United States Patent Application Publication US 2006/0003322 A1 - sequence listing, part 19

SEQ ID NO: 787279 - RNA, 22 nt, Human
ugggauuacaggugugcaccac

SEQ ID NO: 787280 - RNA, 24 nt, Human
ugggauuacaggugugcaccacca

SEQ ID NO: 787281 - RNA, 24 nt, Human
ugggauuacaggugugcaccacca

SEQ ID NO: 787282 - RNA, 25 nt, Human
ugggauuacaggugugcaccaccau

SEQ ID NO: 787283 - RNA, 24 nt, Human
uggggagaguggggccuccauggg

SEQ ID NO: 787284 - RNA, 18 nt, Human
uggggugcagggcagugg

SEQ ID NO: 787285 - RNA, 25 nt, Human
uggugcaguggcaugaucucggcuc

SEQ ID NO: 787286 - RNA, 22 nt, Human
uggugugaucucagaucacugc

SEQ ID NO: 787287 - RNA, 18 nt, Human
ugucauaccugccauaaa

SEQ ID NO: 787288 - RNA, 18 nt, Human
uguccugaagccccacag

SEQ ID NO: 787289 - RNA, 26 nt, Human
ugugagccaccgugccuggccuuuau

SEQ ID NO: 787290 - RNA, 20 nt, Human
uuaguagagacaggguuuca

SEQ ID NO: 787291 - RNA, 24 nt, Human
uuaguagagacaggguuucauuau

SEQ ID NO: 787292 - RNA, 24 nt, Human
uugaggccucugccccucggguuu

SEQ ID NO: 787293 - RNA, 18 nt, Human
uuggccucccaaagugcu

SEQ ID NO: 787294 - RNA, 21 nt, Human
uuucauguuuucugugcugcc

SEQ ID NO: 787295 - RNA, 24 nt, Human
uuucauuauguuggccaggcuggu

SEQ ID NO: 787296 - RNA, 24 nt, Human
uuuuuaguagagacaggguuucau

SEQ ID NO: 787297 - RNA, 20 nt, Human
uuuuuguauuuuuaguagag

SEQ ID NO: 787298 - RNA, 22 nt, Human
aaaacaaaaacaaaaacagaaa

SEQ ID NO: 787299 - RNA, 30 nt, Human
aaaacaaaaacagaaacaaaacugcaccaa

SEQ ID NO: 787300 - RNA, 19 nt, Human
aaacagaaacaaaacugca

SEQ ID NO: 787301 - RNA, 21 nt, Human
aaacagaaacaaaacugcacc

SEQ ID NO: 787302 - RNA, 22 nt, Human
aaauccauuuugagaagaaacu

SEQ ID NO: 787303 - RNA, 20 nt, Human
caaaaacaaaaacagaaaca

SEQ ID NO: 787304 - RNA, 25 nt, Human
caaaaacaaaaacagaaacaaaacu

SEQ ID NO: 787305 - RNA, 22 nt, Human
caaaaacagaaacaaaacugca

SEQ ID NO: 787306 - RNA, 21 nt, Human
caccaaugcacagccagaggc

SEQ ID NO: 787307 - RNA, 21 nt, Human
ccagcaauuggcaaaauuugu

SEQ ID NO: 787308 - RNA, 24 nt, Human
cuaauacauaaccacaugaacauc

SEQ ID NO: 787309 - RNA, 31 nt, Human
gauuaaaaacaaaaacaaaaacagaaacaaa

SEQ ID NO: 787310 - RNA, 22 nt, Human
guuucugauggagagcagaauu

SEQ ID NO: 787311 - RNA, 25 nt, Human
uaaaaacaaaaacaaaaacagaaac

SEQ ID NO: 787312 - RNA, 21 nt, Human
uacauaaccacaugaacaucu

SEQ ID NO: 787313 - RNA, 22 nt, Human
uggagagcagaauucauaaaga

SEQ ID NO: 787314 - RNA, 21 nt, Human
uuucugauggagagcagaauu

SEQ ID NO: 787315 - RNA, 22 nt, Human
aaaaugccucccuccccaaauu

SEQ ID NO: 787316 - RNA, 24 nt, Human
aaacagccauguuuuccagauuuu

SEQ ID NO: 787317 - RNA, 22 nt, Human
aaacauauguaagaaaacaaag

SEQ ID NO: 787318 - RNA, 20 nt, Human
aaaccaaacuuuuaugugaa

SEQ ID NO: 787319 - RNA, 25 nt, Human
aaaccagguauuuugaagauuaaag

SEQ ID NO: 787320 - RNA, 23 nt, Human
aacacuguuagcauucuaaacaa

SEQ ID NO: 787321 - RNA, 21 nt, Human
aacauacagagaauggaauaa

SEQ ID NO: 787322 - RNA, 25 nt, Human
aagaacaaaaaaggaaagacauaua

SEQ ID NO: 787323 - RNA, 26 nt, Human
aagauuuuuccaacaauggagggcca

SEQ ID NO: 787324 - RNA, 20 nt, Human
acaauuuauccaaaaggauu

SEQ ID NO: 787325 - RNA, 19 nt, Human
acauaccacaugaaaaaca

SEQ ID NO: 787326 - RNA, 22 nt, Human
acggcauguccagaguggucug

SEQ ID NO: 787327 - RNA, 20 nt, Human
agaagaacaaaaaaggaaag

SEQ ID NO: 787328 - RNA, 19 nt, Human
agaauucuagaccagacuu

SEQ ID NO: 787329 - RNA, 24 nt, Human
agauaaucagugacaaguugacaa

SEQ ID NO: 787330 - RNA, 25 nt, Human
agccauguuuuccagauuuucugaa

SEQ ID NO: 787331 - RNA, 18 nt, Human
aggaaagacauauaggaa

SEQ ID NO: 787332 - RNA, 20 nt, Human
agggaugggaaaugggagau

SEQ ID NO: 787333 - RNA, 19 nt, Human
agggcaucuagguucuuua

SEQ ID NO: 787334 - RNA, 19 nt, Human
agugaaagggguggugggg

SEQ ID NO: 787335 - RNA, 19 nt, Human
auguuuuccagauuuucug

SEQ ID NO: 787336 - RNA, 20 nt, Human
caacaaguauaauaaugcaa

SEQ ID NO: 787337 - RNA, 23 nt, Human
caaccuucucuuugcuucaauuu

SEQ ID NO: 787338 - RNA, 20 nt, Human
caagaccagugagcaaugac

SEQ ID NO: 787339 - RNA, 18 nt, Human
cacugcacaugguuuuag

SEQ ID NO: 787340 - RNA, 21 nt, Human
cagauuuucugaaauaaccau

SEQ ID NO: 787341 - RNA, 21 nt, Human
cauguaagauucuagcaggcc

SEQ ID NO: 787342 - RNA, 21 nt, Human
ccacauagaaaagcaccuaaa

SEQ ID NO: 787343 - RNA, 24 nt, Human
ccgacauaccacaugaaaaacaaa

SEQ ID NO: 787344 - RNA, 20 nt, Human
ccuggcaaaugaccaaccuu

SEQ ID NO: 787345 - RNA, 23 nt, Human
cggcaauucaacuaaacuucagu

SEQ ID NO: 787346 - RNA, 19 nt, Human
cuccacauagaaaagcacc

SEQ ID NO: 787347 - RNA, 18 nt, Human
cugcauggcuauguguau

SEQ ID NO: 787348 - RNA, 20 nt, Human
gaacuagaaagaaaaacuaa

SEQ ID NO: 787349 - RNA, 21 nt, Human
gaacuagaaagaaaaacuaag

SEQ ID NO: 787350 - RNA, 21 nt, Human
gacauaccacaugaaaaacaa

SEQ ID NO: 787351 - RNA, 21 nt, Human
gagauaauaaggagaggacag

SEQ ID NO: 787352 - RNA, 26 nt, Human
ggauagauacacaugacauuaucccc

SEQ ID NO: 787353 - RNA, 19 nt, Human
gggagaguauuuauugcac

SEQ ID NO: 787354 - RNA, 24 nt, Human
uaaaacuaaaauggguaagaauuu

SEQ ID NO: 787355 - RNA, 22 nt, Human
uaaauaagcaacuuguuagcca

SEQ ID NO: 787356 - RNA, 21 nt, Human
uaagcaacuuguuagccaaug

SEQ ID NO: 787357 - RNA, 22 nt, Human
uaaggcuuuugugccuucuaag

SEQ ID NO: 787358 - RNA, 20 nt, Human
uaaguuauuuuucucuuuug

SEQ ID NO: 787359 - RNA, 24 nt, Human
uaauauaccuuggauucacagaac

SEQ ID NO: 787360 - RNA, 19 nt, Human
uaaugacucuuaaugaagg

SEQ ID NO: 787361 - RNA, 18 nt, Human
uaaugcaauaugacauga

SEQ ID NO: 787362 - RNA, 23 nt, Human
uagaaaaauaagauuuuuccaac

SEQ ID NO: 787363 - RNA, 19 nt, Human
uagcauucuaaacaagggu

SEQ ID NO: 787364 - RNA, 18 nt, Human
uagccauaucccaacaag

SEQ ID NO: 787365 - RNA, 22 nt, Human
uagcuugaaagaacccaaacac

SEQ ID NO: 787366 - RNA, 20 nt, Human
uagggaugggaaaugggaga

SEQ ID NO: 787367 - RNA, 24 nt, Human
uauaauaaauauaugacucaggug

SEQ ID NO: 787368 - RNA, 21 nt, Human
uauagcagaagaacaaaaaag

SEQ ID NO: 787369 - RNA, 23 nt, Human
uauagcuaacugaaaucuccaca

SEQ ID NO: 787370 - RNA, 19 nt, Human
uaugacucaggugaaaugu

SEQ ID NO: 787371 - RNA, 19 nt, Human
uauguaagaaaacaaaguu

SEQ ID NO: 787372 - RNA, 24 nt, Human
ucaaauccuacuuuaaacauaugu

SEQ ID NO: 787373 - RNA, 22 nt, Human
ucaauuucuaaaucuucuacau

SEQ ID NO: 787374 - RNA, 19 nt, Human
ucaguuuaaaaaaaaaaaa

SEQ ID NO: 787375 - RNA, 26 nt, Human
ucaguuuaaaaaaaaaaaacacccua

SEQ ID NO: 787376 - RNA, 24 nt, Human
uccaagaggcaugccagcuacaga

SEQ ID NO: 787377 - RNA, 23 nt, Human
ucucaauauuccauuuuuuaaaa

SEQ ID NO: 787378 - RNA, 22 nt, Human
ucugaaauaaccaugcuuccaa

SEQ ID NO: 787379 - RNA, 18 nt, Human
ugaaaaauuucacuucag

SEQ ID NO: 787380 - RNA, 21 nt, Human
ugaaaagagcauaacaugugg

SEQ ID NO: 787381 - RNA, 21 nt, Human
ugaaacagccauguuuuccag

SEQ ID NO: 787382 - RNA, 24 nt, Human
ugaaagaacccaaacacugucuua

SEQ ID NO: 787383 - RNA, 18 nt, Human
ugagaugacguucaacuc

SEQ ID NO: 787384 - RNA, 20 nt, Human
ugccacugcacaugguuuua

SEQ ID NO: 787385 - RNA, 20 nt, Human
ugcuaacauauuuguuaaua

SEQ ID NO: 787386 - RNA, 18 nt, Human
ugcugcauggcuaugugu

SEQ ID NO: 787387 - RNA, 18 nt, Human
uggaauaaacauaaaagu

SEQ ID NO: 787388 - RNA, 27 nt, Human
uggagucaggaaaccuggcaaaugacc

SEQ ID NO: 787389 - RNA, 18 nt, Human
uggccaauuagaaacaaa

SEQ ID NO: 787390 - RNA, 23 nt, Human
ugggagauaauaaggagaggaca

SEQ ID NO: 787391 - RNA, 22 nt, Human
uguaagauucuagcaggccuug

SEQ ID NO: 787392 - RNA, 19 nt, Human
uguaagcaaaauauaauuu

SEQ ID NO: 787393 - RNA, 24 nt, Human
uguagaaccaggguaaguuauuuu

SEQ ID NO: 787394 - RNA, 19 nt, Human
ugugaagauauuguaauga

SEQ ID NO: 787395 - RNA, 21 nt, Human
uguggagucaggaaaccuggu

SEQ ID NO: 787396 - RNA, 23 nt, Human
uguuagcauucuaaacaaggguu

SEQ ID NO: 787397 - RNA, 25 nt, Human
uucaguggccaauuagaaacaaaua

SEQ ID NO: 787398 - RNA, 21 nt, Human
uucuccaaucauaaaccaaac

SEQ ID NO: 787399 - RNA, 24 nt, Human
uugaaacuauuauccacaucacua

SEQ ID NO: 787400 - RNA, 20 nt, Human
uuuggacauaaaaguaggau

SEQ ID NO: 787401 - RNA, 18 nt, Human
uuuguauagcagaagaac

SEQ ID NO: 787402 - RNA, 24 nt, Human
aaaauaguacuugaugucaaaaca

SEQ ID NO: 787403 - RNA, 24 nt, Human
aaacaaacaaacaggacagccaga

SEQ ID NO: 787404 - RNA, 21 nt, Human
aaaggccuccugcugugagaa

SEQ ID NO: 787405 - RNA, 21 nt, Human
aaccagacauggcugggaaau

SEQ ID NO: 787406 - RNA, 19 nt, Human
aagcuagccccccgccccc

SEQ ID NO: 787407 - RNA, 19 nt, Human
aagcuagccccccgccccc

SEQ ID NO: 787408 - RNA, 28 nt, Human
aagcuuuggcuccagcaaguccuugcug

SEQ ID NO: 787409 - RNA, 18 nt, Human
aaguccuugcugugugac

SEQ ID NO: 787410 - RNA, 19 nt, Human
accccaagucucgccccuc

SEQ ID NO: 787411 - RNA, 24 nt, Human
accccaagucucgccccuccacac

SEQ ID NO: 787412 - RNA, 22 nt, Human
accuggcuccuggagggaaggg

SEQ ID NO: 787413 - RNA, 19 nt, Human
agacacugaggcucccagc

SEQ ID NO: 787414 - RNA, 22 nt, Human
agcaccccaagucucgccccuc

SEQ ID NO: 787415 - RNA, 24 nt, Human
aggagacacugccccccccacccc

SEQ ID NO: 787416 - RNA, 24 nt, Human
agggcagccccggggucugugggc

SEQ ID NO: 787417 - RNA, 25 nt, Human
agugacacagggacaagggacaccc

SEQ ID NO: 787418 - RNA, 19 nt, Human
agugacagugacacaggga

SEQ ID NO: 787419 - RNA, 18 nt, Human
auaauaccucccucagag

SEQ ID NO: 787420 - RNA, 24 nt, Human
auggcugggaaaugcacaagccca

SEQ ID NO: 787421 - RNA, 18 nt, Human
caagaagggagccaggcc

SEQ ID NO: 787422 - RNA, 24 nt, Human
caagaagggagccaggcccucuca

SEQ ID NO: 787423 - RNA, 20 nt, Human
caagcccagcacagccaccu

SEQ ID NO: 787424 - RNA, 18 nt, Human
cacaacacagccugccug

SEQ ID NO: 787425 - RNA, 22 nt, Human
cacacagcugccaugcagucag

SEQ ID NO: 787426 - RNA, 23 nt, Human
cacacugggcugcaaugccagaa

SEQ ID NO: 787427 - RNA, 22 nt, Human
caccauugagcaggauauucca

SEQ ID NO: 787428 - RNA, 21 nt, Human
cacccaaaaugcuggggugag

SEQ ID NO: 787429 - RNA, 21 nt, Human
cacccccauaugagaaacaaa

SEQ ID NO: 787430 - RNA, 20 nt, Human
cacugccccccccaccccuu

SEQ ID NO: 787431 - RNA, 22 nt, Human
cagagcaagccacuuccccgcu

SEQ ID NO: 787432 - RNA, 18 nt, Human
cagcacagccaccugcca

SEQ ID NO: 787433 - RNA, 24 nt, Human
cagcacagccaccugccagacacu

SEQ ID NO: 787434 - RNA, 26 nt, Human
cagccagaggagacacugcccccccc

SEQ ID NO: 787435 - RNA, 21 nt, Human
cagcccaccaagaagggagcc

SEQ ID NO: 787436 - RNA, 23 nt, Human
cagcccaccaagaagggagccag

SEQ ID NO: 787437 - RNA, 28 nt, Human
cagccccucuggaccccacaacacagcc

SEQ ID NO: 787438 - RNA, 24 nt, Human
cagcuacaaaggccaacugcucag

SEQ ID NO: 787439 - RNA, 20 nt, Human
cagcugcuucugccuggaag

SEQ ID NO: 787440 - RNA, 24 nt, Human
caggcccuaccuggcuccuggagg

SEQ ID NO: 787441 - RNA, 20 nt, Human
caggcguggaggggcugugg

SEQ ID NO: 787442 - RNA, 25 nt, Human
caguaaaaucaggacucuaaccaca

SEQ ID NO: 787443 - RNA, 19 nt, Human
cauccuuccucuugguagg

SEQ ID NO: 787444 - RNA, 21 nt, Human
cauuggagcugaggucuagcc

SEQ ID NO: 787445 - RNA, 22 nt, Human
ccacacuucacaaggaacauga

SEQ ID NO: 787446 - RNA, 21 nt, Human
ccacaggcuuccuaagagccc

SEQ ID NO: 787447 - RNA, 19 nt, Human
ccagaagcuuuggcuccag

SEQ ID NO: 787448 - RNA, 25 nt, Human
cccacaacacagccugccugugcgg

SEQ ID NO: 787449 - RNA, 24 nt, Human
cccacaggcuuccuaagagcccac

SEQ ID NO: 787450 - RNA, 23 nt, Human
cccaccaagaagggagccaggcc

SEQ ID NO: 787451 - RNA, 23 nt, Human
ccccaaaaccaugcaguggcgcu

SEQ ID NO: 787452 - RNA, 24 nt, Human
cccccaaaaccaugcaguggcgcu

SEQ ID NO: 787453 - RNA, 25 nt, Human
cccccacccccauaugagaaacaaa

SEQ ID NO: 787454 - RNA, 24 nt, Human
ccccccacccccauaugagaaaca

SEQ ID NO: 787455 - RNA, 26 nt, Human
ccccccacccccauaugagaaacaaa

SEQ ID NO: 787456 - RNA, 22 nt, Human
ccccccccaccccuuugugcaa

SEQ ID NO: 787457 - RNA, 18 nt, Human
cccccccccccaaaacca

SEQ ID NO: 787458 - RNA, 20 nt, Human
ccccccgcccccccccccaa

SEQ ID NO: 787459 - RNA, 21 nt, Human
ccccccgcccccccccccaaa

SEQ ID NO: 787460 - RNA, 24 nt, Human
cccccgcccccccccccaaaaccc

SEQ ID NO: 787461 - RNA, 25 nt, Human
ccccgcucugggccucaguuucuuc

SEQ ID NO: 787462 - RNA, 22 nt, Human
ccccugggccagaagcuuuggc

SEQ ID NO: 787463 - RNA, 24 nt, Human
ccccugggccagaagcuuuggcuc

SEQ ID NO: 787464 - RNA, 19 nt, Human
cccucaggcccuaccuggc

SEQ ID NO: 787465 - RNA, 18 nt, Human
cccucucagcaccccaag

SEQ ID NO: 787466 - RNA, 20 nt, Human
cccugggccagaagcuuugg

SEQ ID NO: 787467 - RNA, 20 nt, Human
ccgcccccccccccaaaacc

SEQ ID NO: 787468 - RNA, 18 nt, Human
ccugaggcaggcguggag

SEQ ID NO: 787469 - RNA, 21 nt, Human
cucuggaccccacaacacagc

SEQ ID NO: 787470 - RNA, 19 nt, Human
cugggcugcaaugccagaa

SEQ ID NO: 787471 - RNA, 21 nt, Human
cuuuauaccguacagcagucg

SEQ ID NO: 787472 - RNA, 21 nt, Human
cuuugugcaaggcuuggaucc

SEQ ID NO: 787473 - RNA, 18 nt, Human
gaagcuuuggcuccagca

SEQ ID NO: 787474 - RNA, 18 nt, Human
gacacagggacaagggac

SEQ ID NO: 787475 - RNA, 22 nt, Human
gacacccaaaaugcugggguga

SEQ ID NO: 787476 - RNA, 20 nt, Human
gacacugccccccccacccc

SEQ ID NO: 787477 - RNA, 20 nt, Human
gacccgugugugcccaucuc

SEQ ID NO: 787478 - RNA, 22 nt, Human
gaggagacacugccccccccac

SEQ ID NO: 787479 - RNA, 19 nt, Human
gaggagcccacaggcuucc

SEQ ID NO: 787480 - RNA, 21 nt, Human
gagggaaggggucagguuggc

SEQ ID NO: 787481 - RNA, 21 nt, Human
gcagccccggggucugugggc

SEQ ID NO: 787482 - RNA, 23 nt, Human
gcagccccggggucugugggcug

SEQ ID NO: 787483 - RNA, 19 nt, Human
gccaugcagucagugcuga

SEQ ID NO: 787484 - RNA, 18 nt, Human
gccccccccaccccuuug

SEQ ID NO: 787485 - RNA, 24 nt, Human
gccccucuggaccccacaacacag

SEQ ID NO: 787486 - RNA, 18 nt, Human
gcuagccccccgcccccc

SEQ ID NO: 787487 - RNA, 20 nt, Human
gcucagaggagcccacaggc

SEQ ID NO: 787488 - RNA, 21 nt, Human
ggacuuaggucuuacuuccau

SEQ ID NO: 787489 - RNA, 18 nt, Human
ggcaggucucggucucug

SEQ ID NO: 787490 - RNA, 23 nt, Human
ggccagaagcuuuggcuccagca

SEQ ID NO: 787491 - RNA, 18 nt, Human
ggcccugaggcaggcgug

SEQ ID NO: 787492 - RNA, 22 nt, Human
ggcguggaggggcugugggggc

SEQ ID NO: 787493 - RNA, 21 nt, Human
ggugagggcagcccaggggcu

SEQ ID NO: 787494 - RNA, 19 nt, Human
gucaaaacauuggagcuga

SEQ ID NO: 787495 - RNA, 26 nt, Human
uacagcagucggaaggaaaauaguac

SEQ ID NO: 787496 - RNA, 21 nt, Human
uagaagggggcuacagcagug

SEQ ID NO: 787497 - RNA, 21 nt, Human
uagccccccgccccccccccc

SEQ ID NO: 787498 - RNA, 18 nt, Human
ucaggcccugaggcaggc

SEQ ID NO: 787499 - RNA, 19 nt, Human
ucagggcacuucacccaac

SEQ ID NO: 787500 - RNA, 22 nt, Human
ucccucaggcccuaccuggcuc

SEQ ID NO: 787501 - RNA, 22 nt, Human
uccguaauguccuggguuccca

SEQ ID NO: 787502 - RNA, 21 nt, Human
uccugcugugcuuuauaccgu

SEQ ID NO: 787503 - RNA, 22 nt, Human
uccuggguucccacauugacuc

SEQ ID NO: 787504 - RNA, 23 nt, Human
ugacccagagcaagccacuuccc

SEQ ID NO: 787505 - RNA, 22 nt, Human
ugagaaacaaacaaacaggaca

SEQ ID NO: 787506 - RNA, 24 nt, Human
ugagaagcuagccccccgcccccc

SEQ ID NO: 787507 - RNA, 21 nt, Human
ugagcacacagcugccaugca

SEQ ID NO: 787508 - RNA, 21 nt, Human
ugagcuguaccauccuuccuc

SEQ ID NO: 787509 - RNA, 21 nt, Human
ugaggaaaacagccuagacuc

SEQ ID NO: 787510 - RNA, 18 nt, Human
ugaggcaggcguggaggg

SEQ ID NO: 787511 - RNA, 18 nt, Human
ugcagguaccccccaccc

SEQ ID NO: 787512 - RNA, 19 nt, Human
ugcugugagaagcuagccc

SEQ ID NO: 787513 - RNA, 23 nt, Human
uggagggaaggggucagguuggc

SEQ ID NO: 787514 - RNA, 21 nt, Human
ugggccucaguuucuuccucu

SEQ ID NO: 787515 - RNA, 24 nt, Human
uggggugagggcagcccaggggcu

SEQ ID NO: 787516 - RNA, 18 nt, Human
uguaaaauggggauaaua

SEQ ID NO: 787517 - RNA, 21 nt, Human
ugucagggcacuucacccaac

SEQ ID NO: 787518 - RNA, 20 nt, Human
ugugugcccaucucggcugc

SEQ ID NO: 787519 - RNA, 19 nt, Human
uuccaucaacuuuacaugu

SEQ ID NO: 787520 - RNA, 20 nt, Human
uuccccgcucugggccucag

SEQ ID NO: 787521 - RNA, 20 nt, Human
uuccugaacaucaucaggac

SEQ ID NO: 787522 - RNA, 19 nt, Human
uugcagcuacaaaggccaa

SEQ ID NO: 787523 - RNA, 18 nt, Human
aaaauuagcugggcgugg

SEQ ID NO: 787524 - RNA, 22 nt, Human
aaaguaccaauuugaagugcaa

SEQ ID NO: 787525 - RNA, 19 nt, Human
aacaaaaacacacaagaca

SEQ ID NO: 787526 - RNA, 19 nt, Human
aacaggguaaaaccccauc

SEQ ID NO: 787527 - RNA, 20 nt, Human
aacaggguaaaaccccaucu

SEQ ID NO: 787528 - RNA, 21 nt, Human
aacaggguaaaaccccaucuc

SEQ ID NO: 787529 - RNA, 20 nt, Human
aacaguuugcuagaugauuc

SEQ ID NO: 787530 - RNA, 22 nt, Human
aacuuauuauuuuccucacuuu

SEQ ID NO: 787531 - RNA, 20 nt, Human
aagcugagaugggaggacag

SEQ ID NO: 787532 - RNA, 24 nt, Human
aaucgcuugaaccugggaggugga

SEQ ID NO: 787533 - RNA, 21 nt, Human
acagagugagacucugucuca

SEQ ID NO: 787534 - RNA, 19 nt, Human
acaugcuagaaauuacagu

SEQ ID NO: 787535 - RNA, 24 nt, Human
accccaucucuacuaaaaauacaa

SEQ ID NO: 787536 - RNA, 19 nt, Human
acccggcgacgaggcgucc

SEQ ID NO: 787537 - RNA, 24 nt, Human
acuagccaggcaugguggcucaug

SEQ ID NO: 787538 - RNA, 24 nt, Human
acuccagccugggcgacagaguga

SEQ ID NO: 787539 - RNA, 24 nt, Human
acugcacuccagccugggcgacag

SEQ ID NO: 787540 - RNA, 26 nt, Human
acugcacuccagccugggcgacagag

SEQ ID NO: 787541 - RNA, 24 nt, Human
acugugccacugcacuccagccug

SEQ ID NO: 787542 - RNA, 24 nt, Human
agcacuuugggaagcugagauggg

SEQ ID NO: 787543 - RNA, 23 nt, Human
agccaggcaugguggcucaugcc

SEQ ID NO: 787544 - RNA, 23 nt, Human
agccuggacaauauagugagacc

SEQ ID NO: 787545 - RNA, 24 nt, Human
agccuggacaauauagugagaccu

SEQ ID NO: 787546 - RNA, 24 nt, Human
agccugggcgacagagugagacuc

SEQ ID NO: 787547 - RNA, 23 nt, Human
agcugggcgugguggugcacgcc

SEQ ID NO: 787548 - RNA, 19 nt, Human
aggacagcuugaggccagg

SEQ ID NO: 787549 - RNA, 22 nt, Human
aggcaugagaaucgcuugaacc

SEQ ID NO: 787550 - RNA, 24 nt, Human
aggcaugagaaucgcuugaaccug

SEQ ID NO: 787551 - RNA, 24 nt, Human
aggcaugguggcucaugccuauaa

SEQ ID NO: 787552 - RNA, 24 nt, Human
aggcggguagaucaucagagguca

SEQ ID NO: 787553 - RNA, 26 nt, Human
aggcggguagaucaucagaggucagg

SEQ ID NO: 787554 - RNA, 24 nt, Human
aggcugaggcaugagaaucgcuug

SEQ ID NO: 787555 - RNA, 20 nt, Human
agguggagguugcagugagc

SEQ ID NO: 787556 - RNA, 24 nt, Human
agguggagguugcagugagcugag

SEQ ID NO: 787557 - RNA, 23 nt, Human
aguggcucaugucuguaauccca

SEQ ID NO: 787558 - RNA, 24 nt, Human
aguggcucaugucuguaaucccag

SEQ ID NO: 787559 - RNA, 24 nt, Human
auaguacuauagugaucucagcuc

SEQ ID NO: 787560 - RNA, 18 nt, Human
aucuguacaguauuacag

SEQ ID NO: 787561 - RNA, 19 nt, Human
augccuauaaucucagcac

SEQ ID NO: 787562 - RNA, 22 nt, Human
augcuagaaauuacaguaaaca

SEQ ID NO: 787563 - RNA, 21 nt, Human
auggcccagagucacaagcca

SEQ ID NO: 787564 - RNA, 19 nt, Human
augucuguaaucccagcac

SEQ ID NO: 787565 - RNA, 25 nt, Human
caagaaagaguuguuuucaucggga

SEQ ID NO: 787566 - RNA, 22 nt, Human
cacaaaacagaggcagggcaca

SEQ ID NO: 787567 - RNA, 19 nt, Human
cacaguacacaagccuuga

SEQ ID NO: 787568 - RNA, 18 nt, Human
cacccuggccaacagggu

SEQ ID NO: 787569 - RNA, 21 nt, Human
caccuaaacucccuuuugcuc

SEQ ID NO: 787570 - RNA, 18 nt, Human
cacgccuguaguccucgc

SEQ ID NO: 787571 - RNA, 22 nt, Human
cacuccagccugggcgacagag

SEQ ID NO: 787572 - RNA, 24 nt, Human
cacuccagccugggcgacagagug

SEQ ID NO: 787573 - RNA, 19 nt, Human
cacugcacuccagccuggg

SEQ ID NO: 787574 - RNA, 20 nt, Human
cacugcacuccagccugggc

SEQ ID NO: 787575 - RNA, 22 nt, Human
cacugcacuccagccugggcga

SEQ ID NO: 787576 - RNA, 23 nt, Human
cacugcacuccagccugggcgac

SEQ ID NO: 787577 - RNA, 24 nt, Human
cacugcacuccagccugggcgaca

SEQ ID NO: 787578 - RNA, 19 nt, Human
cagaaaaagcucgcaggug

SEQ ID NO: 787579 - RNA, 23 nt, Human
cagaaaaagcucgcagguggaag

SEQ ID NO: 787580 - RNA, 21 nt, Human
cagaggcagggcacaguggcu

SEQ ID NO: 787581 - RNA, 22 nt, Human
cagaggucaggaauucgagacc

SEQ ID NO: 787582 - RNA, 24 nt, Human
cagcacuuugagagguccaggcgg

SEQ ID NO: 787583 - RNA, 18 nt, Human
cagcacuuugggaagcug

SEQ ID NO: 787584 - RNA, 20 nt, Human
cagcacuuugggaagcugag

SEQ ID NO: 787585 - RNA, 19 nt, Human
cagcccgugugggacggcg

SEQ ID NO: 787586 - RNA, 22 nt, Human
cagggcacaguggcucaugucu

SEQ ID NO: 787587 - RNA, 22 nt, Human
caggguaccuggccucacaucc

SEQ ID NO: 787588 - RNA, 24 nt, Human
caguacacaagccuugaugcagcc

SEQ ID NO: 787589 - RNA, 24 nt, Human
caugccuauaaucucagcacuuug

SEQ ID NO: 787590 - RNA, 24 nt, Human
caugucuguaaucccagcacuuug

SEQ ID NO: 787591 - RNA, 18 nt, Human
cauucugcagaaaaagcu

SEQ ID NO: 787592 - RNA, 20 nt, Human
cauugcaucccaaacagagc

SEQ ID NO: 787593 - RNA, 23 nt, Human
ccaacauuuaauaaauugcauuc

SEQ ID NO: 787594 - RNA, 20 nt, Human
ccacugcacuccagccuggg

SEQ ID NO: 787595 - RNA, 21 nt, Human
ccacugcacuccagccugggc

SEQ ID NO: 787596 - RNA, 21 nt, Human
ccacugcacuccagccugggc

SEQ ID NO: 787597 - RNA, 23 nt, Human
ccacugcacuccagccugggcga

SEQ ID NO: 787598 - RNA, 24 nt, Human
ccacugcacuccagccugggcgac

SEQ ID NO: 787599 - RNA, 19 nt, Human
cccacgcgcaggccggccg

SEQ ID NO: 787600 - RNA, 25 nt, Human
ccccuccucuguggcggcggcggcg

SEQ ID NO: 787601 - RNA, 18 nt, Human
ccccugggugccgccucc

SEQ ID NO: 787602 - RNA, 20 nt, Human
cccugcacgucuucucccca

SEQ ID NO: 787603 - RNA, 23 nt, Human
cccugcugccgcugcugcaggaa

SEQ ID NO: 787604 - RNA, 24 nt, Human
ccgaaccugcagcaaccgucccug

SEQ ID NO: 787605 - RNA, 19 nt, Human
ccgaccccgaaccugcagc

SEQ ID NO: 787606 - RNA, 22 nt, Human
ccgccuccgccucugccucccc

SEQ ID NO: 787607 - RNA, 21 nt, Human
ccgccuccgccucugccuccg

SEQ ID NO: 787608 - RNA, 22 nt, Human
ccggccccugggugccgccucc

SEQ ID NO: 787609 - RNA, 18 nt, Human
ccgugcgucguucuccuc

SEQ ID NO: 787610 - RNA, 22 nt, Human
ccuauaaucucagcacuuuggg

SEQ ID NO: 787611 - RNA, 20 nt, Human
ccucggccgugccuccuccc

SEQ ID NO: 787612 - RNA, 18 nt, Human
ccugcggauggccuagag

SEQ ID NO: 787613 - RNA, 22 nt, Human
ccugcggauggccuagagcccu

SEQ ID NO: 787614 - RNA, 20 nt, Human
ccuggcaauucuuggauuac

SEQ ID NO: 787615 - RNA, 24 nt, Human
ccuggccaacaggguaaaacccca

SEQ ID NO: 787616 - RNA, 21 nt, Human
ccugggagguggagguugcag

SEQ ID NO: 787617 - RNA, 22 nt, Human
ccugggcgacagagugagacuc

SEQ ID NO: 787618 - RNA, 19 nt, Human
ccuguaguccucgcuacuc

SEQ ID NO: 787619 - RNA, 22 nt, Human
ccuguaguccucgcuacucggg

SEQ ID NO: 787620 - RNA, 21 nt, Human
ccuucuccauuccacuucuug

SEQ ID NO: 787621 - RNA, 23 nt, Human
cgaacagcguccucgcaagccca

SEQ ID NO: 787622 - RNA, 24 nt, Human
cgagaccacccuggccaacagggu

SEQ ID NO: 787623 - RNA, 24 nt, Human
cgccuguaguccucgcuacucggg

SEQ ID NO: 787624 - RNA, 23 nt, Human
cgcgcaggccggccgaccccgaa

SEQ ID NO: 787625 - RNA, 19 nt, Human
cggccccugggugccgccu

SEQ ID NO: 787626 - RNA, 24 nt, Human
cggguagaucaucagaggucagga

SEQ ID NO: 787627 - RNA, 21 nt, Human
cgucccugcugccgcugcugc

SEQ ID NO: 787628 - RNA, 20 nt, Human
cucaaucacuucauuagcaa

SEQ ID NO: 787629 - RNA, 24 nt, Human
cucaugccuauaaucucagcacuu

SEQ ID NO: 787630 - RNA, 23 nt, Human
cucaugucuguaaucccagcacu

SEQ ID NO: 787631 - RNA, 24 nt, Human
cucaugucuguaaucccagcacuu

SEQ ID NO: 787632 - RNA, 18 nt, Human
cuccccugccccggcccc

SEQ ID NO: 787633 - RNA, 20 nt, Human
cuccgugcgucguucuccuc

SEQ ID NO: 787634 - RNA, 19 nt, Human
cuccuccucgcugucggac

SEQ ID NO: 787635 - RNA, 22 nt, Human
cucgcaagcccacgcgcaggcc

SEQ ID NO: 787636 - RNA, 19 nt, Human
cugaauuuccaaaauaaac

SEQ ID NO: 787637 - RNA, 23 nt, Human
cugaccguuaaacugucacugga

SEQ ID NO: 787638 - RNA, 23 nt, Human
cuggccaacaggguaaaacccca

SEQ ID NO: 787639 - RNA, 19 nt, Human
cuugaaccugggaggugga

SEQ ID NO: 787640 - RNA, 22 nt, Human
gaaguaaauggcccagagucac

SEQ ID NO: 787641 - RNA, 22 nt, Human
gacagagugagacucugucuca

SEQ ID NO: 787642 - RNA, 24 nt, Human
gacagcuugaggccaggaguucaa

SEQ ID NO: 787643 - RNA, 20 nt, Human
gaccccgaaccugcagcaac

SEQ ID NO: 787644 - RNA, 23 nt, Human
gagacugugccacugcacuccag

SEQ ID NO: 787645 - RNA, 23 nt, Human
gagguugcagugagcugagacug

SEQ ID NO: 787646 - RNA, 18 nt, Human
gaucaucagaggucagga

SEQ ID NO: 787647 - RNA, 24 nt, Human
gaucaucagaggucaggaauucga

SEQ ID NO: 787648 - RNA, 24 nt, Human
gcacuccagccugggcgacagagu

SEQ ID NO: 787649 - RNA, 19 nt, Human
gcagggcacaguggcucau

SEQ ID NO: 787650 - RNA, 23 nt, Human
gcagggcacaguggcucaugucu

SEQ ID NO: 787651 - RNA, 22 nt, Human
gccacugcacuccagccugggc

SEQ ID NO: 787652 - RNA, 24 nt, Human
gccacugcacuccagccugggcga

SEQ ID NO: 787653 - RNA, 18 nt, Human
gccccacaauauuagagc

SEQ ID NO: 787654 - RNA, 20 nt, Human
gccuggacaauauagugaga

SEQ ID NO: 787655 - RNA, 24 nt, Human
gcgacagagugagacucugucuca

SEQ ID NO: 787656 - RNA, 23 nt, Human
gcugaucuguacaguauuacagu

SEQ ID NO: 787657 - RNA, 23 nt, Human
ggacagcuugaggccaggaguuc

SEQ ID NO: 787658 - RNA, 18 nt, Human
ggaggacagcuugaggcc

SEQ ID NO: 787659 - RNA, 22 nt, Human
ggagguugcagugagcugagac

SEQ ID NO: 787660 - RNA, 18 nt, Human
ggcagggcacaguggcuc

SEQ ID NO: 787661 - RNA, 19 nt, Human
ggccccugggugccgccuc

SEQ ID NO: 787662 - RNA, 18 nt, Human
ggccgaccccgaaccugc

SEQ ID NO: 787663 - RNA, 22 nt, Human
ggcgugguggugcacgccugua

SEQ ID NO: 787664 - RNA, 21 nt, Human
ggcucaugccuauaaucucag

SEQ ID NO: 787665 - RNA, 24 nt, Human
gggcacaguggcucaugucuguaa

SEQ ID NO: 787666 - RNA, 19 nt, Human
gguggagguugcagugagc

SEQ ID NO: 787667 - RNA, 24 nt, Human
gguggcucaugccuauaaucucag

SEQ ID NO: 787668 - RNA, 24 nt, Human
gguggugcacgccuguaguccucg

SEQ ID NO: 787669 - RNA, 22 nt, Human
gucccugcugccgcugcugcag

SEQ ID NO: 787670 - RNA, 20 nt, Human
guggagguugcagugagcug

SEQ ID NO: 787671 - RNA, 24 nt, Human
guucuaguuuuaaaauuuaagaag

SEQ ID NO: 787672 - RNA, 21 nt, Human
uaaauaaauaaauaacugauc

SEQ ID NO: 787673 - RNA, 21 nt, Human
uaaauaaauaacugaucucac

SEQ ID NO: 787674 - RNA, 28 nt, Human
uaacaaaaacacacaagacauagaggua

SEQ ID NO: 787675 - RNA, 20 nt, Human
uaccuggccucacauccaug

SEQ ID NO: 787676 - RNA, 24 nt, Human
uagaucaucagaggucaggaauuc

SEQ ID NO: 787677 - RNA, 22 nt, Human
ucaagaacauuuuucuauuugg

SEQ ID NO: 787678 - RNA, 26 nt, Human
ucaagccaaaugaaauuccacccacg

SEQ ID NO: 787679 - RNA, 22 nt, Human
ucaccaaagagucaagccaaau

SEQ ID NO: 787680 - RNA, 23 nt, Human
ucagaggucaggaauucgagacc

SEQ ID NO: 787681 - RNA, 23 nt, Human
ucaggaucccaaaaaugcuuccu

SEQ ID NO: 787682 - RNA, 18 nt, Human
ucaggguauauuucuggg

SEQ ID NO: 787683 - RNA, 22 nt, Human
ucaucagaggucaggaauucga

SEQ ID NO: 787684 - RNA, 23 nt, Human
uccagccugggcgacagagugag

SEQ ID NO: 787685 - RNA, 24 nt, Human
uccagccugggcgacagagugaga

SEQ ID NO: 787686 - RNA, 19 nt, Human
uccaugaguacuugagaaa

SEQ ID NO: 787687 - RNA, 19 nt, Human
ucccggccuccccugcccc

SEQ ID NO: 787688 - RNA, 19 nt, Human
ucccugcugccgcugcugc

SEQ ID NO: 787689 - RNA, 22 nt, Human
ucccugcugccgcugcugcagg

SEQ ID NO: 787690 - RNA, 24 nt, Human
ucgcuugaaccugggagguggagg

SEQ ID NO: 787691 - RNA, 24 nt, Human
ucgggaggcugaggcaugagaauc

SEQ ID NO: 787692 - RNA, 21 nt, Human
ucucuacuaaaaauacaaaaa

SEQ ID NO: 787693 - RNA, 21 nt, Human
ucuuaucugugaaaugaggau

SEQ ID NO: 787694 - RNA, 20 nt, Human
ucuuggauuaccuaaucacc

SEQ ID NO: 787695 - RNA, 22 nt, Human
ugaaacccugcacgucuucucc

SEQ ID NO: 787696 - RNA, 24 nt, Human
ugaaccugggagguggagguugca

SEQ ID NO: 787697 - RNA, 18 nt, Human
ugaagaaugaauggucua

SEQ ID NO: 787698 - RNA, 22 nt, Human
ugaaguaaauggcccagaguca

SEQ ID NO: 787699 - RNA, 22 nt, Human
ugacaaacacaacauugcaucc

SEQ ID NO: 787700 - RNA, 23 nt, Human
ugagagccugauuuuuuuuuuuu

SEQ ID NO: 787701 - RNA, 24 nt, Human
ugagagguccaggcggguagauca

SEQ ID NO: 787702 - RNA, 24 nt, Human
ugagaugggaggacagcuugaggc

SEQ ID NO: 787703 - RNA, 26 nt, Human
ugagaugggaggacagcuugaggcca

SEQ ID NO: 787704 - RNA, 22 nt, Human
ugagcugagacugugccacugc

SEQ ID NO: 787705 - RNA, 24 nt, Human
ugaggcaugagaaucgcuugaacc

SEQ ID NO: 787706 - RNA, 23 nt, Human
ugcagcggggugauaccggcacc

SEQ ID NO: 787707 - RNA, 19 nt, Human
ugccccggccccugggugc

SEQ ID NO: 787708 - RNA, 18 nt, Human
ugccuccgcccccuccuc

SEQ ID NO: 787709 - RNA, 19 nt, Human
ugccuccgcccccuccucu

SEQ ID NO: 787710 - RNA, 18 nt, Human
uggagguugcagugagcu

SEQ ID NO: 787711 - RNA, 24 nt, Human
uggcccagagucacaagccagcaa

SEQ ID NO: 787712 - RNA, 20 nt, Human
uggccuggcaaaaacaguuu

SEQ ID NO: 787713 - RNA, 21 nt, Human
uggcucaugccuauaaucuca

SEQ ID NO: 787714 - RNA, 24 nt, Human
uggcucaugccuauaaucucagca

SEQ ID NO: 787715 - RNA, 22 nt, Human
uggcucaugucuguaaucccag

SEQ ID NO: 787716 - RNA, 24 nt, Human
uggcucaugucuguaaucccagca

SEQ ID NO: 787717 - RNA, 24 nt, Human
ugggaagcugagaugggaggacag

SEQ ID NO: 787718 - RNA, 18 nt, Human
ugggagguggagguugca

SEQ ID NO: 787719 - RNA, 29 nt, Human
ugggagguggagguugcagugacaacggu

SEQ ID NO: 787720 - RNA, 24 nt, Human
ugggagguggagguugcagugagc

SEQ ID NO: 787721 - RNA, 21 nt, Human
ugggcgacagagugagacucu

SEQ ID NO: 787722 - RNA, 23 nt, Human
uggguccucucaaugucugguuu

SEQ ID NO: 787723 - RNA, 26 nt, Human
uggugacaaacacaacauugcauccc

SEQ ID NO: 787724 - RNA, 18 nt, Human
uggugcacgccuguaguc

SEQ ID NO: 787725 - RNA, 22 nt, Human
uggugcacgccuguaguccucg

SEQ ID NO: 787726 - RNA, 24 nt, Human
ugguggcucaugccuauaaucuca

SEQ ID NO: 787727 - RNA, 21 nt, Human
ugucacuggagucuggggaag

SEQ ID NO: 787728 - RNA, 18 nt, Human
ugucuguaaucccagcac

SEQ ID NO: 787729 - RNA, 23 nt, Human
ugucuguaaucccagcacuuuga

SEQ ID NO: 787730 - RNA, 18 nt, Human
ugugauacuaauacaacc

SEQ ID NO: 787731 - RNA, 18 nt, Human
uguggcggcggcggcggc

SEQ ID NO: 787732 - RNA, 24 nt, Human
uguggcggcggcggcggcuucccg

SEQ ID NO: 787733 - RNA, 22 nt, Human
uuaaucaggaucccaaaaaugc

SEQ ID NO: 787734 - RNA, 18 nt, Human
uuaccuaaucaccuucuc

SEQ ID NO: 787735 - RNA, 20 nt, Human
uuagcugggcgugguggugc

SEQ ID NO: 787736 - RNA, 22 nt, Human
uuagcugggcgugguggugcac

SEQ ID NO: 787737 - RNA, 24 nt, Human
uuagcugggcgugguggugcacgc

SEQ ID NO: 787738 - RNA, 18 nt, Human
uucauuagcaacccuugg

SEQ ID NO: 787739 - RNA, 19 nt, Human
uucugguuucacuuucacu

SEQ ID NO: 787740 - RNA, 24 nt, Human
uugaaccugggagguggagguugc

SEQ ID NO: 787741 - RNA, 21 nt, Human
uugaggccaggaguucaagau

SEQ ID NO: 787742 - RNA, 19 nt, Human
uugcagugagcugagacug

SEQ ID NO: 787743 - RNA, 22 nt, Human
uugcagugagcugagacugugc

SEQ ID NO: 787744 - RNA, 23 nt, Human
uugcagugagcugagacugugcc

SEQ ID NO: 787745 - RNA, 21 nt, Human
uugcaucccaaacagagccaa

SEQ ID NO: 787746 - RNA, 20 nt, Human
uuugccucggccgugccucc

SEQ ID NO: 787747 - RNA, 20 nt, Human
uuuuaaaauuuaagaagaau

SEQ ID NO: 787748 - RNA, 24 nt, Human
uuuucuuuagaaaggaaaggcaga

SEQ ID NO: 787749 - RNA, 25 nt, Human
aaaagaaaagaaacauguuaaaaag

SEQ ID NO: 787750 - RNA, 20 nt, Human
aaacaauaaccccacccccc

SEQ ID NO: 787751 - RNA, 20 nt, Human
aaacaauaaccccacccccc

SEQ ID NO: 787752 - RNA, 22 nt, Human
aaacaauaaccccaccccccau

SEQ ID NO: 787753 - RNA, 20 nt, Human
aaacacauacacaguacaaa

SEQ ID NO: 787754 - RNA, 18 nt, Human
aaacauguuaaaaagaaa

SEQ ID NO: 787755 - RNA, 24 nt, Human
aaagaaaagaaacauguuaaaaag

SEQ ID NO: 787756 - RNA, 24 nt, Human
aaagcuaaauaauauuccauugua

SEQ ID NO: 787757 - RNA, 20 nt, Human
aaccaaaacaugcuuacccu

SEQ ID NO: 787758 - RNA, 25 nt, Human
aagaaaagaaacauguuaaaaagaa

SEQ ID NO: 787759 - RNA, 28 nt, Human
aagaaaagaaacauguuaaaaagaaaag

SEQ ID NO: 787760 - RNA, 26 nt, Human
aauauacauaacaaaauuuaccauuu

SEQ ID NO: 787761 - RNA, 21 nt, Human
accacaugugcaaaaacgaca

SEQ ID NO: 787762 - RNA, 24 nt, Human
agaaaagaaacauguuaaaaagaa

SEQ ID NO: 787763 - RNA, 18 nt, Human
agaauauuccaauauucc

SEQ ID NO: 787764 - RNA, 18 nt, Human
agcacauuuguuuaucca

SEQ ID NO: 787765 - RNA, 26 nt, Human
aguggcauuaacauucaaaauguuga

SEQ ID NO: 787766 - RNA, 19 nt, Human
aucuggaucaagaacagaa

SEQ ID NO: 787767 - RNA, 20 nt, Human
augcaucuauacccacccua

SEQ ID NO: 787768 - RNA, 23 nt, Human
auuccaguaaugcugcuaugaac

SEQ ID NO: 787769 - RNA, 25 nt, Human
caagaacagaauauuccaauauucc

SEQ ID NO: 787770 - RNA, 18 nt, Human
cacagcaaguacuuauac

SEQ ID NO: 787771 - RNA, 24 nt, Human
cagaacguguuucaaaagauaaaa

SEQ ID NO: 787772 - RNA, 18 nt, Human
cauuguauguauuauagc

SEQ ID NO: 787773 - RNA, 18 nt, Human
ccagcaaucugagugcca

SEQ ID NO: 787774 - RNA, 21 nt, Human
ccauucaugauagacacuuga

SEQ ID NO: 787775 - RNA, 18 nt, Human
ccccauuuccuccucccu

SEQ ID NO: 787776 - RNA, 22 nt, Human
cccccauuuccuccucccugca

SEQ ID NO: 787777 - RNA, 24 nt, Human
ccggaaaagaaaagaaacauguua

SEQ ID NO: 787778 - RNA, 24 nt, Human
ccugcagucccuggcaaccacuau

SEQ ID NO: 787779 - RNA, 21 nt, Human
cuaaauacacagcaaguacuu

SEQ ID NO: 787780 - RNA, 19 nt, Human
cuccagcaaucugagugcc

SEQ ID NO: 787781 - RNA, 23 nt, Human
cuuuucguuaauguuacuugaaa

SEQ ID NO: 787782 - RNA, 20 nt, Human
gaaaauuuuuccacucccaa

SEQ ID NO: 787783 - RNA, 18 nt, Human
gacauguccauuuccaca

SEQ ID NO: 787784 - RNA, 24 nt, Human
ggaaaagaaaagaaacauguuaaa

SEQ ID NO: 787785 - RNA, 21 nt, Human
gggguuaagagagguaaucuc

SEQ ID NO: 787786 - RNA, 24 nt, Human
guguauauauauauauaucauaca

SEQ ID NO: 787787 - RNA, 20 nt, Human
guguguauauauauauauau

SEQ ID NO: 787788 - RNA, 21 nt, Human
uaaacaauaaccccacccccc

SEQ ID NO: 787789 - RNA, 22 nt, Human
uaaacaauaaccccacccccca

SEQ ID NO: 787790 - RNA, 18 nt, Human
uaaauagaguaaucaaac

SEQ ID NO: 787791 - RNA, 25 nt, Human
uaacauucaaaauguugagcaacca

SEQ ID NO: 787792 - RNA, 22 nt, Human
uaaucgacacuacacagguauc

SEQ ID NO: 787793 - RNA, 23 nt, Human
uacacagguaucucuuaaguaca

SEQ ID NO: 787794 - RNA, 20 nt, Human
uaggaaacacauacacagua

SEQ ID NO: 787795 - RNA, 26 nt, Human
uauauauauauaucauacauaauccc

SEQ ID NO: 787796 - RNA, 20 nt, Human
uaucuaugcaucuauaccca

SEQ ID NO: 787797 - RNA, 23 nt, Human
uauuuguuuuauuguuuaaaaga

SEQ ID NO: 787798 - RNA, 20 nt, Human
ucagaacguguuucaaaaga

SEQ ID NO: 787799 - RNA, 24 nt, Human
ucccauaucuaugcaucuauaccc

SEQ ID NO: 787800 - RNA, 24 nt, Human
ucccuggcaaccacuauucuccuu

SEQ ID NO: 787801 - RNA, 22 nt, Human
uccucauguauuuuuguucuau

SEQ ID NO: 787802 - RNA, 24 nt, Human
ugaaguaaugggcaaaaaacugac

SEQ ID NO: 787803 - RNA, 24 nt, Human
ugaggagaauccuucuugcccauu

SEQ ID NO: 787804 - RNA, 20 nt, Human
uggaggcauuuuacaauuua

SEQ ID NO: 787805 - RNA, 19 nt, Human
uggcaaccacuauucuccu

SEQ ID NO: 787806 - RNA, 21 nt, Human
uguauauauauauauaucaua

SEQ ID NO: 787807 - RNA, 22 nt, Human
uguauauauauauauaucauaa

SEQ ID NO: 787808 - RNA, 23 nt, Human
uguauauauauauauaucauaca

SEQ ID NO: 787809 - RNA, 22 nt, Human
ugugguaauaacuuugggauac

SEQ ID NO: 787810 - RNA, 18 nt, Human
uguguauauauauauaua

SEQ ID NO: 787811 - RNA, 19 nt, Human
uguguauauauauauauau

SEQ ID NO: 787812 - RNA, 23 nt, Human
uguguauauauauauauaucaua

SEQ ID NO: 787813 - RNA, 18 nt, Human
uguguguguauauauaua

SEQ ID NO: 787814 - RNA, 24 nt, Human
uguguguguauauauauauauaau

SEQ ID NO: 787815 - RNA, 23 nt, Human
uguguguguguauauauauauau

SEQ ID NO: 787816 - RNA, 23 nt, Human
uguguguguguguauauauauau

SEQ ID NO: 787817 - RNA, 18 nt, Human
uucaaaagauaaaauuuc

SEQ ID NO: 787818 - RNA, 20 nt, Human
uucaucuuucugcauguacu

SEQ ID NO: 787819 - RNA, 22 nt, Human
uucaugauagacacuugagcug

SEQ ID NO: 787820 - RNA, 20 nt, Human
uucuccuuucuguuucugug

SEQ ID NO: 787821 - RNA, 25 nt, Human
uucuccuuucuguuucugugaacuu

SEQ ID NO: 787822 - RNA, 22 nt, Human
uugaaaauuuuuccacucccaa

SEQ ID NO: 787823 - RNA, 21 nt, Human
uugaaauauaacaauauagga

SEQ ID NO: 787824 - RNA, 21 nt, Human
uuucaagguuuauccugaggu

SEQ ID NO: 787825 - RNA, 22 nt, Human
uuuggaggcauuuuacaauuua

SEQ ID NO: 787826 - RNA, 27 nt, Human
uuuucagaaauggguuuucgggucacc

SEQ ID NO: 787827 - RNA, 24 nt, Human
uuuugugucuggcuuauuucacuu

SEQ ID NO: 787828 - RNA, 19 nt, Human
aaaaaaaaaaaaaaaaaga

SEQ ID NO: 787829 - RNA, 20 nt, Human
aaaaaaagagaaauuacaaa

SEQ ID NO: 787830 - RNA, 24 nt, Human
aaaaagccaaccaaauaaacaaac

SEQ ID NO: 787831 - RNA, 18 nt, Human
aaaaaggaaaaaaagaga

SEQ ID NO: 787832 - RNA, 22 nt, Human
aaaaauccaaaagauuuaucgc

SEQ ID NO: 787833 - RNA, 23 nt, Human
aaaacacaaauagcauuccaaca

SEQ ID NO: 787834 - RNA, 25 nt, Human
aaaauacaacaacaacaacaacaac

SEQ ID NO: 787835 - RNA, 22 nt, Human
aaacaaacaaacgaaaaaaaca

SEQ ID NO: 787836 - RNA, 18 nt, Human
aaacacaaauagcauucc

SEQ ID NO: 787837 - RNA, 23 nt, Human
aaacagugcaacaaaacacaaau

SEQ ID NO: 787838 - RNA, 23 nt, Human
aaaugcuaucaugaaugcuggua

SEQ ID NO: 787839 - RNA, 20 nt, Human
aacaacaacaaaauaaguac

SEQ ID NO: 787840 - RNA, 20 nt, Human
aacaacaacaacaacaaaau

SEQ ID NO: 787841 - RNA, 24 nt, Human
aaccaaauaaacaaacaaacaaac

SEQ ID NO: 787842 - RNA, 19 nt, Human
aacuugauucaaccaagug

SEQ ID NO: 787843 - RNA, 19 nt, Human
aagaguaucaagagucugg

SEQ ID NO: 787844 - RNA, 23 nt, Human
aaggaaaaaaagagaaauuacaa

SEQ ID NO: 787845 - RNA, 24 nt, Human
aauggaaaacuuccauacuuucaa

SEQ ID NO: 787846 - RNA, 22 nt, Human
acaaaacagaaaaaaacaaaac

SEQ ID NO: 787847 - RNA, 23 nt, Human
acaaaacagaaaaaaacaaaaca

SEQ ID NO: 787848 - RNA, 20 nt, Human
acaaacgaaaaaaacagugc

SEQ ID NO: 787849 - RNA, 19 nt, Human
acaacaacaacaacaacaa

SEQ ID NO: 787850 - RNA, 19 nt, Human
acaacaacaacaacaacaa

SEQ ID NO: 787851 - RNA, 24 nt, Human
acaacaacaacaacaacaaaauaa

SEQ ID NO: 787852 - RNA, 22 nt, Human
acaacaacaacaacaacaacaa

SEQ ID NO: 787853 - RNA, 24 nt, Human
acaacaacaacaacaacaacaaaa

SEQ ID NO: 787854 - RNA, 23 nt, Human
accaaauaaaaaaggaaaaaaag

SEQ ID NO: 787855 - RNA, 21 nt, Human
accaaauaaacaaacaaacaa

SEQ ID NO: 787856 - RNA, 21 nt, Human
accaaaugcccuuuaugccaa

SEQ ID NO: 787857 - RNA, 23 nt, Human
accaaaugcccuuuaugccaaau

SEQ ID NO: 787858 - RNA, 25 nt, Human
accagcaaaagcgauuuccaacaua

SEQ ID NO: 787859 - RNA, 21 nt, Human
agaaaaaaaaaaaaaaaaaaa

SEQ ID NO: 787860 - RNA, 22 nt, Human
agaaaaacacaaaaauccaaaa

SEQ ID NO: 787861 - RNA, 20 nt, Human
agacagcaaagguacaaauu

SEQ ID NO: 787862 - RNA, 22 nt, Human
agagagaaaagggauuuucuga

SEQ ID NO: 787863 - RNA, 19 nt, Human
agagucuggcaaaaauaga

SEQ ID NO: 787864 - RNA, 23 nt, Human
agcuuccuccucuuaucucuuuu

SEQ ID NO: 787865 - RNA, 23 nt, Human
aggaaaaaaagagaaauuacaaa

SEQ ID NO: 787866 - RNA, 19 nt, Human
aggaagagcaauaggaaaa

SEQ ID NO: 787867 - RNA, 21 nt, Human
aggcagucaguaacaaaaugc

SEQ ID NO: 787868 - RNA, 21 nt, Human
aguaggcugcaaaacauacag

SEQ ID NO: 787869 - RNA, 20 nt, Human
aucucuuuuuuucccacauu

SEQ ID NO: 787870 - RNA, 19 nt, Human
augcauaucaacaauuguu

SEQ ID NO: 787871 - RNA, 20 nt, Human
augccaaauauuccauuagc

SEQ ID NO: 787872 - RNA, 21 nt, Human
caaaacauacagcaaaaagga

SEQ ID NO: 787873 - RNA, 23 nt, Human
caaacaaaaauaaaaccaccaaa

SEQ ID NO: 787874 - RNA, 19 nt, Human
caaagcuuuguuuuguucc

SEQ ID NO: 787875 - RNA, 21 nt, Human
caaauuguucuuuagguaaug

SEQ ID NO: 787876 - RNA, 22 nt, Human
caaauuucccucuccaaaaagc

SEQ ID NO: 787877 - RNA, 18 nt, Human
caacaacaacaacaacaa

SEQ ID NO: 787878 - RNA, 20 nt, Human
caacaacaacaacaacaaaa

SEQ ID NO: 787879 - RNA, 22 nt, Human
caccagcaaaagcgauuuccaa

SEQ ID NO: 787880 - RNA, 21 nt, Human
cacuuuucccuccuuucccca

SEQ ID NO: 787881 - RNA, 24 nt, Human
cagaaaauuaccuuuaauauaaac

SEQ ID NO: 787882 - RNA, 22 nt, Human
caggauagauguaacacccauu

SEQ ID NO: 787883 - RNA, 18 nt, Human
cagggcagcagaggcugc

SEQ ID NO: 787884 - RNA, 19 nt, Human
cagguaaaguccaggcuau

SEQ ID NO: 787885 - RNA, 21 nt, Human
caguauuuaaccaggucaagc

SEQ ID NO: 787886 - RNA, 22 nt, Human
cauuagaaaaacacaaaaaucc

SEQ ID NO: 787887 - RNA, 23 nt, Human
cauuuuacacguauguugcaaca

SEQ ID NO: 787888 - RNA, 31 nt, Human
ccaccaaaugcccuuuaugccaaauauuccu

SEQ ID NO: 787889 - RNA, 24 nt, Human
cccacauuaucuguugcguaucua

SEQ ID NO: 787890 - RNA, 19 nt, Human
ccccauuuccuuauuaucu

SEQ ID NO: 787891 - RNA, 18 nt, Human
ccuccucuuaucucuuuu

SEQ ID NO: 787892 - RNA, 21 nt, Human
ccucuuaucucuuuuuuuccc

SEQ ID NO: 787893 - RNA, 22 nt, Human
cuaauugaaaaaucaggaaucu

SEQ ID NO: 787894 - RNA, 22 nt, Human
cucaaacaaaaauaaaaccacc

SEQ ID NO: 787895 - RNA, 19 nt, Human
cucaacucuuugcuggugc

SEQ ID NO: 787896 - RNA, 23 nt, Human
cuccucuuaucucuuuuuuuccc

SEQ ID NO: 787897 - RNA, 24 nt, Human
cugcugcuccgcgcucccgcucgu

SEQ ID NO: 787898 - RNA, 20 nt, Human
gaaaaaaacagugcaacaaa

SEQ ID NO: 787899 - RNA, 21 nt, Human
gaaaaaaacagugcaacaaaa

SEQ ID NO: 787900 - RNA, 24 nt, Human
gaaaaaaacagugcaacaaaacac

SEQ ID NO: 787901 - RNA, 24 nt, Human
gaaaaaaacagugcaacaaaacac

SEQ ID NO: 787902 - RNA, 23 nt, Human
gaaaaugcugaaaugcuaucaug

SEQ ID NO: 787903 - RNA, 20 nt, Human
gagaaaagggauuuucugac

SEQ ID NO: 787904 - RNA, 21 nt, Human
gcaagacagcaaagguacaaa

SEQ ID NO: 787905 - RNA, 21 nt, Human
ggaauacaacugugaaccuca

SEQ ID NO: 787906 - RNA, 21 nt, Human
gguauauuuguuaugagccaa

SEQ ID NO: 787907 - RNA, 21 nt, Human
guauuaguuugcuacgggagc

SEQ ID NO: 787908 - RNA, 20 nt, Human
uaaaaaaggaaaaaaagaga

SEQ ID NO: 787909 - RNA, 18 nt, Human
uaaaacagagccuacaag

SEQ ID NO: 787910 - RNA, 18 nt, Human
uaaacuauaacuuacuga

SEQ ID NO: 787911 - RNA, 25 nt, Human
uaaauaaauccacaauuggauccaa

SEQ ID NO: 787912 - RNA, 29 nt, Human
uaaccaggucaagcaccaagccagagcua

SEQ ID NO: 787913 - RNA, 19 nt, Human
uaacuuacugaugugauug

SEQ ID NO: 787914 - RNA, 18 nt, Human
uaagacaaaaaagucaag

SEQ ID NO: 787915 - RNA, 25 nt, Human
uacaacaacaacaacaacaacaaaa

SEQ ID NO: 787916 - RNA, 27 nt, Human
uagcuuccuccucuuaucucuuuuuuu

SEQ ID NO: 787917 - RNA, 22 nt, Human
uaggcugcaaaacauacagcaa

SEQ ID NO: 787918 - RNA, 21 nt, Human
uaguucauugagauuucuuaa

SEQ ID NO: 787919 - RNA, 23 nt, Human
uaucuaguauuaguuugcuacgg

SEQ ID NO: 787920 - RNA, 26 nt, Human
uauguugcaacaucagagaugcuggu

SEQ ID NO: 787921 - RNA, 24 nt, Human
ucaaacaaaaauaaaaccaccaaa

SEQ ID NO: 787922 - RNA, 18 nt, Human
ucaacucuuugcuggugc

SEQ ID NO: 787923 - RNA, 18 nt, Human
ucaagcauguuggagcag

SEQ ID NO: 787924 - RNA, 22 nt, Human
uccaaauuucccucuccaaaaa

SEQ ID NO: 787925 - RNA, 27 nt, Human
uccacaauuggauccaagccggggucc

SEQ ID NO: 787926 - RNA, 24 nt, Human
ucccucuccaaaaagccaaccaaa

SEQ ID NO: 787927 - RNA, 29 nt, Human
uccuccucuuaucucuuuuuuucccacaa

SEQ ID NO: 787928 - RNA, 22 nt, Human
uccucugaaacgugucuccaag

SEQ ID NO: 787929 - RNA, 23 nt, Human
ucuaaagcaugaucacugguugu

SEQ ID NO: 787930 - RNA, 22 nt, Human
ucuccaagauacuucucugucc

SEQ ID NO: 787931 - RNA, 22 nt, Human
ucuuauuagcuuccuccucuua

SEQ ID NO: 787932 - RNA, 19 nt, Human
ugaaaaacaguauucucau

SEQ ID NO: 787933 - RNA, 25 nt, Human
ugaaaaacaguauucucauuagaag

SEQ ID NO: 787934 - RNA, 19 nt, Human
ugauaaaaagggaaugugg

SEQ ID NO: 787935 - RNA, 18 nt, Human
ugcaacaaaacacaaaua

SEQ ID NO: 787936 - RNA, 23 nt, Human
ugcaacaaaacacaaauagcauu

SEQ ID NO: 787937 - RNA, 18 nt, Human
ugccaauuaucagaauau

SEQ ID NO: 787938 - RNA, 18 nt, Human
ugcccuuuaugccaaaua

SEQ ID NO: 787939 - RNA, 24 nt, Human
ugcuccgcgcucccgcucgucuca

SEQ ID NO: 787940 - RNA, 20 nt, Human
ugcugaccacaaacaaguuu

SEQ ID NO: 787941 - RNA, 19 nt, Human
ugcugcuccgcgcucccgc

SEQ ID NO: 787942 - RNA, 20 nt, Human
ugcuugcaggccggaucagu

SEQ ID NO: 787943 - RNA, 20 nt, Human
uggaaaagccuauuuguuuu

SEQ ID NO: 787944 - RNA, 22 nt, Human
uggagguaauuaaguaacucug

SEQ ID NO: 787945 - RNA, 18 nt, Human
uguaagcauugagcaugu

SEQ ID NO: 787946 - RNA, 21 nt, Human
uguaagcauugagcaugugca

SEQ ID NO: 787947 - RNA, 20 nt, Human
ugugggguuaaauggcagga

SEQ ID NO: 787948 - RNA, 18 nt, Human
uguuucauguauucgcca

SEQ ID NO: 787949 - RNA, 19 nt, Human
uguuuuguuccuuguugug

SEQ ID NO: 787950 - RNA, 20 nt, Human
uuaaaagaaaccaagaaggu

SEQ ID NO: 787951 - RNA, 23 nt, Human
uucaaagcuuuguuuuguuccuu

SEQ ID NO: 787952 - RNA, 20 nt, Human
uucccacauuaucuguugcg

SEQ ID NO: 787953 - RNA, 21 nt, Human
uucccucuccaaaaagccaac

SEQ ID NO: 787954 - RNA, 24 nt, Human
uugacagucucuuauuagcuuccu

SEQ ID NO: 787955 - RNA, 22 nt, Human
uugguaccuuggaaaaugcuga

SEQ ID NO: 787956 - RNA, 21 nt, Human
uugugcugaccacaaacaagu

SEQ ID NO: 787957 - RNA, 18 nt, Human
uuucccuccuuuccccag

SEQ ID NO: 787958 - RNA, 21 nt, Human
uuugugauccagugccaauua

SEQ ID NO: 787959 - RNA, 20 nt, Human
uuuuacacugggcuuucuuc

SEQ ID NO: 787960 - RNA, 24 nt, Human
uuuucagccacuuuauuaacugug

SEQ ID NO: 787961 - RNA, 19 nt, Human
aaagugcugggauuacagg

SEQ ID NO: 787962 - RNA, 23 nt, Human
aaagugcugggauuacaggcaua

SEQ ID NO: 787963 - RNA, 26 nt, Human
aaguaauccucccgccucagcacccc

SEQ ID NO: 787964 - RNA, 19 nt, Human
aaguagcugggacuacagg

SEQ ID NO: 787965 - RNA, 20 nt, Human
aaguagcugggacuacaggu

SEQ ID NO: 787966 - RNA, 26 nt, Human
aaguagcugggacuacaggugcaugc

SEQ ID NO: 787967 - RNA, 19 nt, Human
aagugcugggauuacaggc

SEQ ID NO: 787968 - RNA, 20 nt, Human
aagugcugggauuacaggca

SEQ ID NO: 787969 - RNA, 21 nt, Human
aagugcugggauuacaggcau

SEQ ID NO: 787970 - RNA, 26 nt, Human
aagugcugggauuacaggcauaagcc

SEQ ID NO: 787971 - RNA, 24 nt, Human
aauaaagagguucaauaaacagaa

SEQ ID NO: 787972 - RNA, 24 nt, Human
aauaugccauacuucauaaacauc

SEQ ID NO: 787973 - RNA, 19 nt, Human
aauuguacagccauaggaa

SEQ ID NO: 787974 - RNA, 25 nt, Human
acacugucacccaggcuggugugca

SEQ ID NO: 787975 - RNA, 18 nt, Human
acagcucacugcagccuc

SEQ ID NO: 787976 - RNA, 22 nt, Human
accaagggccauuuugugggau

SEQ ID NO: 787977 - RNA, 19 nt, Human
acuacaggugcaugccacc

SEQ ID NO: 787978 - RNA, 21 nt, Human
agcggcgaccucgccgggcaa

SEQ ID NO: 787979 - RNA, 21 nt, Human
agcggcgauggcagcugaggc

SEQ ID NO: 787980 - RNA, 18 nt, Human
agugcugggauuacaggc

SEQ ID NO: 787981 - RNA, 18 nt, Human
aucuauaaauugcaaagg

SEQ ID NO: 787982 - RNA, 22 nt, Human
caaaaagguaaccuuugcucua

SEQ ID NO: 787983 - RNA, 19 nt, Human
caaagugccauguaugaaa

SEQ ID NO: 787984 - RNA, 23 nt, Human
caaagugccauguaugaaauaug

SEQ ID NO: 787985 - RNA, 18 nt, Human
caaagugcugggauuaca

SEQ ID NO: 787986 - RNA, 21 nt, Human
caaagugcugggauuacaggc

SEQ ID NO: 787987 - RNA, 22 nt, Human
caaagugcugggauuacaggca

SEQ ID NO: 787988 - RNA, 23 nt, Human
caaagugcugggauuacaggcau

SEQ ID NO: 787989 - RNA, 24 nt, Human
caaagugcugggauuacaggcaua

SEQ ID NO: 787990 - RNA, 22 nt, Human
caaccucccagguugaaguaau

SEQ ID NO: 787991 - RNA, 23 nt, Human
cacaaaaucugaguuaggacaaa

SEQ ID NO: 787992 - RNA, 24 nt, Human
caccaugccugguuaauuuuugua

SEQ ID NO: 787993 - RNA, 19 nt, Human
cacuccgucucucaggccc

SEQ ID NO: 787994 - RNA, 20 nt, Human
cacuccgucucucaggcccc

SEQ ID NO: 787995 - RNA, 22 nt, Human
cacugcagccucaaccucccag

SEQ ID NO: 787996 - RNA, 22 nt, Human
cacuucagcgccgccugucugc

SEQ ID NO: 787997 - RNA, 24 nt, Human
cagccucaaccucccagguugaag

SEQ ID NO: 787998 - RNA, 19 nt, Human
cauauauuucaacaugaaa

SEQ ID NO: 787999 - RNA, 25 nt, Human
ccagguugaaguaauccuccugggc

SEQ ID NO: 788000 - RNA, 20 nt, Human
ccauacaaaaagguaaccuu

SEQ ID NO: 788001 - RNA, 23 nt, Human
ccauguaugaaauaugaaauuug

SEQ ID NO: 788002 - RNA, 23 nt, Human
cccaaguagcugggacuacaggu

SEQ ID NO: 788003 - RNA, 24 nt, Human
cccaaguagcugggacuacaggug

SEQ ID NO: 788004 - RNA, 24 nt, Human
ccccaaguagcugggacuacaggu

SEQ ID NO: 788005 - RNA, 26 nt, Human
cccccagaaccucccucauggcagcu

SEQ ID NO: 788006 - RNA, 24 nt, Human
ccucccgccucagcaccccaagua

SEQ ID NO: 788007 - RNA, 20 nt, Human
ccuccugcucggccccuccc

SEQ ID NO: 788008 - RNA, 24 nt, Human
ccuccugggcucaaguaauccucc

SEQ ID NO: 788009 - RNA, 18 nt, Human
ccugggcucaaguaaucc

SEQ ID NO: 788010 - RNA, 21 nt, Human
ccugucugcucgcccccagaa

SEQ ID NO: 788011 - RNA, 22 nt, Human
cgaaacacagcucacugcagcc

SEQ ID NO: 788012 - RNA, 25 nt, Human
cgaaacacagcucacugcagccuca

SEQ ID NO: 788013 - RNA, 20 nt, Human
cgaacuccugagcucaagcc

SEQ ID NO: 788014 - RNA, 24 nt, Human
cgccucagcaccccaaguagcugg

SEQ ID NO: 788015 - RNA, 20 nt, Human
cggcagcaacccugcagccg

SEQ ID NO: 788016 - RNA, 18 nt, Human
cggccccucccuacacuc

SEQ ID NO: 788017 - RNA, 21 nt, Human
cgucacgggcgcggaaggguu

SEQ ID NO: 788018 - RNA, 25 nt, Human
cucaaguaauccucccgccucagca

SEQ ID NO: 788019 - RNA, 23 nt, Human
cucacaaaaucugaguuaggaca

SEQ ID NO: 788020 - RNA, 24 nt, Human
cucagaacucuguuaaacuucacu

SEQ ID NO: 788021 - RNA, 24 nt, Human
cucauggcagcuccggcuuccucc

SEQ ID NO: 788022 - RNA, 18 nt, Human
cuccuccuccugcucggc

SEQ ID NO: 788023 - RNA, 19 nt, Human
cuccuccugcucggccccc

SEQ ID NO: 788024 - RNA, 22 nt, Human
cugaggcagcggcgaccucgcc

SEQ ID NO: 788025 - RNA, 20 nt, Human
cugcaaagugcugggauuac

SEQ ID NO: 788026 - RNA, 23 nt, Human
cugcagccucaaccucccagguu

SEQ ID NO: 788027 - RNA, 18 nt, Human
cugccaccaagggccauu

SEQ ID NO: 788028 - RNA, 24 nt, Human
cugccaccaagggccauuuugugg

SEQ ID NO: 788029 - RNA, 22 nt, Human
cugucugcucgcccccagaacc

SEQ ID NO: 788030 - RNA, 21 nt, Human
gaaggccucccuucaccauac

SEQ ID NO: 788031 - RNA, 24 nt, Human
gacuacaggugcaugccaccaugc

SEQ ID NO: 788032 - RNA, 18 nt, Human
gauuacaggcauaagcca

SEQ ID NO: 788033 - RNA, 24 nt, Human
gcaaagugcugggauuacaggcau

SEQ ID NO: 788034 - RNA, 20 nt, Human
gccucagcaccccaaguagc

SEQ ID NO: 788035 - RNA, 25 nt, Human
gcgaaacacagcucacugcagccuc

SEQ ID NO: 788036 - RNA, 20 nt, Human
gcgauggcagcugaggcagc

SEQ ID NO: 788037 - RNA, 23 nt, Human
gcuccggcuuccuccuccuccug

SEQ ID NO: 788038 - RNA, 23 nt, Human
gcucggccccucccuacacuccc

SEQ ID NO: 788039 - RNA, 21 nt, Human
gcuuuguuaaaugucacugcu

SEQ ID NO: 788040 - RNA, 22 nt, Human
ggauuacaggcauaagccaacg

SEQ ID NO: 788041 - RNA, 22 nt, Human
ggcaauagcagauggggcggca

SEQ ID NO: 788042 - RNA, 22 nt, Human
guuguugcucacauguuuuccu

SEQ ID NO: 788043 - RNA, 24 nt, Human
uaauuuuuguauuuuuuguagaga

SEQ ID NO: 788044 - RNA, 18 nt, Human
uagcagauggggcggcag

SEQ ID NO: 788045 - RNA, 23 nt, Human
uaggacaaauguucauggggguu

SEQ ID NO: 788046 - RNA, 20 nt, Human
uaugccauacuucauaaaca

SEQ ID NO: 788047 - RNA, 22 nt, Human
ucacacugucacccaggcuggu

SEQ ID NO: 788048 - RNA, 23 nt, Human
ucacacugucacccaggcuggug

SEQ ID NO: 788049 - RNA, 23 nt, Human
ucacgaacuccugagcucaagcc

SEQ ID NO: 788050 - RNA, 19 nt, Human
ucacugcagccucaaccuc

SEQ ID NO: 788051 - RNA, 23 nt, Human
ucacugcagccucaaccucccag

SEQ ID NO: 788052 - RNA, 24 nt, Human
ucacugcagccucaaccucccagg

SEQ ID NO: 788053 - RNA, 18 nt, Human
ucccagguugaaguaauc

SEQ ID NO: 788054 - RNA, 24 nt, Human
ucccagguugaaguaauccuccug

SEQ ID NO: 788055 - RNA, 22 nt, Human
ucccgccucagcaccccaagua

SEQ ID NO: 788056 - RNA, 23 nt, Human
uccgucucucaggccccgcguca

SEQ ID NO: 788057 - RNA, 19 nt, Human
uccugcucggccccucccu

SEQ ID NO: 788058 - RNA, 23 nt, Human
uccugggcucaaguaauccuccc

SEQ ID NO: 788059 - RNA, 22 nt, Human
ucucacacugucacccaggcug

SEQ ID NO: 788060 - RNA, 23 nt, Human
ucucacacugucacccaggcugg

SEQ ID NO: 788061 - RNA, 24 nt, Human
ucucacacugucacccaggcuggu

SEQ ID NO: 788062 - RNA, 18 nt, Human
ucugcucgcccccagaac

SEQ ID NO: 788063 - RNA, 20 nt, Human
ucuuaucaguaaguuagagg

SEQ ID NO: 788064 - RNA, 18 nt, Human
ugaggcagcggcgaccuc

SEQ ID NO: 788065 - RNA, 18 nt, Human
ugcagccucaaccuccca

SEQ ID NO: 788066 - RNA, 24 nt, Human
ugcccaggcuggucacgaacuccu

SEQ ID NO: 788067 - RNA, 28 nt, Human
ugcccaggcuggucacgaacuccugagc

SEQ ID NO: 788068 - RNA, 24 nt, Human
ugcucgcccccagaaccucccuca

SEQ ID NO: 788069 - RNA, 24 nt, Human
ugcugggauuacaggcauaagcca

SEQ ID NO: 788070 - RNA, 22 nt, Human
uggcagcugaggcagcggcgac

SEQ ID NO: 788071 - RNA, 19 nt, Human
uggccucgacagcccuagc

SEQ ID NO: 788072 - RNA, 22 nt, Human
uggcgaaacacagcucacugca

SEQ ID NO: 788073 - RNA, 23 nt, Human
uggcgaaacacagcucacugcag

SEQ ID NO: 788074 - RNA, 21 nt, Human
ugggacuacaggugcaugcca

SEQ ID NO: 788075 - RNA, 22 nt, Human
ugggacuacaggugcaugccac

SEQ ID NO: 788076 - RNA, 24 nt, Human
ugggacuacaggugcaugccacca

SEQ ID NO: 788077 - RNA, 25 nt, Human
ugggacuacaggugcaugccaccau

SEQ ID NO: 788078 - RNA, 18 nt, Human
ugggauuacaggcauaag

SEQ ID NO: 788079 - RNA, 19 nt, Human
ugggauuacaggcauaagc

SEQ ID NO: 788080 - RNA, 21 nt, Human
ugggauuacaggcauaagcca

SEQ ID NO: 788081 - RNA, 21 nt, Human
ugggauuacaggcauaagcca

SEQ ID NO: 788082 - RNA, 24 nt, Human
ugggauuacaggcauaagccaacg

SEQ ID NO: 788083 - RNA, 27 nt, Human
ugggauuacaggcauaagccaacggcc

SEQ ID NO: 788084 - RNA, 24 nt, Human
ugggcucaaguaauccucccgccu

SEQ ID NO: 788085 - RNA, 23 nt, Human
uggugugcaguggcgaaacacag

SEQ ID NO: 788086 - RNA, 23 nt, Human
uguagcggcgauggcagcugagg

SEQ ID NO: 788087 - RNA, 24 nt, Human
uguagcggcgauggcagcugaggc

SEQ ID NO: 788088 - RNA, 22 nt, Human
ugugcaguggcgaaacacagcu

SEQ ID NO: 788089 - RNA, 19 nt, Human
uuaggacaaauguucaugg

SEQ ID NO: 788090 - RNA, 20 nt, Human
uugcucuacucacaagcuuc

SEQ ID NO: 788091 - RNA, 21 nt, Human
uuguagagacaggguugccca

SEQ ID NO: 788092 - RNA, 18 nt, Human
uuuguagagacaggguug

SEQ ID NO: 788093 - RNA, 20 nt, Human
uuuuuguauuuuuuguagag

SEQ ID NO: 788094 - RNA, 23 nt, Human
uuuuuguauuuuuuguagagaca

SEQ ID NO: 788095 - RNA, 20 nt, Human
uuuuuuguagagacaggguu

SEQ ID NO: 788096 - RNA, 19 nt, Human
aaaacaaauaugaucccau

SEQ ID NO: 788097 - RNA, 24 nt, Human
aaaaggugcagggcacuaugagag

SEQ ID NO: 788098 - RNA, 24 nt, Human
aaaauaaccauugaacaaacugaa

SEQ ID NO: 788099 - RNA, 20 nt, Human
aaacaaaaggugcagggcac

SEQ ID NO: 788100 - RNA, 22 nt, Human
aaacugaacuccuauaucagaa

SEQ ID NO: 788101 - RNA, 18 nt, Human
aaagagaagcggauucag

SEQ ID NO: 788102 - RNA, 22 nt, Human
aaccauugaacaaacugaaaug

SEQ ID NO: 788103 - RNA, 24 nt, Human
aaccauugaacaaacugaaaugac

SEQ ID NO: 788104 - RNA, 23 nt, Human
aaccuuucauaucucaaaacuuu

SEQ ID NO: 788105 - RNA, 24 nt, Human
aacugaacuccuauaucagaaacu

SEQ ID NO: 788106 - RNA, 24 nt, Human
aagaaacugaacuccuauaucaga

SEQ ID NO: 788107 - RNA, 18 nt, Human
aagucagcuuuagaauga

SEQ ID NO: 788108 - RNA, 23 nt, Human
aauaaucuguuauuccuauugcu

SEQ ID NO: 788109 - RNA, 19 nt, Human
accaaauaaaacguugguu

SEQ ID NO: 788110 - RNA, 22 nt, Human
accauugaacaaacugaaauga

SEQ ID NO: 788111 - RNA, 23 nt, Human
acucaacaaauguccuuucuacc

SEQ ID NO: 788112 - RNA, 19 nt, Human
acugaaaugacaagaaacu

SEQ ID NO: 788113 - RNA, 25 nt, Human
agaaaccuuucauaucucaaaacuu

SEQ ID NO: 788114 - RNA, 22 nt, Human
agaaaggaaauuagaaccucac

SEQ ID NO: 788115 - RNA, 24 nt, Human
agagacaauuuagaaagacacacu

SEQ ID NO: 788116 - RNA, 21 nt, Human
agccacuagccacagaaaccu

SEQ ID NO: 788117 - RNA, 23 nt, Human
agcuuuaaaauuuuuuucacuaa

SEQ ID NO: 788118 - RNA, 20 nt, Human
auaaggaauuauuucuuuga

SEQ ID NO: 788119 - RNA, 18 nt, Human
auuccuauugcuuagaau

SEQ ID NO: 788120 - RNA, 21 nt, Human
caaaacagaaauauuacaguc

SEQ ID NO: 788121 - RNA, 26 nt, Human
caaauaugaucccaucacacaacuga

SEQ ID NO: 788122 - RNA, 20 nt, Human
caucacacaacugaagccua

SEQ ID NO: 788123 - RNA, 24 nt, Human
cauccucuucucucuuuccucuga

SEQ ID NO: 788124 - RNA, 23 nt, Human
ccccaaaauguaacauccucuuc

SEQ ID NO: 788125 - RNA, 22 nt, Human
cuaaacccucccauuagguauu

SEQ ID NO: 788126 - RNA, 18 nt, Human
cucacuucauacauucaa

SEQ ID NO: 788127 - RNA, 19 nt, Human
cugcagccacaugccagga

SEQ ID NO: 788128 - RNA, 19 nt, Human
gaggcucucuguaaucugg

SEQ ID NO: 788129 - RNA, 21 nt, Human
gcuagauacaaaaaugcacug

SEQ ID NO: 788130 - RNA, 19 nt, Human
ggaagacuucuuaucuaca

SEQ ID NO: 788131 - RNA, 22 nt, Human
guccuuucuaccacucuguagc

SEQ ID NO: 788132 - RNA, 21 nt, Human
uaaaaagucuaaaaauuaaag

SEQ ID NO: 788133 - RNA, 21 nt, Human
uaaaacguugguuuauaagga

SEQ ID NO: 788134 - RNA, 20 nt, Human
uaaaagcaacuucaccuauu

SEQ ID NO: 788135 - RNA, 21 nt, Human
uaaaauauucaaaaugucaug

SEQ ID NO: 788136 - RNA, 24 nt, Human
uaaaguauaacacagcuagaagaa

SEQ ID NO: 788137 - RNA, 25 nt, Human
uaacaguacacauagguccuugaaa

SEQ ID NO: 788138 - RNA, 18 nt, Human
uaacucaaagagaagcgg

SEQ ID NO: 788139 - RNA, 26 nt, Human
uaagagagacaauuuagaaagacaca

SEQ ID NO: 788140 - RNA, 20 nt, Human
uagauacaaaaaugcacuga

SEQ ID NO: 788141 - RNA, 21 nt, Human
uagccacagaaaccuuucaua

SEQ ID NO: 788142 - RNA, 21 nt, Human
uauucacauaauucaugaacu

SEQ ID NO: 788143 - RNA, 21 nt, Human
uauugcacugcagccacaugc

SEQ ID NO: 788144 - RNA, 23 nt, Human
uauuucagagaacaccugaaggc

SEQ ID NO: 788145 - RNA, 24 nt, Human
ucaaagagaagcggauucagcuac

SEQ ID NO: 788146 - RNA, 23 nt, Human
ucauaaaaacaaaguuccauaca

SEQ ID NO: 788147 - RNA, 28 nt, Human
uccauacacuaaaaauaaccauugaaca

SEQ ID NO: 788148 - RNA, 24 nt, Human
ucccaucacacaacugaagccuag

SEQ ID NO: 788149 - RNA, 19 nt, Human
uccuauaucagaaacugua

SEQ ID NO: 788150 - RNA, 21 nt, Human
ucucuguaaucuggcauuuuc

SEQ ID NO: 788151 - RNA, 23 nt, Human
ucugcaucuaacacaguaagucu

SEQ ID NO: 788152 - RNA, 24 nt, Human
ucuguagcaugaguggaucauucu

SEQ ID NO: 788153 - RNA, 24 nt, Human
ugaacaaacugaaaugacaagaaa

SEQ ID NO: 788154 - RNA, 18 nt, Human
ugacuuacucucuaccaa

SEQ ID NO: 788155 - RNA, 23 nt, Human
ugaguggaucauucuauucaaga

SEQ ID NO: 788156 - RNA, 24 nt, Human
ugaucaauacuguagacuagacac

SEQ ID NO: 788157 - RNA, 19 nt, Human
ugcacugauguguaaaaca

SEQ ID NO: 788158 - RNA, 22 nt, Human
ugcuuaauucuaaacccuccca

SEQ ID NO: 788159 - RNA, 19 nt, Human
uggaguagaauuuguagaa

SEQ ID NO: 788160 - RNA, 19 nt, Human
uuaaacaucuaguuacaau

SEQ ID NO: 788161 - RNA, 24 nt, Human
uuaugauuaaacaauuuaaaaaga

SEQ ID NO: 788162 - RNA, 18 nt, Human
uucagagaacaccugaag

SEQ ID NO: 788163 - RNA, 23 nt, Human
uucauauugcuccccaaaaugua

SEQ ID NO: 788164 - RNA, 23 nt, Human
uuccaauaaggauuuucugcagg

SEQ ID NO: 788165 - RNA, 23 nt, Human
uuccauaguaaugacaaauugcu

SEQ ID NO: 788166 - RNA, 23 nt, Human
uucuagaaauaaguauucaugga

SEQ ID NO: 788167 - RNA, 25 nt, Human
uugcacugcagccacaugccaggaa

SEQ ID NO: 788168 - RNA, 21 nt, Human
uuguagaauguaauaggaagg

SEQ ID NO: 788169 - RNA, 20 nt, Human
uuuauugucucuuccauagg

SEQ ID NO: 788170 - RNA, 21 nt, Human
uuugaugauucugauauugcu

SEQ ID NO: 788171 - RNA, 18 nt, Human
aaaauaguauugacugaa

SEQ ID NO: 788172 - RNA, 24 nt, Human
aaacaacgaagauugcacuuuacu

SEQ ID NO: 788173 - RNA, 24 nt, Human
aaaccuccaugaacugaauaguga

SEQ ID NO: 788174 - RNA, 19 nt, Human
aagaagaagaaaaaaugua

SEQ ID NO: 788175 - RNA, 23 nt, Human
aagaagaagaaaaaauguacgug

SEQ ID NO: 788176 - RNA, 22 nt, Human
aauaaaaugcagaacaagucua

SEQ ID NO: 788177 - RNA, 21 nt, Human
acaccuucugguucccaacuc

SEQ ID NO: 788178 - RNA, 23 nt, Human
acggcaucggauuccaguauacc

SEQ ID NO: 788179 - RNA, 22 nt, Human
agaaacagugacaguugacaac

SEQ ID NO: 788180 - RNA, 20 nt, Human
agaagaagaaaaaauguacg

SEQ ID NO: 788181 - RNA, 20 nt, Human
agagaaagagagagggagag

SEQ ID NO: 788182 - RNA, 22 nt, Human
agagaagaagaagaaaaaaugu

SEQ ID NO: 788183 - RNA, 19 nt, Human
agagagaaagagagaggga

SEQ ID NO: 788184 - RNA, 23 nt, Human
agagagggagagagagagggagc

SEQ ID NO: 788185 - RNA, 18 nt, Human
agcaaagguucuuguaca

SEQ ID NO: 788186 - RNA, 20 nt, Human
agcacaaaccuccaugaacu

SEQ ID NO: 788187 - RNA, 24 nt, Human
aggauucaacaccaucucuggaug

SEQ ID NO: 788188 - RNA, 22 nt, Human
agggagaaaagagagaaagaga

SEQ ID NO: 788189 - RNA, 28 nt, Human
agggagaaaagagagaaagagagaggga

SEQ ID NO: 788190 - RNA, 20 nt, Human
agucaaggcucacuuaagcu

SEQ ID NO: 788191 - RNA, 23 nt, Human
aguggcaauuucuguaaugcagu

SEQ ID NO: 788192 - RNA, 23 nt, Human
aguugacaacaaaagguucugaa

SEQ ID NO: 788193 - RNA, 21 nt, Human
aguuguuguucaagcucugga

SEQ ID NO: 788194 - RNA, 25 nt, Human
auacugaucugaggucucucugggg

SEQ ID NO: 788195 - RNA, 25 nt, Human
auuaugcuaccaagaaacaacacau

SEQ ID NO: 788196 - RNA, 19 nt, Human
caagaaaauguaggagagg

SEQ ID NO: 788197 - RNA, 20 nt, Human
caagaacaggucucuuucuu

SEQ ID NO: 788198 - RNA, 18 nt, Human
cacaauacugaucugagg

SEQ ID NO: 788199 - RNA, 24 nt, Human
cacaucauuauccuugggccuggg

SEQ ID NO: 788200 - RNA, 21 nt, Human
caccuucugguucccaacucc

SEQ ID NO: 788201 - RNA, 21 nt, Human
cagaacaagucuaaggaaagc

SEQ ID NO: 788202 - RNA, 24 nt, Human
cagaaucucuaaaauaguauugac

SEQ ID NO: 788203 - RNA, 22 nt, Human
cagaguacuguaacuuuucuuu

SEQ ID NO: 788204 - RNA, 19 nt, Human
cagcaagaaaauguaggag

SEQ ID NO: 788205 - RNA, 20 nt, Human
cauauauuuauauauauaua

SEQ ID NO: 788206 - RNA, 19 nt, Human
caucagaaaccaagggugg

SEQ ID NO: 788207 - RNA, 21 nt, Human
caugcagguagacuacaaugc

SEQ ID NO: 788208 - RNA, 18 nt, Human
ccaagaaacaacacauca

SEQ ID NO: 788209 - RNA, 24 nt, Human
ccacagaguacuguaacuuuucuu

SEQ ID NO: 788210 - RNA, 18 nt, Human
ccccuuccaagcaagcuu

SEQ ID NO: 788211 - RNA, 23 nt, Human
cccugaauuccugaaaacaaucu

SEQ ID NO: 788212 - RNA, 21 nt, Human
cucacuuaagcuccccccaaa

SEQ ID NO: 788213 - RNA, 21 nt, Human
cuccaggcagucacucuuuac

SEQ ID NO: 788214 - RNA, 19 nt, Human
cuuuacaauuuauuuuguc

SEQ ID NO: 788215 - RNA, 19 nt, Human
gaaacgaaaaugccucucu

SEQ ID NO: 788216 - RNA, 18 nt, Human
gaaaugucaacauagauc

SEQ ID NO: 788217 - RNA, 19 nt, Human
gaaugacacauuuguugaa

SEQ ID NO: 788218 - RNA, 18 nt, Human
gaauuccucaugcuccuc

SEQ ID NO: 788219 - RNA, 19 nt, Human
gagaaaagagagaaagaga

SEQ ID NO: 788220 - RNA, 21 nt, Human
gagaagaagaagaaaaaaugu

SEQ ID NO: 788221 - RNA, 19 nt, Human
gagggagcagagcuuucug

SEQ ID NO: 788222 - RNA, 24 nt, Human
gauauacauauauuuauauauaua

SEQ ID NO: 788223 - RNA, 22 nt, Human
gcagagcuuucugcaagagaag

SEQ ID NO: 788224 - RNA, 19 nt, Human
gcuaccaagaaacaacaca

SEQ ID NO: 788225 - RNA, 23 nt, Human
gcuccugaauuccucaugcuccu

SEQ ID NO: 788226 - RNA, 18 nt, Human
gcuuuaaacccuccucca

SEQ ID NO: 788227 - RNA, 20 nt, Human
ggcaauuucuguaaugcagu

SEQ ID NO: 788228 - RNA, 19 nt, Human
ggcgagcugacucggugca

SEQ ID NO: 788229 - RNA, 20 nt, Human
guaaugcaguguauuuuggu

SEQ ID NO: 788230 - RNA, 20 nt, Human
uaaaaccagucugaaaugga

SEQ ID NO: 788231 - RNA, 21 nt, Human
uaaaucaucagaaaccaaggg

SEQ ID NO: 788232 - RNA, 23 nt, Human
uaagucaagugucuagaggcacc

SEQ ID NO: 788233 - RNA, 19 nt, Human
uaaguuaaaaccagucuga

SEQ ID NO: 788234 - RNA, 23 nt, Human
uacaugauuuucaauaacagugu

SEQ ID NO: 788235 - RNA, 20 nt, Human
uagaaacgaaaaugccucuc

SEQ ID NO: 788236 - RNA, 22 nt, Human
uagaaagcauuuauuacaagag

SEQ ID NO: 788237 - RNA, 25 nt, Human
uagcaacagcaagaaaauguaggag

SEQ ID NO: 788238 - RNA, 21 nt, Human
uaguaucuguucaagaacagg

SEQ ID NO: 788239 - RNA, 25 nt, Human
uauacauauauuuauauauauauau

SEQ ID NO: 788240 - RNA, 22 nt, Human
uaugaaaaagcacaaaccucca

SEQ ID NO: 788241 - RNA, 19 nt, Human
uauuuuguuuuaaucuuuc

SEQ ID NO: 788242 - RNA, 21 nt, Human
ucccugaauuccugaaaacaa

SEQ ID NO: 788243 - RNA, 23 nt, Human
ucccugaauuccugaaaacaauc

SEQ ID NO: 788244 - RNA, 18 nt, Human
uccuugggccuggggcuc

SEQ ID NO: 788245 - RNA, 23 nt, Human
ucugcaagagaagaagaagaaaa

SEQ ID NO: 788246 - RNA, 22 nt, Human
ucuguaaugcaguguauuuugg

SEQ ID NO: 788247 - RNA, 24 nt, Human
ucugucaggugcuauaauuggagu

SEQ ID NO: 788248 - RNA, 19 nt, Human
ucugugacuuauuuauuca

SEQ ID NO: 788249 - RNA, 18 nt, Human
ugaaaaagcacaaaccuc

SEQ ID NO: 788250 - RNA, 22 nt, Human
ugaauuccugaaaacaaucucc

SEQ ID NO: 788251 - RNA, 26 nt, Human
ugacacauuuguugaaggauucaaca

SEQ ID NO: 788252 - RNA, 18 nt, Human
ugacuuuuggaagaaaca

SEQ ID NO: 788253 - RNA, 19 nt, Human
ugaggaagaggagaaguau

SEQ ID NO: 788254 - RNA, 19 nt, Human
ugcaccuggcuuuaaaccc

SEQ ID NO: 788255 - RNA, 24 nt, Human
ugccaugaaagcuuaucacuaagg

SEQ ID NO: 788256 - RNA, 23 nt, Human
uggauauacauauauuuauauau

SEQ ID NO: 788257 - RNA, 25 nt, Human
uggugagaaauaaaaaauaaaaugc

SEQ ID NO: 788258 - RNA, 22 nt, Human
uguaggagagggagaaaagaga

SEQ ID NO: 788259 - RNA, 22 nt, Human
ugugauacuguucauuccagag

SEQ ID NO: 788260 - RNA, 20 nt, Human
uguguuuuagaaacagaaag

SEQ ID NO: 788261 - RNA, 18 nt, Human
uguuuuagaaacagaaag

SEQ ID NO: 788262 - RNA, 23 nt, Human
uuaaagguuugcugucuccuugg

SEQ ID NO: 788263 - RNA, 20 nt, Human
uuaugucucucugaaauaca

SEQ ID NO: 788264 - RNA, 21 nt, Human
uugaaugacacauuuguugaa

SEQ ID NO: 788265 - RNA, 22 nt, Human
uugaaugacacauuuguugaag

SEQ ID NO: 788266 - RNA, 22 nt, Human
uuuagaaacagaaagacaacug

SEQ ID NO: 788267 - RNA, 18 nt, Human
uuugaaugacacauuugu

SEQ ID NO: 788268 - RNA, 18 nt, Human
uuugucaauccugucuuu

SEQ ID NO: 788269 - RNA, 22 nt, Human
uuuuaggcuuuuauuuacuccu

SEQ ID NO: 788270 - RNA, 23 nt, Human
uuuuaggcuuuuauuuacuccua

SEQ ID NO: 788271 - RNA, 24 nt, Human
uuuuauuuaaaguuuuccccuucc

SEQ ID NO: 788272 - RNA, 21 nt, Human
aaaaagcagcuuucauaucac

SEQ ID NO: 788273 - RNA, 25 nt, Human
aaaacaacaacauggccagcaccau

SEQ ID NO: 788274 - RNA, 24 nt, Human
aaaauuguuucuagaucgacaccc

SEQ ID NO: 788275 - RNA, 21 nt, Human
aaacaacaacauggccagcac

SEQ ID NO: 788276 - RNA, 19 nt, Human
aaacaggggaaacugcuuu

SEQ ID NO: 788277 - RNA, 24 nt, Human
aaagacagaacuuuacuaacaaag

SEQ ID NO: 788278 - RNA, 28 nt, Human
aaauggacccguaacacauuacaagggu

SEQ ID NO: 788279 - RNA, 24 nt, Human
aacuacaaaaucuccaaaacaggg

SEQ ID NO: 788280 - RNA, 27 nt, Human
aacuuuacuaacaaaguagaaagugau

SEQ ID NO: 788281 - RNA, 19 nt, Human
aagaggcaacugauuaaaa

SEQ ID NO: 788282 - RNA, 21 nt, Human
aagcuacaugugcugcaugcu

SEQ ID NO: 788283 - RNA, 25 nt, Human
aaguagcuucuuggaucaaaauggc

SEQ ID NO: 788284 - RNA, 20 nt, Human
aauuaacuacaaaaucucca

SEQ ID NO: 788285 - RNA, 18 nt, Human
acaagagccacugaggcc

SEQ ID NO: 788286 - RNA, 23 nt, Human
acucucccgucucuuugcccccc

SEQ ID NO: 788287 - RNA, 21 nt, Human
agaaaacucaacaugugcuga

SEQ ID NO: 788288 - RNA, 21 nt, Human
agaaaagcuacaugugcugca

SEQ ID NO: 788289 - RNA, 27 nt, Human
aggcaguaguggcgguggcggcggcgg

SEQ ID NO: 788290 - RNA, 24 nt, Human
aguuuacaacugaaguucuguaaa

SEQ ID NO: 788291 - RNA, 21 nt, Human
auagaugagcaaacuaacauu

SEQ ID NO: 788292 - RNA, 21 nt, Human
auucuguucgaucuacuuuca

SEQ ID NO: 788293 - RNA, 21 nt, Human
auucuuggccuucguugucuc

SEQ ID NO: 788294 - RNA, 21 nt, Human
auuuacaguuaacuuguugcu

SEQ ID NO: 788295 - RNA, 22 nt, Human
caaaauggcuucuagauacuaa

SEQ ID NO: 788296 - RNA, 22 nt, Human
caaaccccuuaauuacuagcaa

SEQ ID NO: 788297 - RNA, 18 nt, Human
caacuaccuaaaaggcug

SEQ ID NO: 788298 - RNA, 18 nt, Human
caagagccacugaggccu

SEQ ID NO: 788299 - RNA, 18 nt, Human
caccccgaggagcaaccc

SEQ ID NO: 788300 - RNA, 18 nt, Human
cagccuaaaaggcaaacc

SEQ ID NO: 788301 - RNA, 24 nt, Human
cauacacccacucucccgucucuu

SEQ ID NO: 788302 - RNA, 20 nt, Human
cccccagggcucgcuugcuc

SEQ ID NO: 788303 - RNA, 24 nt, Human
ccccccagggcucgcuugcucucc

SEQ ID NO: 788304 - RNA, 24 nt, Human
ccccguuaccucucacuucacccg

SEQ ID NO: 788305 - RNA, 20 nt, Human
ccccuccccuaaaccguccc

SEQ ID NO: 788306 - RNA, 22 nt, Human
cccgcgcauacacccacucucc

SEQ ID NO: 788307 - RNA, 23 nt, Human
cccuuaauuacuagcaagcaauc

SEQ ID NO: 788308 - RNA, 20 nt, Human
ccgccgccuccucgcuuacc

SEQ ID NO: 788309 - RNA, 20 nt, Human
ccgcucuagccgccgccucc

SEQ ID NO: 788310 - RNA, 22 nt, Human
ccugaauuuuacaguuuagcau

SEQ ID NO: 788311 - RNA, 23 nt, Human
cgccgcgguaacuacuacagauc

SEQ ID NO: 788312 - RNA, 20 nt, Human
cgcgcauacacccacucucc

SEQ ID NO: 788313 - RNA, 22 nt, Human
gaaugugcuuuuacucuucuua

SEQ ID NO: 788314 - RNA, 22 nt, Human
gcaguaguggcgguggcggcuu

SEQ ID NO: 788315 - RNA, 20 nt, Human
gcccggagccccguuaccuc

SEQ ID NO: 788316 - RNA, 21 nt, Human
gcugagaagcugucucccagg

SEQ ID NO: 788317 - RNA, 24 nt, Human
ggcccgaauucaccauggcuccaa

SEQ ID NO: 788318 - RNA, 20 nt, Human
ggcgguggcggcggcggcgg

SEQ ID NO: 788319 - RNA, 22 nt, Human
gguggcggcggcggcggcuucg

SEQ ID NO: 788320 - RNA, 24 nt, Human
guaguggcgguggcggcggcggcg

SEQ ID NO: 788321 - RNA, 23 nt, Human
guggcggcggcggcggcuucgga

SEQ ID NO: 788322 - RNA, 22 nt, Human
guggcgguggcggcggcggcgg

SEQ ID NO: 788323 - RNA, 28 nt, Human
guggcgguggcggcggcggcggcuucuu

SEQ ID NO: 788324 - RNA, 25 nt, Human
guucaauugagaaagcuuucugauu

SEQ ID NO: 788325 - RNA, 24 nt, Human
uaaaacaacaacauggccagcacc

SEQ ID NO: 788326 - RNA, 21 nt, Human
uacacagacagcucaucuuuu

SEQ ID NO: 788327 - RNA, 19 nt, Human
uaggagacgguaaaggcag

SEQ ID NO: 788328 - RNA, 21 nt, Human
uaggcgguugacaacauuccc

SEQ ID NO: 788329 - RNA, 18 nt, Human
uaguggcgguggcggcgg

SEQ ID NO: 788330 - RNA, 23 nt, Human
uauggaaaaaacuauacuucaua

SEQ ID NO: 788331 - RNA, 21 nt, Human
ucagccgcgagaaggggugac

SEQ ID NO: 788332 - RNA, 18 nt, Human
uccaggaaaaauggaccc

SEQ ID NO: 788333 - RNA, 23 nt, Human
ucgcuugcucucccgccgccgcg

SEQ ID NO: 788334 - RNA, 24 nt, Human
ucuccaccgcucuagccgccgccu

SEQ ID NO: 788335 - RNA, 22 nt, Human
ucucccgucucuuugcccccca

SEQ ID NO: 788336 - RNA, 22 nt, Human
ucuuccacaaaagauuguacug

SEQ ID NO: 788337 - RNA, 19 nt, Human
ugacaagagccacugaggc

SEQ ID NO: 788338 - RNA, 23 nt, Human
ugacagccuaaaaggcaaacccc

SEQ ID NO: 788339 - RNA, 19 nt, Human
ugagaaagcuuucugauuc

SEQ ID NO: 788340 - RNA, 24 nt, Human
ugcauuauuauaucaaccuuuucc

SEQ ID NO: 788341 - RNA, 21 nt, Human
uggcggcggcggcggcuucgg

SEQ ID NO: 788342 - RNA, 18 nt, Human
uggcgguggcggcggcgg

SEQ ID NO: 788343 - RNA, 20 nt, Human
ugguaggcgguugacaacau

SEQ ID NO: 788344 - RNA, 18 nt, Human
uguagaaaacucaacaug

SEQ ID NO: 788345 - RNA, 19 nt, Human
uuaacuguuugccucaauu

SEQ ID NO: 788346 - RNA, 21 nt, Human
uuaacuguuugccucaauuua

SEQ ID NO: 788347 - RNA, 19 nt, Human
uucaacuaccuaaaaggcu

SEQ ID NO: 788348 - RNA, 20 nt, Human
uucagauuuucagcucacug

SEQ ID NO: 788349 - RNA, 19 nt, Human
uucagcacuauucuugguu

SEQ ID NO: 788350 - RNA, 24 nt, Human
uuccugggaagccugauuuuuauu

SEQ ID NO: 788351 - RNA, 19 nt, Human
uuccugguguagaaaacuc

SEQ ID NO: 788352 - RNA, 21 nt, Human
uuccugguguagaaaacuccu

SEQ ID NO: 788353 - RNA, 18 nt, Human
uuccuugcugagaagcug

SEQ ID NO: 788354 - RNA, 19 nt, Human
uugacagccuaaaaggcaa

SEQ ID NO: 788355 - RNA, 23 nt, Human
uuuccccuccccuaaaccguccc

SEQ ID NO: 788356 - RNA, 26 nt, Human
uuuuacaguuuagcauuaauaucacc

SEQ ID NO: 788357 - RNA, 20 nt, Human
aaagaauuagcaguugggac

SEQ ID NO: 788358 - RNA, 20 nt, Human
aaagguccuucugggcuucc

SEQ ID NO: 788359 - RNA, 18 nt, Human
aacccacuugcucuuucu

SEQ ID NO: 788360 - RNA, 20 nt, Human
aagauccaaaaugacaugaa

SEQ ID NO: 788361 - RNA, 18 nt, Human
aaggaccagccccucccu

SEQ ID NO: 788362 - RNA, 24 nt, Human
aaguagcuggauguuguccagaac

SEQ ID NO: 788363 - RNA, 25 nt, Human
acagaagaggggcuggucagacagc

SEQ ID NO: 788364 - RNA, 19 nt, Human
acagcccgagucaguaacc

SEQ ID NO: 788365 - RNA, 21 nt, Human
acaggaaggaacucagucaga

SEQ ID NO: 788366 - RNA, 22 nt, Human
accaggucccccacaggcuucc

SEQ ID NO: 788367 - RNA, 22 nt, Human
acccacccugcacaucuccccu

SEQ ID NO: 788368 - RNA, 21 nt, Human
acccucugcuucaugagccuc

SEQ ID NO: 788369 - RNA, 22 nt, Human
acccugcacaucuccccugcca

SEQ ID NO: 788370 - RNA, 23 nt, Human
acccuggccuagucuuggcucug

SEQ ID NO: 788371 - RNA, 26 nt, Human
accuagcccaccucuggggccccagc

SEQ ID NO: 788372 - RNA, 20 nt, Human
acucacccucugcccuccca

SEQ ID NO: 788373 - RNA, 18 nt, Human
acucuaagccuucucggg

SEQ ID NO: 788374 - RNA, 19 nt, Human
acugcacuacaaagguggg

SEQ ID NO: 788375 - RNA, 22 nt, Human
acuugcucuuucugcucccuau

SEQ ID NO: 788376 - RNA, 25 nt, Human
agagauggacaaggaccucagacaa

SEQ ID NO: 788377 - RNA, 21 nt, Human
agagggcaggggauagagcag

SEQ ID NO: 788378 - RNA, 24 nt, Human
agccagagaccuagggggacucua

SEQ ID NO: 788379 - RNA, 21 nt, Human
agcccaccucuggggccccag

SEQ ID NO: 788380 - RNA, 25 nt, Human
agcccaccucuggggccccagcccc

SEQ ID NO: 788381 - RNA, 19 nt, Human
agcuggguggggcccuugg

SEQ ID NO: 788382 - RNA, 21 nt, Human
aggaagaaggaaggagaagcc

SEQ ID NO: 788383 - RNA, 19 nt, Human
aggaaggagaagccuucac

SEQ ID NO: 788384 - RNA, 22 nt, Human
aggacacuuguuugcaucugcu

SEQ ID NO: 788385 - RNA, 18 nt, Human
aggagaggagcggcugcu

SEQ ID NO: 788386 - RNA, 20 nt, Human
aggcacagaagaggggcugg

SEQ ID NO: 788387 - RNA, 21 nt, Human
aggcagcagguugcuugagca

SEQ ID NO: 788388 - RNA, 18 nt, Human
aggcagcugugaggagcu

SEQ ID NO: 788389 - RNA, 23 nt, Human
agggagggguggggcuggaagag

SEQ ID NO: 788390 - RNA, 18 nt, Human
agggaggguacugggggg

SEQ ID NO: 788391 - RNA, 22 nt, Human
agggguggggcuggaagagggc

SEQ ID NO: 788392 - RNA, 18 nt, Human
aggguuuggagaguaaug

SEQ ID NO: 788393 - RNA, 19 nt, Human
aggucucagaacaccgagc

SEQ ID NO: 788394 - RNA, 20 nt, Human
agugauccguucacuuugug

SEQ ID NO: 788395 - RNA, 25 nt, Human
auccaaauccucacauuuuuauaua

SEQ ID NO: 788396 - RNA, 24 nt, Human
auguagggaggguacugggggggu

SEQ ID NO: 788397 - RNA, 22 nt, Human
caaacugcuuucagaaagcaaa

SEQ ID NO: 788398 - RNA, 18 nt, Human
caaagaaauguaagaguc

SEQ ID NO: 788399 - RNA, 19 nt, Human
caagaccagggaggggugg

SEQ ID NO: 788400 - RNA, 24 nt, Human
caagacccacccugcacaucuccc

SEQ ID NO: 788401 - RNA, 22 nt, Human
caaggcacagaagaggggcugg

SEQ ID NO: 788402 - RNA, 23 nt, Human
caauccagagagagaagcugccc

SEQ ID NO: 788403 - RNA, 18 nt, Human
cacagaagaggggcuggu

SEQ ID NO: 788404 - RNA, 19 nt, Human
cacagagauggacaaggac

SEQ ID NO: 788405 - RNA, 22 nt, Human
cacaggacagucuggccucuaa

SEQ ID NO: 788406 - RNA, 18 nt, Human
cacccucugcccucccag

SEQ ID NO: 788407 - RNA, 22 nt, Human
cacccucugcccucccaguccc

SEQ ID NO: 788408 - RNA, 22 nt, Human
cacccugcacaucuccccugcc

SEQ ID NO: 788409 - RNA, 21 nt, Human
caccuagcccaccucuggggc

SEQ ID NO: 788410 - RNA, 21 nt, Human
cacuauauauuaacaucaaaa

SEQ ID NO: 788411 - RNA, 21 nt, Human
cagaaagcaaaaugaaaggaa

SEQ ID NO: 788412 - RNA, 23 nt, Human
cagaacaucuuggcuguaccaga

SEQ ID NO: 788413 - RNA, 18 nt, Human
cagcaccgaggggaagga

SEQ ID NO: 788414 - RNA, 20 nt, Human
cagccccaagacccacccug

SEQ ID NO: 788415 - RNA, 18 nt, Human
cagggagggguggggcug

SEQ ID NO: 788416 - RNA, 20 nt, Human
caggucccccacaggcuucc

SEQ ID NO: 788417 - RNA, 20 nt, Human
caugggcagccagagaccua

SEQ ID NO: 788418 - RNA, 23 nt, Human
ccaauccagagagagaagcugcc

SEQ ID NO: 788419 - RNA, 18 nt, Human
ccaccaggucccccacag

SEQ ID NO: 788420 - RNA, 19 nt, Human
cccacugauuagucuucuu

SEQ ID NO: 788421 - RNA, 24 nt, Human
ccccaaggauggcacugucccuuu

SEQ ID NO: 788422 - RNA, 22 nt, Human
ccccacacggcaacugaugccu

SEQ ID NO: 788423 - RNA, 23 nt, Human
ccccacccuggccuagucuuggc

SEQ ID NO: 788424 - RNA, 19 nt, Human
ccccagccccaccaugagc

SEQ ID NO: 788425 - RNA, 22 nt, Human
ccccagccccaccaugagccuc

SEQ ID NO: 788426 - RNA, 19 nt, Human
cccccuucccccugggccc

SEQ ID NO: 788427 - RNA, 27 nt, Human
ccccuggcuagagcagacggagagggc

SEQ ID NO: 788428 - RNA, 19 nt, Human
ccccugggcccacuggucu

SEQ ID NO: 788429 - RNA, 22 nt, Human
ccccugggcccacuggucucca

SEQ ID NO: 788430 - RNA, 22 nt, Human
ccccugggcccacuggucucca

SEQ ID NO: 788431 - RNA, 24 nt, Human
ccccugggcccacuggucuccagg

SEQ ID NO: 788432 - RNA, 21 nt, Human
cccgcacugcccgcuggugcc

SEQ ID NO: 788433 - RNA, 25 nt, Human
cccucugcccucccaguccccaggc

SEQ ID NO: 788434 - RNA, 22 nt, Human
cccucugcuucaugagccucau

SEQ ID NO: 788435 - RNA, 20 nt, Human
ccgcacugcccgcuggugcc

SEQ ID NO: 788436 - RNA, 24 nt, Human
ccguagccacccagcgauguuggu

SEQ ID NO: 788437 - RNA, 22 nt, Human
ccuaggccugguccugcuuccu

SEQ ID NO: 788438 - RNA, 25 nt, Human
ccucaugggcagccagagaccuagg

SEQ ID NO: 788439 - RNA, 19 nt, Human
ccucccagccucagguggg

SEQ ID NO: 788440 - RNA, 20 nt, Human
ccucccagccucaggugggc

SEQ ID NO: 788441 - RNA, 18 nt, Human
ccucuggggccccagccc

SEQ ID NO: 788442 - RNA, 19 nt, Human
ccucuggggccccagcccc

SEQ ID NO: 788443 - RNA, 18 nt, Human
ccuggguuccaugucuuu

SEQ ID NO: 788444 - RNA, 21 nt, Human
ccuguggccacaggaaggaac

SEQ ID NO: 788445 - RNA, 22 nt, Human
cucacucccgaggucucagaac

SEQ ID NO: 788446 - RNA, 19 nt, Human
cucccagccucaggugggc

SEQ ID NO: 788447 - RNA, 22 nt, Human
cugaugccuuacaccuagccca

SEQ ID NO: 788448 - RNA, 20 nt, Human
cugcccucccaguccccagg

SEQ ID NO: 788449 - RNA, 22 nt, Human
cuggggccccagccccaccaug

SEQ ID NO: 788450 - RNA, 24 nt, Human
cuggggcugugccccaagccccug

SEQ ID NO: 788451 - RNA, 23 nt, Human
cuggguugagcugacuggggcug

SEQ ID NO: 788452 - RNA, 19 nt, Human
cugugccccaagccccuga

SEQ ID NO: 788453 - RNA, 24 nt, Human
cugugccccaagccccugacgcuu

SEQ ID NO: 788454 - RNA, 24 nt, Human
cuugacuuccagccuggcuccagu

SEQ ID NO: 788455 - RNA, 22 nt, Human
gaagaggggcuggucagacagc

SEQ ID NO: 788456 - RNA, 22 nt, Human
gaccagccccucccuguggcca

SEQ ID NO: 788457 - RNA, 20 nt, Human
gaggcauugugacagagagc

SEQ ID NO: 788458 - RNA, 19 nt, Human
gcaacccacuuccagguuc

SEQ ID NO: 788459 - RNA, 19 nt, Human
gcagggagaagccacuuga

SEQ ID NO: 788460 - RNA, 20 nt, Human
gccccaagacccacccugca

SEQ ID NO: 788461 - RNA, 18 nt, Human
gccccaccaugagccucc

SEQ ID NO: 788462 - RNA, 23 nt, Human
gccccagccccaccaugagccuc

SEQ ID NO: 788463 - RNA, 19 nt, Human
gcccuuggugcaaggcagc

SEQ ID NO: 788464 - RNA, 20 nt, Human
gcccuuggugcaaggcagcu

SEQ ID NO: 788465 - RNA, 21 nt, Human
gcuagagcagacggagagggc

SEQ ID NO: 788466 - RNA, 24 nt, Human
ggaaauaaggggggugcugauggc

SEQ ID NO: 788467 - RNA, 20 nt, Human
ggaagggagggaggagagga

SEQ ID NO: 788468 - RNA, 22 nt, Human
ggaagggagggaggagaggagc

SEQ ID NO: 788469 - RNA, 19 nt, Human
ggacgguuguaggccuggg

SEQ ID NO: 788470 - RNA, 19 nt, Human
ggcagccagagaccuaggg

SEQ ID NO: 788471 - RNA, 19 nt, Human
ggcccuuggugugcccacu

SEQ ID NO: 788472 - RNA, 22 nt, Human
gggaaggugggcuucucugagc

SEQ ID NO: 788473 - RNA, 20 nt, Human
gggggguccccacccuggcc

SEQ ID NO: 788474 - RNA, 19 nt, Human
ggguggggcuggaagaggg

SEQ ID NO: 788475 - RNA, 21 nt, Human
guccugcuuccucccagccuc

SEQ ID NO: 788476 - RNA, 19 nt, Human
uaaccaagcggacagacua

SEQ ID NO: 788477 - RNA, 21 nt, Human
uaacccacuugcucuuucugc

SEQ ID NO: 788478 - RNA, 18 nt, Human
uaacugcucugccaaaga

SEQ ID NO: 788479 - RNA, 21 nt, Human
uaaggagggccguagccaccc

SEQ ID NO: 788480 - RNA, 19 nt, Human
uagcaguugggacgguugu

SEQ ID NO: 788481 - RNA, 26 nt, Human
uauaacaaacugcuuucagaaagcaa

SEQ ID NO: 788482 - RNA, 21 nt, Human
ucaaugucuuuacuucuaaag

SEQ ID NO: 788483 - RNA, 23 nt, Human
uccaggcagacccagccccaaga

SEQ ID NO: 788484 - RNA, 18 nt, Human
uccaggccagcagccaca

SEQ ID NO: 788485 - RNA, 23 nt, Human
uccccaggccuacgucuuaaagc

SEQ ID NO: 788486 - RNA, 18 nt, Human
uccccagugauccguuca

SEQ ID NO: 788487 - RNA, 20 nt, Human
ucccccuucccccugggccc

SEQ ID NO: 788488 - RNA, 20 nt, Human
ucuaaagcauacauuggacu

SEQ ID NO: 788489 - RNA, 20 nt, Human
ucuccaggcagacccagccc

SEQ ID NO: 788490 - RNA, 18 nt, Human
ucucccccacacggcaac

SEQ ID NO: 788491 - RNA, 21 nt, Human
ucucugagcgccuguaggucc

SEQ ID NO: 788492 - RNA, 23 nt, Human
ucucugagcgccuguagguccgc

SEQ ID NO: 788493 - RNA, 22 nt, Human
ucugccuacaggacaugggggc

SEQ ID NO: 788494 - RNA, 19 nt, Human
ucuuggcuguaccagaccc

SEQ ID NO: 788495 - RNA, 23 nt, Human
ucuuucugcucccuaugacuggg

SEQ ID NO: 788496 - RNA, 22 nt, Human
ugacagagaagcaugguggcau

SEQ ID NO: 788497 - RNA, 18 nt, Human
ugacuuccagccuggcuc

SEQ ID NO: 788498 - RNA, 19 nt, Human
ugaggcauugugacagaga

SEQ ID NO: 788499 - RNA, 20 nt, Human
ugcacaucuccccugccaga

SEQ ID NO: 788500 - RNA, 19 nt, Human
ugccccaagccccugacgc

SEQ ID NO: 788501 - RNA, 22 nt, Human
ugccccaagccccugacgcuuu

SEQ ID NO: 788502 - RNA, 18 nt, Human
ugccuacaggacaugggg

SEQ ID NO: 788503 - RNA, 19 nt, Human
uggcuguaccagaccccug

SEQ ID NO: 788504 - RNA, 25 nt, Human
uggggcccuuggugcaaggcagcug

SEQ ID NO: 788505 - RNA, 23 nt, Human
uggggcuggaagagggcagggga

SEQ ID NO: 788506 - RNA, 20 nt, Human
uggguugagcugacuggggc

SEQ ID NO: 788507 - RNA, 18 nt, Human
uguagggaggguacuggg

SEQ ID NO: 788508 - RNA, 22 nt, Human
uuguccagaacaucuuggcugu

SEQ ID NO: 788509 - RNA, 21 nt, Human
uuguuugcaucugcuggggag

SEQ ID NO: 788510 - RNA, 20 nt, Human
uuuguaaguuuucuccugag

SEQ ID NO: 788511 - RNA, 22 nt, Human
uuuguaaguuuucuccugagcc

SEQ ID NO: 788512 - RNA, 18 nt, Human
uuuuccuccuguccccaa

SEQ ID NO: 788513 - RNA, 22 nt, Human
uuuuccuccuguccccaaggau

SEQ ID NO: 788514 - RNA, 21 nt, Human
aaaaaugguaaagcaauacaa

SEQ ID NO: 788515 - RNA, 18 nt, Human
aaaagaaaaaggucucaa

SEQ ID NO: 788516 - RNA, 21 nt, Human
aaagcuuuuccaacuauguac

SEQ ID NO: 788517 - RNA, 22 nt, Human
aacagugcuuuuuuuuuuuuuu

SEQ ID NO: 788518 - RNA, 19 nt, Human
aacucaacuaucuucccuc

SEQ ID NO: 788519 - RNA, 18 nt, Human
aagcaauacaaacaaugu

SEQ ID NO: 788520 - RNA, 22 nt, Human
aagcacacagaaaaaccacaug

SEQ ID NO: 788521 - RNA, 18 nt, Human
aauugcuuuacaucucua

SEQ ID NO: 788522 - RNA, 23 nt, Human
acacagaaaaaccacauguuugu

SEQ ID NO: 788523 - RNA, 18 nt, Human
acauuuauuaaaaaagca

SEQ ID NO: 788524 - RNA, 25 nt, Human
accuuuaacauuaaaguauaugucu

SEQ ID NO: 788525 - RNA, 18 nt, Human
acuacuguacauccaaaa

SEQ ID NO: 788526 - RNA, 23 nt, Human
auagagcaccuuuaacauuaaag

SEQ ID NO: 788527 - RNA, 21 nt, Human
auggaacagcaaaaacaucua

SEQ ID NO: 788528 - RNA, 21 nt, Human
cagaauggaacagcaaaaaca

SEQ ID NO: 788529 - RNA, 23 nt, Human
cagagcaacuauacaaaagugaa

SEQ ID NO: 788530 - RNA, 21 nt, Human
cagcagagcaacuauacaaaa

SEQ ID NO: 788531 - RNA, 22 nt, Human
caggcaccauuuguuccugcaa

SEQ ID NO: 788532 - RNA, 23 nt, Human
ccacaaagcuuuuccaacuaugu

SEQ ID NO: 788533 - RNA, 20 nt, Human
ccccccacaaagcuuuucca

SEQ ID NO: 788534 - RNA, 19 nt, Human
ccugcagcuaccuccaucc

SEQ ID NO: 788535 - RNA, 22 nt, Human
cuauguacuaugccuccuuucu

SEQ ID NO: 788536 - RNA, 22 nt, Human
cucaucguagugcaggccaaac

SEQ ID NO: 788537 - RNA, 19 nt, Human
gaggcucccuauccugcug

SEQ ID NO: 788538 - RNA, 18 nt, Human
gcagagcaacuauacaaa

SEQ ID NO: 788539 - RNA, 24 nt, Human
gccgugguuaccgagaaagagucg

SEQ ID NO: 788540 - RNA, 21 nt, Human
uacaaaagugaacuaagaguu

SEQ ID NO: 788541 - RNA, 19 nt, Human
uacauucaucuucacacca

SEQ ID NO: 788542 - RNA, 23 nt, Human
uaccgagaaagagucgaggcucc

SEQ ID NO: 788543 - RNA, 21 nt, Human
uagaaucucucacccugcuuc

SEQ ID NO: 788544 - RNA, 21 nt, Human
uagagcaccuuuaacauuaaa

SEQ ID NO: 788545 - RNA, 20 nt, Human
uagcagagucuaaaagaaaa

SEQ ID NO: 788546 - RNA, 26 nt, Human
uauacaaaagugaacuaagaguugaa

SEQ ID NO: 788547 - RNA, 23 nt, Human
uauacaggaaauaaaacucaacu

SEQ ID NO: 788548 - RNA, 25 nt, Human
uaucuucccucuugagguaagccca

SEQ ID NO: 788549 - RNA, 23 nt, Human
uccaaaaaaauagagcaccuuua

SEQ ID NO: 788550 - RNA, 20 nt, Human
ucugauuauuuguucucaug

SEQ ID NO: 788551 - RNA, 23 nt, Human
ugaaagcacacagaaaaaccaca

SEQ ID NO: 788552 - RNA, 28 nt, Human
ugaaagcacacagaaaaacuggagaccc

SEQ ID NO: 788553 - RNA, 24 nt, Human
ugagguaagcccaagccagagcac

SEQ ID NO: 788554 - RNA, 25 nt, Human
ugcaaauaaauaagucucuaaggua

SEQ ID NO: 788555 - RNA, 20 nt, Human
ugcagcuaccuccaucccuc

SEQ ID NO: 788556 - RNA, 23 nt, Human
ugcaggccaaaccaaauuuuaua

SEQ ID NO: 788557 - RNA, 18 nt, Human
ugcuuuacaucucuacca

SEQ ID NO: 788558 - RNA, 26 nt, Human
uggaaauaaaacuacuguacauccaa

SEQ ID NO: 788559 - RNA, 23 nt, Human
uggaacagcaaaaacaucuacga

SEQ ID NO: 788560 - RNA, 19 nt, Human
uguacaagugguuccgcug

SEQ ID NO: 788561 - RNA, 22 nt, Human
uguggacuucuuuuaaacauuu

SEQ ID NO: 788562 - RNA, 23 nt, Human
uuaauauucaggcaccauuuguu

SEQ ID NO: 788563 - RNA, 19 nt, Human
uuaauccccccacaaagcu

SEQ ID NO: 788564 - RNA, 18 nt, Human
uuacauucaucuucacac

SEQ ID NO: 788565 - RNA, 23 nt, Human
uuccugcaaauaaauaagucucu

SEQ ID NO: 788566 - RNA, 19 nt, Human
uucugagccugcagcuacc

SEQ ID NO: 788567 - RNA, 22 nt, Human
uuuuccaacuauguacuaugcc

SEQ ID NO: 788568 - RNA, 24 nt, Human
aaaaaaaggcaauuucuuccagaa

SEQ ID NO: 788569 - RNA, 24 nt, Human
aaacaaaccgacaaauacaaccgg

SEQ ID NO: 788570 - RNA, 21 nt, Human
aaaccacaugacaggaccaau

SEQ ID NO: 788571 - RNA, 21 nt, Human
aaagcagagaaagaaaggucc

SEQ ID NO: 788572 - RNA, 20 nt, Human
aaauacaaccaacaaaacug

SEQ ID NO: 788573 - RNA, 23 nt, Human
aacuacaaaaaucagaaaaggga

SEQ ID NO: 788574 - RNA, 20 nt, Human
aagaaagcagagaaagaaag

SEQ ID NO: 788575 - RNA, 19 nt, Human
aagcaaaacccaaagcaaa

SEQ ID NO: 788576 - RNA, 26 nt, Human
aagcacuucaacaugaaugaaaaaac

SEQ ID NO: 788577 - RNA, 20 nt, Human
aagcagagaaagaaaggucc

SEQ ID NO: 788578 - RNA, 24 nt, Human
aauaagaaaaagccucccaaacac

SEQ ID NO: 788579 - RNA, 23 nt, Human
aauggcauuuuauuuaacagaca

SEQ ID NO: 788580 - RNA, 25 nt, Human
acaaaccgacaaauacaaccaacaa

SEQ ID NO: 788581 - RNA, 21 nt, Human
acaaauacaaccaacaaaacu

SEQ ID NO: 788582 - RNA, 22 nt, Human
acaucugugacucagauggcca

SEQ ID NO: 788583 - RNA, 20 nt, Human
acccuuccccucucuccuca

SEQ ID NO: 788584 - RNA, 18 nt, Human
acucuguuuuucuccacu

SEQ ID NO: 788585 - RNA, 23 nt, Human
acugcugcaaccuuuaagucaag

SEQ ID NO: 788586 - RNA, 23 nt, Human
agaagaugcuuucucuagcccuc

SEQ ID NO: 788587 - RNA, 26 nt, Human
agacaaauaauuuggaauaagcuagc

SEQ ID NO: 788588 - RNA, 19 nt, Human
agagaaagguccaucugau

SEQ ID NO: 788589 - RNA, 18 nt, Human
agcagcaguuucugcaag

SEQ ID NO: 788590 - RNA, 18 nt, Human
auaguaggaaugguuauu

SEQ ID NO: 788591 - RNA, 25 nt, Human
auauauuauacaaacucaaagcauu

SEQ ID NO: 788592 - RNA, 21 nt, Human
augaaaaaacaaaccgacaaa

SEQ ID NO: 788593 - RNA, 21 nt, Human
augaaugaaaaaacaaaccga

SEQ ID NO: 788594 - RNA, 24 nt, Human
augccaugguuugaucacauuuua

SEQ ID NO: 788595 - RNA, 19 nt, Human
caaaacccaaagcaaaugg

SEQ ID NO: 788596 - RNA, 23 nt, Human
caaaccgacaaauacaaccaaca

SEQ ID NO: 788597 - RNA, 27 nt, Human
caacaugaaugaaaaaacaaaccgaca

SEQ ID NO: 788598 - RNA, 28 nt, Human
caaccuuuagaacaaaaaagaaagaaca

SEQ ID NO: 788599 - RNA, 20 nt, Human
caagaaagcagagaaagaaa

SEQ ID NO: 788600 - RNA, 24 nt, Human
caauauaauacuuuacagcaauau

SEQ ID NO: 788601 - RNA, 23 nt, Human
caauauuaacaaacuauucacau

SEQ ID NO: 788602 - RNA, 23 nt, Human
caaugggcugguucuuggaauga

SEQ ID NO: 788603 - RNA, 25 nt, Human
cacaaaaauggccacuggcuuagau

SEQ ID NO: 788604 - RNA, 24 nt, Human
cacuucaacaugaaugaaaaaaca

SEQ ID NO: 788605 - RNA, 18 nt, Human
caggacaucaaucucaca

SEQ ID NO: 788606 - RNA, 18 nt, Human
cagggccauguccccaag

SEQ ID NO: 788607 - RNA, 27 nt, Human
ccaaaaaagaugcauauggacacuuag

SEQ ID NO: 788608 - RNA, 23 nt, Human
ccaaacuacaaaaaucagaaaag

SEQ ID NO: 788609 - RNA, 23 nt, Human
ccaaagcaaauggcugucugaga

SEQ ID NO: 788610 - RNA, 19 nt, Human
ccaagagguagguagcacc

SEQ ID NO: 788611 - RNA, 20 nt, Human
cccaagagguagguagcacc

SEQ ID NO: 788612 - RNA, 22 nt, Human
cccaauguccuuggcgaagauu

SEQ ID NO: 788613 - RNA, 20 nt, Human
ccccucucuccucaggcccc

SEQ ID NO: 788614 - RNA, 24 nt, Human
cccucuguuaguaucucuaaaacc

SEQ ID NO: 788615 - RNA, 20 nt, Human
ccuauaacugaaaaugcaac

SEQ ID NO: 788616 - RNA, 22 nt, Human
ccugaagccuugcaaagcacuu

SEQ ID NO: 788617 - RNA, 21 nt, Human
ccuuuucuuucucuagauuga

SEQ ID NO: 788618 - RNA, 23 nt, Human
cgcaaacagggccauguccccaa

SEQ ID NO: 788619 - RNA, 21 nt, Human
cgucuggaagcaaaacccaaa

SEQ ID NO: 788620 - RNA, 26 nt, Human
cuaaaaccacaugacaggaccaaucc

SEQ ID NO: 788621 - RNA, 21 nt, Human
cuaaaagaucauuguaauggu

SEQ ID NO: 788622 - RNA, 21 nt, Human
cuacaaaaaucagaaaaggga

SEQ ID NO: 788623 - RNA, 23 nt, Human
cuccaagccguuaagagcuucau

SEQ ID NO: 788624 - RNA, 24 nt, Human
cuccuuauaaccggccaaccucaa

SEQ ID NO: 788625 - RNA, 21 nt, Human
cuuagauuuagggaaagauuu

SEQ ID NO: 788626 - RNA, 23 nt, Human
cuuagauuuagggaaagauuuua

SEQ ID NO: 788627 - RNA, 19 nt, Human
gaaaaaaaaaaaaaaggca

SEQ ID NO: 788628 - RNA, 22 nt, Human
gaaagcagagaaagaaaggucc

SEQ ID NO: 788629 - RNA, 26 nt, Human
gaagaugcacauccauuuuuagugcc

SEQ ID NO: 788630 - RNA, 21 nt, Human
gcaaaacccaaagcaaauggc

SEQ ID NO: 788631 - RNA, 20 nt, Human
gcagagaaagaaagguccau

SEQ ID NO: 788632 - RNA, 19 nt, Human
ggaaaggggagucccugcu

SEQ ID NO: 788633 - RNA, 19 nt, Human
ggucuuuuccuccauauug

SEQ ID NO: 788634 - RNA, 21 nt, Human
guccuuuucuuucucuagauu

SEQ ID NO: 788635 - RNA, 23 nt, Human
guccuuuucuuucucuagauuga

SEQ ID NO: 788636 - RNA, 18 nt, Human
gugaaagaagaugcacau

SEQ ID NO: 788637 - RNA, 21 nt, Human
uaaaaccacaugacaggacca

SEQ ID NO: 788638 - RNA, 22 nt, Human
uaaaaccacaugacaggaccaa

SEQ ID NO: 788639 - RNA, 20 nt, Human
uaacaaacuauucacauuaa

SEQ ID NO: 788640 - RNA, 23 nt, Human
uaacccaguuccuguucuugugg

SEQ ID NO: 788641 - RNA, 25 nt, Human
uaacugaaaaugcaaccuuuagaac

SEQ ID NO: 788642 - RNA, 18 nt, Human
uaagaaaaagccucccaa

SEQ ID NO: 788643 - RNA, 22 nt, Human
uaagaaaaagccucccaaacac

SEQ ID NO: 788644 - RNA, 21 nt, Human
uaagagcuucauucacaucuu

SEQ ID NO: 788645 - RNA, 20 nt, Human
uacaaccaacaaaacugaua

SEQ ID NO: 788646 - RNA, 19 nt, Human
uacacauuuauuacauaac

SEQ ID NO: 788647 - RNA, 26 nt, Human
uaccaaaaaagaugcauauggacagu

SEQ ID NO: 788648 - RNA, 25 nt, Human
uaccaaaaaagaugcauauggacua

SEQ ID NO: 788649 - RNA, 21 nt, Human
uaccuuugaaaggguacugaa

SEQ ID NO: 788650 - RNA, 18 nt, Human
uagagaaaauauuuuuuc

SEQ ID NO: 788651 - RNA, 24 nt, Human
uagauugauguaucucugaaggag

SEQ ID NO: 788652 - RNA, 20 nt, Human
uagcauaaaguauuugucaa

SEQ ID NO: 788653 - RNA, 24 nt, Human
uaggcacaauucccaauguccuug

SEQ ID NO: 788654 - RNA, 19 nt, Human
uagugccaucccugcauac

SEQ ID NO: 788655 - RNA, 22 nt, Human
uagugccaucccugcauacuag

SEQ ID NO: 788656 - RNA, 19 nt, Human
uauaaagugaaaucgacuu

SEQ ID NO: 788657 - RNA, 26 nt, Human
uauaagccaugaaacauuuggggcaa

SEQ ID NO: 788658 - RNA, 20 nt, Human
uauuucguuguccuaaguau

SEQ ID NO: 788659 - RNA, 20 nt, Human
ucacaucuugcaguucugac

SEQ ID NO: 788660 - RNA, 24 nt, Human
uccuaggcagagauaccuuugaaa

SEQ ID NO: 788661 - RNA, 20 nt, Human
uccucacaacucuguuuccu

SEQ ID NO: 788662 - RNA, 22 nt, Human
ucucucaauugccaaacuacaa

SEQ ID NO: 788663 - RNA, 21 nt, Human
ucucugaaggagagagagcca

SEQ ID NO: 788664 - RNA, 20 nt, Human
ucuucauuacuggacacacu

SEQ ID NO: 788665 - RNA, 22 nt, Human
ucuugcaguucugacugacagu

SEQ ID NO: 788666 - RNA, 18 nt, Human
ugaaaaaaaaaaaaaagg

SEQ ID NO: 788667 - RNA, 19 nt, Human
ugaaaaaaaaaaaaaaggc

SEQ ID NO: 788668 - RNA, 24 nt, Human
ugaaaaaacaaaccgacaaauaca

SEQ ID NO: 788669 - RNA, 21 nt, Human
ugaaagaagaugcacauccau

SEQ ID NO: 788670 - RNA, 18 nt, Human
ugaaugaaaaaacaaacc

SEQ ID NO: 788671 - RNA, 22 nt, Human
ugauaaucuauuccuaggugac

SEQ ID NO: 788672 - RNA, 21 nt, Human
ugcccuaagggaaaggggagu

SEQ ID NO: 788673 - RNA, 19 nt, Human
ugcugacuuuauauauuau

SEQ ID NO: 788674 - RNA, 23 nt, Human
uggaauaagcuagcuugugagag

SEQ ID NO: 788675 - RNA, 18 nt, Human
uggacacuuagaagucuu

SEQ ID NO: 788676 - RNA, 19 nt, Human
ugggguauaagccaugaaa

SEQ ID NO: 788677 - RNA, 21 nt, Human
ugguuucucuguacccuuccc

SEQ ID NO: 788678 - RNA, 23 nt, Human
uguuauaguuuuagaguaggcac

SEQ ID NO: 788679 - RNA, 26 nt, Human
uguuguggucuuuuccuccauauuga

SEQ ID NO: 788680 - RNA, 26 nt, Human
uuaaaaguuagcagcaguuucugcaa

SEQ ID NO: 788681 - RNA, 22 nt, Human
uuagaacaaaaaagaaagaaca

SEQ ID NO: 788682 - RNA, 18 nt, Human
uuauuaaaaacauuccau

SEQ ID NO: 788683 - RNA, 23 nt, Human
uucaacaugaaugaaaaaacaaa

SEQ ID NO: 788684 - RNA, 22 nt, Human
uuccauggaauguagaugguuu

SEQ ID NO: 788685 - RNA, 23 nt, Human
uuccccuauaacugaaaaugcaa

SEQ ID NO: 788686 - RNA, 24 nt, Human
uugucuauuauuauuaacccaguu

SEQ ID NO: 788687 - RNA, 21 nt, Human
uuuagaacaaaaaagaaagaa

SEQ ID NO: 788688 - RNA, 21 nt, Human
uuucagcaaagugaugccaug

SEQ ID NO: 788689 - RNA, 21 nt, Human
uuuguccuuuuguucuggaga

SEQ ID NO: 788690 - RNA, 22 nt, Human
uuuguccuuuuguucuggagaa

SEQ ID NO: 788691 - RNA, 18 nt, Human
aaaaaacagcugcagaug

SEQ ID NO: 788692 - RNA, 18 nt, Human
aaaauucaaaauauagcc

SEQ ID NO: 788693 - RNA, 21 nt, Human
aaacaacaagaucucauaacu

SEQ ID NO: 788694 - RNA, 19 nt, Human
aaacuguacagucaccaga

SEQ ID NO: 788695 - RNA, 24 nt, Human
aaagaaccauccagaaucauuucc

SEQ ID NO: 788696 - RNA, 22 nt, Human
aaaugauugacuuagagacuua

SEQ ID NO: 788697 - RNA, 18 nt, Human
aaauggccuccauaagau

SEQ ID NO: 788698 - RNA, 19 nt, Human
aacaacuuuucacaagcca

SEQ ID NO: 788699 - RNA, 18 nt, Human
aaccucgcagaucuucuc

SEQ ID NO: 788700 - RNA, 22 nt, Human
aacucugcuauuguucaagaaa

SEQ ID NO: 788701 - RNA, 23 nt, Human
aagcaacuguucuugccaaaggc

SEQ ID NO: 788702 - RNA, 19 nt, Human
aagggcucacaccuguaac

SEQ ID NO: 788703 - RNA, 25 nt, Human
aauguccuuaacucuuuaagcaacu

SEQ ID NO: 788704 - RNA, 20 nt, Human
aauuuguuuuuccauaccac

SEQ ID NO: 788705 - RNA, 21 nt, Human
acacuccagccugggcaacag

SEQ ID NO: 788706 - RNA, 24 nt, Human
acagagcaagacccugucucuaag

SEQ ID NO: 788707 - RNA, 23 nt, Human
accccuucccccaaaaacaacaa

SEQ ID NO: 788708 - RNA, 18 nt, Human
accuucucucccuucuuu

SEQ ID NO: 788709 - RNA, 19 nt, Human
acgcagcagcgcgcgggcu

SEQ ID NO: 788710 - RNA, 24 nt, Human
acugugucucuacacuccagccug

SEQ ID NO: 788711 - RNA, 22 nt, Human
agaaagcagcugcaguccucac

SEQ ID NO: 788712 - RNA, 18 nt, Human
agaaucauuuccuuuuua

SEQ ID NO: 788713 - RNA, 23 nt, Human
agcuggauccgcgagccgacccc

SEQ ID NO: 788714 - RNA, 20 nt, Human
aggcaaaauaggagaaggca

SEQ ID NO: 788715 - RNA, 20 nt, Human
agggagauggagaaaacauu

SEQ ID NO: 788716 - RNA, 19 nt, Human
agggauguccaagcuacug

SEQ ID NO: 788717 - RNA, 19 nt, Human
auaaaacccaaugaagucc

SEQ ID NO: 788718 - RNA, 21 nt, Human
auaaaacccaaugaaguccuc

SEQ ID NO: 788719 - RNA, 22 nt, Human
auaccccuucccccaaaaacaa

SEQ ID NO: 788720 - RNA, 22 nt, Human
auccaaauggccuccauaagau

SEQ ID NO: 788721 - RNA, 18 nt, Human
auccaagcaccauuccaa

SEQ ID NO: 788722 - RNA, 20 nt, Human
auggcggcggcggcggcggc

SEQ ID NO: 788723 - RNA, 21 nt, Human
auuuugugaagaaauucugcu

SEQ ID NO: 788724 - RNA, 18 nt, Human
caaaaaacagcugcagau

SEQ ID NO: 788725 - RNA, 20 nt, Human
caaacuguauccagcuuuau

SEQ ID NO: 788726 - RNA, 24 nt, Human
caacaagaucucauaacucauuau

SEQ ID NO: 788727 - RNA, 22 nt, Human
caacagagcaagacccugucuc

SEQ ID NO: 788728 - RNA, 22 nt, Human
caagaaagcagcugcaguccuc

SEQ ID NO: 788729 - RNA, 19 nt, Human
caagaggaagucucucaaa

SEQ ID NO: 788730 - RNA, 19 nt, Human
caauaguaaaaaccaaacc

SEQ ID NO: 788731 - RNA, 24 nt, Human
cacacauugggaagccgagauggg

SEQ ID NO: 788732 - RNA, 20 nt, Human
cacauauaagggcucacacc

SEQ ID NO: 788733 - RNA, 23 nt, Human
caccagaaguacaguuauaaaaa

SEQ ID NO: 788734 - RNA, 27 nt, Human
cacucaaaaugcugucguuacaaccac

SEQ ID NO: 788735 - RNA, 23 nt, Human
cacuccagccugggcaacagagc

SEQ ID NO: 788736 - RNA, 25 nt, Human
cagaauggucccugcgcaaggauga

SEQ ID NO: 788737 - RNA, 27 nt, Human
cagauugccagacacacugguaaccaa

SEQ ID NO: 788738 - RNA, 27 nt, Human
cagcagcgcgcgggcuuuggucggucc

SEQ ID NO: 788739 - RNA, 24 nt, Human
cauaagauccaagcaccauuccaa

SEQ ID NO: 788740 - RNA, 19 nt, Human
cauaccccuucccccaaaa

SEQ ID NO: 788741 - RNA, 22 nt, Human
ccaaaaaucagccgcuauaaaa

SEQ ID NO: 788742 - RNA, 19 nt, Human
ccaaauggccuccauaaga

SEQ ID NO: 788743 - RNA, 21 nt, Human
ccaagguggccauguguguca

SEQ ID NO: 788744 - RNA, 20 nt, Human
ccauaaucuagaaauggaac

SEQ ID NO: 788745 - RNA, 19 nt, Human
ccauaccacaaggcuuuug

SEQ ID NO: 788746 - RNA, 26 nt, Human
cccuccuccugggagccaagaggaag

SEQ ID NO: 788747 - RNA, 20 nt, Human
ccuucccccaaaaacaacaa

SEQ ID NO: 788748 - RNA, 19 nt, Human
ccuuuagcauccccuucag

SEQ ID NO: 788749 - RNA, 21 nt, Human
cgaccccucaccucccgcucc

SEQ ID NO: 788750 - RNA, 18 nt, Human
cgagaugggaagaucuca

SEQ ID NO: 788751 - RNA, 20 nt, Human
cgagugccacauacuuugaa

SEQ ID NO: 788752 - RNA, 23 nt, Human
cgcgagccgaccccucaccuccc

SEQ ID NO: 788753 - RNA, 18 nt, Human
cgggaugugggcaccggg

SEQ ID NO: 788754 - RNA, 22 nt, Human
cuacacuccagccugggcaaca

SEQ ID NO: 788755 - RNA, 23 nt, Human
cuacacuccagccugggcaacag

SEQ ID NO: 788756 - RNA, 21 nt, Human
cuaggucccuaaaaaugcuga

SEQ ID NO: 788757 - RNA, 24 nt, Human
cucaaaaugcugucguuacaacca

SEQ ID NO: 788758 - RNA, 18 nt, Human
cucacaguucuccaggcu

SEQ ID NO: 788759 - RNA, 20 nt, Human
cuccauaagauccaagcacc

SEQ ID NO: 788760 - RNA, 20 nt, Human
cucccuucuuugcaggggcc

SEQ ID NO: 788761 - RNA, 24 nt, Human
cucucccuucuuugcaggggccuu

SEQ ID NO: 788762 - RNA, 24 nt, Human
cucuugggcauggcggcggcggcg

SEQ ID NO: 788763 - RNA, 19 nt, Human
cugcaguccucacuucagc

SEQ ID NO: 788764 - RNA, 23 nt, Human
cuggauccgcgagccgaccccuc

SEQ ID NO: 788765 - RNA, 22 nt, Human
cugguaauaaaaaauaaaaugg

SEQ ID NO: 788766 - RNA, 18 nt, Human
cuuuugugccaagguggc

SEQ ID NO: 788767 - RNA, 22 nt, Human
gaaauggaaccacugcucuuuu

SEQ ID NO: 788768 - RNA, 23 nt, Human
gaagacauaaaaacgaauuuguu

SEQ ID NO: 788769 - RNA, 21 nt, Human
gaagccucaggaagcuuuuac

SEQ ID NO: 788770 - RNA, 20 nt, Human
gagaauccaaauggccucca

SEQ ID NO: 788771 - RNA, 21 nt, Human
gagccgaccccucaccucccg

SEQ ID NO: 788772 - RNA, 20 nt, Human
gagugccacauacuuugaaa

SEQ ID NO: 788773 - RNA, 20 nt, Human
gauccgcgagccgaccccuc

SEQ ID NO: 788774 - RNA, 24 nt, Human
gaucucaagccuaggaguucaagg

SEQ ID NO: 788775 - RNA, 21 nt, Human
gcucuggcuuuggaggagcag

SEQ ID NO: 788776 - RNA, 19 nt, Human
ggacagauuuggccugcag

SEQ ID NO: 788777 - RNA, 21 nt, Human
ggcaucacuggaaaguccaga

SEQ ID NO: 788778 - RNA, 21 nt, Human
gggcagacagucauuaacagu

SEQ ID NO: 788779 - RNA, 18 nt, Human
gggcauggcggcggcggc

SEQ ID NO: 788780 - RNA, 26 nt, Human
gggcauggcggcggcggcggcggcgg

SEQ ID NO: 788781 - RNA, 23 nt, Human
gguuacauugagguguaacugug

SEQ ID NO: 788782 - RNA, 25 nt, Human
guaaaaauaaaaauagagucaaaga

SEQ ID NO: 788783 - RNA, 20 nt, Human
guccucacuucagcagcaca

SEQ ID NO: 788784 - RNA, 20 nt, Human
guugcuugccugugaguugg

SEQ ID NO: 788785 - RNA, 21 nt, Human
uaaaaaaugcacacacuucac

SEQ ID NO: 788786 - RNA, 21 nt, Human
uaaaaacaaaaaacagcugcc

SEQ ID NO: 788787 - RNA, 18 nt, Human
uaaauggcuuugcuuggc

SEQ ID NO: 788788 - RNA, 21 nt, Human
uaacaguugcuugccugugag

SEQ ID NO: 788789 - RNA, 20 nt, Human
uaaccuucacacauugggaa

SEQ ID NO: 788790 - RNA, 23 nt, Human
uaacucauuaucuuaaggacacc

SEQ ID NO: 788791 - RNA, 18 nt, Human
uaaggacaccaccaaggg

SEQ ID NO: 788792 - RNA, 23 nt, Human
uaauuggcucacaguucuccagg

SEQ ID NO: 788793 - RNA, 21 nt, Human
uaccccuucccccaaaaacaa

SEQ ID NO: 788794 - RNA, 19 nt, Human
uacucaaucacccuacuuu

SEQ ID NO: 788795 - RNA, 19 nt, Human
uacuguuguugcagccuca

SEQ ID NO: 788796 - RNA, 18 nt, Human
uagaggguuaacauuuca

SEQ ID NO: 788797 - RNA, 19 nt, Human
uagcaugucauuauuuuaa

SEQ ID NO: 788798 - RNA, 22 nt, Human
uauuaaaaacaaaaaacagcug

SEQ ID NO: 788799 - RNA, 20 nt, Human
ucaaaguuguuuugccuugu

SEQ ID NO: 788800 - RNA, 24 nt, Human
ucaaccaauggaaaacguaagaac

SEQ ID NO: 788801 - RNA, 21 nt, Human
ucaaucacccuacuuucaaaa

SEQ ID NO: 788802 - RNA, 23 nt, Human
ucacccuacuuucaaaaauuauu

SEQ ID NO: 788803 - RNA, 18 nt, Human
ucaggaaaucccuccucc

SEQ ID NO: 788804 - RNA, 22 nt, Human
ucaggcaggacaugggcagaca

SEQ ID NO: 788805 - RNA, 25 nt, Human
ucccaacagaugucugggcuuaagg

SEQ ID NO: 788806 - RNA, 22 nt, Human
ucccgcuccgguaccgaucgga

SEQ ID NO: 788807 - RNA, 19 nt, Human
ucccuucuuugcaggggcc

SEQ ID NO: 788808 - RNA, 22 nt, Human
uccgcgagccgaccccucaccu

SEQ ID NO: 788809 - RNA, 21 nt, Human
ucucaaaacuagaagggaaag

SEQ ID NO: 788810 - RNA, 24 nt, Human
ucucaagccuaggaguucaagguu

SEQ ID NO: 788811 - RNA, 20 nt, Human
ucucucccuucuuugcaggg

SEQ ID NO: 788812 - RNA, 21 nt, Human
ucugcagcuggauccgcgagc

SEQ ID NO: 788813 - RNA, 20 nt, Human
ugaaaauggcagaauuuauc

SEQ ID NO: 788814 - RNA, 21 nt, Human
ugaaaauggcagaauuuaucc

SEQ ID NO: 788815 - RNA, 19 nt, Human
ugaaacaacaagaucucau

SEQ ID NO: 788816 - RNA, 24 nt, Human
ugacacauaccccuucccccaaaa

SEQ ID NO: 788817 - RNA, 21 nt, Human
ugagaauaacauugccucuaa

SEQ ID NO: 788818 - RNA, 18 nt, Human
ugagcauauucaucacuu

SEQ ID NO: 788819 - RNA, 23 nt, Human
ugcacacacuucacuugggaucu

SEQ ID NO: 788820 - RNA, 24 nt, Human
ugcacuugcaccuaggucccuaaa

SEQ ID NO: 788821 - RNA, 22 nt, Human
ugccaaauacugcuaucaaucc

SEQ ID NO: 788822 - RNA, 18 nt, Human
ugccaagguggccaugug

SEQ ID NO: 788823 - RNA, 23 nt, Human
uggaaccacugcucuuuugacag

SEQ ID NO: 788824 - RNA, 19 nt, Human
uggauccgcgagccgaccc

SEQ ID NO: 788825 - RNA, 18 nt, Human
uggcaucacuggaaaguc

SEQ ID NO: 788826 - RNA, 18 nt, Human
uggcggcggcggcggcgg

SEQ ID NO: 788827 - RNA, 22 nt, Human
uggcggcggcggcggcggcggg

SEQ ID NO: 788828 - RNA, 20 nt, Human
ugggacagauuuggccugca

SEQ ID NO: 788829 - RNA, 24 nt, Human
ugucaaaaugacuguaccauauca

SEQ ID NO: 788830 - RNA, 19 nt, Human
ugucagggauguccaagcu

SEQ ID NO: 788831 - RNA, 24 nt, Human
ugucucuacacuccagccugggca

SEQ ID NO: 788832 - RNA, 19 nt, Human
uguucugugugcuaacaac

SEQ ID NO: 788833 - RNA, 23 nt, Human
uuaaaaauaacaacaaaguccac

SEQ ID NO: 788834 - RNA, 22 nt, Human
uuaacaguauacaacuuucaaa

SEQ ID NO: 788835 - RNA, 21 nt, Human
uuagugacacauaccccuucc

SEQ ID NO: 788836 - RNA, 20 nt, Human
uuauccgaagauccauaauc

SEQ ID NO: 788837 - RNA, 19 nt, Human
uucauccuucaccuuggcu

SEQ ID NO: 788838 - RNA, 20 nt, Human
uucauccuucaccuuggcuu

SEQ ID NO: 788839 - RNA, 24 nt, Human
uuccccguaucaauccagcuucag

SEQ ID NO: 788840 - RNA, 20 nt, Human
uucccuuuggguaccuucuc

SEQ ID NO: 788841 - RNA, 19 nt, Human
uucuccuucacacugcucc

SEQ ID NO: 788842 - RNA, 24 nt, Human
uugcaggggccuuuuuaggcuugg

SEQ ID NO: 788843 - RNA, 19 nt, Human
uugcauugcuauaaagaaa

SEQ ID NO: 788844 - RNA, 20 nt, Human
uuggugagaauaacauugcc

SEQ ID NO: 788845 - RNA, 18 nt, Human
uuuccauaccacaaggcu

SEQ ID NO: 788846 - RNA, 22 nt, Human
uuuuauggugauaguuaauugg

SEQ ID NO: 788847 - RNA, 19 nt, Human
acaguguggucaccccaca

SEQ ID NO: 788848 - RNA, 20 nt, Human
accccacagcccagugggca

SEQ ID NO: 788849 - RNA, 24 nt, Human
agauggggacacaggggcagaggg

SEQ ID NO: 788850 - RNA, 20 nt, Human
agcccagugggcaccagggc

SEQ ID NO: 788851 - RNA, 22 nt, Human
agcugaggcccgggugcugguu

SEQ ID NO: 788852 - RNA, 18 nt, Human
caccagggcagacucccc

SEQ ID NO: 788853 - RNA, 23 nt, Human
caccccacagcccagugggcacc

SEQ ID NO: 788854 - RNA, 26 nt, Human
cagcacagacagcugaggcccgggug

SEQ ID NO: 788855 - RNA, 21 nt, Human
ccacagcccagugggcaccag

SEQ ID NO: 788856 - RNA, 26 nt, Human
ccccucgcagcacagacagcugaggc

SEQ ID NO: 788857 - RNA, 22 nt, Human
ccucuagguacagcuuuggucc

SEQ ID NO: 788858 - RNA, 20 nt, Human
gggacacaggggcagagggc

SEQ ID NO: 788859 - RNA, 22 nt, Human
ucaccccacagcccagugggca

SEQ ID NO: 788860 - RNA, 22 nt, Human
uggggacacaggggcagagggc

SEQ ID NO: 788861 - RNA, 20 nt, Human
aaaccucccuucugauuccu

SEQ ID NO: 788862 - RNA, 22 nt, Human
aacagugucuugggagggcaag

SEQ ID NO: 788863 - RNA, 18 nt, Human
aagcugugcccacagcca

SEQ ID NO: 788864 - RNA, 18 nt, Human
aagcugugcccacagccc

SEQ ID NO: 788865 - RNA, 22 nt, Human
aauuaacacucaacaugaauuu

SEQ ID NO: 788866 - RNA, 22 nt, Human
acacuuuucaaauauaaaaaac

SEQ ID NO: 788867 - RNA, 21 nt, Human
accaacaagggaacacagccu

SEQ ID NO: 788868 - RNA, 18 nt, Human
acccagggccuugguggc

SEQ ID NO: 788869 - RNA, 24 nt, Human
acuacaugugcuaaucaccaucua

SEQ ID NO: 788870 - RNA, 18 nt, Human
agaugccagccagagcuc

SEQ ID NO: 788871 - RNA, 23 nt, Human
agcuuccuugcauuggguuagaa

SEQ ID NO: 788872 - RNA, 24 nt, Human
aggcagucugucccuuagcagagc

SEQ ID NO: 788873 - RNA, 23 nt, Human
aggcauucugguuuuuggaauuu

SEQ ID NO: 788874 - RNA, 22 nt, Human
agggcucugcucagcuggaacu

SEQ ID NO: 788875 - RNA, 24 nt, Human
agggucacuugagcacaggaguuu

SEQ ID NO: 788876 - RNA, 22 nt, Human
aguaugaauucuucccuguaaa

SEQ ID NO: 788877 - RNA, 24 nt, Human
aguuugagaccacccugggcaaca

SEQ ID NO: 788878 - RNA, 19 nt, Human
auccagagcuauauagcca

SEQ ID NO: 788879 - RNA, 19 nt, Human
auccgaaggacuccgugag

SEQ ID NO: 788880 - RNA, 18 nt, Human
auuccaggugccacuggg

SEQ ID NO: 788881 - RNA, 19 nt, Human
auuccuguuaguuuuccuu

SEQ ID NO: 788882 - RNA, 20 nt, Human
auuuaucuaccuuuggucuu

SEQ ID NO: 788883 - RNA, 20 nt, Human
auuucauuucuuuccccuug

SEQ ID NO: 788884 - RNA, 18 nt, Human
caagguucuuagcuuccu

SEQ ID NO: 788885 - RNA, 28 nt, Human
caccaacaagggaacacagccuuaauca

SEQ ID NO: 788886 - RNA, 28 nt, Human
caccccuuucccccacgugcuuuguccc

SEQ ID NO: 788887 - RNA, 20 nt, Human
cagaggcuuugcugagcugu

SEQ ID NO: 788888 - RNA, 19 nt, Human
cagcagaggcuaauaauuu

SEQ ID NO: 788889 - RNA, 23 nt, Human
cagucccucauggcuucccuugg

SEQ ID NO: 788890 - RNA, 19 nt, Human
ccacccugcuucagcucac

SEQ ID NO: 788891 - RNA, 24 nt, Human
ccagucccaaugagaugagccagg

SEQ ID NO: 788892 - RNA, 20 nt, Human
cccacauguugaaauagaac

SEQ ID NO: 788893 - RNA, 22 nt, Human
cccacgugcuuugucccaggga

SEQ ID NO: 788894 - RNA, 27 nt, Human
ccccaccaagcuugaucaucccagguu

SEQ ID NO: 788895 - RNA, 24 nt, Human
ccccccaccaagcuugaucauccc

SEQ ID NO: 788896 - RNA, 19 nt, Human
ccccgucaggaggcauggg

SEQ ID NO: 788897 - RNA, 26 nt, Human
ccccuuucccccacgugcuuuguccc

SEQ ID NO: 788898 - RNA, 20 nt, Human
cccgaauggccgcccaguuu

SEQ ID NO: 788899 - RNA, 21 nt, Human
cccggcuucagcccccuuaac

SEQ ID NO: 788900 - RNA, 20 nt, Human
ccucaugaaagaaguggaac

SEQ ID NO: 788901 - RNA, 23 nt, Human
ccugcugggaggugucuccccgu

SEQ ID NO: 788902 - RNA, 18 nt, Human
ccuguaauugcagccacu

SEQ ID NO: 788903 - RNA, 22 nt, Human
ccuuaaucaugagacagccgcu

SEQ ID NO: 788904 - RNA, 23 nt, Human
ccuuccucuggaagcuuuguccc

SEQ ID NO: 788905 - RNA, 21 nt, Human
cgaaagggacaaaagaggaug

SEQ ID NO: 788906 - RNA, 23 nt, Human
cgccccuccccccaccaagcuug

SEQ ID NO: 788907 - RNA, 18 nt, Human
cggagugcaccauuccuc

SEQ ID NO: 788908 - RNA, 19 nt, Human
cuagaguuuuaagaguaac

SEQ ID NO: 788909 - RNA, 18 nt, Human
cuccccggcuucagcccc

SEQ ID NO: 788910 - RNA, 20 nt, Human
cucucuucagagcuggcagg

SEQ ID NO: 788911 - RNA, 22 nt, Human
cucuguucuccaucagcagagg

SEQ ID NO: 788912 - RNA, 18 nt, Human
cucuucuggucuuucucu

SEQ ID NO: 788913 - RNA, 20 nt, Human
cugaagcugugcccacagcc

SEQ ID NO: 788914 - RNA, 19 nt, Human
cugcucucuucagagcugg

SEQ ID NO: 788915 - RNA, 20 nt, Human
cugcuggaguuugcuggagg

SEQ ID NO: 788916 - RNA, 18 nt, Human
cugugcuggaagaacugc

SEQ ID NO: 788917 - RNA, 28 nt, Human
cuguuccuuccucuggaagcuuuguccc

SEQ ID NO: 788918 - RNA, 20 nt, Human
cuugcugggcucagugggca

SEQ ID NO: 788919 - RNA, 23 nt, Human
gaaaacacuuuucaaauauaaaa

SEQ ID NO: 788920 - RNA, 21 nt, Human
gaaccaaaagaaguggauaaa

SEQ ID NO: 788921 - RNA, 19 nt, Human
gaccccugcugggaggugu

SEQ ID NO: 788922 - RNA, 19 nt, Human
gacuguguuuuggacuggg

SEQ ID NO: 788923 - RNA, 18 nt, Human
gagcuggcugccugaaau

SEQ ID NO: 788924 - RNA, 21 nt, Human
gaggugggagggucacuugag

SEQ ID NO: 788925 - RNA, 22 nt, Human
gaugagccagguaccucagcug

SEQ ID NO: 788926 - RNA, 19 nt, Human
gcagagcucaagcgcugug

SEQ ID NO: 788927 - RNA, 20 nt, Human
gcgccccuccccccaccaag

SEQ ID NO: 788928 - RNA, 22 nt, Human
gcuaucaaaaaaacuccuacag

SEQ ID NO: 788929 - RNA, 20 nt, Human
ggaaaaccaccuauucaagc

SEQ ID NO: 788930 - RNA, 20 nt, Human
gggaggugucuccccgucag

SEQ ID NO: 788931 - RNA, 22 nt, Human
gggucacuugagcacaggaguu

SEQ ID NO: 788932 - RNA, 24 nt, Human
ggucacuugagcacaggaguuuga

SEQ ID NO: 788933 - RNA, 18 nt, Human
uaacaagggaguaagcgg

SEQ ID NO: 788934 - RNA, 18 nt, Human
uaagaccgcucugcagua

SEQ ID NO: 788935 - RNA, 23 nt, Human
uacaggauuacaauauugaaaca

SEQ ID NO: 788936 - RNA, 23 nt, Human
uaccucagcuggaaauacagaaa

SEQ ID NO: 788937 - RNA, 23 nt, Human
uacugcuuucaagaaugcacugu

SEQ ID NO: 788938 - RNA, 22 nt, Human
uagaaagacaccauuuaaaacu

SEQ ID NO: 788939 - RNA, 19 nt, Human
uaguaucugugccggagug

SEQ ID NO: 788940 - RNA, 18 nt, Human
uauguucuucucuaaacu

SEQ ID NO: 788941 - RNA, 19 nt, Human
ucacuugagcacaggaguu

SEQ ID NO: 788942 - RNA, 18 nt, Human
ucaggcuuuuugcacugg

SEQ ID NO: 788943 - RNA, 19 nt, Human
uccaucaggucauuuaugu

SEQ ID NO: 788944 - RNA, 19 nt, Human
ucccaccuucugaagccua

SEQ ID NO: 788945 - RNA, 23 nt, Human
ucccagggagaugaggguuuuau

SEQ ID NO: 788946 - RNA, 18 nt, Human
ucccuucugauuccugcc

SEQ ID NO: 788947 - RNA, 20 nt, Human
ucccuuggcuaggggaggga

SEQ ID NO: 788948 - RNA, 21 nt, Human
uccuuuggaggagaagaggca

SEQ ID NO: 788949 - RNA, 19 nt, Human
ucuaaacugguuauucuag

SEQ ID NO: 788950 - RNA, 20 nt, Human
ucuacaaaaccucccuucug

SEQ ID NO: 788951 - RNA, 21 nt, Human
ucuacaaaaccucccuucuga

SEQ ID NO: 788952 - RNA, 20 nt, Human
ucucuugaagaacagugucu

SEQ ID NO: 788953 - RNA, 21 nt, Human
ucuggcacccagacgcucuca

SEQ ID NO: 788954 - RNA, 19 nt, Human
ucugugccggagugcacca

SEQ ID NO: 788955 - RNA, 21 nt, Human
ucuguggguugcgaagaccau

SEQ ID NO: 788956 - RNA, 22 nt, Human
ucuguggguugcgaagaccaug

SEQ ID NO: 788957 - RNA, 20 nt, Human
ucuuuuguucguuuuaucca

SEQ ID NO: 788958 - RNA, 23 nt, Human
ugaaauagaacuauauuauucaa

SEQ ID NO: 788959 - RNA, 23 nt, Human
ugaaaugacuguguuuuggacug

SEQ ID NO: 788960 - RNA, 26 nt, Human
ugacuuagccucaugaaagaaguggg

SEQ ID NO: 788961 - RNA, 21 nt, Human
ugaggccccucggcugcaggu

SEQ ID NO: 788962 - RNA, 21 nt, Human
ugaggugggagggucacuuga

SEQ ID NO: 788963 - RNA, 23 nt, Human
ugaggugggagggucacuugagc

SEQ ID NO: 788964 - RNA, 20 nt, Human
ugccuguuccuuccucugga

SEQ ID NO: 788965 - RNA, 20 nt, Human
ugcugagcuguggagggcuc

SEQ ID NO: 788966 - RNA, 21 nt, Human
ugcugccuguuccuuccucug

SEQ ID NO: 788967 - RNA, 22 nt, Human
uggaaauacagaaagcacccac

SEQ ID NO: 788968 - RNA, 21 nt, Human
uggacuggggaaccaaaagaa

SEQ ID NO: 788969 - RNA, 21 nt, Human
uggaggagaagaggcauucug

SEQ ID NO: 788970 - RNA, 22 nt, Human
uggaggcugcagaacagcaaag

SEQ ID NO: 788971 - RNA, 22 nt, Human
uggcuccccggcuucagccccc

SEQ ID NO: 788972 - RNA, 23 nt, Human
ugggaaccacuuggcuccccggc

SEQ ID NO: 788973 - RNA, 22 nt, Human
ugggaacugcagaucagagcug

SEQ ID NO: 788974 - RNA, 18 nt, Human
ugggacaucucugauuaa

SEQ ID NO: 788975 - RNA, 21 nt, Human
uggguugcgaagaccauggga

SEQ ID NO: 788976 - RNA, 25 nt, Human
uguaaaaguaacuuacaggauuaca

SEQ ID NO: 788977 - RNA, 18 nt, Human
uguaauguuaacucgaaa

SEQ ID NO: 788978 - RNA, 22 nt, Human
uguauauaacuaaguaaacuca

SEQ ID NO: 788979 - RNA, 19 nt, Human
uguuaagaccgcucugcag

SEQ ID NO: 788980 - RNA, 21 nt, Human
uguuuugguuccaaaauuuuu

SEQ ID NO: 788981 - RNA, 19 nt, Human
uuaaucaugagacagccgc

SEQ ID NO: 788982 - RNA, 21 nt, Human
uucauggguaugcaacccauu

SEQ ID NO: 788983 - RNA, 24 nt, Human
uuccaauguggcccagggaagaca

SEQ ID NO: 788984 - RNA, 19 nt, Human
uuccaggugccacugggcu

SEQ ID NO: 788985 - RNA, 22 nt, Human
uuccucaccaacaagggaacac

SEQ ID NO: 788986 - RNA, 20 nt, Human
uuccuucuaacagugaggcc

SEQ ID NO: 788987 - RNA, 22 nt, Human
uugagcacaggaguuugagacc

SEQ ID NO: 788988 - RNA, 22 nt, Human
uugcugccuguuccuuccucug

SEQ ID NO: 788989 - RNA, 24 nt, Human
uugcugccuguuccuuccucugga

SEQ ID NO: 788990 - RNA, 18 nt, Human
uugcugggcucagugggc

SEQ ID NO: 788991 - RNA, 24 nt, Human
uuuauccagagcuauauagccacu

SEQ ID NO: 788992 - RNA, 23 nt, Human
uuuauguucuucucuaaacuggu

SEQ ID NO: 788993 - RNA, 22 nt, Human
uuuuagcuuaaaaaaagauacu

SEQ ID NO: 788994 - RNA, 18 nt, Human
uuuucagcuccaucaggu

SEQ ID NO: 788995 - RNA, 20 nt, Human
uuuucaggcuuuuugcacug

SEQ ID NO: 788996 - RNA, 21 nt, Human
uuuucaggcuuuuugcacugg

SEQ ID NO: 788997 - RNA, 19 nt, Human
aaacagggugagagcaggg

SEQ ID NO: 788998 - RNA, 21 nt, Human
aaaggcagugugucccugcca

SEQ ID NO: 788999 - RNA, 19 nt, Human
aagcugaagccacagcagc

SEQ ID NO: 789000 - RNA, 22 nt, Human
acacagccccaggagaaacaaa

SEQ ID NO: 789001 - RNA, 23 nt, Human
acacagccccaggagaaacaaaa

SEQ ID NO: 789002 - RNA, 24 nt, Human
acaccagcauaucccucccugagc

SEQ ID NO: 789003 - RNA, 22 nt, Human
acagcuuccaaagcugaagcca

SEQ ID NO: 789004 - RNA, 22 nt, Human
accauccaccccaccaucccca

SEQ ID NO: 789005 - RNA, 25 nt, Human
acccgugccuccuccuuuucuggcu

SEQ ID NO: 789006 - RNA, 24 nt, Human
acccucugccugcucccucuguug

SEQ ID NO: 789007 - RNA, 24 nt, Human
acccugcuccgggcccucaguggu

SEQ ID NO: 789008 - RNA, 21 nt, Human
accugaaccuucucaaugacc

SEQ ID NO: 789009 - RNA, 22 nt, Human
agccacagcagcagaacugugc

SEQ ID NO: 789010 - RNA, 20 nt, Human
agcccaccugaaaucgggag

SEQ ID NO: 789011 - RNA, 28 nt, Human
agcggcaugggcucagcagcucccccuu

SEQ ID NO: 789012 - RNA, 22 nt, Human
agcucgcagcuccagcagcccc

SEQ ID NO: 789013 - RNA, 23 nt, Human
aggagggguccagggguagugcu

SEQ ID NO: 789014 - RNA, 21 nt, Human
aggcagugugucccugccagc

SEQ ID NO: 789015 - RNA, 24 nt, Human
agggcacagaaggacacccuuuuc

SEQ ID NO: 789016 - RNA, 27 nt, Human
aggggcugaaaguugaccagaugagcc

SEQ ID NO: 789017 - RNA, 23 nt, Human
aggguuccaaacagggaggguuc

SEQ ID NO: 789018 - RNA, 19 nt, Human
aggucccccacccucugcc

SEQ ID NO: 789019 - RNA, 19 nt, Human
aggucccccacccucugcc

SEQ ID NO: 789020 - RNA, 22 nt, Human
caaagcacugagcaucagccug

SEQ ID NO: 789021 - RNA, 19 nt, Human
caaccagaaacuuugcagg

SEQ ID NO: 789022 - RNA, 21 nt, Human
cacagccccaggagaaacaaa

SEQ ID NO: 789023 - RNA, 18 nt, Human
cacccgugccuccuccuu

SEQ ID NO: 789024 - RNA, 20 nt, Human
cacccucugccugcucccuc

SEQ ID NO: 789025 - RNA, 18 nt, Human
cacccuuuuccaaaccua

SEQ ID NO: 789026 - RNA, 18 nt, Human
cacuugaugaggcaaggc

SEQ ID NO: 789027 - RNA, 22 nt, Human
cagaaacuuugcaggugaacac

SEQ ID NO: 789028 - RNA, 25 nt, Human
cagaacacagccccaggagaaacaa

SEQ ID NO: 789029 - RNA, 18 nt, Human
cagccuguauugcacuuu

SEQ ID NO: 789030 - RNA, 18 nt, Human
cagcggcaugggcucagc

SEQ ID NO: 789031 - RNA, 20 nt, Human
caggagccccaaaggcagug

SEQ ID NO: 789032 - RNA, 22 nt, Human
caggagggguccagggguagug

SEQ ID NO: 789033 - RNA, 19 nt, Human
caggguuuuucuguugggc

SEQ ID NO: 789034 - RNA, 18 nt, Human
caggugcauuggggcagg

SEQ ID NO: 789035 - RNA, 21 nt, Human
cagugacaaccagaaacuuug

SEQ ID NO: 789036 - RNA, 18 nt, Human
caucacagcggcaugggc

SEQ ID NO: 789037 - RNA, 24 nt, Human
ccaaaccuaagcccucuuuuagcc

SEQ ID NO: 789038 - RNA, 20 nt, Human
ccacagaugcuuuuccucuu

SEQ ID NO: 789039 - RNA, 22 nt, Human
ccacagucacacaggcuuugcc

SEQ ID NO: 789040 - RNA, 19 nt, Human
ccaccuggcuacgcgggaa

SEQ ID NO: 789041 - RNA, 20 nt, Human
ccaggagaaacaaaaccaaa

SEQ ID NO: 789042 - RNA, 19 nt, Human
ccaggauggcggcugcaac

SEQ ID NO: 789043 - RNA, 20 nt, Human
ccaguggccuucccuggcag

SEQ ID NO: 789044 - RNA, 19 nt, Human
cccaccauccccacagcca

SEQ ID NO: 789045 - RNA, 21 nt, Human
cccaccauccccacagccauu

SEQ ID NO: 789046 - RNA, 18 nt, Human
cccaggagaaacaaaacc

SEQ ID NO: 789047 - RNA, 19 nt, Human
cccauggaugacgcgacca

SEQ ID NO: 789048 - RNA, 18 nt, Human
ccccaccauccccacagc

SEQ ID NO: 789049 - RNA, 18 nt, Human
ccccagggcucccgccag

SEQ ID NO: 789050 - RNA, 18 nt, Human
cccgccaggucccccacc

SEQ ID NO: 789051 - RNA, 18 nt, Human
cccuugggcccaccuggc

SEQ ID NO: 789052 - RNA, 23 nt, Human
ccuccuuuucuggcugccugcag

SEQ ID NO: 789053 - RNA, 18 nt, Human
ccucuuggcccccuuggc

SEQ ID NO: 789054 - RNA, 23 nt, Human
ccugccaggcacccuugggccca

SEQ ID NO: 789055 - RNA, 24 nt, Human
ccugccaggcacccuugggcccac

SEQ ID NO: 789056 - RNA, 23 nt, Human
ccuguaaacaucuuugaaccaaa

SEQ ID NO: 789057 - RNA, 19 nt, Human
cgcagcuccagcagccccg

SEQ ID NO: 789058 - RNA, 24 nt, Human
cuccagcagccccgcucgcugauc

SEQ ID NO: 789059 - RNA, 19 nt, Human
cucccugaccauccacccc

SEQ ID NO: 789060 - RNA, 23 nt, Human
cugaagccacagcagcagaacug

SEQ ID NO: 789061 - RNA, 19 nt, Human
cugccagcucacccgugcc

SEQ ID NO: 789062 - RNA, 20 nt, Human
cugcucccucuguuggcucc

SEQ ID NO: 789063 - RNA, 18 nt, Human
cuugaaauauccacugga

SEQ ID NO: 789064 - RNA, 24 nt, Human
gaaacaaaaccaaacagggugaga

SEQ ID NO: 789065 - RNA, 22 nt, Human
gaaccaaaucacuauaaaauaa

SEQ ID NO: 789066 - RNA, 22 nt, Human
gaaggggcuggcauugcacaug

SEQ ID NO: 789067 - RNA, 21 nt, Human
gagauggccugccacugcaga

SEQ ID NO: 789068 - RNA, 21 nt, Human
gagcaggagggguccaggggu

SEQ ID NO: 789069 - RNA, 19 nt, Human
gagcaucccucccugacca

SEQ ID NO: 789070 - RNA, 24 nt, Human
gagcgagcaggagggguccagggg

SEQ ID NO: 789071 - RNA, 24 nt, Human
gaggguuccaaacagggaggguuc

SEQ ID NO: 789072 - RNA, 21 nt, Human
gcauugcacauguccuggcca

SEQ ID NO: 789073 - RNA, 18 nt, Human
gcccauccaaaugagccc

SEQ ID NO: 789074 - RNA, 20 nt, Human
gccgaggggcugaaaguuga

SEQ ID NO: 789075 - RNA, 20 nt, Human
ggaguuccauuuggaaguuc

SEQ ID NO: 789076 - RNA, 25 nt, Human
gggaggguuccaagcagcaaggaaa

SEQ ID NO: 789077 - RNA, 24 nt, Human
gggcucccgccaggucccccaccc

SEQ ID NO: 789078 - RNA, 19 nt, Human
gggguuggguaguugggaa

SEQ ID NO: 789079 - RNA, 24 nt, Human
gguggucauggccuuccuuccggg

SEQ ID NO: 789080 - RNA, 21 nt, Human
ggugugugugugugugugugu

SEQ ID NO: 789081 - RNA, 24 nt, Human
gugcaugugccaagacaagaaggg

SEQ ID NO: 789082 - RNA, 24 nt, Human
gugcauuggggcaggguuuuucug

SEQ ID NO: 789083 - RNA, 23 nt, Human
gugccaagacaagaaggggcugg

SEQ ID NO: 789084 - RNA, 18 nt, Human
gugguacuuguaguagca

SEQ ID NO: 789085 - RNA, 22 nt, Human
gugguggucauggccuuccuuc

SEQ ID NO: 789086 - RNA, 24 nt, Human
guguguguguccuguaaacaucuu

SEQ ID NO: 789087 - RNA, 20 nt, Human
gugugugugugugugugugu

SEQ ID NO: 789088 - RNA, 21 nt, Human
gugugugugugugugugugug

SEQ ID NO: 789089 - RNA, 21 nt, Human
gugugugugugugugugugug

SEQ ID NO: 789090 - RNA, 19 nt, Human
guuguugaguugguguugg

SEQ ID NO: 789091 - RNA, 20 nt, Human
uaaaauaaauuaacaagggc

SEQ ID NO: 789092 - RNA, 21 nt, Human
uaaaauaaauuaacaagggca

SEQ ID NO: 789093 - RNA, 19 nt, Human
uaccccagggcucccgcca

SEQ ID NO: 789094 - RNA, 24 nt, Human
uagcccaccugaaaucgggaguuc

SEQ ID NO: 789095 - RNA, 25 nt, Human
uauaaaauaaauuaacaagggcaca

SEQ ID NO: 789096 - RNA, 18 nt, Human
uauggcgaugacguggua

SEQ ID NO: 789097 - RNA, 19 nt, Human
ucagccucugcuucuucgg

SEQ ID NO: 789098 - RNA, 18 nt, Human
ucccgccaggucccccac

SEQ ID NO: 789099 - RNA, 21 nt, Human
ucccucuguuggcuccggggg

SEQ ID NO: 789100 - RNA, 23 nt, Human
ucccugagcaucccucccugacc

SEQ ID NO: 789101 - RNA, 18 nt, Human
uccuggccaugguggggu

SEQ ID NO: 789102 - RNA, 20 nt, Human
ucgcagcuccagcagccccg

SEQ ID NO: 789103 - RNA, 27 nt, Human
ucugccugcucccucuguuggcuccgg

SEQ ID NO: 789104 - RNA, 22 nt, Human
ucuggcugccugcagaacacag

SEQ ID NO: 789105 - RNA, 22 nt, Human
ugaacacccaguggccuucccu

SEQ ID NO: 789106 - RNA, 20 nt, Human
ugagagcagggcagaccaca

SEQ ID NO: 789107 - RNA, 25 nt, Human
ugagagcagggcagaccacagaugc

SEQ ID NO: 789108 - RNA, 23 nt, Human
ugagcccaggagccccaaaggca

SEQ ID NO: 789109 - RNA, 20 nt, Human
ugaggaagagggagcccagg

SEQ ID NO: 789110 - RNA, 24 nt, Human
ugaggaagagggagcccaggaugg

SEQ ID NO: 789111 - RNA, 24 nt, Human
ugaugaggcaaggcuggugugugc

SEQ ID NO: 789112 - RNA, 24 nt, Human
ugccacagucacacaggcuuugcc

SEQ ID NO: 789113 - RNA, 19 nt, Human
uggaaguuccuucaggaag

SEQ ID NO: 789114 - RNA, 18 nt, Human
uggcaggguccccagagc

SEQ ID NO: 789115 - RNA, 23 nt, Human
uggcauugcacauguccuggcca

SEQ ID NO: 789116 - RNA, 26 nt, Human
uggcccccuuggccuccggggagguc

SEQ ID NO: 789117 - RNA, 22 nt, Human
ugggccagguucagccuguauu

SEQ ID NO: 789118 - RNA, 20 nt, Human
uggggaggguuccaaacagg

SEQ ID NO: 789119 - RNA, 21 nt, Human
ugucccugccagcucacccgu

SEQ ID NO: 789120 - RNA, 22 nt, Human
uguccuguaaacaucuuugaac

SEQ ID NO: 789121 - RNA, 27 nt, Human
ugugucccugccagcucacccgugccu

SEQ ID NO: 789122 - RNA, 21 nt, Human
uguguguguguguguguccug

SEQ ID NO: 789123 - RNA, 22 nt, Human
uguguguguguguguguccugu

SEQ ID NO: 789124 - RNA, 18 nt, Human
ugugugugugugugugug

SEQ ID NO: 789125 - RNA, 18 nt, Human
ugugugugugugugugug

SEQ ID NO: 789126 - RNA, 18 nt, Human
ugugugugugugugugug

SEQ ID NO: 789127 - RNA, 18 nt, Human
ugugugugugugugugug

SEQ ID NO: 789128 - RNA, 18 nt, Human
ugugugugugugugugug

SEQ ID NO: 789129 - RNA, 18 nt, Human
ugugugugugugugugug

SEQ ID NO: 789130 - RNA, 18 nt, Human
ugugugugugugugugug

SEQ ID NO: 789131 - RNA, 18 nt, Human
ugugugugugugugugug

SEQ ID NO: 789132 - RNA, 18 nt, Human
ugugugugugugugugug

SEQ ID NO: 789133 - RNA, 18 nt, Human
ugugugugugugugugug

SEQ ID NO: 789134 - RNA, 18 nt, Human
ugugugugugugugugug

SEQ ID NO: 789135 - RNA, 19 nt, Human
ugugugugugugugugugu

SEQ ID NO: 789136 - RNA, 21 nt, Human
ugugugugugugugugugugu

SEQ ID NO: 789137 - RNA, 21 nt, Human
ugugugugugugugugugugu

SEQ ID NO: 789138 - RNA, 21 nt, Human
ugugugugugugugugugugu

SEQ ID NO: 789139 - RNA, 21 nt, Human
ugugugugugugugugugugu

SEQ ID NO: 789140 - RNA, 21 nt, Human
ugugugugugugugugugugu

SEQ ID NO: 789141 - RNA, 21 nt, Human
ugugugugugugugugugugu

SEQ ID NO: 789142 - RNA, 21 nt, Human
ugugugugugugugugugugu

SEQ ID NO: 789143 - RNA, 21 nt, Human
ugugugugugugugugugugu

SEQ ID NO: 789144 - RNA, 21 nt, Human
ugugugugugugugugugugu

SEQ ID NO: 789145 - RNA, 21 nt, Human
ugugugugugugugugugugu

SEQ ID NO: 789146 - RNA, 21 nt, Human
ugugugugugugugugugugu

SEQ ID NO: 789147 - RNA, 21 nt, Human
ugugugugugugugugugugu

SEQ ID NO: 789148 - RNA, 21 nt, Human
ugugugugugugugugugugu

SEQ ID NO: 789149 - RNA, 21 nt, Human
ugugugugugugugugugugu

SEQ ID NO: 789150 - RNA, 21 nt, Human
ugugugugugugugugugugu

SEQ ID NO: 789151 - RNA, 21 nt, Human
ugugugugugugugugugugu

SEQ ID NO: 789152 - RNA, 21 nt, Human
ugugugugugugugugugugu

SEQ ID NO: 789153 - RNA, 21 nt, Human
ugugugugugugugugugugu

SEQ ID NO: 789154 - RNA, 21 nt, Human
ugugugugugugugugugugu

SEQ ID NO: 789155 - RNA, 22 nt, Human
ugugugugugugugugugugug

SEQ ID NO: 789156 - RNA, 22 nt, Human
ugugugugugugugugugugug

SEQ ID NO: 789157 - RNA, 22 nt, Human
ugugugugugugugugugugug

SEQ ID NO: 789158 - RNA, 22 nt, Human
ugugugugugugugugugugug

SEQ ID NO: 789159 - RNA, 22 nt, Human
ugugugugugugugugugugug

SEQ ID NO: 789160 - RNA, 22 nt, Human
ugugugugugugugugugugug

SEQ ID NO: 789161 - RNA, 22 nt, Human
ugugugugugugugugugugug

SEQ ID NO: 789162 - RNA, 23 nt, Human
ugugugugugugugugugugugu

SEQ ID NO: 789163 - RNA, 22 nt, Human
uuagcccaccugaaaucgggag

SEQ ID NO: 789164 - RNA, 22 nt, Human
uucagccuguauugcacuuugu

SEQ ID NO: 789165 - RNA, 33 nt, Human
uucucuagggguguguguguguguguguguggu

SEQ ID NO: 789166 - RNA, 23 nt, Human
aacaauucucuaucuguccacca

SEQ ID NO: 789167 - RNA, 18 nt, Human
accaucuugccuugcccu

SEQ ID NO: 789168 - RNA, 20 nt, Human
accaucuugccuugcccuuc

SEQ ID NO: 789169 - RNA, 21 nt, Human
agggggcggggcggaggcgug

SEQ ID NO: 789170 - RNA, 22 nt, Human
agggggcggggcggaggcgugg

SEQ ID NO: 789171 - RNA, 25 nt, Human
agggggcggggcggaggcgugggga

SEQ ID NO: 789172 - RNA, 21 nt, Human
agugcccgcugaggcgccggc

SEQ ID NO: 789173 - RNA, 19 nt, Human
cacagccccuguccgcagc

SEQ ID NO: 789174 - RNA, 18 nt, Human
cagaagacauguuuaaua

SEQ ID NO: 789175 - RNA, 26 nt, Human
cagccgcugccaccucacagccccug

SEQ ID NO: 789176 - RNA, 20 nt, Human
cagggagcagggacggggaa

SEQ ID NO: 789177 - RNA, 19 nt, Human
cccgggagggggcggggcg

SEQ ID NO: 789178 - RNA, 21 nt, Human
ccgcugcagccgcugccaccu

SEQ ID NO: 789179 - RNA, 18 nt, Human
ccgcugccaccucacagc

SEQ ID NO: 789180 - RNA, 21 nt, Human
ccggcuccgccgcugcagccg

SEQ ID NO: 789181 - RNA, 25 nt, Human
ccuggggcugaggcagaccgggguc

SEQ ID NO: 789182 - RNA, 22 nt, Human
cucacagccccuguccgcagcu

SEQ ID NO: 789183 - RNA, 19 nt, Human
gaagggggaacagacccca

SEQ ID NO: 789184 - RNA, 24 nt, Human
ggccggcggacaccggauaaagga

SEQ ID NO: 789185 - RNA, 19 nt, Human
gggcugaggcagacaaagg

SEQ ID NO: 789186 - RNA, 23 nt, Human
ucccgcacgcgccuggcagggag

SEQ ID NO: 789187 - RNA, 21 nt, Human
uccgccgcugcagccgcugcc

SEQ ID NO: 789188 - RNA, 24 nt, Human
ucuaucuguccaccaucuugccuu

SEQ ID NO: 789189 - RNA, 24 nt, Human
ugccaccucacagccccuguccgc

SEQ ID NO: 789190 - RNA, 23 nt, Human
uuccuggggcugaggcagacaaa

SEQ ID NO: 789191 - RNA, 21 nt, Human
aaaaaggaugauaauaaaaaa

SEQ ID NO: 789192 - RNA, 19 nt, Human
aaagugcugggauuacagg

SEQ ID NO: 789193 - RNA, 20 nt, Human
aaagugcugggauuacaggc

SEQ ID NO: 789194 - RNA, 23 nt, Human
aaagugcugggauuacaggcgua

SEQ ID NO: 789195 - RNA, 20 nt, Human
aagcaguucauaaacaacua

SEQ ID NO: 789196 - RNA, 20 nt, Human
aagcgauucuucugccucag

SEQ ID NO: 789197 - RNA, 21 nt, Human
aagcgauucuucugccucagc

SEQ ID NO: 789198 - RNA, 18 nt, Human
aaggagggcagggagggg

SEQ ID NO: 789199 - RNA, 19 nt, Human
aaguagcugggauuacagg

SEQ ID NO: 789200 - RNA, 25 nt, Human
aaguagcugggauuacaggcgcccg

SEQ ID NO: 789201 - RNA, 19 nt, Human
aagugcugggauuacaggc

SEQ ID NO: 789202 - RNA, 19 nt, Human
aagugcugggauuacaggc

SEQ ID NO: 789203 - RNA, 26 nt, Human
aagugcugggauuacaggcguaagcc

SEQ ID NO: 789204 - RNA, 23 nt, Human
acagcuccaagagggagggaacc

SEQ ID NO: 789205 - RNA, 21 nt, Human
acgggguuucgccauguuggu

SEQ ID NO: 789206 - RNA, 23 nt, Human
acgggguuucgccauguugguca

SEQ ID NO: 789207 - RNA, 24 nt, Human
acgggguuucgccauguuggucag

SEQ ID NO: 789208 - RNA, 19 nt, Human
acucuagcgcagggguaaa

SEQ ID NO: 789209 - RNA, 18 nt, Human
acucuguuccuggggaac

SEQ ID NO: 789210 - RNA, 26 nt, Human
agacaaaaaaaggaaaugcauacaua

SEQ ID NO: 789211 - RNA, 24 nt, Human
agcgauucuucugccucagccucc

SEQ ID NO: 789212 - RNA, 22 nt, Human
aggaaaggggucacuccuuaau

SEQ ID NO: 789213 - RNA, 19 nt, Human
aggcagcaggccugggucu

SEQ ID NO: 789214 - RNA, 22 nt, Human
aggcagcaggccugggucuggc

SEQ ID NO: 789215 - RNA, 22 nt, Human
aggcagcaggccugggucuggc

SEQ ID NO: 789216 - RNA, 22 nt, Human
aguagagacgggguuucgccau

SEQ ID NO: 789217 - RNA, 18 nt, Human
agugcugggauuacaggc

SEQ ID NO: 789218 - RNA, 24 nt, Human
auuuuuguauuuuuaguagagacg

SEQ ID NO: 789219 - RNA, 24 nt, Human
caaaccugucagcagguaaagaaa

SEQ ID NO: 789220 - RNA, 24 nt, Human
caaagugcugggauuacaggcgua

SEQ ID NO: 789221 - RNA, 20 nt, Human
caagagggaguguugggaug

SEQ ID NO: 789222 - RNA, 19 nt, Human
caaggagggcagggagggg

SEQ ID NO: 789223 - RNA, 21 nt, Human
caaguaaagacccagagauac

SEQ ID NO: 789224 - RNA, 21 nt, Human
cacugcaaccuccgccuccug

SEQ ID NO: 789225 - RNA, 23 nt, Human
cacugcaaccuccgccuccuggg

SEQ ID NO: 789226 - RNA, 24 nt, Human
cacuugggauaggugcugcuggua

SEQ ID NO: 789227 - RNA, 22 nt, Human
caggcagcaggccugggucugg

SEQ ID NO: 789228 - RNA, 21 nt, Human
caggcgcccgccauaacgccc

SEQ ID NO: 789229 - RNA, 20 nt, Human
cagggcccagggguaaccag

SEQ ID NO: 789230 - RNA, 20 nt, Human
caguuccuucauuagggagc

SEQ ID NO: 789231 - RNA, 22 nt, Human
cauaaggcccaucuuaugcagc

SEQ ID NO: 789232 - RNA, 22 nt, Human
ccaaagugcugggauuacaggc

SEQ ID NO: 789233 - RNA, 22 nt, Human
ccaaagugcugggauuacaggc

SEQ ID NO: 789234 - RNA, 24 nt, Human
ccaaagugcugggauuacaggcgu

SEQ ID NO: 789235 - RNA, 22 nt, Human
ccaaguaaagacccagagauac

SEQ ID NO: 789236 - RNA, 22 nt, Human
ccaaguagcugggauuacaggc

SEQ ID NO: 789237 - RNA, 19 nt, Human
ccacugcgcccagccuaaa

SEQ ID NO: 789238 - RNA, 19 nt, Human
ccacugcgcccagccuaaa

SEQ ID NO: 789239 - RNA, 24 nt, Human
ccacugcgcccagccuaaaaagga

SEQ ID NO: 789240 - RNA, 19 nt, Human
ccauguuggucaggcuggu

SEQ ID NO: 789241 - RNA, 22 nt, Human
ccauguuggucaggcuggucuc

SEQ ID NO: 789242 - RNA, 23 nt, Human
ccauguuggucaggcuggucucg

SEQ ID NO: 789243 - RNA, 21 nt, Human
cccaaacauguuccagggagu

SEQ ID NO: 789244 - RNA, 23 nt, Human
cccaaguagcugggauuacaggc

SEQ ID NO: 789245 - RNA, 24 nt, Human
cccaaguagcugggauuacaggcg

SEQ ID NO: 789246 - RNA, 24 nt, Human
ccgccuccuggguuuaagcgauuc

SEQ ID NO: 789247 - RNA, 21 nt, Human
ccuccaucuccuggaggcagg

SEQ ID NO: 789248 - RNA, 24 nt, Human
ccuccuggguuuaagcgauucuuc

SEQ ID NO: 789249 - RNA, 24 nt, Human
ccugccucggccucccaaagugcu

SEQ ID NO: 789250 - RNA, 18 nt, Human
ccugucgcccagacugga

SEQ ID NO: 789251 - RNA, 24 nt, Human
cgccauguuggucaggcuggucuc

SEQ ID NO: 789252 - RNA, 24 nt, Human
cgggguuucgccauguuggucagg

SEQ ID NO: 789253 - RNA, 24 nt, Human
cucacugcaaccuccgccuccugg

SEQ ID NO: 789254 - RNA, 24 nt, Human
cucagccucccaaguagcugggau

SEQ ID NO: 789255 - RNA, 24 nt, Human
cuccugaccucgugauccgccugc

SEQ ID NO: 789256 - RNA, 21 nt, Human
cuccuggguuuaagcgauucu

SEQ ID NO: 789257 - RNA, 23 nt, Human
cugcaaccuccgccuccuggguu

SEQ ID NO: 789258 - RNA, 24 nt, Human
cugcaaccuccgccuccuggguuu

SEQ ID NO: 789259 - RNA, 24 nt, Human
cuggagugcaauggcaugaucuca

SEQ ID NO: 789260 - RNA, 20 nt, Human
cuugcuccugucgcccagac

SEQ ID NO: 789261 - RNA, 24 nt, Human
cuugcuccugucgcccagacugga

SEQ ID NO: 789262 - RNA, 25 nt, Human
gaaacuucuaccaucccaaagugca

SEQ ID NO: 789263 - RNA, 21 nt, Human
gaaugcagaugcaggcagcag

SEQ ID NO: 789264 - RNA, 21 nt, Human
gaccaaguaaagacccagaga

SEQ ID NO: 789265 - RNA, 22 nt, Human
gaccucgugauccgccugccuc

SEQ ID NO: 789266 - RNA, 22 nt, Human
gaccucgugauccgccugccuc

SEQ ID NO: 789267 - RNA, 24 nt, Human
gaccucgugauccgccugccucgg

SEQ ID NO: 789268 - RNA, 22 nt, Human
gacuauguaacugugucagggu

SEQ ID NO: 789269 - RNA, 23 nt, Human
gagacgggguuucgccauguugg

SEQ ID NO: 789270 - RNA, 24 nt, Human
gagacgggguuucgccauguuggu

SEQ ID NO: 789271 - RNA, 18 nt, Human
gauuacaggcgcccgcca

SEQ ID NO: 789272 - RNA, 18 nt, Human
gauuacaggcguaagcca

SEQ ID NO: 789273 - RNA, 22 nt, Human
gauuacaggcguaagccacugc

SEQ ID NO: 789274 - RNA, 22 nt, Human
gauuacaggcguaagccacugc

SEQ ID NO: 789275 - RNA, 24 nt, Human
gcccagacuggagugcaauggcau

SEQ ID NO: 789276 - RNA, 18 nt, Human
gcccagcuaauuuuugua

SEQ ID NO: 789277 - RNA, 22 nt, Human
gcccagcuaauuuuuguauuuu

SEQ ID NO: 789278 - RNA, 18 nt, Human
gcccuagguggaagcccc

SEQ ID NO: 789279 - RNA, 18 nt, Human
gccugggucuggcuucug

SEQ ID NO: 789280 - RNA, 24 nt, Human
gcgauucuucugccucagccuccc

SEQ ID NO: 789281 - RNA, 21 nt, Human
gcuccugucgcccagacugga

SEQ ID NO: 789282 - RNA, 21 nt, Human
gcucucaguucuggagauaaa

SEQ ID NO: 789283 - RNA, 23 nt, Human
gcuggucucgaacuccugaccuc

SEQ ID NO: 789284 - RNA, 22 nt, Human
ggagauaaagugcuuacucuag

SEQ ID NO: 789285 - RNA, 22 nt, Human
ggaugauaauaaaaaacaaacu

SEQ ID NO: 789286 - RNA, 24 nt, Human
ggaugauaauaaaaaacaaacuuc

SEQ ID NO: 789287 - RNA, 22 nt, Human
ggauuacaggcguaagccacug

SEQ ID NO: 789288 - RNA, 20 nt, Human
ggccugggucuggcuucugg

SEQ ID NO: 789289 - RNA, 24 nt, Human
ggcuggucucgaacuccugaccuc

SEQ ID NO: 789290 - RNA, 19 nt, Human
ggcuucuggccuggguuug

SEQ ID NO: 789291 - RNA, 28 nt, Human
gggaacaauguagaauaaaccgguaccc

SEQ ID NO: 789292 - RNA, 19 nt, Human
gggaacagcuccaagaggg

SEQ ID NO: 789293 - RNA, 24 nt, Human
gggagggguucuugugcuccuuua

SEQ ID NO: 789294 - RNA, 19 nt, Human
gggcagggagggguucuug

SEQ ID NO: 789295 - RNA, 21 nt, Human
gggcccagggguaaccagcag

SEQ ID NO: 789296 - RNA, 23 nt, Human
gggguuucgccauguuggucagg

SEQ ID NO: 789297 - RNA, 19 nt, Human
ggucucgaacuccugaccu

SEQ ID NO: 789298 - RNA, 19 nt, Human
guaaagacccagagauacc

SEQ ID NO: 789299 - RNA, 23 nt, Human
guagagacgggguuucgccaugu

SEQ ID NO: 789300 - RNA, 18 nt, Human
guagcugggauuacaggc

SEQ ID NO: 789301 - RNA, 18 nt, Human
guucuugugcuccuuuaa

SEQ ID NO: 789302 - RNA, 27 nt, Human
uaagcgauucuucugccucagccuccc

SEQ ID NO: 789303 - RNA, 24 nt, Human
uaauuuuuguauuuuuaguagaga

SEQ ID NO: 789304 - RNA, 24 nt, Human
uacaggcguaagccacugcgccca

SEQ ID NO: 789305 - RNA, 20 nt, Human
uaccacuagguggcccuagg

SEQ ID NO: 789306 - RNA, 22 nt, Human
uagaaaggaccugagauaccua

SEQ ID NO: 789307 - RNA, 23 nt, Human
uagaauaaacaucugaccaagua

SEQ ID NO: 789308 - RNA, 22 nt, Human
uagagacgggguuucgccaugu

SEQ ID NO: 789309 - RNA, 23 nt, Human
uagcuccauucagggcccagggg

SEQ ID NO: 789310 - RNA, 27 nt, Human
uagcuccauucagggcccagggguaac

SEQ ID NO: 789311 - RNA, 22 nt, Human
uaguaaagacaaaaaaaggaaa

SEQ ID NO: 789312 - RNA, 24 nt, Human
uaguagagacgggguuucgccaug

SEQ ID NO: 789313 - RNA, 19 nt, Human
ucacuccuuaaugacgacc

SEQ ID NO: 789314 - RNA, 23 nt, Human
ucacugcaaccuccgccuccugg

SEQ ID NO: 789315 - RNA, 24 nt, Human
ucacugcaaccuccgccuccuggg

SEQ ID NO: 789316 - RNA, 25 nt, Human
ucacugcaaccuccgccuccugggu

SEQ ID NO: 789317 - RNA, 23 nt, Human
ucacugccgccggcgagugcugg

SEQ ID NO: 789318 - RNA, 20 nt, Human
ucagccucccaaguagcugg

SEQ ID NO: 789319 - RNA, 18 nt, Human
ucaguucuggagauaaag

SEQ ID NO: 789320 - RNA, 23 nt, Human
ucauuguuuuuaauuggcuuuau

SEQ ID NO: 789321 - RNA, 24 nt, Human
ucccaaagugcugggauuacaggc

SEQ ID NO: 789322 - RNA, 24 nt, Human
ucccaaguagcugggauuacaggc

SEQ ID NO: 789323 - RNA, 23 nt, Human
uccggcgcguccuuucacugccg

SEQ ID NO: 789324 - RNA, 21 nt, Human
uccuggguuuaagcgauucuu

SEQ ID NO: 789325 - RNA, 22 nt, Human
ucgccauguuggucaggcuggu

SEQ ID NO: 789326 - RNA, 24 nt, Human
ucgccauguuggucaggcuggucu

SEQ ID NO: 789327 - RNA, 18 nt, Human
ucgcccagacuggagugc

SEQ ID NO: 789328 - RNA, 18 nt, Human
ucggccucccaaagugcu

SEQ ID NO: 789329 - RNA, 19 nt, Human
ucuaccaucccaaagugca

SEQ ID NO: 789330 - RNA, 20 nt, Human
ucuccuggaggcagggugcu

SEQ ID NO: 789331 - RNA, 19 nt, Human
ucucgaacuccugaccucg

SEQ ID NO: 789332 - RNA, 24 nt, Human
ucugccucagccucccaaguagcu

SEQ ID NO: 789333 - RNA, 19 nt, Human
ucuggcuucuggccugggu

SEQ ID NO: 789334 - RNA, 25 nt, Human
ucuugcuccugucgcccagacugga

SEQ ID NO: 789335 - RNA, 19 nt, Human
ugagacagagucuugcucc

SEQ ID NO: 789336 - RNA, 23 nt, Human
ugagacagagucuugcuccuguc

SEQ ID NO: 789337 - RNA, 24 nt, Human
ugagcucauacucuguuccugggg

SEQ ID NO: 789338 - RNA, 21 nt, Human
ugaguuggugcagucuuuugu

SEQ ID NO: 789339 - RNA, 21 nt, Human
ugcauacauaggaaagggaca

SEQ ID NO: 789340 - RNA, 23 nt, Human
ugcauaguaaagacaaaaaaagg

SEQ ID NO: 789341 - RNA, 24 nt, Human
ugccucagccucccaaguagcugg

SEQ ID NO: 789342 - RNA, 21 nt, Human
ugccucggccucccaaagugc

SEQ ID NO: 789343 - RNA, 24 nt, Human
ugccucggccucccaaagugcugg

SEQ ID NO: 789344 - RNA, 24 nt, Human
ugcugcugguaccaaaugugauuu

SEQ ID NO: 789345 - RNA, 24 nt, Human
ugcugggauuacaggcguaagcca

SEQ ID NO: 789346 - RNA, 22 nt, Human
uggaagccccaaacauguucca

SEQ ID NO: 789347 - RNA, 20 nt, Human
uggagccugcagaagcugcu

SEQ ID NO: 789348 - RNA, 23 nt, Human
uggagccugcagaagcugcuggc

SEQ ID NO: 789349 - RNA, 19 nt, Human
uggaggcagggugcccaag

SEQ ID NO: 789350 - RNA, 19 nt, Human
uggagugcaauggcaugau

SEQ ID NO: 789351 - RNA, 24 nt, Human
uggagugcaauggcaugaucucag

SEQ ID NO: 789352 - RNA, 24 nt, Human
uggcaugaucucagcucacugcaa

SEQ ID NO: 789353 - RNA, 20 nt, Human
uggcccuagguggaagcccc

SEQ ID NO: 789354 - RNA, 20 nt, Human
uggccuggguuuggagccug

SEQ ID NO: 789355 - RNA, 26 nt, Human
uggcuucuggccuggguuuggagccu

SEQ ID NO: 789356 - RNA, 18 nt, Human
ugggauuacaggcgcccg

SEQ ID NO: 789357 - RNA, 19 nt, Human
ugggauuacaggcgcccgc

SEQ ID NO: 789358 - RNA, 21 nt, Human
ugggauuacaggcgcccgcca

SEQ ID NO: 789359 - RNA, 21 nt, Human
ugggauuacaggcgcccgcca

SEQ ID NO: 789360 - RNA, 22 nt, Human
ugggauuacaggcgcccgccau

SEQ ID NO: 789361 - RNA, 19 nt, Human
ugggauuacaggcguaagc

SEQ ID NO: 789362 - RNA, 21 nt, Human
ugggauuacaggcguaagcca

SEQ ID NO: 789363 - RNA, 22 nt, Human
ugggauuacaggcguaagccac

SEQ ID NO: 789364 - RNA, 22 nt, Human
ugggauuacaggcguaagccac

SEQ ID NO: 789365 - RNA, 24 nt, Human
ugggauuacaggcguaagccacug

SEQ ID NO: 789366 - RNA, 26 nt, Human
ugggauuacaggcguaagccacugcg

SEQ ID NO: 789367 - RNA, 24 nt, Human
uggucaggcuggucucgaacuccu

SEQ ID NO: 789368 - RNA, 22 nt, Human
ugucagggugaguuggugcagu

SEQ ID NO: 789369 - RNA, 21 nt, Human
ugucccaucuuccccacucuc

SEQ ID NO: 789370 - RNA, 20 nt, Human
ugucgcccagacuggagugc

SEQ ID NO: 789371 - RNA, 21 nt, Human
ugugggcugucccaucuuccc

SEQ ID NO: 789372 - RNA, 18 nt, Human
ugugucagggugaguugg

SEQ ID NO: 789373 - RNA, 19 nt, Human
uuagaaaggaccugagaua

SEQ ID NO: 789374 - RNA, 19 nt, Human
uuagaaucggucugcauca

SEQ ID NO: 789375 - RNA, 18 nt, Human
uuaguagagacgggguuu

SEQ ID NO: 789376 - RNA, 22 nt, Human
uuaguagagacgggguuucgcc

SEQ ID NO: 789377 - RNA, 24 nt, Human
uuaguagagacgggguuucgccau

SEQ ID NO: 789378 - RNA, 23 nt, Human
uuguauuuuuaguagagacgggg

SEQ ID NO: 789379 - RNA, 24 nt, Human
uuuaagcgauucuucugccucagc

SEQ ID NO: 789380 - RNA, 24 nt, Human
uuucgccauguuggucaggcuggu

SEQ ID NO: 789381 - RNA, 22 nt, Human
uuuuagcuccauucagggccca

SEQ ID NO: 789382 - RNA, 23 nt, Human
uuuuuaguagagacgggguuucg

SEQ ID NO: 789383 - RNA, 24 nt, Human
uuuuuaguagagacgggguuucgc

SEQ ID NO: 789384 - RNA, 20 nt, Human
uuuuuguauuuuuaguagag

SEQ ID NO: 789385 - RNA, 24 nt, Human
uuuuuuuuuuuugagacagagucu

SEQ ID NO: 789386 - RNA, 21 nt, Human
aacacuggugggcaugggugu

SEQ ID NO: 789387 - RNA, 20 nt, Human
aagaccaacacuggugggca

SEQ ID NO: 789388 - RNA, 19 nt, Human
aagcaggucucaggcuuug

SEQ ID NO: 789389 - RNA, 20 nt, Human
accagcgccgagaugacauu

SEQ ID NO: 789390 - RNA, 22 nt, Human
agccaggggugggcagugcagg

SEQ ID NO: 789391 - RNA, 24 nt, Human
agccuccgaggggcuccugcccag

SEQ ID NO: 789392 - RNA, 24 nt, Human
agcgccgagaugacauugcccagu

SEQ ID NO: 789393 - RNA, 30 nt, Human
agucagacagaggcacaguuccuucccagg

SEQ ID NO: 789394 - RNA, 18 nt, Human
caccccauggggcagggc

SEQ ID NO: 789395 - RNA, 20 nt, Human
ccccggagcgcuguguggca

SEQ ID NO: 789396 - RNA, 19 nt, Human
ccgcucgcccguggccccg

SEQ ID NO: 789397 - RNA, 25 nt, Human
ccuugagccgcucgcccguggcccc

SEQ ID NO: 789398 - RNA, 19 nt, Human
cggaaacacugauguggua

SEQ ID NO: 789399 - RNA, 23 nt, Human
cggagcgcuguguggcagguggg

SEQ ID NO: 789400 - RNA, 22 nt, Human
cucgcugcccgccagguccacc

SEQ ID NO: 789401 - RNA, 22 nt, Human
cugccgcucgcugcccgccagg

SEQ ID NO: 789402 - RNA, 25 nt, Human
cugcugugggaccccugugccaccc

SEQ ID NO: 789403 - RNA, 21 nt, Human
gaccagccaggggugggcagu

SEQ ID NO: 789404 - RNA, 18 nt, Human
gagcgacagguugaucuu

SEQ ID NO: 789405 - RNA, 18 nt, Human
gcagcuuaauguggagug

SEQ ID NO: 789406 - RNA, 23 nt, Human
gcaggcaauggcaagcagcugug

SEQ ID NO: 789407 - RNA, 21 nt, Human
gcuccugcccagggcggaggu

SEQ ID NO: 789408 - RNA, 26 nt, Human
ggaggugggcucucugggggggaucc

SEQ ID NO: 789409 - RNA, 21 nt, Human
gggcagggcagugcuuaggaa

SEQ ID NO: 789410 - RNA, 24 nt, Human
gggcagugcaggaagaccugcugu

SEQ ID NO: 789411 - RNA, 23 nt, Human
gugaagcaggucucaggcuuuga

SEQ ID NO: 789412 - RNA, 23 nt, Human
gugagcagacggaaacacugaug

SEQ ID NO: 789413 - RNA, 18 nt, Human
guggaguggccuuccuug

SEQ ID NO: 789414 - RNA, 23 nt, Human
uaaggaggacuauacagccuccg

SEQ ID NO: 789415 - RNA, 23 nt, Human
uaauguggaguggccuuccuugg

SEQ ID NO: 789416 - RNA, 23 nt, Human
uacagcgcccguccaccagcgcc

SEQ ID NO: 789417 - RNA, 23 nt, Human
uaggggacgugcuuacagcgccc

SEQ ID NO: 789418 - RNA, 19 nt, Human
ucccagggcugagggagcc

SEQ ID NO: 789419 - RNA, 22 nt, Human
ucccagggcugagggagcccuc

SEQ ID NO: 789420 - RNA, 23 nt, Human
uccuugagccgcucgcccguggc

SEQ ID NO: 789421 - RNA, 19 nt, Human
ucgcugcccgccaggucca

SEQ ID NO: 789422 - RNA, 19 nt, Human
ugaacagcuggagcaggcc

SEQ ID NO: 789423 - RNA, 24 nt, Human
ugccuauaaggcaggcaauggcaa

SEQ ID NO: 789424 - RNA, 24 nt, Human
uggccccggucuuggacugccgcu

SEQ ID NO: 789425 - RNA, 20 nt, Human
ugggaccccugugccacccc

SEQ ID NO: 789426 - RNA, 18 nt, Human
ugggagggccuggcaguc

SEQ ID NO: 789427 - RNA, 24 nt, Human
ugggcaugggugugggcucugugg

SEQ ID NO: 789428 - RNA, 19 nt, Human
uggggccagucagacagag

SEQ ID NO: 789429 - RNA, 20 nt, Human
uggugaaggccgugaagcag

SEQ ID NO: 789430 - RNA, 23 nt, Human
uguggcaggugggaggagaccug

SEQ ID NO: 789431 - RNA, 19 nt, Human
ugugucuucccagggcuga

SEQ ID NO: 789432 - RNA, 21 nt, Human
uuccuugggccacagaccagc

SEQ ID NO: 789433 - RNA, 18 nt, Human
ggcaggaaaaaaguagug

SEQ ID NO: 789434 - RNA, 22 nt, Human
uggggcucucugguguacucca

SEQ ID NO: 789435 - RNA, 22 nt, Human
uuugaugucagguucugccaag

SEQ ID NO: 789436 - RNA, 21 nt, Human
uuuuguguguguguuggcugg

SEQ ID NO: 789437 - RNA, 27 nt, Human
aaaaauaauguaaggaaaccgguaccc

SEQ ID NO: 789438 - RNA, 22 nt, Human
aaaaauagcaacagggggaccg

SEQ ID NO: 789439 - RNA, 21 nt, Human
aaaccagaguguugacacuga

SEQ ID NO: 789440 - RNA, 22 nt, Human
aaacuagaaagagaauguacag

SEQ ID NO: 789441 - RNA, 18 nt, Human
aagcuucauuuucggccc

SEQ ID NO: 789442 - RNA, 22 nt, Human
aauuguuuguuuuuaaacccau

SEQ ID NO: 789443 - RNA, 18 nt, Human
acacugagcgccgaggag

SEQ ID NO: 789444 - RNA, 21 nt, Human
accaauauguuccccaaccug

SEQ ID NO: 789445 - RNA, 22 nt, Human
acucccagcucagagcaggaau

SEQ ID NO: 789446 - RNA, 22 nt, Human
agacaaagacauagacccugca

SEQ ID NO: 789447 - RNA, 18 nt, Human
agcgagcucucuugaucu

SEQ ID NO: 789448 - RNA, 19 nt, Human
aggaauuuuggaggucagg

SEQ ID NO: 789449 - RNA, 20 nt, Human
aggcccuuucacgcuguccc

SEQ ID NO: 789450 - RNA, 19 nt, Human
aucagaaauauguguagca

SEQ ID NO: 789451 - RNA, 24 nt, Human
caaagaaagcgucucaaaucuauu

SEQ ID NO: 789452 - RNA, 23 nt, Human
caaagaacucccagcucagagca

SEQ ID NO: 789453 - RNA, 21 nt, Human
caaauguagcugggcuuccaa

SEQ ID NO: 789454 - RNA, 23 nt, Human
cagagcaggaauauccugcuuaa

SEQ ID NO: 789455 - RNA, 22 nt, Human
caggaauauccugcuuaagaaa

SEQ ID NO: 789456 - RNA, 26 nt, Human
cauagacccugcaaugcuggccucuu

SEQ ID NO: 789457 - RNA, 22 nt, Human
ccccaaccugcuuggaucaaau

SEQ ID NO: 789458 - RNA, 24 nt, Human
ccuauuuauucucuaucaucaaaa

SEQ ID NO: 789459 - RNA, 22 nt, Human
cuaaaccagaguguugacacug

SEQ ID NO: 789460 - RNA, 28 nt, Human
cucagagcaggaauauccugcuuaagaa

SEQ ID NO: 789461 - RNA, 21 nt, Human
gggaacguacacucuucuggc

SEQ ID NO: 789462 - RNA, 19 nt, Human
ggugucaagcaggagacca

SEQ ID NO: 789463 - RNA, 18 nt, Human
uaaaaaauaauguaagga

SEQ ID NO: 789464 - RNA, 23 nt, Human
uaagaaagugcaagaguaaaagc

SEQ ID NO: 789465 - RNA, 22 nt, Human
ucaucaaaaauagcaacagggg

SEQ ID NO: 789466 - RNA, 22 nt, Human
ucauuuucggcccucucuggcc

SEQ ID NO: 789467 - RNA, 21 nt, Human
uccucacagcagugaugguug

SEQ ID NO: 789468 - RNA, 22 nt, Human
ucugugaguacccaccagucua

SEQ ID NO: 789469 - RNA, 19 nt, Human
ucuuggauuccacaggccc

SEQ ID NO: 789470 - RNA, 21 nt, Human
ugagguuagcaacauuggucc

SEQ ID NO: 789471 - RNA, 19 nt, Human
ugcuaaaccagaguguuga

SEQ ID NO: 789472 - RNA, 21 nt, Human
ugggcuuccaaagaaagcguc

SEQ ID NO: 789473 - RNA, 19 nt, Human
uguaggaaaaggaaauucc

SEQ ID NO: 789474 - RNA, 18 nt, Human
uuaaacccauuauugcua

SEQ ID NO: 789475 - RNA, 19 nt, Human
uuccaaagaaagcgucuca

SEQ ID NO: 789476 - RNA, 21 nt, Human
uugacacugagcgccgaggag

SEQ ID NO: 789477 - RNA, 23 nt, Human
aaaaaccucucugaaacaaaucc

SEQ ID NO: 789478 - RNA, 22 nt, Human
aaaaccucucugaaacaaaucc

SEQ ID NO: 789479 - RNA, 25 nt, Human
aaacaaggugugagaacucauaugg

SEQ ID NO: 789480 - RNA, 23 nt, Human
aaaguccugcuacagagcuuucu

SEQ ID NO: 789481 - RNA, 27 nt, Human
aagaaaaaaagauucagguuuaaaaaa

SEQ ID NO: 789482 - RNA, 23 nt, Human
acagagcuuucuucagucucaua

SEQ ID NO: 789483 - RNA, 18 nt, Human
acucauaugauuaagacu

SEQ ID NO: 789484 - RNA, 19 nt, Human
aggaagaauauacugaaaa

SEQ ID NO: 789485 - RNA, 19 nt, Human
auaaaacuagagagggaaa

SEQ ID NO: 789486 - RNA, 24 nt, Human
auaaaacuagagagggaaaaaaac

SEQ ID NO: 789487 - RNA, 19 nt, Human
auucugaauucccauccag

SEQ ID NO: 789488 - RNA, 22 nt, Human
cagagcuuucuucagucucaua

SEQ ID NO: 789489 - RNA, 21 nt, Human
gaaacaaauccacauuguaga

SEQ ID NO: 789490 - RNA, 21 nt, Human
gagcuuucuucagucucauau

SEQ ID NO: 789491 - RNA, 24 nt, Human
gcaccagcaggucugacuuucaac

SEQ ID NO: 789492 - RNA, 24 nt, Human
uaaaaaccucucugaaacaaaucc

SEQ ID NO: 789493 - RNA, 19 nt, Human
uaaaacaaggugugagaac

SEQ ID NO: 789494 - RNA, 28 nt, Human
uaaccuuaacuuuggauuuauuugauuc

SEQ ID NO: 789495 - RNA, 24 nt, Human
ucugaagauucugaauucccaucc

SEQ ID NO: 789496 - RNA, 22 nt, Human
uggaggcaccagcaggucugac

SEQ ID NO: 789497 - RNA, 24 nt, Human
uuaaaacaaggugugagaacucau

SEQ ID NO: 789498 - RNA, 21 nt, Human
uuaggaagaauauacugaaaa

SEQ ID NO: 789499 - RNA, 18 nt, Human
uuagggaaugguuuuaug

SEQ ID NO: 789500 - RNA, 20 nt, Human
uuauccaaagaaaaaaagau

SEQ ID NO: 789501 - RNA, 21 nt, Human
uucccauccagggugcaucua

SEQ ID NO: 789502 - RNA, 22 nt, Human
uuugauucuucauucuuuccuu

SEQ ID NO: 789503 - RNA, 21 nt, Human
uuuuagagauuuuguuagcug

SEQ ID NO: 789504 - RNA, 18 nt, Human
uuuuuuuuuuuuuuuuug

SEQ ID NO: 789505 - RNA, 19 nt, Human
uuuuuuuuuuuuuuuuugu

SEQ ID NO: 789506 - RNA, 21 nt, Human
accacaugauaaaaaaaauca

SEQ ID NO: 789507 - RNA, 21 nt, Human
agaaacauuauuaggaggaaa

SEQ ID NO: 789508 - RNA, 25 nt, Human
auaaaacagaacccauagguagccu

SEQ ID NO: 789509 - RNA, 22 nt, Human
auaguauauacaccacaaaaca

SEQ ID NO: 789510 - RNA, 20 nt, Human
caccacaaaacagacacuuu

SEQ ID NO: 789511 - RNA, 23 nt, Human
caccacaaaacagacacuuucca

SEQ ID NO: 789512 - RNA, 24 nt, Human
cauuuuuuuccccugacaguauca

SEQ ID NO: 789513 - RNA, 22 nt, Human
ccacaugauaaaaaaaaucacu

SEQ ID NO: 789514 - RNA, 21 nt, Human
cccauuuuuuuccccugacag

SEQ ID NO: 789515 - RNA, 23 nt, Human
cugacagcuucuggugaggucuu

SEQ ID NO: 789516 - RNA, 21 nt, Human
cugacccauuuuuuuccccug

SEQ ID NO: 789517 - RNA, 24 nt, Human
gaguucugacccauuuuuuucccc

SEQ ID NO: 789518 - RNA, 21 nt, Human
uaaguuaacaaaagagaaaca

SEQ ID NO: 789519 - RNA, 23 nt, Human
uaaguuaacaaaagagaaacauu

SEQ ID NO: 789520 - RNA, 20 nt, Human
uacaccacaaaacagacacc

SEQ ID NO: 789521 - RNA, 23 nt, Human
uacaccacaaaacagacacuuuc

SEQ ID NO: 789522 - RNA, 18 nt, Human
uauacaaauaaaacagaa

SEQ ID NO: 789523 - RNA, 21 nt, Human
uauacaaauaaaacagaaccc

SEQ ID NO: 789524 - RNA, 22 nt, Human
ucaaguuguugagccguucugc

SEQ ID NO: 789525 - RNA, 21 nt, Human
uccacugacagcuucugguga

SEQ ID NO: 789526 - RNA, 22 nt, Human
ugaaaaauaaauaaguuaacaa

SEQ ID NO: 789527 - RNA, 22 nt, Human
ugacaacauaaauacaaauaaa

SEQ ID NO: 789528 - RNA, 18 nt, Human
ugacagaugcugaguucu

SEQ ID NO: 789529 - RNA, 19 nt, Human
ugacagaugcugaguucug

SEQ ID NO: 789530 - RNA, 21 nt, Human
uuagaaaaugcugugauuuua

SEQ ID NO: 789531 - RNA, 18 nt, Human
uuaggaggaaaaugaaaa

SEQ ID NO: 789532 - RNA, 25 nt, Human
uuccccugacaguaucaauaggcug

SEQ ID NO: 789533 - RNA, 33 nt, Human
aaaaaauaaaaggacaucacaacaaagaaaaag

SEQ ID NO: 789534 - RNA, 19 nt, Human
aaaagcaucauuacuacag

SEQ ID NO: 789535 - RNA, 23 nt, Human
aaacagcaucugugcuuuucuca

SEQ ID NO: 789536 - RNA, 22 nt, Human
aaagaaaaacaauacauuuaca

SEQ ID NO: 789537 - RNA, 19 nt, Human
aacacuugaacuggaacug

SEQ ID NO: 789538 - RNA, 21 nt, Human
aacacuugaacuggaacuggu

SEQ ID NO: 789539 - RNA, 20 nt, Human
aacuuggcauaucaacagug

SEQ ID NO: 789540 - RNA, 22 nt, Human
aagagaaaaaaaaaaagcagag

SEQ ID NO: 789541 - RNA, 21 nt, Human
aauaaauaaugcacugcacaa

SEQ ID NO: 789542 - RNA, 21 nt, Human
acagcagcaggguucuucgca

SEQ ID NO: 789543 - RNA, 21 nt, Human
agagaaaaaaaaaaagcagag

SEQ ID NO: 789544 - RNA, 18 nt, Human
agcaccaacagauccauu

SEQ ID NO: 789545 - RNA, 22 nt, Human
agcuugaccuucacagcaaaaa

SEQ ID NO: 789546 - RNA, 21 nt, Human
aggcuguucaccagcaaaggg

SEQ ID NO: 789547 - RNA, 19 nt, Human
auggauguguguguaugca

SEQ ID NO: 789548 - RNA, 22 nt, Human
auguguguguaugcacgagugu

SEQ ID NO: 789549 - RNA, 23 nt, Human
caaacaggcuguucaccagcaaa

SEQ ID NO: 789550 - RNA, 19 nt, Human
caacaaagaaaaacaauac

SEQ ID NO: 789551 - RNA, 20 nt, Human
caacaaagaaaaacaauaca

SEQ ID NO: 789552 - RNA, 22 nt, Human
caacagcccgcccaagccaaac

SEQ ID NO: 789553 - RNA, 20 nt, Human
caacaggcacccuuucuucu

SEQ ID NO: 789554 - RNA, 27 nt, Human
caccaacagauccauucgcagagucag

SEQ ID NO: 789555 - RNA, 22 nt, Human
cacccuuucuucuccugucaaa

SEQ ID NO: 789556 - RNA, 19 nt, Human
cagcacagcagcaggguuc

SEQ ID NO: 789557 - RNA, 21 nt, Human
cagcacaucugcauucuuugg

SEQ ID NO: 789558 - RNA, 22 nt, Human
cagcacaucugcauucuuuggu

SEQ ID NO: 789559 - RNA, 22 nt, Human
cagccgaaacagcaucugugcu

SEQ ID NO: 789560 - RNA, 21 nt, Human
cagccuuuucuucgcuggagc

SEQ ID NO: 789561 - RNA, 24 nt, Human
caggaacaaaaccagacugcuuaa

SEQ ID NO: 789562 - RNA, 25 nt, Human
caucugugcuuuucucagagucuuu

SEQ ID NO: 789563 - RNA, 21 nt, Human
caugucuguaaacuucaaggc

SEQ ID NO: 789564 - RNA, 20 nt, Human
cauuacaagaccacgagaca

SEQ ID NO: 789565 - RNA, 23 nt, Human
ccaaacacguugggcaggcccgc

SEQ ID NO: 789566 - RNA, 20 nt, Human
ccaagccaaacacguugggc

SEQ ID NO: 789567 - RNA, 19 nt, Human
cccgcacuacaggcccagu

SEQ ID NO: 789568 - RNA, 23 nt, Human
cccgcacuacaggcccagugaga

SEQ ID NO: 789569 - RNA, 20 nt, Human
cccugugcuauuucgucuuc

SEQ ID NO: 789570 - RNA, 19 nt, Human
ccgaaacagcaucugugcu

SEQ ID NO: 789571 - RNA, 19 nt, Human
ccucuccuuuugaagugcu

SEQ ID NO: 789572 - RNA, 20 nt, Human
cgcuggagcccacggcauuc

SEQ ID NO: 789573 - RNA, 21 nt, Human
cguggaggccacagcagcggc

SEQ ID NO: 789574 - RNA, 24 nt, Human
cuauuucgucuucuaagagggagg

SEQ ID NO: 789575 - RNA, 23 nt, Human
cucaaauuucaucucuccuaggg

SEQ ID NO: 789576 - RNA, 20 nt, Human
cuggguccagcuguccggga

SEQ ID NO: 789577 - RNA, 18 nt, Human
cuguaaacuucaaggcua

SEQ ID NO: 789578 - RNA, 21 nt, Human
cugucuggcaagaacccuccc

SEQ ID NO: 789579 - RNA, 20 nt, Human
gagcaacugcaaauucagga

SEQ ID NO: 789580 - RNA, 19 nt, Human
gaucaccucucaaauuuca

SEQ ID NO: 789581 - RNA, 24 nt, Human
gcaaacaggcuguucaccagcaaa

SEQ ID NO: 789582 - RNA, 24 nt, Human
gcagccgaaacagcaucugugcuu

SEQ ID NO: 789583 - RNA, 22 nt, Human
gcaucaggggcagcacagcagc

SEQ ID NO: 789584 - RNA, 21 nt, Human
gccaccuggguagauccuuca

SEQ ID NO: 789585 - RNA, 20 nt, Human
gcuccacccaucuucuuccc

SEQ ID NO: 789586 - RNA, 19 nt, Human
gggagaaggaauguuucuu

SEQ ID NO: 789587 - RNA, 20 nt, Human
gggagaaggaauguuucuug

SEQ ID NO: 789588 - RNA, 20 nt, Human
ggguagaagaggcccggggc

SEQ ID NO: 789589 - RNA, 20 nt, Human
guguauggauguguguguau

SEQ ID NO: 789590 - RNA, 24 nt, Human
guuauucaucauuuucauuguuuu

SEQ ID NO: 789591 - RNA, 23 nt, Human
uaaauuucagcuugaccuucaca

SEQ ID NO: 789592 - RNA, 18 nt, Human
uaacugugaguguaaaca

SEQ ID NO: 789593 - RNA, 18 nt, Human
uaacuuggcauaucaaca

SEQ ID NO: 789594 - RNA, 19 nt, Human
uaacuuggcauaucaacag

SEQ ID NO: 789595 - RNA, 19 nt, Human
uaaugcuguuuuagcuuug

SEQ ID NO: 789596 - RNA, 22 nt, Human
uacaagaccacgagacaaugga

SEQ ID NO: 789597 - RNA, 24 nt, Human
uaccaagagaaaaaaaaaaagcag

SEQ ID NO: 789598 - RNA, 33 nt, Human
uagaaacauggauggguagaagaggcccggggg

SEQ ID NO: 789599 - RNA, 22 nt, Human
uaucuuacaugauagcaguuuu

SEQ ID NO: 789600 - RNA, 23 nt, Human
ucaacagcccgcccaagccaaac

SEQ ID NO: 789601 - RNA, 19 nt, Human
ucaacaguguaaguagggu

SEQ ID NO: 789602 - RNA, 21 nt, Human
ucaaggcuaguuuagagcuga

SEQ ID NO: 789603 - RNA, 19 nt, Human
ucacaacaaagaaaaacaa

SEQ ID NO: 789604 - RNA, 23 nt, Human
ucacaacaaagaaaaacaauaca

SEQ ID NO: 789605 - RNA, 21 nt, Human
ucccugacguggaggccacag

SEQ ID NO: 789606 - RNA, 21 nt, Human
uccggcgguggcagcuguugc

SEQ ID NO: 789607 - RNA, 20 nt, Human
ucgggacagaggcguucaca

SEQ ID NO: 789608 - RNA, 21 nt, Human
ucgguuucugaaaugaggaaa

SEQ ID NO: 789609 - RNA, 19 nt, Human
ucucaaauuucaucucucc

SEQ ID NO: 789610 - RNA, 24 nt, Human
ucugcagucuuauccaggcucucc

SEQ ID NO: 789611 - RNA, 24 nt, Human
ucuuuauuuauucaucuauuuauu

SEQ ID NO: 789612 - RNA, 18 nt, Human
ugagaaggcggucaaaca

SEQ ID NO: 789613 - RNA, 18 nt, Human
ugaggaaaacagcacauc

SEQ ID NO: 789614 - RNA, 20 nt, Human
ugaguguaaacaguaggacu

SEQ ID NO: 789615 - RNA, 18 nt, Human
ugccuuauuauugcugcg

SEQ ID NO: 789616 - RNA, 25 nt, Human
uggagggaagcccaugaggccugcc

SEQ ID NO: 789617 - RNA, 18 nt, Human
uggcagcaucaggggcag

SEQ ID NO: 789618 - RNA, 23 nt, Human
uguaaacaguaggacuaccacuu

SEQ ID NO: 789619 - RNA, 19 nt, Human
uguaugcacgaguguggga

SEQ ID NO: 789620 - RNA, 21 nt, Human
uguaugcacgagugugggaac

SEQ ID NO: 789621 - RNA, 19 nt, Human
uguauggauguguguguau

SEQ ID NO: 789622 - RNA, 20 nt, Human
uguguguaugcacgagugug

SEQ ID NO: 789623 - RNA, 20 nt, Human
uuaaacacuugaacuggaac

SEQ ID NO: 789624 - RNA, 19 nt, Human
uucacagcaaaaaaauuaa

SEQ ID NO: 789625 - RNA, 25 nt, Human
uuccuuaaaaagacaugaucaccuc

SEQ ID NO: 789626 - RNA, 21 nt, Human
uuccuuugagcagcacuuucu

SEQ ID NO: 789627 - RNA, 23 nt, Human
uuccuuugagcagcacuuucuuc

SEQ ID NO: 789628 - RNA, 19 nt, Human
uucgucuucuaagagggag

SEQ ID NO: 789629 - RNA, 18 nt, Human
uucuaagagggaggacuc

SEQ ID NO: 789630 - RNA, 18 nt, Human
uucuauuucauccccccc

SEQ ID NO: 789631 - RNA, 23 nt, Human
uugggccuucuuccucuucugcu

SEQ ID NO: 789632 - RNA, 20 nt, Human
uuugaagugcugucuuccgg

SEQ ID NO: 789633 - RNA, 22 nt, Human
agagggaggagccggaaccgcc

SEQ ID NO: 789634 - RNA, 19 nt, Human
agccggaaccgcccggcgc

SEQ ID NO: 789635 - RNA, 18 nt, Human
cccggcgcagcugagggc

SEQ ID NO: 789636 - RNA, 22 nt, Human
ccuuccuuucuuuucugauuuu

SEQ ID NO: 789637 - RNA, 23 nt, Human
uaacuuuagcuuccauuccaagu

SEQ ID NO: 789638 - RNA, 27 nt, Human
ugaggcacaaggagagggaggagccgg

SEQ ID NO: 789639 - RNA, 22 nt, Human
aaacaaaugaacaggaaaucuc

SEQ ID NO: 789640 - RNA, 23 nt, Human
aaacaaaugugaauagaauccau

SEQ ID NO: 789641 - RNA, 30 nt, Human
aaacagcaucacaagaugucacagacuaaa

SEQ ID NO: 789642 - RNA, 23 nt, Human
aaacauucacuuuugccugauga

SEQ ID NO: 789643 - RNA, 20 nt, Human
aaacccuccucagaacucca

SEQ ID NO: 789644 - RNA, 24 nt, Human
aaacuuguuaucaaugccucuucu

SEQ ID NO: 789645 - RNA, 24 nt, Human
aaaguguugagauuacagauguga

SEQ ID NO: 789646 - RNA, 24 nt, Human
aacagcaucacaagaugucacaga

SEQ ID NO: 789647 - RNA, 26 nt, Human
aagauaaacagcaucacaagauguca

SEQ ID NO: 789648 - RNA, 25 nt, Human
aagcaauccucccaccucagccucc

SEQ ID NO: 789649 - RNA, 19 nt, Human
aaguagguacugcuugcgu

SEQ ID NO: 789650 - RNA, 25 nt, Human
aagugauccucccaccuuggccucc

SEQ ID NO: 789651 - RNA, 25 nt, Human
aagugauccucccaccuuggccucc

SEQ ID NO: 789652 - RNA, 19 nt, Human
aaucauggcucacugcagc

SEQ ID NO: 789653 - RNA, 22 nt, Human
aauuauguacauuaacaaccuu

SEQ ID NO: 789654 - RNA, 20 nt, Human
aauuuuuuucaauacacaga

SEQ ID NO: 789655 - RNA, 23 nt, Human
acacugcacaaaacgcaguccac

SEQ ID NO: 789656 - RNA, 19 nt, Human
acagaauugcagaaacugc

SEQ ID NO: 789657 - RNA, 21 nt, Human
acaggccccugaaaagcacca

SEQ ID NO: 789658 - RNA, 20 nt, Human
accaugacaauaaauuuggc

SEQ ID NO: 789659 - RNA, 23 nt, Human
acccaggcuggagugcaguggug

SEQ ID NO: 789660 - RNA, 19 nt, Human
acugcuauuuacuggaaug

SEQ ID NO: 789661 - RNA, 22 nt, Human
agaaaaaucugaauauaacagg

SEQ ID NO: 789662 - RNA, 24 nt, Human
agauuacagaugugagccacugca

SEQ ID NO: 789663 - RNA, 24 nt, Human
agcaucucccauucccgaugaguc

SEQ ID NO: 789664 - RNA, 23 nt, Human
agccauuaccaugaaggaacuaa

SEQ ID NO: 789665 - RNA, 19 nt, Human
aguagcagaaaauucuucu

SEQ ID NO: 789666 - RNA, 19 nt, Human
aguagcagaaaauucuucu

SEQ ID NO: 789667 - RNA, 19 nt, Human
aguagcugggacuaugggc

SEQ ID NO: 789668 - RNA, 21 nt, Human
aguagcugggacuaugggcau

SEQ ID NO: 789669 - RNA, 20 nt, Human
agugcaguggugcaaucaug

SEQ ID NO: 789670 - RNA, 23 nt, Human
agugcaguggugcaaucauggcu

SEQ ID NO: 789671 - RNA, 23 nt, Human
auaaacaaacauucacuuuugcc

SEQ ID NO: 789672 - RNA, 18 nt, Human
auagagacggggucuccc

SEQ ID NO: 789673 - RNA, 21 nt, Human
auagaugaagaaaaaaaguag

SEQ ID NO: 789674 - RNA, 21 nt, Human
aucaguuuacauaaaguuaua

SEQ ID NO: 789675 - RNA, 22 nt, Human
augauuacaggaaaaaaaagua

SEQ ID NO: 789676 - RNA, 24 nt, Human
auggcucacugcagccuugaccuc

SEQ ID NO: 789677 - RNA, 20 nt, Human
augggguggcacugugcccc

SEQ ID NO: 789678 - RNA, 23 nt, Human
caaaauacacaaauacacuuuca

SEQ ID NO: 789679 - RNA, 25 nt, Human
caaacuccugggcucaagugauccu

SEQ ID NO: 789680 - RNA, 24 nt, Human
caaaguguugagauuacagaugug

SEQ ID NO: 789681 - RNA, 25 nt, Human
caaccgguuucuaaaacccucaaaa

SEQ ID NO: 789682 - RNA, 24 nt, Human
caaguugaaaauacaugacuuagu

SEQ ID NO: 789683 - RNA, 21 nt, Human
caauaaauuuggcuaaacauu

SEQ ID NO: 789684 - RNA, 22 nt, Human
cacacaggccccugaaaagcac

SEQ ID NO: 789685 - RNA, 22 nt, Human
cacagauaaggcuucccuuuga

SEQ ID NO: 789686 - RNA, 24 nt, Human
cacccaggcuggagugcaguggug

SEQ ID NO: 789687 - RNA, 20 nt, Human
caccggggaaagcauccagg

SEQ ID NO: 789688 - RNA, 24 nt, Human
caccucagccuccugaguagcugg

SEQ ID NO: 789689 - RNA, 18 nt, Human
caccugguuacccagggc

SEQ ID NO: 789690 - RNA, 18 nt, Human
cacuucacugcuauaaug

SEQ ID NO: 789691 - RNA, 25 nt, Human
cagcaacacugugaugggguggcac

SEQ ID NO: 789692 - RNA, 20 nt, Human
cagccuccugaguagcuggg

SEQ ID NO: 789693 - RNA, 22 nt, Human
caggccccugaaaagcaccaug

SEQ ID NO: 789694 - RNA, 23 nt, Human
cagugccaaggacuuuacagaac

SEQ ID NO: 789695 - RNA, 24 nt, Human
cauaaaauacuugaggcuggugac

SEQ ID NO: 789696 - RNA, 19 nt, Human
cauccguuuuaauuauccc

SEQ ID NO: 789697 - RNA, 27 nt, Human
cauggcucacugcagccuugaccucca

SEQ ID NO: 789698 - RNA, 21 nt, Human
ccaaaguguugagauuacaga

SEQ ID NO: 789699 - RNA, 24 nt, Human
ccaaaguguugagauuacagaugu

SEQ ID NO: 789700 - RNA, 23 nt, Human
ccaccucagccuccugaguagcu

SEQ ID NO: 789701 - RNA, 20 nt, Human
ccagggcucaagcaauccuc

SEQ ID NO: 789702 - RNA, 23 nt, Human
cccaccucagccuccugaguagc

SEQ ID NO: 789703 - RNA, 21 nt, Human
cccacggacagguccacaacu

SEQ ID NO: 789704 - RNA, 25 nt, Human
cccauaccucccacaggcaaaucca

SEQ ID NO: 789705 - RNA, 20 nt, Human
ccccagcaucucccauuccc

SEQ ID NO: 789706 - RNA, 24 nt, Human
ccucccaccucagccuccugagua

SEQ ID NO: 789707 - RNA, 19 nt, Human
ccucccaccuuggccuccc

SEQ ID NO: 789708 - RNA, 19 nt, Human
ccugaguagcugggacuau

SEQ ID NO: 789709 - RNA, 24 nt, Human
ccugaguagcugggacuaugggca

SEQ ID NO: 789710 - RNA, 18 nt, Human
ccugggcucaagugaucc

SEQ ID NO: 789711 - RNA, 22 nt, Human
ccugggcucaagugauccuccc

SEQ ID NO: 789712 - RNA, 18 nt, Human
ccuguguugcccaggcug

SEQ ID NO: 789713 - RNA, 23 nt, Human
ccuguguugcccaggcuggucuc

SEQ ID NO: 789714 - RNA, 21 nt, Human
ccuuucaaauggggcuuaaga

SEQ ID NO: 789715 - RNA, 20 nt, Human
cgaguugccuucuacccaaa

SEQ ID NO: 789716 - RNA, 24 nt, Human
cgcucugacacccaggcuggagug

SEQ ID NO: 789717 - RNA, 24 nt, Human
cggggucucccuguguugcccagg

SEQ ID NO: 789718 - RNA, 21 nt, Human
cucaagcaauccucccaccuc

SEQ ID NO: 789719 - RNA, 24 nt, Human
cucaagcaauccucccaccucagc

SEQ ID NO: 789720 - RNA, 24 nt, Human
cucaagugauccucccaccuuggc

SEQ ID NO: 789721 - RNA, 21 nt, Human
cucacugcagccuugaccucc

SEQ ID NO: 789722 - RNA, 24 nt, Human
cucagaacuccacacuauuacuuc

SEQ ID NO: 789723 - RNA, 24 nt, Human
cucagccuccugaguagcugggac

SEQ ID NO: 789724 - RNA, 19 nt, Human
cucaguaaauaguucauaa

SEQ ID NO: 789725 - RNA, 23 nt, Human
cuccugggcucaagugauccucc

SEQ ID NO: 789726 - RNA, 19 nt, Human
cugacacccaggcuggagu

SEQ ID NO: 789727 - RNA, 22 nt, Human
cugauaaauaacagcauuccaa

SEQ ID NO: 789728 - RNA, 22 nt, Human
cugcagccuugaccuccagggc

SEQ ID NO: 789729 - RNA, 20 nt, Human
cuuaaguacuuucuaacuuu

SEQ ID NO: 789730 - RNA, 22 nt, Human
gaagacaaguugaaaauacaug

SEQ ID NO: 789731 - RNA, 23 nt, Human
gagacggggucucccuguguugc

SEQ ID NO: 789732 - RNA, 24 nt, Human
gaguagcugggacuaugggcaugc

SEQ ID NO: 789733 - RNA, 21 nt, Human
gagucccugacugaaaggaac

SEQ ID NO: 789734 - RNA, 18 nt, Human
gauuacagaugugagcca

SEQ ID NO: 789735 - RNA, 22 nt, Human
gauuacagaugugagccacugc

SEQ ID NO: 789736 - RNA, 18 nt, Human
gcagccuugaccuccagg

SEQ ID NO: 789737 - RNA, 20 nt, Human
gcaugccccagcaugcccag

SEQ ID NO: 789738 - RNA, 19 nt, Human
gccccugaaaagcaccaug

SEQ ID NO: 789739 - RNA, 18 nt, Human
gcucaagugauccuccca

SEQ ID NO: 789740 - RNA, 21 nt, Human
gcucacugcagccuugaccuc

SEQ ID NO: 789741 - RNA, 19 nt, Human
gcucauuuaguggguuggg

SEQ ID NO: 789742 - RNA, 21 nt, Human
gcucauuuaguggguugggaa

SEQ ID NO: 789743 - RNA, 26 nt, Human
gggaaaagaucuguaucuuuuuuuuu

SEQ ID NO: 789744 - RNA, 24 nt, Human
gggaagaaagagggugaugcuguu

SEQ ID NO: 789745 - RNA, 22 nt, Human
gggcucaagugauccucccacc

SEQ ID NO: 789746 - RNA, 22 nt, Human
gggucucccuguguugcccagg

SEQ ID NO: 789747 - RNA, 20 nt, Human
gucaaaccaagauaaacagc

SEQ ID NO: 789748 - RNA, 22 nt, Human
guccacauaacugaccaaucac

SEQ ID NO: 789749 - RNA, 21 nt, Human
guccacaugagacucuauaug

SEQ ID NO: 789750 - RNA, 24 nt, Human
gucuuguaaccugcucauuuagug

SEQ ID NO: 789751 - RNA, 23 nt, Human
gugaugggguggcacugugcccc

SEQ ID NO: 789752 - RNA, 26 nt, Human
uaaaaaaaacaucauugcaaauuuaa

SEQ ID NO: 789753 - RNA, 21 nt, Human
uaaaacccucaaaauacacaa

SEQ ID NO: 789754 - RNA, 21 nt, Human
uaaagucagcccuuuaaguuc

SEQ ID NO: 789755 - RNA, 23 nt, Human
uaaccucuaaggcaaccgguuuc

SEQ ID NO: 789756 - RNA, 24 nt, Human
uaacgaagcucucccuagggaaac

SEQ ID NO: 789757 - RNA, 25 nt, Human
uaauaaaucaagcagacuuaucauc

SEQ ID NO: 789758 - RNA, 22 nt, Human
uaaucuauuuaacauaacuacc

SEQ ID NO: 789759 - RNA, 19 nt, Human
uacaaaggaaagucauaac

SEQ ID NO: 789760 - RNA, 22 nt, Human
uacagaacaggucgucccuacc

SEQ ID NO: 789761 - RNA, 22 nt, Human
uacagaugugagccacugcacc

SEQ ID NO: 789762 - RNA, 24 nt, Human
uacccagggcacuggccacucaac

SEQ ID NO: 789763 - RNA, 22 nt, Human
uagaauccauauuaaaaguaca

SEQ ID NO: 789764 - RNA, 21 nt, Human
uaguagcagaaaauucuucug

SEQ ID NO: 789765 - RNA, 22 nt, Human
uauagagacggggucucccugu

SEQ ID NO: 789766 - RNA, 22 nt, Human
uauagagacggggucucccugu

SEQ ID NO: 789767 - RNA, 22 nt, Human
uaugagggucuguguuuuuccu

SEQ ID NO: 789768 - RNA, 24 nt, Human
ucaaaauacacaaauacacuuuca

SEQ ID NO: 789769 - RNA, 25 nt, Human
ucaaaccaagauaaacagcaucaca

SEQ ID NO: 789770 - RNA, 24 nt, Human
ucaacgaggaaggacugcccugaa

SEQ ID NO: 789771 - RNA, 26 nt, Human
ucaagcagacuuaucauccacaugga

SEQ ID NO: 789772 - RNA, 24 nt, Human
ucaagugauccucccaccuuggcc

SEQ ID NO: 789773 - RNA, 23 nt, Human
ucacugcagccuugaccuccagg

SEQ ID NO: 789774 - RNA, 24 nt, Human
ucacugcagccuugaccuccaggg

SEQ ID NO: 789775 - RNA, 23 nt, Human
ucagccuccugaguagcugggac

SEQ ID NO: 789776 - RNA, 22 nt, Human
uccaaugucaaaccaagauaaa

SEQ ID NO: 789777 - RNA, 24 nt, Human
uccacaugagacucuauauggagu

SEQ ID NO: 789778 - RNA, 19 nt, Human
uccacauggauaacgaagc

SEQ ID NO: 789779 - RNA, 23 nt, Human
uccauuuaaucauguguguacac

SEQ ID NO: 789780 - RNA, 23 nt, Human
ucccaaaguguugagauuacaga

SEQ ID NO: 789781 - RNA, 22 nt, Human
ucccacuuaguuacaaaaagua

SEQ ID NO: 789782 - RNA, 21 nt, Human
ucccuguguugcccaggcugg

SEQ ID NO: 789783 - RNA, 18 nt, Human
uccucuccugcccauacc

SEQ ID NO: 789784 - RNA, 24 nt, Human
uccugaguagcugggacuaugggc

SEQ ID NO: 789785 - RNA, 21 nt, Human
uccugggcucaagugauccuc

SEQ ID NO: 789786 - RNA, 24 nt, Human
uccugggcucaagugauccuccca

SEQ ID NO: 789787 - RNA, 25 nt, Human
ucuaaaauauucuaucaaucuuuca

SEQ ID NO: 789788 - RNA, 23 nt, Human
ucucaaacuccugggcucaagug

SEQ ID NO: 789789 - RNA, 19 nt, Human
ucucccuguguugcccagg

SEQ ID NO: 789790 - RNA, 23 nt, Human
ucucccuguguugcccaggcugg

SEQ ID NO: 789791 - RNA, 24 nt, Human
ucucccuguguugcccaggcuggu

SEQ ID NO: 789792 - RNA, 23 nt, Human
ucucgcucugacacccaggcugg

SEQ ID NO: 789793 - RNA, 24 nt, Human
ucucgcucugacacccaggcugga

SEQ ID NO: 789794 - RNA, 24 nt, Human
ucugacacccaggcuggagugcag

SEQ ID NO: 789795 - RNA, 23 nt, Human
ucuuccagguucuccuagacugg

SEQ ID NO: 789796 - RNA, 22 nt, Human
ugaaauaccucuggucaucuuc

SEQ ID NO: 789797 - RNA, 25 nt, Human
ugaccuccagggcucaagcaauccu

SEQ ID NO: 789798 - RNA, 21 nt, Human
ugagauuacagaugugagcca

SEQ ID NO: 789799 - RNA, 22 nt, Human
ugagauuacagaugugagccac

SEQ ID NO: 789800 - RNA, 22 nt, Human
ugagauuacagaugugagccac

SEQ ID NO: 789801 - RNA, 24 nt, Human
ugagauuacagaugugagccacug

SEQ ID NO: 789802 - RNA, 23 nt, Human
ugaggcuggugacauuugucuug

SEQ ID NO: 789803 - RNA, 22 nt, Human
ugcacaaaacgcaguccacaua

SEQ ID NO: 789804 - RNA, 22 nt, Human
ugcaguggugcaaucauggcuc

SEQ ID NO: 789805 - RNA, 23 nt, Human
ugcaguggugcaaucauggcuca

SEQ ID NO: 789806 - RNA, 31 nt, Human
ugccaaggacuuuacagaacaggucgucccu

SEQ ID NO: 789807 - RNA, 24 nt, Human
ugcccaggcuggucucaaacuccu

SEQ ID NO: 789808 - RNA, 28 nt, Human
ugcccaggcuggucucaaacuccugggc

SEQ ID NO: 789809 - RNA, 21 nt, Human
ugccccagcaugcccagccaa

SEQ ID NO: 789810 - RNA, 21 nt, Human
uggagugcaguggugcaauca

SEQ ID NO: 789811 - RNA, 24 nt, Human
uggagugcaguggugcaaucaugg

SEQ ID NO: 789812 - RNA, 20 nt, Human
uggcuaaaugccucaaauau

SEQ ID NO: 789813 - RNA, 24 nt, Human
uggcucacugcagccuugaccucc

SEQ ID NO: 789814 - RNA, 24 nt, Human
ugggcucaagugauccucccaccu

SEQ ID NO: 789815 - RNA, 26 nt, Human
uggggcuuaagagagagaaaauggcc

SEQ ID NO: 789816 - RNA, 21 nt, Human
uggguuuacaaaauguaucua

SEQ ID NO: 789817 - RNA, 24 nt, Human
uggugcaaucauggcucacugcag

SEQ ID NO: 789818 - RNA, 22 nt, Human
uguaaaauuugguaacagaaaa

SEQ ID NO: 789819 - RNA, 23 nt, Human
uguguugcccaggcuggucucaa

SEQ ID NO: 789820 - RNA, 24 nt, Human
uguguugcccaggcuggucucaaa

SEQ ID NO: 789821 - RNA, 22 nt, Human
uguugcccaggcuggucucaaa

SEQ ID NO: 789822 - RNA, 21 nt, Human
uuaaaacaaaugugaauagaa

SEQ ID NO: 789823 - RNA, 22 nt, Human
uuauagagacggggucucccug

SEQ ID NO: 789824 - RNA, 25 nt, Human
uugcagaaacugcuauucugugcgg

SEQ ID NO: 789825 - RNA, 20 nt, Human
uugcuuuucauuuugcuucc

SEQ ID NO: 789826 - RNA, 18 nt, Human
uuuaaaacauuuuacuug

SEQ ID NO: 789827 - RNA, 23 nt, Human
uuuauagagacggggucucccug

SEQ ID NO: 789828 - RNA, 19 nt, Human
uuucuugcuacugucaaaa

SEQ ID NO: 789829 - RNA, 23 nt, Human
uuugccugaugacagcaacacug

SEQ ID NO: 789830 - RNA, 21 nt, Human
aaaagacucuugcccuuucca

SEQ ID NO: 789831 - RNA, 27 nt, Human
aaaaggaggcaacauuaguuuaaaaaa

SEQ ID NO: 789832 - RNA, 23 nt, Human
aaacacaaaagggaagcuucuaa

SEQ ID NO: 789833 - RNA, 25 nt, Human
aaacccuaucugccauuaccaauuc

SEQ ID NO: 789834 - RNA, 23 nt, Human
aaaguaaaccaaaacaagaaaau

SEQ ID NO: 789835 - RNA, 21 nt, Human
aaaugaaaaacaaagccagcc

SEQ ID NO: 789836 - RNA, 18 nt, Human
aacaaagccagccaaauu

SEQ ID NO: 789837 - RNA, 18 nt, Human
aacacuuuuuacauuaaa

SEQ ID NO: 789838 - RNA, 21 nt, Human
aacagagcaucgaauaacauu

SEQ ID NO: 789839 - RNA, 18 nt, Human
aagaaaacagcuuuuuau

SEQ ID NO: 789840 - RNA, 21 nt, Human
aagcagaaccucaaagccagg

SEQ ID NO: 789841 - RNA, 23 nt, Human
aagcauucagcauacaugcuaca

SEQ ID NO: 789842 - RNA, 18 nt, Human
aagcuucuaaguugaacu

SEQ ID NO: 789843 - RNA, 21 nt, Human
aaggagcguggcgggcgcccc

SEQ ID NO: 789844 - RNA, 23 nt, Human
aauaaguguuaaaucucauacaa

SEQ ID NO: 789845 - RNA, 21 nt, Human
aaucugcucaucaaaucuaga

SEQ ID NO: 789846 - RNA, 19 nt, Human
aaugaaaauuauggccccc

SEQ ID NO: 789847 - RNA, 18 nt, Human
acaaaagggaagcuucua

SEQ ID NO: 789848 - RNA, 23 nt, Human
acagaaaagacuauauauaaaua

SEQ ID NO: 789849 - RNA, 25 nt, Human
accacauuuuccaaguccuauuugu

SEQ ID NO: 789850 - RNA, 22 nt, Human
aggaaaaaagcauucagcauac

SEQ ID NO: 789851 - RNA, 21 nt, Human
aggaaguauaagagcuacccc

SEQ ID NO: 789852 - RNA, 24 nt, Human
aguuagaagacuagcucuaaaacc

SEQ ID NO: 789853 - RNA, 18 nt, Human
aucugcuucucggcucuu

SEQ ID NO: 789854 - RNA, 24 nt, Human
aucugcuucucggcucuucaugcu

SEQ ID NO: 789855 - RNA, 21 nt, Human
auguucacaggccugauccuu

SEQ ID NO: 789856 - RNA, 23 nt, Human
caaaagcagaaccucaaagccag

SEQ ID NO: 789857 - RNA, 21 nt, Human
cacagccccacgcgcggcgcu

SEQ ID NO: 789858 - RNA, 21 nt, Human
caccacagccccacgcgcggc

SEQ ID NO: 789859 - RNA, 19 nt, Human
caccagaacagagcaucga

SEQ ID NO: 789860 - RNA, 21 nt, Human
caccucaggaucugcuucucg

SEQ ID NO: 789861 - RNA, 23 nt, Human
cagcagccucaacaaauguguga

SEQ ID NO: 789862 - RNA, 25 nt, Human
cagcagccucaacaaaugugugauu

SEQ ID NO: 789863 - RNA, 21 nt, Human
caugaaaacacaaaagggaag

SEQ ID NO: 789864 - RNA, 18 nt, Human
caugacaacagaauugaa

SEQ ID NO: 789865 - RNA, 25 nt, Human
caugcaaugauacuaucacuacuau

SEQ ID NO: 789866 - RNA, 26 nt, Human
cauugaaugaaaauuauggcccccaa

SEQ ID NO: 789867 - RNA, 26 nt, Human
ccaaaagcagaaccucaaagccaggu

SEQ ID NO: 789868 - RNA, 19 nt, Human
cccacgcgcggcgcuggcg

SEQ ID NO: 789869 - RNA, 19 nt, Human
cccacgcgcggcgcuggcg

SEQ ID NO: 789870 - RNA, 21 nt, Human
cccacgcgcggcgcuggcgca

SEQ ID NO: 789871 - RNA, 24 nt, Human
ccccaaaagcagaaccucaaagcc

SEQ ID NO: 789872 - RNA, 18 nt, Human
cccgcggcccugaacggg

SEQ ID NO: 789873 - RNA, 19 nt, Human
cccgcggcccugaacgggc

SEQ ID NO: 789874 - RNA, 21 nt, Human
ccgcucgcgcgccccucaccu

SEQ ID NO: 789875 - RNA, 21 nt, Human
ccugacauguggcaacaaaga

SEQ ID NO: 789876 - RNA, 26 nt, Human
cgccccgcgagcaggaagccaggagc

SEQ ID NO: 789877 - RNA, 22 nt, Human
cgcccgcgcuuccggaggcgga

SEQ ID NO: 789878 - RNA, 22 nt, Human
cgccgcgcgcccgcgcuuccgg

SEQ ID NO: 789879 - RNA, 24 nt, Human
cuaaagcaaaugaaaaacaaagcc

SEQ ID NO: 789880 - RNA, 23 nt, Human
cuacagagccugagcacugaaaa

SEQ ID NO: 789881 - RNA, 24 nt, Human
cucagagacuaaugccauuaugaa

SEQ ID NO: 789882 - RNA, 18 nt, Human
cucccggcgccgcgcgcc

SEQ ID NO: 789883 - RNA, 25 nt, Human
cuuaaacuauaacaacuucauagca

SEQ ID NO: 789884 - RNA, 20 nt, Human
cuugcuggaauuucuaaagc

SEQ ID NO: 789885 - RNA, 21 nt, Human
gaacacauacaucucauauaa

SEQ ID NO: 789886 - RNA, 19 nt, Human
gagccgcggccaccacagc

SEQ ID NO: 789887 - RNA, 19 nt, Human
gagcggaaagggaaaggag

SEQ ID NO: 789888 - RNA, 25 nt, Human
gagcguggcgggcgccccgcgagca

SEQ ID NO: 789889 - RNA, 19 nt, Human
gcuaagucuucucuaauaa

SEQ ID NO: 789890 - RNA, 25 nt, Human
ggaaaggagcguggcgggcgccccg

SEQ ID NO: 789891 - RNA, 22 nt, Human
gggcucccggcgccgcgcgccc

SEQ ID NO: 789892 - RNA, 23 nt, Human
guacaguaaguuaaaaaacaaaa

SEQ ID NO: 789893 - RNA, 20 nt, Human
guacucgccgccgccugggc

SEQ ID NO: 789894 - RNA, 19 nt, Human
guuaaaggugcuaaggaaa

SEQ ID NO: 789895 - RNA, 28 nt, Human
uaaaaaucaauuuuaaaaaaacugauua

SEQ ID NO: 789896 - RNA, 23 nt, Human
uaaaacacuguccgacacaccuc

SEQ ID NO: 789897 - RNA, 22 nt, Human
uaaaaccuaccucauuucuaag

SEQ ID NO: 789898 - RNA, 18 nt, Human
uaaaagacucuugcccuu

SEQ ID NO: 789899 - RNA, 18 nt, Human
uaaaauagugccagacca

SEQ ID NO: 789900 - RNA, 24 nt, Human
uaaagcaaaugaaaaacaaagcca

SEQ ID NO: 789901 - RNA, 24 nt, Human
uaaauacuugcuggaauuucuaaa

SEQ ID NO: 789902 - RNA, 25 nt, Human
uaaauuaguaccuaaaaucaaagua

SEQ ID NO: 789903 - RNA, 21 nt, Human
uaacaauacauuacaacucac

SEQ ID NO: 789904 - RNA, 23 nt, Human
uaacaauacauuacaacucacug

SEQ ID NO: 789905 - RNA, 19 nt, Human
uaacucagugcacuuauac

SEQ ID NO: 789906 - RNA, 24 nt, Human
uaacucagugcacuuauacaacaa

SEQ ID NO: 789907 - RNA, 23 nt, Human
uaaguucuaaagcaaaugaaaaa

SEQ ID NO: 789908 - RNA, 22 nt, Human
uacaaucgagcuaugucaugcc

SEQ ID NO: 789909 - RNA, 20 nt, Human
uacagaucaaaaauucauac

SEQ ID NO: 789910 - RNA, 20 nt, Human
uaccagugaaaacaaauuuc

SEQ ID NO: 789911 - RNA, 20 nt, Human
uaccuaaaaucaaaguacag

SEQ ID NO: 789912 - RNA, 23 nt, Human
uagaagauacacaugcauaccac

SEQ ID NO: 789913 - RNA, 23 nt, Human
uagcuaagaaaacagcuuuuuau

SEQ ID NO: 789914 - RNA, 18 nt, Human
uauaaacaguaaaaguac

SEQ ID NO: 789915 - RNA, 21 nt, Human
uauauaaaacauauauauaua

SEQ ID NO: 789916 - RNA, 24 nt, Human
uauccugacauguggcaacaaaga

SEQ ID NO: 789917 - RNA, 25 nt, Human
ucaaauaaaucaaaguaaaccaaaa

SEQ ID NO: 789918 - RNA, 22 nt, Human
ucaauuuuaaaaaaacugauua

SEQ ID NO: 789919 - RNA, 25 nt, Human
ucacaggccugauccuuaacaaaau

SEQ ID NO: 789920 - RNA, 23 nt, Human
ucaggaaacacuuuuuacauuaa

SEQ ID NO: 789921 - RNA, 19 nt, Human
ucauagcaucuugacuuag

SEQ ID NO: 789922 - RNA, 21 nt, Human
ucaucaaaucuagaucagcuc

SEQ ID NO: 789923 - RNA, 21 nt, Human
uccgacacaccucaggaucug

SEQ ID NO: 789924 - RNA, 21 nt, Human
ucgccgccgccugggcuccgg

SEQ ID NO: 789925 - RNA, 18 nt, Human
ugaaaaacaaagccagcc

SEQ ID NO: 789926 - RNA, 18 nt, Human
ugaaaaacaaagccagcc

SEQ ID NO: 789927 - RNA, 24 nt, Human
ugaauaauuagaagauacacaugc

SEQ ID NO: 789928 - RNA, 18 nt, Human
ugaaugcaugaaaacaca

SEQ ID NO: 789929 - RNA, 23 nt, Human
ugagagccgcggccaccacagcc

SEQ ID NO: 789930 - RNA, 24 nt, Human
ugcuacagagccugagcacugaaa

SEQ ID NO: 789931 - RNA, 24 nt, Human
uggcaaaaauauaucccgaguacu

SEQ ID NO: 789932 - RNA, 20 nt, Human
uggcccccaaaagcagaacc

SEQ ID NO: 789933 - RNA, 19 nt, Human
uggcuacagaucaaaaauu

SEQ ID NO: 789934 - RNA, 23 nt, Human
uggcuacagaucaaaaauucaua

SEQ ID NO: 789935 - RNA, 24 nt, Human
ugggacugguaaaaauaauacuuc

SEQ ID NO: 789936 - RNA, 19 nt, Human
uguacucagagacuaaugc

SEQ ID NO: 789937 - RNA, 23 nt, Human
uuaagaacacauacaucucauau

SEQ ID NO: 789938 - RNA, 20 nt, Human
uuauauacacagcagguaua

SEQ ID NO: 789939 - RNA, 20 nt, Human
uugaaaacuauagugaccau

SEQ ID NO: 789940 - RNA, 18 nt, Human
uuucguagaaucuuacua

SEQ ID NO: 789941 - RNA, 20 nt, Human
uuugacaauaauuuugcacu

SEQ ID NO: 789942 - RNA, 18 nt, Human
uuuuccaaguccuauuug

SEQ ID NO: 789943 - RNA, 25 nt, Human
uuuuuugacaauaauuuugcacuga

SEQ ID NO: 789944 - RNA, 22 nt, Human
aaaaccaacaaaggcaaaaccu

SEQ ID NO: 789945 - RNA, 26 nt, Human
aaacaagcagcagauaggagggaccc

SEQ ID NO: 789946 - RNA, 22 nt, Human
aaacagucagugagacuguggc

SEQ ID NO: 789947 - RNA, 22 nt, Human
aaccucugcuccauagcaggga

SEQ ID NO: 789948 - RNA, 22 nt, Human
aacuaauaagggacaaaaagaa

SEQ ID NO: 789949 - RNA, 21 nt, Human
aauucuguuccugauagaaaa

SEQ ID NO: 789950 - RNA, 21 nt, Human
acagacccacaccccuggcca

SEQ ID NO: 789951 - RNA, 28 nt, Human
acuacuguaacuuuucaauguucaaauu

SEQ ID NO: 789952 - RNA, 20 nt, Human
agaaucaaguuuuaaaacca

SEQ ID NO: 789953 - RNA, 22 nt, Human
auagaaaaugugcuuuuuccua

SEQ ID NO: 789954 - RNA, 23 nt, Human
aucaaguuuuaaaaccaacaaag

SEQ ID NO: 789955 - RNA, 19 nt, Human
auucauuugucccagcugg

SEQ ID NO: 789956 - RNA, 21 nt, Human
caaaaagaaaacaaaagggca

SEQ ID NO: 789957 - RNA, 25 nt, Human
caacaaaacuuuauuuacagacacc

SEQ ID NO: 789958 - RNA, 20 nt, Human
caacaaaggcaaaaccucac

SEQ ID NO: 789959 - RNA, 21 nt, Human
caacaaaggcaaaaccucacc

SEQ ID NO: 789960 - RNA, 20 nt, Human
caagaggagugaauaaguua

SEQ ID NO: 789961 - RNA, 19 nt, Human
cacaccccuggccacaccc

SEQ ID NO: 789962 - RNA, 25 nt, Human
cacagacccacaccccuggccacac

SEQ ID NO: 789963 - RNA, 22 nt, Human
cacccgaggccgcgcgacgccc

SEQ ID NO: 789964 - RNA, 27 nt, Human
cacuguguggcugaagccaacaaaacu

SEQ ID NO: 789965 - RNA, 23 nt, Human
cagacccacaccccuggccacac

SEQ ID NO: 789966 - RNA, 19 nt, Human
cagcagauaggauuugguc

SEQ ID NO: 789967 - RNA, 24 nt, Human
ccaacaaaacuuuauuuacagacc

SEQ ID NO: 789968 - RNA, 19 nt, Human
ccaauuuaaagaaacuaua

SEQ ID NO: 789969 - RNA, 18 nt, Human
cccucacagacccacacc

SEQ ID NO: 789970 - RNA, 20 nt, Human
cugaagccaacaaaacuuua

SEQ ID NO: 789971 - RNA, 19 nt, Human
gagaauucuguuccugaua

SEQ ID NO: 789972 - RNA, 24 nt, Human
gagcagagguuggcaaacuuucug

SEQ ID NO: 789973 - RNA, 24 nt, Human
ggcagggagaugggguuuuaaacu

SEQ ID NO: 789974 - RNA, 19 nt, Human
gggcagggagaugggguuu

SEQ ID NO: 789975 - RNA, 20 nt, Human
gggcucugcaggccacaugg

SEQ ID NO: 789976 - RNA, 20 nt, Human
gugcugagcacaucucacac

SEQ ID NO: 789977 - RNA, 21 nt, Human
guguggcugaagccaacaaaa

SEQ ID NO: 789978 - RNA, 22 nt, Human
uaaagcagccauagucaauagc

SEQ ID NO: 789979 - RNA, 23 nt, Human
uaaaggauaggaaauauuugcag

SEQ ID NO: 789980 - RNA, 23 nt, Human
uaaguuuacugagcacuuacuau

SEQ ID NO: 789981 - RNA, 24 nt, Human
uaauaagggacaaaaagaaaacaa

SEQ ID NO: 789982 - RNA, 21 nt, Human
uaauuuucucaccaacaaggu

SEQ ID NO: 789983 - RNA, 19 nt, Human
uacagacaccaaaacuuaa

SEQ ID NO: 789984 - RNA, 19 nt, Human
uagaaaaugugcuuuuucc

SEQ ID NO: 789985 - RNA, 23 nt, Human
uauagaaucaaguuuuaaaacca

SEQ ID NO: 789986 - RNA, 22 nt, Human
ucaacccuuuaaaauuuuuuua

SEQ ID NO: 789987 - RNA, 19 nt, Human
ucacacacauuuucugugu

SEQ ID NO: 789988 - RNA, 18 nt, Human
ucacaguugucuaaagca

SEQ ID NO: 789989 - RNA, 21 nt, Human
ucacauagggucagauggaaa

SEQ ID NO: 789990 - RNA, 18 nt, Human
ucacccgaggccgcgcga

SEQ ID NO: 789991 - RNA, 20 nt, Human
ucccucacagacccacaccc

SEQ ID NO: 789992 - RNA, 21 nt, Human
uccuuuaucauuuguuuucuu

SEQ ID NO: 789993 - RNA, 22 nt, Human
ucuauuuacaaaaacaagcagc

SEQ ID NO: 789994 - RNA, 23 nt, Human
ucuccugucacaacugcucaacu

SEQ ID NO: 789995 - RNA, 23 nt, Human
ucucuacucuagagcagagguug

SEQ ID NO: 789996 - RNA, 23 nt, Human
ugaauaaguuacauuuacacuua

SEQ ID NO: 789997 - RNA, 18 nt, Human
ugcugaccccuauucugg

SEQ ID NO: 789998 - RNA, 23 nt, Human
uggaaagccacaaaacuaacuug

SEQ ID NO: 789999 - RNA, 19 nt, Human
uggaccaggcacugugcug

SEQ ID NO: 790000 - RNA, 20 nt, Human
ugggcucugcaggccacaug

SEQ ID NO: 790001 - RNA, 21 nt, Human
ugucacaguugucuaaagcag

SEQ ID NO: 790002 - RNA, 21 nt, Human
ugucccagcuggccuauucau

SEQ ID NO: 790003 - RNA, 21 nt, Human
uguggcugaagccaacaaaac

SEQ ID NO: 790004 - RNA, 20 nt, Human
uuaaaaccaacaaaggcaaa

SEQ ID NO: 790005 - RNA, 25 nt, Human
uuaaaaccaacaaaggcaaaacccc

SEQ ID NO: 790006 - RNA, 24 nt, Human
uucauauaauuuucauguugaaaa

SEQ ID NO: 790007 - RNA, 21 nt, Human
uucauggucccuagacuuucu

SEQ ID NO: 790008 - RNA, 23 nt, Human
uuggcaaacuuucuguuaaagga

SEQ ID NO: 790009 - RNA, 21 nt, Human
uuuaaaaccaacaaaggcaaa

SEQ ID NO: 790010 - RNA, 21 nt, Human
uuuaauaauuuccuuucaccu

SEQ ID NO: 790011 - RNA, 20 nt, Human
uuuacaaaaacaagcagcag

SEQ ID NO: 790012 - RNA, 20 nt, Human
aaacaccacaauaaaaaugg

SEQ ID NO: 790013 - RNA, 20 nt, Human
aaacacuccauaaagaaagg

SEQ ID NO: 790014 - RNA, 21 nt, Human
aaagugcuuaaucccugagac

SEQ ID NO: 790015 - RNA, 19 nt, Human
aaauugcacaguacaaaca

SEQ ID NO: 790016 - RNA, 24 nt, Human
aagaacccccucagaccucugccc

SEQ ID NO: 790017 - RNA, 23 nt, Human
aagcaaaaucuccuccaagugua

SEQ ID NO: 790018 - RNA, 20 nt, Human
aagcaacaccugcucuuggu

SEQ ID NO: 790019 - RNA, 19 nt, Human
aagcaaggagagaggacca

SEQ ID NO: 790020 - RNA, 18 nt, Human
aagcacauuaacucacag

SEQ ID NO: 790021 - RNA, 22 nt, Human
aaguguggcacaguauuccaug

SEQ ID NO: 790022 - RNA, 19 nt, Human
acacuauugucaggagacc

SEQ ID NO: 790023 - RNA, 21 nt, Human
acagaaccacucacacagcca

SEQ ID NO: 790024 - RNA, 24 nt, Human
acauuggucuaaugggaaucaagc

SEQ ID NO: 790025 - RNA, 22 nt, Human
accaaacacaaaagcaaugcug

SEQ ID NO: 790026 - RNA, 21 nt, Human
acucuuaauaaacugaaauaa

SEQ ID NO: 790027 - RNA, 23 nt, Human
agaacccccucagaccucugccc

SEQ ID NO: 790028 - RNA, 19 nt, Human
agacaacuaaaucuagcca

SEQ ID NO: 790029 - RNA, 26 nt, Human
agacuauagcaagcaccuuagcauuu

SEQ ID NO: 790030 - RNA, 21 nt, Human
aggagaagagaguucaguuua

SEQ ID NO: 790031 - RNA, 25 nt, Human
aguaaaccucaaauaguuauacuga

SEQ ID NO: 790032 - RNA, 24 nt, Human
aguaaaugauaguaaauuacccaa

SEQ ID NO: 790033 - RNA, 21 nt, Human
auccaaacugaguagaugauu

SEQ ID NO: 790034 - RNA, 19 nt, Human
auccaguauuuuccucauc

SEQ ID NO: 790035 - RNA, 23 nt, Human
aucccugagacucuaaaccucca

SEQ ID NO: 790036 - RNA, 24 nt, Human
aucuagccauuuacuuuaaaaagc

SEQ ID NO: 790037 - RNA, 19 nt, Human
aucuggacauaaugcagaa

SEQ ID NO: 790038 - RNA, 21 nt, Human
auugagaagaacccccucaga

SEQ ID NO: 790039 - RNA, 20 nt, Human
caaacagguagcucaaguac

SEQ ID NO: 790040 - RNA, 25 nt, Human
caaauaauuuauuaauaaaugcauc

SEQ ID NO: 790041 - RNA, 19 nt, Human
caacaacaucuuguggcca

SEQ ID NO: 790042 - RNA, 20 nt, Human
caacaacaucuuguggccaa

SEQ ID NO: 790043 - RNA, 22 nt, Human
caacaacaucuuguggccaaac

SEQ ID NO: 790044 - RNA, 21 nt, Human
caacaugccaaugccgauguc

SEQ ID NO: 790045 - RNA, 22 nt, Human
caacaugccaaugccgaugucc

SEQ ID NO: 790046 - RNA, 23 nt, Human
caagcgauccucacccugaagca

SEQ ID NO: 790047 - RNA, 21 nt, Human
caauaaaccugucuuccucag

SEQ ID NO: 790048 - RNA, 21 nt, Human
caauuaacacacuaggucggc

SEQ ID NO: 790049 - RNA, 21 nt, Human
cacaguacaaacaagcugucu

SEQ ID NO: 790050 - RNA, 29 nt, Human
cacaguucaaguacaagcgauccucaccc

SEQ ID NO: 790051 - RNA, 18 nt, Human
cacauauugugccccagg

SEQ ID NO: 790052 - RNA, 22 nt, Human
caccccagcucauagaguugau

SEQ ID NO: 790053 - RNA, 20 nt, Human
cagaaccacucacacagcca

SEQ ID NO: 790054 - RNA, 21 nt, Human
cagcaaaauugagaagaaccc

SEQ ID NO: 790055 - RNA, 19 nt, Human
cagcacaguguuuuauuuc

SEQ ID NO: 790056 - RNA, 26 nt, Human
cagcuguauccaagggagcaaacagg

SEQ ID NO: 790057 - RNA, 19 nt, Human
cagcugugcuccaaaaaca

SEQ ID NO: 790058 - RNA, 21 nt, Human
caggucuacugaaaaggguac

SEQ ID NO: 790059 - RNA, 23 nt, Human
caguauuuuccucaucuccaaau

SEQ ID NO: 790060 - RNA, 26 nt, Human
cauaaaauacuuuaaguuuacaauga

SEQ ID NO: 790061 - RNA, 19 nt, Human
ccaaggagaauguuuccau

SEQ ID NO: 790062 - RNA, 23 nt, Human
ccagguaccaauaaucacauacu

SEQ ID NO: 790063 - RNA, 22 nt, Human
ccauuuacuuuaaaaagcaagg

SEQ ID NO: 790064 - RNA, 23 nt, Human
ccccagagggcacagcagccucu

SEQ ID NO: 790065 - RNA, 23 nt, Human
cccccaaugacuuguuuugguuu

SEQ ID NO: 790066 - RNA, 27 nt, Human
ccugagacucuaaaccuccaucugcaa

SEQ ID NO: 790067 - RNA, 24 nt, Human
ccugccaaacuucuugccuggggg

SEQ ID NO: 790068 - RNA, 19 nt, Human
ccuggcuaagacaacuaaa

SEQ ID NO: 790069 - RNA, 19 nt, Human
cuccugaggucagacucaa

SEQ ID NO: 790070 - RNA, 21 nt, Human
cuuuaagauucagggaaaggu

SEQ ID NO: 790071 - RNA, 22 nt, Human
cuuuccuuccauuugucauucc

SEQ ID NO: 790072 - RNA, 21 nt, Human
gaaaucuguacaacaugccaa

SEQ ID NO: 790073 - RNA, 24 nt, Human
gaagccucuccacaguucaaguac

SEQ ID NO: 790074 - RNA, 19 nt, Human
gacuuguuuugguuucagc

SEQ ID NO: 790075 - RNA, 25 nt, Human
gauuaaagaguccagcuguauccaa

SEQ ID NO: 790076 - RNA, 22 nt, Human
gcaaaaccaaacuugccaacca

SEQ ID NO: 790077 - RNA, 25 nt, Human
gcaaaaucuccuccaaguguacaaa

SEQ ID NO: 790078 - RNA, 19 nt, Human
gcaaaauugagaagaaccc

SEQ ID NO: 790079 - RNA, 19 nt, Human
gcggccagcacggcgaaga

SEQ ID NO: 790080 - RNA, 23 nt, Human
gcuaaaacaagcacauuaacuca

SEQ ID NO: 790081 - RNA, 18 nt, Human
guaaguagugaaaaagua

SEQ ID NO: 790082 - RNA, 22 nt, Human
guacaucuguacaauauuuacu

SEQ ID NO: 790083 - RNA, 23 nt, Human
guauguguagacaugcagaaucc

SEQ ID NO: 790084 - RNA, 22 nt, Human
gugcuccaaaaacacuccauaa

SEQ ID NO: 790085 - RNA, 23 nt, Human
uaaaaagcaaggagagaggacca

SEQ ID NO: 790086 - RNA, 24 nt, Human
uaaaaagcaaggagagaggaccaa

SEQ ID NO: 790087 - RNA, 19 nt, Human
uaaaaauagcaccagaagg

SEQ ID NO: 790088 - RNA, 21 nt, Human
uaagacaacuaaaucuagcca

SEQ ID NO: 790089 - RNA, 24 nt, Human
uaagcaaaaucuccuccaaguguu

SEQ ID NO: 790090 - RNA, 22 nt, Human
uaauaaauccaacuuuaccauc

SEQ ID NO: 790091 - RNA, 19 nt, Human
uaaugugcaaaaccaaacu

SEQ ID NO: 790092 - RNA, 19 nt, Human
uacaacagcaaacccauca

SEQ ID NO: 790093 - RNA, 23 nt, Human
uacaguuaacuuauacuggugcc

SEQ ID NO: 790094 - RNA, 21 nt, Human
uaccaauaaucacauacucca

SEQ ID NO: 790095 - RNA, 23 nt, Human
uacucuagaugacugcaggucua

SEQ ID NO: 790096 - RNA, 23 nt, Human
uagcugaaaaccguauaggccaa

SEQ ID NO: 790097 - RNA, 21 nt, Human
uaggauaggagaagagaguuc

SEQ ID NO: 790098 - RNA, 22 nt, Human
uaggugauagccuucugcaccc

SEQ ID NO: 790099 - RNA, 24 nt, Human
uaguaaauuacccaacucaguaau

SEQ ID NO: 790100 - RNA, 22 nt, Human
uauaagcaaaaucuccuccaag

SEQ ID NO: 790101 - RNA, 20 nt, Human
uauaauacaagcccuaaaau

SEQ ID NO: 790102 - RNA, 19 nt, Human
uauagcaagcaccuuagca

SEQ ID NO: 790103 - RNA, 18 nt, Human
ucacaccaaacacaaaag

SEQ ID NO: 790104 - RNA, 21 nt, Human
uccaaguaaagugcuuaaucc

SEQ ID NO: 790105 - RNA, 20 nt, Human
uccauaaagaaaggccuccg

SEQ ID NO: 790106 - RNA, 22 nt, Human
uccccagagggcacagcagccu

SEQ ID NO: 790107 - RNA, 25 nt, Human
uccgucaacaacaucuuguggccaa

SEQ ID NO: 790108 - RNA, 20 nt, Human
uccucaguuuugcagaggag

SEQ ID NO: 790109 - RNA, 19 nt, Human
ucuggacugggauuugacu

SEQ ID NO: 790110 - RNA, 25 nt, Human
ucuguaaaccugccaaacuucuugc

SEQ ID NO: 790111 - RNA, 23 nt, Human
ucuuuuuuggugccaucagaccu

SEQ ID NO: 790112 - RNA, 26 nt, Human
ugaagaaugcauucuuuacacacuaa

SEQ ID NO: 790113 - RNA, 23 nt, Human
ugagaaaagaggcuauuuuagau

SEQ ID NO: 790114 - RNA, 21 nt, Human
ugagauagcagcauggcuccc

SEQ ID NO: 790115 - RNA, 18 nt, Human
ugaguagaugauuuugca

SEQ ID NO: 790116 - RNA, 22 nt, Human
ugauagccuucugcaccccagc

SEQ ID NO: 790117 - RNA, 20 nt, Human
ugauaguaaauuacccaacu

SEQ ID NO: 790118 - RNA, 21 nt, Human
ugauaguaaauuacccaacuc

SEQ ID NO: 790119 - RNA, 21 nt, Human
ugauaguaaauuacccaacuc

SEQ ID NO: 790120 - RNA, 20 nt, Human
ugauuuuauucccacacccc

SEQ ID NO: 790121 - RNA, 20 nt, Human
ugcaaaaccaaacuugccaa

SEQ ID NO: 790122 - RNA, 25 nt, Human
ugcaaaaccaaacuugccaaccaca

SEQ ID NO: 790123 - RNA, 23 nt, Human
ugccaaacuucuugccugggggc

SEQ ID NO: 790124 - RNA, 21 nt, Human
ugccaaccacagcaauauucu

SEQ ID NO: 790125 - RNA, 21 nt, Human
ugcugggcuguuuaacuacac

SEQ ID NO: 790126 - RNA, 23 nt, Human
ugcuuguaggauccaaacugagu

SEQ ID NO: 790127 - RNA, 19 nt, Human
uggccaaacuccaugaagc

SEQ ID NO: 790128 - RNA, 19 nt, Human
ugggauucuggguuuguga

SEQ ID NO: 790129 - RNA, 24 nt, Human
ugggcuguuuaacuacacuccuga

SEQ ID NO: 790130 - RNA, 19 nt, Human
uggggcaaaacaauuccug

SEQ ID NO: 790131 - RNA, 22 nt, Human
uggguuuuuaaaaauuaaggua

SEQ ID NO: 790132 - RNA, 19 nt, Human
uguauaaaagaaaugauuc

SEQ ID NO: 790133 - RNA, 23 nt, Human
uguauaaaagaaaugauucauuc

SEQ ID NO: 790134 - RNA, 22 nt, Human
ugucaggagaccaucucaucaa

SEQ ID NO: 790135 - RNA, 18 nt, Human
ugucuuccucaguuuugc

SEQ ID NO: 790136 - RNA, 18 nt, Human
ugugccccaggguagcaa

SEQ ID NO: 790137 - RNA, 19 nt, Human
uguggcacaguauuccaug

SEQ ID NO: 790138 - RNA, 21 nt, Human
uguggccaaacuccaugaagc

SEQ ID NO: 790139 - RNA, 23 nt, Human
uguguugaagaacuccugggauu

SEQ ID NO: 790140 - RNA, 24 nt, Human
uguguugaagaacuccugggauuc

SEQ ID NO: 790141 - RNA, 24 nt, Human
uguguugaagaacuccugggauuu

SEQ ID NO: 790142 - RNA, 22 nt, Human
uguuuaacuacacuccugaggu

SEQ ID NO: 790143 - RNA, 18 nt, Human
uguuuugcuguuagcucu

SEQ ID NO: 790144 - RNA, 23 nt, Human
uuaccaucauuaaauacaacagc

SEQ ID NO: 790145 - RNA, 23 nt, Human
uuccucaguuuugcagaggagca

SEQ ID NO: 790146 - RNA, 20 nt, Human
uucuugcugggcugcaugua

SEQ ID NO: 790147 - RNA, 24 nt, Human
uugacuggcuaguaaagccaagga

SEQ ID NO: 790148 - RNA, 24 nt, Human
uugcugggcugcauguacucacau

SEQ ID NO: 790149 - RNA, 21 nt, Human
uuugagaugaacucagcagca

SEQ ID NO: 790150 - RNA, 23 nt, Human
uuuguaaaaaauaacauugcauu

SEQ ID NO: 790151 - RNA, 19 nt, Human
uuugugaagccucuccaca

SEQ ID NO: 790152 - RNA, 20 nt, Human
uuuucuguaaaccugccaaa

SEQ ID NO: 790153 - RNA, 21 nt, Human
uuuugaguuucucuucaaagg

SEQ ID NO: 790154 - RNA, 26 nt, Human
aaaaaugacuaugacaaggucccugc

SEQ ID NO: 790155 - RNA, 18 nt, Human
aaaacaaacccacaaagc

SEQ ID NO: 790156 - RNA, 28 nt, Human
aaaauacguccaguccuugacaucuucu

SEQ ID NO: 790157 - RNA, 19 nt, Human
aaacaaacccacaaagcaa

SEQ ID NO: 790158 - RNA, 18 nt, Human
aaagacgucccugcccuu

SEQ ID NO: 790159 - RNA, 18 nt, Human
aaggaagcaugagcuaac

SEQ ID NO: 790160 - RNA, 21 nt, Human
aauaccuauauacaagauggc

SEQ ID NO: 790161 - RNA, 23 nt, Human
aauagguagugagagacacacaa

SEQ ID NO: 790162 - RNA, 18 nt, Human
acaaaacaaacccacaaa

SEQ ID NO: 790163 - RNA, 21 nt, Human
acaaaacaaacccacaaagca

SEQ ID NO: 790164 - RNA, 23 nt, Human
acaaagaucaacucugccuaccu

SEQ ID NO: 790165 - RNA, 20 nt, Human
acaaagcaacaguguguaau

SEQ ID NO: 790166 - RNA, 22 nt, Human
acagacaagugucacaaggagc

SEQ ID NO: 790167 - RNA, 19 nt, Human
acauacaaaacaaacccac

SEQ ID NO: 790168 - RNA, 19 nt, Human
accuaacaguaaacaugua

SEQ ID NO: 790169 - RNA, 23 nt, Human
acuaauauuuuauacauuaaauu

SEQ ID NO: 790170 - RNA, 18 nt, Human
agaaagugagcaggaagg

SEQ ID NO: 790171 - RNA, 19 nt, Human
agaaagugagcaggaaggu

SEQ ID NO: 790172 - RNA, 24 nt, Human
agaaaugguaaccguauuggacaa

SEQ ID NO: 790173 - RNA, 24 nt, Human
agaagaaaugaguuuggcagagag

SEQ ID NO: 790174 - RNA, 19 nt, Human
agaagccacacuccccaug

SEQ ID NO: 790175 - RNA, 23 nt, Human
agacuucggaaggcagcguaguu

SEQ ID NO: 790176 - RNA, 20 nt, Human
agaggagcaaaggagcagga

SEQ ID NO: 790177 - RNA, 22 nt, Human
agaucaacaaugcucagugaug

SEQ ID NO: 790178 - RNA, 19 nt, Human
agccagcacugggaaggca

SEQ ID NO: 790179 - RNA, 26 nt, Human
aggaagagauaggacagaagggaccc

SEQ ID NO: 790180 - RNA, 19 nt, Human
aggacagaaagugagcagg

SEQ ID NO: 790181 - RNA, 26 nt, Human
aggacagaaagugagcaggaagguuc

SEQ ID NO: 790182 - RNA, 22 nt, Human
agggccaaugacagggacaggg

SEQ ID NO: 790183 - RNA, 18 nt, Human
agguagaugcaaauaagc

SEQ ID NO: 790184 - RNA, 18 nt, Human
agguggguggguggcagg

SEQ ID NO: 790185 - RNA, 22 nt, Human
auauuuaaaacgccuacaaaca

SEQ ID NO: 790186 - RNA, 20 nt, Human
aucaacucugccuaccuaga

SEQ ID NO: 790187 - RNA, 18 nt, Human
auuuauuuaucuaguuca

SEQ ID NO: 790188 - RNA, 18 nt, Human
caaaacaaacccacaaag

SEQ ID NO: 790189 - RNA, 22 nt, Human
caaaacccacauccuaguccca

SEQ ID NO: 790190 - RNA, 21 nt, Human
caaacagccuuuuuuuuuuag

SEQ ID NO: 790191 - RNA, 19 nt, Human
caaacccacaaagcaacag

SEQ ID NO: 790192 - RNA, 21 nt, Human
caaaggagcaggacuagaaac

SEQ ID NO: 790193 - RNA, 22 nt, Human
caacagcuagugauacgaagga

SEQ ID NO: 790194 - RNA, 22 nt, Human
caauucacaccaaaauuuugga

SEQ ID NO: 790195 - RNA, 19 nt, Human
cacaacacuuuccacacag

SEQ ID NO: 790196 - RNA, 19 nt, Human
cacacagggguggguggug

SEQ ID NO: 790197 - RNA, 21 nt, Human
caccacagaugcaaggaccua

SEQ ID NO: 790198 - RNA, 23 nt, Human
cagagaguagaaaauaccagagg

SEQ ID NO: 790199 - RNA, 21 nt, Human
caggaagagauaggacagaaa

SEQ ID NO: 790200 - RNA, 25 nt, Human
caggaagcgccacaacacuuuccac

SEQ ID NO: 790201 - RNA, 20 nt, Human
cagugcuagagaugcaaaga

SEQ ID NO: 790202 - RNA, 21 nt, Human
cauaacuaaaucucuuaauuc

SEQ ID NO: 790203 - RNA, 26 nt, Human
caucaauaaaccauccuaauuguuaa

SEQ ID NO: 790204 - RNA, 24 nt, Human
caugcacugaauugaauuuguaug

SEQ ID NO: 790205 - RNA, 19 nt, Human
ccacauccuagucccaacc

SEQ ID NO: 790206 - RNA, 26 nt, Human
cccagaacagcggugcacgcccccaa

SEQ ID NO: 790207 - RNA, 25 nt, Human
cccccaggcggccugccgcggcguc

SEQ ID NO: 790208 - RNA, 20 nt, Human
ccucgccagcgcucccccca

SEQ ID NO: 790209 - RNA, 22 nt, Human
ccugcagccuggcagaugagac

SEQ ID NO: 790210 - RNA, 19 nt, Human
ccuuccuucauccuuucuu

SEQ ID NO: 790211 - RNA, 19 nt, Human
ccuugagucuucaaaaugg

SEQ ID NO: 790212 - RNA, 19 nt, Human
cgcuccccccaggcggccu

SEQ ID NO: 790213 - RNA, 19 nt, Human
cggcagagagguggguggg

SEQ ID NO: 790214 - RNA, 20 nt, Human
cuaaguaugcaauacauacu

SEQ ID NO: 790215 - RNA, 19 nt, Human
cucagaagccacacucccc

SEQ ID NO: 790216 - RNA, 19 nt, Human
cucgccagcgcucccccca

SEQ ID NO: 790217 - RNA, 23 nt, Human
cugagguagcuguaagcuuggag

SEQ ID NO: 790218 - RNA, 18 nt, Human
cugucugcucuccccagc

SEQ ID NO: 790219 - RNA, 21 nt, Human
cuugcagaagacuccauuucc

SEQ ID NO: 790220 - RNA, 22 nt, Human
gaaacaaguuucgagguucacc

SEQ ID NO: 790221 - RNA, 23 nt, Human
gaacugagaagcccaaaaggcau

SEQ ID NO: 790222 - RNA, 19 nt, Human
gaagcgccacaacacuuuc

SEQ ID NO: 790223 - RNA, 21 nt, Human
gacacacgggcacagagagga

SEQ ID NO: 790224 - RNA, 25 nt, Human
gauucauccuuccugaaguuuccac

SEQ ID NO: 790225 - RNA, 21 nt, Human
gcaaauaagccaucccuuuag

SEQ ID NO: 790226 - RNA, 19 nt, Human
gcacauacaaaacaaaccc

SEQ ID NO: 790227 - RNA, 19 nt, Human
gcacugaauugaauuugua

SEQ ID NO: 790228 - RNA, 20 nt, Human
gcagaggacacacgggcaca

SEQ ID NO: 790229 - RNA, 21 nt, Human
gcaguuggaaucaccagugca

SEQ ID NO: 790230 - RNA, 18 nt, Human
gcauugcuuagcuuaaaa

SEQ ID NO: 790231 - RNA, 18 nt, Human
gcgcccgccguccgugcc

SEQ ID NO: 790232 - RNA, 23 nt, Human
gcgcccgccguccgugccucgcc

SEQ ID NO: 790233 - RNA, 21 nt, Human
gcugucugcauguuuccauca

SEQ ID NO: 790234 - RNA, 21 nt, Human
ggaaaaguauacagaacccuu

SEQ ID NO: 790235 - RNA, 22 nt, Human
ggacuuaguccugugaaaauaa

SEQ ID NO: 790236 - RNA, 19 nt, Human
ggagcaacggcagagaggu

SEQ ID NO: 790237 - RNA, 19 nt, Human
ggaggaggcugcaccugag

SEQ ID NO: 790238 - RNA, 18 nt, Human
ggaguuuuccaaaagugc

SEQ ID NO: 790239 - RNA, 19 nt, Human
gggcgcccgccguccgugc

SEQ ID NO: 790240 - RNA, 18 nt, Human
ggguggguggcaggaagc

SEQ ID NO: 790241 - RNA, 21 nt, Human
guaaaaaauaccuauauacaa

SEQ ID NO: 790242 - RNA, 22 nt, Human
guuacaguuaacacaaucugcu

SEQ ID NO: 790243 - RNA, 19 nt, Human
uaaaacgccuacaaacagc

SEQ ID NO: 790244 - RNA, 22 nt, Human
uaaagagacugacuggcaauua

SEQ ID NO: 790245 - RNA, 21 nt, Human
uaaagcaugcacugaauugaa

SEQ ID NO: 790246 - RNA, 24 nt, Human
uaaauuuucucacuauaaagagac

SEQ ID NO: 790247 - RNA, 22 nt, Human
uaacaaaugccagacuucggaa

SEQ ID NO: 790248 - RNA, 23 nt, Human
uacaaaacaaacccacaaagcaa

SEQ ID NO: 790249 - RNA, 24 nt, Human
uacaaucucaugcuuaacaccuaa

SEQ ID NO: 790250 - RNA, 20 nt, Human
uacagccgaucauuuacagc

SEQ ID NO: 790251 - RNA, 18 nt, Human
uagcaccacagaugcaaa

SEQ ID NO: 790252 - RNA, 24 nt, Human
uagcaccacagaugcaaggaccua

SEQ ID NO: 790253 - RNA, 25 nt, Human
uagcaccacagaugcaaggaccuaa

SEQ ID NO: 790254 - RNA, 22 nt, Human
uauggcuaaucgaguuacuaua

SEQ ID NO: 790255 - RNA, 19 nt, Human
ucauucagaucaaaagcug

SEQ ID NO: 790256 - RNA, 25 nt, Human
uccaaaagugcccaauucacaccaa

SEQ ID NO: 790257 - RNA, 20 nt, Human
ucucaugcuuaacaccuaaa

SEQ ID NO: 790258 - RNA, 23 nt, Human
ucugauggauuuauuuuaugaug

SEQ ID NO: 790259 - RNA, 22 nt, Human
ugaagaaaauaaaucuguauca

SEQ ID NO: 790260 - RNA, 18 nt, Human
ugaaggaaggcaaaggag

SEQ ID NO: 790261 - RNA, 21 nt, Human
ugaaggaaggcaaaggaggug

SEQ ID NO: 790262 - RNA, 18 nt, Human
ugacagggacaggguggc

SEQ ID NO: 790263 - RNA, 19 nt, Human
ugagcuuuagggaggaggc

SEQ ID NO: 790264 - RNA, 20 nt, Human
ugagguagcuguaagcuugg

SEQ ID NO: 790265 - RNA, 18 nt, Human
ugaucaagguacgagccg

SEQ ID NO: 790266 - RNA, 21 nt, Human
ugauguaaaacaacuuuugaa

SEQ ID NO: 790267 - RNA, 18 nt, Human
ugcaaagacgucccugcc

SEQ ID NO: 790268 - RNA, 21 nt, Human
ugcaguuggaaucaccagugc

SEQ ID NO: 790269 - RNA, 21 nt, Human
ugccaccaccauuuauuuauc

SEQ ID NO: 790270 - RNA, 24 nt, Human
ugccaccaccauuuauuuaucuag

SEQ ID NO: 790271 - RNA, 21 nt, Human
ugccucgccagcgcucccccc

SEQ ID NO: 790272 - RNA, 18 nt, Human
uggaaucaccagugcaaa

SEQ ID NO: 790273 - RNA, 19 nt, Human
ugggaggagagggcuccca

SEQ ID NO: 790274 - RNA, 21 nt, Human
ugggaggagagggcucccagg

SEQ ID NO: 790275 - RNA, 21 nt, Human
uguccuugagucuucaaaaug

SEQ ID NO: 790276 - RNA, 21 nt, Human
ugugaaaaacaugcaguaaaa

SEQ ID NO: 790277 - RNA, 20 nt, Human
ugugaaaauaaaaaugacua

SEQ ID NO: 790278 - RNA, 22 nt, Human
ugugugcaugucaacccaugua

SEQ ID NO: 790279 - RNA, 25 nt, Human
uuaacauugauguaaaacaacuuuu

SEQ ID NO: 790280 - RNA, 20 nt, Human
uucaaaaggacauuugauac

SEQ ID NO: 790281 - RNA, 24 nt, Human
uucaaaaggacauuugauacaaaa

SEQ ID NO: 790282 - RNA, 21 nt, Human
uucaaagugcuaugcuuuuaa

SEQ ID NO: 790283 - RNA, 24 nt, Human
uucagaccugaucaaaugaaaagc

SEQ ID NO: 790284 - RNA, 25 nt, Human
uucuugaaauuucauuuuguaauga

SEQ ID NO: 790285 - RNA, 24 nt, Human
uuggaguuuggaugggagacgaca

SEQ ID NO: 790286 - RNA, 26 nt, Human
uuucagacaagcaaagcaguacugag

SEQ ID NO: 790287 - RNA, 25 nt, Human
uuuuuaggcaacaaaauacguccag

SEQ ID NO: 790288 - RNA, 20 nt, Human
aaaaaaaaaaaaacaaaaaa

SEQ ID NO: 790289 - RNA, 20 nt, Human
aaaaaacccaaaaaacaaac

SEQ ID NO: 790290 - RNA, 22 nt, Human
aaaaaacuaaaacugccacaaa

SEQ ID NO: 790291 - RNA, 24 nt, Human
aaaaaacuaaaacugccacaaaua

SEQ ID NO: 790292 - RNA, 25 nt, Human
aaaaacccaaaaaacaaacaaaaaa

SEQ ID NO: 790293 - RNA, 21 nt, Human
aaaaauaaauaccaagaacua

SEQ ID NO: 790294 - RNA, 18 nt, Human
aaaacaaacaaaaaaacc

SEQ ID NO: 790295 - RNA, 23 nt, Human
aaacaaaaaaaccucccucccca

SEQ ID NO: 790296 - RNA, 26 nt, Human
aaacaaaaaaaccucccuccccagga

SEQ ID NO: 790297 - RNA, 26 nt, Human
aaacaaaaaacuaaaacugccacaaa

SEQ ID NO: 790298 - RNA, 25 nt, Human
aaacaaacaaaaaaaccucccuccc

SEQ ID NO: 790299 - RNA, 27 nt, Human
aaagaaaacaagacaccaaaaaaaccc

SEQ ID NO: 790300 - RNA, 20 nt, Human
aaauacugaagaggcaagcu

SEQ ID NO: 790301 - RNA, 20 nt, Human
aacaaaaaacuaaaacugcc

SEQ ID NO: 790302 - RNA, 23 nt, Human
aacccaaaaaacaaacaaaaaaa

SEQ ID NO: 790303 - RNA, 21 nt, Human
aaccggcuuggaaccaacgcc

SEQ ID NO: 790304 - RNA, 25 nt, Human
aagacacccugcacccugcgcccag

SEQ ID NO: 790305 - RNA, 18 nt, Human
aagcagcggaggccagcg

SEQ ID NO: 790306 - RNA, 21 nt, Human
aagcagcggaggccagcggug

SEQ ID NO: 790307 - RNA, 21 nt, Human
aaggggccagccccacagaua

SEQ ID NO: 790308 - RNA, 24 nt, Human
aaggggccagccccacagauacug

SEQ ID NO: 790309 - RNA, 21 nt, Human
acaaauagaacuccuggacca

SEQ ID NO: 790310 - RNA, 24 nt, Human
acaagacaccaaaaaaacccaaaa

SEQ ID NO: 790311 - RNA, 25 nt, Human
acaagacaccaaaaaaacccaaaaa

SEQ ID NO: 790312 - RNA, 20 nt, Human
acacaaauggacggacagac

SEQ ID NO: 790313 - RNA, 18 nt, Human
acaccaaaaaaacccaaa

SEQ ID NO: 790314 - RNA, 25 nt, Human
acaccaaaaaaacccaaaaaacaaa

SEQ ID NO: 790315 - RNA, 28 nt, Human
acaccaaaaaaacccaaaaaacaaacaa

SEQ ID NO: 790316 - RNA, 27 nt, Human
acaccaaauccacccaucaucuccgac

SEQ ID NO: 790317 - RNA, 20 nt, Human
acagccacagaaaugagugc

SEQ ID NO: 790318 - RNA, 21 nt, Human
acagugggguggcugggucag

SEQ ID NO: 790319 - RNA, 19 nt, Human
acccaaaaaacaaacaaaa

SEQ ID NO: 790320 - RNA, 20 nt, Human
acccaaaccauccauuuuca

SEQ ID NO: 790321 - RNA, 21 nt, Human
acccugcccugagacuccaac

SEQ ID NO: 790322 - RNA, 20 nt, Human
accgcaccgcagagcccagc

SEQ ID NO: 790323 - RNA, 26 nt, Human
accgcaccgcagagcccagcccggca

SEQ ID NO: 790324 - RNA, 18 nt, Human
acuaaagugaggguccca

SEQ ID NO: 790325 - RNA, 20 nt, Human
acuccaacucacuggccguu

SEQ ID NO: 790326 - RNA, 26 nt, Human
agaaagaaaacaagacaccaaaaaaa

SEQ ID NO: 790327 - RNA, 26 nt, Human
agacaccaaaaaaacccaaaaaacaa

SEQ ID NO: 790328 - RNA, 19 nt, Human
agaccagccagugcccaga

SEQ ID NO: 790329 - RNA, 21 nt, Human
agagccaaaggaucagcagga

SEQ ID NO: 790330 - RNA, 19 nt, Human
aggaccucugguggcagcu

SEQ ID NO: 790331 - RNA, 24 nt, Human
aggagaaagaaaacaagacaccaa

SEQ ID NO: 790332 - RNA, 19 nt, Human
aggcacgaggaggggaggu

SEQ ID NO: 790333 - RNA, 23 nt, Human
aggcagggcaggcacgaggaggg

SEQ ID NO: 790334 - RNA, 19 nt, Human
aggcgccagggacgggaac

SEQ ID NO: 790335 - RNA, 23 nt, Human
agucugggcgaaguggcuccucu

SEQ ID NO: 790336 - RNA, 22 nt, Human
auccauuuucaaagcuuuuuuu

SEQ ID NO: 790337 - RNA, 22 nt, Human
aucuaaagcaggguggcuucca

SEQ ID NO: 790338 - RNA, 20 nt, Human
aucuggagaaggcuugcggg

SEQ ID NO: 790339 - RNA, 19 nt, Human
aucuggaugaaggaggugg

SEQ ID NO: 790340 - RNA, 22 nt, Human
caaaaaaacccaaaaaacaaac

SEQ ID NO: 790341 - RNA, 25 nt, Human
caaaaaaacccaaaaaacaaacaaa

SEQ ID NO: 790342 - RNA, 24 nt, Human
caaaaaacuaaaacugccacaaau

SEQ ID NO: 790343 - RNA, 25 nt, Human
caagacaccaaaaaaacccaaaaaa

SEQ ID NO: 790344 - RNA, 28 nt, Human
caagacaccaaaaaaacccaaaaaacaa

SEQ ID NO: 790345 - RNA, 24 nt, Human
caagcuccaggccuggccuuucca

SEQ ID NO: 790346 - RNA, 25 nt, Human
caccaaaaaaacccaaaaaacaaac

SEQ ID NO: 790347 - RNA, 28 nt, Human
caccaaaaaaacccaaaaaacaaacaaa

SEQ ID NO: 790348 - RNA, 22 nt, Human
caccagauccggaagacacccu

SEQ ID NO: 790349 - RNA, 18 nt, Human
cacccugcacccugcgcc

SEQ ID NO: 790350 - RNA, 23 nt, Human
cacugugcguggagaggcagggc

SEQ ID NO: 790351 - RNA, 23 nt, Human
cagaaaacacaaauggacggaca

SEQ ID NO: 790352 - RNA, 21 nt, Human
cagagcccagcccggcacugc

SEQ ID NO: 790353 - RNA, 20 nt, Human
cagccagugcccagacucca

SEQ ID NO: 790354 - RNA, 20 nt, Human
cagcccggcacugcugggug

SEQ ID NO: 790355 - RNA, 20 nt, Human
caggagcugggagaguggcc

SEQ ID NO: 790356 - RNA, 21 nt, Human
cagggaaaggaaacacaguuc

SEQ ID NO: 790357 - RNA, 22 nt, Human
caggguagggaaagcugugauc

SEQ ID NO: 790358 - RNA, 27 nt, Human
ccaaaaaaacccaaaaaacaaacaaaa

SEQ ID NO: 790359 - RNA, 22 nt, Human
ccagaacauucccucuggccga

SEQ ID NO: 790360 - RNA, 21 nt, Human
ccagacuccaacuuaaacacc

SEQ ID NO: 790361 - RNA, 19 nt, Human
ccagagccagagaggggaa

SEQ ID NO: 790362 - RNA, 23 nt, Human
ccaggagcugggagaguggccca

SEQ ID NO: 790363 - RNA, 20 nt, Human
ccauaugcgccagacacugu

SEQ ID NO: 790364 - RNA, 23 nt, Human
cccaaaaaacaaacaaaaaaacc

SEQ ID NO: 790365 - RNA, 21 nt, Human
cccaugccgcaggcggugggg

SEQ ID NO: 790366 - RNA, 22 nt, Human
cccauggcugguucgccccgga

SEQ ID NO: 790367 - RNA, 21 nt, Human
ccccacagauacuguccucuc

SEQ ID NO: 790368 - RNA, 20 nt, Human
ccccuggggcagagcuggcc

SEQ ID NO: 790369 - RNA, 21 nt, Human
ccccuggggcagagcuggccu

SEQ ID NO: 790370 - RNA, 24 nt, Human
ccccuggggcagagcuggccucca

SEQ ID NO: 790371 - RNA, 20 nt, Human
ccgcagagcccagcccggca

SEQ ID NO: 790372 - RNA, 21 nt, Human
ccucugguggcagcucagccc

SEQ ID NO: 790373 - RNA, 21 nt, Human
ccugcacccugcgcccaggga

SEQ ID NO: 790374 - RNA, 24 nt, Human
cggacagacggauggacauaauca

SEQ ID NO: 790375 - RNA, 24 nt, Human
cggaccacucugcugaaguccuuu

SEQ ID NO: 790376 - RNA, 19 nt, Human
cucaagggaaacugccacc

SEQ ID NO: 790377 - RNA, 24 nt, Human
cuccugcccagccacgaggcuguc

SEQ ID NO: 790378 - RNA, 18 nt, Human
cucuuggcuccuuaacac

SEQ ID NO: 790379 - RNA, 24 nt, Human
cugaacaccuuccaucugggcuga

SEQ ID NO: 790380 - RNA, 19 nt, Human
cugaaguccaggugggugu

SEQ ID NO: 790381 - RNA, 23 nt, Human
cugaggcuggcccgcgucugccu

SEQ ID NO: 790382 - RNA, 18 nt, Human
cugcacccugcgcccagg

SEQ ID NO: 790383 - RNA, 23 nt, Human
cugcucuucaugaaggaccaggu

SEQ ID NO: 790384 - RNA, 18 nt, Human
cugcugaaguccaggugg

SEQ ID NO: 790385 - RNA, 20 nt, Human
cugcuuugcucaagggaaac

SEQ ID NO: 790386 - RNA, 23 nt, Human
cuggccgacagccacagaaauga

SEQ ID NO: 790387 - RNA, 20 nt, Human
cuguccgggaguucugggag

SEQ ID NO: 790388 - RNA, 19 nt, Human
cuugagacuugcucuccuc

SEQ ID NO: 790389 - RNA, 23 nt, Human
cuugcgggcucggcauggcgaga

SEQ ID NO: 790390 - RNA, 24 nt, Human
gaagacacccugcacccugcgccc

SEQ ID NO: 790391 - RNA, 20 nt, Human
gaccagguggugacagggcu

SEQ ID NO: 790392 - RNA, 18 nt, Human
gacgcagaaaacacaaau

SEQ ID NO: 790393 - RNA, 23 nt, Human
gacgcagaaaacacaaauggacg

SEQ ID NO: 790394 - RNA, 25 nt, Human
gacuugcucuccuccacaagcacuu

SEQ ID NO: 790395 - RNA, 24 nt, Human
gagaaagaaaacaagacaccaaaa

SEQ ID NO: 790396 - RNA, 25 nt, Human
gagaaagaaaacaagacaccaaaaa

SEQ ID NO: 790397 - RNA, 20 nt, Human
gagcaccguucauccgggga

SEQ ID NO: 790398 - RNA, 21 nt, Human
gagccaaaggaucagcaggag

SEQ ID NO: 790399 - RNA, 19 nt, Human
gaggcuguccuggcugucc

SEQ ID NO: 790400 - RNA, 18 nt, Human
gauggaagcagcggaggc

SEQ ID NO: 790401 - RNA, 26 nt, Human
gauuuuugcuucaugguugucagagg

SEQ ID NO: 790402 - RNA, 20 nt, Human
gcacuccaggcgccagggac

SEQ ID NO: 790403 - RNA, 19 nt, Human
gcacuggacacacccaugc

SEQ ID NO: 790404 - RNA, 18 nt, Human
gcagagcuggccuccagg

SEQ ID NO: 790405 - RNA, 24 nt, Human
gcccugggggacgugagucucaga

SEQ ID NO: 790406 - RNA, 19 nt, Human
gcgcgucggcugucggugc

SEQ ID NO: 790407 - RNA, 18 nt, Human
gcugauggaagcagcgga

SEQ ID NO: 790408 - RNA, 20 nt, Human
gcuguccgggaguucuggga

SEQ ID NO: 790409 - RNA, 21 nt, Human
gcuuggaaccaacgccugccc

SEQ ID NO: 790410 - RNA, 20 nt, Human
ggaaaggaaacacaguucaa

SEQ ID NO: 790411 - RNA, 19 nt, Human
ggaagcagcggaggccagc

SEQ ID NO: 790412 - RNA, 18 nt, Human
ggaggagggcggggguag

SEQ ID NO: 790413 - RNA, 19 nt, Human
ggcacugcugggugaccgu

SEQ ID NO: 790414 - RNA, 20 nt, Human
ggccccaggcuccugcccag

SEQ ID NO: 790415 - RNA, 21 nt, Human
ggccccaggcuccugcccagc

SEQ ID NO: 790416 - RNA, 20 nt, Human
ggcugcuuugcucaagggaa

SEQ ID NO: 790417 - RNA, 24 nt, Human
gggaaaggaaacacaguucaacgu

SEQ ID NO: 790418 - RNA, 19 nt, Human
gggguggcugggucaggca

SEQ ID NO: 790419 - RNA, 19 nt, Human
gggucaggcagagaccagc

SEQ ID NO: 790420 - RNA, 21 nt, Human
guccugcugcuugcugugcug

SEQ ID NO: 790421 - RNA, 18 nt, Human
gugcaugggaguggcagg

SEQ ID NO: 790422 - RNA, 21 nt, Human
guggaccgcaccgcagagccc

SEQ ID NO: 790423 - RNA, 25 nt, Human
guggcacuggacacacccaugccgc

SEQ ID NO: 790424 - RNA, 23 nt, Human
uaaauaccaagaacuaaagugag

SEQ ID NO: 790425 - RNA, 20 nt, Human
uaagacaagagacucuaaaa

SEQ ID NO: 790426 - RNA, 27 nt, Human
uaccaagaacuaaagugagggucccag

SEQ ID NO: 790427 - RNA, 21 nt, Human
uacccaggaaggaggagggcg

SEQ ID NO: 790428 - RNA, 25 nt, Human
uagaacuccuggaccaaggucacac

SEQ ID NO: 790429 - RNA, 20 nt, Human
uaggccugccccuccgggcc

SEQ ID NO: 790430 - RNA, 20 nt, Human
ucagccccuggggcagagcu

SEQ ID NO: 790431 - RNA, 21 nt, Human
uccacaagcacuugcccuggg

SEQ ID NO: 790432 - RNA, 18 nt, Human
uccagcuggaggccugcu

SEQ ID NO: 790433 - RNA, 22 nt, Human
uccagcuggaggccugcucucc

SEQ ID NO: 790434 - RNA, 24 nt, Human
uccauggacgcugccucccuggag

SEQ ID NO: 790435 - RNA, 18 nt, Human
ucccaggaccucuggugg

SEQ ID NO: 790436 - RNA, 25 nt, Human
uccccaggaacaaauagaacuccug

SEQ ID NO: 790437 - RNA, 19 nt, Human
ucccuccuuggcagcucca

SEQ ID NO: 790438 - RNA, 18 nt, Human
ucccucuggccgacagcc

SEQ ID NO: 790439 - RNA, 19 nt, Human
uccgacagucaaccagccu

SEQ ID NO: 790440 - RNA, 21 nt, Human
uccuccacaagcacuugcccu

SEQ ID NO: 790441 - RNA, 22 nt, Human
ucugggagaagcuaggccugcc

SEQ ID NO: 790442 - RNA, 23 nt, Human
ugaagaggcaagcuccaggccug

SEQ ID NO: 790443 - RNA, 19 nt, Human
ugacagggcugauggaagc

SEQ ID NO: 790444 - RNA, 22 nt, Human
ugaccgagucuacaaguucaga

SEQ ID NO: 790445 - RNA, 18 nt, Human
ugacucacaagcggcccc

SEQ ID NO: 790446 - RNA, 19 nt, Human
ugcagaacugugcauggga

SEQ ID NO: 790447 - RNA, 19 nt, Human
ugcaugggaguggcagggu

SEQ ID NO: 790448 - RNA, 21 nt, Human
ugccacccugcccugagacuc

SEQ ID NO: 790449 - RNA, 21 nt, Human
ugcccugagacuccaacucac

SEQ ID NO: 790450 - RNA, 21 nt, Human
ugcgggcucggcauggcgaga

SEQ ID NO: 790451 - RNA, 23 nt, Human
ugcuccauggacgcugccucccu

SEQ ID NO: 790452 - RNA, 21 nt, Human
uggaagcagcggaggccagcg

SEQ ID NO: 790453 - RNA, 21 nt, Human
uggaggagagaguacauggca

SEQ ID NO: 790454 - RNA, 20 nt, Human
uggaugaaggaggugggaga

SEQ ID NO: 790455 - RNA, 22 nt, Human
uggcaagagaugagccacagug

SEQ ID NO: 790456 - RNA, 22 nt, Human
uggccuccagggaggagacccu

SEQ ID NO: 790457 - RNA, 18 nt, Human
ugggagaagcuaggccug

SEQ ID NO: 790458 - RNA, 18 nt, Human
ugggagaagcuaggccug

SEQ ID NO: 790459 - RNA, 21 nt, Human
ugggcugaacuuucuugggaa

SEQ ID NO: 790460 - RNA, 22 nt, Human
ugggucaggcagagaccagcca

SEQ ID NO: 790461 - RNA, 18 nt, Human
uggugacagggcugaugg

SEQ ID NO: 790462 - RNA, 19 nt, Human
ugguggcagcucagccccu

SEQ ID NO: 790463 - RNA, 18 nt, Human
ugugcugggccggccucg

SEQ ID NO: 790464 - RNA, 25 nt, Human
uuaaaaaaaaaaaaacaaaaaacua

SEQ ID NO: 790465 - RNA, 26 nt, Human
uucccgaccagccucuaagugucugc

SEQ ID NO: 790466 - RNA, 23 nt, Human
uuggaaccaacgccugcccuccc

SEQ ID NO: 790467 - RNA, 24 nt, Human
uuuuuaauacccaaaccauccauu

SEQ ID NO: 790468 - RNA, 20 nt, Human
aagaagugaaaggcacugca

SEQ ID NO: 790469 - RNA, 23 nt, Human
aagaauaaaggauuccugagagc

SEQ ID NO: 790470 - RNA, 21 nt, Human
accccgcuccagccgcugcag

SEQ ID NO: 790471 - RNA, 21 nt, Human
acucaucccuaccaacccccc

SEQ ID NO: 790472 - RNA, 18 nt, Human
acuccccagccgagggau

SEQ ID NO: 790473 - RNA, 19 nt, Human
agaaaggaggaauggaggg

SEQ ID NO: 790474 - RNA, 21 nt, Human
agccuguccccuccucuccug

SEQ ID NO: 790475 - RNA, 23 nt, Human
aggcagcaguagggaaaaccagg

SEQ ID NO: 790476 - RNA, 19 nt, Human
aguguugggcucagaaagg

SEQ ID NO: 790477 - RNA, 22 nt, Human
caaccccccacccccccgcccc

SEQ ID NO: 790478 - RNA, 23 nt, Human
caaccccccacccccccgccccg

SEQ ID NO: 790479 - RNA, 18 nt, Human
cacccccaggcccacacu

SEQ ID NO: 790480 - RNA, 22 nt, Human
cagcaguagggaaaaccaggcu

SEQ ID NO: 790481 - RNA, 18 nt, Human
cagccaccgccgcccucc

SEQ ID NO: 790482 - RNA, 20 nt, Human
caucccuaccaaccccccac

SEQ ID NO: 790483 - RNA, 21 nt, Human
caucccuaccaaccccccacc

SEQ ID NO: 790484 - RNA, 19 nt, Human
ccaccgccgcccuccccgc

SEQ ID NO: 790485 - RNA, 18 nt, Human
ccagccgcugcagccacc

SEQ ID NO: 790486 - RNA, 24 nt, Human
ccaggcccacacuggggguucugc

SEQ ID NO: 790487 - RNA, 20 nt, Human
ccagggccaaacccaaaggg

SEQ ID NO: 790488 - RNA, 19 nt, Human
ccccacccccccgccccgg

SEQ ID NO: 790489 - RNA, 20 nt, Human
ccccacccccccgccccgga

SEQ ID NO: 790490 - RNA, 22 nt, Human
ccccacccccccgccccggauu

SEQ ID NO: 790491 - RNA, 18 nt, Human
cccccacccccccgcccc

SEQ ID NO: 790492 - RNA, 21 nt, Human
ccccccacccccccgccccgg

SEQ ID NO: 790493 - RNA, 20 nt, Human
ccccccgccccggauuucug

SEQ ID NO: 790494 - RNA, 23 nt, Human
cccccgccccggauuucugggga

SEQ ID NO: 790495 - RNA, 22 nt, Human
cccgcuccagccgcugcagcca

SEQ ID NO: 790496 - RNA, 22 nt, Human
cccuaccaaccccccacccccc

SEQ ID NO: 790497 - RNA, 21 nt, Human
ccgcggccgccgcuacuuccc

SEQ ID NO: 790498 - RNA, 21 nt, Human
ccgcugcagccaccgccgccc

SEQ ID NO: 790499 - RNA, 22 nt, Human
ccgcugcagccaccgccgcccu

SEQ ID NO: 790500 - RNA, 23 nt, Human
ccuaagucccauccucccacccc

SEQ ID NO: 790501 - RNA, 26 nt, Human
ccuaccaaccccccacccccccgccc

SEQ ID NO: 790502 - RNA, 21 nt, Human
ccucaaaugcucuucuucuuc

SEQ ID NO: 790503 - RNA, 18 nt, Human
cggccgccgcuacuuccu

SEQ ID NO: 790504 - RNA, 24 nt, Human
cuaccaaccccccacccccccgcc

SEQ ID NO: 790505 - RNA, 21 nt, Human
cucaucccuaccaacccccca

SEQ ID NO: 790506 - RNA, 20 nt, Human
cuccccgcggccgccgcuac

SEQ ID NO: 790507 - RNA, 20 nt, Human
cucuccuguggcccccuuga

SEQ ID NO: 790508 - RNA, 19 nt, Human
cuguggcccccuugacagg

SEQ ID NO: 790509 - RNA, 20 nt, Human
gcugcagccaccgccgcccu

SEQ ID NO: 790510 - RNA, 21 nt, Human
ggacucaucccuaccaacccc

SEQ ID NO: 790511 - RNA, 18 nt, Human
ggcgggggcgggggcggg

SEQ ID NO: 790512 - RNA, 21 nt, Human
ggcgggggugggcacuagggc

SEQ ID NO: 790513 - RNA, 23 nt, Human
gggccgagacccggcggucucua

SEQ ID NO: 790514 - RNA, 22 nt, Human
gggcgggggcgggggcgggggu

SEQ ID NO: 790515 - RNA, 21 nt, Human
ggguugggcgggggcgggggc

SEQ ID NO: 790516 - RNA, 20 nt, Human
gugaguugggguugggcggg

SEQ ID NO: 790517 - RNA, 21 nt, Human
guuccgcuccuggugcgggcc

SEQ ID NO: 790518 - RNA, 25 nt, Human
guugggcgggggcgggggcgggggu

SEQ ID NO: 790519 - RNA, 21 nt, Human
uaagucccauccucccacccc

SEQ ID NO: 790520 - RNA, 22 nt, Human
uaagucccauccucccaccccc

SEQ ID NO: 790521 - RNA, 20 nt, Human
uaccaaccccccaccccccc

SEQ ID NO: 790522 - RNA, 18 nt, Human
ucagaaaggaggaaugga

SEQ ID NO: 790523 - RNA, 20 nt, Human
ucccauccucccacccccag

SEQ ID NO: 790524 - RNA, 23 nt, Human
ucccauccucccacccccaggcc

SEQ ID NO: 790525 - RNA, 23 nt, Human
ucccuaccaaccccccacccccc

SEQ ID NO: 790526 - RNA, 24 nt, Human
ucccuaccaaccccccaccccccc

SEQ ID NO: 790527 - RNA, 26 nt, Human
ucccuaccaaccccccacccccccgc

SEQ ID NO: 790528 - RNA, 20 nt, Human
ucgaccacaaacaguuuuaa

SEQ ID NO: 790529 - RNA, 19 nt, Human
ucggccuccccacucccuc

SEQ ID NO: 790530 - RNA, 21 nt, Human
ucuacuaggacuccagggcca

SEQ ID NO: 790531 - RNA, 19 nt, Human
ugaaaggcacugcaggggu

SEQ ID NO: 790532 - RNA, 18 nt, Human
ugagagccuguccccucc

SEQ ID NO: 790533 - RNA, 20 nt, Human
uggggguucugcagcaggag

SEQ ID NO: 790534 - RNA, 21 nt, Human
ugggguugggcgggggcgggg

SEQ ID NO: 790535 - RNA, 23 nt, Human
aaacagcagacacgaggagagca

SEQ ID NO: 790536 - RNA, 24 nt, Human
aacagguuuguaaaaccaaaccug

SEQ ID NO: 790537 - RNA, 19 nt, Human
aacaugaugaaacccgucu

SEQ ID NO: 790538 - RNA, 20 nt, Human
aacaugaugaaacccgucuc

SEQ ID NO: 790539 - RNA, 23 nt, Human
aaggugggcggaucaugagguca

SEQ ID NO: 790540 - RNA, 24 nt, Human
aauggcaugaaccugggaggcgga

SEQ ID NO: 790541 - RNA, 18 nt, Human
acaaagcuuuuuaguucc

SEQ ID NO: 790542 - RNA, 22 nt, Human
acaccaagggaaaaaaacagca

SEQ ID NO: 790543 - RNA, 24 nt, Human
acagagcaagacuccaccucaaaa

SEQ ID NO: 790544 - RNA, 21 nt, Human
accaccuccaauaaauaucca

SEQ ID NO: 790545 - RNA, 22 nt, Human
acccaauuauuaaaguuuuuua

SEQ ID NO: 790546 - RNA, 23 nt, Human
acccucacuauaucccccugcca

SEQ ID NO: 790547 - RNA, 22 nt, Human
accucaaaaaaaaaaaaaagaa

SEQ ID NO: 790548 - RNA, 18 nt, Human
agaaaagggguacaaggc

SEQ ID NO: 790549 - RNA, 19 nt, Human
agacacgaggagagcaaga

SEQ ID NO: 790550 - RNA, 20 nt, Human
agagggaaaagucucuuuuc

SEQ ID NO: 790551 - RNA, 24 nt, Human
agcaagagcagcuucccagcccau

SEQ ID NO: 790552 - RNA, 24 nt, Human
agcacuuugggaggccaagguggg

SEQ ID NO: 790553 - RNA, 20 nt, Human
agcauuuuagggcuuccacu

SEQ ID NO: 790554 - RNA, 21 nt, Human
agccgggcacgguggcucaug

SEQ ID NO: 790555 - RNA, 23 nt, Human
agccgggcacgguggcucaugcc

SEQ ID NO: 790556 - RNA, 23 nt, Human
agccgggugugguggcaggugcc

SEQ ID NO: 790557 - RNA, 24 nt, Human
agccugggcgacagagcaagacuc

SEQ ID NO: 790558 - RNA, 22 nt, Human
aggcaggagaauggcaugaacc

SEQ ID NO: 790559 - RNA, 24 nt, Human
aggcaggagaauggcaugaaccug

SEQ ID NO: 790560 - RNA, 20 nt, Human
aggccaaggugggcggauca

SEQ ID NO: 790561 - RNA, 20 nt, Human
aggcggagcuugcagugagc

SEQ ID NO: 790562 - RNA, 24 nt, Human
aggcggagcuugcagugagcugag

SEQ ID NO: 790563 - RNA, 18 nt, Human
aggcugaggcaggagaau

SEQ ID NO: 790564 - RNA, 18 nt, Human
agguaauuuuaaaaaugu

SEQ ID NO: 790565 - RNA, 24 nt, Human
aggugggcggaucaugaggucagg

SEQ ID NO: 790566 - RNA, 19 nt, Human
aguaacagaccuccccucc

SEQ ID NO: 790567 - RNA, 20 nt, Human
aucaugaggucaggagaucc

SEQ ID NO: 790568 - RNA, 22 nt, Human
aucccagcacuuugggaggcca

SEQ ID NO: 790569 - RNA, 19 nt, Human
augccuauaaucccagcac

SEQ ID NO: 790570 - RNA, 24 nt, Human
auugcacuacagccugggcgacag

SEQ ID NO: 790571 - RNA, 24 nt, Human
caagaccauccuggcuaacaugau

SEQ ID NO: 790572 - RNA, 21 nt, Human
caagagcagcuucccagccca

SEQ ID NO: 790573 - RNA, 22 nt, Human
caccaagggaaaaaaacagcag

SEQ ID NO: 790574 - RNA, 23 nt, Human
cacccucacuauaucccccugcc

SEQ ID NO: 790575 - RNA, 28 nt, Human
caccucaaaaaaaaaaaaaagaacugaa

SEQ ID NO: 790576 - RNA, 20 nt, Human
cacuacagccugggcgacag

SEQ ID NO: 790577 - RNA, 23 nt, Human
cacuacagccugggcgacagagc

SEQ ID NO: 790578 - RNA, 24 nt, Human
cacucccuacccuaagguuagagg

SEQ ID NO: 790579 - RNA, 24 nt, Human
cacugcccuucaacaaggagaaac

SEQ ID NO: 790580 - RNA, 18 nt, Human
cagaauccuuuacuccuc

SEQ ID NO: 790581 - RNA, 23 nt, Human
cagacacgaggagagcaagagca

SEQ ID NO: 790582 - RNA, 23 nt, Human
cagaccuccccucccccagcucc

SEQ ID NO: 790583 - RNA, 22 nt, Human
cagcaaaaagaugaaaaauuag

SEQ ID NO: 790584 - RNA, 24 nt, Human
cagcacuuugggaggccaaggugg

SEQ ID NO: 790585 - RNA, 18 nt, Human
cagcauaagaacugaaaa

SEQ ID NO: 790586 - RNA, 20 nt, Human
cagcauaagaacugaaaaua

SEQ ID NO: 790587 - RNA, 24 nt, Human
cagcuacucgggaggcugaggcag

SEQ ID NO: 790588 - RNA, 21 nt, Human
caugaaccugggaggcggagc

SEQ ID NO: 790589 - RNA, 20 nt, Human
caugccuauaaucccagcac

SEQ ID NO: 790590 - RNA, 24 nt, Human
caugccuauaaucccagcacuuug

SEQ ID NO: 790591 - RNA, 19 nt, Human
cauugcacuacagccuggg

SEQ ID NO: 790592 - RNA, 22 nt, Human
cauugcacuacagccugggcga

SEQ ID NO: 790593 - RNA, 24 nt, Human
cauugcacuacagccugggcgaca

SEQ ID NO: 790594 - RNA, 22 nt, Human
ccacccaauuauuaaaguuuuu

SEQ ID NO: 790595 - RNA, 24 nt, Human
ccaccucaaaaaaaaaaaaaagaa

SEQ ID NO: 790596 - RNA, 20 nt, Human
ccauugcacuacagccuggg

SEQ ID NO: 790597 - RNA, 21 nt, Human
ccauugcacuacagccugggc

SEQ ID NO: 790598 - RNA, 24 nt, Human
ccauugcacuacagccugggcgac

SEQ ID NO: 790599 - RNA, 22 nt, Human
cccacccugaagaacacaaagc

SEQ ID NO: 790600 - RNA, 25 nt, Human
cccccugccacccacccugaagaac

SEQ ID NO: 790601 - RNA, 19 nt, Human
cccuaauuaccaccuccaa

SEQ ID NO: 790602 - RNA, 19 nt, Human
cccucucuuucaccccuuu

SEQ ID NO: 790603 - RNA, 22 nt, Human
ccuauaaucccagcacuuuggg

SEQ ID NO: 790604 - RNA, 18 nt, Human
ccucaaaaaaaaaaaaaa

SEQ ID NO: 790605 - RNA, 26 nt, Human
ccucacuauaucccccugccacccac

SEQ ID NO: 790606 - RNA, 22 nt, Human
ccuggcuaacaugaugaaaccc

SEQ ID NO: 790607 - RNA, 22 nt, Human
ccugggcgacagagcaagacuc

SEQ ID NO: 790608 - RNA, 19 nt, Human
ccuguagucccagcuacuc

SEQ ID NO: 790609 - RNA, 21 nt, Human
ccuguagucccagcuacucgg

SEQ ID NO: 790610 - RNA, 21 nt, Human
ccugugauuuagucaugaagc

SEQ ID NO: 790611 - RNA, 23 nt, Human
cuauuugccauauagcugauccc

SEQ ID NO: 790612 - RNA, 26 nt, Human
cucacuauaucccccugccacccacc

SEQ ID NO: 790613 - RNA, 24 nt, Human
cucaugccuauaaucccagcacuu

SEQ ID NO: 790614 - RNA, 20 nt, Human
cuccaccucaaaaaaaaaaa

SEQ ID NO: 790615 - RNA, 23 nt, Human
cuccaccucaaaaaaaaaaaaaa

SEQ ID NO: 790616 - RNA, 18 nt, Human
cuccccucccccagcucc

SEQ ID NO: 790617 - RNA, 24 nt, Human
cugcugauccaaucccagccuuac

SEQ ID NO: 790618 - RNA, 19 nt, Human
cuugcagugagcugagauu

SEQ ID NO: 790619 - RNA, 21 nt, Human
cuugcagugagcugagauugc

SEQ ID NO: 790620 - RNA, 19 nt, Human
cuugugcucagaaaagggg

SEQ ID NO: 790621 - RNA, 24 nt, Human
gaagauuuucccugagacaaacaa

SEQ ID NO: 790622 - RNA, 25 nt, Human
gaccuccccucccccagcuccccac

SEQ ID NO: 790623 - RNA, 25 nt, Human
gagcagcuucccagcccaugguuuc

SEQ ID NO: 790624 - RNA, 26 nt, Human
gagcagcuucccagcccaugguuucc

SEQ ID NO: 790625 - RNA, 23 nt, Human
gagcuugcagugagcugagauug

SEQ ID NO: 790626 - RNA, 21 nt, Human
gcaaaguggucacagcauaag

SEQ ID NO: 790627 - RNA, 19 nt, Human
gccaaggugggcggaucau

SEQ ID NO: 790628 - RNA, 24 nt, Human
gccauugcacuacagccugggcga

SEQ ID NO: 790629 - RNA, 23 nt, Human
gcuaacaugaugaaacccgucuc

SEQ ID NO: 790630 - RNA, 25 nt, Human
ggaagugggggagagggcagggggc

SEQ ID NO: 790631 - RNA, 24 nt, Human
ggagcuugcagugagcugagauug

SEQ ID NO: 790632 - RNA, 23 nt, Human
ggcacgguggcucaugccuauaa

SEQ ID NO: 790633 - RNA, 21 nt, Human
ggcucaugccuauaaucccag

SEQ ID NO: 790634 - RNA, 19 nt, Human
gggaagugggggagagggc

SEQ ID NO: 790635 - RNA, 24 nt, Human
gggcggaucaugaggucaggagau

SEQ ID NO: 790636 - RNA, 21 nt, Human
ggggggaagugggggagaggg

SEQ ID NO: 790637 - RNA, 23 nt, Human
gguggcucaugccuauaauccca

SEQ ID NO: 790638 - RNA, 23 nt, Human
ggugggcggaucaugaggucagg

SEQ ID NO: 790639 - RNA, 23 nt, Human
guacaaggcagccuuauauucca

SEQ ID NO: 790640 - RNA, 23 nt, Human
guggcucaugccuauaaucccag

SEQ ID NO: 790641 - RNA, 22 nt, Human
uaacagaccuccccucccccag

SEQ ID NO: 790642 - RNA, 23 nt, Human
uaacaugaugaaacccgucucua

SEQ ID NO: 790643 - RNA, 18 nt, Human
uaagaaaaaaguaagaga

SEQ ID NO: 790644 - RNA, 23 nt, Human
uaaguugguucaucuuucaguaa

SEQ ID NO: 790645 - RNA, 19 nt, Human
uagaaaaagcuacaaggca

SEQ ID NO: 790646 - RNA, 20 nt, Human
uagaaaaagcuacaaggcaa

SEQ ID NO: 790647 - RNA, 22 nt, Human
uagaggguuggauuucugcuga

SEQ ID NO: 790648 - RNA, 21 nt, Human
uagcauuuuagggcuuccacu

SEQ ID NO: 790649 - RNA, 24 nt, Human
uagccgggcacgguggcucaugcc

SEQ ID NO: 790650 - RNA, 24 nt, Human
uauaguacaccaagggaaaaaaac

SEQ ID NO: 790651 - RNA, 24 nt, Human
uauauuccagguaagaugguggga

SEQ ID NO: 790652 - RNA, 21 nt, Human
uaucaagagagggaaaagucu

SEQ ID NO: 790653 - RNA, 22 nt, Human
uaucaagagagggaaaagucuc

SEQ ID NO: 790654 - RNA, 20 nt, Human
uaugaggaaaaggaaauauu

SEQ ID NO: 790655 - RNA, 22 nt, Human
ucacuauaucccccugccaccc

SEQ ID NO: 790656 - RNA, 18 nt, Human
ucaugaggucaggagauc

SEQ ID NO: 790657 - RNA, 24 nt, Human
ucaugaggucaggagaucaagacc

SEQ ID NO: 790658 - RNA, 22 nt, Human
ucaugccuauaaucccagcacu

SEQ ID NO: 790659 - RNA, 23 nt, Human
uccaccucaaaaaaaaaaaaaag

SEQ ID NO: 790660 - RNA, 25 nt, Human
ucccagcccaugguuuccccagauc

SEQ ID NO: 790661 - RNA, 21 nt, Human
uccccagauccuuagcacucc

SEQ ID NO: 790662 - RNA, 24 nt, Human
uccccagauccuuagcacucccua

SEQ ID NO: 790663 - RNA, 20 nt, Human
ucccugagacaaacaaugaa

SEQ ID NO: 790664 - RNA, 22 nt, Human
ucucuacuaaaaauauaaaaaa

SEQ ID NO: 790665 - RNA, 22 nt, Human
ugaaaccuaccuucacugcccu

SEQ ID NO: 790666 - RNA, 20 nt, Human
ugaagcgggugaaacauagu

SEQ ID NO: 790667 - RNA, 22 nt, Human
ugaagcgggugaaacauaguca

SEQ ID NO: 790668 - RNA, 19 nt, Human
ugagacaaacaaugaacag

SEQ ID NO: 790669 - RNA, 23 nt, Human
ugaggcaggagaauggcaugaac

SEQ ID NO: 790670 - RNA, 24 nt, Human
ugaggcaggagaauggcaugaacc

SEQ ID NO: 790671 - RNA, 24 nt, Human
ugaggcaggagaauggcaugaacc

SEQ ID NO: 790672 - RNA, 24 nt, Human
ugcacuacagccugggcgacagag

SEQ ID NO: 790673 - RNA, 24 nt, Human
ugccacccacccugaagaacacaa

SEQ ID NO: 790674 - RNA, 21 nt, Human
ugcccuauggucauucucccu

SEQ ID NO: 790675 - RNA, 24 nt, Human
ugccuguagucccagcuacucggg

SEQ ID NO: 790676 - RNA, 22 nt, Human
ugcgccauugcacuacagccug

SEQ ID NO: 790677 - RNA, 23 nt, Human
ugcugauccaaucccagccuuac

SEQ ID NO: 790678 - RNA, 22 nt, Human
uggaaacaaauugacagcaaaa

SEQ ID NO: 790679 - RNA, 27 nt, Human
uggaaacaaauugacagcaaaaagaug

SEQ ID NO: 790680 - RNA, 18 nt, Human
uggaaagauagaaaaaga

SEQ ID NO: 790681 - RNA, 25 nt, Human
uggagagguggugccaacaucuggc

SEQ ID NO: 790682 - RNA, 22 nt, Human
uggauuucugcugauccaaucc

SEQ ID NO: 790683 - RNA, 21 nt, Human
uggcucaugccuauaauccca

SEQ ID NO: 790684 - RNA, 22 nt, Human
uggcucaugccuauaaucccag

SEQ ID NO: 790685 - RNA, 24 nt, Human
uggcucaugccuauaaucccagca

SEQ ID NO: 790686 - RNA, 19 nt, Human
ugggaggccaaggugggcg

SEQ ID NO: 790687 - RNA, 24 nt, Human
ugggaggccaaggugggcggauca

SEQ ID NO: 790688 - RNA, 29 nt, Human
ugggaggcggagcuugcagugacaacggu

SEQ ID NO: 790689 - RNA, 24 nt, Human
ugggaggcggagcuugcagugagc

SEQ ID NO: 790690 - RNA, 24 nt, Human
ugguggcaggugccuguaguccca

SEQ ID NO: 790691 - RNA, 20 nt, Human
ugguuaacucauugaugaua

SEQ ID NO: 790692 - RNA, 20 nt, Human
ugguuucuuuguuuaaacag

SEQ ID NO: 790693 - RNA, 23 nt, Human
ugugguggcaggugccuguaguc

SEQ ID NO: 790694 - RNA, 21 nt, Human
uuacuccuccuuuccaauccu

SEQ ID NO: 790695 - RNA, 23 nt, Human
uuagugcccuauggucauucucc

SEQ ID NO: 790696 - RNA, 22 nt, Human
uucccucucuuucaccccuuug

SEQ ID NO: 790697 - RNA, 23 nt, Human
uucucugccacaagguaauuuua

SEQ ID NO: 790698 - RNA, 19 nt, Human
uugcagugagcugagauug

SEQ ID NO: 790699 - RNA, 22 nt, Human
uugcagugagcugagauugcgc

SEQ ID NO: 790700 - RNA, 19 nt, Human
aaaaacguucccugccucc

SEQ ID NO: 790701 - RNA, 19 nt, Human
aaaaagccuucauaucuac

SEQ ID NO: 790702 - RNA, 21 nt, Human
aaaaugugcaccaaaagcaca

SEQ ID NO: 790703 - RNA, 21 nt, Human
aaacaaaaggaggaagcaaag

SEQ ID NO: 790704 - RNA, 22 nt, Human
aaacaaauauguauacuuccac

SEQ ID NO: 790705 - RNA, 18 nt, Human
aaaugaccuuggggagaa

SEQ ID NO: 790706 - RNA, 18 nt, Human
aacaaaaaccugcauaua

SEQ ID NO: 790707 - RNA, 19 nt, Human
aacguucccugccucccuc

SEQ ID NO: 790708 - RNA, 19 nt, Human
aacuuuggaaaaacaaaua

SEQ ID NO: 790709 - RNA, 21 nt, Human
aagaaaaaacguucccugccu

SEQ ID NO: 790710 - RNA, 21 nt, Human
aagaacacaucugagaugcaa

SEQ ID NO: 790711 - RNA, 20 nt, Human
aagcaaagucugcacuggcc

SEQ ID NO: 790712 - RNA, 23 nt, Human
aauucacaacuauugcuaaaaaa

SEQ ID NO: 790713 - RNA, 21 nt, Human
acagagugugugggcuuaaag

SEQ ID NO: 790714 - RNA, 20 nt, Human
acagguacaacaaaaaccug

SEQ ID NO: 790715 - RNA, 21 nt, Human
acagugaaaagaagaucugga

SEQ ID NO: 790716 - RNA, 21 nt, Human
acugcugcaccucccuggggu

SEQ ID NO: 790717 - RNA, 19 nt, Human
agaaauguggccacgucuu

SEQ ID NO: 790718 - RNA, 20 nt, Human
aggaggaagcaaagucugca

SEQ ID NO: 790719 - RNA, 20 nt, Human
aggagugaaacugcugcacc

SEQ ID NO: 790720 - RNA, 23 nt, Human
agggaacccugucucugcaguug

SEQ ID NO: 790721 - RNA, 19 nt, Human
agugagggaacccugucuc

SEQ ID NO: 790722 - RNA, 22 nt, Human
caaaagaagcugacuagcagug

SEQ ID NO: 790723 - RNA, 21 nt, Human
caagaacacaucugagaugca

SEQ ID NO: 790724 - RNA, 20 nt, Human
cagagugugugggcuuaaag

SEQ ID NO: 790725 - RNA, 24 nt, Human
cagcaucgcuaggcaugggcugca

SEQ ID NO: 790726 - RNA, 19 nt, Human
ccauuaauucacaacuauu

SEQ ID NO: 790727 - RNA, 22 nt, Human
ccuuuauucugacaccauaaau

SEQ ID NO: 790728 - RNA, 26 nt, Human
cguaaaugaauauccaggagcauuag

SEQ ID NO: 790729 - RNA, 18 nt, Human
cguuagaagucuugcucc

SEQ ID NO: 790730 - RNA, 22 nt, Human
cuaaaaaaugugcaccaaaagc

SEQ ID NO: 790731 - RNA, 19 nt, Human
cuccggcccaacaguccaa

SEQ ID NO: 790732 - RNA, 21 nt, Human
cuuccuacaagaacacaucug

SEQ ID NO: 790733 - RNA, 19 nt, Human
gaaacugcugcaccucccu

SEQ ID NO: 790734 - RNA, 19 nt, Human
gacacaguggaggaaggag

SEQ ID NO: 790735 - RNA, 24 nt, Human
gaccauuucaacuuauuagaaaug

SEQ ID NO: 790736 - RNA, 24 nt, Human
gacuagcagugagggaacccuguc

SEQ ID NO: 790737 - RNA, 20 nt, Human
gagcaagaaccuguggucuc

SEQ ID NO: 790738 - RNA, 22 nt, Human
gccacacacaagcuagggaggc

SEQ ID NO: 790739 - RNA, 24 nt, Human
ggcccaacaguccaagugcuauga

SEQ ID NO: 790740 - RNA, 19 nt, Human
uacaacaaaaaccugcaua

SEQ ID NO: 790741 - RNA, 24 nt, Human
uacaacaaaaaccugcauauaaaa

SEQ ID NO: 790742 - RNA, 27 nt, Human
uacaagauccaaaugauucuaugaaag

SEQ ID NO: 790743 - RNA, 26 nt, Human
uagaaaggacuuuuaaaaaaaaagaa

SEQ ID NO: 790744 - RNA, 21 nt, Human
uagaagucuugcucccguugg

SEQ ID NO: 790745 - RNA, 20 nt, Human
uaugaaaugggcugguucuc

SEQ ID NO: 790746 - RNA, 26 nt, Human
uauugcuaaaaaaugugcaccaaaag

SEQ ID NO: 790747 - RNA, 22 nt, Human
ucacaacuauugcuaaaaaaug

SEQ ID NO: 790748 - RNA, 19 nt, Human
uccaacagauagaaaggac

SEQ ID NO: 790749 - RNA, 19 nt, Human
uccagagcaagaaccugug

SEQ ID NO: 790750 - RNA, 19 nt, Human
ucccucccuagucccugcu

SEQ ID NO: 790751 - RNA, 23 nt, Human
ucccugccucccucccuaguccc

SEQ ID NO: 790752 - RNA, 21 nt, Human
ucccuggggacagcuuaaucu

SEQ ID NO: 790753 - RNA, 22 nt, Human
ucccuggggacagcuuaaucua

SEQ ID NO: 790754 - RNA, 22 nt, Human
ucccugggguugccacaaagcc

SEQ ID NO: 790755 - RNA, 22 nt, Human
ucucugaggaagggagaaagac

SEQ ID NO: 790756 - RNA, 22 nt, Human
ucugacaccauaaauuuuaggu

SEQ ID NO: 790757 - RNA, 19 nt, Human
ucuucuguacaucuugaaa

SEQ ID NO: 790758 - RNA, 24 nt, Human
ucuugaaagacauagucugcuugg

SEQ ID NO: 790759 - RNA, 19 nt, Human
ugaaacagagacaguugug

SEQ ID NO: 790760 - RNA, 23 nt, Human
ugauggugucaugcugcucaucc

SEQ ID NO: 790761 - RNA, 24 nt, Human
ugcaacagcaaauucccauuaaaa

SEQ ID NO: 790762 - RNA, 21 nt, Human
ugcaauauuaacaacaagccc

SEQ ID NO: 790763 - RNA, 19 nt, Human
ugcucucugaggaagggag

SEQ ID NO: 790764 - RNA, 23 nt, Human
ugcuuggggcucuucugcucuug

SEQ ID NO: 790765 - RNA, 21 nt, Human
uggaauguacuguuuuagaaa

SEQ ID NO: 790766 - RNA, 18 nt, Human
uggacuggaaucaacugc

SEQ ID NO: 790767 - RNA, 22 nt, Human
uggcaauggccuguccaguuuc

SEQ ID NO: 790768 - RNA, 27 nt, Human
uggggagaauccaaaguauuuucugcc

SEQ ID NO: 790769 - RNA, 20 nt, Human
ugguuucuauauuacaucuc

SEQ ID NO: 790770 - RNA, 25 nt, Human
uuaauucacaacuauugcuaaaaaa

SEQ ID NO: 790771 - RNA, 23 nt, Human
uucaucauggucuuaaauuuuga

SEQ ID NO: 790772 - RNA, 19 nt, Human
uugcucccguuggggauca

SEQ ID NO: 790773 - RNA, 22 nt, Human
uuucuauauuacaucucgauua

SEQ ID NO: 790774 - RNA, 21 nt, Human
uuuugauggugucaugcugcu

SEQ ID NO: 790775 - RNA, 22 nt, Human
uuuuuuuuuuuuuugccauuaa

SEQ ID NO: 790776 - RNA, 22 nt, Human
aaaaacacaaaacaaaaaggug

SEQ ID NO: 790777 - RNA, 23 nt, Human
aaaacacaaaacaaaaaggugga

SEQ ID NO: 790778 - RNA, 21 nt, Human
aaaacagugggucccuaaagc

SEQ ID NO: 790779 - RNA, 18 nt, Human
aaacagucacugcuaaag

SEQ ID NO: 790780 - RNA, 19 nt, Human
aaagguggaaugacuguuu

SEQ ID NO: 790781 - RNA, 24 nt, Human
aaaugcuauuaugucaaguaaacc

SEQ ID NO: 790782 - RNA, 26 nt, Human
aacagcacaaggcaaucuguugcaac

SEQ ID NO: 790783 - RNA, 20 nt, Human
aagaagaaaugaaaacagug

SEQ ID NO: 790784 - RNA, 22 nt, Human
aagaagaaaugaaaacaguggg

SEQ ID NO: 790785 - RNA, 24 nt, Human
aagcaaacugugaccuggaaucca

SEQ ID NO: 790786 - RNA, 24 nt, Human
aaguaaaccuaagucuucaaugaa

SEQ ID NO: 790787 - RNA, 22 nt, Human
aaguggccucucuuaaaaaggc

SEQ ID NO: 790788 - RNA, 19 nt, Human
acaaaacaaaaagguggaa

SEQ ID NO: 790789 - RNA, 21 nt, Human
acaauccaucucugaccuacc

SEQ ID NO: 790790 - RNA, 19 nt, Human
acagcaaaaacacaaaaca

SEQ ID NO: 790791 - RNA, 21 nt, Human
acagcaaaaacacaaaacaaa

SEQ ID NO: 790792 - RNA, 20 nt, Human
acgacaaucacaaaugcuau

SEQ ID NO: 790793 - RNA, 23 nt, Human
acugcugaccaccccgcucaagu

SEQ ID NO: 790794 - RNA, 21 nt, Human
agcugaagauggcacaaugug

SEQ ID NO: 790795 - RNA, 21 nt, Human
aggaauuagaaggcacagaaa

SEQ ID NO: 790796 - RNA, 19 nt, Human
agucauccugaacugcugc

SEQ ID NO: 790797 - RNA, 18 nt, Human
caagaagaaaugaaaaca

SEQ ID NO: 790798 - RNA, 20 nt, Human
caagaagaaaugaaaacagu

SEQ ID NO: 790799 - RNA, 23 nt, Human
caagguaaacuccaagaagaaau

SEQ ID NO: 790800 - RNA, 21 nt, Human
caccaacaauccaucucugac

SEQ ID NO: 790801 - RNA, 18 nt, Human
caccaggacagcugugcc

SEQ ID NO: 790802 - RNA, 20 nt, Human
caccaggacagcugugccuu

SEQ ID NO: 790803 - RNA, 21 nt, Human
cacucuucccaacaagcaauu

SEQ ID NO: 790804 - RNA, 23 nt, Human
cagcacaaggcaaucuguugcaa

SEQ ID NO: 790805 - RNA, 18 nt, Human
cagcgcgcagccgggggc

SEQ ID NO: 790806 - RNA, 20 nt, Human
cagcuugacagcaaaaacac

SEQ ID NO: 790807 - RNA, 18 nt, Human
cauccugaacugcugcag

SEQ ID NO: 790808 - RNA, 18 nt, Human
cccauggcugcaucugaa

SEQ ID NO: 790809 - RNA, 18 nt, Human
ccgccgcagcuccggccg

SEQ ID NO: 790810 - RNA, 21 nt, Human
ccuaaagcacucuucccaaca

SEQ ID NO: 790811 - RNA, 20 nt, Human
ccucucuuaaaaaggcugcu

SEQ ID NO: 790812 - RNA, 18 nt, Human
cgcagccgggggcggcgg

SEQ ID NO: 790813 - RNA, 24 nt, Human
cuccggccguggcgcucggggggc

SEQ ID NO: 790814 - RNA, 20 nt, Human
gaugcaggaauuagaaggca

SEQ ID NO: 790815 - RNA, 21 nt, Human
gcucuaaaauauaaggauaaa

SEQ ID NO: 790816 - RNA, 20 nt, Human
gcuuauuccuuucuccuuca

SEQ ID NO: 790817 - RNA, 21 nt, Human
uaaaaagcaaacugugaccug

SEQ ID NO: 790818 - RNA, 24 nt, Human
uaccuugucuaaaaagcaaacugu

SEQ ID NO: 790819 - RNA, 24 nt, Human
uauaugaauuuuuucuaaauguuc

SEQ ID NO: 790820 - RNA, 23 nt, Human
ucagcuggaagaacuuaccaacc

SEQ ID NO: 790821 - RNA, 18 nt, Human
uccaaggaagaacugucc

SEQ ID NO: 790822 - RNA, 22 nt, Human
ucugaaacaagguaaacuccaa

SEQ ID NO: 790823 - RNA, 21 nt, Human
ugaaacaagguaaacuccaag

SEQ ID NO: 790824 - RNA, 23 nt, Human
ugaaagcucuaaaauauaaggau

SEQ ID NO: 790825 - RNA, 24 nt, Human
ugaaagcucuaaaauauaaggaua

SEQ ID NO: 790826 - RNA, 19 nt, Human
ugaagcaucagcuugacag

SEQ ID NO: 790827 - RNA, 24 nt, Human
ugacagcaaaaacacaaaacaaaa

SEQ ID NO: 790828 - RNA, 19 nt, Human
ugccgccgccgcagcuccg

SEQ ID NO: 790829 - RNA, 23 nt, Human
uggguuuauugcaccaacaaucc

SEQ ID NO: 790830 - RNA, 20 nt, Human
ugucuggaaagauguuuuga

SEQ ID NO: 790831 - RNA, 18 nt, Human
uguuucuguuugcucuuc

SEQ ID NO: 790832 - RNA, 22 nt, Human
uuagugcuuauguuuccuccua

SEQ ID NO: 790833 - RNA, 20 nt, Human
uucccaccaggacagcugug

SEQ ID NO: 790834 - RNA, 24 nt, Human
uuucagacuguacacuuugcugcu

SEQ ID NO: 790835 - RNA, 19 nt, Human
aaacaccgaagccgcagag

SEQ ID NO: 790836 - RNA, 22 nt, Human
aaccauuuguaaucaaaaucaa

SEQ ID NO: 790837 - RNA, 19 nt, Human
aagccgcagagcgggcguc

SEQ ID NO: 790838 - RNA, 23 nt, Human
aaucugcuccacuuggcggcguu

SEQ ID NO: 790839 - RNA, 21 nt, Human
acgcagcccuggcgacuccuu

SEQ ID NO: 790840 - RNA, 20 nt, Human
agaaagccccaagcucugga

SEQ ID NO: 790841 - RNA, 24 nt, Human
agaccagaaguuccgucgagucug

SEQ ID NO: 790842 - RNA, 18 nt, Human
agagaugggccgcuccac

SEQ ID NO: 790843 - RNA, 22 nt, Human
agcgggcagcugugccuggccc

SEQ ID NO: 790844 - RNA, 21 nt, Human
aggauggugaggggggaggug

SEQ ID NO: 790845 - RNA, 20 nt, Human
agggacacaagguccucguu

SEQ ID NO: 790846 - RNA, 20 nt, Human
agugaaaaaagcagucagaa

SEQ ID NO: 790847 - RNA, 18 nt, Human
auggaggagcagcuccgu

SEQ ID NO: 790848 - RNA, 26 nt, Human
auguggggugggggcugaaggggggu

SEQ ID NO: 790849 - RNA, 22 nt, Human
caacagcaucuuggggcuuggc

SEQ ID NO: 790850 - RNA, 22 nt, Human
caccgucuuagaaucugcucca

SEQ ID NO: 790851 - RNA, 22 nt, Human
cagcaucuuggggcuuggcacu

SEQ ID NO: 790852 - RNA, 18 nt, Human
caguuccuggaccacauc

SEQ ID NO: 790853 - RNA, 25 nt, Human
caucuccuuccacaggggcacaguc

SEQ ID NO: 790854 - RNA, 20 nt, Human
caugcgguccccaggacacc

SEQ ID NO: 790855 - RNA, 20 nt, Human
ccacagggugcuggccuucu

SEQ ID NO: 790856 - RNA, 21 nt, Human
ccagcgcucucgucguucccc

SEQ ID NO: 790857 - RNA, 21 nt, Human
ccucugcggcucucccacaaa

SEQ ID NO: 790858 - RNA, 20 nt, Human
ccucuggaucaccaucaccc

SEQ ID NO: 790859 - RNA, 18 nt, Human
ccuggcucagccccaugc

SEQ ID NO: 790860 - RNA, 20 nt, Human
cgcagcugcuggacucgggg

SEQ ID NO: 790861 - RNA, 19 nt, Human
cggcauggaaccaggaucu

SEQ ID NO: 790862 - RNA, 21 nt, Human
cgggccaaguggaggcaacga

SEQ ID NO: 790863 - RNA, 23 nt, Human
cuauaagugaaaaaagcagucag

SEQ ID NO: 790864 - RNA, 21 nt, Human
cuccauuccaagacacaggag

SEQ ID NO: 790865 - RNA, 18 nt, Human
cuccugggggucuggggg

SEQ ID NO: 790866 - RNA, 18 nt, Human
cucugagcccagccucug

SEQ ID NO: 790867 - RNA, 23 nt, Human
cugcagggcgcuggcagcugugu

SEQ ID NO: 790868 - RNA, 18 nt, Human
cuggacagcaaugugggg

SEQ ID NO: 790869 - RNA, 19 nt, Human
cugggcuggagcugcugga

SEQ ID NO: 790870 - RNA, 18 nt, Human
cuuccucuuccucuuccc

SEQ ID NO: 790871 - RNA, 18 nt, Human
gagacucuuccauggccu

SEQ ID NO: 790872 - RNA, 23 nt, Human
gagcgggcgucagagccccggcc

SEQ ID NO: 790873 - RNA, 23 nt, Human
gagcgggcgucagagccccggcc

SEQ ID NO: 790874 - RNA, 21 nt, Human
gaggagcagcuccgugguucu

SEQ ID NO: 790875 - RNA, 20 nt, Human
gaugaguauuugagcaguuc

SEQ ID NO: 790876 - RNA, 18 nt, Human
gccauucaccuguggcug

SEQ ID NO: 790877 - RNA, 23 nt, Human
gccccaagcucuggaggcuucca

SEQ ID NO: 790878 - RNA, 22 nt, Human
gcucaggacaggggacuucagc

SEQ ID NO: 790879 - RNA, 24 nt, Human
gcuccacuccugggggucuggggg

SEQ ID NO: 790880 - RNA, 18 nt, Human
gcuccgggggggcucacu

SEQ ID NO: 790881 - RNA, 25 nt, Human
gcuguguccuccgggcgcuucuucu

SEQ ID NO: 790882 - RNA, 21 nt, Human
ggagccccuccugucgaggcc

SEQ ID NO: 790883 - RNA, 18 nt, Human
ggaggcaacgacggggug

SEQ ID NO: 790884 - RNA, 20 nt, Human
ggccuucuuggcagaaaggg

SEQ ID NO: 790885 - RNA, 19 nt, Human
ggcucaguggugguguugc

SEQ ID NO: 790886 - RNA, 18 nt, Human
gggcagcugugccuggcc

SEQ ID NO: 790887 - RNA, 18 nt, Human
gggcucccaggcugucuc

SEQ ID NO: 790888 - RNA, 20 nt, Human
ggggggagguggacggaggu

SEQ ID NO: 790889 - RNA, 19 nt, Human
ggggugggggcugaagggg

SEQ ID NO: 790890 - RNA, 25 nt, Human
gggugggggcugaagggggguugca

SEQ ID NO: 790891 - RNA, 19 nt, Human
gucaaugaagagcagccag

SEQ ID NO: 790892 - RNA, 18 nt, Human
guggaagggacacaaggu

SEQ ID NO: 790893 - RNA, 19 nt, Human
guuugguugggcaggugcu

SEQ ID NO: 790894 - RNA, 18 nt, Human
guuuucauggggugggug

SEQ ID NO: 790895 - RNA, 21 nt, Human
uaacacaucccaccugcuggc

SEQ ID NO: 790896 - RNA, 23 nt, Human
uaacacaucccaccugcuggcca

SEQ ID NO: 790897 - RNA, 24 nt, Human
uacuggacagcaaugugggguggg

SEQ ID NO: 790898 - RNA, 23 nt, Human
uagcugaggcuggcagccuuugc

SEQ ID NO: 790899 - RNA, 22 nt, Human
uauuaccaacagaagacaauuu

SEQ ID NO: 790900 - RNA, 19 nt, Human
ucacugggaugugcagacu

SEQ ID NO: 790901 - RNA, 21 nt, Human
ucagagccccggccucuccgc

SEQ ID NO: 790902 - RNA, 19 nt, Human
uccaagcuauaagugaaaa

SEQ ID NO: 790903 - RNA, 19 nt, Human
ucccaggucagaacuuuuc

SEQ ID NO: 790904 - RNA, 23 nt, Human
ucccugggggcuuggggguacug

SEQ ID NO: 790905 - RNA, 24 nt, Human
uccuacugcggcauggaaccagga

SEQ ID NO: 790906 - RNA, 20 nt, Human
uccuggaccacaucagacuc

SEQ ID NO: 790907 - RNA, 23 nt, Human
uccuggaccacaucagacucccg

SEQ ID NO: 790908 - RNA, 18 nt, Human
uccuggugcaggccgccu

SEQ ID NO: 790909 - RNA, 22 nt, Human
uccuggugcaggccgccuucuu

SEQ ID NO: 790910 - RNA, 25 nt, Human
ucggggacaacagcaucuuggggcu

SEQ ID NO: 790911 - RNA, 22 nt, Human
ucuccauuccaagacacaggag

SEQ ID NO: 790912 - RNA, 18 nt, Human
ucucugagcccagccucu

SEQ ID NO: 790913 - RNA, 18 nt, Human
ucugaaguuucuggaagg

SEQ ID NO: 790914 - RNA, 19 nt, Human
ucugcuccacuuggcggcg

SEQ ID NO: 790915 - RNA, 22 nt, Human
ucugggcuggagcugcuggagc

SEQ ID NO: 790916 - RNA, 20 nt, Human
ugaaaaaagcagucagaacg

SEQ ID NO: 790917 - RNA, 23 nt, Human
ugaagagcagccagaaagcccca

SEQ ID NO: 790918 - RNA, 21 nt, Human
ugaaguuucuggaaggcguug

SEQ ID NO: 790919 - RNA, 23 nt, Human
ugaggcuggcagccuuugcuggg

SEQ ID NO: 790920 - RNA, 21 nt, Human
ugagucacagaccagaaguuc

SEQ ID NO: 790921 - RNA, 19 nt, Human
ugcagacuugggccugcug

SEQ ID NO: 790922 - RNA, 18 nt, Human
ugcaucacugggaugugc

SEQ ID NO: 790923 - RNA, 21 nt, Human
ugccgaaguggguccuggugc

SEQ ID NO: 790924 - RNA, 24 nt, Human
ugcggcauggaaccaggaucuuaa

SEQ ID NO: 790925 - RNA, 19 nt, Human
ugcucgcgugguggccguc

SEQ ID NO: 790926 - RNA, 19 nt, Human
ugcucugggcuggagcugc

SEQ ID NO: 790927 - RNA, 24 nt, Human
ugcuugcaggcucagugguggugu

SEQ ID NO: 790928 - RNA, 26 nt, Human
uggaggagcagcuccgugggguccuc

SEQ ID NO: 790929 - RNA, 18 nt, Human
uggaugauuggggagcag

SEQ ID NO: 790930 - RNA, 25 nt, Human
uggaugauuggggagcaggugacac

SEQ ID NO: 790931 - RNA, 24 nt, Human
uggcagaaagggccaguuuuuugg

SEQ ID NO: 790932 - RNA, 23 nt, Human
uggcagccuuugcugggugaguc

SEQ ID NO: 790933 - RNA, 23 nt, Human
uggccucuggaucaccaucaccc

SEQ ID NO: 790934 - RNA, 20 nt, Human
ugggggcugaagggggguug

SEQ ID NO: 790935 - RNA, 24 nt, Human
uggggggcacgucucugagcccag

SEQ ID NO: 790936 - RNA, 24 nt, Human
ugggggucuggggggccuuggugg

SEQ ID NO: 790937 - RNA, 22 nt, Human
uggggugggggcugaagggggg

SEQ ID NO: 790938 - RNA, 24 nt, Human
uggggugggggcugaagggggguu

SEQ ID NO: 790939 - RNA, 23 nt, Human
uggggugggugaggucggaggau

SEQ ID NO: 790940 - RNA, 21 nt, Human
uggguccuggugcaggccgcc

SEQ ID NO: 790941 - RNA, 23 nt, Human
uggguccuggugcaggccgccuu

SEQ ID NO: 790942 - RNA, 21 nt, Human
ugguguugcucaggacagggg

SEQ ID NO: 790943 - RNA, 22 nt, Human
ugguugggcaggugcuacgcgg

SEQ ID NO: 790944 - RNA, 22 nt, Human
uguauacaugcuacucguuuac

SEQ ID NO: 790945 - RNA, 23 nt, Human
ugugccaucuuccugccgucuga

SEQ ID NO: 790946 - RNA, 20 nt, Human
ugugccuggcccucccuccu

SEQ ID NO: 790947 - RNA, 22 nt, Human
uguggggugggggcugaagggg

SEQ ID NO: 790948 - RNA, 20 nt, Human
ugugucugccccuccugcag

SEQ ID NO: 790949 - RNA, 22 nt, Human
uucaccaagaccuucugcuccu

SEQ ID NO: 790950 - RNA, 19 nt, Human
uucaccuguggcugugugc

SEQ ID NO: 790951 - RNA, 21 nt, Human
uuccauggccucuggaucacc

SEQ ID NO: 790952 - RNA, 22 nt, Human
uuccucuucucagaggggcucc

SEQ ID NO: 790953 - RNA, 22 nt, Human
uuccuuggagacucuuccaugg

SEQ ID NO: 790954 - RNA, 22 nt, Human
uucuccucuucucucucuuaaa

SEQ ID NO: 790955 - RNA, 19 nt, Human
uucuuccucuuccucuucc

SEQ ID NO: 790956 - RNA, 21 nt, Human
uugccggucgcccuccacagg

SEQ ID NO: 790957 - RNA, 22 nt, Human
uugcucaggacaggggacuuca

SEQ ID NO: 790958 - RNA, 27 nt, Human
uuguaaucaaaaucaauguauacaugc

SEQ ID NO: 790959 - RNA, 18 nt, Human
uuuaauuuucuuuuccuu

SEQ ID NO: 790960 - RNA, 22 nt, Human
aaaaaaacagccgggcgucgug

SEQ ID NO: 790961 - RNA, 19 nt, Human
aaaaagaaaaaagaaauag

SEQ ID NO: 790962 - RNA, 18 nt, Human
aaaaccugcguuacaugc

SEQ ID NO: 790963 - RNA, 21 nt, Human
aaaagacagaggaauuacugg

SEQ ID NO: 790964 - RNA, 25 nt, Human
aaacaaaaacaaccaaauaauuaau

SEQ ID NO: 790965 - RNA, 21 nt, Human
aaacagccgggcgucguggug

SEQ ID NO: 790966 - RNA, 20 nt, Human
aaacaugaaaacaaaaacaa

SEQ ID NO: 790967 - RNA, 24 nt, Human
aaacaugaaaacaaaaacaaccaa

SEQ ID NO: 790968 - RNA, 25 nt, Human
aaacaugaaaacaaaaacaaccaaa

SEQ ID NO: 790969 - RNA, 19 nt, Human
aaacuccaagacguuugug

SEQ ID NO: 790970 - RNA, 24 nt, Human
aaagaaauagaagaaaccaaauua

SEQ ID NO: 790971 - RNA, 19 nt, Human
aaagugcugggauuacagg

SEQ ID NO: 790972 - RNA, 19 nt, Human
aaagugcugggauuacagg

SEQ ID NO: 790973 - RNA, 24 nt, Human
aaagugcugggauuacaggcauga

SEQ ID NO: 790974 - RNA, 23 nt, Human
aaagugcugggauuacaggugca

SEQ ID NO: 790975 - RNA, 18 nt, Human
aaauacaaaaaaacagcc

SEQ ID NO: 790976 - RNA, 19 nt, Human
aaaucuaaacagugaccac

SEQ ID NO: 790977 - RNA, 20 nt, Human
aacacggugaaaccccgucu

SEQ ID NO: 790978 - RNA, 21 nt, Human
aacacggugaaaccccgucuc

SEQ ID NO: 790979 - RNA, 26 nt, Human
aacagccgggcgucguggugggugcc

SEQ ID NO: 790980 - RNA, 21 nt, Human
aacagugaccacacagugucc

SEQ ID NO: 790981 - RNA, 19 nt, Human
aaccuauaagagaaaaacc

SEQ ID NO: 790982 - RNA, 24 nt, Human
aaccucaggugauccgccugccuc

SEQ ID NO: 790983 - RNA, 21 nt, Human
aacuuauuucugcuucuccug

SEQ ID NO: 790984 - RNA, 23 nt, Human
aagaaaaaagaaauagaagaaac

SEQ ID NO: 790985 - RNA, 21 nt, Human
aagaagaaggaauaagaaaga

SEQ ID NO: 790986 - RNA, 21 nt, Human
aagcaaggccuuggcaacaag

SEQ ID NO: 790987 - RNA, 23 nt, Human
aagcaauaguaguaucaaucuug

SEQ ID NO: 790988 - RNA, 24 nt, Human
aagcaugauugauaacaaucuugc

SEQ ID NO: 790989 - RNA, 23 nt, Human
aaguagaagcaaggccuuggcaa

SEQ ID NO: 790990 - RNA, 24 nt, Human
aagugauccuucugccuuggccuc

SEQ ID NO: 790991 - RNA, 25 nt, Human
aagugauccuucugccuuggccucc

SEQ ID NO: 790992 - RNA, 18 nt, Human
aagugcugggaguacagg

SEQ ID NO: 790993 - RNA, 23 nt, Human
aagugcugggaguacagguguga

SEQ ID NO: 790994 - RNA, 18 nt, Human
aagugcugggauuacagg

SEQ ID NO: 790995 - RNA, 19 nt, Human
aagugcugggauuacaggc

SEQ ID NO: 790996 - RNA, 21 nt, Human
aagugcugggauuacaggcau

SEQ ID NO: 790997 - RNA, 19 nt, Human
aagugcugggauuacaggu

SEQ ID NO: 790998 - RNA, 26 nt, Human
aagugcugggauuacaggugcaagcc

SEQ ID NO: 790999 - RNA, 22 nt, Human
aaguggcugggauuacaggcau

SEQ ID NO: 791000 - RNA, 21 nt, Human
aauaaacccccaaacucuccc

SEQ ID NO: 791001 - RNA, 19 nt, Human
aaucauaguucacugcagc

SEQ ID NO: 791002 - RNA, 20 nt, Human
aaucucuaccaguggcccac

SEQ ID NO: 791003 - RNA, 24 nt, Human
aauuuuguauuuuuaguagagaug

SEQ ID NO: 791004 - RNA, 21 nt, Human
acacaaucuuauuuugaagcc

SEQ ID NO: 791005 - RNA, 22 nt, Human
acacugcucucaguuauaaccu

SEQ ID NO: 791006 - RNA, 23 nt, Human
acagagcgagacucugucucaaa

SEQ ID NO: 791007 - RNA, 24 nt, Human
acagagcgagacucugucucaaaa

SEQ ID NO: 791008 - RNA, 24 nt, Human
acagagucucccucagucacccag

SEQ ID NO: 791009 - RNA, 24 nt, Human
acaggccgggcgcgguggcucacg

SEQ ID NO: 791010 - RNA, 21 nt, Human
acauagauuuaaacagaccca

SEQ ID NO: 791011 - RNA, 21 nt, Human
acauugaaaaccuuauuauca

SEQ ID NO: 791012 - RNA, 23 nt, Human
accauguuggucaggcuggucuc

SEQ ID NO: 791013 - RNA, 24 nt, Human
accccgucucuccuaaaaauacaa

SEQ ID NO: 791014 - RNA, 18 nt, Human
accuuuuauuuauuuauu

SEQ ID NO: 791015 - RNA, 21 nt, Human
acgggguuucaccauguuggu

SEQ ID NO: 791016 - RNA, 23 nt, Human
acgggguuucaccauguugguca

SEQ ID NO: 791017 - RNA, 24 nt, Human
acgggguuucaccauguuggucag

SEQ ID NO: 791018 - RNA, 22 nt, Human
agaaaaaccugcguuacaugcu

SEQ ID NO: 791019 - RNA, 24 nt, Human
agaaaagaaugugguucaucuuuu

SEQ ID NO: 791020 - RNA, 18 nt, Human
agaaaagagaaccaaacc

SEQ ID NO: 791021 - RNA, 18 nt, Human
agaacauuuugacucuga

SEQ ID NO: 791022 - RNA, 20 nt, Human
agacaaccucaucuaccaaa

SEQ ID NO: 791023 - RNA, 18 nt, Human
agacagagucucccucag

SEQ ID NO: 791024 - RNA, 18 nt, Human
agacagagucuugcuaug

SEQ ID NO: 791025 - RNA, 24 nt, Human
agccugggcgacagagcgagacuc

SEQ ID NO: 791026 - RNA, 24 nt, Human
aggcaggaggauggcgugaacccg

SEQ ID NO: 791027 - RNA, 24 nt, Human
aggcggagcuuacagugagccgag

SEQ ID NO: 791028 - RNA, 24 nt, Human
aggcggguggaucacgacgucagg

SEQ ID NO: 791029 - RNA, 20 nt, Human
aggcuaccagcagaaagaga

SEQ ID NO: 791030 - RNA, 19 nt, Human
aggcugaggcaggaggaug

SEQ ID NO: 791031 - RNA, 25 nt, Human
aggcuggagugcaguggcgcaaucu

SEQ ID NO: 791032 - RNA, 24 nt, Human
aggugauccgccugccucggccuc

SEQ ID NO: 791033 - RNA, 18 nt, Human
aggugugagucaucguac

SEQ ID NO: 791034 - RNA, 20 nt, Human
aguaaguaaagaagaaggaa

SEQ ID NO: 791035 - RNA, 22 nt, Human
aguagucacagcccacgguaug

SEQ ID NO: 791036 - RNA, 24 nt, Human
agugcaauggcacaaucucggcuc

SEQ ID NO: 791037 - RNA, 24 nt, Human
agugcacuccagccugggcgacag

SEQ ID NO: 791038 - RNA, 21 nt, Human
agugcagugaugcaaucauag

SEQ ID NO: 791039 - RNA, 23 nt, Human
agugcagugaugcaaucauaguu

SEQ ID NO: 791040 - RNA, 20 nt, Human
agugcaguggcgcaaucucg

SEQ ID NO: 791041 - RNA, 24 nt, Human
agugcaguggcgcaaucucgguuc

SEQ ID NO: 791042 - RNA, 20 nt, Human
agugcugggaguacaggugu

SEQ ID NO: 791043 - RNA, 18 nt, Human
agugcugggauuacaggc

SEQ ID NO: 791044 - RNA, 23 nt, Human
aguggcugggauuacaggcaugc

SEQ ID NO: 791045 - RNA, 18 nt, Human
auaaaacaagauuuggau

SEQ ID NO: 791046 - RNA, 24 nt, Human
auaauuuuguauuuuuaguagaga

SEQ ID NO: 791047 - RNA, 18 nt, Human
auagagauggggucuugc

SEQ ID NO: 791048 - RNA, 18 nt, Human
auaguucacugcagccuu

SEQ ID NO: 791049 - RNA, 24 nt, Human
aucgcgccagugcacuccagccug

SEQ ID NO: 791050 - RNA, 20 nt, Human
auggauuaacaaauaacacu

SEQ ID NO: 791051 - RNA, 23 nt, Human
auggguuucuccauguuggucag

SEQ ID NO: 791052 - RNA, 19 nt, Human
auuacaggugcaagccacu

SEQ ID NO: 791053 - RNA, 20 nt, Human
caaaacugggggcucacagc

SEQ ID NO: 791054 - RNA, 21 nt, Human
caaacaugaaaacaaaaacaa

SEQ ID NO: 791055 - RNA, 24 nt, Human
caaacaugaaaacaaaaacaacca

SEQ ID NO: 791056 - RNA, 18 nt, Human
caaacuccugaccucagc

SEQ ID NO: 791057 - RNA, 24 nt, Human
caaagugcugggauuacaggugca

SEQ ID NO: 791058 - RNA, 23 nt, Human
caagauaacucaucacaugguuc

SEQ ID NO: 791059 - RNA, 22 nt, Human
caagcaauucucuugccuuagc

SEQ ID NO: 791060 - RNA, 22 nt, Human
caagcgauucuccugccucagc

SEQ ID NO: 791061 - RNA, 27 nt, Human
caagcgauucuccugccucagccuccc

SEQ ID NO: 791062 - RNA, 22 nt, Human
caagugauccuucugccuuggc

SEQ ID NO: 791063 - RNA, 19 nt, Human
caauaaacccccaaacucu

SEQ ID NO: 791064 - RNA, 26 nt, Human
caaucauuaaaggaaaaaagaacccc

SEQ ID NO: 791065 - RNA, 24 nt, Human
cacacugcucucaguuauaaccuu

SEQ ID NO: 791066 - RNA, 21 nt, Human
caccauguuggucaggcuggu

SEQ ID NO: 791067 - RNA, 24 nt, Human
caccauguuggucaggcuggucuc

SEQ ID NO: 791068 - RNA, 24 nt, Human
cacccaggcuggagugcaguggcg

SEQ ID NO: 791069 - RNA, 24 nt, Human
caccucagcuuccugaagugcugg

SEQ ID NO: 791070 - RNA, 22 nt, Human
cacgccuguaaucccagcacug

SEQ ID NO: 791071 - RNA, 24 nt, Human
cacuccagccugggcgacagagcg

SEQ ID NO: 791072 - RNA, 21 nt, Human
cacugcaaccuccgccuccca

SEQ ID NO: 791073 - RNA, 23 nt, Human
cacugcaaccucugccucacggg

SEQ ID NO: 791074 - RNA, 23 nt, Human
cagagucucccucagucacccag

SEQ ID NO: 791075 - RNA, 24 nt, Human
cagagucuugcuauguugcccagg

SEQ ID NO: 791076 - RNA, 24 nt, Human
cagcacuguggggggccgaggcgg

SEQ ID NO: 791077 - RNA, 22 nt, Human
cagcagaaagagaggacuucaa

SEQ ID NO: 791078 - RNA, 23 nt, Human
cagcauaaaguaaaaagacucuu

SEQ ID NO: 791079 - RNA, 18 nt, Human
cagccuaacagugccuuu

SEQ ID NO: 791080 - RNA, 24 nt, Human
cagcuacuugggaggcugaggcag

SEQ ID NO: 791081 - RNA, 19 nt, Human
cagcugauccacccaccuc

SEQ ID NO: 791082 - RNA, 22 nt, Human
caggugauccgccugccucggc

SEQ ID NO: 791083 - RNA, 19 nt, Human
cagugcacuccagccuggg

SEQ ID NO: 791084 - RNA, 22 nt, Human
cagugcacuccagccugggcga

SEQ ID NO: 791085 - RNA, 23 nt, Human
cagugcacuccagccugggcgac

SEQ ID NO: 791086 - RNA, 24 nt, Human
cagugcacuccagccugggcgaca

SEQ ID NO: 791087 - RNA, 23 nt, Human
cauacaaaguggugugugcacau

SEQ ID NO: 791088 - RNA, 21 nt, Human
ccaaagugcugggauuacagg

SEQ ID NO: 791089 - RNA, 21 nt, Human
ccaaagugcugggauuacagg

SEQ ID NO: 791090 - RNA, 23 nt, Human
ccaaagugcugggauuacaggca

SEQ ID NO: 791091 - RNA, 24 nt, Human
ccaaagugcugggauuacaggcau

SEQ ID NO: 791092 - RNA, 22 nt, Human
ccaaagugcugggauuacaggu

SEQ ID NO: 791093 - RNA, 23 nt, Human
ccaaguggcugggauuacaggca

SEQ ID NO: 791094 - RNA, 24 nt, Human
ccaaguggcugggauuacaggcau

SEQ ID NO: 791095 - RNA, 19 nt, Human
ccaccaugcucagccuaac

SEQ ID NO: 791096 - RNA, 20 nt, Human
ccaccucagcuuccugaagg

SEQ ID NO: 791097 - RNA, 18 nt, Human
ccaguagucccagcuacu

SEQ ID NO: 791098 - RNA, 21 nt, Human
ccaguagucccagcuacuugg

SEQ ID NO: 791099 - RNA, 22 nt, Human
ccaguagucccagcuacuuggg

SEQ ID NO: 791100 - RNA, 21 nt, Human
ccagugcacuccagccugggc

SEQ ID NO: 791101 - RNA, 22 nt, Human
ccagugcacuccagccugggcg

SEQ ID NO: 791102 - RNA, 23 nt, Human
ccagugcacuccagccugggcga

SEQ ID NO: 791103 - RNA, 24 nt, Human
ccagugcacuccagccugggcgac

SEQ ID NO: 791104 - RNA, 19 nt, Human
ccauguuggucagguuggu

SEQ ID NO: 791105 - RNA, 22 nt, Human
ccauuuccuccuuccuccaaaa

SEQ ID NO: 791106 - RNA, 22 nt, Human
cccaaacucucccuucuauuuc

SEQ ID NO: 791107 - RNA, 24 nt, Human
cccaaagugcugggauuacaggca

SEQ ID NO: 791108 - RNA, 20 nt, Human
cccaaccucaggugauccgc

SEQ ID NO: 791109 - RNA, 24 nt, Human
cccaaccucaggugauccgccugc

SEQ ID NO: 791110 - RNA, 23 nt, Human
cccaaguggcugggauuacaggc

SEQ ID NO: 791111 - RNA, 24 nt, Human
cccaaguggcugggauuacaggca

SEQ ID NO: 791112 - RNA, 20 nt, Human
cccaggcugcagugcaguga

SEQ ID NO: 791113 - RNA, 23 nt, Human
cccagguucaagcgauucuccug

SEQ ID NO: 791114 - RNA, 24 nt, Human
cccucagucacccaggcuggagug

SEQ ID NO: 791115 - RNA, 24 nt, Human
ccucacggguucaagcaauucucu

SEQ ID NO: 791116 - RNA, 21 nt, Human
ccucagcuuccugaagugcug

SEQ ID NO: 791117 - RNA, 19 nt, Human
ccucagucacccaggcugg

SEQ ID NO: 791118 - RNA, 21 nt, Human
ccuccaaaacugggggcucac

SEQ ID NO: 791119 - RNA, 24 nt, Human
ccucccagguucaagcgauucucc

SEQ ID NO: 791120 - RNA, 24 nt, Human
ccuccugccucagucucuugagua

SEQ ID NO: 791121 - RNA, 25 nt, Human
ccugaagugcugggaguacaggugu

SEQ ID NO: 791122 - RNA, 24 nt, Human
ccugaccucagcugauccacccac

SEQ ID NO: 791123 - RNA, 24 nt, Human
ccugccucagccucccaaguggcu

SEQ ID NO: 791124 - RNA, 24 nt, Human
ccugccucagucucuugaguagcu

SEQ ID NO: 791125 - RNA, 23 nt, Human
ccuggcuaacacggugaaacccc

SEQ ID NO: 791126 - RNA, 24 nt, Human
ccuggcuaacacggugaaaccccg

SEQ ID NO: 791127 - RNA, 22 nt, Human
ccugggcgacagagcgagacuc

SEQ ID NO: 791128 - RNA, 18 nt, Human
ccuggguucaagugaucc

SEQ ID NO: 791129 - RNA, 19 nt, Human
ccuggguucaagugauccu

SEQ ID NO: 791130 - RNA, 20 nt, Human
ccuggguucaagugauccuu

SEQ ID NO: 791131 - RNA, 22 nt, Human
ccuggguucaagugauccuucu

SEQ ID NO: 791132 - RNA, 21 nt, Human
ccuguaaucccagcacugugg

SEQ ID NO: 791133 - RNA, 24 nt, Human
cgagaccauccuggcuaacacggu

SEQ ID NO: 791134 - RNA, 22 nt, Human
cgaggcggguggaucacgacgu

SEQ ID NO: 791135 - RNA, 21 nt, Human
cgaguaggugggaucauaggc

SEQ ID NO: 791136 - RNA, 23 nt, Human
cgccuguaaucccagcacugugg

SEQ ID NO: 791137 - RNA, 24 nt, Human
cgccuguaaucccagcacuguggg

SEQ ID NO: 791138 - RNA, 26 nt, Human
cgcgccagugcacuccagccugggcg

SEQ ID NO: 791139 - RNA, 22 nt, Human
cggguggaucacgacgucagga

SEQ ID NO: 791140 - RNA, 18 nt, Human
cggguucaagcaauucuc

SEQ ID NO: 791141 - RNA, 24 nt, Human
cgugauccuccugccucagucucu

SEQ ID NO: 791142 - RNA, 21 nt, Human
cuaccuacauacuccacuccu

SEQ ID NO: 791143 - RNA, 18 nt, Human
cuauucuugaacuccugg

SEQ ID NO: 791144 - RNA, 22 nt, Human
cucacgccuguaaucccagcac

SEQ ID NO: 791145 - RNA, 23 nt, Human
cucacgccuguaaucccagcacu

SEQ ID NO: 791146 - RNA, 24 nt, Human
cucacugcaaccuccgccucccag

SEQ ID NO: 791147 - RNA, 24 nt, Human
cucagccucccaaguggcugggau

SEQ ID NO: 791148 - RNA, 18 nt, Human
cucagucacccaggcugg

SEQ ID NO: 791149 - RNA, 24 nt, Human
cuccauguuggucagguuggucuc

SEQ ID NO: 791150 - RNA, 22 nt, Human
cuccuccaauaaacccccaaac

SEQ ID NO: 791151 - RNA, 19 nt, Human
cucugucucaaaaaaaaaa

SEQ ID NO: 791152 - RNA, 18 nt, Human
cucuuguugcccagguug

SEQ ID NO: 791153 - RNA, 24 nt, Human
cugaagugcugggaguacaggugu

SEQ ID NO: 791154 - RNA, 18 nt, Human
cugagaaucuuuucuuuu

SEQ ID NO: 791155 - RNA, 23 nt, Human
cugauccacccaccucagcuucc

SEQ ID NO: 791156 - RNA, 23 nt, Human
cugcaaccuccgccucccagguu

SEQ ID NO: 791157 - RNA, 24 nt, Human
cugcaaccuccgccucccagguuc

SEQ ID NO: 791158 - RNA, 24 nt, Human
cugcaaccucugccucacggguuc

SEQ ID NO: 791159 - RNA, 23 nt, Human
cugcagccuugaauuccugggcu

SEQ ID NO: 791160 - RNA, 23 nt, Human
cugccucggccucccaaagugcu

SEQ ID NO: 791161 - RNA, 20 nt, Human
cugugcccucccccaccaag

SEQ ID NO: 791162 - RNA, 24 nt, Human
cuuauuaucacaugucaacuuauu

SEQ ID NO: 791163 - RNA, 20 nt, Human
cuugaacuccuggguucaag

SEQ ID NO: 791164 - RNA, 24 nt, Human
cuugccuuagccucccgaguaggu

SEQ ID NO: 791165 - RNA, 24 nt, Human
cuuguugcccagguuggagugcaa

SEQ ID NO: 791166 - RNA, 23 nt, Human
cuuuuauuuauuuauuuauuuug

SEQ ID NO: 791167 - RNA, 19 nt, Human
gaagugcugggaguacagg

SEQ ID NO: 791168 - RNA, 21 nt, Human
gaccucagcugauccacccac

SEQ ID NO: 791169 - RNA, 24 nt, Human
gaccucagcugauccacccaccuc

SEQ ID NO: 791170 - RNA, 23 nt, Human
gagaucgcgccagugcacuccag

SEQ ID NO: 791171 - RNA, 23 nt, Human
gagauggguuucuccauguuggu

SEQ ID NO: 791172 - RNA, 23 nt, Human
gaggcggguggaucacgacguca

SEQ ID NO: 791173 - RNA, 18 nt, Human
gauuacaggcaugagcca

SEQ ID NO: 791174 - RNA, 21 nt, Human
gauuacaggcaugagccacca

SEQ ID NO: 791175 - RNA, 24 nt, Human
gauuacaggcaugagccaccaugc

SEQ ID NO: 791176 - RNA, 18 nt, Human
gauuacaggcaugcgcca

SEQ ID NO: 791177 - RNA, 18 nt, Human
gauuacaggugcaagcca

SEQ ID NO: 791178 - RNA, 21 nt, Human
gauuacaggugcaagccacug

SEQ ID NO: 791179 - RNA, 24 nt, Human
gauuacaggugcaagccacugugc

SEQ ID NO: 791180 - RNA, 21 nt, Human
gauucuccugccucagccucc

SEQ ID NO: 791181 - RNA, 19 nt, Human
gcaaaucuaaacagugacc

SEQ ID NO: 791182 - RNA, 27 nt, Human
gcaaauucagguaaccauaucaaacca

SEQ ID NO: 791183 - RNA, 24 nt, Human
gcacuccagccugggcgacagagc

SEQ ID NO: 791184 - RNA, 22 nt, Human
gccagugcacuccagccugggc

SEQ ID NO: 791185 - RNA, 19 nt, Human
gcccagguuggagugcaau

SEQ ID NO: 791186 - RNA, 24 nt, Human
gccucagccucccaaguggcuggg

SEQ ID NO: 791187 - RNA, 18 nt, Human
gccucagucucuugagua

SEQ ID NO: 791188 - RNA, 22 nt, Human
gccuuggccucccaaagugcug

SEQ ID NO: 791189 - RNA, 24 nt, Human
gcgacagagcgagacucugucuca

SEQ ID NO: 791190 - RNA, 24 nt, Human
gcgauucuccugccucagccuccc

SEQ ID NO: 791191 - RNA, 19 nt, Human
gcgcuuucccccaaauccu

SEQ ID NO: 791192 - RNA, 24 nt, Human
gcuaacacggugaaaccccgucuc

SEQ ID NO: 791193 - RNA, 24 nt, Human
gcuacauugaaaaccuuauuauca

SEQ ID NO: 791194 - RNA, 19 nt, Human
gcuggagugcaguggcgca

SEQ ID NO: 791195 - RNA, 23 nt, Human
gcuggucucaaacuccugaccuc

SEQ ID NO: 791196 - RNA, 20 nt, Human
ggaacaggccgggcgcggug

SEQ ID NO: 791197 - RNA, 24 nt, Human
ggagcuuacagugagccgagaucg

SEQ ID NO: 791198 - RNA, 21 nt, Human
ggaggcggagcuuacagugag

SEQ ID NO: 791199 - RNA, 24 nt, Human
ggauuacaggcaugagccaccaug

SEQ ID NO: 791200 - RNA, 19 nt, Human
ggauuacaggcaugcgcca

SEQ ID NO: 791201 - RNA, 22 nt, Human
ggauuacaggugcaagccacug

SEQ ID NO: 791202 - RNA, 24 nt, Human
ggauuacaggugcaagccacugug

SEQ ID NO: 791203 - RNA, 23 nt, Human
ggcgcgguggcucacgccuguaa

SEQ ID NO: 791204 - RNA, 24 nt, Human
ggcuggucucaaacuccugaccuc

SEQ ID NO: 791205 - RNA, 21 nt, Human
gggccgaggcggguggaucac

SEQ ID NO: 791206 - RNA, 22 nt, Human
gggcgucguggugggugccagu

SEQ ID NO: 791207 - RNA, 22 nt, Human
gggcucacgugauccuccugcc

SEQ ID NO: 791208 - RNA, 23 nt, Human
gggguuucaccauguuggucagg

SEQ ID NO: 791209 - RNA, 21 nt, Human
ggguucaagugauccuucugc

SEQ ID NO: 791210 - RNA, 22 nt, Human
ggguuucaccauguuggucagg

SEQ ID NO: 791211 - RNA, 21 nt, Human
ggguuucuccauguuggucag

SEQ ID NO: 791212 - RNA, 23 nt, Human
gguggcucacgccuguaauccca

SEQ ID NO: 791213 - RNA, 24 nt, Human
gguggcucacgccuguaaucccag

SEQ ID NO: 791214 - RNA, 20 nt, Human
gucacccaggcuggagugca

SEQ ID NO: 791215 - RNA, 21 nt, Human
gucucaaaaaaaaaaaaaaag

SEQ ID NO: 791216 - RNA, 25 nt, Human
gugaggcaucaggaagccagcaaag

SEQ ID NO: 791217 - RNA, 18 nt, Human
gugauccuccugccucag

SEQ ID NO: 791218 - RNA, 21 nt, Human
gugcugggauuacaggugcaa

SEQ ID NO: 791219 - RNA, 23 nt, Human
guggcucacgccuguaaucccag

SEQ ID NO: 791220 - RNA, 25 nt, Human
uaaaagagcuuuccaugugacuacc

SEQ ID NO: 791221 - RNA, 22 nt, Human
uaaaauaaaugcccagauacua

SEQ ID NO: 791222 - RNA, 22 nt, Human
uaaagacgggguuucaccaugu

SEQ ID NO: 791223 - RNA, 22 nt, Human
uaaaggaaaaaagaacccaaga

SEQ ID NO: 791224 - RNA, 24 nt, Human
uaaaguccuuguaaaacuucuugg

SEQ ID NO: 791225 - RNA, 26 nt, Human
uaaauggauuaacaaauaacacugaa

SEQ ID NO: 791226 - RNA, 18 nt, Human
uaacacggugaaaccccg

SEQ ID NO: 791227 - RNA, 22 nt, Human
uaacacggugaaaccccgucuc

SEQ ID NO: 791228 - RNA, 24 nt, Human
uaacacggugaaaccccgucucuc

SEQ ID NO: 791229 - RNA, 20 nt, Human
uaagaacauuuugacucuga

SEQ ID NO: 791230 - RNA, 24 nt, Human
uaauaaagacgggguuucaccaug

SEQ ID NO: 791231 - RNA, 22 nt, Human
uacacugaacaguacaacucau

SEQ ID NO: 791232 - RNA, 18 nt, Human
uacaggcaugagccacca

SEQ ID NO: 791233 - RNA, 22 nt, Human
uacaggugcaagccacugugcc

SEQ ID NO: 791234 - RNA, 19 nt, Human
uaccaaggcuaacuaugcu

SEQ ID NO: 791235 - RNA, 18 nt, Human
uaccagcagaaagagagg

SEQ ID NO: 791236 - RNA, 22 nt, Human
uagagauggggucuugcuaugu

SEQ ID NO: 791237 - RNA, 22 nt, Human
uagaugaagaguaaaagacuua

SEQ ID NO: 791238 - RNA, 21 nt, Human
uaggcgcgugccaccaugacc

SEQ ID NO: 791239 - RNA, 23 nt, Human
uaguagagauggguuucuccaug

SEQ ID NO: 791240 - RNA, 24 nt, Human
uaguucacugcagccuugaauucc

SEQ ID NO: 791241 - RNA, 23 nt, Human
uaguuuugcucuucaauggcuuu

SEQ ID NO: 791242 - RNA, 22 nt, Human
uauaacuccuacuaccuacaua

SEQ ID NO: 791243 - RNA, 19 nt, Human
uauacuccacuuauauaug

SEQ ID NO: 791244 - RNA, 23 nt, Human
uauagagauggggucuugcuaug

SEQ ID NO: 791245 - RNA, 24 nt, Human
uauagagauggggucuugcuaugu

SEQ ID NO: 791246 - RNA, 20 nt, Human
uauguugcccaggcuauucu

SEQ ID NO: 791247 - RNA, 23 nt, Human
uauguugcccaggcuauucuuga

SEQ ID NO: 791248 - RNA, 24 nt, Human
uauguugcccaggcuauucuugaa

SEQ ID NO: 791249 - RNA, 19 nt, Human
uauguugcccaggcugcag

SEQ ID NO: 791250 - RNA, 24 nt, Human
uauguugcccaggcugcagugcag

SEQ ID NO: 791251 - RNA, 19 nt, Human
ucaaaaaaaaaaaaaaaga

SEQ ID NO: 791252 - RNA, 23 nt, Human
ucaacugucuacguuuauacuca

SEQ ID NO: 791253 - RNA, 18 nt, Human
ucaagcccgaguuguaag

SEQ ID NO: 791254 - RNA, 19 nt, Human
ucaagugauccuucugccu

SEQ ID NO: 791255 - RNA, 20 nt, Human
ucaaugccagaaucugugcu

SEQ ID NO: 791256 - RNA, 22 nt, Human
ucacaugucaacuuauuuugaa

SEQ ID NO: 791257 - RNA, 24 nt, Human
ucacccaggcuggagugcaguggc

SEQ ID NO: 791258 - RNA, 24 nt, Human
ucacgacgucaggagaucgagacc

SEQ ID NO: 791259 - RNA, 24 nt, Human
ucacggguucaagcaauucucuug

SEQ ID NO: 791260 - RNA, 22 nt, Human
ucacucuuguugcccagguugg

SEQ ID NO: 791261 - RNA, 23 nt, Human
ucacucuuguugcccagguugga

SEQ ID NO: 791262 - RNA, 19 nt, Human
ucacugcaaccuccgccuc

SEQ ID NO: 791263 - RNA, 24 nt, Human
ucacugcaaccuccgccucccagg

SEQ ID NO: 791264 - RNA, 25 nt, Human
ucacugcaaccuccgccucccaggu

SEQ ID NO: 791265 - RNA, 27 nt, Human
ucacugcaaccuccgccucccagguuc

SEQ ID NO: 791266 - RNA, 23 nt, Human
ucacugcaaccucugccucacgg

SEQ ID NO: 791267 - RNA, 23 nt, Human
ucacugcaaccucugccucacgg

SEQ ID NO: 791268 - RNA, 24 nt, Human
ucacugcaaccucugccucacggg

SEQ ID NO: 791269 - RNA, 20 nt, Human
ucacugcagccuugaauucc

SEQ ID NO: 791270 - RNA, 23 nt, Human
ucacugcagccuugaauuccugg

SEQ ID NO: 791271 - RNA, 24 nt, Human
ucacugcagccuugaauuccuggg

SEQ ID NO: 791272 - RNA, 22 nt, Human
ucagagagaggaacaauccauu

SEQ ID NO: 791273 - RNA, 18 nt, Human
ucagcugauccacccacc

SEQ ID NO: 791274 - RNA, 21 nt, Human
ucaggugauccgccugccucg

SEQ ID NO: 791275 - RNA, 23 nt, Human
ucauuuucaccagacaaccucau

SEQ ID NO: 791276 - RNA, 23 nt, Human
uccagccugggcgacagagcgag

SEQ ID NO: 791277 - RNA, 24 nt, Human
uccagccugggcgacagagcgaga

SEQ ID NO: 791278 - RNA, 24 nt, Human
uccauguuggucagguuggucucg

SEQ ID NO: 791279 - RNA, 23 nt, Human
ucccaaagugcugggauuacagg

SEQ ID NO: 791280 - RNA, 24 nt, Human
ucccaaagugcugggauuacaggc

SEQ ID NO: 791281 - RNA, 24 nt, Human
ucccaaguggcugggauuacaggc

SEQ ID NO: 791282 - RNA, 21 nt, Human
ucccagguucaagcgauucuc

SEQ ID NO: 791283 - RNA, 24 nt, Human
ucccagguucaagcgauucuccug

SEQ ID NO: 791284 - RNA, 24 nt, Human
ucccucagucacccaggcuggagu

SEQ ID NO: 791285 - RNA, 22 nt, Human
uccuccaauaaacccccaaacu

SEQ ID NO: 791286 - RNA, 24 nt, Human
uccugaagugcugggaguacaggu

SEQ ID NO: 791287 - RNA, 24 nt, Human
uccugggcucacgugauccuccug

SEQ ID NO: 791288 - RNA, 18 nt, Human
uccuggguucaagugauc

SEQ ID NO: 791289 - RNA, 21 nt, Human
uccuggguucaagugauccuu

SEQ ID NO: 791290 - RNA, 24 nt, Human
uccuggguucaagugauccuucug

SEQ ID NO: 791291 - RNA, 23 nt, Human
ucgcgccagugcacuccagccug

SEQ ID NO: 791292 - RNA, 18 nt, Human
ucggccucccaaagugcu

SEQ ID NO: 791293 - RNA, 19 nt, Human
ucuacaaagugacagaaau

SEQ ID NO: 791294 - RNA, 21 nt, Human
ucuccauguuggucagguugg

SEQ ID NO: 791295 - RNA, 24 nt, Human
ucucccucagucacccaggcugga

SEQ ID NO: 791296 - RNA, 26 nt, Human
ucuccugccucagccucccaaguggc

SEQ ID NO: 791297 - RNA, 21 nt, Human
ucucucugggguuaaaaaaaa

SEQ ID NO: 791298 - RNA, 19 nt, Human
ucugagaaucuuuucuuuu

SEQ ID NO: 791299 - RNA, 24 nt, Human
ucugccuuggccucccaaagugcu

SEQ ID NO: 791300 - RNA, 23 nt, Human
ucugucucaaaaaaaaaaaaaaa

SEQ ID NO: 791301 - RNA, 23 nt, Human
ucuugaacuccuggguucaagug

SEQ ID NO: 791302 - RNA, 24 nt, Human
ucuugaguagcuuggaugacaggc

SEQ ID NO: 791303 - RNA, 18 nt, Human
ucuugcuauguugcccag

SEQ ID NO: 791304 - RNA, 18 nt, Human
ucuugcuauguugcccag

SEQ ID NO: 791305 - RNA, 19 nt, Human
ucuugcuauguugcccagg

SEQ ID NO: 791306 - RNA, 19 nt, Human
ucuugcuauguugcccagg

SEQ ID NO: 791307 - RNA, 22 nt, Human
ucuuguugcccagguuggagug

SEQ ID NO: 791308 - RNA, 20 nt, Human
ugaaaacaaaaacaaccaaa

SEQ ID NO: 791309 - RNA, 21 nt, Human
ugaaaacaaaaacaaccaaau

SEQ ID NO: 791310 - RNA, 25 nt, Human
ugaaaaccuuauuaucacaugucaa

SEQ ID NO: 791311 - RNA, 23 nt, Human
ugaaaccccgucucuccuaaaaa

SEQ ID NO: 791312 - RNA, 25 nt, Human
ugaacuccuggguucaagugauccu

SEQ ID NO: 791313 - RNA, 19 nt, Human
ugagacagagucucccuca

SEQ ID NO: 791314 - RNA, 22 nt, Human
ugagacagagucuugcuauguu

SEQ ID NO: 791315 - RNA, 24 nt, Human
ugaggcaggaggauggcgugaacc

SEQ ID NO: 791316 - RNA, 25 nt, Human
ugaggcaggaggauggcgugaaccc

SEQ ID NO: 791317 - RNA, 19 nt, Human
ugaucagauuacuccagcu

SEQ ID NO: 791318 - RNA, 22 nt, Human
ugauccacccaccucagcuucc

SEQ ID NO: 791319 - RNA, 23 nt, Human
ugcaguggcgcaaucucgguuca

SEQ ID NO: 791320 - RNA, 20 nt, Human
ugcauauaacuccuacuacc

SEQ ID NO: 791321 - RNA, 24 nt, Human
ugcaucauuuucaccagacaaccu

SEQ ID NO: 791322 - RNA, 24 nt, Human
ugccaguagucccagcuacuuggg

SEQ ID NO: 791323 - RNA, 24 nt, Human
ugcccaggcuauucuugaacuccu

SEQ ID NO: 791324 - RNA, 24 nt, Human
ugcccaggcugcagugcagugaug

SEQ ID NO: 791325 - RNA, 18 nt, Human
ugcccagguuggagugca

SEQ ID NO: 791326 - RNA, 21 nt, Human
ugcccagguuggagugcaaug

SEQ ID NO: 791327 - RNA, 21 nt, Human
ugcccucccccaccaaguuca

SEQ ID NO: 791328 - RNA, 19 nt, Human
ugccuauugaauugauggu

SEQ ID NO: 791329 - RNA, 24 nt, Human
ugccucagccucccaaguggcugg

SEQ ID NO: 791330 - RNA, 21 nt, Human
ugccucggccucccaaagugc

SEQ ID NO: 791331 - RNA, 24 nt, Human
ugccucggccucccaaagugcugg

SEQ ID NO: 791332 - RNA, 20 nt, Human
ugccuuagccucccgaguag

SEQ ID NO: 791333 - RNA, 24 nt, Human
ugcuauguugcccaggcuauucuu

SEQ ID NO: 791334 - RNA, 25 nt, Human
ugcuauguugcccaggcuauucuug

SEQ ID NO: 791335 - RNA, 31 nt, Human
ugcuauguugcccaggcuauucuugaacucc

SEQ ID NO: 791336 - RNA, 20 nt, Human
ugcuauguugcccaggcugc

SEQ ID NO: 791337 - RNA, 24 nt, Human
ugcuauguugcccaggcugcagug

SEQ ID NO: 791338 - RNA, 24 nt, Human
ugcugggauuacaggugcaagcca

SEQ ID NO: 791339 - RNA, 21 nt, Human
uggaagaauaccacuugggua

SEQ ID NO: 791340 - RNA, 19 nt, Human
uggaauuccucaaauagac

SEQ ID NO: 791341 - RNA, 23 nt, Human
uggagugcaauggcacaaucucg

SEQ ID NO: 791342 - RNA, 24 nt, Human
uggagugcaauggcacaaucucgg

SEQ ID NO: 791343 - RNA, 23 nt, Human
uggagugcaguggcgcaaucucg

SEQ ID NO: 791344 - RNA, 24 nt, Human
uggagugcaguggcgcaaucucgg

SEQ ID NO: 791345 - RNA, 24 nt, Human
uggcacaaucucggcucacugcaa

SEQ ID NO: 791346 - RNA, 22 nt, Human
uggccaacuuuuuuuuuuuuuu

SEQ ID NO: 791347 - RNA, 23 nt, Human
uggccaacuuuuuuuuuuuuuuu

SEQ ID NO: 791348 - RNA, 21 nt, Human
uggcuaauuuuuuguauuuaa

SEQ ID NO: 791349 - RNA, 24 nt, Human
uggcucacgccuguaaucccagca

SEQ ID NO: 791350 - RNA, 20 nt, Human
ugggaggcugaggcaggagg

SEQ ID NO: 791351 - RNA, 22 nt, Human
ugggaggcugaggcaggaggau

SEQ ID NO: 791352 - RNA, 22 nt, Human
ugggaguacaggugugagucau

SEQ ID NO: 791353 - RNA, 21 nt, Human
ugggaucauaggcgcgugcca

SEQ ID NO: 791354 - RNA, 22 nt, Human
ugggaucauaggcgcgugccac

SEQ ID NO: 791355 - RNA, 24 nt, Human
ugggaucauaggcgcgugccacca

SEQ ID NO: 791356 - RNA, 25 nt, Human
ugggaucauaggcgcgugccaccau

SEQ ID NO: 791357 - RNA, 18 nt, Human
ugggauuacaggcaugag

SEQ ID NO: 791358 - RNA, 22 nt, Human
ugggauuacaggcaugagccac

SEQ ID NO: 791359 - RNA, 23 nt, Human
ugggauuacaggcaugagccacc

SEQ ID NO: 791360 - RNA, 24 nt, Human
ugggauuacaggcaugagccacca

SEQ ID NO: 791361 - RNA, 25 nt, Human
ugggauuacaggcaugagccaccau

SEQ ID NO: 791362 - RNA, 18 nt, Human
ugggauuacaggcaugcg

SEQ ID NO: 791363 - RNA, 21 nt, Human
ugggauuacaggcaugcgcca

SEQ ID NO: 791364 - RNA, 22 nt, Human
ugggauuacaggcaugcgccac

SEQ ID NO: 791365 - RNA, 24 nt, Human
ugggauuacaggcaugcgccacca

SEQ ID NO: 791366 - RNA, 21 nt, Human
ugggauuacaggugcaagcca

SEQ ID NO: 791367 - RNA, 22 nt, Human
ugggauuacaggugcaagccac

SEQ ID NO: 791368 - RNA, 22 nt, Human
ugggauuacaggugcaagccac

SEQ ID NO: 791369 - RNA, 22 nt, Human
ugggauuacaggugcaagccac

SEQ ID NO: 791370 - RNA, 24 nt, Human
ugggauuacaggugcaagccacug

SEQ ID NO: 791371 - RNA, 24 nt, Human
ugggcucacgugauccuccugccu

SEQ ID NO: 791372 - RNA, 23 nt, Human
uggggggccgaggcggguggauc

SEQ ID NO: 791373 - RNA, 24 nt, Human
uggggggccgaggcggguggauca

SEQ ID NO: 791374 - RNA, 24 nt, Human
uggggucuugcuauguugcccagg

SEQ ID NO: 791375 - RNA, 20 nt, Human
uggguucaagugauccuucu

SEQ ID NO: 791376 - RNA, 23 nt, Human
uggguucaagugauccuucugcc

SEQ ID NO: 791377 - RNA, 24 nt, Human
uggguucaagugauccuucugccu

SEQ ID NO: 791378 - RNA, 23 nt, Human
uggguuucuccauguuggucagg

SEQ ID NO: 791379 - RNA, 24 nt, Human
uggucaggcuggucucaaacuccu

SEQ ID NO: 791380 - RNA, 23 nt, Human
uggucagguuggucucgaacucc

SEQ ID NO: 791381 - RNA, 21 nt, Human
uggugggugccaguaguccca

SEQ ID NO: 791382 - RNA, 24 nt, Human
uggugggugccaguagucccagcu

SEQ ID NO: 791383 - RNA, 18 nt, Human
uguccauguuaaugcgcu

SEQ ID NO: 791384 - RNA, 23 nt, Human
uguccauguuaaugcgcuuuccc

SEQ ID NO: 791385 - RNA, 24 nt, Human
ugucucauaacaagaaauauaauu

SEQ ID NO: 791386 - RNA, 18 nt, Human
uguggggggccgaggcgg

SEQ ID NO: 791387 - RNA, 22 nt, Human
uuaaaggauacagcaaauccaa

SEQ ID NO: 791388 - RNA, 24 nt, Human
uuaauaaagacgggguuucaccau

SEQ ID NO: 791389 - RNA, 22 nt, Human
uuacagugagccgagaucgcgc

SEQ ID NO: 791390 - RNA, 21 nt, Human
uuaguagagauggguuucucc

SEQ ID NO: 791391 - RNA, 23 nt, Human
uuaguagagauggguuucuccau

SEQ ID NO: 791392 - RNA, 23 nt, Human
uuauagagauggggucuugcuau

SEQ ID NO: 791393 - RNA, 21 nt, Human
uucaagcgauucuccugccuc

SEQ ID NO: 791394 - RNA, 23 nt, Human
uucaagcgauucuccugccucag

SEQ ID NO: 791395 - RNA, 24 nt, Human
uucaagcgauucuccugccucagc

SEQ ID NO: 791396 - RNA, 23 nt, Human
uucaagugauccuucugccuugg

SEQ ID NO: 791397 - RNA, 24 nt, Human
uucaagugauccuucugccuuggc

SEQ ID NO: 791398 - RNA, 24 nt, Human
uucacucuuguugcccagguugga

SEQ ID NO: 791399 - RNA, 23 nt, Human
uucagcuagugggacucugugcu

SEQ ID NO: 791400 - RNA, 19 nt, Human
uucauaauucaaaggccgu

SEQ ID NO: 791401 - RNA, 23 nt, Human
uuccugggcucacgugauccucc

SEQ ID NO: 791402 - RNA, 18 nt, Human
uugaagauucuguggaau

SEQ ID NO: 791403 - RNA, 22 nt, Human
uugagacagagucuugcuaugu

SEQ ID NO: 791404 - RNA, 24 nt, Human
uugcccaggcugcagugcagugau

SEQ ID NO: 791405 - RNA, 18 nt, Human
uugcccagguuggagugc

SEQ ID NO: 791406 - RNA, 18 nt, Human
uuggccucccaaagugcu

SEQ ID NO: 791407 - RNA, 23 nt, Human
uuguucucagagauaaaaucagu

SEQ ID NO: 791408 - RNA, 23 nt, Human
uuuaacagcauaaucuuuuuaaa

SEQ ID NO: 791409 - RNA, 33 nt, Human
uuuaagacuccuccaauaaacccccaaacucuu

SEQ ID NO: 791410 - RNA, 22 nt, Human
uuuaagauauuuuccaguccca

SEQ ID NO: 791411 - RNA, 24 nt, Human
uuucaccauguuggucaggcuggu

SEQ ID NO: 791412 - RNA, 24 nt, Human
uuucacucuuguugcccagguugg

SEQ ID NO: 791413 - RNA, 21 nt, Human
uuucuagcagcaaggccagga

SEQ ID NO: 791414 - RNA, 19 nt, Human
uuucuccauguuggucagg

SEQ ID NO: 791415 - RNA, 20 nt, Human
uuucuccauguuggucaggu

SEQ ID NO: 791416 - RNA, 25 nt, Human
uuucucuggauuacuccaaauuuuu

SEQ ID NO: 791417 - RNA, 22 nt, Human
uuugagacagagucucccucag

SEQ ID NO: 791418 - RNA, 23 nt, Human
uuuggaggaguugucuaaaagga

SEQ ID NO: 791419 - RNA, 24 nt, Human
uuuuaagacuccuccaauaaaccc

SEQ ID NO: 791420 - RNA, 24 nt, Human
uuuuggccauuaauaaucaggggc

SEQ ID NO: 791421 - RNA, 19 nt, Human
uuuuguauuuuuaguagag

SEQ ID NO: 791422 - RNA, 20 nt, Human
uuuuguauuuuuaguagaga

SEQ ID NO: 791423 - RNA, 18 nt, Human
uuuuuaguagagaugggu

SEQ ID NO: 791424 - RNA, 18 nt, Human
uuuuuauagagauggggu

SEQ ID NO: 791425 - RNA, 23 nt, Human
aaaaaauaacauucaaacacuga

SEQ ID NO: 791426 - RNA, 25 nt, Human
aaaaaauaacauucaaacacugaga

SEQ ID NO: 791427 - RNA, 23 nt, Human
aaaaaguaucugacaauuaugaa

SEQ ID NO: 791428 - RNA, 25 nt, Human
aaaacaaaguuaaauaaccugaaua

SEQ ID NO: 791429 - RNA, 22 nt, Human
aaaggaccaugcuuaacgucaa

SEQ ID NO: 791430 - RNA, 21 nt, Human
aaaggccaucuuuccugagcc

SEQ ID NO: 791431 - RNA, 22 nt, Human
aacaagugaugaaauauuuuaa

SEQ ID NO: 791432 - RNA, 19 nt, Human
aaguuaaaaucauaggcac

SEQ ID NO: 791433 - RNA, 23 nt, Human
aaucucuagcccagguuucuuuc

SEQ ID NO: 791434 - RNA, 25 nt, Human
acaaaauaaucaacauucauaaaac

SEQ ID NO: 791435 - RNA, 24 nt, Human
accacauauacaaguucggcuaua

SEQ ID NO: 791436 - RNA, 21 nt, Human
acccaccccaucacccucaaa

SEQ ID NO: 791437 - RNA, 27 nt, Human
acccuuacuacuauauaucaaacauaa

SEQ ID NO: 791438 - RNA, 22 nt, Human
acugagaggaaaaaaggaaucu

SEQ ID NO: 791439 - RNA, 22 nt, Human
agaguuauacaaacaucugggg

SEQ ID NO: 791440 - RNA, 19 nt, Human
agcaggaccaggccccacc

SEQ ID NO: 791441 - RNA, 27 nt, Human
agcgacagggaaagagacggaggaaag

SEQ ID NO: 791442 - RNA, 20 nt, Human
aggaccaugcuuaacgucaa

SEQ ID NO: 791443 - RNA, 24 nt, Human
aggcaauuuuucucuuuaagaaaa

SEQ ID NO: 791444 - RNA, 19 nt, Human
auauagcaggaccaggccc

SEQ ID NO: 791445 - RNA, 24 nt, Human
auccaaccccaugaagacuaaauc

SEQ ID NO: 791446 - RNA, 20 nt, Human
caccaaauacauaguacugg

SEQ ID NO: 791447 - RNA, 22 nt, Human
caccccaucacccucaaauuca

SEQ ID NO: 791448 - RNA, 22 nt, Human
cagcagaguuucuauuacuuuc

SEQ ID NO: 791449 - RNA, 23 nt, Human
cagcgacagggaaagagacggag

SEQ ID NO: 791450 - RNA, 21 nt, Human
caggaccaggccccaccgcca

SEQ ID NO: 791451 - RNA, 21 nt, Human
caggaccaggccccaccgccg

SEQ ID NO: 791452 - RNA, 24 nt, Human
cauacaagaaaagaugcacgugau

SEQ ID NO: 791453 - RNA, 20 nt, Human
cauagucuagaucauucuag

SEQ ID NO: 791454 - RNA, 20 nt, Human
caucaaccuaucaaccuuaa

SEQ ID NO: 791455 - RNA, 18 nt, Human
cccacccccuaaucucaa

SEQ ID NO: 791456 - RNA, 20 nt, Human
cccaccgccagggucccccc

SEQ ID NO: 791457 - RNA, 23 nt, Human
cccaccgccaggguccccccacc

SEQ ID NO: 791458 - RNA, 24 nt, Human
cccaccgccaggguccccccaccu

SEQ ID NO: 791459 - RNA, 21 nt, Human
ccccaccgccagggucccccc

SEQ ID NO: 791460 - RNA, 20 nt, Human
ccccccgcgggccggcccag

SEQ ID NO: 791461 - RNA, 19 nt, Human
ccccgccgccgccgccgcc

SEQ ID NO: 791462 - RNA, 23 nt, Human
ccccgccgccgccgccgccuccg

SEQ ID NO: 791463 - RNA, 24 nt, Human
ccccgccgccgccgccgccuccgc

SEQ ID NO: 791464 - RNA, 25 nt, Human
ccccugccgccaucuucccuccguc

SEQ ID NO: 791465 - RNA, 24 nt, Human
ccgccgccgccgccgccuccgccg

SEQ ID NO: 791466 - RNA, 18 nt, Human
ccgccgccgccgccuccg

SEQ ID NO: 791467 - RNA, 24 nt, Human
ccgccgccgccgccuccgccgccc

SEQ ID NO: 791468 - RNA, 23 nt, Human
ccgccgccgccuccgccgcccgc

SEQ ID NO: 791469 - RNA, 23 nt, Human
ccgccgccgccuccgccgcccgc

SEQ ID NO: 791470 - RNA, 25 nt, Human
ccgccgccgccuccgccgcccgcuc

SEQ ID NO: 791471 - RNA, 25 nt, Human
ccgccuccgccgcccgcucgcucuc

SEQ ID NO: 791472 - RNA, 18 nt, Human
ccgcucacucuagccgag

SEQ ID NO: 791473 - RNA, 21 nt, Human
ccggccccgccgccgccgccg

SEQ ID NO: 791474 - RNA, 18 nt, Human
ccggccccugccgccauc

SEQ ID NO: 791475 - RNA, 24 nt, Human
ccuaccacauaauagaccguuaug

SEQ ID NO: 791476 - RNA, 21 nt, Human
ccucagagcgucgggggugga

SEQ ID NO: 791477 - RNA, 22 nt, Human
ccuugcauuauacaccaaauac

SEQ ID NO: 791478 - RNA, 21 nt, Human
cgccuccgccgcccgcucgcu

SEQ ID NO: 791479 - RNA, 20 nt, Human
cggaggaaagaggcgucgcc

SEQ ID NO: 791480 - RNA, 19 nt, Human
cuagcauucaguuaacaua

SEQ ID NO: 791481 - RNA, 19 nt, Human
cuccgucccuccgcccccc

SEQ ID NO: 791482 - RNA, 23 nt, Human
cugaaaacugagacuuguucugu

SEQ ID NO: 791483 - RNA, 25 nt, Human
cugaaaacugagacuuguucuguuu

SEQ ID NO: 791484 - RNA, 19 nt, Human
cugugguaguacaacagca

SEQ ID NO: 791485 - RNA, 18 nt, Human
cuuaacgucaaaaaugga

SEQ ID NO: 791486 - RNA, 20 nt, Human
cuuggaaacucauaauagcu

SEQ ID NO: 791487 - RNA, 24 nt, Human
cuugugcuaaaugaaugacucucc

SEQ ID NO: 791488 - RNA, 20 nt, Human
gaaacugauuaucuaacuua

SEQ ID NO: 791489 - RNA, 24 nt, Human
gauagccugaauucaccauuuucu

SEQ ID NO: 791490 - RNA, 21 nt, Human
gcccagguuucuuuccuccca

SEQ ID NO: 791491 - RNA, 18 nt, Human
gcccgcucgcucucgcag

SEQ ID NO: 791492 - RNA, 21 nt, Human
gccggcccagucggugaccuc

SEQ ID NO: 791493 - RNA, 27 nt, Human
gccucugucaaauauuuuuuaaaaauc

SEQ ID NO: 791494 - RNA, 23 nt, Human
gcuuucuaguaaaaaggcaauuu

SEQ ID NO: 791495 - RNA, 19 nt, Human
ggguuucugugguuaaaga

SEQ ID NO: 791496 - RNA, 28 nt, Human
guaaauccuuagauuuucccaaacagaa

SEQ ID NO: 791497 - RNA, 18 nt, Human
gugagcuacauccaaaac

SEQ ID NO: 791498 - RNA, 21 nt, Human
uaaaguggaucaacuuaagua

SEQ ID NO: 791499 - RNA, 23 nt, Human
uaaauaaccugaauacuccuuuu

SEQ ID NO: 791500 - RNA, 24 nt, Human
uaaauggcucuucaaguuuuuaga

SEQ ID NO: 791501 - RNA, 23 nt, Human
uaacaagugaugaaauauuuuaa

SEQ ID NO: 791502 - RNA, 24 nt, Human
uaagacauaauccaaccccaugaa

SEQ ID NO: 791503 - RNA, 20 nt, Human
uaagugacaauaucuuagag

SEQ ID NO: 791504 - RNA, 24 nt, Human
uaauccaaccccaugaagacuaaa

SEQ ID NO: 791505 - RNA, 25 nt, Human
uacaaacaaguuuuguagaaaaaug

SEQ ID NO: 791506 - RNA, 19 nt, Human
uacauagucuagaucauuc

SEQ ID NO: 791507 - RNA, 21 nt, Human
uaccaaacacaucugauguua

SEQ ID NO: 791508 - RNA, 24 nt, Human
uaugaaauaacucugacagagaaa

SEQ ID NO: 791509 - RNA, 21 nt, Human
ucaaaacaaacacacacaagu

SEQ ID NO: 791510 - RNA, 21 nt, Human
uccaaccccaugaagacuaaa

SEQ ID NO: 791511 - RNA, 25 nt, Human
uccagaauaucaagccuucuauuuc

SEQ ID NO: 791512 - RNA, 23 nt, Human
ucccaauuucuuuugccaacuua

SEQ ID NO: 791513 - RNA, 23 nt, Human
uccggccccugccgccaucuucc

SEQ ID NO: 791514 - RNA, 24 nt, Human
uccuaucaugaaaaccugcuaaua

SEQ ID NO: 791515 - RNA, 22 nt, Human
ucugcauucuugucuuugcugg

SEQ ID NO: 791516 - RNA, 22 nt, Human
ugaaauaacucugacagagaaa

SEQ ID NO: 791517 - RNA, 25 nt, Human
ugagaaaauuaaauaacuuuggaag

SEQ ID NO: 791518 - RNA, 19 nt, Human
ugagagaaaaaaacagaag

SEQ ID NO: 791519 - RNA, 23 nt, Human
ugcaaaaaucauuucugaaauuc

SEQ ID NO: 791520 - RNA, 22 nt, Human
ugcacugaaaacugagacuugu

SEQ ID NO: 791521 - RNA, 22 nt, Human
ugcagccauuuaaaaacaaagu

SEQ ID NO: 791522 - RNA, 24 nt, Human
ugcauuauacaccaaauacauagu

SEQ ID NO: 791523 - RNA, 22 nt, Human
ugcccagauauuggccucuguc

SEQ ID NO: 791524 - RNA, 19 nt, Human
uggcaaucaaaacaaacac

SEQ ID NO: 791525 - RNA, 21 nt, Human
uggcaaucaaaacaaacacac

SEQ ID NO: 791526 - RNA, 18 nt, Human
uggcaguuuaaaucucca

SEQ ID NO: 791527 - RNA, 22 nt, Human
uggugguggugacaugugagcu

SEQ ID NO: 791528 - RNA, 21 nt, Human
uguacaaacaaguuuuguaga

SEQ ID NO: 791529 - RNA, 22 nt, Human
uguagaaaaaugauccagcaaa

SEQ ID NO: 791530 - RNA, 19 nt, Human
uguaugauuaccaaacaca

SEQ ID NO: 791531 - RNA, 22 nt, Human
uguaugauuaccaaacacaucu

SEQ ID NO: 791532 - RNA, 20 nt, Human
ugucaaugcaacaugaugga

SEQ ID NO: 791533 - RNA, 31 nt, Human
uguuuuaaucucuagcccagguuucuuuccc

SEQ ID NO: 791534 - RNA, 22 nt, Human
uuaacaggaaaugaacuuaugu

SEQ ID NO: 791535 - RNA, 22 nt, Human
uucccaaacagaaaaauugcaa

SEQ ID NO: 791536 - RNA, 19 nt, Human
uuuaaaguggaucaacuua

SEQ ID NO: 791537 - RNA, 21 nt, Human
uuuaacaagugaugaaauauu

SEQ ID NO: 791538 - RNA, 22 nt, Human
uuuaggaucauucaaaauacau

SEQ ID NO: 791539 - RNA, 21 nt, Human
uuuccucccacccccuaaucu

SEQ ID NO: 791540 - RNA, 21 nt, Human
uuugaugaucucugucgguuu

SEQ ID NO: 791541 - RNA, 21 nt, Human
aaaaaauaaaagggaaaagga

SEQ ID NO: 791542 - RNA, 20 nt, Human
aaauguugaaaauuucaacu

SEQ ID NO: 791543 - RNA, 22 nt, Human
aacagccagugucccaaacucc

SEQ ID NO: 791544 - RNA, 22 nt, Human
aagaaggaaaaaaaugcaugag

SEQ ID NO: 791545 - RNA, 20 nt, Human
aagaccccacaaagaccucc

SEQ ID NO: 791546 - RNA, 18 nt, Human
aagggagggaggacagaa

SEQ ID NO: 791547 - RNA, 21 nt, Human
aaggggaaaaaauaaaaggga

SEQ ID NO: 791548 - RNA, 22 nt, Human
aauaaaaauagauaauacugag

SEQ ID NO: 791549 - RNA, 21 nt, Human
aauguuaucaggaugcuaaaa

SEQ ID NO: 791550 - RNA, 20 nt, Human
acaagagcauggacugcagg

SEQ ID NO: 791551 - RNA, 19 nt, Human
acacacauacaaagauaaa

SEQ ID NO: 791552 - RNA, 21 nt, Human
acacacauacaaagauaaaac

SEQ ID NO: 791553 - RNA, 24 nt, Human
accccacaaagaccuccaggcgcc

SEQ ID NO: 791554 - RNA, 23 nt, Human
agaagaacaaagacaaauacaaa

SEQ ID NO: 791555 - RNA, 20 nt, Human
agaagcgcaucacauuuugg

SEQ ID NO: 791556 - RNA, 20 nt, Human
agaaggggaaaaaauaaaag

SEQ ID NO: 791557 - RNA, 21 nt, Human
agaaggggaaaaaauaaaagg

SEQ ID NO: 791558 - RNA, 20 nt, Human
agacuaaaucuaccagcuaa

SEQ ID NO: 791559 - RNA, 22 nt, Human
aggaaaaaaaugcaugaaaaaa

SEQ ID NO: 791560 - RNA, 19 nt, Human
aggaacuuaaaagauauug

SEQ ID NO: 791561 - RNA, 19 nt, Human
aggaacuuaaaagauauug

SEQ ID NO: 791562 - RNA, 21 nt, Human
aggaaggaagaaaggaaggga

SEQ ID NO: 791563 - RNA, 21 nt, Human
aggaagggagggagggaggga

SEQ ID NO: 791564 - RNA, 23 nt, Human
aggaagggagggagggagggagg

SEQ ID NO: 791565 - RNA, 19 nt, Human
agggagggaggacagaagg

SEQ ID NO: 791566 - RNA, 21 nt, Human
agggcaagagguagcaaggga

SEQ ID NO: 791567 - RNA, 22 nt, Human
auaggcauuaaaucuucaugcu

SEQ ID NO: 791568 - RNA, 24 nt, Human
augugcacguauauaaauguauau

SEQ ID NO: 791569 - RNA, 25 nt, Human
augugcacguauauaaauguauaua

SEQ ID NO: 791570 - RNA, 25 nt, Human
caaaaaagauuuacauguaggcuua

SEQ ID NO: 791571 - RNA, 24 nt, Human
cacaaagaccuccaggcgccucag

SEQ ID NO: 791572 - RNA, 24 nt, Human
cacccagaaugagagcaacaccaa

SEQ ID NO: 791573 - RNA, 21 nt, Human
cagaaugagagcaacaccaaa

SEQ ID NO: 791574 - RNA, 26 nt, Human
cagcagcagaaggccaaauugauuag

SEQ ID NO: 791575 - RNA, 18 nt, Human
cagcuuccagcuucuaca

SEQ ID NO: 791576 - RNA, 18 nt, Human
caggccgggacagcccgg

SEQ ID NO: 791577 - RNA, 21 nt, Human
ccauucacaggccuuuccaaa

SEQ ID NO: 791578 - RNA, 19 nt, Human
cccacaaagaccuccaggc

SEQ ID NO: 791579 - RNA, 23 nt, Human
ccccacaaagaccuccaggcgcc

SEQ ID NO: 791580 - RNA, 24 nt, Human
ccccuaaacugaaagugcugaaac

SEQ ID NO: 791581 - RNA, 22 nt, Human
cgccucagcccuuauuugguac

SEQ ID NO: 791582 - RNA, 21 nt, Human
cugccgccuaacaauuguuua

SEQ ID NO: 791583 - RNA, 19 nt, Human
cuuccagccacaaaaaacg

SEQ ID NO: 791584 - RNA, 20 nt, Human
gaaaggaagggagggaggga

SEQ ID NO: 791585 - RNA, 18 nt, Human
gaagggagggagggaggg

SEQ ID NO: 791586 - RNA, 24 nt, Human
gaagggagggagggagggagggag

SEQ ID NO: 791587 - RNA, 19 nt, Human
gaccccacaaagaccucca

SEQ ID NO: 791588 - RNA, 23 nt, Human
gagaaauagaaacaauaacuaaa

SEQ ID NO: 791589 - RNA, 18 nt, Human
gagggagggagggaggga

SEQ ID NO: 791590 - RNA, 19 nt, Human
gagggagggagggagggag

SEQ ID NO: 791591 - RNA, 20 nt, Human
gagggagggagggagggagg

SEQ ID NO: 791592 - RNA, 22 nt, Human
gauaacaaaacagaagcgcauc

SEQ ID NO: 791593 - RNA, 20 nt, Human
gccagugucccaaacuccuu

SEQ ID NO: 791594 - RNA, 19 nt, Human
gccgggacagcccggccag

SEQ ID NO: 791595 - RNA, 19 nt, Human
gcugcugugaaaacuggag

SEQ ID NO: 791596 - RNA, 24 nt, Human
ggaaaaaaaugcaugaaaaaaugc

SEQ ID NO: 791597 - RNA, 18 nt, Human
ggaaaaaauaaaagggaa

SEQ ID NO: 791598 - RNA, 18 nt, Human
ggaacuuaaaagauauug

SEQ ID NO: 791599 - RNA, 24 nt, Human
ggagacacagaggggagcacacca

SEQ ID NO: 791600 - RNA, 19 nt, Human
ggagggagggagggaggga

SEQ ID NO: 791601 - RNA, 20 nt, Human
ggagggagggagggagggga

SEQ ID NO: 791602 - RNA, 21 nt, Human
ggagggagggagggaggggaa

SEQ ID NO: 791603 - RNA, 18 nt, Human
ggagugcacucucacuuu

SEQ ID NO: 791604 - RNA, 23 nt, Human
ggaguucauauacauguaugggu

SEQ ID NO: 791605 - RNA, 18 nt, Human
ggaugcuaaaaacucagc

SEQ ID NO: 791606 - RNA, 21 nt, Human
gugaaggaaggagggcaagag

SEQ ID NO: 791607 - RNA, 22 nt, Human
uaaaaauagauaauacugagug

SEQ ID NO: 791608 - RNA, 25 nt, Human
uaaaagaaaauaaaaugaaagagaa

SEQ ID NO: 791609 - RNA, 28 nt, Human
uaaaauaauacuuccuuaaaaaucugcc

SEQ ID NO: 791610 - RNA, 20 nt, Human
uaaagcaaaagugaacccuc

SEQ ID NO: 791611 - RNA, 21 nt, Human
uaaagcaaaagugaacccucu

SEQ ID NO: 791612 - RNA, 22 nt, Human
uaaaggggugggguggcagggu

SEQ ID NO: 791613 - RNA, 23 nt, Human
uaagauaaaauaaaaguagcaga

SEQ ID NO: 791614 - RNA, 23 nt, Human
uaauggcauauauauaauguccc

SEQ ID NO: 791615 - RNA, 24 nt, Human
uacacuuguacaaaaaucuuugug

SEQ ID NO: 791616 - RNA, 26 nt, Human
uacauguacgaguauacaugugcacg

SEQ ID NO: 791617 - RNA, 22 nt, Human
uagaaaaauagcauuuucguaa

SEQ ID NO: 791618 - RNA, 21 nt, Human
uagaaagaaggaaaaaaaugc

SEQ ID NO: 791619 - RNA, 23 nt, Human
uagauaauacugagugcaaagca

SEQ ID NO: 791620 - RNA, 22 nt, Human
uagcuacacuuguacaaaaauc

SEQ ID NO: 791621 - RNA, 20 nt, Human
uauauaaauguauauacaca

SEQ ID NO: 791622 - RNA, 21 nt, Human
uauggguaugugugcauacau

SEQ ID NO: 791623 - RNA, 19 nt, Human
uaugugugcauacauguac

SEQ ID NO: 791624 - RNA, 20 nt, Human
ucacaggccuuuccaaagca

SEQ ID NO: 791625 - RNA, 19 nt, Human
ucacccagaaugagagcaa

SEQ ID NO: 791626 - RNA, 25 nt, Human
ucauauacauguauggguaugugug

SEQ ID NO: 791627 - RNA, 21 nt, Human
ucccaaacuccuucacaagag

SEQ ID NO: 791628 - RNA, 19 nt, Human
uccccacacacauacaaag

SEQ ID NO: 791629 - RNA, 20 nt, Human
ucuacauggggaaguggggc

SEQ ID NO: 791630 - RNA, 22 nt, Human
ucugggaaagcuguuguugguu

SEQ ID NO: 791631 - RNA, 20 nt, Human
ucugugaaaacuccuucccc

SEQ ID NO: 791632 - RNA, 19 nt, Human
ugaaggaaggagggcaaga

SEQ ID NO: 791633 - RNA, 28 nt, Human
ugcaugaaaaaaugcauaaacuuugugc

SEQ ID NO: 791634 - RNA, 21 nt, Human
ugcuaaaaacucagcagcuuc

SEQ ID NO: 791635 - RNA, 21 nt, Human
uggcagggugggaagaaaagc

SEQ ID NO: 791636 - RNA, 23 nt, Human
uggcagggugggaagaaaagcau

SEQ ID NO: 791637 - RNA, 21 nt, Human
uggcauauauauaaugucccc

SEQ ID NO: 791638 - RNA, 19 nt, Human
ugggaagaggaucuuuuug

SEQ ID NO: 791639 - RNA, 19 nt, Human
ugggguggcagggugggaa

SEQ ID NO: 791640 - RNA, 26 nt, Human
uguauauacacauauaccuucuuacg

SEQ ID NO: 791641 - RNA, 21 nt, Human
ugugaaaacuccuuccuaauu

SEQ ID NO: 791642 - RNA, 24 nt, Human
ugugcacguauauaaauguauaua

SEQ ID NO: 791643 - RNA, 31 nt, Human
ugugcacguauauaaauguauauacacauaa

SEQ ID NO: 791644 - RNA, 19 nt, Human
ugugcauacauguacgagu

SEQ ID NO: 791645 - RNA, 20 nt, Human
ugugcauacauguacgagua

SEQ ID NO: 791646 - RNA, 24 nt, Human
ugugugcauacauguacgaguaua

SEQ ID NO: 791647 - RNA, 26 nt, Human
ugugugcauacauguacgaguauaca

SEQ ID NO: 791648 - RNA, 18 nt, Human
uuaaagcaaaagugaacc

SEQ ID NO: 791649 - RNA, 19 nt, Human
uucaagaucauucuagaua

SEQ ID NO: 791650 - RNA, 25 nt, Human
uuccuuggggauccuucucuuucuc

SEQ ID NO: 791651 - RNA, 19 nt, Human
uucucugauggcaaguuac

SEQ ID NO: 791652 - RNA, 24 nt, Human
uuuaagauaacaaaacagaagcgc

SEQ ID NO: 791653 - RNA, 20 nt, Human
uuuaugagcuccaaauuauu

SEQ ID NO: 791654 - RNA, 20 nt, Human
uuucuugguccgagucccag

SEQ ID NO: 791655 - RNA, 18 nt, Human
uuugcuagaucuuccaca

SEQ ID NO: 791656 - RNA, 23 nt, Human
uuuuucuuccuuggggauccuuc

SEQ ID NO: 791657 - RNA, 23 nt, Human
aaaaaaaugugguuacuagaaac

SEQ ID NO: 791658 - RNA, 20 nt, Human
aaaagaaacauaggcagcuu

SEQ ID NO: 791659 - RNA, 19 nt, Human
aaaauaacucauuaauaau

SEQ ID NO: 791660 - RNA, 19 nt, Human
aaaauacaccagccaacaa

SEQ ID NO: 791661 - RNA, 21 nt, Human
aaacagccugaggcaacacaa

SEQ ID NO: 791662 - RNA, 20 nt, Human
aaagagguucagaaaccuuc

SEQ ID NO: 791663 - RNA, 19 nt, Human
aaagaucaauaaagcagaa

SEQ ID NO: 791664 - RNA, 19 nt, Human
aaagcagacaacaaaaaca

SEQ ID NO: 791665 - RNA, 20 nt, Human
aaaguaaaauaacucauuaa

SEQ ID NO: 791666 - RNA, 19 nt, Human
aaauuacagauguggcucu

SEQ ID NO: 791667 - RNA, 24 nt, Human
aacaucuagcuacggcagaauggc

SEQ ID NO: 791668 - RNA, 23 nt, Human
aacuacauacaccuaaaccagaa

SEQ ID NO: 791669 - RNA, 18 nt, Human
aagcaaggauugcccagg

SEQ ID NO: 791670 - RNA, 18 nt, Human
aagcagacaacaaaaaca

SEQ ID NO: 791671 - RNA, 22 nt, Human
aagcagacaacaaaaacaacac

SEQ ID NO: 791672 - RNA, 25 nt, Human
aagcagacaacaaaaacaacacuaa

SEQ ID NO: 791673 - RNA, 27 nt, Human
aagcagacaacaaaaacaacacuaagg

SEQ ID NO: 791674 - RNA, 19 nt, Human
aaggaaaguaauuuauuug

SEQ ID NO: 791675 - RNA, 24 nt, Human
aaggagacagacucaugugaccaa

SEQ ID NO: 791676 - RNA, 25 nt, Human
aaggagacagacucaugugaccaag

SEQ ID NO: 791677 - RNA, 21 nt, Human
acaaagacauagaacaaugug

SEQ ID NO: 791678 - RNA, 27 nt, Human
acaacaaaaacaacacuaaggcauaga

SEQ ID NO: 791679 - RNA, 22 nt, Human
acaaugugccuggaaaagagga

SEQ ID NO: 791680 - RNA, 23 nt, Human
acacugaauuucaaaggccuaau

SEQ ID NO: 791681 - RNA, 20 nt, Human
acagaauauguuccagagga

SEQ ID NO: 791682 - RNA, 22 nt, Human
acagacauuaaaaacccagaca

SEQ ID NO: 791683 - RNA, 21 nt, Human
acauggcccaacuacauacac

SEQ ID NO: 791684 - RNA, 18 nt, Human
acccccugcccucgugaa

SEQ ID NO: 791685 - RNA, 19 nt, Human
accguguaauggcagcccu

SEQ ID NO: 791686 - RNA, 19 nt, Human
acugugucacucagacuac

SEQ ID NO: 791687 - RNA, 20 nt, Human
agaaagcaaaaaauaaauua

SEQ ID NO: 791688 - RNA, 23 nt, Human
agaauggcccacugcagucccca

SEQ ID NO: 791689 - RNA, 23 nt, Human
agacaacaaaaacaacacuaagg

SEQ ID NO: 791690 - RNA, 20 nt, Human
agcaccaugccuggggcaga

SEQ ID NO: 791691 - RNA, 25 nt, Human
agcagacaacaaaaacaacacuaag

SEQ ID NO: 791692 - RNA, 22 nt, Human
agcagauucuggcuuuggggga

SEQ ID NO: 791693 - RNA, 23 nt, Human
aggaguggggaggaaaagaggau

SEQ ID NO: 791694 - RNA, 23 nt, Human
aggcaggaaguaaagacugugga

SEQ ID NO: 791695 - RNA, 24 nt, Human
aggguaauuacaagucuuaaaaau

SEQ ID NO: 791696 - RNA, 18 nt, Human
aguuauauggccuuacag

SEQ ID NO: 791697 - RNA, 18 nt, Human
aucuagcuacggcagaau

SEQ ID NO: 791698 - RNA, 23 nt, Human
auguuaacaaaccccacagaaca

SEQ ID NO: 791699 - RNA, 23 nt, Human
caaaaaauaaauuagaggccuga

SEQ ID NO: 791700 - RNA, 20 nt, Human
caaaaccugccaacaauuug

SEQ ID NO: 791701 - RNA, 19 nt, Human
caaaccccacagaacaucu

SEQ ID NO: 791702 - RNA, 24 nt, Human
caaagcaacccacagaauagcauc

SEQ ID NO: 791703 - RNA, 25 nt, Human
caacaaagacauagaacaaugugca

SEQ ID NO: 791704 - RNA, 21 nt, Human
caagacaaaggaaacacauuc

SEQ ID NO: 791705 - RNA, 24 nt, Human
caagacaggcaauggucccuaaac

SEQ ID NO: 791706 - RNA, 22 nt, Human
cagacaacaaaaacaacacuaa

SEQ ID NO: 791707 - RNA, 23 nt, Human
cagaggauuggaaaggcuguguu

SEQ ID NO: 791708 - RNA, 19 nt, Human
cagaugaaaaaaaugcaac

SEQ ID NO: 791709 - RNA, 23 nt, Human
cagcauaagccuggcugcuuugg

SEQ ID NO: 791710 - RNA, 20 nt, Human
caggugaucccacaaacacc

SEQ ID NO: 791711 - RNA, 23 nt, Human
caucacaagaccguguaauggca

SEQ ID NO: 791712 - RNA, 25 nt, Human
caucucagcuuauuucacaucguuu

SEQ ID NO: 791713 - RNA, 23 nt, Human
cauucaaugaguuaauagaacac

SEQ ID NO: 791714 - RNA, 22 nt, Human
ccacagaauagcaucuaaccau

SEQ ID NO: 791715 - RNA, 24 nt, Human
ccacagaauagcaucuaaccauaa

SEQ ID NO: 791716 - RNA, 22 nt, Human
ccacagacauuaaaaacccaga

SEQ ID NO: 791717 - RNA, 25 nt, Human
ccagccaacaaagacauagaacaau

SEQ ID NO: 791718 - RNA, 24 nt, Human
cccacagaauagcaucuaaccauu

SEQ ID NO: 791719 - RNA, 21 nt, Human
ccccacugccuuccuggccua

SEQ ID NO: 791720 - RNA, 21 nt, Human
cggcagaauggcaaaauacag

SEQ ID NO: 791721 - RNA, 24 nt, Human
cuacugugguuguuauaacuauac

SEQ ID NO: 791722 - RNA, 18 nt, Human
cucuccucucccuccaca

SEQ ID NO: 791723 - RNA, 23 nt, Human
cugagcucugcccucuguggagg

SEQ ID NO: 791724 - RNA, 18 nt, Human
cuggccuaucauucuugu

SEQ ID NO: 791725 - RNA, 25 nt, Human
cuuccuggccuaucauucuuguuuu

SEQ ID NO: 791726 - RNA, 21 nt, Human
cuuguuuaguuuuuuuccaca

SEQ ID NO: 791727 - RNA, 19 nt, Human
cuuucaggccugccuuaag

SEQ ID NO: 791728 - RNA, 24 nt, Human
gacagaaaguaaacaaaagggacc

SEQ ID NO: 791729 - RNA, 19 nt, Human
gacuaaaguaaggagacag

SEQ ID NO: 791730 - RNA, 23 nt, Human
gaggaaaagaggauuacaugaag

SEQ ID NO: 791731 - RNA, 21 nt, Human
gaguuggccacacuuugagau

SEQ ID NO: 791732 - RNA, 20 nt, Human
gcaaauguccugagcucugc

SEQ ID NO: 791733 - RNA, 22 nt, Human
gcacaugucuaccaaauguuaa

SEQ ID NO: 791734 - RNA, 22 nt, Human
gcagccccuuccugaucuacuu

SEQ ID NO: 791735 - RNA, 20 nt, Human
gcccacugcaguccccacaa

SEQ ID NO: 791736 - RNA, 21 nt, Human
ggaggaguggggaggaaaaga

SEQ ID NO: 791737 - RNA, 22 nt, Human
ggaguuggccacacuuugagau

SEQ ID NO: 791738 - RNA, 20 nt, Human
ggaguuugaggaugagguga

SEQ ID NO: 791739 - RNA, 18 nt, Human
gggcucuccucucccucc

SEQ ID NO: 791740 - RNA, 23 nt, Human
ggucuucugucuuugugauucuu

SEQ ID NO: 791741 - RNA, 20 nt, Human
guaaaacacuggucaaaaug

SEQ ID NO: 791742 - RNA, 20 nt, Human
guccugagcucugcccucug

SEQ ID NO: 791743 - RNA, 23 nt, Human
guguaguuauauggccuuacagu

SEQ ID NO: 791744 - RNA, 24 nt, Human
uaaacagccugaggcaacacaacu

SEQ ID NO: 791745 - RNA, 22 nt, Human
uaaaccagaaaugucguaugaa

SEQ ID NO: 791746 - RNA, 23 nt, Human
uaaacuguagacacaguuuacaa

SEQ ID NO: 791747 - RNA, 22 nt, Human
uaaagcagaaagcaaaaaauaa

SEQ ID NO: 791748 - RNA, 25 nt, Human
uaacaaaccccacagaacaucuagc

SEQ ID NO: 791749 - RNA, 24 nt, Human
uaaggagacagacucaugugacca

SEQ ID NO: 791750 - RNA, 22 nt, Human
uaagugcuuuuuuucuauccau

SEQ ID NO: 791751 - RNA, 21 nt, Human
uaauuccaugaaaaugcugaa

SEQ ID NO: 791752 - RNA, 18 nt, Human
uacuucaguuacuucugc

SEQ ID NO: 791753 - RNA, 20 nt, Human
uacuucaguuacuucugcug

SEQ ID NO: 791754 - RNA, 19 nt, Human
uagaacaaugugcagcaaa

SEQ ID NO: 791755 - RNA, 20 nt, Human
uagaauagggugggcucuga

SEQ ID NO: 791756 - RNA, 23 nt, Human
uagacuaaaagauuccuggauau

SEQ ID NO: 791757 - RNA, 18 nt, Human
uagcaugcugguccuucc

SEQ ID NO: 791758 - RNA, 19 nt, Human
uaguauuuacaguggacag

SEQ ID NO: 791759 - RNA, 30 nt, Human
uauaaaauacaccagccaacaaagacauaa

SEQ ID NO: 791760 - RNA, 20 nt, Human
uauguuccagaggauuggaa

SEQ ID NO: 791761 - RNA, 21 nt, Human
ucaaagcacaugucuaccaaa

SEQ ID NO: 791762 - RNA, 19 nt, Human
ucaaaggccuaauaugaaa

SEQ ID NO: 791763 - RNA, 27 nt, Human
ucacugaauuccuaggaucuaggaauu

SEQ ID NO: 791764 - RNA, 20 nt, Human
ucaguggguuaucugauuug

SEQ ID NO: 791765 - RNA, 22 nt, Human
ucauuugccaucacagaauucc

SEQ ID NO: 791766 - RNA, 24 nt, Human
uccagccagauguuaaauuuaaaa

SEQ ID NO: 791767 - RNA, 25 nt, Human
ucucuagaugccuauacccuaaucu

SEQ ID NO: 791768 - RNA, 20 nt, Human
ucugcaaaccaaaccauugc

SEQ ID NO: 791769 - RNA, 21 nt, Human
ucugcaaaccaaaccauugcu

SEQ ID NO: 791770 - RNA, 21 nt, Human
ugaagccugcucuuagccaga

SEQ ID NO: 791771 - RNA, 22 nt, Human
ugaaggaaugaguauagaucug

SEQ ID NO: 791772 - RNA, 22 nt, Human
ugaagggagucacaaaguggcu

SEQ ID NO: 791773 - RNA, 23 nt, Human
ugaagggagucacaaaguggcuu

SEQ ID NO: 791774 - RNA, 18 nt, Human
ugacugaaagaaagcuga

SEQ ID NO: 791775 - RNA, 29 nt, Human
ugaggcaggaaguaaagacuguggauucc

SEQ ID NO: 791776 - RNA, 21 nt, Human
ugcaaaagaucaauaaagcag

SEQ ID NO: 791777 - RNA, 21 nt, Human
ugcagcaaaaccugccaacaa

SEQ ID NO: 791778 - RNA, 23 nt, Human
ugcgagcuuuaaaaagaaacaua

SEQ ID NO: 791779 - RNA, 20 nt, Human
ugcuccaaauacucuugcuu

SEQ ID NO: 791780 - RNA, 21 nt, Human
uggaacagacucaggaaggca

SEQ ID NO: 791781 - RNA, 24 nt, Human
uggcagaguaggcuuuaaaucugc

SEQ ID NO: 791782 - RNA, 22 nt, Human
ugggucaaagagaaccauucug

SEQ ID NO: 791783 - RNA, 24 nt, Human
uggguugacugaaagaaagcugag

SEQ ID NO: 791784 - RNA, 22 nt, Human
ugugcagcaaaaccugccaaca

SEQ ID NO: 791785 - RNA, 22 nt, Human
uguuggaguuugaggaugaggu

SEQ ID NO: 791786 - RNA, 21 nt, Human
uuacaucaaagcagacaacaa

SEQ ID NO: 791787 - RNA, 24 nt, Human
uuauggguugacugaaagaaagcu

SEQ ID NO: 791788 - RNA, 24 nt, Human
uuccugaggcagccccuuccugau

SEQ ID NO: 791789 - RNA, 19 nt, Human
uugcuccaaauacucuugc

SEQ ID NO: 791790 - RNA, 21 nt, Human
uuugggggacaugcaaaagau

SEQ ID NO: 791791 - RNA, 20 nt, Human
aaaaauaaaucacuuggcug

SEQ ID NO: 791792 - RNA, 20 nt, Human
aaaaauuuaaaaaccccacc

SEQ ID NO: 791793 - RNA, 21 nt, Human
aaaaccccaaccccuccucaa

SEQ ID NO: 791794 - RNA, 25 nt, Human
aaaccccccuuucaaaauagaaggc

SEQ ID NO: 791795 - RNA, 26 nt, Human
aaagcccagauucaggcagggacuga

SEQ ID NO: 791796 - RNA, 21 nt, Human
aaagggagagggggaaaggcc

SEQ ID NO: 791797 - RNA, 23 nt, Human
aacagaaagcauccauucucuca

SEQ ID NO: 791798 - RNA, 19 nt, Human
aaccccaaccccuccucaa

SEQ ID NO: 791799 - RNA, 25 nt, Human
aaccccaaccccuccucaaaacaaa

SEQ ID NO: 791800 - RNA, 22 nt, Human
aaccugccuccacaagguacug

SEQ ID NO: 791801 - RNA, 23 nt, Human
aagcagccccuguacucaagggc

SEQ ID NO: 791802 - RNA, 21 nt, Human
aagcauccauucucucagagc

SEQ ID NO: 791803 - RNA, 23 nt, Human
aagggagagggggaaaggccagg

SEQ ID NO: 791804 - RNA, 24 nt, Human
accagggcucccccaggugccuuu

SEQ ID NO: 791805 - RNA, 22 nt, Human
accauuuggugccgcaagggga

SEQ ID NO: 791806 - RNA, 23 nt, Human
acuaaauaguguugcccaaccca

SEQ ID NO: 791807 - RNA, 22 nt, Human
acugcuggagggcacaucagcc

SEQ ID NO: 791808 - RNA, 19 nt, Human
agaaagcagccccuguacu

SEQ ID NO: 791809 - RNA, 20 nt, Human
agacacccaaccccaugcag

SEQ ID NO: 791810 - RNA, 23 nt, Human
agagauggugaagaucuaggcag

SEQ ID NO: 791811 - RNA, 23 nt, Human
agagugggcucaagcagcuuggu

SEQ ID NO: 791812 - RNA, 18 nt, Human
agcauccauucucucaga

SEQ ID NO: 791813 - RNA, 19 nt, Human
agccagagccagccagcac

SEQ ID NO: 791814 - RNA, 23 nt, Human
agcccaagaaccugccuccacaa

SEQ ID NO: 791815 - RNA, 18 nt, Human
agcuagguagccccaggc

SEQ ID NO: 791816 - RNA, 20 nt, Human
aggaaaaugccugaggcagc

SEQ ID NO: 791817 - RNA, 18 nt, Human
aggaaggaaggaaaggga

SEQ ID NO: 791818 - RNA, 22 nt, Human
aggaaggaaggaaagggagagg

SEQ ID NO: 791819 - RNA, 23 nt, Human
aggaaggaaggaaagggagaggg

SEQ ID NO: 791820 - RNA, 21 nt, Human
aggaaggaaggaaggaaaggg

SEQ ID NO: 791821 - RNA, 21 nt, Human
aggcacccguccucaucccug

SEQ ID NO: 791822 - RNA, 23 nt, Human
aggcagaauucugacagcacagg

SEQ ID NO: 791823 - RNA, 18 nt, Human
aggcagacacccaacccc

SEQ ID NO: 791824 - RNA, 19 nt, Human
aggcagccagaggccacaa

SEQ ID NO: 791825 - RNA, 19 nt, Human
aggcaggaagaaagcagcc

SEQ ID NO: 791826 - RNA, 26 nt, Human
aggcaggcaggccuggacucucagca

SEQ ID NO: 791827 - RNA, 22 nt, Human
aggcaggcagugggaggugggg

SEQ ID NO: 791828 - RNA, 19 nt, Human
aggcagugggagguggggu

SEQ ID NO: 791829 - RNA, 20 nt, Human
agggagcugucuggcacagu

SEQ ID NO: 791830 - RNA, 23 nt, Human
aguguugcccaacccacagggau

SEQ ID NO: 791831 - RNA, 21 nt, Human
auaaaccaauguaaccaugcc

SEQ ID NO: 791832 - RNA, 22 nt, Human
auaaggcacagaaaauggggag

SEQ ID NO: 791833 - RNA, 21 nt, Human
aucaccagcaguugguccaau

SEQ ID NO: 791834 - RNA, 19 nt, Human
aucuaucugaaacagcugg

SEQ ID NO: 791835 - RNA, 24 nt, Human
auuuaaaaaccccaaccccuccuc

SEQ ID NO: 791836 - RNA, 22 nt, Human
auuuggguuuccuaggcugcag

SEQ ID NO: 791837 - RNA, 19 nt, Human
caaaauagaaggcgcuaca

SEQ ID NO: 791838 - RNA, 24 nt, Human
caaacccuauuuggguuuccuagg

SEQ ID NO: 791839 - RNA, 22 nt, Human
caacugggacagagagccccuc

SEQ ID NO: 791840 - RNA, 23 nt, Human
caagcgccggcucagcuccugcu

SEQ ID NO: 791841 - RNA, 18 nt, Human
caaggacccucuaccucu

SEQ ID NO: 791842 - RNA, 22 nt, Human
cacaaccuaagcucaggcaccc

SEQ ID NO: 791843 - RNA, 22 nt, Human
cacaccaaccauucccaugucc

SEQ ID NO: 791844 - RNA, 23 nt, Human
cacaggugggccaccccaagucc

SEQ ID NO: 791845 - RNA, 18 nt, Human
caccagggcucccccagg

SEQ ID NO: 791846 - RNA, 22 nt, Human
caccccaaguccuggcaaccau

SEQ ID NO: 791847 - RNA, 20 nt, Human
cagcacacagcugucccgag

SEQ ID NO: 791848 - RNA, 22 nt, Human
cagccugacacacagaagcucc

SEQ ID NO: 791849 - RNA, 22 nt, Human
cagcucagcacaaacucuccag

SEQ ID NO: 791850 - RNA, 20 nt, Human
cagcuccagcccuggggcca

SEQ ID NO: 791851 - RNA, 18 nt, Human
cagcugucccgagcccuc

SEQ ID NO: 791852 - RNA, 20 nt, Human
caggcgcugcaagcgccggc

SEQ ID NO: 791853 - RNA, 23 nt, Human
caggcugcggguucccagcuccc

SEQ ID NO: 791854 - RNA, 22 nt, Human
cauggguaccaagugcgagcca

SEQ ID NO: 791855 - RNA, 22 nt, Human
cauuccagcugcaaaagccugu

SEQ ID NO: 791856 - RNA, 22 nt, Human
ccaaggacccucuaccucugcu

SEQ ID NO: 791857 - RNA, 24 nt, Human
ccacacccacaaguuucaugcuaa

SEQ ID NO: 791858 - RNA, 24 nt, Human
ccagccacagacccaugaggaugg

SEQ ID NO: 791859 - RNA, 20 nt, Human
ccagcccuggggccagugga

SEQ ID NO: 791860 - RNA, 18 nt, Human
ccagcccuucaccagggc

SEQ ID NO: 791861 - RNA, 23 nt, Human
ccaggcagacacccaaccccaug

SEQ ID NO: 791862 - RNA, 20 nt, Human
ccaggugccuuucccacucu

SEQ ID NO: 791863 - RNA, 23 nt, Human
ccaguggagggccagccagagcc

SEQ ID NO: 791864 - RNA, 21 nt, Human
cccaaggcagaauucugacag

SEQ ID NO: 791865 - RNA, 18 nt, Human
cccagugaggccugguga

SEQ ID NO: 791866 - RNA, 20 nt, Human
cccagugaggccuggugagc

SEQ ID NO: 791867 - RNA, 21 nt, Human
ccccagggccggacaaaccaa

SEQ ID NO: 791868 - RNA, 23 nt, Human
ccccuccucaaaacaaaaccccc

SEQ ID NO: 791869 - RNA, 19 nt, Human
ccccugaagguagcagcuu

SEQ ID NO: 791870 - RNA, 28 nt, Human
cccgcccccagcgcccccgccggaggaa

SEQ ID NO: 791871 - RNA, 19 nt, Human
cccucuccacagcuugugg

SEQ ID NO: 791872 - RNA, 18 nt, Human
cccugacacaccccugaa

SEQ ID NO: 791873 - RNA, 21 nt, Human
cccuguacucaagggccuccu

SEQ ID NO: 791874 - RNA, 18 nt, Human
ccgcugccuggcugccac

SEQ ID NO: 791875 - RNA, 19 nt, Human
ccucaaaacaaaacccccc

SEQ ID NO: 791876 - RNA, 20 nt, Human
ccuccugggcccucucagcc

SEQ ID NO: 791877 - RNA, 23 nt, Human
ccugcacccagccacagacccau

SEQ ID NO: 791878 - RNA, 22 nt, Human
ccuggacucucagcaagagagu

SEQ ID NO: 791879 - RNA, 26 nt, Human
ccuuucccacucuaggcuccuggaag

SEQ ID NO: 791880 - RNA, 23 nt, Human
cgagccaggcagacacccaaccc

SEQ ID NO: 791881 - RNA, 21 nt, Human
cggacaaaccaagaaagccag

SEQ ID NO: 791882 - RNA, 22 nt, Human
cgggaccacuuuuacucugcca

SEQ ID NO: 791883 - RNA, 18 nt, Human
cuaucaccaacuuggaua

SEQ ID NO: 791884 - RNA, 22 nt, Human
cucaggcacccguccucauccc

SEQ ID NO: 791885 - RNA, 19 nt, Human
cucaggccacaccaaccau

SEQ ID NO: 791886 - RNA, 19 nt, Human
cucaggccacaccaaccau

SEQ ID NO: 791887 - RNA, 20 nt, Human
cuccagggcagccaguccuc

SEQ ID NO: 791888 - RNA, 22 nt, Human
cuccauccucccacacccacaa

SEQ ID NO: 791889 - RNA, 21 nt, Human
cucccacacccacaaguuuca

SEQ ID NO: 791890 - RNA, 19 nt, Human
cuccucaaaacaaaacccc

SEQ ID NO: 791891 - RNA, 18 nt, Human
cucuguguagacuuccuc

SEQ ID NO: 791892 - RNA, 21 nt, Human
cugacccuacucuuugcaugg

SEQ ID NO: 791893 - RNA, 24 nt, Human
cugaguugugagcaaccaaaggaa

SEQ ID NO: 791894 - RNA, 19 nt, Human
cuggccacaggucugggug

SEQ ID NO: 791895 - RNA, 19 nt, Human
cuuccuccugccuccaugg

SEQ ID NO: 791896 - RNA, 26 nt, Human
cuuuccuuuccugauuccccaauggu

SEQ ID NO: 791897 - RNA, 18 nt, Human
gaccacuuuuacucugcc

SEQ ID NO: 791898 - RNA, 20 nt, Human
gagcccuccugggcccucuc

SEQ ID NO: 791899 - RNA, 21 nt, Human
gaggaaaaugccugaggcagc

SEQ ID NO: 791900 - RNA, 19 nt, Human
gcagacacccaaccccaug

SEQ ID NO: 791901 - RNA, 19 nt, Human
gcagcccaagaaccugccu

SEQ ID NO: 791902 - RNA, 19 nt, Human
gccaagucacuuaaucucc

SEQ ID NO: 791903 - RNA, 23 nt, Human
gccagccagagccagccagcaca

SEQ ID NO: 791904 - RNA, 23 nt, Human
gccagccccaaggaccaagaaaa

SEQ ID NO: 791905 - RNA, 26 nt, Human
gccccaaggaccaagaaaaagcagca

SEQ ID NO: 791906 - RNA, 21 nt, Human
ggaaggagugaccauuuggug

SEQ ID NO: 791907 - RNA, 21 nt, Human
ggacucaaagaaaacauggug

SEQ ID NO: 791908 - RNA, 20 nt, Human
ggagagggggaaaggccagg

SEQ ID NO: 791909 - RNA, 19 nt, Human
ggaggaguccccaggcugc

SEQ ID NO: 791910 - RNA, 20 nt, Human
ggaggaguccccaggcugcg

SEQ ID NO: 791911 - RNA, 19 nt, Human
ggcaggaggaguggacucu

SEQ ID NO: 791912 - RNA, 18 nt, Human
ggccaguggagggccagc

SEQ ID NO: 791913 - RNA, 25 nt, Human
ggcccugggccaaguuaucacuucu

SEQ ID NO: 791914 - RNA, 20 nt, Human
ggcuggcaggcaggcaggcc

SEQ ID NO: 791915 - RNA, 22 nt, Human
gggagagagagagagacugagc

SEQ ID NO: 791916 - RNA, 21 nt, Human
gggagcuagguagccccaggc

SEQ ID NO: 791917 - RNA, 18 nt, Human
gggcccucucagccacuc

SEQ ID NO: 791918 - RNA, 21 nt, Human
gggcccuggccccaucaccag

SEQ ID NO: 791919 - RNA, 26 nt, Human
gggcucccccaggugccuuucccacu

SEQ ID NO: 791920 - RNA, 20 nt, Human
gggggagauguucacugaac

SEQ ID NO: 791921 - RNA, 25 nt, Human
ggugagcaauggguaucucaggcca

SEQ ID NO: 791922 - RNA, 21 nt, Human
guaguggacgcggagguugcc

SEQ ID NO: 791923 - RNA, 20 nt, Human
gugacuuuagccaagucacu

SEQ ID NO: 791924 - RNA, 19 nt, Human
uaaaaaccccaaccccucc

SEQ ID NO: 791925 - RNA, 20 nt, Human
uaaaaaccccaaccccuccu

SEQ ID NO: 791926 - RNA, 21 nt, Human
uaaauaguguugcccaaccca

SEQ ID NO: 791927 - RNA, 20 nt, Human
uaaauuagcagaaaccaggg

SEQ ID NO: 791928 - RNA, 20 nt, Human
uaagcuaucaccaacuugga

SEQ ID NO: 791929 - RNA, 19 nt, Human
uacagacaggacgccuccu

SEQ ID NO: 791930 - RNA, 19 nt, Human
uacuaaugcaggaaaaccc

SEQ ID NO: 791931 - RNA, 21 nt, Human
uacuguguuacaggccgcugc

SEQ ID NO: 791932 - RNA, 22 nt, Human
uagaaggcgcuacaugagagua

SEQ ID NO: 791933 - RNA, 21 nt, Human
uagggcuccgcugccuggcug

SEQ ID NO: 791934 - RNA, 23 nt, Human
uauauuuuuauauauauauauau

SEQ ID NO: 791935 - RNA, 18 nt, Human
uaucacuucucuggaccc

SEQ ID NO: 791936 - RNA, 19 nt, Human
ucaaagaaaacauggugcc

SEQ ID NO: 791937 - RNA, 19 nt, Human
ucagcuccugcuccccagg

SEQ ID NO: 791938 - RNA, 19 nt, Human
ucagguccagcccuucacc

SEQ ID NO: 791939 - RNA, 23 nt, Human
ucccaaaggugagcugcccaacu

SEQ ID NO: 791940 - RNA, 21 nt, Human
uccccaggcugcggguuccca

SEQ ID NO: 791941 - RNA, 25 nt, Human
uccccaggcugcggguucccagcuc

SEQ ID NO: 791942 - RNA, 20 nt, Human
uccccaggggacggcagccc

SEQ ID NO: 791943 - RNA, 21 nt, Human
uccccaggggacggcagcccg

SEQ ID NO: 791944 - RNA, 24 nt, Human
uccccaggggacggcagcccgccc

SEQ ID NO: 791945 - RNA, 20 nt, Human
ucccgagcccuccugggccc

SEQ ID NO: 791946 - RNA, 21 nt, Human
ucccgagcccuccugggcccu

SEQ ID NO: 791947 - RNA, 20 nt, Human
ucccuuuccuccuccagggc

SEQ ID NO: 791948 - RNA, 21 nt, Human
uccuaggcugcagcucggccu

SEQ ID NO: 791949 - RNA, 26 nt, Human
uccugggccuguuuccuuauuuguag

SEQ ID NO: 791950 - RNA, 18 nt, Human
ucgcugccgccaucuugg

SEQ ID NO: 791951 - RNA, 23 nt, Human
ucuaggcuccuggaagcaggcug

SEQ ID NO: 791952 - RNA, 18 nt, Human
ucuaguagggcuccgcug

SEQ ID NO: 791953 - RNA, 22 nt, Human
ucuccauccucccacacccaca

SEQ ID NO: 791954 - RNA, 19 nt, Human
ucucucagagcugugcaga

SEQ ID NO: 791955 - RNA, 18 nt, Human
ucucuccauccucccaca

SEQ ID NO: 791956 - RNA, 19 nt, Human
ucugccgucgcugccgcca

SEQ ID NO: 791957 - RNA, 23 nt, Human
ucugccgucgcugccgccaucuu

SEQ ID NO: 791958 - RNA, 22 nt, Human
ucuggccagcaaauacucccaa

SEQ ID NO: 791959 - RNA, 19 nt, Human
ucuucuuuuuuaaugaguu

SEQ ID NO: 791960 - RNA, 22 nt, Human
ugacacaccccugaagguagca

SEQ ID NO: 791961 - RNA, 20 nt, Human
ugaccgcgggauacaggcgc

SEQ ID NO: 791962 - RNA, 18 nt, Human
ugacucaaaaaaggggga

SEQ ID NO: 791963 - RNA, 23 nt, Human
ugacucaaaaaagggggagcaag

SEQ ID NO: 791964 - RNA, 21 nt, Human
ugagcgggguggugggcagag

SEQ ID NO: 791965 - RNA, 24 nt, Human
ugccgucgcugccgccaucuugga

SEQ ID NO: 791966 - RNA, 18 nt, Human
ugcgagccaggcagacac

SEQ ID NO: 791967 - RNA, 21 nt, Human
uggacucaaagaaaacauggu

SEQ ID NO: 791968 - RNA, 22 nt, Human
uggagggccagccagagccagc

SEQ ID NO: 791969 - RNA, 18 nt, Human
uggcacaguggcagugaa

SEQ ID NO: 791970 - RNA, 18 nt, Human
uggcacgcacugaggccg

SEQ ID NO: 791971 - RNA, 18 nt, Human
uggcaggcaggcaggccu

SEQ ID NO: 791972 - RNA, 20 nt, Human
uggccugcacccagccacag

SEQ ID NO: 791973 - RNA, 22 nt, Human
uggcuggcaggcaggcaggccu

SEQ ID NO: 791974 - RNA, 19 nt, Human
ugggaaggcgcuagguggc

SEQ ID NO: 791975 - RNA, 18 nt, Human
ugggacagagagccccuc

SEQ ID NO: 791976 - RNA, 21 nt, Human
ugggagagaccaauguaguug

SEQ ID NO: 791977 - RNA, 20 nt, Human
ugggaugcuauaaaccaaug

SEQ ID NO: 791978 - RNA, 21 nt, Human
ugggguggguggcacgcacug

SEQ ID NO: 791979 - RNA, 19 nt, Human
ugggugcaugagacuggca

SEQ ID NO: 791980 - RNA, 19 nt, Human
uggguuuccuaggcugcag

SEQ ID NO: 791981 - RNA, 22 nt, Human
ugguagcgggaccacuuuuacu

SEQ ID NO: 791982 - RNA, 21 nt, Human
ugucccgagcccuccugggcc

SEQ ID NO: 791983 - RNA, 18 nt, Human
uguguauuuuaauaaaaa

SEQ ID NO: 791984 - RNA, 21 nt, Human
uguugcccagcugugggccca

SEQ ID NO: 791985 - RNA, 24 nt, Human
uuagaguaaauguauuauuuggcc

SEQ ID NO: 791986 - RNA, 19 nt, Human
uucacugaaccccauucca

SEQ ID NO: 791987 - RNA, 22 nt, Human
uuccucccuuuccuccuccagg

SEQ ID NO: 791988 - RNA, 18 nt, Human
uugaaaagggaggaaagg

SEQ ID NO: 791989 - RNA, 19 nt, Human
uugcaugggcggcuugugc

SEQ ID NO: 791990 - RNA, 19 nt, Human
uuggcccucuccacagcuu

SEQ ID NO: 791991 - RNA, 26 nt, Human
uuuaaaaaccccaaccccuccucaaa

SEQ ID NO: 791992 - RNA, 21 nt, Human
uuucccaaggcagaauucuga

SEQ ID NO: 791993 - RNA, 22 nt, Human
uuugcugacaaucuucacuuca

SEQ ID NO: 791994 - RNA, 20 nt, Human
uuuggcccucuccacagcuu

SEQ ID NO: 791995 - RNA, 18 nt, Human
uuuuauauauauauauau

SEQ ID NO: 791996 - RNA, 24 nt, Human
aaaaaaaggaaagaaagaaaggga

SEQ ID NO: 791997 - RNA, 19 nt, Human
aaaacaggaaaaucugagc

SEQ ID NO: 791998 - RNA, 19 nt, Human
aaacuccccccaccccaac

SEQ ID NO: 791999 - RNA, 20 nt, Human
aaagggaggaggggccgggc

SEQ ID NO: 792000 - RNA, 19 nt, Human
aacauggugaaaccccguc

SEQ ID NO: 792001 - RNA, 20 nt, Human
aacauggugaaaccccgucu

SEQ ID NO: 792002 - RNA, 21 nt, Human
aacauggugaaaccccgucuc

SEQ ID NO: 792003 - RNA, 24 nt, Human
aaccaggaaagggguucaggcucc

SEQ ID NO: 792004 - RNA, 19 nt, Human
aaccccuucuccagacccg

SEQ ID NO: 792005 - RNA, 19 nt, Human
aacccgguuuccgcccccc

SEQ ID NO: 792006 - RNA, 24 nt, Human
aacgcauucccucccuaccccccg

SEQ ID NO: 792007 - RNA, 21 nt, Human
aacuccccccaccccaacccc

SEQ ID NO: 792008 - RNA, 20 nt, Human
aagcaagauacacgcaugug

SEQ ID NO: 792009 - RNA, 23 nt, Human
aagcagacacacggucaacccca

SEQ ID NO: 792010 - RNA, 24 nt, Human
aagcagacacacggucaaccccac

SEQ ID NO: 792011 - RNA, 19 nt, Human
aagcaggggcggguggggc

SEQ ID NO: 792012 - RNA, 24 nt, Human
aagcaggggcggguggggcggggc

SEQ ID NO: 792013 - RNA, 21 nt, Human
aagccccacagccaucacccc

SEQ ID NO: 792014 - RNA, 21 nt, Human
aaggaugguggcaaaacgucc

SEQ ID NO: 792015 - RNA, 18 nt, Human
aaggggguguuagcacca

SEQ ID NO: 792016 - RNA, 19 nt, Human
aauaaaaaaaaaggaaaga

SEQ ID NO: 792017 - RNA, 24 nt, Human
aaucgcuugaacccgggaggcgga

SEQ ID NO: 792018 - RNA, 20 nt, Human
acacggucaaccccacacgc

SEQ ID NO: 792019 - RNA, 22 nt, Human
acagaccaagacuccgucaaaa

SEQ ID NO: 792020 - RNA, 18 nt, Human
acagggcacgcuugucag

SEQ ID NO: 792021 - RNA, 20 nt, Human
accaaguccacaggcucagc

SEQ ID NO: 792022 - RNA, 22 nt, Human
accccacagcacuccacuggcu

SEQ ID NO: 792023 - RNA, 18 nt, Human
accccgucucuacuaaaa

SEQ ID NO: 792024 - RNA, 21 nt, Human
accggccauaaccaggaaagg

SEQ ID NO: 792025 - RNA, 20 nt, Human
acuccccccaccccaacccc

SEQ ID NO: 792026 - RNA, 23 nt, Human
acugcacuccagccuggcgacag

SEQ ID NO: 792027 - RNA, 19 nt, Human
agaaagaaagggaggagga

SEQ ID NO: 792028 - RNA, 22 nt, Human
agaaagggaggaggaggggucg

SEQ ID NO: 792029 - RNA, 24 nt, Human
agaaagggaggaggaggggucgag

SEQ ID NO: 792030 - RNA, 22 nt, Human
agaaucgcuugaacccgggagg

SEQ ID NO: 792031 - RNA, 22 nt, Human
agaccaagacuccgucaaaaaa

SEQ ID NO: 792032 - RNA, 19 nt, Human
agaccuccggaaagcccaa

SEQ ID NO: 792033 - RNA, 23 nt, Human
agagauccagaccauccuggcca

SEQ ID NO: 792034 - RNA, 19 nt, Human
agauacacgcauguguugu

SEQ ID NO: 792035 - RNA, 25 nt, Human
agccgcgguggccccucaccgcccc

SEQ ID NO: 792036 - RNA, 18 nt, Human
agccuggcgacagaccaa

SEQ ID NO: 792037 - RNA, 23 nt, Human
agccuggcgacagaccaagacuc

SEQ ID NO: 792038 - RNA, 21 nt, Human
agcuacuaggcaggcugaggc

SEQ ID NO: 792039 - RNA, 23 nt, Human
agcuggucgugguggcgcgcgcc

SEQ ID NO: 792040 - RNA, 23 nt, Human
aggaaaaucugagcgcggagcug

SEQ ID NO: 792041 - RNA, 18 nt, Human
aggaggaggggucgaggu

SEQ ID NO: 792042 - RNA, 21 nt, Human
aggcagauggaucaccugagg

SEQ ID NO: 792043 - RNA, 22 nt, Human
aggcagauggaucaccugaggu

SEQ ID NO: 792044 - RNA, 26 nt, Human
aggcagauggaucaccugaggucaag

SEQ ID NO: 792045 - RNA, 24 nt, Human
aggcaggagaaucgcuugaacccg

SEQ ID NO: 792046 - RNA, 21 nt, Human
aggccgaggcagauggaucac

SEQ ID NO: 792047 - RNA, 18 nt, Human
aggcgccccaggcaccgg

SEQ ID NO: 792048 - RNA, 21 nt, Human
aggcggaagaugcagugagcc

SEQ ID NO: 792049 - RNA, 24 nt, Human
aggcggaagaugcagugagccgag

SEQ ID NO: 792050 - RNA, 18 nt, Human
aggcggaggcgcggcgau

SEQ ID NO: 792051 - RNA, 19 nt, Human
aggcucagccgccaagggg

SEQ ID NO: 792052 - RNA, 20 nt, Human
aggcugaggcaggagaaucg

SEQ ID NO: 792053 - RNA, 24 nt, Human
aggcugaggcaggagaaucgcuug

SEQ ID NO: 792054 - RNA, 21 nt, Human
agggagaauggcagccguggg

SEQ ID NO: 792055 - RNA, 20 nt, Human
agggaggaggaggggucgag

SEQ ID NO: 792056 - RNA, 22 nt, Human
agggaggaggaggggucgaggu

SEQ ID NO: 792057 - RNA, 19 nt, Human
aggggauucagcccgcagg

SEQ ID NO: 792058 - RNA, 19 nt, Human
aggggcggguggggcgggg

SEQ ID NO: 792059 - RNA, 19 nt, Human
agucgccgcgccgcgcccc

SEQ ID NO: 792060 - RNA, 21 nt, Human
auccccacccauucuguagcc

SEQ ID NO: 792061 - RNA, 24 nt, Human
auccgcccccccgcccgccccccu

SEQ ID NO: 792062 - RNA, 21 nt, Human
auccuggccaacauggugaaa

SEQ ID NO: 792063 - RNA, 24 nt, Human
aucgcgccacugcacuccagccug

SEQ ID NO: 792064 - RNA, 22 nt, Human
augcagugagccgagaucgcgc

SEQ ID NO: 792065 - RNA, 18 nt, Human
caaaauggaaaaaagaac

SEQ ID NO: 792066 - RNA, 21 nt, Human
caaaauggaaaaaagaacccc

SEQ ID NO: 792067 - RNA, 24 nt, Human
caacauggugaaaccccgucucua

SEQ ID NO: 792068 - RNA, 21 nt, Human
caagcaagauacacgcaugug

SEQ ID NO: 792069 - RNA, 22 nt, Human
caagcagacacacggucaaccc

SEQ ID NO: 792070 - RNA, 21 nt, Human
caagccccacagccaucaccc

SEQ ID NO: 792071 - RNA, 20 nt, Human
cacacccucacacaacagcc

SEQ ID NO: 792072 - RNA, 22 nt, Human
cacagaccuccggaaagcccaa

SEQ ID NO: 792073 - RNA, 19 nt, Human
cacagacuuuucuccuaca

SEQ ID NO: 792074 - RNA, 25 nt, Human
caccaagccccacagccaucacccc

SEQ ID NO: 792075 - RNA, 22 nt, Human
caccgccccgccgucucacacc

SEQ ID NO: 792076 - RNA, 19 nt, Human
caccgcguuaccgcgaggu

SEQ ID NO: 792077 - RNA, 20 nt, Human
cacgcacuaucccccaagcc

SEQ ID NO: 792078 - RNA, 24 nt, Human
cacgccuguaaucccagcacuuug

SEQ ID NO: 792079 - RNA, 23 nt, Human
cacgcgccugucccgccagcgcc

SEQ ID NO: 792080 - RNA, 26 nt, Human
cacuacacggucacacuucacaggac

SEQ ID NO: 792081 - RNA, 20 nt, Human
cacuccacuggccuuggcug

SEQ ID NO: 792082 - RNA, 18 nt, Human
cacugagcucucugggag

SEQ ID NO: 792083 - RNA, 18 nt, Human
cacugcacuccagccugg

SEQ ID NO: 792084 - RNA, 18 nt, Human
cacugcacuccagccugg

SEQ ID NO: 792085 - RNA, 22 nt, Human
cacugcacuccagccuggcgac

SEQ ID NO: 792086 - RNA, 23 nt, Human
cacugcacuccagccuggcgaca

SEQ ID NO: 792087 - RNA, 23 nt, Human
cacugcacuccagccuggcgaca

SEQ ID NO: 792088 - RNA, 24 nt, Human
cagacacacggucaaccccacacg

SEQ ID NO: 792089 - RNA, 21 nt, Human
cagaccaagacuccgucaaaa

SEQ ID NO: 792090 - RNA, 25 nt, Human
cagaccuccggaaagcccaacacac

SEQ ID NO: 792091 - RNA, 24 nt, Human
cagauggaucaccugaggucaaga

SEQ ID NO: 792092 - RNA, 24 nt, Human
cagcacuuugagaggccgaggcag

SEQ ID NO: 792093 - RNA, 22 nt, Human
cagccguggguagcagggacug

SEQ ID NO: 792094 - RNA, 19 nt, Human
cagcuaccggccauaacca

SEQ ID NO: 792095 - RNA, 18 nt, Human
ccaacacacggacaacga

SEQ ID NO: 792096 - RNA, 18 nt, Human
ccacagcacuccacuggc

SEQ ID NO: 792097 - RNA, 19 nt, Human
ccacugcacuccagccugg

SEQ ID NO: 792098 - RNA, 19 nt, Human
ccacugcacuccagccugg

SEQ ID NO: 792099 - RNA, 20 nt, Human
ccacugcacuccagccuggc

SEQ ID NO: 792100 - RNA, 23 nt, Human
ccacugcacuccagccuggcgac

SEQ ID NO: 792101 - RNA, 18 nt, Human
ccagaagugggguggggg

SEQ ID NO: 792102 - RNA, 24 nt, Human
ccagaccauccuggccaacauggu

SEQ ID NO: 792103 - RNA, 22 nt, Human
ccagacccggcguggcagagca

SEQ ID NO: 792104 - RNA, 20 nt, Human
ccagaggcugggaagggggu

SEQ ID NO: 792105 - RNA, 20 nt, Human
ccauaucuucacagccucuc

SEQ ID NO: 792106 - RNA, 25 nt, Human
cccacacgcacuaucccccaagccg

SEQ ID NO: 792107 - RNA, 27 nt, Human
cccacacgcacuaucccccaagccgcg

SEQ ID NO: 792108 - RNA, 20 nt, Human
cccacagcacuccacuggcc

SEQ ID NO: 792109 - RNA, 25 nt, Human
cccauaucugccccccauaucuuca

SEQ ID NO: 792110 - RNA, 19 nt, Human
ccccaagccgcgguggccc

SEQ ID NO: 792111 - RNA, 22 nt, Human
ccccaagccgcgguggccccuc

SEQ ID NO: 792112 - RNA, 23 nt, Human
ccccaagccgcgguggccccuca

SEQ ID NO: 792113 - RNA, 21 nt, Human
ccccacagccaucaccccggg

SEQ ID NO: 792114 - RNA, 20 nt, Human
ccccaccccaaccccgacgc

SEQ ID NO: 792115 - RNA, 22 nt, Human
ccccaggcaccgggcuggacuc

SEQ ID NO: 792116 - RNA, 20 nt, Human
ccccccaccccaaccccgac

SEQ ID NO: 792117 - RNA, 24 nt, Human
ccccccgacacacacacucgauuu

SEQ ID NO: 792118 - RNA, 27 nt, Human
ccccccgacacacacacucgauuuucc

SEQ ID NO: 792119 - RNA, 20 nt, Human
ccccgcccauccgccccccc

SEQ ID NO: 792120 - RNA, 21 nt, Human
ccccgccgucucacacccuca

SEQ ID NO: 792121 - RNA, 18 nt, Human
ccccuucccucccucccc

SEQ ID NO: 792122 - RNA, 20 nt, Human
ccccuucccucccuccccgc

SEQ ID NO: 792123 - RNA, 26 nt, Human
cccgagucgccgcgccgcgccccucc

SEQ ID NO: 792124 - RNA, 23 nt, Human
cccgcccauccgcccccccgccc

SEQ ID NO: 792125 - RNA, 21 nt, Human
cccgcgaccaaguccacaggc

SEQ ID NO: 792126 - RNA, 21 nt, Human
cccuaccccccgacacacaca

SEQ ID NO: 792127 - RNA, 22 nt, Human
ccgagucgccgcgccgcgcccc

SEQ ID NO: 792128 - RNA, 23 nt, Human
ccgccccgccgucucacacccuc

SEQ ID NO: 792129 - RNA, 23 nt, Human
ccuagcucugaugaaaccccgac

SEQ ID NO: 792130 - RNA, 22 nt, Human
ccucacgcgccugucccgccag

SEQ ID NO: 792131 - RNA, 22 nt, Human
ccuggccaacauggugaaaccc

SEQ ID NO: 792132 - RNA, 23 nt, Human
ccuggccaacauggugaaacccc

SEQ ID NO: 792133 - RNA, 24 nt, Human
ccuggccaacauggugaaaccccg

SEQ ID NO: 792134 - RNA, 21 nt, Human
ccuguagucccagcuacuagg

SEQ ID NO: 792135 - RNA, 24 nt, Human
ccuguagucccagcuacuaggcag

SEQ ID NO: 792136 - RNA, 19 nt, Human
ccuuggcuggcccccgaaa

SEQ ID NO: 792137 - RNA, 19 nt, Human
cgagacgcgaggacggagg

SEQ ID NO: 792138 - RNA, 20 nt, Human
cgaggcagauggaucaccug

SEQ ID NO: 792139 - RNA, 24 nt, Human
cgaggcagauggaucaccugaggu

SEQ ID NO: 792140 - RNA, 26 nt, Human
cgaggcagauggaucaccugagguca

SEQ ID NO: 792141 - RNA, 27 nt, Human
cgaggugggaccccacagcacuccacu

SEQ ID NO: 792142 - RNA, 21 nt, Human
cgcacuaucccccaagccgcg

SEQ ID NO: 792143 - RNA, 20 nt, Human
cgcagaauccccacccauuc

SEQ ID NO: 792144 - RNA, 25 nt, Human
cgccacugcacuccagccuggcgac

SEQ ID NO: 792145 - RNA, 18 nt, Human
cgccuguaaucccagcac

SEQ ID NO: 792146 - RNA, 23 nt, Human
cgccuguagucccagcuacuagg

SEQ ID NO: 792147 - RNA, 18 nt, Human
cgcgacgggaauggaggg

SEQ ID NO: 792148 - RNA, 19 nt, Human
cgcgacgggaauggaggga

SEQ ID NO: 792149 - RNA, 21 nt, Human
cgcgccccuccccuucccucc

SEQ ID NO: 792150 - RNA, 23 nt, Human
cgcgccgcgccccuccccuuccc

SEQ ID NO: 792151 - RNA, 19 nt, Human
cgcuguugggcgcacagac

SEQ ID NO: 792152 - RNA, 23 nt, Human
cggcgcuguugggcgcacagacc

SEQ ID NO: 792153 - RNA, 24 nt, Human
cggcgcuuuaaguuaggagagaga

SEQ ID NO: 792154 - RNA, 18 nt, Human
cgggagcggcgcuguugg

SEQ ID NO: 792155 - RNA, 18 nt, Human
cuaaaacccgguuuccgc

SEQ ID NO: 792156 - RNA, 18 nt, Human
cuacacgccgggcaaaca

SEQ ID NO: 792157 - RNA, 22 nt, Human
cucacgccuguaaucccagcac

SEQ ID NO: 792158 - RNA, 24 nt, Human
cucacgccuguaaucccagcacuu

SEQ ID NO: 792159 - RNA, 21 nt, Human
cuccccgcccauccgcccccc

SEQ ID NO: 792160 - RNA, 24 nt, Human
cugaaacuccccccaccccaaccc

SEQ ID NO: 792161 - RNA, 19 nt, Human
cugcagcagacaguagcac

SEQ ID NO: 792162 - RNA, 23 nt, Human
cugcccacguuagcccuggagac

SEQ ID NO: 792163 - RNA, 22 nt, Human
cuggcccccgaaaccaccgcgu

SEQ ID NO: 792164 - RNA, 22 nt, Human
cuugugcugcgcuucgcggaga

SEQ ID NO: 792165 - RNA, 24 nt, Human
cuuucuuucaaaauggaaaaaaga

SEQ ID NO: 792166 - RNA, 22 nt, Human
gaaaacaacgaaaacaggaaaa

SEQ ID NO: 792167 - RNA, 25 nt, Human
gaaaacgcauucccucccuaccccc

SEQ ID NO: 792168 - RNA, 22 nt, Human
gaaacuccccccaccccaaccc

SEQ ID NO: 792169 - RNA, 21 nt, Human
gaaaugucgcugucuuugaaa

SEQ ID NO: 792170 - RNA, 23 nt, Human
gaaauuggcccgcgaccaagucc

SEQ ID NO: 792171 - RNA, 18 nt, Human
gaacccgggaggcggaag

SEQ ID NO: 792172 - RNA, 21 nt, Human
gaaggggguguuagcaccaga

SEQ ID NO: 792173 - RNA, 23 nt, Human
gacacacacacucgauuuuccca

SEQ ID NO: 792174 - RNA, 22 nt, Human
gacugcugcucccaggcacccu

SEQ ID NO: 792175 - RNA, 23 nt, Human
gagaucgcgccacugcacuccag

SEQ ID NO: 792176 - RNA, 23 nt, Human
gagcugaaaggcgccccaggcac

SEQ ID NO: 792177 - RNA, 18 nt, Human
gaggacagaaggauuugg

SEQ ID NO: 792178 - RNA, 23 nt, Human
gaggaggggccgggcgcggugcc

SEQ ID NO: 792179 - RNA, 20 nt, Human
gaucaccugaggucaagaga

SEQ ID NO: 792180 - RNA, 19 nt, Human
gcaagauacacgcaugugu

SEQ ID NO: 792181 - RNA, 27 nt, Human
gcagaauccccacccauucuguagcca

SEQ ID NO: 792182 - RNA, 20 nt, Human
gcagacaguagcacagacaa

SEQ ID NO: 792183 - RNA, 19 nt, Human
gcagcagacaguagcacag

SEQ ID NO: 792184 - RNA, 23 nt, Human
gcagcagacaguagcacagacaa

SEQ ID NO: 792185 - RNA, 24 nt, Human
gccaacauggugaaaccccgucuc

SEQ ID NO: 792186 - RNA, 19 nt, Human
gccccaggcaccgggcugg

SEQ ID NO: 792187 - RNA, 20 nt, Human
gccccgccgucucacacccu

SEQ ID NO: 792188 - RNA, 20 nt, Human
gccgagaucgcgccacugca

SEQ ID NO: 792189 - RNA, 21 nt, Human
gccucacgccuguaaucccag

SEQ ID NO: 792190 - RNA, 22 nt, Human
gccuguagucccagcuacuagg

SEQ ID NO: 792191 - RNA, 19 nt, Human
gcgccccuccccuucccuc

SEQ ID NO: 792192 - RNA, 20 nt, Human
gcgccugucccgccagcgcc

SEQ ID NO: 792193 - RNA, 22 nt, Human
gcugcgggguggauuucgcaga

SEQ ID NO: 792194 - RNA, 23 nt, Human
gcuugucagggacuacacgccgg

SEQ ID NO: 792195 - RNA, 19 nt, Human
ggaaagcccaacacacgga

SEQ ID NO: 792196 - RNA, 24 nt, Human
ggaagaugcagugagccgagaucg

SEQ ID NO: 792197 - RNA, 18 nt, Human
ggacaacgaaauuggccc

SEQ ID NO: 792198 - RNA, 24 nt, Human
ggacacagacuuuucuccuacagg

SEQ ID NO: 792199 - RNA, 22 nt, Human
ggagagggcugaucccgaggac

SEQ ID NO: 792200 - RNA, 21 nt, Human
ggaggaggaggggucgaggug

SEQ ID NO: 792201 - RNA, 22 nt, Human
ggaggaggggccgggcgcggug

SEQ ID NO: 792202 - RNA, 19 nt, Human
ggaggucgggaaugggcgg

SEQ ID NO: 792203 - RNA, 23 nt, Human
ggcgcggugccucacgccuguaa

SEQ ID NO: 792204 - RNA, 24 nt, Human
ggcgcuuuccagcuagggucuggg

SEQ ID NO: 792205 - RNA, 21 nt, Human
ggcggaagaugcagugagccg

SEQ ID NO: 792206 - RNA, 19 nt, Human
gggaggaggaggggucgag

SEQ ID NO: 792207 - RNA, 20 nt, Human
gggaggaggaggggucgagg

SEQ ID NO: 792208 - RNA, 20 nt, Human
gggcacgggcuccggggggc

SEQ ID NO: 792209 - RNA, 20 nt, Human
ggggaggaguaggugaaggu

SEQ ID NO: 792210 - RNA, 18 nt, Human
ggggccgggcgcggugcc

SEQ ID NO: 792211 - RNA, 18 nt, Human
ggggcggguggggcgggg

SEQ ID NO: 792212 - RNA, 23 nt, Human
gggucugggucggguggagccgc

SEQ ID NO: 792213 - RNA, 24 nt, Human
ggugccucacgccuguaaucccag

SEQ ID NO: 792214 - RNA, 19 nt, Human
gucacacuucacaggacac

SEQ ID NO: 792215 - RNA, 21 nt, Human
gucggguggagccgcgggagc

SEQ ID NO: 792216 - RNA, 23 nt, Human
guggcgcgcgccuguagucccag

SEQ ID NO: 792217 - RNA, 25 nt, Human
uaaaaaaaaaggaaagaaagaaaaa

SEQ ID NO: 792218 - RNA, 20 nt, Human
uaagauaaacacugugcuug

SEQ ID NO: 792219 - RNA, 22 nt, Human
uaagauaaacacugugcuuggc

SEQ ID NO: 792220 - RNA, 21 nt, Human
uaccgcgagguuuccaaaguc

SEQ ID NO: 792221 - RNA, 19 nt, Human
uacuaggcaggcugaggca

SEQ ID NO: 792222 - RNA, 26 nt, Human
uagaagaaauuagcuggucguggugg

SEQ ID NO: 792223 - RNA, 18 nt, Human
uagcucugaugaaacccc

SEQ ID NO: 792224 - RNA, 21 nt, Human
uaguaagggggaggaguaggu

SEQ ID NO: 792225 - RNA, 18 nt, Human
uaucgcccaccgucugcg

SEQ ID NO: 792226 - RNA, 20 nt, Human
ucaaccccacacgcacuauc

SEQ ID NO: 792227 - RNA, 23 nt, Human
ucaaccccacacgcacuaucccc

SEQ ID NO: 792228 - RNA, 23 nt, Human
ucaagguuggggaguaguaaggg

SEQ ID NO: 792229 - RNA, 18 nt, Human
ucacacccucacacaaca

SEQ ID NO: 792230 - RNA, 21 nt, Human
uccaaagucuucgcucguuuc

SEQ ID NO: 792231 - RNA, 18 nt, Human
uccacaggcucagccgcc

SEQ ID NO: 792232 - RNA, 18 nt, Human
uccacuggccuuggcugg

SEQ ID NO: 792233 - RNA, 21 nt, Human
ucccagaggcugggaaggggg

SEQ ID NO: 792234 - RNA, 21 nt, Human
ucccaggcccgcgcuugugcu

SEQ ID NO: 792235 - RNA, 19 nt, Human
ucccauaucugccccccau

SEQ ID NO: 792236 - RNA, 22 nt, Human
ucccccaagccgcgguggcccc

SEQ ID NO: 792237 - RNA, 24 nt, Human
ucccccaagccgcgguggccccuc

SEQ ID NO: 792238 - RNA, 18 nt, Human
uccccccaccccaacccc

SEQ ID NO: 792239 - RNA, 21 nt, Human
ucccgaggacugaaacucccc

SEQ ID NO: 792240 - RNA, 26 nt, Human
ucccgaggacugaaacuccccccacc

SEQ ID NO: 792241 - RNA, 23 nt, Human
ucgaggcauuuggcuaaaacccg

SEQ ID NO: 792242 - RNA, 23 nt, Human
ucgcgccacugcacuccagccug

SEQ ID NO: 792243 - RNA, 20 nt, Human
ucgcucccuagcucugauga

SEQ ID NO: 792244 - RNA, 18 nt, Human
ucgcuugaacccgggagg

SEQ ID NO: 792245 - RNA, 19 nt, Human
ucguuuccucuggcuccag

SEQ ID NO: 792246 - RNA, 24 nt, Human
ucucacacccucacacaacagccg

SEQ ID NO: 792247 - RNA, 24 nt, Human
ucucuacuaaaaauagaagaaauu

SEQ ID NO: 792248 - RNA, 24 nt, Human
ugaaacuccccccaccccaacccc

SEQ ID NO: 792249 - RNA, 26 nt, Human
ugaaacuccccccaccccaaccccga

SEQ ID NO: 792250 - RNA, 18 nt, Human
ugaaagggaggaggggcc

SEQ ID NO: 792251 - RNA, 20 nt, Human
ugaaagggaggaggggccgg

SEQ ID NO: 792252 - RNA, 18 nt, Human
ugagaggccgaggcagau

SEQ ID NO: 792253 - RNA, 24 nt, Human
ugagaggccgaggcagauggauca

SEQ ID NO: 792254 - RNA, 22 nt, Human
ugagccgagaucgcgccacugc

SEQ ID NO: 792255 - RNA, 20 nt, Human
ugaggcaggagaaucgcuug

SEQ ID NO: 792256 - RNA, 24 nt, Human
ugaggcaggagaaucgcuugaacc

SEQ ID NO: 792257 - RNA, 25 nt, Human
ugaggcaggagaaucgcuugaaccc

SEQ ID NO: 792258 - RNA, 21 nt, Human
ugccucacgccuguaauccca

SEQ ID NO: 792259 - RNA, 22 nt, Human
ugccucacgccuguaaucccag

SEQ ID NO: 792260 - RNA, 24 nt, Human
ugccucacgccuguaaucccagca

SEQ ID NO: 792261 - RNA, 24 nt, Human
uggaucaccugaggucaagagauc

SEQ ID NO: 792262 - RNA, 25 nt, Human
uggaucaccugaggucaagagaucc

SEQ ID NO: 792263 - RNA, 24 nt, Human
uggcaaaacguccgcuacucuuga

SEQ ID NO: 792264 - RNA, 18 nt, Human
uggcagccguggguagca

SEQ ID NO: 792265 - RNA, 24 nt, Human
uggccaacauggugaaaccccguc

SEQ ID NO: 792266 - RNA, 25 nt, Human
uggccagaagugggguggggguggg

SEQ ID NO: 792267 - RNA, 26 nt, Human
uggccagaagugggguggucgacacg

SEQ ID NO: 792268 - RNA, 21 nt, Human
uggcgcgcgccuguaguccca

SEQ ID NO: 792269 - RNA, 19 nt, Human
uggcuccagagcccacggu

SEQ ID NO: 792270 - RNA, 19 nt, Human
ugggaccccacagcacucc

SEQ ID NO: 792271 - RNA, 21 nt, Human
ugggaggacagaaggauuugg

SEQ ID NO: 792272 - RNA, 20 nt, Human
uggggaguaguaagggggag

SEQ ID NO: 792273 - RNA, 23 nt, Human
uggggcggggcgacgcgaggacc

SEQ ID NO: 792274 - RNA, 18 nt, Human
ugggguaagauaaacacu

SEQ ID NO: 792275 - RNA, 19 nt, Human
uggggugggggugggagga

SEQ ID NO: 792276 - RNA, 22 nt, Human
uggugaaaucggcccacucccu

SEQ ID NO: 792277 - RNA, 24 nt, Human
ugguggcgcgcgccuguaguccca

SEQ ID NO: 792278 - RNA, 19 nt, Human
ugucgaggcauuuggcuaa

SEQ ID NO: 792279 - RNA, 18 nt, Human
uuagcuggucgugguggc

SEQ ID NO: 792280 - RNA, 20 nt, Human
uuagcuggucgugguggcgc

SEQ ID NO: 792281 - RNA, 21 nt, Human
uucaaaauggaaaaaagaacc

SEQ ID NO: 792282 - RNA, 22 nt, Human
uucaaaauggaaaaaagaaccc

SEQ ID NO: 792283 - RNA, 28 nt, Human
uucccgacugucgcucccuagcucugau

SEQ ID NO: 792284 - RNA, 28 nt, Human
uugugcugcgcuucgcggagagggcuga

SEQ ID NO: 792285 - RNA, 24 nt, Human
uuucccagaggcugggaagggggu

SEQ ID NO: 792286 - RNA, 23 nt, Human
uuuccgccccccugcgcugccca

SEQ ID NO: 792287 - RNA, 21 nt, Human
uuuggaacuaaaaacuagggg

SEQ ID NO: 792288 - RNA, 25 nt, Human
aaagauagugggggaguuuuugaac

SEQ ID NO: 792289 - RNA, 20 nt, Human
aaaguccauuaauuaucuug

SEQ ID NO: 792290 - RNA, 19 nt, Human
aagaaaacacgagcuuaca

SEQ ID NO: 792291 - RNA, 23 nt, Human
aagcaggaagcaggcuuacagaa

SEQ ID NO: 792292 - RNA, 27 nt, Human
aagcaggaagcaggcuuacagaagcaa

SEQ ID NO: 792293 - RNA, 24 nt, Human
aagccugcugccccuaaaaacucc

SEQ ID NO: 792294 - RNA, 24 nt, Human
acagaccugagcuuuuuccuuaga

SEQ ID NO: 792295 - RNA, 21 nt, Human
acccggcucugcagaccccuu

SEQ ID NO: 792296 - RNA, 20 nt, Human
accugcaacuuuaacagcag

SEQ ID NO: 792297 - RNA, 18 nt, Human
acuuaaauucuuuuuagc

SEQ ID NO: 792298 - RNA, 19 nt, Human
acuucucaagcuucaguug

SEQ ID NO: 792299 - RNA, 21 nt, Human
agaaaaagaaaggcuuaguca

SEQ ID NO: 792300 - RNA, 24 nt, Human
agaaaaucuaagcauagaucaaag

SEQ ID NO: 792301 - RNA, 18 nt, Human
agauaugguuaauguuuc

SEQ ID NO: 792302 - RNA, 24 nt, Human
aggaauuacgugaagcaggaagca

SEQ ID NO: 792303 - RNA, 21 nt, Human
aggccuuuuccugaacaaaaa

SEQ ID NO: 792304 - RNA, 21 nt, Human
aggggggcuacuuaaauucuu

SEQ ID NO: 792305 - RNA, 18 nt, Human
auccagaaaaucuaagca

SEQ ID NO: 792306 - RNA, 25 nt, Human
auggacauagaaaaagaaaggcucc

SEQ ID NO: 792307 - RNA, 21 nt, Human
caaaagccugcugccccuaaa

SEQ ID NO: 792308 - RNA, 24 nt, Human
caaaauaccugaagggcagauaug

SEQ ID NO: 792309 - RNA, 20 nt, Human
caaagagagaaucuggagac

SEQ ID NO: 792310 - RNA, 20 nt, Human
caccugugauaagcaggaac

SEQ ID NO: 792311 - RNA, 18 nt, Human
cacgcugcccuugggcua

SEQ ID NO: 792312 - RNA, 25 nt, Human
cagcauggcaguggcagcuaaugcu

SEQ ID NO: 792313 - RNA, 19 nt, Human
caguggaauugcauccaga

SEQ ID NO: 792314 - RNA, 22 nt, Human
cagugugugacuacagcagggu

SEQ ID NO: 792315 - RNA, 20 nt, Human
cauagaaaaagaaaggcuua

SEQ ID NO: 792316 - RNA, 23 nt, Human
cauccagaaaaucuaagcauaga

SEQ ID NO: 792317 - RNA, 21 nt, Human
cauguuggauggucugagucu

SEQ ID NO: 792318 - RNA, 20 nt, Human
cauuuggugggacaaaagcc

SEQ ID NO: 792319 - RNA, 24 nt, Human
ccacugccgaguucacgcugccgc

SEQ ID NO: 792320 - RNA, 22 nt, Human
cccacuuuguggcuucauacaa

SEQ ID NO: 792321 - RNA, 21 nt, Human
ccccauuaccuauuuugugcc

SEQ ID NO: 792322 - RNA, 23 nt, Human
ccccauuaccuauuuugugccua

SEQ ID NO: 792323 - RNA, 25 nt, Human
ccccuugcuuuagaggaauuagaaa

SEQ ID NO: 792324 - RNA, 20 nt, Human
ccuggcaguaauucccauga

SEQ ID NO: 792325 - RNA, 21 nt, Human
ccuugggcuacuaggaaaccu

SEQ ID NO: 792326 - RNA, 24 nt, Human
cgaaugucuuuuaagcauuuuuuu

SEQ ID NO: 792327 - RNA, 21 nt, Human
cggcauuucuacaggcaacag

SEQ ID NO: 792328 - RNA, 22 nt, Human
cuacuguuugaacugaaacucc

SEQ ID NO: 792329 - RNA, 20 nt, Human
cuagguagcuggcccauacu

SEQ ID NO: 792330 - RNA, 19 nt, Human
cucuuuuucucccccacuu

SEQ ID NO: 792331 - RNA, 19 nt, Human
cugaacaaaaacaguaaca

SEQ ID NO: 792332 - RNA, 18 nt, Human
cugccccuaaaaacuccc

SEQ ID NO: 792333 - RNA, 19 nt, Human
cugccgaguucacgcugcc

SEQ ID NO: 792334 - RNA, 19 nt, Human
cuuacagaagcaagaacaa

SEQ ID NO: 792335 - RNA, 19 nt, Human
cuuccagugugugacuaca

SEQ ID NO: 792336 - RNA, 20 nt, Human
cuugcagcuguacaaggagg

SEQ ID NO: 792337 - RNA, 29 nt, Human
gaaaacacgagcuuacagagccuacaaag

SEQ ID NO: 792338 - RNA, 23 nt, Human
gaaaacgaaugucuuuuaagcau

SEQ ID NO: 792339 - RNA, 24 nt, Human
gaaggagaucuuuggugcccugga

SEQ ID NO: 792340 - RNA, 21 nt, Human
gaaggcgaaggagaucuuugg

SEQ ID NO: 792341 - RNA, 21 nt, Human
gacauagaaaaagaaaggcuu

SEQ ID NO: 792342 - RNA, 23 nt, Human
gagaacaccucaucuacuacguc

SEQ ID NO: 792343 - RNA, 19 nt, Human
gagaaucuggagaccaacc

SEQ ID NO: 792344 - RNA, 18 nt, Human
gcaaaagccugcugcccc

SEQ ID NO: 792345 - RNA, 19 nt, Human
gcaaacaaaagaucaccaa

SEQ ID NO: 792346 - RNA, 23 nt, Human
gcaaacaaaagaucaccaaugua

SEQ ID NO: 792347 - RNA, 18 nt, Human
gcacauauggcuuccuuc

SEQ ID NO: 792348 - RNA, 21 nt, Human
gcaggaagcaggcuuacagaa

SEQ ID NO: 792349 - RNA, 20 nt, Human
gcaggcaccugugauaagca

SEQ ID NO: 792350 - RNA, 20 nt, Human
gcaguggcagcuaaugcuuu

SEQ ID NO: 792351 - RNA, 23 nt, Human
gcauagaucaaagaaaacgaaug

SEQ ID NO: 792352 - RNA, 25 nt, Human
gcuccauuaaggugaucacuguggu

SEQ ID NO: 792353 - RNA, 22 nt, Human
gggcucuuuuucucccccacuu

SEQ ID NO: 792354 - RNA, 18 nt, Human
gugaagcaggaagcaggc

SEQ ID NO: 792355 - RNA, 21 nt, Human
uaaacuucccacauacuccuc

SEQ ID NO: 792356 - RNA, 22 nt, Human
uaaauaggcuacuggucaauac

SEQ ID NO: 792357 - RNA, 18 nt, Human
uaacagcagugggaguag

SEQ ID NO: 792358 - RNA, 22 nt, Human
uaaucaguauuacuaagaucac

SEQ ID NO: 792359 - RNA, 23 nt, Human
uaccuauuuugugccuagguagc

SEQ ID NO: 792360 - RNA, 23 nt, Human
uaggccuuuuccugaacaaaaac

SEQ ID NO: 792361 - RNA, 20 nt, Human
uaggcuacuggucaauacca

SEQ ID NO: 792362 - RNA, 22 nt, Human
uaucuagugaagacuccucaag

SEQ ID NO: 792363 - RNA, 18 nt, Human
ucaaagauagugggggag

SEQ ID NO: 792364 - RNA, 23 nt, Human
ucagucgacugugaugaauccaa

SEQ ID NO: 792365 - RNA, 22 nt, Human
ucaguggaauugcauccagaaa

SEQ ID NO: 792366 - RNA, 21 nt, Human
uccacagauccaauauaggcc

SEQ ID NO: 792367 - RNA, 23 nt, Human
uccagaaaaucuaagcauagauc

SEQ ID NO: 792368 - RNA, 22 nt, Human
uccagcauuuucugccagcaug

SEQ ID NO: 792369 - RNA, 22 nt, Human
ucccagggcucgagcuuggcuu

SEQ ID NO: 792370 - RNA, 19 nt, Human
uccuaagaguuccccuugc

SEQ ID NO: 792371 - RNA, 26 nt, Human
uccuguagucauuccuuuucuuucau

SEQ ID NO: 792372 - RNA, 23 nt, Human
uccuucuuuaacucuaacuucag

SEQ ID NO: 792373 - RNA, 19 nt, Human
ucuagugccagccuguuuu

SEQ ID NO: 792374 - RNA, 19 nt, Human
ucuuccucgguaggugccg

SEQ ID NO: 792375 - RNA, 23 nt, Human
ugaaacuccuguagucauuccuu

SEQ ID NO: 792376 - RNA, 18 nt, Human
ugaacuggaacuugggcc

SEQ ID NO: 792377 - RNA, 23 nt, Human
ugaaguacagcaaaagccugcug

SEQ ID NO: 792378 - RNA, 18 nt, Human
ugacugguucacuggucc

SEQ ID NO: 792379 - RNA, 20 nt, Human
ugagaacaccucaucuacua

SEQ ID NO: 792380 - RNA, 21 nt, Human
ugagaacaccucaucuacuac

SEQ ID NO: 792381 - RNA, 21 nt, Human
ugauacaaaccugcuucccuc

SEQ ID NO: 792382 - RNA, 18 nt, Human
uggaauugcauccagaaa

SEQ ID NO: 792383 - RNA, 19 nt, Human
uggauuuccacauaagagc

SEQ ID NO: 792384 - RNA, 19 nt, Human
ugggacaaaagccuugagg

SEQ ID NO: 792385 - RNA, 19 nt, Human
ugguuuugccacaggauua

SEQ ID NO: 792386 - RNA, 21 nt, Human
ugugauaccugcaacuuuaac

SEQ ID NO: 792387 - RNA, 20 nt, Human
uucuugagucgguacauauu

SEQ ID NO: 792388 - RNA, 26 nt, Human
uuuaacagcagugggaguagacaaga

SEQ ID NO: 792389 - RNA, 21 nt, Human
uuucucaguggugucgugguu

SEQ ID NO: 792390 - RNA, 21 nt, Human
uuugacuucucaagcuucagu

SEQ ID NO: 792391 - RNA, 21 nt, Human
uuuggcauugaaguacagcaa

SEQ ID NO: 792392 - RNA, 23 nt, Human
aaaaaaaaaagauacaagcccag

SEQ ID NO: 792393 - RNA, 29 nt, Human
aaaaaaaagauacaagcccagguaaagaa

SEQ ID NO: 792394 - RNA, 23 nt, Human
aaaaagauacaagcccagguaaa

SEQ ID NO: 792395 - RNA, 22 nt, Human
aaauauacacacacacagcaca

SEQ ID NO: 792396 - RNA, 18 nt, Human
aacaaaauguuuccuagu

SEQ ID NO: 792397 - RNA, 22 nt, Human
aacaugcaugcuuggaucuacu

SEQ ID NO: 792398 - RNA, 19 nt, Human
aacauggugaaaccccguc

SEQ ID NO: 792399 - RNA, 20 nt, Human
aacauggugaaaccccgucu

SEQ ID NO: 792400 - RNA, 21 nt, Human
aacauggugaaaccccgucuc

SEQ ID NO: 792401 - RNA, 22 nt, Human
aagaaaccagcacccacauugg

SEQ ID NO: 792402 - RNA, 20 nt, Human
aagaaacuggaucccugaag

SEQ ID NO: 792403 - RNA, 21 nt, Human
aagaagagaugcaggacaaaa

SEQ ID NO: 792404 - RNA, 23 nt, Human
aagagcaaaacucugucucaaaa

SEQ ID NO: 792405 - RNA, 26 nt, Human
aagcagguggauuaucugaggucagg

SEQ ID NO: 792406 - RNA, 23 nt, Human
aagguugcagugagccgagauug

SEQ ID NO: 792407 - RNA, 20 nt, Human
aaguagauucaaaucccaga

SEQ ID NO: 792408 - RNA, 23 nt, Human
aaguggcccucaacaucagaggu

SEQ ID NO: 792409 - RNA, 23 nt, Human
aaucgcuugaacccaggaggcga

SEQ ID NO: 792410 - RNA, 18 nt, Human
aauuagccaggcauggua

SEQ ID NO: 792411 - RNA, 20 nt, Human
acaaaauuugccuucaggag

SEQ ID NO: 792412 - RNA, 21 nt, Human
acacacacacagcacaaugua

SEQ ID NO: 792413 - RNA, 20 nt, Human
accagcacccacauugguca

SEQ ID NO: 792414 - RNA, 19 nt, Human
accaucagagccacauaua

SEQ ID NO: 792415 - RNA, 24 nt, Human
accccgucucuacuaaaaauacaa

SEQ ID NO: 792416 - RNA, 19 nt, Human
accugaggugcacucaggg

SEQ ID NO: 792417 - RNA, 23 nt, Human
accuguagucccagcuacuuggg

SEQ ID NO: 792418 - RNA, 28 nt, Human
acucugucucaaaaaaaaaaaaaaaaaa

SEQ ID NO: 792419 - RNA, 18 nt, Human
acugcacuccagccuggg

SEQ ID NO: 792420 - RNA, 19 nt, Human
acugcacuccagccugggc

SEQ ID NO: 792421 - RNA, 24 nt, Human
acugcacuccagccugggcgacaa

SEQ ID NO: 792422 - RNA, 21 nt, Human
agaaagccuuaacauaacaga

SEQ ID NO: 792423 - RNA, 24 nt, Human
agaaagccuuaacauaacagagaa

SEQ ID NO: 792424 - RNA, 24 nt, Human
agaagcagguggauuaucugaggu

SEQ ID NO: 792425 - RNA, 23 nt, Human
agacauggauggaaaaucuaagg

SEQ ID NO: 792426 - RNA, 21 nt, Human
agagaugcaggacaaaauggu

SEQ ID NO: 792427 - RNA, 25 nt, Human
agagaugggucacugagacuacauc

SEQ ID NO: 792428 - RNA, 20 nt, Human
agagauucaaacuuaccaua

SEQ ID NO: 792429 - RNA, 22 nt, Human
agauuuauacagaagaagggag

SEQ ID NO: 792430 - RNA, 19 nt, Human
agcaagacuucauaaauua

SEQ ID NO: 792431 - RNA, 20 nt, Human
agcacuuugggaggcagaag

SEQ ID NO: 792432 - RNA, 22 nt, Human
agccuggccaacauggugaaac

SEQ ID NO: 792433 - RNA, 24 nt, Human
agccuggccaacauggugaaaccc

SEQ ID NO: 792434 - RNA, 21 nt, Human
agcgggcaccuguagucccag

SEQ ID NO: 792435 - RNA, 18 nt, Human
agcuuccucuuaucuuuc

SEQ ID NO: 792436 - RNA, 22 nt, Human
aggagggugcccuauagaaaaa

SEQ ID NO: 792437 - RNA, 19 nt, Human
aggaugggauuagagaaag

SEQ ID NO: 792438 - RNA, 21 nt, Human
aggcacccagaaaccugauaa

SEQ ID NO: 792439 - RNA, 24 nt, Human
aggcacccagaaaccugauaagga

SEQ ID NO: 792440 - RNA, 24 nt, Human
aggcaugguagcgggcaccuguag

SEQ ID NO: 792441 - RNA, 21 nt, Human
aggcgaagguugcagugagcc

SEQ ID NO: 792442 - RNA, 24 nt, Human
aggcgaagguugcagugagccgag

SEQ ID NO: 792443 - RNA, 23 nt, Human
aggcuggagaaucgcuugaaccc

SEQ ID NO: 792444 - RNA, 24 nt, Human
aggguguuuaagggaaagaggagg

SEQ ID NO: 792445 - RNA, 20 nt, Human
aggugcacucagggaugacc

SEQ ID NO: 792446 - RNA, 22 nt, Human
agguggauuaucugaggucagg

SEQ ID NO: 792447 - RNA, 23 nt, Human
auaaacacaguccucugcccaaa

SEQ ID NO: 792448 - RNA, 19 nt, Human
auaauguuguuuggcaagg

SEQ ID NO: 792449 - RNA, 23 nt, Human
aucagagguagggcaucuggaag

SEQ ID NO: 792450 - RNA, 26 nt, Human
augacuuccaaacuguugaaacaaaa

SEQ ID NO: 792451 - RNA, 24 nt, Human
auugugccacugcacuccagccug

SEQ ID NO: 792452 - RNA, 22 nt, Human
caaagacuccaacaugccuucc

SEQ ID NO: 792453 - RNA, 24 nt, Human
caaauagaucaugcugccgucaaa

SEQ ID NO: 792454 - RNA, 24 nt, Human
caacauggugaaaccccgucucua

SEQ ID NO: 792455 - RNA, 18 nt, Human
caagaaaccagcacccac

SEQ ID NO: 792456 - RNA, 19 nt, Human
caagaaaccagcacccaca

SEQ ID NO: 792457 - RNA, 20 nt, Human
caagcuaaaagauacaagcc

SEQ ID NO: 792458 - RNA, 22 nt, Human
caaguagcagaagaaaaagucc

SEQ ID NO: 792459 - RNA, 18 nt, Human
cacaauguacaacaaaau

SEQ ID NO: 792460 - RNA, 23 nt, Human
caccuguagucccagcuacuugg

SEQ ID NO: 792461 - RNA, 24 nt, Human
caccuguagucccagcuacuuggg

SEQ ID NO: 792462 - RNA, 18 nt, Human
caccuuucuguaccggcu

SEQ ID NO: 792463 - RNA, 24 nt, Human
cacgccuguaaucccagcacuuug

SEQ ID NO: 792464 - RNA, 24 nt, Human
cacuccagccugggcgacaagagc

SEQ ID NO: 792465 - RNA, 19 nt, Human
cacugcacuccagccuggg

SEQ ID NO: 792466 - RNA, 20 nt, Human
cacugcacuccagccugggc

SEQ ID NO: 792467 - RNA, 22 nt, Human
cacugcacuccagccugggcga

SEQ ID NO: 792468 - RNA, 23 nt, Human
cacugcacuccagccugggcgac

SEQ ID NO: 792469 - RNA, 24 nt, Human
cacugcacuccagccugggcgaca

SEQ ID NO: 792470 - RNA, 27 nt, Human
cagaagcagguggauuaucugagguca

SEQ ID NO: 792471 - RNA, 26 nt, Human
cagaggcacccagaaaccugauaagg

SEQ ID NO: 792472 - RNA, 19 nt, Human
cagcacaauguacaacaaa

SEQ ID NO: 792473 - RNA, 19 nt, Human
cagcacaauguacaacaaa

SEQ ID NO: 792474 - RNA, 18 nt, Human
cagcacuuugggaggcag

SEQ ID NO: 792475 - RNA, 26 nt, Human
cagcacuuugggaggcagaagcaggu

SEQ ID NO: 792476 - RNA, 21 nt, Human
cagccaaaccacaggaccacc

SEQ ID NO: 792477 - RNA, 19 nt, Human
cagcuggcucuucuuuaau

SEQ ID NO: 792478 - RNA, 18 nt, Human
cagguggauuaucugagg

SEQ ID NO: 792479 - RNA, 24 nt, Human
cagguggauuaucugaggucagga

SEQ ID NO: 792480 - RNA, 23 nt, Human
caucuggaagucucaaaaugacc

SEQ ID NO: 792481 - RNA, 21 nt, Human
caugcaaacauacacuucuga

SEQ ID NO: 792482 - RNA, 23 nt, Human
caugcugccgucaaagacuccaa

SEQ ID NO: 792483 - RNA, 19 nt, Human
cauguuucacuccugcgca

SEQ ID NO: 792484 - RNA, 21 nt, Human
ccaaaacagguccucagaaaa

SEQ ID NO: 792485 - RNA, 26 nt, Human
ccaaacaaaccagauauauuucagaa

SEQ ID NO: 792486 - RNA, 23 nt, Human
ccaaucuacaggccaggcaacau

SEQ ID NO: 792487 - RNA, 21 nt, Human
ccacagaaaaaagaucaugac

SEQ ID NO: 792488 - RNA, 20 nt, Human
ccacugcacuccagccuggg

SEQ ID NO: 792489 - RNA, 21 nt, Human
ccacugcacuccagccugggc

SEQ ID NO: 792490 - RNA, 21 nt, Human
ccacugcacuccagccugggc

SEQ ID NO: 792491 - RNA, 24 nt, Human
ccacugcacuccagccugggcgac

SEQ ID NO: 792492 - RNA, 22 nt, Human
ccaggaggcgaagguugcagug

SEQ ID NO: 792493 - RNA, 23 nt, Human
ccuggccaacauggugaaacccc

SEQ ID NO: 792494 - RNA, 24 nt, Human
ccuggccaacauggugaaaccccg

SEQ ID NO: 792495 - RNA, 21 nt, Human
ccuguagucccagcuacuugg

SEQ ID NO: 792496 - RNA, 21 nt, Human
ccuucaggaucuuaaggcaga

SEQ ID NO: 792497 - RNA, 23 nt, Human
cgccuguaaucccagcacuuugg

SEQ ID NO: 792498 - RNA, 24 nt, Human
cgccuguaaucccagcacuuuggg

SEQ ID NO: 792499 - RNA, 21 nt, Human
cgggcaccuguagucccagcu

SEQ ID NO: 792500 - RNA, 24 nt, Human
cgugaccagccuggccaacauggu

SEQ ID NO: 792501 - RNA, 21 nt, Human
cuauagaaaaagaugcagaga

SEQ ID NO: 792502 - RNA, 24 nt, Human
cucaaaaugaccaaacaaaccaga

SEQ ID NO: 792503 - RNA, 22 nt, Human
cucacgccuguaaucccagcac

SEQ ID NO: 792504 - RNA, 24 nt, Human
cucacgccuguaaucccagcacuu

SEQ ID NO: 792505 - RNA, 22 nt, Human
cuccaacaugccuucccaagcc

SEQ ID NO: 792506 - RNA, 19 nt, Human
cucugucucaaaaaaaaaa

SEQ ID NO: 792507 - RNA, 24 nt, Human
cugcaagaggaagaagaaaacuaa

SEQ ID NO: 792508 - RNA, 21 nt, Human
cugcuauauaaacaaugaccu

SEQ ID NO: 792509 - RNA, 22 nt, Human
cuggaaaauaacuucaccacaa

SEQ ID NO: 792510 - RNA, 19 nt, Human
cuggaucccugaagcuuag

SEQ ID NO: 792511 - RNA, 24 nt, Human
cuuaaacucaaguagauucaaauc

SEQ ID NO: 792512 - RNA, 23 nt, Human
cuuccugacaauauaccagcugg

SEQ ID NO: 792513 - RNA, 20 nt, Human
cuucucuccauagaacugau

SEQ ID NO: 792514 - RNA, 24 nt, Human
gaaaaaguccagaaacauaucccu

SEQ ID NO: 792515 - RNA, 22 nt, Human
gaagguugcagugagccgagau

SEQ ID NO: 792516 - RNA, 24 nt, Human
gaagguugcagugagccgagauug

SEQ ID NO: 792517 - RNA, 20 nt, Human
gagaaaacagagugagggga

SEQ ID NO: 792518 - RNA, 21 nt, Human
gagaaagaaaggagcaugucc

SEQ ID NO: 792519 - RNA, 23 nt, Human
gagauugugccacugcacuccag

SEQ ID NO: 792520 - RNA, 19 nt, Human
gagugaggggagcuaagga

SEQ ID NO: 792521 - RNA, 23 nt, Human
gaucaugcugccgucaaagacuc

SEQ ID NO: 792522 - RNA, 18 nt, Human
gauuaucugaggucagga

SEQ ID NO: 792523 - RNA, 23 nt, Human
gauuaucugaggucaggaguucg

SEQ ID NO: 792524 - RNA, 19 nt, Human
gcagaguggcuggcuuccc

SEQ ID NO: 792525 - RNA, 24 nt, Human
gccaacauggugaaaccccgucuc

SEQ ID NO: 792526 - RNA, 24 nt, Human
gccaaucuacaggccaggcaacau

SEQ ID NO: 792527 - RNA, 18 nt, Human
gccacagaaaaaagauca

SEQ ID NO: 792528 - RNA, 22 nt, Human
gccacagaaaaaagaucaugac

SEQ ID NO: 792529 - RNA, 22 nt, Human
gccacugcacuccagccugggc

SEQ ID NO: 792530 - RNA, 24 nt, Human
gccacugcacuccagccugggcga

SEQ ID NO: 792531 - RNA, 21 nt, Human
ggacagcucagccaaaccaca

SEQ ID NO: 792532 - RNA, 22 nt, Human
ggaggcgaagguugcagugagc

SEQ ID NO: 792533 - RNA, 18 nt, Human
ggaggcuaaggcuggaga

SEQ ID NO: 792534 - RNA, 19 nt, Human
ggauagcaauucacauuca

SEQ ID NO: 792535 - RNA, 22 nt, Human
ggauuaucugaggucaggaguu

SEQ ID NO: 792536 - RNA, 24 nt, Human
ggcaccuguagucccagcuacuug

SEQ ID NO: 792537 - RNA, 23 nt, Human
ggcaugguggcucacgccuguaa

SEQ ID NO: 792538 - RNA, 19 nt, Human
gguaaagagagaaccugag

SEQ ID NO: 792539 - RNA, 24 nt, Human
gguagcgggcaccuguagucccag

SEQ ID NO: 792540 - RNA, 21 nt, Human
ggucauauuggcuuugccggc

SEQ ID NO: 792541 - RNA, 24 nt, Human
gguggcucacgccuguaaucccag

SEQ ID NO: 792542 - RNA, 24 nt, Human
guugcagugagccgagauugugcc

SEQ ID NO: 792543 - RNA, 23 nt, Human
uaaaacaagagagaugaaaaugc

SEQ ID NO: 792544 - RNA, 25 nt, Human
uaaaauauacacacacacagcacaa

SEQ ID NO: 792545 - RNA, 25 nt, Human
uaaacacaguccucugcccaaacaa

SEQ ID NO: 792546 - RNA, 18 nt, Human
uaaggaaaagggagggug

SEQ ID NO: 792547 - RNA, 23 nt, Human
uaaggaaaagggaggguguuuaa

SEQ ID NO: 792548 - RNA, 19 nt, Human
uaaggagagaaauaagugg

SEQ ID NO: 792549 - RNA, 22 nt, Human
uaaggcagaggcacccagaaac

SEQ ID NO: 792550 - RNA, 23 nt, Human
uaaggcagaggcacccagaaacc

SEQ ID NO: 792551 - RNA, 23 nt, Human
uaaggcagaggcacccagaaacc

SEQ ID NO: 792552 - RNA, 24 nt, Human
uaaggcagaggcacccagaaaccu

SEQ ID NO: 792553 - RNA, 24 nt, Human
uaaggcuggagaaucgcuugaacc

SEQ ID NO: 792554 - RNA, 21 nt, Human
uaagggaaagaggaggguaag

SEQ ID NO: 792555 - RNA, 31 nt, Human
uacaagcccagccgggcaugguggcucacgg

SEQ ID NO: 792556 - RNA, 19 nt, Human
uacaaugcuucaaaggcuc

SEQ ID NO: 792557 - RNA, 18 nt, Human
uacagcaggauaaggaca

SEQ ID NO: 792558 - RNA, 23 nt, Human
uagagaggguauccacucuguuc

SEQ ID NO: 792559 - RNA, 21 nt, Human
uagcagaagaaaaaguccaga

SEQ ID NO: 792560 - RNA, 20 nt, Human
uagcuuccucuuaucuuucu

SEQ ID NO: 792561 - RNA, 21 nt, Human
uaggucccaggcccuuaaacu

SEQ ID NO: 792562 - RNA, 22 nt, Human
uauagaaaaagaugcagagaag

SEQ ID NO: 792563 - RNA, 18 nt, Human
uaucuuagacaccugggu

SEQ ID NO: 792564 - RNA, 22 nt, Human
uauuucagaaggacaagaaacu

SEQ ID NO: 792565 - RNA, 22 nt, Human
ucaaaaaaaaaaaaaaaaaaaa

SEQ ID NO: 792566 - RNA, 23 nt, Human
ucaaaaaaaaaaaaaaaaaaaaa

SEQ ID NO: 792567 - RNA, 22 nt, Human
ucacaagaaaccagcacccaca

SEQ ID NO: 792568 - RNA, 25 nt, Human
ucagagccacauauaacacaacaug

SEQ ID NO: 792569 - RNA, 19 nt, Human
uccagccugggcgacaaga

SEQ ID NO: 792570 - RNA, 18 nt, Human
ucccaccaaaacaggucc

SEQ ID NO: 792571 - RNA, 20 nt, Human
ucccaccaaaacagguccuc

SEQ ID NO: 792572 - RNA, 20 nt, Human
ucccugaauagaagagaaaa

SEQ ID NO: 792573 - RNA, 23 nt, Human
uccucugcccaaacaaucccacc

SEQ ID NO: 792574 - RNA, 22 nt, Human
ucucuacuaaaaauacaaaaaa

SEQ ID NO: 792575 - RNA, 23 nt, Human
ucugaggucaggaguucgugacc

SEQ ID NO: 792576 - RNA, 23 nt, Human
ucugucucaaaaaaaaaaaaaaa

SEQ ID NO: 792577 - RNA, 19 nt, Human
ucuuucugggauuugcccu

SEQ ID NO: 792578 - RNA, 19 nt, Human
ugaaacaaaauuugccuuc

SEQ ID NO: 792579 - RNA, 18 nt, Human
ugacaauauaccagcugg

SEQ ID NO: 792580 - RNA, 19 nt, Human
ugaccaaacaaaccagaua

SEQ ID NO: 792581 - RNA, 18 nt, Human
ugacuuccaguucuccuc

SEQ ID NO: 792582 - RNA, 22 nt, Human
ugagccgagauugugccacugc

SEQ ID NO: 792583 - RNA, 20 nt, Human
ugaggggagcuaaggagggu

SEQ ID NO: 792584 - RNA, 21 nt, Human
ugaggggagcuaaggagggug

SEQ ID NO: 792585 - RNA, 22 nt, Human
ugaggggagcuaaggagggugc

SEQ ID NO: 792586 - RNA, 21 nt, Human
ugaggucaggaguucgugacc

SEQ ID NO: 792587 - RNA, 18 nt, Human
ugcccuauagaaaaagau

SEQ ID NO: 792588 - RNA, 27 nt, Human
ugccugcaaggagaaggaggcuuaggg

SEQ ID NO: 792589 - RNA, 19 nt, Human
ugccuucccaagccuuugc

SEQ ID NO: 792590 - RNA, 21 nt, Human
uggaagucucaaaaugaccaa

SEQ ID NO: 792591 - RNA, 23 nt, Human
uggaucccugaagcuuaggacau

SEQ ID NO: 792592 - RNA, 22 nt, Human
uggauggaaaaucuaaggaaau

SEQ ID NO: 792593 - RNA, 24 nt, Human
uggauuaucugaggucaggaguuc

SEQ ID NO: 792594 - RNA, 18 nt, Human
uggcaaaaacggggucua

SEQ ID NO: 792595 - RNA, 24 nt, Human
uggccaacauggugaaaccccguc

SEQ ID NO: 792596 - RNA, 22 nt, Human
uggcucacgccuguaaucccag

SEQ ID NO: 792597 - RNA, 24 nt, Human
uggcucacgccuguaaucccagca

SEQ ID NO: 792598 - RNA, 24 nt, Human
ugggaggcagaagcagguggauua

SEQ ID NO: 792599 - RNA, 23 nt, Human
ugggaggcuaaggcuggagaauc

SEQ ID NO: 792600 - RNA, 24 nt, Human
ugguagcgggcaccuguaguccca

SEQ ID NO: 792601 - RNA, 24 nt, Human
ugguggcucacgccuguaauccca

SEQ ID NO: 792602 - RNA, 21 nt, Human
uuaauagacauggauggaaaa

SEQ ID NO: 792603 - RNA, 21 nt, Human
uucacaagaaaccagcaccca

SEQ ID NO: 792604 - RNA, 23 nt, Human
uucaccacaacacuaaaauauac

SEQ ID NO: 792605 - RNA, 19 nt, Human
uucaccauaccacacauuu

SEQ ID NO: 792606 - RNA, 18 nt, Human
uucauguuucacuccugc

SEQ ID NO: 792607 - RNA, 21 nt, Human
uucugcaacugaagauuccau

SEQ ID NO: 792608 - RNA, 18 nt, Human
uugcagugagccgagauu

SEQ ID NO: 792609 - RNA, 22 nt, Human
uugcagugagccgagauugugc

SEQ ID NO: 792610 - RNA, 20 nt, Human
uugggaggcagaagcaggug

SEQ ID NO: 792611 - RNA, 24 nt, Human
uugggaggcuaaggcuggagaauc

SEQ ID NO: 792612 - RNA, 23 nt, Human
uugugccacugcacuccagccug

SEQ ID NO: 792613 - RNA, 21 nt, Human
aaacacaggaggucacugacu

SEQ ID NO: 792614 - RNA, 19 nt, Human
aaagaauauucaugagagu

SEQ ID NO: 792615 - RNA, 19 nt, Human
aacacacaaacugaugucc

SEQ ID NO: 792616 - RNA, 20 nt, Human
aaccaagcacccccuuccua

SEQ ID NO: 792617 - RNA, 20 nt, Human
aaccccucaaaccaagcacc

SEQ ID NO: 792618 - RNA, 24 nt, Human
aagggacuugguacagaccaucaa

SEQ ID NO: 792619 - RNA, 21 nt, Human
aaugaaaagguacucucuaaa

SEQ ID NO: 792620 - RNA, 19 nt, Human
accuugguuaccucucccc

SEQ ID NO: 792621 - RNA, 28 nt, Human
agaaacaauaaaaagucugccgguaccc

SEQ ID NO: 792622 - RNA, 22 nt, Human
agacaagaacauagacaaggga

SEQ ID NO: 792623 - RNA, 19 nt, Human
aggaaacaaaaaaggcaag

SEQ ID NO: 792624 - RNA, 23 nt, Human
aguuaagaaacaauaaaaagucu

SEQ ID NO: 792625 - RNA, 18 nt, Human
auacaccaguuuguaaaa

SEQ ID NO: 792626 - RNA, 27 nt, Human
auacagcaguaauuaaaagcagugcaa

SEQ ID NO: 792627 - RNA, 20 nt, Human
augaaagguagccacuuuca

SEQ ID NO: 792628 - RNA, 19 nt, Human
auucugaaagacaagaaca

SEQ ID NO: 792629 - RNA, 21 nt, Human
caagggacuugguacagacca

SEQ ID NO: 792630 - RNA, 27 nt, Human
caaguguccuuaacuuuucaguacuuc

SEQ ID NO: 792631 - RNA, 21 nt, Human
cacaauuccuacagaacacac

SEQ ID NO: 792632 - RNA, 21 nt, Human
cacacaauuccuacagaacac

SEQ ID NO: 792633 - RNA, 20 nt, Human
cacccccuuccuauguccag

SEQ ID NO: 792634 - RNA, 20 nt, Human
cagauauuugcgaauauccc

SEQ ID NO: 792635 - RNA, 19 nt, Human
caguaauuaaaagcagugc

SEQ ID NO: 792636 - RNA, 19 nt, Human
cagugcaaauaucuuugga

SEQ ID NO: 792637 - RNA, 23 nt, Human
ccccucaaaccaagcacccccuu

SEQ ID NO: 792638 - RNA, 26 nt, Human
ccuacagaacacacaaacugaugucc

SEQ ID NO: 792639 - RNA, 24 nt, Human
cuccacuuuauuauuuuauaacaa

SEQ ID NO: 792640 - RNA, 31 nt, Human
cuccccaugccuaugugcugucuuuccucaa

SEQ ID NO: 792641 - RNA, 18 nt, Human
cuccugaauuucaggacu

SEQ ID NO: 792642 - RNA, 22 nt, Human
gauuuguaauucaaaucaucac

SEQ ID NO: 792643 - RNA, 23 nt, Human
gcagugcaaauaucuuuggaggu

SEQ ID NO: 792644 - RNA, 22 nt, Human
gcgaauaucccauccaaaaauu

SEQ ID NO: 792645 - RNA, 24 nt, Human
uaaaaauuauucugaaagacaaga

SEQ ID NO: 792646 - RNA, 24 nt, Human
uaaaauucaccuugguuaccucuc

SEQ ID NO: 792647 - RNA, 24 nt, Human
uaaccccucaaaccaagcaccccc

SEQ ID NO: 792648 - RNA, 22 nt, Human
uaacuuuucaguacuucucugu

SEQ ID NO: 792649 - RNA, 21 nt, Human
uacaccaguuuguaaaauuca

SEQ ID NO: 792650 - RNA, 21 nt, Human
uagcccccaaguguccuuaac

SEQ ID NO: 792651 - RNA, 25 nt, Human
uagcuuucccaggaaaugaauguaa

SEQ ID NO: 792652 - RNA, 18 nt, Human
uauaauacagauauuugc

SEQ ID NO: 792653 - RNA, 26 nt, Human
uauucauuuuucaaaaaggccucaca

SEQ ID NO: 792654 - RNA, 18 nt, Human
uauucuuucauaauuuaa

SEQ ID NO: 792655 - RNA, 22 nt, Human
uccaaaaggcacagaguaaugc

SEQ ID NO: 792656 - RNA, 23 nt, Human
uccacuuuauuauuuuauaacaa

SEQ ID NO: 792657 - RNA, 21 nt, Human
uccagcacucuuuucuacuuc

SEQ ID NO: 792658 - RNA, 25 nt, Human
uccuacaucaucccauaauucaaaa

SEQ ID NO: 792659 - RNA, 18 nt, Human
ucuacaagaucuuuucca

SEQ ID NO: 792660 - RNA, 19 nt, Human
ucucugcaggcuggggagu

SEQ ID NO: 792661 - RNA, 18 nt, Human
ugaaaagguacucucuaa

SEQ ID NO: 792662 - RNA, 21 nt, Human
ugacuaagaaguuuagagcuc

SEQ ID NO: 792663 - RNA, 25 nt, Human
ugcaagaacauaaaacugaggaaac

SEQ ID NO: 792664 - RNA, 26 nt, Human
ugcaagaacauaaaacugaggaaaca

SEQ ID NO: 792665 - RNA, 21 nt, Human
ugcacacaauuccuacagaac

SEQ ID NO: 792666 - RNA, 22 nt, Human
ugcauuauucuuucauaauuua

SEQ ID NO: 792667 - RNA, 21 nt, Human
uggccacaucuacaagaucuu

SEQ ID NO: 792668 - RNA, 21 nt, Human
uggcuccugaauuucaggacu

SEQ ID NO: 792669 - RNA, 21 nt, Human
ugugugaauggaaugcacaca

SEQ ID NO: 792670 - RNA, 20 nt, Human
ugugugaauggaaugcacca

SEQ ID NO: 792671 - RNA, 21 nt, Human
uguuuacugggggcuucuuuc

SEQ ID NO: 792672 - RNA, 18 nt, Human
uguuuuauaaacuugaau

SEQ ID NO: 792673 - RNA, 21 nt, Human
uucacuguagguaaaugaaau

SEQ ID NO: 792674 - RNA, 24 nt, Human
uugauuuguaauuuuuucguuccu

SEQ ID NO: 792675 - RNA, 25 nt, Human
uuuagagggaaaaaaguagccccca

SEQ ID NO: 792676 - RNA, 19 nt, Human
aaaaaaaaaaaaaagaaga

SEQ ID NO: 792677 - RNA, 21 nt, Human
aaaaaaaaaaaaagaagaaga

SEQ ID NO: 792678 - RNA, 19 nt, Human
aaaaaaaaaaagaagaaga

SEQ ID NO: 792679 - RNA, 19 nt, Human
aaaaaaaagaagaagaaaa

SEQ ID NO: 792680 - RNA, 18 nt, Human
aaaaagaagaagaaaaag

SEQ ID NO: 792681 - RNA, 24 nt, Human
aaaaauacaaaauuuagccacgca

SEQ ID NO: 792682 - RNA, 22 nt, Human
aaaagaagaagaaaaagaaaaa

SEQ ID NO: 792683 - RNA, 23 nt, Human
aaacccuggcucuauuaaaaaua

SEQ ID NO: 792684 - RNA, 23 nt, Human
aaacuaaaaauuugucucucaau

SEQ ID NO: 792685 - RNA, 19 nt, Human
aaagaagaagaaaaagaaa

SEQ ID NO: 792686 - RNA, 24 nt, Human
aaagugcugggauuacaggcguga

SEQ ID NO: 792687 - RNA, 23 nt, Human
aaaugcuuauuuuuugaacucuu

SEQ ID NO: 792688 - RNA, 19 nt, Human
aacaaaaguaaauuuaaau

SEQ ID NO: 792689 - RNA, 20 nt, Human
aacaagaucuguguuacaag

SEQ ID NO: 792690 - RNA, 22 nt, Human
aacauggcaaaacccuggcucu

SEQ ID NO: 792691 - RNA, 18 nt, Human
aagaagaaaaagaaaaac

SEQ ID NO: 792692 - RNA, 21 nt, Human
aagaagaaaaagaaaaacuaa

SEQ ID NO: 792693 - RNA, 18 nt, Human
aagaagaagaaaaagaaa

SEQ ID NO: 792694 - RNA, 21 nt, Human
aagcugggcggaucaccuaaa

SEQ ID NO: 792695 - RNA, 19 nt, Human
aagugcugggauuacaggc

SEQ ID NO: 792696 - RNA, 19 nt, Human
aagugcugggauuacaggc

SEQ ID NO: 792697 - RNA, 26 nt, Human
aagugcugggauuacaggcgugagcc

SEQ ID NO: 792698 - RNA, 24 nt, Human
aaucacuugaacccuggagacgga

SEQ ID NO: 792699 - RNA, 24 nt, Human
aauuuuguauuuuuaguagagaug

SEQ ID NO: 792700 - RNA, 19 nt, Human
acauuccuuauuugcagga

SEQ ID NO: 792701 - RNA, 25 nt, Human
accuaaagucucgaguucgagacca

SEQ ID NO: 792702 - RNA, 25 nt, Human
accuuuuaccuacacccuugaguaa

SEQ ID NO: 792703 - RNA, 19 nt, Human
acgcauggugguuugcgcc

SEQ ID NO: 792704 - RNA, 19 nt, Human
acuccagccugggggggcg

SEQ ID NO: 792705 - RNA, 22 nt, Human
acuguacuccagccuggggggg

SEQ ID NO: 792706 - RNA, 26 nt, Human
acuguacuccagccugggggggcgau

SEQ ID NO: 792707 - RNA, 19 nt, Human
acuuugucacccaggacgg

SEQ ID NO: 792708 - RNA, 25 nt, Human
agaaccucuuuacuuagauuuucau

SEQ ID NO: 792709 - RNA, 20 nt, Human
agaagaaaaagaaaaacuaa

SEQ ID NO: 792710 - RNA, 20 nt, Human
agacggagguugcagugagc

SEQ ID NO: 792711 - RNA, 24 nt, Human
agacggagguugcagugagcugag

SEQ ID NO: 792712 - RNA, 19 nt, Human
agagaauucuauggccaca

SEQ ID NO: 792713 - RNA, 18 nt, Human
agccuggccaacauggca

SEQ ID NO: 792714 - RNA, 24 nt, Human
agccuggccaacauggcaaaaccc

SEQ ID NO: 792715 - RNA, 18 nt, Human
aggcaggagaaucacuug

SEQ ID NO: 792716 - RNA, 23 nt, Human
aggcaggagaaucacuugaaccc

SEQ ID NO: 792717 - RNA, 24 nt, Human
aggcgcaguggcuaacaccuguaa

SEQ ID NO: 792718 - RNA, 23 nt, Human
aggcgugagccaccgugcccggc

SEQ ID NO: 792719 - RNA, 24 nt, Human
aggcugaggcaggagaaucacuug

SEQ ID NO: 792720 - RNA, 24 nt, Human
aggugaucuacccaccuuugccuc

SEQ ID NO: 792721 - RNA, 22 nt, Human
aguagagauggcguuucuccau

SEQ ID NO: 792722 - RNA, 21 nt, Human
aguagcugggauuacaggcau

SEQ ID NO: 792723 - RNA, 24 nt, Human
agugauucuccugccucagccucc

SEQ ID NO: 792724 - RNA, 18 nt, Human
agugcugggauuacaggc

SEQ ID NO: 792725 - RNA, 25 nt, Human
auaaauucucugauguugaacaaag

SEQ ID NO: 792726 - RNA, 23 nt, Human
auagagcaagacuccaucuaaaa

SEQ ID NO: 792727 - RNA, 24 nt, Human
auaugccugaaaaaacuaacaaaa

SEQ ID NO: 792728 - RNA, 19 nt, Human
augaauuaccuuaccuaca

SEQ ID NO: 792729 - RNA, 24 nt, Human
auggcguuucuccauguuggucag

SEQ ID NO: 792730 - RNA, 24 nt, Human
caaagugcugggauuacaggcgug

SEQ ID NO: 792731 - RNA, 20 nt, Human
caagcugggcggaucaccua

SEQ ID NO: 792732 - RNA, 20 nt, Human
caagugauucuccugccuca

SEQ ID NO: 792733 - RNA, 22 nt, Human
caagugauucuccugccucagc

SEQ ID NO: 792734 - RNA, 24 nt, Human
caaucguauauuuuaaaaaaacua

SEQ ID NO: 792735 - RNA, 23 nt, Human
caccgcaaccucugcuucccggg

SEQ ID NO: 792736 - RNA, 22 nt, Human
caccuguaauugcagcauugcg

SEQ ID NO: 792737 - RNA, 24 nt, Human
caccuguaauugcagcauugcggg

SEQ ID NO: 792738 - RNA, 18 nt, Human
cacuguacuccagccugg

SEQ ID NO: 792739 - RNA, 19 nt, Human
cacuguacuccagccuggg

SEQ ID NO: 792740 - RNA, 19 nt, Human
cacuguacuccagccuggg

SEQ ID NO: 792741 - RNA, 20 nt, Human
cacuguacuccagccugggg

SEQ ID NO: 792742 - RNA, 25 nt, Human
cacuguacuccagccugggggggcg

SEQ ID NO: 792743 - RNA, 24 nt, Human
cacuuugucacccaggacggagug

SEQ ID NO: 792744 - RNA, 22 nt, Human
cagaauaugccauauauaacau

SEQ ID NO: 792745 - RNA, 22 nt, Human
cagaaugaauacaacaagaucu

SEQ ID NO: 792746 - RNA, 19 nt, Human
cagcacuuuaaaugcuuau

SEQ ID NO: 792747 - RNA, 24 nt, Human
cagccacuugggaggcugaggcag

SEQ ID NO: 792748 - RNA, 24 nt, Human
cauguuggucaggcuggucuugaa

SEQ ID NO: 792749 - RNA, 20 nt, Human
cauuuucauaaaaguaaaau

SEQ ID NO: 792750 - RNA, 21 nt, Human
cauuuucauaaaaguaaaauu

SEQ ID NO: 792751 - RNA, 22 nt, Human
ccaaagugcugggauuacaggc

SEQ ID NO: 792752 - RNA, 22 nt, Human
ccaaagugcugggauuacaggc

SEQ ID NO: 792753 - RNA, 24 nt, Human
ccaaagugcugggauuacaggcgu

SEQ ID NO: 792754 - RNA, 19 nt, Human
ccacuguacuccagccugg

SEQ ID NO: 792755 - RNA, 20 nt, Human
ccacuguacuccagccuggg

SEQ ID NO: 792756 - RNA, 20 nt, Human
ccacuguacuccagccuggg

SEQ ID NO: 792757 - RNA, 24 nt, Human
ccacuguacuccagccuggggggg

SEQ ID NO: 792758 - RNA, 25 nt, Human
ccacuguacuccagccugggggggc

SEQ ID NO: 792759 - RNA, 25 nt, Human
ccaucuaaaaaaaaaaaaaaaaaga

SEQ ID NO: 792760 - RNA, 19 nt, Human
ccauguuggucaggcuggu

SEQ ID NO: 792761 - RNA, 24 nt, Human
cccgaccucaggugaucuacccac

SEQ ID NO: 792762 - RNA, 23 nt, Human
cccgaguagcugggauuacaggc

SEQ ID NO: 792763 - RNA, 24 nt, Human
cccgaguagcugggauuacaggca

SEQ ID NO: 792764 - RNA, 23 nt, Human
cccggguucaagugauucuccuc

SEQ ID NO: 792765 - RNA, 23 nt, Human
cccggguucaagugauucuccug

SEQ ID NO: 792766 - RNA, 23 nt, Human
ccgaguagcugggauuacaggca

SEQ ID NO: 792767 - RNA, 24 nt, Human
ccgaguagcugggauuacaggcau

SEQ ID NO: 792768 - RNA, 23 nt, Human
ccgcaaccucugcuucccggguu

SEQ ID NO: 792769 - RNA, 24 nt, Human
ccgcaaccucugcuucccggguuc

SEQ ID NO: 792770 - RNA, 23 nt, Human
ccugccucagccucccgaguagc

SEQ ID NO: 792771 - RNA, 20 nt, Human
ccuggagacggagguugcag

SEQ ID NO: 792772 - RNA, 22 nt, Human
ccuggccaacauggcaaaaccc

SEQ ID NO: 792773 - RNA, 24 nt, Human
ccuggccaacauggcaaaacccug

SEQ ID NO: 792774 - RNA, 22 nt, Human
ccuguaaucccagccacuuggg

SEQ ID NO: 792775 - RNA, 26 nt, Human
ccuguaauugcagcauugcgggaggc

SEQ ID NO: 792776 - RNA, 22 nt, Human
ccuugaguaagguggacuaggu

SEQ ID NO: 792777 - RNA, 21 nt, Human
cgagaccagccuggccaacau

SEQ ID NO: 792778 - RNA, 21 nt, Human
cgccuguaaucccagccacuu

SEQ ID NO: 792779 - RNA, 23 nt, Human
cgccuguaaucccagccacuugg

SEQ ID NO: 792780 - RNA, 23 nt, Human
cggagugccauggcaugaucucg

SEQ ID NO: 792781 - RNA, 24 nt, Human
cggagugccauggcaugaucucgg

SEQ ID NO: 792782 - RNA, 24 nt, Human
cggaucaccuaaagucucgaguuc

SEQ ID NO: 792783 - RNA, 25 nt, Human
cgugagccaccgugcccggccuugu

SEQ ID NO: 792784 - RNA, 24 nt, Human
cuaauuuuguauuuuuaguagaga

SEQ ID NO: 792785 - RNA, 24 nt, Human
cucaccgcaaccucugcuucccgg

SEQ ID NO: 792786 - RNA, 24 nt, Human
cucagccucccgaguagcugggau

SEQ ID NO: 792787 - RNA, 24 nt, Human
cuccauguuggucaggcuggucuu

SEQ ID NO: 792788 - RNA, 23 nt, Human
cugccucagccucccgaguagcu

SEQ ID NO: 792789 - RNA, 23 nt, Human
cugggcggaucaccuaaagucuc

SEQ ID NO: 792790 - RNA, 19 nt, Human
cuuagauuuucaucaugca

SEQ ID NO: 792791 - RNA, 21 nt, Human
cuucccggguucaagugauuc

SEQ ID NO: 792792 - RNA, 24 nt, Human
cuucccggguucaagugauucucc

SEQ ID NO: 792793 - RNA, 20 nt, Human
gaauucuauggccacauccc

SEQ ID NO: 792794 - RNA, 24 nt, Human
gaccucaggugaucuacccaccuu

SEQ ID NO: 792795 - RNA, 21 nt, Human
gagagggagucucacuuuguc

SEQ ID NO: 792796 - RNA, 23 nt, Human
gagguugcagugagcugagaucg

SEQ ID NO: 792797 - RNA, 24 nt, Human
gaguagcugggauuacaggcaugc

SEQ ID NO: 792798 - RNA, 24 nt, Human
gaucaccuaaagucucgaguucga

SEQ ID NO: 792799 - RNA, 18 nt, Human
gauuacaggcaugcgcca

SEQ ID NO: 792800 - RNA, 24 nt, Human
gauuacaggcaugcgccaccaugc

SEQ ID NO: 792801 - RNA, 18 nt, Human
gauuacaggcgugagcca

SEQ ID NO: 792802 - RNA, 21 nt, Human
gauuacaggcgugagccaccg

SEQ ID NO: 792803 - RNA, 24 nt, Human
gauuacaggcgugagccaccgugc

SEQ ID NO: 792804 - RNA, 18 nt, Human
gcagaauauuacucagaa

SEQ ID NO: 792805 - RNA, 23 nt, Human
gcaggagaaucacuugaacccug

SEQ ID NO: 792806 - RNA, 22 nt, Human
gcauggugguuugcgccuguaa

SEQ ID NO: 792807 - RNA, 19 nt, Human
gccacuguacuccagccug

SEQ ID NO: 792808 - RNA, 22 nt, Human
gccacuguacuccagccugggg

SEQ ID NO: 792809 - RNA, 23 nt, Human
gcuggucuugaacucccgaccuc

SEQ ID NO: 792810 - RNA, 22 nt, Human
ggagguugcagugagcugagau

SEQ ID NO: 792811 - RNA, 24 nt, Human
ggagguugcagugagcugagaucg

SEQ ID NO: 792812 - RNA, 24 nt, Human
ggauuacaggcaugcgccaccaug

SEQ ID NO: 792813 - RNA, 22 nt, Human
ggcguuucuccauguuggucag

SEQ ID NO: 792814 - RNA, 24 nt, Human
ggcuggucuugaacucccgaccuc

SEQ ID NO: 792815 - RNA, 19 nt, Human
gggaaaaaauaaauaaaaa

SEQ ID NO: 792816 - RNA, 23 nt, Human
gggaggccaagcugggcggauca

SEQ ID NO: 792817 - RNA, 22 nt, Human
ggguucaagugauucuccugcc

SEQ ID NO: 792818 - RNA, 24 nt, Human
ggugguuugcgccuguaaucccag

SEQ ID NO: 792819 - RNA, 21 nt, Human
gguuugcgccuguaaucccag

SEQ ID NO: 792820 - RNA, 18 nt, Human
guagcugggauuacaggc

SEQ ID NO: 792821 - RNA, 20 nt, Human
guagcugggauuacaggcau

SEQ ID NO: 792822 - RNA, 24 nt, Human
gugaucuacccaccuuugccuccc

SEQ ID NO: 792823 - RNA, 24 nt, Human
gugauucuccugccucagccuccc

SEQ ID NO: 792824 - RNA, 24 nt, Human
guugcagugagcugagaucgugcc

SEQ ID NO: 792825 - RNA, 19 nt, Human
uaaaaaaacuaaaacugua

SEQ ID NO: 792826 - RNA, 25 nt, Human
uaaaaauaacccuguagucaauaac

SEQ ID NO: 792827 - RNA, 20 nt, Human
uaaaaauacaaaauuuagcc

SEQ ID NO: 792828 - RNA, 21 nt, Human
uaaaaauacaaaauuuagcca

SEQ ID NO: 792829 - RNA, 22 nt, Human
uaaaacuaaaaauuugucucuc

SEQ ID NO: 792830 - RNA, 19 nt, Human
uaaaguuaccacaacuucg

SEQ ID NO: 792831 - RNA, 25 nt, Human
uaaaugcucaccuaauaaaaaauaa

SEQ ID NO: 792832 - RNA, 24 nt, Human
uacaaaaaauaaauucuaaaggug

SEQ ID NO: 792833 - RNA, 22 nt, Human
uacaggcaugcgccaccaugcc

SEQ ID NO: 792834 - RNA, 23 nt, Human
uacaggcgugagccaccgugccc

SEQ ID NO: 792835 - RNA, 22 nt, Human
uacccaccuuugccucccaaag

SEQ ID NO: 792836 - RNA, 23 nt, Human
uacccaccuuugccucccaaagu

SEQ ID NO: 792837 - RNA, 22 nt, Human
uacugcauuuucauaaaaguaa

SEQ ID NO: 792838 - RNA, 18 nt, Human
uacuguauaugcaaaaau

SEQ ID NO: 792839 - RNA, 24 nt, Human
uaguagagauggcguuucuccaug

SEQ ID NO: 792840 - RNA, 19 nt, Human
uaucagaauaugccauaua

SEQ ID NO: 792841 - RNA, 24 nt, Human
uauuuauuuuuugagagggagucu

SEQ ID NO: 792842 - RNA, 19 nt, Human
ucaagugauucuccugccu

SEQ ID NO: 792843 - RNA, 24 nt, Human
ucaccgcaaccucugcuucccggg

SEQ ID NO: 792844 - RNA, 20 nt, Human
ucagccucccgaguagcugg

SEQ ID NO: 792845 - RNA, 23 nt, Human
ucaggcaggcgcaguggcuaaca

SEQ ID NO: 792846 - RNA, 22 nt, Human
uccaucuaaaaaaaaaaaaaaa

SEQ ID NO: 792847 - RNA, 24 nt, Human
uccauguuggucaggcuggucuug

SEQ ID NO: 792848 - RNA, 24 nt, Human
ucccaaagugcugggauuacaggc

SEQ ID NO: 792849 - RNA, 18 nt, Human
ucccagccacuugggagg

SEQ ID NO: 792850 - RNA, 24 nt, Human
ucccgaguagcugggauuacaggc

SEQ ID NO: 792851 - RNA, 21 nt, Human
ucccggguucaagugauucuc

SEQ ID NO: 792852 - RNA, 24 nt, Human
ucccggguucaagugauucuccug

SEQ ID NO: 792853 - RNA, 19 nt, Human
uccuccagagagaauucua

SEQ ID NO: 792854 - RNA, 23 nt, Human
ucgugccacuguacuccagccug

SEQ ID NO: 792855 - RNA, 19 nt, Human
ucuaacauaaauucucuga

SEQ ID NO: 792856 - RNA, 19 nt, Human
ucucacuuugucacccagg

SEQ ID NO: 792857 - RNA, 20 nt, Human
ucucacuuugucacccagga

SEQ ID NO: 792858 - RNA, 24 nt, Human
ucucacuuugucacccaggacgga

SEQ ID NO: 792859 - RNA, 24 nt, Human
ucuccugccucagccucccgagua

SEQ ID NO: 792860 - RNA, 18 nt, Human
ucugcugugcggugucca

SEQ ID NO: 792861 - RNA, 20 nt, Human
ugaagugucauugccuuaua

SEQ ID NO: 792862 - RNA, 22 nt, Human
ugagcugagaucgugccacugu

SEQ ID NO: 792863 - RNA, 20 nt, Human
ugaggcaggagaaucacuug

SEQ ID NO: 792864 - RNA, 24 nt, Human
ugaggcaggagaaucacuugaacc

SEQ ID NO: 792865 - RNA, 25 nt, Human
ugaggcaggagaaucacuugaaccc

SEQ ID NO: 792866 - RNA, 24 nt, Human
ugaucuacccaccuuugccuccca

SEQ ID NO: 792867 - RNA, 20 nt, Human
ugauucuccugccucagccu

SEQ ID NO: 792868 - RNA, 22 nt, Human
ugcacaauauuuaaacuguuaa

SEQ ID NO: 792869 - RNA, 19 nt, Human
ugcauucuuuuaccaaaua

SEQ ID NO: 792870 - RNA, 24 nt, Human
ugccucagccucccgaguagcugg

SEQ ID NO: 792871 - RNA, 21 nt, Human
ugcgccuguaaucccagccac

SEQ ID NO: 792872 - RNA, 24 nt, Human
ugcgccuguaaucccagccacuug

SEQ ID NO: 792873 - RNA, 24 nt, Human
ugcugggauuacaggcgugagcca

SEQ ID NO: 792874 - RNA, 18 nt, Human
uggaauaaugugacuuga

SEQ ID NO: 792875 - RNA, 23 nt, Human
uggagacggagguugcagugagc

SEQ ID NO: 792876 - RNA, 19 nt, Human
uggauuacuuucuaaacuc

SEQ ID NO: 792877 - RNA, 24 nt, Human
uggcguuucuccauguuggucagg

SEQ ID NO: 792878 - RNA, 22 nt, Human
uggcuaacaccuguaauugcag

SEQ ID NO: 792879 - RNA, 19 nt, Human
ugggaggcugaggcaggag

SEQ ID NO: 792880 - RNA, 24 nt, Human
ugggaggcugaggcaggagaauca

SEQ ID NO: 792881 - RNA, 18 nt, Human
ugggauuacaggcaugcg

SEQ ID NO: 792882 - RNA, 21 nt, Human
ugggauuacaggcaugcgcca

SEQ ID NO: 792883 - RNA, 22 nt, Human
ugggauuacaggcaugcgccac

SEQ ID NO: 792884 - RNA, 24 nt, Human
ugggauuacaggcaugcgccacca

SEQ ID NO: 792885 - RNA, 18 nt, Human
ugggauuacaggcgugag

SEQ ID NO: 792886 - RNA, 21 nt, Human
ugggauuacaggcgugagcca

SEQ ID NO: 792887 - RNA, 22 nt, Human
ugggauuacaggcgugagccac

SEQ ID NO: 792888 - RNA, 23 nt, Human
ugggauuacaggcgugagccacc

SEQ ID NO: 792889 - RNA, 23 nt, Human
ugggauuacaggcgugagccacc

SEQ ID NO: 792890 - RNA, 24 nt, Human
ugggauuacaggcgugagccaccg

SEQ ID NO: 792891 - RNA, 24 nt, Human
ugggcggaucaccuaaagucucga

SEQ ID NO: 792892 - RNA, 23 nt, Human
uggucaggcuggucuugaacucc

SEQ ID NO: 792893 - RNA, 24 nt, Human
uggugguuugcgccuguaauccca

SEQ ID NO: 792894 - RNA, 21 nt, Human
ugguuugcgccuguaauccca

SEQ ID NO: 792895 - RNA, 22 nt, Human
ugguuugcgccuguaaucccag

SEQ ID NO: 792896 - RNA, 21 nt, Human
uguacauuuguucucaaguau

SEQ ID NO: 792897 - RNA, 21 nt, Human
uguuacaaguaaaguuaccac

SEQ ID NO: 792898 - RNA, 23 nt, Human
uuaacacgaaguaauuugaguua

SEQ ID NO: 792899 - RNA, 29 nt, Human
uuacuuauuuauuuuuugagagggagucc

SEQ ID NO: 792900 - RNA, 18 nt, Human
uuaguagagauggcguuu

SEQ ID NO: 792901 - RNA, 24 nt, Human
uuaguagagauggcguuucuccau

SEQ ID NO: 792902 - RNA, 20 nt, Human
uuagugcauucuuuuaccaa

SEQ ID NO: 792903 - RNA, 21 nt, Human
uucaagugauucuccugccuc

SEQ ID NO: 792904 - RNA, 23 nt, Human
uucaagugauucuccugccucag

SEQ ID NO: 792905 - RNA, 24 nt, Human
uucaagugauucuccugccucagc

SEQ ID NO: 792906 - RNA, 19 nt, Human
uucauaauacaaaaaauaa

SEQ ID NO: 792907 - RNA, 22 nt, Human
uuccuauauaaauucugcugug

SEQ ID NO: 792908 - RNA, 18 nt, Human
uugcagugagcugagauc

SEQ ID NO: 792909 - RNA, 21 nt, Human
uugcagugagcugagaucgug

SEQ ID NO: 792910 - RNA, 22 nt, Human
uugcagugagcugagaucgugc

SEQ ID NO: 792911 - RNA, 21 nt, Human
uugcgggaggccaagcugggc

SEQ ID NO: 792912 - RNA, 25 nt, Human
uugggaggcugaggcaggagaauca

SEQ ID NO: 792913 - RNA, 22 nt, Human
uuuaaugcuauuaauauaaacu

SEQ ID NO: 792914 - RNA, 21 nt, Human
uuucuaaacucagaacucuga

SEQ ID NO: 792915 - RNA, 21 nt, Human
uuucuccauguuggucaggcu

SEQ ID NO: 792916 - RNA, 19 nt, Human
uuuuguauuuuuaguagag

SEQ ID NO: 792917 - RNA, 20 nt, Human
uuuuguauuuuuaguagaga

SEQ ID NO: 792918 - RNA, 19 nt, Human
uuuuuaguagagauggcgu

SEQ ID NO: 792919 - RNA, 18 nt, Human
uuuuugaacucuuuugac

SEQ ID NO: 792920 - RNA, 27 nt, Human
acugcauuuuaaccuuccuggcuaacc

SEQ ID NO: 792921 - RNA, 19 nt, Human
agaacaacaagucagaggg

SEQ ID NO: 792922 - RNA, 25 nt, Human
caagaacaacaagucagagggggcc

SEQ ID NO: 792923 - RNA, 22 nt, Human
caagucagagggggccugaagg

SEQ ID NO: 792924 - RNA, 24 nt, Human
cacaaaguuccaaacacuuaccac

SEQ ID NO: 792925 - RNA, 21 nt, Human
cacuguacaguuauacaaaac

SEQ ID NO: 792926 - RNA, 22 nt, Human
cagagggcuaaagaugaaaggg

SEQ ID NO: 792927 - RNA, 23 nt, Human
cagcccagagugauucucugcag

SEQ ID NO: 792928 - RNA, 19 nt, Human
ccaagaacaacaagucaga

SEQ ID NO: 792929 - RNA, 27 nt, Human
ccagagugauucucugcagucgaccuc

SEQ ID NO: 792930 - RNA, 21 nt, Human
ccagcacacucgagucucgug

SEQ ID NO: 792931 - RNA, 20 nt, Human
ccaucugccguaugcuccuc

SEQ ID NO: 792932 - RNA, 20 nt, Human
cuaaaccuucguccaccagg

SEQ ID NO: 792933 - RNA, 23 nt, Human
cugccguaugcuccucugggucu

SEQ ID NO: 792934 - RNA, 22 nt, Human
ggccugaaggugccuuccacag

SEQ ID NO: 792935 - RNA, 22 nt, Human
guuuacacaaaguuccaaacac

SEQ ID NO: 792936 - RNA, 19 nt, Human
uaaaauaagaacaugugcc

SEQ ID NO: 792937 - RNA, 25 nt, Human
uaaaauaagaacaugugccaagaac

SEQ ID NO: 792938 - RNA, 25 nt, Human
uaacaacagcugauuaugcaccucu

SEQ ID NO: 792939 - RNA, 21 nt, Human
uaagaacaugugccaagaaca

SEQ ID NO: 792940 - RNA, 22 nt, Human
uacaaaacaguccagcccagag

SEQ ID NO: 792941 - RNA, 18 nt, Human
ucaaagcaaacugcaguc

SEQ ID NO: 792942 - RNA, 20 nt, Human
ucccucaaagcaaacugcag

SEQ ID NO: 792943 - RNA, 22 nt, Human
ucucugcaguuaaaauaagaac

SEQ ID NO: 792944 - RNA, 28 nt, Human
ucugcaguuaaaauaagaaccggggucc

SEQ ID NO: 792945 - RNA, 24 nt, Human
ucugccguaugcuccucugggucu

SEQ ID NO: 792946 - RNA, 21 nt, Human
ugcaaaagugcuucaaaguac

SEQ ID NO: 792947 - RNA, 19 nt, Human
ugccaagaacaacaaguca

SEQ ID NO: 792948 - RNA, 20 nt, Human
ugccagcacacucgagucuc

SEQ ID NO: 792949 - RNA, 24 nt, Human
ugcucacaacuaaaucccguuuac

SEQ ID NO: 792950 - RNA, 21 nt, Human
ugugccaagaacaacaaguca

SEQ ID NO: 792951 - RNA, 24 nt, Human
uuaaacacuguacaguuauacaaa

SEQ ID NO: 792952 - RNA, 22 nt, Human
uucucugcaguuaaaauaagaa

SEQ ID NO: 792953 - RNA, 24 nt, Human
aaaaaaaacaaccaaaaaccugga

SEQ ID NO: 792954 - RNA, 22 nt, Human
aaaaacuuacaaauuugagaac

SEQ ID NO: 792955 - RNA, 23 nt, Human
aaacaaccaaaaaccuggagaau

SEQ ID NO: 792956 - RNA, 24 nt, Human
aacacacaaacucacagcuuguca

SEQ ID NO: 792957 - RNA, 18 nt, Human
aacaucaaaaucaaguuu

SEQ ID NO: 792958 - RNA, 22 nt, Human
aaccaaaaaccuggagaauaaa

SEQ ID NO: 792959 - RNA, 23 nt, Human
aaccaaaaaccuggagaauaaac

SEQ ID NO: 792960 - RNA, 24 nt, Human
aagaaaaaaaaacaaccaaaaacc

SEQ ID NO: 792961 - RNA, 18 nt, Human
aagaaaaaaaaacaaccc

SEQ ID NO: 792962 - RNA, 25 nt, Human
aagaaagaaaaaaaaacaaccaaaa

SEQ ID NO: 792963 - RNA, 21 nt, Human
aagaaagaagaaagaaaaaaa

SEQ ID NO: 792964 - RNA, 22 nt, Human
aagaagaaagaaaaaaaaacaa

SEQ ID NO: 792965 - RNA, 20 nt, Human
aagaagccagcaaugagaua

SEQ ID NO: 792966 - RNA, 26 nt, Human
aagaagccagcaaugagauaaggaug

SEQ ID NO: 792967 - RNA, 23 nt, Human
aaggaccuguuuguaucaugcca

SEQ ID NO: 792968 - RNA, 21 nt, Human
acccagggaaagucauaauuu

SEQ ID NO: 792969 - RNA, 22 nt, Human
acccagggaaagucauaauuuu

SEQ ID NO: 792970 - RNA, 23 nt, Human
agaaaaaaaaacaaccaaaaacc

SEQ ID NO: 792971 - RNA, 25 nt, Human
agaaagaaaaaaaaacaaccaaaaa

SEQ ID NO: 792972 - RNA, 20 nt, Human
agaaagaagaaagaaaaaaa

SEQ ID NO: 792973 - RNA, 21 nt, Human
agccguauuucuaagcagcac

SEQ ID NO: 792974 - RNA, 21 nt, Human
aguuuuuaacauauacauaua

SEQ ID NO: 792975 - RNA, 31 nt, Human
auaaugaccauuaucuuuccaauauccccuu

SEQ ID NO: 792976 - RNA, 21 nt, Human
caauuaauguugccaguaaac

SEQ ID NO: 792977 - RNA, 19 nt, Human
ccccgccgccgccgccucu

SEQ ID NO: 792978 - RNA, 18 nt, Human
ccccuucuccuucagucc

SEQ ID NO: 792979 - RNA, 22 nt, Human
cccgccgccgccgccucugccu

SEQ ID NO: 792980 - RNA, 19 nt, Human
ccuccccgccgccgccgcc

SEQ ID NO: 792981 - RNA, 24 nt, Human
ccuccccgccgccgccgccucugc

SEQ ID NO: 792982 - RNA, 19 nt, Human
ccucugggcagccucggcc

SEQ ID NO: 792983 - RNA, 21 nt, Human
ccucugggcagccucggccgu

SEQ ID NO: 792984 - RNA, 19 nt, Human
ccuuacuucuggcuccugu

SEQ ID NO: 792985 - RNA, 21 nt, Human
cuaucagcauugacuuucagu

SEQ ID NO: 792986 - RNA, 19 nt, Human
cuccccuucuccuucaguc

SEQ ID NO: 792987 - RNA, 22 nt, Human
cucucgcugcugcugcugcugc

SEQ ID NO: 792988 - RNA, 25 nt, Human
cucucgcugcugcugcugcugcugc

SEQ ID NO: 792989 - RNA, 23 nt, Human
cugccucucgcugcugcugcugc

SEQ ID NO: 792990 - RNA, 18 nt, Human
cuggcuccuguuuugucu

SEQ ID NO: 792991 - RNA, 20 nt, Human
gaagggagggaagauagucu

SEQ ID NO: 792992 - RNA, 24 nt, Human
gcaauuagauuuuuuguccugauu

SEQ ID NO: 792993 - RNA, 21 nt, Human
gccucucgcugcugcugcugc

SEQ ID NO: 792994 - RNA, 19 nt, Human
gcugcugcugcugccgccg

SEQ ID NO: 792995 - RNA, 22 nt, Human
gcuguccuccccgccgccgccg

SEQ ID NO: 792996 - RNA, 18 nt, Human
ggaaaaggggaagaggag

SEQ ID NO: 792997 - RNA, 21 nt, Human
ggaagauagucuuuguaaaaa

SEQ ID NO: 792998 - RNA, 22 nt, Human
ggaagggagggaagauagucuu

SEQ ID NO: 792999 - RNA, 22 nt, Human
guuuguaucaugccauggagaa

SEQ ID NO: 793000 - RNA, 24 nt, Human
uaaaacaaauuugucagaaacuca

SEQ ID NO: 793001 - RNA, 20 nt, Human
uaaaguuuccccacacuuuc

SEQ ID NO: 793002 - RNA, 19 nt, Human
uaagaaagaagaaagaaaa

SEQ ID NO: 793003 - RNA, 23 nt, Human
uaagaaagaagaaagaaaaaaaa

SEQ ID NO: 793004 - RNA, 20 nt, Human
uaaugaacaauuuuuacugc

SEQ ID NO: 793005 - RNA, 24 nt, Human
uacagcauuuuguuguugcucaac

SEQ ID NO: 793006 - RNA, 19 nt, Human
uagcuauucuccccuucuc

SEQ ID NO: 793007 - RNA, 19 nt, Human
uaguacagagcccagccgu

SEQ ID NO: 793008 - RNA, 23 nt, Human
uaucaugccauggagaacuacag

SEQ ID NO: 793009 - RNA, 20 nt, Human
uauucuccccuucuccuuca

SEQ ID NO: 793010 - RNA, 19 nt, Human
ucaguccuuacuucuggcu

SEQ ID NO: 793011 - RNA, 24 nt, Human
ucccaaacagcaauuagauuuuuu

SEQ ID NO: 793012 - RNA, 22 nt, Human
uccccgccgccgccgccucugc

SEQ ID NO: 793013 - RNA, 21 nt, Human
ucgcugcugcugcugcugcug

SEQ ID NO: 793014 - RNA, 25 nt, Human
ucgcugcugcugcugcugcugccgg

SEQ ID NO: 793015 - RNA, 19 nt, Human
ucggccgugcuguccuccc

SEQ ID NO: 793016 - RNA, 21 nt, Human
ucucgcugcugcugcugcugc

SEQ ID NO: 793017 - RNA, 21 nt, Human
ucugaaguaagacaccuggag

SEQ ID NO: 793018 - RNA, 21 nt, Human
ucugccucucgcugcugcugc

SEQ ID NO: 793019 - RNA, 20 nt, Human
ugaggcccuucuuuuauugg

SEQ ID NO: 793020 - RNA, 20 nt, Human
ugcauaguacagagcccagc

SEQ ID NO: 793021 - RNA, 25 nt, Human
ugccucucgcugcugcugcugcugc

SEQ ID NO: 793022 - RNA, 19 nt, Human
uggaaagaagccagcaaug

SEQ ID NO: 793023 - RNA, 23 nt, Human
ugucagaaacucaaauacagcau

SEQ ID NO: 793024 - RNA, 20 nt, Human
uguuuuauuauauacccuuc

SEQ ID NO: 793025 - RNA, 22 nt, Human
uguuuugucuugugaggcccuu

SEQ ID NO: 793026 - RNA, 27 nt, Human
uuaccaaauuggauuccaguuguuuua

SEQ ID NO: 793027 - RNA, 23 nt, Human
uuacuuuuucuccuuuuuguuuu

SEQ ID NO: 793028 - RNA, 22 nt, Human
uuagcuauucuccccuucuccu

SEQ ID NO: 793029 - RNA, 19 nt, Human
uucaggcauuaagaaagaa

SEQ ID NO: 793030 - RNA, 22 nt, Human
uuccuauauccuuuucccugca

SEQ ID NO: 793031 - RNA, 23 nt, Human
uuccuauauccuuuucccugcag

SEQ ID NO: 793032 - RNA, 21 nt, Human
uucugaaguaagacaccugga

SEQ ID NO: 793033 - RNA, 22 nt, Human
uucuggcuccuguuuugucuug

SEQ ID NO: 793034 - RNA, 25 nt, Human
uuuaaaacaaauuugucagaaacuc

SEQ ID NO: 793035 - RNA, 18 nt, Human
uuuguuguugcucaacuu

SEQ ID NO: 793036 - RNA, 22 nt, Human
uuuucugacauuguuuuucuga

SEQ ID NO: 793037 - RNA, 21 nt, Human
aaacagagaaagggggacccc

SEQ ID NO: 793038 - RNA, 18 nt, Human
aaccccgcccugggcacg

SEQ ID NO: 793039 - RNA, 19 nt, Human
aacgagggaaacagagaaa

SEQ ID NO: 793040 - RNA, 24 nt, Human
aagccagacccgaccggaccagga

SEQ ID NO: 793041 - RNA, 19 nt, Human
aaucuaggucacccucccc

SEQ ID NO: 793042 - RNA, 22 nt, Human
aaucuaggucacccucccccaa

SEQ ID NO: 793043 - RNA, 18 nt, Human
acaaacgagggaaacaga

SEQ ID NO: 793044 - RNA, 19 nt, Human
acaaacgagggaaacagag

SEQ ID NO: 793045 - RNA, 23 nt, Human
acacacacacacacacacacaca

SEQ ID NO: 793046 - RNA, 23 nt, Human
acacacacacacacacacacaca

SEQ ID NO: 793047 - RNA, 23 nt, Human
acacacacacacacacacacaca

SEQ ID NO: 793048 - RNA, 23 nt, Human
acacacacacacacacacacaca

SEQ ID NO: 793049 - RNA, 23 nt, Human
acacacacacacacacacacaca

SEQ ID NO: 793050 - RNA, 23 nt, Human
acacacacacacacacacacaca

SEQ ID NO: 793051 - RNA, 23 nt, Human
acacacacacacacacacacaca

SEQ ID NO: 793052 - RNA, 23 nt, Human
acacacacacacacacacacaca

SEQ ID NO: 793053 - RNA, 24 nt, Human
acacacacacacacacacacacag

SEQ ID NO: 793054 - RNA, 25 nt, Human
acacacacacacacacacacacagu

SEQ ID NO: 793055 - RNA, 22 nt, Human
acacacacacacacacacacag

SEQ ID NO: 793056 - RNA, 27 nt, Human
acacauacagacacacacacaggucag

SEQ ID NO: 793057 - RNA, 24 nt, Human
acauacagacacacacacagguca

SEQ ID NO: 793058 - RNA, 20 nt, Human
accccaagccagacccgacc

SEQ ID NO: 793059 - RNA, 22 nt, Human
acccucccccaacacacacaca

SEQ ID NO: 793060 - RNA, 21 nt, Human
acuacagagagacgacaagag

SEQ ID NO: 793061 - RNA, 18 nt, Human
agagaaaggagaggcaaa

SEQ ID NO: 793062 - RNA, 21 nt, Human
agccgcagcccgaggcugccc

SEQ ID NO: 793063 - RNA, 26 nt, Human
aggagagacagggagacuagacaaaa

SEQ ID NO: 793064 - RNA, 24 nt, Human
aggcuuuggaggccgccgcgggac

SEQ ID NO: 793065 - RNA, 22 nt, Human
agggagacuagacaaaaccagg

SEQ ID NO: 793066 - RNA, 18 nt, Human
agggccgagggacaagag

SEQ ID NO: 793067 - RNA, 24 nt, Human
augaguaaagagaagaaaucagga

SEQ ID NO: 793068 - RNA, 23 nt, Human
caaacgagggaaacagagaaagg

SEQ ID NO: 793069 - RNA, 26 nt, Human
caagaaaugggccccucgccccggcc

SEQ ID NO: 793070 - RNA, 20 nt, Human
cacacacacacacacacaca

SEQ ID NO: 793071 - RNA, 20 nt, Human
cacacacacacacacacaca

SEQ ID NO: 793072 - RNA, 20 nt, Human
cacacacacacacacacaca

SEQ ID NO: 793073 - RNA, 20 nt, Human
cacacacacacacacacaca

SEQ ID NO: 793074 - RNA, 20 nt, Human
cacacacacacacacacaca

SEQ ID NO: 793075 - RNA, 20 nt, Human
cacacacacacacacacaca

SEQ ID NO: 793076 - RNA, 20 nt, Human
cacacacacacacacacaca

SEQ ID NO: 793077 - RNA, 20 nt, Human
cacacacacacacacacaca

SEQ ID NO: 793078 - RNA, 20 nt, Human
cacacacacacacacacaca

SEQ ID NO: 793079 - RNA, 20 nt, Human
cacacacacacacacacaca

SEQ ID NO: 793080 - RNA, 20 nt, Human
cacacacacacacacacaca

SEQ ID NO: 793081 - RNA, 22 nt, Human
cacacacacacacacacacaca

SEQ ID NO: 793082 - RNA, 22 nt, Human
cacacacacacacacacacaca

SEQ ID NO: 793083 - RNA, 22 nt, Human
cacacacacacacacacacaca

SEQ ID NO: 793084 - RNA, 26 nt, Human
cacacacacacacacacacacacaca

SEQ ID NO: 793085 - RNA, 26 nt, Human
cacacacacacacacacacacacaca

SEQ ID NO: 793086 - RNA, 26 nt, Human
cacacacacacacacacacacacaca

SEQ ID NO: 793087 - RNA, 26 nt, Human
cacacacacacacacacacacacaca

SEQ ID NO: 793088 - RNA, 29 nt, Human
cacacacacacacacacacacacacuaca

SEQ ID NO: 793089 - RNA, 27 nt, Human
cacacacacacacacacacacacuaca

SEQ ID NO: 793090 - RNA, 27 nt, Human
cacacacacacacacacacacacuaca

SEQ ID NO: 793091 - RNA, 30 nt, Human
cacacacacacacacacacacuacacgcgg

SEQ ID NO: 793092 - RNA, 25 nt, Human
cacacacacacacacuacacgcgga

SEQ ID NO: 793093 - RNA, 25 nt, Human
cacacacacacacuacacgcggaca

SEQ ID NO: 793094 - RNA, 22 nt, Human
cacacauacagacacacacaca

SEQ ID NO: 793095 - RNA, 21 nt, Human
cagacccgaccggaccaggaa

SEQ ID NO: 793096 - RNA, 19 nt, Human
cagcagggccucagacaca

SEQ ID NO: 793097 - RNA, 24 nt, Human
cagcccgaggcugccccgcccccu

SEQ ID NO: 793098 - RNA, 18 nt, Human
cagggggcccugccccuc

SEQ ID NO: 793099 - RNA, 26 nt, Human
ccaacacacacacacacacacacaca

SEQ ID NO: 793100 - RNA, 22 nt, Human
ccaagccagacccgaccggacc

SEQ ID NO: 793101 - RNA, 19 nt, Human
ccagacccgaccggaccag

SEQ ID NO: 793102 - RNA, 21 nt, Human
cccaacacacacacacacaca

SEQ ID NO: 793103 - RNA, 26 nt, Human
ccccaagccagacccgaccggaccag

SEQ ID NO: 793104 - RNA, 18 nt, Human
ccccaguuagucaucuuc

SEQ ID NO: 793105 - RNA, 20 nt, Human
ccccaguuagucaucuuccc

SEQ ID NO: 793106 - RNA, 23 nt, Human
ccccgcccccucccggggacaag

SEQ ID NO: 793107 - RNA, 23 nt, Human
cccgaggcugccccgcccccucc

SEQ ID NO: 793108 - RNA, 22 nt, Human
cccgcccccucccggggacaag

SEQ ID NO: 793109 - RNA, 21 nt, Human
ccgaaccccgcccugggcacg

SEQ ID NO: 793110 - RNA, 23 nt, Human
ccgccgcgggacagaauaggauc

SEQ ID NO: 793111 - RNA, 24 nt, Human
ccggccccgggugacgggcugggg

SEQ ID NO: 793112 - RNA, 19 nt, Human
ccgguccccgaaccccgcc

SEQ ID NO: 793113 - RNA, 18 nt, Human
ccucccggggacaagggc

SEQ ID NO: 793114 - RNA, 22 nt, Human
ccucccggggacaagggcgcgu

SEQ ID NO: 793115 - RNA, 22 nt, Human
ccucgccccggccccgggugac

SEQ ID NO: 793116 - RNA, 24 nt, Human
ccucuaagucucucagaggauaaa

SEQ ID NO: 793117 - RNA, 18 nt, Human
cgggcugggggagggggc

SEQ ID NO: 793118 - RNA, 20 nt, Human
cuucccaucuuccuucaguc

SEQ ID NO: 793119 - RNA, 18 nt, Human
gaagggaggccggcagcc

SEQ ID NO: 793120 - RNA, 22 nt, Human
gacaggacagagagaaaggaga

SEQ ID NO: 793121 - RNA, 19 nt, Human
gacgacaggacagagagaa

SEQ ID NO: 793122 - RNA, 23 nt, Human
gacgacaggacagagagaaagga

SEQ ID NO: 793123 - RNA, 19 nt, Human
gaguccauaggggaaggga

SEQ ID NO: 793124 - RNA, 22 nt, Human
gccccagcguccgugcggcugg

SEQ ID NO: 793125 - RNA, 22 nt, Human
gccccgggugacgggcuggggg

SEQ ID NO: 793126 - RNA, 19 nt, Human
gccccucgccccggccccg

SEQ ID NO: 793127 - RNA, 23 nt, Human
gcgcugcgcuuucucccaguccc

SEQ ID NO: 793128 - RNA, 23 nt, Human
gcugcaaucuaggucacccuccc

SEQ ID NO: 793129 - RNA, 22 nt, Human
ggaaacagagaaagggggaccg

SEQ ID NO: 793130 - RNA, 20 nt, Human
ggacacacauacagacacac

SEQ ID NO: 793131 - RNA, 22 nt, Human
ggacacacauacagacacacac

SEQ ID NO: 793132 - RNA, 20 nt, Human
ggagacuagacaaaaccagg

SEQ ID NO: 793133 - RNA, 21 nt, Human
ggagacuagacaaaaccaggg

SEQ ID NO: 793134 - RNA, 23 nt, Human
ggcaaauagggaaagacaggcac

SEQ ID NO: 793135 - RNA, 23 nt, Human
gggaggcuuuggaggccgccgcg

SEQ ID NO: 793136 - RNA, 21 nt, Human
gggauagagacaaacgaggga

SEQ ID NO: 793137 - RNA, 22 nt, Human
gggcguggccucgagccgcagc

SEQ ID NO: 793138 - RNA, 23 nt, Human
gggcguggccucgagccgcagcc

SEQ ID NO: 793139 - RNA, 23 nt, Human
ggguggggugggaggcuuuggag

SEQ ID NO: 793140 - RNA, 23 nt, Human
uaaaagccugucugccagucucc

SEQ ID NO: 793141 - RNA, 19 nt, Human
ucaggagagacagggagac

SEQ ID NO: 793142 - RNA, 19 nt, Human
uccagugggaccugcccgg

SEQ ID NO: 793143 - RNA, 21 nt, Human
ucccaucuuccuucagucuca

SEQ ID NO: 793144 - RNA, 19 nt, Human
ucgagccgcagcccgaggc

SEQ ID NO: 793145 - RNA, 20 nt, Human
ucggcggcgcacggcggcga

SEQ ID NO: 793146 - RNA, 21 nt, Human
ucggcggcgcacggcggcgau

SEQ ID NO: 793147 - RNA, 18 nt, Human
ucucucagaggauaaaag

SEQ ID NO: 793148 - RNA, 18 nt, Human
ucugccagucuccuccgg

SEQ ID NO: 793149 - RNA, 23 nt, Human
ugaguaaagagaagaaaucagga

SEQ ID NO: 793150 - RNA, 28 nt, Human
ugcggcugggcguuuggucugcggcacc

SEQ ID NO: 793151 - RNA, 23 nt, Human
ugcugcagugucagggggcccug

SEQ ID NO: 793152 - RNA, 20 nt, Human
uggcgaagucucggcggcgc

SEQ ID NO: 793153 - RNA, 19 nt, Human
ugggaccugcccgggagaa

SEQ ID NO: 793154 - RNA, 21 nt, Human
ugggcacgggggcguggccuc

SEQ ID NO: 793155 - RNA, 21 nt, Human
uggggugggaggcuuuggagg

SEQ ID NO: 793156 - RNA, 22 nt, Human
uggggugggaggcuuuggaggc

SEQ ID NO: 793157 - RNA, 23 nt, Human
uggggugggaggcuuuggaggcc

SEQ ID NO: 793158 - RNA, 18 nt, Human
ugggguggggugggaggc

SEQ ID NO: 793159 - RNA, 21 nt, Human
ugggguggggugggaggcuuu

SEQ ID NO: 793160 - RNA, 20 nt, Human
uuaugaucauuuuauuuuug

SEQ ID NO: 793161 - RNA, 19 nt, Human
uucucccagucccgcccca

SEQ ID NO: 793162 - RNA, 22 nt, Human
uuggauuuuguucgugugggga

SEQ ID NO: 793163 - RNA, 20 nt, Human
aaccacagucaccgucccug

SEQ ID NO: 793164 - RNA, 21 nt, Human
aagcagaugguaagggucagg

SEQ ID NO: 793165 - RNA, 22 nt, Human
aagcagaugguaagggucaggg

SEQ ID NO: 793166 - RNA, 25 nt, Human
aaggagcuggggcugugauucaggg

SEQ ID NO: 793167 - RNA, 20 nt, Human
accccacccagcagugauua

SEQ ID NO: 793168 - RNA, 20 nt, Human
accgugugguuggagcuggg

SEQ ID NO: 793169 - RNA, 19 nt, Human
acucggggaagugggacuu

SEQ ID NO: 793170 - RNA, 20 nt, Human
agccuggcagccccgcccug

SEQ ID NO: 793171 - RNA, 18 nt, Human
aggacaaucccccuaccc

SEQ ID NO: 793172 - RNA, 19 nt, Human
agggcaggaaggguggccu

SEQ ID NO: 793173 - RNA, 20 nt, Human
aguuccugggccggcugcuc

SEQ ID NO: 793174 - RNA, 21 nt, Human
caaucccccuacccccacccc

SEQ ID NO: 793175 - RNA, 21 nt, Human
cacccugggugccugcagagc

SEQ ID NO: 793176 - RNA, 22 nt, Human
cacugaagucuuucaggaagca

SEQ ID NO: 793177 - RNA, 21 nt, Human
cagagccuggcagccccgccc

SEQ ID NO: 793178 - RNA, 20 nt, Human
caggauguucacagccgugg

SEQ ID NO: 793179 - RNA, 19 nt, Human
caggcugcugggcagggag

SEQ ID NO: 793180 - RNA, 24 nt, Human
ccaggacaaucccccuacccccac

SEQ ID NO: 793181 - RNA, 24 nt, Human
cccagcagugauuaaaaacccgua

SEQ ID NO: 793182 - RNA, 20 nt, Human
cccccuacccccaccccacc

SEQ ID NO: 793183 - RNA, 24 nt, Human
cccccuacccccaccccacccagc

SEQ ID NO: 793184 - RNA, 20 nt, Human
ccccuacccccaccccaccc

SEQ ID NO: 793185 - RNA, 24 nt, Human
ccuccccacccugggugccugcag

SEQ ID NO: 793186 - RNA, 23 nt, Human
cuccuuagaaugggaggcgaaca

SEQ ID NO: 793187 - RNA, 21 nt, Human
cugcuccacagccugcuccuc

SEQ ID NO: 793188 - RNA, 23 nt, Human
cugggcagggagggcaaaggaga

SEQ ID NO: 793189 - RNA, 23 nt, Human
cuucccacggagcaugcagaggu

SEQ ID NO: 793190 - RNA, 18 nt, Human
gaacauuuggcaccuaga

SEQ ID NO: 793191 - RNA, 19 nt, Human
gaagugggacuuugucgac

SEQ ID NO: 793192 - RNA, 21 nt, Human
gaauuuaccucacuugauacc

SEQ ID NO: 793193 - RNA, 21 nt, Human
gacugcauagcgguugcagau

SEQ ID NO: 793194 - RNA, 22 nt, Human
gagagcaccauucugcggguag

SEQ ID NO: 793195 - RNA, 20 nt, Human
gaugggggucaaggagcugg

SEQ ID NO: 793196 - RNA, 19 nt, Human
gccuccugcacguagacga

SEQ ID NO: 793197 - RNA, 18 nt, Human
gccugcuccuccacaggc

SEQ ID NO: 793198 - RNA, 19 nt, Human
ggacaccaccagguggugc

SEQ ID NO: 793199 - RNA, 19 nt, Human
ggcaguggcgucauggguc

SEQ ID NO: 793200 - RNA, 19 nt, Human
gggugugugucuaugcugg

SEQ ID NO: 793201 - RNA, 23 nt, Human
ggugccauggcaaccaccgaggc

SEQ ID NO: 793202 - RNA, 23 nt, Human
guagacgaugaacuccgaggccu

SEQ ID NO: 793203 - RNA, 18 nt, Human
uaaccacagucaccgucc

SEQ ID NO: 793204 - RNA, 23 nt, Human
uaggagaguccuaucaggcugcu

SEQ ID NO: 793205 - RNA, 22 nt, Human
ucacagccgugggguccagucg

SEQ ID NO: 793206 - RNA, 20 nt, Human
ucagggggugugugucuaug

SEQ ID NO: 793207 - RNA, 18 nt, Human
ucccccuacccccacccc

SEQ ID NO: 793208 - RNA, 20 nt, Human
ucggcaagcuccacggacgc

SEQ ID NO: 793209 - RNA, 18 nt, Human
ugaagucuuucaggaagc

SEQ ID NO: 793210 - RNA, 19 nt, Human
ugaggccaccgccucucca

SEQ ID NO: 793211 - RNA, 18 nt, Human
ugcguguagacagucacc

SEQ ID NO: 793212 - RNA, 24 nt, Human
ugggacuuugucgacaaagccagg

SEQ ID NO: 793213 - RNA, 23 nt, Human
ugggcagggagggcaaaggagag

SEQ ID NO: 793214 - RNA, 24 nt, Human
ugggccggcugcuccacagccugc

SEQ ID NO: 793215 - RNA, 18 nt, Human
ugggguguguguagggga

SEQ ID NO: 793216 - RNA, 19 nt, Human
ugggucucggcgcccagcu

SEQ ID NO: 793217 - RNA, 19 nt, Human
ugggugccugcagagccug

SEQ ID NO: 793218 - RNA, 24 nt, Human
ugugauggcugucucccucucacc

SEQ ID NO: 793219 - RNA, 18 nt, Human
ugugggguguguguaggg

SEQ ID NO: 793220 - RNA, 21 nt, Human
uguucacagccguggggucca

SEQ ID NO: 793221 - RNA, 24 nt, Human
uguuugaaucuugaagcaaggggu

SEQ ID NO: 793222 - RNA, 20 nt, Human
uuccugggccggcugcucca

SEQ ID NO: 793223 - RNA, 23 nt, Human
uugcuggugaugcugacugccuu

SEQ ID NO: 793224 - RNA, 25 nt, Human
uuucucguaaaccuccaccaagggc

SEQ ID NO: 793225 - RNA, 18 nt, Human
aaaacaaauaauacaaaa

SEQ ID NO: 793226 - RNA, 21 nt, Human
aaaagcaaaugcgaaaguugu

SEQ ID NO: 793227 - RNA, 23 nt, Human
aaacaaauaauacaaaacaucuc

SEQ ID NO: 793228 - RNA, 18 nt, Human
aaacaugaaagagagaaa

SEQ ID NO: 793229 - RNA, 21 nt, Human
aaaccaccagaaauauuacag

SEQ ID NO: 793230 - RNA, 18 nt, Human
aaaccagagacaaaaacg

SEQ ID NO: 793231 - RNA, 20 nt, Human
aaagaaccacuaagccaaua

SEQ ID NO: 793232 - RNA, 21 nt, Human
aaagaagaaagacuagcugcc

SEQ ID NO: 793233 - RNA, 22 nt, Human
aacuaggaaaaaagcaaaacaa

SEQ ID NO: 793234 - RNA, 19 nt, Human
aacucaucccccgcauccc

SEQ ID NO: 793235 - RNA, 22 nt, Human
aacucaucccccgcauccccua

SEQ ID NO: 793236 - RNA, 18 nt, Human
aagaaagaagaaagacua

SEQ ID NO: 793237 - RNA, 21 nt, Human
aagaaauagacuuguaguuca

SEQ ID NO: 793238 - RNA, 24 nt, Human
aagagagaaagaauuuaaaaaaga

SEQ ID NO: 793239 - RNA, 20 nt, Human
aagcaaaacaaaacaaauaa

SEQ ID NO: 793240 - RNA, 25 nt, Human
aagcaaaacaaaacaaauaauacaa

SEQ ID NO: 793241 - RNA, 22 nt, Human
aagcaaaugcgaaaguugucua

SEQ ID NO: 793242 - RNA, 22 nt, Human
aagcagagagaaaacauuccag

SEQ ID NO: 793243 - RNA, 18 nt, Human
aagccuagaggccagccu

SEQ ID NO: 793244 - RNA, 19 nt, Human
aagggucauaaacuugaaa

SEQ ID NO: 793245 - RNA, 19 nt, Human
aaguagcugggacuacagg

SEQ ID NO: 793246 - RNA, 20 nt, Human
aaguagcugggacuacaggc

SEQ ID NO: 793247 - RNA, 25 nt, Human
aaguagcugggacuacaggcgcccg

SEQ ID NO: 793248 - RNA, 19 nt, Human
aaguugcuauuucagaaga

SEQ ID NO: 793249 - RNA, 19 nt, Human
aauaauacaaaacaucucu

SEQ ID NO: 793250 - RNA, 26 nt, Human
aauagcuuuaauuagcuaaguuggca

SEQ ID NO: 793251 - RNA, 21 nt, Human
acaaaguagauaaauuuauca

SEQ ID NO: 793252 - RNA, 26 nt, Human
acaaggaagaaagauauucuuuuuca

SEQ ID NO: 793253 - RNA, 21 nt, Human
acacauagaaaaauaaaagca

SEQ ID NO: 793254 - RNA, 21 nt, Human
acaggcgcccgccaccacacc

SEQ ID NO: 793255 - RNA, 22 nt, Human
acagugucuuacagucaugcuc

SEQ ID NO: 793256 - RNA, 18 nt, Human
accaaucacaaggaagaa

SEQ ID NO: 793257 - RNA, 20 nt, Human
acccaccucugccucccaga

SEQ ID NO: 793258 - RNA, 19 nt, Human
acccaggcuggagugcagu

SEQ ID NO: 793259 - RNA, 23 nt, Human
acccaggcuggagugcaguggug

SEQ ID NO: 793260 - RNA, 18 nt, Human
acccauacacacauagaa

SEQ ID NO: 793261 - RNA, 25 nt, Human
accucccagguucaccacauucucc

SEQ ID NO: 793262 - RNA, 24 nt, Human
accuugugauccacccaccucugc

SEQ ID NO: 793263 - RNA, 24 nt, Human
acgauuugguaacaaacagcaaag

SEQ ID NO: 793264 - RNA, 20 nt, Human
acguacccaaacgaacauca

SEQ ID NO: 793265 - RNA, 18 nt, Human
acucaucccccgcauccc

SEQ ID NO: 793266 - RNA, 20 nt, Human
acugcaagcuccaccuccca

SEQ ID NO: 793267 - RNA, 25 nt, Human
agaaaaauaaaagcaaaugcgaaag

SEQ ID NO: 793268 - RNA, 21 nt, Human
agaacauuucugauauuguug

SEQ ID NO: 793269 - RNA, 19 nt, Human
agagagaaaacauuccaga

SEQ ID NO: 793270 - RNA, 19 nt, Human
agagauggggucucaccgu

SEQ ID NO: 793271 - RNA, 22 nt, Human
agauauugaagguaauauacuu

SEQ ID NO: 793272 - RNA, 23 nt, Human
agcaaagaaaguuucaccaccaa

SEQ ID NO: 793273 - RNA, 22 nt, Human
agcagagagaaaacauuccaga

SEQ ID NO: 793274 - RNA, 21 nt, Human
agcuaugcuuaccacuucauc

SEQ ID NO: 793275 - RNA, 19 nt, Human
aggaaaaaagcaaaacaaa

SEQ ID NO: 793276 - RNA, 25 nt, Human
aggcuggagugcaguggugcgaucu

SEQ ID NO: 793277 - RNA, 22 nt, Human
agguucaccacauucuccugcc

SEQ ID NO: 793278 - RNA, 20 nt, Human
aguagagauggggucucacc

SEQ ID NO: 793279 - RNA, 21 nt, Human
agugcaguggugcgaucucag

SEQ ID NO: 793280 - RNA, 23 nt, Human
agugcaguggugcgaucucagcu

SEQ ID NO: 793281 - RNA, 24 nt, Human
agugcaguggugcgaucucagcuc

SEQ ID NO: 793282 - RNA, 18 nt, Human
agugcugggauuacaggc

SEQ ID NO: 793283 - RNA, 18 nt, Human
agugcugggauuacaggc

SEQ ID NO: 793284 - RNA, 22 nt, Human
agugcugggauuacaggcguga

SEQ ID NO: 793285 - RNA, 24 nt, Human
aguggugcgaucucagcucacugc

SEQ ID NO: 793286 - RNA, 21 nt, Human
auucuccugccucagccuccc

SEQ ID NO: 793287 - RNA, 22 nt, Human
auucuggaaguuuaucccaaga

SEQ ID NO: 793288 - RNA, 20 nt, Human
auugaagcuaggaagcagag

SEQ ID NO: 793289 - RNA, 21 nt, Human
auugaagcuaggaagcagaga

SEQ ID NO: 793290 - RNA, 26 nt, Human
caaacgaacaucagagcaacauauua

SEQ ID NO: 793291 - RNA, 21 nt, Human
cacacauagaaaaauaaaagc

SEQ ID NO: 793292 - RNA, 27 nt, Human
caccaaucacaaggaagaaagauauuc

SEQ ID NO: 793293 - RNA, 22 nt, Human
caccacauucuccugccucagc

SEQ ID NO: 793294 - RNA, 23 nt, Human
cacccaccucugccucccagagu

SEQ ID NO: 793295 - RNA, 21 nt, Human
cacccaggcuggagugcagug

SEQ ID NO: 793296 - RNA, 18 nt, Human
caccguguuagccaggau

SEQ ID NO: 793297 - RNA, 24 nt, Human
caccguguuagccaggauggucuc

SEQ ID NO: 793298 - RNA, 19 nt, Human
caccucccagguucaccac

SEQ ID NO: 793299 - RNA, 24 nt, Human
caccucugccucccagagugcugg

SEQ ID NO: 793300 - RNA, 21 nt, Human
cacugcaagcuccaccuccca

SEQ ID NO: 793301 - RNA, 23 nt, Human
cagaacucaucccccgcaucccc

SEQ ID NO: 793302 - RNA, 23 nt, Human
cagacaaaaacacuaagaggcac

SEQ ID NO: 793303 - RNA, 24 nt, Human
cagagugcugggauuacaggcgug

SEQ ID NO: 793304 - RNA, 21 nt, Human
cagggagagcuaagugcaaua

SEQ ID NO: 793305 - RNA, 21 nt, Human
cauccacaaccacguacccaa

SEQ ID NO: 793306 - RNA, 22 nt, Human
ccagagugcugggauuacaggc

SEQ ID NO: 793307 - RNA, 22 nt, Human
ccagagugcugggauuacaggc

SEQ ID NO: 793308 - RNA, 24 nt, Human
ccagagugcugggauuacaggcgu

SEQ ID NO: 793309 - RNA, 23 nt, Human
cccaaguagcugggacuacaggc

SEQ ID NO: 793310 - RNA, 24 nt, Human
cccaaguagcugggacuacaggcg

SEQ ID NO: 793311 - RNA, 18 nt, Human
cccaccucugccucccag

SEQ ID NO: 793312 - RNA, 20 nt, Human
cccagguucaccacauucuc

SEQ ID NO: 793313 - RNA, 23 nt, Human
ccccauccacaaccacguaccca

SEQ ID NO: 793314 - RNA, 20 nt, Human
ccgcauccccuaacccauac

SEQ ID NO: 793315 - RNA, 18 nt, Human
ccuaacccauacacacau

SEQ ID NO: 793316 - RNA, 22 nt, Human
ccugaccuugugauccacccac

SEQ ID NO: 793317 - RNA, 23 nt, Human
ccugccucagccucccaaguagc

SEQ ID NO: 793318 - RNA, 24 nt, Human
ccugccucagccucccaaguagcu

SEQ ID NO: 793319 - RNA, 24 nt, Human
cgcucugucacccaggcuggagug

SEQ ID NO: 793320 - RNA, 23 nt, Human
cuaauuuuuuguauuuuuaguag

SEQ ID NO: 793321 - RNA, 24 nt, Human
cucacugcaagcuccaccucccag

SEQ ID NO: 793322 - RNA, 24 nt, Human
cucagccucccaaguagcugggac

SEQ ID NO: 793323 - RNA, 18 nt, Human
cuccugaccuugugaucc

SEQ ID NO: 793324 - RNA, 25 nt, Human
cuccugaccuugugauccacccacc

SEQ ID NO: 793325 - RNA, 24 nt, Human
cucgcucugucacccaggcuggag

SEQ ID NO: 793326 - RNA, 23 nt, Human
cucugucacccaggcuggagugc

SEQ ID NO: 793327 - RNA, 24 nt, Human
cugcaagcuccaccucccagguuc

SEQ ID NO: 793328 - RNA, 21 nt, Human
cuuacagucaugcuccaagcu

SEQ ID NO: 793329 - RNA, 19 nt, Human
gaaaacacagacugccaga

SEQ ID NO: 793330 - RNA, 20 nt, Human
gaacucaucccccgcauccc

SEQ ID NO: 793331 - RNA, 22 nt, Human
gacaauuaagccucacaaauua

SEQ ID NO: 793332 - RNA, 22 nt, Human
gaccuugugauccacccaccuc

SEQ ID NO: 793333 - RNA, 21 nt, Human
gagauggagucucgcucuguc

SEQ ID NO: 793334 - RNA, 18 nt, Human
gauuacaggcgugagcca

SEQ ID NO: 793335 - RNA, 21 nt, Human
gauuacaggcgugagccacca

SEQ ID NO: 793336 - RNA, 22 nt, Human
gauuacaggcgugagccaccac

SEQ ID NO: 793337 - RNA, 18 nt, Human
gcaagcuccaccucccag

SEQ ID NO: 793338 - RNA, 22 nt, Human
gcaagcuccaccucccagguuc

SEQ ID NO: 793339 - RNA, 19 nt, Human
gcuaggaagcagagagaaa

SEQ ID NO: 793340 - RNA, 19 nt, Human
ggaaaaaagcaaaacaaaa

SEQ ID NO: 793341 - RNA, 24 nt, Human
ggaaguuuaucccaagaaccugcu

SEQ ID NO: 793342 - RNA, 18 nt, Human
ggacagacagagguggga

SEQ ID NO: 793343 - RNA, 24 nt, Human
ggauggucucaaucuccugaccuu

SEQ ID NO: 793344 - RNA, 19 nt, Human
ggauuacaggcgugagcca

SEQ ID NO: 793345 - RNA, 18 nt, Human
ggggucucaccguguuag

SEQ ID NO: 793346 - RNA, 24 nt, Human
gugauccacccaccucugccuccc

SEQ ID NO: 793347 - RNA, 19 nt, Human
guugaucucagggcaguuc

SEQ ID NO: 793348 - RNA, 26 nt, Human
uaaaaaagaaccacuaagccaauaca

SEQ ID NO: 793349 - RNA, 23 nt, Human
uaaaagcaaaugcgaaaguuguc

SEQ ID NO: 793350 - RNA, 19 nt, Human
uaaaaguacacaaaacaug

SEQ ID NO: 793351 - RNA, 24 nt, Human
uaaagacaacuaggaaaaaagcaa

SEQ ID NO: 793352 - RNA, 23 nt, Human
uaaaugauauuucaguuuaugcc

SEQ ID NO: 793353 - RNA, 23 nt, Human
uaacaaacagcaaagaaaguuuc

SEQ ID NO: 793354 - RNA, 21 nt, Human
uaacagcauauaaaggcgucc

SEQ ID NO: 793355 - RNA, 19 nt, Human
uaacaguaacgacaauuaa

SEQ ID NO: 793356 - RNA, 22 nt, Human
uaaccagaaggugacuuguguc

SEQ ID NO: 793357 - RNA, 19 nt, Human
uaagaaagaagaaagacua

SEQ ID NO: 793358 - RNA, 19 nt, Human
uaagacacaagaaauucua

SEQ ID NO: 793359 - RNA, 18 nt, Human
uaaggacaucaauauuca

SEQ ID NO: 793360 - RNA, 21 nt, Human
uaaguacaauauuuuuggaau

SEQ ID NO: 793361 - RNA, 21 nt, Human
uaaguugcuauuucagaagag

SEQ ID NO: 793362 - RNA, 24 nt, Human
uaauuuuuuguauuuuuaguagag

SEQ ID NO: 793363 - RNA, 18 nt, Human
uacagcaacaggacagac

SEQ ID NO: 793364 - RNA, 22 nt, Human
uacaggcgcccgccaccacacc

SEQ ID NO: 793365 - RNA, 24 nt, Human
uacaggcgugagccaccacgccca

SEQ ID NO: 793366 - RNA, 19 nt, Human
uacaguauaauaggauaag

SEQ ID NO: 793367 - RNA, 21 nt, Human
uacccaaacgaacaucagagc

SEQ ID NO: 793368 - RNA, 18 nt, Human
uaccuugucucuauucug

SEQ ID NO: 793369 - RNA, 25 nt, Human
uaggaaaaaagcaaaacaaaacaaa

SEQ ID NO: 793370 - RNA, 21 nt, Human
uaguagagauggggucucacc

SEQ ID NO: 793371 - RNA, 24 nt, Human
uaguagagauggggucucaccgug

SEQ ID NO: 793372 - RNA, 25 nt, Human
uaguagagauggggucucaccgugu

SEQ ID NO: 793373 - RNA, 19 nt, Human
uagugauuuuuccccauac

SEQ ID NO: 793374 - RNA, 24 nt, Human
uauaaagacaacuaggaaaaaagc

SEQ ID NO: 793375 - RNA, 19 nt, Human
uauaagagagaaaagucau

SEQ ID NO: 793376 - RNA, 22 nt, Human
uauaaggacaucaauauucaac

SEQ ID NO: 793377 - RNA, 18 nt, Human
uauccaaaaaguguuuga

SEQ ID NO: 793378 - RNA, 19 nt, Human
uaucuagauuaucuggcca

SEQ ID NO: 793379 - RNA, 19 nt, Human
ucaaucuccugaccuugug

SEQ ID NO: 793380 - RNA, 20 nt, Human
ucaaucuccugaccuuguga

SEQ ID NO: 793381 - RNA, 24 nt, Human
ucacccaggcuggagugcaguggu

SEQ ID NO: 793382 - RNA, 24 nt, Human
ucaccguguuagccaggauggucu

SEQ ID NO: 793383 - RNA, 19 nt, Human
ucacugcaagcuccaccuc

SEQ ID NO: 793384 - RNA, 24 nt, Human
ucacugcaagcuccaccucccagg

SEQ ID NO: 793385 - RNA, 22 nt, Human
ucagacaaaaacacuaagaggc

SEQ ID NO: 793386 - RNA, 23 nt, Human
ucagacaaaaacacuaagaggca

SEQ ID NO: 793387 - RNA, 21 nt, Human
ucagagacaguauaaaaguac

SEQ ID NO: 793388 - RNA, 18 nt, Human
ucagccucccaaguagcu

SEQ ID NO: 793389 - RNA, 20 nt, Human
ucagccucccaaguagcugg

SEQ ID NO: 793390 - RNA, 25 nt, Human
ucagcucacugcaagcuccaccucc

SEQ ID NO: 793391 - RNA, 27 nt, Human
ucauuuaccaugcaugaacacuuacau

SEQ ID NO: 793392 - RNA, 21 nt, Human
uccacaaccacguacccaaac

SEQ ID NO: 793393 - RNA, 24 nt, Human
uccacaaccacguacccaaacgaa

SEQ ID NO: 793394 - RNA, 21 nt, Human
uccaccucccagguucaccac

SEQ ID NO: 793395 - RNA, 24 nt, Human
ucccaaguagcugggacuacaggc

SEQ ID NO: 793396 - RNA, 24 nt, Human
ucccagagugcugggauuacaggc

SEQ ID NO: 793397 - RNA, 21 nt, Human
ucccagguucaccacauucuc

SEQ ID NO: 793398 - RNA, 24 nt, Human
ucccagguucaccacauucuccug

SEQ ID NO: 793399 - RNA, 20 nt, Human
ucccccgcauccccuaaccc

SEQ ID NO: 793400 - RNA, 24 nt, Human
ucgcucugucacccaggcuggagu

SEQ ID NO: 793401 - RNA, 26 nt, Human
ucuccugccucagccucccaaguagc

SEQ ID NO: 793402 - RNA, 19 nt, Human
ucucgcucugucacccagg

SEQ ID NO: 793403 - RNA, 23 nt, Human
ucucgcucugucacccaggcugg

SEQ ID NO: 793404 - RNA, 24 nt, Human
ucucgcucugucacccaggcugga

SEQ ID NO: 793405 - RNA, 26 nt, Human
ucucgcucugucacccaggcuggagu

SEQ ID NO: 793406 - RNA, 27 nt, Human
ucucgcucugucacccaggcuggagug

SEQ ID NO: 793407 - RNA, 24 nt, Human
ucugucacccaggcuggagugcag

SEQ ID NO: 793408 - RNA, 18 nt, Human
ugaaaacacagacugcca

SEQ ID NO: 793409 - RNA, 24 nt, Human
ugaaaacacagacugccagaacuc

SEQ ID NO: 793410 - RNA, 19 nt, Human
ugacaacaucugugcgagu

SEQ ID NO: 793411 - RNA, 23 nt, Human
ugacaccacccuacuuaacaccu

SEQ ID NO: 793412 - RNA, 20 nt, Human
ugacaccacccuacuuaacu

SEQ ID NO: 793413 - RNA, 24 nt, Human
ugagaacauuucugauauuguugg

SEQ ID NO: 793414 - RNA, 20 nt, Human
ugagagaagccucucauuuc

SEQ ID NO: 793415 - RNA, 22 nt, Human
ugagauacccuugagagaagcc

SEQ ID NO: 793416 - RNA, 23 nt, Human
ugagauacccuugagagaagccu

SEQ ID NO: 793417 - RNA, 22 nt, Human
ugagcuaaagauaggacauuua

SEQ ID NO: 793418 - RNA, 24 nt, Human
ugauccacccaccucugccuccca

SEQ ID NO: 793419 - RNA, 20 nt, Human
ugcaauaaccagaaggugac

SEQ ID NO: 793420 - RNA, 22 nt, Human
ugcaguggugcgaucucagcuc

SEQ ID NO: 793421 - RNA, 18 nt, Human
ugccauacucaauccaaa

SEQ ID NO: 793422 - RNA, 24 nt, Human
ugccucagccucccaaguagcugg

SEQ ID NO: 793423 - RNA, 24 nt, Human
ugcugggauuacaggcgugagcca

SEQ ID NO: 793424 - RNA, 21 nt, Human
uggaaaccagagacaaaaacg

SEQ ID NO: 793425 - RNA, 23 nt, Human
uggagugcaguggugcgaucuca

SEQ ID NO: 793426 - RNA, 24 nt, Human
uggagugcaguggugcgaucucag

SEQ ID NO: 793427 - RNA, 21 nt, Human
ugggacuacaggcgcccgcca

SEQ ID NO: 793428 - RNA, 22 nt, Human
ugggacuacaggcgcccgccac

SEQ ID NO: 793429 - RNA, 24 nt, Human
ugggacuacaggcgcccgccacca

SEQ ID NO: 793430 - RNA, 18 nt, Human
ugggauuacaggcgugag

SEQ ID NO: 793431 - RNA, 19 nt, Human
ugggauuacaggcgugagc

SEQ ID NO: 793432 - RNA, 22 nt, Human
ugggauuacaggcgugagccac

SEQ ID NO: 793433 - RNA, 23 nt, Human
ugggauuacaggcgugagccacc

SEQ ID NO: 793434 - RNA, 24 nt, Human
ugggauuacaggcgugagccacca

SEQ ID NO: 793435 - RNA, 24 nt, Human
uggggucucaccguguuagccagg

SEQ ID NO: 793436 - RNA, 26 nt, Human
ugguaacaaacagcaaagaaaguuuc

SEQ ID NO: 793437 - RNA, 24 nt, Human
uggugcgaucucagcucacugcaa

SEQ ID NO: 793438 - RNA, 25 nt, Human
uguauauuacaacuggcuauaagcc

SEQ ID NO: 793439 - RNA, 21 nt, Human
uguauuuuuaguagagauggg

SEQ ID NO: 793440 - RNA, 21 nt, Human
ugucuuaggccagucaauagc

SEQ ID NO: 793441 - RNA, 24 nt, Human
ugugucugucagagcccucucuca

SEQ ID NO: 793442 - RNA, 19 nt, Human
uuaaauguugguaaguaca

SEQ ID NO: 793443 - RNA, 22 nt, Human
uuacagaaugauggaaaccaga

SEQ ID NO: 793444 - RNA, 18 nt, Human
uuaguagagauggggucu

SEQ ID NO: 793445 - RNA, 22 nt, Human
uuaguagagauggggucucacc

SEQ ID NO: 793446 - RNA, 24 nt, Human
uuaguagagauggggucucaccgu

SEQ ID NO: 793447 - RNA, 22 nt, Human
uucauugacaacaucugugcga

SEQ ID NO: 793448 - RNA, 18 nt, Human
uucuaaaugguacuugag

SEQ ID NO: 793449 - RNA, 20 nt, Human
uugaaugcuaagucagagga

SEQ ID NO: 793450 - RNA, 23 nt, Human
uuguauuuuuaguagagaugggg

SEQ ID NO: 793451 - RNA, 24 nt, Human
uuuaugccuuuauuucuugucucu

SEQ ID NO: 793452 - RNA, 21 nt, Human
uuugguaacaaacagcaaaga

SEQ ID NO: 793453 - RNA, 24 nt, Human
uuuuuaguagagauggggucucac

SEQ ID NO: 793454 - RNA, 21 nt, Human
uuuuuguauuuuuaguagaga

SEQ ID NO: 793455 - RNA, 24 nt, Human
uuuuuuguauuuuuaguagagaug

SEQ ID NO: 793456 - RNA, 21 nt, Human
aaaaacaauaccaaacacaaa

SEQ ID NO: 793457 - RNA, 22 nt, Human
aaaaagaccuaaaauggaucuu

SEQ ID NO: 793458 - RNA, 24 nt, Human
aaaagagcaaaauagcacucagug

SEQ ID NO: 793459 - RNA, 18 nt, Human
aaaauagcacucaguggc

SEQ ID NO: 793460 - RNA, 21 nt, Human
aaacaauaccaaacacaaccc

SEQ ID NO: 793461 - RNA, 22 nt, Human
aaacaauaccaaacacaaccca

SEQ ID NO: 793462 - RNA, 19 nt, Human
aaacaggagggugacugag

SEQ ID NO: 793463 - RNA, 21 nt, Human
aaacagggggauaacagaaga

SEQ ID NO: 793464 - RNA, 24 nt, Human
aaagcauccagggaaaaaguugaa

SEQ ID NO: 793465 - RNA, 20 nt, Human
aaauagaaacuggcaaauga

SEQ ID NO: 793466 - RNA, 19 nt, Human
aacaaagcauccauuauag

SEQ ID NO: 793467 - RNA, 18 nt, Human
aacagaugaauugggcag

SEQ ID NO: 793468 - RNA, 25 nt, Human
aaccacuaaaaacaauaccaaacac

SEQ ID NO: 793469 - RNA, 19 nt, Human
aaguaaaaggaccaagagu

SEQ ID NO: 793470 - RNA, 20 nt, Human
aauggaucuuucagaagaga

SEQ ID NO: 793471 - RNA, 27 nt, Human
acaacuuauuuuguuaaaaaauguguu

SEQ ID NO: 793472 - RNA, 23 nt, Human
acaauaccaaacacaacccaaac

SEQ ID NO: 793473 - RNA, 26 nt, Human
acagaacaaacagggggauaacagaa

SEQ ID NO: 793474 - RNA, 27 nt, Human
accagcagagcaauagcaauucccuuc

SEQ ID NO: 793475 - RNA, 20 nt, Human
acccaguggagcauggaaga

SEQ ID NO: 793476 - RNA, 28 nt, Human
acccaguggagcauggaagacacgauuc

SEQ ID NO: 793477 - RNA, 20 nt, Human
acccauuuaauaaugucuuu

SEQ ID NO: 793478 - RNA, 20 nt, Human
acuaaaaucaccagcagagc

SEQ ID NO: 793479 - RNA, 22 nt, Human
acuaauuucucccaggaaacca

SEQ ID NO: 793480 - RNA, 24 nt, Human
acuacaauauuacagucucuuugu

SEQ ID NO: 793481 - RNA, 21 nt, Human
agaaacuggcaaaugaaauaa

SEQ ID NO: 793482 - RNA, 23 nt, Human
agaaagaaguaaaaggaccaaga

SEQ ID NO: 793483 - RNA, 18 nt, Human
agcuuauuacagacuuuu

SEQ ID NO: 793484 - RNA, 21 nt, Human
agggacuguaggacagaugau

SEQ ID NO: 793485 - RNA, 21 nt, Human
agggggauaacagaagaaaac

SEQ ID NO: 793486 - RNA, 21 nt, Human
aguaucuaauuuacaugugac

SEQ ID NO: 793487 - RNA, 19 nt, Human
agucaccaaaguuaaaugu

SEQ ID NO: 793488 - RNA, 23 nt, Human
auggaucuuucagaagagaaagc

SEQ ID NO: 793489 - RNA, 25 nt, Human
caaaacuuuccuuuuaaaauuacaa

SEQ ID NO: 793490 - RNA, 22 nt, Human
caacccuuugaccucucucaua

SEQ ID NO: 793491 - RNA, 23 nt, Human
caauaaaaccacaccuuucagac

SEQ ID NO: 793492 - RNA, 21 nt, Human
cacaaaaaugcaguauccugc

SEQ ID NO: 793493 - RNA, 18 nt, Human
caccaaaguuaaauguuc

SEQ ID NO: 793494 - RNA, 20 nt, Human
cacuacuccuacuuuaaugc

SEQ ID NO: 793495 - RNA, 24 nt, Human
cagcagagcaauagcaauucccuu

SEQ ID NO: 793496 - RNA, 20 nt, Human
cauaauaauagacaaugaaa

SEQ ID NO: 793497 - RNA, 18 nt, Human
cauucaauaaaaccacac

SEQ ID NO: 793498 - RNA, 25 nt, Human
ccaggaaaccaacccuuugaccucc

SEQ ID NO: 793499 - RNA, 24 nt, Human
ccagugaaauuaaaaugagagcaa

SEQ ID NO: 793500 - RNA, 19 nt, Human
ccuucaacaaaacaggagg

SEQ ID NO: 793501 - RNA, 23 nt, Human
cucaaauagacauucaauaaaac

SEQ ID NO: 793502 - RNA, 19 nt, Human
cugcaagucaacacagcac

SEQ ID NO: 793503 - RNA, 24 nt, Human
cuggcugaacuuuggaaggugcug

SEQ ID NO: 793504 - RNA, 22 nt, Human
cuguccuaaggacuuuuuuaaa

SEQ ID NO: 793505 - RNA, 25 nt, Human
cuuaagcauaauaauagacaaugaa

SEQ ID NO: 793506 - RNA, 23 nt, Human
cuuuuagauaucuucuggaagau

SEQ ID NO: 793507 - RNA, 19 nt, Human
cuuuuuggccaaugaauaa

SEQ ID NO: 793508 - RNA, 21 nt, Human
gaaaacaugcacuacuccuac

SEQ ID NO: 793509 - RNA, 20 nt, Human
gagccucaauauucccuucg

SEQ ID NO: 793510 - RNA, 22 nt, Human
gcagagcaauagcaauucccuu

SEQ ID NO: 793511 - RNA, 26 nt, Human
ggacuguaggacagaugauagauugu

SEQ ID NO: 793512 - RNA, 22 nt, Human
ggagcauggaagacacgauucc

SEQ ID NO: 793513 - RNA, 23 nt, Human
guauaugcacacuuguguauaua

SEQ ID NO: 793514 - RNA, 23 nt, Human
gucuuuuuaaaaacagaaauuac

SEQ ID NO: 793515 - RNA, 24 nt, Human
guggagcauggaagacacgauucc

SEQ ID NO: 793516 - RNA, 21 nt, Human
guggagggcuguuacuuccca

SEQ ID NO: 793517 - RNA, 19 nt, Human
uaaaaaacucuagugguuc

SEQ ID NO: 793518 - RNA, 19 nt, Human
uaaaaacaauaccaaacac

SEQ ID NO: 793519 - RNA, 19 nt, Human
uaaaaucaccagcagagca

SEQ ID NO: 793520 - RNA, 26 nt, Human
uaaaaucaccagcagagcuggagacc

SEQ ID NO: 793521 - RNA, 23 nt, Human
uaacugaauauuuucuuaagcau

SEQ ID NO: 793522 - RNA, 19 nt, Human
uaauauuuaaguaucuaau

SEQ ID NO: 793523 - RNA, 18 nt, Human
uacuacugcaagucaaca

SEQ ID NO: 793524 - RNA, 22 nt, Human
uauaugcacacuuguguauaua

SEQ ID NO: 793525 - RNA, 24 nt, Human
uauaugcacacuuguguauauaua

SEQ ID NO: 793526 - RNA, 18 nt, Human
uaucugaacuucuaagcu

SEQ ID NO: 793527 - RNA, 22 nt, Human
uauuugcuuuuacgaugaaaau

SEQ ID NO: 793528 - RNA, 25 nt, Human
ucaaaguaaauagcaaacacugcug

SEQ ID NO: 793529 - RNA, 19 nt, Human
ucaaauagacauucaauaa

SEQ ID NO: 793530 - RNA, 19 nt, Human
ucaccagaagaauugaaau

SEQ ID NO: 793531 - RNA, 19 nt, Human
uccguaagcugcccuugac

SEQ ID NO: 793532 - RNA, 22 nt, Human
ucucuguggagggcuguuacuu

SEQ ID NO: 793533 - RNA, 23 nt, Human
ugaaaaaagccuucuccaccaaa

SEQ ID NO: 793534 - RNA, 24 nt, Human
ugaaaaaagccuucuccaccaaaa

SEQ ID NO: 793535 - RNA, 25 nt, Human
ugaaaaaagccuucuccaccaaaag

SEQ ID NO: 793536 - RNA, 21 nt, Human
ugaaaaauagauaaacauuga

SEQ ID NO: 793537 - RNA, 22 nt, Human
ugaauuggaaaaaauguuucaa

SEQ ID NO: 793538 - RNA, 20 nt, Human
ugagaagauauucugacuuu

SEQ ID NO: 793539 - RNA, 18 nt, Human
ugcaaagaugaugguggc

SEQ ID NO: 793540 - RNA, 21 nt, Human
ugcacacuuguguauauauau

SEQ ID NO: 793541 - RNA, 19 nt, Human
ugcaccccuagcaacacag

SEQ ID NO: 793542 - RNA, 21 nt, Human
uggaauacuaaauagaaacug

SEQ ID NO: 793543 - RNA, 24 nt, Human
uguguauauauauugugagacaua

SEQ ID NO: 793544 - RNA, 24 nt, Human
uuaaaaccacaaaaaugcaguauc

SEQ ID NO: 793545 - RNA, 21 nt, Human
uuagccuaaaaagaaauuucc

SEQ ID NO: 793546 - RNA, 24 nt, Human
uucaaaaaauuaaaugcaacugga

SEQ ID NO: 793547 - RNA, 21 nt, Human
uucaaaguaaauagcaaacac

SEQ ID NO: 793548 - RNA, 18 nt, Human
uucaauaaaaccacaccu

SEQ ID NO: 793549 - RNA, 19 nt, Human
uuccaguuucucuguggag

SEQ ID NO: 793550 - RNA, 21 nt, Human
uucuccaccaaaagagcaaaa

SEQ ID NO: 793551 - RNA, 22 nt, Human
uuguguauauauauugugagac

SEQ ID NO: 793552 - RNA, 20 nt, Human
uuuaaaguuuccuccugaug

SEQ ID NO: 793553 - RNA, 24 nt, Human
uuucauuaacuguauaugcacacu

SEQ ID NO: 793554 - RNA, 22 nt, Human
aaaaaagacucaauauuacaga

SEQ ID NO: 793555 - RNA, 24 nt, Human
aaaaauacagcagaaaauccgaug

SEQ ID NO: 793556 - RNA, 19 nt, Human
aaagcagauccucuauucc

SEQ ID NO: 793557 - RNA, 24 nt, Human
aaaguguaugagagagaaaaguca

SEQ ID NO: 793558 - RNA, 18 nt, Human
aaauaccauccagucaga

SEQ ID NO: 793559 - RNA, 22 nt, Human
aaaugcagcccuacuccugcca

SEQ ID NO: 793560 - RNA, 19 nt, Human
aacaaggugaaaccccauc

SEQ ID NO: 793561 - RNA, 20 nt, Human
aacaaggugaaaccccaucu

SEQ ID NO: 793562 - RNA, 21 nt, Human
aacaaggugaaaccccaucuc

SEQ ID NO: 793563 - RNA, 20 nt, Human
aacagagugagacuccaucu

SEQ ID NO: 793564 - RNA, 24 nt, Human
aacagagugagacuccaucucaaa

SEQ ID NO: 793565 - RNA, 23 nt, Human
aaggggagcuuguagugagcuga

SEQ ID NO: 793566 - RNA, 22 nt, Human
aaucaacaauagcaacaaugua

SEQ ID NO: 793567 - RNA, 24 nt, Human
aaugacaagaggagagaagguaag

SEQ ID NO: 793568 - RNA, 18 nt, Human
aauugcuugaaccuggga

SEQ ID NO: 793569 - RNA, 23 nt, Human
aauuuagagucuucagcgaugga

SEQ ID NO: 793570 - RNA, 18 nt, Human
acaacucacaacaaggca

SEQ ID NO: 793571 - RNA, 20 nt, Human
acagaaacgagacaaccaca

SEQ ID NO: 793572 - RNA, 24 nt, Human
acagagugagacuccaucucaaaa

SEQ ID NO: 793573 - RNA, 20 nt, Human
accagcuugaccaacaaggu

SEQ ID NO: 793574 - RNA, 24 nt, Human
accccaucucuacuaaaaauacaa

SEQ ID NO: 793575 - RNA, 24 nt, Human
accugaggucaggaguuugagacc

SEQ ID NO: 793576 - RNA, 21 nt, Human
acgccuguaaucccagcacuu

SEQ ID NO: 793577 - RNA, 24 nt, Human
acugaacuccagacugggcaacag

SEQ ID NO: 793578 - RNA, 20 nt, Human
acuggcauacaaaaugucua

SEQ ID NO: 793579 - RNA, 21 nt, Human
agaacugaaccucaugucccc

SEQ ID NO: 793580 - RNA, 22 nt, Human
agacaggagaauugcuugaacc

SEQ ID NO: 793581 - RNA, 24 nt, Human
agacaggagaauugcuugaaccug

SEQ ID NO: 793582 - RNA, 24 nt, Human
agacugggcaacagagugagacuc

SEQ ID NO: 793583 - RNA, 20 nt, Human
agaggcgaguggaucaccug

SEQ ID NO: 793584 - RNA, 24 nt, Human
agaggcgaguggaucaccugaggu

SEQ ID NO: 793585 - RNA, 19 nt, Human
agauuucacuggcauacaa

SEQ ID NO: 793586 - RNA, 27 nt, Human
agcagcugacugaaaggaaauucuaua

SEQ ID NO: 793587 - RNA, 23 nt, Human
agcugggugugguggcaggcgcc

SEQ ID NO: 793588 - RNA, 24 nt, Human
aggaguuugagaccagcuugacca

SEQ ID NO: 793589 - RNA, 19 nt, Human
aggauagucagagaggacc

SEQ ID NO: 793590 - RNA, 24 nt, Human
aggauuguaguuucugagcagcug

SEQ ID NO: 793591 - RNA, 24 nt, Human
aggcacuuaucauuuaguugggga

SEQ ID NO: 793592 - RNA, 23 nt, Human
aggcagaauggcaggggucaggg

SEQ ID NO: 793593 - RNA, 18 nt, Human
aggcagaggcgaguggau

SEQ ID NO: 793594 - RNA, 21 nt, Human
aggcccauugaaaaaacugag

SEQ ID NO: 793595 - RNA, 22 nt, Human
aggcgaguggaucaccugaggu

SEQ ID NO: 793596 - RNA, 26 nt, Human
aggcgaguggaucaccugaggucagg

SEQ ID NO: 793597 - RNA, 24 nt, Human
aggcugagacaggagaauugcuug

SEQ ID NO: 793598 - RNA, 24 nt, Human
aguaaauaaaaccaaggguguucc

SEQ ID NO: 793599 - RNA, 22 nt, Human
auacucacagauacacacagaa

SEQ ID NO: 793600 - RNA, 21 nt, Human
auaugacuucuguguguaaau

SEQ ID NO: 793601 - RNA, 20 nt, Human
aucaccugaggucaggaguu

SEQ ID NO: 793602 - RNA, 24 nt, Human
aucgcgccacugaacuccagacug

SEQ ID NO: 793603 - RNA, 18 nt, Human
auggcaggggucagggcu

SEQ ID NO: 793604 - RNA, 21 nt, Human
caaaagccuguucccccaaaa

SEQ ID NO: 793605 - RNA, 25 nt, Human
caaaaguaucuguguuguguuaccc

SEQ ID NO: 793606 - RNA, 23 nt, Human
caaagagaaaagaugcccagagc

SEQ ID NO: 793607 - RNA, 23 nt, Human
caacaauguaaagcuaaugaaaa

SEQ ID NO: 793608 - RNA, 23 nt, Human
caagacaucagauauuaaaccua

SEQ ID NO: 793609 - RNA, 23 nt, Human
caaggcaaagagaaaagaugccc

SEQ ID NO: 793610 - RNA, 26 nt, Human
caauauguauaaucaucaaagauaua

SEQ ID NO: 793611 - RNA, 21 nt, Human
cacacagaaacgagacaacca

SEQ ID NO: 793612 - RNA, 19 nt, Human
cacaucagcccuccaaauc

SEQ ID NO: 793613 - RNA, 20 nt, Human
caccaaagagaacuaaccuu

SEQ ID NO: 793614 - RNA, 23 nt, Human
caccugaggucaggaguuugaga

SEQ ID NO: 793615 - RNA, 24 nt, Human
cacugaacuccagacugggcaaca

SEQ ID NO: 793616 - RNA, 20 nt, Human
cagaggccuccacuuuuuau

SEQ ID NO: 793617 - RNA, 27 nt, Human
cagaggcgaguggaucaccugagguca

SEQ ID NO: 793618 - RNA, 18 nt, Human
cagcacuuugggaggcag

SEQ ID NO: 793619 - RNA, 21 nt, Human
caggggucagggcugggcaug

SEQ ID NO: 793620 - RNA, 22 nt, Human
ccaaaaugcaggugccaagucc

SEQ ID NO: 793621 - RNA, 20 nt, Human
ccacugaacuccagacuggg

SEQ ID NO: 793622 - RNA, 24 nt, Human
ccacugaacuccagacugggcaac

SEQ ID NO: 793623 - RNA, 19 nt, Human
ccagaaaaauacagcagaa

SEQ ID NO: 793624 - RNA, 22 nt, Human
ccagucagaagcaauuugauua

SEQ ID NO: 793625 - RNA, 19 nt, Human
cccacugugcaaauggagu

SEQ ID NO: 793626 - RNA, 27 nt, Human
cccccaaaaugcaggugccaaguccac

SEQ ID NO: 793627 - RNA, 21 nt, Human
cccugcugccuucggauucug

SEQ ID NO: 793628 - RNA, 22 nt, Human
ccugaggucaggaguuugagac

SEQ ID NO: 793629 - RNA, 19 nt, Human
ccuguagucccagcuacuc

SEQ ID NO: 793630 - RNA, 21 nt, Human
ccuguagucccagcuacucag

SEQ ID NO: 793631 - RNA, 22 nt, Human
ccuguagucccagcuacucagg

SEQ ID NO: 793632 - RNA, 23 nt, Human
cgccuguaaucccagcacuuugg

SEQ ID NO: 793633 - RNA, 24 nt, Human
cgccuguaaucccagcacuuuggg

SEQ ID NO: 793634 - RNA, 24 nt, Human
cgccuguagucccagcuacucagg

SEQ ID NO: 793635 - RNA, 23 nt, Human
cuacuccugccaaauaccaucca

SEQ ID NO: 793636 - RNA, 18 nt, Human
cuccaaaucaccaucaau

SEQ ID NO: 793637 - RNA, 25 nt, Human
cuccaucucaaaaaaaaaaaauugc

SEQ ID NO: 793638 - RNA, 21 nt, Human
cugcugccuucggauucuggc

SEQ ID NO: 793639 - RNA, 22 nt, Human
cuuacgccuguaaucccagcac

SEQ ID NO: 793640 - RNA, 21 nt, Human
cuuguagugagcugagaucgc

SEQ ID NO: 793641 - RNA, 19 nt, Human
cuuuccucugaaaagcaga

SEQ ID NO: 793642 - RNA, 18 nt, Human
cuuuucacccaguauuuu

SEQ ID NO: 793643 - RNA, 18 nt, Human
gaaacgagacaaccacag

SEQ ID NO: 793644 - RNA, 21 nt, Human
gacaaacauccacaguucugu

SEQ ID NO: 793645 - RNA, 23 nt, Human
gagcuuguagugagcugagaucg

SEQ ID NO: 793646 - RNA, 24 nt, Human
gaggagcagucuugcagcagcugc

SEQ ID NO: 793647 - RNA, 23 nt, Human
gaguggaucaccugaggucagga

SEQ ID NO: 793648 - RNA, 21 nt, Human
gauaaacuggaaaaauuuaga

SEQ ID NO: 793649 - RNA, 24 nt, Human
gaucaccugaggucaggaguuuga

SEQ ID NO: 793650 - RNA, 20 nt, Human
gauucuggcauaauuugcuc

SEQ ID NO: 793651 - RNA, 24 nt, Human
gccacugaacuccagacugggcaa

SEQ ID NO: 793652 - RNA, 21 nt, Human
gcugggugugguggcuuacgc

SEQ ID NO: 793653 - RNA, 24 nt, Human
ggagcuuguagugagcugagaucg

SEQ ID NO: 793654 - RNA, 22 nt, Human
ggaucaccugaggucaggaguu

SEQ ID NO: 793655 - RNA, 19 nt, Human
ggcagacuagguggagaag

SEQ ID NO: 793656 - RNA, 20 nt, Human
ggcaggggucagggcugggc

SEQ ID NO: 793657 - RNA, 20 nt, Human
ggccuucuugucacagucuu

SEQ ID NO: 793658 - RNA, 18 nt, Human
gggagacaaaacaugcag

SEQ ID NO: 793659 - RNA, 24 nt, Human
gggugugguggcuuacgccuguaa

SEQ ID NO: 793660 - RNA, 19 nt, Human
ggucaggaguuugagacca

SEQ ID NO: 793661 - RNA, 24 nt, Human
gguggcaggcgccuguagucccag

SEQ ID NO: 793662 - RNA, 24 nt, Human
gguggcuuacgccuguaaucccag

SEQ ID NO: 793663 - RNA, 22 nt, Human
ggugugguggcaggcgccugua

SEQ ID NO: 793664 - RNA, 20 nt, Human
guagaagaacugaaccucau

SEQ ID NO: 793665 - RNA, 18 nt, Human
guuguacucaucuguccc

SEQ ID NO: 793666 - RNA, 21 nt, Human
guuguguuaccccuaaauuca

SEQ ID NO: 793667 - RNA, 24 nt, Human
uaaaccuauacauuauugguguua

SEQ ID NO: 793668 - RNA, 18 nt, Human
uaaagagcuauauaaacc

SEQ ID NO: 793669 - RNA, 26 nt, Human
uaaauauacucacagauacacacaga

SEQ ID NO: 793670 - RNA, 20 nt, Human
uaaauucaaaaaauaugacu

SEQ ID NO: 793671 - RNA, 19 nt, Human
uaagaaagaaaaaagacuc

SEQ ID NO: 793672 - RNA, 25 nt, Human
uaauuuuuuuuaauaaacuaugcag

SEQ ID NO: 793673 - RNA, 21 nt, Human
uacaacucacaacaaggcaga

SEQ ID NO: 793674 - RNA, 25 nt, Human
uacauuauugguguuacuggagagg

SEQ ID NO: 793675 - RNA, 24 nt, Human
uacgccuguaaucccagcacuuug

SEQ ID NO: 793676 - RNA, 19 nt, Human
uagcaacaauguaaagcua

SEQ ID NO: 793677 - RNA, 22 nt, Human
uaggcccauugaaaaaacugag

SEQ ID NO: 793678 - RNA, 22 nt, Human
uagggcagacuagguggagaag

SEQ ID NO: 793679 - RNA, 19 nt, Human
uauaaguaauuucacauaa

SEQ ID NO: 793680 - RNA, 23 nt, Human
ucaacaauagcaacaauguaaag

SEQ ID NO: 793681 - RNA, 18 nt, Human
ucaacuugagaacugcuu

SEQ ID NO: 793682 - RNA, 22 nt, Human
ucaagugaggaugaagagagag

SEQ ID NO: 793683 - RNA, 19 nt, Human
ucaccaaagagaacuaacc

SEQ ID NO: 793684 - RNA, 19 nt, Human
ucaccugaggucaggaguu

SEQ ID NO: 793685 - RNA, 22 nt, Human
ucccccaaaaugcaggugccaa

SEQ ID NO: 793686 - RNA, 25 nt, Human
ucuccacuggggguguacagugcuc

SEQ ID NO: 793687 - RNA, 20 nt, Human
ucucuacuaaaaauacaaaa

SEQ ID NO: 793688 - RNA, 18 nt, Human
ucuggcauaauuugcucu

SEQ ID NO: 793689 - RNA, 19 nt, Human
ugaaaagcagagaggacua

SEQ ID NO: 793690 - RNA, 19 nt, Human
ugaaaccccaucucuacua

SEQ ID NO: 793691 - RNA, 21 nt, Human
ugaaaggaaauucuauaaagc

SEQ ID NO: 793692 - RNA, 22 nt, Human
ugaccaacaaggugaaacccca

SEQ ID NO: 793693 - RNA, 24 nt, Human
ugagacaggagaauugcuugaacc

SEQ ID NO: 793694 - RNA, 24 nt, Human
ugagacaggagaauugcuugaacc

SEQ ID NO: 793695 - RNA, 23 nt, Human
ugagaccagcuugaccaacaagg

SEQ ID NO: 793696 - RNA, 22 nt, Human
ugagaucgcgccacugaacucc

SEQ ID NO: 793697 - RNA, 24 nt, Human
ugagaucgcgccacugaacuccag

SEQ ID NO: 793698 - RNA, 24 nt, Human
ugagcugagaucgcgccacugaac

SEQ ID NO: 793699 - RNA, 18 nt, Human
ugaggucaggaguuugag

SEQ ID NO: 793700 - RNA, 22 nt, Human
ugauaacaguaauacugauuaa

SEQ ID NO: 793701 - RNA, 21 nt, Human
ugcagcagcugccuguauggc

SEQ ID NO: 793702 - RNA, 19 nt, Human
ugccauguugguuaaaugc

SEQ ID NO: 793703 - RNA, 23 nt, Human
uggaucaccugaggucaggaguu

SEQ ID NO: 793704 - RNA, 24 nt, Human
uggaucaccugaggucaggaguuu

SEQ ID NO: 793705 - RNA, 27 nt, Human
uggaucaccugaggucaggaguuugag

SEQ ID NO: 793706 - RNA, 19 nt, Human
uggcaggggucagggcugg

SEQ ID NO: 793707 - RNA, 24 nt, Human
uggcuuacgccuguaaucccagca

SEQ ID NO: 793708 - RNA, 20 nt, Human
ugggaggcagaggcgagugg

SEQ ID NO: 793709 - RNA, 24 nt, Human
ugggaggcagaggcgaguggauca

SEQ ID NO: 793710 - RNA, 20 nt, Human
ugggcugggugugguggcuu

SEQ ID NO: 793711 - RNA, 20 nt, Human
ugggcugggugugguggcuu

SEQ ID NO: 793712 - RNA, 24 nt, Human
uggguaaagaaaguuuucuuucca

SEQ ID NO: 793713 - RNA, 24 nt, Human
ugguggcaggcgccuguaguccca

SEQ ID NO: 793714 - RNA, 24 nt, Human
ugguggcuuacgccuguaauccca

SEQ ID NO: 793715 - RNA, 20 nt, Human
uguauaaucaucaaagauau

SEQ ID NO: 793716 - RNA, 22 nt, Human
ugucuagggucaccaaagagaa

SEQ ID NO: 793717 - RNA, 19 nt, Human
ugugacaaacauccacagu

SEQ ID NO: 793718 - RNA, 23 nt, Human
ugugcagguuuguuacauaugua

SEQ ID NO: 793719 - RNA, 23 nt, Human
ugugguggcaggcgccuguaguc

SEQ ID NO: 793720 - RNA, 18 nt, Human
uguuacauauguauacau

SEQ ID NO: 793721 - RNA, 19 nt, Human
uguuacauauguauacaug

SEQ ID NO: 793722 - RNA, 24 nt, Human
uguucauucuucaaaauaggccca

SEQ ID NO: 793723 - RNA, 18 nt, Human
uuagcugggugugguggc

SEQ ID NO: 793724 - RNA, 24 nt, Human
uuagcugggugugguggcaggcgc

SEQ ID NO: 793725 - RNA, 19 nt, Human
uucuguuuauaagugggua

SEQ ID NO: 793726 - RNA, 24 nt, Human
uugaugagaaaaauggagaacaaa

SEQ ID NO: 793727 - RNA, 20 nt, Human
uugcuugaaccugggaaggg

SEQ ID NO: 793728 - RNA, 21 nt, Human
uugcuugaaccugggaagggg

SEQ ID NO: 793729 - RNA, 20 nt, Human
uugggaggcagaggcgagug

SEQ ID NO: 793730 - RNA, 19 nt, Human
uuguagugagcugagaucg

SEQ ID NO: 793731 - RNA, 21 nt, Human
uuuaacucuuuugggguuuug

SEQ ID NO: 793732 - RNA, 23 nt, Human
uuuauaaguggguaaagaaaguu

SEQ ID NO: 793733 - RNA, 23 nt, Human
uuuccagaaaaauacagcagaaa

SEQ ID NO: 793734 - RNA, 21 nt, Human
uuuuuugggcugggugugggg

SEQ ID NO: 793735 - RNA, 20 nt, Human
aaaacauaaccccaaaauau

SEQ ID NO: 793736 - RNA, 18 nt, Human
aaaaccaauagaaaaccc

SEQ ID NO: 793737 - RNA, 23 nt, Human
aaaaccaauagaaaacccauaca

SEQ ID NO: 793738 - RNA, 18 nt, Human
aaaaucauaauccaaaga

SEQ ID NO: 793739 - RNA, 26 nt, Human
aaacauaaccccaaaauauaauggua

SEQ ID NO: 793740 - RNA, 24 nt, Human
aaagaagaaaaccaaauuagagaa

SEQ ID NO: 793741 - RNA, 25 nt, Human
aaagaagcaaaacauaaccccaaaa

SEQ ID NO: 793742 - RNA, 18 nt, Human
aaagacaggcucuucugg

SEQ ID NO: 793743 - RNA, 18 nt, Human
aaauauacacaccaugca

SEQ ID NO: 793744 - RNA, 18 nt, Human
aaaugacucauguaacau

SEQ ID NO: 793745 - RNA, 21 nt, Human
aacaucuucuucauucugcuc

SEQ ID NO: 793746 - RNA, 20 nt, Human
aacaugaaaaggagugauaa

SEQ ID NO: 793747 - RNA, 21 nt, Human
aacuagaaagagagggaauca

SEQ ID NO: 793748 - RNA, 23 nt, Human
aagaagaaaaccaaauuagagaa

SEQ ID NO: 793749 - RNA, 18 nt, Human
aagaagcaaaacauaacc

SEQ ID NO: 793750 - RNA, 18 nt, Human
aagcaaaacauaacccca

SEQ ID NO: 793751 - RNA, 23 nt, Human
aaguaucuuuuuaagaccaugaa

SEQ ID NO: 793752 - RNA, 20 nt, Human
aauucacucccaccaagccu

SEQ ID NO: 793753 - RNA, 20 nt, Human
accaagccuuccagagcucc

SEQ ID NO: 793754 - RNA, 19 nt, Human
accaugaaaccucuuguca

SEQ ID NO: 793755 - RNA, 19 nt, Human
agaagaaaaccaaauuaga

SEQ ID NO: 793756 - RNA, 22 nt, Human
agacagguaaaaaaauuaucuu

SEQ ID NO: 793757 - RNA, 22 nt, Human
aguggcuuugggguagagaaga

SEQ ID NO: 793758 - RNA, 21 nt, Human
aucuuaaagaagcaaaacaua

SEQ ID NO: 793759 - RNA, 23 nt, Human
caaaaaaccaauagaaaacccau

SEQ ID NO: 793760 - RNA, 21 nt, Human
caaaacccacacaaacaucuu

SEQ ID NO: 793761 - RNA, 19 nt, Human
caaccaaacaauugagcug

SEQ ID NO: 793762 - RNA, 19 nt, Human
caauuuuaucauuaccaua

SEQ ID NO: 793763 - RNA, 22 nt, Human
caccuccugaauuggucaauuc

SEQ ID NO: 793764 - RNA, 21 nt, Human
cacuguguaacaagcccuugu

SEQ ID NO: 793765 - RNA, 19 nt, Human
cagacaguacaaggcacac

SEQ ID NO: 793766 - RNA, 18 nt, Human
cagggugauuccuaccaa

SEQ ID NO: 793767 - RNA, 28 nt, Human
cauaaccccaaaauauaaugguagcagg

SEQ ID NO: 793768 - RNA, 18 nt, Human
ccaccgcgcucgccgcuc

SEQ ID NO: 793769 - RNA, 21 nt, Human
ccaggcccuaauugauacuga

SEQ ID NO: 793770 - RNA, 24 nt, Human
cccaccaagccuuccagagcucca

SEQ ID NO: 793771 - RNA, 20 nt, Human
ccccaccgcgcucgccgcuc

SEQ ID NO: 793772 - RNA, 19 nt, Human
ccucucugcugccccccuc

SEQ ID NO: 793773 - RNA, 18 nt, Human
ccucuuuguucgcggccc

SEQ ID NO: 793774 - RNA, 22 nt, Human
ccuuugacuuaacacgagugca

SEQ ID NO: 793775 - RNA, 18 nt, Human
cuaucuuaaagaagcaaa

SEQ ID NO: 793776 - RNA, 20 nt, Human
cucgcagugucucugacgcc

SEQ ID NO: 793777 - RNA, 24 nt, Human
cucgccgcucgcagugucucugac

SEQ ID NO: 793778 - RNA, 18 nt, Human
cucgcgccucggcuccuc

SEQ ID NO: 793779 - RNA, 24 nt, Human
cugccacaauuguaaggugugggc

SEQ ID NO: 793780 - RNA, 18 nt, Human
cugcugccccccucacgc

SEQ ID NO: 793781 - RNA, 20 nt, Human
cuuaaaaaaaaaaaaaaguu

SEQ ID NO: 793782 - RNA, 24 nt, Human
cuuaaaauauggagaaaagacagg

SEQ ID NO: 793783 - RNA, 18 nt, Human
cuucucucaaguuucugu

SEQ ID NO: 793784 - RNA, 19 nt, Human
cuucugcuauaaaacuaaa

SEQ ID NO: 793785 - RNA, 21 nt, Human
cuucuggauccugccacaauu

SEQ ID NO: 793786 - RNA, 22 nt, Human
gaaaagacagguaaaaaaauua

SEQ ID NO: 793787 - RNA, 22 nt, Human
gaagcaaaacauaaccccaaaa

SEQ ID NO: 793788 - RNA, 21 nt, Human
gacagugacuacaacuucaau

SEQ ID NO: 793789 - RNA, 18 nt, Human
gaccacuuucacuaauga

SEQ ID NO: 793790 - RNA, 21 nt, Human
gacuccucucugcugcccccc

SEQ ID NO: 793791 - RNA, 22 nt, Human
gcaaaaaaccaauagaaaaccc

SEQ ID NO: 793792 - RNA, 24 nt, Human
gcagggaggaggagaggggaaaau

SEQ ID NO: 793793 - RNA, 19 nt, Human
gccccccucacgcgcgcac

SEQ ID NO: 793794 - RNA, 18 nt, Human
gccgcggcggcaccggga

SEQ ID NO: 793795 - RNA, 24 nt, Human
gcucucaacaggagauaauccagc

SEQ ID NO: 793796 - RNA, 18 nt, Human
gcugaugcagaugcggcc

SEQ ID NO: 793797 - RNA, 20 nt, Human
ggccccaccgcgcucgccgc

SEQ ID NO: 793798 - RNA, 19 nt, Human
gggaggacauaaaagacca

SEQ ID NO: 793799 - RNA, 19 nt, Human
gguagagaagagaacacug

SEQ ID NO: 793800 - RNA, 21 nt, Human
guaacaagcccuuguuacaaa

SEQ ID NO: 793801 - RNA, 21 nt, Human
gugaaaugacgcuucauagcc

SEQ ID NO: 793802 - RNA, 23 nt, Human
guucauaguugugugcaucccuu

SEQ ID NO: 793803 - RNA, 22 nt, Human
uaaaguaucuuuuuaagaccau

SEQ ID NO: 793804 - RNA, 21 nt, Human
uaaaucagacaguacaaggca

SEQ ID NO: 793805 - RNA, 20 nt, Human
uaacacgagugcaucacuua

SEQ ID NO: 793806 - RNA, 22 nt, Human
uaaugacuuguguaguggcuaa

SEQ ID NO: 793807 - RNA, 22 nt, Human
uaauucuuaaaggaaaaaaaaa

SEQ ID NO: 793808 - RNA, 24 nt, Human
uacaaacucaucuuaacaggaaau

SEQ ID NO: 793809 - RNA, 19 nt, Human
uacauuauauuaccuaaug

SEQ ID NO: 793810 - RNA, 20 nt, Human
uaccaccacuaucucacaaa

SEQ ID NO: 793811 - RNA, 19 nt, Human
uagaaagagagggaaucac

SEQ ID NO: 793812 - RNA, 20 nt, Human
uagaaagagagggaaucacu

SEQ ID NO: 793813 - RNA, 19 nt, Human
uagucuccugguuaacuca

SEQ ID NO: 793814 - RNA, 24 nt, Human
uauacacaccaugcacagucuaua

SEQ ID NO: 793815 - RNA, 25 nt, Human
uauguuugguuucccaaagaagaaa

SEQ ID NO: 793816 - RNA, 24 nt, Human
ucaaaacgaaucucuugcucucaa

SEQ ID NO: 793817 - RNA, 22 nt, Human
ucacuguguaacaagcccuugu

SEQ ID NO: 793818 - RNA, 18 nt, Human
ucauguuucuauuuccca

SEQ ID NO: 793819 - RNA, 20 nt, Human
uccauuucagacuuugcucu

SEQ ID NO: 793820 - RNA, 18 nt, Human
ucccaaagaagaaaacca

SEQ ID NO: 793821 - RNA, 23 nt, Human
ucgcggccccgcagcggcugcgg

SEQ ID NO: 793822 - RNA, 24 nt, Human
ucuaucuuaaagaagcaaaacaua

SEQ ID NO: 793823 - RNA, 19 nt, Human
ucucgcgccucggcuccuc

SEQ ID NO: 793824 - RNA, 19 nt, Human
ucucucaaguuucugucuc

SEQ ID NO: 793825 - RNA, 18 nt, Human
ucugacgccgcggcggca

SEQ ID NO: 793826 - RNA, 21 nt, Human
ucuucagaaauguucauaguu

SEQ ID NO: 793827 - RNA, 23 nt, Human
ucuucagaaauguucauaguugu

SEQ ID NO: 793828 - RNA, 18 nt, Human
ugagaaaaaaucuucaga

SEQ ID NO: 793829 - RNA, 19 nt, Human
ugagaaaacugugguaagg

SEQ ID NO: 793830 - RNA, 23 nt, Human
ugcaucacuuaccaccacuaucu

SEQ ID NO: 793831 - RNA, 23 nt, Human
ugccccccucacgcgcgcacaca

SEQ ID NO: 793832 - RNA, 21 nt, Human
uggaaguccacaaaugugcuc

SEQ ID NO: 793833 - RNA, 23 nt, Human
ugguagcagggaggaggagaggg

SEQ ID NO: 793834 - RNA, 23 nt, Human
ugguagcagggaggaggagaggg

SEQ ID NO: 793835 - RNA, 19 nt, Human
uguaaggugugggcaaauu

SEQ ID NO: 793836 - RNA, 19 nt, Human
ugugcuggggcaucagagu

SEQ ID NO: 793837 - RNA, 18 nt, Human
uuaagaccaugaaaccuc

SEQ ID NO: 793838 - RNA, 21 nt, Human
uuacugagaaaaaaucuucag

SEQ ID NO: 793839 - RNA, 18 nt, Human
uuauuauguauuucccau

SEQ ID NO: 793840 - RNA, 24 nt, Human
uucaauuuccccuacuuuccaacc

SEQ ID NO: 793841 - RNA, 25 nt, Human
uucacaguguuucuuauagccuuug

SEQ ID NO: 793842 - RNA, 21 nt, Human
uucacucccaccaagccuucc

SEQ ID NO: 793843 - RNA, 23 nt, Human
uucacucuaugucaaaacgaauc

SEQ ID NO: 793844 - RNA, 19 nt, Human
uucauagccauucucagac

SEQ ID NO: 793845 - RNA, 20 nt, Human
uugaugucugucugcuggga

SEQ ID NO: 793846 - RNA, 18 nt, Human
uuguauguuugguuuccc

SEQ ID NO: 793847 - RNA, 27 nt, Human
uuguauguuugguuucccaaagaagaa

SEQ ID NO: 793848 - RNA, 20 nt, Human
uuuagucauauaucuuaaaa

SEQ ID NO: 793849 - RNA, 18 nt, Human
uuucugucucucuacccc

SEQ ID NO: 793850 - RNA, 23 nt, Human
aaaaaaccacaaaugucacaaug

SEQ ID NO: 793851 - RNA, 23 nt, Human
aaacuaagaccaaagauugaaga

SEQ ID NO: 793852 - RNA, 23 nt, Human
aacuacuaaaagaaauacaucag

SEQ ID NO: 793853 - RNA, 20 nt, Human
aacugaaaauauuuuggcac

SEQ ID NO: 793854 - RNA, 22 nt, Human
aaguaauugaagaucacaaggu

SEQ ID NO: 793855 - RNA, 22 nt, Human
aauaaccagacaucagaaggaa

SEQ ID NO: 793856 - RNA, 21 nt, Human
aaucacaaaucccacucaagu

SEQ ID NO: 793857 - RNA, 19 nt, Human
aauugcuaaaaaaaauuac

SEQ ID NO: 793858 - RNA, 20 nt, Human
acgugguguugccauuuggc

SEQ ID NO: 793859 - RNA, 27 nt, Human
agccagaauuguuuuuuugugguacua

SEQ ID NO: 793860 - RNA, 20 nt, Human
auaaaauacucuucaaauaa

SEQ ID NO: 793861 - RNA, 18 nt, Human
aucaauuacacaggcacu

SEQ ID NO: 793862 - RNA, 22 nt, Human
aucacaaaucccacucaaguaa

SEQ ID NO: 793863 - RNA, 24 nt, Human
aucccacucaaguaaugaaaauca

SEQ ID NO: 793864 - RNA, 24 nt, Human
caacuaaaaaauuaacaacuaaug

SEQ ID NO: 793865 - RNA, 22 nt, Human
caacugaucaaaaaaaguacag

SEQ ID NO: 793866 - RNA, 18 nt, Human
caacugcugcucucugag

SEQ ID NO: 793867 - RNA, 24 nt, Human
cacauauuacugacuuuacaaaau

SEQ ID NO: 793868 - RNA, 24 nt, Human
cacaucuguauucuaaagccaaaa

SEQ ID NO: 793869 - RNA, 19 nt, Human
caggauucacaaauggcca

SEQ ID NO: 793870 - RNA, 22 nt, Human
cugauagaaugcugcucaaagg

SEQ ID NO: 793871 - RNA, 20 nt, Human
gaccucagagaagcccaucu

SEQ ID NO: 793872 - RNA, 23 nt, Human
gcaauggacuaacuaaaaaacca

SEQ ID NO: 793873 - RNA, 24 nt, Human
uaaaaaaccacaaaugucacaaug

SEQ ID NO: 793874 - RNA, 27 nt, Human
uaaaauaauucauacuagauugauuaa

SEQ ID NO: 793875 - RNA, 21 nt, Human
uaaagaaugcuacagugaggu

SEQ ID NO: 793876 - RNA, 20 nt, Human
uaacagaaauagauaucuau

SEQ ID NO: 793877 - RNA, 18 nt, Human
uaacauuguaggggacca

SEQ ID NO: 793878 - RNA, 21 nt, Human
uaacugaaaaguaacugaaau

SEQ ID NO: 793879 - RNA, 24 nt, Human
uaagaaaauggccuacaauuucac

SEQ ID NO: 793880 - RNA, 21 nt, Human
uaauagccauaaaaacauuua

SEQ ID NO: 793881 - RNA, 30 nt, Human
uaaugaacacaucuguauucuaaagccaaa

SEQ ID NO: 793882 - RNA, 20 nt, Human
uaccauuuggcacacuaguu

SEQ ID NO: 793883 - RNA, 21 nt, Human
uaccuaaguuaaaacaaggac

SEQ ID NO: 793884 - RNA, 18 nt, Human
uagaaaacuaagaccaaa

SEQ ID NO: 793885 - RNA, 20 nt, Human
uauccagauguuuacuaaua

SEQ ID NO: 793886 - RNA, 26 nt, Human
uaugaaacaggacaacacuuguaaaa

SEQ ID NO: 793887 - RNA, 24 nt, Human
uauuuauuugccauuucuuacaua

SEQ ID NO: 793888 - RNA, 18 nt, Human
ucaaaguaauugaagauc

SEQ ID NO: 793889 - RNA, 23 nt, Human
ucaauaacugaugaaauagauaa

SEQ ID NO: 793890 - RNA, 18 nt, Human
ucuaaagccaaaauuuaa

SEQ ID NO: 793891 - RNA, 24 nt, Human
ucugugaccaauacaaaccggggc

SEQ ID NO: 793892 - RNA, 20 nt, Human
ugaaaaauuccugcaauacc

SEQ ID NO: 793893 - RNA, 23 nt, Human
ugaaaaauuccugcaauaccaac

SEQ ID NO: 793894 - RNA, 24 nt, Human
ugaaauacccaggccaacauuuuu

SEQ ID NO: 793895 - RNA, 22 nt, Human
ugaaauagauaauagccauaaa

SEQ ID NO: 793896 - RNA, 18 nt, Human
ugcaauggacuaacuaaa

SEQ ID NO: 793897 - RNA, 22 nt, Human
uggacuaacuaaaaaaccacaa

SEQ ID NO: 793898 - RNA, 23 nt, Human
uggcaguuuuaucaaaauguccu

SEQ ID NO: 793899 - RNA, 23 nt, Human
uguuauaagaaaauggccuacaa

SEQ ID NO: 793900 - RNA, 23 nt, Human
uuaaaaaagucauuaaacuagca

SEQ ID NO: 793901 - RNA, 22 nt, Human
uuacaguaauguuuuugaaaaa

SEQ ID NO: 793902 - RNA, 20 nt, Human
uucaaaaaauucaguuaaaa

SEQ ID NO: 793903 - RNA, 20 nt, Human
uucaaggggugcaaauaacc

SEQ ID NO: 793904 - RNA, 19 nt, Human
uugguauuuuugacaacau

SEQ ID NO: 793905 - RNA, 21 nt, Human
uuuaaaguuccauugacucua

SEQ ID NO: 793906 - RNA, 21 nt, Human
uuuaacaucaaaguaauugaa

SEQ ID NO: 793907 - RNA, 21 nt, Human
uuucaaggggugcaaauaacc

SEQ ID NO: 793908 - RNA, 21 nt, Human
uuugaaauacccaggccaaca

SEQ ID NO: 793909 - RNA, 18 nt, Human
uuuguguaacauuuucaa

SEQ ID NO: 793910 - RNA, 23 nt, Human
uuuuucuacuccuuuuuucuaga

SEQ ID NO: 793911 - RNA, 22 nt, Human
aaaaaaaaaaaaaaggaaagaa

SEQ ID NO: 793912 - RNA, 21 nt, Human
aaaagaaaacauaccacagag

SEQ ID NO: 793913 - RNA, 23 nt, Human
aaaagaaaacauaccacagagaa

SEQ ID NO: 793914 - RNA, 26 nt, Human
aaaagaaaagaaaacauaccacagag

SEQ ID NO: 793915 - RNA, 30 nt, Human
aaaauacaggccgggcgcgguggcucacgg

SEQ ID NO: 793916 - RNA, 20 nt, Human
aaacaaaagaaaagaaaaca

SEQ ID NO: 793917 - RNA, 18 nt, Human
aaacuaauuuauuauagu

SEQ ID NO: 793918 - RNA, 21 nt, Human
aacaaaaaaaaaaaaaaggaa

SEQ ID NO: 793919 - RNA, 21 nt, Human
aacacagacuggaagccuaga

SEQ ID NO: 793920 - RNA, 24 nt, Human
aacaugaccaacauggugaaaccc

SEQ ID NO: 793921 - RNA, 28 nt, Human
aacaugcacacacacacacacaaaugca

SEQ ID NO: 793922 - RNA, 20 nt, Human
aacauggugaaacccugucu

SEQ ID NO: 793923 - RNA, 21 nt, Human
aacauggugaaacccugucuc

SEQ ID NO: 793924 - RNA, 24 nt, Human
aaccaaacacagacuggaagccua

SEQ ID NO: 793925 - RNA, 26 nt, Human
aacuacauguauuuauagcuccaaaa

SEQ ID NO: 793926 - RNA, 19 nt, Human
aacuaguuuuagaacuccu

SEQ ID NO: 793927 - RNA, 19 nt, Human
aagcagaguuacauguuuc

SEQ ID NO: 793928 - RNA, 25 nt, Human
aagccugcagaugucuuuucuuuaa

SEQ ID NO: 793929 - RNA, 18 nt, Human
aaguaaaagaaggaaagc

SEQ ID NO: 793930 - RNA, 21 nt, Human
aaguuuggccaaugauggacc

SEQ ID NO: 793931 - RNA, 24 nt, Human
aauaucaaaaacaugcuugaaaga

SEQ ID NO: 793932 - RNA, 19 nt, Human
aauccucugaagucaggua

SEQ ID NO: 793933 - RNA, 18 nt, Human
aaucgcuugaaccuggga

SEQ ID NO: 793934 - RNA, 24 nt, Human
aaucgcuugaaccugggaggcaga

SEQ ID NO: 793935 - RNA, 23 nt, Human
aaugucacucacugcuuaauaac

SEQ ID NO: 793936 - RNA, 23 nt, Human
acaaaaaaaaaaaaaaggaaaga

SEQ ID NO: 793937 - RNA, 30 nt, Human
acaaaagaaaagaaaacauaccacagagaa

SEQ ID NO: 793938 - RNA, 22 nt, Human
acaacaaaaaaaaaaaaaagga

SEQ ID NO: 793939 - RNA, 23 nt, Human
acacacacacacaaaugcacaca

SEQ ID NO: 793940 - RNA, 24 nt, Human
acagagcaagacccugucuuaaaa

SEQ ID NO: 793941 - RNA, 29 nt, Human
acaugcacacacacacacacaaaugcaca

SEQ ID NO: 793942 - RNA, 25 nt, Human
accaacauggugaaacccugucucc

SEQ ID NO: 793943 - RNA, 24 nt, Human
acccugucucuacuaaaaauauaa

SEQ ID NO: 793944 - RNA, 20 nt, Human
accucauuugucuccuggaa

SEQ ID NO: 793945 - RNA, 24 nt, Human
acugcacuccagccugggcaacag

SEQ ID NO: 793946 - RNA, 24 nt, Human
acugcacuccagccugggcaacag

SEQ ID NO: 793947 - RNA, 19 nt, Human
acugugggaggcuggcagg

SEQ ID NO: 793948 - RNA, 25 nt, Human
agaaaagaaaacauaccacagagaa

SEQ ID NO: 793949 - RNA, 19 nt, Human
agaauaggacaaccugcag

SEQ ID NO: 793950 - RNA, 22 nt, Human
agaaucgcuugaaccugggagg

SEQ ID NO: 793951 - RNA, 18 nt, Human
agagguugcagugagcca

SEQ ID NO: 793952 - RNA, 20 nt, Human
agagguugcagugagccaag

SEQ ID NO: 793953 - RNA, 22 nt, Human
agagguugcagugagccaagau

SEQ ID NO: 793954 - RNA, 24 nt, Human
agagguugcagugagccaagaugg

SEQ ID NO: 793955 - RNA, 23 nt, Human
agaugacaaguaaaagaaggaaa

SEQ ID NO: 793956 - RNA, 22 nt, Human
agauggcgccacugcacuccag

SEQ ID NO: 793957 - RNA, 20 nt, Human
agcacaacaacuaaaauaaa

SEQ ID NO: 793958 - RNA, 23 nt, Human
agcuaggcguggugguacgugcc

SEQ ID NO: 793959 - RNA, 19 nt, Human
agcucaacuccugacaccc

SEQ ID NO: 793960 - RNA, 22 nt, Human
aggaaacauacauuuggcauuc

SEQ ID NO: 793961 - RNA, 23 nt, Human
aggaguucgagaccaacaugacc

SEQ ID NO: 793962 - RNA, 24 nt, Human
aggcagagguugcagugagccaag

SEQ ID NO: 793963 - RNA, 22 nt, Human
aggcaggagaaucgcuugaacc

SEQ ID NO: 793964 - RNA, 24 nt, Human
aggcaggagaaucgcuugaaccug

SEQ ID NO: 793965 - RNA, 24 nt, Human
aggcguggugguacgugccuguaa

SEQ ID NO: 793966 - RNA, 25 nt, Human
aggcuggagugcaguggugcgaucu

SEQ ID NO: 793967 - RNA, 21 nt, Human
agggggcagaucaugagguca

SEQ ID NO: 793968 - RNA, 31 nt, Human
agucacuaaacaugcacacacacacacagug

SEQ ID NO: 793969 - RNA, 20 nt, Human
agugcaguggugcgaucucg

SEQ ID NO: 793970 - RNA, 23 nt, Human
agugcaguggugcgaucucggcu

SEQ ID NO: 793971 - RNA, 24 nt, Human
agugcaguggugcgaucucggcuc

SEQ ID NO: 793972 - RNA, 21 nt, Human
auaaaaaccaaacacagacug

SEQ ID NO: 793973 - RNA, 18 nt, Human
auaaagcaaaaacgucuu

SEQ ID NO: 793974 - RNA, 22 nt, Human
auaauaaugauaagaauaaaaa

SEQ ID NO: 793975 - RNA, 19 nt, Human
auaauuguuauucaucauc

SEQ ID NO: 793976 - RNA, 18 nt, Human
auaggacaaccugcaggg

SEQ ID NO: 793977 - RNA, 22 nt, Human
augaacauguuuauauaaccuc

SEQ ID NO: 793978 - RNA, 25 nt, Human
augaccaacauggugaaacccuguc

SEQ ID NO: 793979 - RNA, 21 nt, Human
augcacacacucauacauagg

SEQ ID NO: 793980 - RNA, 24 nt, Human
auggcgccacugcacuccagccug

SEQ ID NO: 793981 - RNA, 24 nt, Human
auucauuguuuaaaggcaaacauu

SEQ ID NO: 793982 - RNA, 20 nt, Human
auuccauauacuuucuacau

SEQ ID NO: 793983 - RNA, 23 nt, Human
auuugcacaaugacggaaucacc

SEQ ID NO: 793984 - RNA, 21 nt, Human
caacagagcaagacccugucu

SEQ ID NO: 793985 - RNA, 24 nt, Human
caacauggugaaacccugucucua

SEQ ID NO: 793986 - RNA, 25 nt, Human
caacauggugaaacccugucucuaa

SEQ ID NO: 793987 - RNA, 30 nt, Human
caagcaaagucuugguugagcuguguagaa

SEQ ID NO: 793988 - RNA, 19 nt, Human
cacauccccaucauuaagu

SEQ ID NO: 793989 - RNA, 22 nt, Human
cacgccuguaaucccagcacug

SEQ ID NO: 793990 - RNA, 23 nt, Human
cacuaagaaaaagccugcagaug

SEQ ID NO: 793991 - RNA, 21 nt, Human
cacucuuguuucuguuuagag

SEQ ID NO: 793992 - RNA, 18 nt, Human
cacugcacuccagccugg

SEQ ID NO: 793993 - RNA, 19 nt, Human
cacugcacuccagccuggg

SEQ ID NO: 793994 - RNA, 21 nt, Human
cacugcacuccagccugggca

SEQ ID NO: 793995 - RNA, 23 nt, Human
cacugcacuccagccugggcaac

SEQ ID NO: 793996 - RNA, 24 nt, Human
cacugcacuccagccugggcaaca

SEQ ID NO: 793997 - RNA, 27 nt, Human
cacugcacuccagccugggcaacagag

SEQ ID NO: 793998 - RNA, 23 nt, Human
cagaaaauguaaacauucaagca

SEQ ID NO: 793999 - RNA, 21 nt, Human
cagaaagcaacuuggagucuu

SEQ ID NO: 794000 - RNA, 18 nt, Human
cagaagcaaaauauccuc

SEQ ID NO: 794001 - RNA, 23 nt, Human
cagaaggggucaugcuacuggua

SEQ ID NO: 794002 - RNA, 24 nt, Human
cagaucaugaggucaggaguucga

SEQ ID NO: 794003 - RNA, 26 nt, Human
cagauguuaugcuuauuccccugaag

SEQ ID NO: 794004 - RNA, 19 nt, Human
cagcacugugggaggcugg

SEQ ID NO: 794005 - RNA, 22 nt, Human
cagcacugugggaggcuggcag

SEQ ID NO: 794006 - RNA, 22 nt, Human
cagccuaggagcaauaggguau

SEQ ID NO: 794007 - RNA, 21 nt, Human
caggaguucgagaccaacaug

SEQ ID NO: 794008 - RNA, 25 nt, Human
ccacuagucauauaugacuguguac

SEQ ID NO: 794009 - RNA, 20 nt, Human
ccacugcacuccagccuggg

SEQ ID NO: 794010 - RNA, 21 nt, Human
ccacugcacuccagccugggc

SEQ ID NO: 794011 - RNA, 23 nt, Human
ccacugcacuccagccugggcaa

SEQ ID NO: 794012 - RNA, 24 nt, Human
ccacugcacuccagccugggcaac

SEQ ID NO: 794013 - RNA, 19 nt, Human
cccaggcuggagugcagug

SEQ ID NO: 794014 - RNA, 20 nt, Human
cccuccuccccaucuccaag

SEQ ID NO: 794015 - RNA, 19 nt, Human
ccguccucuccacucugcc

SEQ ID NO: 794016 - RNA, 25 nt, Human
ccugggaggcagagguugcagugag

SEQ ID NO: 794017 - RNA, 21 nt, Human
ccuguaaucccagcacugugg

SEQ ID NO: 794018 - RNA, 21 nt, Human
ccuguaaucccagcuacucag

SEQ ID NO: 794019 - RNA, 22 nt, Human
ccuguaaucccagcuacucagg

SEQ ID NO: 794020 - RNA, 24 nt, Human
cgagaccaacaugaccaacauggu

SEQ ID NO: 794021 - RNA, 24 nt, Human
cgccacugcacuccagccugggca

SEQ ID NO: 794022 - RNA, 23 nt, Human
cgccuguaaucccagcacugugg

SEQ ID NO: 794023 - RNA, 24 nt, Human
cgccuguaaucccagcacuguggg

SEQ ID NO: 794024 - RNA, 21 nt, Human
cuaaaaaaucagaacaaaacu

SEQ ID NO: 794025 - RNA, 19 nt, Human
cuacugguaaaagcacagg

SEQ ID NO: 794026 - RNA, 23 nt, Human
cuagcaaagucaaaaauacaaaa

SEQ ID NO: 794027 - RNA, 23 nt, Human
cuaguguauucuucacuuuccua

SEQ ID NO: 794028 - RNA, 23 nt, Human
cucacaaaaguuaauaauuguua

SEQ ID NO: 794029 - RNA, 22 nt, Human
cucacgccuguaaucccagcac

SEQ ID NO: 794030 - RNA, 23 nt, Human
cucacgccuguaaucccagcacu

SEQ ID NO: 794031 - RNA, 22 nt, Human
cuccaaaaaauuaaaaguucau

SEQ ID NO: 794032 - RNA, 21 nt, Human
cucccuccuccccaucuccaa

SEQ ID NO: 794033 - RNA, 22 nt, Human
cucccuccuccccaucuccaag

SEQ ID NO: 794034 - RNA, 24 nt, Human
cucgcucugucgcccaggcuggag

SEQ ID NO: 794035 - RNA, 20 nt, Human
cucugucgcccaggcuggag

SEQ ID NO: 794036 - RNA, 24 nt, Human
cugauauacauauuucuauugccu

SEQ ID NO: 794037 - RNA, 24 nt, Human
cugcauuacuggucuaacaauaaa

SEQ ID NO: 794038 - RNA, 18 nt, Human
cugccacaaacuagcaaa

SEQ ID NO: 794039 - RNA, 19 nt, Human
cugcuuaauaacuguugac

SEQ ID NO: 794040 - RNA, 18 nt, Human
cugucuuaaaaaaacaaa

SEQ ID NO: 794041 - RNA, 21 nt, Human
gaaaagaaaacauaccacaga

SEQ ID NO: 794042 - RNA, 18 nt, Human
gagguugcagugagccaa

SEQ ID NO: 794043 - RNA, 22 nt, Human
gaucaugaggucaggaguucga

SEQ ID NO: 794044 - RNA, 24 nt, Human
gaucaugaggucaggaguucgaga

SEQ ID NO: 794045 - RNA, 23 nt, Human
gcacaacaacuaaaauaaaauaa

SEQ ID NO: 794046 - RNA, 20 nt, Human
gcacaaugacggaaucaccu

SEQ ID NO: 794047 - RNA, 24 nt, Human
gcacuccagccugggcaacagagc

SEQ ID NO: 794048 - RNA, 22 nt, Human
gccacugcacuccagccugggc

SEQ ID NO: 794049 - RNA, 24 nt, Human
gccacugcacuccagccugggcaa

SEQ ID NO: 794050 - RNA, 20 nt, Human
gcccaggcuggagugcagug

SEQ ID NO: 794051 - RNA, 23 nt, Human
gcccaggcuggagugcaguggug

SEQ ID NO: 794052 - RNA, 21 nt, Human
gcuaaaguauucgaagcagag

SEQ ID NO: 794053 - RNA, 25 nt, Human
gcucugucgcccaggcuggagugca

SEQ ID NO: 794054 - RNA, 22 nt, Human
gcuuuuuggaggacaaaguacu

SEQ ID NO: 794055 - RNA, 21 nt, Human
ggaaacauacauuuggcauuc

SEQ ID NO: 794056 - RNA, 22 nt, Human
ggaggacaaaguacuuucuacg

SEQ ID NO: 794057 - RNA, 19 nt, Human
ggcaagugugagacaggag

SEQ ID NO: 794058 - RNA, 24 nt, Human
ggccugaggcaggagaaucgcuug

SEQ ID NO: 794059 - RNA, 24 nt, Human
gggcagaucaugaggucaggaguu

SEQ ID NO: 794060 - RNA, 24 nt, Human
gggcgcgguggcucacgccuguaa

SEQ ID NO: 794061 - RNA, 21 nt, Human
ggggcagaucaugaggucagg

SEQ ID NO: 794062 - RNA, 22 nt, Human
gggguugcucauacaaggacag

SEQ ID NO: 794063 - RNA, 18 nt, Human
ggguauggggggggguac

SEQ ID NO: 794064 - RNA, 19 nt, Human
ggguauggggggggguaca

SEQ ID NO: 794065 - RNA, 21 nt, Human
gggugcuaaaggcuacaaagu

SEQ ID NO: 794066 - RNA, 23 nt, Human
gguggcucacgccuguaauccca

SEQ ID NO: 794067 - RNA, 24 nt, Human
gguggcucacgccuguaaucccag

SEQ ID NO: 794068 - RNA, 24 nt, Human
ggugguacgugccuguaaucccag

SEQ ID NO: 794069 - RNA, 24 nt, Human
gguugcagugagccaagauggcgc

SEQ ID NO: 794070 - RNA, 19 nt, Human
gucuacuaaagauaaaaag

SEQ ID NO: 794071 - RNA, 21 nt, Human
gugaaacccugucucuacuaa

SEQ ID NO: 794072 - RNA, 19 nt, Human
guugcucauacaaggacag

SEQ ID NO: 794073 - RNA, 19 nt, Human
guugcucauacaaggacag

SEQ ID NO: 794074 - RNA, 22 nt, Human
uaaaaaaacaaaagaaaagaaa

SEQ ID NO: 794075 - RNA, 19 nt, Human
uaaaaacacaaacauacac

SEQ ID NO: 794076 - RNA, 24 nt, Human
uaaaaagccauuauggauccagug

SEQ ID NO: 794077 - RNA, 18 nt, Human
uaaaaguucauuccuagu

SEQ ID NO: 794078 - RNA, 28 nt, Human
uaaacaugcacacacacacacacaaaug

SEQ ID NO: 794079 - RNA, 19 nt, Human
uaaccucuugaagccucaa

SEQ ID NO: 794080 - RNA, 25 nt, Human
uaacuauuacaacaaaaaaaaaaaa

SEQ ID NO: 794081 - RNA, 19 nt, Human
uaagaaaaagccugcagau

SEQ ID NO: 794082 - RNA, 24 nt, Human
uacaaaauaugaaaacugcauuac

SEQ ID NO: 794083 - RNA, 23 nt, Human
uacauaccaccuagguuuaugua

SEQ ID NO: 794084 - RNA, 22 nt, Human
uacauguuuccugguguuuguc

SEQ ID NO: 794085 - RNA, 20 nt, Human
uacauuuguauguauacaca

SEQ ID NO: 794086 - RNA, 24 nt, Human
uaccacagagaauaacauuuuuau

SEQ ID NO: 794087 - RNA, 19 nt, Human
uaccagaagcaaaauaucc

SEQ ID NO: 794088 - RNA, 25 nt, Human
uagaacagcauuauugaguuuagca

SEQ ID NO: 794089 - RNA, 19 nt, Human
uagcugcuauuauuaaccu

SEQ ID NO: 794090 - RNA, 23 nt, Human
uagcugcuauuauuaaccuuucg

SEQ ID NO: 794091 - RNA, 19 nt, Human
uaguaguuagugguuccau

SEQ ID NO: 794092 - RNA, 21 nt, Human
uauaaaacuaguugacucuga

SEQ ID NO: 794093 - RNA, 28 nt, Human
uauaauaacaaucauaauaaugauaaga

SEQ ID NO: 794094 - RNA, 18 nt, Human
uauaucauauaggcuaca

SEQ ID NO: 794095 - RNA, 21 nt, Human
uaucauauaagccacauauau

SEQ ID NO: 794096 - RNA, 22 nt, Human
uauuauaaaacuaguugacucu

SEQ ID NO: 794097 - RNA, 18 nt, Human
uauuucacucuuguuucu

SEQ ID NO: 794098 - RNA, 26 nt, Human
ucaaaaacaugcuugaaagaugccag

SEQ ID NO: 794099 - RNA, 19 nt, Human
ucaacuaacaucauucaac

SEQ ID NO: 794100 - RNA, 21 nt, Human
ucaauuccaggcaugugcaca

SEQ ID NO: 794101 - RNA, 22 nt, Human
ucagaugacaaguaaaagaagg

SEQ ID NO: 794102 - RNA, 21 nt, Human
ucagccaaauugaagucugga

SEQ ID NO: 794103 - RNA, 24 nt, Human
ucaugaggucaggaguucgagacc

SEQ ID NO: 794104 - RNA, 23 nt, Human
ucauuccuagugaaagcaaaaca

SEQ ID NO: 794105 - RNA, 23 nt, Human
ucauuugucuccuggaagucuuu

SEQ ID NO: 794106 - RNA, 24 nt, Human
uccaaaaaauuaaaaguucauucc

SEQ ID NO: 794107 - RNA, 19 nt, Human
uccacaaauuuauuucacu

SEQ ID NO: 794108 - RNA, 22 nt, Human
ucgcccaggcuggagugcagug

SEQ ID NO: 794109 - RNA, 24 nt, Human
ucgcucugucgcccaggcuggagu

SEQ ID NO: 794110 - RNA, 18 nt, Human
ucgcuugaaccugggagg

SEQ ID NO: 794111 - RNA, 19 nt, Human
ucucgcucugucgcccagg

SEQ ID NO: 794112 - RNA, 22 nt, Human
ucucgcucugucgcccaggcug

SEQ ID NO: 794113 - RNA, 23 nt, Human
ucucgcucugucgcccaggcugg

SEQ ID NO: 794114 - RNA, 24 nt, Human
ucucgcucugucgcccaggcugga

SEQ ID NO: 794115 - RNA, 26 nt, Human
ucucgcucugucgcccaggcuggagu

SEQ ID NO: 794116 - RNA, 27 nt, Human
ucucgcucugucgcccaggcuggagug

SEQ ID NO: 794117 - RNA, 21 nt, Human
ucucuacuaaaaauauaaaaa

SEQ ID NO: 794118 - RNA, 18 nt, Human
ucugaauucaugcuagcu

SEQ ID NO: 794119 - RNA, 24 nt, Human
ucugucgcccaggcuggagugcag

SEQ ID NO: 794120 - RNA, 18 nt, Human
ucuucaacuuguucacuu

SEQ ID NO: 794121 - RNA, 20 nt, Human
ugaaauauccacccguccuc

SEQ ID NO: 794122 - RNA, 26 nt, Human
ugaaaugaaaaaauacaggccgggcg

SEQ ID NO: 794123 - RNA, 24 nt, Human
ugaaccugggaggcagagguugca

SEQ ID NO: 794124 - RNA, 19 nt, Human
ugacacauuucucagaaca

SEQ ID NO: 794125 - RNA, 24 nt, Human
ugacacauuucucagaacacaucc

SEQ ID NO: 794126 - RNA, 20 nt, Human
ugaccaacauggugaaaccc

SEQ ID NO: 794127 - RNA, 23 nt, Human
ugaccaacauggugaaacccugu

SEQ ID NO: 794128 - RNA, 25 nt, Human
ugaccaugaacauguuuauauaacc

SEQ ID NO: 794129 - RNA, 18 nt, Human
ugagaaugucacucacug

SEQ ID NO: 794130 - RNA, 24 nt, Human
ugagaugaugaaaauauucuaaag

SEQ ID NO: 794131 - RNA, 20 nt, Human
ugaggcaggagaaucgcuug

SEQ ID NO: 794132 - RNA, 24 nt, Human
ugaggcaggagaaucgcuugaacc

SEQ ID NO: 794133 - RNA, 25 nt, Human
ugaggcaggagaaucgcuugaaccu

SEQ ID NO: 794134 - RNA, 20 nt, Human
ugauaagaauaaaaaccaaa

SEQ ID NO: 794135 - RNA, 25 nt, Human
ugauaagaauaaaaaccaaacacag

SEQ ID NO: 794136 - RNA, 22 nt, Human
ugcacaauucugugaauauucu

SEQ ID NO: 794137 - RNA, 25 nt, Human
ugcacacacucauacauacuuaaua

SEQ ID NO: 794138 - RNA, 22 nt, Human
ugcaguggugcgaucucggcuc

SEQ ID NO: 794139 - RNA, 19 nt, Human
ugccaccauaaagaaaguu

SEQ ID NO: 794140 - RNA, 21 nt, Human
ugccugaaaauuagauuagga

SEQ ID NO: 794141 - RNA, 27 nt, Human
ugccugaaaauuagauuaggacagaug

SEQ ID NO: 794142 - RNA, 24 nt, Human
ugccuguaaucccagcuacucagg

SEQ ID NO: 794143 - RNA, 19 nt, Human
ugcgauacgcuauacuaaa

SEQ ID NO: 794144 - RNA, 18 nt, Human
uggaagucuuucuuuucu

SEQ ID NO: 794145 - RNA, 23 nt, Human
uggagugcaguggugcgaucucg

SEQ ID NO: 794146 - RNA, 24 nt, Human
uggagugcaguggugcgaucucgg

SEQ ID NO: 794147 - RNA, 22 nt, Human
uggcauucuucucccuccuccc

SEQ ID NO: 794148 - RNA, 22 nt, Human
uggcucacgccuguaaucccag

SEQ ID NO: 794149 - RNA, 24 nt, Human
uggcucacgccuguaaucccagca

SEQ ID NO: 794150 - RNA, 24 nt, Human
ugggaggcagagguugcagugagc

SEQ ID NO: 794151 - RNA, 21 nt, Human
ugggaggcuggcagggggcag

SEQ ID NO: 794152 - RNA, 25 nt, Human
ugggaggcuggcagggggcagauca

SEQ ID NO: 794153 - RNA, 21 nt, Human
ugguacgugccuguaauccca

SEQ ID NO: 794154 - RNA, 22 nt, Human
ugguacgugccuguaaucccag

SEQ ID NO: 794155 - RNA, 24 nt, Human
uggugguacgugccuguaauccca

SEQ ID NO: 794156 - RNA, 18 nt, Human
uguauguauacacaugua

SEQ ID NO: 794157 - RNA, 26 nt, Human
uguauguauacacauguaaagucacu

SEQ ID NO: 794158 - RNA, 27 nt, Human
ugucagaugacaaguaaaagaaggaaa

SEQ ID NO: 794159 - RNA, 20 nt, Human
uguguacauuuguauguaua

SEQ ID NO: 794160 - RNA, 21 nt, Human
uguuaugcuuauuccauauaa

SEQ ID NO: 794161 - RNA, 18 nt, Human
uguucuaaaaaaucagaa

SEQ ID NO: 794162 - RNA, 24 nt, Human
uguucuaaaaaaucagaacaaaac

SEQ ID NO: 794163 - RNA, 21 nt, Human
uguuuuuauuaaccaucaucu

SEQ ID NO: 794164 - RNA, 18 nt, Human
uuaaaggcaaacauucaa

SEQ ID NO: 794165 - RNA, 28 nt, Human
uuacuggucuaacaauaaaaaaaaaaaa

SEQ ID NO: 794166 - RNA, 26 nt, Human
uuacuuuaccauuuauuauguagucu

SEQ ID NO: 794167 - RNA, 20 nt, Human
uuagcuaggcguggugguac

SEQ ID NO: 794168 - RNA, 24 nt, Human
uuagcuaggcguggugguacgugc

SEQ ID NO: 794169 - RNA, 19 nt, Human
uuagugguuccauuuuuuc

SEQ ID NO: 794170 - RNA, 22 nt, Human
uuauaugcucacaaaaguuaau

SEQ ID NO: 794171 - RNA, 20 nt, Human
uucaaaaggcagaaagcaac

SEQ ID NO: 794172 - RNA, 19 nt, Human
uucaagcaaagucuugguu

SEQ ID NO: 794173 - RNA, 20 nt, Human
uucacucuuguuucuguuuu

SEQ ID NO: 794174 - RNA, 19 nt, Human
uucacuuuuacaauuaaau

SEQ ID NO: 794175 - RNA, 24 nt, Human
uuccacauauacaaaguauccaga

SEQ ID NO: 794176 - RNA, 21 nt, Human
uucuaagccucuuuaacuauu

SEQ ID NO: 794177 - RNA, 20 nt, Human
uucucagaacacauccccau

SEQ ID NO: 794178 - RNA, 19 nt, Human
uucuucucccuccucccca

SEQ ID NO: 794179 - RNA, 24 nt, Human
uugaaccugggaggcagagguugc

SEQ ID NO: 794180 - RNA, 22 nt, Human
uugcagugagccaagauggcgc

SEQ ID NO: 794181 - RNA, 24 nt, Human
uuuaguaguugccuauggccaggg

SEQ ID NO: 794182 - RNA, 20 nt, Human
uuuauauaaccucuugaagc

SEQ ID NO: 794183 - RNA, 20 nt, Human
uuucccaaacugggccauuc

SEQ ID NO: 794184 - RNA, 30 nt, Human
uuugaaauauccacccguccucuccacucu

SEQ ID NO: 794185 - RNA, 23 nt, Human
aaaagcaagcuguguguagccua

SEQ ID NO: 794186 - RNA, 26 nt, Human
aaaauaguuaagcugauacuugaaca

SEQ ID NO: 794187 - RNA, 19 nt, Human
aaagaaagggaggcagaaa

SEQ ID NO: 794188 - RNA, 22 nt, Human
aacaaauaccuauagcagacug

SEQ ID NO: 794189 - RNA, 26 nt, Human
aaccugacacucaucucagaaugcua

SEQ ID NO: 794190 - RNA, 23 nt, Human
aacuaguugggaacagacaccuc

SEQ ID NO: 794191 - RNA, 21 nt, Human
aagcagagcuuugacugaaau

SEQ ID NO: 794192 - RNA, 18 nt, Human
aagcuggggcugggggag

SEQ ID NO: 794193 - RNA, 19 nt, Human
aaucagguugacagcacca

SEQ ID NO: 794194 - RNA, 20 nt, Human
aaucauuugagagucaagaa

SEQ ID NO: 794195 - RNA, 21 nt, Human
aauucauaacacacaaauuca

SEQ ID NO: 794196 - RNA, 22 nt, Human
acacacagcaaggagaaccagc

SEQ ID NO: 794197 - RNA, 20 nt, Human
accaguggguagccugggga

SEQ ID NO: 794198 - RNA, 23 nt, Human
acuagagaaguacuggcauucaa

SEQ ID NO: 794199 - RNA, 18 nt, Human
acuugauuccuauaauga

SEQ ID NO: 794200 - RNA, 23 nt, Human
agaaaagaaccccucaaagagaa

SEQ ID NO: 794201 - RNA, 19 nt, Human
agaaagaaagggaggcaga

SEQ ID NO: 794202 - RNA, 20 nt, Human
agaaaucccugaaauacugc

SEQ ID NO: 794203 - RNA, 22 nt, Human
agaaaucccugaaauacugcac

SEQ ID NO: 794204 - RNA, 24 nt, Human
agcaaggagaaccagcauguaucu

SEQ ID NO: 794205 - RNA, 19 nt, Human
agcaaguaguaaccacuga

SEQ ID NO: 794206 - RNA, 20 nt, Human
agcagaauuuuuaauggaau

SEQ ID NO: 794207 - RNA, 18 nt, Human
agcccuguaggagaaagc

SEQ ID NO: 794208 - RNA, 19 nt, Human
aggagaaagcuggggcugg

SEQ ID NO: 794209 - RNA, 19 nt, Human
aggcacuguugaagaauga

SEQ ID NO: 794210 - RNA, 25 nt, Human
aggcagaaacagaagagaaacaaaa

SEQ ID NO: 794211 - RNA, 20 nt, Human
agugugcauccacuagagaa

SEQ ID NO: 794212 - RNA, 24 nt, Human
aucauucacccaugacaccauuca

SEQ ID NO: 794213 - RNA, 23 nt, Human
auccuguuucgcagcauccuugg

SEQ ID NO: 794214 - RNA, 18 nt, Human
aucucacucuugcccuug

SEQ ID NO: 794215 - RNA, 18 nt, Human
aucucaucuccacaucuc

SEQ ID NO: 794216 - RNA, 24 nt, Human
auuucagaccuuguacguggcggu

SEQ ID NO: 794217 - RNA, 22 nt, Human
caaagcagaaugguacagacca

SEQ ID NO: 794218 - RNA, 22 nt, Human
caacacuauuucccacccaaca

SEQ ID NO: 794219 - RNA, 24 nt, Human
caacucauucucuccugaaaaccu

SEQ ID NO: 794220 - RNA, 19 nt, Human
caagaaaagguuaucucau

SEQ ID NO: 794221 - RNA, 24 nt, Human
caagaauaacaaauaccuauagca

SEQ ID NO: 794222 - RNA, 18 nt, Human
caaggcacuguugaagaa

SEQ ID NO: 794223 - RNA, 19 nt, Human
cacacacagcaaggagaac

SEQ ID NO: 794224 - RNA, 24 nt, Human
cacacacagcaaggagaaccagca

SEQ ID NO: 794225 - RNA, 18 nt, Human
cacagagcugccuagaac

SEQ ID NO: 794226 - RNA, 21 nt, Human
cacccaacaauagaaucugca

SEQ ID NO: 794227 - RNA, 25 nt, Human
cagaaacagaagagaaacaaaagca

SEQ ID NO: 794228 - RNA, 19 nt, Human
cagaaagaaagggaggcag

SEQ ID NO: 794229 - RNA, 25 nt, Human
cagaauaaaaaaccauaccuaggac

SEQ ID NO: 794230 - RNA, 19 nt, Human
cagcaagugugaccacaau

SEQ ID NO: 794231 - RNA, 21 nt, Human
caggaaaagcccuguaggaga

SEQ ID NO: 794232 - RNA, 18 nt, Human
caggaguccucuaggagg

SEQ ID NO: 794233 - RNA, 19 nt, Human
ccccaagaacugcuuccac

SEQ ID NO: 794234 - RNA, 21 nt, Human
cccuguaggagaaagcugggg

SEQ ID NO: 794235 - RNA, 23 nt, Human
ccugagcuaccagaaaagaaccc

SEQ ID NO: 794236 - RNA, 22 nt, Human
cucaccccaacucauucucucc

SEQ ID NO: 794237 - RNA, 19 nt, Human
cuccaagaaaagguuaucu

SEQ ID NO: 794238 - RNA, 25 nt, Human
cuccaagaaaagguuaucucauaau

SEQ ID NO: 794239 - RNA, 26 nt, Human
cucccgugguuuucagaggauuuuac

SEQ ID NO: 794240 - RNA, 20 nt, Human
cugaaaaccugacacucauc

SEQ ID NO: 794241 - RNA, 20 nt, Human
cuggcaauaugaggcucccu

SEQ ID NO: 794242 - RNA, 21 nt, Human
cuggucuuaaguagcaccuga

SEQ ID NO: 794243 - RNA, 19 nt, Human
cugugucacacacagcaag

SEQ ID NO: 794244 - RNA, 19 nt, Human
gaaaagcccuguaggagaa

SEQ ID NO: 794245 - RNA, 18 nt, Human
gaaaggcagaaagaaagg

SEQ ID NO: 794246 - RNA, 18 nt, Human
gacucugggcucacccca

SEQ ID NO: 794247 - RNA, 22 nt, Human
gcaaagcagaaugguacagacc

SEQ ID NO: 794248 - RNA, 22 nt, Human
gcacuaacagaauaaaaaacca

SEQ ID NO: 794249 - RNA, 21 nt, Human
gccaugcaucagaagaggaca

SEQ ID NO: 794250 - RNA, 24 nt, Human
gcccguaccuacuucuucucucug

SEQ ID NO: 794251 - RNA, 19 nt, Human
ggacucaggaaaagcccug

SEQ ID NO: 794252 - RNA, 19 nt, Human
ggagucucacagagcugcc

SEQ ID NO: 794253 - RNA, 23 nt, Human
ggcagaaacagaagagaaacaaa

SEQ ID NO: 794254 - RNA, 26 nt, Human
ggcucuggaaaagcaaaguacaauua

SEQ ID NO: 794255 - RNA, 21 nt, Human
gggaggcagaaauacugcaag

SEQ ID NO: 794256 - RNA, 23 nt, Human
gggcaaagaccggaguaggagga

SEQ ID NO: 794257 - RNA, 19 nt, Human
gugaugugugcugucugcc

SEQ ID NO: 794258 - RNA, 20 nt, Human
uaaaaaaccauaccuaggac

SEQ ID NO: 794259 - RNA, 24 nt, Human
uaaaaauaccaguauuucccccca

SEQ ID NO: 794260 - RNA, 20 nt, Human
uaaaagcaaguaguaaccac

SEQ ID NO: 794261 - RNA, 26 nt, Human
uaacaaauaccuauagcagacugaga

SEQ ID NO: 794262 - RNA, 18 nt, Human
uaagaccagccuuacaga

SEQ ID NO: 794263 - RNA, 20 nt, Human
uaagcugauacuugaacacu

SEQ ID NO: 794264 - RNA, 24 nt, Human
uaaguagcaccugaccagucagga

SEQ ID NO: 794265 - RNA, 22 nt, Human
uaccaguauuuccccccauuuu

SEQ ID NO: 794266 - RNA, 19 nt, Human
uaccuacuucuucucucug

SEQ ID NO: 794267 - RNA, 19 nt, Human
uagagccauguguucaugg

SEQ ID NO: 794268 - RNA, 24 nt, Human
uagcaccugaccagucaggaguuu

SEQ ID NO: 794269 - RNA, 18 nt, Human
uaggaggaaaguguggug

SEQ ID NO: 794270 - RNA, 21 nt, Human
uaguaaaacacacacaaggca

SEQ ID NO: 794271 - RNA, 19 nt, Human
ucagcaagugugaccacaa

SEQ ID NO: 794272 - RNA, 19 nt, Human
ucagcaguaauggaagggg

SEQ ID NO: 794273 - RNA, 21 nt, Human
ucaggaguuucagacucuggg

SEQ ID NO: 794274 - RNA, 19 nt, Human
ucagugguucuuugcugaa

SEQ ID NO: 794275 - RNA, 18 nt, Human
ucauaacacacaaauuca

SEQ ID NO: 794276 - RNA, 18 nt, Human
uccaagaauaacaaauac

SEQ ID NO: 794277 - RNA, 19 nt, Human
uccaugaggcugauacagg

SEQ ID NO: 794278 - RNA, 18 nt, Human
uccccaagaacugcuucc

SEQ ID NO: 794279 - RNA, 20 nt, Human
uccccagguaaaaagggcuc

SEQ ID NO: 794280 - RNA, 18 nt, Human
uccccaucauucacccau

SEQ ID NO: 794281 - RNA, 19 nt, Human
ucccccuuuguaggaggga

SEQ ID NO: 794282 - RNA, 20 nt, Human
uccuuccuugguaacuucuu

SEQ ID NO: 794283 - RNA, 19 nt, Human
ucucaaagagcuugaguca

SEQ ID NO: 794284 - RNA, 22 nt, Human
ucugagaucugccaugguacuc

SEQ ID NO: 794285 - RNA, 24 nt, Human
ucugcgagauuauaaaaauaccag

SEQ ID NO: 794286 - RNA, 23 nt, Human
ucugcucaugcuuccuuaggacc

SEQ ID NO: 794287 - RNA, 19 nt, Human
ucuggagauucugugccug

SEQ ID NO: 794288 - RNA, 22 nt, Human
ucuggggacucaggaaaagccc

SEQ ID NO: 794289 - RNA, 23 nt, Human
ucuguggcugaggaggcagaggc

SEQ ID NO: 794290 - RNA, 26 nt, Human
ugaaaggcagaaagaaagggaggcag

SEQ ID NO: 794291 - RNA, 19 nt, Human
ugaaauacugcaccaggaa

SEQ ID NO: 794292 - RNA, 20 nt, Human
ugaaauacugcaccaggaau

SEQ ID NO: 794293 - RNA, 24 nt, Human
ugaggcucccugcugccuccuggu

SEQ ID NO: 794294 - RNA, 20 nt, Human
ugaguugaugcaugugaugu

SEQ ID NO: 794295 - RNA, 19 nt, Human
ugcaucagaagaggacaug

SEQ ID NO: 794296 - RNA, 22 nt, Human
ugccaggccccuccuuaacucg

SEQ ID NO: 794297 - RNA, 23 nt, Human
ugccugagcuaccagaaaagaac

SEQ ID NO: 794298 - RNA, 20 nt, Human
ugcugucuggggacucagga

SEQ ID NO: 794299 - RNA, 19 nt, Human
ugcuuggugacuauggugu

SEQ ID NO: 794300 - RNA, 22 nt, Human
uggaauguucucaaagagcuug

SEQ ID NO: 794301 - RNA, 23 nt, Human
ugggaacagacaccucccugggg

SEQ ID NO: 794302 - RNA, 21 nt, Human
ugggcaaauggaaaggugcug

SEQ ID NO: 794303 - RNA, 19 nt, Human
ugggggagggaaccaaagg

SEQ ID NO: 794304 - RNA, 18 nt, Human
uggggugaaaggcagaaa

SEQ ID NO: 794305 - RNA, 22 nt, Human
uggggugaaaggcagaaagaaa

SEQ ID NO: 794306 - RNA, 20 nt, Human
uggguggugcuggcaauaug

SEQ ID NO: 794307 - RNA, 19 nt, Human
uguacguggcgguugcugg

SEQ ID NO: 794308 - RNA, 22 nt, Human
uguggcugaggaggcagaggcu

SEQ ID NO: 794309 - RNA, 21 nt, Human
ugugggcaaauggaaaggugc

SEQ ID NO: 794310 - RNA, 24 nt, Human
uuaagcacacugaaauccccaggu

SEQ ID NO: 794311 - RNA, 20 nt, Human
uuacuccccaucauucaccc

SEQ ID NO: 794312 - RNA, 23 nt, Human
uuagagccauguguucauggccu

SEQ ID NO: 794313 - RNA, 22 nt, Human
uuagcagaauuuuuaauggaau

SEQ ID NO: 794314 - RNA, 18 nt, Human
uucauacucugcugucug

SEQ ID NO: 794315 - RNA, 18 nt, Human
uucccaugcaauguccua

SEQ ID NO: 794316 - RNA, 19 nt, Human
uugaugcaugugaugugug

SEQ ID NO: 794317 - RNA, 19 nt, Human
uuugcucuaaaucuccugu

SEQ ID NO: 794318 - RNA, 21 nt, Human
uuuguaggagggaguucucug

SEQ ID NO: 794319 - RNA, 23 nt, Human
aauugauuaauuacauuuuaaau

SEQ ID NO: 794320 - RNA, 19 nt, Human
acucugucgcccaggcugg

SEQ ID NO: 794321 - RNA, 24 nt, Human
acucugucgcccaggcuggagugu

SEQ ID NO: 794322 - RNA, 21 nt, Human
agaagaaggcauggucugaca

SEQ ID NO: 794323 - RNA, 18 nt, Human
agauaguggagugguuuu

SEQ ID NO: 794324 - RNA, 24 nt, Human
agucaggaaagggacaggguuugg

SEQ ID NO: 794325 - RNA, 24 nt, Human
aguggugugaucucagcucacugc

SEQ ID NO: 794326 - RNA, 19 nt, Human
aguguaguggugugaucuc

SEQ ID NO: 794327 - RNA, 24 nt, Human
aguguaguggugugaucucagcuc

SEQ ID NO: 794328 - RNA, 24 nt, Human
cacucugucgcccaggcuggagug

SEQ ID NO: 794329 - RNA, 23 nt, Human
cacugcagccucugccucccggg

SEQ ID NO: 794330 - RNA, 23 nt, Human
cagcucacugcagccucugccuc

SEQ ID NO: 794331 - RNA, 20 nt, Human
cccaggcuggaguguagugg

SEQ ID NO: 794332 - RNA, 24 nt, Human
cucacugcagccucugccucccgg

SEQ ID NO: 794333 - RNA, 24 nt, Human
cuggaguguaguggugugaucuca

SEQ ID NO: 794334 - RNA, 19 nt, Human
cugucgcccaggcuggagu

SEQ ID NO: 794335 - RNA, 20 nt, Human
gcccaggcuggaguguagug

SEQ ID NO: 794336 - RNA, 23 nt, Human
gcccaggcuggaguguaguggug

SEQ ID NO: 794337 - RNA, 22 nt, Human
ggcuggaguguaguggugugau

SEQ ID NO: 794338 - RNA, 24 nt, Human
ggucacucugucgcccaggcugga

SEQ ID NO: 794339 - RNA, 18 nt, Human
uagaagaaggcauggucu

SEQ ID NO: 794340 - RNA, 19 nt, Human
uagcugagccauuauggcc

SEQ ID NO: 794341 - RNA, 20 nt, Human
uagcugagccauuauggcca

SEQ ID NO: 794342 - RNA, 21 nt, Human
uauggccaucuaguggcagaa

SEQ ID NO: 794343 - RNA, 20 nt, Human
ucacucugucgcccaggcug

SEQ ID NO: 794344 - RNA, 22 nt, Human
ucacucugucgcccaggcugga

SEQ ID NO: 794345 - RNA, 24 nt, Human
ucacugcagccucugccucccggg

SEQ ID NO: 794346 - RNA, 25 nt, Human
ucacugcagccucugccucccgggc

SEQ ID NO: 794347 - RNA, 24 nt, Human
ucgcccaggcuggaguguaguggu

SEQ ID NO: 794348 - RNA, 24 nt, Human
ucugucgcccaggcuggaguguag

SEQ ID NO: 794349 - RNA, 19 nt, Human
ugaagcuguagaagaaggc

SEQ ID NO: 794350 - RNA, 20 nt, Human
ugaagcuguagaagaaggca

SEQ ID NO: 794351 - RNA, 24 nt, Human
ugacagccccaccaacagucagga

SEQ ID NO: 794352 - RNA, 22 nt, Human
ugacuuagcugagccauuaugg

SEQ ID NO: 794353 - RNA, 18 nt, Human
ugaggcagggucacucug

SEQ ID NO: 794354 - RNA, 19 nt, Human
ugaggcagggucacucugu

SEQ ID NO: 794355 - RNA, 24 nt, Human
uggaguguaguggugugaucucag

SEQ ID NO: 794356 - RNA, 21 nt, Human
ugggugacuuagcugagccau

SEQ ID NO: 794357 - RNA, 25 nt, Human
ugggugacuuagcugagccauuaug

SEQ ID NO: 794358 - RNA, 24 nt, Human
uggugugaucucagcucacugcag

SEQ ID NO: 794359 - RNA, 22 nt, Human
uguagaagaaggcauggucuga

SEQ ID NO: 794360 - RNA, 22 nt, Human
uguaguggugugaucucagcuc

SEQ ID NO: 794361 - RNA, 22 nt, Human
uucauaacaaugaagcuguaga

SEQ ID NO: 794362 - RNA, 21 nt, Human
uuucauaacaaugaagcugua

SEQ ID NO: 794363 - RNA, 24 nt, Human
uuugaggcagggucacucugucgc

SEQ ID NO: 794364 - RNA, 25 nt, Human
aaaaagaaaauauaagcgauucaaa

SEQ ID NO: 794365 - RNA, 25 nt, Human
aaacaaccuagacagggcccaaagc

SEQ ID NO: 794366 - RNA, 19 nt, Human
aaagaccacagaugggugg

SEQ ID NO: 794367 - RNA, 30 nt, Human
aaauauaagcgauucaaauauauacuuugg

SEQ ID NO: 794368 - RNA, 20 nt, Human
aacagacaccccccaccccc

SEQ ID NO: 794369 - RNA, 19 nt, Human
aagaaaauuaaauaugaga

SEQ ID NO: 794370 - RNA, 23 nt, Human
acacacacacacacacacacaca

SEQ ID NO: 794371 - RNA, 23 nt, Human
acacacacacacacacacacaca

SEQ ID NO: 794372 - RNA, 23 nt, Human
acacacacacacacacacacaca

SEQ ID NO: 794373 - RNA, 23 nt, Human
acacacacacacacacacacaca

SEQ ID NO: 794374 - RNA, 23 nt, Human
acacacacacacacacacacaca

SEQ ID NO: 794375 - RNA, 23 nt, Human
acacacacacacacacacacaca

SEQ ID NO: 794376 - RNA, 23 nt, Human
acacacacacacacacacacaca

SEQ ID NO: 794377 - RNA, 23 nt, Human
acacacacacacacacacacaca

SEQ ID NO: 794378 - RNA, 23 nt, Human
acacacacacacacacacacaca

SEQ ID NO: 794379 - RNA, 23 nt, Human
acacacacacacacacacacaca

SEQ ID NO: 794380 - RNA, 23 nt, Human
acacacacacacacacacacaca

SEQ ID NO: 794381 - RNA, 23 nt, Human
acacacacacacacacacacaca

SEQ ID NO: 794382 - RNA, 23 nt, Human
acacacacacacacacacacaca

SEQ ID NO: 794383 - RNA, 25 nt, Human
acagacaccccccacccccaccucu

SEQ ID NO: 794384 - RNA, 21 nt, Human
accuugccuacuacaaauuuc

SEQ ID NO: 794385 - RNA, 23 nt, Human
agaaaggaacuacaauauguaga

SEQ ID NO: 794386 - RNA, 21 nt, Human
agacaccccccacccccaccu

SEQ ID NO: 794387 - RNA, 20 nt, Human
agaccaaugacuaacugaug

SEQ ID NO: 794388 - RNA, 20 nt, Human
agacucaugcuacaagaagu

SEQ ID NO: 794389 - RNA, 20 nt, Human
agucuuuuccuugagaggcc

SEQ ID NO: 794390 - RNA, 21 nt, Human
aguucaccuaauacaaagcuu

SEQ ID NO: 794391 - RNA, 24 nt, Human
auacacacacacacacacacacag

SEQ ID NO: 794392 - RNA, 18 nt, Human
auaggauucuccuuagag

SEQ ID NO: 794393 - RNA, 23 nt, Human
auccugcuucccuccaucuccua

SEQ ID NO: 794394 - RNA, 21 nt, Human
auggagguacagaugcuccuc

SEQ ID NO: 794395 - RNA, 20 nt, Human
cacacacacacacacacaca

SEQ ID NO: 794396 - RNA, 20 nt, Human
cacacacacacacacacaca

SEQ ID NO: 794397 - RNA, 20 nt, Human
cacacacacacacacacaca

SEQ ID NO: 794398 - RNA, 20 nt, Human
cacacacacacacacacaca

SEQ ID NO: 794399 - RNA, 20 nt, Human
cacacacacacacacacaca

SEQ ID NO: 794400 - RNA, 20 nt, Human
cacacacacacacacacaca

SEQ ID NO: 794401 - RNA, 20 nt, Human
cacacacacacacacacaca

SEQ ID NO: 794402 - RNA, 20 nt, Human
cacacacacacacacacaca

SEQ ID NO: 794403 - RNA, 20 nt, Human
cacacacacacacacacaca

SEQ ID NO: 794404 - RNA, 20 nt, Human
cacacacacacacacacaca

SEQ ID NO: 794405 - RNA, 20 nt, Human
cacacacacacacacacaca

SEQ ID NO: 794406 - RNA, 20 nt, Human
cacacacacacacacacaca

SEQ ID NO: 794407 - RNA, 20 nt, Human
cacacacacacacacacaca

SEQ ID NO: 794408 - RNA, 20 nt, Human
cacacacacacacacacaca

SEQ ID NO: 794409 - RNA, 20 nt, Human
cacacacacacacacacaca

SEQ ID NO: 794410 - RNA, 20 nt, Human
cacacacacacacacacaca

SEQ ID NO: 794411 - RNA, 20 nt, Human
cacacacacacacacacaca

SEQ ID NO: 794412 - RNA, 20 nt, Human
cacacacacacacacacaca

SEQ ID NO: 794413 - RNA, 20 nt, Human
cacacacacacacacacaca

SEQ ID NO: 794414 - RNA, 22 nt, Human
cacacacacacacacacacaca

SEQ ID NO: 794415 - RNA, 22 nt, Human
cacacacacacacacacacaca

SEQ ID NO: 794416 - RNA, 22 nt, Human
cacacacacacacacacacaca

SEQ ID NO: 794417 - RNA, 22 nt, Human
cacacacacacacacacacaca

SEQ ID NO: 794418 - RNA, 22 nt, Human
cacacacacacacacacacaca

SEQ ID NO: 794419 - RNA, 26 nt, Human
cacacacacacacacacacacacaca

SEQ ID NO: 794420 - RNA, 26 nt, Human
cacacacacacacacacacacacaca

SEQ ID NO: 794421 - RNA, 26 nt, Human
cacacacacacacacacacacacaca

SEQ ID NO: 794422 - RNA, 26 nt, Human
cacacacacacacacacacacacaca

SEQ ID NO: 794423 - RNA, 26 nt, Human
cacacacacacacacacacacacaca

SEQ ID NO: 794424 - RNA, 26 nt, Human
cacacacacacacacacacacacaca

SEQ ID NO: 794425 - RNA, 26 nt, Human
cacacacacacacacacacacacaca

SEQ ID NO: 794426 - RNA, 26 nt, Human
cacacacacacacacacacacacaca

SEQ ID NO: 794427 - RNA, 26 nt, Human
cacacacacacacacacacacacaca

SEQ ID NO: 794428 - RNA, 26 nt, Human
cacacacacacacacacacacacaca

SEQ ID NO: 794429 - RNA, 26 nt, Human
cacacacacacacacacacacacaca

SEQ ID NO: 794430 - RNA, 26 nt, Human
cacacacacacacacacacacacaca

SEQ ID NO: 794431 - RNA, 28 nt, Human
cacacacacacacacacacacacacuug

SEQ ID NO: 794432 - RNA, 29 nt, Human
cacacacacacacacacacacuugccuua

SEQ ID NO: 794433 - RNA, 18 nt, Human
caccccccacccccaccu

SEQ ID NO: 794434 - RNA, 20 nt, Human
caccccccacccccaccucu

SEQ ID NO: 794435 - RNA, 18 nt, Human
caccucugggugcaacag

SEQ ID NO: 794436 - RNA, 18 nt, Human
cagacaccccccaccccc

SEQ ID NO: 794437 - RNA, 20 nt, Human
cagacaccccccacccccac

SEQ ID NO: 794438 - RNA, 19 nt, Human
cagccuccugaaacugacc

SEQ ID NO: 794439 - RNA, 24 nt, Human
cagggauucaaaguaaaaauauua

SEQ ID NO: 794440 - RNA, 18 nt, Human
ccaggggguggagggagg

SEQ ID NO: 794441 - RNA, 30 nt, Human
ccaucugcccugugugcuuuaauuaucccc

SEQ ID NO: 794442 - RNA, 18 nt, Human
ccccccacccccaccucu

SEQ ID NO: 794443 - RNA, 22 nt, Human
ccccccacccccaccucugggu

SEQ ID NO: 794444 - RNA, 24 nt, Human
cccuacuuucugugcagaucccaa

SEQ ID NO: 794445 - RNA, 23 nt, Human
ccuagccuacauucucaggacac

SEQ ID NO: 794446 - RNA, 21 nt, Human
ccuguggguacaaggaagccu

SEQ ID NO: 794447 - RNA, 21 nt, Human
ccuugccuacuacaaauuucu

SEQ ID NO: 794448 - RNA, 24 nt, Human
ccuugucagggaaugggagccagg

SEQ ID NO: 794449 - RNA, 21 nt, Human
cggcuagaagcaauuaagaca

SEQ ID NO: 794450 - RNA, 19 nt, Human
cguuguaaguugaaacuac

SEQ ID NO: 794451 - RNA, 26 nt, Human
cuaagacucaugcuacaagaaguuaa

SEQ ID NO: 794452 - RNA, 24 nt, Human
cucccaaucuacucugaauaucug

SEQ ID NO: 794453 - RNA, 31 nt, Human
cuguaggggauacacacacacacacacacag

SEQ ID NO: 794454 - RNA, 18 nt, Human
cuugacccauaauuaagc

SEQ ID NO: 794455 - RNA, 21 nt, Human
gaaggcaggaauuugcccagc

SEQ ID NO: 794456 - RNA, 24 nt, Human
gaauuuccucaaugaccucugccu

SEQ ID NO: 794457 - RNA, 24 nt, Human
gaccucugccucccaaucuacucu

SEQ ID NO: 794458 - RNA, 19 nt, Human
gagggaggaggggagcaag

SEQ ID NO: 794459 - RNA, 20 nt, Human
gauagucauaaauucaauga

SEQ ID NO: 794460 - RNA, 23 nt, Human
gcagcagaagagauagucauaaa

SEQ ID NO: 794461 - RNA, 22 nt, Human
gcagggauucaaaguaaaaaua

SEQ ID NO: 794462 - RNA, 22 nt, Human
gcucuauccugcuucccuccau

SEQ ID NO: 794463 - RNA, 22 nt, Human
ggaaggcaggaauuugcccagc

SEQ ID NO: 794464 - RNA, 18 nt, Human
ggacaguucuauguccca

SEQ ID NO: 794465 - RNA, 22 nt, Human
ggcccgucugcccacccauccc

SEQ ID NO: 794466 - RNA, 21 nt, Human
ggcuagaagcaauuaagacaa

SEQ ID NO: 794467 - RNA, 22 nt, Human
gggugggacuuggaggguaucu

SEQ ID NO: 794468 - RNA, 19 nt, Human
guagaaaaaucauaagcug

SEQ ID NO: 794469 - RNA, 20 nt, Human
gucacuggcugagcagagcu

SEQ ID NO: 794470 - RNA, 18 nt, Human
uaaagagugaaaaagaaa

SEQ ID NO: 794471 - RNA, 27 nt, Human
uaaaguagaaaaaucauaagcugaacc

SEQ ID NO: 794472 - RNA, 19 nt, Human
uaacagacaccccccaccc

SEQ ID NO: 794473 - RNA, 23 nt, Human
uaacagacaccccccacccccac

SEQ ID NO: 794474 - RNA, 21 nt, Human
uaaccuacugaaaucauagcu

SEQ ID NO: 794475 - RNA, 19 nt, Human
uaagccagggcccgucugc

SEQ ID NO: 794476 - RNA, 22 nt, Human
uaagcugaaccaucauaagcca

SEQ ID NO: 794477 - RNA, 20 nt, Human
uacacacacacacacacaca

SEQ ID NO: 794478 - RNA, 25 nt, Human
uacacacacacacacacacacacac

SEQ ID NO: 794479 - RNA, 25 nt, Human
uacacacacacacacacacacacag

SEQ ID NO: 794480 - RNA, 19 nt, Human
uacugcuuucacaccacug

SEQ ID NO: 794481 - RNA, 18 nt, Human
uacuggaaugguuugaug

SEQ ID NO: 794482 - RNA, 19 nt, Human
uacuucauugagaacagau

SEQ ID NO: 794483 - RNA, 22 nt, Human
uagccuacauucucaggacacu

SEQ ID NO: 794484 - RNA, 24 nt, Human
uaguaguugguggguaaauagaaa

SEQ ID NO: 794485 - RNA, 19 nt, Human
uauauuauuuuuccagaau

SEQ ID NO: 794486 - RNA, 20 nt, Human
ucacuggcugagcagagcug

SEQ ID NO: 794487 - RNA, 21 nt, Human
ucaugcuuaaucuccucucca

SEQ ID NO: 794488 - RNA, 21 nt, Human
ucccaauaaacccguuguaag

SEQ ID NO: 794489 - RNA, 21 nt, Human
ucccaauuugcuaccaucucc

SEQ ID NO: 794490 - RNA, 21 nt, Human
uccugaccagccuccugaaac

SEQ ID NO: 794491 - RNA, 21 nt, Human
uccuugagaggccuggauuug

SEQ ID NO: 794492 - RNA, 21 nt, Human
ucuaacagacaccccccaccc

SEQ ID NO: 794493 - RNA, 18 nt, Human
ucugcccacccaucccuc

SEQ ID NO: 794494 - RNA, 23 nt, Human
ucugcccacccaucccucaaaug

SEQ ID NO: 794495 - RNA, 24 nt, Human
ucuucggcuagaagcaauuaagac

SEQ ID NO: 794496 - RNA, 22 nt, Human
ugaccucugccucccaaucuac

SEQ ID NO: 794497 - RNA, 18 nt, Human
ugagagagaaaggaacua

SEQ ID NO: 794498 - RNA, 25 nt, Human
ugcauggguacuugaagcguggugu

SEQ ID NO: 794499 - RNA, 22 nt, Human
ugccacggaaggcaggaauuug

SEQ ID NO: 794500 - RNA, 18 nt, Human
ugccuugucagggaaugg

SEQ ID NO: 794501 - RNA, 26 nt, Human
uggagugacgucccaauaaacccguu

SEQ ID NO: 794502 - RNA, 19 nt, Human
uggcccagcuucuucccca

SEQ ID NO: 794503 - RNA, 22 nt, Human
ugggacuuggaggguaucucca

SEQ ID NO: 794504 - RNA, 21 nt, Human
ugggagccaggggguggaggg

SEQ ID NO: 794505 - RNA, 21 nt, Human
ugggugcaacagccucuguga

SEQ ID NO: 794506 - RNA, 23 nt, Human
ugggugcaacagccucugugaug

SEQ ID NO: 794507 - RNA, 25 nt, Human
uggguggcaaaguggggaguuacuu

SEQ ID NO: 794508 - RNA, 18 nt, Human
uguacuggaaugguuuga

SEQ ID NO: 794509 - RNA, 24 nt, Human
ugugcagaucccaauuugcuacca

SEQ ID NO: 794510 - RNA, 20 nt, Human
uuccccagcucuauccugcu

SEQ ID NO: 794511 - RNA, 20 nt, Human
uucuugaguucuccauggga

SEQ ID NO: 794512 - RNA, 24 nt, Human
uugaaacuaccuuaaguugaaaau

SEQ ID NO: 794513 - RNA, 20 nt, Human
uuuuugguuccuuaaacacu

SEQ ID NO: 794514 - RNA, 25 nt, Human
aaaaaaaaaaaaaagugacaaaaua

SEQ ID NO: 794515 - RNA, 22 nt, Human
aaaaaaaaaaaaagugacaaaa

SEQ ID NO: 794516 - RNA, 18 nt, Human
aaaaaaagagagaaauga

SEQ ID NO: 794517 - RNA, 23 nt, Human
aaaaaggcaauccucuggaagcu

SEQ ID NO: 794518 - RNA, 18 nt, Human
aaaauuagcugggcaugg

SEQ ID NO: 794519 - RNA, 22 nt, Human
aaacaaacuaacaagcaaaaac

SEQ ID NO: 794520 - RNA, 22 nt, Human
aaacaaugcgaaauaggccaaa

SEQ ID NO: 794521 - RNA, 20 nt, Human
aaagaaugagucuaagaaaa

SEQ ID NO: 794522 - RNA, 22 nt, Human
aaagacacaaagauggggcaca

SEQ ID NO: 794523 - RNA, 24 nt, Human
aaagugcuaggauuaaagguguga

SEQ ID NO: 794524 - RNA, 23 nt, Human
aacaaaauuugaauccccacaaa

SEQ ID NO: 794525 - RNA, 21 nt, Human
aacaccagccugaccaacaug

SEQ ID NO: 794526 - RNA, 24 nt, Human
aacaggugacacauggaggccaga

SEQ ID NO: 794527 - RNA, 18 nt, Human
aacaugaugauaccugca

SEQ ID NO: 794528 - RNA, 18 nt, Human
aacauggugaaaccuugu

SEQ ID NO: 794529 - RNA, 20 nt, Human
aacauggugaaaccuuguuu

SEQ ID NO: 794530 - RNA, 21 nt, Human
aacauggugaaaccuuguuuc

SEQ ID NO: 794531 - RNA, 25 nt, Human
aacucagagagaacagguagggucu

SEQ ID NO: 794532 - RNA, 23 nt, Human
aagaaaaaaaagagagaaaugaa

SEQ ID NO: 794533 - RNA, 22 nt, Human
aagauuaaagguacuuaaacaa

SEQ ID NO: 794534 - RNA, 21 nt, Human
aagcaaaaacacauucacagc

SEQ ID NO: 794535 - RNA, 25 nt, Human
aagcaaaaggcagaacauggaacaa

SEQ ID NO: 794536 - RNA, 23 nt, Human
aagcaaccagagccauccucgaa

SEQ ID NO: 794537 - RNA, 22 nt, Human
aagcagguggauuaccugaggu

SEQ ID NO: 794538 - RNA, 26 nt, Human
aagcagguggauuaccugaggucagg

SEQ ID NO: 794539 - RNA, 18 nt, Human
aaggacuauuuaaaaaca

SEQ ID NO: 794540 - RNA, 19 nt, Human
aaggcagaacauggaacaa

SEQ ID NO: 794541 - RNA, 26 nt, Human
aagugcuaggauuaaaggugugagcc

SEQ ID NO: 794542 - RNA, 24 nt, Human
aaucacuugaucccaggaggcgga

SEQ ID NO: 794543 - RNA, 19 nt, Human
aauuccugaaacaggcagc

SEQ ID NO: 794544 - RNA, 24 nt, Human
aauugcacuccagccugggugacg

SEQ ID NO: 794545 - RNA, 18 nt, Human
acaacauagcuacacaug

SEQ ID NO: 794546 - RNA, 21 nt, Human
acaagcaaaaacacauucaca

SEQ ID NO: 794547 - RNA, 24 nt, Human
acaagccggacaugguggcucacg

SEQ ID NO: 794548 - RNA, 21 nt, Human
accaacauggugaaaccuugu

SEQ ID NO: 794549 - RNA, 19 nt, Human
accagcaaccugaaagaag

SEQ ID NO: 794550 - RNA, 23 nt, Human
acccaggcuggagugcaguggug

SEQ ID NO: 794551 - RNA, 20 nt, Human
accugaggucaggaguucaa

SEQ ID NO: 794552 - RNA, 24 nt, Human
accuugugauccacccaccucagc

SEQ ID NO: 794553 - RNA, 19 nt, Human
agaaaagaaaaaaaagaga

SEQ ID NO: 794554 - RNA, 23 nt, Human
agaaacaauggaaguugccacaa

SEQ ID NO: 794555 - RNA, 24 nt, Human
agaaacaauggaaguugccacaac

SEQ ID NO: 794556 - RNA, 22 nt, Human
agagccagaaagcccugcagug

SEQ ID NO: 794557 - RNA, 18 nt, Human
agaggacuucgguacacu

SEQ ID NO: 794558 - RNA, 24 nt, Human
agcaauuaucugccucagccuucc

SEQ ID NO: 794559 - RNA, 20 nt, Human
agcacuuugguaggcugaag

SEQ ID NO: 794560 - RNA, 21 nt, Human
agccagcacuggcacagagca

SEQ ID NO: 794561 - RNA, 23 nt, Human
agccugaccaacauggugaaacc

SEQ ID NO: 794562 - RNA, 23 nt, Human
agccugggugacgagcaaaauuc

SEQ ID NO: 794563 - RNA, 22 nt, Human
agcucacugcaaccucugccuc

SEQ ID NO: 794564 - RNA, 18 nt, Human
agcugccagcagaacuca

SEQ ID NO: 794565 - RNA, 23 nt, Human
agcugggcaugguggugggugcc

SEQ ID NO: 794566 - RNA, 21 nt, Human
aggcaaaaaucagagccagaa

SEQ ID NO: 794567 - RNA, 23 nt, Human
aggcaaaaaucagagccagaaag

SEQ ID NO: 794568 - RNA, 18 nt, Human
aggcaaacaaaauuugaa

SEQ ID NO: 794569 - RNA, 27 nt, Human
aggccaaaaauggagcaaaagggaccc

SEQ ID NO: 794570 - RNA, 20 nt, Human
aggcggagguugcagugagc

SEQ ID NO: 794571 - RNA, 24 nt, Human
aggcggagguugcagugagcugag

SEQ ID NO: 794572 - RNA, 25 nt, Human
aggcuggagugcaguggugugaucu

SEQ ID NO: 794573 - RNA, 24 nt, Human
aggcuguggcaggagaaucacuug

SEQ ID NO: 794574 - RNA, 19 nt, Human
agggcuggaagucauggau

SEQ ID NO: 794575 - RNA, 22 nt, Human
agguggauuaccugaggucagg

SEQ ID NO: 794576 - RNA, 20 nt, Human
aggugugagccacugcgccc

SEQ ID NO: 794577 - RNA, 23 nt, Human
agugcaguggugugaucugagcu

SEQ ID NO: 794578 - RNA, 24 nt, Human
agugcaguggugugaucugagcuc

SEQ ID NO: 794579 - RNA, 21 nt, Human
aguucuuccacagaaacgcuc

SEQ ID NO: 794580 - RNA, 18 nt, Human
auaaaaaucagaacaugu

SEQ ID NO: 794581 - RNA, 22 nt, Human
auccuagaacuggagaaagcca

SEQ ID NO: 794582 - RNA, 20 nt, Human
aucugccucagccuuccagg

SEQ ID NO: 794583 - RNA, 24 nt, Human
auugcacaauugcacuccagccug

SEQ ID NO: 794584 - RNA, 19 nt, Human
auugcacuccagccugggu

SEQ ID NO: 794585 - RNA, 21 nt, Human
auugcacuccagccuggguga

SEQ ID NO: 794586 - RNA, 22 nt, Human
auugcacuccagccugggugac

SEQ ID NO: 794587 - RNA, 23 nt, Human
auugcacuccagccugggugacg

SEQ ID NO: 794588 - RNA, 19 nt, Human
caaaaggcagaacauggaa

SEQ ID NO: 794589 - RNA, 24 nt, Human
caaagagcauccuagaaccggggc

SEQ ID NO: 794590 - RNA, 24 nt, Human
caaagugcuaggauuaaaggugug

SEQ ID NO: 794591 - RNA, 24 nt, Human
caacaauguccucaaaaaaggcaa

SEQ ID NO: 794592 - RNA, 18 nt, Human
caacacaagccggacaug

SEQ ID NO: 794593 - RNA, 24 nt, Human
caacauggugaaaccuuguuucua

SEQ ID NO: 794594 - RNA, 21 nt, Human
caacucagagagaacagguag

SEQ ID NO: 794595 - RNA, 19 nt, Human
caacugcccccucugcaga

SEQ ID NO: 794596 - RNA, 26 nt, Human
caagggacacagcuccuucacaggac

SEQ ID NO: 794597 - RNA, 18 nt, Human
caaugcgaaauaggccaa

SEQ ID NO: 794598 - RNA, 21 nt, Human
caauugcacuccagccugggu

SEQ ID NO: 794599 - RNA, 24 nt, Human
caauugcacuccagccugggugac

SEQ ID NO: 794600 - RNA, 20 nt, Human
cacaacacaagccggacaug

SEQ ID NO: 794601 - RNA, 18 nt, Human
cacagaaacgcucucugc

SEQ ID NO: 794602 - RNA, 19 nt, Human
cacaugcuucccacauacc

SEQ ID NO: 794603 - RNA, 22 nt, Human
cacaugcuucccacauaccuca

SEQ ID NO: 794604 - RNA, 19 nt, Human
cacauucacagcauauaua

SEQ ID NO: 794605 - RNA, 24 nt, Human
caccagcaaccugaaagaagagaa

SEQ ID NO: 794606 - RNA, 22 nt, Human
cacccaaucacugagaacucag

SEQ ID NO: 794607 - RNA, 22 nt, Human
cacccaccucagccucccaaag

SEQ ID NO: 794608 - RNA, 23 nt, Human
cacccaccucagccucccaaagu

SEQ ID NO: 794609 - RNA, 24 nt, Human
cacccaggcuggagugcaguggug

SEQ ID NO: 794610 - RNA, 24 nt, Human
caccucagccucccaaagugcuag

SEQ ID NO: 794611 - RNA, 24 nt, Human
cacgccuguaaucccagcacuuug

SEQ ID NO: 794612 - RNA, 21 nt, Human
cacuauguagccacaggagga

SEQ ID NO: 794613 - RNA, 18 nt, Human
cacuccagccugggugac

SEQ ID NO: 794614 - RNA, 21 nt, Human
cacugcaaccucugccuccca

SEQ ID NO: 794615 - RNA, 23 nt, Human
cacugcaaccucugccucccaag

SEQ ID NO: 794616 - RNA, 20 nt, Human
cagaaugaccucugagccca

SEQ ID NO: 794617 - RNA, 21 nt, Human
cagcacaugacaaacuacagc

SEQ ID NO: 794618 - RNA, 24 nt, Human
cagcacuuugguaggcugaagcag

SEQ ID NO: 794619 - RNA, 26 nt, Human
cagcacuuugguaggcugaagcaggu

SEQ ID NO: 794620 - RNA, 24 nt, Human
caggaggcuguggcaggagaauca

SEQ ID NO: 794621 - RNA, 24 nt, Human
caggguuucaccaccuuggccagg

SEQ ID NO: 794622 - RNA, 20 nt, Human
caggugacacauggaggcca

SEQ ID NO: 794623 - RNA, 24 nt, Human
cagguggauuaccugaggucagga

SEQ ID NO: 794624 - RNA, 18 nt, Human
caucuacugcuccacacc

SEQ ID NO: 794625 - RNA, 22 nt, Human
caugguggugggugccuguaau

SEQ ID NO: 794626 - RNA, 24 nt, Human
ccaaagugcuaggauuaaaggugu

SEQ ID NO: 794627 - RNA, 26 nt, Human
ccacccaccucagccucccaaagugc

SEQ ID NO: 794628 - RNA, 19 nt, Human
ccacugcgcccggccggau

SEQ ID NO: 794629 - RNA, 23 nt, Human
ccagcagaacucagaucaggucc

SEQ ID NO: 794630 - RNA, 20 nt, Human
cccaggcuggagugcagugg

SEQ ID NO: 794631 - RNA, 22 nt, Human
cccgaccuugugauccacccac

SEQ ID NO: 794632 - RNA, 19 nt, Human
cccuauuauucaacccagc

SEQ ID NO: 794633 - RNA, 22 nt, Human
cccugugacaguucuuccacag

SEQ ID NO: 794634 - RNA, 22 nt, Human
ccuauaagauguaugcccuaaa

SEQ ID NO: 794635 - RNA, 21 nt, Human
ccucagccuuccaggguuuca

SEQ ID NO: 794636 - RNA, 22 nt, Human
ccucuacaagucacagaacaag

SEQ ID NO: 794637 - RNA, 20 nt, Human
ccucugagcccacaugcagg

SEQ ID NO: 794638 - RNA, 23 nt, Human
ccucuggaagcugccagcagaac

SEQ ID NO: 794639 - RNA, 21 nt, Human
ccugaccaacauggugaaacc

SEQ ID NO: 794640 - RNA, 24 nt, Human
ccugaccaacauggugaaaccuug

SEQ ID NO: 794641 - RNA, 22 nt, Human
ccuggggccaacacugggguag

SEQ ID NO: 794642 - RNA, 23 nt, Human
ccugggugacgagcaaaauucca

SEQ ID NO: 794643 - RNA, 23 nt, Human
cgaccuugugauccacccaccuc

SEQ ID NO: 794644 - RNA, 23 nt, Human
cgccuguaaucccagcacuuugg

SEQ ID NO: 794645 - RNA, 24 nt, Human
cgcucugucacccaggcuggagug

SEQ ID NO: 794646 - RNA, 18 nt, Human
cucaaaaaaaaaaaaaaa

SEQ ID NO: 794647 - RNA, 22 nt, Human
cucacgccuguaaucccagcac

SEQ ID NO: 794648 - RNA, 24 nt, Human
cucacgccuguaaucccagcacuu

SEQ ID NO: 794649 - RNA, 23 nt, Human
cucacugcaaccucugccuccca

SEQ ID NO: 794650 - RNA, 24 nt, Human
cucacugcaaccucugccucccaa

SEQ ID NO: 794651 - RNA, 21 nt, Human
cucaucuacugcuccacacca

SEQ ID NO: 794652 - RNA, 23 nt, Human
cuccccugaugagaagagaggac

SEQ ID NO: 794653 - RNA, 18 nt, Human
cucccgaccuugugaucc

SEQ ID NO: 794654 - RNA, 25 nt, Human
cucccgaccuugugauccacccacc

SEQ ID NO: 794655 - RNA, 18 nt, Human
cucgaaucccaguugugc

SEQ ID NO: 794656 - RNA, 24 nt, Human
cucgcucugucacccaggcuggag

SEQ ID NO: 794657 - RNA, 22 nt, Human
cucugccucccugagcauguug

SEQ ID NO: 794658 - RNA, 24 nt, Human
cugaccaacauggugaaaccuugu

SEQ ID NO: 794659 - RNA, 23 nt, Human
cugcaaccucugccucccaaguu

SEQ ID NO: 794660 - RNA, 24 nt, Human
cugcaaccucugccucccaaguuc

SEQ ID NO: 794661 - RNA, 18 nt, Human
cuucgguacacugcacag

SEQ ID NO: 794662 - RNA, 23 nt, Human
gaacauggaacaaagagcauccu

SEQ ID NO: 794663 - RNA, 21 nt, Human
gaaucagcacccaaucacuga

SEQ ID NO: 794664 - RNA, 19 nt, Human
gaaucccaguugugcaacu

SEQ ID NO: 794665 - RNA, 22 nt, Human
gaccuugugauccacccaccuc

SEQ ID NO: 794666 - RNA, 24 nt, Human
gaccuugugauccacccaccucag

SEQ ID NO: 794667 - RNA, 18 nt, Human
gagaaagccauccuguca

SEQ ID NO: 794668 - RNA, 23 nt, Human
gagaaucacuugaucccaggagg

SEQ ID NO: 794669 - RNA, 18 nt, Human
gagaucaacaauguccuc

SEQ ID NO: 794670 - RNA, 21 nt, Human
gagcauccuagaacuggagaa

SEQ ID NO: 794671 - RNA, 21 nt, Human
gaggcggagguugcagugagc

SEQ ID NO: 794672 - RNA, 21 nt, Human
gagguugcagugagcugagau

SEQ ID NO: 794673 - RNA, 23 nt, Human
gagguugcagugagcugagauug

SEQ ID NO: 794674 - RNA, 18 nt, Human
gauuaaaggugugagcca

SEQ ID NO: 794675 - RNA, 22 nt, Human
gauuaaaggugugagccacugc

SEQ ID NO: 794676 - RNA, 22 nt, Human
gauuaaaggugugagccacugc

SEQ ID NO: 794677 - RNA, 23 nt, Human
gauuaccugaggucaggaguuca

SEQ ID NO: 794678 - RNA, 24 nt, Human
gauuaccugaggucaggaguucaa

SEQ ID NO: 794679 - RNA, 22 nt, Human
gcaaccucugccucccaaguuc

SEQ ID NO: 794680 - RNA, 25 nt, Human
gcacaacucagagagaagggaacgc

SEQ ID NO: 794681 - RNA, 20 nt, Human
gcacagagcaacucagcaca

SEQ ID NO: 794682 - RNA, 19 nt, Human
gcagucuccuccauucccu

SEQ ID NO: 794683 - RNA, 25 nt, Human
gcucugucacccaggcuggagugca

SEQ ID NO: 794684 - RNA, 23 nt, Human
gcugcagucuccuccauucccua

SEQ ID NO: 794685 - RNA, 24 nt, Human
gcuggagugcaguggugugaucug

SEQ ID NO: 794686 - RNA, 18 nt, Human
ggaaaaaagccucuacaa

SEQ ID NO: 794687 - RNA, 26 nt, Human
ggaaaaaagccucuacaagucacaga

SEQ ID NO: 794688 - RNA, 18 nt, Human
ggaaguugccacaacugc

SEQ ID NO: 794689 - RNA, 24 nt, Human
ggacaugguggcucacgccuguaa

SEQ ID NO: 794690 - RNA, 22 nt, Human
ggagguugcagugagcugagau

SEQ ID NO: 794691 - RNA, 24 nt, Human
ggagguugcagugagcugagauug

SEQ ID NO: 794692 - RNA, 22 nt, Human
ggauuaaaggugugagccacug

SEQ ID NO: 794693 - RNA, 22 nt, Human
ggauuaccugaggucaggaguu

SEQ ID NO: 794694 - RNA, 23 nt, Human
ggcaugguggugggugccuguaa

SEQ ID NO: 794695 - RNA, 22 nt, Human
ggcguccccucaucuacugcuc

SEQ ID NO: 794696 - RNA, 21 nt, Human
ggcucacgccuguaaucccag

SEQ ID NO: 794697 - RNA, 22 nt, Human
ggcuggagugcaguggugugau

SEQ ID NO: 794698 - RNA, 18 nt, Human
gggucucccagcggguag

SEQ ID NO: 794699 - RNA, 24 nt, Human
gguggcucacgccuguaaucccag

SEQ ID NO: 794700 - RNA, 24 nt, Human
gguggugggugccuguaaucucag

SEQ ID NO: 794701 - RNA, 26 nt, Human
guaaagcaaccagagccauccucgaa

SEQ ID NO: 794702 - RNA, 24 nt, Human
gugauccacccaccucagccuccc

SEQ ID NO: 794703 - RNA, 19 nt, Human
guggaaaaaagccucuaca

SEQ ID NO: 794704 - RNA, 19 nt, Human
guugcagugagcugagauu

SEQ ID NO: 794705 - RNA, 21 nt, Human
guugcagugagcugagauugc

SEQ ID NO: 794706 - RNA, 18 nt, Human
uaaaaaaugcuucaucac

SEQ ID NO: 794707 - RNA, 22 nt, Human
uaaaacaaacuaacaagcaaaa

SEQ ID NO: 794708 - RNA, 18 nt, Human
uaagaaaauguuuuuagg

SEQ ID NO: 794709 - RNA, 20 nt, Human
uaauuugcugcagucuccuc

SEQ ID NO: 794710 - RNA, 22 nt, Human
uacacaugcuucccacauaccu

SEQ ID NO: 794711 - RNA, 24 nt, Human
uacagcagugaaaaauaauguuac

SEQ ID NO: 794712 - RNA, 21 nt, Human
uacugcuccacaccagcaacc

SEQ ID NO: 794713 - RNA, 19 nt, Human
uagaaaagaaaaaaaagag

SEQ ID NO: 794714 - RNA, 25 nt, Human
uagaaaagaaaaaaaagagagaaau

SEQ ID NO: 794715 - RNA, 20 nt, Human
uagaagcaaaaggcagaaca

SEQ ID NO: 794716 - RNA, 23 nt, Human
uagccuccagugccgucauacca

SEQ ID NO: 794717 - RNA, 22 nt, Human
uaggauuaaaggugugagccac

SEQ ID NO: 794718 - RNA, 22 nt, Human
uaggauuaaaggugugagccac

SEQ ID NO: 794719 - RNA, 24 nt, Human
uaggauuaaaggugugagccacug

SEQ ID NO: 794720 - RNA, 21 nt, Human
uagugucuugcccucccuuag

SEQ ID NO: 794721 - RNA, 20 nt, Human
uaguuagaagcaaaaggcag

SEQ ID NO: 794722 - RNA, 18 nt, Human
uaucaguggauguaucug

SEQ ID NO: 794723 - RNA, 25 nt, Human
uaugaaaagccuauggaccaguuaa

SEQ ID NO: 794724 - RNA, 24 nt, Human
ucacccaggcuggagugcaguggu

SEQ ID NO: 794725 - RNA, 18 nt, Human
ucacugcaaccucugccu

SEQ ID NO: 794726 - RNA, 19 nt, Human
ucacugcaaccucugccuc

SEQ ID NO: 794727 - RNA, 24 nt, Human
ucacugcaaccucugccucccaag

SEQ ID NO: 794728 - RNA, 20 nt, Human
ucagcacccaaucacugaga

SEQ ID NO: 794729 - RNA, 23 nt, Human
ucagccgcagaaacuggcaguga

SEQ ID NO: 794730 - RNA, 18 nt, Human
ucagccucccaaagugcu

SEQ ID NO: 794731 - RNA, 18 nt, Human
ucagguggaucuuuauga

SEQ ID NO: 794732 - RNA, 25 nt, Human
uccacagaaacgcucucugcagaag

SEQ ID NO: 794733 - RNA, 21 nt, Human
uccacccaccucagccuccca

SEQ ID NO: 794734 - RNA, 21 nt, Human
uccaggguuucaccaccuugg

SEQ ID NO: 794735 - RNA, 23 nt, Human
uccaucucaaaaaaaaaaaaaaa

SEQ ID NO: 794736 - RNA, 24 nt, Human
uccaucucaaaaaaaaaaaaaaaa

SEQ ID NO: 794737 - RNA, 23 nt, Human
ucccaaagugcuaggauuaaagg

SEQ ID NO: 794738 - RNA, 18 nt, Human
ucccaaguucaagcaauu

SEQ ID NO: 794739 - RNA, 21 nt, Human
ucccaaguucaagcaauuauc

SEQ ID NO: 794740 - RNA, 21 nt, Human
ucccugagcauguuggggugg

SEQ ID NO: 794741 - RNA, 18 nt, Human
ucccugggcagguuuaga

SEQ ID NO: 794742 - RNA, 19 nt, Human
ucccugggcagguuuagag

SEQ ID NO: 794743 - RNA, 23 nt, Human
uccucgaaucccaguugugcaac

SEQ ID NO: 794744 - RNA, 24 nt, Human
uccuggggccaacacugggguagu

SEQ ID NO: 794745 - RNA, 24 nt, Human
ucgcucugucacccaggcuggagu

SEQ ID NO: 794746 - RNA, 21 nt, Human
ucuacaagucacagaacaagg

SEQ ID NO: 794747 - RNA, 18 nt, Human
ucucaaaaaaaaaaaaaa

SEQ ID NO: 794748 - RNA, 23 nt, Human
ucuccagaaacaauggaaguugc

SEQ ID NO: 794749 - RNA, 19 nt, Human
ucucgcucugucacccagg

SEQ ID NO: 794750 - RNA, 23 nt, Human
ucucgcucugucacccaggcugg

SEQ ID NO: 794751 - RNA, 24 nt, Human
ucucgcucugucacccaggcugga

SEQ ID NO: 794752 - RNA, 26 nt, Human
ucucgcucugucacccaggcuggagu

SEQ ID NO: 794753 - RNA, 24 nt, Human
ucugucacccaggcuggagugcag

SEQ ID NO: 794754 - RNA, 24 nt, Human
ucugugggucucccagcggguagu

SEQ ID NO: 794755 - RNA, 18 nt, Human
ucuuugggaaaucuugug

SEQ ID NO: 794756 - RNA, 18 nt, Human
ucuuugggaaaucuugug

SEQ ID NO: 794757 - RNA, 19 nt, Human
ucuuugggaaaucuugugu

SEQ ID NO: 794758 - RNA, 22 nt, Human
ugaaagacacaaagauggggca

SEQ ID NO: 794759 - RNA, 24 nt, Human
ugaaagacacaaagauggggcacu

SEQ ID NO: 794760 - RNA, 20 nt, Human
ugaagcagguggauuaccug

SEQ ID NO: 794761 - RNA, 24 nt, Human
ugaagcagguggauuaccugaggu

SEQ ID NO: 794762 - RNA, 26 nt, Human
ugaagcagguggauuaccugagguca

SEQ ID NO: 794763 - RNA, 23 nt, Human
ugaccaacauggugaaaccuugu

SEQ ID NO: 794764 - RNA, 18 nt, Human
ugaccucugagcccacau

SEQ ID NO: 794765 - RNA, 24 nt, Human
ugagaaaacacagauuuacuaugg

SEQ ID NO: 794766 - RNA, 18 nt, Human
ugagaaaccccccuaaga

SEQ ID NO: 794767 - RNA, 23 nt, Human
ugagaaaccccccuaagagcuua

SEQ ID NO: 794768 - RNA, 22 nt, Human
ugagaagagaggacuucgguac

SEQ ID NO: 794769 - RNA, 24 nt, Human
ugagauugcacaauugcacuccag

SEQ ID NO: 794770 - RNA, 23 nt, Human
ugaggcaaacaaaauuugaaucc

SEQ ID NO: 794771 - RNA, 24 nt, Human
ugaggcaaacaaaauuugaauccc

SEQ ID NO: 794772 - RNA, 24 nt, Human
ugauccacccaccucagccuccca

SEQ ID NO: 794773 - RNA, 18 nt, Human
ugauuagaaacagcccua

SEQ ID NO: 794774 - RNA, 18 nt, Human
ugcacagccagcacuggc

SEQ ID NO: 794775 - RNA, 19 nt, Human
ugcacuccagccuggguga

SEQ ID NO: 794776 - RNA, 20 nt, Human
ugcacuccagccugggugac

SEQ ID NO: 794777 - RNA, 23 nt, Human
ugcacuccagccugggugacgag

SEQ ID NO: 794778 - RNA, 24 nt, Human
ugccuguaaucucagguacucagg

SEQ ID NO: 794779 - RNA, 24 nt, Human
uggaaauuuguggaaaaaagccuc

SEQ ID NO: 794780 - RNA, 19 nt, Human
uggagugcaguggugugau

SEQ ID NO: 794781 - RNA, 21 nt, Human
uggagugcaguggugugaucu

SEQ ID NO: 794782 - RNA, 22 nt, Human
uggagugcaguggugugaucug

SEQ ID NO: 794783 - RNA, 20 nt, Human
uggaugaaauaaaaaucaga

SEQ ID NO: 794784 - RNA, 21 nt, Human
uggaugaaauaaaaaucagaa

SEQ ID NO: 794785 - RNA, 24 nt, Human
uggauuaccugaggucaggaguuc

SEQ ID NO: 794786 - RNA, 18 nt, Human
uggcacagagcaacucag

SEQ ID NO: 794787 - RNA, 21 nt, Human
uggccaggcuguuauugaacu

SEQ ID NO: 794788 - RNA, 24 nt, Human
uggcucacgccuguaaucccagca

SEQ ID NO: 794789 - RNA, 20 nt, Human
ugguagcagcuaagggcugg

SEQ ID NO: 794790 - RNA, 24 nt, Human
ugguaggcugaagcagguggauua

SEQ ID NO: 794791 - RNA, 24 nt, Human
ugguggcucacgccuguaauccca

SEQ ID NO: 794792 - RNA, 22 nt, Human
uggugggugccuguaaucucag

SEQ ID NO: 794793 - RNA, 24 nt, Human
ugguggugggugccuguaaucuca

SEQ ID NO: 794794 - RNA, 24 nt, Human
uggugugaucugagcucacugcaa

SEQ ID NO: 794795 - RNA, 21 nt, Human
uguaaaaugucucucaggacu

SEQ ID NO: 794796 - RNA, 19 nt, Human
ugucaaagaaugagucuaa

SEQ ID NO: 794797 - RNA, 24 nt, Human
ugucuccuagaaggccuuggaaac

SEQ ID NO: 794798 - RNA, 18 nt, Human
ugucuugcccucccuuag

SEQ ID NO: 794799 - RNA, 24 nt, Human
ugugauccacccaccucagccucc

SEQ ID NO: 794800 - RNA, 24 nt, Human
uguggcaggagaaucacuugaucc

SEQ ID NO: 794801 - RNA, 19 nt, Human
uuaacaggcaguuccuggu

SEQ ID NO: 794802 - RNA, 24 nt, Human
uuagcugggcaugguggugggugc

SEQ ID NO: 794803 - RNA, 22 nt, Human
uuaguuagaagcaaaaggcaga

SEQ ID NO: 794804 - RNA, 21 nt, Human
uucaacaccagccugaccaac

SEQ ID NO: 794805 - RNA, 19 nt, Human
uugaauccccacaaauguu

SEQ ID NO: 794806 - RNA, 24 nt, Human
uugaucccaggaggcggagguugc

SEQ ID NO: 794807 - RNA, 19 nt, Human
uugcagugagcugagauug

SEQ ID NO: 794808 - RNA, 22 nt, Human
uugcagugagcugagauugcac

SEQ ID NO: 794809 - RNA, 20 nt, Human
uuggauacaugagucacauc

SEQ ID NO: 794810 - RNA, 20 nt, Human
uugguaggcugaagcaggug

SEQ ID NO: 794811 - RNA, 23 nt, Human
uuuaguuagaagcaaaaggcaga

SEQ ID NO: 794812 - RNA, 21 nt, Human
uuucuauuaaaaauacaaaaa

SEQ ID NO: 794813 - RNA, 23 nt, Human
uuugcugcagucuccuccauucc

SEQ ID NO: 794814 - RNA, 19 nt, Human
aaccccuuuccucauucca

SEQ ID NO: 794815 - RNA, 22 nt, Human
aagcaagagaaaaggccgugag

SEQ ID NO: 794816 - RNA, 21 nt, Human
aagcggcagacacagaaaaca

SEQ ID NO: 794817 - RNA, 22 nt, Human
aaggaaaaaaaaaucuuaaaaa

SEQ ID NO: 794818 - RNA, 25 nt, Human
aaggaaaaaaaaaucuuaaaaaaaa

SEQ ID NO: 794819 - RNA, 23 nt, Human
aauacacaaccccaaacacuccu

SEQ ID NO: 794820 - RNA, 24 nt, Human
aauugguccccaugcugacgugga

SEQ ID NO: 794821 - RNA, 24 nt, Human
acaaacagcagaaaugcgugggaa

SEQ ID NO: 794822 - RNA, 20 nt, Human
acacaaccccaaacacuccu

SEQ ID NO: 794823 - RNA, 19 nt, Human
accccaggaauggaacagc

SEQ ID NO: 794824 - RNA, 18 nt, Human
accccuuuccucauucca

SEQ ID NO: 794825 - RNA, 20 nt, Human
accccuuuccucauuccaaa

SEQ ID NO: 794826 - RNA, 20 nt, Human
agaacaaacagcagaaaugc

SEQ ID NO: 794827 - RNA, 24 nt, Human
aggaaaaaaaaaucuuaaaaaaaa

SEQ ID NO: 794828 - RNA, 18 nt, Human
agggaagugcuugggacc

SEQ ID NO: 794829 - RNA, 22 nt, Human
agggaagugcuugggaccccag

SEQ ID NO: 794830 - RNA, 23 nt, Human
agggggcuggaugggggccucuu

SEQ ID NO: 794831 - RNA, 18 nt, Human
aguaguuuucagguuugc

SEQ ID NO: 794832 - RNA, 23 nt, Human
aguaguuuucagguuugcgagcu

SEQ ID NO: 794833 - RNA, 24 nt, Human
aguauacauauuucacaugagugu

SEQ ID NO: 794834 - RNA, 18 nt, Human
auaaauagauccccccaa

SEQ ID NO: 794835 - RNA, 19 nt, Human
aucaaaaggaaaaaaaaau

SEQ ID NO: 794836 - RNA, 22 nt, Human
auuauuuguuccaaagauauca

SEQ ID NO: 794837 - RNA, 20 nt, Human
auucacagaacaaacagcag

SEQ ID NO: 794838 - RNA, 19 nt, Human
caaaaggaaaaaaaaaucc

SEQ ID NO: 794839 - RNA, 26 nt, Human
caauccccaggccuggcagauccagu

SEQ ID NO: 794840 - RNA, 18 nt, Human
cacaaagcagcagauaag

SEQ ID NO: 794841 - RNA, 21 nt, Human
cagcagcacucucacuuuuua

SEQ ID NO: 794842 - RNA, 22 nt, Human
cagcagcacucucacuuuuuaa

SEQ ID NO: 794843 - RNA, 19 nt, Human
cagcaggccugacucuggg

SEQ ID NO: 794844 - RNA, 20 nt, Human
cagcugcccugcaggcugcc

SEQ ID NO: 794845 - RNA, 19 nt, Human
cagcugcuggaagcggcag

SEQ ID NO: 794846 - RNA, 21 nt, Human
caguccuguccuugaguucca

SEQ ID NO: 794847 - RNA, 23 nt, Human
caguggccuugggagagggagug

SEQ ID NO: 794848 - RNA, 21 nt, Human
ccaaacccccuggugcagagc

SEQ ID NO: 794849 - RNA, 22 nt, Human
ccaccagccugcgcagcuccag

SEQ ID NO: 794850 - RNA, 25 nt, Human
ccccaaacccccuggugcagagcuc

SEQ ID NO: 794851 - RNA, 27 nt, Human
ccccuggugcagagcucaacccuuccg

SEQ ID NO: 794852 - RNA, 20 nt, Human
ccccuggugcagagcucagg

SEQ ID NO: 794853 - RNA, 21 nt, Human
ccuaaaauggaucuuguuaac

SEQ ID NO: 794854 - RNA, 22 nt, Human
ccuggagggggcuggauggggg

SEQ ID NO: 794855 - RNA, 23 nt, Human
ccuggagggggcuggaugggggc

SEQ ID NO: 794856 - RNA, 21 nt, Human
ccuggugcagagcucaggagc

SEQ ID NO: 794857 - RNA, 22 nt, Human
ccugugugguccccaaaccccc

SEQ ID NO: 794858 - RNA, 23 nt, Human
cggcagacacagaaaacacguua

SEQ ID NO: 794859 - RNA, 23 nt, Human
cgucaguaguuuucagguuugcg

SEQ ID NO: 794860 - RNA, 20 nt, Human
cuccugggauccaguggccu

SEQ ID NO: 794861 - RNA, 20 nt, Human
cucugugcggaugaccccuc

SEQ ID NO: 794862 - RNA, 19 nt, Human
cugaccaaagacacaaagc

SEQ ID NO: 794863 - RNA, 21 nt, Human
cugagccucguaagccuguug

SEQ ID NO: 794864 - RNA, 20 nt, Human
cugcgcagcuccagguucuc

SEQ ID NO: 794865 - RNA, 21 nt, Human
cugcgcagcuccagguucucu

SEQ ID NO: 794866 - RNA, 21 nt, Human
cuggguccugggguaaaggga

SEQ ID NO: 794867 - RNA, 18 nt, Human
gaaaugcgugggaacccc

SEQ ID NO: 794868 - RNA, 20 nt, Human
gagugugugugugcuuaacg

SEQ ID NO: 794869 - RNA, 24 nt, Human
gccaccgccagcugcccugcaggc

SEQ ID NO: 794870 - RNA, 24 nt, Human
gccagcugcccugcaggcugcccu

SEQ ID NO: 794871 - RNA, 20 nt, Human
gccagcuggaggcugggggc

SEQ ID NO: 794872 - RNA, 21 nt, Human
gcgcagcuccagguucucugc

SEQ ID NO: 794873 - RNA, 19 nt, Human
gcucaacacauugcaaaug

SEQ ID NO: 794874 - RNA, 21 nt, Human
gcuugggaccccaggaaugga

SEQ ID NO: 794875 - RNA, 18 nt, Human
ggaagucaguuugucauu

SEQ ID NO: 794876 - RNA, 21 nt, Human
ggagccagcuggaggcugggg

SEQ ID NO: 794877 - RNA, 19 nt, Human
ggccugagccucguaagcc

SEQ ID NO: 794878 - RNA, 20 nt, Human
gggauccaguggccuuggga

SEQ ID NO: 794879 - RNA, 21 nt, Human
ggggaugucgggugccgcagc

SEQ ID NO: 794880 - RNA, 19 nt, Human
ggggcuggaugggggccuc

SEQ ID NO: 794881 - RNA, 23 nt, Human
ggugcacugugcacacuggccug

SEQ ID NO: 794882 - RNA, 20 nt, Human
guacauauacaugucauaua

SEQ ID NO: 794883 - RNA, 20 nt, Human
uaaaucaacaccccgagacc

SEQ ID NO: 794884 - RNA, 23 nt, Human
uacacaaccccaaacacuccuaa

SEQ ID NO: 794885 - RNA, 18 nt, Human
uauauuaaaaaaaauugg

SEQ ID NO: 794886 - RNA, 22 nt, Human
ucaaaaggaaaaaaaaaucuua

SEQ ID NO: 794887 - RNA, 27 nt, Human
ucaaaagucucccauuucuuucucagg

SEQ ID NO: 794888 - RNA, 18 nt, Human
ucaacaccccgagaccgg

SEQ ID NO: 794889 - RNA, 19 nt, Human
ucacagaacaaacagcaga

SEQ ID NO: 794890 - RNA, 24 nt, Human
ucagaaauaaaucaacaccccgag

SEQ ID NO: 794891 - RNA, 20 nt, Human
ucggugcacugugcacacug

SEQ ID NO: 794892 - RNA, 20 nt, Human
ugaccaaagacacaaagcaa

SEQ ID NO: 794893 - RNA, 24 nt, Human
ugaccaaagacacaaagcagcaga

SEQ ID NO: 794894 - RNA, 25 nt, Human
ugaccaaagacacaaagcagcagau

SEQ ID NO: 794895 - RNA, 29 nt, Human
ugaguguguacauauacaugucauauauu

SEQ ID NO: 794896 - RNA, 21 nt, Human
ugccaggcccuggagaccuuu

SEQ ID NO: 794897 - RNA, 20 nt, Human
uggaagcggcagacacagaa

SEQ ID NO: 794898 - RNA, 18 nt, Human
uggccuugggagagggag

SEQ ID NO: 794899 - RNA, 23 nt, Human
uggggucugccaggcccuggaga

SEQ ID NO: 794900 - RNA, 23 nt, Human
uguguacauauacaugucauaua

SEQ ID NO: 794901 - RNA, 18 nt, Human
ugugugagugugugugug

SEQ ID NO: 794902 - RNA, 19 nt, Human
ugugugagugugugugugc

SEQ ID NO: 794903 - RNA, 24 nt, Human
uucaaaagucucccauuucuuucu

SEQ ID NO: 794904 - RNA, 22 nt, Human
uucuccugggauccaguggccu

SEQ ID NO: 794905 - RNA, 19 nt, Human
uugucaggaaucugaccaa

SEQ ID NO: 794906 - RNA, 18 nt, Human
aaccagggccuugcugcg

SEQ ID NO: 794907 - RNA, 18 nt, Human
aagccagaggcgggggcg

SEQ ID NO: 794908 - RNA, 18 nt, Human
acacagccucacuccugc

SEQ ID NO: 794909 - RNA, 23 nt, Human
agccaguaauggagcacgcggcc

SEQ ID NO: 794910 - RNA, 19 nt, Human
aggggaccccaggggcuca

SEQ ID NO: 794911 - RNA, 21 nt, Human
caggucaaacccugggaggga

SEQ ID NO: 794912 - RNA, 20 nt, Human
ccagaggcgggggcguaggu

SEQ ID NO: 794913 - RNA, 19 nt, Human
cccaagccagaggcggggg

SEQ ID NO: 794914 - RNA, 21 nt, Human
cgcccccauucuccaggaacc

SEQ ID NO: 794915 - RNA, 18 nt, Human
cuguacuucguggcugcc

SEQ ID NO: 794916 - RNA, 21 nt, Human
gcagugucacguggcuccugg

SEQ ID NO: 794917 - RNA, 25 nt, Human
ggcauggggggccugguguucucgu

SEQ ID NO: 794918 - RNA, 21 nt, Human
uaauggagcacgcggccaagc

SEQ ID NO: 794919 - RNA, 24 nt, Human
ucagugcccggcuccagcuucugc

SEQ ID NO: 794920 - RNA, 19 nt, Human
uccagcugaccugcaggcu

SEQ ID NO: 794921 - RNA, 21 nt, Human
uccaggaaccagggccuugcu

SEQ ID NO: 794922 - RNA, 19 nt, Human
ucuccaggaaccagggccu

SEQ ID NO: 794923 - RNA, 23 nt, Human
ugcauagauagcugagaccagga

SEQ ID NO: 794924 - RNA, 22 nt, Human
uggaaggagucgaacuuugaca

SEQ ID NO: 794925 - RNA, 21 nt, Human
ugggagggagccgucagggcg

SEQ ID NO: 794926 - RNA, 23 nt, Human
uucguggcugccugcaggucggg

SEQ ID NO: 794927 - RNA, 20 nt, Human
uuugacacgugugucugaau

SEQ ID NO: 794928 - RNA, 18 nt, Human
aaaaguaaagcagaugga

SEQ ID NO: 794929 - RNA, 23 nt, Human
aaacagguacacagccauagaac

SEQ ID NO: 794930 - RNA, 24 nt, Human
aaacagguacacagccauagaacu

SEQ ID NO: 794931 - RNA, 20 nt, Human
aaacaugcacaaacaugagu

SEQ ID NO: 794932 - RNA, 21 nt, Human
aaagagaaaucuggcaaaaag

SEQ ID NO: 794933 - RNA, 23 nt, Human
aaagagaaaucuggcaaaaagga

SEQ ID NO: 794934 - RNA, 23 nt, Human
aaagcagccaaucugauggcaga

SEQ ID NO: 794935 - RNA, 19 nt, Human
aaagggcaacugugauaca

SEQ ID NO: 794936 - RNA, 21 nt, Human
aacucaggaacuaagacauga

SEQ ID NO: 794937 - RNA, 18 nt, Human
aagacacugguuccaacu

SEQ ID NO: 794938 - RNA, 18 nt, Human
aaucccugagauggaaca

SEQ ID NO: 794939 - RNA, 19 nt, Human
acaaaauguguauauccuc

SEQ ID NO: 794940 - RNA, 26 nt, Human
acacacaauuauagaugaaaccacac

SEQ ID NO: 794941 - RNA, 19 nt, Human
acacagacaucccuacaug

SEQ ID NO: 794942 - RNA, 22 nt, Human
accacuggacuauaaaugcccu

SEQ ID NO: 794943 - RNA, 24 nt, Human
accagcccuagccuccaagucagc

SEQ ID NO: 794944 - RNA, 18 nt, Human
agauguaucuauguacau

SEQ ID NO: 794945 - RNA, 18 nt, Human
agccggcccgagugggga

SEQ ID NO: 794946 - RNA, 19 nt, Human
agcuauaccaccccuuccc

SEQ ID NO: 794947 - RNA, 20 nt, Human
aggacacgcaggauauaggg

SEQ ID NO: 794948 - RNA, 19 nt, Human
aggcaaaagucuaagucca

SEQ ID NO: 794949 - RNA, 22 nt, Human
aggcaggagcuucaauguccuc

SEQ ID NO: 794950 - RNA, 21 nt, Human
aggcauuaucgacuagagcug

SEQ ID NO: 794951 - RNA, 20 nt, Human
aggcgagaagagaacuaugg

SEQ ID NO: 794952 - RNA, 19 nt, Human
aggcggcggcggcugcucg

SEQ ID NO: 794953 - RNA, 24 nt, Human
aguguucuguguuugccaagggag

SEQ ID NO: 794954 - RNA, 18 nt, Human
aguucacauucuagcuau

SEQ ID NO: 794955 - RNA, 19 nt, Human
aguuugucgaagaaagaaa

SEQ ID NO: 794956 - RNA, 24 nt, Human
auaaagacacagaugcauggauaa

SEQ ID NO: 794957 - RNA, 19 nt, Human
auacacacacacaauuaua

SEQ ID NO: 794958 - RNA, 23 nt, Human
auacacauaaauauauaugugca

SEQ ID NO: 794959 - RNA, 18 nt, Human
aucaaaccccacccccaa

SEQ ID NO: 794960 - RNA, 23 nt, Human
augcagauccucaaacaugaaua

SEQ ID NO: 794961 - RNA, 20 nt, Human
auguacacaaaauguguaua

SEQ ID NO: 794962 - RNA, 20 nt, Human
auucauagaaaagcacugug

SEQ ID NO: 794963 - RNA, 21 nt, Human
caagacacugguuccaacuga

SEQ ID NO: 794964 - RNA, 22 nt, Human
caagugcccaucaaaucagaag

SEQ ID NO: 794965 - RNA, 23 nt, Human
caagugcccaucaaaucagaagc

SEQ ID NO: 794966 - RNA, 27 nt, Human
cacggccacgcgccccgcgcaagcgcc

SEQ ID NO: 794967 - RNA, 21 nt, Human
cacuauggaggucagccaggg

SEQ ID NO: 794968 - RNA, 22 nt, Human
cacucugcaagggaaaccugag

SEQ ID NO: 794969 - RNA, 19 nt, Human
cagcccuagccuccaaguc

SEQ ID NO: 794970 - RNA, 23 nt, Human
caggaacaugauacacuauggag

SEQ ID NO: 794971 - RNA, 20 nt, Human
caggaacuaagacaugaaac

SEQ ID NO: 794972 - RNA, 22 nt, Human
cauacacauggauacaaacaug

SEQ ID NO: 794973 - RNA, 20 nt, Human
caugaauacacagacauccc

SEQ ID NO: 794974 - RNA, 20 nt, Human
caugcacaaacaugagugca

SEQ ID NO: 794975 - RNA, 19 nt, Human
ccacacacuugcuaacaca

SEQ ID NO: 794976 - RNA, 22 nt, Human
ccccacccccaacucaggaacu

SEQ ID NO: 794977 - RNA, 19 nt, Human
cccugagauggaacagugu

SEQ ID NO: 794978 - RNA, 22 nt, Human
ccuaucaaaccccacccccaac

SEQ ID NO: 794979 - RNA, 25 nt, Human
ccuccaagucagcgagcaaugagac

SEQ ID NO: 794980 - RNA, 22 nt, Human
ccugagauggaacaguguucug

SEQ ID NO: 794981 - RNA, 20 nt, Human
ccuuggcacccccacucuuc

SEQ ID NO: 794982 - RNA, 25 nt, Human
cggccacgcgccccgcgcaagcgcc

SEQ ID NO: 794983 - RNA, 20 nt, Human
cguguacgcagauacacaua

SEQ ID NO: 794984 - RNA, 23 nt, Human
cuagcuauaccaccccuucccua

SEQ ID NO: 794985 - RNA, 21 nt, Human
cuaucaaaccccacccccaac

SEQ ID NO: 794986 - RNA, 29 nt, Human
cuauguacauacacacauguacuuagcca

SEQ ID NO: 794987 - RNA, 28 nt, Human
cucaccacuggacuauaaaagguuuucc

SEQ ID NO: 794988 - RNA, 22 nt, Human
cucgggcugcggcggagacccu

SEQ ID NO: 794989 - RNA, 22 nt, Human
cugaggcggcggcggcugcucu

SEQ ID NO: 794990 - RNA, 27 nt, Human
cuucaagugcccaucaaaucagaagca

SEQ ID NO: 794991 - RNA, 23 nt, Human
cuugcuaacacaaaggugaccac

SEQ ID NO: 794992 - RNA, 19 nt, Human
gaaaccacacacuugcuaa

SEQ ID NO: 794993 - RNA, 20 nt, Human
gaaaggcaggggaagaaagc

SEQ ID NO: 794994 - RNA, 21 nt, Human
gaaccgcggccgggcccggga

SEQ ID NO: 794995 - RNA, 21 nt, Human
gacuuggguugauccuaacug

SEQ ID NO: 794996 - RNA, 22 nt, Human
gagaacccgcgagccagccggc

SEQ ID NO: 794997 - RNA, 19 nt, Human
gagaaugaauagaggaggc

SEQ ID NO: 794998 - RNA, 18 nt, Human
gagggcagacgcgggcgg

SEQ ID NO: 794999 - RNA, 21 nt, Human
gaguggggaaccgcggccggg

SEQ ID NO: 795000 - RNA, 24 nt, Human
gaugugcauccucacauguacaca

SEQ ID NO: 795001 - RNA, 20 nt, Human
gcagacgcgggcggccugca

SEQ ID NO: 795002 - RNA, 21 nt, Human
gcauguugugggguuucuggu

SEQ ID NO: 795003 - RNA, 20 nt, Human
gccggcgaggaagcuugagg

SEQ ID NO: 795004 - RNA, 20 nt, Human
gcggcggcggcugcucgggc

SEQ ID NO: 795005 - RNA, 22 nt, Human
gcggcugcucgggcugcggcgg

SEQ ID NO: 795006 - RNA, 21 nt, Human
gcugcucgggcugcggcggag

SEQ ID NO: 795007 - RNA, 26 nt, Human
ggacuuuccccauccuuagggcacuc

SEQ ID NO: 795008 - RNA, 18 nt, Human
ggagacagggccaaugcu

SEQ ID NO: 795009 - RNA, 19 nt, Human
ggaggucagccagggcuaa

SEQ ID NO: 795010 - RNA, 22 nt, Human
ggcaaaaaggacacauugaugc

SEQ ID NO: 795011 - RNA, 18 nt, Human
ggcaacugugauacagaa

SEQ ID NO: 795012 - RNA, 21 nt, Human
ggcagacgcgggcggccugca

SEQ ID NO: 795013 - RNA, 22 nt, Human
ggccgggcccgggagcgcgccg

SEQ ID NO: 795014 - RNA, 22 nt, Human
ggcgagagagauuuaagaggaa

SEQ ID NO: 795015 - RNA, 18 nt, Human
gggaaagagaaaucuggc

SEQ ID NO: 795016 - RNA, 18 nt, Human
gggcagacgcgggcggcc

SEQ ID NO: 795017 - RNA, 20 nt, Human
ggucagccagggcuaagaca

SEQ ID NO: 795018 - RNA, 19 nt, Human
guccaguccuggccucugu

SEQ ID NO: 795019 - RNA, 20 nt, Human
guccuggccucugucccuca

SEQ ID NO: 795020 - RNA, 21 nt, Human
gugacaaaagccggcgaggaa

SEQ ID NO: 795021 - RNA, 22 nt, Human
gugcuuagaagcuuguuuggug

SEQ ID NO: 795022 - RNA, 19 nt, Human
uaaaugcccugucuguagg

SEQ ID NO: 795023 - RNA, 24 nt, Human
uaacaagcauacacauggauacaa

SEQ ID NO: 795024 - RNA, 23 nt, Human
uaagacuugaguagccacaaaug

SEQ ID NO: 795025 - RNA, 20 nt, Human
uaagcaaucccugagaugga

SEQ ID NO: 795026 - RNA, 19 nt, Human
uacaauaauuagcaacaca

SEQ ID NO: 795027 - RNA, 19 nt, Human
uacacagacaucccuacau

SEQ ID NO: 795028 - RNA, 24 nt, Human
uacccacagcuacuucaagugccc

SEQ ID NO: 795029 - RNA, 19 nt, Human
uaccugggaacccaggcug

SEQ ID NO: 795030 - RNA, 32 nt, Human
uacgcagauacacauacuaaacaugcacagug

SEQ ID NO: 795031 - RNA, 23 nt, Human
uagaaaagcacugugaauucaca

SEQ ID NO: 795032 - RNA, 21 nt, Human
uagaugaauauuaugaacuca

SEQ ID NO: 795033 - RNA, 19 nt, Human
uagcaggaacaugauacac

SEQ ID NO: 795034 - RNA, 24 nt, Human
uauacacaugcacucguguacgca

SEQ ID NO: 795035 - RNA, 24 nt, Human
uauagaugaaaccacacacuugcu

SEQ ID NO: 795036 - RNA, 20 nt, Human
uaucaaaccccacccccaac

SEQ ID NO: 795037 - RNA, 20 nt, Human
uauguacauacacacaugua

SEQ ID NO: 795038 - RNA, 22 nt, Human
uauguacauacacacauguagu

SEQ ID NO: 795039 - RNA, 24 nt, Human
uaugugcacaaacaggcaugcaca

SEQ ID NO: 795040 - RNA, 21 nt, Human
ucaaacagguacacagccaua

SEQ ID NO: 795041 - RNA, 24 nt, Human
ucacacacuugcuaaaaaagggca

SEQ ID NO: 795042 - RNA, 28 nt, Human
ucagcggcuucccagaccuucaucuucu

SEQ ID NO: 795043 - RNA, 20 nt, Human
ucaggaagguagcaggaaca

SEQ ID NO: 795044 - RNA, 22 nt, Human
uccaacugacuuuucugagugc

SEQ ID NO: 795045 - RNA, 21 nt, Human
uccacugcuaccagcaaacac

SEQ ID NO: 795046 - RNA, 18 nt, Human
ucccugagauggaacagu

SEQ ID NO: 795047 - RNA, 24 nt, Human
uccuccuacccacagcuacuucaa

SEQ ID NO: 795048 - RNA, 25 nt, Human
uccuggccucugucccucacucacc

SEQ ID NO: 795049 - RNA, 21 nt, Human
uccuuuggccucauccacagg

SEQ ID NO: 795050 - RNA, 21 nt, Human
ucugcauagacuagacuuggg

SEQ ID NO: 795051 - RNA, 18 nt, Human
ucuguguuugccaaggga

SEQ ID NO: 795052 - RNA, 19 nt, Human
ugaaacaguaaacaccaag

SEQ ID NO: 795053 - RNA, 24 nt, Human
ugaaacaguaaacaccaagacacu

SEQ ID NO: 795054 - RNA, 20 nt, Human
ugaacaguaggcuguaguca

SEQ ID NO: 795055 - RNA, 21 nt, Human
ugaacucagcggcuucccaga

SEQ ID NO: 795056 - RNA, 25 nt, Human
ugacacauacacauaaauauauaug

SEQ ID NO: 795057 - RNA, 26 nt, Human
ugaccugauacuaccugggaacccag

SEQ ID NO: 795058 - RNA, 21 nt, Human
ugagacugugacaaaagccgg

SEQ ID NO: 795059 - RNA, 20 nt, Human
ugagagaaugaauagaggag

SEQ ID NO: 795060 - RNA, 21 nt, Human
ugagaguggcuucucucuuuu

SEQ ID NO: 795061 - RNA, 19 nt, Human
ugaggcaaaagucuaaguc

SEQ ID NO: 795062 - RNA, 25 nt, Human
ugcacaaacaggcaugcacagaugu

SEQ ID NO: 795063 - RNA, 20 nt, Human
ugcacagauguaucuaugua

SEQ ID NO: 795064 - RNA, 19 nt, Human
ugcacauauucaaacaggu

SEQ ID NO: 795065 - RNA, 19 nt, Human
ugcagggcccagcuccucc

SEQ ID NO: 795066 - RNA, 27 nt, Human
ugcauggauaacaagcauacacauggu

SEQ ID NO: 795067 - RNA, 18 nt, Human
ugcggcggagacccuggc

SEQ ID NO: 795068 - RNA, 26 nt, Human
ugcuaccagcaaacacucugcaaggg

SEQ ID NO: 795069 - RNA, 20 nt, Human
ugcucagaguucucucaggg

SEQ ID NO: 795070 - RNA, 18 nt, Human
ugggaaagagaaaucugg

SEQ ID NO: 795071 - RNA, 23 nt, Human
uggucaguuuggaguaaaaaagg

SEQ ID NO: 795072 - RNA, 20 nt, Human
uguacauacacacauguacu

SEQ ID NO: 795073 - RNA, 23 nt, Human
uguacauacacacauguacuuag

SEQ ID NO: 795074 - RNA, 27 nt, Human
uguagucagaagcuugccaagguaggc

SEQ ID NO: 795075 - RNA, 20 nt, Human
ugugcacaaacaggcaugca

SEQ ID NO: 795076 - RNA, 24 nt, Human
ugugcauccucacauguacacaaa

SEQ ID NO: 795077 - RNA, 20 nt, Human
uucucccugcacuuguuucu

SEQ ID NO: 795078 - RNA, 22 nt, Human
uuuauacacaugcacucgugua

SEQ ID NO: 795079 - RNA, 20 nt, Human
uuucagugcccuuggccuga

SEQ ID NO: 795080 - RNA, 20 nt, Human
aaacuccugaacucuuuccc

SEQ ID NO: 795081 - RNA, 18 nt, Human
aacucuuucccuuucccu

SEQ ID NO: 795082 - RNA, 20 nt, Human
agacuaagaugacguuuuaa

SEQ ID NO: 795083 - RNA, 18 nt, Human
aucaacaguuacccguga

SEQ ID NO: 795084 - RNA, 22 nt, Human
aucuuccuucagacaucugcug

SEQ ID NO: 795085 - RNA, 19 nt, Human
caguuuuucccugccuggu

SEQ ID NO: 795086 - RNA, 21 nt, Human
cugugauuuucaguuuuuccc

SEQ ID NO: 795087 - RNA, 24 nt, Human
ucuugaccaagacaggccgggguc

SEQ ID NO: 795088 - RNA, 19 nt, Human
ugucauagcccaugugaag

SEQ ID NO: 795089 - RNA, 22 nt, Human
ugugaaggucauaaugagacua

SEQ ID NO: 795090 - RNA, 21 nt, Human
ugugauuuucaguuuuucccu

SEQ ID NO: 795091 - RNA, 18 nt, Human
aaaaaauaugcaggaaca

SEQ ID NO: 795092 - RNA, 18 nt, Human
aaccuaaucaucccacag

SEQ ID NO: 795093 - RNA, 18 nt, Human
aagucaauuccagcacag

SEQ ID NO: 795094 - RNA, 18 nt, Human
agagagagaagauaggcg

SEQ ID NO: 795095 - RNA, 22 nt, Human
agagcagcggcaguggguccag

SEQ ID NO: 795096 - RNA, 22 nt, Human
agagcagcggcaguggguccag

SEQ ID NO: 795097 - RNA, 20 nt, Human
agcggcaguggguccagggg

SEQ ID NO: 795098 - RNA, 19 nt, Human
aggaaggcgcuaagcaaau

SEQ ID NO: 795099 - RNA, 19 nt, Human
aggcaggggucaguugugg

SEQ ID NO: 795100 - RNA, 22 nt, Human
aggcaggggucaguuguggggg

SEQ ID NO: 795101 - RNA, 23 nt, Human
aggcaggggucaguugugggggg

SEQ ID NO: 795102 - RNA, 21 nt, Human
agggguccuggaggggcugga

SEQ ID NO: 795103 - RNA, 22 nt, Human
aucccacagugccaaggccagu

SEQ ID NO: 795104 - RNA, 21 nt, Human
auggagggaaggaggagcaga

SEQ ID NO: 795105 - RNA, 19 nt, Human
auuuacaccucugcucccc

SEQ ID NO: 795106 - RNA, 18 nt, Human
caccuccaccacggcugc

SEQ ID NO: 795107 - RNA, 19 nt, Human
caccuuuggccugacaggg

SEQ ID NO: 795108 - RNA, 19 nt, Human
cagaagcuuuuucuucccu

SEQ ID NO: 795109 - RNA, 18 nt, Human
cagcacagggaggcaggg

SEQ ID NO: 795110 - RNA, 19 nt, Human
cagcggcaguggguccagg

SEQ ID NO: 795111 - RNA, 24 nt, Human
cagcuggcuggacauccagaagcu

SEQ ID NO: 795112 - RNA, 21 nt, Human
caucccacagugccaaggcca

SEQ ID NO: 795113 - RNA, 21 nt, Human
ccacagugauggugcauggag

SEQ ID NO: 795114 - RNA, 24 nt, Human
ccaggccgcugaucugcaggcccc

SEQ ID NO: 795115 - RNA, 19 nt, Human
cuacccuugggcucucuuc

SEQ ID NO: 795116 - RNA, 18 nt, Human
gaagauaggcguggccuc

SEQ ID NO: 795117 - RNA, 23 nt, Human
gacagggcagggggucuggauga

SEQ ID NO: 795118 - RNA, 21 nt, Human
gagcagcggcaguggguccag

SEQ ID NO: 795119 - RNA, 23 nt, Human
gaggcaggggucaguuguggggg

SEQ ID NO: 795120 - RNA, 23 nt, Human
gcaguggguccagggguccugga

SEQ ID NO: 795121 - RNA, 20 nt, Human
gccacgccugccuggcggcc

SEQ ID NO: 795122 - RNA, 24 nt, Human
gccuuauuuacaccucugcucccc

SEQ ID NO: 795123 - RNA, 23 nt, Human
ggaaggaggagcagagagagaag

SEQ ID NO: 795124 - RNA, 19 nt, Human
ggagaaguugagcagggga

SEQ ID NO: 795125 - RNA, 21 nt, Human
ggcuggaagggggcagcuggc

SEQ ID NO: 795126 - RNA, 21 nt, Human
ggcuggaagggggcagcuggc

SEQ ID NO: 795127 - RNA, 24 nt, Human
ggcuggaagggggcagcuggcugg

SEQ ID NO: 795128 - RNA, 23 nt, Human
gggaugcccauucuuuuugcaga

SEQ ID NO: 795129 - RNA, 24 nt, Human
gguuucuccccuacccuugggcuu

SEQ ID NO: 795130 - RNA, 18 nt, Human
uaccaggugauggagggc

SEQ ID NO: 795131 - RNA, 18 nt, Human
uaccaggugauggagggc

SEQ ID NO: 795132 - RNA, 26 nt, Human
uaugcaggaacaaggaaggcgcuuua

SEQ ID NO: 795133 - RNA, 22 nt, Human
ucaguugugggggguuucuccc

SEQ ID NO: 795134 - RNA, 22 nt, Human
ucccucggccacgccugccugg

SEQ ID NO: 795135 - RNA, 21 nt, Human
ugcaggaacaaggaaggcgcu

SEQ ID NO: 795136 - RNA, 20 nt, Human
ugccaagacagggcaggggg

SEQ ID NO: 795137 - RNA, 18 nt, Human
uggaagggggcagcuggc

SEQ ID NO: 795138 - RNA, 20 nt, Human
uggaagggggcagcuggcug

SEQ ID NO: 795139 - RNA, 21 nt, Human
uggaagggggcagcuggcugg

SEQ ID NO: 795140 - RNA, 19 nt, Human
uggagaaguugagcagggg

SEQ ID NO: 795141 - RNA, 23 nt, Human
uggagggcggcggcacaccuuug

SEQ ID NO: 795142 - RNA, 19 nt, Human
uggaggggcuggaaggggg

SEQ ID NO: 795143 - RNA, 22 nt, Human
uuccagcacagggaggcagggg

SEQ ID NO: 795144 - RNA, 18 nt, Human
uucuccccuacccuuggg

SEQ ID NO: 795145 - RNA, 23 nt, Human
uuuaguuuuuuguuuuuuguuuu

SEQ ID NO: 795146 - RNA, 20 nt, Human
uuugcagagagcagcggcag

SEQ ID NO: 795147 - RNA, 21 nt, Human
uuuuuuuuuuuuuuuuucauu

SEQ ID NO: 795148 - RNA, 21 nt, Human
aacacaaugacuuggccaccu

SEQ ID NO: 795149 - RNA, 22 nt, Human
aacaucuuuaaaugaaacacag

SEQ ID NO: 795150 - RNA, 18 nt, Human
aacccagcacuaugggga

SEQ ID NO: 795151 - RNA, 18 nt, Human
aacucagugggcaggugc

SEQ ID NO: 795152 - RNA, 18 nt, Human
aaggggcaggugcuugac

SEQ ID NO: 795153 - RNA, 22 nt, Human
aauguuggaggagggagaggga

SEQ ID NO: 795154 - RNA, 19 nt, Human
acaaagaagggcugccucu

SEQ ID NO: 795155 - RNA, 21 nt, Human
acacugccaagugccccgaga

SEQ ID NO: 795156 - RNA, 21 nt, Human
acccagccugcccuagaagca

SEQ ID NO: 795157 - RNA, 22 nt, Human
accuaggggaccaccacccagc

SEQ ID NO: 795158 - RNA, 18 nt, Human
acucaaaaauuuaaagaa

SEQ ID NO: 795159 - RNA, 23 nt, Human
agacagguggcacaggccggacc

SEQ ID NO: 795160 - RNA, 24 nt, Human
agacagguggcacaggccggaccc

SEQ ID NO: 795161 - RNA, 20 nt, Human
agaguacaguaagagaggcu

SEQ ID NO: 795162 - RNA, 23 nt, Human
agcagggggcgcagccacccucu

SEQ ID NO: 795163 - RNA, 19 nt, Human
agcagugccagugaggugc

SEQ ID NO: 795164 - RNA, 19 nt, Human
agccacgcugcuguggacc

SEQ ID NO: 795165 - RNA, 18 nt, Human
agccucagggccagcagg

SEQ ID NO: 795166 - RNA, 21 nt, Human
agcggcaacugccagagguga

SEQ ID NO: 795167 - RNA, 21 nt, Human
agcgguggcccuggggggcag

SEQ ID NO: 795168 - RNA, 20 nt, Human
aggaggcaaggggcaggugc

SEQ ID NO: 795169 - RNA, 21 nt, Human
aggagggagagggaaagagaa

SEQ ID NO: 795170 - RNA, 19 nt, Human
aggcaggagggugguuggu

SEQ ID NO: 795171 - RNA, 23 nt, Human
agggugguuggugaguugaggca

SEQ ID NO: 795172 - RNA, 24 nt, Human
auauauguauauauauacuucuaa

SEQ ID NO: 795173 - RNA, 20 nt, Human
aucccacccugccucuccag

SEQ ID NO: 795174 - RNA, 21 nt, Human
auggagcaccuggcagaacug

SEQ ID NO: 795175 - RNA, 20 nt, Human
auguaaacaggcccuuggaa

SEQ ID NO: 795176 - RNA, 22 nt, Human
caagaugaggcuaaggccaaga

SEQ ID NO: 795177 - RNA, 22 nt, Human
caagcucagaagauccuaacag

SEQ ID NO: 795178 - RNA, 23 nt, Human
cacccagccugcccuagaagcac

SEQ ID NO: 795179 - RNA, 19 nt, Human
cacccugccucuccagagc

SEQ ID NO: 795180 - RNA, 19 nt, Human
cacccuggagagggccaga

SEQ ID NO: 795181 - RNA, 18 nt, Human
caccuccagccauuccca

SEQ ID NO: 795182 - RNA, 23 nt, Human
cacucgagacguucccuauccca

SEQ ID NO: 795183 - RNA, 18 nt, Human
cagccccacaccugcccc

SEQ ID NO: 795184 - RNA, 23 nt, Human
caggauagaguuccaguaauguu

SEQ ID NO: 795185 - RNA, 20 nt, Human
ccaaaggcuccugccucuga

SEQ ID NO: 795186 - RNA, 22 nt, Human
ccacccagccugcccuagaagc

SEQ ID NO: 795187 - RNA, 22 nt, Human
ccagcagcacucuccacugccc

SEQ ID NO: 795188 - RNA, 19 nt, Human
ccagccuuggugagggggc

SEQ ID NO: 795189 - RNA, 19 nt, Human
cccaccuccagccauuccc

SEQ ID NO: 795190 - RNA, 18 nt, Human
ccccacaccugcccccag

SEQ ID NO: 795191 - RNA, 22 nt, Human
ccccagaggacaaagaagggcu

SEQ ID NO: 795192 - RNA, 22 nt, Human
cccccagccuagagaagccugu

SEQ ID NO: 795193 - RNA, 22 nt, Human
ccccgagaugacucuacugcuc

SEQ ID NO: 795194 - RNA, 20 nt, Human
cccucccuucuccuuugucc

SEQ ID NO: 795195 - RNA, 19 nt, Human
ccuagaagcacugggugcc

SEQ ID NO: 795196 - RNA, 22 nt, Human
ccucuuuccccaacucaguggg

SEQ ID NO: 795197 - RNA, 24 nt, Human
cgaaaugaggagagagaaagguca

SEQ ID NO: 795198 - RNA, 19 nt, Human
cucauugacuagagaagac

SEQ ID NO: 795199 - RNA, 19 nt, Human
cucccaccuccagccauuc

SEQ ID NO: 795200 - RNA, 20 nt, Human
cucccuuccauccaccuccc

SEQ ID NO: 795201 - RNA, 22 nt, Human
cucccuuccauccaccuccuca

SEQ ID NO: 795202 - RNA, 19 nt, Human
cuccuuuguccucuguccc

SEQ ID NO: 795203 - RNA, 21 nt, Human
cucuaggucaagcucauuuac

SEQ ID NO: 795204 - RNA, 18 nt, Human
cugacugccggggaugga

SEQ ID NO: 795205 - RNA, 22 nt, Human
cugcccccaguggaaccaccug

SEQ ID NO: 795206 - RNA, 25 nt, Human
cuggcagucuccuacuuguccccag

SEQ ID NO: 795207 - RNA, 22 nt, Human
cuggucccaagcuaugggcuga

SEQ ID NO: 795208 - RNA, 27 nt, Human
cugguuucaugcagcuuuggggucccu

SEQ ID NO: 795209 - RNA, 20 nt, Human
cuucaagaugaggcuaaggc

SEQ ID NO: 795210 - RNA, 21 nt, Human
cuugacacugccaagugcccc

SEQ ID NO: 795211 - RNA, 20 nt, Human
gaaaacacccuggagagggc

SEQ ID NO: 795212 - RNA, 19 nt, Human
gagggagagggaaagagaa

SEQ ID NO: 795213 - RNA, 23 nt, Human
gagggagagggaaagagaaguca

SEQ ID NO: 795214 - RNA, 26 nt, Human
gauuguguuucugggaugggucagca

SEQ ID NO: 795215 - RNA, 22 nt, Human
gcacucuccacugcccacaggc

SEQ ID NO: 795216 - RNA, 23 nt, Human
gcccacccaccccagugugguca

SEQ ID NO: 795217 - RNA, 18 nt, Human
gcgcagccacccucuccc

SEQ ID NO: 795218 - RNA, 19 nt, Human
gcgguggcccuggggggca

SEQ ID NO: 795219 - RNA, 21 nt, Human
gcuaugggcugacugccgggg

SEQ ID NO: 795220 - RNA, 18 nt, Human
gcugccucuucuagaccc

SEQ ID NO: 795221 - RNA, 22 nt, Human
gcugcuguggacccacaggggc

SEQ ID NO: 795222 - RNA, 21 nt, Human
ggaaaacacccuggagagggc

SEQ ID NO: 795223 - RNA, 21 nt, Human
ggggaagccagcuugccuaga

SEQ ID NO: 795224 - RNA, 18 nt, Human
ggggcagccacgcugcug

SEQ ID NO: 795225 - RNA, 21 nt, Human
ggggugggguagaucaggagc

SEQ ID NO: 795226 - RNA, 19 nt, Human
gguugcugccagggccugg

SEQ ID NO: 795227 - RNA, 20 nt, Human
gucacuguuaaggaaagagg

SEQ ID NO: 795228 - RNA, 21 nt, Human
gugcugaaaggcagcugcaga

SEQ ID NO: 795229 - RNA, 24 nt, Human
guggcacaggcugaaaauagaaag

SEQ ID NO: 795230 - RNA, 18 nt, Human
gugguuggugaguugagg

SEQ ID NO: 795231 - RNA, 29 nt, Human
uaaaaugcaccuguggcuucccauccuuu

SEQ ID NO: 795232 - RNA, 23 nt, Human
uaacaggauagaguuccaguaau

SEQ ID NO: 795233 - RNA, 24 nt, Human
uaaguaucgaaggccguggagguu

SEQ ID NO: 795234 - RNA, 21 nt, Human
uacacccagcagcacucucca

SEQ ID NO: 795235 - RNA, 22 nt, Human
uacaguaagagaggcugauacc

SEQ ID NO: 795236 - RNA, 19 nt, Human
uagcugcccccaguggaac

SEQ ID NO: 795237 - RNA, 24 nt, Human
uagugacuaguggaaaacacccug

SEQ ID NO: 795238 - RNA, 18 nt, Human
uauauauauguauauaua

SEQ ID NO: 795239 - RNA, 18 nt, Human
uauauauguauauauaua

SEQ ID NO: 795240 - RNA, 24 nt, Human
uauauguauauauauacuucuaac

SEQ ID NO: 795241 - RNA, 23 nt, Human
ucaagcccaagucacuguuaagg

SEQ ID NO: 795242 - RNA, 20 nt, Human
ucagcccaaaggcuccugcc

SEQ ID NO: 795243 - RNA, 22 nt, Human
ucagcccaaaggcuccugccuc

SEQ ID NO: 795244 - RNA, 22 nt, Human
ucaggcuucagggcagagggaa

SEQ ID NO: 795245 - RNA, 21 nt, Human
ucaggugagguguccugcucc

SEQ ID NO: 795246 - RNA, 22 nt, Human
uccacagccccacaccugcccc

SEQ ID NO: 795247 - RNA, 20 nt, Human
ucccacccugccucuccaga

SEQ ID NO: 795248 - RNA, 20 nt, Human
ucccugagauuguguuucug

SEQ ID NO: 795249 - RNA, 19 nt, Human
uccugcucccaacucugca

SEQ ID NO: 795250 - RNA, 18 nt, Human
uccuuggagcugcucggg

SEQ ID NO: 795251 - RNA, 18 nt, Human
ucucaccacauccccucu

SEQ ID NO: 795252 - RNA, 21 nt, Human
ucugucccacccagcagggaa

SEQ ID NO: 795253 - RNA, 23 nt, Human
ucuucuagacccucccuucuccu

SEQ ID NO: 795254 - RNA, 20 nt, Human
ucuuugggcccuggcagucu

SEQ ID NO: 795255 - RNA, 23 nt, Human
ugaaaaaaaaugaaacucaggug

SEQ ID NO: 795256 - RNA, 21 nt, Human
ugaagcuaaaagcaagguucc

SEQ ID NO: 795257 - RNA, 19 nt, Human
ugacuaguggaaaacaccc

SEQ ID NO: 795258 - RNA, 20 nt, Human
ugacuaguggaaaacacccu

SEQ ID NO: 795259 - RNA, 22 nt, Human
ugagcagaacagugcucacuga

SEQ ID NO: 795260 - RNA, 21 nt, Human
ugagguguccugcucccaacu

SEQ ID NO: 795261 - RNA, 18 nt, Human
ugaguaaaaugcaccugu

SEQ ID NO: 795262 - RNA, 19 nt, Human
ugaguaaaaugcaccugug

SEQ ID NO: 795263 - RNA, 23 nt, Human
ugauaccuaggggaccaccaccc

SEQ ID NO: 795264 - RNA, 23 nt, Human
ugcagaaaggacaugcaccgaaa

SEQ ID NO: 795265 - RNA, 24 nt, Human
ugccaagugccccgagaugacucu

SEQ ID NO: 795266 - RNA, 26 nt, Human
ugccagggccugguuuccccccucag

SEQ ID NO: 795267 - RNA, 22 nt, Human
ugcucagcccaaaggcuccugc

SEQ ID NO: 795268 - RNA, 20 nt, Human
ugcuugacacugccaagugc

SEQ ID NO: 795269 - RNA, 18 nt, Human
uggaaggcaggagggugg

SEQ ID NO: 795270 - RNA, 18 nt, Human
uggaaggcaggagggugg

SEQ ID NO: 795271 - RNA, 20 nt, Human
uggaaggcaggagggugguu

SEQ ID NO: 795272 - RNA, 30 nt, Human
uggaauuccacagccccacaccugcccccc

SEQ ID NO: 795273 - RNA, 21 nt, Human
uggcacaggcugaaaauagaa

SEQ ID NO: 795274 - RNA, 21 nt, Human
uggcagaacuggaaggcagga

SEQ ID NO: 795275 - RNA, 19 nt, Human
ugggugccccucauugacu

SEQ ID NO: 795276 - RNA, 25 nt, Human
uguggucaaggaggcaaggggcagg

SEQ ID NO: 795277 - RNA, 21 nt, Human
uuccacagccccacaccugcc

SEQ ID NO: 795278 - RNA, 23 nt, Human
uugaggcacaggaaggccaaucc

SEQ ID NO: 795279 - RNA, 21 nt, Human
uugcucagcccaaaggcuccu

SEQ ID NO: 795280 - RNA, 21 nt, Human
uuggaggagggagagggaaag

SEQ ID NO: 795281 - RNA, 24 nt, Human
uuggugagggggcggggaggucau

SEQ ID NO: 795282 - RNA, 23 nt, Human
aaaaaagagaaaaaaacacuaaa

SEQ ID NO: 795283 - RNA, 25 nt, Human
aaaaauaaagauauuuaaccuaugc

SEQ ID NO: 795284 - RNA, 24 nt, Human
aaaaaugaagcccagaggguaguu

SEQ ID NO: 795285 - RNA, 18 nt, Human
aaaacaccgaaucagugu

SEQ ID NO: 795286 - RNA, 18 nt, Human
aaaagagaaacagaaugu

SEQ ID NO: 795287 - RNA, 20 nt, Human
aaaaggaaagaaccuuagaa

SEQ ID NO: 795288 - RNA, 19 nt, Human
aaaaguacagaaggacccu

SEQ ID NO: 795289 - RNA, 20 nt, Human
aaaaucauaccuucucucuu

SEQ ID NO: 795290 - RNA, 21 nt, Human
aaacagaauagaaagcaacua

SEQ ID NO: 795291 - RNA, 26 nt, Human
aaacgaucagccgaggaacaguuagc

SEQ ID NO: 795292 - RNA, 19 nt, Human
aaagugcaaacacaaccac

SEQ ID NO: 795293 - RNA, 24 nt, Human
aaauaucaugagauuacaaauucc

SEQ ID NO: 795294 - RNA, 18 nt, Human
aaaucauaagaaacuuau

SEQ ID NO: 795295 - RNA, 20 nt, Human
aacacaaccacaguuaaacu

SEQ ID NO: 795296 - RNA, 20 nt, Human
aagcacuuauguuggggucc

SEQ ID NO: 795297 - RNA, 21 nt, Human
aagccagaaacaaaaaguaaa

SEQ ID NO: 795298 - RNA, 20 nt, Human
aauccuuucacauuuuuuuc

SEQ ID NO: 795299 - RNA, 23 nt, Human
acuaugcaacauuugaaaaaaga

SEQ ID NO: 795300 - RNA, 23 nt, Human
acuccaaugcuaaaacagaacag

SEQ ID NO: 795301 - RNA, 18 nt, Human
acuccccuacccaccccc

SEQ ID NO: 795302 - RNA, 21 nt, Human
acuccccuacccacccccccu

SEQ ID NO: 795303 - RNA, 23 nt, Human
agaaacaaaaaguaaaacuuaga

SEQ ID NO: 795304 - RNA, 29 nt, Human
agacaauaggugagcucagaagggacccc

SEQ ID NO: 795305 - RNA, 20 nt, Human
agaguagaauccaaauuauc

SEQ ID NO: 795306 - RNA, 23 nt, Human
agccgaggaacaguuagcagcau

SEQ ID NO: 795307 - RNA, 25 nt, Human
aggugauaagaguucgauaaaaaga

SEQ ID NO: 795308 - RNA, 23 nt, Human
aguaggucaacugaauacuuucu

SEQ ID NO: 795309 - RNA, 19 nt, Human
auaagacaggcaaaacaga

SEQ ID NO: 795310 - RNA, 23 nt, Human
augucuacugcuaguugagacag

SEQ ID NO: 795311 - RNA, 24 nt, Human
auuaacuccccuacccaccccccc

SEQ ID NO: 795312 - RNA, 24 nt, Human
auuacaaauuccaaaaugccauaa

SEQ ID NO: 795313 - RNA, 19 nt, Human
auucacuuaaaucaaacag

SEQ ID NO: 795314 - RNA, 18 nt, Human
auuuccagaacuguacaa

SEQ ID NO: 795315 - RNA, 23 nt, Human
caaaaacaccgaaucaguguggc

SEQ ID NO: 795316 - RNA, 19 nt, Human
caaaagagaaacagaaugu

SEQ ID NO: 795317 - RNA, 21 nt, Human
caaaccacucccgccagcaca

SEQ ID NO: 795318 - RNA, 23 nt, Human
caacuaagaaaaaggaaagaacc

SEQ ID NO: 795319 - RNA, 24 nt, Human
caacuccaaugcuaaaacagaaca

SEQ ID NO: 795320 - RNA, 19 nt, Human
caauucauaucagaauuaa

SEQ ID NO: 795321 - RNA, 19 nt, Human
cacaaaugagaauaaauaa

SEQ ID NO: 795322 - RNA, 21 nt, Human
caccagaauagaaaauuuuga

SEQ ID NO: 795323 - RNA, 21 nt, Human
cacugcaaaaacaccgaauca

SEQ ID NO: 795324 - RNA, 19 nt, Human
ccaucaccguuuaugagaa

SEQ ID NO: 795325 - RNA, 21 nt, Human
cccagaguggcgcugccaggu

SEQ ID NO: 795326 - RNA, 20 nt, Human
ccccuacccacccccccucc

SEQ ID NO: 795327 - RNA, 21 nt, Human
ccccuacccacccccccucca

SEQ ID NO: 795328 - RNA, 21 nt, Human
cuaauguaagaaccaaagaaa

SEQ ID NO: 795329 - RNA, 19 nt, Human
cuacccacccccccuccaa

SEQ ID NO: 795330 - RNA, 20 nt, Human
cuacuaugggccaacaaggu

SEQ ID NO: 795331 - RNA, 26 nt, Human
cuccaaugcuaaaacagaacaguuuu

SEQ ID NO: 795332 - RNA, 22 nt, Human
cucugcauaauauuuuuuaaaa

SEQ ID NO: 795333 - RNA, 21 nt, Human
cuggaccacuaugcaacauuu

SEQ ID NO: 795334 - RNA, 21 nt, Human
cuguauugguauagcaauaaa

SEQ ID NO: 795335 - RNA, 21 nt, Human
cuuggcaauccuuucacauuu

SEQ ID NO: 795336 - RNA, 23 nt, Human
cuuguuaauaucugauuugaugu

SEQ ID NO: 795337 - RNA, 18 nt, Human
gaaaaccuuaagccauaa

SEQ ID NO: 795338 - RNA, 20 nt, Human
gaaacagaauguaucuccuc

SEQ ID NO: 795339 - RNA, 20 nt, Human
gaacaacuccaaugcuaaaa

SEQ ID NO: 795340 - RNA, 18 nt, Human
gaaugcacugcaaaaaca

SEQ ID NO: 795341 - RNA, 19 nt, Human
gaccacuaugcaacauuug

SEQ ID NO: 795342 - RNA, 18 nt, Human
gcagcagaagggucacaa

SEQ ID NO: 795343 - RNA, 20 nt, Human
gcgcagcugagucacugaac

SEQ ID NO: 795344 - RNA, 22 nt, Human
ggcaaaacagaauagaaagcaa

SEQ ID NO: 795345 - RNA, 24 nt, Human
guaggcagcagaagggucacaaaa

SEQ ID NO: 795346 - RNA, 19 nt, Human
gugaagcacuuauguuggg

SEQ ID NO: 795347 - RNA, 19 nt, Human
guggagacuguucaaacau

SEQ ID NO: 795348 - RNA, 21 nt, Human
uaaagauauuuaaccuaugcu

SEQ ID NO: 795349 - RNA, 22 nt, Human
uaaauguaauaguuuaacacaa

SEQ ID NO: 795350 - RNA, 21 nt, Human
uaacuccccuacccacccccc

SEQ ID NO: 795351 - RNA, 22 nt, Human
uaagaagaccuaauacuuggug

SEQ ID NO: 795352 - RNA, 18 nt, Human
uaagaucagugaagcacu

SEQ ID NO: 795353 - RNA, 19 nt, Human
uacugcuaguugagacagc

SEQ ID NO: 795354 - RNA, 25 nt, Human
uagaaagcaacuaagaaaaaggaaa

SEQ ID NO: 795355 - RNA, 24 nt, Human
uagaacaaauaguaauuuaaaaug

SEQ ID NO: 795356 - RNA, 18 nt, Human
uagcagcaucuaugacau

SEQ ID NO: 795357 - RNA, 23 nt, Human
uaucaaauaaaaaacaugcaaca

SEQ ID NO: 795358 - RNA, 20 nt, Human
uaugacauccucaaauauuu

SEQ ID NO: 795359 - RNA, 19 nt, Human
uaugauucaaaugaaaagu

SEQ ID NO: 795360 - RNA, 24 nt, Human
uaugcaacauuugaaaaaagagaa

SEQ ID NO: 795361 - RNA, 19 nt, Human
uauguuaacuucuguagaa

SEQ ID NO: 795362 - RNA, 19 nt, Human
ucaaacagacauaugguga

SEQ ID NO: 795363 - RNA, 19 nt, Human
ucaaguagcucuacaaggc

SEQ ID NO: 795364 - RNA, 18 nt, Human
ucacaaaacgaucagccg

SEQ ID NO: 795365 - RNA, 20 nt, Human
ucagggucuuuacuaaauua

SEQ ID NO: 795366 - RNA, 20 nt, Human
ucccagaguggcgcugccag

SEQ ID NO: 795367 - RNA, 26 nt, Human
ucccccaccucuucauuuaaugucaa

SEQ ID NO: 795368 - RNA, 22 nt, Human
uccccuacccacccccccucca

SEQ ID NO: 795369 - RNA, 24 nt, Human
uccccuacccacccccccuccaau

SEQ ID NO: 795370 - RNA, 19 nt, Human
ugaaaaaagagaaaaaaac

SEQ ID NO: 795371 - RNA, 21 nt, Human
ugaaaaaagagaaaaaaacac

SEQ ID NO: 795372 - RNA, 22 nt, Human
ugaaaaaugaagcccagagggu

SEQ ID NO: 795373 - RNA, 20 nt, Human
ugaaaaguacagaaggaccc

SEQ ID NO: 795374 - RNA, 24 nt, Human
ugaagaaaacaccaaguaaaauua

SEQ ID NO: 795375 - RNA, 20 nt, Human
ugaagaggaaucaggauccu

SEQ ID NO: 795376 - RNA, 21 nt, Human
ugaagaggaaucaggauccuu

SEQ ID NO: 795377 - RNA, 21 nt, Human
ugagaauaaauaagacaggca

SEQ ID NO: 795378 - RNA, 22 nt, Human
ugagaauaaauaagacaggcaa

SEQ ID NO: 795379 - RNA, 22 nt, Human
ugccgacaaagauuugccaaua

SEQ ID NO: 795380 - RNA, 20 nt, Human
ugcguuugaacagaaagauu

SEQ ID NO: 795381 - RNA, 20 nt, Human
uguaagaaccaaagaaaacc

SEQ ID NO: 795382 - RNA, 21 nt, Human
uuaacuccccuacccaccccc

SEQ ID NO: 795383 - RNA, 22 nt, Human
uuaugcuacagcaguauaaaaa

SEQ ID NO: 795384 - RNA, 18 nt, Human
uugaaaagucugaugaau

SEQ ID NO: 795385 - RNA, 19 nt, Human
uugaaaaugcaugcaauuu

SEQ ID NO: 795386 - RNA, 22 nt, Human
uugaaugcacugcaaaaacacc

SEQ ID NO: 795387 - RNA, 20 nt, Human
uugcauuuuuuucaaauuua

SEQ ID NO: 795388 - RNA, 26 nt, Human
uuggcaauccuuucacauuuuuuucu

SEQ ID NO: 795389 - RNA, 18 nt, Human
uuggucuuaagaucuaaa

SEQ ID NO: 795390 - RNA, 20 nt, Human
uuuauuuuguaaucuuuagg

SEQ ID NO: 795391 - RNA, 25 nt, Human
aaauugaaagcagggaucccacuca

SEQ ID NO: 795392 - RNA, 25 nt, Human
aacagaccaaaauguggaacagaua

SEQ ID NO: 795393 - RNA, 22 nt, Human
aagcagggaucccacucauaua

SEQ ID NO: 795394 - RNA, 19 nt, Human
aagcggcccagcaggaagg

SEQ ID NO: 795395 - RNA, 19 nt, Human
accuuuuaauccagucacu

SEQ ID NO: 795396 - RNA, 27 nt, Human
agaugacgugcccugcccccugaaagg

SEQ ID NO: 795397 - RNA, 19 nt, Human
aggcaaggcacagcagcga

SEQ ID NO: 795398 - RNA, 21 nt, Human
aggcacagcagcgagggccag

SEQ ID NO: 795399 - RNA, 21 nt, Human
agguagauggacagggaagga

SEQ ID NO: 795400 - RNA, 18 nt, Human
aucaucugguuucuguuc

SEQ ID NO: 795401 - RNA, 21 nt, Human
auccagucacugaaauuagca

SEQ ID NO: 795402 - RNA, 21 nt, Human
caagaugacgugcccugccca

SEQ ID NO: 795403 - RNA, 24 nt, Human
caaugaaaagauacaggcagauga

SEQ ID NO: 795404 - RNA, 23 nt, Human
cacaaacacgcagaacucgauga

SEQ ID NO: 795405 - RNA, 22 nt, Human
caccacaguaauucccaagaag

SEQ ID NO: 795406 - RNA, 19 nt, Human
cacccucccugcuaaccac

SEQ ID NO: 795407 - RNA, 19 nt, Human
cagccgccgccaucccucg

SEQ ID NO: 795408 - RNA, 24 nt, Human
cagcucuuucaccugcaggaugac

SEQ ID NO: 795409 - RNA, 20 nt, Human
caggaaggcaaggcacagca

SEQ ID NO: 795410 - RNA, 23 nt, Human
caguaaaacacgagggucucaua

SEQ ID NO: 795411 - RNA, 20 nt, Human
cauaauucuccacaaacacc

SEQ ID NO: 795412 - RNA, 23 nt, Human
caugcuugccuuccucaugggaa

SEQ ID NO: 795413 - RNA, 22 nt, Human
cauucugcuuggaaauugaaag

SEQ ID NO: 795414 - RNA, 20 nt, Human
ccacccagacuccuuuggug

SEQ ID NO: 795415 - RNA, 19 nt, Human
ccacguggaauuccccuuu

SEQ ID NO: 795416 - RNA, 24 nt, Human
cccaagaagaaugugacaauaagc

SEQ ID NO: 795417 - RNA, 25 nt, Human
cccauagccucuucaugugcuuucu

SEQ ID NO: 795418 - RNA, 21 nt, Human
cccucagagccuugacaaaca

SEQ ID NO: 795419 - RNA, 30 nt, Human
cccugcuaaccacguggaauuccccuuucu

SEQ ID NO: 795420 - RNA, 27 nt, Human
ccucaggagcugcuugacgugcucucc

SEQ ID NO: 795421 - RNA, 25 nt, Human
cgggcaaaauggucgccacccagac

SEQ ID NO: 795422 - RNA, 23 nt, Human
cucauauauccugguuuggaacc

SEQ ID NO: 795423 - RNA, 24 nt, Human
cucccuggugcacuuccaggacag

SEQ ID NO: 795424 - RNA, 21 nt, Human
gaaggugauguagcuuuccag

SEQ ID NO: 795425 - RNA, 19 nt, Human
gacagauuuuucuuccacc

SEQ ID NO: 795426 - RNA, 18 nt, Human
gacuggggucaggacccc

SEQ ID NO: 795427 - RNA, 21 nt, Human
gagggcuccacgugggcaggg

SEQ ID NO: 795428 - RNA, 21 nt, Human
gcaggaagcggcccagcagga

SEQ ID NO: 795429 - RNA, 19 nt, Human
gcccugcccagcaugcugu

SEQ ID NO: 795430 - RNA, 18 nt, Human
gccucuucaugugcuuuc

SEQ ID NO: 795431 - RNA, 19 nt, Human
gcuuggaaauugaaagcag

SEQ ID NO: 795432 - RNA, 24 nt, Human
ggagggaugaagggagggagggau

SEQ ID NO: 795433 - RNA, 18 nt, Human
ggcccagcaggaaggcaa

SEQ ID NO: 795434 - RNA, 20 nt, Human
gggaugaagggagggaggga

SEQ ID NO: 795435 - RNA, 24 nt, Human
gggguggagggaugaagggaggga

SEQ ID NO: 795436 - RNA, 19 nt, Human
ggguggagggaugaaggga

SEQ ID NO: 795437 - RNA, 21 nt, Human
gguauccucaggagcugcuug

SEQ ID NO: 795438 - RNA, 24 nt, Human
gguuauggaacuucaaaggaagaa

SEQ ID NO: 795439 - RNA, 19 nt, Human
gugcaucaucugguuucug

SEQ ID NO: 795440 - RNA, 20 nt, Human
guuauggaacuucaaaggaa

SEQ ID NO: 795441 - RNA, 22 nt, Human
uaaagcuacagugcccggcaca

SEQ ID NO: 795442 - RNA, 21 nt, Human
uaaccacguggaauuccccuu

SEQ ID NO: 795443 - RNA, 19 nt, Human
uaauucccaagaagaaugu

SEQ ID NO: 795444 - RNA, 19 nt, Human
uagcucacacacgugagau

SEQ ID NO: 795445 - RNA, 19 nt, Human
uauugugcaucaucugguu

SEQ ID NO: 795446 - RNA, 21 nt, Human
uauugugcaucaucugguuuc

SEQ ID NO: 795447 - RNA, 22 nt, Human
ucaggagcugcuugacgugcuc

SEQ ID NO: 795448 - RNA, 24 nt, Human
ucaugggaagagggcuccacgugg

SEQ ID NO: 795449 - RNA, 22 nt, Human
uccaaagccuuagucaguuccu

SEQ ID NO: 795450 - RNA, 22 nt, Human
ucccucgaagccaccguugcuu

SEQ ID NO: 795451 - RNA, 24 nt, Human
ucgaugacaaugaaaagauacagg

SEQ ID NO: 795452 - RNA, 26 nt, Human
ucuccacaaacaccucagauuccgag

SEQ ID NO: 795453 - RNA, 24 nt, Human
ucugcaccacaguaauucccaaga

SEQ ID NO: 795454 - RNA, 25 nt, Human
ucugcaccacaguaauucccaagaa

SEQ ID NO: 795455 - RNA, 26 nt, Human
ugacaaacauaugcaggaaggguuuc

SEQ ID NO: 795456 - RNA, 20 nt, Human
ugcagccgccgccaucccuc

SEQ ID NO: 795457 - RNA, 19 nt, Human
ugcaggaagcggcccagca

SEQ ID NO: 795458 - RNA, 19 nt, Human
ugcccggcacagagcaggg

SEQ ID NO: 795459 - RNA, 19 nt, Human
ugcuugacgugcucucccu

SEQ ID NO: 795460 - RNA, 20 nt, Human
ugggcagggaccaugcugug

SEQ ID NO: 795461 - RNA, 21 nt, Human
uucaaaggaagaaaauguuua

SEQ ID NO: 795462 - RNA, 23 nt, Human
uuccaaagccuuagucaguuccu

SEQ ID NO: 795463 - RNA, 24 nt, Human
uuccucaugggaagagggcuccac

SEQ ID NO: 795464 - RNA, 27 nt, Human
uucuccacaaacaccucagauuccgag

SEQ ID NO: 795465 - RNA, 19 nt, Human
uucugagcuucgacaccuu

SEQ ID NO: 795466 - RNA, 23 nt, Human
uugaagcucuggugccuauuuga

SEQ ID NO: 795467 - RNA, 20 nt, Human
uugcagccgccgccaucccu

SEQ ID NO: 795468 - RNA, 18 nt, Human
aaaauuagcugggcgugg

SEQ ID NO: 795469 - RNA, 21 nt, Human
aaaccuuaaaaacaacgccaa

SEQ ID NO: 795470 - RNA, 19 nt, Human
aaagaucuacacauaagag

SEQ ID NO: 795471 - RNA, 21 nt, Human
aaagcagcacugaucaaggca

SEQ ID NO: 795472 - RNA, 19 nt, Human
aacacagugaaaucccguc

SEQ ID NO: 795473 - RNA, 20 nt, Human
aacacagugaaaucccgucu

SEQ ID NO: 795474 - RNA, 21 nt, Human
aacacagugaaaucccgucuc

SEQ ID NO: 795475 - RNA, 19 nt, Human
aacacagugagaccucauc

SEQ ID NO: 795476 - RNA, 20 nt, Human
aacacagugagaccucaucu

SEQ ID NO: 795477 - RNA, 21 nt, Human
aacacagugagaccucaucuc

SEQ ID NO: 795478 - RNA, 18 nt, Human
aacuuuugugcuucagag

SEQ ID NO: 795479 - RNA, 23 nt, Human
aagaagccagggacaagaggaca

SEQ ID NO: 795480 - RNA, 20 nt, Human
aagcaacaaaagaaaaaaac

SEQ ID NO: 795481 - RNA, 21 nt, Human
aagcaacaaaagaaaaaaaca

SEQ ID NO: 795482 - RNA, 18 nt, Human
aagcaggaggaucgcuug

SEQ ID NO: 795483 - RNA, 22 nt, Human
aagcaggaggaucgcuugaggc

SEQ ID NO: 795484 - RNA, 27 nt, Human
aagcaugguuacugcccagacccacgc

SEQ ID NO: 795485 - RNA, 24 nt, Human
aagccagggacaagaggacacaug

SEQ ID NO: 795486 - RNA, 24 nt, Human
aagcgccaggcgaggccggggcgg

SEQ ID NO: 795487 - RNA, 21 nt, Human
aaggaaaaacaaaaaaaacaa

SEQ ID NO: 795488 - RNA, 20 nt, Human
aaggcugcagaggccaagag

SEQ ID NO: 795489 - RNA, 21 nt, Human
aaggcugcagaggccaagagg

SEQ ID NO: 795490 - RNA, 22 nt, Human
aagugcugauggccagugcacu

SEQ ID NO: 795491 - RNA, 24 nt, Human
aaucgcuugaacccaggagguggu

SEQ ID NO: 795492 - RNA, 23 nt, Human
acaaaaaaaacaacuguuacaac

SEQ ID NO: 795493 - RNA, 22 nt, Human
acaacaaagcagcacugaucaa

SEQ ID NO: 795494 - RNA, 21 nt, Human
acacauguaugaaaaggcaca

SEQ ID NO: 795495 - RNA, 24 nt, Human
acagagcaagauuccauuucaaaa

SEQ ID NO: 795496 - RNA, 18 nt, Human
acaguaauagacaaagca

SEQ ID NO: 795497 - RNA, 24 nt, Human
acccaggaggugguaguugcagug

SEQ ID NO: 795498 - RNA, 21 nt, Human
accccacaccacgacaagcac

SEQ ID NO: 795499 - RNA, 26 nt, Human
acgagaagauguucgguauccuucuc

SEQ ID NO: 795500 - RNA, 23 nt, Human
acugcacucagccuggguaagag

SEQ ID NO: 795501 - RNA, 28 nt, Human
agaaacagaaagcagaugaccgguaccc

SEQ ID NO: 795502 - RNA, 20 nt, Human
agaaagcagaugacugaacg

SEQ ID NO: 795503 - RNA, 24 nt, Human
agaccgaagcaggaggaucgcuug

SEQ ID NO: 795504 - RNA, 18 nt, Human
agauuccgcagggcagcc

SEQ ID NO: 795505 - RNA, 24 nt, Human
agcacuaugggaggccgagguggg

SEQ ID NO: 795506 - RNA, 25 nt, Human
agcccaucucuaaaaggaaaaacaa

SEQ ID NO: 795507 - RNA, 24 nt, Human
agccuggguaagagcaaaagccca

SEQ ID NO: 795508 - RNA, 23 nt, Human
agcugggcgugguggugcgcgcc

SEQ ID NO: 795509 - RNA, 19 nt, Human
aggaaaaacaaaaaaaaca

SEQ ID NO: 795510 - RNA, 24 nt, Human
aggagugguggcucaugccuguaa

SEQ ID NO: 795511 - RNA, 24 nt, Human
aggaguuugaggcugcacugagcu

SEQ ID NO: 795512 - RNA, 24 nt, Human
aggaucgcuugaggcuaggaguuc

SEQ ID NO: 795513 - RNA, 21 nt, Human
aggccgagguggguggaucac

SEQ ID NO: 795514 - RNA, 22 nt, Human
aggccggggcggaggcugggaa

SEQ ID NO: 795515 - RNA, 24 nt, Human
agguggguggaucacgaggucaag

SEQ ID NO: 795516 - RNA, 21 nt, Human
aggugguaguugcagugagcc

SEQ ID NO: 795517 - RNA, 24 nt, Human
aggugguaguugcagugagccgag

SEQ ID NO: 795518 - RNA, 18 nt, Human
agguguuguggugugugc

SEQ ID NO: 795519 - RNA, 21 nt, Human
auagacuccucuccaaaggag

SEQ ID NO: 795520 - RNA, 24 nt, Human
aucacgccauugcacuccagccug

SEQ ID NO: 795521 - RNA, 24 nt, Human
aucagcugagugcgguggcucaca

SEQ ID NO: 795522 - RNA, 23 nt, Human
aucucuacaaaaaauuuaaaaaa

SEQ ID NO: 795523 - RNA, 19 nt, Human
augccuguaaucccaacac

SEQ ID NO: 795524 - RNA, 30 nt, Human
augugacagcaaaagcauaagcaacaaaag

SEQ ID NO: 795525 - RNA, 23 nt, Human
auucugccacugcacucagccug

SEQ ID NO: 795526 - RNA, 20 nt, Human
auugcacuccagccuggcga

SEQ ID NO: 795527 - RNA, 23 nt, Human
auugcacuccagccuggcgacag

SEQ ID NO: 795528 - RNA, 18 nt, Human
caaaacagccuugaagca

SEQ ID NO: 795529 - RNA, 20 nt, Human
caaaagaaaaaaacagauaa

SEQ ID NO: 795530 - RNA, 26 nt, Human
caaaagaaaaaaacagauaaauugcu

SEQ ID NO: 795531 - RNA, 23 nt, Human
caaacacaguaauagacaaagca

SEQ ID NO: 795532 - RNA, 21 nt, Human
caaagcagcacugaucaaggc

SEQ ID NO: 795533 - RNA, 20 nt, Human
caacaaaagaaaaaaacaga

SEQ ID NO: 795534 - RNA, 19 nt, Human
caacaaagcagcacugauc

SEQ ID NO: 795535 - RNA, 24 nt, Human
caacacagugaaaucccgucucua

SEQ ID NO: 795536 - RNA, 19 nt, Human
caacugauuaucaauaaug

SEQ ID NO: 795537 - RNA, 21 nt, Human
caagaaauucugagaccaaug

SEQ ID NO: 795538 - RNA, 23 nt, Human
caagaggagccaagaaauucuga

SEQ ID NO: 795539 - RNA, 24 nt, Human
cacaacaaagcagcacugaucaag

SEQ ID NO: 795540 - RNA, 24 nt, Human
cacaccuguaaucccagcacuaug

SEQ ID NO: 795541 - RNA, 24 nt, Human
caccacgacaagcacuggucucac

SEQ ID NO: 795542 - RNA, 18 nt, Human
caccgcggcgugccuggu

SEQ ID NO: 795543 - RNA, 23 nt, Human
caccuguaaucccagcacuaugg

SEQ ID NO: 795544 - RNA, 24 nt, Human
caccuguaaucccagcacuauggg

SEQ ID NO: 795545 - RNA, 22 nt, Human
cacuaugggaggccgagguggg

SEQ ID NO: 795546 - RNA, 22 nt, Human
cacuccagccuggcgacagagc

SEQ ID NO: 795547 - RNA, 20 nt, Human
cacugcacucagccugggua

SEQ ID NO: 795548 - RNA, 22 nt, Human
cacugcacucagccuggguaag

SEQ ID NO: 795549 - RNA, 33 nt, Human
cagcaaaagcauaagcaacaaaagaaaaaaaag

SEQ ID NO: 795550 - RNA, 26 nt, Human
cagcaaggcugcagaggccaagagga

SEQ ID NO: 795551 - RNA, 24 nt, Human
cagcacuaugggaggccgaggugg

SEQ ID NO: 795552 - RNA, 20 nt, Human
cagcagagcggccguaccuu

SEQ ID NO: 795553 - RNA, 23 nt, Human
caggaggaucgcuugaggcuagg

SEQ ID NO: 795554 - RNA, 18 nt, Human
cagggacaagaggacaca

SEQ ID NO: 795555 - RNA, 24 nt, Human
cagggccgagcaccgcggcgugcc

SEQ ID NO: 795556 - RNA, 18 nt, Human
cauugcacuccagccugg

SEQ ID NO: 795557 - RNA, 20 nt, Human
cauugcacuccagccuggcg

SEQ ID NO: 795558 - RNA, 22 nt, Human
cauugcacuccagccuggcgac

SEQ ID NO: 795559 - RNA, 23 nt, Human
cauugcacuccagccuggcgaca

SEQ ID NO: 795560 - RNA, 23 nt, Human
cauugcacuccagccuggcgaca

SEQ ID NO: 795561 - RNA, 18 nt, Human
ccaaaggagauacacaaa

SEQ ID NO: 795562 - RNA, 19 nt, Human
ccacugcacucagccuggg

SEQ ID NO: 795563 - RNA, 20 nt, Human
ccacugcacucagccugggu

SEQ ID NO: 795564 - RNA, 23 nt, Human
ccacugcacucagccuggguaag

SEQ ID NO: 795565 - RNA, 21 nt, Human
ccagacccacgcccacucugc

SEQ ID NO: 795566 - RNA, 21 nt, Human
ccaucaccagacgaugccgaa

SEQ ID NO: 795567 - RNA, 19 nt, Human
ccaucucuaaaaggaaaaa

SEQ ID NO: 795568 - RNA, 19 nt, Human
ccauugcacuccagccugg

SEQ ID NO: 795569 - RNA, 20 nt, Human
ccauugcacuccagccuggc

SEQ ID NO: 795570 - RNA, 23 nt, Human
ccauugcacuccagccuggcgac

SEQ ID NO: 795571 - RNA, 19 nt, Human
cccacaccacgacaagcac

SEQ ID NO: 795572 - RNA, 19 nt, Human
ccccacaccacgacaagca

SEQ ID NO: 795573 - RNA, 21 nt, Human
cccggaaggaagcgccaggcg

SEQ ID NO: 795574 - RNA, 22 nt, Human
cccgucucuacuaaaaauacaa

SEQ ID NO: 795575 - RNA, 18 nt, Human
ccgaacccuguagcagca

SEQ ID NO: 795576 - RNA, 18 nt, Human
ccgccgccggcgcucucg

SEQ ID NO: 795577 - RNA, 22 nt, Human
ccuccagcaaggcugcagaggc

SEQ ID NO: 795578 - RNA, 23 nt, Human
ccucuggaacagggucgcugccu

SEQ ID NO: 795579 - RNA, 21 nt, Human
ccuggcgacagagcaagauuc

SEQ ID NO: 795580 - RNA, 20 nt, Human
ccuguaaucccaacacuuug

SEQ ID NO: 795581 - RNA, 21 nt, Human
ccuguagucccagcuaccugg

SEQ ID NO: 795582 - RNA, 22 nt, Human
ccuguagucccagcuaccuggg

SEQ ID NO: 795583 - RNA, 19 nt, Human
ccuguagucccagcuacuc

SEQ ID NO: 795584 - RNA, 21 nt, Human
ccuguagucccagcuacucag

SEQ ID NO: 795585 - RNA, 22 nt, Human
ccuguagucccagcuacucagg

SEQ ID NO: 795586 - RNA, 21 nt, Human
cgacggugcucggggggcugc

SEQ ID NO: 795587 - RNA, 23 nt, Human
cgaggcuuggaccgcggggucgc

SEQ ID NO: 795588 - RNA, 24 nt, Human
cgaugccgaacccuguagcagcag

SEQ ID NO: 795589 - RNA, 22 nt, Human
cgcaccgccagggaaaggccga

SEQ ID NO: 795590 - RNA, 24 nt, Human
cgcauggacagguuuucaccuccu

SEQ ID NO: 795591 - RNA, 25 nt, Human
cgccauugcacuccagccuggcgac

SEQ ID NO: 795592 - RNA, 23 nt, Human
cgggcacacgggacacgcccugg

SEQ ID NO: 795593 - RNA, 24 nt, Human
cuagccuuuguguuuguguuaaaa

SEQ ID NO: 795594 - RNA, 21 nt, Human
cucaagauaaaucauucaauu

SEQ ID NO: 795595 - RNA, 22 nt, Human
cucacaccuguaaucccagcac

SEQ ID NO: 795596 - RNA, 23 nt, Human
cucacaccuguaaucccagcacu

SEQ ID NO: 795597 - RNA, 24 nt, Human
cucaugccuguaaucccaacacuu

SEQ ID NO: 795598 - RNA, 22 nt, Human
cucggcccagggcccgcccucc

SEQ ID NO: 795599 - RNA, 18 nt, Human
cucuuacaccacacacaa

SEQ ID NO: 795600 - RNA, 23 nt, Human
cucuuacaccacacacaaaacuu

SEQ ID NO: 795601 - RNA, 19 nt, Human
cugcacacacauuccgucc

SEQ ID NO: 795602 - RNA, 33 nt, Human
cugcacacacauuccguccgugcugaaccccuc

SEQ ID NO: 795603 - RNA, 18 nt, Human
cuucagaggacacuaucc

SEQ ID NO: 795604 - RNA, 18 nt, Human
cuuggauuaggugauggc

SEQ ID NO: 795605 - RNA, 21 nt, Human
gaaaaacaaaaaaaacaacuu

SEQ ID NO: 795606 - RNA, 22 nt, Human
gaaagaaggggcccggcagggc

SEQ ID NO: 795607 - RNA, 22 nt, Human
gaaagugcugauggccagugca

SEQ ID NO: 795608 - RNA, 20 nt, Human
gaagcagaacaaaguaaaac

SEQ ID NO: 795609 - RNA, 24 nt, Human
gaagcaggaggaucgcuugaggcu

SEQ ID NO: 795610 - RNA, 19 nt, Human
gaaggacccggaaggaagc

SEQ ID NO: 795611 - RNA, 22 nt, Human
gaauagacuccucuccaaagga

SEQ ID NO: 795612 - RNA, 18 nt, Human
gacaagaggacacaugua

SEQ ID NO: 795613 - RNA, 23 nt, Human
gagaucacgccauugcacuccag

SEQ ID NO: 795614 - RNA, 18 nt, Human
gagcccaggaguuugagg

SEQ ID NO: 795615 - RNA, 22 nt, Human
gaggaucgcuugaggcuaggag

SEQ ID NO: 795616 - RNA, 18 nt, Human
gaggaucuaguauccaca

SEQ ID NO: 795617 - RNA, 22 nt, Human
gaggccagacccaucaccagac

SEQ ID NO: 795618 - RNA, 23 nt, Human
gagguggguggaucacgagguca

SEQ ID NO: 795619 - RNA, 24 nt, Human
gagugcgguggcucacaccuguaa

SEQ ID NO: 795620 - RNA, 24 nt, Human
gaucgcuugaggcuaggaguucga

SEQ ID NO: 795621 - RNA, 23 nt, Human
gcacuccagccuggcgacagagc

SEQ ID NO: 795622 - RNA, 18 nt, Human
gcacugagcuaugauucu

SEQ ID NO: 795623 - RNA, 23 nt, Human
gccacugcacucagccuggguaa

SEQ ID NO: 795624 - RNA, 22 nt, Human
gcccagggcccgcccuccggcc

SEQ ID NO: 795625 - RNA, 23 nt, Human
gccuguagucccagcuacucagg

SEQ ID NO: 795626 - RNA, 20 nt, Human
gcgacagagcaagauuccau

SEQ ID NO: 795627 - RNA, 20 nt, Human
gcgaggcuuggaccgcgggg

SEQ ID NO: 795628 - RNA, 20 nt, Human
gcggccugucacucggccca

SEQ ID NO: 795629 - RNA, 19 nt, Human
gcugcacugagcuaugauu

SEQ ID NO: 795630 - RNA, 19 nt, Human
gcugcggccugucacucgg

SEQ ID NO: 795631 - RNA, 22 nt, Human
gcuugagcccaggaguuugagg

SEQ ID NO: 795632 - RNA, 21 nt, Human
ggaaagaaggggcccggcagg

SEQ ID NO: 795633 - RNA, 21 nt, Human
ggaaaggccgaaggacccgga

SEQ ID NO: 795634 - RNA, 21 nt, Human
ggacucgcagaagcccucugg

SEQ ID NO: 795635 - RNA, 19 nt, Human
ggaguucgagaucaccgug

SEQ ID NO: 795636 - RNA, 23 nt, Human
ggaucgcuugaggcuaggaguuc

SEQ ID NO: 795637 - RNA, 21 nt, Human
ggccaggagugguggcucaug

SEQ ID NO: 795638 - RNA, 24 nt, Human
ggccggggcggaggcugggaagcu

SEQ ID NO: 795639 - RNA, 22 nt, Human
ggcgugguggugcgcgccugua

SEQ ID NO: 795640 - RNA, 20 nt, Human
ggggcccggcagggccacgc

SEQ ID NO: 795641 - RNA, 23 nt, Human
ggggggcugcggccugucacucg

SEQ ID NO: 795642 - RNA, 19 nt, Human
ggguggaucacgaggucaa

SEQ ID NO: 795643 - RNA, 23 nt, Human
gguggcucacaccuguaauccca

SEQ ID NO: 795644 - RNA, 24 nt, Human
gguggcucacaccuguaaucccag

SEQ ID NO: 795645 - RNA, 23 nt, Human
gguggcucaugccuguaauccca

SEQ ID NO: 795646 - RNA, 24 nt, Human
gguggugcgcgccuguagucccag

SEQ ID NO: 795647 - RNA, 18 nt, Human
gucaagagaucaagacca

SEQ ID NO: 795648 - RNA, 23 nt, Human
guccgugcugaaccccacaccac

SEQ ID NO: 795649 - RNA, 21 nt, Human
gugcacaagcuuccgcauggg

SEQ ID NO: 795650 - RNA, 22 nt, Human
guggcucaugccuguaauccca

SEQ ID NO: 795651 - RNA, 18 nt, Human
guggugcgcgccuguagu

SEQ ID NO: 795652 - RNA, 18 nt, Human
guggugugugccuguagu

SEQ ID NO: 795653 - RNA, 22 nt, Human
guggugugugccuguaguccca

SEQ ID NO: 795654 - RNA, 19 nt, Human
guugcagugagccgagauc

SEQ ID NO: 795655 - RNA, 26 nt, Human
uaaauaaauaaauaaaguuuuugcaa

SEQ ID NO: 795656 - RNA, 22 nt, Human
uaagcaacaaaagaaaaaaaca

SEQ ID NO: 795657 - RNA, 22 nt, Human
uacacaaauggccaguaagccc

SEQ ID NO: 795658 - RNA, 19 nt, Human
uaccugggaggcugacgug

SEQ ID NO: 795659 - RNA, 23 nt, Human
uagccagguguuguggugugugc

SEQ ID NO: 795660 - RNA, 18 nt, Human
uaggaguucgagaucacc

SEQ ID NO: 795661 - RNA, 24 nt, Human
ucacaacaaagcagcacugaucaa

SEQ ID NO: 795662 - RNA, 21 nt, Human
ucacaugaggaucuaguaucc

SEQ ID NO: 795663 - RNA, 24 nt, Human
ucacgaggucaagagaucaagacc

SEQ ID NO: 795664 - RNA, 23 nt, Human
ucacgccauugcacuccagccug

SEQ ID NO: 795665 - RNA, 21 nt, Human
uccacaugcaaaagaaugugg

SEQ ID NO: 795666 - RNA, 19 nt, Human
uccagaaacagaaagcaga

SEQ ID NO: 795667 - RNA, 20 nt, Human
uccuucuccaaugcugcugu

SEQ ID NO: 795668 - RNA, 23 nt, Human
ucgcuugaggcuaggaguucgag

SEQ ID NO: 795669 - RNA, 21 nt, Human
ucuccaggcccgagggccucu

SEQ ID NO: 795670 - RNA, 24 nt, Human
ucuccaggcccgagggccucuucu

SEQ ID NO: 795671 - RNA, 20 nt, Human
ucucgcacagcggcugcacc

SEQ ID NO: 795672 - RNA, 21 nt, Human
ucucuacuaaaaauacaaaaa

SEQ ID NO: 795673 - RNA, 19 nt, Human
ucuuggauuaggugauggc

SEQ ID NO: 795674 - RNA, 22 nt, Human
ugaaaaggcacauccagaaaca

SEQ ID NO: 795675 - RNA, 19 nt, Human
ugaaacaacaguauggaag

SEQ ID NO: 795676 - RNA, 25 nt, Human
ugaaccccacaccacgacaagcacu

SEQ ID NO: 795677 - RNA, 26 nt, Human
ugacagcaaaagcauaagcaacaaaa

SEQ ID NO: 795678 - RNA, 18 nt, Human
ugacgcaggcgaaucgcu

SEQ ID NO: 795679 - RNA, 24 nt, Human
ugagaccaaugaaaagucgcgucc

SEQ ID NO: 795680 - RNA, 22 nt, Human
ugagcccaggaguuugaggcug

SEQ ID NO: 795681 - RNA, 22 nt, Human
ugagccgagaucacgccauugc

SEQ ID NO: 795682 - RNA, 19 nt, Human
ugauggccagugcacuggg

SEQ ID NO: 795683 - RNA, 18 nt, Human
ugcacaagcuuccgcaug

SEQ ID NO: 795684 - RNA, 23 nt, Human
ugcacuccagccuggcgacagag

SEQ ID NO: 795685 - RNA, 22 nt, Human
ugcauggauaaaccuuaaaaac

SEQ ID NO: 795686 - RNA, 22 nt, Human
ugcccagaaauaagccuguaca

SEQ ID NO: 795687 - RNA, 19 nt, Human
ugccuggugggaugaggcg

SEQ ID NO: 795688 - RNA, 23 nt, Human
ugccuguaaucccaacacuuugg

SEQ ID NO: 795689 - RNA, 23 nt, Human
ugccuguaaucccaacacuuugg

SEQ ID NO: 795690 - RNA, 24 nt, Human
ugccuguaaucccaacacuuuggg

SEQ ID NO: 795691 - RNA, 23 nt, Human
ugccuguagucccagcuaccugg

SEQ ID NO: 795692 - RNA, 24 nt, Human
ugccuguagucccagcuaccuggg

SEQ ID NO: 795693 - RNA, 18 nt, Human
ugcuguacuucaucaaaa

SEQ ID NO: 795694 - RNA, 23 nt, Human
ugcuucagaggacacuauccaga

SEQ ID NO: 795695 - RNA, 24 nt, Human
uggaaggauggcuugagcccagga

SEQ ID NO: 795696 - RNA, 18 nt, Human
uggcagagggagaaagug

SEQ ID NO: 795697 - RNA, 23 nt, Human
uggccaggagugguggcucaugc

SEQ ID NO: 795698 - RNA, 24 nt, Human
uggccaggagugguggcucaugcc

SEQ ID NO: 795699 - RNA, 23 nt, Human
uggccaguaagcccacgagaaga

SEQ ID NO: 795700 - RNA, 21 nt, Human
uggcucacaccuguaauccca

SEQ ID NO: 795701 - RNA, 24 nt, Human
uggcucacaccuguaaucccagca

SEQ ID NO: 795702 - RNA, 21 nt, Human
uggcucaugccuguaauccca

SEQ ID NO: 795703 - RNA, 24 nt, Human
uggcucaugccuguaaucccaaca

SEQ ID NO: 795704 - RNA, 23 nt, Human
ugggaggccgagguggguggauc

SEQ ID NO: 795705 - RNA, 24 nt, Human
ugggaggccgagguggguggauca

SEQ ID NO: 795706 - RNA, 19 nt, Human
ugggaggcugacguggaag

SEQ ID NO: 795707 - RNA, 25 nt, Human
uggguaagagcaaaagcccaucucu

SEQ ID NO: 795708 - RNA, 18 nt, Human
uggugcgcgccuguaguc

SEQ ID NO: 795709 - RNA, 21 nt, Human
uggugcgcgccuguaguccca

SEQ ID NO: 795710 - RNA, 24 nt, Human
ugguggcucaugccuguaauccca

SEQ ID NO: 795711 - RNA, 24 nt, Human
uggugggaugaggcgagggccugc

SEQ ID NO: 795712 - RNA, 24 nt, Human
ugguggugcgcgccuguaguccca

SEQ ID NO: 795713 - RNA, 18 nt, Human
uggugugugccuguaguc

SEQ ID NO: 795714 - RNA, 21 nt, Human
uggugugugccuguaguccca

SEQ ID NO: 795715 - RNA, 24 nt, Human
uggugugugccuguagucccagcu

SEQ ID NO: 795716 - RNA, 19 nt, Human
uguccugagacacuggcag

SEQ ID NO: 795717 - RNA, 22 nt, Human
uguguuaaaaacagcauuugca

SEQ ID NO: 795718 - RNA, 21 nt, Human
uuaaaaacagcauuugcacaa

SEQ ID NO: 795719 - RNA, 20 nt, Human
uuagcugggcgugguggugc

SEQ ID NO: 795720 - RNA, 22 nt, Human
uuagcugggcgugguggugcgc

SEQ ID NO: 795721 - RNA, 24 nt, Human
uuagcugggcgugguggugcgcgc

SEQ ID NO: 795722 - RNA, 18 nt, Human
uucuccaaugcugcugug

SEQ ID NO: 795723 - RNA, 18 nt, Human
uugaagcagaacaaagua

SEQ ID NO: 795724 - RNA, 18 nt, Human
uugcagugagccgagauc

SEQ ID NO: 795725 - RNA, 20 nt, Human
uugcagugagccgagaucac

SEQ ID NO: 795726 - RNA, 21 nt, Human
uugcagugagccgagaucacg

SEQ ID NO: 795727 - RNA, 26 nt, Human
uugugcuucagaggacacuauccaga

SEQ ID NO: 795728 - RNA, 24 nt, Human
aggaggcgccccccacaaccucag

SEQ ID NO: 795729 - RNA, 23 nt, Human
agggcagggcagggcagggcugg

SEQ ID NO: 795730 - RNA, 20 nt, Human
agggcugggcugcgcggggc

SEQ ID NO: 795731 - RNA, 26 nt, Human
agggcugggcugcgcggggcugggcc

SEQ ID NO: 795732 - RNA, 22 nt, Human
augcggcgcggugggcgcgccc

SEQ ID NO: 795733 - RNA, 18 nt, Human
auggugccugguucuggc

SEQ ID NO: 795734 - RNA, 22 nt, Human
caggaggcgccccccacaaccu

SEQ ID NO: 795735 - RNA, 26 nt, Human
caggaggcgccccccacaaccucagc

SEQ ID NO: 795736 - RNA, 24 nt, Human
ccagcaguggccgccgaggcucuu

SEQ ID NO: 795737 - RNA, 21 nt, Human
cccaggaggcgccccccacaa

SEQ ID NO: 795738 - RNA, 19 nt, Human
ccccccacaaccucagccg

SEQ ID NO: 795739 - RNA, 20 nt, Human
ccggagcgauggggagcugc

SEQ ID NO: 795740 - RNA, 26 nt, Human
ccuuccgcggccgccgcccccacccg

SEQ ID NO: 795741 - RNA, 24 nt, Human
cucacaccgugccagcaguggccg

SEQ ID NO: 795742 - RNA, 20 nt, Human
cugggugcugggggucccag

SEQ ID NO: 795743 - RNA, 18 nt, Human
gcagggcugggcugcgcg

SEQ ID NO: 795744 - RNA, 19 nt, Human
ggagcugcuuggcgugcuc

SEQ ID NO: 795745 - RNA, 24 nt, Human
ggcagggcagggcagggcugggcc

SEQ ID NO: 795746 - RNA, 18 nt, Human
ggcucugggugcuggggg

SEQ ID NO: 795747 - RNA, 18 nt, Human
ggcugggcugcgcggggc

SEQ ID NO: 795748 - RNA, 23 nt, Human
ggcugggcugcgcggggcugggc

SEQ ID NO: 795749 - RNA, 21 nt, Human
gggagcugcuuggcgugcucc

SEQ ID NO: 795750 - RNA, 18 nt, Human
gggcaaaauaaguuagug

SEQ ID NO: 795751 - RNA, 19 nt, Human
gggcagggcagggcagggc

SEQ ID NO: 795752 - RNA, 19 nt, Human
gggcagggcagggcagggc

SEQ ID NO: 795753 - RNA, 20 nt, Human
gggcagggcagggcagggca

SEQ ID NO: 795754 - RNA, 23 nt, Human
gggcagggcagggcagggcaggg

SEQ ID NO: 795755 - RNA, 19 nt, Human
gggcagggcagggcugggc

SEQ ID NO: 795756 - RNA, 18 nt, Human
gggcugcgcggggcuggg

SEQ ID NO: 795757 - RNA, 19 nt, Human
ggggaacagcugcguggcc

SEQ ID NO: 795758 - RNA, 20 nt, Human
ggggccggcuugggggcagg

SEQ ID NO: 795759 - RNA, 20 nt, Human
ggggcugggcugcgcugggc

SEQ ID NO: 795760 - RNA, 18 nt, Human
gggggcaggagcugcagc

SEQ ID NO: 795761 - RNA, 23 nt, Human
gugggggccggcuugggggcagg

SEQ ID NO: 795762 - RNA, 19 nt, Human
uaaacccagagcugaggga

SEQ ID NO: 795763 - RNA, 22 nt, Human
ucucugaggagcuaucugaucc

SEQ ID NO: 795764 - RNA, 25 nt, Human
ugccagcaguggccgccgaggcucu

SEQ ID NO: 795765 - RNA, 18 nt, Human
ugccugguucuggcucag

SEQ ID NO: 795766 - RNA, 19 nt, Human
ugcugggggucccaggcac

SEQ ID NO: 795767 - RNA, 24 nt, Human
uggcucaggugggggccggcuugg

SEQ ID NO: 795768 - RNA, 21 nt, Human
ugggugcugggggucccaggc

SEQ ID NO: 795769 - RNA, 20 nt, Human
ugguucuggcucaggugggg

SEQ ID NO: 795770 - RNA, 20 nt, Human
uuaguggggggccugccaga

SEQ ID NO: 795771 - RNA, 24 nt, Human
uuccggagcgauggggagcugcuu

SEQ ID NO: 795772 - RNA, 21 nt, Human
aaaacuucucccacacaccaa

SEQ ID NO: 795773 - RNA, 19 nt, Human
aaacaaaacaaaacucuaa

SEQ ID NO: 795774 - RNA, 19 nt, Human
aaaggaggggagggaugga

SEQ ID NO: 795775 - RNA, 21 nt, Human
aaaugaauaaauaaacaagcg

SEQ ID NO: 795776 - RNA, 23 nt, Human
aaaugaauaaauacaauuaaaua

SEQ ID NO: 795777 - RNA, 28 nt, Human
aacaagcgaagaaaaaaauaucacacaa

SEQ ID NO: 795778 - RNA, 19 nt, Human
aacagcaaacucagaagga

SEQ ID NO: 795779 - RNA, 23 nt, Human
aagaaaaaaauaucacacaagga

SEQ ID NO: 795780 - RNA, 19 nt, Human
aagaacuaaggcuggaugu

SEQ ID NO: 795781 - RNA, 23 nt, Human
aagcaauuauaaaacuucuccca

SEQ ID NO: 795782 - RNA, 19 nt, Human
aagcgaagaaaaaaauauc

SEQ ID NO: 795783 - RNA, 25 nt, Human
aagcgaagaaaaaaauaucacacaa

SEQ ID NO: 795784 - RNA, 21 nt, Human
aaggagacuuaggguccuggu

SEQ ID NO: 795785 - RNA, 24 nt, Human
acaaaacaaaacucuaaagguaaa

SEQ ID NO: 795786 - RNA, 21 nt, Human
acacaccaagaaccccagaac

SEQ ID NO: 795787 - RNA, 23 nt, Human
acagaggcuggcauggagaggcc

SEQ ID NO: 795788 - RNA, 23 nt, Human
acaggaacaggaagauaaccaga

SEQ ID NO: 795789 - RNA, 18 nt, Human
acucagaaggaaaaaaca

SEQ ID NO: 795790 - RNA, 21 nt, Human
acuccuccugucuccuuaccu

SEQ ID NO: 795791 - RNA, 20 nt, Human
acuucuacuuggcaguggag

SEQ ID NO: 795792 - RNA, 21 nt, Human
agaaggaaaggagacuuaggg

SEQ ID NO: 795793 - RNA, 20 nt, Human
aggagaggggacaggcagag

SEQ ID NO: 795794 - RNA, 21 nt, Human
aggauucuugagcugaggaca

SEQ ID NO: 795795 - RNA, 18 nt, Human
agggggucacgacugggg

SEQ ID NO: 795796 - RNA, 21 nt, Human
aggguccuggucccacagucu

SEQ ID NO: 795797 - RNA, 18 nt, Human
aguaaaugaauaaauaca

SEQ ID NO: 795798 - RNA, 23 nt, Human
augggggcacaggugacuggcag

SEQ ID NO: 795799 - RNA, 24 nt, Human
caagcuacaggauucuugagcuga

SEQ ID NO: 795800 - RNA, 22 nt, Human
cacacaccaagaaccccagaac

SEQ ID NO: 795801 - RNA, 18 nt, Human
caccccaagaacuaaggc

SEQ ID NO: 795802 - RNA, 24 nt, Human
cagaacuccccacccagaaggaaa

SEQ ID NO: 795803 - RNA, 18 nt, Human
cagaaggaaaggagacuu

SEQ ID NO: 795804 - RNA, 23 nt, Human
cagaaggaaaggagacuuagggu

SEQ ID NO: 795805 - RNA, 18 nt, Human
cagaggguacagggaaga

SEQ ID NO: 795806 - RNA, 18 nt, Human
cagcaaugggggcacagg

SEQ ID NO: 795807 - RNA, 22 nt, Human
caggacccaagacaucugcuga

SEQ ID NO: 795808 - RNA, 20 nt, Human
cagggaacuuagaaguaugu

SEQ ID NO: 795809 - RNA, 18 nt, Human
caggucccaguaaaaccg

SEQ ID NO: 795810 - RNA, 22 nt, Human
caggucccaguaaaaccggaag

SEQ ID NO: 795811 - RNA, 20 nt, Human
ccaacagcaaacucagaagg

SEQ ID NO: 795812 - RNA, 21 nt, Human
ccaagacaucugcugacagca

SEQ ID NO: 795813 - RNA, 19 nt, Human
ccagaccgggcagaaccug

SEQ ID NO: 795814 - RNA, 27 nt, Human
cccacacaccaagaaccccagaacucc

SEQ ID NO: 795815 - RNA, 23 nt, Human
ccccagaacuccccacccagaag

SEQ ID NO: 795816 - RNA, 19 nt, Human
ccccauggccuuccccaag

SEQ ID NO: 795817 - RNA, 24 nt, Human
ccccgcugacuucacccgcuccug

SEQ ID NO: 795818 - RNA, 21 nt, Human
cccugccuccuccuacuccuc

SEQ ID NO: 795819 - RNA, 24 nt, Human
cccugccuccuccuacuccuccug

SEQ ID NO: 795820 - RNA, 18 nt, Human
ccuccuacuccuccuguc

SEQ ID NO: 795821 - RNA, 21 nt, Human
ccuccugccccuaccugggag

SEQ ID NO: 795822 - RNA, 18 nt, Human
ccugaaaaggaggggagg

SEQ ID NO: 795823 - RNA, 22 nt, Human
ccugaaaaggaggggagggaug

SEQ ID NO: 795824 - RNA, 18 nt, Human
ccugcaccaacagcaaac

SEQ ID NO: 795825 - RNA, 25 nt, Human
ccugcaccaacagcaaacucagaag

SEQ ID NO: 795826 - RNA, 18 nt, Human
ccugccuccuccuacucc

SEQ ID NO: 795827 - RNA, 21 nt, Human
cggaagucgcuguaggggugg

SEQ ID NO: 795828 - RNA, 20 nt, Human
cggaauguccgcacaggguc

SEQ ID NO: 795829 - RNA, 20 nt, Human
cuaugcuacaggaacaggaa

SEQ ID NO: 795830 - RNA, 22 nt, Human
cucagaaggaaaaaacaaaaca

SEQ ID NO: 795831 - RNA, 18 nt, Human
cugaaaaggaggggaggg

SEQ ID NO: 795832 - RNA, 19 nt, Human
cugaaaaggaggggaggga

SEQ ID NO: 795833 - RNA, 23 nt, Human
cugaaaaggaggggagggaugga

SEQ ID NO: 795834 - RNA, 21 nt, Human
cuuccccaggcuuggauaccu

SEQ ID NO: 795835 - RNA, 20 nt, Human
gacuacucuugucccugaga

SEQ ID NO: 795836 - RNA, 19 nt, Human
gaggguacagggaagagga

SEQ ID NO: 795837 - RNA, 19 nt, Human
gauaccuugggccuuuccc

SEQ ID NO: 795838 - RNA, 23 nt, Human
gccccuaccugggagaagguuca

SEQ ID NO: 795839 - RNA, 20 nt, Human
gcuacaggaacaggaagaua

SEQ ID NO: 795840 - RNA, 24 nt, Human
gcuggcauggagaggcccugccuc

SEQ ID NO: 795841 - RNA, 21 nt, Human
gcuggccugcccuuccccagg

SEQ ID NO: 795842 - RNA, 26 nt, Human
ggaaaaaacaaaacaaaacucuaaag

SEQ ID NO: 795843 - RNA, 22 nt, Human
ggaaacagagacaucuaguuac

SEQ ID NO: 795844 - RNA, 19 nt, Human
ggacaagcuacaggauucu

SEQ ID NO: 795845 - RNA, 18 nt, Human
ggaccacagaggcuggca

SEQ ID NO: 795846 - RNA, 23 nt, Human
ggacccaagacaucugcugacag

SEQ ID NO: 795847 - RNA, 19 nt, Human
ggaggugccaacuaccccu

SEQ ID NO: 795848 - RNA, 19 nt, Human
ggggagggauggauaaagg

SEQ ID NO: 795849 - RNA, 21 nt, Human
ggguccuggucccacagucuu

SEQ ID NO: 795850 - RNA, 20 nt, Human
gguacauacuacugcacccc

SEQ ID NO: 795851 - RNA, 24 nt, Human
gguuuugagucacuucuacuuggc

SEQ ID NO: 795852 - RNA, 19 nt, Human
guuacuuggcagugauggc

SEQ ID NO: 795853 - RNA, 24 nt, Human
uaaccagaccgggcagaaccugca

SEQ ID NO: 795854 - RNA, 22 nt, Human
uacaggaacaggaagauaacca

SEQ ID NO: 795855 - RNA, 23 nt, Human
uacaggauucuugagcugaggac

SEQ ID NO: 795856 - RNA, 23 nt, Human
uacauacuacugcaccccaagaa

SEQ ID NO: 795857 - RNA, 19 nt, Human
uaguaaagguggggucaug

SEQ ID NO: 795858 - RNA, 21 nt, Human
ucagaaggaaaaaacaaaaca

SEQ ID NO: 795859 - RNA, 23 nt, Human
ucagaaggaaaaaacaaaacaaa

SEQ ID NO: 795860 - RNA, 22 nt, Human
uccacagguggcagugagcggg

SEQ ID NO: 795861 - RNA, 18 nt, Human
ucccacacaccaagaacc

SEQ ID NO: 795862 - RNA, 19 nt, Human
ucccacacaccaagaaccc

SEQ ID NO: 795863 - RNA, 22 nt, Human
ucccacacaccaagaaccccag

SEQ ID NO: 795864 - RNA, 22 nt, Human
uccccaggcuuggauaccuugg

SEQ ID NO: 795865 - RNA, 20 nt, Human
ucccugagaaggcagagguu

SEQ ID NO: 795866 - RNA, 23 nt, Human
uccuccugucuccuuaccugaaa

SEQ ID NO: 795867 - RNA, 21 nt, Human
ucucccacacaccaagaaccc

SEQ ID NO: 795868 - RNA, 22 nt, Human
ugacagcaaugggggcacaggu

SEQ ID NO: 795869 - RNA, 19 nt, Human
uggauuaugaugggacaag

SEQ ID NO: 795870 - RNA, 23 nt, Human
uggcaggaccauagccaagggaa

SEQ ID NO: 795871 - RNA, 24 nt, Human
uggcagugagcggguaaaagugga

SEQ ID NO: 795872 - RNA, 22 nt, Human
uggcauggagaggcccugccuc

SEQ ID NO: 795873 - RNA, 24 nt, Human
uggcauggagaggcccugccuccu

SEQ ID NO: 795874 - RNA, 20 nt, Human
uggcuaugcuacaggaacag

SEQ ID NO: 795875 - RNA, 22 nt, Human
uggcuggccugcccuuccccag

SEQ ID NO: 795876 - RNA, 19 nt, Human
ugggcaaggaccacagagg

SEQ ID NO: 795877 - RNA, 22 nt, Human
uggggcaauguuucaggucccc

SEQ ID NO: 795878 - RNA, 18 nt, Human
ugugcuuaguaaaggugg

SEQ ID NO: 795879 - RNA, 21 nt, Human
ugugcuuaguaaagguggggu

SEQ ID NO: 795880 - RNA, 19 nt, Human
uuaguaaagguggggucau

SEQ ID NO: 795881 - RNA, 20 nt, Human
uuaguaaagguggggucaug

SEQ ID NO: 795882 - RNA, 23 nt, Human
uuaugaugggacaagcuacagga

SEQ ID NO: 795883 - RNA, 19 nt, Human
uucagguccccauggccuu

SEQ ID NO: 795884 - RNA, 22 nt, Human
uuccccaagaggcaucugcccu

SEQ ID NO: 795885 - RNA, 25 nt, Human
uucucccacacaccaagaaccccag

SEQ ID NO: 795886 - RNA, 23 nt, Human
uuuaaacccagcuguuuggaagc

SEQ ID NO: 795887 - RNA, 21 nt, Human
aagcaaccagggcuaggagug

SEQ ID NO: 795888 - RNA, 20 nt, Human
aagcaguucuuagggaacag

SEQ ID NO: 795889 - RNA, 19 nt, Human
aaggccuccuccaucccgg

SEQ ID NO: 795890 - RNA, 23 nt, Human
accaaaagggaccugagaggcca

SEQ ID NO: 795891 - RNA, 27 nt, Human
accaaugaaacugagaaccaaaaggga

SEQ ID NO: 795892 - RNA, 23 nt, Human
agaaaaugggcaugaaaccuaag

SEQ ID NO: 795893 - RNA, 18 nt, Human
agccacugcuuccgaaca

SEQ ID NO: 795894 - RNA, 22 nt, Human
aggaaccaaugaaacugagaac

SEQ ID NO: 795895 - RNA, 23 nt, Human
aggaccccucccugggacaaaag

SEQ ID NO: 795896 - RNA, 22 nt, Human
agggaccugagaggccaugaug

SEQ ID NO: 795897 - RNA, 19 nt, Human
agguaggagaggaugaagu

SEQ ID NO: 795898 - RNA, 21 nt, Human
augggggaacagaaagaggaa

SEQ ID NO: 795899 - RNA, 20 nt, Human
augugugugagugugugugu

SEQ ID NO: 795900 - RNA, 22 nt, Human
caugugugugagugugugugug

SEQ ID NO: 795901 - RNA, 22 nt, Human
ccaucccgguuccuccaaaacc

SEQ ID NO: 795902 - RNA, 23 nt, Human
cccuccaaacugaauaccuaagg

SEQ ID NO: 795903 - RNA, 25 nt, Human
ccucaaaaauacaaaaaaccccucc

SEQ ID NO: 795904 - RNA, 28 nt, Human
ccuccaaaaccacuuucaggggauaaag

SEQ ID NO: 795905 - RNA, 18 nt, Human
cuaaguguaugcaugugu

SEQ ID NO: 795906 - RNA, 18 nt, Human
cuccaaacugaauaccua

SEQ ID NO: 795907 - RNA, 25 nt, Human
cuccuccaucccgguuccuccaaaa

SEQ ID NO: 795908 - RNA, 24 nt, Human
gaaaacucagguaaaccaacggaa

SEQ ID NO: 795909 - RNA, 22 nt, Human
gaacagaaagaggaaccaauga

SEQ ID NO: 795910 - RNA, 22 nt, Human
gaacaggaccccucccugggac

SEQ ID NO: 795911 - RNA, 23 nt, Human
gacaaaagagccagguaggagag

SEQ ID NO: 795912 - RNA, 21 nt, Human
gaccuggagagggaggggggc

SEQ ID NO: 795913 - RNA, 24 nt, Human
gagugugugugugcaugagugugu

SEQ ID NO: 795914 - RNA, 18 nt, Human
gccccaggaauuggcuuu

SEQ ID NO: 795915 - RNA, 20 nt, Human
ggaaauggggauaccuggga

SEQ ID NO: 795916 - RNA, 24 nt, Human
ggaaauggggauaccugggaccac

SEQ ID NO: 795917 - RNA, 19 nt, Human
ggagagggaggggggccuu

SEQ ID NO: 795918 - RNA, 25 nt, Human
ggcacacagaagcaguucuuaggga

SEQ ID NO: 795919 - RNA, 24 nt, Human
gggaacagaaagaggaaccgguac

SEQ ID NO: 795920 - RNA, 19 nt, Human
gggaacagaauaucaugga

SEQ ID NO: 795921 - RNA, 20 nt, Human
gggaccuggagagggagggg

SEQ ID NO: 795922 - RNA, 28 nt, Human
gggggaccuggagagggaggggggccuu

SEQ ID NO: 795923 - RNA, 18 nt, Human
ggggggaccuggagaggg

SEQ ID NO: 795924 - RNA, 21 nt, Human
guaugcaugugugugagugug

SEQ ID NO: 795925 - RNA, 20 nt, Human
uaggguggggcacagaaguc

SEQ ID NO: 795926 - RNA, 18 nt, Human
uaucauggagcccagugu

SEQ ID NO: 795927 - RNA, 25 nt, Human
uaucauggagcccagugugauagaa

SEQ ID NO: 795928 - RNA, 26 nt, Human
ucaaaaauacaaaaaaccccuccaaa

SEQ ID NO: 795929 - RNA, 19 nt, Human
uccaugcugcugccucugu

SEQ ID NO: 795930 - RNA, 19 nt, Human
ugaggagaugcgaggagag

SEQ ID NO: 795931 - RNA, 20 nt, Human
ugagugugagugugugugug

SEQ ID NO: 795932 - RNA, 20 nt, Human
ugagugugugugugcagugg

SEQ ID NO: 795933 - RNA, 19 nt, Human
ugagugugugugugcauga

SEQ ID NO: 795934 - RNA, 24 nt, Human
ugagugugugugugcaugagugug

SEQ ID NO: 795935 - RNA, 21 nt, Human
ugcaugugugugagugugugu

SEQ ID NO: 795936 - RNA, 22 nt, Human
uggagagggaggggggccuugg

SEQ ID NO: 795937 - RNA, 22 nt, Human
uggggggaccuggagagggagg

SEQ ID NO: 795938 - RNA, 21 nt, Human
ugugagugugagugugugugu

SEQ ID NO: 795939 - RNA, 18 nt, Human
ugugagugugugugugca

SEQ ID NO: 795940 - RNA, 21 nt, Human
ugugagugugugugugcagug

SEQ ID NO: 795941 - RNA, 19 nt, Human
ugugugagugugugugugc

SEQ ID NO: 795942 - RNA, 18 nt, Human
ugugugcaugagugugua

SEQ ID NO: 795943 - RNA, 20 nt, Human
ugugugugagugugugugug

SEQ ID NO: 795944 - RNA, 19 nt, Human
ugugugugcaugagugugu

SEQ ID NO: 795945 - RNA, 21 nt, Human
ugugugugugcaugagugugu

SEQ ID NO: 795946 - RNA, 22 nt, Human
ugugugugugcaugagugugua

SEQ ID NO: 795947 - RNA, 22 nt, Human
uucaaacuacaaagggauggau

SEQ ID NO: 795948 - RNA, 20 nt, Human
uucaggggauaaauucagcc

SEQ ID NO: 795949 - RNA, 21 nt, Human
uuggggcaucagacaagggag

SEQ ID NO: 795950 - RNA, 18 nt, Human
uuuguucaaacuacaaag

SEQ ID NO: 795951 - RNA, 18 nt, Human
ccgcagccgcucgcgagc

SEQ ID NO: 795952 - RNA, 20 nt, Human
ccgccgccgccucugccgcc

SEQ ID NO: 795953 - RNA, 23 nt, Human
ccgccgccgccucugccgccgcc

SEQ ID NO: 795954 - RNA, 24 nt, Human
ccgccgccgccucugccgccgccg

SEQ ID NO: 795955 - RNA, 25 nt, Human
ccgccucugccgccgccgugcgcuc

SEQ ID NO: 795956 - RNA, 20 nt, Human
ccucugccgccgccgugcgc

SEQ ID NO: 795957 - RNA, 20 nt, Human
cgccucugccgccgccgugc

SEQ ID NO: 795958 - RNA, 19 nt, Human
cgcgagcgcucgccgccgc

SEQ ID NO: 795959 - RNA, 20 nt, Human
cgcugcacgaccgagagucg

SEQ ID NO: 795960 - RNA, 20 nt, Human
cuccggaaaccucgcguccc

SEQ ID NO: 795961 - RNA, 18 nt, Human
cuccuaggcccggccgcc

SEQ ID NO: 795962 - RNA, 18 nt, Human
cucgccgccgcugcacga

SEQ ID NO: 795963 - RNA, 20 nt, Human
ucgccgccgcugcacgaccg

SEQ ID NO: 795964 - RNA, 21 nt, Human
acagacaggacccaggaauac

SEQ ID NO: 795965 - RNA, 20 nt, Human
agcaggacuggacucaaagu

SEQ ID NO: 795966 - RNA, 23 nt, Human
agccuguggauccucggaguggg

SEQ ID NO: 795967 - RNA, 21 nt, Human
cacccagacacgguuggggac

SEQ ID NO: 795968 - RNA, 27 nt, Human
cagacaaggggacugagcugagcccug

SEQ ID NO: 795969 - RNA, 25 nt, Human
cagacaggacccaggaauaccgacu

SEQ ID NO: 795970 - RNA, 18 nt, Human
caggaauaccgacugacu

SEQ ID NO: 795971 - RNA, 18 nt, Human
cccacagcaggacuggac

SEQ ID NO: 795972 - RNA, 22 nt, Human
cccccacagcaggacuggacuc

SEQ ID NO: 795973 - RNA, 21 nt, Human
ccgcagcacacagggcccggc

SEQ ID NO: 795974 - RNA, 18 nt, Human
ccucccagcucagccccc

SEQ ID NO: 795975 - RNA, 28 nt, Human
ccucccagcucagcccccacagcaggac

SEQ ID NO: 795976 - RNA, 25 nt, Human
ccugagucccugaaccucccagcuc

SEQ ID NO: 795977 - RNA, 26 nt, Human
ccugagucccugaaccucccagcucc

SEQ ID NO: 795978 - RNA, 24 nt, Human
cuccagccccacccagacacgguu

SEQ ID NO: 795979 - RNA, 27 nt, Human
cugacuguccuccaggggauggcggcc

SEQ ID NO: 795980 - RNA, 20 nt, Human
gagacuccagccccacccag

SEQ ID NO: 795981 - RNA, 25 nt, Human
gccgcagcacacagggcccggcccg

SEQ ID NO: 795982 - RNA, 22 nt, Human
gccucagugccccggggggagg

SEQ ID NO: 795983 - RNA, 20 nt, Human
ggaggccucagugccccggg

SEQ ID NO: 795984 - RNA, 27 nt, Human
gggacugagcugagcccugagucccug

SEQ ID NO: 795985 - RNA, 19 nt, Human
gggaggacagacaagggga

SEQ ID NO: 795986 - RNA, 24 nt, Human
ucccagcucagcccccacagcagg

SEQ ID NO: 795987 - RNA, 25 nt, Human
ugagcccugagucccugaaccuccc

SEQ ID NO: 795988 - RNA, 23 nt, Human
ugagucccugaaccucccagcuc

SEQ ID NO: 795989 - RNA, 24 nt, Human
ugccgcuguuguucugaggugggg

SEQ ID NO: 795990 - RNA, 23 nt, Human
uggcggccgcagcacacagggcc

SEQ ID NO: 795991 - RNA, 18 nt, Human
aaaaacaaaccaaaaaag

SEQ ID NO: 795992 - RNA, 19 nt, Human
aaaacaaaagaucacccuc

SEQ ID NO: 795993 - RNA, 25 nt, Human
aaaacccaaacugagaggaggccag

SEQ ID NO: 795994 - RNA, 22 nt, Human
aaacaaaagaucacccucagaa

SEQ ID NO: 795995 - RNA, 21 nt, Human
aaacaggguccaccguggaaa

SEQ ID NO: 795996 - RNA, 22 nt, Human
aaagaucacccucagaaaagcc

SEQ ID NO: 795997 - RNA, 22 nt, Human
aacaaaccaaaaaagaaauuac

SEQ ID NO: 795998 - RNA, 20 nt, Human
aagccgacacccaagucccc

SEQ ID NO: 795999 - RNA, 18 nt, Human
aagggggggccagggcug

SEQ ID NO: 796000 - RNA, 21 nt, Human
aagggggggccagggcuggcc

SEQ ID NO: 796001 - RNA, 18 nt, Human
acaaacaaccagaggggu

SEQ ID NO: 796002 - RNA, 24 nt, Human
agaaaaauacaaauccauuacaaa

SEQ ID NO: 796003 - RNA, 20 nt, Human
agaaacccuggggaucugga

SEQ ID NO: 796004 - RNA, 24 nt, Human
agaagcaaaaguuucuuuuuuggu

SEQ ID NO: 796005 - RNA, 18 nt, Human
agaggcggcgccgcccca

SEQ ID NO: 796006 - RNA, 23 nt, Human
agcccagacaucggggaacacaa

SEQ ID NO: 796007 - RNA, 18 nt, Human
agccggccaguccugaag

SEQ ID NO: 796008 - RNA, 18 nt, Human
agcuggacucgcggcggc

SEQ ID NO: 796009 - RNA, 23 nt, Human
aggcaaaaaaacaaaguuuugua

SEQ ID NO: 796010 - RNA, 21 nt, Human
aggccaggccaagggccuggg

SEQ ID NO: 796011 - RNA, 20 nt, Human
aggcggaagaaaacacacag

SEQ ID NO: 796012 - RNA, 18 nt, Human
aggcgucugcggccccgg

SEQ ID NO: 796013 - RNA, 18 nt, Human
agggcaaaacccaaacug

SEQ ID NO: 796014 - RNA, 22 nt, Human
agggcaugggggggcucaugug

SEQ ID NO: 796015 - RNA, 21 nt, Human
agugaccgguuuuucuccaua

SEQ ID NO: 796016 - RNA, 28 nt, Human
agugauuuugugugugugugugugugug

SEQ ID NO: 796017 - RNA, 21 nt, Human
aguggcucgacggcugacccc

SEQ ID NO: 796018 - RNA, 19 nt, Human
auaagacaaagaaacccug

SEQ ID NO: 796019 - RNA, 23 nt, Human
auaagacaaagaaacccugggga

SEQ ID NO: 796020 - RNA, 18 nt, Human
auaaggcaaaaaaacaaa

SEQ ID NO: 796021 - RNA, 21 nt, Human
aucuggagaaggaucugaggc

SEQ ID NO: 796022 - RNA, 23 nt, Human
caaaagaucacccucagaaaagc

SEQ ID NO: 796023 - RNA, 18 nt, Human
caaacguccacagcaucg

SEQ ID NO: 796024 - RNA, 21 nt, Human
caaacguccacagcaucgccc

SEQ ID NO: 796025 - RNA, 21 nt, Human
caaagcaaguggcucgacggc

SEQ ID NO: 796026 - RNA, 24 nt, Human
caaaucccaaccgaaaacgaagaa

SEQ ID NO: 796027 - RNA, 23 nt, Human
cacaaacguccacagcaucgccc

SEQ ID NO: 796028 - RNA, 23 nt, Human
cacaccgaggugacgcugaugcc

SEQ ID NO: 796029 - RNA, 20 nt, Human
cacagugcgcuggacaaagu

SEQ ID NO: 796030 - RNA, 25 nt, Human
cacccucagaaaagccgacacccaa

SEQ ID NO: 796031 - RNA, 26 nt, Human
cagcagcgccuggguuucccgaaucg

SEQ ID NO: 796032 - RNA, 20 nt, Human
cagcagugauuuugugugug

SEQ ID NO: 796033 - RNA, 18 nt, Human
cagccagcagcgccuggg

SEQ ID NO: 796034 - RNA, 21 nt, Human
cagccuuuagacucuugcacu

SEQ ID NO: 796035 - RNA, 18 nt, Human
ccaacagccgaaucccaa

SEQ ID NO: 796036 - RNA, 21 nt, Human
ccaacagccgaaucccaaacu

SEQ ID NO: 796037 - RNA, 22 nt, Human
ccaaguccccgccuccgcaggc

SEQ ID NO: 796038 - RNA, 21 nt, Human
ccagggccuccagggugcuga

SEQ ID NO: 796039 - RNA, 24 nt, Human
ccaguccugaagcccacaggagcc

SEQ ID NO: 796040 - RNA, 23 nt, Human
cccaaacucggaaaacaaaagau

SEQ ID NO: 796041 - RNA, 21 nt, Human
cccaaccccuccacggaccca

SEQ ID NO: 796042 - RNA, 20 nt, Human
cccaaccgaaaacgaagaag

SEQ ID NO: 796043 - RNA, 19 nt, Human
cccacaggagccgcccagg

SEQ ID NO: 796044 - RNA, 18 nt, Human
cccaggggcucugcuggg

SEQ ID NO: 796045 - RNA, 25 nt, Human
cccaggggcucugcuggggggaccc

SEQ ID NO: 796046 - RNA, 24 nt, Human
cccucagaaaagccgacacccaag

SEQ ID NO: 796047 - RNA, 18 nt, Human
cccuggggaucuggagaa

SEQ ID NO: 796048 - RNA, 19 nt, Human
cccuugcggcuggagccgg

SEQ ID NO: 796049 - RNA, 31 nt, Human
ccgacacccaaguccccgccuccgcaggcuu

SEQ ID NO: 796050 - RNA, 19 nt, Human
ccgaggugacgcugaugcc

SEQ ID NO: 796051 - RNA, 19 nt, Human
ccgcaaggggggcagggca

SEQ ID NO: 796052 - RNA, 20 nt, Human
ccgcaggcugcggguggaga

SEQ ID NO: 796053 - RNA, 24 nt, Human
ccgguuuuucuccauaaauaagac

SEQ ID NO: 796054 - RNA, 20 nt, Human
ccgucgaugaccuccuccuc

SEQ ID NO: 796055 - RNA, 20 nt, Human
ccucccccaaccagcagagc

SEQ ID NO: 796056 - RNA, 24 nt, Human
ccuccugcgagcuggacucgcggc

SEQ ID NO: 796057 - RNA, 19 nt, Human
cgaccacaccgaggugacg

SEQ ID NO: 796058 - RNA, 20 nt, Human
cggggaacacaaaaggccgc

SEQ ID NO: 796059 - RNA, 21 nt, Human
cugaagcccacaggagccgcc

SEQ ID NO: 796060 - RNA, 22 nt, Human
cugaagcccacaggagccgccc

SEQ ID NO: 796061 - RNA, 23 nt, Human
cugaagcccacaggagccgccca

SEQ ID NO: 796062 - RNA, 20 nt, Human
gaccuccuccuccugcgagc

SEQ ID NO: 796063 - RNA, 20 nt, Human
gagaacacugcaccauccac

SEQ ID NO: 796064 - RNA, 18 nt, Human
gccuccagggugcugaag

SEQ ID NO: 796065 - RNA, 31 nt, Human
gcgauggcgaagccgucgaugaccuccuccu

SEQ ID NO: 796066 - RNA, 23 nt, Human
gcuggcggaaccuuccuccccca

SEQ ID NO: 796067 - RNA, 20 nt, Human
ggaaaacaaaagaucacccu

SEQ ID NO: 796068 - RNA, 20 nt, Human
gggcaugggggggcucaugu

SEQ ID NO: 796069 - RNA, 20 nt, Human
ggggaacacaaaaggccgca

SEQ ID NO: 796070 - RNA, 19 nt, Human
ggggcagggcauggggggg

SEQ ID NO: 796071 - RNA, 19 nt, Human
ggggggcagggcauggggg

SEQ ID NO: 796072 - RNA, 21 nt, Human
gugugugugugugugugugug

SEQ ID NO: 796073 - RNA, 21 nt, Human
gugugugugugugugugugug

SEQ ID NO: 796074 - RNA, 21 nt, Human
uaaacugcaaaucccaaccga

SEQ ID NO: 796075 - RNA, 18 nt, Human
uaaauaagacaaagaaac

SEQ ID NO: 796076 - RNA, 25 nt, Human
uaaauaagacaaagaaacccugggg

SEQ ID NO: 796077 - RNA, 22 nt, Human
uaauauaaucuguaacuucggu

SEQ ID NO: 796078 - RNA, 19 nt, Human
ucaggcggaagaaaacaca

SEQ ID NO: 796079 - RNA, 20 nt, Human
uccacagcaucgcccuugcg

SEQ ID NO: 796080 - RNA, 21 nt, Human
uccacagcaucgcccuugcgg

SEQ ID NO: 796081 - RNA, 22 nt, Human
uccauaaauaagacaaagaaac

SEQ ID NO: 796082 - RNA, 23 nt, Human
uccauaaauaagacaaagaaacc

SEQ ID NO: 796083 - RNA, 20 nt, Human
ucguuugcuuuuaaaaaaac

SEQ ID NO: 796084 - RNA, 23 nt, Human
ucugauaauguuuacagccagca

SEQ ID NO: 796085 - RNA, 23 nt, Human
ugaaacacagaacugagcaaagc

SEQ ID NO: 796086 - RNA, 25 nt, Human
ugaaacacagaacugagcaaagcaa

SEQ ID NO: 796087 - RNA, 19 nt, Human
ugaggccauuaaacugcaa

SEQ ID NO: 796088 - RNA, 21 nt, Human
ugauuuugugugugugugugu

SEQ ID NO: 796089 - RNA, 23 nt, Human
ugcuggggggacccaaccccucc

SEQ ID NO: 796090 - RNA, 21 nt, Human
uggacucgcggcggcggcggc

SEQ ID NO: 796091 - RNA, 18 nt, Human
uggcggaaccuuccuccc

SEQ ID NO: 796092 - RNA, 21 nt, Human
uggcggaaccuuccuccccca

SEQ ID NO: 796093 - RNA, 23 nt, Human
ugggggggcucaugugggugagg

SEQ ID NO: 796094 - RNA, 20 nt, Human
ugggugagggcaaaacccaa

SEQ ID NO: 796095 - RNA, 18 nt, Human
ugugugugugugugugug

SEQ ID NO: 796096 - RNA, 18 nt, Human
ugugugugugugugugug

SEQ ID NO: 796097 - RNA, 18 nt, Human
ugugugugugugugugug

SEQ ID NO: 796098 - RNA, 18 nt, Human
ugugugugugugugugug

SEQ ID NO: 796099 - RNA, 18 nt, Human
ugugugugugugugugug

SEQ ID NO: 796100 - RNA, 18 nt, Human
ugugugugugugugugug

SEQ ID NO: 796101 - RNA, 18 nt, Human
ugugugugugugugugug

SEQ ID NO: 796102 - RNA, 18 nt, Human
ugugugugugugugugug

SEQ ID NO: 796103 - RNA, 18 nt, Human
ugugugugugugugugug

SEQ ID NO: 796104 - RNA, 18 nt, Human
ugugugugugugugugug

SEQ ID NO: 796105 - RNA, 18 nt, Human
ugugugugugugugugug

SEQ ID NO: 796106 - RNA, 21 nt, Human
ugugugugugugugugugugu

SEQ ID NO: 796107 - RNA, 21 nt, Human
ugugugugugugugugugugu

SEQ ID NO: 796108 - RNA, 21 nt, Human
ugugugugugugugugugugu

SEQ ID NO: 796109 - RNA, 21 nt, Human
ugugugugugugugugugugu

SEQ ID NO: 796110 - RNA, 21 nt, Human
ugugugugugugugugugugu

SEQ ID NO: 796111 - RNA, 21 nt, Human
ugugugugugugugugugugu

SEQ ID NO: 796112 - RNA, 21 nt, Human
ugugugugugugugugugugu

SEQ ID NO: 796113 - RNA, 21 nt, Human
ugugugugugugugugugugu

SEQ ID NO: 796114 - RNA, 21 nt, Human
ugugugugugugugugugugu

SEQ ID NO: 796115 - RNA, 21 nt, Human
ugugugugugugugugugugu

SEQ ID NO: 796116 - RNA, 21 nt, Human
ugugugugugugugugugugu

SEQ ID NO: 796117 - RNA, 21 nt, Human
ugugugugugugugugugugu

SEQ ID NO: 796118 - RNA, 21 nt, Human
ugugugugugugugugugugu

SEQ ID NO: 796119 - RNA, 21 nt, Human
ugugugugugugugugugugu

SEQ ID NO: 796120 - RNA, 21 nt, Human
ugugugugugugugugugugu

SEQ ID NO: 796121 - RNA, 21 nt, Human
ugugugugugugugugugugu

SEQ ID NO: 796122 - RNA, 21 nt, Human
ugugugugugugugugugugu

SEQ ID NO: 796123 - RNA, 21 nt, Human
ugugugugugugugugugugu

SEQ ID NO: 796124 - RNA, 22 nt, Human
ugugugugugugugugugugua

SEQ ID NO: 796125 - RNA, 22 nt, Human
ugugugugugugugugugugug

SEQ ID NO: 796126 - RNA, 22 nt, Human
ugugugugugugugugugugug

SEQ ID NO: 796127 - RNA, 22 nt, Human
ugugugugugugugugugugug

SEQ ID NO: 796128 - RNA, 22 nt, Human
ugugugugugugugugugugug

SEQ ID NO: 796129 - RNA, 22 nt, Human
ugugugugugugugugugugug

SEQ ID NO: 796130 - RNA, 22 nt, Human
ugugugugugugugugugugug

SEQ ID NO: 796131 - RNA, 22 nt, Human
uguguguguguguguguguguu

SEQ ID NO: 796132 - RNA, 19 nt, Human
uguucugcuggcccagggg

SEQ ID NO: 796133 - RNA, 22 nt, Human
uuucccaacagccgaaucccaa

SEQ ID NO: 796134 - RNA, 24 nt, Human
uuugugugugugugugugugugug

SEQ ID NO: 796135 - RNA, 18 nt, Human
aaaaaacauuaaaaucau

SEQ ID NO: 796136 - RNA, 25 nt, Human
aaaaagacaaaagccagcuuacaaa

SEQ ID NO: 796137 - RNA, 21 nt, Human
aaaagcaaaaauauuuuaaaa

SEQ ID NO: 796138 - RNA, 23 nt, Human
aacacaaaggcagacugccauuc

SEQ ID NO: 796139 - RNA, 21 nt, Human
aacagccacuugccaaacucc

SEQ ID NO: 796140 - RNA, 24 nt, Human
aaccaccacagcaaaccagcugcc

SEQ ID NO: 796141 - RNA, 20 nt, Human
aagagccaacagauuuacaa

SEQ ID NO: 796142 - RNA, 21 nt, Human
aagcaaagcaaacauuuuugg

SEQ ID NO: 796143 - RNA, 19 nt, Human
aauucaguguuuuccugcu

SEQ ID NO: 796144 - RNA, 20 nt, Human
acaauuuuguauaaaacugu

SEQ ID NO: 796145 - RNA, 21 nt, Human
acacaaccacaaauucaagaa

SEQ ID NO: 796146 - RNA, 23 nt, Human
acagaaaucaaauauuaagaaug

SEQ ID NO: 796147 - RNA, 20 nt, Human
acaucucaugaaaaugaaau

SEQ ID NO: 796148 - RNA, 22 nt, Human
accacagcaaaccagcugccug

SEQ ID NO: 796149 - RNA, 23 nt, Human
accacagcaaaccagcugccugu

SEQ ID NO: 796150 - RNA, 21 nt, Human
acuauacuacugacagguugg

SEQ ID NO: 796151 - RNA, 19 nt, Human
acuuggaaaaaaaugaugg

SEQ ID NO: 796152 - RNA, 18 nt, Human
agaaaaaugcacacagaa

SEQ ID NO: 796153 - RNA, 22 nt, Human
agacaaaagccagcuuacaaag

SEQ ID NO: 796154 - RNA, 19 nt, Human
agauuacaguaaaaacugc

SEQ ID NO: 796155 - RNA, 19 nt, Human
agauuugaccaauaaaacc

SEQ ID NO: 796156 - RNA, 22 nt, Human
agcaaagcaaacauuuuuggaa

SEQ ID NO: 796157 - RNA, 23 nt, Human
agcaggcugaguagcaccaucau

SEQ ID NO: 796158 - RNA, 19 nt, Human
auauauauauauauauaua

SEQ ID NO: 796159 - RNA, 19 nt, Human
auauauauauauauauaua

SEQ ID NO: 796160 - RNA, 19 nt, Human
auauauauauauauauaua

SEQ ID NO: 796161 - RNA, 19 nt, Human
auauauauauauauauaua

SEQ ID NO: 796162 - RNA, 19 nt, Human
auauauauauauauauaua

SEQ ID NO: 796163 - RNA, 19 nt, Human
auauauauauauauauaua

SEQ ID NO: 796164 - RNA, 19 nt, Human
auauauauauauauauaua

SEQ ID NO: 796165 - RNA, 19 nt, Human
auauauauauauauauaua

SEQ ID NO: 796166 - RNA, 19 nt, Human
auauauauauauauauaua

SEQ ID NO: 796167 - RNA, 19 nt, Human
auauauauauauauauaua

SEQ ID NO: 796168 - RNA, 19 nt, Human
auauauauauauauauaua

SEQ ID NO: 796169 - RNA, 22 nt, Human
augaaaugaaacuaguuuuuaa

SEQ ID NO: 796170 - RNA, 20 nt, Human
augaugguacacaaugcuuu

SEQ ID NO: 796171 - RNA, 24 nt, Human
augugguuuguaagcaaagcaaac

SEQ ID NO: 796172 - RNA, 18 nt, Human
caaaaagccauaauucca

SEQ ID NO: 796173 - RNA, 22 nt, Human
cagcuuacaaagauuugaccaa

SEQ ID NO: 796174 - RNA, 18 nt, Human
cagugauuacaggaucaa

SEQ ID NO: 796175 - RNA, 18 nt, Human
caguucucugaagagccu

SEQ ID NO: 796176 - RNA, 20 nt, Human
cauauauauauauauauaua

SEQ ID NO: 796177 - RNA, 25 nt, Human
ccagaaaacauguuuuguggacuaa

SEQ ID NO: 796178 - RNA, 26 nt, Human
ccccaaccccccaaacuauacuuccu

SEQ ID NO: 796179 - RNA, 19 nt, Human
ccccccaaacuauacuucc

SEQ ID NO: 796180 - RNA, 21 nt, Human
cucauauauauauauauauau

SEQ ID NO: 796181 - RNA, 20 nt, Human
cucaugaaaaugaaaugaaa

SEQ ID NO: 796182 - RNA, 28 nt, Human
cuuagugucaaacugcaaaagguuuucc

SEQ ID NO: 796183 - RNA, 22 nt, Human
cuuucuuccccaccuucuuuuu

SEQ ID NO: 796184 - RNA, 22 nt, Human
gaaaaauucauucaaguaaagu

SEQ ID NO: 796185 - RNA, 20 nt, Human
gacuuggaaaaaaaugaugg

SEQ ID NO: 796186 - RNA, 18 nt, Human
gagaguuacaaguaaguc

SEQ ID NO: 796187 - RNA, 22 nt, Human
gaugaucaaaaucaccaaugca

SEQ ID NO: 796188 - RNA, 24 nt, Human
gcaaaccagcugccuguuuuuguu

SEQ ID NO: 796189 - RNA, 24 nt, Human
gccaaaauguaauuguacaaucug

SEQ ID NO: 796190 - RNA, 22 nt, Human
gcggaacacuuucuuccccacc

SEQ ID NO: 796191 - RNA, 18 nt, Human
gcgggggggggggaucac

SEQ ID NO: 796192 - RNA, 19 nt, Human
gcuucagugaacuagcuuu

SEQ ID NO: 796193 - RNA, 21 nt, Human
ggaacacuuucuuccccaccu

SEQ ID NO: 796194 - RNA, 21 nt, Human
guaaacucuccccaacccccc

SEQ ID NO: 796195 - RNA, 22 nt, Human
guacuuguuugauuuguguucc

SEQ ID NO: 796196 - RNA, 25 nt, Human
gugugcacauauacauguuugugua

SEQ ID NO: 796197 - RNA, 22 nt, Human
uaaaaagacaaaagccagcuua

SEQ ID NO: 796198 - RNA, 18 nt, Human
uaaaaccaccacagcaaa

SEQ ID NO: 796199 - RNA, 21 nt, Human
uaaaaccaccacagcaaacca

SEQ ID NO: 796200 - RNA, 25 nt, Human
uaaaaguuaagauuacaguaaaaac

SEQ ID NO: 796201 - RNA, 22 nt, Human
uaaaauagcauaggcuucagug

SEQ ID NO: 796202 - RNA, 18 nt, Human
uaaagacaccauuuucuu

SEQ ID NO: 796203 - RNA, 23 nt, Human
uaaaggcauuaaauuuuuagcua

SEQ ID NO: 796204 - RNA, 23 nt, Human
uaacaaaugacaguaggugacac

SEQ ID NO: 796205 - RNA, 21 nt, Human
uaagaaaucaaguauugaaaa

SEQ ID NO: 796206 - RNA, 22 nt, Human
uaagaauggaugaucaaaauca

SEQ ID NO: 796207 - RNA, 21 nt, Human
uaagccccaugguggauuuaa

SEQ ID NO: 796208 - RNA, 20 nt, Human
uagaaaaaugcacacagaag

SEQ ID NO: 796209 - RNA, 18 nt, Human
uagaaugcuuuggucuuu

SEQ ID NO: 796210 - RNA, 19 nt, Human
uaguaagcaaaaauguauu

SEQ ID NO: 796211 - RNA, 19 nt, Human
uauacauauacaugugugu

SEQ ID NO: 796212 - RNA, 27 nt, Human
uauacauguuuguguauauauguacau

SEQ ID NO: 796213 - RNA, 19 nt, Human
uauauauauauauauauau

SEQ ID NO: 796214 - RNA, 19 nt, Human
uauauauauauauauauau

SEQ ID NO: 796215 - RNA, 19 nt, Human
uauauauauauauauauau

SEQ ID NO: 796216 - RNA, 19 nt, Human
uauauauauauauauauau

SEQ ID NO: 796217 - RNA, 19 nt, Human
uauauauauauauauauau

SEQ ID NO: 796218 - RNA, 19 nt, Human
uauauauauauauauauau

SEQ ID NO: 796219 - RNA, 19 nt, Human
uauauauauauauauauau

SEQ ID NO: 796220 - RNA, 24 nt, Human
uauauauauauauauauauaugua

SEQ ID NO: 796221 - RNA, 19 nt, Human
uauauauguacauauauac

SEQ ID NO: 796222 - RNA, 20 nt, Human
uauauuuauuaaccuacaac

SEQ ID NO: 796223 - RNA, 21 nt, Human
uauguaaacucuccccaaccc

SEQ ID NO: 796224 - RNA, 24 nt, Human
uauuaaagacaccauuuucuuagc

SEQ ID NO: 796225 - RNA, 20 nt, Human
uauucauguuuccuguagcu

SEQ ID NO: 796226 - RNA, 24 nt, Human
uauuuauacauauacaugugugug

SEQ ID NO: 796227 - RNA, 21 nt, Human
ucaaucaagaugaaaaauuca

SEQ ID NO: 796228 - RNA, 26 nt, Human
ucacauuuacauaucaucucguccaa

SEQ ID NO: 796229 - RNA, 21 nt, Human
ucacugugcgucaaucaagau

SEQ ID NO: 796230 - RNA, 23 nt, Human
ucagugaacuagcuuuguugagu

SEQ ID NO: 796231 - RNA, 19 nt, Human
ucagugcauucuauuuuca

SEQ ID NO: 796232 - RNA, 25 nt, Human
uccccaaccccccaaacuauacuuc

SEQ ID NO: 796233 - RNA, 19 nt, Human
uccccaccuucuuuuugca

SEQ ID NO: 796234 - RNA, 19 nt, Human
ucccugaauuuuuagaaca

SEQ ID NO: 796235 - RNA, 22 nt, Human
uccuagaugccaucugugacca

SEQ ID NO: 796236 - RNA, 23 nt, Human
uccucagaucuuauaaaccaaac

SEQ ID NO: 796237 - RNA, 21 nt, Human
ucucugaagagccuaugaucc

SEQ ID NO: 796238 - RNA, 21 nt, Human
ugaaaaauucauucaaguaaa

SEQ ID NO: 796239 - RNA, 23 nt, Human
ugaaaagguaccccuauuauuca

SEQ ID NO: 796240 - RNA, 24 nt, Human
ugaacuguacaucacugugcguca

SEQ ID NO: 796241 - RNA, 25 nt, Human
ugaauucugcuucaaacucauauau

SEQ ID NO: 796242 - RNA, 19 nt, Human
ugacacagaaaucaaauau

SEQ ID NO: 796243 - RNA, 24 nt, Human
ugacaguaggugacacagaaauca

SEQ ID NO: 796244 - RNA, 24 nt, Human
ugaggcagguuuuauauuuacaaa

SEQ ID NO: 796245 - RNA, 23 nt, Human
uggaaaaaaaugaugguacacaa

SEQ ID NO: 796246 - RNA, 23 nt, Human
uggacagguuuugcaaaugagac

SEQ ID NO: 796247 - RNA, 19 nt, Human
uggcauagggagagcauga

SEQ ID NO: 796248 - RNA, 20 nt, Human
uggcauagggagagcaugag

SEQ ID NO: 796249 - RNA, 25 nt, Human
uguaaacucuccccaaccccccaaa

SEQ ID NO: 796250 - RNA, 21 nt, Human
uguacaaguaaaauagaaggg

SEQ ID NO: 796251 - RNA, 21 nt, Human
uguagaguuguaagcgggggg

SEQ ID NO: 796252 - RNA, 18 nt, Human
ugugaccuuuccccacug

SEQ ID NO: 796253 - RNA, 28 nt, Human
ugugcacauauacauguuuguguauaua

SEQ ID NO: 796254 - RNA, 22 nt, Human
uguggucuuuucaagugaggua

SEQ ID NO: 796255 - RNA, 18 nt, Human
uguguauauauguacaua

SEQ ID NO: 796256 - RNA, 22 nt, Human
uguguauauauguacauauaua

SEQ ID NO: 796257 - RNA, 23 nt, Human
uguguauauauguacauauauac

SEQ ID NO: 796258 - RNA, 19 nt, Human
uguuuguguauauauguac

SEQ ID NO: 796259 - RNA, 22 nt, Human
uuaaaaauggacacaauugcuc

SEQ ID NO: 796260 - RNA, 22 nt, Human
uuagcauuguucaaguugucaa

SEQ ID NO: 796261 - RNA, 25 nt, Human
uuauguaaacucuccccaacccccc

SEQ ID NO: 796262 - RNA, 20 nt, Human
uucaaaaagccauaauucca

SEQ ID NO: 796263 - RNA, 25 nt, Human
uucaaacucauauauauauauauau

SEQ ID NO: 796264 - RNA, 24 nt, Human
uucaagaaauuuuuuaaaaagaca

SEQ ID NO: 796265 - RNA, 23 nt, Human
uucaaguauggcuauauagucaa

SEQ ID NO: 796266 - RNA, 23 nt, Human
uucauguaauuuuuuuuuccugc

SEQ ID NO: 796267 - RNA, 18 nt, Human
uuccuagaugccaucugu

SEQ ID NO: 796268 - RNA, 22 nt, Human
uugucaugaauacugugaccuu

SEQ ID NO: 796269 - RNA, 23 nt, Human
uuuccugcuauucauguuuccug

SEQ ID NO: 796270 - RNA, 21 nt, Human
uuuguguauauauguacauaa

SEQ ID NO: 796271 - RNA, 19 nt, Human
uuuuugagcaaugaacuug

SEQ ID NO: 796272 - RNA, 19 nt, Human
aaaagaaauucccuucuuu

SEQ ID NO: 796273 - RNA, 20 nt, Human
aaaaguuggcccuaagucug

SEQ ID NO: 796274 - RNA, 22 nt, Human
aaaugccccagggucucuucaa

SEQ ID NO: 796275 - RNA, 23 nt, Human
aacaggcagccagaucaaggaug

SEQ ID NO: 796276 - RNA, 22 nt, Human
aacaguaacccaccccacugau

SEQ ID NO: 796277 - RNA, 18 nt, Human
aacccaccccacugauaa

SEQ ID NO: 796278 - RNA, 23 nt, Human
acaacgagcccaccggcucuaau

SEQ ID NO: 796279 - RNA, 20 nt, Human
aggaugcucucacccugaua

SEQ ID NO: 796280 - RNA, 21 nt, Human
agucaggaaaagugcaauuuc

SEQ ID NO: 796281 - RNA, 19 nt, Human
auaauuguaaaaaaaaaaa

SEQ ID NO: 796282 - RNA, 23 nt, Human
auuuacucagcuuauacugaaag

SEQ ID NO: 796283 - RNA, 23 nt, Human
caacauauucuagcugaaacgga

SEQ ID NO: 796284 - RNA, 18 nt, Human
caagcuccugaauccaac

SEQ ID NO: 796285 - RNA, 24 nt, Human
cagugugauucaacaauuccaguu

SEQ ID NO: 796286 - RNA, 21 nt, Human
ccacaacgagcccaccggcuc

SEQ ID NO: 796287 - RNA, 24 nt, Human
ccaccgggcucggaggagugcaga

SEQ ID NO: 796288 - RNA, 20 nt, Human
ccagagcggggaagagccga

SEQ ID NO: 796289 - RNA, 24 nt, Human
ccagggucucuucaacaguaaccc

SEQ ID NO: 796290 - RNA, 21 nt, Human
ccccagaaaaagaaauucccu

SEQ ID NO: 796291 - RNA, 24 nt, Human
ccggcgaccagagcggggaagagc

SEQ ID NO: 796292 - RNA, 20 nt, Human
ccugagguaaaugccccagg

SEQ ID NO: 796293 - RNA, 19 nt, Human
ccugcauucuccaccgggc

SEQ ID NO: 796294 - RNA, 24 nt, Human
cgcccacaacgagcccaccggcuc

SEQ ID NO: 796295 - RNA, 21 nt, Human
cgccgagaaauggcgcccaca

SEQ ID NO: 796296 - RNA, 21 nt, Human
cuacagcagccugcauucucc

SEQ ID NO: 796297 - RNA, 18 nt, Human
cucuaaauuuacucagcu

SEQ ID NO: 796298 - RNA, 22 nt, Human
gagcccaccggcucuaaucccc

SEQ ID NO: 796299 - RNA, 19 nt, Human
gagccgagcaaggcugaga

SEQ ID NO: 796300 - RNA, 18 nt, Human
gcagccugcauucuccac

SEQ ID NO: 796301 - RNA, 19 nt, Human
gcccacaacgagcccaccg

SEQ ID NO: 796302 - RNA, 20 nt, Human
gccgagaaauggcgcccaca

SEQ ID NO: 796303 - RNA, 23 nt, Human
guggaguacugcugugcugugcc

SEQ ID NO: 796304 - RNA, 24 nt, Human
guggaguacugcugugcugugccu

SEQ ID NO: 796305 - RNA, 25 nt, Human
uagaaccgcuagguggagccaagag

SEQ ID NO: 796306 - RNA, 20 nt, Human
uaguguccacauuaauuucc

SEQ ID NO: 796307 - RNA, 19 nt, Human
uauagaaaguucaagacca

SEQ ID NO: 796308 - RNA, 25 nt, Human
uaugaacaaauagaaccgcuaggug

SEQ ID NO: 796309 - RNA, 23 nt, Human
uccaccgggcucggaggagugca

SEQ ID NO: 796310 - RNA, 21 nt, Human
uccuguggaaaggcaggguga

SEQ ID NO: 796311 - RNA, 27 nt, Human
ucucuaacaggcagccagaucaaggau

SEQ ID NO: 796312 - RNA, 21 nt, Human
ucucuucaacaguaacccacc

SEQ ID NO: 796313 - RNA, 26 nt, Human
ugaaacggaucccaggacggaaugcu

SEQ ID NO: 796314 - RNA, 20 nt, Human
ugaaggaaaccccagaaaaa

SEQ ID NO: 796315 - RNA, 18 nt, Human
ugagaaaggggcggcucc

SEQ ID NO: 796316 - RNA, 25 nt, Human
ugcagaugccugagguaaaugcccc

SEQ ID NO: 796317 - RNA, 20 nt, Human
ugccccagggucucuucaac

SEQ ID NO: 796318 - RNA, 18 nt, Human
uguaaaaaaaaaaaaagu

SEQ ID NO: 796319 - RNA, 24 nt, Human
uguaaaaaaaaaaaaaguuggccc

SEQ ID NO: 796320 - RNA, 18 nt, Human
uguaaacuugaaauauua

SEQ ID NO: 796321 - RNA, 22 nt, Human
ugugagugcuuccuguggaaag

SEQ ID NO: 796322 - RNA, 20 nt, Human
uguguggugccugugagugc

SEQ ID NO: 796323 - RNA, 21 nt, Human
uucaagaccaaacacucucuu

SEQ ID NO: 796324 - RNA, 23 nt, Human
uucuagguaagucaggaaaagug

SEQ ID NO: 796325 - RNA, 21 nt, Human
aaaaagagacgaaugcaguca

SEQ ID NO: 796326 - RNA, 26 nt, Human
aaaaagccaaaguuccauuucagaca

SEQ ID NO: 796327 - RNA, 23 nt, Human
aacuugcucccucccuugggccg

SEQ ID NO: 796328 - RNA, 19 nt, Human
aaggugaagggcccuugga

SEQ ID NO: 796329 - RNA, 22 nt, Human
agaagaaggaggaagaaugcgg

SEQ ID NO: 796330 - RNA, 26 nt, Human
agaagaaggaggaagaaugcggggag

SEQ ID NO: 796331 - RNA, 23 nt, Human
agaucuaaacuuugaucuguauu

SEQ ID NO: 796332 - RNA, 26 nt, Human
aucguacacguaccagucucaauccc

SEQ ID NO: 796333 - RNA, 19 nt, Human
augcagucauuuuguuagc

SEQ ID NO: 796334 - RNA, 20 nt, Human
cauauauuucaacugaaccc

SEQ ID NO: 796335 - RNA, 19 nt, Human
ccacugaaaaagccaaagu

SEQ ID NO: 796336 - RNA, 24 nt, Human
ccgagaguugcuccuuccucuucc

SEQ ID NO: 796337 - RNA, 27 nt, Human
ccucccuugggcaggcugcccgagagu

SEQ ID NO: 796338 - RNA, 20 nt, Human
ccucuucucagaaaacaaaa

SEQ ID NO: 796339 - RNA, 22 nt, Human
cuaguagcuuuuuaaaauuccc

SEQ ID NO: 796340 - RNA, 19 nt, Human
cucuuccaaacacccacuc

SEQ ID NO: 796341 - RNA, 22 nt, Human
cuguagcaccagaagaaggagg

SEQ ID NO: 796342 - RNA, 21 nt, Human
cuuuuugccccacuuugggag

SEQ ID NO: 796343 - RNA, 21 nt, Human
gagggauuuuuuuuuucuaga

SEQ ID NO: 796344 - RNA, 19 nt, Human
ggcaaaucugcgaggcgag

SEQ ID NO: 796345 - RNA, 19 nt, Human
gguuuguguuuuguuuuug

SEQ ID NO: 796346 - RNA, 27 nt, Human
guugauuuccuuuuggucuugcuucca

SEQ ID NO: 796347 - RNA, 21 nt, Human
uaaaauucccaaacagucuua

SEQ ID NO: 796348 - RNA, 21 nt, Human
uacuuggcaaaucugcgaggc

SEQ ID NO: 796349 - RNA, 25 nt, Human
uagaacaaaaugaaaccuucaacau

SEQ ID NO: 796350 - RNA, 22 nt, Human
uauuucaacugaacccaagugu

SEQ ID NO: 796351 - RNA, 21 nt, Human
ucccacagaaacgcuugguuc

SEQ ID NO: 796352 - RNA, 19 nt, Human
ucccuugggcaggcugccc

SEQ ID NO: 796353 - RNA, 19 nt, Human
ucccuugggcaggcugccc

SEQ ID NO: 796354 - RNA, 18 nt, Human
ucuaaacuuugaucugua

SEQ ID NO: 796355 - RNA, 23 nt, Human
ugaagugcugcuggcuuuuggcc

SEQ ID NO: 796356 - RNA, 18 nt, Human
ugcucccucccuugggca

SEQ ID NO: 796357 - RNA, 20 nt, Human
uggaguaaaagagaaaaauu

SEQ ID NO: 796358 - RNA, 20 nt, Human
ugggagggauuuuuuuuuuc

SEQ ID NO: 796359 - RNA, 21 nt, Human
uuccaaacacccacucaguug

SEQ ID NO: 796360 - RNA, 18 nt, Human
uugcucccucccuugggc

SEQ ID NO: 796361 - RNA, 27 nt, Human
uugcucccucccuugggcaggcugccc

SEQ ID NO: 796362 - RNA, 21 nt, Human
uuggagcuguagcaccagaag

SEQ ID NO: 796363 - RNA, 18 nt, Human
uuggcaaaucugcgaggc

SEQ ID NO: 796364 - RNA, 23 nt, Human
uuggccaaaauacauauauuuca

SEQ ID NO: 796365 - RNA, 20 nt, Human
uuuuguuuuugugaagugcu

SEQ ID NO: 796366 - RNA, 25 nt, Human
aaaaaaaaaaaucaaaaugcacuca

SEQ ID NO: 796367 - RNA, 18 nt, Human
aaagaaccagcucagauc

SEQ ID NO: 796368 - RNA, 18 nt, Human
aaauuuccuucuuggauu

SEQ ID NO: 796369 - RNA, 18 nt, Human
aagaaccagcucagaucc

SEQ ID NO: 796370 - RNA, 18 nt, Human
aaucacuacaccuucaag

SEQ ID NO: 796371 - RNA, 19 nt, Human
aauuuuuuuaauacaagcu

SEQ ID NO: 796372 - RNA, 23 nt, Human
acacacacacacacacacacaca

SEQ ID NO: 796373 - RNA, 23 nt, Human
acacacacacacacacacacaca

SEQ ID NO: 796374 - RNA, 23 nt, Human
acacacacacacacacacacaca

SEQ ID NO: 796375 - RNA, 23 nt, Human
acacacacacacacacacacaca

SEQ ID NO: 796376 - RNA, 23 nt, Human
acacacacacacacacacacaca

SEQ ID NO: 796377 - RNA, 23 nt, Human
acacacacacacacacacacaca

SEQ ID NO: 796378 - RNA, 23 nt, Human
acacacacacacacacacacaca

SEQ ID NO: 796379 - RNA, 21 nt, Human
acacacacacacacacacggc

SEQ ID NO: 796380 - RNA, 21 nt, Human
acacacacacacgcgcacaca

SEQ ID NO: 796381 - RNA, 21 nt, Human
acacacacgugcacacacaca

SEQ ID NO: 796382 - RNA, 23 nt, Human
acacacaugcacacgcacacaca

SEQ ID NO: 796383 - RNA, 21 nt, Human
acacauacacacacacacaca

SEQ ID NO: 796384 - RNA, 21 nt, Human
acacauacacacacacacaca

SEQ ID NO: 796385 - RNA, 21 nt, Human
acacauacacauacacacaca

SEQ ID NO: 796386 - RNA, 21 nt, Human
acacauacacauacacacaca

SEQ ID NO: 796387 - RNA, 21 nt, Human
acacauacacauacacauaca

SEQ ID NO: 796388 - RNA, 21 nt, Human
acacauacacauacacauaua

SEQ ID NO: 796389 - RNA, 21 nt, Human
acacauauauacacacacaca

SEQ ID NO: 796390 - RNA, 20 nt, Human
acagacacauauacagccuc

SEQ ID NO: 796391 - RNA, 22 nt, Human
acagagccuccagcacugccca

SEQ ID NO: 796392 - RNA, 18 nt, Human
acgcacacagacacauau

SEQ ID NO: 796393 - RNA, 23 nt, Human
acgccugcaaguugagugcguga

SEQ ID NO: 796394 - RNA, 19 nt, Human
acuugucugaguguguaug

SEQ ID NO: 796395 - RNA, 20 nt, Human
agagccuccagcacugccca

SEQ ID NO: 796396 - RNA, 27 nt, Human
agcaaagaaccagcucagauccuccca

SEQ ID NO: 796397 - RNA, 19 nt, Human
agcacugcccacagcugcc

SEQ ID NO: 796398 - RNA, 19 nt, Human
agcacugcccacagcugcc

SEQ ID NO: 796399 - RNA, 19 nt, Human
agcacugcccacagcugcc

SEQ ID NO: 796400 - RNA, 19 nt, Human
agcacugcucacagcugcc

SEQ ID NO: 796401 - RNA, 19 nt, Human
agcacugcucacagcugcc

SEQ ID NO: 796402 - RNA, 18 nt, Human
aguagagugcaaaaccca

SEQ ID NO: 796403 - RNA, 20 nt, Human
auaaaaggcaguaauuaaca

SEQ ID NO: 796404 - RNA, 27 nt, Human
caaaacccacucaaccaggauuccagg

SEQ ID NO: 796405 - RNA, 25 nt, Human
caaaaugauauccuggggguuacaa

SEQ ID NO: 796406 - RNA, 18 nt, Human
caaccaggauuccaggua

SEQ ID NO: 796407 - RNA, 18 nt, Human
cacacacacacacacaca

SEQ ID NO: 796408 - RNA, 20 nt, Human
cacacacacacacacacaca

SEQ ID NO: 796409 - RNA, 20 nt, Human
cacacacacacacacacaca

SEQ ID NO: 796410 - RNA, 20 nt, Human
cacacacacacacacacaca

SEQ ID NO: 796411 - RNA, 20 nt, Human
cacacacacacacacacaca

SEQ ID NO: 796412 - RNA, 20 nt, Human
cacacacacacacacacaca

SEQ ID NO: 796413 - RNA, 20 nt, Human
cacacacacacacacacaca

SEQ ID NO: 796414 - RNA, 20 nt, Human
cacacacacacacacacaca

SEQ ID NO: 796415 - RNA, 20 nt, Human
cacacacacacacacacaca

SEQ ID NO: 796416 - RNA, 20 nt, Human
cacacacacacacacacaca

SEQ ID NO: 796417 - RNA, 20 nt, Human
cacacacacacacacacaca

SEQ ID NO: 796418 - RNA, 20 nt, Human
cacacacacacacacacaca

SEQ ID NO: 796419 - RNA, 20 nt, Human
cacacacacacacacacaca

SEQ ID NO: 796420 - RNA, 22 nt, Human
cacacacacacacacacacaca

SEQ ID NO: 796421 - RNA, 20 nt, Human
cacacagacacauauacagc

SEQ ID NO: 796422 - RNA, 21 nt, Human
cacacagccuccagcacugcc

SEQ ID NO: 796423 - RNA, 21 nt, Human
cacacagccuccagcacugcc

SEQ ID NO: 796424 - RNA, 21 nt, Human
cacacagccuccagcacugcc

SEQ ID NO: 796425 - RNA, 24 nt, Human
cacacagccuccagcacugcccac

SEQ ID NO: 796426 - RNA, 24 nt, Human
cacacagccuccagcacugcccac

SEQ ID NO: 796427 - RNA, 24 nt, Human
cacacagccuccagcacugcccac

SEQ ID NO: 796428 - RNA, 21 nt, Human
cacagcauagcucgccccuaa

SEQ ID NO: 796429 - RNA, 20 nt, Human
cacagccuccagcacugccc

SEQ ID NO: 796430 - RNA, 20 nt, Human
cacagccuccagcacugccc

SEQ ID NO: 796431 - RNA, 20 nt, Human
cacagccuccagcacugccc

SEQ ID NO: 796432 - RNA, 20 nt, Human
cacagccuccagcauugccc

SEQ ID NO: 796433 - RNA, 24 nt, Human
cacauacacauacauacacacaca

SEQ ID NO: 796434 - RNA, 23 nt, Human
cacgcacacacagagccuccagc

SEQ ID NO: 796435 - RNA, 26 nt, Human
cacucacucauacacacguucacaca

SEQ ID NO: 796436 - RNA, 19 nt, Human
cacugcugcccggccugcu

SEQ ID NO: 796437 - RNA, 25 nt, Human
cagaaggagggaguuggcuuuuuau

SEQ ID NO: 796438 - RNA, 25 nt, Human
cagaaggaggguguuggcuuuuuau

SEQ ID NO: 796439 - RNA, 20 nt, Human
cagcugccuggccugcuugc

SEQ ID NO: 796440 - RNA, 22 nt, Human
cagcugccuggccugcuugcuu

SEQ ID NO: 796441 - RNA, 22 nt, Human
cagcugccuggccugcuugcuu

SEQ ID NO: 796442 - RNA, 22 nt, Human
cagcugccuggccugcuugcuu

SEQ ID NO: 796443 - RNA, 22 nt, Human
cagcugccuggccugcuugcuu

SEQ ID NO: 796444 - RNA, 21 nt, Human
cagcugccugggcugcuugcu

SEQ ID NO: 796445 - RNA, 28 nt, Human
cauacacauacacgugcgugcucacaca

SEQ ID NO: 796446 - RNA, 24 nt, Human
cauauacacauacacagaugcgca

SEQ ID NO: 796447 - RNA, 21 nt, Human
cauauguguguugguguguau

SEQ ID NO: 796448 - RNA, 18 nt, Human
caugaagggcccagcugg

SEQ ID NO: 796449 - RNA, 19 nt, Human
caugugagugcauguguau

SEQ ID NO: 796450 - RNA, 25 nt, Human
caugugcaagugugaguguguaagu

SEQ ID NO: 796451 - RNA, 21 nt, Human
cauguguaugucuguguguau

SEQ ID NO: 796452 - RNA, 24 nt, Human
ccaagcgccuccaacauucaaagc

SEQ ID NO: 796453 - RNA, 24 nt, Human
ccaagcgccuccaacauucaaagc

SEQ ID NO: 796454 - RNA, 23 nt, Human
ccauguacaaaucuacagcaaag

SEQ ID NO: 796455 - RNA, 18 nt, Human
cccacagcugccuggccu

SEQ ID NO: 796456 - RNA, 18 nt, Human
cccacagcugccuggccu

SEQ ID NO: 796457 - RNA, 18 nt, Human
ccccuuggcuugggccag

SEQ ID NO: 796458 - RNA, 19 nt, Human
cccuaaagucugaagccaa

SEQ ID NO: 796459 - RNA, 22 nt, Human
ccuacagccuuaccuuccugcu

SEQ ID NO: 796460 - RNA, 24 nt, Human
ccucccaguuggggugcucggccc

SEQ ID NO: 796461 - RNA, 24 nt, Human
ccucccaguuggggugcucggccc

SEQ ID NO: 796462 - RNA, 21 nt, Human
ccugggugggagcuccccucg

SEQ ID NO: 796463 - RNA, 20 nt, Human
cgcacacacacacacacaca

SEQ ID NO: 796464 - RNA, 23 nt, Human
cuccagcacugcccacagcugcc

SEQ ID NO: 796465 - RNA, 23 nt, Human
cuccagcacugcccacagcugcc

SEQ ID NO: 796466 - RNA, 23 nt, Human
cuccagcacugcccacagcugcc

SEQ ID NO: 796467 - RNA, 23 nt, Human
cuccagcacugcccacugcugcc

SEQ ID NO: 796468 - RNA, 23 nt, Human
cuccagcacugcucacagcugcc

SEQ ID NO: 796469 - RNA, 23 nt, Human
cuccagcacugcucacagcugcc

SEQ ID NO: 796470 - RNA, 23 nt, Human
cuccagcacugcucacaguugcc

SEQ ID NO: 796471 - RNA, 23 nt, Human
cuccuuggaccgcucacaccgcu

SEQ ID NO: 796472 - RNA, 18 nt, Human
cugaaggauguagagagg

SEQ ID NO: 796473 - RNA, 19 nt, Human
cugaguguguaugucaggg

SEQ ID NO: 796474 - RNA, 20 nt, Human
cugcccggccugcuugcuug

SEQ ID NO: 796475 - RNA, 21 nt, Human
cugguacugcacuugccaaaa

SEQ ID NO: 796476 - RNA, 19 nt, Human
cuucuccaccugguacugc

SEQ ID NO: 796477 - RNA, 20 nt, Human
cuuugcuguaagaccccuuc

SEQ ID NO: 796478 - RNA, 19 nt, Human
gaagaaagcuggagauugc

SEQ ID NO: 796479 - RNA, 20 nt, Human
gaagggcccagcuggguguc

SEQ ID NO: 796480 - RNA, 22 nt, Human
gaccccuucuuccuacgugcac

SEQ ID NO: 796481 - RNA, 19 nt, Human
gagcaugucagggagugug

SEQ ID NO: 796482 - RNA, 19 nt, Human
gagcaugucagggagugug

SEQ ID NO: 796483 - RNA, 19 nt, Human
gagcucccaucggcugcuc

SEQ ID NO: 796484 - RNA, 22 nt, Human
gagggugugugggccugugugg

SEQ ID NO: 796485 - RNA, 18 nt, Human
gagugccugcgugggugu

SEQ ID NO: 796486 - RNA, 27 nt, Human
gagugugcauauguguguugguguguu

SEQ ID NO: 796487 - RNA, 21 nt, Human
gaguguguaaguauaugucag

SEQ ID NO: 796488 - RNA, 26 nt, Human
gcaaaaaaaaaaaaaaaaaaucaaaa

SEQ ID NO: 796489 - RNA, 19 nt, Human
gcaaaaauauuguagugac

SEQ ID NO: 796490 - RNA, 19 nt, Human
gcauauguguguuggugug

SEQ ID NO: 796491 - RNA, 19 nt, Human
gcaugugugugcacgccug

SEQ ID NO: 796492 - RNA, 18 nt, Human
gccacacauaaaagagau

SEQ ID NO: 796493 - RNA, 24 nt, Human
gccacacauaaaagagauucuaau

SEQ ID NO: 796494 - RNA, 24 nt, Human
gccacacauaaaagagauucuaau

SEQ ID NO: 796495 - RNA, 18 nt, Human
gcucacacacgugcgugc

SEQ ID NO: 796496 - RNA, 20 nt, Human
gcucugggcaagcugcaaag

SEQ ID NO: 796497 - RNA, 22 nt, Human
gcugcucccucccaguuggggu

SEQ ID NO: 796498 - RNA, 23 nt, Human
ggcugcucccucccaguuggggu

SEQ ID NO: 796499 - RNA, 28 nt, Human
ggguauggguguggucuggggcccgggc

SEQ ID NO: 796500 - RNA, 20 nt, Human
gucaagcuucuccaccuggu

SEQ ID NO: 796501 - RNA, 20 nt, Human
gucuguguguaugcaugugu

SEQ ID NO: 796502 - RNA, 19 nt, Human
gugaaugugagugcaugga

SEQ ID NO: 796503 - RNA, 18 nt, Human
guguguguguaugcuugu

SEQ ID NO: 796504 - RNA, 24 nt, Human
uaaauacacggguauguuuauaua

SEQ ID NO: 796505 - RNA, 19 nt, Human
uaagacacccccagaccuc

SEQ ID NO: 796506 - RNA, 26 nt, Human
uaagacacccccagaccuccccucga

SEQ ID NO: 796507 - RNA, 22 nt, Human
uaauacaagcuuugaaacaccc

SEQ ID NO: 796508 - RNA, 22 nt, Human
uacaagagucugacuccuaaau

SEQ ID NO: 796509 - RNA, 18 nt, Human
uacacacacacacacaca

SEQ ID NO: 796510 - RNA, 20 nt, Human
uacacacacacacacacaca

SEQ ID NO: 796511 - RNA, 20 nt, Human
uacacacacacacacacaca

SEQ ID NO: 796512 - RNA, 22 nt, Human
uacacacacgugcacacacaca

SEQ ID NO: 796513 - RNA, 19 nt, Human
uaggcccaugaagggccca

SEQ ID NO: 796514 - RNA, 20 nt, Human
uauaugucagugugugugua

SEQ ID NO: 796515 - RNA, 19 nt, Human
uaucagaagcuuaggccca

SEQ ID NO: 796516 - RNA, 18 nt, Human
uaugacagugugugagca

SEQ ID NO: 796517 - RNA, 19 nt, Human
uaugucaaugaguguguau

SEQ ID NO: 796518 - RNA, 18 nt, Human
uaugucagugagggugug

SEQ ID NO: 796519 - RNA, 18 nt, Human
uaugucagugagugugua

SEQ ID NO: 796520 - RNA, 19 nt, Human
uaugucuguguguaugcau

SEQ ID NO: 796521 - RNA, 23 nt, Human
uaugucuguguguaugcaugugu

SEQ ID NO: 796522 - RNA, 20 nt, Human
uaugugagugugugagugug

SEQ ID NO: 796523 - RNA, 18 nt, Human
uauguguguuggugugua

SEQ ID NO: 796524 - RNA, 18 nt, Human
ucaaggagaccccuuggc

SEQ ID NO: 796525 - RNA, 21 nt, Human
ucacaccgcuccuuccgggug

SEQ ID NO: 796526 - RNA, 25 nt, Human
ucacagaucagcccuacagccuuac

SEQ ID NO: 796527 - RNA, 21 nt, Human
ucagugaguguauguauguga

SEQ ID NO: 796528 - RNA, 18 nt, Human
ucagugaguguguaggca

SEQ ID NO: 796529 - RNA, 22 nt, Human
ucagugugagugugcauaugug

SEQ ID NO: 796530 - RNA, 20 nt, Human
ucaguguguaugcaugugug

SEQ ID NO: 796531 - RNA, 23 nt, Human
uccacuuccccaucaaaaagagc

SEQ ID NO: 796532 - RNA, 21 nt, Human
ucccaucggcugcucccuccc

SEQ ID NO: 796533 - RNA, 21 nt, Human
uccccaucaaaaagagccgug

SEQ ID NO: 796534 - RNA, 18 nt, Human
uccccucggcugcccccu

SEQ ID NO: 796535 - RNA, 23 nt, Human
uccuaaauuuccuucuuggauuu

SEQ ID NO: 796536 - RNA, 31 nt, Human
ucucuuaacugugcaaaaaaaaaaaaaaaaa

SEQ ID NO: 796537 - RNA, 26 nt, Human
ucugaagccaagguuuccuccugggg

SEQ ID NO: 796538 - RNA, 27 nt, Human
ucugaagccaagguuuccuccuggggc

SEQ ID NO: 796539 - RNA, 18 nt, Human
ucugcgaugucacaugau

SEQ ID NO: 796540 - RNA, 18 nt, Human
ucugguguugccagggug

SEQ ID NO: 796541 - RNA, 20 nt, Human
ucuguguuaaauacguuugu

SEQ ID NO: 796542 - RNA, 21 nt, Human
ucuuuuccaccaucuguccuc

SEQ ID NO: 796543 - RNA, 22 nt, Human
ucuuuuuuuuuucugcuuguuu

SEQ ID NO: 796544 - RNA, 28 nt, Human
ugaaaugcgucauguuaagacacccccc

SEQ ID NO: 796545 - RNA, 20 nt, Human
ugagaggcuuugcagguaug

SEQ ID NO: 796546 - RNA, 21 nt, Human
ugagugaggaacaugggugug

SEQ ID NO: 796547 - RNA, 22 nt, Human
ugagugcaugagugugugugua

SEQ ID NO: 796548 - RNA, 21 nt, Human
ugaguguguaugucagggagu

SEQ ID NO: 796549 - RNA, 19 nt, Human
ugcaugaguguguguguau

SEQ ID NO: 796550 - RNA, 20 nt, Human
ugcauggaugugaaugaaug

SEQ ID NO: 796551 - RNA, 21 nt, Human
ugcauggaugugaaugaaugu

SEQ ID NO: 796552 - RNA, 21 nt, Human
ugccugcgugggugugagugc

SEQ ID NO: 796553 - RNA, 19 nt, Human
ugccuggccugcuugcuug

SEQ ID NO: 796554 - RNA, 19 nt, Human
ugccuggccugcuugcuug

SEQ ID NO: 796555 - RNA, 19 nt, Human
ugccuggccugcuugcuug

SEQ ID NO: 796556 - RNA, 24 nt, Human
ugcgugcucacacacgugcgugcu

SEQ ID NO: 796557 - RNA, 19 nt, Human
uggaccgcucacaccgcuc

SEQ ID NO: 796558 - RNA, 20 nt, Human
uggcucugggcaagcugcaa

SEQ ID NO: 796559 - RNA, 24 nt, Human
uggcucugggcaagcugcaaagug

SEQ ID NO: 796560 - RNA, 19 nt, Human
uggcuugggccagugcagc

SEQ ID NO: 796561 - RNA, 23 nt, Human
uggcuugggccagugcagcccug

SEQ ID NO: 796562 - RNA, 24 nt, Human
uggcuugggccagugcagcccugu

SEQ ID NO: 796563 - RNA, 24 nt, Human
uggggugaaggugacaauccuggg

SEQ ID NO: 796564 - RNA, 21 nt, Human
uggggugcucggcccacaggg

SEQ ID NO: 796565 - RNA, 21 nt, Human
uggggugcucggcccacaggg

SEQ ID NO: 796566 - RNA, 24 nt, Human
uggggugcucggcccacagggagc

SEQ ID NO: 796567 - RNA, 24 nt, Human
uggggugcucggcccacagggagc

SEQ ID NO: 796568 - RNA, 25 nt, Human
ugggugcaugggcacuugucugagu

SEQ ID NO: 796569 - RNA, 24 nt, Human
ugggugugagugcaugagugugug

SEQ ID NO: 796570 - RNA, 19 nt, Human
uguaugacugcaugugugu

SEQ ID NO: 796571 - RNA, 24 nt, Human
uguaugacugcaugugugugugua

SEQ ID NO: 796572 - RNA, 19 nt, Human
uguaugucagugaguguau

SEQ ID NO: 796573 - RNA, 21 nt, Human
ugucucuuuccuccccaaccc

SEQ ID NO: 796574 - RNA, 21 nt, Human
ugugaaugugagugcaugagu

SEQ ID NO: 796575 - RNA, 19 nt, Human
ugugagcaugucagggagu

SEQ ID NO: 796576 - RNA, 19 nt, Human
ugugagcaugucagggagu

SEQ ID NO: 796577 - RNA, 20 nt, Human
ugugagugcaugagugugug

SEQ ID NO: 796578 - RNA, 21 nt, Human
ugugagugugcauaugugugu

SEQ ID NO: 796579 - RNA, 23 nt, Human
ugugagugugcaugcaugugugc

SEQ ID NO: 796580 - RNA, 19 nt, Human
ugugaguguguaaguauau

SEQ ID NO: 796581 - RNA, 21 nt, Human
ugugaguguguaaguauaugu

SEQ ID NO: 796582 - RNA, 20 nt, Human
ugugcaaaaaaaaaaaaaaa

SEQ ID NO: 796583 - RNA, 24 nt, Human
ugugcaaaaaaaaaaaaaaaaaau

SEQ ID NO: 796584 - RNA, 19 nt, Human
ugugcauauguguguuggu

SEQ ID NO: 796585 - RNA, 27 nt, Human
ugugcaugugagugcauguguaugcaa

SEQ ID NO: 796586 - RNA, 18 nt, Human
ugugggcauguaugugug

SEQ ID NO: 796587 - RNA, 20 nt, Human
uguguacgaaugugaguaca

SEQ ID NO: 796588 - RNA, 21 nt, Human
uguguaugacugcaugugugu

SEQ ID NO: 796589 - RNA, 19 nt, Human
uguguaugcaugugugaau

SEQ ID NO: 796590 - RNA, 22 nt, Human
uguguaugucuguguguaugca

SEQ ID NO: 796591 - RNA, 20 nt, Human
uguguaugugugugaaugug

SEQ ID NO: 796592 - RNA, 21 nt, Human
ugugugagugugacagugugu

SEQ ID NO: 796593 - RNA, 21 nt, Human
ugugugagugugacagugugu

SEQ ID NO: 796594 - RNA, 19 nt, Human
ugugugcaugugagugcau

SEQ ID NO: 796595 - RNA, 19 nt, Human
ugugugcaugugagugcau

SEQ ID NO: 796596 - RNA, 19 nt, Human
ugugugcaugugaguguau

SEQ ID NO: 796597 - RNA, 19 nt, Human
ugugugcaugugaguguau

SEQ ID NO: 796598 - RNA, 24 nt, Human
uguguguaugucagugagugugua

SEQ ID NO: 796599 - RNA, 20 nt, Human
uguguguguguaugucagug

SEQ ID NO: 796600 - RNA, 18 nt, Human
uguguugguguguaugca

SEQ ID NO: 796601 - RNA, 21 nt, Human
uguguugguguguaugcaagu

SEQ ID NO: 796602 - RNA, 24 nt, Human
uguguugguguguaugcaaguacg

SEQ ID NO: 796603 - RNA, 28 nt, Human
uguuggcuuuuuaucagucugcagcuuu

SEQ ID NO: 796604 - RNA, 28 nt, Human
uuaacugugcaaaaaaaaaaaaaaaaaa

SEQ ID NO: 796605 - RNA, 23 nt, Human
uuagaggaaagaguacauugcgg

SEQ ID NO: 796606 - RNA, 25 nt, Human
uuaggcccaugaagggcccagcugg

SEQ ID NO: 796607 - RNA, 23 nt, Human
uuccaaugcauuguuucccauuu

SEQ ID NO: 796608 - RNA, 18 nt, Human
uuccaccaucuguccucu

SEQ ID NO: 796609 - RNA, 21 nt, Human
uuucuggccuuccagguccug

SEQ ID NO: 796610 - RNA, 23 nt, Human
aaaaaaaaaaaaaaaaauccaaa

SEQ ID NO: 796611 - RNA, 26 nt, Human
aaaaaaauccaaaaaacaaacaacua

SEQ ID NO: 796612 - RNA, 20 nt, Human
aaaaaauccaaaaaacaaac

SEQ ID NO: 796613 - RNA, 22 nt, Human
aaaaauccaaaaaacaaacaac

SEQ ID NO: 796614 - RNA, 21 nt, Human
aaaagccccugcacuguuuuc

SEQ ID NO: 796615 - RNA, 23 nt, Human
aaaaucacugaaauacgguuucc

SEQ ID NO: 796616 - RNA, 22 nt, Human
aaaauggcccccaaagagccca

SEQ ID NO: 796617 - RNA, 23 nt, Human
aaacaacuaaaaaccaaagaauu

SEQ ID NO: 796618 - RNA, 18 nt, Human
aaacauguccacucccuc

SEQ ID NO: 796619 - RNA, 22 nt, Human
aaccagaacaaauuccauggga

SEQ ID NO: 796620 - RNA, 19 nt, Human
aagaagccaaaagccccug

SEQ ID NO: 796621 - RNA, 18 nt, Human
aagagaguugcuggguuu

SEQ ID NO: 796622 - RNA, 18 nt, Human
aaggaaagcgacugccaa

SEQ ID NO: 796623 - RNA, 21 nt, Human
aaggaccugcaggcguuuccu

SEQ ID NO: 796624 - RNA, 21 nt, Human
aaguugaacuuguuauucgug

SEQ ID NO: 796625 - RNA, 25 nt, Human
aaugaagaaaauccagauuguuucu

SEQ ID NO: 796626 - RNA, 21 nt, Human
acaaagcucccggaaccugga

SEQ ID NO: 796627 - RNA, 18 nt, Human
acaccauacagacagggc

SEQ ID NO: 796628 - RNA, 20 nt, Human
acagccaaggugaacugaag

SEQ ID NO: 796629 - RNA, 21 nt, Human
acgaagacaugugccccccaa

SEQ ID NO: 796630 - RNA, 19 nt, Human
acuaguuagaucagcaacu

SEQ ID NO: 796631 - RNA, 22 nt, Human
agaaaccagaacaaauuccaug

SEQ ID NO: 796632 - RNA, 24 nt, Human
agaagccaaaagccccugcacugu

SEQ ID NO: 796633 - RNA, 20 nt, Human
agacaugugccccccaaggc

SEQ ID NO: 796634 - RNA, 21 nt, Human
agaggggcccagaccugggcc

SEQ ID NO: 796635 - RNA, 23 nt, Human
agaguucccacguguguccacuu

SEQ ID NO: 796636 - RNA, 27 nt, Human
agccaacaccgaaaggggaggggcacg

SEQ ID NO: 796637 - RNA, 24 nt, Human
agcuugcucuccccacacucaggc

SEQ ID NO: 796638 - RNA, 23 nt, Human
aggaaacauguccacucccucca

SEQ ID NO: 796639 - RNA, 18 nt, Human
aggaaguagauguugggg

SEQ ID NO: 796640 - RNA, 19 nt, Human
aggcaggggguggccaggu

SEQ ID NO: 796641 - RNA, 20 nt, Human
aggcauagagaagggcccaa

SEQ ID NO: 796642 - RNA, 18 nt, Human
agggaaaacuugcaugug

SEQ ID NO: 796643 - RNA, 19 nt, Human
aggggcccagaccugggcc

SEQ ID NO: 796644 - RNA, 20 nt, Human
aggggcccagaccugggccc

SEQ ID NO: 796645 - RNA, 18 nt, Human
aggggguggccagguaua

SEQ ID NO: 796646 - RNA, 20 nt, Human
agguauaggacagcaggacc

SEQ ID NO: 796647 - RNA, 21 nt, Human
aguaauagccccuuggcccuc

SEQ ID NO: 796648 - RNA, 24 nt, Human
auaggacagcaggaccuucuagag

SEQ ID NO: 796649 - RNA, 25 nt, Human
aucaaugaagacuaccaccuacugu

SEQ ID NO: 796650 - RNA, 19 nt, Human
auccaaaaaacaaacaacu

SEQ ID NO: 796651 - RNA, 21 nt, Human
auccaaaaaacaaacaacuaa

SEQ ID NO: 796652 - RNA, 24 nt, Human
aucuauucaccacuaaguagaucc

SEQ ID NO: 796653 - RNA, 19 nt, Human
auuaugucauacagccacu

SEQ ID NO: 796654 - RNA, 21 nt, Human
auugcugcugaugugguuccc

SEQ ID NO: 796655 - RNA, 22 nt, Human
caaaaucagauguaaaaaacaa

SEQ ID NO: 796656 - RNA, 24 nt, Human
caaggaaacauguccacucccucc

SEQ ID NO: 796657 - RNA, 23 nt, Human
caccauacagacagggcaaggac

SEQ ID NO: 796658 - RNA, 22 nt, Human
caccugaagcuaugauuagccc

SEQ ID NO: 796659 - RNA, 21 nt, Human
cacucccuccaaccagcaacc

SEQ ID NO: 796660 - RNA, 20 nt, Human
cagcaguaauagccccuugg

SEQ ID NO: 796661 - RNA, 23 nt, Human
cagcaguaauagccccuuggccc

SEQ ID NO: 796662 - RNA, 24 nt, Human
cagccucuggugaccccgaaucuc

SEQ ID NO: 796663 - RNA, 20 nt, Human
cagcggugggaagggggagg

SEQ ID NO: 796664 - RNA, 19 nt, Human
caggagccgcagugacgag

SEQ ID NO: 796665 - RNA, 21 nt, Human
caggagccugacauucccagu

SEQ ID NO: 796666 - RNA, 23 nt, Human
cagggcaaggaccugcaggcggc

SEQ ID NO: 796667 - RNA, 19 nt, Human
cauggugagcucaaagagg

SEQ ID NO: 796668 - RNA, 26 nt, Human
cauucaguuuccuaaggaugcacucc

SEQ ID NO: 796669 - RNA, 23 nt, Human
ccacaaagcucccggaaccugga

SEQ ID NO: 796670 - RNA, 21 nt, Human
ccaggacucugguaugacaca

SEQ ID NO: 796671 - RNA, 22 nt, Human
ccaggcggggugcaagcucacg

SEQ ID NO: 796672 - RNA, 18 nt, Human
cccagaccugggcccgcc

SEQ ID NO: 796673 - RNA, 22 nt, Human
cccagaccugggcccgcccuga

SEQ ID NO: 796674 - RNA, 20 nt, Human
ccccacacucaggcugcccc

SEQ ID NO: 796675 - RNA, 22 nt, Human
cccccaaagagcccaaugauuu

SEQ ID NO: 796676 - RNA, 18 nt, Human
cccccuucaucucacuuc

SEQ ID NO: 796677 - RNA, 24 nt, Human
cccucuacugccauccaaggggca

SEQ ID NO: 796678 - RNA, 20 nt, Human
ccgcagugacgaggggcugu

SEQ ID NO: 796679 - RNA, 22 nt, Human
ccucccgccuccagcccccaac

SEQ ID NO: 796680 - RNA, 21 nt, Human
ccuuggcccucacccccacuu

SEQ ID NO: 796681 - RNA, 27 nt, Human
cggaaggacacggcucagauggagaca

SEQ ID NO: 796682 - RNA, 21 nt, Human
cuaaaugaacccaguggucau

SEQ ID NO: 796683 - RNA, 21 nt, Human
cuaacaagaagccaaaagccc

SEQ ID NO: 796684 - RNA, 18 nt, Human
cucuaacagggguagaug

SEQ ID NO: 796685 - RNA, 22 nt, Human
cugaagcuaugauuagccacug

SEQ ID NO: 796686 - RNA, 25 nt, Human
cuggagccaccuguauggauggaga

SEQ ID NO: 796687 - RNA, 20 nt, Human
gaaaucaaugaagacuacca

SEQ ID NO: 796688 - RNA, 21 nt, Human
gacagaaguuguaaguacaag

SEQ ID NO: 796689 - RNA, 20 nt, Human
gaggaccccuaaccucuggu

SEQ ID NO: 796690 - RNA, 21 nt, Human
gccaaaaaaaaaaaaaaaaaa

SEQ ID NO: 796691 - RNA, 24 nt, Human
gccaaaaaaaaaaaaaaaaaaauc

SEQ ID NO: 796692 - RNA, 18 nt, Human
gccacuccccacggacau

SEQ ID NO: 796693 - RNA, 19 nt, Human
gcccucacccccacuucau

SEQ ID NO: 796694 - RNA, 19 nt, Human
gccuaaagagugacacaac

SEQ ID NO: 796695 - RNA, 22 nt, Human
gccuccagcccccaacaaccag

SEQ ID NO: 796696 - RNA, 19 nt, Human
ggaaacauguccacucccu

SEQ ID NO: 796697 - RNA, 19 nt, Human
ggaacgaagacaugugccc

SEQ ID NO: 796698 - RNA, 20 nt, Human
ggaaggacacggcucagaug

SEQ ID NO: 796699 - RNA, 18 nt, Human
ggacauguguaccccauc

SEQ ID NO: 796700 - RNA, 22 nt, Human
ggcacgcuagcgcaaaugacac

SEQ ID NO: 796701 - RNA, 20 nt, Human
ggccaagcugaacggaagcc

SEQ ID NO: 796702 - RNA, 25 nt, Human
ggcuucuuucuugcgguuggguggg

SEQ ID NO: 796703 - RNA, 23 nt, Human
ggggcuggggagggcacaaccag

SEQ ID NO: 796704 - RNA, 21 nt, Human
gggggagguggugggagaggg

SEQ ID NO: 796705 - RNA, 21 nt, Human
ggugggaagggggagguggug

SEQ ID NO: 796706 - RNA, 19 nt, Human
guccacuucucuucacaga

SEQ ID NO: 796707 - RNA, 24 nt, Human
uaaaaaacaaggucaguaaaauca

SEQ ID NO: 796708 - RNA, 19 nt, Human
uaaaaaaugcuccugggua

SEQ ID NO: 796709 - RNA, 18 nt, Human
uaaaauggcccccaaaga

SEQ ID NO: 796710 - RNA, 24 nt, Human
uaaaauggcccccaaagagcccaa

SEQ ID NO: 796711 - RNA, 23 nt, Human
uaaaguagcaaaauauuaagcca

SEQ ID NO: 796712 - RNA, 20 nt, Human
uaaccucuggucccugcccu

SEQ ID NO: 796713 - RNA, 23 nt, Human
uaagacagagagucauucagucc

SEQ ID NO: 796714 - RNA, 19 nt, Human
uacacagccaggcggggug

SEQ ID NO: 796715 - RNA, 20 nt, Human
uacagagaaaucaaugaaga

SEQ ID NO: 796716 - RNA, 26 nt, Human
uacagagaaaucaaugaagacuacca

SEQ ID NO: 796717 - RNA, 24 nt, Human
uacagagaaaucaaugaagacuag

SEQ ID NO: 796718 - RNA, 22 nt, Human
uagaaaccagaacaaauuccau

SEQ ID NO: 796719 - RNA, 26 nt, Human
uagaaagcagggcaauucauggcuug

SEQ ID NO: 796720 - RNA, 22 nt, Human
uagacacagccaaggugaacug

SEQ ID NO: 796721 - RNA, 22 nt, Human
uagauguuggggucguugucag

SEQ ID NO: 796722 - RNA, 22 nt, Human
uagccccuuggcccucaccccc

SEQ ID NO: 796723 - RNA, 20 nt, Human
ucagauguaaaaaacaaggu

SEQ ID NO: 796724 - RNA, 22 nt, Human
uccaugggaccucccgccucca

SEQ ID NO: 796725 - RNA, 20 nt, Human
ucccaaguauugcucagucc

SEQ ID NO: 796726 - RNA, 28 nt, Human
ucuccuggcugcuccagucccuccuuuc

SEQ ID NO: 796727 - RNA, 19 nt, Human
ugaaauacgguuuccaaaa

SEQ ID NO: 796728 - RNA, 24 nt, Human
ugaacggaagccuucccuggcacc

SEQ ID NO: 796729 - RNA, 19 nt, Human
ugacgaggggcuguugcug

SEQ ID NO: 796730 - RNA, 20 nt, Human
ugacgaggggcuguugcugg

SEQ ID NO: 796731 - RNA, 22 nt, Human
ugacgaggggcuguugcuggcg

SEQ ID NO: 796732 - RNA, 23 nt, Human
ugacugggaaagaagcaaacauu

SEQ ID NO: 796733 - RNA, 24 nt, Human
ugaguggacccugggaagggacau

SEQ ID NO: 796734 - RNA, 22 nt, Human
ugcacgaacauggcacuuuuaa

SEQ ID NO: 796735 - RNA, 22 nt, Human
ugccaacagguuucauggaaca

SEQ ID NO: 796736 - RNA, 20 nt, Human
ugccacagucccgcuucugu

SEQ ID NO: 796737 - RNA, 21 nt, Human
ugcgugugugugcaugcugug

SEQ ID NO: 796738 - RNA, 22 nt, Human
ugcgugugugugcaugcugugu

SEQ ID NO: 796739 - RNA, 19 nt, Human
uggaaacggaggccaucuc

SEQ ID NO: 796740 - RNA, 23 nt, Human
uggaagauguaaaauaugggaag

SEQ ID NO: 796741 - RNA, 28 nt, Human
uggaagauguaaaauaugggaagagggg

SEQ ID NO: 796742 - RNA, 24 nt, Human
uggagaagugaggacaccauacag

SEQ ID NO: 796743 - RNA, 22 nt, Human
uggagagcaugcagcuggccug

SEQ ID NO: 796744 - RNA, 21 nt, Human
uggcacuuuuaaagagauuuu

SEQ ID NO: 796745 - RNA, 24 nt, Human
ugggaaagaagcaaacauuugugg

SEQ ID NO: 796746 - RNA, 19 nt, Human
ugggaagaggggcaagaga

SEQ ID NO: 796747 - RNA, 19 nt, Human
ugggaagggggagguggug

SEQ ID NO: 796748 - RNA, 18 nt, Human
ugggauacaaggccaaaa

SEQ ID NO: 796749 - RNA, 21 nt, Human
ugggggcagcggaaggacacg

SEQ ID NO: 796750 - RNA, 19 nt, Human
uggugaccccgaaucucug

SEQ ID NO: 796751 - RNA, 24 nt, Human
uguaaaugacacuuaggagcaaau

SEQ ID NO: 796752 - RNA, 21 nt, Human
ugucagaaaaacauuaaggcu

SEQ ID NO: 796753 - RNA, 22 nt, Human
ugucauacagccacuggaacug

SEQ ID NO: 796754 - RNA, 25 nt, Human
ugucugugcuaaucuuuuaguccuu

SEQ ID NO: 796755 - RNA, 20 nt, Human
ugugaggggcuggggagggc

SEQ ID NO: 796756 - RNA, 20 nt, Human
ugugugcaugcugugugcau

SEQ ID NO: 796757 - RNA, 20 nt, Human
ugugugcaugcugugugcau

SEQ ID NO: 796758 - RNA, 22 nt, Human
uuccaugggaccucccgccucc

SEQ ID NO: 796759 - RNA, 22 nt, Human
uucccaguuggugcuccuggag

SEQ ID NO: 796760 - RNA, 20 nt, Human
uuccccacuccccacaaaca

SEQ ID NO: 796761 - RNA, 24 nt, Human
uugcauguggucguaaaggacuuc

SEQ ID NO: 796762 - RNA, 22 nt, Human
uuggguggguguuuacgugugc

SEQ ID NO: 796763 - RNA, 22 nt, Human
uuugguaaaacuauucucauua

SEQ ID NO: 796764 - RNA, 23 nt, Human
uuuuuguuacauucaguuuccua

SEQ ID NO: 796765 - RNA, 22 nt, Human
aaaaaggcaacacgucagugag

SEQ ID NO: 796766 - RNA, 21 nt, Human
aaagaggggugggcagugcca

SEQ ID NO: 796767 - RNA, 21 nt, Human
aaaugcaguuuucccccugaa

SEQ ID NO: 796768 - RNA, 21 nt, Human
aaccacagaaaggacuagaua

SEQ ID NO: 796769 - RNA, 23 nt, Human
aacucccaggcucaagcaauccu

SEQ ID NO: 796770 - RNA, 21 nt, Human
aagcacagcacacaaaaugaa

SEQ ID NO: 796771 - RNA, 23 nt, Human
aagcacagcacacaaaaugaaac

SEQ ID NO: 796772 - RNA, 20 nt, Human
aagcagcacaagauccgggc

SEQ ID NO: 796773 - RNA, 24 nt, Human
aaguuucagaacauguauguacau

SEQ ID NO: 796774 - RNA, 19 nt, Human
aaucauagcucacugcagc

SEQ ID NO: 796775 - RNA, 21 nt, Human
acaaaaugcccugauuuuucu

SEQ ID NO: 796776 - RNA, 24 nt, Human
accaguccaugaucaaguccacgc

SEQ ID NO: 796777 - RNA, 23 nt, Human
acccagguuggagugcaguggug

SEQ ID NO: 796778 - RNA, 25 nt, Human
acucugucacccagguuggagugca

SEQ ID NO: 796779 - RNA, 19 nt, Human
agaagaaaaaaaaaaagag

SEQ ID NO: 796780 - RNA, 21 nt, Human
agaagaaaaaaaaaaagaggg

SEQ ID NO: 796781 - RNA, 21 nt, Human
agacuucagcaagccagcccc

SEQ ID NO: 796782 - RNA, 21 nt, Human
agcaagccagcccccggcccc

SEQ ID NO: 796783 - RNA, 24 nt, Human
agcacagcacacaaaaugaaacaa

SEQ ID NO: 796784 - RNA, 25 nt, Human
agccagcccccggcccccacacccg

SEQ ID NO: 796785 - RNA, 20 nt, Human
agcccccggcccccacaccc

SEQ ID NO: 796786 - RNA, 21 nt, Human
aggaaaaaaaaagccuucaca

SEQ ID NO: 796787 - RNA, 24 nt, Human
aggaaaaaaaaagccuucacagaa

SEQ ID NO: 796788 - RNA, 19 nt, Human
aggaagagaaauuagucca

SEQ ID NO: 796789 - RNA, 21 nt, Human
aggcagagccuguuuucugug

SEQ ID NO: 796790 - RNA, 24 nt, Human
aggcagugcacguggucgcagggc

SEQ ID NO: 796791 - RNA, 21 nt, Human
aggcuuugaagcacagcacac

SEQ ID NO: 796792 - RNA, 20 nt, Human
agggaacuguccagggaggc

SEQ ID NO: 796793 - RNA, 20 nt, Human
aggguuacuguuuaucucuu

SEQ ID NO: 796794 - RNA, 18 nt, Human
agguuggagugcaguggu

SEQ ID NO: 796795 - RNA, 21 nt, Human
agugcaguggugcaaucauag

SEQ ID NO: 796796 - RNA, 23 nt, Human
agugcaguggugcaaucauagcu

SEQ ID NO: 796797 - RNA, 24 nt, Human
agugcaguggugcaaucauagcuc

SEQ ID NO: 796798 - RNA, 18 nt, Human
auagcucacugcagccuc

SEQ ID NO: 796799 - RNA, 20 nt, Human
augaucaaguccacgccgca

SEQ ID NO: 796800 - RNA, 20 nt, Human
augcaagauuugacaguuaa

SEQ ID NO: 796801 - RNA, 19 nt, Human
augcagaucucgguggcag

SEQ ID NO: 796802 - RNA, 19 nt, Human
auggagcauggcugaaucc

SEQ ID NO: 796803 - RNA, 26 nt, Human
auuagaagaaaaaaaaaaagaggggu

SEQ ID NO: 796804 - RNA, 24 nt, Human
caaaaugaaacaauuuaaaacccc

SEQ ID NO: 796805 - RNA, 27 nt, Human
caagcaauccucauaccucagccuccc

SEQ ID NO: 796806 - RNA, 20 nt, Human
caagccagcccccggccccc

SEQ ID NO: 796807 - RNA, 20 nt, Human
cacaaacgauucccaaaagc

SEQ ID NO: 796808 - RNA, 22 nt, Human
cacaaacgauucccaaaagccu

SEQ ID NO: 796809 - RNA, 18 nt, Human
cacagcacacaaaaugaa

SEQ ID NO: 796810 - RNA, 18 nt, Human
cacaugugaaggcagagc

SEQ ID NO: 796811 - RNA, 24 nt, Human
cacccagguuggagugcaguggug

SEQ ID NO: 796812 - RNA, 24 nt, Human
cacucugucacccagguuggagug

SEQ ID NO: 796813 - RNA, 21 nt, Human
cacugugaggggagaggguca

SEQ ID NO: 796814 - RNA, 22 nt, Human
cagaaagagacugacacucgac

SEQ ID NO: 796815 - RNA, 19 nt, Human
cagaauuagaagaaaaaaa

SEQ ID NO: 796816 - RNA, 23 nt, Human
cagaggcgaacgggcacagguca

SEQ ID NO: 796817 - RNA, 26 nt, Human
cagcaaaacuccaguuuauuaagaca

SEQ ID NO: 796818 - RNA, 23 nt, Human
cagcaagccagcccccggccccc

SEQ ID NO: 796819 - RNA, 24 nt, Human
cagcaagccagcccccggccccca

SEQ ID NO: 796820 - RNA, 18 nt, Human
cagcacacaaaaugaaac

SEQ ID NO: 796821 - RNA, 24 nt, Human
cagccucaaacucccaggcucaag

SEQ ID NO: 796822 - RNA, 21 nt, Human
caggcccugaggcagcgcagg

SEQ ID NO: 796823 - RNA, 19 nt, Human
cagugcacguggucgcagg

SEQ ID NO: 796824 - RNA, 20 nt, Human
caucagacacugguggcacc

SEQ ID NO: 796825 - RNA, 22 nt, Human
caucgugggaacccagaaauau

SEQ ID NO: 796826 - RNA, 23 nt, Human
ccaaggcccugauggugucccug

SEQ ID NO: 796827 - RNA, 18 nt, Human
ccagggaggcggguauga

SEQ ID NO: 796828 - RNA, 21 nt, Human
ccagguagcugggauuacagg

SEQ ID NO: 796829 - RNA, 23 nt, Human
ccagguagcugggauuacaggug

SEQ ID NO: 796830 - RNA, 24 nt, Human
ccagguagcugggauuacaggugu

SEQ ID NO: 796831 - RNA, 25 nt, Human
ccagugccuuucacaaugaggcuuu

SEQ ID NO: 796832 - RNA, 21 nt, Human
cccaaaagccuagcugauguc

SEQ ID NO: 796833 - RNA, 22 nt, Human
cccaaaagccuagcugaugucu

SEQ ID NO: 796834 - RNA, 20 nt, Human
cccaggcucaagcaauccuc

SEQ ID NO: 796835 - RNA, 20 nt, Human
cccaggcucaagcaauccuc

SEQ ID NO: 796836 - RNA, 22 nt, Human
cccagguagcugggauuacagg

SEQ ID NO: 796837 - RNA, 23 nt, Human
cccagguagcugggauuacaggu

SEQ ID NO: 796838 - RNA, 25 nt, Human
ccucauaccucagccucccagguag

SEQ ID NO: 796839 - RNA, 24 nt, Human
ccucccagguagcugggauuacag

SEQ ID NO: 796840 - RNA, 19 nt, Human
cgcaggcagugcacguggu

SEQ ID NO: 796841 - RNA, 24 nt, Human
cucaagcaauccucauaccucagc

SEQ ID NO: 796842 - RNA, 20 nt, Human
cucacaugugaaggcagagc

SEQ ID NO: 796843 - RNA, 24 nt, Human
cucacucugucacccagguuggag

SEQ ID NO: 796844 - RNA, 21 nt, Human
cucacugcagccucaaacucc

SEQ ID NO: 796845 - RNA, 24 nt, Human
cucagccucccagguagcugggau

SEQ ID NO: 796846 - RNA, 18 nt, Human
cuccaaagucauccaaag

SEQ ID NO: 796847 - RNA, 18 nt, Human
cugagguguggccaguga

SEQ ID NO: 796848 - RNA, 23 nt, Human
cugaguccuggacaagcauuuug

SEQ ID NO: 796849 - RNA, 24 nt, Human
cugcagccccgcuguguccaguga

SEQ ID NO: 796850 - RNA, 23 nt, Human
cugcagccucaaacucccaggcu

SEQ ID NO: 796851 - RNA, 23 nt, Human
cugcuaggccaguauauuucugu

SEQ ID NO: 796852 - RNA, 26 nt, Human
cuguggagucgccaggaugcugucau

SEQ ID NO: 796853 - RNA, 24 nt, Human
gaaaaaaaaagccuucacagaaag

SEQ ID NO: 796854 - RNA, 20 nt, Human
gagacagggucucacucugu

SEQ ID NO: 796855 - RNA, 19 nt, Human
gagcacaguuccuuccgug

SEQ ID NO: 796856 - RNA, 21 nt, Human
gaggcaaaccaggcccugagg

SEQ ID NO: 796857 - RNA, 22 nt, Human
gcugugguucuagaccacaggu

SEQ ID NO: 796858 - RNA, 18 nt, Human
ggcaguggcucacuguga

SEQ ID NO: 796859 - RNA, 21 nt, Human
gguagcacgccuuggucuuga

SEQ ID NO: 796860 - RNA, 22 nt, Human
gguaugagugggagugaggaug

SEQ ID NO: 796861 - RNA, 24 nt, Human
gguugggagggggaaggucagggu

SEQ ID NO: 796862 - RNA, 24 nt, Human
gugggcuccuggaaggguuacugu

SEQ ID NO: 796863 - RNA, 23 nt, Human
guuagcugcagccccgcuguguc

SEQ ID NO: 796864 - RNA, 22 nt, Human
uaaaggacauuuccacaaagaa

SEQ ID NO: 796865 - RNA, 20 nt, Human
uaagggaauggaagaaagaa

SEQ ID NO: 796866 - RNA, 23 nt, Human
uaagucguuaacucauuuagaau

SEQ ID NO: 796867 - RNA, 21 nt, Human
uacaaacaagauaaugcaaga

SEQ ID NO: 796868 - RNA, 24 nt, Human
uaccucagccucccagguagcugg

SEQ ID NO: 796869 - RNA, 24 nt, Human
uagcucacugcagccucaaacucc

SEQ ID NO: 796870 - RNA, 19 nt, Human
uagcugcagccccgcugug

SEQ ID NO: 796871 - RNA, 22 nt, Human
uauuaaggauacugccucuaac

SEQ ID NO: 796872 - RNA, 24 nt, Human
uauuuuuuuuugagacagggucuc

SEQ ID NO: 796873 - RNA, 19 nt, Human
ucaaacucccaggcucaag

SEQ ID NO: 796874 - RNA, 21 nt, Human
ucacagaugacuaaaugccag

SEQ ID NO: 796875 - RNA, 24 nt, Human
ucacccagguuggagugcaguggu

SEQ ID NO: 796876 - RNA, 24 nt, Human
ucacucugucacccagguuggagu

SEQ ID NO: 796877 - RNA, 24 nt, Human
ucacugcagccucaaacucccagg

SEQ ID NO: 796878 - RNA, 23 nt, Human
ucagacacugguggcaccaugac

SEQ ID NO: 796879 - RNA, 23 nt, Human
ucagugggcuccuggaaggguua

SEQ ID NO: 796880 - RNA, 19 nt, Human
uccacgccgcagacgagga

SEQ ID NO: 796881 - RNA, 18 nt, Human
uccauggcggaaacggga

SEQ ID NO: 796882 - RNA, 18 nt, Human
ucccaaaagccuagcuga

SEQ ID NO: 796883 - RNA, 18 nt, Human
ucccaggcucaagcaauc

SEQ ID NO: 796884 - RNA, 23 nt, Human
ucccagguagcugggauuacagg

SEQ ID NO: 796885 - RNA, 24 nt, Human
ucccagguagcugggauuacaggu

SEQ ID NO: 796886 - RNA, 22 nt, Human
uccgcaaagaacugccagaacc

SEQ ID NO: 796887 - RNA, 23 nt, Human
ucucacucugucacccagguugg

SEQ ID NO: 796888 - RNA, 24 nt, Human
ucucacucugucacccagguugga

SEQ ID NO: 796889 - RNA, 24 nt, Human
ucugucacccagguuggagugcag

SEQ ID NO: 796890 - RNA, 24 nt, Human
ucuugcugugguucuagaccacag

SEQ ID NO: 796891 - RNA, 23 nt, Human
ugaaagcagaaagaacucugcag

SEQ ID NO: 796892 - RNA, 24 nt, Human
ugaagcacagcacacaaaaugaaa

SEQ ID NO: 796893 - RNA, 21 nt, Human
ugaagucaguuacugccugca

SEQ ID NO: 796894 - RNA, 23 nt, Human
ugaauaaaggguugggaggggga

SEQ ID NO: 796895 - RNA, 19 nt, Human
ugacagugaggagaacgga

SEQ ID NO: 796896 - RNA, 19 nt, Human
ugagaaaaccaaggcccug

SEQ ID NO: 796897 - RNA, 18 nt, Human
ugagaaaagcagcacaag

SEQ ID NO: 796898 - RNA, 22 nt, Human
ugagaaaagcagcacaagaucc

SEQ ID NO: 796899 - RNA, 23 nt, Human
ugagaagacaaaaaacagucugg

SEQ ID NO: 796900 - RNA, 20 nt, Human
ugagacagggucucacucug

SEQ ID NO: 796901 - RNA, 22 nt, Human
ugagacagggucucacucuguc

SEQ ID NO: 796902 - RNA, 23 nt, Human
ugaggggagagggucagaucuug

SEQ ID NO: 796903 - RNA, 19 nt, Human
ugaggugaggcuggcgcag

SEQ ID NO: 796904 - RNA, 19 nt, Human
ugaggugaggcuggcgcag

SEQ ID NO: 796905 - RNA, 21 nt, Human
ugagucugggugugagcugcc

SEQ ID NO: 796906 - RNA, 18 nt, Human
ugaucaaguccacgccgc

SEQ ID NO: 796907 - RNA, 20 nt, Human
ugccagaaccaggccuguga

SEQ ID NO: 796908 - RNA, 23 nt, Human
ugccagggacugugugaagucag

SEQ ID NO: 796909 - RNA, 24 nt, Human
ugccuuucacaaugaggcuuuugg

SEQ ID NO: 796910 - RNA, 19 nt, Human
uggagcauggcugaauccc

SEQ ID NO: 796911 - RNA, 18 nt, Human
uggagugcaguggugcaa

SEQ ID NO: 796912 - RNA, 19 nt, Human
uggagugcaguggugcaau

SEQ ID NO: 796913 - RNA, 21 nt, Human
uggagugcaguggugcaauca

SEQ ID NO: 796914 - RNA, 25 nt, Human
uggccagugagucugggugugagcu

SEQ ID NO: 796915 - RNA, 21 nt, Human
uggcucacugugaggggagag

SEQ ID NO: 796916 - RNA, 23 nt, Human
ugggagggggaaggucaggguug

SEQ ID NO: 796917 - RNA, 18 nt, Human
ugggauuacaggugugca

SEQ ID NO: 796918 - RNA, 20 nt, Human
ugggauuacaggugugcaac

SEQ ID NO: 796919 - RNA, 22 nt, Human
ugggauuacaggugugcacacc

SEQ ID NO: 796920 - RNA, 23 nt, Human
ugggauuacaggugugcacaccu

SEQ ID NO: 796921 - RNA, 24 nt, Human
uggugcaaucauagcucacugcag

SEQ ID NO: 796922 - RNA, 19 nt, Human
uguaugugcucugaguccu

SEQ ID NO: 796923 - RNA, 22 nt, Human
uguccagaggaaaaguccaccg

SEQ ID NO: 796924 - RNA, 21 nt, Human
ugucuaggaagagaaauuagu

SEQ ID NO: 796925 - RNA, 22 nt, Human
ugugcacaccuaauuuuuucag

SEQ ID NO: 796926 - RNA, 21 nt, Human
ugugcugagcugucuaggaag

SEQ ID NO: 796927 - RNA, 22 nt, Human
uuaguuagcuccuaccuguacc

SEQ ID NO: 796928 - RNA, 23 nt, Human
uucaaaaagcugucagcucaggu

SEQ ID NO: 796929 - RNA, 22 nt, Human
uucacagaaagagacugacacu

SEQ ID NO: 796930 - RNA, 22 nt, Human
uucuuuagcagcaaaacuccag

SEQ ID NO: 796931 - RNA, 25 nt, Human
uuuguaguucucacuccuuaggcca

SEQ ID NO: 796932 - RNA, 22 nt, Human
aaaaaaagaaaaaaaaaaagaa

SEQ ID NO: 796933 - RNA, 24 nt, Human
aaaaaaucacaguuccacaaaacu

SEQ ID NO: 796934 - RNA, 18 nt, Human
aaaaagaaaaaagaaaaa

SEQ ID NO: 796935 - RNA, 23 nt, Human
aaaagaaaaaaaaaaagaaaaaa

SEQ ID NO: 796936 - RNA, 20 nt, Human
aaaagaaaaaaaaaucacag

SEQ ID NO: 796937 - RNA, 20 nt, Human
aaaauucuguccaagcucuu

SEQ ID NO: 796938 - RNA, 25 nt, Human
aaacagucaccaaaguaaauaaagc

SEQ ID NO: 796939 - RNA, 22 nt, Human
aacaauaaaagcuuuuagccaa

SEQ ID NO: 796940 - RNA, 22 nt, Human
aacagagcacuaggcacauaua

SEQ ID NO: 796941 - RNA, 19 nt, Human
aagaaacacaacaucaaac

SEQ ID NO: 796942 - RNA, 19 nt, Human
aagcauaaauuccacaacc

SEQ ID NO: 796943 - RNA, 21 nt, Human
aagucuagaaaacuuuagaac

SEQ ID NO: 796944 - RNA, 22 nt, Human
aauaaacagucaagaaacacaa

SEQ ID NO: 796945 - RNA, 24 nt, Human
accaguuuccaucaggauuuauca

SEQ ID NO: 796946 - RNA, 20 nt, Human
acucuuucagccagcaaaau

SEQ ID NO: 796947 - RNA, 26 nt, Human
agaaaaaguagugaagaaaauaucau

SEQ ID NO: 796948 - RNA, 22 nt, Human
agaaaacuuuagaaccuaccaa

SEQ ID NO: 796949 - RNA, 24 nt, Human
agauagaaaaaguagugaagaaaa

SEQ ID NO: 796950 - RNA, 22 nt, Human
agcagaaaagcuagaacuacag

SEQ ID NO: 796951 - RNA, 25 nt, Human
agcaguucuuuuuuuuuuuuccuuu

SEQ ID NO: 796952 - RNA, 30 nt, Human
agcaguucuuuuuuuuuuuuccuuuuucuu

SEQ ID NO: 796953 - RNA, 19 nt, Human
agcaguuucugagcaggaa

SEQ ID NO: 796954 - RNA, 23 nt, Human
agcggugucuguugggcagugcc

SEQ ID NO: 796955 - RNA, 20 nt, Human
agcuacugauuucuaaacaa

SEQ ID NO: 796956 - RNA, 27 nt, Human
agguauucauucuauucacaaauauuu

SEQ ID NO: 796957 - RNA, 22 nt, Human
auaaagcuauaagaagaaaaac

SEQ ID NO: 796958 - RNA, 19 nt, Human
augcauauauaacacagga

SEQ ID NO: 796959 - RNA, 24 nt, Human
auguagguuuuacaauauuccaug

SEQ ID NO: 796960 - RNA, 22 nt, Human
auguggcugacuuugagucccc

SEQ ID NO: 796961 - RNA, 20 nt, Human
caagaaacacaacaucaaac

SEQ ID NO: 796962 - RNA, 21 nt, Human
caagaaacacaacaucaaaca

SEQ ID NO: 796963 - RNA, 24 nt, Human
cacaacaucaaacaauaaaagcuu

SEQ ID NO: 796964 - RNA, 22 nt, Human
cacagcaguucuuuuuuuuuuu

SEQ ID NO: 796965 - RNA, 18 nt, Human
cacauaaugcauauauaa

SEQ ID NO: 796966 - RNA, 22 nt, Human
cauauauaacacaggagaaaac

SEQ ID NO: 796967 - RNA, 22 nt, Human
cauccuaaggacacagcagaaa

SEQ ID NO: 796968 - RNA, 21 nt, Human
caugcaaauuugucauguaaa

SEQ ID NO: 796969 - RNA, 20 nt, Human
cauuacacagcaaguccaua

SEQ ID NO: 796970 - RNA, 23 nt, Human
ccaaauguacaguauccaguaaa

SEQ ID NO: 796971 - RNA, 19 nt, Human
ccacagcaguucuuuuuuu

SEQ ID NO: 796972 - RNA, 21 nt, Human
ccauuuuucuaaaccugcagu

SEQ ID NO: 796973 - RNA, 19 nt, Human
cccacuguguaaguggaau

SEQ ID NO: 796974 - RNA, 22 nt, Human
ccccauaugaugucaacuacca

SEQ ID NO: 796975 - RNA, 19 nt, Human
ccuaaggacacagcagaaa

SEQ ID NO: 796976 - RNA, 20 nt, Human
ccugacuugagcuuggaaga

SEQ ID NO: 796977 - RNA, 24 nt, Human
cuaccaggugcuuguaaguuugag

SEQ ID NO: 796978 - RNA, 22 nt, Human
cucagagaucagaauacgaagc

SEQ ID NO: 796979 - RNA, 24 nt, Human
cucagcaucaugggaggagauaaa

SEQ ID NO: 796980 - RNA, 22 nt, Human
cugcaguuuguucucuuuucua

SEQ ID NO: 796981 - RNA, 22 nt, Human
cuuaagcauacucagaaaugaa

SEQ ID NO: 796982 - RNA, 18 nt, Human
cuuggaaggugggccaag

SEQ ID NO: 796983 - RNA, 23 nt, Human
cuuguacacgacaaacguuuaca

SEQ ID NO: 796984 - RNA, 21 nt, Human
gaaaauuccccauaugauguc

SEQ ID NO: 796985 - RNA, 24 nt, Human
ggaggagauaaaauaauucauucu

SEQ ID NO: 796986 - RNA, 21 nt, Human
ggaggccuuccacauuuuugg

SEQ ID NO: 796987 - RNA, 25 nt, Human
gggaaaaaagacaauuuaaggaagu

SEQ ID NO: 796988 - RNA, 20 nt, Human
gugauggugaagaagaugga

SEQ ID NO: 796989 - RNA, 18 nt, Human
uaaacaaaacacacgauc

SEQ ID NO: 796990 - RNA, 21 nt, Human
uaacacaggagaaaaccugua

SEQ ID NO: 796991 - RNA, 22 nt, Human
uaacugcaucaaucauuugcug

SEQ ID NO: 796992 - RNA, 18 nt, Human
uaagacuuggugcuuucu

SEQ ID NO: 796993 - RNA, 20 nt, Human
uaagcugguugacaauccca

SEQ ID NO: 796994 - RNA, 26 nt, Human
uaauacaaaaaaaaaaagaaaaaaaa

SEQ ID NO: 796995 - RNA, 21 nt, Human
uaauauggaaacugaggcuuu

SEQ ID NO: 796996 - RNA, 26 nt, Human
uacaaaaaaaaaaagaaaaaaaaaaa

SEQ ID NO: 796997 - RNA, 26 nt, Human
uacagcaugcaauucaaugaggugga

SEQ ID NO: 796998 - RNA, 18 nt, Human
uacauagauuucucaaag

SEQ ID NO: 796999 - RNA, 21 nt, Human
uaccugcacauaaugcauaua

SEQ ID NO: 797000 - RNA, 19 nt, Human
uaccuuugcagaaguauuu

SEQ ID NO: 797001 - RNA, 26 nt, Human
uagaaccuaccaauaaugcuucuagg

SEQ ID NO: 797002 - RNA, 22 nt, Human
uagaacuacagcaugcaauuca

SEQ ID NO: 797003 - RNA, 23 nt, Human
uagauuucucaaagauaacauua

SEQ ID NO: 797004 - RNA, 20 nt, Human
uauauaacacaggagaaaac

SEQ ID NO: 797005 - RNA, 24 nt, Human
ucaaacgcauuuaggaaauucucu

SEQ ID NO: 797006 - RNA, 19 nt, Human
ucaaagauaacauuaaagc

SEQ ID NO: 797007 - RNA, 22 nt, Human
ucaggaagaaacuagauuuuac

SEQ ID NO: 797008 - RNA, 21 nt, Human
uccacaaccuuauaacuaaua

SEQ ID NO: 797009 - RNA, 19 nt, Human
uccacauuuuuggaugcua

SEQ ID NO: 797010 - RNA, 23 nt, Human
ucuaagaaucugccuccaaauuc

SEQ ID NO: 797011 - RNA, 21 nt, Human
ucucaaagauaacauuaaagc

SEQ ID NO: 797012 - RNA, 23 nt, Human
ucucugcugagacugaagcuuaa

SEQ ID NO: 797013 - RNA, 19 nt, Human
ugaagauuuggauacacug

SEQ ID NO: 797014 - RNA, 18 nt, Human
ugaaggacucaagaaaau

SEQ ID NO: 797015 - RNA, 26 nt, Human
ugaaguuucucaaacauuccuuugag

SEQ ID NO: 797016 - RNA, 24 nt, Human
ugaauaaacagucaagaaacacaa

SEQ ID NO: 797017 - RNA, 22 nt, Human
ugaauaugaaaaccauuuuucu

SEQ ID NO: 797018 - RNA, 21 nt, Human
ugagaucggggguauaggugu

SEQ ID NO: 797019 - RNA, 21 nt, Human
uggaugguacugaauucugau

SEQ ID NO: 797020 - RNA, 19 nt, Human
uggcaugaaagguauucau

SEQ ID NO: 797021 - RNA, 19 nt, Human
ugguacaguauuaagaaug

SEQ ID NO: 797022 - RNA, 21 nt, Human
ugguacaguauuaagaaugga

SEQ ID NO: 797023 - RNA, 23 nt, Human
ugguacaguauuaagaauggaag

SEQ ID NO: 797024 - RNA, 20 nt, Human
uggugaagaagauggaguua

SEQ ID NO: 797025 - RNA, 19 nt, Human
ugucauguaaaggaccucu

SEQ ID NO: 797026 - RNA, 22 nt, Human
ugugaaauguggcugacuuuga

SEQ ID NO: 797027 - RNA, 25 nt, Human
uuaaagaacauucauccacugcaua

SEQ ID NO: 797028 - RNA, 22 nt, Human
uuaaggaagugagcaguuucug

SEQ ID NO: 797029 - RNA, 20 nt, Human
uucagacugguaaauuuuua

SEQ ID NO: 797030 - RNA, 19 nt, Human
uuccauuacacagcaaguc

SEQ ID NO: 797031 - RNA, 20 nt, Human
uugagucccccacuguguaa

SEQ ID NO: 797032 - RNA, 21 nt, Human
uuugcuguucucuacauuugc

SEQ ID NO: 797033 - RNA, 25 nt, Human
aaaaaagaaaaacccauucaaaaaa

SEQ ID NO: 797034 - RNA, 24 nt, Human
aaagugcugggauuacaggcauga

SEQ ID NO: 797035 - RNA, 24 nt, Human
aaagugcugggauuacagguguga

SEQ ID NO: 797036 - RNA, 22 nt, Human
aaauacaguauaacaacuauuu

SEQ ID NO: 797037 - RNA, 20 nt, Human
aacauagugagacccuuucu

SEQ ID NO: 797038 - RNA, 23 nt, Human
aagaaucacuugagcccaggagg

SEQ ID NO: 797039 - RNA, 22 nt, Human
aaguagcugggauuacaggcau

SEQ ID NO: 797040 - RNA, 25 nt, Human
aagugauucuccugccuuagccucc

SEQ ID NO: 797041 - RNA, 18 nt, Human
aagugcugggauuacagg

SEQ ID NO: 797042 - RNA, 19 nt, Human
aagugcugggauuacaggc

SEQ ID NO: 797043 - RNA, 21 nt, Human
aagugcugggauuacaggcau

SEQ ID NO: 797044 - RNA, 19 nt, Human
aagugcugggauuacaggu

SEQ ID NO: 797045 - RNA, 20 nt, Human
aaucacuugagcccaggagg

SEQ ID NO: 797046 - RNA, 24 nt, Human
acaaagugacacccugucucaaaa

SEQ ID NO: 797047 - RNA, 26 nt, Human
acaagucagcaaaaugaggcacagaa

SEQ ID NO: 797048 - RNA, 19 nt, Human
acagacaggguuucaccau

SEQ ID NO: 797049 - RNA, 18 nt, Human
acaggguuucaccauguu

SEQ ID NO: 797050 - RNA, 19 nt, Human
acaggguuucaccauguua

SEQ ID NO: 797051 - RNA, 24 nt, Human
acaggguuucaccauguuaaccag

SEQ ID NO: 797052 - RNA, 22 nt, Human
acaguguggcaggcugacucua

SEQ ID NO: 797053 - RNA, 19 nt, Human
acccaggcuggagugcagu

SEQ ID NO: 797054 - RNA, 19 nt, Human
acccaggcuggagugcagu

SEQ ID NO: 797055 - RNA, 20 nt, Human
acccaggcuggagugcagug

SEQ ID NO: 797056 - RNA, 18 nt, Human
acccugaagcagaggacc

SEQ ID NO: 797057 - RNA, 19 nt, Human
acccugaagcagaggaccc

SEQ ID NO: 797058 - RNA, 24 nt, Human
acccugucucaaaaaaauuauaca

SEQ ID NO: 797059 - RNA, 21 nt, Human
accgcaccuggccacuuggcu

SEQ ID NO: 797060 - RNA, 18 nt, Human
accuguaaccccagcacc

SEQ ID NO: 797061 - RNA, 21 nt, Human
acuacaggugugugccaccau

SEQ ID NO: 797062 - RNA, 24 nt, Human
acucaaaaaaaaacaauaaaaaua

SEQ ID NO: 797063 - RNA, 24 nt, Human
acuccagccugggggacaaaguga

SEQ ID NO: 797064 - RNA, 18 nt, Human
acucugucacccaggcug

SEQ ID NO: 797065 - RNA, 25 nt, Human
acucugucacccaggcuggagugca

SEQ ID NO: 797066 - RNA, 20 nt, Human
acugacuuauagaaugaugu

SEQ ID NO: 797067 - RNA, 18 nt, Human
acugcacuccagccuggg

SEQ ID NO: 797068 - RNA, 18 nt, Human
acugcacuccagccuggg

SEQ ID NO: 797069 - RNA, 28 nt, Human
acuggucaguccuuuucaagauuucucu

SEQ ID NO: 797070 - RNA, 20 nt, Human
acuucuggugacccugaaau

SEQ ID NO: 797071 - RNA, 22 nt, Human
agaaaauacucaaaaaaaaaca

SEQ ID NO: 797072 - RNA, 23 nt, Human
agaaguucaagaccagccugggc

SEQ ID NO: 797073 - RNA, 21 nt, Human
agacaacagggauuguaagcc

SEQ ID NO: 797074 - RNA, 19 nt, Human
agcagcgaagccggaaaga

SEQ ID NO: 797075 - RNA, 20 nt, Human
agccagcccuccauaugugc

SEQ ID NO: 797076 - RNA, 20 nt, Human
agccagcuagaaacugagaa

SEQ ID NO: 797077 - RNA, 22 nt, Human
agccugggcaacauagugagac

SEQ ID NO: 797078 - RNA, 24 nt, Human
agccugggcaacauagugagaccc

SEQ ID NO: 797079 - RNA, 25 nt, Human
agccugggcaacauagugagacccu

SEQ ID NO: 797080 - RNA, 18 nt, Human
aggagggaggaucacuug

SEQ ID NO: 797081 - RNA, 24 nt, Human
aggaucacuugagcccagaaguuc

SEQ ID NO: 797082 - RNA, 25 nt, Human
aggcuggagugcaguggcacgaucu

SEQ ID NO: 797083 - RNA, 25 nt, Human
aggcuggagugcaguggcgcgaucu

SEQ ID NO: 797084 - RNA, 18 nt, Human
agguggaagaaucacuug

SEQ ID NO: 797085 - RNA, 23 nt, Human
agguggaagaaucacuugagccc

SEQ ID NO: 797086 - RNA, 23 nt, Human
aguagcugggauuacaggcaugc

SEQ ID NO: 797087 - RNA, 18 nt, Human
agucaugccuauacuccu

SEQ ID NO: 797088 - RNA, 21 nt, Human
agugcaguggcacgaucucag

SEQ ID NO: 797089 - RNA, 23 nt, Human
agugcaguggcacgaucucagcu

SEQ ID NO: 797090 - RNA, 24 nt, Human
agugcaguggcacgaucucagcuc

SEQ ID NO: 797091 - RNA, 19 nt, Human
agugcaguggcgcgaucuc

SEQ ID NO: 797092 - RNA, 24 nt, Human
agugcaguggcgcgaucucaacuc

SEQ ID NO: 797093 - RNA, 24 nt, Human
aguugggcugggugugguggcuca

SEQ ID NO: 797094 - RNA, 20 nt, Human
aucacaucaaaaacucaacu

SEQ ID NO: 797095 - RNA, 18 nt, Human
aucaguggaggauccugg

SEQ ID NO: 797096 - RNA, 19 nt, Human
augaggcacagaagcuuag

SEQ ID NO: 797097 - RNA, 23 nt, Human
augcagccacaaucaaguaaacu

SEQ ID NO: 797098 - RNA, 24 nt, Human
augggguuucucaguguuggucag

SEQ ID NO: 797099 - RNA, 26 nt, Human
auguuuuguuucuuucccacaggagu

SEQ ID NO: 797100 - RNA, 22 nt, Human
auuaauuugucacugaacagaa

SEQ ID NO: 797101 - RNA, 23 nt, Human
auuuuguauuuuuaguacagaca

SEQ ID NO: 797102 - RNA, 20 nt, Human
auuuuuuuuuugagacaggg

SEQ ID NO: 797103 - RNA, 24 nt, Human
caaccaaucucaaauagaaaauac

SEQ ID NO: 797104 - RNA, 21 nt, Human
caagaauaaugaguugggcug

SEQ ID NO: 797105 - RNA, 22 nt, Human
caagcagccauguugaugaggc

SEQ ID NO: 797106 - RNA, 19 nt, Human
caaguauuaacuacuuacu

SEQ ID NO: 797107 - RNA, 22 nt, Human
caagugauucuccugccuuagc

SEQ ID NO: 797108 - RNA, 22 nt, Human
caccaccaugccuggcuaauuu

SEQ ID NO: 797109 - RNA, 22 nt, Human
caccauguuaaccagguugguc

SEQ ID NO: 797110 - RNA, 24 nt, Human
caccauguuaaccagguuggucuc

SEQ ID NO: 797111 - RNA, 22 nt, Human
cacccaccuuguccucccaaag

SEQ ID NO: 797112 - RNA, 23 nt, Human
cacccaccuuguccucccaaagu

SEQ ID NO: 797113 - RNA, 23 nt, Human
caccugccauggccucccaaagu

SEQ ID NO: 797114 - RNA, 23 nt, Human
cacuccagccugggggacaaagu

SEQ ID NO: 797115 - RNA, 22 nt, Human
cacucugucacccaggcuggag

SEQ ID NO: 797116 - RNA, 23 nt, Human
cacucugucacccaggcuggagu

SEQ ID NO: 797117 - RNA, 23 nt, Human
cacugcaaacucugccucuuggg

SEQ ID NO: 797118 - RNA, 18 nt, Human
cacugcacuccagccugg

SEQ ID NO: 797119 - RNA, 19 nt, Human
cacugcacuccagccuggg

SEQ ID NO: 797120 - RNA, 22 nt, Human
cacugcacuccagccuggggga

SEQ ID NO: 797121 - RNA, 24 nt, Human
cacugcacuccagccugggggaca

SEQ ID NO: 797122 - RNA, 25 nt, Human
cacugcacuccagccugggggacaa

SEQ ID NO: 797123 - RNA, 23 nt, Human
cacuucccucacugucuccaaaa

SEQ ID NO: 797124 - RNA, 19 nt, Human
cagcaauaaauaacuaaua

SEQ ID NO: 797125 - RNA, 19 nt, Human
cagccugggacuacaggug

SEQ ID NO: 797126 - RNA, 20 nt, Human
cagccugggcaacauaguga

SEQ ID NO: 797127 - RNA, 24 nt, Human
caggguuucaccauguuaaccagg

SEQ ID NO: 797128 - RNA, 18 nt, Human
caggugauccaccugcca

SEQ ID NO: 797129 - RNA, 25 nt, Human
caggugugugccaccaugccuggcu

SEQ ID NO: 797130 - RNA, 22 nt, Human
caguguuggucaggcuggucuc

SEQ ID NO: 797131 - RNA, 25 nt, Human
cauaccuguaaccccagcaccuuug

SEQ ID NO: 797132 - RNA, 24 nt, Human
cauagugagacccuuucucuaaaa

SEQ ID NO: 797133 - RNA, 23 nt, Human
caugcaccaccaugccuggcuaa

SEQ ID NO: 797134 - RNA, 21 nt, Human
ccaaagugcugggauuacagg

SEQ ID NO: 797135 - RNA, 21 nt, Human
ccaaagugcugggauuacagg

SEQ ID NO: 797136 - RNA, 23 nt, Human
ccaaagugcugggauuacaggca

SEQ ID NO: 797137 - RNA, 24 nt, Human
ccaaagugcugggauuacaggcau

SEQ ID NO: 797138 - RNA, 24 nt, Human
ccaaagugcugggauuacaggugu

SEQ ID NO: 797139 - RNA, 23 nt, Human
ccaaguagcugggauuacaggca

SEQ ID NO: 797140 - RNA, 24 nt, Human
ccaaguagcugggauuacaggcau

SEQ ID NO: 797141 - RNA, 22 nt, Human
ccaccucagccugggacuacag

SEQ ID NO: 797142 - RNA, 19 nt, Human
ccacugcacuccagccugg

SEQ ID NO: 797143 - RNA, 20 nt, Human
ccacugcacuccagccuggg

SEQ ID NO: 797144 - RNA, 22 nt, Human
ccacugcacuccagccuggggg

SEQ ID NO: 797145 - RNA, 24 nt, Human
ccacugcacuccagccugggggac

SEQ ID NO: 797146 - RNA, 20 nt, Human
ccagagcucucggagccgac

SEQ ID NO: 797147 - RNA, 23 nt, Human
ccagcuagaaacugagaaucuca

SEQ ID NO: 797148 - RNA, 22 nt, Human
ccaugaacaaaacacuccacuu

SEQ ID NO: 797149 - RNA, 24 nt, Human
cccaaagugcugggauuacaggca

SEQ ID NO: 797150 - RNA, 23 nt, Human
cccaaguagcugggauuacaggc

SEQ ID NO: 797151 - RNA, 24 nt, Human
cccaaguagcugggauuacaggca

SEQ ID NO: 797152 - RNA, 20 nt, Human
ccccagcaccuuuggaggcc

SEQ ID NO: 797153 - RNA, 21 nt, Human
cccccagugguccugucucca

SEQ ID NO: 797154 - RNA, 18 nt, Human
ccccugugccaggccaaa

SEQ ID NO: 797155 - RNA, 21 nt, Human
cccgaccucaggugauccacc

SEQ ID NO: 797156 - RNA, 23 nt, Human
cccgaccucaggugauccaccug

SEQ ID NO: 797157 - RNA, 23 nt, Human
cccgaccucaggugauccaccug

SEQ ID NO: 797158 - RNA, 19 nt, Human
ccgacaccagcagcgaagc

SEQ ID NO: 797159 - RNA, 21 nt, Human
ccuauuccacaguguggcagg

SEQ ID NO: 797160 - RNA, 20 nt, Human
ccucagccugggacuacagg

SEQ ID NO: 797161 - RNA, 21 nt, Human
ccucccaccucagccugggac

SEQ ID NO: 797162 - RNA, 24 nt, Human
ccuccuggauucaagugauucucc

SEQ ID NO: 797163 - RNA, 24 nt, Human
ccucuuggguucaagugauccucc

SEQ ID NO: 797164 - RNA, 23 nt, Human
ccuggauucaagugauucuccuc

SEQ ID NO: 797165 - RNA, 23 nt, Human
ccuggauucaagugauucuccug

SEQ ID NO: 797166 - RNA, 18 nt, Human
ccuggccucaagugaucc

SEQ ID NO: 797167 - RNA, 24 nt, Human
ccuggccucaagugauccacccac

SEQ ID NO: 797168 - RNA, 18 nt, Human
ccuuuggaggccaaggag

SEQ ID NO: 797169 - RNA, 23 nt, Human
cgacaccagcagcgaagccggaa

SEQ ID NO: 797170 - RNA, 21 nt, Human
cggagccgacaccagcagcga

SEQ ID NO: 797171 - RNA, 24 nt, Human
cucaagugauccacccaccuuguc

SEQ ID NO: 797172 - RNA, 25 nt, Human
cucaccacaaacuccgccuccugga

SEQ ID NO: 797173 - RNA, 24 nt, Human
cucacucugucacccaggcuggag

SEQ ID NO: 797174 - RNA, 24 nt, Human
cucacugcaaacucugccucuugg

SEQ ID NO: 797175 - RNA, 20 nt, Human
cucagccugggacuacaggu

SEQ ID NO: 797176 - RNA, 19 nt, Human
cucccaccucagccuggga

SEQ ID NO: 797177 - RNA, 20 nt, Human
cuccuggauucaagugauuc

SEQ ID NO: 797178 - RNA, 23 nt, Human
cugccuuagccucccaaguagcu

SEQ ID NO: 797179 - RNA, 27 nt, Human
cuggucaguccuuuucaagauuucucu

SEQ ID NO: 797180 - RNA, 18 nt, Human
cugugcuuguaccacugc

SEQ ID NO: 797181 - RNA, 18 nt, Human
cuguuacccaggcuggag

SEQ ID NO: 797182 - RNA, 23 nt, Human
cuuagccucccaaguagcuggga

SEQ ID NO: 797183 - RNA, 21 nt, Human
cuugcucuguuacccaggcug

SEQ ID NO: 797184 - RNA, 22 nt, Human
cuuggguucaagugauccuccc

SEQ ID NO: 797185 - RNA, 24 nt, Human
cuuguaccacugcacuccagccug

SEQ ID NO: 797186 - RNA, 18 nt, Human
gaccucaggugauccacc

SEQ ID NO: 797187 - RNA, 22 nt, Human
gaccucaggugauccaccugcc

SEQ ID NO: 797188 - RNA, 22 nt, Human
gacuacaggugugugccaccau

SEQ ID NO: 797189 - RNA, 24 nt, Human
gagaugggguuucucaguguuggu

SEQ ID NO: 797190 - RNA, 24 nt, Human
gaucaaaggguucagagguggcca

SEQ ID NO: 797191 - RNA, 24 nt, Human
gaucacuugagcccagaaguucaa

SEQ ID NO: 797192 - RNA, 21 nt, Human
gaucuguuuggcuucuuccuu

SEQ ID NO: 797193 - RNA, 18 nt, Human
gauuacaggcaugagcca

SEQ ID NO: 797194 - RNA, 22 nt, Human
gauuacaggcaugagccaccgc

SEQ ID NO: 797195 - RNA, 23 nt, Human
gauuacaggcaugagccaccgca

SEQ ID NO: 797196 - RNA, 24 nt, Human
gauuacaggcaugcaccaccaugc

SEQ ID NO: 797197 - RNA, 18 nt, Human
gauuacaggugugacccc

SEQ ID NO: 797198 - RNA, 20 nt, Human
gauuacaggugugaccccug

SEQ ID NO: 797199 - RNA, 21 nt, Human
gccaaggagggaggaucacuu

SEQ ID NO: 797200 - RNA, 25 nt, Human
gcucuguuacccaggcuggagugca

SEQ ID NO: 797201 - RNA, 19 nt, Human
gcuggagugcaguggcacg

SEQ ID NO: 797202 - RNA, 19 nt, Human
gcuggagugcaguggcgcg

SEQ ID NO: 797203 - RNA, 19 nt, Human
gcugggugugguggcucau

SEQ ID NO: 797204 - RNA, 22 nt, Human
ggaaauacuuauucauucccuc

SEQ ID NO: 797205 - RNA, 24 nt, Human
ggacuacaggugugugccaccaug

SEQ ID NO: 797206 - RNA, 22 nt, Human
ggauuacaggcaugagccaccg

SEQ ID NO: 797207 - RNA, 24 nt, Human
ggauuacaggcaugcaccaccaug

SEQ ID NO: 797208 - RNA, 24 nt, Human
ggccucaagugauccacccaccuu

SEQ ID NO: 797209 - RNA, 18 nt, Human
ggccugguguugcugcug

SEQ ID NO: 797210 - RNA, 21 nt, Human
ggcucauaccuguaaccccag

SEQ ID NO: 797211 - RNA, 18 nt, Human
gggguuucucaguguugg

SEQ ID NO: 797212 - RNA, 24 nt, Human
gggugugguggcucauaccuguaa

SEQ ID NO: 797213 - RNA, 20 nt, Human
ggucucaaacuccuggccuc

SEQ ID NO: 797214 - RNA, 19 nt, Human
guccucccuuuuggcuugc

SEQ ID NO: 797215 - RNA, 24 nt, Human
gugauccacccaccuuguccuccc

SEQ ID NO: 797216 - RNA, 24 nt, Human
gugauccaccugccauggccuccc

SEQ ID NO: 797217 - RNA, 24 nt, Human
gugauucuccugccuuagccuccc

SEQ ID NO: 797218 - RNA, 24 nt, Human
guuuuguuucuuucccacaggagu

SEQ ID NO: 797219 - RNA, 24 nt, Human
uaaauuuuguauuuuuaguacaga

SEQ ID NO: 797220 - RNA, 23 nt, Human
uaagccagagcucucggagccga

SEQ ID NO: 797221 - RNA, 23 nt, Human
uaaggucuagaaaauggugauuu

SEQ ID NO: 797222 - RNA, 24 nt, Human
uaagucuccaugaacaaaacacuc

SEQ ID NO: 797223 - RNA, 24 nt, Human
uaauagagaugggguuucucagug

SEQ ID NO: 797224 - RNA, 23 nt, Human
uacaagucagcaaaaugaggcac

SEQ ID NO: 797225 - RNA, 25 nt, Human
uacacaacaauauuaaauuccuagg

SEQ ID NO: 797226 - RNA, 22 nt, Human
uacagacaggguuucaccaugu

SEQ ID NO: 797227 - RNA, 22 nt, Human
uacaggcaugagccaccgcacc

SEQ ID NO: 797228 - RNA, 22 nt, Human
uacaggcaugcaccaccaugcc

SEQ ID NO: 797229 - RNA, 22 nt, Human
uaccacugcacuccagccuggg

SEQ ID NO: 797230 - RNA, 21 nt, Human
uacccaggcuggagugcagug

SEQ ID NO: 797231 - RNA, 24 nt, Human
uacccaggcuggagugcaguggcg

SEQ ID NO: 797232 - RNA, 21 nt, Human
uaccuguaaccccagcaccuu

SEQ ID NO: 797233 - RNA, 19 nt, Human
uagaaacugagaaucucaa

SEQ ID NO: 797234 - RNA, 20 nt, Human
uagaacugcaaaaacugggg

SEQ ID NO: 797235 - RNA, 19 nt, Human
uagaaggugagggaauguu

SEQ ID NO: 797236 - RNA, 24 nt, Human
uaguacagacaggguuucaccaug

SEQ ID NO: 797237 - RNA, 21 nt, Human
uaguauguaucucauaucaua

SEQ ID NO: 797238 - RNA, 24 nt, Human
uauaaaauuuauuaugcuuggaau

SEQ ID NO: 797239 - RNA, 23 nt, Human
uauaaucacacugacauaauccc

SEQ ID NO: 797240 - RNA, 24 nt, Human
uaugacugugauuccuccaaguau

SEQ ID NO: 797241 - RNA, 21 nt, Human
ucaaaccagguccaaguaaug

SEQ ID NO: 797242 - RNA, 19 nt, Human
ucaagugauucuccugccu

SEQ ID NO: 797243 - RNA, 23 nt, Human
ucacaucaaaaacucaacuugaa

SEQ ID NO: 797244 - RNA, 27 nt, Human
ucaccacaaacuccgccuccuggauuc

SEQ ID NO: 797245 - RNA, 24 nt, Human
ucacccaggcuggagugcaguggc

SEQ ID NO: 797246 - RNA, 24 nt, Human
ucacucugucacccaggcuggagu

SEQ ID NO: 797247 - RNA, 23 nt, Human
ucacugcaaacucugccucuugg

SEQ ID NO: 797248 - RNA, 24 nt, Human
ucacugcaaacucugccucuuggg

SEQ ID NO: 797249 - RNA, 18 nt, Human
ucagcccuggcugaaauc

SEQ ID NO: 797250 - RNA, 21 nt, Human
ucaggcuggucucaaaauccc

SEQ ID NO: 797251 - RNA, 21 nt, Human
ucaguggaggauccuggaacc

SEQ ID NO: 797252 - RNA, 24 nt, Human
uccacacuucccucacugucucca

SEQ ID NO: 797253 - RNA, 24 nt, Human
uccaucuugcuagcagacuguccu

SEQ ID NO: 797254 - RNA, 23 nt, Human
ucccaaagugcugggauuacagg

SEQ ID NO: 797255 - RNA, 24 nt, Human
ucccaaagugcugggauuacaggc

SEQ ID NO: 797256 - RNA, 24 nt, Human
ucccaaguagcugggauuacaggc

SEQ ID NO: 797257 - RNA, 20 nt, Human
uccucugauuuauugauuuc

SEQ ID NO: 797258 - RNA, 21 nt, Human
uccuggauucaagugauucuc

SEQ ID NO: 797259 - RNA, 24 nt, Human
uccuggauucaagugauucuccug

SEQ ID NO: 797260 - RNA, 24 nt, Human
uccuuuuacgugaauucacuaaua

SEQ ID NO: 797261 - RNA, 23 nt, Human
ucucacucugucacccaggcugg

SEQ ID NO: 797262 - RNA, 24 nt, Human
ucucacucugucacccaggcugga

SEQ ID NO: 797263 - RNA, 26 nt, Human
ucucacucugucacccaggcuggagu

SEQ ID NO: 797264 - RNA, 27 nt, Human
ucucacucugucacccaggcuggagug

SEQ ID NO: 797265 - RNA, 26 nt, Human
ucuccugccuuagccucccaaguagc

SEQ ID NO: 797266 - RNA, 20 nt, Human
ucucuaaaaaaaaaaaaaaa

SEQ ID NO: 797267 - RNA, 24 nt, Human
ucugauagacccauuuuuauuaag

SEQ ID NO: 797268 - RNA, 19 nt, Human
ucugccucuuggguucaag

SEQ ID NO: 797269 - RNA, 24 nt, Human
ucugucacccaggcuggagugcag

SEQ ID NO: 797270 - RNA, 24 nt, Human
ucuguuacccaggcuggagugcag

SEQ ID NO: 797271 - RNA, 19 nt, Human
ucuguuuggcuucuuccuu

SEQ ID NO: 797272 - RNA, 22 nt, Human
ucuucaaaaaagaaaaacccau

SEQ ID NO: 797273 - RNA, 24 nt, Human
ucuucauuucauaguauguaucuc

SEQ ID NO: 797274 - RNA, 23 nt, Human
ucuugcucuguuacccaggcugg

SEQ ID NO: 797275 - RNA, 24 nt, Human
ucuugcucuguuacccaggcugga

SEQ ID NO: 797276 - RNA, 24 nt, Human
ucuuggguucaagugauccuccca

SEQ ID NO: 797277 - RNA, 22 nt, Human
ugaaacaacuccuacugguuga

SEQ ID NO: 797278 - RNA, 25 nt, Human
ugaagcagaggacccaacuaaguca

SEQ ID NO: 797279 - RNA, 18 nt, Human
ugacucuaaacaggcccc

SEQ ID NO: 797280 - RNA, 22 nt, Human
ugacugugauuccuccaaguau

SEQ ID NO: 797281 - RNA, 20 nt, Human
ugagacagggucucacucug

SEQ ID NO: 797282 - RNA, 19 nt, Human
ugagacccuuucucuaaaa

SEQ ID NO: 797283 - RNA, 23 nt, Human
ugagcccagaaguucaagaccag

SEQ ID NO: 797284 - RNA, 20 nt, Human
ugagcccaggaggaacaggg

SEQ ID NO: 797285 - RNA, 20 nt, Human
ugaguugggcuggguguggu

SEQ ID NO: 797286 - RNA, 20 nt, Human
ugauucuccugccuuagccu

SEQ ID NO: 797287 - RNA, 18 nt, Human
ugcagucagcguucagcc

SEQ ID NO: 797288 - RNA, 22 nt, Human
ugcccuuuauagccagcccucc

SEQ ID NO: 797289 - RNA, 24 nt, Human
ugccuuagccucccaaguagcugg

SEQ ID NO: 797290 - RNA, 24 nt, Human
ugcucuguuacccaggcuggagug

SEQ ID NO: 797291 - RNA, 20 nt, Human
ugcugggauuacagguguga

SEQ ID NO: 797292 - RNA, 23 nt, Human
uggagugcaguggcacgaucuca

SEQ ID NO: 797293 - RNA, 24 nt, Human
uggagugcaguggcacgaucucag

SEQ ID NO: 797294 - RNA, 23 nt, Human
uggagugcaguggcgcgaucuca

SEQ ID NO: 797295 - RNA, 23 nt, Human
uggauucaagugauucuccugcc

SEQ ID NO: 797296 - RNA, 24 nt, Human
uggauucaagugauucuccugccu

SEQ ID NO: 797297 - RNA, 24 nt, Human
uggcacgaucucagcucacugcaa

SEQ ID NO: 797298 - RNA, 21 nt, Human
uggccaggagcugcagucagc

SEQ ID NO: 797299 - RNA, 22 nt, Human
uggccucaagugauccacccac

SEQ ID NO: 797300 - RNA, 24 nt, Human
uggcgcgaucucaacucaccacaa

SEQ ID NO: 797301 - RNA, 21 nt, Human
uggcucauaccuguaacccca

SEQ ID NO: 797302 - RNA, 22 nt, Human
uggcucauaccuguaaccccag

SEQ ID NO: 797303 - RNA, 23 nt, Human
uggcucauaccuguaaccccagc

SEQ ID NO: 797304 - RNA, 24 nt, Human
uggcucauaccuguaaccccagca

SEQ ID NO: 797305 - RNA, 18 nt, Human
uggcuguucuuuacuugg

SEQ ID NO: 797306 - RNA, 18 nt, Human
ugggacuacaggugugug

SEQ ID NO: 797307 - RNA, 21 nt, Human
ugggacuacaggugugugcca

SEQ ID NO: 797308 - RNA, 22 nt, Human
ugggacuacaggugugugccac

SEQ ID NO: 797309 - RNA, 24 nt, Human
ugggacuacaggugugugccacca

SEQ ID NO: 797310 - RNA, 25 nt, Human
ugggacuacaggugugugccaccau

SEQ ID NO: 797311 - RNA, 19 nt, Human
ugggaucacaucaaaaacu

SEQ ID NO: 797312 - RNA, 21 nt, Human
ugggaucacaucaaaaacuca

SEQ ID NO: 797313 - RNA, 19 nt, Human
ugggauuacaggcaugagc

SEQ ID NO: 797314 - RNA, 21 nt, Human
ugggauuacaggcaugagcca

SEQ ID NO: 797315 - RNA, 22 nt, Human
ugggauuacaggcaugagccac

SEQ ID NO: 797316 - RNA, 23 nt, Human
ugggauuacaggcaugagccacc

SEQ ID NO: 797317 - RNA, 24 nt, Human
ugggauuacaggcaugagccaccg

SEQ ID NO: 797318 - RNA, 24 nt, Human
ugggauuacaggcaugagccaccg

SEQ ID NO: 797319 - RNA, 21 nt, Human
ugggauuacaggcaugcacca

SEQ ID NO: 797320 - RNA, 24 nt, Human
ugggauuacaggcaugcaccacca

SEQ ID NO: 797321 - RNA, 18 nt, Human
ugggauuacaggugugac

SEQ ID NO: 797322 - RNA, 21 nt, Human
ugggauuacaggugugacccc

SEQ ID NO: 797323 - RNA, 21 nt, Human
ugggauuacaggugugacccc

SEQ ID NO: 797324 - RNA, 22 nt, Human
ugggauuacaggugugaccccu

SEQ ID NO: 797325 - RNA, 23 nt, Human
ugggauuacaggugugaccccug

SEQ ID NO: 797326 - RNA, 23 nt, Human
uggguucaagugauccucccacc

SEQ ID NO: 797327 - RNA, 24 nt, Human
uggguucaagugauccucccaccu

SEQ ID NO: 797328 - RNA, 24 nt, Human
ugguggcucauaccuguaacccca

SEQ ID NO: 797329 - RNA, 18 nt, Human
ugguguggacuuccuauu

SEQ ID NO: 797330 - RNA, 24 nt, Human
uguggcaggcugacucuaaacagg

SEQ ID NO: 797331 - RNA, 18 nt, Human
uguguugucugauagacc

SEQ ID NO: 797332 - RNA, 18 nt, Human
uuaauagagaugggguuu

SEQ ID NO: 797333 - RNA, 20 nt, Human
uuacagauaauauuuacaga

SEQ ID NO: 797334 - RNA, 26 nt, Human
uuacgugaauucacuaauacuaauga

SEQ ID NO: 797335 - RNA, 24 nt, Human
uuaguacagacaggguuucaccau

SEQ ID NO: 797336 - RNA, 23 nt, Human
uucaagugauccucccaccucag

SEQ ID NO: 797337 - RNA, 24 nt, Human
uucaagugauccucccaccucagc

SEQ ID NO: 797338 - RNA, 20 nt, Human
uucaagugauucuccugccu

SEQ ID NO: 797339 - RNA, 24 nt, Human
uucaagugauucuccugccuuagc

SEQ ID NO: 797340 - RNA, 21 nt, Human
uugaaaaauacaguauaacaa

SEQ ID NO: 797341 - RNA, 22 nt, Human
uugagacagggucucacucugu

SEQ ID NO: 797342 - RNA, 24 nt, Human
uugcucuguuacccaggcuggagu

SEQ ID NO: 797343 - RNA, 23 nt, Human
uuguaccacugcacuccagccug

SEQ ID NO: 797344 - RNA, 24 nt, Human
uuuaaacuguggucagacaacagg

SEQ ID NO: 797345 - RNA, 23 nt, Human
uuucugagaggugacaggaggca

SEQ ID NO: 797346 - RNA, 20 nt, Human
uuugcuagaauauuuuaauc

SEQ ID NO: 797347 - RNA, 22 nt, Human
uuugcuagaauauuuuaaucca

SEQ ID NO: 797348 - RNA, 22 nt, Human
uuuggaggccaaggagggagga

SEQ ID NO: 797349 - RNA, 24 nt, Human
uuuuuaguacagacaggguuucac

SEQ ID NO: 797350 - RNA, 20 nt, Human
uuuuuuuugagacagggucu

SEQ ID NO: 797351 - RNA, 18 nt, Human
aaaaagccaggaucauug

SEQ ID NO: 797352 - RNA, 21 nt, Human
aaaaaucaaucagcauuucca

SEQ ID NO: 797353 - RNA, 19 nt, Human
aaaaauccauaaaugccuc

SEQ ID NO: 797354 - RNA, 24 nt, Human
aaaaauccauaaaugccucuaacc

SEQ ID NO: 797355 - RNA, 24 nt, Human
aaaaauucuuaauuccauaauauc

SEQ ID NO: 797356 - RNA, 24 nt, Human
aaaauaauuuauugagauuucauc

SEQ ID NO: 797357 - RNA, 20 nt, Human
aaacagacugcaguuucaug

SEQ ID NO: 797358 - RNA, 21 nt, Human
aacuugaccacagucuucccc

SEQ ID NO: 797359 - RNA, 23 nt, Human
aagauuuucaaagcaccaguuaa

SEQ ID NO: 797360 - RNA, 19 nt, Human
aaggaacucaucucaugac

SEQ ID NO: 797361 - RNA, 19 nt, Human
aaggaagcauuaaccacua

SEQ ID NO: 797362 - RNA, 19 nt, Human
aaguguuaucugcaggcug

SEQ ID NO: 797363 - RNA, 22 nt, Human
acagcccauaguaagucuuaga

SEQ ID NO: 797364 - RNA, 19 nt, Human
acauuucuuuguacaacag

SEQ ID NO: 797365 - RNA, 22 nt, Human
accuucaacucuugagccagaa

SEQ ID NO: 797366 - RNA, 20 nt, Human
acuaaguauaccauguaaga

SEQ ID NO: 797367 - RNA, 18 nt, Human
acucaauuauuuuuaaag

SEQ ID NO: 797368 - RNA, 21 nt, Human
acuguauucuaacagucuguc

SEQ ID NO: 797369 - RNA, 19 nt, Human
agaaggcacuugucuucca

SEQ ID NO: 797370 - RNA, 23 nt, Human
agacggcaagucucagguuucua

SEQ ID NO: 797371 - RNA, 20 nt, Human
agacugcaguuucauguugu

SEQ ID NO: 797372 - RNA, 18 nt, Human
agaggcagguauuaccug

SEQ ID NO: 797373 - RNA, 19 nt, Human
agaggcugaggucccccca

SEQ ID NO: 797374 - RNA, 23 nt, Human
auaaaacacugaugaacaucuca

SEQ ID NO: 797375 - RNA, 18 nt, Human
auggaaguacaaacuuaa

SEQ ID NO: 797376 - RNA, 22 nt, Human
auuaaaaccuuauuuaccccaa

SEQ ID NO: 797377 - RNA, 23 nt, Human
caaaaucgcaguuauuucacagu

SEQ ID NO: 797378 - RNA, 21 nt, Human
caacaaauuacccagcagcac

SEQ ID NO: 797379 - RNA, 19 nt, Human
cacuauguggcauaagggu

SEQ ID NO: 797380 - RNA, 22 nt, Human
cagaaggaagacucgaagccau

SEQ ID NO: 797381 - RNA, 23 nt, Human
cagcagcucuuugcagcaaugac

SEQ ID NO: 797382 - RNA, 19 nt, Human
ccaaaggagaaaaaggucc

SEQ ID NO: 797383 - RNA, 21 nt, Human
ccagccaaauuaacuuccuga

SEQ ID NO: 797384 - RNA, 20 nt, Human
cccaaaggagaaaaaggucc

SEQ ID NO: 797385 - RNA, 22 nt, Human
ccccaaagcaucugaacguacu

SEQ ID NO: 797386 - RNA, 19 nt, Human
cccucucccaaaacacaca

SEQ ID NO: 797387 - RNA, 21 nt, Human
ccucccucucccaaaacacac

SEQ ID NO: 797388 - RNA, 23 nt, Human
cgccacacuggacguuacaaaau

SEQ ID NO: 797389 - RNA, 25 nt, Human
cuaaacacuacaacuaucuguggau

SEQ ID NO: 797390 - RNA, 21 nt, Human
cuagucaguaaaauggaaugc

SEQ ID NO: 797391 - RNA, 21 nt, Human
cuguaccugugagaggcaggu

SEQ ID NO: 797392 - RNA, 21 nt, Human
cuguguugaugcagagcuggg

SEQ ID NO: 797393 - RNA, 22 nt, Human
cuuccccagauaaggaacaccc

SEQ ID NO: 797394 - RNA, 22 nt, Human
gaaagagcuccgaucaccuaca

SEQ ID NO: 797395 - RNA, 19 nt, Human
gaauaauggugagcuugag

SEQ ID NO: 797396 - RNA, 22 nt, Human
gacucccuggguauccuccaaa

SEQ ID NO: 797397 - RNA, 24 nt, Human
gagguacagacauaaaacaggaag

SEQ ID NO: 797398 - RNA, 22 nt, Human
gcaacaccauuucuauaaaaca

SEQ ID NO: 797399 - RNA, 21 nt, Human
gcaucccucccucucccaaaa

SEQ ID NO: 797400 - RNA, 27 nt, Human
gcccauaguaagucuuagaaaccucaa

SEQ ID NO: 797401 - RNA, 23 nt, Human
gccguauuuucuuugcuuagguu

SEQ ID NO: 797402 - RNA, 18 nt, Human
gcuaucuguucauuaccg

SEQ ID NO: 797403 - RNA, 19 nt, Human
guuaucugcaggcugcugu

SEQ ID NO: 797404 - RNA, 22 nt, Human
uaaaaaacagguuuacagccca

SEQ ID NO: 797405 - RNA, 22 nt, Human
uaaaaaagauuuucaaagcacc

SEQ ID NO: 797406 - RNA, 23 nt, Human
uaaaaaaucaccauaauuaccau

SEQ ID NO: 797407 - RNA, 25 nt, Human
uaaacuguuagaaaacguuuuaaca

SEQ ID NO: 797408 - RNA, 21 nt, Human
uaacauaaaacuucaggacuc

SEQ ID NO: 797409 - RNA, 19 nt, Human
uacauggagugcuauggga

SEQ ID NO: 797410 - RNA, 23 nt, Human
uagaaaacaaaccaaccaaaagg

SEQ ID NO: 797411 - RNA, 21 nt, Human
uagaaauaaggucaagaaucu

SEQ ID NO: 797412 - RNA, 22 nt, Human
uagcaaaucauacauugcauuc

SEQ ID NO: 797413 - RNA, 27 nt, Human
uaggaaaacugcuauuugguuggaggg

SEQ ID NO: 797414 - RNA, 25 nt, Human
uauaaagcacuuugggauaaaaggu

SEQ ID NO: 797415 - RNA, 23 nt, Human
ucaacaucagagcuacuacaacu

SEQ ID NO: 797416 - RNA, 23 nt, Human
ucaacucuugagccagaagcugg

SEQ ID NO: 797417 - RNA, 19 nt, Human
ucacuuaggacauucucau

SEQ ID NO: 797418 - RNA, 21 nt, Human
ucagucaugaggcacugaaga

SEQ ID NO: 797419 - RNA, 22 nt, Human
ucaugagauacuaucaguguuu

SEQ ID NO: 797420 - RNA, 18 nt, Human
uccaagaaacagcuguac

SEQ ID NO: 797421 - RNA, 19 nt, Human
uccaagaaacagcuguacc

SEQ ID NO: 797422 - RNA, 20 nt, Human
uccaggugcaaacuugguuu

SEQ ID NO: 797423 - RNA, 18 nt, Human
ucuaacagucugucagcu

SEQ ID NO: 797424 - RNA, 22 nt, Human
ucugugcuuauuuucugcaggg

SEQ ID NO: 797425 - RNA, 22 nt, Human
ugaaauaucaaucagcaucccu

SEQ ID NO: 797426 - RNA, 22 nt, Human
ugacagcaaaggacagcacagu

SEQ ID NO: 797427 - RNA, 18 nt, Human
ugagccagaagcugguac

SEQ ID NO: 797428 - RNA, 19 nt, Human
ugcaaacuugguuucccag

SEQ ID NO: 797429 - RNA, 19 nt, Human
ugcaguacacaaucugugu

SEQ ID NO: 797430 - RNA, 18 nt, Human
ugccccagugcuaucugu

SEQ ID NO: 797431 - RNA, 20 nt, Human
ugcuaucuggaagcuucauu

SEQ ID NO: 797432 - RNA, 19 nt, Human
ugcugaaauuaacucaaag

SEQ ID NO: 797433 - RNA, 19 nt, Human
uggcauaaggguuuaggca

SEQ ID NO: 797434 - RNA, 22 nt, Human
ugucgacugggaagcgaguccc

SEQ ID NO: 797435 - RNA, 23 nt, Human
ugugaaauuuaacagauuccaga

SEQ ID NO: 797436 - RNA, 26 nt, Human
uuaaaaaaucaccauaauuaccauaa

SEQ ID NO: 797437 - RNA, 21 nt, Human
uuaaaggaagcauuaaccacu

SEQ ID NO: 797438 - RNA, 22 nt, Human
uuaccccaauucauccauguau

SEQ ID NO: 797439 - RNA, 21 nt, Human
uucauaacauaaaacuucagg

SEQ ID NO: 797440 - RNA, 19 nt, Human
uucugcaggggaggaaaua

SEQ ID NO: 797441 - RNA, 18 nt, Human
uugaaacucaauggcacu

SEQ ID NO: 797442 - RNA, 18 nt, Human
uugagauuucaucuugua

SEQ ID NO: 797443 - RNA, 26 nt, Human
uugcagcaaugacaggcagggcagag

SEQ ID NO: 797444 - RNA, 19 nt, Human
uugcuggucauuugaaacu

SEQ ID NO: 797445 - RNA, 19 nt, Human
uuuguauuaaacuaaaaug

SEQ ID NO: 797446 - RNA, 20 nt, Human
uuuguuaaaagucaugguuu

SEQ ID NO: 797447 - RNA, 22 nt, Human
aagcaauggggcccaugcuggg

SEQ ID NO: 797448 - RNA, 21 nt, Human
aauacagcagccgcccaagca

SEQ ID NO: 797449 - RNA, 19 nt, Human
acuuccccacaucuccccu

SEQ ID NO: 797450 - RNA, 18 nt, Human
aucuccccugccccuccc

SEQ ID NO: 797451 - RNA, 19 nt, Human
cacaucuccccugccccuc

SEQ ID NO: 797452 - RNA, 22 nt, Human
caccucuucuucuucuucauca

SEQ ID NO: 797453 - RNA, 18 nt, Human
ccaagcaauggggcccau

SEQ ID NO: 797454 - RNA, 20 nt, Human
ccaccucuucuucuucuuca

SEQ ID NO: 797455 - RNA, 21 nt, Human
ccagaguaaaugaaaauacag

SEQ ID NO: 797456 - RNA, 22 nt, Human
cccacaucuccccugccccucc

SEQ ID NO: 797457 - RNA, 22 nt, Human
ccccacaucuccccugccccuc

SEQ ID NO: 797458 - RNA, 25 nt, Human
ccccacaucuccccugccccuccca

SEQ ID NO: 797459 - RNA, 18 nt, Human
ccccugccccucccacgu

SEQ ID NO: 797460 - RNA, 22 nt, Human
ccccugccccucccacguuucc

SEQ ID NO: 797461 - RNA, 21 nt, Human
cccugccccucccacguuucc

SEQ ID NO: 797462 - RNA, 24 nt, Human
ccucuucuucuucuucaucaucug

SEQ ID NO: 797463 - RNA, 23 nt, Human
cuccccugccccucccacguuuc

SEQ ID NO: 797464 - RNA, 18 nt, Human
cuccuggaguccuggacu

SEQ ID NO: 797465 - RNA, 25 nt, Human
gccccucccacguuuccauagucca

SEQ ID NO: 797466 - RNA, 25 nt, Human
ggacuuccccacaucuccccugccc

SEQ ID NO: 797467 - RNA, 20 nt, Human
uaaaugaaaauacagcagcc

SEQ ID NO: 797468 - RNA, 23 nt, Human
uccccacaucuccccugccccuc

SEQ ID NO: 797469 - RNA, 23 nt, Human
uccccugccccucccacguuucc

SEQ ID NO: 797470 - RNA, 19 nt, Human
ugaaaauacagcagccgcc

SEQ ID NO: 797471 - RNA, 21 nt, Human
aaaaaagacaccaauacccac

SEQ ID NO: 797472 - RNA, 21 nt, Human
aaaaagggggggaaugccuaa

SEQ ID NO: 797473 - RNA, 19 nt, Human
aaaagacaccaauacccac

SEQ ID NO: 797474 - RNA, 20 nt, Human
aaaagacaccaauacccaca

SEQ ID NO: 797475 - RNA, 24 nt, Human
aaaaugguaacauuuuuacaacuu

SEQ ID NO: 797476 - RNA, 23 nt, Human
aaacauaaaaauaaaaacugaua

SEQ ID NO: 797477 - RNA, 25 nt, Human
aaacugauaugguaaugccuaaaau

SEQ ID NO: 797478 - RNA, 20 nt, Human
aaagacaccaauacccacaa

SEQ ID NO: 797479 - RNA, 22 nt, Human
aaauaauauuuauagcaaaaua

SEQ ID NO: 797480 - RNA, 20 nt, Human
aaauauggcagucauacaau

SEQ ID NO: 797481 - RNA, 19 nt, Human
aaaugggccuccacaaaga

SEQ ID NO: 797482 - RNA, 26 nt, Human
aacaagaacaagauuaaaauacucau

SEQ ID NO: 797483 - RNA, 22 nt, Human
aacauagugaaacccccaacuc

SEQ ID NO: 797484 - RNA, 18 nt, Human
aaccuucucccugccccc

SEQ ID NO: 797485 - RNA, 19 nt, Human
aacucaaccagugucccug

SEQ ID NO: 797486 - RNA, 18 nt, Human
aacugcaucucguuaaca

SEQ ID NO: 797487 - RNA, 22 nt, Human
aagacaccaauacccacaaaua

SEQ ID NO: 797488 - RNA, 24 nt, Human
aagacagugagacucugucucaaa

SEQ ID NO: 797489 - RNA, 20 nt, Human
aaggugguuaaaaaaaaggg

SEQ ID NO: 797490 - RNA, 21 nt, Human
aagguucuggaucuauucuga

SEQ ID NO: 797491 - RNA, 18 nt, Human
aaugauuacaagaacuua

SEQ ID NO: 797492 - RNA, 24 nt, Human
aauugcuugaacccgggaggugga

SEQ ID NO: 797493 - RNA, 21 nt, Human
acaaagcuuuguuccuaaauu

SEQ ID NO: 797494 - RNA, 22 nt, Human
acaaaguaccaaauauauuuca

SEQ ID NO: 797495 - RNA, 24 nt, Human
acaaaguaccaaauauauuucaac

SEQ ID NO: 797496 - RNA, 18 nt, Human
acaaaugcaaaaacacac

SEQ ID NO: 797497 - RNA, 21 nt, Human
acaagaacaagauuaaaauac

SEQ ID NO: 797498 - RNA, 22 nt, Human
acagugagacucugucucaaaa

SEQ ID NO: 797499 - RNA, 20 nt, Human
acuaaagacaaaaacauuug

SEQ ID NO: 797500 - RNA, 21 nt, Human
acucuacuaaaaauacaaaaa

SEQ ID NO: 797501 - RNA, 22 nt, Human
acugcacuccagccugggcaag

SEQ ID NO: 797502 - RNA, 26 nt, Human
acugcacuccagccugggcaagacag

SEQ ID NO: 797503 - RNA, 24 nt, Human
agcacuuugggaggcugaggcggg

SEQ ID NO: 797504 - RNA, 23 nt, Human
agccgggcaugguggcgcacgcc

SEQ ID NO: 797505 - RNA, 22 nt, Human
agccuggccaacauagugaaac

SEQ ID NO: 797506 - RNA, 24 nt, Human
agccuggccaacauagugaaaccc

SEQ ID NO: 797507 - RNA, 24 nt, Human
agccugggcaagacagugagacuc

SEQ ID NO: 797508 - RNA, 20 nt, Human
aggaguuugagaccagccug

SEQ ID NO: 797509 - RNA, 23 nt, Human
aggcaagguugaaggaaaugaga

SEQ ID NO: 797510 - RNA, 24 nt, Human
aggcaggagaauugcuugaacccg

SEQ ID NO: 797511 - RNA, 24 nt, Human
aggcggguggaccacaaggucagg

SEQ ID NO: 797512 - RNA, 21 nt, Human
aggcugaggcggguggaccac

SEQ ID NO: 797513 - RNA, 22 nt, Human
aggcugggcaugguggcucaug

SEQ ID NO: 797514 - RNA, 24 nt, Human
aggcuuaggcaggagaauugcuug

SEQ ID NO: 797515 - RNA, 24 nt, Human
agguggagguugcggugagcuaag

SEQ ID NO: 797516 - RNA, 22 nt, Human
aucacgauaugacacaucauag

SEQ ID NO: 797517 - RNA, 18 nt, Human
aucucguuaacaucuuuc

SEQ ID NO: 797518 - RNA, 19 nt, Human
augcaucuguaccaacuca

SEQ ID NO: 797519 - RNA, 20 nt, Human
caaaagaacuccaucauagc

SEQ ID NO: 797520 - RNA, 22 nt, Human
caaaaugggccuccacaaagau

SEQ ID NO: 797521 - RNA, 19 nt, Human
caaaugcaaaaacacacuu

SEQ ID NO: 797522 - RNA, 19 nt, Human
caacauagugaaaccccca

SEQ ID NO: 797523 - RNA, 21 nt, Human
caaccagugucccugaauaaa

SEQ ID NO: 797524 - RNA, 19 nt, Human
caacucaaccagugucccu

SEQ ID NO: 797525 - RNA, 23 nt, Human
caagacagugagacucugucuca

SEQ ID NO: 797526 - RNA, 24 nt, Human
caaguaccaccuuuggaagguggg

SEQ ID NO: 797527 - RNA, 24 nt, Human
cacaaggucaggaguuugagacca

SEQ ID NO: 797528 - RNA, 24 nt, Human
cacacagguuaaauaauggccccu

SEQ ID NO: 797529 - RNA, 24 nt, Human
caccagauccacaaguaccaccuu

SEQ ID NO: 797530 - RNA, 20 nt, Human
cacgaaugaaugacaacuga

SEQ ID NO: 797531 - RNA, 18 nt, Human
cacgccuguagucccagc

SEQ ID NO: 797532 - RNA, 20 nt, Human
cacuccagccugggcaagac

SEQ ID NO: 797533 - RNA, 21 nt, Human
cacugcacuccagccugggca

SEQ ID NO: 797534 - RNA, 22 nt, Human
cacugcacuccagccugggcaa

SEQ ID NO: 797535 - RNA, 22 nt, Human
cacugcacuccagccugggcaa

SEQ ID NO: 797536 - RNA, 23 nt, Human
cacugcacuccagccugggcaag

SEQ ID NO: 797537 - RNA, 26 nt, Human
cacugcacuccagccugggcaagaca

SEQ ID NO: 797538 - RNA, 20 nt, Human
cacugcacuccagccugggg

SEQ ID NO: 797539 - RNA, 21 nt, Human
cagaaccaaaaaagucacagc

SEQ ID NO: 797540 - RNA, 22 nt, Human
cagcacuuugggaggcugaggc

SEQ ID NO: 797541 - RNA, 24 nt, Human
cagcacuuugggaggcugaggcgg

SEQ ID NO: 797542 - RNA, 20 nt, Human
cagucaacugagguggguca

SEQ ID NO: 797543 - RNA, 18 nt, Human
cauauuaagccaccaacu

SEQ ID NO: 797544 - RNA, 24 nt, Human
caugacuguaaucccagcacuuug

SEQ ID NO: 797545 - RNA, 20 nt, Human
ccacaaggucaggaguuuga

SEQ ID NO: 797546 - RNA, 24 nt, Human
ccacaaggucaggaguuugagacc

SEQ ID NO: 797547 - RNA, 21 nt, Human
ccacaaguaccaccuuuggaa

SEQ ID NO: 797548 - RNA, 20 nt, Human
ccacugcacuccagccuggg

SEQ ID NO: 797549 - RNA, 21 nt, Human
ccacugcacuccagccugggc

SEQ ID NO: 797550 - RNA, 24 nt, Human
ccacugcacuccagccugggcaag

SEQ ID NO: 797551 - RNA, 26 nt, Human
ccacugcacuccagccugggcaagac

SEQ ID NO: 797552 - RNA, 18 nt, Human
ccccaaugaaaaugguac

SEQ ID NO: 797553 - RNA, 19 nt, Human
cccgggagguggagguugc

SEQ ID NO: 797554 - RNA, 23 nt, Human
ccuggccaacauagugaaacccc

SEQ ID NO: 797555 - RNA, 23 nt, Human
ccuggccaacauagugaaacccc

SEQ ID NO: 797556 - RNA, 25 nt, Human
ccuggccaacauagugaaaccccca

SEQ ID NO: 797557 - RNA, 19 nt, Human
ccuguagucccagcuacuc

SEQ ID NO: 797558 - RNA, 22 nt, Human
ccuguagucccagcuacucgag

SEQ ID NO: 797559 - RNA, 22 nt, Human
cgauaugacacaucauagguac

SEQ ID NO: 797560 - RNA, 22 nt, Human
cgccuguagucccagcuacucg

SEQ ID NO: 797561 - RNA, 24 nt, Human
cgggagguggagguugcggugagc

SEQ ID NO: 797562 - RNA, 20 nt, Human
cuaauaaggcuaacccaaaa

SEQ ID NO: 797563 - RNA, 21 nt, Human
cuagccugaacacaaaaccaa

SEQ ID NO: 797564 - RNA, 24 nt, Human
cucaugacuguaaucccagcacuu

SEQ ID NO: 797565 - RNA, 21 nt, Human
cuguaaucccagcacuuuggg

SEQ ID NO: 797566 - RNA, 25 nt, Human
cuucauaaucacuaucaccgggcac

SEQ ID NO: 797567 - RNA, 18 nt, Human
gaaccaaaaaagucacag

SEQ ID NO: 797568 - RNA, 22 nt, Human
gaaucuuaaaaugaaaggacuc

SEQ ID NO: 797569 - RNA, 22 nt, Human
gaccacaaggucaggaguuuga

SEQ ID NO: 797570 - RNA, 24 nt, Human
gaccacaaggucaggaguuugaga

SEQ ID NO: 797571 - RNA, 20 nt, Human
gacuguaugugugcaugugu

SEQ ID NO: 797572 - RNA, 23 nt, Human
gagaauugcuugaacccgggagg

SEQ ID NO: 797573 - RNA, 23 nt, Human
gagaccagccuggccaacauagu

SEQ ID NO: 797574 - RNA, 19 nt, Human
gagguugcggugagcuaag

SEQ ID NO: 797575 - RNA, 25 nt, Human
gauuauggaaucucauuuucuggaa

SEQ ID NO: 797576 - RNA, 23 nt, Human
gcaaaaugggccuccacaaagau

SEQ ID NO: 797577 - RNA, 18 nt, Human
gccaacauagugaaaccc

SEQ ID NO: 797578 - RNA, 22 nt, Human
gccacugcacuccagccugggc

SEQ ID NO: 797579 - RNA, 24 nt, Human
gccacugcacuccagccugggcaa

SEQ ID NO: 797580 - RNA, 21 nt, Human
gcccaaauauuaccaagccaa

SEQ ID NO: 797581 - RNA, 19 nt, Human
gccuccacaaagauuacca

SEQ ID NO: 797582 - RNA, 20 nt, Human
gccuguagucccagcuacuc

SEQ ID NO: 797583 - RNA, 18 nt, Human
ggagguugcggugagcua

SEQ ID NO: 797584 - RNA, 20 nt, Human
ggagguugcggugagcuaag

SEQ ID NO: 797585 - RNA, 22 nt, Human
ggcaugguggcgcacgccugua

SEQ ID NO: 797586 - RNA, 23 nt, Human
ggcaugguggcucaugacuguaa

SEQ ID NO: 797587 - RNA, 24 nt, Human
ggccacugcacuccagccugggca

SEQ ID NO: 797588 - RNA, 21 nt, Human
ggcucaugacuguaaucccag

SEQ ID NO: 797589 - RNA, 20 nt, Human
gggaaaaaagacaccaauac

SEQ ID NO: 797590 - RNA, 22 nt, Human
gggaaagcugugugcacaaagu

SEQ ID NO: 797591 - RNA, 20 nt, Human
gggcaaaauuauuuuccccu

SEQ ID NO: 797592 - RNA, 23 nt, Human
gguaggcugggcaugguggcuca

SEQ ID NO: 797593 - RNA, 25 nt, Human
ggucagucacuaacugaaggggaau

SEQ ID NO: 797594 - RNA, 23 nt, Human
gguggaccacaaggucaggaguu

SEQ ID NO: 797595 - RNA, 19 nt, Human
gguggagguugcggugagc

SEQ ID NO: 797596 - RNA, 24 nt, Human
gguggcgcacgccuguagucccag

SEQ ID NO: 797597 - RNA, 24 nt, Human
gguggcucaugacuguaaucccag

SEQ ID NO: 797598 - RNA, 19 nt, Human
guacuuagaagggcuucca

SEQ ID NO: 797599 - RNA, 23 nt, Human
guggcucaugacuguaaucccag

SEQ ID NO: 797600 - RNA, 21 nt, Human
guuaaaaaaaagggggggaau

SEQ ID NO: 797601 - RNA, 21 nt, Human
guucaggccacugcacuccag

SEQ ID NO: 797602 - RNA, 22 nt, Human
uaaaaaaaaucaccaguuuuua

SEQ ID NO: 797603 - RNA, 22 nt, Human
uaaaaguuagagacuugcagau

SEQ ID NO: 797604 - RNA, 23 nt, Human
uaaacaaaaucaucaguacugca

SEQ ID NO: 797605 - RNA, 21 nt, Human
uaacccaaaaaaccuagagac

SEQ ID NO: 797606 - RNA, 19 nt, Human
uaagaucuaauaaggcuaa

SEQ ID NO: 797607 - RNA, 18 nt, Human
uaagggaacuaugugucu

SEQ ID NO: 797608 - RNA, 25 nt, Human
uaaucacuaucaccgggcaccagau

SEQ ID NO: 797609 - RNA, 22 nt, Human
uaauuugacuuuuuacuauuaa

SEQ ID NO: 797610 - RNA, 18 nt, Human
uacaucugacuucagaac

SEQ ID NO: 797611 - RNA, 20 nt, Human
uagaagagaguaaagguggu

SEQ ID NO: 797612 - RNA, 24 nt, Human
uaggcaggagaauugcuugaaccc

SEQ ID NO: 797613 - RNA, 22 nt, Human
uauaaaccuucucccugccccc

SEQ ID NO: 797614 - RNA, 23 nt, Human
uaucuugauaacaucaaaaacaa

SEQ ID NO: 797615 - RNA, 20 nt, Human
uauucugcaaauuaagccaa

SEQ ID NO: 797616 - RNA, 24 nt, Human
ucaacuagccugaacacaaaacca

SEQ ID NO: 797617 - RNA, 23 nt, Human
ucaggccacugcacuccagccug

SEQ ID NO: 797618 - RNA, 18 nt, Human
ucaucaguacugcacugu

SEQ ID NO: 797619 - RNA, 25 nt, Human
ucaucugaaauuacuucauaaucac

SEQ ID NO: 797620 - RNA, 21 nt, Human
ucauuauuucuaagguaacac

SEQ ID NO: 797621 - RNA, 19 nt, Human
uccuucuuuuuaauaaguu

SEQ ID NO: 797622 - RNA, 21 nt, Human
ucugcaaauuaagccaacauu

SEQ ID NO: 797623 - RNA, 18 nt, Human
ugaaacccccaacucuac

SEQ ID NO: 797624 - RNA, 21 nt, Human
ugaaacccccaacucuacuaa

SEQ ID NO: 797625 - RNA, 20 nt, Human
ugaaaguaauuuccaauuua

SEQ ID NO: 797626 - RNA, 21 nt, Human
ugaaggaaaugagauauaugc

SEQ ID NO: 797627 - RNA, 19 nt, Human
ugacagucaacugaggugg

SEQ ID NO: 797628 - RNA, 18 nt, Human
ugagaccagccuggccaa

SEQ ID NO: 797629 - RNA, 24 nt, Human
ugaggcggguggaccacaagguca

SEQ ID NO: 797630 - RNA, 25 nt, Human
ugaggcggguggaccacaaggucag

SEQ ID NO: 797631 - RNA, 19 nt, Human
ugcaacuaaagacaaaaac

SEQ ID NO: 797632 - RNA, 24 nt, Human
ugcacaaaugcaaaaacacacuuc

SEQ ID NO: 797633 - RNA, 21 nt, Human
uggaccacaaggucaggaguu

SEQ ID NO: 797634 - RNA, 21 nt, Human
uggcgcacgccuguaguccca

SEQ ID NO: 797635 - RNA, 24 nt, Human
uggcucaugacuguaaucccagca

SEQ ID NO: 797636 - RNA, 19 nt, Human
ugggaggcugaggcgggug

SEQ ID NO: 797637 - RNA, 20 nt, Human
ugggaggcugaggcgggugg

SEQ ID NO: 797638 - RNA, 24 nt, Human
ugggaggcugaggcggguggacca

SEQ ID NO: 797639 - RNA, 24 nt, Human
ugguggcgcacgccuguaguccca

SEQ ID NO: 797640 - RNA, 24 nt, Human
ugguggcucaugacuguaauccca

SEQ ID NO: 797641 - RNA, 19 nt, Human
ugugcauguguccaaauga

SEQ ID NO: 797642 - RNA, 19 nt, Human
ugugugcauguguccaaau

SEQ ID NO: 797643 - RNA, 19 nt, Human
uuaaaugaagcaggaggag

SEQ ID NO: 797644 - RNA, 18 nt, Human
uuaaaugcacaaaugcaa

SEQ ID NO: 797645 - RNA, 27 nt, Human
uuaaccaaaaaaaaaaaaaaaaagugu

SEQ ID NO: 797646 - RNA, 18 nt, Human
uuagccgggcaugguggc

SEQ ID NO: 797647 - RNA, 24 nt, Human
uuaggcaggagaauugcuugaacc

SEQ ID NO: 797648 - RNA, 22 nt, Human
uuccacuugcaaaaugggccuc

SEQ ID NO: 797649 - RNA, 23 nt, Human
uuccacuugcaaaaugggccucc

SEQ ID NO: 797650 - RNA, 21 nt, Human
uugaacacacaaaaacaucaa

SEQ ID NO: 797651 - RNA, 24 nt, Human
uugaacccgggagguggagguugc

SEQ ID NO: 797652 - RNA, 19 nt, Human
uugaauuacaggaacuguu

SEQ ID NO: 797653 - RNA, 20 nt, Human
uugcaacuaaagacaaaaac

SEQ ID NO: 797654 - RNA, 24 nt, Human
uugcuugaacccgggagguggagg

SEQ ID NO: 797655 - RNA, 20 nt, Human
uuuaaacuuacacugaaaga

SEQ ID NO: 797656 - RNA, 19 nt, Human
uuugaacuacuggcccagu

SEQ ID NO: 797657 - RNA, 22 nt, Human
uuuuaauaaguuugcuauauuc

SEQ ID NO: 797658 - RNA, 26 nt, Human
uuuugugacauaaauuaagaugaagu

SEQ ID NO: 797659 - RNA, 20 nt, Human
aaacaacucugcacaaagca

SEQ ID NO: 797660 - RNA, 23 nt, Human
aaaccucuuaaauuccucugccc

SEQ ID NO: 797661 - RNA, 21 nt, Human
aaagcacaaacacaagggagg

SEQ ID NO: 797662 - RNA, 24 nt, Human
aaagcacaaacacaagggaggucu

SEQ ID NO: 797663 - RNA, 18 nt, Human
aacugugguauccaggua

SEQ ID NO: 797664 - RNA, 22 nt, Human
aagcacaaacacaagggagguc

SEQ ID NO: 797665 - RNA, 20 nt, Human
aauaaauaguagaaaaauaa

SEQ ID NO: 797666 - RNA, 20 nt, Human
aauccuuuacuuagaaauuc

SEQ ID NO: 797667 - RNA, 22 nt, Human
acaaaacagcucggggcaacug

SEQ ID NO: 797668 - RNA, 21 nt, Human
acacaaaacagcucggggcaa

SEQ ID NO: 797669 - RNA, 25 nt, Human
acauaacauuucuuuuaaaaccucu

SEQ ID NO: 797670 - RNA, 18 nt, Human
accccuuuggccuugucu

SEQ ID NO: 797671 - RNA, 21 nt, Human
acugcauuacaaacaaagaug

SEQ ID NO: 797672 - RNA, 19 nt, Human
acugcugaaaacuucuccu

SEQ ID NO: 797673 - RNA, 22 nt, Human
acuugcuuguuccgauugacca

SEQ ID NO: 797674 - RNA, 21 nt, Human
agcaauuugguggauaauguc

SEQ ID NO: 797675 - RNA, 18 nt, Human
aggcaggaaaugacucaa

SEQ ID NO: 797676 - RNA, 24 nt, Human
aggugggauaguacagcagucuug

SEQ ID NO: 797677 - RNA, 22 nt, Human
auacagcaacugugguauccag

SEQ ID NO: 797678 - RNA, 20 nt, Human
caaaaaagacuagagaaaaa

SEQ ID NO: 797679 - RNA, 23 nt, Human
caaguaacgguugaacuucucuc

SEQ ID NO: 797680 - RNA, 25 nt, Human
caaugcacacauuuguaucugcaug

SEQ ID NO: 797681 - RNA, 26 nt, Human
cacuacuuuaaaguuacaaugcccca

SEQ ID NO: 797682 - RNA, 20 nt, Human
cagaaccagccucacaucuu

SEQ ID NO: 797683 - RNA, 22 nt, Human
cagagaaagaauacugcauuac

SEQ ID NO: 797684 - RNA, 18 nt, Human
cagguuccgucucugugu

SEQ ID NO: 797685 - RNA, 23 nt, Human
cauugcauacgguuuauuucacu

SEQ ID NO: 797686 - RNA, 19 nt, Human
ccacacacauucuuuacca

SEQ ID NO: 797687 - RNA, 21 nt, Human
ccacacacauucuuuaccaug

SEQ ID NO: 797688 - RNA, 19 nt, Human
ccagccucacaucuucaca

SEQ ID NO: 797689 - RNA, 18 nt, Human
ccccuccccaucucuguc

SEQ ID NO: 797690 - RNA, 23 nt, Human
cccuuacugaggcuguccaaaaa

SEQ ID NO: 797691 - RNA, 19 nt, Human
ccuucuguuaccuuccauu

SEQ ID NO: 797692 - RNA, 21 nt, Human
cucuuuggaacauuccucugg

SEQ ID NO: 797693 - RNA, 23 nt, Human
cucuuuggaacauuccucuggcu

SEQ ID NO: 797694 - RNA, 23 nt, Human
cugccccuccccaucucugucaa

SEQ ID NO: 797695 - RNA, 19 nt, Human
cugggugagcagauuuuuc

SEQ ID NO: 797696 - RNA, 18 nt, Human
cuguauaaaucacaaagc

SEQ ID NO: 797697 - RNA, 22 nt, Human
cuguuacaaaucaaacaguaaa

SEQ ID NO: 797698 - RNA, 21 nt, Human
cuuccauuaguguuauggcag

SEQ ID NO: 797699 - RNA, 20 nt, Human
cuuggcuaacuggcagcagc

SEQ ID NO: 797700 - RNA, 22 nt, Human
cuuuccagaacauucuguagcu

SEQ ID NO: 797701 - RNA, 23 nt, Human
gaaccagccucacaucuucacaa

SEQ ID NO: 797702 - RNA, 22 nt, Human
gagcauaacaugaguuccauac

SEQ ID NO: 797703 - RNA, 22 nt, Human
gauuucuucauuuuccuauuuu

SEQ ID NO: 797704 - RNA, 19 nt, Human
ggaaaauaaauccaacccu

SEQ ID NO: 797705 - RNA, 24 nt, Human
ggagagcugaaugcuucuggcucu

SEQ ID NO: 797706 - RNA, 18 nt, Human
guaccgcuaagaaacaaa

SEQ ID NO: 797707 - RNA, 26 nt, Human
uaaaacaaggaaaauaaauccaaccc

SEQ ID NO: 797708 - RNA, 22 nt, Human
uaaggagagcugaaugcuucug

SEQ ID NO: 797709 - RNA, 19 nt, Human
uacauuguaucauaauacc

SEQ ID NO: 797710 - RNA, 20 nt, Human
uacauuguaucauaauaccc

SEQ ID NO: 797711 - RNA, 23 nt, Human
uaccacacacauucuuuaccaug

SEQ ID NO: 797712 - RNA, 22 nt, Human
uagaaaccuaagaauagcauug

SEQ ID NO: 797713 - RNA, 19 nt, Human
uagaaauucugagaugcau

SEQ ID NO: 797714 - RNA, 19 nt, Human
uaguagaaaaauaauccuu

SEQ ID NO: 797715 - RNA, 21 nt, Human
uauaaacggagauuuaccaca

SEQ ID NO: 797716 - RNA, 21 nt, Human
ucaaacaacucugcacaaagc

SEQ ID NO: 797717 - RNA, 21 nt, Human
ucagucaaaaugggauauuua

SEQ ID NO: 797718 - RNA, 20 nt, Human
ucaguuaaauaagaaauaga

SEQ ID NO: 797719 - RNA, 21 nt, Human
ucaguuaaauaagaaauagag

SEQ ID NO: 797720 - RNA, 21 nt, Human
uccccaucucugucaaacaca

SEQ ID NO: 797721 - RNA, 20 nt, Human
ucugggugagcagauuuuuc

SEQ ID NO: 797722 - RNA, 22 nt, Human
ucuuuggaacauuccucuggcu

SEQ ID NO: 797723 - RNA, 20 nt, Human
ugaaugcuucuggcucuuug

SEQ ID NO: 797724 - RNA, 20 nt, Human
ugacucaaacaacucugcac

SEQ ID NO: 797725 - RNA, 20 nt, Human
ugacucaaacaacucugcac

SEQ ID NO: 797726 - RNA, 18 nt, Human
ugcacaaagcacaaacac

SEQ ID NO: 797727 - RNA, 22 nt, Human
ugcacaaagcacaaacacaagg

SEQ ID NO: 797728 - RNA, 19 nt, Human
ugcuguggguuuuaagccg

SEQ ID NO: 797729 - RNA, 20 nt, Human
uggcguggaggugaggagaa

SEQ ID NO: 797730 - RNA, 20 nt, Human
uggcguggaggugaggagau

SEQ ID NO: 797731 - RNA, 21 nt, Human
uggcguggaggugaggagauu

SEQ ID NO: 797732 - RNA, 23 nt, Human
ugggauaucaguuaaauaagaaa

SEQ ID NO: 797733 - RNA, 22 nt, Human
uguuccgauugaccacauccaa

SEQ ID NO: 797734 - RNA, 18 nt, Human
uuccucugccccucccca

SEQ ID NO: 797735 - RNA, 18 nt, Human
uuuguagucucuaaaaca

SEQ ID NO: 797736 - RNA, 19 nt, Human
uuuuguggaguggggcagu

SEQ ID NO: 797737 - RNA, 19 nt, Human
aaaaaacaaucaagagaca

SEQ ID NO: 797738 - RNA, 18 nt, Human
aaaagcucuaaagccaca

SEQ ID NO: 797739 - RNA, 19 nt, Human
aaaccaaaccaaacccaga

SEQ ID NO: 797740 - RNA, 20 nt, Human
aaagugucacuggccugagg

SEQ ID NO: 797741 - RNA, 24 nt, Human
aaauaaaaccaaaccaaacccaga

SEQ ID NO: 797742 - RNA, 21 nt, Human
aacagccaauaauauagcacu

SEQ ID NO: 797743 - RNA, 22 nt, Human
aacuugcgucccccgguucuuc

SEQ ID NO: 797744 - RNA, 18 nt, Human
aaggcagacugagacauu

SEQ ID NO: 797745 - RNA, 21 nt, Human
aagggcucuucacuccuucag

SEQ ID NO: 797746 - RNA, 22 nt, Human
acaaaagcucuaaagccacaaa

SEQ ID NO: 797747 - RNA, 20 nt, Human
acauucucccaccugggucc

SEQ ID NO: 797748 - RNA, 23 nt, Human
acccaacuuacuaggaaugccac

SEQ ID NO: 797749 - RNA, 20 nt, Human
acuacagcauuuguucacug

SEQ ID NO: 797750 - RNA, 20 nt, Human
acugcauggcaugggauugg

SEQ ID NO: 797751 - RNA, 22 nt, Human
agacaggaaagaaggugcuuaa

SEQ ID NO: 797752 - RNA, 25 nt, Human
agagagaaaaaguacuacuaggaga

SEQ ID NO: 797753 - RNA, 21 nt, Human
agcucuggaaaaugucauuuc

SEQ ID NO: 797754 - RNA, 21 nt, Human
aggaaggagaugcucauugac

SEQ ID NO: 797755 - RNA, 19 nt, Human
aggauagguaaaaagacca

SEQ ID NO: 797756 - RNA, 23 nt, Human
aggcacaauauaacaaaagcucu

SEQ ID NO: 797757 - RNA, 23 nt, Human
aguucacuucuaucaagcuuaaa

SEQ ID NO: 797758 - RNA, 23 nt, Human
caauauaacaaaagcucuaaagc

SEQ ID NO: 797759 - RNA, 22 nt, Human
cacaaugaggagaaacucuuca

SEQ ID NO: 797760 - RNA, 24 nt, Human
caccaggaauugaaauuuacagaa

SEQ ID NO: 797761 - RNA, 26 nt, Human
cagcaaugcucaggaaugacuucuga

SEQ ID NO: 797762 - RNA, 21 nt, Human
ccaaaccauccuucacauucu

SEQ ID NO: 797763 - RNA, 24 nt, Human
ccacuugcggaaaggguugggucc

SEQ ID NO: 797764 - RNA, 21 nt, Human
cccuaguauggccaagggcuc

SEQ ID NO: 797765 - RNA, 19 nt, Human
ccuagaguuuguuacaugu

SEQ ID NO: 797766 - RNA, 23 nt, Human
cucaccccuugguuccucagaug

SEQ ID NO: 797767 - RNA, 21 nt, Human
cucccuaagacccccuuuuca

SEQ ID NO: 797768 - RNA, 21 nt, Human
cugaaaaguugaacaaggugu

SEQ ID NO: 797769 - RNA, 22 nt, Human
cugcagacaaacacgacacgca

SEQ ID NO: 797770 - RNA, 23 nt, Human
cugcgguggcugcgguggcugcg

SEQ ID NO: 797771 - RNA, 19 nt, Human
cuggaguaauuugcgauua

SEQ ID NO: 797772 - RNA, 22 nt, Human
gaaaaaacaaucaagagacagg

SEQ ID NO: 797773 - RNA, 20 nt, Human
gaaauccauggucaaagugg

SEQ ID NO: 797774 - RNA, 24 nt, Human
gaacccacagauggaugguuuuga

SEQ ID NO: 797775 - RNA, 20 nt, Human
gaauucuaggagcuggacag

SEQ ID NO: 797776 - RNA, 24 nt, Human
gagagcccuaguauggccaagggc

SEQ ID NO: 797777 - RNA, 22 nt, Human
gagcagguggcuuguuccuugg

SEQ ID NO: 797778 - RNA, 18 nt, Human
gcaaagguaauaggggaa

SEQ ID NO: 797779 - RNA, 19 nt, Human
gcaaggaaggagaugcuca

SEQ ID NO: 797780 - RNA, 18 nt, Human
gcaagugugcaaacacca

SEQ ID NO: 797781 - RNA, 23 nt, Human
gcgguggcugcgguggcugcggc

SEQ ID NO: 797782 - RNA, 23 nt, Human
gcugacugcagacaaacacgaca

SEQ ID NO: 797783 - RNA, 22 nt, Human
gcugcagauucuacaccggggu

SEQ ID NO: 797784 - RNA, 23 nt, Human
gcugcgguggcugcgguggcugc

SEQ ID NO: 797785 - RNA, 19 nt, Human
ggacuggaaggacggggug

SEQ ID NO: 797786 - RNA, 19 nt, Human
ggacuuuggaaaucaggua

SEQ ID NO: 797787 - RNA, 21 nt, Human
ggagaaacugggcaauguaaa

SEQ ID NO: 797788 - RNA, 19 nt, Human
ggagcucccucuguuucuc

SEQ ID NO: 797789 - RNA, 20 nt, Human
ggccaagggcucuucacucc

SEQ ID NO: 797790 - RNA, 18 nt, Human
ggcgcucgagggcgcggg

SEQ ID NO: 797791 - RNA, 19 nt, Human
ggcugcggcgcugggggag

SEQ ID NO: 797792 - RNA, 21 nt, Human
ggggugggguuccuuaggagc

SEQ ID NO: 797793 - RNA, 20 nt, Human
guggcugaguucccacuccc

SEQ ID NO: 797794 - RNA, 18 nt, Human
guggcugcgguggcugcg

SEQ ID NO: 797795 - RNA, 24 nt, Human
guguaauacacagauaggagaggg

SEQ ID NO: 797796 - RNA, 21 nt, Human
uaaaaccaaaccaaacccaga

SEQ ID NO: 797797 - RNA, 21 nt, Human
uacauguugggacaugcuuug

SEQ ID NO: 797798 - RNA, 27 nt, Human
uaggcacaauauaacaaaagcucuaaa

SEQ ID NO: 797799 - RNA, 21 nt, Human
uauggagcaggaagaaucccc

SEQ ID NO: 797800 - RNA, 18 nt, Human
ucaagcacagucaaauug

SEQ ID NO: 797801 - RNA, 20 nt, Human
ucacaguuccuuuaaggcag

SEQ ID NO: 797802 - RNA, 22 nt, Human
ucagaaaaaacaaucaagagac

SEQ ID NO: 797803 - RNA, 23 nt, Human
ucagaaaaaacaaucaagagaca

SEQ ID NO: 797804 - RNA, 20 nt, Human
ucagaugcugaauauaaacc

SEQ ID NO: 797805 - RNA, 21 nt, Human
uccccgggggaaggagagccc

SEQ ID NO: 797806 - RNA, 23 nt, Human
uccucaucuuccaaaccauccuu

SEQ ID NO: 797807 - RNA, 20 nt, Human
ucuaaagccacaaagacauu

SEQ ID NO: 797808 - RNA, 20 nt, Human
ucucuaaaugacccagaacu

SEQ ID NO: 797809 - RNA, 21 nt, Human
ucucuuaggcauugggccugg

SEQ ID NO: 797810 - RNA, 18 nt, Human
ucugaaaggguuuucuuu

SEQ ID NO: 797811 - RNA, 19 nt, Human
ugaaaaguugaacaaggug

SEQ ID NO: 797812 - RNA, 26 nt, Human
ugaaacagauauggagcaggaagaau

SEQ ID NO: 797813 - RNA, 21 nt, Human
ugaaagcacccuuucuugucu

SEQ ID NO: 797814 - RNA, 20 nt, Human
ugacauuugcuacaaaagga

SEQ ID NO: 797815 - RNA, 20 nt, Human
ugaggaauucuaggagcugg

SEQ ID NO: 797816 - RNA, 23 nt, Human
ugaggagaaacucuucagauaag

SEQ ID NO: 797817 - RNA, 21 nt, Human
ugaggugacauuugcuacaaa

SEQ ID NO: 797818 - RNA, 18 nt, Human
ugaugcugguguccuccu

SEQ ID NO: 797819 - RNA, 19 nt, Human
ugaugcugguguccuccuu

SEQ ID NO: 797820 - RNA, 19 nt, Human
ugcggaaaggguugggucc

SEQ ID NO: 797821 - RNA, 21 nt, Human
ugcgguggcugcggcgcuggg

SEQ ID NO: 797822 - RNA, 20 nt, Human
ugcgguggcugcgguggcug

SEQ ID NO: 797823 - RNA, 19 nt, Human
uggaaggacggggugagga

SEQ ID NO: 797824 - RNA, 18 nt, Human
uggcaaggaaggagaugc

SEQ ID NO: 797825 - RNA, 23 nt, Human
uggcuuguuccuugguuggaagc

SEQ ID NO: 797826 - RNA, 24 nt, Human
ugggaggggaggaacuguacaucu

SEQ ID NO: 797827 - RNA, 24 nt, Human
ugggguaugaaucaaaugagcucc

SEQ ID NO: 797828 - RNA, 23 nt, Human
ugguagggguggugggggagagu

SEQ ID NO: 797829 - RNA, 18 nt, Human
uggugggggagagugccu

SEQ ID NO: 797830 - RNA, 18 nt, Human
ugguggguccuggaguac

SEQ ID NO: 797831 - RNA, 22 nt, Human
ugguuuugauacaggggagagg

SEQ ID NO: 797832 - RNA, 23 nt, Human
ugguuuugauacaggggagaggg

SEQ ID NO: 797833 - RNA, 23 nt, Human
uuaaauaaaaccaaaccaaaccc

SEQ ID NO: 797834 - RNA, 21 nt, Human
uuccucagaugaaagcacccu

SEQ ID NO: 797835 - RNA, 21 nt, Human
uuccuugguuuccgaagagca

SEQ ID NO: 797836 - RNA, 21 nt, Human
uucuaggagcuggacagggcu

SEQ ID NO: 797837 - RNA, 23 nt, Human
uucuguauucugaaaggguuuuc

SEQ ID NO: 797838 - RNA, 18 nt, Human
uugguagggguggugggg

SEQ ID NO: 797839 - RNA, 21 nt, Human
uuuacagaauugguaaugcag

SEQ ID NO: 797840 - RNA, 18 nt, Human
aaaaaggguacaaaggca

SEQ ID NO: 797841 - RNA, 19 nt, Human
aaacaaaccaucccuccca

SEQ ID NO: 797842 - RNA, 22 nt, Human
aaagaaagaaauagggaaaaaa

SEQ ID NO: 797843 - RNA, 21 nt, Human
aagaaagaaauagggaaaaaa

SEQ ID NO: 797844 - RNA, 23 nt, Human
aagguuacagaaccaucagcuaa

SEQ ID NO: 797845 - RNA, 18 nt, Human
aauaaaauaaaggaaaga

SEQ ID NO: 797846 - RNA, 20 nt, Human
acaaaaccagaaaaaaaaaa

SEQ ID NO: 797847 - RNA, 25 nt, Human
acaaaaccagaaaaaaaaaauuaaa

SEQ ID NO: 797848 - RNA, 26 nt, Human
acaaaaccagaaaaaaaaaauuaaaa

SEQ ID NO: 797849 - RNA, 19 nt, Human
accaugcaauccaaaaggu

SEQ ID NO: 797850 - RNA, 19 nt, Human
agcauguucucuagugaag

SEQ ID NO: 797851 - RNA, 25 nt, Human
aggaaagaaagaaauagggaaaaga

SEQ ID NO: 797852 - RNA, 21 nt, Human
aggaacauguucaugccagag

SEQ ID NO: 797853 - RNA, 22 nt, Human
aggaggcacgaaccccaauucc

SEQ ID NO: 797854 - RNA, 21 nt, Human
aggaguaaagcugaauccauu

SEQ ID NO: 797855 - RNA, 19 nt, Human
aggggccacccgcgggagu

SEQ ID NO: 797856 - RNA, 19 nt, Human
auccccaccccccacccca

SEQ ID NO: 797857 - RNA, 23 nt, Human
aucccucccauccccacccccca

SEQ ID NO: 797858 - RNA, 26 nt, Human
auuaaaaaaaaagaaaacugaaaagu

SEQ ID NO: 797859 - RNA, 18 nt, Human
caagagacacuggacaac

SEQ ID NO: 797860 - RNA, 23 nt, Human
caagcuacugcagcuucaaguau

SEQ ID NO: 797861 - RNA, 21 nt, Human
caaguggcuauccugccagug

SEQ ID NO: 797862 - RNA, 21 nt, Human
cacaugcacaagcaucgugug

SEQ ID NO: 797863 - RNA, 18 nt, Human
caccccccaccccauuca

SEQ ID NO: 797864 - RNA, 21 nt, Human
caccccccaccccauucauac

SEQ ID NO: 797865 - RNA, 20 nt, Human
cacuauacuguaaccaaagu

SEQ ID NO: 797866 - RNA, 23 nt, Human
cauacaaaaccagaaaaaaaaaa

SEQ ID NO: 797867 - RNA, 26 nt, Human
cauacaaaaccagaaaaaaaaaauua

SEQ ID NO: 797868 - RNA, 25 nt, Human
cauccccaccccccaccccauucau

SEQ ID NO: 797869 - RNA, 20 nt, Human
caucccucccauccccaccc

SEQ ID NO: 797870 - RNA, 20 nt, Human
caugagcauguuuacauggg

SEQ ID NO: 797871 - RNA, 23 nt, Human
ccaaccaugcaauccaaaaggug

SEQ ID NO: 797872 - RNA, 21 nt, Human
ccaacccugaagcaaggcgua

SEQ ID NO: 797873 - RNA, 23 nt, Human
cccauggacagacaucaacacua

SEQ ID NO: 797874 - RNA, 21 nt, Human
cccucccauccccacccccca

SEQ ID NO: 797875 - RNA, 20 nt, Human
ccuacacaacuuucuguccu

SEQ ID NO: 797876 - RNA, 19 nt, Human
ccucccauccccacccccc

SEQ ID NO: 797877 - RNA, 21 nt, Human
ccucccauccccaccccccac

SEQ ID NO: 797878 - RNA, 22 nt, Human
ccucccauccccaccccccacc

SEQ ID NO: 797879 - RNA, 20 nt, Human
ccuuuuuuuuucuuuuuacc

SEQ ID NO: 797880 - RNA, 19 nt, Human
cgauggcucgggugaacac

SEQ ID NO: 797881 - RNA, 22 nt, Human
cucuguucuuuaaguuaaaaag

SEQ ID NO: 797882 - RNA, 23 nt, Human
cugcugcugucgucuuaauguau

SEQ ID NO: 797883 - RNA, 21 nt, Human
cuguguguauacauauauaua

SEQ ID NO: 797884 - RNA, 20 nt, Human
cuuaauuacuuucaacuuca

SEQ ID NO: 797885 - RNA, 23 nt, Human
cuucuaaacaaaaauaccuacaa

SEQ ID NO: 797886 - RNA, 18 nt, Human
cuuuaaaaagcacaaggu

SEQ ID NO: 797887 - RNA, 24 nt, Human
cuuucaacuucaugagcauguuua

SEQ ID NO: 797888 - RNA, 22 nt, Human
gcgcaugaaauaguucuucuaa

SEQ ID NO: 797889 - RNA, 20 nt, Human
gcuugcugcucuggcugugu

SEQ ID NO: 797890 - RNA, 22 nt, Human
ggaaaaaauaaaaaacacacaa

SEQ ID NO: 797891 - RNA, 23 nt, Human
ggaaaaaauaaaaaacacacaaa

SEQ ID NO: 797892 - RNA, 22 nt, Human
ggcugcuuuuguuugaguaauu

SEQ ID NO: 797893 - RNA, 24 nt, Human
gggaaaaaauaaaaaacacacaag

SEQ ID NO: 797894 - RNA, 24 nt, Human
gugaagggaacaagagacacugga

SEQ ID NO: 797895 - RNA, 20 nt, Human
guggugugugugugugucug

SEQ ID NO: 797896 - RNA, 20 nt, Human
gugguuguugguggugugug

SEQ ID NO: 797897 - RNA, 21 nt, Human
gugugucuguguguauacauu

SEQ ID NO: 797898 - RNA, 18 nt, Human
uaaaaaaaaagaaaacug

SEQ ID NO: 797899 - RNA, 21 nt, Human
uaaaaaacacacaaacuuuca

SEQ ID NO: 797900 - RNA, 25 nt, Human
uaaaaagcacaagguuacagaacca

SEQ ID NO: 797901 - RNA, 28 nt, Human
uaaaaauugcuuuaaaaagcacaagguu

SEQ ID NO: 797902 - RNA, 20 nt, Human
uaaagacacuauacuguaac

SEQ ID NO: 797903 - RNA, 22 nt, Human
uaacaguaguugguguauaggu

SEQ ID NO: 797904 - RNA, 21 nt, Human
uaauuucucccaauagaucuc

SEQ ID NO: 797905 - RNA, 22 nt, Human
uacaaaaccagaaaaaaaaaau

SEQ ID NO: 797906 - RNA, 23 nt, Human
uacaaaaccagaaaaaaaaaauu

SEQ ID NO: 797907 - RNA, 18 nt, Human
uacaaacauaccucuaag

SEQ ID NO: 797908 - RNA, 18 nt, Human
uacaaccuuuuuuuuucu

SEQ ID NO: 797909 - RNA, 24 nt, Human
uacagaaccaucagcuaaaguaaa

SEQ ID NO: 797910 - RNA, 18 nt, Human
uaccuaugcagaauagau

SEQ ID NO: 797911 - RNA, 21 nt, Human
uaccuaugcagaauagauaua

SEQ ID NO: 797912 - RNA, 25 nt, Human
uaguggugguuguugguggugugug

SEQ ID NO: 797913 - RNA, 18 nt, Human
uauaaauauauauacaua

SEQ ID NO: 797914 - RNA, 23 nt, Human
uauacagaaaacaggagagcuuu

SEQ ID NO: 797915 - RNA, 22 nt, Human
uauacucaguguaaaccaaacc

SEQ ID NO: 797916 - RNA, 20 nt, Human
uauauacaguacaauaaaug

SEQ ID NO: 797917 - RNA, 18 nt, Human
uauauauauguauacaua

SEQ ID NO: 797918 - RNA, 23 nt, Human
uauauguauacauaaguuguaua

SEQ ID NO: 797919 - RNA, 24 nt, Human
uauuccauuucuucagcuguuuua

SEQ ID NO: 797920 - RNA, 23 nt, Human
uauucuagugccuguuauaagca

SEQ ID NO: 797921 - RNA, 22 nt, Human
ucaacacuauuccauuucuuca

SEQ ID NO: 797922 - RNA, 24 nt, Human
ucacaggauggagguguuuuguuu

SEQ ID NO: 797923 - RNA, 22 nt, Human
ucaccaccugagccaacccuga

SEQ ID NO: 797924 - RNA, 21 nt, Human
uccaaccaugcaauccaaaag

SEQ ID NO: 797925 - RNA, 20 nt, Human
uccacaugcacaagcaucgu

SEQ ID NO: 797926 - RNA, 22 nt, Human
ucccauccccaccccccacccc

SEQ ID NO: 797927 - RNA, 19 nt, Human
ucccauggacagacaucaa

SEQ ID NO: 797928 - RNA, 21 nt, Human
uccccaccccccaccccauuc

SEQ ID NO: 797929 - RNA, 25 nt, Human
uccuaggcuaggaggcacgaacccc

SEQ ID NO: 797930 - RNA, 23 nt, Human
ucuaaacaaaaauaccuacaaac

SEQ ID NO: 797931 - RNA, 18 nt, Human
ucuaagcauguucucuag

SEQ ID NO: 797932 - RNA, 20 nt, Human
ucuagugccuguuauaagca

SEQ ID NO: 797933 - RNA, 21 nt, Human
ucucccaauagaucucagucc

SEQ ID NO: 797934 - RNA, 20 nt, Human
ucugauagguuuucucucag

SEQ ID NO: 797935 - RNA, 19 nt, Human
ugaaaauguaaagaugagu

SEQ ID NO: 797936 - RNA, 18 nt, Human
ugcuucucugggguaccc

SEQ ID NO: 797937 - RNA, 24 nt, Human
uggacgaacagcacugcaaagcca

SEQ ID NO: 797938 - RNA, 25 nt, Human
uggacgaacagcacugcaaagccac

SEQ ID NO: 797939 - RNA, 22 nt, Human
uggagguguuuuguuugguucu

SEQ ID NO: 797940 - RNA, 23 nt, Human
uggcauuugcacccugaggcaga

SEQ ID NO: 797941 - RNA, 19 nt, Human
ugggugaugaauuacaacc

SEQ ID NO: 797942 - RNA, 18 nt, Human
ugguggugugugugugug

SEQ ID NO: 797943 - RNA, 20 nt, Human
uggugguguguguguguguc

SEQ ID NO: 797944 - RNA, 23 nt, Human
uggugugugugugugucugugug

SEQ ID NO: 797945 - RNA, 26 nt, Human
ugguuguugguggugugugugugugu

SEQ ID NO: 797946 - RNA, 18 nt, Human
uguauaaauauauauaca

SEQ ID NO: 797947 - RNA, 24 nt, Human
uguauacauaaguuguauaaauau

SEQ ID NO: 797948 - RNA, 18 nt, Human
uguauacauauauauaug

SEQ ID NO: 797949 - RNA, 23 nt, Human
uguauacauauauauauguauac

SEQ ID NO: 797950 - RNA, 24 nt, Human
uguauacauauauauauguauaca

SEQ ID NO: 797951 - RNA, 21 nt, Human
uguccugcacaaagucaaaau

SEQ ID NO: 797952 - RNA, 25 nt, Human
ugucuguguguauacauauauauag

SEQ ID NO: 797953 - RNA, 20 nt, Human
uguggcucuguucuuuaagu

SEQ ID NO: 797954 - RNA, 22 nt, Human
uguggcucuguucuuuaaguua

SEQ ID NO: 797955 - RNA, 19 nt, Human
uguguauacauauauauau

SEQ ID NO: 797956 - RNA, 21 nt, Human
uguguauacauauauauaugu

SEQ ID NO: 797957 - RNA, 18 nt, Human
ugugucuguguguauaca

SEQ ID NO: 797958 - RNA, 18 nt, Human
ugugucuguguguauaca

SEQ ID NO: 797959 - RNA, 18 nt, Human
uguguguauacauauaua

SEQ ID NO: 797960 - RNA, 24 nt, Human
uguguguauacauauauauaugua

SEQ ID NO: 797961 - RNA, 25 nt, Human
uguguguauacauauauauauguaa

SEQ ID NO: 797962 - RNA, 18 nt, Human
ugugugucuguguguaua

SEQ ID NO: 797963 - RNA, 19 nt, Human
ugugugugugucugugugu

SEQ ID NO: 797964 - RNA, 22 nt, Human
ugugugugugucuguguguaua

SEQ ID NO: 797965 - RNA, 21 nt, Human
ugugugugugugucugugugu

SEQ ID NO: 797966 - RNA, 22 nt, Human
ugugugugugugucugugugua

SEQ ID NO: 797967 - RNA, 24 nt, Human
uguuucugcugcugucgucuuaau

SEQ ID NO: 797968 - RNA, 22 nt, Human
uuacaaccuuuuuuuuucuuuu

SEQ ID NO: 797969 - RNA, 22 nt, Human
uuaguauuucauuuuguugguu

SEQ ID NO: 797970 - RNA, 25 nt, Human
uucucucaguuuuuuuuuuguuuuu

SEQ ID NO: 797971 - RNA, 24 nt, Human
uugcuagucucagugcuucucugg

SEQ ID NO: 797972 - RNA, 19 nt, Human
uugguggugugugugugug

SEQ ID NO: 797973 - RNA, 24 nt, Human
uuucagugucgucaugguaacagu

SEQ ID NO: 797974 - RNA, 24 nt, Human
uuugguaguuagaucuccaguuug

SEQ ID NO: 797975 - RNA, 22 nt, Human
uuuguugguuuguuuaaauaug

SEQ ID NO: 797976 - RNA, 20 nt, Human
aaaacacagguuuauggaca

SEQ ID NO: 797977 - RNA, 19 nt, Human
aaaccagagguuagcagca

SEQ ID NO: 797978 - RNA, 18 nt, Human
aaagaaacaaauuggaau

SEQ ID NO: 797979 - RNA, 24 nt, Human
aacacacuugccaaauucaaguau

SEQ ID NO: 797980 - RNA, 25 nt, Human
aagaaaaaggcaaauuuaaaaagaa

SEQ ID NO: 797981 - RNA, 28 nt, Human
aagaacacgagagagagaaccgguaccc

SEQ ID NO: 797982 - RNA, 21 nt, Human
aagacuccaacgaacaggaua

SEQ ID NO: 797983 - RNA, 19 nt, Human
aagcacacacugggcaaca

SEQ ID NO: 797984 - RNA, 20 nt, Human
aauuugugaucacuguucuc

SEQ ID NO: 797985 - RNA, 19 nt, Human
acaagcgugcgcuagaagc

SEQ ID NO: 797986 - RNA, 22 nt, Human
acacgagagagagaacaaaucc

SEQ ID NO: 797987 - RNA, 22 nt, Human
acaguaaugcaaaaggcauccu

SEQ ID NO: 797988 - RNA, 24 nt, Human
agaagacauacaguaaugcaaaag

SEQ ID NO: 797989 - RNA, 25 nt, Human
agacaagacuccaacgaaccgacgc

SEQ ID NO: 797990 - RNA, 18 nt, Human
agcacaguagugucugua

SEQ ID NO: 797991 - RNA, 23 nt, Human
agcuuacaccacuaagaguaagc

SEQ ID NO: 797992 - RNA, 22 nt, Human
agggaggauucauuuccccacc

SEQ ID NO: 797993 - RNA, 18 nt, Human
auggauuuuuacugagcc

SEQ ID NO: 797994 - RNA, 24 nt, Human
caaaagguggagaauaagcaaugc

SEQ ID NO: 797995 - RNA, 19 nt, Human
caaagccaccaacguaacu

SEQ ID NO: 797996 - RNA, 21 nt, Human
caaaggagacacugaacagug

SEQ ID NO: 797997 - RNA, 25 nt, Human
cacaguagugucuguaaauaugauc

SEQ ID NO: 797998 - RNA, 24 nt, Human
cagaacuugggcuguucucccugg

SEQ ID NO: 797999 - RNA, 23 nt, Human
cagcugcaccauuuuuacagaac

SEQ ID NO: 798000 - RNA, 19 nt, Human
caggauagaucugagaaga

SEQ ID NO: 798001 - RNA, 23 nt, Human
caggcaaacacaaagcugcucca

SEQ ID NO: 798002 - RNA, 22 nt, Human
cauccagaaugcugcuugcaau

SEQ ID NO: 798003 - RNA, 21 nt, Human
cucugggcaagcaagugugga

SEQ ID NO: 798004 - RNA, 19 nt, Human
cugugcaagcuggcaaaac

SEQ ID NO: 798005 - RNA, 21 nt, Human
cuugcaggggaugauaagcac

SEQ ID NO: 798006 - RNA, 23 nt, Human
gaaagaacacgagagagagaaca

SEQ ID NO: 798007 - RNA, 20 nt, Human
gcuagaagcagggacuguca

SEQ ID NO: 798008 - RNA, 18 nt, Human
gcuggaccucuucagccu

SEQ ID NO: 798009 - RNA, 23 nt, Human
gcuggcuguucuaggaaaguaag

SEQ ID NO: 798010 - RNA, 20 nt, Human
ggaagaaagaacacgagaga

SEQ ID NO: 798011 - RNA, 21 nt, Human
ggagacaagacuccaacgaac

SEQ ID NO: 798012 - RNA, 21 nt, Human
ggauagaucugagaagaagcu

SEQ ID NO: 798013 - RNA, 23 nt, Human
gggaggauucauuuccccaccau

SEQ ID NO: 798014 - RNA, 21 nt, Human
gugcaagcuggcaaaacacag

SEQ ID NO: 798015 - RNA, 24 nt, Human
uaaauaaugucuugaacacauucc

SEQ ID NO: 798016 - RNA, 22 nt, Human
uaaauaucuagugcaaaaugau

SEQ ID NO: 798017 - RNA, 23 nt, Human
uaagcugaagaagggccaaagca

SEQ ID NO: 798018 - RNA, 21 nt, Human
uaaggaagaaagaacacgaga

SEQ ID NO: 798019 - RNA, 20 nt, Human
uaaguauacaauaaaucaca

SEQ ID NO: 798020 - RNA, 18 nt, Human
uacaccacuaagaguaag

SEQ ID NO: 798021 - RNA, 22 nt, Human
uacaccacuaagaguaagcuga

SEQ ID NO: 798022 - RNA, 25 nt, Human
uacccaacccauauuuuuccgucuu

SEQ ID NO: 798023 - RNA, 25 nt, Human
uagcagcauuuuucuauaaagaacc

SEQ ID NO: 798024 - RNA, 18 nt, Human
uauuagggaugggucagg

SEQ ID NO: 798025 - RNA, 23 nt, Human
uauuagggaugggucaggcaaaa

SEQ ID NO: 798026 - RNA, 24 nt, Human
uauuuaaugaauuuuuaaaaaauu

SEQ ID NO: 798027 - RNA, 24 nt, Human
uccauaaucacacagggccggggc

SEQ ID NO: 798028 - RNA, 22 nt, Human
ucuacaaucaguggagaagaac

SEQ ID NO: 798029 - RNA, 22 nt, Human
ucuagugcaaaaugauacuaaa

SEQ ID NO: 798030 - RNA, 18 nt, Human
ucucugggcaagcaagug

SEQ ID NO: 798031 - RNA, 21 nt, Human
ugagaagaagcuggcuguucu

SEQ ID NO: 798032 - RNA, 23 nt, Human
ugagagguaaauaucuagugcaa

SEQ ID NO: 798033 - RNA, 19 nt, Human
ugcaaagccaccaacguaa

SEQ ID NO: 798034 - RNA, 20 nt, Human
ugggaauuauuuaccugugc

SEQ ID NO: 798035 - RNA, 19 nt, Human
uguucuaggaaaguaagag

SEQ ID NO: 798036 - RNA, 26 nt, Human
uuaaaaagaaauaaaaguucaaaaaa

SEQ ID NO: 798037 - RNA, 20 nt, Human
uucaaaugaugaguaagaaa

SEQ ID NO: 798038 - RNA, 18 nt, Human
uucuaaguuuauuaggga

SEQ ID NO: 798039 - RNA, 24 nt, Human
aaaaaaaacacacacgaaaaaaga

SEQ ID NO: 798040 - RNA, 25 nt, Human
aaaaaaaaggagguugaugaagaaa

SEQ ID NO: 798041 - RNA, 26 nt, Human
aaaaaaaaggagguugaugaagaaaa

SEQ ID NO: 798042 - RNA, 20 nt, Human
aaaaaaaauucccuaaucgc

SEQ ID NO: 798043 - RNA, 19 nt, Human
aaaaaaacacacacgaaaa

SEQ ID NO: 798044 - RNA, 22 nt, Human
aaaaaaagaaaaaggaagaaaa

SEQ ID NO: 798045 - RNA, 27 nt, Human
aaaaaggaagaaaacggguaaaaaaaa

SEQ ID NO: 798046 - RNA, 23 nt, Human
aaaaaggagguugaugaagaaaa

SEQ ID NO: 798047 - RNA, 23 nt, Human
aaaagaaagaaaaaaagaaaaag

SEQ ID NO: 798048 - RNA, 22 nt, Human
aaacaccaccacaccaguucuu

SEQ ID NO: 798049 - RNA, 22 nt, Human
aaacaccaccacaccaguucuu

SEQ ID NO: 798050 - RNA, 19 nt, Human
aaaccccaguccccuucca

SEQ ID NO: 798051 - RNA, 26 nt, Human
aaauaucuccuuggcucacuuucucc

SEQ ID NO: 798052 - RNA, 18 nt, Human
aacccauuccuccccccg

SEQ ID NO: 798053 - RNA, 25 nt, Human
aacccauuccuccccccgcuacuuu

SEQ ID NO: 798054 - RNA, 23 nt, Human
aaccccaguccccuuccauccac

SEQ ID NO: 798055 - RNA, 18 nt, Human
aacuucccccccacucuc

SEQ ID NO: 798056 - RNA, 19 nt, Human
aacuucccccccacucucc

SEQ ID NO: 798057 - RNA, 21 nt, Human
aagaaaaaaagaaaaagaaga

SEQ ID NO: 798058 - RNA, 22 nt, Human
aagaaaaaaagaaaaagaagaa

SEQ ID NO: 798059 - RNA, 21 nt, Human
aagaaaaagaagaaaaaaaga

SEQ ID NO: 798060 - RNA, 24 nt, Human
aagaaaacaccaccacaccaguuc

SEQ ID NO: 798061 - RNA, 22 nt, Human
aagaaacccauuccuccccccg

SEQ ID NO: 798062 - RNA, 20 nt, Human
aagaagaaaaaaagaaaaaa

SEQ ID NO: 798063 - RNA, 22 nt, Human
aagaagaaaaaaagaaaaagga

SEQ ID NO: 798064 - RNA, 19 nt, Human
aaggcucggggugccuuuc

SEQ ID NO: 798065 - RNA, 21 nt, Human
aaugcaacugcagcuuugauc

SEQ ID NO: 798066 - RNA, 19 nt, Human
aauuccucuccccagccuc

SEQ ID NO: 798067 - RNA, 20 nt, Human
acacacgaaaaaagaaagaa

SEQ ID NO: 798068 - RNA, 20 nt, Human
acacgaaaaaagaaagaaaa

SEQ ID NO: 798069 - RNA, 18 nt, Human
acauggucaauuccucuc

SEQ ID NO: 798070 - RNA, 18 nt, Human
acccauuccuccccccgc

SEQ ID NO: 798071 - RNA, 19 nt, Human
agaaaaaaagaaaaagaag

SEQ ID NO: 798072 - RNA, 21 nt, Human
agaaaaagaagaaaaaaagaa

SEQ ID NO: 798073 - RNA, 25 nt, Human
agaaaaagaagaaaaaaagaaaaag

SEQ ID NO: 798074 - RNA, 21 nt, Human
agaaagaaaaaaagaaaaaga

SEQ ID NO: 798075 - RNA, 22 nt, Human
agagaaaaaugaacauacuuuu

SEQ ID NO: 798076 - RNA, 23 nt, Human
agcgcagcugcuccgcgccgccc

SEQ ID NO: 798077 - RNA, 23 nt, Human
aggaagaaaacggguaaaaaaaa

SEQ ID NO: 798078 - RNA, 20 nt, Human
aggugauggaaguugagacu

SEQ ID NO: 798079 - RNA, 24 nt, Human
aucauccuuuuuuuuggggggggg

SEQ ID NO: 798080 - RNA, 19 nt, Human
auccugucuccuucccucc

SEQ ID NO: 798081 - RNA, 20 nt, Human
caaauuaaaaaaaacacaca

SEQ ID NO: 798082 - RNA, 28 nt, Human
caacauaggcacaaauccaacugugcuc

SEQ ID NO: 798083 - RNA, 19 nt, Human
caacuucccccccacucuc

SEQ ID NO: 798084 - RNA, 25 nt, Human
caagaagaaacccauuccucccccc

SEQ ID NO: 798085 - RNA, 20 nt, Human
cacccaacagccaccaccac

SEQ ID NO: 798086 - RNA, 24 nt, Human
cacccaacagccaccaccaccaaa

SEQ ID NO: 798087 - RNA, 24 nt, Human
caccggcggcagcucuugccagcc

SEQ ID NO: 798088 - RNA, 21 nt, Human
caccuuccccucuccccucca

SEQ ID NO: 798089 - RNA, 23 nt, Human
caccuuccccucuccccuccaaa

SEQ ID NO: 798090 - RNA, 22 nt, Human
cacucuccauccuuccggccgg

SEQ ID NO: 798091 - RNA, 21 nt, Human
cagacugaucacagcaacauc

SEQ ID NO: 798092 - RNA, 21 nt, Human
cagccgguaguggcuccggga

SEQ ID NO: 798093 - RNA, 23 nt, Human
ccaacagccaccaccaccaaaaa

SEQ ID NO: 798094 - RNA, 22 nt, Human
ccacccggccagccaccuuccc

SEQ ID NO: 798095 - RNA, 24 nt, Human
ccagcccccggguccccuucuccu

SEQ ID NO: 798096 - RNA, 23 nt, Human
cccccaaucaaugccucaaucug

SEQ ID NO: 798097 - RNA, 24 nt, Human
cccccaaucaaugccucaaucugc

SEQ ID NO: 798098 - RNA, 23 nt, Human
ccccccgcuacuuuuuuuuuuuc

SEQ ID NO: 798099 - RNA, 20 nt, Human
cccgcccccacccccagcac

SEQ ID NO: 798100 - RNA, 22 nt, Human
cccgcccccacccccagcaccc

SEQ ID NO: 798101 - RNA, 18 nt, Human
cccggccagccaccuucc

SEQ ID NO: 798102 - RNA, 18 nt, Human
cccuccaaacuccgguua

SEQ ID NO: 798103 - RNA, 21 nt, Human
cccucugcucucuccccucuu

SEQ ID NO: 798104 - RNA, 20 nt, Human
cccugccagcccccgggucc

SEQ ID NO: 798105 - RNA, 18 nt, Human
ccgcgccgcccuuagcgc

SEQ ID NO: 798106 - RNA, 23 nt, Human
ccucugcucucuccccucuuuuu

SEQ ID NO: 798107 - RNA, 21 nt, Human
ccuuccccucuccccuccaaa

SEQ ID NO: 798108 - RNA, 18 nt, Human
ccuuuccuuccucugucc

SEQ ID NO: 798109 - RNA, 21 nt, Human
cgcuacuuuuuuuuuuucuuu

SEQ ID NO: 798110 - RNA, 18 nt, Human
cgguggccccugccagcc

SEQ ID NO: 798111 - RNA, 19 nt, Human
cuagcuuccaaaagcuccu

SEQ ID NO: 798112 - RNA, 21 nt, Human
cucugcucucuccccucuuuu

SEQ ID NO: 798113 - RNA, 26 nt, Human
cucugcucucuccccucuuuuucucc

SEQ ID NO: 798114 - RNA, 20 nt, Human
cucuucucauccuucucaaa

SEQ ID NO: 798115 - RNA, 19 nt, Human
cuuagcgccaucgcccugg

SEQ ID NO: 798116 - RNA, 23 nt, Human
gagcaacuucccccccacucucc

SEQ ID NO: 798117 - RNA, 19 nt, Human
gaggaaaauuucaaggcuc

SEQ ID NO: 798118 - RNA, 20 nt, Human
gauggaaguugagacugggg

SEQ ID NO: 798119 - RNA, 20 nt, Human
gccaccaccaccaaaaaaaa

SEQ ID NO: 798120 - RNA, 22 nt, Human
gcccccacccccagcacccggu

SEQ ID NO: 798121 - RNA, 28 nt, Human
gcgggggcgggggcgggggcggagguag

SEQ ID NO: 798122 - RNA, 23 nt, Human
ggcagaaaccccaguccccuucc

SEQ ID NO: 798123 - RNA, 20 nt, Human
ggccccugccagcccccggg

SEQ ID NO: 798124 - RNA, 21 nt, Human
ggcgggggcgggggcgggggc

SEQ ID NO: 798125 - RNA, 18 nt, Human
gggccgggaucacggggg

SEQ ID NO: 798126 - RNA, 22 nt, Human
gggcgggggcgggggcggaggu

SEQ ID NO: 798127 - RNA, 22 nt, Human
gggcgggggcgggggcgggggc

SEQ ID NO: 798128 - RNA, 20 nt, Human
gggggcgggggcgggggcgg

SEQ ID NO: 798129 - RNA, 18 nt, Human
ggggggcgggggcggggg

SEQ ID NO: 798130 - RNA, 19 nt, Human
ggggggggaggggaacagc

SEQ ID NO: 798131 - RNA, 23 nt, Human
gggggggggaggggaacagcugc

SEQ ID NO: 798132 - RNA, 19 nt, Human
gguccuagcuuccaaaagc

SEQ ID NO: 798133 - RNA, 27 nt, Human
uaaauaaauuucuuuucuuuuuuguuu

SEQ ID NO: 798134 - RNA, 22 nt, Human
uacuuuuuuuuuuucuuuuuaa

SEQ ID NO: 798135 - RNA, 19 nt, Human
uagcuuccaaaagcuccuu

SEQ ID NO: 798136 - RNA, 18 nt, Human
uaggcacaaauccaacug

SEQ ID NO: 798137 - RNA, 21 nt, Human
uaggguccuagcuuccaaaag

SEQ ID NO: 798138 - RNA, 20 nt, Human
uauccugucuccuucccucc

SEQ ID NO: 798139 - RNA, 19 nt, Human
uaugucagaacacaccaac

SEQ ID NO: 798140 - RNA, 19 nt, Human
ucaaaaagaaaagaaaaca

SEQ ID NO: 798141 - RNA, 26 nt, Human
ucaaaaagaaaagaaaacaccaccac

SEQ ID NO: 798142 - RNA, 19 nt, Human
ucaauuccucuccccagcc

SEQ ID NO: 798143 - RNA, 23 nt, Human
ucagaacacaccaacccccgcgg

SEQ ID NO: 798144 - RNA, 23 nt, Human
uccaaaagcuccuuucggacugc

SEQ ID NO: 798145 - RNA, 24 nt, Human
uccccgcccccacccccagcaccc

SEQ ID NO: 798146 - RNA, 21 nt, Human
ucccucugcucucuccccucu

SEQ ID NO: 798147 - RNA, 25 nt, Human
ucccucugcucucuccccucuuccc

SEQ ID NO: 798148 - RNA, 19 nt, Human
uccgcggucggggccggga

SEQ ID NO: 798149 - RNA, 19 nt, Human
uccuagcuuccaaaagcuc

SEQ ID NO: 798150 - RNA, 20 nt, Human
ucgcccuggcucacggcucc

SEQ ID NO: 798151 - RNA, 19 nt, Human
ucgcuggcucuucucaucc

SEQ ID NO: 798152 - RNA, 18 nt, Human
ucuccccucuuuuucucc

SEQ ID NO: 798153 - RNA, 21 nt, Human
ucuccuuuauagagaaaaaug

SEQ ID NO: 798154 - RNA, 25 nt, Human
ucucucgaccaaugccacguccuga

SEQ ID NO: 798155 - RNA, 26 nt, Human
ucugcucucuccccucuuuuucuccc

SEQ ID NO: 798156 - RNA, 21 nt, Human
ugaacauacuuuuuucuuugu

SEQ ID NO: 798157 - RNA, 19 nt, Human
ugaggggacagacagggug

SEQ ID NO: 798158 - RNA, 20 nt, Human
ugauggaaguugagacuggg

SEQ ID NO: 798159 - RNA, 21 nt, Human
ugauggaaguugagacugggg

SEQ ID NO: 798160 - RNA, 22 nt, Human
ugcacauauacacauuuguguu

SEQ ID NO: 798161 - RNA, 22 nt, Human
ugcagucgccuucccuccucug

SEQ ID NO: 798162 - RNA, 19 nt, Human
ugcucucccagcaccggcg

SEQ ID NO: 798163 - RNA, 24 nt, Human
ugcucugcugguuucucuccccca

SEQ ID NO: 798164 - RNA, 23 nt, Human
ugggaaauucaaaaagaaaagaa

SEQ ID NO: 798165 - RNA, 18 nt, Human
uggggagggcgaagugag

SEQ ID NO: 798166 - RNA, 18 nt, Human
ugguuaagaacaagagaa

SEQ ID NO: 798167 - RNA, 20 nt, Human
ugguuuauuucauucuugaa

SEQ ID NO: 798168 - RNA, 23 nt, Human
uguaaagacacuuuuuugaaaca

SEQ ID NO: 798169 - RNA, 21 nt, Human
ugucaagaagaaacccauucc

SEQ ID NO: 798170 - RNA, 19 nt, Human
uguccccgcccccaccccc

SEQ ID NO: 798171 - RNA, 24 nt, Human
ugugugcacauauacacauuugug

SEQ ID NO: 798172 - RNA, 25 nt, Human
uguguuaagauccagggcucacaag

SEQ ID NO: 798173 - RNA, 24 nt, Human
uguugcagaacuccgcggucgggg

SEQ ID NO: 798174 - RNA, 23 nt, Human
uuaggguccuagcuuccaaaagc

SEQ ID NO: 798175 - RNA, 22 nt, Human
uucagccacccggccagccacc

SEQ ID NO: 798176 - RNA, 23 nt, Human
uucucucgaccaaugccacgucc

SEQ ID NO: 798177 - RNA, 21 nt, Human
uuucuuuucuuuuuuguuuuu

SEQ ID NO: 798178 - RNA, 19 nt, Human
uuuuuucuuuuuaaggcuc

SEQ ID NO: 798179 - RNA, 27 nt, Human
uuuuuuuuuucuuuuuaaggcucgggg

SEQ ID NO: 798180 - RNA, 21 nt, Human
uuuuuuuuuuucuuuuuaagg

SEQ ID NO: 798181 - RNA, 22 nt, Human
aaguuuccccaagcaccuaaag

SEQ ID NO: 798182 - RNA, 18 nt, Human
aaucucccccuccugcac

SEQ ID NO: 798183 - RNA, 19 nt, Human
acaggccaggcagcugggu

SEQ ID NO: 798184 - RNA, 25 nt, Human
agcccaguucuguugggggccaggu

SEQ ID NO: 798185 - RNA, 21 nt, Human
agcugcacaaccccaggccuc

SEQ ID NO: 798186 - RNA, 19 nt, Human
aggaccagcaggagguccu

SEQ ID NO: 798187 - RNA, 20 nt, Human
aggcagagucagugucugua

SEQ ID NO: 798188 - RNA, 19 nt, Human
aggccaggcagcuggguug

SEQ ID NO: 798189 - RNA, 20 nt, Human
agggcuuuggacgagugcgc

SEQ ID NO: 798190 - RNA, 20 nt, Human
aguucuguugggggccaggu

SEQ ID NO: 798191 - RNA, 21 nt, Human
aguuugaagccugaguagcug

SEQ ID NO: 798192 - RNA, 25 nt, Human
auccauuuuuuuucccaucccccaa

SEQ ID NO: 798193 - RNA, 22 nt, Human
aucucccccuccugcacuccag

SEQ ID NO: 798194 - RNA, 20 nt, Human
augucacuguuggaaugcug

SEQ ID NO: 798195 - RNA, 25 nt, Human
auuacugucagcaucccauccagau

SEQ ID NO: 798196 - RNA, 23 nt, Human
caaggacagacgaugaaucugcc

SEQ ID NO: 798197 - RNA, 23 nt, Human
cacaaccccaggccucuguccca

SEQ ID NO: 798198 - RNA, 22 nt, Human
cacuguuggaaugcugguuugg

SEQ ID NO: 798199 - RNA, 21 nt, Human
cacuugcuguaguuccagaag

SEQ ID NO: 798200 - RNA, 18 nt, Human
cagagcuggagccugugg

SEQ ID NO: 798201 - RNA, 19 nt, Human
cagagcuggagccuguggc

SEQ ID NO: 798202 - RNA, 20 nt, Human
cagcuggguuggcauuagga

SEQ ID NO: 798203 - RNA, 18 nt, Human
caucguucuuccccccug

SEQ ID NO: 798204 - RNA, 22 nt, Human
cauguccaaguacaggccaggc

SEQ ID NO: 798205 - RNA, 24 nt, Human
cauuccaaccagacccugaccuau

SEQ ID NO: 798206 - RNA, 24 nt, Human
cauuccuuggcaacuggaugugcc

SEQ ID NO: 798207 - RNA, 19 nt, Human
ccaacgccauuguugccac

SEQ ID NO: 798208 - RNA, 22 nt, Human
ccacuguucccagaucucgugg

SEQ ID NO: 798209 - RNA, 24 nt, Human
ccaggcgaguauuccaggaccagc

SEQ ID NO: 798210 - RNA, 19 nt, Human
ccaugccccaguuuggcag

SEQ ID NO: 798211 - RNA, 21 nt, Human
ccaugccccaguuuggcaguc

SEQ ID NO: 798212 - RNA, 25 nt, Human
cccaaacccccgggccacuuggcgc

SEQ ID NO: 798213 - RNA, 18 nt, Human
cccaagcauuuccuccac

SEQ ID NO: 798214 - RNA, 22 nt, Human
cccauaccaacagccaugcccc

SEQ ID NO: 798215 - RNA, 23 nt, Human
cccaucccccaaguguccaagga

SEQ ID NO: 798216 - RNA, 24 nt, Human
cccauugucauuuuuccuuucaga

SEQ ID NO: 798217 - RNA, 25 nt, Human
ccccaagcuccugaauggauauuac

SEQ ID NO: 798218 - RNA, 22 nt, Human
ccccagccacuguucccagauc

SEQ ID NO: 798219 - RNA, 21 nt, Human
ccccccaguuuguaccuggau

SEQ ID NO: 798220 - RNA, 21 nt, Human
cccccgggccacuuggcgcuu

SEQ ID NO: 798221 - RNA, 24 nt, Human
cccccgggccacuuggcgcuuugu

SEQ ID NO: 798222 - RNA, 24 nt, Human
cccccuccugcacuccaggcugga

SEQ ID NO: 798223 - RNA, 22 nt, Human
cccccugaguuugaagccugag

SEQ ID NO: 798224 - RNA, 22 nt, Human
ccugaccuauuacugucagcau

SEQ ID NO: 798225 - RNA, 22 nt, Human
ccugcacuccaggcuggauuug

SEQ ID NO: 798226 - RNA, 20 nt, Human
ccuguagccaugcuacuguu

SEQ ID NO: 798227 - RNA, 20 nt, Human
ccuucucccguuccuucccu

SEQ ID NO: 798228 - RNA, 24 nt, Human
cgaguccccccaaacccccgggcc

SEQ ID NO: 798229 - RNA, 24 nt, Human
cgcuuuguuguugcugucucccca

SEQ ID NO: 798230 - RNA, 21 nt, Human
cucaccccaggugggugacuu

SEQ ID NO: 798231 - RNA, 22 nt, Human
cucccacccuguugauccuuuc

SEQ ID NO: 798232 - RNA, 20 nt, Human
cugaugauccauuagcacca

SEQ ID NO: 798233 - RNA, 18 nt, Human
cuggaaggguugccuguc

SEQ ID NO: 798234 - RNA, 20 nt, Human
cuggagccuguggcuacacc

SEQ ID NO: 798235 - RNA, 23 nt, Human
cuguuggaaugcugguuuggggg

SEQ ID NO: 798236 - RNA, 19 nt, Human
cuucggcugggguggcccc

SEQ ID NO: 798237 - RNA, 19 nt, Human
cuuuguuguugcugucucc

SEQ ID NO: 798238 - RNA, 20 nt, Human
gagcuuaucgagucccccca

SEQ ID NO: 798239 - RNA, 20 nt, Human
gaguucauguguucaccacc

SEQ ID NO: 798240 - RNA, 18 nt, Human
gaguuggaagcaccccag

SEQ ID NO: 798241 - RNA, 24 nt, Human
gcaaguuuccccaagcaccuaaag

SEQ ID NO: 798242 - RNA, 22 nt, Human
gcaguacuaacagcaguagagc

SEQ ID NO: 798243 - RNA, 20 nt, Human
gccgcuuuggcccaggaguu

SEQ ID NO: 798244 - RNA, 18 nt, Human
gcucucuuguggcagcaa

SEQ ID NO: 798245 - RNA, 23 nt, Human
gcugggguggccccaagcuccug

SEQ ID NO: 798246 - RNA, 21 nt, Human
ggcagcaaguuuccccaagca

SEQ ID NO: 798247 - RNA, 21 nt, Human
gggcuuuccccauuccccauu

SEQ ID NO: 798248 - RNA, 22 nt, Human
ggguccccccaagcugagguac

SEQ ID NO: 798249 - RNA, 21 nt, Human
uaccaacgccauuguugccac

SEQ ID NO: 798250 - RNA, 25 nt, Human
uaccuggaccaagcaaccggggguc

SEQ ID NO: 798251 - RNA, 20 nt, Human
uaccuggaccaagcaacggu

SEQ ID NO: 798252 - RNA, 18 nt, Human
uacuggaaggguugccug

SEQ ID NO: 798253 - RNA, 21 nt, Human
uacuguucucugagccacagu

SEQ ID NO: 798254 - RNA, 18 nt, Human
uagcccaguucuguuggg

SEQ ID NO: 798255 - RNA, 22 nt, Human
uaucgaguccccccaaaccccc

SEQ ID NO: 798256 - RNA, 21 nt, Human
ucacauuguugucuugggguu

SEQ ID NO: 798257 - RNA, 21 nt, Human
ucagcacugcccccacugacu

SEQ ID NO: 798258 - RNA, 19 nt, Human
ucccagccaguugcuucac

SEQ ID NO: 798259 - RNA, 22 nt, Human
uccccaguuacucacauuguug

SEQ ID NO: 798260 - RNA, 18 nt, Human
ucccuguagccaugcuac

SEQ ID NO: 798261 - RNA, 23 nt, Human
uccugaaucccaagcauuuccuc

SEQ ID NO: 798262 - RNA, 20 nt, Human
uccuuccuuuugcacagcac

SEQ ID NO: 798263 - RNA, 22 nt, Human
uccuugucaguccuaucuauua

SEQ ID NO: 798264 - RNA, 21 nt, Human
ucucccguuccuucccuccca

SEQ ID NO: 798265 - RNA, 22 nt, Human
ucugcauugcauugauaggguu

SEQ ID NO: 798266 - RNA, 20 nt, Human
ucugcccaaucucccccucc

SEQ ID NO: 798267 - RNA, 22 nt, Human
ugaggcagauucagucucuguu

SEQ ID NO: 798268 - RNA, 20 nt, Human
ugaucuuuguccaucucccc

SEQ ID NO: 798269 - RNA, 20 nt, Human
ugaugaaacuuuccuaccug

SEQ ID NO: 798270 - RNA, 24 nt, Human
ugauggcccccauaccaacagcca

SEQ ID NO: 798271 - RNA, 19 nt, Human
ugcccugggcacucccugu

SEQ ID NO: 798272 - RNA, 21 nt, Human
ugcccugggcacucccuguag

SEQ ID NO: 798273 - RNA, 18 nt, Human
ugcggccccacuccaagc

SEQ ID NO: 798274 - RNA, 18 nt, Human
ugcucuggaugaccgggu

SEQ ID NO: 798275 - RNA, 24 nt, Human
uggaagcaccccagcaauucugac

SEQ ID NO: 798276 - RNA, 20 nt, Human
uggaaugcugguuugggggc

SEQ ID NO: 798277 - RNA, 24 nt, Human
uggaaugcugguuugggggcuuuc

SEQ ID NO: 798278 - RNA, 18 nt, Human
uggcauuaggauuaaggu

SEQ ID NO: 798279 - RNA, 20 nt, Human
uggcccccauaccaacagcc

SEQ ID NO: 798280 - RNA, 22 nt, Human
uggcuacaccccacacucuggc

SEQ ID NO: 798281 - RNA, 23 nt, Human
uggcuacaccccacacucuggcc

SEQ ID NO: 798282 - RNA, 18 nt, Human
ugggauuugggcuuugga

SEQ ID NO: 798283 - RNA, 23 nt, Human
ugggggccagguuuuaaagucuc

SEQ ID NO: 798284 - RNA, 21 nt, Human
ugggucaagaucauuccuugg

SEQ ID NO: 798285 - RNA, 23 nt, Human
uggguuggcauuaggauuaaggu

SEQ ID NO: 798286 - RNA, 20 nt, Human
ugguagugguggugguggug

SEQ ID NO: 798287 - RNA, 24 nt, Human
ugguccaucaguguuaagguucug

SEQ ID NO: 798288 - RNA, 23 nt, Human
uggugguggugguggugguauug

SEQ ID NO: 798289 - RNA, 20 nt, Human
uggugguggugguggugguc

SEQ ID NO: 798290 - RNA, 19 nt, Human
ugguuugggggcuuucccc

SEQ ID NO: 798291 - RNA, 19 nt, Human
ugucauuccaaccagaccc

SEQ ID NO: 798292 - RNA, 27 nt, Human
uguccaucuccccaguguugggauuug

SEQ ID NO: 798293 - RNA, 18 nt, Human
ugugcuguugccccagcc

SEQ ID NO: 798294 - RNA, 21 nt, Human
uguugggauuugggcuuugga

SEQ ID NO: 798295 - RNA, 20 nt, Human
uuaaugcugaguucacaguu

SEQ ID NO: 798296 - RNA, 24 nt, Human
uuacucacauuguugucuuggggu

SEQ ID NO: 798297 - RNA, 28 nt, Human
uuagcaccaggaaggccuugcaggugga

SEQ ID NO: 798298 - RNA, 22 nt, Human
uuccccaagcaccuaaagugcc

SEQ ID NO: 798299 - RNA, 22 nt, Human
uuccccauuccccauucacacc

SEQ ID NO: 798300 - RNA, 24 nt, Human
uucuugguauguccagugaaguug

SEQ ID NO: 798301 - RNA, 21 nt, Human
uuggaguuggaagcaccccag

SEQ ID NO: 798302 - RNA, 21 nt, Human
uuguauuugugcuguugcccc

SEQ ID NO: 798303 - RNA, 20 nt, Human
uuguuguugcugucucccca

SEQ ID NO: 798304 - RNA, 20 nt, Human
uuucacagaagcagcuccuc

SEQ ID NO: 798305 - RNA, 21 nt, Human
aaaauccucccaugcucaagu

SEQ ID NO: 798306 - RNA, 24 nt, Human
aaagugcugggauuacagguguga

SEQ ID NO: 798307 - RNA, 18 nt, Human
aacaugaaggguggauaa

SEQ ID NO: 798308 - RNA, 18 nt, Human
aaccuuugcauauccucc

SEQ ID NO: 798309 - RNA, 23 nt, Human
aagcaauucucaugucuccgccu

SEQ ID NO: 798310 - RNA, 25 nt, Human
aagcaauucucaugucuccgccucc

SEQ ID NO: 798311 - RNA, 24 nt, Human
aaguagcugaaauuacaggcacgu

SEQ ID NO: 798312 - RNA, 25 nt, Human
aaguagcugaaauuacaggcacgug

SEQ ID NO: 798313 - RNA, 24 nt, Human
aagugaucugccagccuuggccuc

SEQ ID NO: 798314 - RNA, 18 nt, Human
aagugcugggauuacagg

SEQ ID NO: 798315 - RNA, 19 nt, Human
aagugcugggauuacaggu

SEQ ID NO: 798316 - RNA, 26 nt, Human
aagugcugggauuacaggugugagcc

SEQ ID NO: 798317 - RNA, 18 nt, Human
acagaugacaaaaaacgu

SEQ ID NO: 798318 - RNA, 22 nt, Human
accaaaauccucccaugcucaa

SEQ ID NO: 798319 - RNA, 18 nt, Human
agauuuuuuuuuuuuuuu

SEQ ID NO: 798320 - RNA, 20 nt, Human
aggcaugcaccaccacgccc

SEQ ID NO: 798321 - RNA, 20 nt, Human
aggcaugcaccaccacgccc

SEQ ID NO: 798322 - RNA, 21 nt, Human
agugcaguggcgcgaucucag

SEQ ID NO: 798323 - RNA, 23 nt, Human
agugcaguggcgcgaucucagcu

SEQ ID NO: 798324 - RNA, 24 nt, Human
agugcaguggcgcgaucucagcuc

SEQ ID NO: 798325 - RNA, 23 nt, Human
auaccaaaauccucccaugcuca

SEQ ID NO: 798326 - RNA, 20 nt, Human
aucaaugccauaaaaguuuu

SEQ ID NO: 798327 - RNA, 20 nt, Human
augacccacucuagcaaaca

SEQ ID NO: 798328 - RNA, 20 nt, Human
augagguuucacuauacugg

SEQ ID NO: 798329 - RNA, 22 nt, Human
augucuccgccucccaaguagc

SEQ ID NO: 798330 - RNA, 20 nt, Human
auuuuuuuuuuuuuuuuugg

SEQ ID NO: 798331 - RNA, 18 nt, Human
caaaauccucccaugcuc

SEQ ID NO: 798332 - RNA, 24 nt, Human
caaagugcugggauuacaggugug

SEQ ID NO: 798333 - RNA, 24 nt, Human
caaauaaccucaagugcacagaua

SEQ ID NO: 798334 - RNA, 22 nt, Human
caacaugaaggguggauaauau

SEQ ID NO: 798335 - RNA, 24 nt, Human
caccacgcccggcuaguuuuugua

SEQ ID NO: 798336 - RNA, 24 nt, Human
cacccaagcuggagugcaguggcg

SEQ ID NO: 798337 - RNA, 21 nt, Human
caccuccccauaccaaaaucc

SEQ ID NO: 798338 - RNA, 20 nt, Human
cagcucaccguaaacuccac

SEQ ID NO: 798339 - RNA, 21 nt, Human
cauauccuccucuauacuuga

SEQ ID NO: 798340 - RNA, 21 nt, Human
ccaaagugcugggauuacagg

SEQ ID NO: 798341 - RNA, 21 nt, Human
ccaaagugcugggauuacagg

SEQ ID NO: 798342 - RNA, 24 nt, Human
ccaaagugcugggauuacaggugu

SEQ ID NO: 798343 - RNA, 20 nt, Human
ccaaucucuaaaaaacuaua

SEQ ID NO: 798344 - RNA, 24 nt, Human
ccaaucuucaagauuaucuucuua

SEQ ID NO: 798345 - RNA, 26 nt, Human
ccaccucccggguucaagcaauucuu

SEQ ID NO: 798346 - RNA, 24 nt, Human
cccaaguagcugaaauuacaggca

SEQ ID NO: 798347 - RNA, 23 nt, Human
cccggguucaagcaauucucaug

SEQ ID NO: 798348 - RNA, 23 nt, Human
ccgccucccaaguagcugaaauu

SEQ ID NO: 798349 - RNA, 18 nt, Human
ccguaaacuccaccuccc

SEQ ID NO: 798350 - RNA, 24 nt, Human
ccguaaacuccaccucccggguuc

SEQ ID NO: 798351 - RNA, 22 nt, Human
ccucccggguucaagcaauucu

SEQ ID NO: 798352 - RNA, 19 nt, Human
ccugaccucaagugaucug

SEQ ID NO: 798353 - RNA, 24 nt, Human
cgcucugucacccaagcuggagug

SEQ ID NO: 798354 - RNA, 25 nt, Human
cucacaaaauuccugaaaguuuaac

SEQ ID NO: 798355 - RNA, 24 nt, Human
cucaccguaaacuccaccucccgg

SEQ ID NO: 798356 - RNA, 21 nt, Human
cucccaaguagcugaaauuac

SEQ ID NO: 798357 - RNA, 24 nt, Human
cucgcucugucacccaagcuggag

SEQ ID NO: 798358 - RNA, 26 nt, Human
cuggcuuuccaaaaaaaaaaaagacc

SEQ ID NO: 798359 - RNA, 24 nt, Human
gaccucaagugaucugccagccuu

SEQ ID NO: 798360 - RNA, 24 nt, Human
gacuugcuauuucuugaaaaaccc

SEQ ID NO: 798361 - RNA, 18 nt, Human
gagguuucacuauacugg

SEQ ID NO: 798362 - RNA, 21 nt, Human
gagugcaguggcgcgaucuca

SEQ ID NO: 798363 - RNA, 18 nt, Human
gauuacaggugugagcca

SEQ ID NO: 798364 - RNA, 21 nt, Human
gauuacaggugugagccacca

SEQ ID NO: 798365 - RNA, 24 nt, Human
gauuacaggugugagccaccaugc

SEQ ID NO: 798366 - RNA, 22 nt, Human
gccuuggccucccaaagugcug

SEQ ID NO: 798367 - RNA, 23 nt, Human
gcuaauuaguugggacuauaggc

SEQ ID NO: 798368 - RNA, 23 nt, Human
gcuaguuuuuguaucuuugguag

SEQ ID NO: 798369 - RNA, 20 nt, Human
gcucauucaucaaugacauc

SEQ ID NO: 798370 - RNA, 25 nt, Human
gcucugucacccaagcuggagugca

SEQ ID NO: 798371 - RNA, 19 nt, Human
gcucuguugcccaggguag

SEQ ID NO: 798372 - RNA, 19 nt, Human
gcuggagugcaguggcgcg

SEQ ID NO: 798373 - RNA, 23 nt, Human
gcuggucucgaacuccugaccuc

SEQ ID NO: 798374 - RNA, 24 nt, Human
ggauuacaggugugagccaccaug

SEQ ID NO: 798375 - RNA, 24 nt, Human
ggcuggucucgaacuccugaccuc

SEQ ID NO: 798376 - RNA, 20 nt, Human
ggcuuuccaaaaaaaaaaaa

SEQ ID NO: 798377 - RNA, 19 nt, Human
ggucucgaacuccugaccu

SEQ ID NO: 798378 - RNA, 18 nt, Human
guagagaugagguuucac

SEQ ID NO: 798379 - RNA, 18 nt, Human
guagagaugagguuucac

SEQ ID NO: 798380 - RNA, 24 nt, Human
guagagcacaauggcaugaucucg

SEQ ID NO: 798381 - RNA, 23 nt, Human
guagcaacaugaaggguggauaa

SEQ ID NO: 798382 - RNA, 22 nt, Human
guuuguauuuuacugauuacaa

SEQ ID NO: 798383 - RNA, 24 nt, Human
guuuuuguaucuuugguagagaug

SEQ ID NO: 798384 - RNA, 25 nt, Human
uaaaaaacuauagcuucuaaaacca

SEQ ID NO: 798385 - RNA, 23 nt, Human
uaaccugauuuucaguuuauauc

SEQ ID NO: 798386 - RNA, 26 nt, Human
uaauaccuaauauaauaucaaugcca

SEQ ID NO: 798387 - RNA, 22 nt, Human
uacaggugugagccaccaugcc

SEQ ID NO: 798388 - RNA, 23 nt, Human
uacaggugugagccaccaugccu

SEQ ID NO: 798389 - RNA, 22 nt, Human
uacauuaaugaauaagaugaaa

SEQ ID NO: 798390 - RNA, 23 nt, Human
uaccaaaauccucccaugcucaa

SEQ ID NO: 798391 - RNA, 23 nt, Human
uaccaauagaugcaaauaaccuc

SEQ ID NO: 798392 - RNA, 24 nt, Human
uagagcacaauggcaugaucucgg

SEQ ID NO: 798393 - RNA, 19 nt, Human
uagcuucuaaaaccaaucu

SEQ ID NO: 798394 - RNA, 20 nt, Human
uagcuucuaaaaccaaucuu

SEQ ID NO: 798395 - RNA, 20 nt, Human
uaggaaaugauguauuaaau

SEQ ID NO: 798396 - RNA, 21 nt, Human
uaguauuucuaccaauagaug

SEQ ID NO: 798397 - RNA, 18 nt, Human
uaguugggacuauaggca

SEQ ID NO: 798398 - RNA, 24 nt, Human
uaguuuuuguaucuuugguagaga

SEQ ID NO: 798399 - RNA, 25 nt, Human
uauaaaaugaaguauuugcacucaa

SEQ ID NO: 798400 - RNA, 21 nt, Human
uaucaaugccauaaaaguuuu

SEQ ID NO: 798401 - RNA, 21 nt, Human
uaugaagggcugacuguagua

SEQ ID NO: 798402 - RNA, 22 nt, Human
uauguacuugugcauuuauaua

SEQ ID NO: 798403 - RNA, 25 nt, Human
ucaaugacaucaacaucuuuccgaa

SEQ ID NO: 798404 - RNA, 21 nt, Human
ucaccguaaacuccaccuccc

SEQ ID NO: 798405 - RNA, 24 nt, Human
ucaccguaaacuccaccucccggg

SEQ ID NO: 798406 - RNA, 23 nt, Human
ucccaaagugcugggauuacagg

SEQ ID NO: 798407 - RNA, 24 nt, Human
ucccaaguagcugaaauuacaggc

SEQ ID NO: 798408 - RNA, 24 nt, Human
uccccauaccaaaauccucccaug

SEQ ID NO: 798409 - RNA, 21 nt, Human
ucccggguucaagcaauucuc

SEQ ID NO: 798410 - RNA, 24 nt, Human
ucccggguucaagcaauucucaug

SEQ ID NO: 798411 - RNA, 20 nt, Human
ucccuuguauaaaaugaagu

SEQ ID NO: 798412 - RNA, 22 nt, Human
ucucaugucuccgccucccaag

SEQ ID NO: 798413 - RNA, 21 nt, Human
ucucgaacuccugaccucaag

SEQ ID NO: 798414 - RNA, 24 nt, Human
ucucgcucugucacccaagcugga

SEQ ID NO: 798415 - RNA, 26 nt, Human
ucucgcucugucacccaagcuggagu

SEQ ID NO: 798416 - RNA, 27 nt, Human
ucucgcucugucacccaagcuggagug

SEQ ID NO: 798417 - RNA, 20 nt, Human
ucucuaaaaaacuauagcuu

SEQ ID NO: 798418 - RNA, 24 nt, Human
ucugucacccaagcuggagugcag

SEQ ID NO: 798419 - RNA, 19 nt, Human
ucuugcucuguugcccagg

SEQ ID NO: 798420 - RNA, 20 nt, Human
ucuugcucuguugcccaggg

SEQ ID NO: 798421 - RNA, 24 nt, Human
ucuugcucuguugcccaggguaga

SEQ ID NO: 798422 - RNA, 24 nt, Human
ucuuugguagagaugagguuucac

SEQ ID NO: 798423 - RNA, 21 nt, Human
ugaaauuacaggcacgugcca

SEQ ID NO: 798424 - RNA, 24 nt, Human
ugaaauuacaggcacgugccacga

SEQ ID NO: 798425 - RNA, 25 nt, Human
ugaaauuacaggcacgugccacgac

SEQ ID NO: 798426 - RNA, 24 nt, Human
ugaauccacggauguggaacccac

SEQ ID NO: 798427 - RNA, 18 nt, Human
ugaccucaagugaucugc

SEQ ID NO: 798428 - RNA, 24 nt, Human
ugaccucaagugaucugccagccu

SEQ ID NO: 798429 - RNA, 22 nt, Human
ugagacggagucucgcucuguc

SEQ ID NO: 798430 - RNA, 20 nt, Human
ugagguuucacuauacuggg

SEQ ID NO: 798431 - RNA, 22 nt, Human
ugaucugccagccuuggccucc

SEQ ID NO: 798432 - RNA, 19 nt, Human
ugcaccuccccauaccagu

SEQ ID NO: 798433 - RNA, 22 nt, Human
ugcaguggcgcgaucucagcuc

SEQ ID NO: 798434 - RNA, 20 nt, Human
ugcuauuuuuugcauccuua

SEQ ID NO: 798435 - RNA, 24 nt, Human
ugcugggauuacaggugugagcca

SEQ ID NO: 798436 - RNA, 24 nt, Human
uggagugcaguggcgcgaucucag

SEQ ID NO: 798437 - RNA, 18 nt, Human
uggauaauauuuucaauu

SEQ ID NO: 798438 - RNA, 25 nt, Human
uggcaugaucucggcucacugcaaa

SEQ ID NO: 798439 - RNA, 24 nt, Human
uggcgcgaucucagcucaccguaa

SEQ ID NO: 798440 - RNA, 21 nt, Human
ugggacuauaggcaugcacca

SEQ ID NO: 798441 - RNA, 24 nt, Human
ugggacuauaggcaugcaccacca

SEQ ID NO: 798442 - RNA, 18 nt, Human
ugggauuacaggugugag

SEQ ID NO: 798443 - RNA, 22 nt, Human
ugggauuacaggugugagccac

SEQ ID NO: 798444 - RNA, 23 nt, Human
ugggauuacaggugugagccacc

SEQ ID NO: 798445 - RNA, 24 nt, Human
ugggauuacaggugugagccacca

SEQ ID NO: 798446 - RNA, 25 nt, Human
ugggauuacaggugugagccaccau

SEQ ID NO: 798447 - RNA, 24 nt, Human
ugggcaggcuggucucgaacuccu

SEQ ID NO: 798448 - RNA, 21 nt, Human
ugggccaaucucuaaaaaacu

SEQ ID NO: 798449 - RNA, 23 nt, Human
ugguagagaugagguuucacuau

SEQ ID NO: 798450 - RNA, 24 nt, Human
ugguagagaugagguuucacuaua

SEQ ID NO: 798451 - RNA, 21 nt, Human
uguggaacccacaguauauga

SEQ ID NO: 798452 - RNA, 24 nt, Human
uuaacauucuauccuucacuuucu

SEQ ID NO: 798453 - RNA, 30 nt, Human
uuaacgauuagauuuuuuuuuuuuuuuuuu

SEQ ID NO: 798454 - RNA, 21 nt, Human
uuagaacuuagcugaguccug

SEQ ID NO: 798455 - RNA, 24 nt, Human
uucaagcaauucucaugucuccgc

SEQ ID NO: 798456 - RNA, 23 nt, Human
uugcaccuccccauaccaaaauc

SEQ ID NO: 798457 - RNA, 18 nt, Human
uuggccucccaaagugcu

SEQ ID NO: 798458 - RNA, 24 nt, Human
uugguagagaugagguuucacuau

SEQ ID NO: 798459 - RNA, 23 nt, Human
uuuacaaucagcucacaaaauuc

SEQ ID NO: 798460 - RNA, 23 nt, Human
uuuacagaugacaaaaaacguau

SEQ ID NO: 798461 - RNA, 18 nt, Human
uuugagaaggagucuugc

SEQ ID NO: 798462 - RNA, 20 nt, Human
uuuuuguaucuuugguagag

SEQ ID NO: 798463 - RNA, 21 nt, Human
uuuuuguaucuuugguagaga

SEQ ID NO: 798464 - RNA, 24 nt, Human
uuuuuuuuuuuugagaaggagucu

SEQ ID NO: 798465 - RNA, 18 nt, Human
aaaaggcaggcacuggcc

SEQ ID NO: 798466 - RNA, 22 nt, Human
aaacauuuccagacaccacacc

SEQ ID NO: 798467 - RNA, 23 nt, Human
aagccagccacaauuuagagugc

SEQ ID NO: 798468 - RNA, 24 nt, Human
aauauguacccacccccacccccc

SEQ ID NO: 798469 - RNA, 26 nt, Human
acagaaagggaagccagccacaauuu

SEQ ID NO: 798470 - RNA, 23 nt, Human
accagaacuaaauaugaaaagac

SEQ ID NO: 798471 - RNA, 18 nt, Human
acccacccccacccccca

SEQ ID NO: 798472 - RNA, 22 nt, Human
acuggaacacaaauaccaaaua

SEQ ID NO: 798473 - RNA, 20 nt, Human
agacaccacaccagaacuaa

SEQ ID NO: 798474 - RNA, 23 nt, Human
agacaccacaccagaacuaaaua

SEQ ID NO: 798475 - RNA, 22 nt, Human
agacaccgacaggcccgcgauc

SEQ ID NO: 798476 - RNA, 19 nt, Human
agagugccuuuucaguugu

SEQ ID NO: 798477 - RNA, 22 nt, Human
agcagacaccgacaggcccgcg

SEQ ID NO: 798478 - RNA, 18 nt, Human
auaaugcaacaagaugga

SEQ ID NO: 798479 - RNA, 20 nt, Human
augauguugcugcugcugcc

SEQ ID NO: 798480 - RNA, 24 nt, Human
caaaacauuuuauagagcuaucaa

SEQ ID NO: 798481 - RNA, 23 nt, Human
caaagcaaauacagguaaacauc

SEQ ID NO: 798482 - RNA, 24 nt, Human
caaaggccccuccuugcaaggccc

SEQ ID NO: 798483 - RNA, 24 nt, Human
caacaagauggaaagauuuccaaa

SEQ ID NO: 798484 - RNA, 25 nt, Human
caccagaacuaaauaugaaaagaca

SEQ ID NO: 798485 - RNA, 21 nt, Human
cacccccaccccccaauacau

SEQ ID NO: 798486 - RNA, 28 nt, Human
cagaaccaaaguuccaagcaacugcuga

SEQ ID NO: 798487 - RNA, 21 nt, Human
cagacagaaagggaagccagg

SEQ ID NO: 798488 - RNA, 20 nt, Human
caucaguauucuucauacaa

SEQ ID NO: 798489 - RNA, 23 nt, Human
caucaguauucuucauacaauag

SEQ ID NO: 798490 - RNA, 19 nt, Human
ccaaaauacaacagagaca

SEQ ID NO: 798491 - RNA, 18 nt, Human
ccaagcaacugcugaagc

SEQ ID NO: 798492 - RNA, 19 nt, Human
cuaaauaugaaaagacaua

SEQ ID NO: 798493 - RNA, 20 nt, Human
cuagcgguaaugauguugcu

SEQ ID NO: 798494 - RNA, 23 nt, Human
cugaagcugaaauuagagguggu

SEQ ID NO: 798495 - RNA, 22 nt, Human
cuugcaaggccccucugacugc

SEQ ID NO: 798496 - RNA, 22 nt, Human
gaaacauuuccagacaccacac

SEQ ID NO: 798497 - RNA, 20 nt, Human
gagcagacaccgacaggccc

SEQ ID NO: 798498 - RNA, 19 nt, Human
gagguguguaggugccucg

SEQ ID NO: 798499 - RNA, 19 nt, Human
gccacaauuuagagugccu

SEQ ID NO: 798500 - RNA, 23 nt, Human
gccagaaccaaaguuccaagcaa

SEQ ID NO: 798501 - RNA, 24 nt, Human
ggaacacaaauaccaaauacaaag

SEQ ID NO: 798502 - RNA, 21 nt, Human
gguggugaaaaaggcaggcac

SEQ ID NO: 798503 - RNA, 23 nt, Human
uaaaacaguugaaacauuuccag

SEQ ID NO: 798504 - RNA, 21 nt, Human
uaacuggaacacaaauaccaa

SEQ ID NO: 798505 - RNA, 23 nt, Human
uaccaaauacaauauguacccac

SEQ ID NO: 798506 - RNA, 21 nt, Human
uagagguggugaaaaaggcag

SEQ ID NO: 798507 - RNA, 21 nt, Human
uaggagcagacaccgacaggc

SEQ ID NO: 798508 - RNA, 23 nt, Human
ucaaaacucauaccaaaauacaa

SEQ ID NO: 798509 - RNA, 22 nt, Human
ucaaggaaaagccuauaucuau

SEQ ID NO: 798510 - RNA, 27 nt, Human
ugaaaagacauaaauauaacuggaaca

SEQ ID NO: 798511 - RNA, 18 nt, Human
ugagaacugaggcucaaa

SEQ ID NO: 798512 - RNA, 22 nt, Human
ugcaacaagauggaaagauuuc

SEQ ID NO: 798513 - RNA, 22 nt, Human
ugccagaaccaaaguuccaagc

SEQ ID NO: 798514 - RNA, 24 nt, Human
ugccagaaccaaaguuccaagcaa

SEQ ID NO: 798515 - RNA, 19 nt, Human
uguacccacccccaccccc

SEQ ID NO: 798516 - RNA, 22 nt, Human
uuuauuuuucauuacauuuuag

SEQ ID NO: 798517 - RNA, 24 nt, Human
uuuuucaagcuuucaaggaaaagc

SEQ ID NO: 798518 - RNA, 24 nt, Human
aaagaaaaaacacgaaagaauaua

SEQ ID NO: 798519 - RNA, 23 nt, Human
aaagacaucacaaauucaugaaa

SEQ ID NO: 798520 - RNA, 19 nt, Human
aaagagaacaaacugucau

SEQ ID NO: 798521 - RNA, 25 nt, Human
aacaacaacaacaaaacagcuccuc

SEQ ID NO: 798522 - RNA, 19 nt, Human
aagacaaaagaagugccac

SEQ ID NO: 798523 - RNA, 24 nt, Human
aauaaaagaaaaaacacgaaagaa

SEQ ID NO: 798524 - RNA, 25 nt, Human
acaacaacaacaaaacagcuccuca

SEQ ID NO: 798525 - RNA, 19 nt, Human
acaacaacaacaacaaaac

SEQ ID NO: 798526 - RNA, 21 nt, Human
acaacaacaacaacaaaacag

SEQ ID NO: 798527 - RNA, 21 nt, Human
acagaauuccauccucaaaag

SEQ ID NO: 798528 - RNA, 21 nt, Human
acauauuccaaagcaccaaca

SEQ ID NO: 798529 - RNA, 18 nt, Human
acucugucacucagacug

SEQ ID NO: 798530 - RNA, 26 nt, Human
acucugucacucagacugcagugcaa

SEQ ID NO: 798531 - RNA, 20 nt, Human
acucuucuuauccucccuau

SEQ ID NO: 798532 - RNA, 30 nt, Human
acugcagugcaaugaugcgaucucagcucc

SEQ ID NO: 798533 - RNA, 22 nt, Human
agaauuccaaauucuccuucag

SEQ ID NO: 798534 - RNA, 20 nt, Human
agagaacaaacugucauuag

SEQ ID NO: 798535 - RNA, 19 nt, Human
agagcaccuaaaaaguaga

SEQ ID NO: 798536 - RNA, 22 nt, Human
agcaggcauauucugguggcuc

SEQ ID NO: 798537 - RNA, 21 nt, Human
agggcaaagccagacaguaaa

SEQ ID NO: 798538 - RNA, 19 nt, Human
aggugaggugggcagcagu

SEQ ID NO: 798539 - RNA, 27 nt, Human
caaaacagcuccucaagucaggugaag

SEQ ID NO: 798540 - RNA, 19 nt, Human
caaaagaagugccacucau

SEQ ID NO: 798541 - RNA, 23 nt, Human
caaagcaccaacaauccauuucu

SEQ ID NO: 798542 - RNA, 24 nt, Human
caaagcaccaacaauccauuucuu

SEQ ID NO: 798543 - RNA, 21 nt, Human
caacaaaacagcuccucaagu

SEQ ID NO: 798544 - RNA, 22 nt, Human
caacaacaacaaaacagcuccu

SEQ ID NO: 798545 - RNA, 28 nt, Human
caacaacaacaacaaaacagcuccucaa

SEQ ID NO: 798546 - RNA, 20 nt, Human
caaccucugccuccuggguu

SEQ ID NO: 798547 - RNA, 22 nt, Human
caagucaggugacaguaaugcc

SEQ ID NO: 798548 - RNA, 21 nt, Human
cacaaauucaugaaauuugca

SEQ ID NO: 798549 - RNA, 19 nt, Human
caccaacaauccauuucuu

SEQ ID NO: 798550 - RNA, 23 nt, Human
caccuaaaaaguagauaaauaaa

SEQ ID NO: 798551 - RNA, 23 nt, Human
cacucugucacucagacugcagu

SEQ ID NO: 798552 - RNA, 24 nt, Human
cacucugucacucagacugcagug

SEQ ID NO: 798553 - RNA, 21 nt, Human
cacugcaaccucugccuccug

SEQ ID NO: 798554 - RNA, 23 nt, Human
cacugcaaccucugccuccuggg

SEQ ID NO: 798555 - RNA, 18 nt, Human
cagaauuccauccucaaa

SEQ ID NO: 798556 - RNA, 21 nt, Human
cagacaacaacaacaacaaaa

SEQ ID NO: 798557 - RNA, 21 nt, Human
caggugaauggacucuuugac

SEQ ID NO: 798558 - RNA, 24 nt, Human
caugaaauuugcagacaacaacaa

SEQ ID NO: 798559 - RNA, 21 nt, Human
cauggcagaaugacaaaaaag

SEQ ID NO: 798560 - RNA, 21 nt, Human
ccuccuggguucaagugauuc

SEQ ID NO: 798561 - RNA, 22 nt, Human
ccucugccuccuggguucaagu

SEQ ID NO: 798562 - RNA, 21 nt, Human
ccuucagcagaggaaagguga

SEQ ID NO: 798563 - RNA, 18 nt, Human
cgugugugugugugugug

SEQ ID NO: 798564 - RNA, 19 nt, Human
cgugugugugugugugugu

SEQ ID NO: 798565 - RNA, 30 nt, Human
cucaaggaacauaaaagcuaaaagccccac

SEQ ID NO: 798566 - RNA, 29 nt, Human
cucaaggaacauaaaagcuaaaagccccc

SEQ ID NO: 798567 - RNA, 24 nt, Human
cucacugcaaccucugccuccugg

SEQ ID NO: 798568 - RNA, 21 nt, Human
cuccuggguucaagugauucu

SEQ ID NO: 798569 - RNA, 24 nt, Human
cuccuucagcagaggaaaggugag

SEQ ID NO: 798570 - RNA, 25 nt, Human
cugaaaaccugaugugguuuugucc

SEQ ID NO: 798571 - RNA, 24 nt, Human
cugcaaccucugccuccuggguuc

SEQ ID NO: 798572 - RNA, 23 nt, Human
cugccuccuggguucaagugauu

SEQ ID NO: 798573 - RNA, 20 nt, Human
gagcauucuacguuacucca

SEQ ID NO: 798574 - RNA, 18 nt, Human
gcagaaugacaaaaaaga

SEQ ID NO: 798575 - RNA, 22 nt, Human
gcagacaacaacaacaacaaaa

SEQ ID NO: 798576 - RNA, 20 nt, Human
gcagugcaugcugccaaccc

SEQ ID NO: 798577 - RNA, 20 nt, Human
gcgaucucagcucacugcaa

SEQ ID NO: 798578 - RNA, 19 nt, Human
gcugccaacccaggaguuu

SEQ ID NO: 798579 - RNA, 20 nt, Human
ggauuaccuaagccaaucac

SEQ ID NO: 798580 - RNA, 20 nt, Human
gugacaguaaugccccucuc

SEQ ID NO: 798581 - RNA, 19 nt, Human
uaaaaaguagauaaauaaa

SEQ ID NO: 798582 - RNA, 26 nt, Human
uaacaaauaugcagugcaugcugcca

SEQ ID NO: 798583 - RNA, 20 nt, Human
uaagacaaaagaagugccac

SEQ ID NO: 798584 - RNA, 18 nt, Human
uaaugauaucugggcuca

SEQ ID NO: 798585 - RNA, 26 nt, Human
uacacacauacacagauauauauuua

SEQ ID NO: 798586 - RNA, 24 nt, Human
ucacugcaaccucugccuccuggg

SEQ ID NO: 798587 - RNA, 25 nt, Human
ucacugcaaccucugccuccugggu

SEQ ID NO: 798588 - RNA, 27 nt, Human
ucacugcaaccucugccuccuggguuc

SEQ ID NO: 798589 - RNA, 20 nt, Human
uccagugaauuuuacuaaua

SEQ ID NO: 798590 - RNA, 21 nt, Human
uccuggguucaagugauucuc

SEQ ID NO: 798591 - RNA, 23 nt, Human
uccuggguucaagugauucucuc

SEQ ID NO: 798592 - RNA, 18 nt, Human
ucucacucugucacucag

SEQ ID NO: 798593 - RNA, 19 nt, Human
ucucacucugucacucaga

SEQ ID NO: 798594 - RNA, 26 nt, Human
ucucacucugucacucagacugcagu

SEQ ID NO: 798595 - RNA, 27 nt, Human
ucucacucugucacucagacugcagug

SEQ ID NO: 798596 - RNA, 19 nt, Human
ugacaaaaaagaaaaaaga

SEQ ID NO: 798597 - RNA, 22 nt, Human
ugacaaaaaagaaaaaagauuc

SEQ ID NO: 798598 - RNA, 23 nt, Human
ugacaaaaaagaaaaaagauucu

SEQ ID NO: 798599 - RNA, 20 nt, Human
ugacaguaaugccccucucu

SEQ ID NO: 798600 - RNA, 18 nt, Human
ugagaacuaaagaauaau

SEQ ID NO: 798601 - RNA, 22 nt, Human
ugagauggagucucacucuguc

SEQ ID NO: 798602 - RNA, 23 nt, Human
ugcaacccuauuuuaagggcaaa

SEQ ID NO: 798603 - RNA, 21 nt, Human
ugcaugcugccaacccaggag

SEQ ID NO: 798604 - RNA, 22 nt, Human
ugccacucauaggagaaaaaga

SEQ ID NO: 798605 - RNA, 22 nt, Human
ugccuccuggguucaagugauu

SEQ ID NO: 798606 - RNA, 22 nt, Human
ugcugugcuauuaauuuugagc

SEQ ID NO: 798607 - RNA, 19 nt, Human
uggcagaaugacaaaaaag

SEQ ID NO: 798608 - RNA, 23 nt, Human
uggcagaaugacaaaaaagaaaa

SEQ ID NO: 798609 - RNA, 20 nt, Human
uggguucaagugauucucuu

SEQ ID NO: 798610 - RNA, 19 nt, Human
ugguggcucauccuaacuc

SEQ ID NO: 798611 - RNA, 19 nt, Human
uguaaacagcaaagacauc

SEQ ID NO: 798612 - RNA, 22 nt, Human
uguaaacagcaaagacaucaca

SEQ ID NO: 798613 - RNA, 23 nt, Human
uguaaacagcaaagacaucacaa

SEQ ID NO: 798614 - RNA, 24 nt, Human
uguauacacacauacacagauaua

SEQ ID NO: 798615 - RNA, 26 nt, Human
uguauacacacauacacagauauaua

SEQ ID NO: 798616 - RNA, 20 nt, Human
ugucuguguguguguauaaa

SEQ ID NO: 798617 - RNA, 18 nt, Human
uguguauacacacauaca

SEQ ID NO: 798618 - RNA, 20 nt, Human
ugugucuguguguguguaua

SEQ ID NO: 798619 - RNA, 20 nt, Human
uguguguguauacacacaua

SEQ ID NO: 798620 - RNA, 21 nt, Human
ugugugugucugugugugugu

SEQ ID NO: 798621 - RNA, 23 nt, Human
ugugugugucuguguguguguaa

SEQ ID NO: 798622 - RNA, 21 nt, Human
uguguguguguauacacacau

SEQ ID NO: 798623 - RNA, 22 nt, Human
uguguguguguauacacacaua

SEQ ID NO: 798624 - RNA, 26 nt, Human
uguguguguguauacacacauaaugu

SEQ ID NO: 798625 - RNA, 21 nt, Human
ugugugugugugucugugugu

SEQ ID NO: 798626 - RNA, 21 nt, Human
ugugugugugugugucugugu

SEQ ID NO: 798627 - RNA, 23 nt, Human
ugugugugugugugucugugugu

SEQ ID NO: 798628 - RNA, 24 nt, Human
ugugugugugugugucugugugug

SEQ ID NO: 798629 - RNA, 23 nt, Human
uucagugguccagaauuuuagcu

SEQ ID NO: 798630 - RNA, 27 nt, Human
uucaucccguguguguguguguguggu

SEQ ID NO: 798631 - RNA, 21 nt, Human
uucauuucuucuccaaacugc

SEQ ID NO: 798632 - RNA, 19 nt, Human
uugcagacaacaacaacaa

SEQ ID NO: 798633 - RNA, 20 nt, Human
uuucuugggacugcauguaa

SEQ ID NO: 798634 - RNA, 25 nt, Human
acuucaggaauaucaauuccccggg

SEQ ID NO: 798635 - RNA, 19 nt, Human
agggcaaaaccuugcauug

SEQ ID NO: 798636 - RNA, 20 nt, Human
cauugcugggagggucauac

SEQ ID NO: 798637 - RNA, 24 nt, Human
cauugcugggagggucauacugca

SEQ ID NO: 798638 - RNA, 19 nt, Human
cgggcacaaaaucuggaaa

SEQ ID NO: 798639 - RNA, 21 nt, Human
cuccaggaguuucugccucug

SEQ ID NO: 798640 - RNA, 19 nt, Human
ggcacaaaaucuggaaacu

SEQ ID NO: 798641 - RNA, 18 nt, Human
ucauacugcaaaacccag

SEQ ID NO: 798642 - RNA, 21 nt, Human
uccacgggcacaaaaucugga

SEQ ID NO: 798643 - RNA, 20 nt, Human
uccaggaguuucugccucug

SEQ ID NO: 798644 - RNA, 18 nt, Human
ucucuucuuuguugcucc

SEQ ID NO: 798645 - RNA, 18 nt, Human
ucugccucugcuuuucuc

SEQ ID NO: 798646 - RNA, 27 nt, Human
ucuucucccuucauuuucuguuuucuc

SEQ ID NO: 798647 - RNA, 20 nt, Human
ucuucuuuguugcuccagga

SEQ ID NO: 798648 - RNA, 25 nt, Human
ugacuucaggaauaucaauuccccg

SEQ ID NO: 798649 - RNA, 22 nt, Human
ugccucugcuuuucucugauuu

SEQ ID NO: 798650 - RNA, 18 nt, Human
ugcuccaggaguuucugc

SEQ ID NO: 798651 - RNA, 18 nt, Human
uggaaucgugucgguauu

SEQ ID NO: 798652 - RNA, 22 nt, Human
aaacugacacucuguuaauaac

SEQ ID NO: 798653 - RNA, 24 nt, Human
aaacugacacucuguuaauaacac

SEQ ID NO: 798654 - RNA, 19 nt, Human
aacagaaaauaaaucccua

SEQ ID NO: 798655 - RNA, 24 nt, Human
aacagcaugggggaaccgccccca

SEQ ID NO: 798656 - RNA, 18 nt, Human
aauuuccaaauaccuucc

SEQ ID NO: 798657 - RNA, 22 nt, Human
acagaaaauaaaucccuagagc

SEQ ID NO: 798658 - RNA, 21 nt, Human
acaggguaagaaaagcaaauu

SEQ ID NO: 798659 - RNA, 24 nt, Human
acccuuagcaauuucauauuccaa

SEQ ID NO: 798660 - RNA, 20 nt, Human
agaaaauaaaucccuagagc

SEQ ID NO: 798661 - RNA, 23 nt, Human
agaacagcaugggggaaccgccc

SEQ ID NO: 798662 - RNA, 19 nt, Human
agaauucacagcugaaugu

SEQ ID NO: 798663 - RNA, 24 nt, Human
auaaaacagcaaugauuauugaag

SEQ ID NO: 798664 - RNA, 20 nt, Human
aucacagucacagagacuug

SEQ ID NO: 798665 - RNA, 20 nt, Human
auggcaguaggcaagagaac

SEQ ID NO: 798666 - RNA, 23 nt, Human
caaaaugaucacugaacaucaga

SEQ ID NO: 798667 - RNA, 24 nt, Human
caaaaugaucacugaacaucagau

SEQ ID NO: 798668 - RNA, 24 nt, Human
caacaaaaguucaucagaaauuaa

SEQ ID NO: 798669 - RNA, 19 nt, Human
caagucugagaguccacug

SEQ ID NO: 798670 - RNA, 20 nt, Human
cacagagacuuggcucauca

SEQ ID NO: 798671 - RNA, 19 nt, Human
cacccaucacccacaccuu

SEQ ID NO: 798672 - RNA, 21 nt, Human
cagcaaacaggugcauuuauc

SEQ ID NO: 798673 - RNA, 18 nt, Human
caucacccacaccuuacc

SEQ ID NO: 798674 - RNA, 23 nt, Human
caucagaaauuaagaacugagag

SEQ ID NO: 798675 - RNA, 23 nt, Human
ccagaaucuaaaacauuuccagc

SEQ ID NO: 798676 - RNA, 18 nt, Human
cccaucacccacaccuua

SEQ ID NO: 798677 - RNA, 20 nt, Human
ccccaugagcuaaucacguu

SEQ ID NO: 798678 - RNA, 23 nt, Human
ccuguacaccucucugaucacga

SEQ ID NO: 798679 - RNA, 22 nt, Human
cuaaauucuguugagaauucac

SEQ ID NO: 798680 - RNA, 25 nt, Human
cuagaacagcaugggggaaccgccc

SEQ ID NO: 798681 - RNA, 23 nt, Human
cucacaacccacccaucacccuu

SEQ ID NO: 798682 - RNA, 18 nt, Human
cugcacaggguaagaaaa

SEQ ID NO: 798683 - RNA, 21 nt, Human
cuuaaacuauccuuaguaaca

SEQ ID NO: 798684 - RNA, 18 nt, Human
gaaucuaaaacauuucca

SEQ ID NO: 798685 - RNA, 23 nt, Human
gaauucaauucuaaauucuguug

SEQ ID NO: 798686 - RNA, 22 nt, Human
gagacuuggcucaucagaaaua

SEQ ID NO: 798687 - RNA, 22 nt, Human
gaggucacuguuaucaacauca

SEQ ID NO: 798688 - RNA, 20 nt, Human
gcaguacccuuagcaauuuc

SEQ ID NO: 798689 - RNA, 23 nt, Human
ggaggagaauaagauaaaaaucu

SEQ ID NO: 798690 - RNA, 21 nt, Human
ggggaggccucgggaacuuac

SEQ ID NO: 798691 - RNA, 23 nt, Human
guaagaaaagcaaauucucaagu

SEQ ID NO: 798692 - RNA, 21 nt, Human
guaggcaagagaacugcagag

SEQ ID NO: 798693 - RNA, 23 nt, Human
gugcaguacccuuagcaauuuca

SEQ ID NO: 798694 - RNA, 23 nt, Human
uaaaucccuagagcaaucaaaaa

SEQ ID NO: 798695 - RNA, 23 nt, Human
uaagugaauucaauucuaaauuc

SEQ ID NO: 798696 - RNA, 22 nt, Human
uacacauagggaaaaucgacaa

SEQ ID NO: 798697 - RNA, 22 nt, Human
uaccaaguacauguauuuagaa

SEQ ID NO: 798698 - RNA, 23 nt, Human
uauaaaaccaucagauccucuga

SEQ ID NO: 798699 - RNA, 22 nt, Human
uauuucaucaucagaaucugga

SEQ ID NO: 798700 - RNA, 18 nt, Human
ucaguacacuuaaaagua

SEQ ID NO: 798701 - RNA, 22 nt, Human
ucaucagaaauuaagaacugag

SEQ ID NO: 798702 - RNA, 23 nt, Human
ucguaaaugcucugcacagggua

SEQ ID NO: 798703 - RNA, 22 nt, Human
ucucacaacccacccaucaccc

SEQ ID NO: 798704 - RNA, 24 nt, Human
ucucuugguauuagugcuugauuc

SEQ ID NO: 798705 - RNA, 18 nt, Human
ugacacucuguuaauaac

SEQ ID NO: 798706 - RNA, 23 nt, Human
ugacagcaaacaggugcauuuau

SEQ ID NO: 798707 - RNA, 23 nt, Human
ugagauuuugguuggggacacag

SEQ ID NO: 798708 - RNA, 18 nt, Human
uggauuuauuuguaaacu

SEQ ID NO: 798709 - RNA, 22 nt, Human
uggcuggggaggccucgggaac

SEQ ID NO: 798710 - RNA, 18 nt, Human
ugggauaauaacaguucc

SEQ ID NO: 798711 - RNA, 24 nt, Human
ugggggaaccgcccccaugagcua

SEQ ID NO: 798712 - RNA, 18 nt, Human
ugucugacacagguaaag

SEQ ID NO: 798713 - RNA, 19 nt, Human
ugugacagcaaacaggugc

SEQ ID NO: 798714 - RNA, 21 nt, Human
uucaucaucagaaucuggacu

SEQ ID NO: 798715 - RNA, 23 nt, Human
uuccaagucugagaguccaccgu

SEQ ID NO: 798716 - RNA, 25 nt, Human
uuccagcaagugaacuaggguaccc

SEQ ID NO: 798717 - RNA, 20 nt, Human
uuugguuggggacacagcca

SEQ ID NO: 798718 - RNA, 20 nt, Human
aaaccaaaaccuacuaggaa

SEQ ID NO: 798719 - RNA, 23 nt, Human
aauacaauacaacuacugcaauu

SEQ ID NO: 798720 - RNA, 19 nt, Human
acagagcacaugguuuacc

SEQ ID NO: 798721 - RNA, 25 nt, Human
accacacgugcaaaaauacaauaca

SEQ ID NO: 798722 - RNA, 20 nt, Human
accucuucaagccuaugcuu

SEQ ID NO: 798723 - RNA, 21 nt, Human
acugcaauuauuacuaucauu

SEQ ID NO: 798724 - RNA, 18 nt, Human
acugcuaucugcuucugc

SEQ ID NO: 798725 - RNA, 23 nt, Human
agccaugcuaacaaaacuaaacc

SEQ ID NO: 798726 - RNA, 23 nt, Human
auagaacagcagugaagcaagaa

SEQ ID NO: 798727 - RNA, 21 nt, Human
auauagcaguauuauccaguu

SEQ ID NO: 798728 - RNA, 22 nt, Human
aucaagaggaucagacccaaaa

SEQ ID NO: 798729 - RNA, 18 nt, Human
auuuauucacugugguag

SEQ ID NO: 798730 - RNA, 24 nt, Human
caacaaaccuguguaauauagaac

SEQ ID NO: 798731 - RNA, 20 nt, Human
caagaggaucagacccaaaa

SEQ ID NO: 798732 - RNA, 21 nt, Human
caagaggaucagacccaaaac

SEQ ID NO: 798733 - RNA, 21 nt, Human
caauacaauacaacuacugca

SEQ ID NO: 798734 - RNA, 21 nt, Human
caccagaaaagaaccuguauu

SEQ ID NO: 798735 - RNA, 24 nt, Human
caguacccaacaauuuccaugcug

SEQ ID NO: 798736 - RNA, 21 nt, Human
cagucuacuguagaaaauaac

SEQ ID NO: 798737 - RNA, 24 nt, Human
cauguaccugccuacccaccucuu

SEQ ID NO: 798738 - RNA, 24 nt, Human
ccuuaggugaaaaacaccugacag

SEQ ID NO: 798739 - RNA, 21 nt, Human
gaaaaacaccugacagcuaca

SEQ ID NO: 798740 - RNA, 24 nt, Human
gaacauggaaacagucaagcauaa

SEQ ID NO: 798741 - RNA, 24 nt, Human
gaacuuacagaaagauaauuaucu

SEQ ID NO: 798742 - RNA, 24 nt, Human
gaccagagcagaaugucuacagcc

SEQ ID NO: 798743 - RNA, 18 nt, Human
gcaagaaaaaugugugcu

SEQ ID NO: 798744 - RNA, 19 nt, Human
gcuaacaaaacuaaaccuu

SEQ ID NO: 798745 - RNA, 22 nt, Human
gcuaauaucccaguuggacuac

SEQ ID NO: 798746 - RNA, 19 nt, Human
ggaaaacauaauuaacuca

SEQ ID NO: 798747 - RNA, 18 nt, Human
ggaaacagucaagcauaa

SEQ ID NO: 798748 - RNA, 21 nt, Human
ggagguccucgggaggcuuug

SEQ ID NO: 798749 - RNA, 24 nt, Human
ggcuaauaucccaguuggacuacu

SEQ ID NO: 798750 - RNA, 18 nt, Human
ggggcuuuuaaaaucaca

SEQ ID NO: 798751 - RNA, 22 nt, Human
ggugaaaaacaccugacagcua

SEQ ID NO: 798752 - RNA, 24 nt, Human
guagaaaauaacuuguaugccaca

SEQ ID NO: 798753 - RNA, 23 nt, Human
gugaaaaacaccugacagcuaca

SEQ ID NO: 798754 - RNA, 23 nt, Human
uaaaaaaaacaacaacaaaccug

SEQ ID NO: 798755 - RNA, 27 nt, Human
uaaaagaagucauacuuaauacaguag

SEQ ID NO: 798756 - RNA, 18 nt, Human
uaaauaaacaccaauuuu

SEQ ID NO: 798757 - RNA, 19 nt, Human
uaacuaggaaaaaaaccuc

SEQ ID NO: 798758 - RNA, 20 nt, Human
uaccacacgugcaaaaauac

SEQ ID NO: 798759 - RNA, 23 nt, Human
uaccacuuauuuuaaauaaacac

SEQ ID NO: 798760 - RNA, 20 nt, Human
uacccaccucuucaagccua

SEQ ID NO: 798761 - RNA, 19 nt, Human
uacugcuaucugcuucugc

SEQ ID NO: 798762 - RNA, 24 nt, Human
uagaacagcagugaagcaagaaaa

SEQ ID NO: 798763 - RNA, 21 nt, Human
uagcaguauuauccaguuaaa

SEQ ID NO: 798764 - RNA, 18 nt, Human
uauaaagaucaaaaaacc

SEQ ID NO: 798765 - RNA, 25 nt, Human
ucaacaucugaauuuuuuuguaacc

SEQ ID NO: 798766 - RNA, 19 nt, Human
ucacuguuuucagggucaa

SEQ ID NO: 798767 - RNA, 20 nt, Human
ucauuauugggagaacaugg

SEQ ID NO: 798768 - RNA, 21 nt, Human
uccuuucuaacucaguuucac

SEQ ID NO: 798769 - RNA, 23 nt, Human
ucucuucaacugcuugccucuuu

SEQ ID NO: 798770 - RNA, 21 nt, Human
ucuuugggggcuuuuaaaauc

SEQ ID NO: 798771 - RNA, 23 nt, Human
ugaaaaacaccugacagcuacau

SEQ ID NO: 798772 - RNA, 23 nt, Human
ugaaacaaucaacuuugaaaagc

SEQ ID NO: 798773 - RNA, 22 nt, Human
ugacaccagaaaagaaccugua

SEQ ID NO: 798774 - RNA, 19 nt, Human
ugcaguuucuccaucaaga

SEQ ID NO: 798775 - RNA, 24 nt, Human
ugcugcaguuucuccaucaagagg

SEQ ID NO: 798776 - RNA, 20 nt, Human
uggacacaaucaauagcaug

SEQ ID NO: 798777 - RNA, 20 nt, Human
uggauuuguuaagugucccc

SEQ ID NO: 798778 - RNA, 21 nt, Human
uggcuaauaucccaguuggac

SEQ ID NO: 798779 - RNA, 25 nt, Human
ugggagaacauggaaacagucaagc

SEQ ID NO: 798780 - RNA, 21 nt, Human
uguauuuuucauccaauaguu

SEQ ID NO: 798781 - RNA, 23 nt, Human
uguccccaguauuccuuuuaguu

SEQ ID NO: 798782 - RNA, 21 nt, Human
ugucuacagcccuugccaaua

SEQ ID NO: 798783 - RNA, 23 nt, Human
ugugccacauuaguauuugggaa

SEQ ID NO: 798784 - RNA, 22 nt, Human
ugugguagccugaaacauugua

SEQ ID NO: 798785 - RNA, 22 nt, Human
uucacuguuuucagggucaagg

SEQ ID NO: 798786 - RNA, 21 nt, Human
uuggacucugagguggcuaau

SEQ ID NO: 798787 - RNA, 23 nt, Human
uuuauaaagaucaaaaaaccaaa

SEQ ID NO: 798788 - RNA, 22 nt, Human
uuuguaaccuucuaaaagaagu

SEQ ID NO: 798789 - RNA, 24 nt, Human
uuuuuuuuuuuuuuuuuuuauggg

SEQ ID NO: 798790 - RNA, 19 nt, Human
aaaaaaauguaaacaucga

SEQ ID NO: 798791 - RNA, 26 nt, Human
aaaaaaauguaaacaucgaggagcca

SEQ ID NO: 798792 - RNA, 18 nt, Human
aaaaacaaacaauagcuu

SEQ ID NO: 798793 - RNA, 24 nt, Human
aaaaacaaacaauagcuuaaaagc

SEQ ID NO: 798794 - RNA, 21 nt, Human
aaaacagaaacuuagaaacaa

SEQ ID NO: 798795 - RNA, 18 nt, Human
aaaaugagcagauaggug

SEQ ID NO: 798796 - RNA, 23 nt, Human
aaacaaacaauagcuuaaaagca

SEQ ID NO: 798797 - RNA, 19 nt, Human
aaacaauagcuuaaaagca

SEQ ID NO: 798798 - RNA, 18 nt, Human
aaacagaaacuuagaaac

SEQ ID NO: 798799 - RNA, 18 nt, Human
aaaccagaaaagcuaaca

SEQ ID NO: 798800 - RNA, 25 nt, Human
aaagcuuuucugagcuugguuucau

SEQ ID NO: 798801 - RNA, 18 nt, Human
aaauagcaagaacaaacu

SEQ ID NO: 798802 - RNA, 24 nt, Human
aaaugcuuauuuccugaaguuccu

SEQ ID NO: 798803 - RNA, 20 nt, Human
aaauugaacacugcugcgaa

SEQ ID NO: 798804 - RNA, 21 nt, Human
aacauggcuaugugcacaaaa

SEQ ID NO: 798805 - RNA, 23 nt, Human
aaccaaaaagcuaugaauccacu

SEQ ID NO: 798806 - RNA, 20 nt, Human
aaccauuaugauaaagccaa

SEQ ID NO: 798807 - RNA, 24 nt, Human
aagcaugcugugcccagcgcagcu

SEQ ID NO: 798808 - RNA, 20 nt, Human
aagcuuuucugagcuugguu

SEQ ID NO: 798809 - RNA, 24 nt, Human
aaggucccauaguggaaucaagga

SEQ ID NO: 798810 - RNA, 23 nt, Human
aaucauuuaaaacaaaagacuga

SEQ ID NO: 798811 - RNA, 21 nt, Human
aauguuuacacuagcaacagu

SEQ ID NO: 798812 - RNA, 23 nt, Human
acaaggcaggaggcaaaacagag

SEQ ID NO: 798813 - RNA, 27 nt, Human
acacaguaguucuguucccccaacccg

SEQ ID NO: 798814 - RNA, 20 nt, Human
acacgguggcagcccggcuc

SEQ ID NO: 798815 - RNA, 21 nt, Human
accaucugaagaguuucucca

SEQ ID NO: 798816 - RNA, 22 nt, Human
acuaaauauaaaagaaaaaaga

SEQ ID NO: 798817 - RNA, 19 nt, Human
acuacaccuauugagcacu

SEQ ID NO: 798818 - RNA, 26 nt, Human
agaaaagcuaacacaacaaaaugagc

SEQ ID NO: 798819 - RNA, 21 nt, Human
agagggagaggggggaaaaag

SEQ ID NO: 798820 - RNA, 26 nt, Human
agcaauacugcguuuaaaaaggcuuu

SEQ ID NO: 798821 - RNA, 19 nt, Human
aggcaggaggcaaaacaga

SEQ ID NO: 798822 - RNA, 23 nt, Human
aggcugaaauucacuuuggaacu

SEQ ID NO: 798823 - RNA, 18 nt, Human
agggagaggggggaaaaa

SEQ ID NO: 798824 - RNA, 21 nt, Human
agggagaggggggaaaaaggu

SEQ ID NO: 798825 - RNA, 21 nt, Human
auaaagcaauuuuauaaagca

SEQ ID NO: 798826 - RNA, 19 nt, Human
auacauauacacaaauaua

SEQ ID NO: 798827 - RNA, 18 nt, Human
auagaaccauuaugauaa

SEQ ID NO: 798828 - RNA, 25 nt, Human
auauauacauauauacauauauaca

SEQ ID NO: 798829 - RNA, 23 nt, Human
augcauuguuagcacaaaaaguu

SEQ ID NO: 798830 - RNA, 18 nt, Human
auguuacuuagcuuaaaa

SEQ ID NO: 798831 - RNA, 27 nt, Human
auuacgcacaaaauaacuaucucccac

SEQ ID NO: 798832 - RNA, 19 nt, Human
caaaaugagcagauaggug

SEQ ID NO: 798833 - RNA, 22 nt, Human
caaaaugccuugcuaccuaaaa

SEQ ID NO: 798834 - RNA, 25 nt, Human
caaacaauagcuuaaaagcauuauu

SEQ ID NO: 798835 - RNA, 22 nt, Human
cacaugaagaaaaucacuaaca

SEQ ID NO: 798836 - RNA, 23 nt, Human
cacccauucacauacauacccaa

SEQ ID NO: 798837 - RNA, 22 nt, Human
cacggagggaccaagaauucca

SEQ ID NO: 798838 - RNA, 19 nt, Human
cagccucucccgggacgac

SEQ ID NO: 798839 - RNA, 27 nt, Human
cauaacuaaaaacaaauccaaagacca

SEQ ID NO: 798840 - RNA, 24 nt, Human
cauuaccaugaauuuaugaaguaa

SEQ ID NO: 798841 - RNA, 22 nt, Human
ccacggagggaccaagaauucc

SEQ ID NO: 798842 - RNA, 18 nt, Human
cccacuucuguuuuuucu

SEQ ID NO: 798843 - RNA, 19 nt, Human
cccggccgcuucaggugug

SEQ ID NO: 798844 - RNA, 22 nt, Human
cccgggacgaccuggagagcuc

SEQ ID NO: 798845 - RNA, 24 nt, Human
cccgggacugcagcagccucuccc

SEQ ID NO: 798846 - RNA, 19 nt, Human
ccgccgccgccccugcugc

SEQ ID NO: 798847 - RNA, 22 nt, Human
ccgccgccgccccugcugcggc

SEQ ID NO: 798848 - RNA, 18 nt, Human
ccgccgccgccgccccug

SEQ ID NO: 798849 - RNA, 20 nt, Human
ccggagaagcuccggcggcg

SEQ ID NO: 798850 - RNA, 19 nt, Human
cgauccgccgccgccgccc

SEQ ID NO: 798851 - RNA, 20 nt, Human
cgauccgccgccgccgcccc

SEQ ID NO: 798852 - RNA, 23 nt, Human
cgcacaaaauaacuaucucccac

SEQ ID NO: 798853 - RNA, 21 nt, Human
cgggcggcgaggagggcguuc

SEQ ID NO: 798854 - RNA, 19 nt, Human
cggugcggggcggggagga

SEQ ID NO: 798855 - RNA, 21 nt, Human
cuaaaaacaaauccaaagacu

SEQ ID NO: 798856 - RNA, 22 nt, Human
cuacauaaaauaacuuccuaga

SEQ ID NO: 798857 - RNA, 21 nt, Human
cuagaggggguagugacaguu

SEQ ID NO: 798858 - RNA, 18 nt, Human
cugagagggagagggggg

SEQ ID NO: 798859 - RNA, 21 nt, Human
cuuuuuuggugaaauguacac

SEQ ID NO: 798860 - RNA, 19 nt, Human
gaaaaacagaaacuuagaa

SEQ ID NO: 798861 - RNA, 23 nt, Human
gacgcggcgggcggcgaggaggg

SEQ ID NO: 798862 - RNA, 22 nt, Human
gagaagcuccggcggcggcacc

SEQ ID NO: 798863 - RNA, 20 nt, Human
gagaaugucaaaaugccuug

SEQ ID NO: 798864 - RNA, 22 nt, Human
gagaggggggaaaaagguucuc

SEQ ID NO: 798865 - RNA, 28 nt, Human
gaguaaaagaacauuucuuuaaaaauau

SEQ ID NO: 798866 - RNA, 18 nt, Human
gcggcgggcggcgaggag

SEQ ID NO: 798867 - RNA, 20 nt, Human
gcggcgggcggcgaggaggg

SEQ ID NO: 798868 - RNA, 22 nt, Human
gcggggcggggaggacgagcug

SEQ ID NO: 798869 - RNA, 19 nt, Human
ggaucgaggcagggccugg

SEQ ID NO: 798870 - RNA, 20 nt, Human
ggcccggagaagcuccggcg

SEQ ID NO: 798871 - RNA, 22 nt, Human
gggcccggagaagcuccggcgg

SEQ ID NO: 798872 - RNA, 18 nt, Human
gugcauauuuauugauac

SEQ ID NO: 798873 - RNA, 19 nt, Human
guuacuuagcuuaaaaaaa

SEQ ID NO: 798874 - RNA, 20 nt, Human
uaaaacaagccucuaugcac

SEQ ID NO: 798875 - RNA, 18 nt, Human
uaacuaaaaacaaaucca

SEQ ID NO: 798876 - RNA, 23 nt, Human
uaacuaucucccacuucuguuuu

SEQ ID NO: 798877 - RNA, 18 nt, Human
uaagcgagcuaagaauuu

SEQ ID NO: 798878 - RNA, 20 nt, Human
uacaauuuuagcaaacacua

SEQ ID NO: 798879 - RNA, 24 nt, Human
uacacccauucacauacauaccca

SEQ ID NO: 798880 - RNA, 19 nt, Human
uacauauauacauauauac

SEQ ID NO: 798881 - RNA, 23 nt, Human
uacucauauaucaaaguagacug

SEQ ID NO: 798882 - RNA, 22 nt, Human
uagaaaguggacuggcaaacac

SEQ ID NO: 798883 - RNA, 18 nt, Human
uagaaaugcuuauuuccu

SEQ ID NO: 798884 - RNA, 18 nt, Human
uagaaauguaaaugucga

SEQ ID NO: 798885 - RNA, 22 nt, Human
uagcaagaacaaacuaugaaau

SEQ ID NO: 798886 - RNA, 26 nt, Human
uagcuuaaaaaaauacaauuuuagca

SEQ ID NO: 798887 - RNA, 18 nt, Human
uagugcauuuuaguuacu

SEQ ID NO: 798888 - RNA, 21 nt, Human
uagugcauuuuaguuacuguu

SEQ ID NO: 798889 - RNA, 19 nt, Human
uauaacagaaauaucauca

SEQ ID NO: 798890 - RNA, 24 nt, Human
uauacacacacaauaauguacaau

SEQ ID NO: 798891 - RNA, 22 nt, Human
uauauacacacacaauaaugua

SEQ ID NO: 798892 - RNA, 18 nt, Human
uauauauacauauauaca

SEQ ID NO: 798893 - RNA, 20 nt, Human
uauauauauacauauauaca

SEQ ID NO: 798894 - RNA, 24 nt, Human
uauauggcaauaggcuaagacaaa

SEQ ID NO: 798895 - RNA, 22 nt, Human
uaucuaauaucucuuaaugccu

SEQ ID NO: 798896 - RNA, 25 nt, Human
uaugcaaacaugcuacauaaaauaa

SEQ ID NO: 798897 - RNA, 24 nt, Human
uaugcacaugccacacaaugcgua

SEQ ID NO: 798898 - RNA, 18 nt, Human
ucaaguacaagcaugcug

SEQ ID NO: 798899 - RNA, 22 nt, Human
ucaaguacaagcaugcugugcc

SEQ ID NO: 798900 - RNA, 24 nt, Human
ucacaucauucaaaaugauuuaaa

SEQ ID NO: 798901 - RNA, 24 nt, Human
ucaguuccccaccuagacaccacc

SEQ ID NO: 798902 - RNA, 22 nt, Human
uccccccgcucugcccgccgcg

SEQ ID NO: 798903 - RNA, 23 nt, Human
ucccgggacgaccuggagagcuc

SEQ ID NO: 798904 - RNA, 20 nt, Human
ucccuucaagccggaaccuu

SEQ ID NO: 798905 - RNA, 20 nt, Human
ucgauccgccgccgccgccc

SEQ ID NO: 798906 - RNA, 24 nt, Human
ugaaaaacagaaacuuagaaacaa

SEQ ID NO: 798907 - RNA, 21 nt, Human
ugaaauaaaccagaaaagcua

SEQ ID NO: 798908 - RNA, 23 nt, Human
ugaaauaaaccagaaaagcuaac

SEQ ID NO: 798909 - RNA, 20 nt, Human
ugaaauguacacaguaguuc

SEQ ID NO: 798910 - RNA, 20 nt, Human
ugaaugccuucacaucauuc

SEQ ID NO: 798911 - RNA, 25 nt, Human
ugacaugcauauuugauuuacuaca

SEQ ID NO: 798912 - RNA, 21 nt, Human
ugagagcuucuacuggcucua

SEQ ID NO: 798913 - RNA, 22 nt, Human
ugagucccagagaaugucaaaa

SEQ ID NO: 798914 - RNA, 20 nt, Human
ugauagccuguucccccaaa

SEQ ID NO: 798915 - RNA, 18 nt, Human
ugaugcaguacaauguuu

SEQ ID NO: 798916 - RNA, 18 nt, Human
ugccggggccgcuccaga

SEQ ID NO: 798917 - RNA, 21 nt, Human
ugcggggcggggaggacgagc

SEQ ID NO: 798918 - RNA, 18 nt, Human
ugcugcggcugccggggc

SEQ ID NO: 798919 - RNA, 24 nt, Human
uggcuggguggaacugagucuuuu

SEQ ID NO: 798920 - RNA, 20 nt, Human
ugggacacgguggcagcccg

SEQ ID NO: 798921 - RNA, 19 nt, Human
ugucccgggacugcagcag

SEQ ID NO: 798922 - RNA, 22 nt, Human
uuaaauaaacugggacccacac

SEQ ID NO: 798923 - RNA, 22 nt, Human
uuaauucauucaaugguuucug

SEQ ID NO: 798924 - RNA, 20 nt, Human
uuagaaaugcuuauuuccug

SEQ ID NO: 798925 - RNA, 22 nt, Human
uuagaucaucccucuuaguccu

SEQ ID NO: 798926 - RNA, 22 nt, Human
uuauacaacauuucaccaagaa

SEQ ID NO: 798927 - RNA, 20 nt, Human
uuauauauauacauauauac

SEQ ID NO: 798928 - RNA, 19 nt, Human
uucagcugucaacagaagg

SEQ ID NO: 798929 - RNA, 21 nt, Human
uuuaaaacucuguuuucuuua

SEQ ID NO: 798930 - RNA, 22 nt, Human
uuuacacuagcaacaguguaag

SEQ ID NO: 798931 - RNA, 23 nt, Human
uuuauccucuuguggcugggugg

SEQ ID NO: 798932 - RNA, 21 nt, Human
uuugcaaguacugaguaacag

SEQ ID NO: 798933 - RNA, 21 nt, Human
uuuguuugauaagaauucuga

SEQ ID NO: 798934 - RNA, 23 nt, Human
uuuuugcaaguacugaguaacag

SEQ ID NO: 798935 - RNA, 19 nt, Human
aaaaaagacggacgaacag

SEQ ID NO: 798936 - RNA, 26 nt, Human
aaaaagacggacgaacagaccccaaa

SEQ ID NO: 798937 - RNA, 25 nt, Human
aaacaacaacaaaaaagacggacga

SEQ ID NO: 798938 - RNA, 19 nt, Human
aacccccagucccuuccag

SEQ ID NO: 798939 - RNA, 21 nt, Human
aacuugucccccuggccccca

SEQ ID NO: 798940 - RNA, 24 nt, Human
aagacggacgaacagaccccaaaa

SEQ ID NO: 798941 - RNA, 18 nt, Human
aagguucuggggagggac

SEQ ID NO: 798942 - RNA, 26 nt, Human
acaacaaaaaagacggacgaacagac

SEQ ID NO: 798943 - RNA, 21 nt, Human
acaagguucuggggagggaca

SEQ ID NO: 798944 - RNA, 19 nt, Human
acuccgaggucuccagccc

SEQ ID NO: 798945 - RNA, 20 nt, Human
acuuggggaggccuuuggac

SEQ ID NO: 798946 - RNA, 19 nt, Human
agaagggaccaagggcggg

SEQ ID NO: 798947 - RNA, 20 nt, Human
agagauggcacggcuggugg

SEQ ID NO: 798948 - RNA, 19 nt, Human
agcaccauccagacagcag

SEQ ID NO: 798949 - RNA, 20 nt, Human
agcccuggggggcccccgcu

SEQ ID NO: 798950 - RNA, 20 nt, Human
aggaggagcugcugccuggg

SEQ ID NO: 798951 - RNA, 19 nt, Human
aggaggaggagcugcugcc

SEQ ID NO: 798952 - RNA, 23 nt, Human
aggcaggaagcagaggggacccc

SEQ ID NO: 798953 - RNA, 18 nt, Human
aggcuggagguacaacug

SEQ ID NO: 798954 - RNA, 26 nt, Human
caacaaaaaagacggacgaacagacc

SEQ ID NO: 798955 - RNA, 28 nt, Human
caacaaaaaagacggacgaacagacccc

SEQ ID NO: 798956 - RNA, 19 nt, Human
caccacaagauggcucagc

SEQ ID NO: 798957 - RNA, 21 nt, Human
caccagcacgggggccuccag

SEQ ID NO: 798958 - RNA, 21 nt, Human
caccagcacgggggccuccag

SEQ ID NO: 798959 - RNA, 22 nt, Human
caccccaagcugacuuggggag

SEQ ID NO: 798960 - RNA, 26 nt, Human
caccugccuccuuggucccuucaggg

SEQ ID NO: 798961 - RNA, 25 nt, Human
cacgggggccuccaggagggccucg

SEQ ID NO: 798962 - RNA, 24 nt, Human
cagaccccaaaggcauggggcaga

SEQ ID NO: 798963 - RNA, 25 nt, Human
cagaccccaaaggcauggggcagag

SEQ ID NO: 798964 - RNA, 26 nt, Human
cagaccccaaaggcauggggcagagg

SEQ ID NO: 798965 - RNA, 24 nt, Human
cagcacugagacugugcgacacac

SEQ ID NO: 798966 - RNA, 22 nt, Human
cagccccucagcccugacuccc

SEQ ID NO: 798967 - RNA, 21 nt, Human
caggaagagccuuacucuggg

SEQ ID NO: 798968 - RNA, 20 nt, Human
caggcuggagguacaacuga

SEQ ID NO: 798969 - RNA, 21 nt, Human
cagggcaccgagcaggguguc

SEQ ID NO: 798970 - RNA, 20 nt, Human
caguggccuuuaacccccag

SEQ ID NO: 798971 - RNA, 21 nt, Human
cauccagacagcagggaggac

SEQ ID NO: 798972 - RNA, 24 nt, Human
caucccagggguccuccucccaga

SEQ ID NO: 798973 - RNA, 23 nt, Human
cccacaagaggacagcgagucgu

SEQ ID NO: 798974 - RNA, 20 nt, Human
cccccaaacuccaccagcac

SEQ ID NO: 798975 - RNA, 23 nt, Human
cccccaaacuccaccagcacggg

SEQ ID NO: 798976 - RNA, 26 nt, Human
ccccgcuggccacucugccuuccucg

SEQ ID NO: 798977 - RNA, 21 nt, Human
ccccuuuucaccuucuuaucc

SEQ ID NO: 798978 - RNA, 20 nt, Human
cccgaaaggugggcccuggg

SEQ ID NO: 798979 - RNA, 23 nt, Human
ccgaagcagugggugguggggug

SEQ ID NO: 798980 - RNA, 19 nt, Human
ccgaagugcugggggugcg

SEQ ID NO: 798981 - RNA, 20 nt, Human
ccgguccacgggcagggccu

SEQ ID NO: 798982 - RNA, 20 nt, Human
ccucagaggcacugagcucu

SEQ ID NO: 798983 - RNA, 28 nt, Human
ccucugagguagcaccgaagccuggccu

SEQ ID NO: 798984 - RNA, 22 nt, Human
ccugauggggggcugcuccaga

SEQ ID NO: 798985 - RNA, 21 nt, Human
ccuggccugugggccucuggg

SEQ ID NO: 798986 - RNA, 18 nt, Human
cgagcagggugucggggc

SEQ ID NO: 798987 - RNA, 23 nt, Human
cggacgaacagaccccaaaggca

SEQ ID NO: 798988 - RNA, 20 nt, Human
cgggccagggcaccgagcag

SEQ ID NO: 798989 - RNA, 18 nt, Human
cggggcagaggagcagcc

SEQ ID NO: 798990 - RNA, 21 nt, Human
cuccucuccaccuuucggccc

SEQ ID NO: 798991 - RNA, 21 nt, Human
cucgggaggaagcuccucucc

SEQ ID NO: 798992 - RNA, 24 nt, Human
cuggccugugggccucugggguac

SEQ ID NO: 798993 - RNA, 18 nt, Human
cugugcaccugauggggg

SEQ ID NO: 798994 - RNA, 25 nt, Human
cuguguccucaaggagcuggcccag

SEQ ID NO: 798995 - RNA, 19 nt, Human
gaaaggugggcccuggggc

SEQ ID NO: 798996 - RNA, 18 nt, Human
gaacagaccccaaaggca

SEQ ID NO: 798997 - RNA, 19 nt, Human
gaagaggaggaggagcugc

SEQ ID NO: 798998 - RNA, 22 nt, Human
gaccagggcagagagagaaggc

SEQ ID NO: 798999 - RNA, 22 nt, Human
gacucuguguccucaaggagcu

SEQ ID NO: 799000 - RNA, 19 nt, Human
gacugugcgacacacaggc

SEQ ID NO: 799001 - RNA, 25 nt, Human
gagagacuccgaggucuccagcccc

SEQ ID NO: 799002 - RNA, 20 nt, Human
gagcacggucaucucauccg

SEQ ID NO: 799003 - RNA, 19 nt, Human
gagccgguccagucugugg

SEQ ID NO: 799004 - RNA, 23 nt, Human
gaggaggaggagcugcugccugg

SEQ ID NO: 799005 - RNA, 21 nt, Human
gcaccgaagccuggccugugg

SEQ ID NO: 799006 - RNA, 22 nt, Human
gcacugagcucugaggggcguc

SEQ ID NO: 799007 - RNA, 25 nt, Human
gcagaagcagaggcaggaagcagag

SEQ ID NO: 799008 - RNA, 25 nt, Human
gcagaggagggcagcaccauccaga

SEQ ID NO: 799009 - RNA, 19 nt, Human
gcaguggggagggccgcuc

SEQ ID NO: 799010 - RNA, 24 nt, Human
gcccagccucagaggcacugagcu

SEQ ID NO: 799011 - RNA, 19 nt, Human
gcccccaaacuccaccagc

SEQ ID NO: 799012 - RNA, 19 nt, Human
gccuuuggacuuagacagc

SEQ ID NO: 799013 - RNA, 19 nt, Human
gcgcagccccucagcccug

SEQ ID NO: 799014 - RNA, 21 nt, Human
gcgccuggucuggggaggaug

SEQ ID NO: 799015 - RNA, 20 nt, Human
gcuccagagggggcccaagg

SEQ ID NO: 799016 - RNA, 20 nt, Human
gcugcuccagagggggccca

SEQ ID NO: 799017 - RNA, 21 nt, Human
gcuggugggcaggaagcccag

SEQ ID NO: 799018 - RNA, 29 nt, Human
ggaaaggaggggcagcucgggaggaaaag

SEQ ID NO: 799019 - RNA, 18 nt, Human
ggaccagggcagagagag

SEQ ID NO: 799020 - RNA, 22 nt, Human
ggaugacugcccaggaccuggg

SEQ ID NO: 799021 - RNA, 22 nt, Human
ggcaacuugucccccuggcccc

SEQ ID NO: 799022 - RNA, 23 nt, Human
ggcaacuugucccccuggccccc

SEQ ID NO: 799023 - RNA, 20 nt, Human
ggcagagagagaaggcaacu

SEQ ID NO: 799024 - RNA, 18 nt, Human
ggcagcucgggaggaagc

SEQ ID NO: 799025 - RNA, 18 nt, Human
ggccagggcaccgagcag

SEQ ID NO: 799026 - RNA, 18 nt, Human
ggccuuuaacccccaguc

SEQ ID NO: 799027 - RNA, 21 nt, Human
ggcggcugggcuccuggcuuc

SEQ ID NO: 799028 - RNA, 20 nt, Human
ggcugggggcugggccaggc

SEQ ID NO: 799029 - RNA, 18 nt, Human
ggcuggugggcaggaagc

SEQ ID NO: 799030 - RNA, 21 nt, Human
gggcagagagagaaggcaacu

SEQ ID NO: 799031 - RNA, 24 nt, Human
gggcagggccugggaaaggagggg

SEQ ID NO: 799032 - RNA, 19 nt, Human
gggccucugggguaccccc

SEQ ID NO: 799033 - RNA, 19 nt, Human
gguccccagcuccagcggg

SEQ ID NO: 799034 - RNA, 26 nt, Human
guagguaagacucuguguccucaagg

SEQ ID NO: 799035 - RNA, 21 nt, Human
gucuggggaggaugacugccc

SEQ ID NO: 799036 - RNA, 23 nt, Human
gugggguauacuucagaggaaac

SEQ ID NO: 799037 - RNA, 21 nt, Human
guggggugugccagggacccc

SEQ ID NO: 799038 - RNA, 18 nt, Human
uaacccccagucccuucc

SEQ ID NO: 799039 - RNA, 22 nt, Human
uacccccaccccaagcugacuu

SEQ ID NO: 799040 - RNA, 27 nt, Human
uacccccaccccaagcugacuugggga

SEQ ID NO: 799041 - RNA, 21 nt, Human
ucagccugaaguagggacugg

SEQ ID NO: 799042 - RNA, 21 nt, Human
ucagggagggguccccgucuc

SEQ ID NO: 799043 - RNA, 21 nt, Human
ucccagggguccuccuccccc

SEQ ID NO: 799044 - RNA, 23 nt, Human
ucggcccagccucagaggcacug

SEQ ID NO: 799045 - RNA, 25 nt, Human
ucugccuuccucggccauguccgaa

SEQ ID NO: 799046 - RNA, 19 nt, Human
ugaagagagccgguccagu

SEQ ID NO: 799047 - RNA, 22 nt, Human
ugaagagagccgguccagucug

SEQ ID NO: 799048 - RNA, 23 nt, Human
ugacugcccaggaccuggguggu

SEQ ID NO: 799049 - RNA, 22 nt, Human
ugagaacaguccuacaagguuc

SEQ ID NO: 799050 - RNA, 22 nt, Human
uggcacggcuggugggcaggaa

SEQ ID NO: 799051 - RNA, 20 nt, Human
ugggaaaggaggggcagcuc

SEQ ID NO: 799052 - RNA, 21 nt, Human
ugggccugcagccccggccag

SEQ ID NO: 799053 - RNA, 20 nt, Human
uggggggcugcgacacagug

SEQ ID NO: 799054 - RNA, 24 nt, Human
uggggggcugcgacacaguggccc

SEQ ID NO: 799055 - RNA, 24 nt, Human
ugggguauacuucagaggaaacag

SEQ ID NO: 799056 - RNA, 23 nt, Human
ugggugguggggugugccagggg

SEQ ID NO: 799057 - RNA, 19 nt, Human
ugguggggugugccaggga

SEQ ID NO: 799058 - RNA, 20 nt, Human
ugguggggugugccagggac

SEQ ID NO: 799059 - RNA, 19 nt, Human
ugucggggcugggugccuc

SEQ ID NO: 799060 - RNA, 27 nt, Human
uucaauauauaaaaacaacaacaaaaa

SEQ ID NO: 799061 - RNA, 26 nt, Human
uuccaggaagagccuuacucugggug

SEQ ID NO: 799062 - RNA, 18 nt, Human
uuccucggccauguccga

SEQ ID NO: 799063 - RNA, 24 nt, Human
uucggcccagccucagaggcacug

SEQ ID NO: 799064 - RNA, 19 nt, Human
acuuuuucugucugcaaac

SEQ ID NO: 799065 - RNA, 22 nt, Human
auccggcgacccgccaccccca

SEQ ID NO: 799066 - RNA, 24 nt, Human
caaagaugcuucaaacugguccaa

SEQ ID NO: 799067 - RNA, 23 nt, Human
cacccccacuccgcgucucugcc

SEQ ID NO: 799068 - RNA, 25 nt, Human
cacuccgcgucucugccugcgggga

SEQ ID NO: 799069 - RNA, 18 nt, Human
cccacgcacacuccaaug

SEQ ID NO: 799070 - RNA, 21 nt, Human
cccacgcacacuccaaugccg

SEQ ID NO: 799071 - RNA, 25 nt, Human
ccuagccgcucucacaccccucuug

SEQ ID NO: 799072 - RNA, 22 nt, Human
cgagcguagcgagaagacccac

SEQ ID NO: 799073 - RNA, 22 nt, Human
cguaucagugagcccgcaccca

SEQ ID NO: 799074 - RNA, 19 nt, Human
cuagccgcucucacacccc

SEQ ID NO: 799075 - RNA, 22 nt, Human
cugguccaaauaacaaguaccc

SEQ ID NO: 799076 - RNA, 20 nt, Human
cuuacaucccuuucugguga

SEQ ID NO: 799077 - RNA, 19 nt, Human
gagcccgcacccacuccug

SEQ ID NO: 799078 - RNA, 21 nt, Human
guagcgagaagacccacgcac

SEQ ID NO: 799079 - RNA, 24 nt, Human
guccaaauaacaaguacccaauug

SEQ ID NO: 799080 - RNA, 26 nt, Human
uaaauuuacaaauacaaaccaauacu

SEQ ID NO: 799081 - RNA, 21 nt, Human
uaagcgagacuuacaucccuu

SEQ ID NO: 799082 - RNA, 19 nt, Human
uacccaaugcucugaauuc

SEQ ID NO: 799083 - RNA, 23 nt, Human
uauaaggcauguccaguuuaugu

SEQ ID NO: 799084 - RNA, 19 nt, Human
ucuguugccaguuggucca

SEQ ID NO: 799085 - RNA, 19 nt, Human
ugagcccgcacccacuccu

SEQ ID NO: 799086 - RNA, 18 nt, Human
ugucugcaaacaucaccu

SEQ ID NO: 799087 - RNA, 23 nt, Human
uuucuguugccaguugguccaau

SEQ ID NO: 799088 - RNA, 27 nt, Human
uuuuuuaaauuuacaaauacaaaccaa

SEQ ID NO: 799089 - RNA, 25 nt, Human
aaccaggaguuuggugugguuucug

SEQ ID NO: 799090 - RNA, 19 nt, Human
acagacagcggccccaggc

SEQ ID NO: 799091 - RNA, 19 nt, Human
acggcgcacagacagcggc

SEQ ID NO: 799092 - RNA, 19 nt, Human
aggagcuggcuaugugaag

SEQ ID NO: 799093 - RNA, 21 nt, Human
aggaggcccuggggguuucuu

SEQ ID NO: 799094 - RNA, 21 nt, Human
aggcagcagcagguuauggcu

SEQ ID NO: 799095 - RNA, 21 nt, Human
aggcagccagguucucgaaug

SEQ ID NO: 799096 - RNA, 24 nt, Human
augcugggcccuccaucaggcagc

SEQ ID NO: 799097 - RNA, 22 nt, Human
augcugggcccuccaucaggcc

SEQ ID NO: 799098 - RNA, 20 nt, Human
augggcgggcaggcgggucc

SEQ ID NO: 799099 - RNA, 27 nt, Human
cacacaccacagugcuggucccagagg

SEQ ID NO: 799100 - RNA, 24 nt, Human
cacacggcgcacagacagcggccc

SEQ ID NO: 799101 - RNA, 20 nt, Human
caccacagugcuggucccag

SEQ ID NO: 799102 - RNA, 19 nt, Human
cacgugacagccugugugu

SEQ ID NO: 799103 - RNA, 19 nt, Human
cagaauauucucccccucu

SEQ ID NO: 799104 - RNA, 25 nt, Human
cagacaucuucacauccucagucuu

SEQ ID NO: 799105 - RNA, 20 nt, Human
cagagccucugcugccucuc

SEQ ID NO: 799106 - RNA, 23 nt, Human
cagagcucaggccccagucaccu

SEQ ID NO: 799107 - RNA, 18 nt, Human
cagcagaauauucucccc

SEQ ID NO: 799108 - RNA, 20 nt, Human
cagcagguuauggcuccuuc

SEQ ID NO: 799109 - RNA, 23 nt, Human
cagcggccccaggcagccagguu

SEQ ID NO: 799110 - RNA, 20 nt, Human
caggaggcugaaggugacug

SEQ ID NO: 799111 - RNA, 20 nt, Human
cauagaagucccaucggcca

SEQ ID NO: 799112 - RNA, 18 nt, Human
caucaccaaccaggaguu

SEQ ID NO: 799113 - RNA, 20 nt, Human
caucaccaaccaggaguuug

SEQ ID NO: 799114 - RNA, 24 nt, Human
caucaccaagucacaguuuccagc

SEQ ID NO: 799115 - RNA, 20 nt, Human
caucugcagaccagcagaau

SEQ ID NO: 799116 - RNA, 18 nt, Human
ccacaggauacaggugca

SEQ ID NO: 799117 - RNA, 21 nt, Human
ccagcucucgacucaaggcca

SEQ ID NO: 799118 - RNA, 20 nt, Human
ccauugacauuccacaggga

SEQ ID NO: 799119 - RNA, 20 nt, Human
ccccucgggcggccuuuggu

SEQ ID NO: 799120 - RNA, 24 nt, Human
ccucuccugcuggccguccaggaa

SEQ ID NO: 799121 - RNA, 18 nt, Human
ccucucucuuccuaccca

SEQ ID NO: 799122 - RNA, 24 nt, Human
ccucucucuuccuacccaucugca

SEQ ID NO: 799123 - RNA, 23 nt, Human
ccucugcugccucucucuuccua

SEQ ID NO: 799124 - RNA, 21 nt, Human
cggccagagcagucacugcgg

SEQ ID NO: 799125 - RNA, 19 nt, Human
cucccacacacacaccaca

SEQ ID NO: 799126 - RNA, 20 nt, Human
cucccccucucaucaccaac

SEQ ID NO: 799127 - RNA, 23 nt, Human
cucgacucaaggccagguucuuc

SEQ ID NO: 799128 - RNA, 23 nt, Human
cugggccccaggcuguggugaug

SEQ ID NO: 799129 - RNA, 23 nt, Human
cuucacauccucagucuuccaaa

SEQ ID NO: 799130 - RNA, 19 nt, Human
cuuguggccucuugggcuu

SEQ ID NO: 799131 - RNA, 22 nt, Human
gaacagacaucuucacauccuc

SEQ ID NO: 799132 - RNA, 22 nt, Human
gacgcugccaggcacgugacag

SEQ ID NO: 799133 - RNA, 21 nt, Human
gagaacuguggggaaggaggc

SEQ ID NO: 799134 - RNA, 19 nt, Human
gaggagcuggcuaugugaa

SEQ ID NO: 799135 - RNA, 21 nt, Human
gcacagacagcggccccaggc

SEQ ID NO: 799136 - RNA, 20 nt, Human
gcggccccaggcagccaggu

SEQ ID NO: 799137 - RNA, 23 nt, Human
ggaacagacaucuucacauccuc

SEQ ID NO: 799138 - RNA, 18 nt, Human
ggaccaugccgucuugac

SEQ ID NO: 799139 - RNA, 19 nt, Human
ggccagagcagucacugcg

SEQ ID NO: 799140 - RNA, 22 nt, Human
gguuuugcugggcuucccuguc

SEQ ID NO: 799141 - RNA, 22 nt, Human
gugcagcugggcaucaccaagu

SEQ ID NO: 799142 - RNA, 23 nt, Human
uaaagacaauacaauaauuucca

SEQ ID NO: 799143 - RNA, 24 nt, Human
uaagcgacccaucuuuuuuuuuuu

SEQ ID NO: 799144 - RNA, 20 nt, Human
ucaccaagucacaguuucca

SEQ ID NO: 799145 - RNA, 23 nt, Human
ucacugauggugauggcugagau

SEQ ID NO: 799146 - RNA, 18 nt, Human
uccaccucauuguaagcc

SEQ ID NO: 799147 - RNA, 21 nt, Human
ucccaugcugggcccuccauc

SEQ ID NO: 799148 - RNA, 23 nt, Human
ucuccugcuggccguccaggaac

SEQ ID NO: 799149 - RNA, 23 nt, Human
ucuucuguaggcagagcucaggc

SEQ ID NO: 799150 - RNA, 19 nt, Human
ugagaacuguggggaagga

SEQ ID NO: 799151 - RNA, 20 nt, Human
ugagacgucacugaugguga

SEQ ID NO: 799152 - RNA, 19 nt, Human
ugagaugccuucccgaugg

SEQ ID NO: 799153 - RNA, 21 nt, Human
ugccagagccucugcugccuc

SEQ ID NO: 799154 - RNA, 24 nt, Human
ugcucauccuuuucauagaagucc

SEQ ID NO: 799155 - RNA, 21 nt, Human
ugcugggcccuccaucaggca

SEQ ID NO: 799156 - RNA, 22 nt, Human
ugcugggcuucccugucaaagc

SEQ ID NO: 799157 - RNA, 21 nt, Human
uggagaggguugggcugcaga

SEQ ID NO: 799158 - RNA, 24 nt, Human
uggcacuguugugccagagccucu

SEQ ID NO: 799159 - RNA, 21 nt, Human
uggccucuugggcuuggaggc

SEQ ID NO: 799160 - RNA, 24 nt, Human
uguggggaaggaggcccugggggu

SEQ ID NO: 799161 - RNA, 20 nt, Human
uguggugaugcuggccaggg

SEQ ID NO: 799162 - RNA, 20 nt, Human
uguugugccagagccucugc

SEQ ID NO: 799163 - RNA, 20 nt, Human
uuggugugguuucuggacac

SEQ ID NO: 799164 - RNA, 19 nt, Human
aaaccaaccaaccaacaaa

SEQ ID NO: 799165 - RNA, 21 nt, Human
aacaaacaacaaaccaaccaa

SEQ ID NO: 799166 - RNA, 21 nt, Human
aacaaaccaaccaaccaacaa

SEQ ID NO: 799167 - RNA, 28 nt, Human
acaaacaacaaaccaaccaaccaacaaa

SEQ ID NO: 799168 - RNA, 19 nt, Human
acaaaccaaccaaccaaca

SEQ ID NO: 799169 - RNA, 23 nt, Human
acacacugcgaagucagccccuc

SEQ ID NO: 799170 - RNA, 25 nt, Human
acagggcauauuaaacaaacaacaa

SEQ ID NO: 799171 - RNA, 18 nt, Human
aggcuggggcccgcccgc

SEQ ID NO: 799172 - RNA, 22 nt, Human
caaacaacaaaccaaccaacca

SEQ ID NO: 799173 - RNA, 20 nt, Human
caacaaaccaaccaaccaac

SEQ ID NO: 799174 - RNA, 23 nt, Human
caacagaaguagaaaacagggca

SEQ ID NO: 799175 - RNA, 19 nt, Human
cagccccucugcccagucu

SEQ ID NO: 799176 - RNA, 22 nt, Human
caugggcccgcgggccccgcuc

SEQ ID NO: 799177 - RNA, 22 nt, Human
ccccaggccuccucaugggccc

SEQ ID NO: 799178 - RNA, 19 nt, Human
ccccgccccuuccucccuu

SEQ ID NO: 799179 - RNA, 20 nt, Human
ccccgccccuuccucccuuc

SEQ ID NO: 799180 - RNA, 23 nt, Human
cccgcggccgaccggccucccuc

SEQ ID NO: 799181 - RNA, 24 nt, Human
cccgcgggccccgcuccucgggag

SEQ ID NO: 799182 - RNA, 20 nt, Human
cccucgccgccgccgccgcc

SEQ ID NO: 799183 - RNA, 19 nt, Human
cccucuggcgcucuccccg

SEQ ID NO: 799184 - RNA, 24 nt, Human
ccucccuucccucaggcuggggcc

SEQ ID NO: 799185 - RNA, 19 nt, Human
ccucgccgccgccgccgcc

SEQ ID NO: 799186 - RNA, 20 nt, Human
cgaagucagccccucugccc

SEQ ID NO: 799187 - RNA, 20 nt, Human
cgaggcucgcucccucgccg

SEQ ID NO: 799188 - RNA, 19 nt, Human
cgccccuuccucccuuccc

SEQ ID NO: 799189 - RNA, 21 nt, Human
cucccucgccgccgccgccgc

SEQ ID NO: 799190 - RNA, 22 nt, Human
gcuccagcccggcgaacgccau

SEQ ID NO: 799191 - RNA, 18 nt, Human
uacucgcuccagcccggc

SEQ ID NO: 799192 - RNA, 19 nt, Human
ucagccccucugcccaguc

SEQ ID NO: 799193 - RNA, 18 nt, Human
ucaugggcccgcgggccc

SEQ ID NO: 799194 - RNA, 24 nt, Human
uccaacagaaguagaaaacagggc

SEQ ID NO: 799195 - RNA, 24 nt, Human
uccaugcucccacugguuuauuuc

SEQ ID NO: 799196 - RNA, 22 nt, Human
uccccaggccuccucaugggcc

SEQ ID NO: 799197 - RNA, 25 nt, Human
uccccaggccuccucaugggcccgc

SEQ ID NO: 799198 - RNA, 23 nt, Human
ucccucgccgccgccgccgccuc

SEQ ID NO: 799199 - RNA, 22 nt, Human
uccucccuucccucaggcuggg

SEQ ID NO: 799200 - RNA, 21 nt, Human
ucgccgccgccgccgccucca

SEQ ID NO: 799201 - RNA, 23 nt, Human
ucgcucccucgccgccgccgccg

SEQ ID NO: 799202 - RNA, 22 nt, Human
ucuggaaaagcaacggcguaag

SEQ ID NO: 799203 - RNA, 23 nt, Human
ucuggcgcucuccccgccccuuc

SEQ ID NO: 799204 - RNA, 19 nt, Human
uguacucgcuccagcccgg

SEQ ID NO: 799205 - RNA, 23 nt, Human
uuaaacaaacaacaaaccaacca

SEQ ID NO: 799206 - RNA, 23 nt, Human
uucaaccccaaauauuuuccaac

SEQ ID NO: 799207 - RNA, 20 nt, Human
uuuuuuuuuuuuuuuuccau

SEQ ID NO: 799208 - RNA, 24 nt, Human
uuuuuuuuuuuuuuuuuuuccaug

SEQ ID NO: 799209 - RNA, 21 nt, Human
agaauucucccugccgggcuu

SEQ ID NO: 799210 - RNA, 19 nt, Human
aucuggcagaauucucccu

SEQ ID NO: 799211 - RNA, 26 nt, Human
caaaugaccacacucaggaauauggc

SEQ ID NO: 799212 - RNA, 19 nt, Human
ccgggcuuccuggugcugu

SEQ ID NO: 799213 - RNA, 18 nt, Human
gcucagggaccaggguag

SEQ ID NO: 799214 - RNA, 19 nt, Human
gguccagcagcccacgggc

SEQ ID NO: 799215 - RNA, 19 nt, Human
gucagaucaagagacgagc

SEQ ID NO: 799216 - RNA, 20 nt, Human
aaaaacaagaccacagaagc

SEQ ID NO: 799217 - RNA, 23 nt, Human
aaaacaaacugcaaucuaagcau

SEQ ID NO: 799218 - RNA, 23 nt, Human
aaaauacaauuaaauauuucuuu

SEQ ID NO: 799219 - RNA, 21 nt, Human
aaacaaacugcaaucuaagca

SEQ ID NO: 799220 - RNA, 20 nt, Human
aaaugcaaaacaaacugcaa

SEQ ID NO: 799221 - RNA, 22 nt, Human
aacaaaaaacucauacuucuca

SEQ ID NO: 799222 - RNA, 22 nt, Human
aaccacugaaaaaguagugcaa

SEQ ID NO: 799223 - RNA, 18 nt, Human
aagaacaaauuauugugu

SEQ ID NO: 799224 - RNA, 18 nt, Human
aagaacuucacaaaccug

SEQ ID NO: 799225 - RNA, 21 nt, Human
aagcagaaauuuggacuugag

SEQ ID NO: 799226 - RNA, 23 nt, Human
aagcucaacaaacuuguguugaa

SEQ ID NO: 799227 - RNA, 21 nt, Human
aaggggaccaagaaccacuga

SEQ ID NO: 799228 - RNA, 23 nt, Human
acaaaacaaguuuuauuuugcaa

SEQ ID NO: 799229 - RNA, 24 nt, Human
acaaaccugcaaauaaaaugcauc

SEQ ID NO: 799230 - RNA, 23 nt, Human
acacugcaacaauucaaaaagua

SEQ ID NO: 799231 - RNA, 19 nt, Human
acauuaagaugaagucaag

SEQ ID NO: 799232 - RNA, 22 nt, Human
accuuguagugaaauuuuauga

SEQ ID NO: 799233 - RNA, 20 nt, Human
acuccaaagaaaguaaaaua

SEQ ID NO: 799234 - RNA, 22 nt, Human
acugccugccaacaguuguucc

SEQ ID NO: 799235 - RNA, 20 nt, Human
agaaaaacaagaauaauuaa

SEQ ID NO: 799236 - RNA, 23 nt, Human
agacaaaaauacaucacccaaga

SEQ ID NO: 799237 - RNA, 23 nt, Human
agccauuaaaaacaagaccacag

SEQ ID NO: 799238 - RNA, 19 nt, Human
agucacaccagaauuuacu

SEQ ID NO: 799239 - RNA, 18 nt, Human
aguggcugcauuaagaac

SEQ ID NO: 799240 - RNA, 19 nt, Human
auagaagaaacagacugug

SEQ ID NO: 799241 - RNA, 18 nt, Human
auggcagacaaggaaugg

SEQ ID NO: 799242 - RNA, 23 nt, Human
auuguaacuagaaaaguuugaaa

SEQ ID NO: 799243 - RNA, 23 nt, Human
auuucagaauucucaaauuacuu

SEQ ID NO: 799244 - RNA, 22 nt, Human
caaaacaaacugcaaucuaagc

SEQ ID NO: 799245 - RNA, 21 nt, Human
caaaauaaaaugaaagcugac

SEQ ID NO: 799246 - RNA, 18 nt, Human
caaaccuucacucaauua

SEQ ID NO: 799247 - RNA, 23 nt, Human
caacaaacuuguguugaacugaa

SEQ ID NO: 799248 - RNA, 19 nt, Human
caaguuaagaaaauuauac

SEQ ID NO: 799249 - RNA, 22 nt, Human
caccuggauaagaaauaugacu

SEQ ID NO: 799250 - RNA, 23 nt, Human
cacuuuggaaaagcauuaucaaa

SEQ ID NO: 799251 - RNA, 21 nt, Human
cagaauggcagacaaggaaug

SEQ ID NO: 799252 - RNA, 19 nt, Human
cagacaaggaaugggagaa

SEQ ID NO: 799253 - RNA, 24 nt, Human
cauuggcucuugaacugauggcug

SEQ ID NO: 799254 - RNA, 20 nt, Human
cauuucuacagaccaucuuu

SEQ ID NO: 799255 - RNA, 23 nt, Human
ccaaaauuaguaaaucugaauga

SEQ ID NO: 799256 - RNA, 24 nt, Human
ccaaaauuaguaaaucugaaugaa

SEQ ID NO: 799257 - RNA, 20 nt, Human
ccaacaguuguuccuugugu

SEQ ID NO: 799258 - RNA, 20 nt, Human
ccacuacaaaauacgggaac

SEQ ID NO: 799259 - RNA, 21 nt, Human
cccaagaugugguaaagggga

SEQ ID NO: 799260 - RNA, 22 nt, Human
ccgcugccgucucugccgcucc

SEQ ID NO: 799261 - RNA, 23 nt, Human
cgaacauauguuaacaguaauac

SEQ ID NO: 799262 - RNA, 23 nt, Human
cuaaagauauucaaaugagaagg

SEQ ID NO: 799263 - RNA, 20 nt, Human
cugccgcucccgccgccacu

SEQ ID NO: 799264 - RNA, 19 nt, Human
cugccgucucugccgcucc

SEQ ID NO: 799265 - RNA, 19 nt, Human
cuggaaaaauacagaaugu

SEQ ID NO: 799266 - RNA, 21 nt, Human
cuguguauauauauauauuug

SEQ ID NO: 799267 - RNA, 22 nt, Human
cuguuugggaaaaaaaguuguu

SEQ ID NO: 799268 - RNA, 18 nt, Human
gaauagaagaaacagacu

SEQ ID NO: 799269 - RNA, 21 nt, Human
gaaugucuuucauuaggugua

SEQ ID NO: 799270 - RNA, 19 nt, Human
gauucguaaggguuuccuu

SEQ ID NO: 799271 - RNA, 24 nt, Human
gcaagaacuucacaaaccugcaaa

SEQ ID NO: 799272 - RNA, 22 nt, Human
gcucaacaaacuuguguugaac

SEQ ID NO: 799273 - RNA, 25 nt, Human
ggaaaagcauuaucaaaucugaaaa

SEQ ID NO: 799274 - RNA, 20 nt, Human
ggaccaagaaccacugaaaa

SEQ ID NO: 799275 - RNA, 26 nt, Human
ggcaaaggggaagaagacaaaaauac

SEQ ID NO: 799276 - RNA, 21 nt, Human
gggggugggaaugaggcgggg

SEQ ID NO: 799277 - RNA, 23 nt, Human
guacagcaucccuaaucuuuaaa

SEQ ID NO: 799278 - RNA, 28 nt, Human
guagaaauuuaaaaaaaaaaaaaaaaaa

SEQ ID NO: 799279 - RNA, 20 nt, Human
uaaaaacauuucuacagacc

SEQ ID NO: 799280 - RNA, 25 nt, Human
uaaaacauuucuguaguaagaguuu

SEQ ID NO: 799281 - RNA, 21 nt, Human
uaaaaucgauacugccugcca

SEQ ID NO: 799282 - RNA, 20 nt, Human
uaaaaugaaagcugacagac

SEQ ID NO: 799283 - RNA, 23 nt, Human
uaaaaugaaagcugacagacuca

SEQ ID NO: 799284 - RNA, 23 nt, Human
uaacaagaauuuagcacuaaaaa

SEQ ID NO: 799285 - RNA, 24 nt, Human
uaagaugaagucaaguguugcaaa

SEQ ID NO: 799286 - RNA, 19 nt, Human
uaagcagaaauuuggacuu

SEQ ID NO: 799287 - RNA, 19 nt, Human
uaagguaacccaucaaccc

SEQ ID NO: 799288 - RNA, 22 nt, Human
uacaaaauacgggaacacauua

SEQ ID NO: 799289 - RNA, 23 nt, Human
uacaaguuaagaaaauuauacac

SEQ ID NO: 799290 - RNA, 22 nt, Human
uacacaaacacuuaaaaauuca

SEQ ID NO: 799291 - RNA, 23 nt, Human
uacaucacccaagaugugguaaa

SEQ ID NO: 799292 - RNA, 21 nt, Human
uagaaaacagauugugaccau

SEQ ID NO: 799293 - RNA, 19 nt, Human
uaugucuaggaauagaaga

SEQ ID NO: 799294 - RNA, 21 nt, Human
uauuaacagacuucuuuuucc

SEQ ID NO: 799295 - RNA, 18 nt, Human
uauuaagaaaggacagcu

SEQ ID NO: 799296 - RNA, 20 nt, Human
uauuaagaaaggacagcuca

SEQ ID NO: 799297 - RNA, 24 nt, Human
uauuuaagcacuuaagcugacauu

SEQ ID NO: 799298 - RNA, 24 nt, Human
uccgcggcggccgcagcuggguca

SEQ ID NO: 799299 - RNA, 18 nt, Human
ucuaaguaucacuugacc

SEQ ID NO: 799300 - RNA, 18 nt, Human
ucuacagaccaucuuuga

SEQ ID NO: 799301 - RNA, 22 nt, Human
ucuaggaauagaagaaacagac

SEQ ID NO: 799302 - RNA, 24 nt, Human
ucuguaaucacacagagccggggc

SEQ ID NO: 799303 - RNA, 24 nt, Human
ugaaaauggcaucuccaacacugc

SEQ ID NO: 799304 - RNA, 21 nt, Human
ugaacugaauugcagauccug

SEQ ID NO: 799305 - RNA, 24 nt, Human
ugaagggaagcaguccgaacauau

SEQ ID NO: 799306 - RNA, 24 nt, Human
ugaauguacauuaagaugaaguca

SEQ ID NO: 799307 - RNA, 19 nt, Human
ugacuuaauuacuacacaa

SEQ ID NO: 799308 - RNA, 18 nt, Human
ugagaaaaacaagaauaa

SEQ ID NO: 799309 - RNA, 21 nt, Human
ugaggcggggagacuaaauca

SEQ ID NO: 799310 - RNA, 22 nt, Human
ugcagaaaugggaaauuuuaug

SEQ ID NO: 799311 - RNA, 22 nt, Human
ugccugugugagaaaaacaaga

SEQ ID NO: 799312 - RNA, 23 nt, Human
uggaaaagcauuaucaaaucuga

SEQ ID NO: 799313 - RNA, 20 nt, Human
uggaaugucuuucauuaggu

SEQ ID NO: 799314 - RNA, 22 nt, Human
ugggucacggccagaacccgga

SEQ ID NO: 799315 - RNA, 18 nt, Human
uguauaaacacaaaauac

SEQ ID NO: 799316 - RNA, 20 nt, Human
uguauaaacacaaaauacaa

SEQ ID NO: 799317 - RNA, 20 nt, Human
uguauuuaaaacauuucugu

SEQ ID NO: 799318 - RNA, 20 nt, Human
uuaaaaaaaaaaaaaaaaaa

SEQ ID NO: 799319 - RNA, 25 nt, Human
uuaaaaaaaaaaaaaaaaaaaaaaa

SEQ ID NO: 799320 - RNA, 23 nt, Human
uuaaccaccuggauaagaaauau

SEQ ID NO: 799321 - RNA, 20 nt, Human
uuaaucuaaugaaaauauuc

SEQ ID NO: 799322 - RNA, 24 nt, Human
uuagcaaaauaaaaugaaagcuga

SEQ ID NO: 799323 - RNA, 19 nt, Human
uuuaaguaaaacaaaaaca

SEQ ID NO: 799324 - RNA, 22 nt, Human
uuuguugggggugggaaugagg

SEQ ID NO: 799325 - RNA, 18 nt, Human
aaaaaaguuuucaccuuc

SEQ ID NO: 799326 - RNA, 18 nt, Human
aaaacauagcauugucaa

SEQ ID NO: 799327 - RNA, 24 nt, Human
aaaacauagcauugucaagcauga

SEQ ID NO: 799328 - RNA, 19 nt, Human
aaaauggcuccugaaauga

SEQ ID NO: 799329 - RNA, 24 nt, Human
aaacauuugguaccaucagcucug

SEQ ID NO: 799330 - RNA, 23 nt, Human
aaacuaguuucaauucaucuuua

SEQ ID NO: 799331 - RNA, 23 nt, Human
aaaugaccucaggaaaccagagu

SEQ ID NO: 799332 - RNA, 22 nt, Human
aaauggcuccugaaaugagagu

SEQ ID NO: 799333 - RNA, 19 nt, Human
aagaacagagcuuuguccc

SEQ ID NO: 799334 - RNA, 23 nt, Human
aagagaaaacauagcauugucaa

SEQ ID NO: 799335 - RNA, 18 nt, Human
aagcaaaggccuaggaaa

SEQ ID NO: 799336 - RNA, 19 nt, Human
aaugaauacaaccccuccu

SEQ ID NO: 799337 - RNA, 23 nt, Human
aaugcccaucuacccacccugac

SEQ ID NO: 799338 - RNA, 18 nt, Human
accagcaaagcaaaggcc

SEQ ID NO: 799339 - RNA, 23 nt, Human
agaaagaacagacuugagugcua

SEQ ID NO: 799340 - RNA, 22 nt, Human
agaagaauaaaaaauaucuaga

SEQ ID NO: 799341 - RNA, 23 nt, Human
agaagaauaaaaaauaucuagaa

SEQ ID NO: 799342 - RNA, 18 nt, Human
agcaaagcaaaggccuag

SEQ ID NO: 799343 - RNA, 22 nt, Human
agccacaggaauucuuguaacc

SEQ ID NO: 799344 - RNA, 23 nt, Human
aggaaaaaaaaauacaccucuga

SEQ ID NO: 799345 - RNA, 19 nt, Human
aggcagauuuguugagucc

SEQ ID NO: 799346 - RNA, 20 nt, Human
aggcuggauuugugaaauga

SEQ ID NO: 799347 - RNA, 18 nt, Human
agggagcuaagcuuaaaa

SEQ ID NO: 799348 - RNA, 19 nt, Human
agggauugaauuuggggaa

SEQ ID NO: 799349 - RNA, 20 nt, Human
auaaaacaaacaaccuacuu

SEQ ID NO: 799350 - RNA, 18 nt, Human
auaauccuaaagcaugcc

SEQ ID NO: 799351 - RNA, 25 nt, Human
aucaccauuucuacccacuugugug

SEQ ID NO: 799352 - RNA, 20 nt, Human
auccauggacuguagccccc

SEQ ID NO: 799353 - RNA, 22 nt, Human
aucugauuauaaaacaaacaac

SEQ ID NO: 799354 - RNA, 21 nt, Human
augaauacaaccccuccucau

SEQ ID NO: 799355 - RNA, 23 nt, Human
auggcccaaauuuacaucuuacc

SEQ ID NO: 799356 - RNA, 24 nt, Human
auuucugccaaugcccuucuggcu

SEQ ID NO: 799357 - RNA, 19 nt, Human
caaagcaaaggccuaggaa

SEQ ID NO: 799358 - RNA, 24 nt, Human
caacagcaaugguguuaaccaaag

SEQ ID NO: 799359 - RNA, 22 nt, Human
caaccagcaaagcaaaggccua

SEQ ID NO: 799360 - RNA, 24 nt, Human
caagugguugccuaucucaaaaac

SEQ ID NO: 799361 - RNA, 19 nt, Human
cacaccaaucaagugguug

SEQ ID NO: 799362 - RNA, 19 nt, Human
cagaguucuaaacaaugac

SEQ ID NO: 799363 - RNA, 23 nt, Human
cagugcagccacaggaauucuug

SEQ ID NO: 799364 - RNA, 22 nt, Human
caguggcuggcucacuucuccu

SEQ ID NO: 799365 - RNA, 19 nt, Human
cauacugauacauccagga

SEQ ID NO: 799366 - RNA, 21 nt, Human
ccaaugcccaucuacccaccc

SEQ ID NO: 799367 - RNA, 22 nt, Human
ccaugaaaucaugcuccaccuu

SEQ ID NO: 799368 - RNA, 24 nt, Human
cccacccugaccucggggagcagc

SEQ ID NO: 799369 - RNA, 21 nt, Human
cccgcuuucaucauaucacca

SEQ ID NO: 799370 - RNA, 27 nt, Human
ccuauagccaauucaaaaccggggucc

SEQ ID NO: 799371 - RNA, 21 nt, Human
ccucugaaagugagcuagccc

SEQ ID NO: 799372 - RNA, 21 nt, Human
ccugaccucggggagcagcac

SEQ ID NO: 799373 - RNA, 22 nt, Human
cgauauguaauuuauuuaaagc

SEQ ID NO: 799374 - RNA, 26 nt, Human
cuagccccaaggaauaagguucagaa

SEQ ID NO: 799375 - RNA, 23 nt, Human
cucaggugacugaaauucugccu

SEQ ID NO: 799376 - RNA, 26 nt, Human
cucucaucuauucuauuucugagaaa

SEQ ID NO: 799377 - RNA, 24 nt, Human
cuugccauaauccuaaagcaugcc

SEQ ID NO: 799378 - RNA, 23 nt, Human
gaaagaacagacuugagugcuag

SEQ ID NO: 799379 - RNA, 18 nt, Human
gaaauucugccuucugcc

SEQ ID NO: 799380 - RNA, 23 nt, Human
gacaaaaugaccucaggaaacca

SEQ ID NO: 799381 - RNA, 22 nt, Human
gaggugauuuaucaacuuuaga

SEQ ID NO: 799382 - RNA, 21 nt, Human
gcugcagucugauauaagaga

SEQ ID NO: 799383 - RNA, 20 nt, Human
ggcauaucagugccaugaaa

SEQ ID NO: 799384 - RNA, 18 nt, Human
guaaaaggaagcucuuuc

SEQ ID NO: 799385 - RNA, 23 nt, Human
uaaaaggaagcucuuucacccac

SEQ ID NO: 799386 - RNA, 23 nt, Human
uaaagcaugccaagauggcauga

SEQ ID NO: 799387 - RNA, 24 nt, Human
uaaugaauacaaccccuccucauc

SEQ ID NO: 799388 - RNA, 19 nt, Human
uacuucagccuauuuuguu

SEQ ID NO: 799389 - RNA, 20 nt, Human
uagcauugucaagcaugaua

SEQ ID NO: 799390 - RNA, 24 nt, Human
ucaacagcaaugguguuaaccaaa

SEQ ID NO: 799391 - RNA, 20 nt, Human
ucacugggucugccugacug

SEQ ID NO: 799392 - RNA, 19 nt, Human
ucagaaagaacagacuuga

SEQ ID NO: 799393 - RNA, 19 nt, Human
ucaggaaauccucacagag

SEQ ID NO: 799394 - RNA, 23 nt, Human
uccaccuuugcccgcuuucauca

SEQ ID NO: 799395 - RNA, 24 nt, Human
uccagugcugcucauccauggacu

SEQ ID NO: 799396 - RNA, 21 nt, Human
ucuagauauguaucaagcuua

SEQ ID NO: 799397 - RNA, 25 nt, Human
ugaauuuggggaaggcuggauuugu

SEQ ID NO: 799398 - RNA, 25 nt, Human
ugacaaaaugaccucaggaaaccag

SEQ ID NO: 799399 - RNA, 18 nt, Human
ugagccucagccuuucag

SEQ ID NO: 799400 - RNA, 24 nt, Human
ugauggugcuucuuaccauaucac

SEQ ID NO: 799401 - RNA, 21 nt, Human
ugcauucaucugccaccaggc

SEQ ID NO: 799402 - RNA, 23 nt, Human
ugccaagaacagagcuuuguccc

SEQ ID NO: 799403 - RNA, 27 nt, Human
ugccaagaacagagcuuuguccccaug

SEQ ID NO: 799404 - RNA, 22 nt, Human
ugcccagagccccugcuugggc

SEQ ID NO: 799405 - RNA, 18 nt, Human
uggaaugcaacuaccuaa

SEQ ID NO: 799406 - RNA, 18 nt, Human
ugggaaaaugguccagag

SEQ ID NO: 799407 - RNA, 18 nt, Human
ugguaccaucagcucugg

SEQ ID NO: 799408 - RNA, 18 nt, Human
uguagcccccaagggcaa

SEQ ID NO: 799409 - RNA, 26 nt, Human
ugucucaggugacugaaauucugccu

SEQ ID NO: 799410 - RNA, 19 nt, Human
uuaaaaugacaaaaugacc

SEQ ID NO: 799411 - RNA, 22 nt, Human
uuaauacuuaaaccucacuagu

SEQ ID NO: 799412 - RNA, 18 nt, Human
uuaauagccccuuuuaug

SEQ ID NO: 799413 - RNA, 20 nt, Human
uucacagaguaggcacugua

SEQ ID NO: 799414 - RNA, 20 nt, Human
uucacagaguaggcacugua

SEQ ID NO: 799415 - RNA, 21 nt, Human
uuccaugaauuaauuuugggu

SEQ ID NO: 799416 - RNA, 24 nt, Human
uugcaguuauuuuaguuuaauggu

SEQ ID NO: 799417 - RNA, 22 nt, Human
uuuaauuuucuucugggcauuu

SEQ ID NO: 799418 - RNA, 23 nt, Human
uuuuuuccuuugcaaauucucuc

SEQ ID NO: 799419 - RNA, 24 nt, Human
aaaguucugggauuacaggcauga

SEQ ID NO: 799420 - RNA, 25 nt, Human
aagcaauucuccugccucagccucc

SEQ ID NO: 799421 - RNA, 22 nt, Human
aaguagcugggauuauaggcau

SEQ ID NO: 799422 - RNA, 22 nt, Human
aauuuuguauuuuuaguagaca

SEQ ID NO: 799423 - RNA, 22 nt, Human
accaacgcacucucagcugcag

SEQ ID NO: 799424 - RNA, 24 nt, Human
accaugugggccagacuggucucg

SEQ ID NO: 799425 - RNA, 23 nt, Human
acccccucccgcacacuccccac

SEQ ID NO: 799426 - RNA, 23 nt, Human
acuggucucgaacuccugaccuc

SEQ ID NO: 799427 - RNA, 18 nt, Human
agaugucaucagacagca

SEQ ID NO: 799428 - RNA, 21 nt, Human
aggcaugcgccaccacgccca

SEQ ID NO: 799429 - RNA, 22 nt, Human
aggugcagacuccuagagagcc

SEQ ID NO: 799430 - RNA, 23 nt, Human
aguagcugggauuauaggcaugc

SEQ ID NO: 799431 - RNA, 20 nt, Human
agugcaauggcgcaaucucg

SEQ ID NO: 799432 - RNA, 24 nt, Human
agugcaauggcgcaaucucggcuc

SEQ ID NO: 799433 - RNA, 18 nt, Human
augcgccaccacgcccag

SEQ ID NO: 799434 - RNA, 18 nt, Human
auggguuucaccaugugg

SEQ ID NO: 799435 - RNA, 23 nt, Human
caaaccugccaacucuacccccu

SEQ ID NO: 799436 - RNA, 24 nt, Human
caaaguucugggauuacaggcaug

SEQ ID NO: 799437 - RNA, 23 nt, Human
caaccucuaccucccggguucaa

SEQ ID NO: 799438 - RNA, 22 nt, Human
caagcaauucuccugccucagc

SEQ ID NO: 799439 - RNA, 21 nt, Human
caccaugugggccagacuggu

SEQ ID NO: 799440 - RNA, 24 nt, Human
caccaugugggccagacuggucuc

SEQ ID NO: 799441 - RNA, 21 nt, Human
cacugcaaccucuaccucccg

SEQ ID NO: 799442 - RNA, 23 nt, Human
cacugcaaccucuaccucccggg

SEQ ID NO: 799443 - RNA, 23 nt, Human
cagaaagagccccugaggggaga

SEQ ID NO: 799444 - RNA, 26 nt, Human
caggcgccucggccucccaaaguucu

SEQ ID NO: 799445 - RNA, 21 nt, Human
caugcgccaccacgcccagcu

SEQ ID NO: 799446 - RNA, 24 nt, Human
ccaaaguucugggauuacaggcau

SEQ ID NO: 799447 - RNA, 24 nt, Human
ccaacucuacccccucccgcacac

SEQ ID NO: 799448 - RNA, 24 nt, Human
ccaaguagcugggauuauaggcau

SEQ ID NO: 799449 - RNA, 22 nt, Human
ccaccaacgcacucucagcugc

SEQ ID NO: 799450 - RNA, 20 nt, Human
ccaccacgcccagcuaauuu

SEQ ID NO: 799451 - RNA, 19 nt, Human
ccacugcgcccggccuaag

SEQ ID NO: 799452 - RNA, 20 nt, Human
ccacugcgcccggccuaagc

SEQ ID NO: 799453 - RNA, 24 nt, Human
cccaaaguucugggauuacaggca

SEQ ID NO: 799454 - RNA, 23 nt, Human
cccaaguagcugggauuauaggc

SEQ ID NO: 799455 - RNA, 24 nt, Human
cccaaguagcugggauuauaggca

SEQ ID NO: 799456 - RNA, 19 nt, Human
ccccugaggggagaagccu

SEQ ID NO: 799457 - RNA, 24 nt, Human
ccccugaggggagaagccuagucc

SEQ ID NO: 799458 - RNA, 23 nt, Human
cccggguucaagcaauucuccug

SEQ ID NO: 799459 - RNA, 24 nt, Human
cccuggacaauucagaaagagccc

SEQ ID NO: 799460 - RNA, 20 nt, Human
cccuucucccucccaggcca

SEQ ID NO: 799461 - RNA, 18 nt, Human
ccgcacacuccccaccaa

SEQ ID NO: 799462 - RNA, 22 nt, Human
ccucccgcacacuccccaccaa

SEQ ID NO: 799463 - RNA, 24 nt, Human
ccucccggguucaagcaauucucc

SEQ ID NO: 799464 - RNA, 19 nt, Human
ccugaccucaggugaucca

SEQ ID NO: 799465 - RNA, 19 nt, Human
ccugaccucaggugaucca

SEQ ID NO: 799466 - RNA, 23 nt, Human
ccugccucagccucccaaguagc

SEQ ID NO: 799467 - RNA, 18 nt, Human
cgcccggccuaagcuucu

SEQ ID NO: 799468 - RNA, 24 nt, Human
cgccucggccucccaaaguucugg

SEQ ID NO: 799469 - RNA, 20 nt, Human
cuacccccucccgcacacuc

SEQ ID NO: 799470 - RNA, 24 nt, Human
cucacugcaaccucuaccucccgg

SEQ ID NO: 799471 - RNA, 24 nt, Human
cucagccucccaaguagcugggau

SEQ ID NO: 799472 - RNA, 26 nt, Human
cuccagccccuucucccucccaggcc

SEQ ID NO: 799473 - RNA, 20 nt, Human
cucuuguugcccaggcugga

SEQ ID NO: 799474 - RNA, 21 nt, Human
cucuuguugcccaggcuggag

SEQ ID NO: 799475 - RNA, 22 nt, Human
cucuuguugcccaggcuggagu

SEQ ID NO: 799476 - RNA, 20 nt, Human
cugaauucccagagcugcac

SEQ ID NO: 799477 - RNA, 23 nt, Human
cugcaaccucuaccucccggguu

SEQ ID NO: 799478 - RNA, 24 nt, Human
cugcaaccucuaccucccggguuc

SEQ ID NO: 799479 - RNA, 23 nt, Human
cugccucagccucccaaguagcu

SEQ ID NO: 799480 - RNA, 24 nt, Human
cuuguugcccaggcuggagugcaa

SEQ ID NO: 799481 - RNA, 23 nt, Human
cuuucugaauucccagagcugca

SEQ ID NO: 799482 - RNA, 24 nt, Human
gaccucaggugauccaggcgccuc

SEQ ID NO: 799483 - RNA, 18 nt, Human
gauuacaggcaugagcca

SEQ ID NO: 799484 - RNA, 22 nt, Human
gauuacaggcaugagccacugc

SEQ ID NO: 799485 - RNA, 22 nt, Human
gauuacaggcaugagccacugc

SEQ ID NO: 799486 - RNA, 18 nt, Human
gauuauaggcaugcgcca

SEQ ID NO: 799487 - RNA, 19 nt, Human
gcccaggcuggagugcaau

SEQ ID NO: 799488 - RNA, 18 nt, Human
gccucggccucccaaagu

SEQ ID NO: 799489 - RNA, 20 nt, Human
gcucuuguugcccaggcugg

SEQ ID NO: 799490 - RNA, 21 nt, Human
gcucuuguugcccaggcugga

SEQ ID NO: 799491 - RNA, 19 nt, Human
gcuggagugcaauggcgca

SEQ ID NO: 799492 - RNA, 22 nt, Human
ggauuacaggcaugagccacug

SEQ ID NO: 799493 - RNA, 19 nt, Human
ggauuauaggcaugcgcca

SEQ ID NO: 799494 - RNA, 24 nt, Human
gggccagacuggucucgaacuccu

SEQ ID NO: 799495 - RNA, 21 nt, Human
ggguuucaccaugugggccag

SEQ ID NO: 799496 - RNA, 19 nt, Human
ggucucgaacuccugaccu

SEQ ID NO: 799497 - RNA, 18 nt, Human
guagcugggauuauaggc

SEQ ID NO: 799498 - RNA, 24 nt, Human
gugauccaggcgccucggccuccc

SEQ ID NO: 799499 - RNA, 23 nt, Human
uacaggcaugagccacugcgccc

SEQ ID NO: 799500 - RNA, 25 nt, Human
uacccccucccgcacacuccccacc

SEQ ID NO: 799501 - RNA, 23 nt, Human
uaguagacauggguuucaccaug

SEQ ID NO: 799502 - RNA, 23 nt, Human
ucacugcaaccucuaccucccgg

SEQ ID NO: 799503 - RNA, 24 nt, Human
ucacugcaaccucuaccucccggg

SEQ ID NO: 799504 - RNA, 24 nt, Human
ucagaggcuuucugaauucccagg

SEQ ID NO: 799505 - RNA, 20 nt, Human
ucagccucccaaguagcugg

SEQ ID NO: 799506 - RNA, 24 nt, Human
ucccaaaguucugggauuacaggc

SEQ ID NO: 799507 - RNA, 24 nt, Human
ucccaaguagcugggauuauaggc

SEQ ID NO: 799508 - RNA, 20 nt, Human
ucccgcacacuccccaccaa

SEQ ID NO: 799509 - RNA, 21 nt, Human
ucccggguucaagcaauucuc

SEQ ID NO: 799510 - RNA, 24 nt, Human
ucccggguucaagcaauucuccug

SEQ ID NO: 799511 - RNA, 19 nt, Human
ucuccagccccuucucccu

SEQ ID NO: 799512 - RNA, 26 nt, Human
ucuccugccucagccucccaaguagc

SEQ ID NO: 799513 - RNA, 23 nt, Human
ucucgaacuccugaccucaggug

SEQ ID NO: 799514 - RNA, 22 nt, Human
ucuuguugcccaggcuggagug

SEQ ID NO: 799515 - RNA, 23 nt, Human
ugaccucaggugauccaggcgcc

SEQ ID NO: 799516 - RNA, 24 nt, Human
ugaccucaggugauccaggcgccu

SEQ ID NO: 799517 - RNA, 25 nt, Human
ugaccucaggugauccaggcgccuc

SEQ ID NO: 799518 - RNA, 23 nt, Human
ugcaauggcgcaaucucggcuca

SEQ ID NO: 799519 - RNA, 18 nt, Human
ugcccaggcuggagugca

SEQ ID NO: 799520 - RNA, 21 nt, Human
ugcccaggcuggagugcaaug

SEQ ID NO: 799521 - RNA, 21 nt, Human
ugcccaggcuggagugcaaug

SEQ ID NO: 799522 - RNA, 24 nt, Human
ugcccaggcuggagugcaauggcg

SEQ ID NO: 799523 - RNA, 24 nt, Human
ugccucagccucccaaguagcugg

SEQ ID NO: 799524 - RNA, 22 nt, Human
uggagucaaaccugccaacucc

SEQ ID NO: 799525 - RNA, 23 nt, Human
uggagugcaauggcgcaaucucg

SEQ ID NO: 799526 - RNA, 24 nt, Human
uggagugcaauggcgcaaucucgg

SEQ ID NO: 799527 - RNA, 18 nt, Human
ugggauuacaggcaugag

SEQ ID NO: 799528 - RNA, 19 nt, Human
ugggauuacaggcaugagc

SEQ ID NO: 799529 - RNA, 21 nt, Human
ugggauuacaggcaugagcca

SEQ ID NO: 799530 - RNA, 22 nt, Human
ugggauuacaggcaugagccac

SEQ ID NO: 799531 - RNA, 22 nt, Human
ugggauuacaggcaugagccac

SEQ ID NO: 799532 - RNA, 23 nt, Human
ugggauuacaggcaugagccacu

SEQ ID NO: 799533 - RNA, 24 nt, Human
ugggauuacaggcaugagccacug

SEQ ID NO: 799534 - RNA, 26 nt, Human
ugggauuacaggcaugagccacugcg

SEQ ID NO: 799535 - RNA, 18 nt, Human
ugggauuauaggcaugcg

SEQ ID NO: 799536 - RNA, 21 nt, Human
ugggauuauaggcaugcgcca

SEQ ID NO: 799537 - RNA, 22 nt, Human
ugggauuauaggcaugcgccac

SEQ ID NO: 799538 - RNA, 24 nt, Human
ugggauuauaggcaugcgccacca

SEQ ID NO: 799539 - RNA, 18 nt, Human
uggguuucaccauguggg

SEQ ID NO: 799540 - RNA, 21 nt, Human
uggucucgaacuccugaccuc

SEQ ID NO: 799541 - RNA, 25 nt, Human
ugucaucagacagcagggggacagu

SEQ ID NO: 799542 - RNA, 20 nt, Human
uguugcccaggcuggagugc

SEQ ID NO: 799543 - RNA, 23 nt, Human
uuaguagacauggguuucaccau

SEQ ID NO: 799544 - RNA, 24 nt, Human
uuaguagacauggguuucaccaug

SEQ ID NO: 799545 - RNA, 21 nt, Human
uucaagcaauucuccugccuc

SEQ ID NO: 799546 - RNA, 24 nt, Human
uucaagcaauucuccugccucagc

SEQ ID NO: 799547 - RNA, 19 nt, Human
uucagaaagagccccugag

SEQ ID NO: 799548 - RNA, 18 nt, Human
uugcccaggcuggagugc

SEQ ID NO: 799549 - RNA, 23 nt, Human
uugcucuuguugcccaggcugga

SEQ ID NO: 799550 - RNA, 21 nt, Human
uuucaccaugugggccagacu

SEQ ID NO: 799551 - RNA, 18 nt, Human
uuucugaauucccagagc

SEQ ID NO: 799552 - RNA, 24 nt, Human
uuugcucuuguugcccaggcugga

SEQ ID NO: 799553 - RNA, 23 nt, Human
uuuugcucuuguugcccaggcug

SEQ ID NO: 799554 - RNA, 24 nt, Human
uuuugcucuuguugcccaggcugg

SEQ ID NO: 799555 - RNA, 18 nt, Human
uuuuguauuuuuaguaga

SEQ ID NO: 799556 - RNA, 23 nt, Human
uuuuuaguagacauggguuucac

SEQ ID NO: 799557 - RNA, 25 nt, Human
aaaaaaacacacacaaagaaauaua

SEQ ID NO: 799558 - RNA, 21 nt, Human
aaaaaacacacacaaagaaau

SEQ ID NO: 799559 - RNA, 21 nt, Human
aaaaaacugaauagucaaaag

SEQ ID NO: 799560 - RNA, 24 nt, Human
aaaaagaaaaauaaugauaauaga

SEQ ID NO: 799561 - RNA, 21 nt, Human
aaaacaaaacaacauuacaca

SEQ ID NO: 799562 - RNA, 18 nt, Human
aaacaaaacaaaacaaca

SEQ ID NO: 799563 - RNA, 26 nt, Human
aaacaaaacaaaacaacauuacacaa

SEQ ID NO: 799564 - RNA, 21 nt, Human
aaacuacuugaauaagcaaua

SEQ ID NO: 799565 - RNA, 19 nt, Human
aaauaaauaaauccaauaa

SEQ ID NO: 799566 - RNA, 24 nt, Human
aaauaaauaaauccaauaaccagg

SEQ ID NO: 799567 - RNA, 22 nt, Human
aacaagagcaaaacucugucua

SEQ ID NO: 799568 - RNA, 21 nt, Human
aacacggagauaucccgucuc

SEQ ID NO: 799569 - RNA, 22 nt, Human
aaccaagucagcaguccuaaga

SEQ ID NO: 799570 - RNA, 21 nt, Human
aacguggugaaacuccauauc

SEQ ID NO: 799571 - RNA, 24 nt, Human
aaggaaaaaaacacacacaaagaa

SEQ ID NO: 799572 - RNA, 24 nt, Human
aaucgcuugaaccugggaggugga

SEQ ID NO: 799573 - RNA, 22 nt, Human
acaagcaaagaauuacaaugca

SEQ ID NO: 799574 - RNA, 23 nt, Human
acaaugcagaaaagauauugaag

SEQ ID NO: 799575 - RNA, 20 nt, Human
acacacauauacaucacaca

SEQ ID NO: 799576 - RNA, 24 nt, Human
acagagcaaggcucuaucucaaaa

SEQ ID NO: 799577 - RNA, 20 nt, Human
acauacacacuauauauaua

SEQ ID NO: 799578 - RNA, 22 nt, Human
acguggaccgaccucgcccggc

SEQ ID NO: 799579 - RNA, 24 nt, Human
acugcacuccagccuaggcaacaa

SEQ ID NO: 799580 - RNA, 25 nt, Human
acugcacuccagccuaggcaacaag

SEQ ID NO: 799581 - RNA, 27 nt, Human
acugcacuccagccuaggcaacaagag

SEQ ID NO: 799582 - RNA, 23 nt, Human
acugcacuccggccuggugacag

SEQ ID NO: 799583 - RNA, 25 nt, Human
acugcacuccggccuggugacagag

SEQ ID NO: 799584 - RNA, 19 nt, Human
acugcauaaccaagucagc

SEQ ID NO: 799585 - RNA, 20 nt, Human
acugcgccacugcacuccag

SEQ ID NO: 799586 - RNA, 23 nt, Human
acuuacugggugaguaguuuuau

SEQ ID NO: 799587 - RNA, 22 nt, Human
agaaguugaugaccacaucccu

SEQ ID NO: 799588 - RNA, 22 nt, Human
agacugcgccacugcacuccag

SEQ ID NO: 799589 - RNA, 21 nt, Human
agagcaaaacucugucuaaaa

SEQ ID NO: 799590 - RNA, 24 nt, Human
agagguugaggugagccaagacug

SEQ ID NO: 799591 - RNA, 24 nt, Human
agcacuuugggaggccgaggcagg

SEQ ID NO: 799592 - RNA, 24 nt, Human
agcacuuugggaggcugaggcggg

SEQ ID NO: 799593 - RNA, 21 nt, Human
agcaggagaauagccugaacc

SEQ ID NO: 799594 - RNA, 23 nt, Human
agccggucaugguggcgcaugcc

SEQ ID NO: 799595 - RNA, 18 nt, Human
agcuccucccgcagcccg

SEQ ID NO: 799596 - RNA, 23 nt, Human
agcugggcaugguggcgcaugcc

SEQ ID NO: 799597 - RNA, 27 nt, Human
aggaaaaaaacacacacaaagaaauau

SEQ ID NO: 799598 - RNA, 18 nt, Human
aggauaaaaagggagaau

SEQ ID NO: 799599 - RNA, 24 nt, Human
aggcagagguugaggugagccaag

SEQ ID NO: 799600 - RNA, 22 nt, Human
aggcaggggaaucgcuugaacc

SEQ ID NO: 799601 - RNA, 24 nt, Human
aggcaggggaaucgcuugaaccug

SEQ ID NO: 799602 - RNA, 20 nt, Human
aggcagggggaucacaaggu

SEQ ID NO: 799603 - RNA, 24 nt, Human
aggcagggggaucacaaggucagg

SEQ ID NO: 799604 - RNA, 19 nt, Human
aggccgaggcagggggauc

SEQ ID NO: 799605 - RNA, 22 nt, Human
aggcggguggaucaccugaggg

SEQ ID NO: 799606 - RNA, 22 nt, Human
aggcggguggaucaccugaggu

SEQ ID NO: 799607 - RNA, 24 nt, Human
aggcgugguggcucaugccuguaa

SEQ ID NO: 799608 - RNA, 20 nt, Human
aggcugaggcaggggaaucg

SEQ ID NO: 799609 - RNA, 24 nt, Human
aggcugaggcaggggaaucgcuug

SEQ ID NO: 799610 - RNA, 21 nt, Human
aggcugaggcggguggaucac

SEQ ID NO: 799611 - RNA, 24 nt, Human
aggcugaggcggguggaucaccug

SEQ ID NO: 799612 - RNA, 20 nt, Human
aggcugggugcgguggcuca

SEQ ID NO: 799613 - RNA, 22 nt, Human
agggagaaugagauccaagagu

SEQ ID NO: 799614 - RNA, 19 nt, Human
agggggaucacaaggucag

SEQ ID NO: 799615 - RNA, 18 nt, Human
agguggagguugcaguga

SEQ ID NO: 799616 - RNA, 24 nt, Human
agguggagguugcagugaucugag

SEQ ID NO: 799617 - RNA, 19 nt, Human
aguaaguauagauaucaca

SEQ ID NO: 799618 - RNA, 27 nt, Human
auacaucacacacauauacaucacaca

SEQ ID NO: 799619 - RNA, 25 nt, Human
auacaucacacacuauauacacaca

SEQ ID NO: 799620 - RNA, 23 nt, Human
auacugaauugccuugauuaccu

SEQ ID NO: 799621 - RNA, 21 nt, Human
auagaguacauaaauucuggg

SEQ ID NO: 799622 - RNA, 21 nt, Human
auauauaguauacaucacaca

SEQ ID NO: 799623 - RNA, 19 nt, Human
auauauauauauauauaua

SEQ ID NO: 799624 - RNA, 24 nt, Human
augacaccacugcacuccggccug

SEQ ID NO: 799625 - RNA, 19 nt, Human
augccuguaaucccagcac

SEQ ID NO: 799626 - RNA, 19 nt, Human
augccuguaaucccagcac

SEQ ID NO: 799627 - RNA, 31 nt, Human
auguauauagugugugugugugugugugugg

SEQ ID NO: 799628 - RNA, 22 nt, Human
caaaagcuauuguaaacaaaac

SEQ ID NO: 799629 - RNA, 27 nt, Human
caacaagagcaaaacucugucuaaaaa

SEQ ID NO: 799630 - RNA, 24 nt, Human
caacguggugaaacuccauaucua

SEQ ID NO: 799631 - RNA, 20 nt, Human
caaguuccucugagcagaau

SEQ ID NO: 799632 - RNA, 19 nt, Human
cacaaagaaauauaggaca

SEQ ID NO: 799633 - RNA, 22 nt, Human
caccgcgagcuccucccgcagc

SEQ ID NO: 799634 - RNA, 24 nt, Human
cacuccagccuaggcaacaagagc

SEQ ID NO: 799635 - RNA, 22 nt, Human
cacuccggccuggugacagagc

SEQ ID NO: 799636 - RNA, 19 nt, Human
cacugcacuccagccuagg

SEQ ID NO: 799637 - RNA, 21 nt, Human
cacugcacuccagccuaggca

SEQ ID NO: 799638 - RNA, 22 nt, Human
cacugcacuccagccuaggcaa

SEQ ID NO: 799639 - RNA, 23 nt, Human
cacugcacuccagccuaggcaac

SEQ ID NO: 799640 - RNA, 24 nt, Human
cacugcacuccagccuaggcaaca

SEQ ID NO: 799641 - RNA, 18 nt, Human
cacugcacuccggccugg

SEQ ID NO: 799642 - RNA, 18 nt, Human
cacugcacuccggccugg

SEQ ID NO: 799643 - RNA, 20 nt, Human
cacugcacuccggccuggug

SEQ ID NO: 799644 - RNA, 23 nt, Human
cacugcacuccggccuggugaca

SEQ ID NO: 799645 - RNA, 23 nt, Human
cacugcacuccggccuggugaca

SEQ ID NO: 799646 - RNA, 19 nt, Human
cagaacaccaucguccgca

SEQ ID NO: 799647 - RNA, 21 nt, Human
cagaacaccaucguccgcagc

SEQ ID NO: 799648 - RNA, 20 nt, Human
cagauaaaugcuuagucuca

SEQ ID NO: 799649 - RNA, 24 nt, Human
cagauaaaugcuuagucucauucc

SEQ ID NO: 799650 - RNA, 24 nt, Human
cagcacuuugggaggccgaggcag

SEQ ID NO: 799651 - RNA, 25 nt, Human
cagcacuuugggaggccgaggcagg

SEQ ID NO: 799652 - RNA, 24 nt, Human
cagcacuuugggaggcugaggcgg

SEQ ID NO: 799653 - RNA, 20 nt, Human
cagcaguccuaagagagaga

SEQ ID NO: 799654 - RNA, 26 nt, Human
cauacacuauauacacuauaugugua

SEQ ID NO: 799655 - RNA, 22 nt, Human
cauauacaucacacacuauaua

SEQ ID NO: 799656 - RNA, 26 nt, Human
cauauacaucacacacuauauacaca

SEQ ID NO: 799657 - RNA, 18 nt, Human
cauauauugugugugugu

SEQ ID NO: 799658 - RNA, 23 nt, Human
cauauauugugugugugugugug

SEQ ID NO: 799659 - RNA, 23 nt, Human
caucaucacaucccaguacaagu

SEQ ID NO: 799660 - RNA, 20 nt, Human
caugccuguaaucccagcac

SEQ ID NO: 799661 - RNA, 20 nt, Human
caugccuguaaucccagcac

SEQ ID NO: 799662 - RNA, 24 nt, Human
caugccuguaaucccagcacuuug

SEQ ID NO: 799663 - RNA, 24 nt, Human
caugccuguaaucccagcacuuug

SEQ ID NO: 799664 - RNA, 19 nt, Human
ccacugcacuccagccuag

SEQ ID NO: 799665 - RNA, 20 nt, Human
ccacugcacuccagccuagg

SEQ ID NO: 799666 - RNA, 20 nt, Human
ccacugcacuccagccuagg

SEQ ID NO: 799667 - RNA, 21 nt, Human
ccacugcacuccagccuaggc

SEQ ID NO: 799668 - RNA, 24 nt, Human
ccacugcacuccagccuaggcaac

SEQ ID NO: 799669 - RNA, 19 nt, Human
ccacugcacuccggccugg

SEQ ID NO: 799670 - RNA, 19 nt, Human
ccacugcacuccggccugg

SEQ ID NO: 799671 - RNA, 19 nt, Human
ccacugcacuccggccugg

SEQ ID NO: 799672 - RNA, 20 nt, Human
ccacugcacuccggccuggu

SEQ ID NO: 799673 - RNA, 23 nt, Human
ccacugcacuccggccuggugac

SEQ ID NO: 799674 - RNA, 24 nt, Human
ccaggcugggugcgguggcucaug

SEQ ID NO: 799675 - RNA, 21 nt, Human
cccggcccgggucaccucgac

SEQ ID NO: 799676 - RNA, 19 nt, Human
ccgaggcagggggaucaca

SEQ ID NO: 799677 - RNA, 18 nt, Human
ccgcgagcuccucccgca

SEQ ID NO: 799678 - RNA, 22 nt, Human
ccuacagauaaaugcuuagucu

SEQ ID NO: 799679 - RNA, 18 nt, Human
ccuauuaaauccauccac

SEQ ID NO: 799680 - RNA, 21 nt, Human
ccucaccgcgagcuccucccg

SEQ ID NO: 799681 - RNA, 22 nt, Human
ccucgcccggcagcgcggggcc

SEQ ID NO: 799682 - RNA, 22 nt, Human
ccugaggucgggaguuugagac

SEQ ID NO: 799683 - RNA, 21 nt, Human
ccugggagguggagguugcag

SEQ ID NO: 799684 - RNA, 21 nt, Human
ccuggugacagagcaaggcuc

SEQ ID NO: 799685 - RNA, 22 nt, Human
ccuguaaucccagcacuuuggg

SEQ ID NO: 799686 - RNA, 21 nt, Human
ccuguaaucccagcuaaucag

SEQ ID NO: 799687 - RNA, 19 nt, Human
ccuguaaucccagcuacuu

SEQ ID NO: 799688 - RNA, 21 nt, Human
ccuguaaucccagcuacuugg

SEQ ID NO: 799689 - RNA, 24 nt, Human
ccuguaaucccagcuacuuggcag

SEQ ID NO: 799690 - RNA, 24 nt, Human
cgagacugucuuggccaacguggu

SEQ ID NO: 799691 - RNA, 24 nt, Human
cgccacugcacuccagccuaggca

SEQ ID NO: 799692 - RNA, 24 nt, Human
cggguggaucaccugaggucggga

SEQ ID NO: 799693 - RNA, 24 nt, Human
cucaugccuguaaucccagcacuu

SEQ ID NO: 799694 - RNA, 24 nt, Human
cucaugccuguaaucccagcacuu

SEQ ID NO: 799695 - RNA, 24 nt, Human
cuccaucaucacaucccaguacaa

SEQ ID NO: 799696 - RNA, 22 nt, Human
cugcagguaaaaagacugcuua

SEQ ID NO: 799697 - RNA, 19 nt, Human
cuugaaccugggaggugga

SEQ ID NO: 799698 - RNA, 23 nt, Human
cuuggccaacguggugaaacucc

SEQ ID NO: 799699 - RNA, 24 nt, Human
cuuggccaacguggugaaacucca

SEQ ID NO: 799700 - RNA, 24 nt, Human
gaaaaaaacacacacaaagaaaua

SEQ ID NO: 799701 - RNA, 24 nt, Human
gagaaugagauccaagaguaaauu

SEQ ID NO: 799702 - RNA, 18 nt, Human
gagagaaguugaugacca

SEQ ID NO: 799703 - RNA, 23 nt, Human
gagcagaauccagauauucccau

SEQ ID NO: 799704 - RNA, 24 nt, Human
gagcaggagaauagccugaaccug

SEQ ID NO: 799705 - RNA, 23 nt, Human
gaggcagggggaucacaagguca

SEQ ID NO: 799706 - RNA, 23 nt, Human
gaggcggguggaucaccugaggu

SEQ ID NO: 799707 - RNA, 24 nt, Human
gaucacaaggucaggaaaucgaga

SEQ ID NO: 799708 - RNA, 24 nt, Human
gaucaccugaggucgggaguuuga

SEQ ID NO: 799709 - RNA, 23 nt, Human
gcacuccggccuggugacagagc

SEQ ID NO: 799710 - RNA, 20 nt, Human
gcccaaaccuaguaagucaa

SEQ ID NO: 799711 - RNA, 22 nt, Human
gccugcagguaaaaagacugcu

SEQ ID NO: 799712 - RNA, 20 nt, Human
gccuguaaucccagcuacuu

SEQ ID NO: 799713 - RNA, 20 nt, Human
gcgagcuccucccgcagccc

SEQ ID NO: 799714 - RNA, 22 nt, Human
gcugauuguugaaaugcccaaa

SEQ ID NO: 799715 - RNA, 18 nt, Human
ggagguugcagugaucug

SEQ ID NO: 799716 - RNA, 23 nt, Human
ggagguugcagugaucugagaug

SEQ ID NO: 799717 - RNA, 19 nt, Human
ggaguuugagaccagacug

SEQ ID NO: 799718 - RNA, 23 nt, Human
ggcaugguggcgcaugccuguaa

SEQ ID NO: 799719 - RNA, 21 nt, Human
ggcgcaugccuguaaucccag

SEQ ID NO: 799720 - RNA, 21 nt, Human
ggcgcaugccuguaaucccag

SEQ ID NO: 799721 - RNA, 23 nt, Human
ggcugggugcgguggcucaugcc

SEQ ID NO: 799722 - RNA, 24 nt, Human
gggugcgguggcucaugccuguaa

SEQ ID NO: 799723 - RNA, 24 nt, Human
ggucaugguggcgcaugccuguaa

SEQ ID NO: 799724 - RNA, 19 nt, Human
ggucgggaguuugagacca

SEQ ID NO: 799725 - RNA, 24 nt, Human
gguggcgcaugccuguaaucccag

SEQ ID NO: 799726 - RNA, 24 nt, Human
gguggcgcaugccuguaaucccag

SEQ ID NO: 799727 - RNA, 23 nt, Human
gguggcucaugccuguaauccca

SEQ ID NO: 799728 - RNA, 24 nt, Human
gguggcucaugccuguaaucccag

SEQ ID NO: 799729 - RNA, 24 nt, Human
gguggcucaugccuguaaucccag

SEQ ID NO: 799730 - RNA, 19 nt, Human
guauauauauauauauaua

SEQ ID NO: 799731 - RNA, 18 nt, Human
guauuggucuuggucacc

SEQ ID NO: 799732 - RNA, 19 nt, Human
gugcaugugugggcauaua

SEQ ID NO: 799733 - RNA, 20 nt, Human
guguauauacuauauauaca

SEQ ID NO: 799734 - RNA, 20 nt, Human
guguauauacuauauauaca

SEQ ID NO: 799735 - RNA, 19 nt, Human
guguauauauauauauaua

SEQ ID NO: 799736 - RNA, 20 nt, Human
guguguauauauauauauau

SEQ ID NO: 799737 - RNA, 20 nt, Human
gugugugugugugugugugu

SEQ ID NO: 799738 - RNA, 19 nt, Human
uaaaaaaccacuuuauaca

SEQ ID NO: 799739 - RNA, 19 nt, Human
uaaaaaacugaauagucaa

SEQ ID NO: 799740 - RNA, 22 nt, Human
uaaaacaaaacaaaacaacauu

SEQ ID NO: 799741 - RNA, 18 nt, Human
uaaacaaaacaugccagg

SEQ ID NO: 799742 - RNA, 23 nt, Human
uaaagagaagucaacaauuggau

SEQ ID NO: 799743 - RNA, 21 nt, Human
uaacauaaaaaggagaaauau

SEQ ID NO: 799744 - RNA, 26 nt, Human
uaaccggacaggcgugguggcucaug

SEQ ID NO: 799745 - RNA, 19 nt, Human
uaaucccagcuaaucagga

SEQ ID NO: 799746 - RNA, 20 nt, Human
uacauauauugugugugugu

SEQ ID NO: 799747 - RNA, 22 nt, Human
uacaucacacacauauacauca

SEQ ID NO: 799748 - RNA, 21 nt, Human
uacauuguaucugacuaggag

SEQ ID NO: 799749 - RNA, 24 nt, Human
uacccaaaagaggaacauuagcac

SEQ ID NO: 799750 - RNA, 20 nt, Human
uacuaaaauacaauuagcug

SEQ ID NO: 799751 - RNA, 23 nt, Human
uacuguguaggacaugaaacaac

SEQ ID NO: 799752 - RNA, 23 nt, Human
uaggagugcuaacucuguggagg

SEQ ID NO: 799753 - RNA, 20 nt, Human
uaguauacaucacacauaca

SEQ ID NO: 799754 - RNA, 21 nt, Human
uaguuagaaauagagcuacua

SEQ ID NO: 799755 - RNA, 28 nt, Human
uauaacacacauacacacuauauauaua

SEQ ID NO: 799756 - RNA, 20 nt, Human
uauacacuauauguguauau

SEQ ID NO: 799757 - RNA, 21 nt, Human
uauacacuauauguguauaua

SEQ ID NO: 799758 - RNA, 21 nt, Human
uauacaucacacauacacuau

SEQ ID NO: 799759 - RNA, 26 nt, Human
uauaguauacaucacacacauauaca

SEQ ID NO: 799760 - RNA, 20 nt, Human
uauagugugugugugugugu

SEQ ID NO: 799761 - RNA, 20 nt, Human
uauagugugugugugugugu

SEQ ID NO: 799762 - RNA, 20 nt, Human
uauagugugugugugugugu

SEQ ID NO: 799763 - RNA, 24 nt, Human
uauauacacacauauaguauaugu

SEQ ID NO: 799764 - RNA, 25 nt, Human
uauauacacacauauaguauaugug

SEQ ID NO: 799765 - RNA, 21 nt, Human
uauauacacuauauguauaua

SEQ ID NO: 799766 - RNA, 21 nt, Human
uauauacacuauauguguaua

SEQ ID NO: 799767 - RNA, 18 nt, Human
uauauacauauauugugu

SEQ ID NO: 799768 - RNA, 23 nt, Human
uauauacauauauugugugugug

SEQ ID NO: 799769 - RNA, 21 nt, Human
uauauacuauauauacauaua

SEQ ID NO: 799770 - RNA, 27 nt, Human
uauauaguguauauacuauauauacau

SEQ ID NO: 799771 - RNA, 24 nt, Human
uauauagugugugugugugugugu

SEQ ID NO: 799772 - RNA, 18 nt, Human
uauauaguguguuaugua

SEQ ID NO: 799773 - RNA, 19 nt, Human
uauauauauauauauauau

SEQ ID NO: 799774 - RNA, 20 nt, Human
uauauguauauagugugugu

SEQ ID NO: 799775 - RNA, 23 nt, Human
uauauugugugugugugugugua

SEQ ID NO: 799776 - RNA, 24 nt, Human
uaucugaaaauaauaguaaaauuu

SEQ ID NO: 799777 - RNA, 22 nt, Human
uaugaaauagcaaauauccuga

SEQ ID NO: 799778 - RNA, 18 nt, Human
uauguauauagugugugu

SEQ ID NO: 799779 - RNA, 24 nt, Human
uauguauauagugugugugugugu

SEQ ID NO: 799780 - RNA, 19 nt, Human
uaugucaauuccaugagag

SEQ ID NO: 799781 - RNA, 20 nt, Human
uauguguauauacacuauau

SEQ ID NO: 799782 - RNA, 23 nt, Human
uauguguauauacacuauaugua

SEQ ID NO: 799783 - RNA, 23 nt, Human
ucacaaggucaggaaaucgagac

SEQ ID NO: 799784 - RNA, 24 nt, Human
ucacaaggucaggaaaucgagacu

SEQ ID NO: 799785 - RNA, 24 nt, Human
ucacacacuauauacacacauaua

SEQ ID NO: 799786 - RNA, 25 nt, Human
ucacacauacacuauauacacuaua

SEQ ID NO: 799787 - RNA, 19 nt, Human
ucaccucgacucgccaggc

SEQ ID NO: 799788 - RNA, 20 nt, Human
ucaguggucauuuuuucucc

SEQ ID NO: 799789 - RNA, 22 nt, Human
ucaugccuguaaucccagcacu

SEQ ID NO: 799790 - RNA, 22 nt, Human
ucaugccuguaaucccagcacu

SEQ ID NO: 799791 - RNA, 19 nt, Human
uccaauauaacacacauac

SEQ ID NO: 799792 - RNA, 21 nt, Human
uccauaucuacuaaaauacaa

SEQ ID NO: 799793 - RNA, 24 nt, Human
uccauccacaguauuuuccuguga

SEQ ID NO: 799794 - RNA, 22 nt, Human
uccaugguuagaacuguaaaga

SEQ ID NO: 799795 - RNA, 21 nt, Human
ucccacugagaaccaguguuu

SEQ ID NO: 799796 - RNA, 24 nt, Human
ucgcuugaaccugggagguggagg

SEQ ID NO: 799797 - RNA, 18 nt, Human
ucucaaaauaaauaaaua

SEQ ID NO: 799798 - RNA, 20 nt, Human
ucucuacuaaaaauauaaaa

SEQ ID NO: 799799 - RNA, 25 nt, Human
ucugucuaaaaaaaaagaaaaaaaa

SEQ ID NO: 799800 - RNA, 21 nt, Human
ucugucucaauguagacccag

SEQ ID NO: 799801 - RNA, 24 nt, Human
ugaaauagcaaauauccugacaaa

SEQ ID NO: 799802 - RNA, 24 nt, Human
ugaaccugggagguggagguugca

SEQ ID NO: 799803 - RNA, 22 nt, Human
ugacaccacugcacuccggccu

SEQ ID NO: 799804 - RNA, 22 nt, Human
ugagagaaguugaugaccacau

SEQ ID NO: 799805 - RNA, 24 nt, Human
ugagaugacaccacugcacuccgg

SEQ ID NO: 799806 - RNA, 19 nt, Human
ugagcaggagaauagccug

SEQ ID NO: 799807 - RNA, 23 nt, Human
ugagcaggagaauagccugaacc

SEQ ID NO: 799808 - RNA, 24 nt, Human
ugaggcaggggaaucgcuugaacc

SEQ ID NO: 799809 - RNA, 25 nt, Human
ugaggcaggggaaucgcuugaaccu

SEQ ID NO: 799810 - RNA, 20 nt, Human
ugaggcggguggaucaccug

SEQ ID NO: 799811 - RNA, 21 nt, Human
ugaggcggguggaucaccuga

SEQ ID NO: 799812 - RNA, 22 nt, Human
ugaggcggguggaucaccugag

SEQ ID NO: 799813 - RNA, 24 nt, Human
ugaggcggguggaucaccugaggu

SEQ ID NO: 799814 - RNA, 18 nt, Human
ugaggucgggaguuugag

SEQ ID NO: 799815 - RNA, 23 nt, Human
ugaguuggccauuaguaccaaga

SEQ ID NO: 799816 - RNA, 23 nt, Human
ugauauguauaguauacaucaca

SEQ ID NO: 799817 - RNA, 22 nt, Human
ugauccccaaugaaacuugagu

SEQ ID NO: 799818 - RNA, 18 nt, Human
ugccaggaugagaaacuc

SEQ ID NO: 799819 - RNA, 23 nt, Human
ugccuguaaucccagcacuuugg

SEQ ID NO: 799820 - RNA, 23 nt, Human
ugccuguaaucccagcacuuugg

SEQ ID NO: 799821 - RNA, 23 nt, Human
ugccuguaaucccagcacuuugg

SEQ ID NO: 799822 - RNA, 23 nt, Human
ugccuguaaucccagcacuuugg

SEQ ID NO: 799823 - RNA, 24 nt, Human
ugccuguaaucccagcacuuuggg

SEQ ID NO: 799824 - RNA, 18 nt, Human
ugccuguaaucccagcua

SEQ ID NO: 799825 - RNA, 24 nt, Human
ugccuguaaucccagcuaaucagg

SEQ ID NO: 799826 - RNA, 23 nt, Human
ugccuguaaucccagcuacuugg

SEQ ID NO: 799827 - RNA, 19 nt, Human
uggaaaggagaucacacuu

SEQ ID NO: 799828 - RNA, 21 nt, Human
uggaccgaccucgcccggcag

SEQ ID NO: 799829 - RNA, 23 nt, Human
uggaucaccugaggucgggaguu

SEQ ID NO: 799830 - RNA, 24 nt, Human
uggaucaccugaggucgggaguuu

SEQ ID NO: 799831 - RNA, 18 nt, Human
uggcaacaucuaacaaag

SEQ ID NO: 799832 - RNA, 18 nt, Human
uggcaugacagcaugagg

SEQ ID NO: 799833 - RNA, 18 nt, Human
uggccaacguggugaaac

SEQ ID NO: 799834 - RNA, 20 nt, Human
uggccaacguggugaaacuc

SEQ ID NO: 799835 - RNA, 22 nt, Human
uggccaacguggugaaacucca

SEQ ID NO: 799836 - RNA, 21 nt, Human
uggcgcaugccuguaauccca

SEQ ID NO: 799837 - RNA, 21 nt, Human
uggcgcaugccuguaauccca

SEQ ID NO: 799838 - RNA, 22 nt, Human
uggcgcaugccuguaaucccag

SEQ ID NO: 799839 - RNA, 22 nt, Human
uggcucaugccuguaaucccag

SEQ ID NO: 799840 - RNA, 24 nt, Human
uggcucaugccuguaaucccagca

SEQ ID NO: 799841 - RNA, 24 nt, Human
uggcucaugccuguaaucccagca

SEQ ID NO: 799842 - RNA, 20 nt, Human
ugggaggcagagguugaggu

SEQ ID NO: 799843 - RNA, 18 nt, Human
ugggaggccgaggcaggg

SEQ ID NO: 799844 - RNA, 24 nt, Human
ugggaggccgaggcagggggauca

SEQ ID NO: 799845 - RNA, 20 nt, Human
ugggaggcugaggcgggugg

SEQ ID NO: 799846 - RNA, 23 nt, Human
ugggaggcugaggcggguggauc

SEQ ID NO: 799847 - RNA, 24 nt, Human
ugggaggcugaggcggguggauca

SEQ ID NO: 799848 - RNA, 18 nt, Human
ugggagguggagguugca

SEQ ID NO: 799849 - RNA, 29 nt, Human
ugggagguggagguugcagugacaacggu

SEQ ID NO: 799850 - RNA, 23 nt, Human
ugggagguggagguugcagugau

SEQ ID NO: 799851 - RNA, 25 nt, Human
ugggagguggagguugcagugaucu

SEQ ID NO: 799852 - RNA, 22 nt, Human
ugggugcgguggcucaugccug

SEQ ID NO: 799853 - RNA, 24 nt, Human
ugguggcgcaugccuguaauccca

SEQ ID NO: 799854 - RNA, 24 nt, Human
ugguggcgcaugccuguaauccca

SEQ ID NO: 799855 - RNA, 24 nt, Human
ugguggcucaugccuguaauccca

SEQ ID NO: 799856 - RNA, 19 nt, Human
ugguugguauagccugcag

SEQ ID NO: 799857 - RNA, 24 nt, Human
uguaaacaaaacaugccaggauga

SEQ ID NO: 799858 - RNA, 25 nt, Human
uguagugcaugugugggcauauaua

SEQ ID NO: 799859 - RNA, 22 nt, Human
uguauauagugugugugugugu

SEQ ID NO: 799860 - RNA, 18 nt, Human
uguauauauauauauaua

SEQ ID NO: 799861 - RNA, 22 nt, Human
uguauauauauauauauauaua

SEQ ID NO: 799862 - RNA, 22 nt, Human
ugucuuggccaacguggugaaa

SEQ ID NO: 799863 - RNA, 24 nt, Human
ugucuuggccaacguggugaaacu

SEQ ID NO: 799864 - RNA, 19 nt, Human
ugugggcauauauaguaua

SEQ ID NO: 799865 - RNA, 23 nt, Human
uguguauauacacuauauguaua

SEQ ID NO: 799866 - RNA, 25 nt, Human
uguguauauacacuauauguauaua

SEQ ID NO: 799867 - RNA, 18 nt, Human
uguguauauauauauaua

SEQ ID NO: 799868 - RNA, 20 nt, Human
uguguauauauauauauaua

SEQ ID NO: 799869 - RNA, 20 nt, Human
uguguauauauauauauaua

SEQ ID NO: 799870 - RNA, 22 nt, Human
uguguauauauauauauauaua

SEQ ID NO: 799871 - RNA, 24 nt, Human
uguguguauauauauauauauaac

SEQ ID NO: 799872 - RNA, 18 nt, Human
uguguguguauauauaua

SEQ ID NO: 799873 - RNA, 18 nt, Human
uguguguguauauauaua

SEQ ID NO: 799874 - RNA, 23 nt, Human
uguguguguguauauauauauau

SEQ ID NO: 799875 - RNA, 23 nt, Human
uguguguguguguauauauauau

SEQ ID NO: 799876 - RNA, 20 nt, Human
uguguguguguguguauaua

SEQ ID NO: 799877 - RNA, 22 nt, Human
uguguguguguguguguauaua

SEQ ID NO: 799878 - RNA, 18 nt, Human
ugugugugugugugugug

SEQ ID NO: 799879 - RNA, 18 nt, Human
ugugugugugugugugug

SEQ ID NO: 799880 - RNA, 18 nt, Human
ugugugugugugugugug

SEQ ID NO: 799881 - RNA, 21 nt, Human
ugugugugugugugugugugu

SEQ ID NO: 799882 - RNA, 21 nt, Human
ugugugugugugugugugugu

SEQ ID NO: 799883 - RNA, 21 nt, Human
ugugugugugugugugugugu

SEQ ID NO: 799884 - RNA, 22 nt, Human
ugugugugugugugugugugug

SEQ ID NO: 799885 - RNA, 22 nt, Human
uguguguguguguguguguguu

SEQ ID NO: 799886 - RNA, 21 nt, Human
uguguguguguguguguuaug

SEQ ID NO: 799887 - RNA, 21 nt, Human
uguguguguguguguuauggu

SEQ ID NO: 799888 - RNA, 23 nt, Human
uuaaaacaaaacaaaacaacauu

SEQ ID NO: 799889 - RNA, 18 nt, Human
uuagcugggcaugguggc

SEQ ID NO: 799890 - RNA, 20 nt, Human
uuagcugggcaugguggcgc

SEQ ID NO: 799891 - RNA, 24 nt, Human
uugaaccugggagguggagguugc

SEQ ID NO: 799892 - RNA, 22 nt, Human
uugaggugagccaagacugcgc

SEQ ID NO: 799893 - RNA, 18 nt, Human
uugcagugaucugagaug

SEQ ID NO: 799894 - RNA, 20 nt, Human
uuggaugaaaauggaaagga

SEQ ID NO: 799895 - RNA, 24 nt, Human
uuggcaggcugaggcaggggaauc

SEQ ID NO: 799896 - RNA, 25 nt, Human
uugggaggccgaggcagggggauca

SEQ ID NO: 799897 - RNA, 25 nt, Human
uugggaggcugaggcggguggauca

SEQ ID NO: 799898 - RNA, 22 nt, Human
aaacaaacaaacaaacaaacca

SEQ ID NO: 799899 - RNA, 24 nt, Human
aaacaaaccaucuaguugcaugga

SEQ ID NO: 799900 - RNA, 19 nt, Human
aaacacaacaaaaugaaca

SEQ ID NO: 799901 - RNA, 26 nt, Human
aaaggcaccucuaacagaggacagag

SEQ ID NO: 799902 - RNA, 23 nt, Human
aacaaacaaacaaacaaacaaac

SEQ ID NO: 799903 - RNA, 20 nt, Human
aacauggugaaacccugucu

SEQ ID NO: 799904 - RNA, 21 nt, Human
aacauggugaaacccugucuc

SEQ ID NO: 799905 - RNA, 21 nt, Human
aacccugucucuaccaaaaau

SEQ ID NO: 799906 - RNA, 19 nt, Human
aagugccacucaaccaggg

SEQ ID NO: 799907 - RNA, 24 nt, Human
aaucacuugaacccgggagagaga

SEQ ID NO: 799908 - RNA, 19 nt, Human
aaugaacaacaaacaaaca

SEQ ID NO: 799909 - RNA, 18 nt, Human
aauuagccaggcauggug

SEQ ID NO: 799910 - RNA, 22 nt, Human
acaaaaugaacaacaaacaaac

SEQ ID NO: 799911 - RNA, 18 nt, Human
acaaacaaacaaacaaac

SEQ ID NO: 799912 - RNA, 26 nt, Human
acaaacaaaccaucuaguugcaugga

SEQ ID NO: 799913 - RNA, 23 nt, Human
acaacaaaaugaacaacaaacaa

SEQ ID NO: 799914 - RNA, 22 nt, Human
acaacaaacaaacaaacaaaca

SEQ ID NO: 799915 - RNA, 24 nt, Human
acacaacaaaaugaacaacaaaca

SEQ ID NO: 799916 - RNA, 24 nt, Human
acagagcaagacccugucucaaaa

SEQ ID NO: 799917 - RNA, 24 nt, Human
accaacauggugaaacccugucuc

SEQ ID NO: 799918 - RNA, 24 nt, Human
acccugucucuaccaaaaauacaa

SEQ ID NO: 799919 - RNA, 21 nt, Human
accuuuaccaacaccgcaucc

SEQ ID NO: 799920 - RNA, 18 nt, Human
acgccuauccaugggaaa

SEQ ID NO: 799921 - RNA, 24 nt, Human
acugcauuacaaccugggcgacag

SEQ ID NO: 799922 - RNA, 24 nt, Human
acuugagguugggaguucaagacu

SEQ ID NO: 799923 - RNA, 21 nt, Human
agacagaagggacgcucagag

SEQ ID NO: 799924 - RNA, 24 nt, Human
agagagagguugcagugagcugag

SEQ ID NO: 799925 - RNA, 22 nt, Human
agagguugcagugagcugagau

SEQ ID NO: 799926 - RNA, 24 nt, Human
agagguugcagugagcugagauug

SEQ ID NO: 799927 - RNA, 23 nt, Human
agaucacuugagguugggaguuc

SEQ ID NO: 799928 - RNA, 23 nt, Human
agccaggcaugguggugggugcc

SEQ ID NO: 799929 - RNA, 24 nt, Human
agccugaccaacauggugaaaccc

SEQ ID NO: 799930 - RNA, 23 nt, Human
aggcaaaacgugggugagccaag

SEQ ID NO: 799931 - RNA, 24 nt, Human
aggcaaaacgugggugagccaaga

SEQ ID NO: 799932 - RNA, 18 nt, Human
aggcaggagaaucacuug

SEQ ID NO: 799933 - RNA, 24 nt, Human
aggcaggagaaucacuugaacccg

SEQ ID NO: 799934 - RNA, 24 nt, Human
aggcaugguggugggugccuguaa

SEQ ID NO: 799935 - RNA, 21 nt, Human
aggcgggcagaucacuugagg

SEQ ID NO: 799936 - RNA, 22 nt, Human
aggcgggcagaucacuugaggg

SEQ ID NO: 799937 - RNA, 22 nt, Human
aggcgggcagaucacuugaggu

SEQ ID NO: 799938 - RNA, 26 nt, Human
aggcgggcagaucacuugagguuggg

SEQ ID NO: 799939 - RNA, 24 nt, Human
aggcugaggcaggagaaucacuug

SEQ ID NO: 799940 - RNA, 27 nt, Human
agggacuccugcucggugaccugcugc

SEQ ID NO: 799941 - RNA, 20 nt, Human
agggucuagaaaagacuggg

SEQ ID NO: 799942 - RNA, 24 nt, Human
aguggcucacaccuguaaucccag

SEQ ID NO: 799943 - RNA, 23 nt, Human
aucacuugagguugggaguucaa

SEQ ID NO: 799944 - RNA, 22 nt, Human
auccugggcuucugguuuucug

SEQ ID NO: 799945 - RNA, 18 nt, Human
aucucuuucccuuccucc

SEQ ID NO: 799946 - RNA, 24 nt, Human
auugcgccacugcauuacaaccug

SEQ ID NO: 799947 - RNA, 21 nt, Human
caaaaauacaaaaauuagcca

SEQ ID NO: 799948 - RNA, 24 nt, Human
caacauggugaaacccugucucua

SEQ ID NO: 799949 - RNA, 24 nt, Human
caagaugaaaccgcaagugccacu

SEQ ID NO: 799950 - RNA, 23 nt, Human
cacaacaaaaugaacaacaaaca

SEQ ID NO: 799951 - RNA, 24 nt, Human
cacaccuguaaucccagcacguug

SEQ ID NO: 799952 - RNA, 19 nt, Human
cacccucaggguccacacc

SEQ ID NO: 799953 - RNA, 24 nt, Human
cacccucaggguccacaccuguca

SEQ ID NO: 799954 - RNA, 23 nt, Human
caccuguaaucccagcacguugg

SEQ ID NO: 799955 - RNA, 24 nt, Human
caccuguaaucccagcacguuggg

SEQ ID NO: 799956 - RNA, 22 nt, Human
cacguugggaggccgaggcggg

SEQ ID NO: 799957 - RNA, 18 nt, Human
cacucaaccagggucaca

SEQ ID NO: 799958 - RNA, 20 nt, Human
cacugcauuacaaccugggc

SEQ ID NO: 799959 - RNA, 23 nt, Human
cacugcauuacaaccugggcgac

SEQ ID NO: 799960 - RNA, 24 nt, Human
cacugcauuacaaccugggcgaca

SEQ ID NO: 799961 - RNA, 21 nt, Human
cacugcuccugcugcaucaug

SEQ ID NO: 799962 - RNA, 21 nt, Human
cacuugaacccgggagagaga

SEQ ID NO: 799963 - RNA, 23 nt, Human
cacuugagguugggaguucaaga

SEQ ID NO: 799964 - RNA, 19 nt, Human
cagaacgagacagaaggga

SEQ ID NO: 799965 - RNA, 20 nt, Human
cagaagauccugggcuucug

SEQ ID NO: 799966 - RNA, 23 nt, Human
cagcaauaaugggccaccucccu

SEQ ID NO: 799967 - RNA, 24 nt, Human
cagcacguugggaggccgaggcgg

SEQ ID NO: 799968 - RNA, 24 nt, Human
cagcuacuugggaggcugaggcag

SEQ ID NO: 799969 - RNA, 22 nt, Human
caggagacagugugcucaccac

SEQ ID NO: 799970 - RNA, 18 nt, Human
cauccaguugggccgggg

SEQ ID NO: 799971 - RNA, 19 nt, Human
caucugaggaaacccugcu

SEQ ID NO: 799972 - RNA, 21 nt, Human
caugaguggggugaaugccag

SEQ ID NO: 799973 - RNA, 22 nt, Human
caugguggugggugccuguaau

SEQ ID NO: 799974 - RNA, 21 nt, Human
ccacugcauuacaaccugggc

SEQ ID NO: 799975 - RNA, 23 nt, Human
ccagagugaugagaagucaccca

SEQ ID NO: 799976 - RNA, 26 nt, Human
ccagcaauaaugggccaccucccgag

SEQ ID NO: 799977 - RNA, 22 nt, Human
cccaagaucucagaguuuguuc

SEQ ID NO: 799978 - RNA, 20 nt, Human
cccagcacguugggaggccg

SEQ ID NO: 799979 - RNA, 19 nt, Human
ccccagaagcgacugcugc

SEQ ID NO: 799980 - RNA, 24 nt, Human
ccucaggguccacaccugucacuu

SEQ ID NO: 799981 - RNA, 22 nt, Human
ccugaccaacauggugaaaccc

SEQ ID NO: 799982 - RNA, 24 nt, Human
ccugaccaacauggugaaacccug

SEQ ID NO: 799983 - RNA, 19 nt, Human
ccuguaaucccagcuacuu

SEQ ID NO: 799984 - RNA, 21 nt, Human
ccuguaaucccagcuacuugg

SEQ ID NO: 799985 - RNA, 22 nt, Human
ccuguaaucccagcuacuuggg

SEQ ID NO: 799986 - RNA, 25 nt, Human
ccugucacuucacaggaauggaggu

SEQ ID NO: 799987 - RNA, 18 nt, Human
ccuucacuccccguauuc

SEQ ID NO: 799988 - RNA, 24 nt, Human
cgaggcgggcagaucacuugaggu

SEQ ID NO: 799989 - RNA, 18 nt, Human
cgcugccagcugcauugc

SEQ ID NO: 799990 - RNA, 24 nt, Human
cgggagagagagguugcagugagc

SEQ ID NO: 799991 - RNA, 22 nt, Human
cucacaccuguaaucccagcac

SEQ ID NO: 799992 - RNA, 22 nt, Human
cucacaccuguaaucccagcac

SEQ ID NO: 799993 - RNA, 23 nt, Human
cucacaucucuuucccuuccucc

SEQ ID NO: 799994 - RNA, 24 nt, Human
cugaccaacauggugaaacccugu

SEQ ID NO: 799995 - RNA, 22 nt, Human
cugaugagcaagugucucuucu

SEQ ID NO: 799996 - RNA, 21 nt, Human
cugcugcaucaugccugguuc

SEQ ID NO: 799997 - RNA, 22 nt, Human
gaaaccuuuaccaacaccgcau

SEQ ID NO: 799998 - RNA, 23 nt, Human
gaacaacaaacaaacaaacaaac

SEQ ID NO: 799999 - RNA, 21 nt, Human
gacagagcaagacccugucuc

SEQ ID NO: 800000 - RNA, 23 nt, Human
gagaaucacuugaacccgggaga

SEQ ID NO: 800001 - RNA, 24 nt, Human
gagcaagacccugucucaaaaaac

SEQ ID NO: 800002 - RNA, 23 nt, Human
gaucacuugagguugggaguuca

SEQ ID NO: 800003 - RNA, 24 nt, Human
gaucacuugagguugggaguucaa

SEQ ID NO: 800004 - RNA, 21 nt, Human
gauuuggggcaggagaaaggc

SEQ ID NO: 800005 - RNA, 23 nt, Human
gcaggagaaucacuugaacccgg

SEQ ID NO: 800006 - RNA, 24 nt, Human
gccacugcauuacaaccugggcga

SEQ ID NO: 800007 - RNA, 21 nt, Human
gccggggcguaguggcucaca

SEQ ID NO: 800008 - RNA, 19 nt, Human
gccugauuuggggcaggag

SEQ ID NO: 800009 - RNA, 23 nt, Human
gcgacagagcaagacccugucuc

SEQ ID NO: 800010 - RNA, 19 nt, Human
ggagaugccugccggccuu

SEQ ID NO: 800011 - RNA, 25 nt, Human
ggcagaucacuugagguugggaguu

SEQ ID NO: 800012 - RNA, 19 nt, Human
ggcuacgauuaaacaacaa

SEQ ID NO: 800013 - RNA, 24 nt, Human
gggcguaguggcucacaccuguaa

SEQ ID NO: 800014 - RNA, 24 nt, Human
gguggugggugccuguaaucccag

SEQ ID NO: 800015 - RNA, 19 nt, Human
guugcagugagcugagauu

SEQ ID NO: 800016 - RNA, 21 nt, Human
guugcagugagcugagauugc

SEQ ID NO: 800017 - RNA, 23 nt, Human
uaaaagacucacucccugauccg

SEQ ID NO: 800018 - RNA, 18 nt, Human
uaaacaacaacacuggag

SEQ ID NO: 800019 - RNA, 26 nt, Human
uaacagaggacagagcuuuagcacag

SEQ ID NO: 800020 - RNA, 26 nt, Human
uaaugggccaccucccgagggcagac

SEQ ID NO: 800021 - RNA, 25 nt, Human
uaccaaaaauacaaaaauuagccag

SEQ ID NO: 800022 - RNA, 24 nt, Human
uacgauuaaacaacaacacuggag

SEQ ID NO: 800023 - RNA, 23 nt, Human
uagggcagaacgagacagaaggg

SEQ ID NO: 800024 - RNA, 24 nt, Human
uaguggcucacaccuguaauccca

SEQ ID NO: 800025 - RNA, 18 nt, Human
uauaauccaacauuugcc

SEQ ID NO: 800026 - RNA, 23 nt, Human
ucacuugagguugggaguucaag

SEQ ID NO: 800027 - RNA, 22 nt, Human
ucagagggacuccugcucggug

SEQ ID NO: 800028 - RNA, 25 nt, Human
ugaaaccgcaagugccacucaacca

SEQ ID NO: 800029 - RNA, 23 nt, Human
ugaaaugcuucccucacaucucu

SEQ ID NO: 800030 - RNA, 24 nt, Human
ugaccaacauggugaaacccuguc

SEQ ID NO: 800031 - RNA, 22 nt, Human
ugacuccagauucacugcuccu

SEQ ID NO: 800032 - RNA, 19 nt, Human
ugagauugcgccacugcau

SEQ ID NO: 800033 - RNA, 21 nt, Human
ugagccaagaagcaggcccaa

SEQ ID NO: 800034 - RNA, 22 nt, Human
ugagcugagauugcgccacugc

SEQ ID NO: 800035 - RNA, 20 nt, Human
ugaggcaggagaaucacuug

SEQ ID NO: 800036 - RNA, 24 nt, Human
ugaggcaggagaaucacuugaacc

SEQ ID NO: 800037 - RNA, 25 nt, Human
ugaggcaggagaaucacuugaaccc

SEQ ID NO: 800038 - RNA, 19 nt, Human
ugaguggggugaaugccag

SEQ ID NO: 800039 - RNA, 24 nt, Human
ugaguggggugaaugccagcagga

SEQ ID NO: 800040 - RNA, 18 nt, Human
ugauuuggggcaggagaa

SEQ ID NO: 800041 - RNA, 24 nt, Human
ugcauauauaaaugugcucgugug

SEQ ID NO: 800042 - RNA, 22 nt, Human
ugcaucaugccugguucauaug

SEQ ID NO: 800043 - RNA, 23 nt, Human
ugccuguaaucccagcuacuugg

SEQ ID NO: 800044 - RNA, 24 nt, Human
ugccuguaaucccagcuacuuggg

SEQ ID NO: 800045 - RNA, 22 nt, Human
ugcgccacugcauuacaaccug

SEQ ID NO: 800046 - RNA, 27 nt, Human
ugcucggugaccugcugguccgagggg

SEQ ID NO: 800047 - RNA, 25 nt, Human
ugcuuugaaaacauggaaacagcuc

SEQ ID NO: 800048 - RNA, 23 nt, Human
uggcagggucugaugcaugacuu

SEQ ID NO: 800049 - RNA, 18 nt, Human
uggcggaggcagaagauc

SEQ ID NO: 800050 - RNA, 23 nt, Human
uggcgugagguuucuuccuuggc

SEQ ID NO: 800051 - RNA, 28 nt, Human
uggcgugagguuucuuccuuggcgacau

SEQ ID NO: 800052 - RNA, 21 nt, Human
uggcucacaccuguaauccca

SEQ ID NO: 800053 - RNA, 24 nt, Human
uggcucacaccuguaaucccagca

SEQ ID NO: 800054 - RNA, 20 nt, Human
ugggaggccgaggcgggcag

SEQ ID NO: 800055 - RNA, 24 nt, Human
ugggaggccgaggcgggcagauca

SEQ ID NO: 800056 - RNA, 19 nt, Human
ugggaggcugaggcaggag

SEQ ID NO: 800057 - RNA, 24 nt, Human
ugggaggcugaggcaggagaauca

SEQ ID NO: 800058 - RNA, 24 nt, Human
uggugggugccuguaaucccagcu

SEQ ID NO: 800059 - RNA, 24 nt, Human
ugguggugggugccuguaauccca

SEQ ID NO: 800060 - RNA, 24 nt, Human
uuagccaggcaugguggugggugc

SEQ ID NO: 800061 - RNA, 20 nt, Human
uucuuccuuggcgacauucu

SEQ ID NO: 800062 - RNA, 19 nt, Human
uugcagugagcugagauug

SEQ ID NO: 800063 - RNA, 22 nt, Human
uugcagugagcugagauugcgc

SEQ ID NO: 800064 - RNA, 25 nt, Human
uugggaggccgaggcgggcagauca

SEQ ID NO: 800065 - RNA, 25 nt, Human
uugggaggcugaggcaggagaauca

SEQ ID NO: 800066 - RNA, 20 nt, Human
aaaguuaccagaaaucuuug

SEQ ID NO: 800067 - RNA, 23 nt, Human
aaauaaagacaaguacaaucuaa

SEQ ID NO: 800068 - RNA, 22 nt, Human
aaauucucuaggaaauaaagaa

SEQ ID NO: 800069 - RNA, 22 nt, Human
acaacaacaaaaaaaaaaaccc

SEQ ID NO: 800070 - RNA, 26 nt, Human
acaacaacaaaaaaaaaaacccaaaa

SEQ ID NO: 800071 - RNA, 21 nt, Human
agaaauauauauuauaccucc

SEQ ID NO: 800072 - RNA, 21 nt, Human
agaagcucuccaacuucauau

SEQ ID NO: 800073 - RNA, 28 nt, Human
agacaaguacaaucuaaaaaggguuucc

SEQ ID NO: 800074 - RNA, 25 nt, Human
agacuagauucaucauuuuaaauaa

SEQ ID NO: 800075 - RNA, 23 nt, Human
cacaguaaguguucuccuccaca

SEQ ID NO: 800076 - RNA, 19 nt, Human
cacauuaucuccugcugcc

SEQ ID NO: 800077 - RNA, 18 nt, Human
cacucucgccgcccgggc

SEQ ID NO: 800078 - RNA, 19 nt, Human
cagcaacauuugccccaac

SEQ ID NO: 800079 - RNA, 19 nt, Human
caguaaguguucuccucca

SEQ ID NO: 800080 - RNA, 22 nt, Human
caguaaguguucuccuccacag

SEQ ID NO: 800081 - RNA, 24 nt, Human
cagugugacuuuucaagugggcuu

SEQ ID NO: 800082 - RNA, 20 nt, Human
cauuacacuucacuauaaca

SEQ ID NO: 800083 - RNA, 21 nt, Human
ccccgcggccgcccaccagca

SEQ ID NO: 800084 - RNA, 21 nt, Human
ccgcccgggccggagcggccc

SEQ ID NO: 800085 - RNA, 20 nt, Human
cgcccucagccccgcggccg

SEQ ID NO: 800086 - RNA, 19 nt, Human
cgggccggagcggccccgg

SEQ ID NO: 800087 - RNA, 20 nt, Human
cguacauuccaguucacaug

SEQ ID NO: 800088 - RNA, 22 nt, Human
cucaagaacugacaguuuaaaa

SEQ ID NO: 800089 - RNA, 30 nt, Human
cugcacaaauaaaugcagacuugucucuuu

SEQ ID NO: 800090 - RNA, 18 nt, Human
cuuguugugcugacuuca

SEQ ID NO: 800091 - RNA, 20 nt, Human
ggcggcgggagcaagagcac

SEQ ID NO: 800092 - RNA, 19 nt, Human
guaaccacacauacauaug

SEQ ID NO: 800093 - RNA, 19 nt, Human
uaaaaacaaagccccagcc

SEQ ID NO: 800094 - RNA, 23 nt, Human
uaaaauuaagaacuguauauauu

SEQ ID NO: 800095 - RNA, 27 nt, Human
uaacaacaacaaaaaaaaaaacccaaa

SEQ ID NO: 800096 - RNA, 18 nt, Human
uaacagcugauucagacu

SEQ ID NO: 800097 - RNA, 23 nt, Human
uaacuuccaagagaugcaauucu

SEQ ID NO: 800098 - RNA, 23 nt, Human
uagcucaaaguuaccagaaaucu

SEQ ID NO: 800099 - RNA, 25 nt, Human
uauagcucaaaguuaccagaaaucu

SEQ ID NO: 800100 - RNA, 19 nt, Human
ucaaaguuaccagaaaucu

SEQ ID NO: 800101 - RNA, 21 nt, Human
uccaagagaugcaauucugcc

SEQ ID NO: 800102 - RNA, 20 nt, Human
ucccgcagcaacauuugccc

SEQ ID NO: 800103 - RNA, 21 nt, Human
uccguaaccacauuauuacuc

SEQ ID NO: 800104 - RNA, 23 nt, Human
ucucuuguugugcugacuucaac

SEQ ID NO: 800105 - RNA, 19 nt, Human
ucucuuuugcagcaguggu

SEQ ID NO: 800106 - RNA, 22 nt, Human
ucuguuaacuuccaagagaugc

SEQ ID NO: 800107 - RNA, 22 nt, Human
ugagggccacaacguacauucc

SEQ ID NO: 800108 - RNA, 19 nt, Human
ugccggacgcccucagccc

SEQ ID NO: 800109 - RNA, 18 nt, Human
uuaaagcacauuccuaga

SEQ ID NO: 800110 - RNA, 26 nt, Human
uucucaccuuccaagucccccuccaa

SEQ ID NO: 800111 - RNA, 26 nt, Human
uuucugcucauuaacaacaacaaaaa

SEQ ID NO: 800112 - RNA, 18 nt, Human
uuuucucuuguugugcug

SEQ ID NO: 800113 - RNA, 21 nt, Human
uuuucucuuguugugcugacu

SEQ ID NO: 800114 - RNA, 21 nt, Human
uuuugcauuuaauuuucgaaa

SEQ ID NO: 800115 - RNA, 20 nt, Human
uuuuuuuuuucagaaggcac

SEQ ID NO: 800116 - RNA, 24 nt, Human
uuuuuuuuuuuuuuuuuuuuucag

SEQ ID NO: 800117 - RNA, 23 nt, Human
aaaaacaaauaaauaaucgccug

SEQ ID NO: 800118 - RNA, 18 nt, Human
agaaggcagggcggguag

SEQ ID NO: 800119 - RNA, 20 nt, Human
aggggcuacggacggcccgg

SEQ ID NO: 800120 - RNA, 19 nt, Human
cccgcccgcgccggccucg

SEQ ID NO: 800121 - RNA, 18 nt, Human
cgcucgcccgagcgcugc

SEQ ID NO: 800122 - RNA, 24 nt, Human
cggugcagccgcggagcgcgcggg

SEQ ID NO: 800123 - RNA, 18 nt, Human
gacaggucaggucagggg

SEQ ID NO: 800124 - RNA, 22 nt, Human
ggccgccccugugaaugacuga

SEQ ID NO: 800125 - RNA, 18 nt, Human
gugugugugugugugugu

SEQ ID NO: 800126 - RNA, 21 nt, Human
gugugugugugugugugugug

SEQ ID NO: 800127 - RNA, 21 nt, Human
gugugugugugugugugugug

SEQ ID NO: 800128 - RNA, 23 nt, Human
uaaaaacaaauaaauaaucgccu

SEQ ID NO: 800129 - RNA, 19 nt, Human
uacaaaaauaugacaaaau

SEQ ID NO: 800130 - RNA, 19 nt, Human
uacugggggcccucggggg

SEQ ID NO: 800131 - RNA, 22 nt, Human
ucauggggccggugcagccgcg

SEQ ID NO: 800132 - RNA, 24 nt, Human
ucugugugugugugugugugugug

SEQ ID NO: 800133 - RNA, 18 nt, Human
ugugugugugugugugug

SEQ ID NO: 800134 - RNA, 18 nt, Human
ugugugugugugugugug

SEQ ID NO: 800135 - RNA, 18 nt, Human
ugugugugugugugugug

SEQ ID NO: 800136 - RNA, 18 nt, Human
ugugugugugugugugug

SEQ ID NO: 800137 - RNA, 18 nt, Human
ugugugugugugugugug

SEQ ID NO: 800138 - RNA, 18 nt, Human
ugugugugugugugugug

SEQ ID NO: 800139 - RNA, 18 nt, Human
ugugugugugugugugug

SEQ ID NO: 800140 - RNA, 18 nt, Human
ugugugugugugugugug

SEQ ID NO: 800141 - RNA, 21 nt, Human
ugugugugugugugugugugu

SEQ ID NO: 800142 - RNA, 21 nt, Human
ugugugugugugugugugugu

SEQ ID NO: 800143 - RNA, 21 nt, Human
ugugugugugugugugugugu

SEQ ID NO: 800144 - RNA, 21 nt, Human
ugugugugugugugugugugu

SEQ ID NO: 800145 - RNA, 21 nt, Human
ugugugugugugugugugugu

SEQ ID NO: 800146 - RNA, 21 nt, Human
ugugugugugugugugugugu

SEQ ID NO: 800147 - RNA, 21 nt, Human
ugugugugugugugugugugu

SEQ ID NO: 800148 - RNA, 21 nt, Human
ugugugugugugugugugugu

SEQ ID NO: 800149 - RNA, 21 nt, Human
ugugugugugugugugugugu

SEQ ID NO: 800150 - RNA, 21 nt, Human
ugugugugugugugugugugu

SEQ ID NO: 800151 - RNA, 21 nt, Human
ugugugugugugugugugugu

SEQ ID NO: 800152 - RNA, 21 nt, Human
ugugugugugugugugugugu

SEQ ID NO: 800153 - RNA, 22 nt, Human
ugugugugugugugugugugug

SEQ ID NO: 800154 - RNA, 22 nt, Human
ugugugugugugugugugugug

SEQ ID NO: 800155 - RNA, 22 nt, Human
ugugugugugugugugugugug

SEQ ID NO: 800156 - RNA, 26 nt, Human
uguguguguguguguguguuuucugg

SEQ ID NO: 800157 - RNA, 22 nt, Human
uguguguguguguguguuuucu

SEQ ID NO: 800158 - RNA, 23 nt, Human
uguguguguguguuuucuguuuu

SEQ ID NO: 800159 - RNA, 25 nt, Human
uguucugugugugugugugugugug

SEQ ID NO: 800160 - RNA, 22 nt, Human
uuuuacaaaaauaugacaaaau

SEQ ID NO: 800161 - RNA, 27 nt, Human
aaaaaaccagacaguguggugggcacc

SEQ ID NO: 800162 - RNA, 23 nt, Human
aaacuuaaaaaaaaagaagaaaa

SEQ ID NO: 800163 - RNA, 25 nt, Human
aaauguuaaaacccugacaaaagcu

SEQ ID NO: 800164 - RNA, 20 nt, Human
aagaagaaaaaagcuuaccu

SEQ ID NO: 800165 - RNA, 21 nt, Human
acccaccccuggaaucuccac

SEQ ID NO: 800166 - RNA, 19 nt, Human
aucugaguuuauuuaaaac

SEQ ID NO: 800167 - RNA, 20 nt, Human
caagcuggaagugaguucua

SEQ ID NO: 800168 - RNA, 18 nt, Human
cacccaccccuggaaucu

SEQ ID NO: 800169 - RNA, 22 nt, Human
caccuccccuaucaaauuuaga

SEQ ID NO: 800170 - RNA, 24 nt, Human
cacgcacauaacaaaaggcagaau

SEQ ID NO: 800171 - RNA, 21 nt, Human
cagcucagagaaauuaaagca

SEQ ID NO: 800172 - RNA, 22 nt, Human
cagcucagagaaauuaaagcaa

SEQ ID NO: 800173 - RNA, 21 nt, Human
cccuggaaucuccaccucccc

SEQ ID NO: 800174 - RNA, 18 nt, Human
cgaacagaguauccucau

SEQ ID NO: 800175 - RNA, 22 nt, Human
cgcacauaacaaaaggcagaau

SEQ ID NO: 800176 - RNA, 20 nt, Human
cucgcuaagacauucuugca

SEQ ID NO: 800177 - RNA, 18 nt, Human
gaacaaaauucaccggga

SEQ ID NO: 800178 - RNA, 18 nt, Human
gcccugucagcacuagca

SEQ ID NO: 800179 - RNA, 21 nt, Human
uaaaaaaaaagaagaaaaaag

SEQ ID NO: 800180 - RNA, 24 nt, Human
uaaaacccugacaaaagcuuacca

SEQ ID NO: 800181 - RNA, 22 nt, Human
uaagucucccacuugaaauuua

SEQ ID NO: 800182 - RNA, 22 nt, Human
uaccaucuuuuccaacucuauu

SEQ ID NO: 800183 - RNA, 19 nt, Human
ucagcacuagcaugauacc

SEQ ID NO: 800184 - RNA, 23 nt, Human
uccaacuccggcuuuucacuauc

SEQ ID NO: 800185 - RNA, 22 nt, Human
ucuccagugaacucuuauccaa

SEQ ID NO: 800186 - RNA, 20 nt, Human
ugcaagcaaggcucgcuaag

SEQ ID NO: 800187 - RNA, 23 nt, Human
ugccugcuaaguucuaucucuuc

SEQ ID NO: 800188 - RNA, 21 nt, Human
uggaacaaaauucaccgggag

SEQ ID NO: 800189 - RNA, 20 nt, Human
uuaaaaaaaaagaagaaaaa

SEQ ID NO: 800190 - RNA, 22 nt, Human
uucacuaucccgaguacuuguc

SEQ ID NO: 800191 - RNA, 18 nt, Human
uuccauuauuuauuccca

SEQ ID NO: 800192 - RNA, 19 nt, Human
aaagugcugggauuacagg

SEQ ID NO: 800193 - RNA, 23 nt, Human
aaagugcugggauuacaggcaug

SEQ ID NO: 800194 - RNA, 25 nt, Human
aagcgauucucuugccucagccucc

SEQ ID NO: 800195 - RNA, 19 nt, Human
aagugcugggauuacaggc

SEQ ID NO: 800196 - RNA, 23 nt, Human
aagugcugggauuacaggcaugu

SEQ ID NO: 800197 - RNA, 23 nt, Human
acaggugcccaccaccacacccg

SEQ ID NO: 800198 - RNA, 24 nt, Human
accguguuggccaggcuggucucg

SEQ ID NO: 800199 - RNA, 24 nt, Human
agcgauucucuugccucagccucc

SEQ ID NO: 800200 - RNA, 24 nt, Human
aggugauccaccagccuuggccuc

SEQ ID NO: 800201 - RNA, 18 nt, Human
agugcugggauuacaggc

SEQ ID NO: 800202 - RNA, 22 nt, Human
auuuuuuguauuuuuaguagag

SEQ ID NO: 800203 - RNA, 24 nt, Human
caaagugcugggauuacaggcaug

SEQ ID NO: 800204 - RNA, 22 nt, Human
caagcgauucucuugccucagc

SEQ ID NO: 800205 - RNA, 23 nt, Human
cacaggugcccaccaccacaccc

SEQ ID NO: 800206 - RNA, 21 nt, Human
caccguguuggccaggcuggu

SEQ ID NO: 800207 - RNA, 24 nt, Human
caccguguuggccaggcuggucuc

SEQ ID NO: 800208 - RNA, 21 nt, Human
cacugcaaccuccgccuccca

SEQ ID NO: 800209 - RNA, 22 nt, Human
cagccucccaggaagcugggau

SEQ ID NO: 800210 - RNA, 21 nt, Human
caggugcccaccaccacaccc

SEQ ID NO: 800211 - RNA, 24 nt, Human
caggugcccaccaccacacccggc

SEQ ID NO: 800212 - RNA, 23 nt, Human
ccaaagugcugggauuacaggca

SEQ ID NO: 800213 - RNA, 24 nt, Human
ccaaagugcugggauuacaggcau

SEQ ID NO: 800214 - RNA, 24 nt, Human
ccaaagugcugggauuacaggcau

SEQ ID NO: 800215 - RNA, 24 nt, Human
cccaaagugcugggauuacaggca

SEQ ID NO: 800216 - RNA, 22 nt, Human
cccaccaccacacccggcuauu

SEQ ID NO: 800217 - RNA, 20 nt, Human
cccaggcuggacagcaaugg

SEQ ID NO: 800218 - RNA, 24 nt, Human
ccgccucccagauucaagcgauuc

SEQ ID NO: 800219 - RNA, 24 nt, Human
ccucccagauucaagcgauucucu

SEQ ID NO: 800220 - RNA, 19 nt, Human
ccucccaggaagcugggau

SEQ ID NO: 800221 - RNA, 20 nt, Human
ccugaccucaggugauccac

SEQ ID NO: 800222 - RNA, 23 nt, Human
ccugaccucaggugauccaccag

SEQ ID NO: 800223 - RNA, 21 nt, Human
cgggagcccgaggggauccca

SEQ ID NO: 800224 - RNA, 23 nt, Human
cgggguuucaccguguuggccag

SEQ ID NO: 800225 - RNA, 24 nt, Human
cucacugcaaccuccgccucccag

SEQ ID NO: 800226 - RNA, 20 nt, Human
cucuugccucagccucccag

SEQ ID NO: 800227 - RNA, 23 nt, Human
cugcaaccuccgccucccagauu

SEQ ID NO: 800228 - RNA, 24 nt, Human
cugcaaccuccgccucccagauuc

SEQ ID NO: 800229 - RNA, 24 nt, Human
cuugccucagccucccaggaagcu

SEQ ID NO: 800230 - RNA, 21 nt, Human
cuugcucugucacccaggcug

SEQ ID NO: 800231 - RNA, 24 nt, Human
gaccucaggugauccaccagccuu

SEQ ID NO: 800232 - RNA, 24 nt, Human
gaggcgggguuucaccguguuggc

SEQ ID NO: 800233 - RNA, 18 nt, Human
gauuacaggcaugugcca

SEQ ID NO: 800234 - RNA, 22 nt, Human
gccuuggccucccaaagugcug

SEQ ID NO: 800235 - RNA, 24 nt, Human
gcgauucucuugccucagccuccc

SEQ ID NO: 800236 - RNA, 18 nt, Human
gcgggguuucaccguguu

SEQ ID NO: 800237 - RNA, 23 nt, Human
gcgggguuucaccguguuggcca

SEQ ID NO: 800238 - RNA, 24 nt, Human
gcgggguuucaccguguuggccag

SEQ ID NO: 800239 - RNA, 30 nt, Human
gcucugucacccaggcuggacagcaauggg

SEQ ID NO: 800240 - RNA, 23 nt, Human
gcuggucucgaacuccugaccuc

SEQ ID NO: 800241 - RNA, 19 nt, Human
ggauuacaggcaugugcca

SEQ ID NO: 800242 - RNA, 24 nt, Human
ggcuggucucgaacuccugaccuc

SEQ ID NO: 800243 - RNA, 23 nt, Human
gggguuucaccguguuggccagg

SEQ ID NO: 800244 - RNA, 22 nt, Human
ggguuucaccguguuggccagg

SEQ ID NO: 800245 - RNA, 19 nt, Human
ggucucgaacuccugaccu

SEQ ID NO: 800246 - RNA, 24 nt, Human
gugauccaccagccuuggccuccc

SEQ ID NO: 800247 - RNA, 21 nt, Human
uaguagaggcgggguuucacc

SEQ ID NO: 800248 - RNA, 24 nt, Human
uaguagaggcgggguuucaccgug

SEQ ID NO: 800249 - RNA, 26 nt, Human
uaguagaggcgggguuucaccguguu

SEQ ID NO: 800250 - RNA, 24 nt, Human
uauuuuuuguauuuuuaguagagg

SEQ ID NO: 800251 - RNA, 24 nt, Human
ucaccguguuggccaggcuggucu

SEQ ID NO: 800252 - RNA, 18 nt, Human
ucacugcaaccuccgccu

SEQ ID NO: 800253 - RNA, 19 nt, Human
ucacugcaaccuccgccuc

SEQ ID NO: 800254 - RNA, 23 nt, Human
ucacugcaaccuccgccucccag

SEQ ID NO: 800255 - RNA, 26 nt, Human
ucacugcaaccuccgccucccagauu

SEQ ID NO: 800256 - RNA, 24 nt, Human
ucccaaagugcugggauuacaggc

SEQ ID NO: 800257 - RNA, 21 nt, Human
ucccagauucaagcgauucuc

SEQ ID NO: 800258 - RNA, 24 nt, Human
ucccagauucaagcgauucucuug

SEQ ID NO: 800259 - RNA, 20 nt, Human
ucccggccagcaugcuaagg

SEQ ID NO: 800260 - RNA, 23 nt, Human
ucucgaacuccugaccucaggug

SEQ ID NO: 800261 - RNA, 18 nt, Human
ucugucacccaggcugga

SEQ ID NO: 800262 - RNA, 24 nt, Human
ucugucacccaggcuggacagcaa

SEQ ID NO: 800263 - RNA, 23 nt, Human
ucuugcucugucacccaggcugg

SEQ ID NO: 800264 - RNA, 24 nt, Human
ucuugcucugucacccaggcugga

SEQ ID NO: 800265 - RNA, 20 nt, Human
ugaccucaggugauccacca

SEQ ID NO: 800266 - RNA, 24 nt, Human
ugaccucaggugauccaccagccu

SEQ ID NO: 800267 - RNA, 22 nt, Human
ugauccaccagccuuggccucc

SEQ ID NO: 800268 - RNA, 21 nt, Human
ugcccaccaccacacccggcu

SEQ ID NO: 800269 - RNA, 24 nt, Human
ugccucagccucccaggaagcugg

SEQ ID NO: 800270 - RNA, 24 nt, Human
ugcucugucacccaggcuggacag

SEQ ID NO: 800271 - RNA, 20 nt, Human
ugcugggauuacaggcaugu

SEQ ID NO: 800272 - RNA, 24 nt, Human
uggccaggcuggucucgaacuccu

SEQ ID NO: 800273 - RNA, 21 nt, Human
ugggaucacaggugcccacca

SEQ ID NO: 800274 - RNA, 24 nt, Human
ugggaucacaggugcccaccacca

SEQ ID NO: 800275 - RNA, 18 nt, Human
ugggauuacaggcaugug

SEQ ID NO: 800276 - RNA, 21 nt, Human
ugggauuacaggcaugugcca

SEQ ID NO: 800277 - RNA, 22 nt, Human
ugggauuacaggcaugugccac

SEQ ID NO: 800278 - RNA, 24 nt, Human
ugggauuacaggcaugugccaccc

SEQ ID NO: 800279 - RNA, 21 nt, Human
uguauuuuuaguagaggcggg

SEQ ID NO: 800280 - RNA, 18 nt, Human
uuaguagaggcgggguuu

SEQ ID NO: 800281 - RNA, 22 nt, Human
uuaguagaggcgggguuucacc

SEQ ID NO: 800282 - RNA, 24 nt, Human
uuaguagaggcgggguuucaccgu

SEQ ID NO: 800283 - RNA, 23 nt, Human
uucaagcgauucucuugccucag

SEQ ID NO: 800284 - RNA, 22 nt, Human
uucucuugccucagccucccag

SEQ ID NO: 800285 - RNA, 18 nt, Human
uuggccucccaaagugcu

SEQ ID NO: 800286 - RNA, 23 nt, Human
uuguauuuuuaguagaggcgggg

SEQ ID NO: 800287 - RNA, 24 nt, Human
uuucaccguguuggccaggcuggu

SEQ ID NO: 800288 - RNA, 24 nt, Human
uuuuuaguagaggcgggguuucac

SEQ ID NO: 800289 - RNA, 20 nt, Human
uuuuuguauuuuuaguagag

SEQ ID NO: 800290 - RNA, 24 nt, Human
uuuuuuguauuuuuaguagaggcg

SEQ ID NO: 800291 - RNA, 20 nt, Human
uuuuuuuuuugaaacgcagg

SEQ ID NO: 800292 - RNA, 20 nt, Human
uuuuuuuuuuuuuuuuuugg

SEQ ID NO: 800293 - RNA, 24 nt, Human
acauucagauaugcuaaaaaaaaa

SEQ ID NO: 800294 - RNA, 22 nt, Human
uaugcuaaaaaaaaaaaaaaaa

SEQ ID NO: 800295 - RNA, 20 nt, Human
ugcuaaaaaaaaaaaaaaaa

SEQ ID NO: 800296 - RNA, 31 nt, Human
uucagauaugcuaaaaaaaaaaaaaaaaaaa

SEQ ID NO: 800297 - RNA, 20 nt, Human
aaaaaaaaggcuuuuucugg

SEQ ID NO: 800298 - RNA, 22 nt, Human
aaaaaaaggcuuuuucuggaaa

SEQ ID NO: 800299 - RNA, 22 nt, Human
aaaaagccauaagaaagcauca

SEQ ID NO: 800300 - RNA, 22 nt, Human
aaacagacaugauacaguagau

SEQ ID NO: 800301 - RNA, 21 nt, Human
aaaggcccuucaugcagccuu

SEQ ID NO: 800302 - RNA, 26 nt, Human
aaucaccaagucuuuuuaaggagaac

SEQ ID NO: 800303 - RNA, 22 nt, Human
acagcugaacaaaaaggauaaa

SEQ ID NO: 800304 - RNA, 22 nt, Human
accccgcgaccacagcccgcug

SEQ ID NO: 800305 - RNA, 22 nt, Human
accccgcugcaccaugggggag

SEQ ID NO: 800306 - RNA, 21 nt, Human
acccucuaauaauuuggccuc

SEQ ID NO: 800307 - RNA, 23 nt, Human
acugaaauaaaaagggugaccug

SEQ ID NO: 800308 - RNA, 22 nt, Human
acugucuacacauuuguccuca

SEQ ID NO: 800309 - RNA, 18 nt, Human
agcauguggaugcagcuc

SEQ ID NO: 800310 - RNA, 20 nt, Human
agcccgggggcccugggcgg

SEQ ID NO: 800311 - RNA, 19 nt, Human
agccggccagggggacagu

SEQ ID NO: 800312 - RNA, 21 nt, Human
agccuagguaacuugaggcuc

SEQ ID NO: 800313 - RNA, 18 nt, Human
aggaagaaccacauagga

SEQ ID NO: 800314 - RNA, 20 nt, Human
aguacagaguuuacuuagga

SEQ ID NO: 800315 - RNA, 23 nt, Human
aguauacaucgagguuggauaac

SEQ ID NO: 800316 - RNA, 27 nt, Human
agucagacucccagagggaaggaccug

SEQ ID NO: 800317 - RNA, 23 nt, Human
auaaaaacagacaugauacagua

SEQ ID NO: 800318 - RNA, 19 nt, Human
augaagacgagcugggcag

SEQ ID NO: 800319 - RNA, 20 nt, Human
augcagccuagguaacuuga

SEQ ID NO: 800320 - RNA, 18 nt, Human
auggagcuuugcuuccuc

SEQ ID NO: 800321 - RNA, 21 nt, Human
auucugcuuugcaucuuuccu

SEQ ID NO: 800322 - RNA, 25 nt, Human
caacuuccaagccaaaccuaacuuu

SEQ ID NO: 800323 - RNA, 23 nt, Human
cacauaggacaacauaugacauc

SEQ ID NO: 800324 - RNA, 21 nt, Human
cacauuuugcucagcauucca

SEQ ID NO: 800325 - RNA, 18 nt, Human
cacccaagcuugugcacc

SEQ ID NO: 800326 - RNA, 19 nt, Human
cagagccugcccuggugcu

SEQ ID NO: 800327 - RNA, 20 nt, Human
cagccaaaauauccagaaau

SEQ ID NO: 800328 - RNA, 18 nt, Human
cagcccgggggcccuggg

SEQ ID NO: 800329 - RNA, 22 nt, Human
cagcugccucuaguucuuuccc

SEQ ID NO: 800330 - RNA, 23 nt, Human
caugcagccuagguaacuugagg

SEQ ID NO: 800331 - RNA, 21 nt, Human
ccagagccugcccuggugcug

SEQ ID NO: 800332 - RNA, 26 nt, Human
ccagccaaauuaaaauaaaaagccau

SEQ ID NO: 800333 - RNA, 23 nt, Human
cccccaccccgcgaccacagccc

SEQ ID NO: 800334 - RNA, 23 nt, Human
cccccaccccgcgaccacagccc

SEQ ID NO: 800335 - RNA, 25 nt, Human
cccgcgaccacagcccgcugggggc

SEQ ID NO: 800336 - RNA, 22 nt, Human
cccugggcggcccgcgcagccc

SEQ ID NO: 800337 - RNA, 24 nt, Human
cgcgagacgccccuuggacgcccc

SEQ ID NO: 800338 - RNA, 22 nt, Human
cgcuccggccccgucucagccc

SEQ ID NO: 800339 - RNA, 20 nt, Human
cggccggggcgccgcuccgg

SEQ ID NO: 800340 - RNA, 20 nt, Human
cgguaaggggggccucgccg

SEQ ID NO: 800341 - RNA, 26 nt, Human
cugcuggguggaucccucuuacucac

SEQ ID NO: 800342 - RNA, 18 nt, Human
cugugcccaugacugcug

SEQ ID NO: 800343 - RNA, 18 nt, Human
cuuuaugguuucauaauu

SEQ ID NO: 800344 - RNA, 23 nt, Human
gaacuuguuucuccugugguuac

SEQ ID NO: 800345 - RNA, 22 nt, Human
gaaucuuauccaaauguuccuc

SEQ ID NO: 800346 - RNA, 23 nt, Human
gaccaagaaaagcccugaaagcc

SEQ ID NO: 800347 - RNA, 18 nt, Human
gagaccccgcgcgggcgg

SEQ ID NO: 800348 - RNA, 18 nt, Human
gauaaaaacagacaugau

SEQ ID NO: 800349 - RNA, 23 nt, Human
gcaauccuaaaggcccuucaugc

SEQ ID NO: 800350 - RNA, 18 nt, Human
gcccaugacugcugggug

SEQ ID NO: 800351 - RNA, 18 nt, Human
ggagaagagacugaugcu

SEQ ID NO: 800352 - RNA, 21 nt, Human
gggaagcaugucuuaucuaca

SEQ ID NO: 800353 - RNA, 21 nt, Human
ggggcgccgcuccggccccgu

SEQ ID NO: 800354 - RNA, 19 nt, Human
ggucuucuuuugggguuau

SEQ ID NO: 800355 - RNA, 23 nt, Human
guugguucuuagcaauccuaaag

SEQ ID NO: 800356 - RNA, 20 nt, Human
uaaaguagugauguuugggg

SEQ ID NO: 800357 - RNA, 20 nt, Human
uaaagugggacaucaucaga

SEQ ID NO: 800358 - RNA, 24 nt, Human
uaacaaaaauaggauucguuauca

SEQ ID NO: 800359 - RNA, 21 nt, Human
uaagaaacaucuuuaacuaga

SEQ ID NO: 800360 - RNA, 20 nt, Human
uaagaaagcaucaauauugg

SEQ ID NO: 800361 - RNA, 18 nt, Human
uacauccacauuuugcuc

SEQ ID NO: 800362 - RNA, 20 nt, Human
uacugugcccaugacugcug

SEQ ID NO: 800363 - RNA, 21 nt, Human
uagguacagccaaaauaucca

SEQ ID NO: 800364 - RNA, 22 nt, Human
uaucacuaauuguggacuacag

SEQ ID NO: 800365 - RNA, 18 nt, Human
uauggaaguuguuaacag

SEQ ID NO: 800366 - RNA, 23 nt, Human
ucaaacauucaauuguaaguaau

SEQ ID NO: 800367 - RNA, 20 nt, Human
ucaacauaugucauuuguuc

SEQ ID NO: 800368 - RNA, 24 nt, Human
ucaacuuccaagccaaaccuaacu

SEQ ID NO: 800369 - RNA, 22 nt, Human
ucacauaucugaacucucaaaa

SEQ ID NO: 800370 - RNA, 20 nt, Human
ucagccucuuuucugauagc

SEQ ID NO: 800371 - RNA, 19 nt, Human
ucaugaagacgagcugggc

SEQ ID NO: 800372 - RNA, 18 nt, Human
uccacauuuugcucagca

SEQ ID NO: 800373 - RNA, 22 nt, Human
ucuaccucuucguguaacacca

SEQ ID NO: 800374 - RNA, 18 nt, Human
ucuaguucuuucccuuug

SEQ ID NO: 800375 - RNA, 20 nt, Human
ucugcuuuuuuccaacugau

SEQ ID NO: 800376 - RNA, 20 nt, Human
ucuggagaagagacugaugc

SEQ ID NO: 800377 - RNA, 24 nt, Human
ucuggagaagagacugaugcuuua

SEQ ID NO: 800378 - RNA, 23 nt, Human
ucuguaaacaugcaacaugcuau

SEQ ID NO: 800379 - RNA, 19 nt, Human
ugaaaaaaaaaaaaaggcu

SEQ ID NO: 800380 - RNA, 21 nt, Human
ugagacucuucaaauauggaa

SEQ ID NO: 800381 - RNA, 24 nt, Human
ugagacucuucaaauauggaagca

SEQ ID NO: 800382 - RNA, 23 nt, Human
ugagaucaucaacuuccaagcca

SEQ ID NO: 800383 - RNA, 21 nt, Human
ugaguugugaccacauuguua

SEQ ID NO: 800384 - RNA, 19 nt, Human
ugcccuggugcugaccuga

SEQ ID NO: 800385 - RNA, 21 nt, Human
uggaagagauuucucaaccau

SEQ ID NO: 800386 - RNA, 25 nt, Human
uggacgccccucccggcugcgcucc

SEQ ID NO: 800387 - RNA, 22 nt, Human
uggacugugaaacugguuucau

SEQ ID NO: 800388 - RNA, 22 nt, Human
ugguacuaaauucuuaguauuu

SEQ ID NO: 800389 - RNA, 21 nt, Human
uuaaauaagaaaguuaguuaa

SEQ ID NO: 800390 - RNA, 26 nt, Human
uuaaauaagauccaguaaguacuguc

SEQ ID NO: 800391 - RNA, 20 nt, Human
uuaucaguguuuucuuaacu

SEQ ID NO: 800392 - RNA, 20 nt, Human
uucaaauauggaagcaaaau

SEQ ID NO: 800393 - RNA, 23 nt, Human
uucacauaucugaacucucaaag

SEQ ID NO: 800394 - RNA, 19 nt, Human
uucagaauaucugaaaaaa

SEQ ID NO: 800395 - RNA, 18 nt, Human
uuccaagccaaaccuaac

SEQ ID NO: 800396 - RNA, 22 nt, Human
uuccagucucuuuguuuuuguc

SEQ ID NO: 800397 - RNA, 23 nt, Human
uugaguuguuggguuaaagaguu

SEQ ID NO: 800398 - RNA, 20 nt, Human
uugaucucugggucuucuuu

SEQ ID NO: 800399 - RNA, 20 nt, Human
uugauggagcuuugcuuccu

SEQ ID NO: 800400 - RNA, 19 nt, Human
uugauuuuuuucucuggag

SEQ ID NO: 800401 - RNA, 23 nt, Human
uuggacugugaaacugguuucau

SEQ ID NO: 800402 - RNA, 22 nt, Human
uuguccucauuugcugggcaua

SEQ ID NO: 800403 - RNA, 19 nt, Human
uuuaaggaaagaccaagaa

SEQ ID NO: 800404 - RNA, 20 nt, Human
uuuugcucuauuugaauagu

SEQ ID NO: 800405 - RNA, 22 nt, Human
uuuugcugcuuuuuugggcugg

SEQ ID NO: 800406 - RNA, 24 nt, Human
uuuuuccuucccaucugggaucug

SEQ ID NO: 800407 - RNA, 22 nt, Human
aaaaaaacaacgucaucauuaa

SEQ ID NO: 800408 - RNA, 22 nt, Human
aaaagagcaaauacuuaccaua

SEQ ID NO: 800409 - RNA, 21 nt, Human
aaacaaauuugaguacagcua

SEQ ID NO: 800410 - RNA, 21 nt, Human
aaagaugagcugaauguggug

SEQ ID NO: 800411 - RNA, 21 nt, Human
aaccagagccuucuggacuuu

SEQ ID NO: 800412 - RNA, 19 nt, Human
aagaucugacaugccuuuc

SEQ ID NO: 800413 - RNA, 21 nt, Human
aagcaacaaucuguuucagca

SEQ ID NO: 800414 - RNA, 20 nt, Human
aauaaacaggccauguuucu

SEQ ID NO: 800415 - RNA, 24 nt, Human
aaugucaaagaaaugaaaaaaagg

SEQ ID NO: 800416 - RNA, 18 nt, Human
acaaaagcaaagaagagu

SEQ ID NO: 800417 - RNA, 20 nt, Human
acacaaccaagacugacacu

SEQ ID NO: 800418 - RNA, 21 nt, Human
accacaacaaaagcaaagaag

SEQ ID NO: 800419 - RNA, 25 nt, Human
accacaacaaaagcaaagaagaguc

SEQ ID NO: 800420 - RNA, 28 nt, Human
accagagccuucuggacuuuggggccaa

SEQ ID NO: 800421 - RNA, 19 nt, Human
accauacaaaauaaacagc

SEQ ID NO: 800422 - RNA, 20 nt, Human
accuuuuuuuuuuuuuguga

SEQ ID NO: 800423 - RNA, 21 nt, Human
acugcaguucuuucaggccuu

SEQ ID NO: 800424 - RNA, 24 nt, Human
agaugagcugaauguggugagcca

SEQ ID NO: 800425 - RNA, 18 nt, Human
agcaaauuaccacauacu

SEQ ID NO: 800426 - RNA, 20 nt, Human
agcacaguuuggaaaauaaa

SEQ ID NO: 800427 - RNA, 20 nt, Human
agggagaugauaggauguuc

SEQ ID NO: 800428 - RNA, 24 nt, Human
auaaacaggccauguuucugucaa

SEQ ID NO: 800429 - RNA, 24 nt, Human
caaaaaaagcaccaauuucaaaag

SEQ ID NO: 800430 - RNA, 22 nt, Human
caaaagcaaagaagaguccuac

SEQ ID NO: 800431 - RNA, 24 nt, Human
caaaauaaacagcaaauacacccc

SEQ ID NO: 800432 - RNA, 24 nt, Human
caacaaaagcaaagaagaguccua

SEQ ID NO: 800433 - RNA, 25 nt, Human
caaccaagacugacacugacaguaa

SEQ ID NO: 800434 - RNA, 20 nt, Human
cacaacaaaagcaaagaaga

SEQ ID NO: 800435 - RNA, 23 nt, Human
cacaacaaaagcaaagaagaguc

SEQ ID NO: 800436 - RNA, 20 nt, Human
cauaaauaccuuagauccau

SEQ ID NO: 800437 - RNA, 22 nt, Human
ccaauuucaaaaggucugcuag

SEQ ID NO: 800438 - RNA, 21 nt, Human
ccagagccuucuggacuuugg

SEQ ID NO: 800439 - RNA, 22 nt, Human
ccagcacaguuuggaaaauaaa

SEQ ID NO: 800440 - RNA, 21 nt, Human
ccaguguuggaaaugucuccu

SEQ ID NO: 800441 - RNA, 19 nt, Human
ccauagagaaggauugugc

SEQ ID NO: 800442 - RNA, 22 nt, Human
cccugucucuguggugcucuuc

SEQ ID NO: 800443 - RNA, 24 nt, Human
ccuacauaaauaagaacaaaguuu

SEQ ID NO: 800444 - RNA, 21 nt, Human
ccuucguccccaaccccuguc

SEQ ID NO: 800445 - RNA, 21 nt, Human
ccuugcuucaucacgcucuuu

SEQ ID NO: 800446 - RNA, 18 nt, Human
cgucaugucuucuccucu

SEQ ID NO: 800447 - RNA, 23 nt, Human
cuccuuggcuuuuuguuuaaaca

SEQ ID NO: 800448 - RNA, 18 nt, Human
cuuccuggcuuuuugucc

SEQ ID NO: 800449 - RNA, 21 nt, Human
cuuccuggcuuuuuguccuuc

SEQ ID NO: 800450 - RNA, 23 nt, Human
gcuuuuuguccuucguccccaac

SEQ ID NO: 800451 - RNA, 22 nt, Human
ggagcaaauuaccacauacuug

SEQ ID NO: 800452 - RNA, 18 nt, Human
ggaguaggccugccugca

SEQ ID NO: 800453 - RNA, 25 nt, Human
uaaaaugucaaagaaaugaaaaaaa

SEQ ID NO: 800454 - RNA, 23 nt, Human
uaaaggugaauucaacaaaauca

SEQ ID NO: 800455 - RNA, 23 nt, Human
uaaguacgaagcaacaaucuguu

SEQ ID NO: 800456 - RNA, 24 nt, Human
uaaguacgaagcaacaaucuguuu

SEQ ID NO: 800457 - RNA, 23 nt, Human
uaauaggagcaaauuaccacaua

SEQ ID NO: 800458 - RNA, 18 nt, Human
uagaauuuucaggauauc

SEQ ID NO: 800459 - RNA, 19 nt, Human
uaggauguuccugacgcaa

SEQ ID NO: 800460 - RNA, 26 nt, Human
uauaguaaaaugucaaagaaaugaaa

SEQ ID NO: 800461 - RNA, 18 nt, Human
ucaggagaaccaaaacug

SEQ ID NO: 800462 - RNA, 27 nt, Human
uccauucuuucuagaaaugugagauuc

SEQ ID NO: 800463 - RNA, 19 nt, Human
uccccaaccccugucucug

SEQ ID NO: 800464 - RNA, 18 nt, Human
uccuucguccccaacccc

SEQ ID NO: 800465 - RNA, 24 nt, Human
uccuucguccccaaccccugucuc

SEQ ID NO: 800466 - RNA, 19 nt, Human
ucucaaagaaaccuugguu

SEQ ID NO: 800467 - RNA, 22 nt, Human
ugaaaggagcuggaguuuagug

SEQ ID NO: 800468 - RNA, 20 nt, Human
ugaccacaacaaaagcaaag

SEQ ID NO: 800469 - RNA, 24 nt, Human
ugaccacaacaaaagcaaagaaga

SEQ ID NO: 800470 - RNA, 25 nt, Human
ugagaugucacuugauguugaucaa

SEQ ID NO: 800471 - RNA, 18 nt, Human
ugagauucaaaaaaagca

SEQ ID NO: 800472 - RNA, 18 nt, Human
ugcuagcacacucuuccg

SEQ ID NO: 800473 - RNA, 18 nt, Human
uggcaauaaauaguugga

SEQ ID NO: 800474 - RNA, 24 nt, Human
ugucaaagaaaugaaaaaaaggga

SEQ ID NO: 800475 - RNA, 20 nt, Human
uguccuucguccccaacccc

SEQ ID NO: 800476 - RNA, 23 nt, Human
uuccgcacaucuuagggcggcuc

SEQ ID NO: 800477 - RNA, 24 nt, Human
uuccgcacaucuuagggcggcucu

SEQ ID NO: 800478 - RNA, 22 nt, Human
uuggggccagauucucuggaaa

SEQ ID NO: 800479 - RNA, 22 nt, Human
uuguaccuucacaaugacucuc

SEQ ID NO: 800480 - RNA, 24 nt, Human
uuguucuuccuggcuuuuuguccu

SEQ ID NO: 800481 - RNA, 24 nt, Human
uuuauaaagugcuuaugagauuac

SEQ ID NO: 800482 - RNA, 21 nt, Human
aaacagccuccuguggaaaau

SEQ ID NO: 800483 - RNA, 24 nt, Human
aaauacaaaaguuagcaaaaagcu

SEQ ID NO: 800484 - RNA, 18 nt, Human
aaaugcugucuucucagg

SEQ ID NO: 800485 - RNA, 19 nt, Human
aagaaagacuuugaagagg

SEQ ID NO: 800486 - RNA, 26 nt, Human
aauacaaaaguuagcaaaaagcugaa

SEQ ID NO: 800487 - RNA, 21 nt, Human
agaaaggaccgucucuuaaaa

SEQ ID NO: 800488 - RNA, 20 nt, Human
agcaugaucuucaauucuga

SEQ ID NO: 800489 - RNA, 24 nt, Human
aucacaguuccuccuccguucgca

SEQ ID NO: 800490 - RNA, 22 nt, Human
caucguuuugccaccguacaga

SEQ ID NO: 800491 - RNA, 24 nt, Human
ccuggagaggucaccguuguuuca

SEQ ID NO: 800492 - RNA, 23 nt, Human
gaggauagaguguguaagaaaga

SEQ ID NO: 800493 - RNA, 19 nt, Human
uacaaaguacaauaaacag

SEQ ID NO: 800494 - RNA, 19 nt, Human
uauccagaaaggaccgucu

SEQ ID NO: 800495 - RNA, 21 nt, Human
ucguuuugccaccguacagaa

SEQ ID NO: 800496 - RNA, 25 nt, Human
ucucuuaaauccaccaggggaggaa

SEQ ID NO: 800497 - RNA, 19 nt, Human
uguuucauuucucuguauc

SEQ ID NO: 800498 - RNA, 24 nt, Human
uuuacaauuaugucauagguuacu

SEQ ID NO: 800499 - RNA, 19 nt, Human
aaaacaaacaggcaauucc

SEQ ID NO: 800500 - RNA, 19 nt, Human
aaacaaacaggcaauuccc

SEQ ID NO: 800501 - RNA, 21 nt, Human
aaacaaacaggcaauucccau

SEQ ID NO: 800502 - RNA, 23 nt, Human
aaacaaacaggcaauucccauac

SEQ ID NO: 800503 - RNA, 24 nt, Human
aaagugcugagaauacaggcauga

SEQ ID NO: 800504 - RNA, 20 nt, Human
aagcacuggaauuacaagau

SEQ ID NO: 800505 - RNA, 21 nt, Human
aagcacuggaauuacaagaua

SEQ ID NO: 800506 - RNA, 24 nt, Human
aagugauccaccugcacuggccuc

SEQ ID NO: 800507 - RNA, 25 nt, Human
aagugauucucccaccucagccucc

SEQ ID NO: 800508 - RNA, 24 nt, Human
aauaagaaugaaaaauauguacaa

SEQ ID NO: 800509 - RNA, 25 nt, Human
aauacauaaugaaauaauuacacaa

SEQ ID NO: 800510 - RNA, 21 nt, Human
acagagucauacauacaauga

SEQ ID NO: 800511 - RNA, 22 nt, Human
accauauuggccaggcuggucu

SEQ ID NO: 800512 - RNA, 23 nt, Human
accucagccucccgaguagcuga

SEQ ID NO: 800513 - RNA, 18 nt, Human
acuacagugcucuuuugc

SEQ ID NO: 800514 - RNA, 19 nt, Human
acucuguugcucaggcugg

SEQ ID NO: 800515 - RNA, 25 nt, Human
acucuguugcucaggcuggagugca

SEQ ID NO: 800516 - RNA, 23 nt, Human
acuuugcacguguucaaaaacca

SEQ ID NO: 800517 - RNA, 21 nt, Human
agaagcuauagagcagcaguc

SEQ ID NO: 800518 - RNA, 22 nt, Human
agaauacaggcaugagccacug

SEQ ID NO: 800519 - RNA, 24 nt, Human
agaauacaggcaugagccacugca

SEQ ID NO: 800520 - RNA, 18 nt, Human
agacuacaggcaugcacc

SEQ ID NO: 800521 - RNA, 21 nt, Human
agccagacagcacauauucuu

SEQ ID NO: 800522 - RNA, 20 nt, Human
aggcaugcaccaccacaccc

SEQ ID NO: 800523 - RNA, 25 nt, Human
aggcuggagugcaguggcacgaucu

SEQ ID NO: 800524 - RNA, 24 nt, Human
agucacucuguugcucaggcugga

SEQ ID NO: 800525 - RNA, 20 nt, Human
agugcaguggcacgaucuug

SEQ ID NO: 800526 - RNA, 23 nt, Human
agugcaguggcacgaucuuggcu

SEQ ID NO: 800527 - RNA, 24 nt, Human
agugcaguggcacgaucuuggcuc

SEQ ID NO: 800528 - RNA, 23 nt, Human
auauuggccaggcuggucuugaa

SEQ ID NO: 800529 - RNA, 24 nt, Human
auggcuuugcugaucugacaggag

SEQ ID NO: 800530 - RNA, 18 nt, Human
auucucccaccucagccu

SEQ ID NO: 800531 - RNA, 19 nt, Human
caaaaaccaaagccuuuuc

SEQ ID NO: 800532 - RNA, 24 nt, Human
caaagugcugagaauacaggcaug

SEQ ID NO: 800533 - RNA, 19 nt, Human
caaauucuuagcaaucaca

SEQ ID NO: 800534 - RNA, 19 nt, Human
caagugauccaccugcacu

SEQ ID NO: 800535 - RNA, 20 nt, Human
caagugauucucccaccuca

SEQ ID NO: 800536 - RNA, 22 nt, Human
caagugauucucccaccucagc

SEQ ID NO: 800537 - RNA, 23 nt, Human
caaugacaagcauaagacagcac

SEQ ID NO: 800538 - RNA, 24 nt, Human
caccacacccagcuaauuuuugua

SEQ ID NO: 800539 - RNA, 21 nt, Human
caccauauuggccaggcuggu

SEQ ID NO: 800540 - RNA, 24 nt, Human
caccauauuggccaggcuggucuu

SEQ ID NO: 800541 - RNA, 27 nt, Human
caccauauuggccaggcuggucuugaa

SEQ ID NO: 800542 - RNA, 23 nt, Human
caccugcacuggccucccaaagu

SEQ ID NO: 800543 - RNA, 24 nt, Human
cacucuguugcucaggcuggagug

SEQ ID NO: 800544 - RNA, 23 nt, Human
cacugaaaccucugccucccggg

SEQ ID NO: 800545 - RNA, 22 nt, Human
cacuggaauuacaagauaaaga

SEQ ID NO: 800546 - RNA, 18 nt, Human
cagaagcuauagagcagc

SEQ ID NO: 800547 - RNA, 18 nt, Human
cagacagcacauauucuu

SEQ ID NO: 800548 - RNA, 19 nt, Human
cagcuggaggugaagacga

SEQ ID NO: 800549 - RNA, 24 nt, Human
caggauuucaccauauuggccagg

SEQ ID NO: 800550 - RNA, 19 nt, Human
caguggcacgaucuuggcu

SEQ ID NO: 800551 - RNA, 24 nt, Human
cauauuggccaggcuggucuugaa

SEQ ID NO: 800552 - RNA, 23 nt, Human
caugcaccaccacacccagcuaa

SEQ ID NO: 800553 - RNA, 24 nt, Human
ccaaagugcugagaauacaggcau

SEQ ID NO: 800554 - RNA, 22 nt, Human
ccaccugcacuggccucccaaa

SEQ ID NO: 800555 - RNA, 19 nt, Human
ccacucaccuccugcugug

SEQ ID NO: 800556 - RNA, 19 nt, Human
ccauacagagucauacaua

SEQ ID NO: 800557 - RNA, 23 nt, Human
cccaccucagccucccgaguagc

SEQ ID NO: 800558 - RNA, 24 nt, Human
cccaccucagccucccgaguagcu

SEQ ID NO: 800559 - RNA, 24 nt, Human
cccgaguagcugagacuacaggca

SEQ ID NO: 800560 - RNA, 22 nt, Human
cccggguucaagugauucuccc

SEQ ID NO: 800561 - RNA, 21 nt, Human
ccucccggguucaagugauuc

SEQ ID NO: 800562 - RNA, 24 nt, Human
ccucccggguucaagugauucucc

SEQ ID NO: 800563 - RNA, 19 nt, Human
ccuccugcugugcagccug

SEQ ID NO: 800564 - RNA, 21 nt, Human
ccugaccucaagugauccacc

SEQ ID NO: 800565 - RNA, 23 nt, Human
ccugaccucaagugauccaccug

SEQ ID NO: 800566 - RNA, 26 nt, Human
ccugaccucaagugauccaccugcac

SEQ ID NO: 800567 - RNA, 18 nt, Human
cgucagcauguauucuuu

SEQ ID NO: 800568 - RNA, 23 nt, Human
cuaauuuuuguauuuuuaguaga

SEQ ID NO: 800569 - RNA, 23 nt, Human
cuagcucucaaacaccugcagca

SEQ ID NO: 800570 - RNA, 22 nt, Human
cucaagccgcucaauuugguca

SEQ ID NO: 800571 - RNA, 18 nt, Human
cucaagugauccaccugc

SEQ ID NO: 800572 - RNA, 22 nt, Human
cucacugaaaccucugccuccc

SEQ ID NO: 800573 - RNA, 24 nt, Human
cucacugaaaccucugccucccgg

SEQ ID NO: 800574 - RNA, 23 nt, Human
cucaucaucacauguucuacuuc

SEQ ID NO: 800575 - RNA, 20 nt, Human
cugaaaaaacaaacaggcaa

SEQ ID NO: 800576 - RNA, 21 nt, Human
cugcacuggccucccaaagug

SEQ ID NO: 800577 - RNA, 27 nt, Human
cugcagccagacagcacagcgcgaguc

SEQ ID NO: 800578 - RNA, 23 nt, Human
cugccucccggguucaagugauu

SEQ ID NO: 800579 - RNA, 21 nt, Human
cuguguguggccugggaguug

SEQ ID NO: 800580 - RNA, 18 nt, Human
gaaaaaacaaacaggcaa

SEQ ID NO: 800581 - RNA, 22 nt, Human
gaauacaggcaugagccacugc

SEQ ID NO: 800582 - RNA, 23 nt, Human
gaccucaagugauccaccugcac

SEQ ID NO: 800583 - RNA, 23 nt, Human
gagcuuguuuuucuguaacuaga

SEQ ID NO: 800584 - RNA, 24 nt, Human
gagcuuguuuuucuguaacuagau

SEQ ID NO: 800585 - RNA, 21 nt, Human
gaggugaagacgaucacugug

SEQ ID NO: 800586 - RNA, 24 nt, Human
gaguagcugagacuacaggcaugc

SEQ ID NO: 800587 - RNA, 20 nt, Human
gauaaugugagcaacaggga

SEQ ID NO: 800588 - RNA, 21 nt, Human
gauucucccaccucagccucc

SEQ ID NO: 800589 - RNA, 19 nt, Human
gcagccugcuuccuaacag

SEQ ID NO: 800590 - RNA, 21 nt, Human
gcucacugaaaccucugccuc

SEQ ID NO: 800591 - RNA, 23 nt, Human
gcuggucuugaacuccugaccuc

SEQ ID NO: 800592 - RNA, 21 nt, Human
gcuuguuuuucuguaacuaga

SEQ ID NO: 800593 - RNA, 24 nt, Human
ggcuggucuugaacuccugaccuc

SEQ ID NO: 800594 - RNA, 18 nt, Human
gggaguccugagcuuguu

SEQ ID NO: 800595 - RNA, 24 nt, Human
gggaugguuucaggauggugauuc

SEQ ID NO: 800596 - RNA, 18 nt, Human
gguccgccccucaacaac

SEQ ID NO: 800597 - RNA, 19 nt, Human
ggucuugaacuccugaccu

SEQ ID NO: 800598 - RNA, 24 nt, Human
gugauccaccugcacuggccuccc

SEQ ID NO: 800599 - RNA, 24 nt, Human
gugauucucccaccucagccuccc

SEQ ID NO: 800600 - RNA, 24 nt, Human
uaaggagcaugugaccuagauccc

SEQ ID NO: 800601 - RNA, 24 nt, Human
uaauuuuuguauuuuuaguagaga

SEQ ID NO: 800602 - RNA, 21 nt, Human
uacaaugacaagcauaagaca

SEQ ID NO: 800603 - RNA, 22 nt, Human
uacaaugacaagcauaagacag

SEQ ID NO: 800604 - RNA, 24 nt, Human
uacaggcaugagccacugcagcca

SEQ ID NO: 800605 - RNA, 24 nt, Human
uacaggcaugcaccaccacaccca

SEQ ID NO: 800606 - RNA, 21 nt, Human
uacucucagcuuuagaaaguu

SEQ ID NO: 800607 - RNA, 20 nt, Human
uagagacaggauuucaccau

SEQ ID NO: 800608 - RNA, 21 nt, Human
uagauggucccaucgugaaga

SEQ ID NO: 800609 - RNA, 22 nt, Human
uaggagacaaugacauaucauc

SEQ ID NO: 800610 - RNA, 26 nt, Human
uaguagagacaggauuucaccauauu

SEQ ID NO: 800611 - RNA, 22 nt, Human
ucacucuguugcucaggcugga

SEQ ID NO: 800612 - RNA, 24 nt, Human
ucacucuguugcucaggcuggagu

SEQ ID NO: 800613 - RNA, 24 nt, Human
ucacugaaaccucugccucccggg

SEQ ID NO: 800614 - RNA, 25 nt, Human
ucacugaaaccucugccucccgggu

SEQ ID NO: 800615 - RNA, 24 nt, Human
ucccaaagugcugagaauacaggc

SEQ ID NO: 800616 - RNA, 24 nt, Human
ucccgaguagcugagacuacaggc

SEQ ID NO: 800617 - RNA, 21 nt, Human
ucccggguucaagugauucuc

SEQ ID NO: 800618 - RNA, 23 nt, Human
ucccggguucaagugauucuccc

SEQ ID NO: 800619 - RNA, 24 nt, Human
ucccuugaacgagcaguucacagu

SEQ ID NO: 800620 - RNA, 18 nt, Human
uccugcugugcagccugc

SEQ ID NO: 800621 - RNA, 27 nt, Human
uccugugagaaucuaauggcuuugcug

SEQ ID NO: 800622 - RNA, 28 nt, Human
ucuaauggcuuugcugauccucgacaga

SEQ ID NO: 800623 - RNA, 23 nt, Human
ucucaaacaccugcagcaucaaa

SEQ ID NO: 800624 - RNA, 24 nt, Human
ucucccaccucagccucccgagua

SEQ ID NO: 800625 - RNA, 26 nt, Human
ucugaaggggaaggaaaacacaugua

SEQ ID NO: 800626 - RNA, 18 nt, Human
ucugacaggaggcagagc

SEQ ID NO: 800627 - RNA, 24 nt, Human
ucuguugcucaggcuggagugcag

SEQ ID NO: 800628 - RNA, 21 nt, Human
ucuugaacuccugaccucaag

SEQ ID NO: 800629 - RNA, 18 nt, Human
ugaaaaaacaaacaggca

SEQ ID NO: 800630 - RNA, 21 nt, Human
ugacaggaggcagagcucagg

SEQ ID NO: 800631 - RNA, 19 nt, Human
ugaccucaagugauccacc

SEQ ID NO: 800632 - RNA, 20 nt, Human
ugaccucaagugauccaccu

SEQ ID NO: 800633 - RNA, 22 nt, Human
ugagaauacaggcaugagccac

SEQ ID NO: 800634 - RNA, 24 nt, Human
ugagaauacaggcaugagccacug

SEQ ID NO: 800635 - RNA, 26 nt, Human
ugagaauacaggcaugagccacugca

SEQ ID NO: 800636 - RNA, 21 nt, Human
ugagacuacaggcaugcacca

SEQ ID NO: 800637 - RNA, 24 nt, Human
ugagacuacaggcaugcaccacca

SEQ ID NO: 800638 - RNA, 19 nt, Human
ugagauggagucacucugu

SEQ ID NO: 800639 - RNA, 20 nt, Human
ugcacuggccucccaaaguu

SEQ ID NO: 800640 - RNA, 22 nt, Human
ugcaguggcacgaucuuggcuc

SEQ ID NO: 800641 - RNA, 23 nt, Human
ugccugccacucaccuccugcug

SEQ ID NO: 800642 - RNA, 20 nt, Human
ugcucaggcuggagugcagu

SEQ ID NO: 800643 - RNA, 21 nt, Human
ugcucaggcuggagugcagug

SEQ ID NO: 800644 - RNA, 22 nt, Human
ugcucaggcuggagugcagugg

SEQ ID NO: 800645 - RNA, 24 nt, Human
ugcucaggcuggagugcaguggca

SEQ ID NO: 800646 - RNA, 23 nt, Human
uggagugcaguggcacgaucuug

SEQ ID NO: 800647 - RNA, 24 nt, Human
uggagugcaguggcacgaucuugg

SEQ ID NO: 800648 - RNA, 25 nt, Human
uggcaccaggcagcaguuuugugaa

SEQ ID NO: 800649 - RNA, 24 nt, Human
uggccaggcuggucuugaacuccu

SEQ ID NO: 800650 - RNA, 19 nt, Human
uggcucacugaaaccucug

SEQ ID NO: 800651 - RNA, 20 nt, Human
uggcuucacaaagacauacu

SEQ ID NO: 800652 - RNA, 21 nt, Human
ugggggaugguuucaggaugg

SEQ ID NO: 800653 - RNA, 23 nt, Human
uguaauggagcucaguuuugagg

SEQ ID NO: 800654 - RNA, 21 nt, Human
uguauucagcaaccaugugcu

SEQ ID NO: 800655 - RNA, 21 nt, Human
ugugagcaacagggaguggcu

SEQ ID NO: 800656 - RNA, 23 nt, Human
uguguaauggagcucaguuuuga

SEQ ID NO: 800657 - RNA, 24 nt, Human
uuaguagagacaggauuucaccau

SEQ ID NO: 800658 - RNA, 21 nt, Human
uucaaaaaccaaagccuuuuc

SEQ ID NO: 800659 - RNA, 23 nt, Human
uucaagugauucucccaccucag

SEQ ID NO: 800660 - RNA, 24 nt, Human
uucaagugauucucccaccucagc

SEQ ID NO: 800661 - RNA, 23 nt, Human
uucacaaagacauacuaauuauc

SEQ ID NO: 800662 - RNA, 22 nt, Human
uugcacaccgaauucauuauca

SEQ ID NO: 800663 - RNA, 24 nt, Human
uugcucaggcuggagugcaguggc

SEQ ID NO: 800664 - RNA, 24 nt, Human
uuucaccauauuggccaggcuggu

SEQ ID NO: 800665 - RNA, 21 nt, Human
uuugcccauaguugcacaccg

SEQ ID NO: 800666 - RNA, 24 nt, Human
uuugugaaagauaauuuuuccaca

SEQ ID NO: 800667 - RNA, 22 nt, Human
uuuuguauuuuuaguagagaca

SEQ ID NO: 800668 - RNA, 24 nt, Human
uuuuuccacagauggggguuuggg

SEQ ID NO: 800669 - RNA, 20 nt, Human
uuuuuguauuuuuaguagag

SEQ ID NO: 800670 - RNA, 20 nt, Human
aaccccagccucuccuugca

SEQ ID NO: 800671 - RNA, 22 nt, Human
aagcugaccucuuguuggcccc

SEQ ID NO: 800672 - RNA, 19 nt, Human
aaggauggugaggggugag

SEQ ID NO: 800673 - RNA, 21 nt, Human
aaggauggugaggggugaggg

SEQ ID NO: 800674 - RNA, 20 nt, Human
acagugcacaguccuccaag

SEQ ID NO: 800675 - RNA, 28 nt, Human
acauaauauuuccuccauuauauacucu

SEQ ID NO: 800676 - RNA, 22 nt, Human
acgccgugcagaagccacaggc

SEQ ID NO: 800677 - RNA, 20 nt, Human
acucuccccccgacagaagc

SEQ ID NO: 800678 - RNA, 22 nt, Human
agaagccguuucuaugcauaug

SEQ ID NO: 800679 - RNA, 20 nt, Human
agacgaacaggcgguggaug

SEQ ID NO: 800680 - RNA, 18 nt, Human
agcagugggugcacacuc

SEQ ID NO: 800681 - RNA, 19 nt, Human
agcccggagcgccgagcgg

SEQ ID NO: 800682 - RNA, 26 nt, Human
aggaauugggccaggguuccagaggg

SEQ ID NO: 800683 - RNA, 24 nt, Human
aggacagaggcucuggaugcucug

SEQ ID NO: 800684 - RNA, 18 nt, Human
aggcaggcacuugucgga

SEQ ID NO: 800685 - RNA, 20 nt, Human
aggcaucuucugaggguggg

SEQ ID NO: 800686 - RNA, 19 nt, Human
aggcuugguggccaugacc

SEQ ID NO: 800687 - RNA, 23 nt, Human
agggaccagugggagggcccagg

SEQ ID NO: 800688 - RNA, 22 nt, Human
aggggugaggggugagggcugg

SEQ ID NO: 800689 - RNA, 25 nt, Human
augaccucaaacaguguuuuaagaa

SEQ ID NO: 800690 - RNA, 20 nt, Human
caaggccccgagcaaccucu

SEQ ID NO: 800691 - RNA, 22 nt, Human
cacaguccuccaaggccgcacu

SEQ ID NO: 800692 - RNA, 22 nt, Human
caccaggcuccuccgggucccc

SEQ ID NO: 800693 - RNA, 25 nt, Human
cacccugccugccuagaggaccacu

SEQ ID NO: 800694 - RNA, 22 nt, Human
caccgcaacagcagaggcgcag

SEQ ID NO: 800695 - RNA, 21 nt, Human
caccugcccguagcggggcag

SEQ ID NO: 800696 - RNA, 19 nt, Human
cacugacacccagcgcucc

SEQ ID NO: 800697 - RNA, 20 nt, Human
cagcaugcguggcugcuggg

SEQ ID NO: 800698 - RNA, 19 nt, Human
cagcgcgagcagaagaucu

SEQ ID NO: 800699 - RNA, 19 nt, Human
cagcuguggagcugcugga

SEQ ID NO: 800700 - RNA, 22 nt, Human
caguguuuuaagaauacuucuc

SEQ ID NO: 800701 - RNA, 25 nt, Human
ccaccuccaucacccgccccgauuc

SEQ ID NO: 800702 - RNA, 22 nt, Human
ccacugggucagcuucccgcau

SEQ ID NO: 800703 - RNA, 20 nt, Human
ccagagggugcagagggaag

SEQ ID NO: 800704 - RNA, 18 nt, Human
ccaggagcacccugccug

SEQ ID NO: 800705 - RNA, 22 nt, Human
ccaggcuccuccggguccccug

SEQ ID NO: 800706 - RNA, 19 nt, Human
ccaucgcgggucuuggcug

SEQ ID NO: 800707 - RNA, 21 nt, Human
cccaaggccccgagcaaccuc

SEQ ID NO: 800708 - RNA, 22 nt, Human
cccacagcugcggcaguggugc

SEQ ID NO: 800709 - RNA, 21 nt, Human
cccagcaugcagcucucuggc

SEQ ID NO: 800710 - RNA, 23 nt, Human
cccauagccccagcagaucuccg

SEQ ID NO: 800711 - RNA, 18 nt, Human
ccccagcagaucuccgag

SEQ ID NO: 800712 - RNA, 24 nt, Human
ccccugcagcagcggcagcggccu

SEQ ID NO: 800713 - RNA, 20 nt, Human
cccgagcaaccucugccugc

SEQ ID NO: 800714 - RNA, 19 nt, Human
cccggguggguuggggcug

SEQ ID NO: 800715 - RNA, 21 nt, Human
cccguagcggggcagcggugc

SEQ ID NO: 800716 - RNA, 22 nt, Human
ccgcaacagcagaggcgcagag

SEQ ID NO: 800717 - RNA, 19 nt, Human
ccgcaucuccccacuccaa

SEQ ID NO: 800718 - RNA, 20 nt, Human
ccgggcggcccucgcccucc

SEQ ID NO: 800719 - RNA, 20 nt, Human
ccuccaucacccgccccgag

SEQ ID NO: 800720 - RNA, 22 nt, Human
ccugaggcgccucgugagccgg

SEQ ID NO: 800721 - RNA, 26 nt, Human
ccugcaaccccagccucuccuugcag

SEQ ID NO: 800722 - RNA, 19 nt, Human
ccugcagcguggccccacc

SEQ ID NO: 800723 - RNA, 22 nt, Human
ccuggggguuccuggcccgggu

SEQ ID NO: 800724 - RNA, 20 nt, Human
cgacccaaggccccgagcaa

SEQ ID NO: 800725 - RNA, 22 nt, Human
cgacccaaggccccgagcaacc

SEQ ID NO: 800726 - RNA, 24 nt, Human
cgacccaaggccccgagcaaccuc

SEQ ID NO: 800727 - RNA, 21 nt, Human
cgagcagaagaucuucccaca

SEQ ID NO: 800728 - RNA, 27 nt, Human
cgagcgggcggcgggcaggugcgcggg

SEQ ID NO: 800729 - RNA, 22 nt, Human
cgccucuggccccaucuugucu

SEQ ID NO: 800730 - RNA, 24 nt, Human
cgcgagcagaagaucuucccacag

SEQ ID NO: 800731 - RNA, 21 nt, Human
cgcucgggcgcacggacagac

SEQ ID NO: 800732 - RNA, 19 nt, Human
cgggcggcccucgcccucc

SEQ ID NO: 800733 - RNA, 18 nt, Human
cuaugcauauguacucca

SEQ ID NO: 800734 - RNA, 20 nt, Human
cuaugcauauguacuccacc

SEQ ID NO: 800735 - RNA, 19 nt, Human
cuccaaaaauaaaacugca

SEQ ID NO: 800736 - RNA, 21 nt, Human
cuccugcugaccugcaacccc

SEQ ID NO: 800737 - RNA, 25 nt, Human
cugaggagcaggacccagcugugga

SEQ ID NO: 800738 - RNA, 20 nt, Human
cugauggggagaauggguag

SEQ ID NO: 800739 - RNA, 22 nt, Human
cugcuggggccgccucuggccc

SEQ ID NO: 800740 - RNA, 20 nt, Human
gaagugguagcugagcuggu

SEQ ID NO: 800741 - RNA, 22 nt, Human
gagaauggguagccugcauuug

SEQ ID NO: 800742 - RNA, 20 nt, Human
gagcccugcugugccaaaga

SEQ ID NO: 800743 - RNA, 18 nt, Human
gagccggggggcucccag

SEQ ID NO: 800744 - RNA, 18 nt, Human
gcagcagcggcagcggcc

SEQ ID NO: 800745 - RNA, 23 nt, Human
gcagcuggucagccacaccugaa

SEQ ID NO: 800746 - RNA, 18 nt, Human
gcccggcugaggcgcggg

SEQ ID NO: 800747 - RNA, 19 nt, Human
gcccggcugaggcgcgggg

SEQ ID NO: 800748 - RNA, 21 nt, Human
gccugcagcguggccccaccu

SEQ ID NO: 800749 - RNA, 21 nt, Human
gcgaagcccggagcgccgagc

SEQ ID NO: 800750 - RNA, 23 nt, Human
gcgcggcccugaguaugcucugc

SEQ ID NO: 800751 - RNA, 19 nt, Human
gcgcggggcggacgcggag

SEQ ID NO: 800752 - RNA, 24 nt, Human
gcggaggcacggccggagcccccg

SEQ ID NO: 800753 - RNA, 21 nt, Human
gcgugggcaggacagaggcuc

SEQ ID NO: 800754 - RNA, 20 nt, Human
gcugaccugcaaccccagcc

SEQ ID NO: 800755 - RNA, 22 nt, Human
gcugaccugcaaccccagccuc

SEQ ID NO: 800756 - RNA, 18 nt, Human
ggacccccaugccaucag

SEQ ID NO: 800757 - RNA, 24 nt, Human
ggccaugaccucaaacaguguuuu

SEQ ID NO: 800758 - RNA, 21 nt, Human
ggcccggguggguuggggcug

SEQ ID NO: 800759 - RNA, 20 nt, Human
ggcuuugggcucccgcccgu

SEQ ID NO: 800760 - RNA, 21 nt, Human
gggaagugguagcugagcugg

SEQ ID NO: 800761 - RNA, 23 nt, Human
gggcagcggugcugagugcgagg

SEQ ID NO: 800762 - RNA, 20 nt, Human
gggcucccagcaugcagcuc

SEQ ID NO: 800763 - RNA, 20 nt, Human
ggguuccagagggugcagag

SEQ ID NO: 800764 - RNA, 18 nt, Human
gugcagagggaaggggaa

SEQ ID NO: 800765 - RNA, 19 nt, Human
guggaguggcccuugcucc

SEQ ID NO: 800766 - RNA, 20 nt, Human
guggccccgggcguccuggc

SEQ ID NO: 800767 - RNA, 26 nt, Human
gugggcagacaccaggagcacccugc

SEQ ID NO: 800768 - RNA, 20 nt, Human
uagcagugggugcacacucc

SEQ ID NO: 800769 - RNA, 20 nt, Human
ucacaggccggccuugucgc

SEQ ID NO: 800770 - RNA, 24 nt, Human
ucagaggaugacagggucuccugg

SEQ ID NO: 800771 - RNA, 23 nt, Human
ucagcaaggggacaguggugggc

SEQ ID NO: 800772 - RNA, 21 nt, Human
ucagccacaccugaaaugcag

SEQ ID NO: 800773 - RNA, 18 nt, Human
uccaagaagaaaugagau

SEQ ID NO: 800774 - RNA, 19 nt, Human
uccaccaguaaacaguaau

SEQ ID NO: 800775 - RNA, 24 nt, Human
ucccacagcugcggcaguggugcu

SEQ ID NO: 800776 - RNA, 20 nt, Human
ucccaggccacucugggguc

SEQ ID NO: 800777 - RNA, 20 nt, Human
uccccugcugggcaaagcug

SEQ ID NO: 800778 - RNA, 21 nt, Human
ucccgcaucuccccacuccaa

SEQ ID NO: 800779 - RNA, 26 nt, Human
uccgcagagucugggugagcggaccc

SEQ ID NO: 800780 - RNA, 18 nt, Human
uccgccaggcacccugcc

SEQ ID NO: 800781 - RNA, 23 nt, Human
ucucaggggcccugucgcuggcc

SEQ ID NO: 800782 - RNA, 21 nt, Human
ucugagggugggggcgccucc

SEQ ID NO: 800783 - RNA, 18 nt, Human
ucugcaagcggcgcgccg

SEQ ID NO: 800784 - RNA, 25 nt, Human
ugaccugcaaccccagccucuccuu

SEQ ID NO: 800785 - RNA, 22 nt, Human
ugaccuuccuuaacuuuuccuu

SEQ ID NO: 800786 - RNA, 22 nt, Human
ugaggaaggauggugaggggug

SEQ ID NO: 800787 - RNA, 19 nt, Human
ugaggagcaggacccagcu

SEQ ID NO: 800788 - RNA, 20 nt, Human
ugaggagguguccgcugggg

SEQ ID NO: 800789 - RNA, 22 nt, Human
ugaggagguguccgcuggggcc

SEQ ID NO: 800790 - RNA, 21 nt, Human
ugaggcaggcacuugucggaa

SEQ ID NO: 800791 - RNA, 24 nt, Human
ugaggggugaggggugagggcugg

SEQ ID NO: 800792 - RNA, 22 nt, Human
ugagggugggggcgccuccucc

SEQ ID NO: 800793 - RNA, 21 nt, Human
ugcaagcggcgcgccgggcag

SEQ ID NO: 800794 - RNA, 23 nt, Human
ugcaagcggcgcgccgggcagac

SEQ ID NO: 800795 - RNA, 18 nt, Human
ugccaaagagccugugga

SEQ ID NO: 800796 - RNA, 21 nt, Human
ugcggugucagugccuggucg

SEQ ID NO: 800797 - RNA, 19 nt, Human
ugcuccggcuuccagauuc

SEQ ID NO: 800798 - RNA, 19 nt, Human
ugcucuggaggucugggug

SEQ ID NO: 800799 - RNA, 18 nt, Human
ugcuggagcccgacaggg

SEQ ID NO: 800800 - RNA, 21 nt, Human
ugcugggcaaagcugaccucu

SEQ ID NO: 800801 - RNA, 20 nt, Human
uggaggucugggugccccug

SEQ ID NO: 800802 - RNA, 18 nt, Human
uggcaccacgucacaggc

SEQ ID NO: 800803 - RNA, 18 nt, Human
uggccaugaccucaaaca

SEQ ID NO: 800804 - RNA, 19 nt, Human
uggccccugcagccggccc

SEQ ID NO: 800805 - RNA, 23 nt, Human
uggccucuggcuccugcugaccu

SEQ ID NO: 800806 - RNA, 19 nt, Human
ugggaaccugaggugugag

SEQ ID NO: 800807 - RNA, 23 nt, Human
ugggaaccugaggugugaggcag

SEQ ID NO: 800808 - RNA, 19 nt, Human
ugggggcgccuccuccugu

SEQ ID NO: 800809 - RNA, 18 nt, Human
ugggugcacacucggacc

SEQ ID NO: 800810 - RNA, 19 nt, Human
uggguuggggcugccccug

SEQ ID NO: 800811 - RNA, 19 nt, Human
uggucggacccccaugccu

SEQ ID NO: 800812 - RNA, 24 nt, Human
ugguggccccgggcguccuggcug

SEQ ID NO: 800813 - RNA, 20 nt, Human
ugugaagccugagauuuaag

SEQ ID NO: 800814 - RNA, 24 nt, Human
uuccuuaacuuuuccuugucgucu

SEQ ID NO: 800815 - RNA, 25 nt, Human
uugguggccaugaccucaaacagug

SEQ ID NO: 800816 - RNA, 24 nt, Human
uugucggaagugggggcuuugggc

SEQ ID NO: 800817 - RNA, 23 nt, Human
uuuuccuugucgucuguuucagg

SEQ ID NO: 800818 - RNA, 19 nt, Human
aaaacgggaaaugggaaaa

SEQ ID NO: 800819 - RNA, 24 nt, Human
aaaauauuuccaucccccuacccc

SEQ ID NO: 800820 - RNA, 22 nt, Human
aaacaguaucccugggagccca

SEQ ID NO: 800821 - RNA, 20 nt, Human
aaagaagccuguuaaccccu

SEQ ID NO: 800822 - RNA, 19 nt, Human
aagcagacacccucugaug

SEQ ID NO: 800823 - RNA, 23 nt, Human
aagcagacacccucugaugccca

SEQ ID NO: 800824 - RNA, 24 nt, Human
aaguaggcagcuuaaaaaaucagg

SEQ ID NO: 800825 - RNA, 22 nt, Human
acagucuacuccuugagggacc

SEQ ID NO: 800826 - RNA, 27 nt, Human
acucuguugcccaggcuggagugcacu

SEQ ID NO: 800827 - RNA, 21 nt, Human
agacaaaagcagagcaacagc

SEQ ID NO: 800828 - RNA, 20 nt, Human
agcaagagggaccagaucua

SEQ ID NO: 800829 - RNA, 18 nt, Human
agcacagccacacccaca

SEQ ID NO: 800830 - RNA, 24 nt, Human
agccaaguugaaaaauuaaaaaau

SEQ ID NO: 800831 - RNA, 24 nt, Human
aggggagaugccacucacccuggg

SEQ ID NO: 800832 - RNA, 21 nt, Human
agugcacuggugcgaucucag

SEQ ID NO: 800833 - RNA, 19 nt, Human
aguugcuaaaaaacaguaa

SEQ ID NO: 800834 - RNA, 20 nt, Human
aguugcuaaaaaacaguaac

SEQ ID NO: 800835 - RNA, 19 nt, Human
auggugauggacagaagcu

SEQ ID NO: 800836 - RNA, 23 nt, Human
augugcauguauguacuugugug

SEQ ID NO: 800837 - RNA, 19 nt, Human
auuuccaucccccuacccc

SEQ ID NO: 800838 - RNA, 21 nt, Human
cacaccugcuuuccacacuga

SEQ ID NO: 800839 - RNA, 24 nt, Human
cacucuguugcccaggcuggagug

SEQ ID NO: 800840 - RNA, 23 nt, Human
cacugcaagcucugccuucuggg

SEQ ID NO: 800841 - RNA, 21 nt, Human
cagacgaaaacaacccacgug

SEQ ID NO: 800842 - RNA, 24 nt, Human
cagagucucacucuguugcccagg

SEQ ID NO: 800843 - RNA, 19 nt, Human
cagccccggauuucagucu

SEQ ID NO: 800844 - RNA, 18 nt, Human
cagcggaggggccugccu

SEQ ID NO: 800845 - RNA, 22 nt, Human
cagcgugggacguguuggugcu

SEQ ID NO: 800846 - RNA, 24 nt, Human
caugugcauguauguacuugugug

SEQ ID NO: 800847 - RNA, 24 nt, Human
ccaagcacagccacacccacagcc

SEQ ID NO: 800848 - RNA, 18 nt, Human
ccaccacgugagcaggau

SEQ ID NO: 800849 - RNA, 21 nt, Human
ccagccacaaccacagcagga

SEQ ID NO: 800850 - RNA, 24 nt, Human
cccacaugcacacuguucucaccu

SEQ ID NO: 800851 - RNA, 18 nt, Human
ccucugugagacagcaag

SEQ ID NO: 800852 - RNA, 23 nt, Human
ccugcagcagccccggauuucag

SEQ ID NO: 800853 - RNA, 23 nt, Human
ccugcagcagccccggauuucag

SEQ ID NO: 800854 - RNA, 21 nt, Human
ccuggacagcggccugugggg

SEQ ID NO: 800855 - RNA, 19 nt, Human
cucacaguaaaaaguaaaa

SEQ ID NO: 800856 - RNA, 22 nt, Human
cucacaugaagucagaguuuac

SEQ ID NO: 800857 - RNA, 24 nt, Human
cucacucuguugcccaggcuggag

SEQ ID NO: 800858 - RNA, 19 nt, Human
cucacugcaagcucugccu

SEQ ID NO: 800859 - RNA, 25 nt, Human
cuccauccaggucuguucuuccuuc

SEQ ID NO: 800860 - RNA, 19 nt, Human
cugcaagcucugccuucug

SEQ ID NO: 800861 - RNA, 18 nt, Human
cugguacccuaccucaca

SEQ ID NO: 800862 - RNA, 20 nt, Human
cugugcucaggguuggcgcu

SEQ ID NO: 800863 - RNA, 19 nt, Human
cuguugcccaggcuggagu

SEQ ID NO: 800864 - RNA, 21 nt, Human
cuuccaugauuccaacccuag

SEQ ID NO: 800865 - RNA, 23 nt, Human
gaccccgucuccuugaauggcac

SEQ ID NO: 800866 - RNA, 22 nt, Human
gagccagcggaggggccugccu

SEQ ID NO: 800867 - RNA, 24 nt, Human
gagcccuugacaccauugggggau

SEQ ID NO: 800868 - RNA, 22 nt, Human
gcaugucuguuaggcacaacua

SEQ ID NO: 800869 - RNA, 18 nt, Human
gccacaaccaccaaaguu

SEQ ID NO: 800870 - RNA, 21 nt, Human
gccacaaccaccaaaguuguu

SEQ ID NO: 800871 - RNA, 18 nt, Human
gccacacccacagcccug

SEQ ID NO: 800872 - RNA, 20 nt, Human
gcccaggcuggagugcacug

SEQ ID NO: 800873 - RNA, 22 nt, Human
gcccaggcuggagugcacuggu

SEQ ID NO: 800874 - RNA, 18 nt, Human
gcugaccaaugugggauc

SEQ ID NO: 800875 - RNA, 24 nt, Human
gcugaccaaugugggauccugcac

SEQ ID NO: 800876 - RNA, 23 nt, Human
ggaaaugggaaaaauaggaagaa

SEQ ID NO: 800877 - RNA, 18 nt, Human
ggacuagaaacuggggug

SEQ ID NO: 800878 - RNA, 20 nt, Human
ggagagaaaauauuuccauc

SEQ ID NO: 800879 - RNA, 19 nt, Human
ggaggcugguuuaggguca

SEQ ID NO: 800880 - RNA, 21 nt, Human
ggccaagcagacacccucuga

SEQ ID NO: 800881 - RNA, 20 nt, Human
gggaaaugggaaaaauagga

SEQ ID NO: 800882 - RNA, 19 nt, Human
gggacauuguuauaaaaac

SEQ ID NO: 800883 - RNA, 25 nt, Human
gugagacagcaaguaccgugacuaa

SEQ ID NO: 800884 - RNA, 18 nt, Human
guggaugucucccuacag

SEQ ID NO: 800885 - RNA, 22 nt, Human
uaaaaccuagggacauuguuau

SEQ ID NO: 800886 - RNA, 25 nt, Human
uaaaaguaggcagcuuaaaaaauca

SEQ ID NO: 800887 - RNA, 23 nt, Human
uaaacaguaucccugggagccca

SEQ ID NO: 800888 - RNA, 24 nt, Human
uaaacaguaucccugggagcccau

SEQ ID NO: 800889 - RNA, 23 nt, Human
uaccgugacuaacugguacccua

SEQ ID NO: 800890 - RNA, 22 nt, Human
uaccuaccuaccuagacagagu

SEQ ID NO: 800891 - RNA, 18 nt, Human
uaccucacacacuugaca

SEQ ID NO: 800892 - RNA, 19 nt, Human
uagcaggaauggcucccag

SEQ ID NO: 800893 - RNA, 24 nt, Human
uaggcacaacuagccguuucacaa

SEQ ID NO: 800894 - RNA, 22 nt, Human
uauauaaagacaaaagcagagc

SEQ ID NO: 800895 - RNA, 19 nt, Human
uauugguuuugguuuuccc

SEQ ID NO: 800896 - RNA, 24 nt, Human
uauugguuuugguuuucccggucg

SEQ ID NO: 800897 - RNA, 19 nt, Human
ucacaaguggucccagcua

SEQ ID NO: 800898 - RNA, 23 nt, Human
ucacugcaagcucugccuucugg

SEQ ID NO: 800899 - RNA, 24 nt, Human
ucacugcaagcucugccuucuggg

SEQ ID NO: 800900 - RNA, 21 nt, Human
ucagccaaguugaaaaauuaa

SEQ ID NO: 800901 - RNA, 22 nt, Human
uccaaggucacuuucacgggug

SEQ ID NO: 800902 - RNA, 23 nt, Human
uccaugauuccaacccuagauuu

SEQ ID NO: 800903 - RNA, 23 nt, Human
ucccagugcugugggggccaagc

SEQ ID NO: 800904 - RNA, 19 nt, Human
ucccugggagcccauuacc

SEQ ID NO: 800905 - RNA, 23 nt, Human
ucucacucuguugcccaggcugg

SEQ ID NO: 800906 - RNA, 24 nt, Human
ucucacucuguugcccaggcugga

SEQ ID NO: 800907 - RNA, 26 nt, Human
ucucacucuguugcccaggcuggagu

SEQ ID NO: 800908 - RNA, 19 nt, Human
ucuccuggccaaagaagcc

SEQ ID NO: 800909 - RNA, 25 nt, Human
ucucugacugucccagugcuguggg

SEQ ID NO: 800910 - RNA, 21 nt, Human
ucucuugggccaccagcuugg

SEQ ID NO: 800911 - RNA, 21 nt, Human
ucugacugucccagugcugug

SEQ ID NO: 800912 - RNA, 19 nt, Human
ucugaugaugaggggagau

SEQ ID NO: 800913 - RNA, 18 nt, Human
ucuguugcccaggcugga

SEQ ID NO: 800914 - RNA, 19 nt, Human
ugaacccugcagcagcccc

SEQ ID NO: 800915 - RNA, 22 nt, Human
ugacaggugagaagcagaggcu

SEQ ID NO: 800916 - RNA, 21 nt, Human
ugacaugcaauuccaagaaga

SEQ ID NO: 800917 - RNA, 26 nt, Human
ugacugagccccucacccuugcagcc

SEQ ID NO: 800918 - RNA, 19 nt, Human
ugagccaaccuggacagcg

SEQ ID NO: 800919 - RNA, 20 nt, Human
ugagccccucacccuugcag

SEQ ID NO: 800920 - RNA, 20 nt, Human
ugaggagcccuugacaccau

SEQ ID NO: 800921 - RNA, 23 nt, Human
ugagguauuccuggacugcaaag

SEQ ID NO: 800922 - RNA, 25 nt, Human
ugagguauuccuggacugcaaaggg

SEQ ID NO: 800923 - RNA, 22 nt, Human
ugcacuggugcgaucucagcuc

SEQ ID NO: 800924 - RNA, 20 nt, Human
ugccaugaccugaagagagc

SEQ ID NO: 800925 - RNA, 19 nt, Human
ugcccaggcuggagugcac

SEQ ID NO: 800926 - RNA, 24 nt, Human
ugcccaggcuggagugcacuggug

SEQ ID NO: 800927 - RNA, 25 nt, Human
ugcucauucaucaagcaucuaucua

SEQ ID NO: 800928 - RNA, 20 nt, Human
uggaggugaacccugcagca

SEQ ID NO: 800929 - RNA, 18 nt, Human
uggagugcacuggugcga

SEQ ID NO: 800930 - RNA, 24 nt, Human
uggagugcacuggugcgaucucag

SEQ ID NO: 800931 - RNA, 22 nt, Human
uggcacauaguaagugcgcagg

SEQ ID NO: 800932 - RNA, 19 nt, Human
uggcaggcacucggcaagu

SEQ ID NO: 800933 - RNA, 20 nt, Human
uggcauuuugaggagcccuu

SEQ ID NO: 800934 - RNA, 20 nt, Human
uggccaggguggccauauca

SEQ ID NO: 800935 - RNA, 19 nt, Human
ugggaaaaauaggaagaaa

SEQ ID NO: 800936 - RNA, 27 nt, Human
uggggugguggggggcaaugacaccuc

SEQ ID NO: 800937 - RNA, 24 nt, Human
uggugcgaucucagcucacugcaa

SEQ ID NO: 800938 - RNA, 18 nt, Human
uguacaaaccuaaggguc

SEQ ID NO: 800939 - RNA, 23 nt, Human
ugucagcugccuacuugcugcuu

SEQ ID NO: 800940 - RNA, 19 nt, Human
ugucauguuuucccugaca

SEQ ID NO: 800941 - RNA, 25 nt, Human
ugugugcgcgcaugugcauguaugu

SEQ ID NO: 800942 - RNA, 22 nt, Human
ugugugugcgcgcaugugcaug

SEQ ID NO: 800943 - RNA, 20 nt, Human
ugugugugugcgcgcaugug

SEQ ID NO: 800944 - RNA, 20 nt, Human
uguucacacccacaugcaca

SEQ ID NO: 800945 - RNA, 18 nt, Human
uuaccauuuaugggacag

SEQ ID NO: 800946 - RNA, 22 nt, Human
uuaccauuuaugggacaguguc

SEQ ID NO: 800947 - RNA, 18 nt, Human
uuagggucauucaacagg

SEQ ID NO: 800948 - RNA, 20 nt, Human
uugaacucgucacuacccug

SEQ ID NO: 800949 - RNA, 24 nt, Human
uugacaggugagaagcagaggcuc

SEQ ID NO: 800950 - RNA, 18 nt, Human
uugcccaggcuggagugc

SEQ ID NO: 800951 - RNA, 23 nt, Human
uugcccaggcuggagugcacugg

SEQ ID NO: 800952 - RNA, 24 nt, Human
uugcccaggcuggagugcacuggu

SEQ ID NO: 800953 - RNA, 22 nt, Human
uugcuuccaugauuccaacccu

SEQ ID NO: 800954 - RNA, 20 nt, Human
uugguuccagcuguggccag

SEQ ID NO: 800955 - RNA, 20 nt, Human
uuuaagcaccagcgugggac

SEQ ID NO: 800956 - RNA, 22 nt, Human
uuugccaugaccugaagagagc

SEQ ID NO: 800957 - RNA, 22 nt, Human
uuuuccuguugauggggaccag

SEQ ID NO: 800958 - RNA, 24 nt, Human
aaaaaaaaaaagauaacucaaagg

SEQ ID NO: 800959 - RNA, 22 nt, Human
aaaaaaaaaagauaacucaaag

SEQ ID NO: 800960 - RNA, 21 nt, Human
aaaaacacaagccuaccuuuu

SEQ ID NO: 800961 - RNA, 21 nt, Human
aaaaacacaagccuaccuuuu

SEQ ID NO: 800962 - RNA, 22 nt, Human
aaaaagcaaaaaacaaacaaac

SEQ ID NO: 800963 - RNA, 21 nt, Human
aaaacaaacaaacaaacaaac

SEQ ID NO: 800964 - RNA, 22 nt, Human
aaaaccagggugugguuaagug

SEQ ID NO: 800965 - RNA, 23 nt, Human
aaacaaacaaacaaaaaaccuca

SEQ ID NO: 800966 - RNA, 26 nt, Human
aaacaaacaaacaaacaaaaaaccuc

SEQ ID NO: 800967 - RNA, 21 nt, Human
aaacaucccucaguccugggg

SEQ ID NO: 800968 - RNA, 23 nt, Human
aaacggccagcugccauuagaac

SEQ ID NO: 800969 - RNA, 24 nt, Human
aaagugccgggaucacaggcguga

SEQ ID NO: 800970 - RNA, 24 nt, Human
aaagugcugggacaagaggcauga

SEQ ID NO: 800971 - RNA, 23 nt, Human
aacacagaaaggcgggucccauc

SEQ ID NO: 800972 - RNA, 23 nt, Human
aacacagaaaggcgggucccauc

SEQ ID NO: 800973 - RNA, 22 nt, Human
aacacagcccccucccagcaaa

SEQ ID NO: 800974 - RNA, 19 nt, Human
aacacggugaaaccucauc

SEQ ID NO: 800975 - RNA, 20 nt, Human
aacacggugaaaccucaucu

SEQ ID NO: 800976 - RNA, 21 nt, Human
aacacggugaaaccucaucuc

SEQ ID NO: 800977 - RNA, 26 nt, Human
aacagagccacccuccucugcccccu

SEQ ID NO: 800978 - RNA, 24 nt, Human
aacagagugagacuuugucucaaa

SEQ ID NO: 800979 - RNA, 24 nt, Human
aaccugggcaacacagugagacuc

SEQ ID NO: 800980 - RNA, 26 nt, Human
aacuauuuuuuuuuuucuggggggcc

SEQ ID NO: 800981 - RNA, 19 nt, Human
aacuggcuccagcucugcc

SEQ ID NO: 800982 - RNA, 19 nt, Human
aacuggcuccagcucugcc

SEQ ID NO: 800983 - RNA, 23 nt, Human
aagaaagccacccagagaauuca

SEQ ID NO: 800984 - RNA, 23 nt, Human
aagacagaggagcggcacagcuc

SEQ ID NO: 800985 - RNA, 23 nt, Human
aagacagaggagcggcacagcuc

SEQ ID NO: 800986 - RNA, 18 nt, Human
aagagcacagggcagaac

SEQ ID NO: 800987 - RNA, 18 nt, Human
aagagcacagggcagaac

SEQ ID NO: 800988 - RNA, 19 nt, Human
aagaggcaugagccaccau

SEQ ID NO: 800989 - RNA, 18 nt, Human
aagaggccugagaccugc

SEQ ID NO: 800990 - RNA, 18 nt, Human
aagaggccugagaccugc

SEQ ID NO: 800991 - RNA, 19 nt, Human
aagcagccucccccuccaa

SEQ ID NO: 800992 - RNA, 18 nt, Human
aagcaggaggaucacuug

SEQ ID NO: 800993 - RNA, 24 nt, Human
aagcaggaggaucacuugugccca

SEQ ID NO: 800994 - RNA, 21 nt, Human
aagcaggguccuucagacagc

SEQ ID NO: 800995 - RNA, 21 nt, Human
aagcaggguccuucagacagc

SEQ ID NO: 800996 - RNA, 20 nt, Human
aagccacccagagaauucag

SEQ ID NO: 800997 - RNA, 20 nt, Human
aagccacccagagaauucag

SEQ ID NO: 800998 - RNA, 21 nt, Human
aagcccgccuccccggccccg

SEQ ID NO: 800999 - RNA, 21 nt, Human
aagcgcccaccaccgcgcccc

SEQ ID NO: 801000 - RNA, 25 nt, Human
aagcuggguucaaauccuggguccu

SEQ ID NO: 801001 - RNA, 25 nt, Human
aagcuggguucaaauccuggguccu

SEQ ID NO: 801002 - RNA, 26 nt, Human
aaguaacugggaccauaggugcaugc

SEQ ID NO: 801003 - RNA, 26 nt, Human
aagugccgggaucacaggcgugagcc

SEQ ID NO: 801004 - RNA, 25 nt, Human
aauaacugaaaaagcaaaaaacaaa

SEQ ID NO: 801005 - RNA, 24 nt, Human
acaaacaaacaaacaaacaaaaaa

SEQ ID NO: 801006 - RNA, 19 nt, Human
acaacacagcccccuccca

SEQ ID NO: 801007 - RNA, 21 nt, Human
acaagacagaggagcggcaca

SEQ ID NO: 801008 - RNA, 22 nt, Human
acaagacagaggagcggcacag

SEQ ID NO: 801009 - RNA, 22 nt, Human
acaagacagaggagcggcacag

SEQ ID NO: 801010 - RNA, 18 nt, Human
acaaugggaggcugagcc

SEQ ID NO: 801011 - RNA, 24 nt, Human
acagagugagacuuugucucaaaa

SEQ ID NO: 801012 - RNA, 20 nt, Human
acagcuaggagacccaagca

SEQ ID NO: 801013 - RNA, 24 nt, Human
acagcucacugcgaccucugccuc

SEQ ID NO: 801014 - RNA, 18 nt, Human
acaggguuuuaccacguu

SEQ ID NO: 801015 - RNA, 20 nt, Human
acaggguuuuaccacguugg

SEQ ID NO: 801016 - RNA, 24 nt, Human
acaggguuuuaccacguugguuag

SEQ ID NO: 801017 - RNA, 18 nt, Human
accacguugguuaggcug

SEQ ID NO: 801018 - RNA, 19 nt, Human
accauaggugcaugccacc

SEQ ID NO: 801019 - RNA, 24 nt, Human
acccaagcagccucccccuccaac

SEQ ID NO: 801020 - RNA, 19 nt, Human
accucugccuccugggcac

SEQ ID NO: 801021 - RNA, 22 nt, Human
accugcuccccacccaggcacc

SEQ ID NO: 801022 - RNA, 22 nt, Human
accugcuccccacccaggcacc

SEQ ID NO: 801023 - RNA, 23 nt, Human
accugcuuugggaugagagggag

SEQ ID NO: 801024 - RNA, 23 nt, Human
accugcuuugggaugagagggag

SEQ ID NO: 801025 - RNA, 20 nt, Human
accuugggaggccgaggcag

SEQ ID NO: 801026 - RNA, 24 nt, Human
acuauauugcccaagcuggucucg

SEQ ID NO: 801027 - RNA, 25 nt, Human
acuauauugcccaagcuggucucga

SEQ ID NO: 801028 - RNA, 19 nt, Human
acucaggggagaugucagg

SEQ ID NO: 801029 - RNA, 22 nt, Human
acucagugacaacacuggccug

SEQ ID NO: 801030 - RNA, 22 nt, Human
acucagugacaacacuggccug

SEQ ID NO: 801031 - RNA, 18 nt, Human
acucugucacccaggcug

SEQ ID NO: 801032 - RNA, 25 nt, Human
acucugucacccaggcugaagugca

SEQ ID NO: 801033 - RNA, 25 nt, Human
acugaaaaacacaagccuaccuugg

SEQ ID NO: 801034 - RNA, 25 nt, Human
acugaaaaacacaagccuaccuugg

SEQ ID NO: 801035 - RNA, 23 nt, Human
acugcaaguggagcaccaccagg

SEQ ID NO: 801036 - RNA, 23 nt, Human
acugcaaguggagcaccaccagg

SEQ ID NO: 801037 - RNA, 24 nt, Human
acugcacuccagccuuggcaacag

SEQ ID NO: 801038 - RNA, 24 nt, Human
acugcacuccagccuuggcaacag

SEQ ID NO: 801039 - RNA, 19 nt, Human
acugcacuccagccuuggg

SEQ ID NO: 801040 - RNA, 19 nt, Human
acuguguugcccaggaugg

SEQ ID NO: 801041 - RNA, 28 nt, Human
acuuugucucaaaaaaaaaaaaaaaaaa

SEQ ID NO: 801042 - RNA, 21 nt, Human
agaaagcugagaacgagauca

SEQ ID NO: 801043 - RNA, 20 nt, Human
agaaauggauaaguaauaca

SEQ ID NO: 801044 - RNA, 23 nt, Human
agaacaaaaagagauggacggag

SEQ ID NO: 801045 - RNA, 20 nt, Human
agaacacaacacagaaaggc

SEQ ID NO: 801046 - RNA, 20 nt, Human
agaacacaacacagaaaggc

SEQ ID NO: 801047 - RNA, 20 nt, Human
agaacacaacacagaaaggc

SEQ ID NO: 801048 - RNA, 20 nt, Human
agaacacaacacagaaaggc

SEQ ID NO: 801049 - RNA, 21 nt, Human
agacaacugaggccagaaaug

SEQ ID NO: 801050 - RNA, 23 nt, Human
agacagagccucgcucuguugca

SEQ ID NO: 801051 - RNA, 22 nt, Human
agacgacacgggacuccaagcc

SEQ ID NO: 801052 - RNA, 22 nt, Human
agacgacacgggacuccaagcc

SEQ ID NO: 801053 - RNA, 26 nt, Human
agagccacccuccucugcccccacuu

SEQ ID NO: 801054 - RNA, 26 nt, Human
agagccacccuccucugcccccacuu

SEQ ID NO: 801055 - RNA, 23 nt, Human
agagccacccuccucugcccccu

SEQ ID NO: 801056 - RNA, 21 nt, Human
agcaaagacacccagaaggga

SEQ ID NO: 801057 - RNA, 24 nt, Human
agcaguucuccugccacagccucc

SEQ ID NO: 801058 - RNA, 23 nt, Human
agccaggcauggugaugcacgcc

SEQ ID NO: 801059 - RNA, 18 nt, Human
agccuccugaauagcugg

SEQ ID NO: 801060 - RNA, 23 nt, Human
agccuuggcaacagagugagacu

SEQ ID NO: 801061 - RNA, 24 nt, Human
agccuuggcaacagagugagacuu

SEQ ID NO: 801062 - RNA, 24 nt, Human
agcggugcagccucauccugcccu

SEQ ID NO: 801063 - RNA, 24 nt, Human
agcggugcagccucauccugcccu

SEQ ID NO: 801064 - RNA, 24 nt, Human
agcuaauugggaggcugagguggg

SEQ ID NO: 801065 - RNA, 23 nt, Human
agcuaggagacccaagcagccuc

SEQ ID NO: 801066 - RNA, 23 nt, Human
agcugggcgugauggugugcgcc

SEQ ID NO: 801067 - RNA, 24 nt, Human
agcuggucucgaacuccugagcuc

SEQ ID NO: 801068 - RNA, 23 nt, Human
aggaggaucacuugugcccagga

SEQ ID NO: 801069 - RNA, 24 nt, Human
aggaucacuugugcccaggaguuc

SEQ ID NO: 801070 - RNA, 19 nt, Human
aggcagaguucacccugcg

SEQ ID NO: 801071 - RNA, 22 nt, Human
aggcaggaaaauaauccucugg

SEQ ID NO: 801072 - RNA, 22 nt, Human
aggcaggaaaauaauccucugg

SEQ ID NO: 801073 - RNA, 26 nt, Human
aggcaggcagaccacccgaggucagg

SEQ ID NO: 801074 - RNA, 23 nt, Human
aggcagugugagagaaauccagg

SEQ ID NO: 801075 - RNA, 20 nt, Human
aggcauguauacucagcugu

SEQ ID NO: 801076 - RNA, 23 nt, Human
aggccagaaauggagagccagga

SEQ ID NO: 801077 - RNA, 21 nt, Human
aggccgaggggagaggguugc

SEQ ID NO: 801078 - RNA, 23 nt, Human
aggccgaggggagaggguugcuu

SEQ ID NO: 801079 - RNA, 24 nt, Human
aggccgaggggagaggguugcuug

SEQ ID NO: 801080 - RNA, 24 nt, Human
aggcugaagcaggaggaucacuug

SEQ ID NO: 801081 - RNA, 22 nt, Human
aggcugagccuuucaaaggccc

SEQ ID NO: 801082 - RNA, 24 nt, Human
aggcugaggugggaggaucacuug

SEQ ID NO: 801083 - RNA, 18 nt, Human
aggcuggagugcaguggc

SEQ ID NO: 801084 - RNA, 19 nt, Human
agggacugccugggcucug

SEQ ID NO: 801085 - RNA, 19 nt, Human
agggacugccugggcucug

SEQ ID NO: 801086 - RNA, 27 nt, Human
agggggguuggaggaggaggcagagaa

SEQ ID NO: 801087 - RNA, 22 nt, Human
aggugauaacauucccauucau

SEQ ID NO: 801088 - RNA, 19 nt, Human
aggugcaugccaccacacc

SEQ ID NO: 801089 - RNA, 24 nt, Human
aggugggaggaucacuugagucug

SEQ ID NO: 801090 - RNA, 20 nt, Human
aguaaucuuccugccucagc

SEQ ID NO: 801091 - RNA, 23 nt, Human
aguauaguggcaugaucacagcu

SEQ ID NO: 801092 - RNA, 20 nt, Human
agugcaguggcaugaugaug

SEQ ID NO: 801093 - RNA, 23 nt, Human
agugcaguggcaugaugauggcu

SEQ ID NO: 801094 - RNA, 24 nt, Human
agugcaguggcaugaugauggcuc

SEQ ID NO: 801095 - RNA, 24 nt, Human
agugcaguggcgugauuucaccuc

SEQ ID NO: 801096 - RNA, 19 nt, Human
aguggcucaugccuguaac

SEQ ID NO: 801097 - RNA, 24 nt, Human
auaacugaaaaagcaaaaaacaaa

SEQ ID NO: 801098 - RNA, 25 nt, Human
auagugccacugcacuccagccuug

SEQ ID NO: 801099 - RNA, 18 nt, Human
aucucacucugucaccca

SEQ ID NO: 801100 - RNA, 18 nt, Human
augaaacggccagcugcc

SEQ ID NO: 801101 - RNA, 18 nt, Human
auggcucaaccuucaucc

SEQ ID NO: 801102 - RNA, 21 nt, Human
auggcucacuagucucgaucu

SEQ ID NO: 801103 - RNA, 21 nt, Human
auucauuacccaggguucaaa

SEQ ID NO: 801104 - RNA, 18 nt, Human
auucuccugccucagccu

SEQ ID NO: 801105 - RNA, 21 nt, Human
auuucaggcuccugaguagcu

SEQ ID NO: 801106 - RNA, 25 nt, Human
auuuuuaguagagacaggguuuuac

SEQ ID NO: 801107 - RNA, 23 nt, Human
caaaagccuucaauggcuuccca

SEQ ID NO: 801108 - RNA, 21 nt, Human
caaacaaaaaaccucacuggg

SEQ ID NO: 801109 - RNA, 20 nt, Human
caaagcaaaccauuuugguc

SEQ ID NO: 801110 - RNA, 20 nt, Human
caaaggaaaggcagccccuc

SEQ ID NO: 801111 - RNA, 20 nt, Human
caaaggaaaggcagccccuc

SEQ ID NO: 801112 - RNA, 24 nt, Human
caaagugccgggaucacaggcgug

SEQ ID NO: 801113 - RNA, 24 nt, Human
caaagugcugggacaagaggcaug

SEQ ID NO: 801114 - RNA, 21 nt, Human
caaagugggagugaaugucag

SEQ ID NO: 801115 - RNA, 18 nt, Human
caacacagcccccuccca

SEQ ID NO: 801116 - RNA, 19 nt, Human
caagacagaggagcggcac

SEQ ID NO: 801117 - RNA, 22 nt, Human
caagauuaaaacccuuggcugg

SEQ ID NO: 801118 - RNA, 18 nt, Human
caagccgaaagcagucga

SEQ ID NO: 801119 - RNA, 27 nt, Human
caagcgauccucccaccucggcccccc

SEQ ID NO: 801120 - RNA, 27 nt, Human
caagcgauccucccaccucggcccccc

SEQ ID NO: 801121 - RNA, 21 nt, Human
caagcgcccaccaccgcgccc

SEQ ID NO: 801122 - RNA, 22 nt, Human
caagcgcccaccaccgcgcccc

SEQ ID NO: 801123 - RNA, 22 nt, Human
caagugauucuccugccucagc

SEQ ID NO: 801124 - RNA, 18 nt, Human
caaugugagaagcccgaa

SEQ ID NO: 801125 - RNA, 22 nt, Human
cacaaaaccagggugugguuaa

SEQ ID NO: 801126 - RNA, 21 nt, Human
cacaacacagcccccucccag

SEQ ID NO: 801127 - RNA, 18 nt, Human
cacacagcuaggagaccc

SEQ ID NO: 801128 - RNA, 19 nt, Human
cacacuaucccacucaccc

SEQ ID NO: 801129 - RNA, 19 nt, Human
cacacuaucccacucaccc

SEQ ID NO: 801130 - RNA, 18 nt, Human
cacacugaagcuggguuc

SEQ ID NO: 801131 - RNA, 18 nt, Human
cacacugaagcuggguuc

SEQ ID NO: 801132 - RNA, 21 nt, Human
cacaguuuaagaacuuaucca

SEQ ID NO: 801133 - RNA, 21 nt, Human
caccagggcucuccauccccu

SEQ ID NO: 801134 - RNA, 19 nt, Human
caccaugccuggcucauuu

SEQ ID NO: 801135 - RNA, 22 nt, Human
caccaugcuggccccaauaggc

SEQ ID NO: 801136 - RNA, 23 nt, Human
cacccaggcugaagugcaguggc

SEQ ID NO: 801137 - RNA, 18 nt, Human
caccucacugcaaacucc

SEQ ID NO: 801138 - RNA, 21 nt, Human
caccucgcagcaaacucaauc

SEQ ID NO: 801139 - RNA, 21 nt, Human
caccucggccccccaaguaac

SEQ ID NO: 801140 - RNA, 24 nt, Human
caccucggccccccaaguaacugg

SEQ ID NO: 801141 - RNA, 23 nt, Human
caccuucuccucccggucuccca

SEQ ID NO: 801142 - RNA, 23 nt, Human
caccuucuccucccggucuccca

SEQ ID NO: 801143 - RNA, 22 nt, Human
cacgccuguuaauuccaaccuu

SEQ ID NO: 801144 - RNA, 27 nt, Human
cacuauauugcccaagcuggucucgaa

SEQ ID NO: 801145 - RNA, 21 nt, Human
cacucagugacaacacuggcc

SEQ ID NO: 801146 - RNA, 21 nt, Human
cacucagugacaacacuggcc

SEQ ID NO: 801147 - RNA, 22 nt, Human
cacuccagccuuggcaacagag

SEQ ID NO: 801148 - RNA, 23 nt, Human
cacucugucacccaggcugaagu

SEQ ID NO: 801149 - RNA, 24 nt, Human
cacucugucacccaggcugaagug

SEQ ID NO: 801150 - RNA, 19 nt, Human
cacugcacuccagccuugg

SEQ ID NO: 801151 - RNA, 21 nt, Human
cacugcacuccagccuuggca

SEQ ID NO: 801152 - RNA, 22 nt, Human
cacugcacuccagccuuggcaa

SEQ ID NO: 801153 - RNA, 23 nt, Human
cacugcacuccagccuuggcaac

SEQ ID NO: 801154 - RNA, 24 nt, Human
cacugcacuccagccuuggcaaca

SEQ ID NO: 801155 - RNA, 21 nt, Human
cacugcgaccucugccuccug

SEQ ID NO: 801156 - RNA, 23 nt, Human
cacugcgaccucugccuccuggg

SEQ ID NO: 801157 - RNA, 21 nt, Human
cacugggcuagccucaagcaa

SEQ ID NO: 801158 - RNA, 21 nt, Human
cacugggcuagccucaagcaa

SEQ ID NO: 801159 - RNA, 18 nt, Human
cacuguguugcccaggau

SEQ ID NO: 801160 - RNA, 21 nt, Human
cagaacacaacacagaaaggc

SEQ ID NO: 801161 - RNA, 21 nt, Human
cagaacacaacacagaaaggc

SEQ ID NO: 801162 - RNA, 25 nt, Human
cagacagcccccacgcugcauccca

SEQ ID NO: 801163 - RNA, 25 nt, Human
cagacagcccccacgcugcauccca

SEQ ID NO: 801164 - RNA, 23 nt, Human
cagaccacccgaggucaggauuu

SEQ ID NO: 801165 - RNA, 23 nt, Human
cagacugaccccuggaaacauga

SEQ ID NO: 801166 - RNA, 23 nt, Human
cagacugaccccuggaaacauga

SEQ ID NO: 801167 - RNA, 25 nt, Human
cagagcucccagaaccgugcucccc

SEQ ID NO: 801168 - RNA, 25 nt, Human
cagagcucccagaaccgugcucccc

SEQ ID NO: 801169 - RNA, 20 nt, Human
cagauggucaccuauagcac

SEQ ID NO: 801170 - RNA, 20 nt, Human
cagauggucaccuauagcac

SEQ ID NO: 801171 - RNA, 20 nt, Human
cagcccccacgcugcauccc

SEQ ID NO: 801172 - RNA, 20 nt, Human
cagcccccacgcugcauccc

SEQ ID NO: 801173 - RNA, 23 nt, Human
cagccuccaucuccuaggcucaa

SEQ ID NO: 801174 - RNA, 24 nt, Human
cagccuccaucuccuaggcucaag

SEQ ID NO: 801175 - RNA, 24 nt, Human
cagcuaauugggaggcugaggugg

SEQ ID NO: 801176 - RNA, 19 nt, Human
cagcuggacucaaugaaac

SEQ ID NO: 801177 - RNA, 19 nt, Human
cagcugugugcaacaaaag

SEQ ID NO: 801178 - RNA, 22 nt, Human
caggaaauggagaagugaccau

SEQ ID NO: 801179 - RNA, 22 nt, Human
caggaacaaacugaccucuucc

SEQ ID NO: 801180 - RNA, 24 nt, Human
caggaagggaaaagugugggagga

SEQ ID NO: 801181 - RNA, 24 nt, Human
caggaagggaaaagugugggagga

SEQ ID NO: 801182 - RNA, 23 nt, Human
caggacuagcccaccaccuucuc

SEQ ID NO: 801183 - RNA, 23 nt, Human
caggacuagcccaccaccuucuc

SEQ ID NO: 801184 - RNA, 20 nt, Human
caggaugggcuggucugagg

SEQ ID NO: 801185 - RNA, 22 nt, Human
caggauggugucaggguccacu

SEQ ID NO: 801186 - RNA, 24 nt, Human
caggcagaccacccgaggucagga

SEQ ID NO: 801187 - RNA, 23 nt, Human
caggcaucccugaccacuguccu

SEQ ID NO: 801188 - RNA, 21 nt, Human
caggcauguauacucagcugu

SEQ ID NO: 801189 - RNA, 19 nt, Human
cagggcucuccauccccuc

SEQ ID NO: 801190 - RNA, 21 nt, Human
caggguccuucagacagcccc

SEQ ID NO: 801191 - RNA, 21 nt, Human
caggguccuucagacagcccc

SEQ ID NO: 801192 - RNA, 22 nt, Human
cagggugugguuaagugccagg

SEQ ID NO: 801193 - RNA, 24 nt, Human
caggguuuuaccacguugguuagg

SEQ ID NO: 801194 - RNA, 21 nt, Human
cagguccucaggaggccgagg

SEQ ID NO: 801195 - RNA, 23 nt, Human
caggucuugcuauguggcccagg

SEQ ID NO: 801196 - RNA, 24 nt, Human
caguaccugaaaaaccagguccua

SEQ ID NO: 801197 - RNA, 20 nt, Human
caguucuccugccacagccu

SEQ ID NO: 801198 - RNA, 21 nt, Human
caugcagggaggauauuuacc

SEQ ID NO: 801199 - RNA, 21 nt, Human
caugcagggaggauauuuacc

SEQ ID NO: 801200 - RNA, 19 nt, Human
caugccaccacaccuggcu

SEQ ID NO: 801201 - RNA, 24 nt, Human
caugccuguaacuccaacacuuug

SEQ ID NO: 801202 - RNA, 20 nt, Human
caugcgaucugccugccucg

SEQ ID NO: 801203 - RNA, 23 nt, Human
cauggcucaaccuucauccgcuc

SEQ ID NO: 801204 - RNA, 21 nt, Human
cauuaggccacucaggggaga

SEQ ID NO: 801205 - RNA, 22 nt, Human
ccaaagugccgggaucacaggc

SEQ ID NO: 801206 - RNA, 22 nt, Human
ccaaagugccgggaucacaggc

SEQ ID NO: 801207 - RNA, 24 nt, Human
ccaaagugccgggaucacaggcgu

SEQ ID NO: 801208 - RNA, 24 nt, Human
ccaaagugcugggacaagaggcau

SEQ ID NO: 801209 - RNA, 18 nt, Human
ccaaguaacugggaccau

SEQ ID NO: 801210 - RNA, 20 nt, Human
ccacacuaucccacucaccc

SEQ ID NO: 801211 - RNA, 21 nt, Human
ccaccacaccuggcuaauugu

SEQ ID NO: 801212 - RNA, 22 nt, Human
ccaccaucuugccacccgggag

SEQ ID NO: 801213 - RNA, 19 nt, Human
ccaccaugccaaaccgaca

SEQ ID NO: 801214 - RNA, 19 nt, Human
ccacccaggcaccuccacu

SEQ ID NO: 801215 - RNA, 21 nt, Human
ccacccaggcaccuccacuuc

SEQ ID NO: 801216 - RNA, 20 nt, Human
ccacugcacuccagccuugg

SEQ ID NO: 801217 - RNA, 21 nt, Human
ccacugcacuccagccuuggc

SEQ ID NO: 801218 - RNA, 24 nt, Human
ccacugcacuccagccuuggcaac

SEQ ID NO: 801219 - RNA, 24 nt, Human
ccacuggggagaggacaagaggcc

SEQ ID NO: 801220 - RNA, 24 nt, Human
ccacuggggagaggacaagaggcc

SEQ ID NO: 801221 - RNA, 23 nt, Human
ccagaaccgugcuccccaacugg

SEQ ID NO: 801222 - RNA, 21 nt, Human
ccagaagggaaagagagcugg

SEQ ID NO: 801223 - RNA, 18 nt, Human
ccagauaagaaaucagcu

SEQ ID NO: 801224 - RNA, 19 nt, Human
ccaggcucaagcgauccuc

SEQ ID NO: 801225 - RNA, 22 nt, Human
ccaggcucaagcgauccuccca

SEQ ID NO: 801226 - RNA, 22 nt, Human
ccagggcucuccauccccucca

SEQ ID NO: 801227 - RNA, 19 nt, Human
ccaguaccugaaaaaccag

SEQ ID NO: 801228 - RNA, 19 nt, Human
ccaguaccugaaaaaccag

SEQ ID NO: 801229 - RNA, 24 nt, Human
ccauaccccuucaucucauuccac

SEQ ID NO: 801230 - RNA, 21 nt, Human
cccaaccagcaggggaccacu

SEQ ID NO: 801231 - RNA, 21 nt, Human
cccaaccagcaggggaccacu

SEQ ID NO: 801232 - RNA, 21 nt, Human
cccaagaugacugcuuauaga

SEQ ID NO: 801233 - RNA, 21 nt, Human
cccaagaugacugcuuauaga

SEQ ID NO: 801234 - RNA, 20 nt, Human
cccaccucggccccccaagu

SEQ ID NO: 801235 - RNA, 23 nt, Human
cccagagaauucaguguaccauu

SEQ ID NO: 801236 - RNA, 23 nt, Human
cccagagaauucaguguaccauu

SEQ ID NO: 801237 - RNA, 23 nt, Human
cccaggcugaagugcaguggcau

SEQ ID NO: 801238 - RNA, 20 nt, Human
ccccacccaggcaccuccac

SEQ ID NO: 801239 - RNA, 20 nt, Human
ccccacccaggcaccuccac

SEQ ID NO: 801240 - RNA, 27 nt, Human
cccccaaacaccucccggcgaugcugg

SEQ ID NO: 801241 - RNA, 20 nt, Human
cccccucgcuccaagcccgc

SEQ ID NO: 801242 - RNA, 20 nt, Human
ccccgcccccucgcuccaag

SEQ ID NO: 801243 - RNA, 24 nt, Human
ccccgcccccucgcuccaagcccg

SEQ ID NO: 801244 - RNA, 19 nt, Human
ccccuggaaaaagcagggu

SEQ ID NO: 801245 - RNA, 19 nt, Human
ccccuggaaaaagcagggu

SEQ ID NO: 801246 - RNA, 20 nt, Human
ccccuuccuuggacuuuccc

SEQ ID NO: 801247 - RNA, 20 nt, Human
ccccuuccuuggacuuuccc

SEQ ID NO: 801248 - RNA, 21 nt, Human
cccgccccuucggccgcuagg

SEQ ID NO: 801249 - RNA, 18 nt, Human
cccgccuccccggccccg

SEQ ID NO: 801250 - RNA, 21 nt, Human
cccggccccgcccgccauggc

SEQ ID NO: 801251 - RNA, 23 nt, Human
cccggguucaagugauucuccuc

SEQ ID NO: 801252 - RNA, 23 nt, Human
cccggguucaagugauucuccug

SEQ ID NO: 801253 - RNA, 18 nt, Human
cccugaggacuugaagag

SEQ ID NO: 801254 - RNA, 24 nt, Human
ccgccucccggguucaagugauuc

SEQ ID NO: 801255 - RNA, 19 nt, Human
ccuauagcaccagcuccag

SEQ ID NO: 801256 - RNA, 18 nt, Human
ccuauagcaccagcuccg

SEQ ID NO: 801257 - RNA, 19 nt, Human
ccucacuccccugcucaaa

SEQ ID NO: 801258 - RNA, 24 nt, Human
ccucacugcaaacuccgccucccg

SEQ ID NO: 801259 - RNA, 25 nt, Human
ccuccaacuuccacucagauauuuc

SEQ ID NO: 801260 - RNA, 21 nt, Human
ccuccauuucaggcuccugag

SEQ ID NO: 801261 - RNA, 24 nt, Human
ccuccauuucaggcuccugaguag

SEQ ID NO: 801262 - RNA, 25 nt, Human
ccucccaccucggccccccaaguaa

SEQ ID NO: 801263 - RNA, 20 nt, Human
ccuccccggccccgcccgcc

SEQ ID NO: 801264 - RNA, 20 nt, Human
ccuccgggucccgcgccgcg

SEQ ID NO: 801265 - RNA, 25 nt, Human
ccuccucugcccccaccacccgagg

SEQ ID NO: 801266 - RNA, 24 nt, Human
ccuccucugcccccaccacccggg

SEQ ID NO: 801267 - RNA, 23 nt, Human
ccucgcuccaagcccgccucccc

SEQ ID NO: 801268 - RNA, 24 nt, Human
ccucgcucuguugcacaggcugga

SEQ ID NO: 801269 - RNA, 21 nt, Human
ccucugccuccugggcacaaa

SEQ ID NO: 801270 - RNA, 19 nt, Human
ccugaauagcugggauuac

SEQ ID NO: 801271 - RNA, 21 nt, Human
ccugcagucccagcuaauugg

SEQ ID NO: 801272 - RNA, 19 nt, Human
ccugccacagccuccuaag

SEQ ID NO: 801273 - RNA, 20 nt, Human
ccugccccacacuaucccac

SEQ ID NO: 801274 - RNA, 27 nt, Human
ccugccccacacuaucccacucacccu

SEQ ID NO: 801275 - RNA, 24 nt, Human
ccugccucagccuccugaauagcu

SEQ ID NO: 801276 - RNA, 20 nt, Human
ccugcgcgccaccaucuugc

SEQ ID NO: 801277 - RNA, 20 nt, Human
ccugggcagccucagagccu

SEQ ID NO: 801278 - RNA, 20 nt, Human
ccugggcagccucagagccu

SEQ ID NO: 801279 - RNA, 22 nt, Human
ccuguagacaacugaggccaga

SEQ ID NO: 801280 - RNA, 19 nt, Human
ccuuagauggggaggggac

SEQ ID NO: 801281 - RNA, 24 nt, Human
cgaacuccugagcuccaguaaucu

SEQ ID NO: 801282 - RNA, 22 nt, Human
cgagaccccgcgagcccgcccc

SEQ ID NO: 801283 - RNA, 24 nt, Human
cgagaccccgcgagcccgccccuu

SEQ ID NO: 801284 - RNA, 26 nt, Human
cgaggcaggcagaccacccgagguca

SEQ ID NO: 801285 - RNA, 18 nt, Human
cgccgggaguugcgguuc

SEQ ID NO: 801286 - RNA, 24 nt, Human
cgccugcagucccagcuaauuggg

SEQ ID NO: 801287 - RNA, 21 nt, Human
cggaauggggggaugaagggg

SEQ ID NO: 801288 - RNA, 26 nt, Human
cggccccccaaguaacugggaccuuu

SEQ ID NO: 801289 - RNA, 22 nt, Human
cgggacuccaagccaagaacuu

SEQ ID NO: 801290 - RNA, 22 nt, Human
cgggacuccaagccaagagcuu

SEQ ID NO: 801291 - RNA, 24 nt, Human
cgggaucacaggcgugagccacca

SEQ ID NO: 801292 - RNA, 22 nt, Human
cgucccaacugucugcgccuau

SEQ ID NO: 801293 - RNA, 23 nt, Human
cguggugagaugcccauuaggcc

SEQ ID NO: 801294 - RNA, 23 nt, Human
cucaaaaaaaaaaaaaaaaaaaa

SEQ ID NO: 801295 - RNA, 20 nt, Human
cucaaagguaggaauaacaa

SEQ ID NO: 801296 - RNA, 18 nt, Human
cucaagcaaaucuuggga

SEQ ID NO: 801297 - RNA, 18 nt, Human
cucaagcaaaucuuggga

SEQ ID NO: 801298 - RNA, 21 nt, Human
cucaagcaguucuccugccac

SEQ ID NO: 801299 - RNA, 24 nt, Human
cucaagcgauccucccaccucggc

SEQ ID NO: 801300 - RNA, 21 nt, Human
cucaaugaaacucugugacaa

SEQ ID NO: 801301 - RNA, 21 nt, Human
cucaaugaaacucugugacaa

SEQ ID NO: 801302 - RNA, 24 nt, Human
cucacgccuguuaauuccaaccuu

SEQ ID NO: 801303 - RNA, 24 nt, Human
cucacugcgaccucugccuccugg

SEQ ID NO: 801304 - RNA, 24 nt, Human
cucaugccuguaacuccaacacuu

SEQ ID NO: 801305 - RNA, 20 nt, Human
cuccaaacccaagcacugca

SEQ ID NO: 801306 - RNA, 18 nt, Human
cuccaguaaucuuccugc

SEQ ID NO: 801307 - RNA, 22 nt, Human
cucccagaaccgugcuccccaa

SEQ ID NO: 801308 - RNA, 22 nt, Human
cucccagaaccgugcuccccaa

SEQ ID NO: 801309 - RNA, 22 nt, Human
cucccggcgaugcuggccgccu

SEQ ID NO: 801310 - RNA, 20 nt, Human
cucccggguucaagugauuc

SEQ ID NO: 801311 - RNA, 24 nt, Human
cuccuaaggagcuaggacuacagg

SEQ ID NO: 801312 - RNA, 25 nt, Human
cuccuaggcucaagcaguucuccug

SEQ ID NO: 801313 - RNA, 24 nt, Human
cuccugaauagcugggauuacaag

SEQ ID NO: 801314 - RNA, 24 nt, Human
cucgcucuguugcacaggcuggag

SEQ ID NO: 801315 - RNA, 22 nt, Human
cucggccccuggaaaaagcagg

SEQ ID NO: 801316 - RNA, 22 nt, Human
cucggccccuggaaaaagcagg

SEQ ID NO: 801317 - RNA, 24 nt, Human
cucucaaaauaacugaaaaagcaa

SEQ ID NO: 801318 - RNA, 19 nt, Human
cucucaggccgaccuggcu

SEQ ID NO: 801319 - RNA, 19 nt, Human
cucucaggccgaccuggcu

SEQ ID NO: 801320 - RNA, 24 nt, Human
cucuuccauucaaauaagcuccaa

SEQ ID NO: 801321 - RNA, 22 nt, Human
cugcagcuggacucaaugaaac

SEQ ID NO: 801322 - RNA, 22 nt, Human
cugcagcuggacucaaugaaac

SEQ ID NO: 801323 - RNA, 24 nt, Human
cugcggagguugcagugagcugag

SEQ ID NO: 801324 - RNA, 19 nt, Human
cugcuuauagaguggagga

SEQ ID NO: 801325 - RNA, 19 nt, Human
cugcuuauagaguggagga

SEQ ID NO: 801326 - RNA, 25 nt, Human
cuggauauaugccuccaggcauccc

SEQ ID NO: 801327 - RNA, 19 nt, Human
cuggcaacccuucccacaa

SEQ ID NO: 801328 - RNA, 19 nt, Human
cuggcaacccuucccacaa

SEQ ID NO: 801329 - RNA, 24 nt, Human
cuggcugcggagguugcagugagc

SEQ ID NO: 801330 - RNA, 22 nt, Human
cugggcuagccucaagcaaauc

SEQ ID NO: 801331 - RNA, 22 nt, Human
cugggcuagccucaagcaaauc

SEQ ID NO: 801332 - RNA, 23 nt, Human
cuggguccuuccugccugacaga

SEQ ID NO: 801333 - RNA, 23 nt, Human
cuggguccuuccugccugacaga

SEQ ID NO: 801334 - RNA, 21 nt, Human
cuuggcgaugagaugaagaaa

SEQ ID NO: 801335 - RNA, 21 nt, Human
cuuggcgaugagaugaagaaa

SEQ ID NO: 801336 - RNA, 23 nt, Human
cuugugcccaggaguucaagacc

SEQ ID NO: 801337 - RNA, 23 nt, Human
gaaaauaauccucuggucaugga

SEQ ID NO: 801338 - RNA, 23 nt, Human
gaaaauaauccucuggucaugga

SEQ ID NO: 801339 - RNA, 21 nt, Human
gaacaaacugaccucuuccau

SEQ ID NO: 801340 - RNA, 20 nt, Human
gaagagugccuucaggaugg

SEQ ID NO: 801341 - RNA, 25 nt, Human
gaauagcugggauuacaagcgccca

SEQ ID NO: 801342 - RNA, 22 nt, Human
gaccacccgaggucaggauuuc

SEQ ID NO: 801343 - RNA, 19 nt, Human
gacccaagcagccuccccc

SEQ ID NO: 801344 - RNA, 19 nt, Human
gaccccgcgagcccgcccc

SEQ ID NO: 801345 - RNA, 22 nt, Human
gacuacaggcguguaccaccau

SEQ ID NO: 801346 - RNA, 18 nt, Human
gacugcaggagaggggcc

SEQ ID NO: 801347 - RNA, 23 nt, Human
gagauagugccacugcacuccag

SEQ ID NO: 801348 - RNA, 24 nt, Human
gagcacacuuggguucaggagggg

SEQ ID NO: 801349 - RNA, 21 nt, Human
gagccaccaugcuggccccaa

SEQ ID NO: 801350 - RNA, 21 nt, Human
gagccugcacacugaagcugg

SEQ ID NO: 801351 - RNA, 20 nt, Human
gagcucccagaaccgugcuc

SEQ ID NO: 801352 - RNA, 20 nt, Human
gagcucccagaaccgugcuc

SEQ ID NO: 801353 - RNA, 20 nt, Human
gaggaaacggaaugggggga

SEQ ID NO: 801354 - RNA, 20 nt, Human
gaggaggcaaacaggucccc

SEQ ID NO: 801355 - RNA, 20 nt, Human
gaggaggcaaacaggucccc

SEQ ID NO: 801356 - RNA, 23 nt, Human
gaggcaugggaaguggaggagga

SEQ ID NO: 801357 - RNA, 23 nt, Human
gaggcaugggaaguggaggagga

SEQ ID NO: 801358 - RNA, 18 nt, Human
gaggccuggagccacugg

SEQ ID NO: 801359 - RNA, 21 nt, Human
gagguugcagugagcugagau

SEQ ID NO: 801360 - RNA, 20 nt, Human
gaguggaggaggcaaacagg

SEQ ID NO: 801361 - RNA, 20 nt, Human
gaguggaggaggcaaacagg

SEQ ID NO: 801362 - RNA, 18 nt, Human
gaucacaggcgugagcca

SEQ ID NO: 801363 - RNA, 24 nt, Human
gaucacaggcgugagccaccaugc

SEQ ID NO: 801364 - RNA, 18 nt, Human
gaucacuugugcccagga

SEQ ID NO: 801365 - RNA, 24 nt, Human
gaucacuugugcccaggaguucaa

SEQ ID NO: 801366 - RNA, 21 nt, Human
gauucuccugccucagccucc

SEQ ID NO: 801367 - RNA, 21 nt, Human
gcaaaaaacaaacaaacaaac

SEQ ID NO: 801368 - RNA, 22 nt, Human
gcaagccgaaagcagucgagac

SEQ ID NO: 801369 - RNA, 20 nt, Human
gcacaggcuggagugcagug

SEQ ID NO: 801370 - RNA, 24 nt, Human
gcacaggcuggagugcaguggcgu

SEQ ID NO: 801371 - RNA, 23 nt, Human
gcacuccagccuuggcaacagag

SEQ ID NO: 801372 - RNA, 21 nt, Human
gcagccucccccuccaacuuc

SEQ ID NO: 801373 - RNA, 21 nt, Human
gcccccaaacaccucccggcg

SEQ ID NO: 801374 - RNA, 18 nt, Human
gcccccucccagcaaaga

SEQ ID NO: 801375 - RNA, 21 nt, Human
gccucccccuccaacuuccac

SEQ ID NO: 801376 - RNA, 25 nt, Human
gccucccggguucaagugauucucc

SEQ ID NO: 801377 - RNA, 21 nt, Human
gcgaggcagcucgcucuccuu

SEQ ID NO: 801378 - RNA, 21 nt, Human
gcgaucugccugccucggccu

SEQ ID NO: 801379 - RNA, 18 nt, Human
gcggagguugcagugagc

SEQ ID NO: 801380 - RNA, 19 nt, Human
gcgguucggcgccggcgcg

SEQ ID NO: 801381 - RNA, 22 nt, Human
gcucaagcgauccucccaccuc

SEQ ID NO: 801382 - RNA, 19 nt, Human
gcugaagugcaguggcaug

SEQ ID NO: 801383 - RNA, 19 nt, Human
gcuggagugcaguggcgug

SEQ ID NO: 801384 - RNA, 18 nt, Human
gcugggcgugguggcuca

SEQ ID NO: 801385 - RNA, 21 nt, Human
gcugggcgugguggcucacgc

SEQ ID NO: 801386 - RNA, 23 nt, Human
ggaaacaugagucucugguuuuu

SEQ ID NO: 801387 - RNA, 23 nt, Human
ggaaacaugagucucugguuuuu

SEQ ID NO: 801388 - RNA, 24 nt, Human
ggaagcucuuuaucccuggcaacc

SEQ ID NO: 801389 - RNA, 24 nt, Human
ggaagcucuuuaucccuggcaacc

SEQ ID NO: 801390 - RNA, 22 nt, Human
ggacaagaggcaugagccacca

SEQ ID NO: 801391 - RNA, 20 nt, Human
ggacccccggccgccgccag

SEQ ID NO: 801392 - RNA, 22 nt, Human
ggacuacaggcguguaccacca

SEQ ID NO: 801393 - RNA, 24 nt, Human
ggacuacaggcguguaccaccaug

SEQ ID NO: 801394 - RNA, 21 nt, Human
ggagaacuuccucugggugga

SEQ ID NO: 801395 - RNA, 23 nt, Human
ggagcaguggcucaugccuguaa

SEQ ID NO: 801396 - RNA, 23 nt, Human
ggaggaggcaaacagguccccuc

SEQ ID NO: 801397 - RNA, 23 nt, Human
ggaggaggcaaacagguccccuc

SEQ ID NO: 801398 - RNA, 22 nt, Human
ggagguugcagugagcugagau

SEQ ID NO: 801399 - RNA, 23 nt, Human
ggagguugcagugagcugagaua

SEQ ID NO: 801400 - RNA, 24 nt, Human
ggagguugcagugagcugagauag

SEQ ID NO: 801401 - RNA, 24 nt, Human
ggaucacaggcgugagccaccaug

SEQ ID NO: 801402 - RNA, 18 nt, Human
ggaucacuugagucuggc

SEQ ID NO: 801403 - RNA, 23 nt, Human
ggaucacuugugcccaggaguuc

SEQ ID NO: 801404 - RNA, 19 nt, Human
ggcaacuucaaauguggug

SEQ ID NO: 801405 - RNA, 18 nt, Human
ggccgaggggagaggguu

SEQ ID NO: 801406 - RNA, 19 nt, Human
ggccgcuagggagcgacga

SEQ ID NO: 801407 - RNA, 22 nt, Human
ggccguggugagaugcccauua

SEQ ID NO: 801408 - RNA, 20 nt, Human
ggcggcuacacaaaaccagg

SEQ ID NO: 801409 - RNA, 19 nt, Human
ggcuacacaaaaccagggu

SEQ ID NO: 801410 - RNA, 22 nt, Human
ggcuggagugcaguggcgugau

SEQ ID NO: 801411 - RNA, 21 nt, Human
ggcugggcgugguggcucacg

SEQ ID NO: 801412 - RNA, 20 nt, Human
ggcuggucucaaacuccuga

SEQ ID NO: 801413 - RNA, 20 nt, Human
gggacccaccauuuacuggg

SEQ ID NO: 801414 - RNA, 22 nt, Human
gggagggcucacaacacagccc

SEQ ID NO: 801415 - RNA, 23 nt, Human
gggaucacaggcgugagccacca

SEQ ID NO: 801416 - RNA, 22 nt, Human
gggcacaggaccccaccuucug

SEQ ID NO: 801417 - RNA, 25 nt, Human
gggcgugguggcucacgccuguuaa

SEQ ID NO: 801418 - RNA, 22 nt, Human
ggguucaagugauucuccugcc

SEQ ID NO: 801419 - RNA, 23 nt, Human
ggguucaagugauucuccugccu

SEQ ID NO: 801420 - RNA, 22 nt, Human
gguagcaucuggcacugucucc

SEQ ID NO: 801421 - RNA, 18 nt, Human
gguggggagcaguggcuc

SEQ ID NO: 801422 - RNA, 21 nt, Human
ggugugcgccuauagucccag

SEQ ID NO: 801423 - RNA, 18 nt, Human
gguuggaggaggaggcag

SEQ ID NO: 801424 - RNA, 20 nt, Human
gucaguuuuuccuuagaugg

SEQ ID NO: 801425 - RNA, 20 nt, Human
guccacuucagcaggggggu

SEQ ID NO: 801426 - RNA, 22 nt, Human
gucucgaacuccugagcuccag

SEQ ID NO: 801427 - RNA, 24 nt, Human
gugauucuccugccucagccuccu

SEQ ID NO: 801428 - RNA, 21 nt, Human
gugggaggaaugucuuccagc

SEQ ID NO: 801429 - RNA, 21 nt, Human
gugggaggaaugucuuccagc

SEQ ID NO: 801430 - RNA, 22 nt, Human
guggugagaugcccauuaggcc

SEQ ID NO: 801431 - RNA, 24 nt, Human
guugcagugagcugagauagugcc

SEQ ID NO: 801432 - RNA, 20 nt, Human
uaaaaagcagcauucuuuaa

SEQ ID NO: 801433 - RNA, 20 nt, Human
uaaaaagcagcauucuuuaa

SEQ ID NO: 801434 - RNA, 23 nt, Human
uaaaaagcagcauucuuuaaaga

SEQ ID NO: 801435 - RNA, 23 nt, Human
uaaaaagcagcauucuuuaaaga

SEQ ID NO: 801436 - RNA, 20 nt, Human
uaaagaacugcaaguggagc

SEQ ID NO: 801437 - RNA, 20 nt, Human
uaaagaacugcaaguggagc

SEQ ID NO: 801438 - RNA, 19 nt, Human
uaaccuccucccugguauc

SEQ ID NO: 801439 - RNA, 20 nt, Human
uaagaacuuauccaaaucac

SEQ ID NO: 801440 - RNA, 21 nt, Human
uaagcuccaaacccaagcacu

SEQ ID NO: 801441 - RNA, 26 nt, Human
uaagcuccaaacccaagcacugcaca

SEQ ID NO: 801442 - RNA, 25 nt, Human
uaauuuuuguaauuuuuaguagaga

SEQ ID NO: 801443 - RNA, 27 nt, Human
uaauuuuuguaauuuuuaguagagaca

SEQ ID NO: 801444 - RNA, 21 nt, Human
uacacaaaaccaggguguggu

SEQ ID NO: 801445 - RNA, 20 nt, Human
uacacacaaaggaaaggcag

SEQ ID NO: 801446 - RNA, 20 nt, Human
uacacacaaaggaaaggcag

SEQ ID NO: 801447 - RNA, 22 nt, Human
uaccaccaugccuggcucauuu

SEQ ID NO: 801448 - RNA, 21 nt, Human
uaccacguugguuaggcuggu

SEQ ID NO: 801449 - RNA, 24 nt, Human
uaccacguugguuaggcuggucuc

SEQ ID NO: 801450 - RNA, 20 nt, Human
uacugggcaucugucaugag

SEQ ID NO: 801451 - RNA, 18 nt, Human
uagacaacugaggccaga

SEQ ID NO: 801452 - RNA, 22 nt, Human
uagagacaggguuuuaccacgu

SEQ ID NO: 801453 - RNA, 22 nt, Human
uagagaccaggucuugcuaugu

SEQ ID NO: 801454 - RNA, 25 nt, Human
uagaggcaugggaaguggaggagga

SEQ ID NO: 801455 - RNA, 25 nt, Human
uagaggcaugggaaguggaggagga

SEQ ID NO: 801456 - RNA, 21 nt, Human
uaggacuacaggcguguacca

SEQ ID NO: 801457 - RNA, 24 nt, Human
uaggacuacaggcguguaccacca

SEQ ID NO: 801458 - RNA, 22 nt, Human
uaggcaacuucaaauguggugu

SEQ ID NO: 801459 - RNA, 19 nt, Human
uaguagagacaggguuuua

SEQ ID NO: 801460 - RNA, 24 nt, Human
uaguagagacaggguuuuaccacg

SEQ ID NO: 801461 - RNA, 19 nt, Human
uauaguggcaugaucacag

SEQ ID NO: 801462 - RNA, 21 nt, Human
uauauugcccaagcuggucuc

SEQ ID NO: 801463 - RNA, 24 nt, Human
uauauugcccaagcuggucucgaa

SEQ ID NO: 801464 - RNA, 22 nt, Human
uaucccacucacccuggcaagu

SEQ ID NO: 801465 - RNA, 22 nt, Human
uaucccuggcaacccuucccac

SEQ ID NO: 801466 - RNA, 22 nt, Human
uaucccuggcaacccuucccac

SEQ ID NO: 801467 - RNA, 22 nt, Human
uaugcuggggaaacaccuugcc

SEQ ID NO: 801468 - RNA, 22 nt, Human
uaugcuggggaaacaccuugcc

SEQ ID NO: 801469 - RNA, 18 nt, Human
uauguggcccaggcugug

SEQ ID NO: 801470 - RNA, 20 nt, Human
uauuacacaaugugagaagc

SEQ ID NO: 801471 - RNA, 23 nt, Human
ucaaaaaaaaaaaaaaaaaaaaa

SEQ ID NO: 801472 - RNA, 23 nt, Human
ucaaacuccugauuucaugcgau

SEQ ID NO: 801473 - RNA, 23 nt, Human
ucaaagcuugauuuugaauucug

SEQ ID NO: 801474 - RNA, 19 nt, Human
ucaaauccuggguccuucc

SEQ ID NO: 801475 - RNA, 19 nt, Human
ucaaauccuggguccuucc

SEQ ID NO: 801476 - RNA, 19 nt, Human
ucaagugauucuccugccu

SEQ ID NO: 801477 - RNA, 22 nt, Human
ucacgccuguuaauuccaaccu

SEQ ID NO: 801478 - RNA, 18 nt, Human
ucacugcaaacuccgccu

SEQ ID NO: 801479 - RNA, 24 nt, Human
ucacugcaaacuccgccucccggg

SEQ ID NO: 801480 - RNA, 24 nt, Human
ucacugcgaccucugccuccuggg

SEQ ID NO: 801481 - RNA, 25 nt, Human
ucacugcgaccucugccuccugggc

SEQ ID NO: 801482 - RNA, 18 nt, Human
ucacugggcuagccucaa

SEQ ID NO: 801483 - RNA, 18 nt, Human
ucacugggcuagccucaa

SEQ ID NO: 801484 - RNA, 23 nt, Human
ucacuugugcccaggaguucaag

SEQ ID NO: 801485 - RNA, 23 nt, Human
ucagccaggcauggugaugcacg

SEQ ID NO: 801486 - RNA, 19 nt, Human
ucaucucauuccaccucgc

SEQ ID NO: 801487 - RNA, 22 nt, Human
uccaaacccaagcacugcacaa

SEQ ID NO: 801488 - RNA, 23 nt, Human
uccagauaagaaaucagcuuggg

SEQ ID NO: 801489 - RNA, 23 nt, Human
uccagauaagaaaucagcuuggg

SEQ ID NO: 801490 - RNA, 23 nt, Human
uccagccuuggcaacagagugag

SEQ ID NO: 801491 - RNA, 24 nt, Human
uccagccuuggcaacagagugaga

SEQ ID NO: 801492 - RNA, 19 nt, Human
uccagcucugccagccugg

SEQ ID NO: 801493 - RNA, 19 nt, Human
uccagcucugccagccugg

SEQ ID NO: 801494 - RNA, 19 nt, Human
uccagcugcuaacgagaag

SEQ ID NO: 801495 - RNA, 19 nt, Human
uccagcugcuaacgagaag

SEQ ID NO: 801496 - RNA, 20 nt, Human
uccaggcucaagcgauccuc

SEQ ID NO: 801497 - RNA, 24 nt, Human
ucccaaagugcugggacaagaggc

SEQ ID NO: 801498 - RNA, 23 nt, Human
ucccacaaucaggggucuccagu

SEQ ID NO: 801499 - RNA, 23 nt, Human
ucccacaaucaggggucuccagu

SEQ ID NO: 801500 - RNA, 23 nt, Human
ucccacuguacuuaaaagccaaa

SEQ ID NO: 801501 - RNA, 20 nt, Human
ucccagguccucaggaggcc

SEQ ID NO: 801502 - RNA, 19 nt, Human
ucccaguaccugaaaaacc

SEQ ID NO: 801503 - RNA, 21 nt, Human
uccccacccaggcaccuccac

SEQ ID NO: 801504 - RNA, 21 nt, Human
uccccacccaggcaccuccac

SEQ ID NO: 801505 - RNA, 18 nt, Human
uccccagcaccccgccuu

SEQ ID NO: 801506 - RNA, 21 nt, Human
ucccggguucaagugauucuc

SEQ ID NO: 801507 - RNA, 24 nt, Human
ucccggguucaagugauucuccug

SEQ ID NO: 801508 - RNA, 19 nt, Human
ucccucaguccugggccag

SEQ ID NO: 801509 - RNA, 18 nt, Human
ucccugcaagauuaaaac

SEQ ID NO: 801510 - RNA, 21 nt, Human
ucccuggcaacccuucccaca

SEQ ID NO: 801511 - RNA, 21 nt, Human
ucccuggcaacccuucccaca

SEQ ID NO: 801512 - RNA, 20 nt, Human
ucccugguaucugcuuccuu

SEQ ID NO: 801513 - RNA, 19 nt, Human
ucccuugacuccuccuccu

SEQ ID NO: 801514 - RNA, 19 nt, Human
ucccuugacuccuccuccu

SEQ ID NO: 801515 - RNA, 21 nt, Human
uccuaggcucaagcaguucuc

SEQ ID NO: 801516 - RNA, 24 nt, Human
uccuaggcucaagcaguucuccug

SEQ ID NO: 801517 - RNA, 18 nt, Human
uccucccaccucggcccc

SEQ ID NO: 801518 - RNA, 24 nt, Human
uccucugcccccacuucuggcugc

SEQ ID NO: 801519 - RNA, 23 nt, Human
uccugcgcgccaccaucuugcca

SEQ ID NO: 801520 - RNA, 19 nt, Human
uccuuagauggggagggga

SEQ ID NO: 801521 - RNA, 18 nt, Human
ucgagaccccgcgagccc

SEQ ID NO: 801522 - RNA, 24 nt, Human
ucgucccaacugucugcgccuauu

SEQ ID NO: 801523 - RNA, 20 nt, Human
ucuaaaucagaaagcugaga

SEQ ID NO: 801524 - RNA, 19 nt, Human
ucucaaaaaaaaaaaaaaa

SEQ ID NO: 801525 - RNA, 19 nt, Human
ucucacucugucacccagg

SEQ ID NO: 801526 - RNA, 24 nt, Human
ucucacucugucacccaggcugaa

SEQ ID NO: 801527 - RNA, 26 nt, Human
ucucacucugucacccaggcugaagu

SEQ ID NO: 801528 - RNA, 27 nt, Human
ucucacucugucacccaggcugaagug

SEQ ID NO: 801529 - RNA, 18 nt, Human
ucucacuguguugcccag

SEQ ID NO: 801530 - RNA, 24 nt, Human
ucucacuguguugcccaggaugga

SEQ ID NO: 801531 - RNA, 18 nt, Human
ucucaggccgaccuggcu

SEQ ID NO: 801532 - RNA, 18 nt, Human
ucucaggccgaccuggcu

SEQ ID NO: 801533 - RNA, 20 nt, Human
ucuccucccggucucccaag

SEQ ID NO: 801534 - RNA, 20 nt, Human
ucuccucccggucucccaag

SEQ ID NO: 801535 - RNA, 24 nt, Human
ucuccugccucagccuccugaaua

SEQ ID NO: 801536 - RNA, 22 nt, Human
ucucugugggccguggugagau

SEQ ID NO: 801537 - RNA, 21 nt, Human
ucuggagaacuuccucugggu

SEQ ID NO: 801538 - RNA, 20 nt, Human
ucuggcugcggagguugcag

SEQ ID NO: 801539 - RNA, 18 nt, Human
ucugggcggagacgacac

SEQ ID NO: 801540 - RNA, 18 nt, Human
ucuggguggagacgacac

SEQ ID NO: 801541 - RNA, 18 nt, Human
ucuggucauggauggaug

SEQ ID NO: 801542 - RNA, 18 nt, Human
ucuggucauggauggaug

SEQ ID NO: 801543 - RNA, 24 nt, Human
ucugucacccaggcugaagugcag

SEQ ID NO: 801544 - RNA, 24 nt, Human
ucuguugcacaggcuggagugcag

SEQ ID NO: 801545 - RNA, 18 nt, Human
ucuuaaugccccuuccuc

SEQ ID NO: 801546 - RNA, 18 nt, Human
ucuuaaugccccuuccuc

SEQ ID NO: 801547 - RNA, 19 nt, Human
ucuugcuauguggcccagg

SEQ ID NO: 801548 - RNA, 21 nt, Human
ugaaaagcuuaauacacacaa

SEQ ID NO: 801549 - RNA, 21 nt, Human
ugaaaagcuuaauacacacaa

SEQ ID NO: 801550 - RNA, 24 nt, Human
ugaaaagcuuaauacacacaaagg

SEQ ID NO: 801551 - RNA, 24 nt, Human
ugaaaagcuuaauacacacaaagg

SEQ ID NO: 801552 - RNA, 18 nt, Human
ugaaacagauguaacucu

SEQ ID NO: 801553 - RNA, 20 nt, Human
ugaagcaggaggaucacuug

SEQ ID NO: 801554 - RNA, 24 nt, Human
ugaagcaggaggaucacuugugcc

SEQ ID NO: 801555 - RNA, 26 nt, Human
ugaagcaggaggaucacuugugccca

SEQ ID NO: 801556 - RNA, 19 nt, Human
ugaagugcaguggcaugau

SEQ ID NO: 801557 - RNA, 24 nt, Human
ugaagugcaguggcaugaugaugg

SEQ ID NO: 801558 - RNA, 25 nt, Human
ugaauaggcagugugagagaaaucc

SEQ ID NO: 801559 - RNA, 22 nt, Human
ugaccccaggaguuugaaacca

SEQ ID NO: 801560 - RNA, 22 nt, Human
ugagacagaaucucacucuguc

SEQ ID NO: 801561 - RNA, 22 nt, Human
ugagacagagccucgcucuguu

SEQ ID NO: 801562 - RNA, 21 nt, Human
ugagacucucaaaauaacuga

SEQ ID NO: 801563 - RNA, 18 nt, Human
ugagagaaauccaggaug

SEQ ID NO: 801564 - RNA, 24 nt, Human
ugagagaaauccaggauggcugcu

SEQ ID NO: 801565 - RNA, 24 nt, Human
ugagaggcugaagcaggaggauca

SEQ ID NO: 801566 - RNA, 19 nt, Human
ugagagggaggauaaagcc

SEQ ID NO: 801567 - RNA, 18 nt, Human
ugagaugcccauuaggcc

SEQ ID NO: 801568 - RNA, 18 nt, Human
ugagcccccggcucccag

SEQ ID NO: 801569 - RNA, 18 nt, Human
ugagcccccggcucccag

SEQ ID NO: 801570 - RNA, 22 nt, Human
ugagcugagauagugccacugc

SEQ ID NO: 801571 - RNA, 19 nt, Human
ugaggacuugaagagugcc

SEQ ID NO: 801572 - RNA, 23 nt, Human
ugaggacuugaagagugccuuca

SEQ ID NO: 801573 - RNA, 20 nt, Human
ugaggccuggagccacuggg

SEQ ID NO: 801574 - RNA, 19 nt, Human
ugaggugggaggaucacuu

SEQ ID NO: 801575 - RNA, 20 nt, Human
ugaggugggaggaucacuug

SEQ ID NO: 801576 - RNA, 22 nt, Human
ugaggugggaggaucacuugag

SEQ ID NO: 801577 - RNA, 22 nt, Human
ugaggugggaggaucacuugag

SEQ ID NO: 801578 - RNA, 23 nt, Human
ugaggugggaggaucacuugagu

SEQ ID NO: 801579 - RNA, 19 nt, Human
ugagucucugguuuuuuuc

SEQ ID NO: 801580 - RNA, 23 nt, Human
ugcaaguggagcaccaccaggcc

SEQ ID NO: 801581 - RNA, 23 nt, Human
ugcaaguggagcaccaccaggcc

SEQ ID NO: 801582 - RNA, 24 nt, Human
ugcaaguggagcaccaccaggccc

SEQ ID NO: 801583 - RNA, 24 nt, Human
ugcaaguggagcaccaccaggccc

SEQ ID NO: 801584 - RNA, 24 nt, Human
ugcacaggcuggagugcaguggcg

SEQ ID NO: 801585 - RNA, 23 nt, Human
ugcaguggcaugaugauggcuca

SEQ ID NO: 801586 - RNA, 24 nt, Human
ugccacagccuccuaaggagcuag

SEQ ID NO: 801587 - RNA, 21 nt, Human
ugccacuagugaggccuggag

SEQ ID NO: 801588 - RNA, 21 nt, Human
ugccacuagugaggccuggag

SEQ ID NO: 801589 - RNA, 24 nt, Human
ugcccaagcuggucucgaacuccu

SEQ ID NO: 801590 - RNA, 20 nt, Human
ugccccacacuaucccacuc

SEQ ID NO: 801591 - RNA, 22 nt, Human
ugccccacacuaucccacucac

SEQ ID NO: 801592 - RNA, 19 nt, Human
ugccccgcccccucgcucc

SEQ ID NO: 801593 - RNA, 24 nt, Human
ugccgggaucacaggcgugagcca

SEQ ID NO: 801594 - RNA, 24 nt, Human
ugccgucucacuguguugcccagg

SEQ ID NO: 801595 - RNA, 18 nt, Human
ugccucacuccccugcuc

SEQ ID NO: 801596 - RNA, 24 nt, Human
ugccucagcaucccaaagugcugg

SEQ ID NO: 801597 - RNA, 27 nt, Human
ugccucagccuccugaauagcugggau

SEQ ID NO: 801598 - RNA, 23 nt, Human
ugccuccaggcaucccugaccac

SEQ ID NO: 801599 - RNA, 22 nt, Human
ugccucggccuuccaaagugcc

SEQ ID NO: 801600 - RNA, 21 nt, Human
ugcggagguugcagugagcug

SEQ ID NO: 801601 - RNA, 18 nt, Human
ugcuaacgagaagucugc

SEQ ID NO: 801602 - RNA, 18 nt, Human
ugcuaacgagaagucugc

SEQ ID NO: 801603 - RNA, 18 nt, Human
ugcuugaccccaggaguu

SEQ ID NO: 801604 - RNA, 22 nt, Human
uggaaacaugagucucugguuu

SEQ ID NO: 801605 - RNA, 22 nt, Human
uggaaacaugagucucugguuu

SEQ ID NO: 801606 - RNA, 18 nt, Human
uggagcaccaccaggccc

SEQ ID NO: 801607 - RNA, 18 nt, Human
uggagcaccaccaggccc

SEQ ID NO: 801608 - RNA, 22 nt, Human
uggagccacuggggagaggaca

SEQ ID NO: 801609 - RNA, 22 nt, Human
uggagccacuggggagaggaca

SEQ ID NO: 801610 - RNA, 19 nt, Human
uggaguauaguggcaugau

SEQ ID NO: 801611 - RNA, 23 nt, Human
uggagugcaguggcgugauuuca

SEQ ID NO: 801612 - RNA, 21 nt, Human
uggaguucucuguucccggga

SEQ ID NO: 801613 - RNA, 19 nt, Human
uggcagagucacaucuggu

SEQ ID NO: 801614 - RNA, 20 nt, Human
uggcaugaucacagcucacu

SEQ ID NO: 801615 - RNA, 21 nt, Human
uggcaugaugauggcucacua

SEQ ID NO: 801616 - RNA, 22 nt, Human
uggcaugaugauggcucacuag

SEQ ID NO: 801617 - RNA, 22 nt, Human
uggcucacgccuguuaauucca

SEQ ID NO: 801618 - RNA, 21 nt, Human
uggcucaugccuguaacucca

SEQ ID NO: 801619 - RNA, 23 nt, Human
uggcucaugccuguaacuccaac

SEQ ID NO: 801620 - RNA, 23 nt, Human
uggcugggcgugguggcucacgc

SEQ ID NO: 801621 - RNA, 24 nt, Human
ugggacaagaggcaugagccacca

SEQ ID NO: 801622 - RNA, 21 nt, Human
ugggaccauaggugcaugcca

SEQ ID NO: 801623 - RNA, 24 nt, Human
ugggaccauaggugcaugccacca

SEQ ID NO: 801624 - RNA, 20 nt, Human
ugggaggaaugucuuccagc

SEQ ID NO: 801625 - RNA, 20 nt, Human
ugggaggaaugucuuccagc

SEQ ID NO: 801626 - RNA, 20 nt, Human
ugggaggaaugucuuccagg

SEQ ID NO: 801627 - RNA, 20 nt, Human
ugggaggaaugucuuccagg

SEQ ID NO: 801628 - RNA, 19 nt, Human
ugggaggccgaggcaggca

SEQ ID NO: 801629 - RNA, 20 nt, Human
ugggaggccgaggcaggcag

SEQ ID NO: 801630 - RNA, 24 nt, Human
ugggaggccgaggcaggcagacca

SEQ ID NO: 801631 - RNA, 19 nt, Human
ugggaggcugaggugggag

SEQ ID NO: 801632 - RNA, 24 nt, Human
ugggaggcugaggugggaggauca

SEQ ID NO: 801633 - RNA, 21 nt, Human
ugggauuacaagcgcccacca

SEQ ID NO: 801634 - RNA, 24 nt, Human
ugggauuacaagcgcccaccaccg

SEQ ID NO: 801635 - RNA, 23 nt, Human
ugggcagccucagagccugcaca

SEQ ID NO: 801636 - RNA, 23 nt, Human
ugggcagccucagagccugcaca

SEQ ID NO: 801637 - RNA, 24 nt, Human
uggguaucauagcaagaaucuguc

SEQ ID NO: 801638 - RNA, 22 nt, Human
uggucaaaguaguaacagagca

SEQ ID NO: 801639 - RNA, 25 nt, Human
ugguggcucacgccuguuaauucca

SEQ ID NO: 801640 - RNA, 24 nt, Human
ugguuaggcuggucucaaacuccu

SEQ ID NO: 801641 - RNA, 19 nt, Human
uguagagaccaggucuugc

SEQ ID NO: 801642 - RNA, 24 nt, Human
uguagagaccaggucuugcuaugu

SEQ ID NO: 801643 - RNA, 19 nt, Human
uguauacucagcugugugc

SEQ ID NO: 801644 - RNA, 21 nt, Human
ugucaugagcuaggcacuggg

SEQ ID NO: 801645 - RNA, 20 nt, Human
ugucugcgccuaugcugggg

SEQ ID NO: 801646 - RNA, 20 nt, Human
ugucugcgccuaugcugggg

SEQ ID NO: 801647 - RNA, 24 nt, Human
uguuuagcccaguaguucccaaac

SEQ ID NO: 801648 - RNA, 18 nt, Human
uuaguagagacaggguuu

SEQ ID NO: 801649 - RNA, 21 nt, Human
uucaagugauucuccugccuc

SEQ ID NO: 801650 - RNA, 23 nt, Human
uucaagugauucuccugccucag

SEQ ID NO: 801651 - RNA, 24 nt, Human
uucaagugauucuccugccucagc

SEQ ID NO: 801652 - RNA, 22 nt, Human
uucaccucacugcaaacuccgc

SEQ ID NO: 801653 - RNA, 19 nt, Human
uucacugggcuagccucaa

SEQ ID NO: 801654 - RNA, 21 nt, Human
uucagggacugccugggcucu

SEQ ID NO: 801655 - RNA, 21 nt, Human
uucagggacugccugggcucu

SEQ ID NO: 801656 - RNA, 22 nt, Human
uucauuacccaggguucaaauc

SEQ ID NO: 801657 - RNA, 20 nt, Human
uuccagauaagaaaucagcu

SEQ ID NO: 801658 - RNA, 23 nt, Human
uuccuuagauggggaggggaccc

SEQ ID NO: 801659 - RNA, 22 nt, Human
uugagacagagccucgcucugu

SEQ ID NO: 801660 - RNA, 25 nt, Human
uugagaggcugaagcaggaggauca

SEQ ID NO: 801661 - RNA, 23 nt, Human
uugagucuggcugcggagguugc

SEQ ID NO: 801662 - RNA, 21 nt, Human
uugcagugagcugagauagug

SEQ ID NO: 801663 - RNA, 22 nt, Human
uugcagugagcugagauagugc

SEQ ID NO: 801664 - RNA, 21 nt, Human
uugcuugaccccaggaguuug

SEQ ID NO: 801665 - RNA, 18 nt, Human
uuggaggaggaggcagag

SEQ ID NO: 801666 - RNA, 22 nt, Human
uuggcugggcgugguggcucac

SEQ ID NO: 801667 - RNA, 25 nt, Human
uugggaggcugaggugggaggauca

SEQ ID NO: 801668 - RNA, 23 nt, Human
uugggccaggaagggaaaagugu

SEQ ID NO: 801669 - RNA, 23 nt, Human
uugggccaggaagggaaaagugu

SEQ ID NO: 801670 - RNA, 21 nt, Human
uuggucauaagcuuugccuug

SEQ ID NO: 801671 - RNA, 24 nt, Human
uuguaaagauagggcuucacuaua

SEQ ID NO: 801672 - RNA, 19 nt, Human
uuuacugggcaucugucaa

SEQ ID NO: 801673 - RNA, 21 nt, Human
uuuuuguaauuuuuaguagag

SEQ ID NO: 801674 - RNA, 20 nt, Human
uuuuuucuuuugagacagag

SEQ ID NO: 801675 - RNA, 20 nt, Human
aaaaaaaaaaaaaaugccag

SEQ ID NO: 801676 - RNA, 25 nt, Human
aaaaaaaaaaaaaaugccaggcgca

SEQ ID NO: 801677 - RNA, 24 nt, Human
aaaaaaccagcacagcaucucacg

SEQ ID NO: 801678 - RNA, 18 nt, Human
aaacggaggccugaguga

SEQ ID NO: 801679 - RNA, 20 nt, Human
aaagaagagaaaauggggag

SEQ ID NO: 801680 - RNA, 18 nt, Human
aaagagauaacugccccc

SEQ ID NO: 801681 - RNA, 23 nt, Human
aaauccagcaggccuaggagaga

SEQ ID NO: 801682 - RNA, 19 nt, Human
aacauggugaaaccugucu

SEQ ID NO: 801683 - RNA, 20 nt, Human
aacauggugaaaccugucuc

SEQ ID NO: 801684 - RNA, 18 nt, Human
aaccugcugacccuccuu

SEQ ID NO: 801685 - RNA, 24 nt, Human
aacuccucgauuucucaguuuugc

SEQ ID NO: 801686 - RNA, 19 nt, Human
aacuguguggccuuuccuc

SEQ ID NO: 801687 - RNA, 22 nt, Human
aagacuggcccacaccccuugg

SEQ ID NO: 801688 - RNA, 21 nt, Human
aagcaagggcacgcggaccug

SEQ ID NO: 801689 - RNA, 24 nt, Human
aaugaggcugggugcaguggcuca

SEQ ID NO: 801690 - RNA, 24 nt, Human
aauugcuugaacacgggaggugga

SEQ ID NO: 801691 - RNA, 24 nt, Human
aauugcuugaaccugggaggcgga

SEQ ID NO: 801692 - RNA, 19 nt, Human
acaacucccugaaacggag

SEQ ID NO: 801693 - RNA, 23 nt, Human
acagagugagacuccgucuaaaa

SEQ ID NO: 801694 - RNA, 20 nt, Human
acagcaggaugagagggagg

SEQ ID NO: 801695 - RNA, 20 nt, Human
acagcccagcaggaggugcu

SEQ ID NO: 801696 - RNA, 24 nt, Human
accacacuccagccugggcgacag

SEQ ID NO: 801697 - RNA, 22 nt, Human
accacugcacuccagccugggc

SEQ ID NO: 801698 - RNA, 23 nt, Human
accaugccucuaggagccucagc

SEQ ID NO: 801699 - RNA, 18 nt, Human
acccaggcuccugcugcc

SEQ ID NO: 801700 - RNA, 18 nt, Human
accccgggcucuccaagc

SEQ ID NO: 801701 - RNA, 20 nt, Human
accggcagcugcugccacac

SEQ ID NO: 801702 - RNA, 19 nt, Human
accuaauuucuccccacca

SEQ ID NO: 801703 - RNA, 24 nt, Human
accucgucucuacuaaaaauacaa

SEQ ID NO: 801704 - RNA, 21 nt, Human
accugguaccccucucccccu

SEQ ID NO: 801705 - RNA, 22 nt, Human
acgccaccacacuccagccugg

SEQ ID NO: 801706 - RNA, 24 nt, Human
acgccaccacacuccagccugggc

SEQ ID NO: 801707 - RNA, 19 nt, Human
acguggggaugccgccugc

SEQ ID NO: 801708 - RNA, 24 nt, Human
acuccagccugggcaacagaguga

SEQ ID NO: 801709 - RNA, 24 nt, Human
acuccagccugggcgacagaguga

SEQ ID NO: 801710 - RNA, 20 nt, Human
acucucggcucauuucccuc

SEQ ID NO: 801711 - RNA, 24 nt, Human
acugcacuccagccugggcaacag

SEQ ID NO: 801712 - RNA, 24 nt, Human
acugcacuccagccugggcaacag

SEQ ID NO: 801713 - RNA, 19 nt, Human
acugcugagacccucccug

SEQ ID NO: 801714 - RNA, 24 nt, Human
acuggaggucaggaguuugagacc

SEQ ID NO: 801715 - RNA, 18 nt, Human
agaaaggauucuagauca

SEQ ID NO: 801716 - RNA, 20 nt, Human
agaauccucccugccccacu

SEQ ID NO: 801717 - RNA, 22 nt, Human
agacaguggcugucaagucagg

SEQ ID NO: 801718 - RNA, 24 nt, Human
agacugaggcaggagaauugcuug

SEQ ID NO: 801719 - RNA, 20 nt, Human
agacuggcccacaccccuug

SEQ ID NO: 801720 - RNA, 21 nt, Human
agagagacuggcccugagggu

SEQ ID NO: 801721 - RNA, 21 nt, Human
agagcuccggagccccugccc

SEQ ID NO: 801722 - RNA, 21 nt, Human
agagggaccccaagucugggu

SEQ ID NO: 801723 - RNA, 23 nt, Human
agagggaggccugagaaaggucc

SEQ ID NO: 801724 - RNA, 21 nt, Human
agaggggugaagggaggccgg

SEQ ID NO: 801725 - RNA, 23 nt, Human
agcacagcaucucacgguuugca

SEQ ID NO: 801726 - RNA, 20 nt, Human
agcacuuugggaggcugagg

SEQ ID NO: 801727 - RNA, 21 nt, Human
agccauugggcaggagaaaga

SEQ ID NO: 801728 - RNA, 23 nt, Human
agccgggcgugguggcgggugcc

SEQ ID NO: 801729 - RNA, 22 nt, Human
agccuggccaacauggugaaac

SEQ ID NO: 801730 - RNA, 23 nt, Human
agccuggccaacauggugaaacc

SEQ ID NO: 801731 - RNA, 22 nt, Human
agccugggcaacagagugagac

SEQ ID NO: 801732 - RNA, 24 nt, Human
agccugggcgacagagugagacuc

SEQ ID NO: 801733 - RNA, 22 nt, Human
agccuggugucaggaggaacug

SEQ ID NO: 801734 - RNA, 20 nt, Human
agcuucaaaagcagucagca

SEQ ID NO: 801735 - RNA, 19 nt, Human
aggagacagccgugugugu

SEQ ID NO: 801736 - RNA, 19 nt, Human
aggaggaguuggagcccug

SEQ ID NO: 801737 - RNA, 20 nt, Human
aggaguuugagaccagccug

SEQ ID NO: 801738 - RNA, 21 nt, Human
aggcaaacacagggcccuuca

SEQ ID NO: 801739 - RNA, 27 nt, Human
aggcaaggaggaguuggagcccugggg

SEQ ID NO: 801740 - RNA, 20 nt, Human
aggcaaggucuacacgggcu

SEQ ID NO: 801741 - RNA, 23 nt, Human
aggcagagagugcuccagcaggg

SEQ ID NO: 801742 - RNA, 26 nt, Human
aggcagcuggaucacuggaggucagg

SEQ ID NO: 801743 - RNA, 24 nt, Human
aggcaggagaauugcuugaacacg

SEQ ID NO: 801744 - RNA, 22 nt, Human
aggcaggagaauugcuugaacc

SEQ ID NO: 801745 - RNA, 24 nt, Human
aggcaggagaauugcuugaaccug

SEQ ID NO: 801746 - RNA, 24 nt, Human
aggcccccuccuguaccccugccu

SEQ ID NO: 801747 - RNA, 19 nt, Human
aggcggagguugcaaugag

SEQ ID NO: 801748 - RNA, 22 nt, Human
aggcugggugcaguggcucacg

SEQ ID NO: 801749 - RNA, 18 nt, Human
agggaccccaagucuggg

SEQ ID NO: 801750 - RNA, 19 nt, Human
agggagggggacuuuucgg

SEQ ID NO: 801751 - RNA, 22 nt, Human
agggagucugggagcuggucag

SEQ ID NO: 801752 - RNA, 19 nt, Human
agggaugggguggggggca

SEQ ID NO: 801753 - RNA, 18 nt, Human
aggggccugagcccagag

SEQ ID NO: 801754 - RNA, 19 nt, Human
agguggagguuacagugag

SEQ ID NO: 801755 - RNA, 24 nt, Human
agguugaggcaggagaauugcuug

SEQ ID NO: 801756 - RNA, 25 nt, Human
agucaggagcccguccugcagcagc

SEQ ID NO: 801757 - RNA, 21 nt, Human
agugaagacaggaagaguggu

SEQ ID NO: 801758 - RNA, 24 nt, Human
aguggcucacgccuguaaucccag

SEQ ID NO: 801759 - RNA, 21 nt, Human
auaccauuuagaaagaggcag

SEQ ID NO: 801760 - RNA, 18 nt, Human
auagaaggcccucucccc

SEQ ID NO: 801761 - RNA, 24 nt, Human
aucacgccaccacacuccagccug

SEQ ID NO: 801762 - RNA, 20 nt, Human
aucacuggaggucaggaguu

SEQ ID NO: 801763 - RNA, 24 nt, Human
aucacuggaggucaggaguuugag

SEQ ID NO: 801764 - RNA, 21 nt, Human
aucaggagugccccuacgugg

SEQ ID NO: 801765 - RNA, 21 nt, Human
auccuucaacaacuguguggc

SEQ ID NO: 801766 - RNA, 25 nt, Human
auggcuuccccaaauccagcaggcc

SEQ ID NO: 801767 - RNA, 21 nt, Human
caaagcaagggcacgcggacc

SEQ ID NO: 801768 - RNA, 23 nt, Human
caaagcucugcaggugcucgccc

SEQ ID NO: 801769 - RNA, 23 nt, Human
caacauggugaaaccugucucua

SEQ ID NO: 801770 - RNA, 26 nt, Human
caagcaaacccacacccaguuccaga

SEQ ID NO: 801771 - RNA, 20 nt, Human
cacagucccugccgcuccuc

SEQ ID NO: 801772 - RNA, 18 nt, Human
cacaugaagugacaggag

SEQ ID NO: 801773 - RNA, 23 nt, Human
caccaaagcaagggcacgcggac

SEQ ID NO: 801774 - RNA, 24 nt, Human
caccacacuccagccugggcgaca

SEQ ID NO: 801775 - RNA, 24 nt, Human
caccacugcacuccagccugggca

SEQ ID NO: 801776 - RNA, 18 nt, Human
cacccagagucagagcag

SEQ ID NO: 801777 - RNA, 21 nt, Human
cacgccaccacacuccagccu

SEQ ID NO: 801778 - RNA, 24 nt, Human
cacgccuguaaucccagcacuuug

SEQ ID NO: 801779 - RNA, 24 nt, Human
cacucaggccaagcucaggagagc

SEQ ID NO: 801780 - RNA, 22 nt, Human
cacuccagccugggcaacagag

SEQ ID NO: 801781 - RNA, 22 nt, Human
cacuccagccugggcaacagag

SEQ ID NO: 801782 - RNA, 24 nt, Human
cacuccagccugggcaacagagug

SEQ ID NO: 801783 - RNA, 22 nt, Human
cacuccagccugggcgacagag

SEQ ID NO: 801784 - RNA, 22 nt, Human
cacuccagccugggcgacagag

SEQ ID NO: 801785 - RNA, 24 nt, Human
cacuccagccugggcgacagagug

SEQ ID NO: 801786 - RNA, 18 nt, Human
cacugcacuccagccugg

SEQ ID NO: 801787 - RNA, 19 nt, Human
cacugcacuccagccuggg

SEQ ID NO: 801788 - RNA, 21 nt, Human
cacugcacuccagccugggca

SEQ ID NO: 801789 - RNA, 23 nt, Human
cacugcacuccagccugggcaac

SEQ ID NO: 801790 - RNA, 24 nt, Human
cacugcacuccagccugggcaaca

SEQ ID NO: 801791 - RNA, 23 nt, Human
cacuggaggucaggaguuugaga

SEQ ID NO: 801792 - RNA, 20 nt, Human
cagaaaaaaccagcacagca

SEQ ID NO: 801793 - RNA, 22 nt, Human
cagaaaaaaccagcacagcauc

SEQ ID NO: 801794 - RNA, 22 nt, Human
cagaccagcugggagccagaga

SEQ ID NO: 801795 - RNA, 19 nt, Human
cagagcaguggcagaugga

SEQ ID NO: 801796 - RNA, 21 nt, Human
cagcacgagggagagggaccc

SEQ ID NO: 801797 - RNA, 24 nt, Human
cagcacuuugggaggcugaggcag

SEQ ID NO: 801798 - RNA, 21 nt, Human
cagccaaucaaugcaggucac

SEQ ID NO: 801799 - RNA, 20 nt, Human
cagcccaaagcaaaggccuu

SEQ ID NO: 801800 - RNA, 24 nt, Human
cagcuacucaggagguugaggcag

SEQ ID NO: 801801 - RNA, 24 nt, Human
cagcugggccccucuaaaggcaag

SEQ ID NO: 801802 - RNA, 22 nt, Human
caggcgcaccaaggaaagccuc

SEQ ID NO: 801803 - RNA, 20 nt, Human
cagggcccuucacucaggcc

SEQ ID NO: 801804 - RNA, 22 nt, Human
caguccaccaagaggaugacac

SEQ ID NO: 801805 - RNA, 19 nt, Human
cagugcuaggaggccacag

SEQ ID NO: 801806 - RNA, 21 nt, Human
cauccaaagagauaacugccc

SEQ ID NO: 801807 - RNA, 22 nt, Human
caugugugugcuggggggcauc

SEQ ID NO: 801808 - RNA, 20 nt, Human
ccaagacuggcccacacccc

SEQ ID NO: 801809 - RNA, 21 nt, Human
ccaagcaaacccacacccagu

SEQ ID NO: 801810 - RNA, 20 nt, Human
ccaagcauagcaaacgcucu

SEQ ID NO: 801811 - RNA, 23 nt, Human
ccaaggcccccuccuguaccccu

SEQ ID NO: 801812 - RNA, 27 nt, Human
ccacacaggccacucagagaugccaaa

SEQ ID NO: 801813 - RNA, 22 nt, Human
ccaccaagaggaugacaccaag

SEQ ID NO: 801814 - RNA, 23 nt, Human
ccaccacacuccagccugggcga

SEQ ID NO: 801815 - RNA, 23 nt, Human
ccaccacacuccagccugggcga

SEQ ID NO: 801816 - RNA, 20 nt, Human
ccacugcacuccagccuggg

SEQ ID NO: 801817 - RNA, 21 nt, Human
ccacugcacuccagccugggc

SEQ ID NO: 801818 - RNA, 23 nt, Human
ccacugcacuccagccugggcaa

SEQ ID NO: 801819 - RNA, 24 nt, Human
ccacugcacuccagccugggcaac

SEQ ID NO: 801820 - RNA, 18 nt, Human
ccagagucagagcagugg

SEQ ID NO: 801821 - RNA, 22 nt, Human
ccagagucagagcaguggcaga

SEQ ID NO: 801822 - RNA, 21 nt, Human
ccagcccaaagcaaaggccuu

SEQ ID NO: 801823 - RNA, 18 nt, Human
ccaggcuccugcugccca

SEQ ID NO: 801824 - RNA, 24 nt, Human
ccagugccucuuuguucauuuucu

SEQ ID NO: 801825 - RNA, 21 nt, Human
ccauugggcaggagaaagaag

SEQ ID NO: 801826 - RNA, 21 nt, Human
cccacagaccagcugggagcc

SEQ ID NO: 801827 - RNA, 20 nt, Human
cccagagucagagcaguggc

SEQ ID NO: 801828 - RNA, 21 nt, Human
cccagugcuaggaggccacag

SEQ ID NO: 801829 - RNA, 19 nt, Human
cccauccucgucccugaaa

SEQ ID NO: 801830 - RNA, 18 nt, Human
ccccacagaccagcuggg

SEQ ID NO: 801831 - RNA, 24 nt, Human
ccccacagaccagcugggagccag

SEQ ID NO: 801832 - RNA, 18 nt, Human
ccccaccagccacuuccc

SEQ ID NO: 801833 - RNA, 24 nt, Human
cccccucgcccccucgaguaccug

SEQ ID NO: 801834 - RNA, 21 nt, Human
ccccucuaaaggcaaggagga

SEQ ID NO: 801835 - RNA, 18 nt, Human
ccccuuggaccugcccag

SEQ ID NO: 801836 - RNA, 20 nt, Human
ccccuuggaccugcccagcc

SEQ ID NO: 801837 - RNA, 19 nt, Human
cccuccucucuccucccuc

SEQ ID NO: 801838 - RNA, 18 nt, Human
cccuggggaccugggggu

SEQ ID NO: 801839 - RNA, 19 nt, Human
ccgcuccucugccaccccc

SEQ ID NO: 801840 - RNA, 25 nt, Human
ccggagccccugcccuaagcuccca

SEQ ID NO: 801841 - RNA, 22 nt, Human
ccuacugagauccugccuguua

SEQ ID NO: 801842 - RNA, 19 nt, Human
ccucagcauguguuuccaa

SEQ ID NO: 801843 - RNA, 18 nt, Human
ccucuaaaggcaaggagg

SEQ ID NO: 801844 - RNA, 20 nt, Human
ccucucuccucccucgcgcg

SEQ ID NO: 801845 - RNA, 18 nt, Human
ccucugccccagcaaguc

SEQ ID NO: 801846 - RNA, 19 nt, Human
ccugcggggacaaccaggg

SEQ ID NO: 801847 - RNA, 20 nt, Human
ccuggaccaaggaggggacc

SEQ ID NO: 801848 - RNA, 21 nt, Human
ccuggccaacauggugaaacc

SEQ ID NO: 801849 - RNA, 23 nt, Human
ccuggccaacauggugaaaccug

SEQ ID NO: 801850 - RNA, 19 nt, Human
ccuggccaagauggugaca

SEQ ID NO: 801851 - RNA, 21 nt, Human
ccuggccaagauggugacacc

SEQ ID NO: 801852 - RNA, 19 nt, Human
ccugggaggcggagguugc

SEQ ID NO: 801853 - RNA, 22 nt, Human
ccugggcgacagagugagacuc

SEQ ID NO: 801854 - RNA, 21 nt, Human
ccuggugucaggaggaacugg

SEQ ID NO: 801855 - RNA, 22 nt, Human
ccuguaaucccagcacuuuggg

SEQ ID NO: 801856 - RNA, 19 nt, Human
ccuguaauccuagcuacuc

SEQ ID NO: 801857 - RNA, 22 nt, Human
ccugucucuacuaaaaauacaa

SEQ ID NO: 801858 - RNA, 22 nt, Human
ccuucaugugugugcugggggg

SEQ ID NO: 801859 - RNA, 20 nt, Human
ccuugcuugcuuucugcagc

SEQ ID NO: 801860 - RNA, 19 nt, Human
ccuugggggagccaggagg

SEQ ID NO: 801861 - RNA, 19 nt, Human
ccuuguucagccuuugagg

SEQ ID NO: 801862 - RNA, 19 nt, Human
ccuuucacagaaaaaacca

SEQ ID NO: 801863 - RNA, 19 nt, Human
cgccaccacacuccagccu

SEQ ID NO: 801864 - RNA, 24 nt, Human
cgcccauaaucccagcuacucagg

SEQ ID NO: 801865 - RNA, 19 nt, Human
cgcccccucgaguaccugg

SEQ ID NO: 801866 - RNA, 20 nt, Human
cgcucugcacaugaccuaaa

SEQ ID NO: 801867 - RNA, 29 nt, Human
cgggagguggagguuacagugacaacggu

SEQ ID NO: 801868 - RNA, 24 nt, Human
cgggagguggagguuacagugagc

SEQ ID NO: 801869 - RNA, 21 nt, Human
cucacccuccaggccuccagg

SEQ ID NO: 801870 - RNA, 24 nt, Human
cucaccugguaccccucucccccu

SEQ ID NO: 801871 - RNA, 22 nt, Human
cucacgccuguaaucccagcac

SEQ ID NO: 801872 - RNA, 24 nt, Human
cucacgccuguaaucccagcacuu

SEQ ID NO: 801873 - RNA, 22 nt, Human
cuccucucuccucccucgcgcg

SEQ ID NO: 801874 - RNA, 22 nt, Human
cuccuguaccccugccucugcc

SEQ ID NO: 801875 - RNA, 18 nt, Human
cucgaaccccucuccgca

SEQ ID NO: 801876 - RNA, 18 nt, Human
cucgaguaccugggcagc

SEQ ID NO: 801877 - RNA, 22 nt, Human
cucgcccccucgaguaccuggg

SEQ ID NO: 801878 - RNA, 23 nt, Human
cucuccagccucaccugguaccc

SEQ ID NO: 801879 - RNA, 28 nt, Human
cucugguuugggagugggccggaaagcc

SEQ ID NO: 801880 - RNA, 24 nt, Human
cugcccacccacacaggccacuca

SEQ ID NO: 801881 - RNA, 18 nt, Human
cuggaccaaggaggggac

SEQ ID NO: 801882 - RNA, 18 nt, Human
cuggagcaccuggccucu

SEQ ID NO: 801883 - RNA, 21 nt, Human
cuggaggugagauacgcucug

SEQ ID NO: 801884 - RNA, 22 nt, Human
cuggccaccaggucugccccuc

SEQ ID NO: 801885 - RNA, 22 nt, Human
cuggccaccaggucugccccuc

SEQ ID NO: 801886 - RNA, 20 nt, Human
cugggcgugguggugggcgc

SEQ ID NO: 801887 - RNA, 19 nt, Human
cuggggauaccuaauuucu

SEQ ID NO: 801888 - RNA, 21 nt, Human
cugguuugggagugggcugag

SEQ ID NO: 801889 - RNA, 23 nt, Human
cuuccucacccuccaggccucca

SEQ ID NO: 801890 - RNA, 18 nt, Human
cuuuccugucccaggaag

SEQ ID NO: 801891 - RNA, 23 nt, Human
gaaaauggggaguuuguaaacag

SEQ ID NO: 801892 - RNA, 21 nt, Human
gaaccccucuccgcacucugc

SEQ ID NO: 801893 - RNA, 24 nt, Human
gaaggcucugggcaccuagggugg

SEQ ID NO: 801894 - RNA, 18 nt, Human
gaauuaggauuuguggcc

SEQ ID NO: 801895 - RNA, 19 nt, Human
gacaccaccuggccuauag

SEQ ID NO: 801896 - RNA, 23 nt, Human
gacagagugagacuccgucuaaa

SEQ ID NO: 801897 - RNA, 24 nt, Human
gaccaccaccgccuccugccuaaa

SEQ ID NO: 801898 - RNA, 23 nt, Human
gagaaagaagagaaaauggggag

SEQ ID NO: 801899 - RNA, 23 nt, Human
gagaauugcuugaacacgggagg

SEQ ID NO: 801900 - RNA, 23 nt, Human
gagaauugcuugaaccugggagg

SEQ ID NO: 801901 - RNA, 23 nt, Human
gagaccagccuggccaacauggu

SEQ ID NO: 801902 - RNA, 24 nt, Human
gagaugccacaugaagugacagga

SEQ ID NO: 801903 - RNA, 18 nt, Human
gagaugccuguccugcca

SEQ ID NO: 801904 - RNA, 19 nt, Human
gagcaguggcagauggaag

SEQ ID NO: 801905 - RNA, 20 nt, Human
gagcaguggcagauggaagg

SEQ ID NO: 801906 - RNA, 20 nt, Human
gagcccagagcugcgugcga

SEQ ID NO: 801907 - RNA, 22 nt, Human
gaggaggugucucuaagcaugg

SEQ ID NO: 801908 - RNA, 19 nt, Human
gaggucaggaguuugagac

SEQ ID NO: 801909 - RNA, 23 nt, Human
gaggugggcuucucauggugagc

SEQ ID NO: 801910 - RNA, 19 nt, Human
gagguuacagugagcugac

SEQ ID NO: 801911 - RNA, 19 nt, Human
gagguugcaaugagccuag

SEQ ID NO: 801912 - RNA, 21 nt, Human
gagugagacacuggcucaaaa

SEQ ID NO: 801913 - RNA, 24 nt, Human
gaucacuggaggucaggaguuuga

SEQ ID NO: 801914 - RNA, 18 nt, Human
gcaagaaaaugggaggag

SEQ ID NO: 801915 - RNA, 24 nt, Human
gcacuccagccugggcaacagagu

SEQ ID NO: 801916 - RNA, 18 nt, Human
gcagacacuuucacaugg

SEQ ID NO: 801917 - RNA, 23 nt, Human
gcagcagccuagccaucuggaag

SEQ ID NO: 801918 - RNA, 19 nt, Human
gccaacauggugaaaccug

SEQ ID NO: 801919 - RNA, 22 nt, Human
gccaccacacuccagccugggc

SEQ ID NO: 801920 - RNA, 18 nt, Human
gcccaagcaaacccacac

SEQ ID NO: 801921 - RNA, 22 nt, Human
gcccaagcaaacccacacccag

SEQ ID NO: 801922 - RNA, 20 nt, Human
gccuagaucacgccaccaca

SEQ ID NO: 801923 - RNA, 24 nt, Human
gcucugguuugggagugggcugag

SEQ ID NO: 801924 - RNA, 21 nt, Human
gcugcagucauugugaguccu

SEQ ID NO: 801925 - RNA, 23 nt, Human
gcugugggaucugucuccuggcu

SEQ ID NO: 801926 - RNA, 21 nt, Human
ggaaugaggcugggugcagug

SEQ ID NO: 801927 - RNA, 23 nt, Human
ggacaaccagggccaccugguga

SEQ ID NO: 801928 - RNA, 21 nt, Human
ggacuugggagacaccuggug

SEQ ID NO: 801929 - RNA, 24 nt, Human
ggagaaagaagagaaaauggggag

SEQ ID NO: 801930 - RNA, 22 nt, Human
ggagauggagagagaggggggc

SEQ ID NO: 801931 - RNA, 22 nt, Human
ggagcugcagcaggcgcaccaa

SEQ ID NO: 801932 - RNA, 19 nt, Human
ggaggcugaggcagcugga

SEQ ID NO: 801933 - RNA, 21 nt, Human
ggagguggagguuacagugag

SEQ ID NO: 801934 - RNA, 18 nt, Human
ggagguuacagugagcug

SEQ ID NO: 801935 - RNA, 19 nt, Human
ggagguuacagugagcuga

SEQ ID NO: 801936 - RNA, 24 nt, Human
ggagguuacagugagcugacguug

SEQ ID NO: 801937 - RNA, 20 nt, Human
ggagguugcaaugagccuag

SEQ ID NO: 801938 - RNA, 24 nt, Human
ggagguugcaaugagccuagauca

SEQ ID NO: 801939 - RNA, 24 nt, Human
ggccaacauggugaaaccugucuc

SEQ ID NO: 801940 - RNA, 20 nt, Human
ggcuagaaccugcugacccu

SEQ ID NO: 801941 - RNA, 18 nt, Human
ggcuucgcugaggaggug

SEQ ID NO: 801942 - RNA, 20 nt, Human
gggaccugggggugaccucu

SEQ ID NO: 801943 - RNA, 22 nt, Human
gggcaacagagugagacacugg

SEQ ID NO: 801944 - RNA, 24 nt, Human
gggcgugguggcgggugccuguaa

SEQ ID NO: 801945 - RNA, 20 nt, Human
ggggggcagguagagaagaa

SEQ ID NO: 801946 - RNA, 20 nt, Human
gggugaagggaggccggggg

SEQ ID NO: 801947 - RNA, 22 nt, Human
ggucaccugugcuccuaccugu

SEQ ID NO: 801948 - RNA, 19 nt, Human
ggucaggaguuugagacca

SEQ ID NO: 801949 - RNA, 23 nt, Human
ggugcaguggcucacgccuguaa

SEQ ID NO: 801950 - RNA, 25 nt, Human
ggugcuggcacagcaggaugagagg

SEQ ID NO: 801951 - RNA, 19 nt, Human
gguggagguuacagugagc

SEQ ID NO: 801952 - RNA, 24 nt, Human
gguggcgggugccuguaauccuag

SEQ ID NO: 801953 - RNA, 18 nt, Human
guaaggcuucccaucaac

SEQ ID NO: 801954 - RNA, 19 nt, Human
guccuacugagauccugcc

SEQ ID NO: 801955 - RNA, 18 nt, Human
gugcaguggcucacgccu

SEQ ID NO: 801956 - RNA, 21 nt, Human
gugcauggaggcaaacacagg

SEQ ID NO: 801957 - RNA, 21 nt, Human
gugcucggucaaaguuaacuc

SEQ ID NO: 801958 - RNA, 20 nt, Human
guggggggcagguagagaag

SEQ ID NO: 801959 - RNA, 24 nt, Human
guugcaccacugcacuccagccug

SEQ ID NO: 801960 - RNA, 24 nt, Human
guuucauucaccccgggcucucca

SEQ ID NO: 801961 - RNA, 19 nt, Human
uaaacagucauccaaagag

SEQ ID NO: 801962 - RNA, 22 nt, Human
uaaacagucauccaaagagaua

SEQ ID NO: 801963 - RNA, 18 nt, Human
uaaaguaguccauucagg

SEQ ID NO: 801964 - RNA, 23 nt, Human
uaaucuggccaugggguucccag

SEQ ID NO: 801965 - RNA, 24 nt, Human
uacagggggagggagcuucaaaag

SEQ ID NO: 801966 - RNA, 21 nt, Human
uaccccugccucugccccagc

SEQ ID NO: 801967 - RNA, 18 nt, Human
uaccuguucucuucucug

SEQ ID NO: 801968 - RNA, 21 nt, Human
uagccgggcgugguggcgggu

SEQ ID NO: 801969 - RNA, 23 nt, Human
uagcuggcucuuccucacccucc

SEQ ID NO: 801970 - RNA, 21 nt, Human
uaggacaccaccuggccuaua

SEQ ID NO: 801971 - RNA, 20 nt, Human
uauagcauacaaaauauaug

SEQ ID NO: 801972 - RNA, 19 nt, Human
uauccuugggagacagguu

SEQ ID NO: 801973 - RNA, 22 nt, Human
uauccuugggagacagguuggg

SEQ ID NO: 801974 - RNA, 23 nt, Human
uauuagugguuaagcuuuugggg

SEQ ID NO: 801975 - RNA, 20 nt, Human
ucaaaaaaaaaaaaaaaaaa

SEQ ID NO: 801976 - RNA, 21 nt, Human
ucaccccgggcucuccaagca

SEQ ID NO: 801977 - RNA, 24 nt, Human
ucaguccacgcccuccucucuccu

SEQ ID NO: 801978 - RNA, 18 nt, Human
uccaaacaccaggggagc

SEQ ID NO: 801979 - RNA, 21 nt, Human
uccacagugagggagggggac

SEQ ID NO: 801980 - RNA, 23 nt, Human
uccacgcccuccucucuccuccc

SEQ ID NO: 801981 - RNA, 23 nt, Human
uccagaggggugaagggagggaa

SEQ ID NO: 801982 - RNA, 23 nt, Human
uccagccugggcaacagagugag

SEQ ID NO: 801983 - RNA, 24 nt, Human
uccagccugggcaacagagugaga

SEQ ID NO: 801984 - RNA, 23 nt, Human
uccagccugggcgacagagugag

SEQ ID NO: 801985 - RNA, 24 nt, Human
uccagccugggcgacagagugaga

SEQ ID NO: 801986 - RNA, 22 nt, Human
uccauggcaggggccacugaga

SEQ ID NO: 801987 - RNA, 20 nt, Human
ucccacaugagcacagcacc

SEQ ID NO: 801988 - RNA, 25 nt, Human
ucccagagccggugugacacaugcc

SEQ ID NO: 801989 - RNA, 19 nt, Human
uccccaaauccagcaggcc

SEQ ID NO: 801990 - RNA, 25 nt, Human
uccccucauuuuaucuagcaguugg

SEQ ID NO: 801991 - RNA, 22 nt, Human
ucccuccggcugaguugcagag

SEQ ID NO: 801992 - RNA, 21 nt, Human
ucccugaaacggaggccugag

SEQ ID NO: 801993 - RNA, 20 nt, Human
ucccugaaagcaaacuccuc

SEQ ID NO: 801994 - RNA, 19 nt, Human
ucccugggagaggcugguc

SEQ ID NO: 801995 - RNA, 20 nt, Human
ucccugggagaggcuggucc

SEQ ID NO: 801996 - RNA, 23 nt, Human
uccgucuaaaaaaaaaagaaaaa

SEQ ID NO: 801997 - RNA, 20 nt, Human
uccucacccuccaggccucc

SEQ ID NO: 801998 - RNA, 22 nt, Human
uccucacccuccaggccuccag

SEQ ID NO: 801999 - RNA, 19 nt, Human
uccucgucccugaaagcaa

SEQ ID NO: 802000 - RNA, 20 nt, Human
uccuguacacuucccuccca

SEQ ID NO: 802001 - RNA, 23 nt, Human
uccuguaccccugccucugcccc

SEQ ID NO: 802002 - RNA, 27 nt, Human
uccuugggagacagguugggagugaag

SEQ ID NO: 802003 - RNA, 26 nt, Human
ucgcugaggaggugggcuucucaugg

SEQ ID NO: 802004 - RNA, 19 nt, Human
ucguuggaagccaagggag

SEQ ID NO: 802005 - RNA, 20 nt, Human
ucucacacuccgcagacuuu

SEQ ID NO: 802006 - RNA, 22 nt, Human
ucuccaauucacacccagaguc

SEQ ID NO: 802007 - RNA, 23 nt, Human
ucuccagccucaccugguacccc

SEQ ID NO: 802008 - RNA, 21 nt, Human
ucucuacuaaaaauacaaaaa

SEQ ID NO: 802009 - RNA, 23 nt, Human
ucucuacuaaaaauacaaaaauu

SEQ ID NO: 802010 - RNA, 19 nt, Human
ucucuccagccucaccugg

SEQ ID NO: 802011 - RNA, 25 nt, Human
ucucuccagccucaccugguacccc

SEQ ID NO: 802012 - RNA, 24 nt, Human
ucucucuccccucuagaauccaaa

SEQ ID NO: 802013 - RNA, 20 nt, Human
ucugcagccaugguggccuu

SEQ ID NO: 802014 - RNA, 20 nt, Human
ucugcaggugcucgcccuuc

SEQ ID NO: 802015 - RNA, 22 nt, Human
ucugccccucaguccacgcccu

SEQ ID NO: 802016 - RNA, 20 nt, Human
ucuguaaucauucugugugg

SEQ ID NO: 802017 - RNA, 21 nt, Human
ucuguaccgugguguccgaag

SEQ ID NO: 802018 - RNA, 21 nt, Human
ucugucuccuggcucugguuu

SEQ ID NO: 802019 - RNA, 24 nt, Human
ugaaccugggaggcggagguugca

SEQ ID NO: 802020 - RNA, 18 nt, Human
ugaagacaggaagagugg

SEQ ID NO: 802021 - RNA, 22 nt, Human
ugaagggaugggguggggggca

SEQ ID NO: 802022 - RNA, 23 nt, Human
ugacaggaggugacccaagacug

SEQ ID NO: 802023 - RNA, 26 nt, Human
ugaccaccaccgccuccugccuaaac

SEQ ID NO: 802024 - RNA, 21 nt, Human
ugacccaagacuggcccacac

SEQ ID NO: 802025 - RNA, 26 nt, Human
ugagaaagguccccugagaggacacc

SEQ ID NO: 802026 - RNA, 21 nt, Human
ugagacacuggcucaaaaaaa

SEQ ID NO: 802027 - RNA, 23 nt, Human
ugagaccagccuggccaacaugg

SEQ ID NO: 802028 - RNA, 21 nt, Human
ugagcugacguugcaccacug

SEQ ID NO: 802029 - RNA, 25 nt, Human
ugaggaggugggcuucucaugguga

SEQ ID NO: 802030 - RNA, 26 nt, Human
ugaggcagcuggaucacuggagguca

SEQ ID NO: 802031 - RNA, 23 nt, Human
ugaggcaggagaauugcuugaac

SEQ ID NO: 802032 - RNA, 24 nt, Human
ugaggcaggagaauugcuugaacc

SEQ ID NO: 802033 - RNA, 25 nt, Human
ugaggcaggagaauugcuugaaccu

SEQ ID NO: 802034 - RNA, 19 nt, Human
ugaucauaagcccccugcu

SEQ ID NO: 802035 - RNA, 19 nt, Human
ugcacaugaccuaaaugug

SEQ ID NO: 802036 - RNA, 21 nt, Human
ugcaccacugcacuccagccu

SEQ ID NO: 802037 - RNA, 21 nt, Human
ugcagagggcuucgcugagga

SEQ ID NO: 802038 - RNA, 19 nt, Human
ugccacaugaagugacagg

SEQ ID NO: 802039 - RNA, 19 nt, Human
ugcccccuuccacuggacg

SEQ ID NO: 802040 - RNA, 18 nt, Human
ugcccuaagcucccagua

SEQ ID NO: 802041 - RNA, 24 nt, Human
ugccuguaauccuagcuacucagg

SEQ ID NO: 802042 - RNA, 20 nt, Human
ugccuguggcugcccccucg

SEQ ID NO: 802043 - RNA, 21 nt, Human
ugccugugguauccuaggaac

SEQ ID NO: 802044 - RNA, 19 nt, Human
ugcggggacaaccagggcc

SEQ ID NO: 802045 - RNA, 21 nt, Human
ugcucauccacagugagggag

SEQ ID NO: 802046 - RNA, 22 nt, Human
ugcugccacacuucaaaggccu

SEQ ID NO: 802047 - RNA, 22 nt, Human
ugcuucagacccaggcuccugc

SEQ ID NO: 802048 - RNA, 21 nt, Human
ugcuugaaccugggaggcgga

SEQ ID NO: 802049 - RNA, 20 nt, Human
uggaaggaaggaguccugcg

SEQ ID NO: 802050 - RNA, 20 nt, Human
uggagauggagagagagggg

SEQ ID NO: 802051 - RNA, 18 nt, Human
uggaggcaaacacagggc

SEQ ID NO: 802052 - RNA, 23 nt, Human
uggaucacuggaggucaggaguu

SEQ ID NO: 802053 - RNA, 24 nt, Human
uggaucacuggaggucaggaguuu

SEQ ID NO: 802054 - RNA, 23 nt, Human
uggccaacauggugaaaccuguc

SEQ ID NO: 802055 - RNA, 20 nt, Human
uggcuacagacccacccuuu

SEQ ID NO: 802056 - RNA, 18 nt, Human
uggcucaaaaaaaaaaaa

SEQ ID NO: 802057 - RNA, 20 nt, Human
uggcucaaaaaaaaaaaaaa

SEQ ID NO: 802058 - RNA, 24 nt, Human
uggcucacgccuguaaucccagca

SEQ ID NO: 802059 - RNA, 21 nt, Human
uggcucugguuugggaguggg

SEQ ID NO: 802060 - RNA, 23 nt, Human
uggcucugguuugggagugggcu

SEQ ID NO: 802061 - RNA, 18 nt, Human
uggcugggugacgaagag

SEQ ID NO: 802062 - RNA, 21 nt, Human
uggcugggugacgaagagcua

SEQ ID NO: 802063 - RNA, 21 nt, Human
uggcugucaagucaggagccc

SEQ ID NO: 802064 - RNA, 23 nt, Human
ugggaggaggugucucuaagcau

SEQ ID NO: 802065 - RNA, 29 nt, Human
ugggaggcggagguugcaaugacaacggu

SEQ ID NO: 802066 - RNA, 24 nt, Human
ugggaggcggagguugcaaugagc

SEQ ID NO: 802067 - RNA, 24 nt, Human
ugggaggcugaggcagcuggauca

SEQ ID NO: 802068 - RNA, 21 nt, Human
ugggcaggagaaagaagagaa

SEQ ID NO: 802069 - RNA, 23 nt, Human
ugggcugggaggcccaggggccg

SEQ ID NO: 802070 - RNA, 23 nt, Human
uggggauaccuaauuucucccca

SEQ ID NO: 802071 - RNA, 19 nt, Human
uggguguggacuccaaaug

SEQ ID NO: 802072 - RNA, 24 nt, Human
ugguauucaaggguuaacuguauu

SEQ ID NO: 802073 - RNA, 22 nt, Human
ugguggcgggugccuguaaucc

SEQ ID NO: 802074 - RNA, 18 nt, Human
ugguguccccagugcuag

SEQ ID NO: 802075 - RNA, 20 nt, Human
ugguguccccagugcuagga

SEQ ID NO: 802076 - RNA, 24 nt, Human
uguacacaccaacuuguaccaucc

SEQ ID NO: 802077 - RNA, 19 nt, Human
uguggaaggaaggaguccu

SEQ ID NO: 802078 - RNA, 20 nt, Human
uguguacacaccaacuugua

SEQ ID NO: 802079 - RNA, 21 nt, Human
uguguggccuuuccucucucu

SEQ ID NO: 802080 - RNA, 18 nt, Human
uguguguguguguacaca

SEQ ID NO: 802081 - RNA, 23 nt, Human
uuaagagcuggagugagcagucu

SEQ ID NO: 802082 - RNA, 22 nt, Human
uuacagugagcugacguugcac

SEQ ID NO: 802083 - RNA, 24 nt, Human
uuagccgggcgugguggcgggugc

SEQ ID NO: 802084 - RNA, 18 nt, Human
uucaacaaggucuauugc

SEQ ID NO: 802085 - RNA, 22 nt, Human
uucacagaaaaaaccagcacag

SEQ ID NO: 802086 - RNA, 24 nt, Human
uucaccccgggcucuccaagcaua

SEQ ID NO: 802087 - RNA, 24 nt, Human
uuccugcuuggguuguucugggga

SEQ ID NO: 802088 - RNA, 21 nt, Human
uuccuggaccaaggaggggac

SEQ ID NO: 802089 - RNA, 24 nt, Human
uugaaccugggaggcggagguugc

SEQ ID NO: 802090 - RNA, 23 nt, Human
uugcaccacugcacuccagccug

SEQ ID NO: 802091 - RNA, 19 nt, Human
uugcucauccacagugagg

SEQ ID NO: 802092 - RNA, 24 nt, Human
uugcuugaacacgggagguggagg

SEQ ID NO: 802093 - RNA, 24 nt, Human
uugcuugaaccugggaggcggagg

SEQ ID NO: 802094 - RNA, 27 nt, Human
uugcuuucugcagccaugguggccuuu

SEQ ID NO: 802095 - RNA, 18 nt, Human
uuggagcccuggggaccu

SEQ ID NO: 802096 - RNA, 25 nt, Human
uugggaggcugaggcagcuggauca

SEQ ID NO: 802097 - RNA, 22 nt, Human
uuuccaucccauccaugaguuc

SEQ ID NO: 802098 - RNA, 23 nt, Human
uuuccugucccaggaagggccuu

SEQ ID NO: 802099 - RNA, 24 nt, Human
uuucuggagcaccuggccucuguu

SEQ ID NO: 802100 - RNA, 20 nt, Human
uuugaacucauggccuagag

SEQ ID NO: 802101 - RNA, 23 nt, Human
uuugccuuucacagaaaaaacca

SEQ ID NO: 802102 - RNA, 19 nt, Human
uuugggagugggcugagag

SEQ ID NO: 802103 - RNA, 22 nt, Human
aaacagccuuauugagugaggu

SEQ ID NO: 802104 - RNA, 24 nt, Human
aaagugcugggauuacaggcguga

SEQ ID NO: 802105 - RNA, 25 nt, Human
aaccagucaccucccucucuacucu

SEQ ID NO: 802106 - RNA, 19 nt, Human
aacuuguggagagcccacc

SEQ ID NO: 802107 - RNA, 21 nt, Human
aagagcaggcagguccaguaa

SEQ ID NO: 802108 - RNA, 18 nt, Human
aagagcccaguaaccagc

SEQ ID NO: 802109 - RNA, 25 nt, Human
aagcaagagcccaguaaccagcagc

SEQ ID NO: 802110 - RNA, 21 nt, Human
aagcagcucacccugcagaag

SEQ ID NO: 802111 - RNA, 22 nt, Human
aaggcagccauucacccagaac

SEQ ID NO: 802112 - RNA, 22 nt, Human
aaggcugucacacugucacaga

SEQ ID NO: 802113 - RNA, 21 nt, Human
aagugaccuaaagacaaagau

SEQ ID NO: 802114 - RNA, 19 nt, Human
aagugcugggauuacaggc

SEQ ID NO: 802115 - RNA, 19 nt, Human
aagugcugggauuacaggc

SEQ ID NO: 802116 - RNA, 26 nt, Human
aagugcugggauuacaggcgugagcc

SEQ ID NO: 802117 - RNA, 19 nt, Human
aaguugaagggaaccagcc

SEQ ID NO: 802118 - RNA, 22 nt, Human
aaucaagcccuccuccccagug

SEQ ID NO: 802119 - RNA, 22 nt, Human
aaucucugcucacugcaaccuc

SEQ ID NO: 802120 - RNA, 20 nt, Human
acaaaagcaggggaagagca

SEQ ID NO: 802121 - RNA, 22 nt, Human
acaaucagaucaagccuggagc

SEQ ID NO: 802122 - RNA, 21 nt, Human
acacagcuccuuugugccucc

SEQ ID NO: 802123 - RNA, 20 nt, Human
acagaaaggggcaaaccaaa

SEQ ID NO: 802124 - RNA, 20 nt, Human
acagaacaucccccagggaa

SEQ ID NO: 802125 - RNA, 18 nt, Human
acagccugugcucuucac

SEQ ID NO: 802126 - RNA, 22 nt, Human
acaggagcagggggcacggcgg

SEQ ID NO: 802127 - RNA, 21 nt, Human
acaggucugugccccagaggc

SEQ ID NO: 802128 - RNA, 21 nt, Human
accagccugggccccagcaac

SEQ ID NO: 802129 - RNA, 24 nt, Human
accauguuggccaggauggucuug

SEQ ID NO: 802130 - RNA, 18 nt, Human
accauugagacggcccug

SEQ ID NO: 802131 - RNA, 24 nt, Human
acccaggagacacagaagaggcuc

SEQ ID NO: 802132 - RNA, 24 nt, Human
acccucaaaagcucagcaaggagc

SEQ ID NO: 802133 - RNA, 18 nt, Human
acgggguuucaccauguu

SEQ ID NO: 802134 - RNA, 23 nt, Human
acgggguuucaccauguuggcca

SEQ ID NO: 802135 - RNA, 24 nt, Human
acgggguuucaccauguuggccag

SEQ ID NO: 802136 - RNA, 23 nt, Human
acucccaccuccaagcccaccac

SEQ ID NO: 802137 - RNA, 24 nt, Human
acucuguugccaggcuggagugca

SEQ ID NO: 802138 - RNA, 18 nt, Human
acugcagcucccuagccu

SEQ ID NO: 802139 - RNA, 23 nt, Human
agaaacaagugaccuaaagacaa

SEQ ID NO: 802140 - RNA, 19 nt, Human
agaagcaaggccuggagca

SEQ ID NO: 802141 - RNA, 25 nt, Human
agaagucuccggccaacugagugcc

SEQ ID NO: 802142 - RNA, 21 nt, Human
agacucuccaagcucuugaug

SEQ ID NO: 802143 - RNA, 22 nt, Human
agaggcagggaagggagggcag

SEQ ID NO: 802144 - RNA, 21 nt, Human
agaucaagccuggagcuuggg

SEQ ID NO: 802145 - RNA, 21 nt, Human
agcaggucugcugggccagca

SEQ ID NO: 802146 - RNA, 18 nt, Human
agccaagcagagcagccu

SEQ ID NO: 802147 - RNA, 19 nt, Human
agccaggaguucaguugag

SEQ ID NO: 802148 - RNA, 19 nt, Human
agccagggcccggggcaua

SEQ ID NO: 802149 - RNA, 18 nt, Human
agccccauuuuguggcug

SEQ ID NO: 802150 - RNA, 20 nt, Human
agcuagaacgggagcuggag

SEQ ID NO: 802151 - RNA, 21 nt, Human
agcugcagagcgagcgggagc

SEQ ID NO: 802152 - RNA, 21 nt, Human
agcugggacuacgggggcccg

SEQ ID NO: 802153 - RNA, 19 nt, Human
aggaagcaggcgggcaagc

SEQ ID NO: 802154 - RNA, 25 nt, Human
aggaagccccuauccagcagcaggu

SEQ ID NO: 802155 - RNA, 27 nt, Human
aggagaagaaaaacuuaguucccagaa

SEQ ID NO: 802156 - RNA, 18 nt, Human
aggagcccugaauaucug

SEQ ID NO: 802157 - RNA, 19 nt, Human
aggagcgggagcggcugcu

SEQ ID NO: 802158 - RNA, 21 nt, Human
aggagcugcggggcagccugg

SEQ ID NO: 802159 - RNA, 22 nt, Human
aggaggaaggugagcgcagggc

SEQ ID NO: 802160 - RNA, 20 nt, Human
aggcaaaggcccagcagcug

SEQ ID NO: 802161 - RNA, 24 nt, Human
aggcacugggggaacagugaccca

SEQ ID NO: 802162 - RNA, 18 nt, Human
aggcagaagugccaccca

SEQ ID NO: 802163 - RNA, 21 nt, Human
aggcagaagugccacccagga

SEQ ID NO: 802164 - RNA, 20 nt, Human
aggcaggugcagcagcugga

SEQ ID NO: 802165 - RNA, 23 nt, Human
aggcaggugcagcagcuggagga

SEQ ID NO: 802166 - RNA, 18 nt, Human
aggccaguuccagcaacu

SEQ ID NO: 802167 - RNA, 18 nt, Human
aggcccaccgagacccag

SEQ ID NO: 802168 - RNA, 24 nt, Human
aggcccagcgggcccgcguggagg

SEQ ID NO: 802169 - RNA, 24 nt, Human
aggcuccugcugcugcuucaaagc

SEQ ID NO: 802170 - RNA, 25 nt, Human
aggcuggagugcaguggcacaaucu

SEQ ID NO: 802171 - RNA, 18 nt, Human
agggaagggggaauaagg

SEQ ID NO: 802172 - RNA, 19 nt, Human
agggaagggggaauaaggg

SEQ ID NO: 802173 - RNA, 22 nt, Human
agggagaagcaaggccuggagc

SEQ ID NO: 802174 - RNA, 21 nt, Human
agggagggcagcaaggaaggg

SEQ ID NO: 802175 - RNA, 19 nt, Human
aggugcagcagcuggagga

SEQ ID NO: 802176 - RNA, 19 nt, Human
aguacagcgcuccccugcc

SEQ ID NO: 802177 - RNA, 22 nt, Human
aguagagacgggguuucaccau

SEQ ID NO: 802178 - RNA, 18 nt, Human
aguagcugggacuacggg

SEQ ID NO: 802179 - RNA, 20 nt, Human
agucuuuuuuuuuuuuuuuu

SEQ ID NO: 802180 - RNA, 21 nt, Human
agugcaguggcacaaucucug

SEQ ID NO: 802181 - RNA, 18 nt, Human
agugcugggauuacaggc

SEQ ID NO: 802182 - RNA, 22 nt, Human
aguggcccagcaggguggccuc

SEQ ID NO: 802183 - RNA, 21 nt, Human
aucccguaauccacacaacca

SEQ ID NO: 802184 - RNA, 18 nt, Human
aucucugcccgcaggcuc

SEQ ID NO: 802185 - RNA, 22 nt, Human
aucugccaugggaauccagaau

SEQ ID NO: 802186 - RNA, 23 nt, Human
auggcugggccuagcccuguggg

SEQ ID NO: 802187 - RNA, 22 nt, Human
auuuuucuauuuuuaguagaga

SEQ ID NO: 802188 - RNA, 24 nt, Human
auuuuucuauuuuuaguagagacg

SEQ ID NO: 802189 - RNA, 19 nt, Human
caaacuggguugccaccuc

SEQ ID NO: 802190 - RNA, 24 nt, Human
caaagugcugggauuacaggcgug

SEQ ID NO: 802191 - RNA, 20 nt, Human
caaccuccaccuccuggguu

SEQ ID NO: 802192 - RNA, 23 nt, Human
caaccuccaccuccuggguucaa

SEQ ID NO: 802193 - RNA, 18 nt, Human
caagaggcagggaaggga

SEQ ID NO: 802194 - RNA, 20 nt, Human
caagugauucuccugccuca

SEQ ID NO: 802195 - RNA, 22 nt, Human
caagugauucuccugccucagc

SEQ ID NO: 802196 - RNA, 19 nt, Human
caauggggccucacaggag

SEQ ID NO: 802197 - RNA, 21 nt, Human
cacaaaagcaggggaagagca

SEQ ID NO: 802198 - RNA, 18 nt, Human
cacagaaaggggcaaacc

SEQ ID NO: 802199 - RNA, 23 nt, Human
cacagaucacauggagaggcaag

SEQ ID NO: 802200 - RNA, 19 nt, Human
cacaggcccaccgagaccc

SEQ ID NO: 802201 - RNA, 20 nt, Human
caccacacccagcucauuuu

SEQ ID NO: 802202 - RNA, 23 nt, Human
caccacagccuuuacuggcuccc

SEQ ID NO: 802203 - RNA, 18 nt, Human
caccauguuggccaggau

SEQ ID NO: 802204 - RNA, 22 nt, Human
caccauguuggccaggaugguc

SEQ ID NO: 802205 - RNA, 23 nt, Human
caccauguuggccaggauggucu

SEQ ID NO: 802206 - RNA, 24 nt, Human
caccauguuggccaggauggucuu

SEQ ID NO: 802207 - RNA, 20 nt, Human
cacccugcagaagccccuga

SEQ ID NO: 802208 - RNA, 22 nt, Human
caccucaucacaugaggccuua

SEQ ID NO: 802209 - RNA, 21 nt, Human
caccuccaagcccaccaccaa

SEQ ID NO: 802210 - RNA, 24 nt, Human
caccuccaagcccaccaccaaggg

SEQ ID NO: 802211 - RNA, 24 nt, Human
caccucccucucuaccaccacugg

SEQ ID NO: 802212 - RNA, 21 nt, Human
caccugcuuucccuugucuuu

SEQ ID NO: 802213 - RNA, 24 nt, Human
cacgcuccaccagcagccacuccc

SEQ ID NO: 802214 - RNA, 21 nt, Human
cacggggcacacugggcauga

SEQ ID NO: 802215 - RNA, 19 nt, Human
cacuaugugcaccacagcc

SEQ ID NO: 802216 - RNA, 24 nt, Human
cacucuggaagagcgccccacagg

SEQ ID NO: 802217 - RNA, 23 nt, Human
cacucuguugccaggcuggagug

SEQ ID NO: 802218 - RNA, 21 nt, Human
cacugcaaccuccaccuccug

SEQ ID NO: 802219 - RNA, 23 nt, Human
cacugcaaccuccaccuccuggg

SEQ ID NO: 802220 - RNA, 21 nt, Human
cagaagauggccagugcccac

SEQ ID NO: 802221 - RNA, 20 nt, Human
cagaauggcuucuaggagga

SEQ ID NO: 802222 - RNA, 26 nt, Human
cagagagucuacccugaaccaggcac

SEQ ID NO: 802223 - RNA, 18 nt, Human
cagagcucccugguccag

SEQ ID NO: 802224 - RNA, 19 nt, Human
cagcagcugcaggaggaag

SEQ ID NO: 802225 - RNA, 23 nt, Human
cagcagcugcucacaggucugug

SEQ ID NO: 802226 - RNA, 19 nt, Human
cagccucagccucuaucuc

SEQ ID NO: 802227 - RNA, 23 nt, Human
cagccucccuagagcuccuccca

SEQ ID NO: 802228 - RNA, 20 nt, Human
cagccuccugaguagcuggg

SEQ ID NO: 802229 - RNA, 21 nt, Human
cagccucugaugcuuacuccu

SEQ ID NO: 802230 - RNA, 19 nt, Human
cagccuuauugagugaggu

SEQ ID NO: 802231 - RNA, 24 nt, Human
cagcgagcccugcuaaagcagcug

SEQ ID NO: 802232 - RNA, 20 nt, Human
cagcguccagggaagccugc

SEQ ID NO: 802233 - RNA, 21 nt, Human
cagcguccagggaagccugca

SEQ ID NO: 802234 - RNA, 21 nt, Human
cagcucacccugcagaagccc

SEQ ID NO: 802235 - RNA, 18 nt, Human
cagcucagggcccagcag

SEQ ID NO: 802236 - RNA, 19 nt, Human
cagcuggacagccuggacc

SEQ ID NO: 802237 - RNA, 20 nt, Human
cagcuggacagccuggacca

SEQ ID NO: 802238 - RNA, 25 nt, Human
caggacacuggggacugcagcuccc

SEQ ID NO: 802239 - RNA, 23 nt, Human
caggaggaagccccuauccagca

SEQ ID NO: 802240 - RNA, 19 nt, Human
caggaguccucagaagugu

SEQ ID NO: 802241 - RNA, 19 nt, Human
caggcgaugggcugccucc

SEQ ID NO: 802242 - RNA, 22 nt, Human
cagggaaccagucaccucccuc

SEQ ID NO: 802243 - RNA, 19 nt, Human
cagggacgugaaagcccaa

SEQ ID NO: 802244 - RNA, 20 nt, Human
caggggaagagcagccuggc

SEQ ID NO: 802245 - RNA, 22 nt, Human
cagugaggccucacucuggaag

SEQ ID NO: 802246 - RNA, 22 nt, Human
caucuucccugcagguuggggg

SEQ ID NO: 802247 - RNA, 22 nt, Human
cauguggaggcccucagggccc

SEQ ID NO: 802248 - RNA, 18 nt, Human
ccaaacgcagacacaggu

SEQ ID NO: 802249 - RNA, 26 nt, Human
ccaaagggagacucccaccuccaagc

SEQ ID NO: 802250 - RNA, 22 nt, Human
ccaaagugcugggauuacaggc

SEQ ID NO: 802251 - RNA, 22 nt, Human
ccaaagugcugggauuacaggc

SEQ ID NO: 802252 - RNA, 24 nt, Human
ccaaagugcugggauuacaggcgu

SEQ ID NO: 802253 - RNA, 27 nt, Human
ccaacaccaugcauacaaucagaucaa

SEQ ID NO: 802254 - RNA, 23 nt, Human
ccaagagccagagagcaucccug

SEQ ID NO: 802255 - RNA, 20 nt, Human
ccaagcccaccaccaagggc

SEQ ID NO: 802256 - RNA, 24 nt, Human
ccaagcccaccaccaagggcgagc

SEQ ID NO: 802257 - RNA, 18 nt, Human
ccacacucuccugccaga

SEQ ID NO: 802258 - RNA, 22 nt, Human
ccacaucugccaugggaaucca

SEQ ID NO: 802259 - RNA, 25 nt, Human
ccaccagccucccuagagcuccucc

SEQ ID NO: 802260 - RNA, 24 nt, Human
ccaccuccuggguucaagugauuc

SEQ ID NO: 802261 - RNA, 22 nt, Human
ccacgaccuucaagaacaccag

SEQ ID NO: 802262 - RNA, 18 nt, Human
ccagauaacaugucccac

SEQ ID NO: 802263 - RNA, 20 nt, Human
ccagauaacaugucccacag

SEQ ID NO: 802264 - RNA, 21 nt, Human
ccagccaagcagagcagccuc

SEQ ID NO: 802265 - RNA, 22 nt, Human
ccaggagcccugaauaucugac

SEQ ID NO: 802266 - RNA, 18 nt, Human
ccaggccaccugcccaag

SEQ ID NO: 802267 - RNA, 20 nt, Human
ccaggggcucugccacagcc

SEQ ID NO: 802268 - RNA, 22 nt, Human
cccacagccugugcucuucacu

SEQ ID NO: 802269 - RNA, 24 nt, Human
cccagcaaccuagcaucucugccc

SEQ ID NO: 802270 - RNA, 19 nt, Human
cccagccacgaccuucaag

SEQ ID NO: 802271 - RNA, 21 nt, Human
cccagcucuggcuuccuagcc

SEQ ID NO: 802272 - RNA, 22 nt, Human
cccaggagcugcugcagagccu

SEQ ID NO: 802273 - RNA, 18 nt, Human
cccagggucagacauggg

SEQ ID NO: 802274 - RNA, 20 nt, Human
cccagugcuaggcuugcccc

SEQ ID NO: 802275 - RNA, 25 nt, Human
cccaugaugggaaggaaacuaaaac

SEQ ID NO: 802276 - RNA, 25 nt, Human
cccaugccacaucucaagccagggg

SEQ ID NO: 802277 - RNA, 20 nt, Human
ccccacaggcaaagaugagg

SEQ ID NO: 802278 - RNA, 25 nt, Human
ccccagaggccagacgccuggugcc

SEQ ID NO: 802279 - RNA, 24 nt, Human
ccccagggaaccagucaccucccu

SEQ ID NO: 802280 - RNA, 21 nt, Human
cccccaggugggucccagccu

SEQ ID NO: 802281 - RNA, 21 nt, Human
cccccgaccccuacccuucca

SEQ ID NO: 802282 - RNA, 23 nt, Human
ccccgggaacuuguggagagccc

SEQ ID NO: 802283 - RNA, 27 nt, Human
cccgcaggcuccugcugcugcuucaaa

SEQ ID NO: 802284 - RNA, 19 nt, Human
cccguaauccacacaacca

SEQ ID NO: 802285 - RNA, 23 nt, Human
cccguaauccacacaaccaccca

SEQ ID NO: 802286 - RNA, 21 nt, Human
cccucucuacucucucccuca

SEQ ID NO: 802287 - RNA, 20 nt, Human
cccugaauaucugacuacca

SEQ ID NO: 802288 - RNA, 20 nt, Human
cccugcccuaccccauccca

SEQ ID NO: 802289 - RNA, 19 nt, Human
cccuucuaagguccugucc

SEQ ID NO: 802290 - RNA, 22 nt, Human
cccuugucuuuuucugaacaca

SEQ ID NO: 802291 - RNA, 21 nt, Human
ccgaccccuacccuuccacgc

SEQ ID NO: 802292 - RNA, 23 nt, Human
ccgcuuccaccagccucccuaga

SEQ ID NO: 802293 - RNA, 20 nt, Human
ccgggccacuggauauaagg

SEQ ID NO: 802294 - RNA, 25 nt, Human
ccucaggagacugugcacacucccu

SEQ ID NO: 802295 - RNA, 22 nt, Human
ccuccaccuccuggguucaagu

SEQ ID NO: 802296 - RNA, 19 nt, Human
ccuccaggccaccugccca

SEQ ID NO: 802297 - RNA, 19 nt, Human
ccucccuagagcuccuccc

SEQ ID NO: 802298 - RNA, 21 nt, Human
ccucccugcaguucccagcca

SEQ ID NO: 802299 - RNA, 19 nt, Human
ccuccuccccagugcuagg

SEQ ID NO: 802300 - RNA, 24 nt, Human
ccuccuggguucaagugauucucc

SEQ ID NO: 802301 - RNA, 22 nt, Human
ccucuagucacaacagccaaac

SEQ ID NO: 802302 - RNA, 22 nt, Human
ccugagaugccuccaggugugg

SEQ ID NO: 802303 - RNA, 25 nt, Human
ccugagccuccgucugucccaggag

SEQ ID NO: 802304 - RNA, 23 nt, Human
ccugaguagcugggacuacgggg

SEQ ID NO: 802305 - RNA, 21 nt, Human
ccugcagaagccccugacuag

SEQ ID NO: 802306 - RNA, 22 nt, Human
ccugcagcaaggguguuaaagc

SEQ ID NO: 802307 - RNA, 23 nt, Human
ccugccucagccuccugaguagc

SEQ ID NO: 802308 - RNA, 23 nt, Human
ccugcggcuaaccauccuggagc

SEQ ID NO: 802309 - RNA, 19 nt, Human
ccuggagcuagaacgggag

SEQ ID NO: 802310 - RNA, 21 nt, Human
ccuggcaccagaagauggcca

SEQ ID NO: 802311 - RNA, 21 nt, Human
ccugggccccagcaaccuagc

SEQ ID NO: 802312 - RNA, 23 nt, Human
ccuggguucaagugauucuccuc

SEQ ID NO: 802313 - RNA, 23 nt, Human
ccuggguucaagugauucuccug

SEQ ID NO: 802314 - RNA, 21 nt, Human
ccuuaggccaguuccagcaac

SEQ ID NO: 802315 - RNA, 18 nt, Human
ccuuccacgcaugugacc

SEQ ID NO: 802316 - RNA, 22 nt, Human
cgcaugcgccagcguccaggga

SEQ ID NO: 802317 - RNA, 22 nt, Human
cgcgcccggccuugcuaagucu

SEQ ID NO: 802318 - RNA, 18 nt, Human
cggaccugcggcuaacca

SEQ ID NO: 802319 - RNA, 19 nt, Human
cguaauccacacaaccacc

SEQ ID NO: 802320 - RNA, 20 nt, Human
cuagccuaccacuaugugcc

SEQ ID NO: 802321 - RNA, 23 nt, Human
cuagugaaaggggcaggucuggg

SEQ ID NO: 802322 - RNA, 18 nt, Human
cucacucuguugccaggc

SEQ ID NO: 802323 - RNA, 23 nt, Human
cucacucuguugccaggcuggag

SEQ ID NO: 802324 - RNA, 24 nt, Human
cucacugcaaccuccaccuccugg

SEQ ID NO: 802325 - RNA, 26 nt, Human
cucacugcaaccuccaccuccugggu

SEQ ID NO: 802326 - RNA, 24 nt, Human
cucagccuccugaguagcugggac

SEQ ID NO: 802327 - RNA, 24 nt, Human
cuccaagcucuugaugccugggcc

SEQ ID NO: 802328 - RNA, 22 nt, Human
cuccaggccaccugcccaagcu

SEQ ID NO: 802329 - RNA, 19 nt, Human
cucccuggcucugacaucc

SEQ ID NO: 802330 - RNA, 21 nt, Human
cuccugcugcugcuucaaagc

SEQ ID NO: 802331 - RNA, 24 nt, Human
cuccugcugcugcuucaaagcugu

SEQ ID NO: 802332 - RNA, 20 nt, Human
cuccuggguucaagugauuc

SEQ ID NO: 802333 - RNA, 21 nt, Human
cuccuggguucaagugauucu

SEQ ID NO: 802334 - RNA, 20 nt, Human
cucuaggucccacccagcuc

SEQ ID NO: 802335 - RNA, 24 nt, Human
cugaggaagcaggcgggcaagcug

SEQ ID NO: 802336 - RNA, 19 nt, Human
cugagucagaguaacagag

SEQ ID NO: 802337 - RNA, 24 nt, Human
cugcaaccuccaccuccuggguuc

SEQ ID NO: 802338 - RNA, 20 nt, Human
cugcagagggagaagcaagg

SEQ ID NO: 802339 - RNA, 21 nt, Human
cugccaugggaauccagaaug

SEQ ID NO: 802340 - RNA, 23 nt, Human
cugccucagccuccugaguagcu

SEQ ID NO: 802341 - RNA, 25 nt, Human
cugccuccacuccacggggcacacu

SEQ ID NO: 802342 - RNA, 19 nt, Human
cugcucugcccuaucaaug

SEQ ID NO: 802343 - RNA, 19 nt, Human
cugcugcagagccugcaga

SEQ ID NO: 802344 - RNA, 23 nt, Human
cugcuuucccuugucuuuuucug

SEQ ID NO: 802345 - RNA, 19 nt, Human
cuggagcaggcgacuacgg

SEQ ID NO: 802346 - RNA, 23 nt, Human
cugggacacaggcaagaggcagg

SEQ ID NO: 802347 - RNA, 21 nt, Human
cugggccucccaaagugcugg

SEQ ID NO: 802348 - RNA, 19 nt, Human
cuguaguaagcugagucag

SEQ ID NO: 802349 - RNA, 21 nt, Human
cuguaguuuuaaacuuggagg

SEQ ID NO: 802350 - RNA, 25 nt, Human
cugucacagccgccauguaucaggu

SEQ ID NO: 802351 - RNA, 22 nt, Human
cugugcucugggcaauggggcc

SEQ ID NO: 802352 - RNA, 19 nt, Human
cuucccccgaccccuaccc

SEQ ID NO: 802353 - RNA, 21 nt, Human
cuugcaaacugucacagccgc

SEQ ID NO: 802354 - RNA, 19 nt, Human
cuuucccuugucuuuuucu

SEQ ID NO: 802355 - RNA, 19 nt, Human
gaacaucccccagggaacc

SEQ ID NO: 802356 - RNA, 18 nt, Human
gaagcuggcccagcagag

SEQ ID NO: 802357 - RNA, 21 nt, Human
gaaggugggcaagguggucau

SEQ ID NO: 802358 - RNA, 18 nt, Human
gacaaacagcagcugcuc

SEQ ID NO: 802359 - RNA, 24 nt, Human
gacagagucucacucuguugccag

SEQ ID NO: 802360 - RNA, 21 nt, Human
gaccagcauucccuagacaca

SEQ ID NO: 802361 - RNA, 24 nt, Human
gaccaggaacgugaggagcugcgg

SEQ ID NO: 802362 - RNA, 20 nt, Human
gaccauugagacggcccugg

SEQ ID NO: 802363 - RNA, 20 nt, Human
gaccugacgcgccucaguaa

SEQ ID NO: 802364 - RNA, 19 nt, Human
gacgcuugcccagacucgu

SEQ ID NO: 802365 - RNA, 21 nt, Human
gagaagcaggguggguaaggg

SEQ ID NO: 802366 - RNA, 24 nt, Human
gagacgggguuucaccauguuggc

SEQ ID NO: 802367 - RNA, 20 nt, Human
gagcagcugcagagcgagcg

SEQ ID NO: 802368 - RNA, 21 nt, Human
gagcaggugugccacacucuc

SEQ ID NO: 802369 - RNA, 19 nt, Human
gagcagugccugucugagu

SEQ ID NO: 802370 - RNA, 22 nt, Human
gagccccauuuuguggcugagg

SEQ ID NO: 802371 - RNA, 19 nt, Human
gagcgggagcggcugcugg

SEQ ID NO: 802372 - RNA, 20 nt, Human
gagcucuaggucccacccag

SEQ ID NO: 802373 - RNA, 23 nt, Human
gagcuuggggugcgggccgcaga

SEQ ID NO: 802374 - RNA, 19 nt, Human
gagggcucgugugggcagg

SEQ ID NO: 802375 - RNA, 22 nt, Human
gaguagcugggacuacgggggc

SEQ ID NO: 802376 - RNA, 23 nt, Human
gaguagcugggacuacgggggcc

SEQ ID NO: 802377 - RNA, 18 nt, Human
gaguaggugaccuguugc

SEQ ID NO: 802378 - RNA, 18 nt, Human
gagugucaggcaaggcug

SEQ ID NO: 802379 - RNA, 18 nt, Human
gauuacaggcgugagcca

SEQ ID NO: 802380 - RNA, 22 nt, Human
gauuacaggcgugagccaccgc

SEQ ID NO: 802381 - RNA, 22 nt, Human
gauuacaggcgugagccaccgc

SEQ ID NO: 802382 - RNA, 21 nt, Human
gauucuccugccucagccucc

SEQ ID NO: 802383 - RNA, 19 nt, Human
gcaaaggcccagcagcugc

SEQ ID NO: 802384 - RNA, 18 nt, Human
gcaaggccaggccuggcu

SEQ ID NO: 802385 - RNA, 18 nt, Human
gcaaggccuggagcaggc

SEQ ID NO: 802386 - RNA, 19 nt, Human
gcaagugcuucaugcguca

SEQ ID NO: 802387 - RNA, 18 nt, Human
gcagagggagaagcaagg

SEQ ID NO: 802388 - RNA, 24 nt, Human
gcagcugcucacaggucugugccc

SEQ ID NO: 802389 - RNA, 18 nt, Human
gccagcuucccccgaccc

SEQ ID NO: 802390 - RNA, 20 nt, Human
gcccagccgcuuccaccagc

SEQ ID NO: 802391 - RNA, 22 nt, Human
gcccaggggcucugccacagcc

SEQ ID NO: 802392 - RNA, 21 nt, Human
gcccgcguggaggagcagcug

SEQ ID NO: 802393 - RNA, 24 nt, Human
gccuagugaaaggggcaggucugg

SEQ ID NO: 802394 - RNA, 20 nt, Human
gccucaaggugggccugaga

SEQ ID NO: 802395 - RNA, 21 nt, Human
gccuccaggccaccugcccaa

SEQ ID NO: 802396 - RNA, 19 nt, Human
gccuucacaccucgcccca

SEQ ID NO: 802397 - RNA, 24 nt, Human
gccuuggggaucaugccuugcucc

SEQ ID NO: 802398 - RNA, 19 nt, Human
gcuaagucuuuugagagcu

SEQ ID NO: 802399 - RNA, 24 nt, Human
gcuaagucuuuuuuuuuuuuuuuu

SEQ ID NO: 802400 - RNA, 30 nt, Human
gcuaagucuuuuuuuuuuuuuuuuuuuuuu

SEQ ID NO: 802401 - RNA, 22 nt, Human
gcuccugcugcugcuucaaagc

SEQ ID NO: 802402 - RNA, 20 nt, Human
gcugagucagaguaacagag

SEQ ID NO: 802403 - RNA, 25 nt, Human
gcuggagugcaguggcacaaucucu

SEQ ID NO: 802404 - RNA, 19 nt, Human
ggaaggacagggcaggcag

SEQ ID NO: 802405 - RNA, 22 nt, Human
ggaccaggaacgugaggagcug

SEQ ID NO: 802406 - RNA, 23 nt, Human
ggaccugcggcuaaccauccugg

SEQ ID NO: 802407 - RNA, 18 nt, Human
ggagacacagaagaggcu

SEQ ID NO: 802408 - RNA, 21 nt, Human
ggagccccaucauaggcccuu

SEQ ID NO: 802409 - RNA, 21 nt, Human
ggagcuggauaaggagaaggc

SEQ ID NO: 802410 - RNA, 18 nt, Human
ggaggcuccgggccacug

SEQ ID NO: 802411 - RNA, 23 nt, Human
ggaguucaguugagaguccccag

SEQ ID NO: 802412 - RNA, 19 nt, Human
ggcacaggaggcagaucca

SEQ ID NO: 802413 - RNA, 21 nt, Human
ggccagcaggucugcugggcc

SEQ ID NO: 802414 - RNA, 18 nt, Human
ggcccgccaccacaccca

SEQ ID NO: 802415 - RNA, 18 nt, Human
ggcuguggccagggaggg

SEQ ID NO: 802416 - RNA, 30 nt, Human
gggaaugggggaucaucuauauugggggac

SEQ ID NO: 802417 - RNA, 23 nt, Human
gggagacucccaccuccaagccc

SEQ ID NO: 802418 - RNA, 20 nt, Human
gggagcacgacaaacagcag

SEQ ID NO: 802419 - RNA, 24 nt, Human
gggagggcagcaaggaagggggug

SEQ ID NO: 802420 - RNA, 25 nt, Human
gggcaagcucuuccccucucugggu

SEQ ID NO: 802421 - RNA, 21 nt, Human
gggcacaggaggcagauccag

SEQ ID NO: 802422 - RNA, 23 nt, Human
gggcaggcagagggugagccagg

SEQ ID NO: 802423 - RNA, 18 nt, Human
gggccagcagcugagggc

SEQ ID NO: 802424 - RNA, 22 nt, Human
gggcccagcaggugaggguggg

SEQ ID NO: 802425 - RNA, 19 nt, Human
gggcccugcauguccgugg

SEQ ID NO: 802426 - RNA, 20 nt, Human
ggggaauaaggccucgggag

SEQ ID NO: 802427 - RNA, 19 nt, Human
ggggcacacugggcaugaa

SEQ ID NO: 802428 - RNA, 23 nt, Human
gggguuucaccauguuggccagg

SEQ ID NO: 802429 - RNA, 23 nt, Human
ggguagggacggugccccagggc

SEQ ID NO: 802430 - RNA, 22 nt, Human
ggguguuaggaaaugugggcuu

SEQ ID NO: 802431 - RNA, 22 nt, Human
ggguuucaccauguuggccagg

SEQ ID NO: 802432 - RNA, 19 nt, Human
ggucggcuggagggcgcug

SEQ ID NO: 802433 - RNA, 20 nt, Human
ggugagccagggcccggggc

SEQ ID NO: 802434 - RNA, 24 nt, Human
gguuucaccauguuggccaggaug

SEQ ID NO: 802435 - RNA, 23 nt, Human
guagagacgggguuucaccaugu

SEQ ID NO: 802436 - RNA, 21 nt, Human
guccagggaagccugcagaag

SEQ ID NO: 802437 - RNA, 24 nt, Human
gucucacucuguugccaggcugga

SEQ ID NO: 802438 - RNA, 27 nt, Human
gucuuuuuuuuuuuuuuuuuuuuuuug

SEQ ID NO: 802439 - RNA, 22 nt, Human
gugaggccagggcccucgcuag

SEQ ID NO: 802440 - RNA, 24 nt, Human
gugauucuccugccucagccuccu

SEQ ID NO: 802441 - RNA, 20 nt, Human
guggaggcuccgggccacug

SEQ ID NO: 802442 - RNA, 24 nt, Human
guggccuucacaccucgccccagc

SEQ ID NO: 802443 - RNA, 23 nt, Human
uaaagcagcuggacagccuggac

SEQ ID NO: 802444 - RNA, 19 nt, Human
uaagcaagagcccaguaac

SEQ ID NO: 802445 - RNA, 21 nt, Human
uaaggaaguugcccaaggcca

SEQ ID NO: 802446 - RNA, 23 nt, Human
uaagucuuuuuuuuuuuuuuuuu

SEQ ID NO: 802447 - RNA, 23 nt, Human
uacaaucagaucaagccuggagc

SEQ ID NO: 802448 - RNA, 23 nt, Human
uacaggcgugagccaccgcgccc

SEQ ID NO: 802449 - RNA, 26 nt, Human
uaccccaagugggugcuguucucugu

SEQ ID NO: 802450 - RNA, 20 nt, Human
uacucucucccucaccugcu

SEQ ID NO: 802451 - RNA, 23 nt, Human
uagacacagacacacaccccagg

SEQ ID NO: 802452 - RNA, 22 nt, Human
uagagacgggguuucaccaugu

SEQ ID NO: 802453 - RNA, 22 nt, Human
uagccuaccacuaugugcacca

SEQ ID NO: 802454 - RNA, 21 nt, Human
uaggggacuggggauggugcc

SEQ ID NO: 802455 - RNA, 24 nt, Human
uaguagagacgggguuucaccaug

SEQ ID NO: 802456 - RNA, 26 nt, Human
uaguagagacgggguuucaccauguu

SEQ ID NO: 802457 - RNA, 22 nt, Human
uauaauacuccuuuuucuuaca

SEQ ID NO: 802458 - RNA, 19 nt, Human
uauacaacggaggucaugu

SEQ ID NO: 802459 - RNA, 21 nt, Human
ucaagccagggguguggcugg

SEQ ID NO: 802460 - RNA, 25 nt, Human
ucaagccagggguguugucucccga

SEQ ID NO: 802461 - RNA, 19 nt, Human
ucaagugauucuccugccu

SEQ ID NO: 802462 - RNA, 24 nt, Human
ucacagccgccauguaucaggugu

SEQ ID NO: 802463 - RNA, 24 nt, Human
ucaccauguuggccaggauggucu

SEQ ID NO: 802464 - RNA, 23 nt, Human
ucacugcaaccuccaccuccugg

SEQ ID NO: 802465 - RNA, 24 nt, Human
ucacugcaaccuccaccuccuggg

SEQ ID NO: 802466 - RNA, 25 nt, Human
ucacugcaaccuccaccuccugggu

SEQ ID NO: 802467 - RNA, 27 nt, Human
ucacugcaaccuccaccuccuggguuc

SEQ ID NO: 802468 - RNA, 22 nt, Human
ucagagccucccugcaguuccc

SEQ ID NO: 802469 - RNA, 26 nt, Human
ucagaucaagccuggagcuuggggug

SEQ ID NO: 802470 - RNA, 23 nt, Human
ucagccuccugaguagcugggac

SEQ ID NO: 802471 - RNA, 25 nt, Human
ucagccucuaucuccccacuguggu

SEQ ID NO: 802472 - RNA, 19 nt, Human
ucagggccagcagcugagg

SEQ ID NO: 802473 - RNA, 20 nt, Human
ucagggcccagcaggugagg

SEQ ID NO: 802474 - RNA, 23 nt, Human
ucaguggguguuaggaaaugugg

SEQ ID NO: 802475 - RNA, 24 nt, Human
ucauuuuucuauuuuuaguagaga

SEQ ID NO: 802476 - RNA, 18 nt, Human
uccaccagcagccacucc

SEQ ID NO: 802477 - RNA, 22 nt, Human
uccaccagcagccacuccccca

SEQ ID NO: 802478 - RNA, 18 nt, Human
uccagagaguuauucccc

SEQ ID NO: 802479 - RNA, 21 nt, Human
uccagagaguuauuccccugg

SEQ ID NO: 802480 - RNA, 19 nt, Human
uccauggacgacaccaagg

SEQ ID NO: 802481 - RNA, 23 nt, Human
uccauggacgacaccaaggccca

SEQ ID NO: 802482 - RNA, 24 nt, Human
ucccaaagugcugggauuacaggc

SEQ ID NO: 802483 - RNA, 18 nt, Human
ucccacagacucuggcaa

SEQ ID NO: 802484 - RNA, 22 nt, Human
ucccaccuccaagcccaccacc

SEQ ID NO: 802485 - RNA, 24 nt, Human
ucccagaccauugagacggcccug

SEQ ID NO: 802486 - RNA, 22 nt, Human
ucccagaccugcacaggcccac

SEQ ID NO: 802487 - RNA, 19 nt, Human
ucccagauaacauguccca

SEQ ID NO: 802488 - RNA, 25 nt, Human
ucccagccucugucucagguggguc

SEQ ID NO: 802489 - RNA, 20 nt, Human
ucccauggccgcaggcggcc

SEQ ID NO: 802490 - RNA, 23 nt, Human
ucccccagggaaccagucaccuc

SEQ ID NO: 802491 - RNA, 18 nt, Human
uccccugaccugggccuc

SEQ ID NO: 802492 - RNA, 19 nt, Human
uccccugaccugggccucc

SEQ ID NO: 802493 - RNA, 18 nt, Human
uccccuggcacuuccagc

SEQ ID NO: 802494 - RNA, 24 nt, Human
uccccuggcacuuccagccaagca

SEQ ID NO: 802495 - RNA, 24 nt, Human
ucccuagacacagacacacacccc

SEQ ID NO: 802496 - RNA, 20 nt, Human
ucccugagaugccuccaggu

SEQ ID NO: 802497 - RNA, 24 nt, Human
ucccugagaugccuccaggugugg

SEQ ID NO: 802498 - RNA, 22 nt, Human
ucccugaggaaguagccccugg

SEQ ID NO: 802499 - RNA, 18 nt, Human
ucccugcuuguccguucc

SEQ ID NO: 802500 - RNA, 19 nt, Human
ucccuugucuuuuucugaa

SEQ ID NO: 802501 - RNA, 23 nt, Human
ucccuugucuuuuucugaacaca

SEQ ID NO: 802502 - RNA, 21 nt, Human
uccucgcuacagcaacaggag

SEQ ID NO: 802503 - RNA, 26 nt, Human
uccugaguagcugggacuacgggggc

SEQ ID NO: 802504 - RNA, 21 nt, Human
uccuggguucaagugauucuc

SEQ ID NO: 802505 - RNA, 24 nt, Human
uccuggguucaagugauucuccug

SEQ ID NO: 802506 - RNA, 20 nt, Human
ucgccccagcucuggcuucc

SEQ ID NO: 802507 - RNA, 23 nt, Human
ucucacucuguugccaggcugga

SEQ ID NO: 802508 - RNA, 24 nt, Human
ucucaggugggucagccucagccu

SEQ ID NO: 802509 - RNA, 22 nt, Human
ucucccucaccugcuuucccuu

SEQ ID NO: 802510 - RNA, 24 nt, Human
ucuccugccucagccuccugagua

SEQ ID NO: 802511 - RNA, 24 nt, Human
ucugcugggccagcacggagcugg

SEQ ID NO: 802512 - RNA, 22 nt, Human
ucuggcuuccuagccuaccacu

SEQ ID NO: 802513 - RNA, 18 nt, Human
ucuguugccaggcuggag

SEQ ID NO: 802514 - RNA, 23 nt, Human
ucuguugccaggcuggagugcag

SEQ ID NO: 802515 - RNA, 19 nt, Human
ugaaacagcagcgggaguc

SEQ ID NO: 802516 - RNA, 21 nt, Human
ugaccagcauucccuagacac

SEQ ID NO: 802517 - RNA, 18 nt, Human
ugaccgucaccaucaccu

SEQ ID NO: 802518 - RNA, 18 nt, Human
ugagacagagucucacuc

SEQ ID NO: 802519 - RNA, 22 nt, Human
ugagacagagucucacucuguu

SEQ ID NO: 802520 - RNA, 20 nt, Human
ugagaugccuccaggugugg

SEQ ID NO: 802521 - RNA, 23 nt, Human
ugagcaucguccaucucuguccc

SEQ ID NO: 802522 - RNA, 20 nt, Human
ugagccuccgucugucccag

SEQ ID NO: 802523 - RNA, 19 nt, Human
ugagcuggacgcccaugac

SEQ ID NO: 802524 - RNA, 23 nt, Human
ugaggacucugaggcccagagau

SEQ ID NO: 802525 - RNA, 24 nt, Human
ugaggacucugaggcccagagaug

SEQ ID NO: 802526 - RNA, 23 nt, Human
ugaggagcugcggggcagccugg

SEQ ID NO: 802527 - RNA, 20 nt, Human
ugaggcaaggccaggccugg

SEQ ID NO: 802528 - RNA, 23 nt, Human
ugaggccagggcccucgcuagcc

SEQ ID NO: 802529 - RNA, 18 nt, Human
ugagggaaccgagguaug

SEQ ID NO: 802530 - RNA, 19 nt, Human
ugagguaguacagcgcucc

SEQ ID NO: 802531 - RNA, 24 nt, Human
ugaugccugggccaguuccccaga

SEQ ID NO: 802532 - RNA, 20 nt, Human
ugauucuccugccucagccu

SEQ ID NO: 802533 - RNA, 19 nt, Human
ugccaagggcaugcugggg

SEQ ID NO: 802534 - RNA, 20 nt, Human
ugccaagggcaugcuggggc

SEQ ID NO: 802535 - RNA, 20 nt, Human
ugccaagggcaugcuggggc

SEQ ID NO: 802536 - RNA, 18 nt, Human
ugccacccaggagacaca

SEQ ID NO: 802537 - RNA, 19 nt, Human
ugccagagaagucuccggc

SEQ ID NO: 802538 - RNA, 21 nt, Human
ugccaggcuggagugcagugg

SEQ ID NO: 802539 - RNA, 23 nt, Human
ugccaggcuggagugcaguggca

SEQ ID NO: 802540 - RNA, 18 nt, Human
ugccauagaaacaaguga

SEQ ID NO: 802541 - RNA, 24 nt, Human
ugccaugggaauccagaauggcuu

SEQ ID NO: 802542 - RNA, 24 nt, Human
ugccucagccuccugaguagcugg

SEQ ID NO: 802543 - RNA, 21 nt, Human
ugccugcugccagcuuccccc

SEQ ID NO: 802544 - RNA, 20 nt, Human
ugccugggccaguuccccag

SEQ ID NO: 802545 - RNA, 21 nt, Human
ugcuaagucuuuugagagcuc

SEQ ID NO: 802546 - RNA, 21 nt, Human
ugcugcagaggcaaaggccca

SEQ ID NO: 802547 - RNA, 24 nt, Human
ugcugggauuacaggcgugagcca

SEQ ID NO: 802548 - RNA, 23 nt, Human
ugcugugacccaggcuucaggcg

SEQ ID NO: 802549 - RNA, 19 nt, Human
uggaagaacccaggcuggg

SEQ ID NO: 802550 - RNA, 18 nt, Human
uggaaggaagugggggug

SEQ ID NO: 802551 - RNA, 20 nt, Human
uggaaggaagugggggugag

SEQ ID NO: 802552 - RNA, 20 nt, Human
uggagacccgaggagaagaa

SEQ ID NO: 802553 - RNA, 21 nt, Human
uggaggagcaggugcagcagu

SEQ ID NO: 802554 - RNA, 23 nt, Human
uggaggaggcugaagggcagaag

SEQ ID NO: 802555 - RNA, 18 nt, Human
uggagugcaguggcacaa

SEQ ID NO: 802556 - RNA, 22 nt, Human
uggagugcaguggcacaaucuc

SEQ ID NO: 802557 - RNA, 24 nt, Human
uggcacaaucucugcucacugcaa

SEQ ID NO: 802558 - RNA, 22 nt, Human
uggccaggauggucuugaucuc

SEQ ID NO: 802559 - RNA, 20 nt, Human
uggcucagagcagaugaugc

SEQ ID NO: 802560 - RNA, 21 nt, Human
uggcuucuaggaggagguggc

SEQ ID NO: 802561 - RNA, 22 nt, Human
ugggaaggaaacuaaaacugag

SEQ ID NO: 802562 - RNA, 21 nt, Human
ugggacuacgggggcccgcca

SEQ ID NO: 802563 - RNA, 22 nt, Human
ugggacuacgggggcccgccac

SEQ ID NO: 802564 - RNA, 24 nt, Human
ugggacuacgggggcccgccacca

SEQ ID NO: 802565 - RNA, 22 nt, Human
ugggaggccugagggauuugcc

SEQ ID NO: 802566 - RNA, 21 nt, Human
ugggauccuggccuugaccag

SEQ ID NO: 802567 - RNA, 22 nt, Human
ugggaugaugugacacuggaga

SEQ ID NO: 802568 - RNA, 18 nt, Human
ugggauuacaggcgugag

SEQ ID NO: 802569 - RNA, 19 nt, Human
ugggauuacaggcgugagc

SEQ ID NO: 802570 - RNA, 21 nt, Human
ugggauuacaggcgugagcca

SEQ ID NO: 802571 - RNA, 22 nt, Human
ugggauuacaggcgugagccac

SEQ ID NO: 802572 - RNA, 23 nt, Human
ugggauuacaggcgugagccacc

SEQ ID NO: 802573 - RNA, 24 nt, Human
ugggauuacaggcgugagccaccg

SEQ ID NO: 802574 - RNA, 18 nt, Human
uggggacugcagcucccc

SEQ ID NO: 802575 - RNA, 24 nt, Human
uggggauggugccaagggcaugcu

SEQ ID NO: 802576 - RNA, 24 nt, Human
uggguaagggcccagccgcuucca

SEQ ID NO: 802577 - RNA, 19 nt, Human
ugggugcuguucucugugc

SEQ ID NO: 802578 - RNA, 23 nt, Human
uggguucaagugauucuccugcc

SEQ ID NO: 802579 - RNA, 21 nt, Human
uggugccaagggcaugcuggg

SEQ ID NO: 802580 - RNA, 24 nt, Human
uggugugccucccuucuaaggucc

SEQ ID NO: 802581 - RNA, 25 nt, Human
uggugugccucccuucuaagguccc

SEQ ID NO: 802582 - RNA, 23 nt, Human
uguaucaggugucugcugugacc

SEQ ID NO: 802583 - RNA, 18 nt, Human
ugucacacugucacagaa

SEQ ID NO: 802584 - RNA, 19 nt, Human
uguccaaaacgggggggcc

SEQ ID NO: 802585 - RNA, 19 nt, Human
uguccaaaauccgggaagu

SEQ ID NO: 802586 - RNA, 18 nt, Human
uguccguggggcucacgg

SEQ ID NO: 802587 - RNA, 20 nt, Human
ugucugugggcaagcucuuc

SEQ ID NO: 802588 - RNA, 19 nt, Human
ugucuuuuucugaacacag

SEQ ID NO: 802589 - RNA, 24 nt, Human
ugugacugccucuagucacaacag

SEQ ID NO: 802590 - RNA, 19 nt, Human
uguggaagaacccaggcug

SEQ ID NO: 802591 - RNA, 24 nt, Human
uguggaagaacccaggcugggaca

SEQ ID NO: 802592 - RNA, 21 nt, Human
uguggaggcccucagggccca

SEQ ID NO: 802593 - RNA, 21 nt, Human
uguggcugaggacucugaggc

SEQ ID NO: 802594 - RNA, 22 nt, Human
uguguggaagaacccaggcugg

SEQ ID NO: 802595 - RNA, 27 nt, Human
uuaaugauccccugaccugggccuccc

SEQ ID NO: 802596 - RNA, 22 nt, Human
uuacuggcucccaccgcccucc

SEQ ID NO: 802597 - RNA, 18 nt, Human
uuaguagagacgggguuu

SEQ ID NO: 802598 - RNA, 22 nt, Human
uuaguagagacgggguuucacc

SEQ ID NO: 802599 - RNA, 24 nt, Human
uuaguagagacgggguuucaccau

SEQ ID NO: 802600 - RNA, 21 nt, Human
uucaagugauucuccugccuc

SEQ ID NO: 802601 - RNA, 23 nt, Human
uucaagugauucuccugccucag

SEQ ID NO: 802602 - RNA, 24 nt, Human
uucaagugauucuccugccucagc

SEQ ID NO: 802603 - RNA, 22 nt, Human
uucagcaacaugggaugaugug

SEQ ID NO: 802604 - RNA, 19 nt, Human
uucaggcgccgcagccucu

SEQ ID NO: 802605 - RNA, 19 nt, Human
uucaucuauacaacggagg

SEQ ID NO: 802606 - RNA, 18 nt, Human
uuccaccagccucccuag

SEQ ID NO: 802607 - RNA, 19 nt, Human
uucccagaauuccucucca

SEQ ID NO: 802608 - RNA, 18 nt, Human
uucccccgaccccuaccc

SEQ ID NO: 802609 - RNA, 24 nt, Human
uuccugcuuuccauucagugggug

SEQ ID NO: 802610 - RNA, 24 nt, Human
uucuaagguccugucccauugggc

SEQ ID NO: 802611 - RNA, 21 nt, Human
uugccaggcuggagugcagug

SEQ ID NO: 802612 - RNA, 18 nt, Human
uugcccaaggccacacag

SEQ ID NO: 802613 - RNA, 23 nt, Human
uugggcacaggaggcagauccag

SEQ ID NO: 802614 - RNA, 20 nt, Human
uugggggacagggaaggggg

SEQ ID NO: 802615 - RNA, 24 nt, Human
uuguguggaagaacccaggcuggg

SEQ ID NO: 802616 - RNA, 19 nt, Human
uuucaccauguuggccagg

SEQ ID NO: 802617 - RNA, 20 nt, Human
uuucaccauguuggccagga

SEQ ID NO: 802618 - RNA, 19 nt, Human
uuucuuacaauucaugccu

SEQ ID NO: 802619 - RNA, 24 nt, Human
uuuuuaguagagacgggguuucac

SEQ ID NO: 802620 - RNA, 20 nt, Human
uuuuucuauuuuuaguagag

SEQ ID NO: 802621 - RNA, 20 nt, Human
uuuuuuuuuuugagacagag

SEQ ID NO: 802622 - RNA, 26 nt, Human
uuuuuuuuuuuugagacagagucuca

SEQ ID NO: 802623 - RNA, 27 nt, Human
uuuuuuuuuuuuuuuuuuuuuuugggg

SEQ ID NO: 802624 - RNA, 23 nt, Human
aaacacacauuggccacagaaaa

SEQ ID NO: 802625 - RNA, 25 nt, Human
acacagcuucuggagggagggaacc

SEQ ID NO: 802626 - RNA, 23 nt, Human
acagaaaaaggcgcuucuccgua

SEQ ID NO: 802627 - RNA, 22 nt, Human
acagauaaccuuaaccucccag

SEQ ID NO: 802628 - RNA, 22 nt, Human
agacagaaaaauaacauucuga

SEQ ID NO: 802629 - RNA, 23 nt, Human
agagaaaacacacauuggccaca

SEQ ID NO: 802630 - RNA, 25 nt, Human
agcgcagcuacucuuaaccccuugg

SEQ ID NO: 802631 - RNA, 25 nt, Human
agggaggaaggggauacccgccuag

SEQ ID NO: 802632 - RNA, 20 nt, Human
aguggugagggaggaagggg

SEQ ID NO: 802633 - RNA, 23 nt, Human
augguggugaggaggggugcugg

SEQ ID NO: 802634 - RNA, 23 nt, Human
caaggcaauggacagauaaccuu

SEQ ID NO: 802635 - RNA, 22 nt, Human
cagagccuaggggacgcuuaag

SEQ ID NO: 802636 - RNA, 19 nt, Human
cagcugccgccgcucccgc

SEQ ID NO: 802637 - RNA, 22 nt, Human
ccacagaaaaaggcgcuucucc

SEQ ID NO: 802638 - RNA, 21 nt, Human
ccagaucagccgaaucaaccc

SEQ ID NO: 802639 - RNA, 25 nt, Human
cccagagaaaacacacauuggccac

SEQ ID NO: 802640 - RNA, 21 nt, Human
ccucacaucccaaaaauaaca

SEQ ID NO: 802641 - RNA, 20 nt, Human
ccucuugcagcugccgcaac

SEQ ID NO: 802642 - RNA, 18 nt, Human
cgcagccagaucacccuc

SEQ ID NO: 802643 - RNA, 22 nt, Human
cggcugcgcugugccucccacu

SEQ ID NO: 802644 - RNA, 24 nt, Human
cugccgccgcucccgcucggccuc

SEQ ID NO: 802645 - RNA, 19 nt, Human
cugcgcugugccucccacu

SEQ ID NO: 802646 - RNA, 21 nt, Human
gaaaaauaacauucugagagc

SEQ ID NO: 802647 - RNA, 19 nt, Human
gacagauaaccuuaaccuc

SEQ ID NO: 802648 - RNA, 23 nt, Human
gacagauaaccuuaaccucccag

SEQ ID NO: 802649 - RNA, 26 nt, Human
gccagaucacccucacaucccaaaaa

SEQ ID NO: 802650 - RNA, 20 nt, Human
gccgccgcucccgcucggcc

SEQ ID NO: 802651 - RNA, 25 nt, Human
gucgcagccagaucacccucacauc

SEQ ID NO: 802652 - RNA, 19 nt, Human
uaacacaguggcacuugga

SEQ ID NO: 802653 - RNA, 22 nt, Human
uaaccucccagagaaaacacac

SEQ ID NO: 802654 - RNA, 22 nt, Human
uaaccuuaaccucccagagaaa

SEQ ID NO: 802655 - RNA, 21 nt, Human
uaagacagaaaaauaacauuc

SEQ ID NO: 802656 - RNA, 23 nt, Human
uaucagcaacuuugaaauggcuu

SEQ ID NO: 802657 - RNA, 20 nt, Human
uaugguggugaggaggggug

SEQ ID NO: 802658 - RNA, 22 nt, Human
ucacgcagcuggcgcucccggg

SEQ ID NO: 802659 - RNA, 18 nt, Human
ucagccgaaucaacccug

SEQ ID NO: 802660 - RNA, 24 nt, Human
ucccaaaaauaacacucagauugc

SEQ ID NO: 802661 - RNA, 19 nt, Human
uccucuugcagcugccgca

SEQ ID NO: 802662 - RNA, 23 nt, Human
ugaggaggggugcuggugugagg

SEQ ID NO: 802663 - RNA, 19 nt, Human
ugccauaguuaucagcaac

SEQ ID NO: 802664 - RNA, 21 nt, Human
ugccgcaacucccggcugcgc

SEQ ID NO: 802665 - RNA, 20 nt, Human
uggcagggugugagcagcca

SEQ ID NO: 802666 - RNA, 19 nt, Human
uggugaggaggggugcugg

SEQ ID NO: 802667 - RNA, 20 nt, Human
ugguggugaggaggggugcu

SEQ ID NO: 802668 - RNA, 21 nt, Human
uguagacuuuucuugagacuu

SEQ ID NO: 802669 - RNA, 25 nt, Human
aaacaagagauucuuuggcccagag

SEQ ID NO: 802670 - RNA, 20 nt, Human
aaacagagcacagcccagga

SEQ ID NO: 802671 - RNA, 27 nt, Human
aaacaugaaaaggugggagcgaccuag

SEQ ID NO: 802672 - RNA, 20 nt, Human
aaaccagagaaccccccagg

SEQ ID NO: 802673 - RNA, 21 nt, Human
aaaccagagaaccccccagga

SEQ ID NO: 802674 - RNA, 23 nt, Human
aacaccgggcccacauucagccc

SEQ ID NO: 802675 - RNA, 19 nt, Human
aacacggugaaaccccguc

SEQ ID NO: 802676 - RNA, 20 nt, Human
aacacggugaaaccccgucu

SEQ ID NO: 802677 - RNA, 21 nt, Human
aacacggugaaaccccgucuc

SEQ ID NO: 802678 - RNA, 20 nt, Human
aaccagggaccagaacugca

SEQ ID NO: 802679 - RNA, 23 nt, Human
aaccagggaccagaacugcagcc

SEQ ID NO: 802680 - RNA, 23 nt, Human
aaccugagggcagagggugcaau

SEQ ID NO: 802681 - RNA, 20 nt, Human
aagaagccaguguggcccag

SEQ ID NO: 802682 - RNA, 18 nt, Human
aagacagagacucagagc

SEQ ID NO: 802683 - RNA, 23 nt, Human
aaggaaccgagaugagcaccugc

SEQ ID NO: 802684 - RNA, 20 nt, Human
aaucagguugggcagggcug

SEQ ID NO: 802685 - RNA, 19 nt, Human
aauccaguccacccuggac

SEQ ID NO: 802686 - RNA, 18 nt, Human
acaacagagcagacagac

SEQ ID NO: 802687 - RNA, 23 nt, Human
acacacccucaagaaccugaggg

SEQ ID NO: 802688 - RNA, 18 nt, Human
acacagcacaucuguccc

SEQ ID NO: 802689 - RNA, 20 nt, Human
acacagcacaucuguccccc

SEQ ID NO: 802690 - RNA, 20 nt, Human
acaccgggcccacauucagc

SEQ ID NO: 802691 - RNA, 22 nt, Human
acaccgggcccacauucagccc

SEQ ID NO: 802692 - RNA, 24 nt, Human
acagagcgagacucugucucaaaa

SEQ ID NO: 802693 - RNA, 23 nt, Human
accagagauguucagccaccagg

SEQ ID NO: 802694 - RNA, 19 nt, Human
accagcuccgugcuugugc

SEQ ID NO: 802695 - RNA, 24 nt, Human
accccgucucuacuaaaaauacaa

SEQ ID NO: 802696 - RNA, 25 nt, Human
acccuuccuaccugacaaccgacuc

SEQ ID NO: 802697 - RNA, 22 nt, Human
accuuguccuguacacagcaca

SEQ ID NO: 802698 - RNA, 19 nt, Human
acguuaaggaaccgagaug

SEQ ID NO: 802699 - RNA, 28 nt, Human
acucugucucaaaaaaaaaaaaaaaaaa

SEQ ID NO: 802700 - RNA, 24 nt, Human
acugcacuccagccugggcgacag

SEQ ID NO: 802701 - RNA, 26 nt, Human
acugcacuccagccugggcgacagag

SEQ ID NO: 802702 - RNA, 20 nt, Human
agaaagaaacaugaaaaggu

SEQ ID NO: 802703 - RNA, 18 nt, Human
agaaggagccugccaggg

SEQ ID NO: 802704 - RNA, 21 nt, Human
agacaacagagcagacagacc

SEQ ID NO: 802705 - RNA, 25 nt, Human
agacagaccagugaugaccaugggg

SEQ ID NO: 802706 - RNA, 22 nt, Human
agagcccuggccugggaguucc

SEQ ID NO: 802707 - RNA, 20 nt, Human
agaggaaagccuaagugagg

SEQ ID NO: 802708 - RNA, 24 nt, Human
agcacuuugggaggccaagguggg

SEQ ID NO: 802709 - RNA, 19 nt, Human
agcccagagcucauggcag

SEQ ID NO: 802710 - RNA, 23 nt, Human
agccuaagugaggggucagacua

SEQ ID NO: 802711 - RNA, 21 nt, Human
agccucuucccuggaccgggg

SEQ ID NO: 802712 - RNA, 24 nt, Human
agccugggcgacagagcgagacuc

SEQ ID NO: 802713 - RNA, 20 nt, Human
aggaaagggauccugcccag

SEQ ID NO: 802714 - RNA, 18 nt, Human
aggagcugcuccaggagg

SEQ ID NO: 802715 - RNA, 23 nt, Human
aggaggaagaggccaucacccag

SEQ ID NO: 802716 - RNA, 23 nt, Human
aggauuaaaaguuggcuuuagcu

SEQ ID NO: 802717 - RNA, 27 nt, Human
aggcaggaggauggcgugaacccagga

SEQ ID NO: 802718 - RNA, 20 nt, Human
aggcaggugggaaggcaaac

SEQ ID NO: 802719 - RNA, 23 nt, Human
aggcaggugggaaggcaaacaag

SEQ ID NO: 802720 - RNA, 18 nt, Human
aggcaucccagagauagc

SEQ ID NO: 802721 - RNA, 21 nt, Human
aggccaagguggguggaucac

SEQ ID NO: 802722 - RNA, 21 nt, Human
aggccccaaucaagggccggc

SEQ ID NO: 802723 - RNA, 19 nt, Human
aggccgaggcaggaggaug

SEQ ID NO: 802724 - RNA, 20 nt, Human
aggcggagcuugcagugagc

SEQ ID NO: 802725 - RNA, 24 nt, Human
aggcggagcuugcagugagcugag

SEQ ID NO: 802726 - RNA, 24 nt, Human
aggcgucguagcaugcgccuguag

SEQ ID NO: 802727 - RNA, 18 nt, Human
aggcugcagggcacuggc

SEQ ID NO: 802728 - RNA, 18 nt, Human
aggcugcagggcacuggc

SEQ ID NO: 802729 - RNA, 19 nt, Human
agggauggggcaggaagaa

SEQ ID NO: 802730 - RNA, 21 nt, Human
aggggcugggcagggugaggg

SEQ ID NO: 802731 - RNA, 22 nt, Human
aggggcugggcagggugagggg

SEQ ID NO: 802732 - RNA, 23 nt, Human
agggggccuagaggcaucccaga

SEQ ID NO: 802733 - RNA, 24 nt, Human
agguggguggaucacaaggucagg

SEQ ID NO: 802734 - RNA, 19 nt, Human
agucucaacaagauaccac

SEQ ID NO: 802735 - RNA, 22 nt, Human
aguguaaucuuuucccagaggu

SEQ ID NO: 802736 - RNA, 20 nt, Human
aucacaaggucaggagaucc

SEQ ID NO: 802737 - RNA, 23 nt, Human
aucagccaacccuugauugaaau

SEQ ID NO: 802738 - RNA, 22 nt, Human
aucccagcacuuugggaggcca

SEQ ID NO: 802739 - RNA, 24 nt, Human
aucgcgccacugcacuccagccug

SEQ ID NO: 802740 - RNA, 22 nt, Human
auggaaagccucuguguccaca

SEQ ID NO: 802741 - RNA, 18 nt, Human
caaaccagagaacccccc

SEQ ID NO: 802742 - RNA, 19 nt, Human
caaaccagagaacccccca

SEQ ID NO: 802743 - RNA, 23 nt, Human
caagagauucuuuggcccagagc

SEQ ID NO: 802744 - RNA, 21 nt, Human
caagauaccacaaccaagggc

SEQ ID NO: 802745 - RNA, 26 nt, Human
caagguggguggaucacaaggucagg

SEQ ID NO: 802746 - RNA, 21 nt, Human
cacacauaaaaucuggauuuc

SEQ ID NO: 802747 - RNA, 22 nt, Human
caccugccccagcauggccguc

SEQ ID NO: 802748 - RNA, 24 nt, Human
cacgccuguaaucccagcacuuug

SEQ ID NO: 802749 - RNA, 24 nt, Human
cacuccagccugggcgacagagcg

SEQ ID NO: 802750 - RNA, 19 nt, Human
cacugcacuccagccuggg

SEQ ID NO: 802751 - RNA, 21 nt, Human
cacugcacuccagccugggcg

SEQ ID NO: 802752 - RNA, 22 nt, Human
cacugcacuccagccugggcga

SEQ ID NO: 802753 - RNA, 23 nt, Human
cacugcacuccagccugggcgac

SEQ ID NO: 802754 - RNA, 24 nt, Human
cacugcacuccagccugggcgaca

SEQ ID NO: 802755 - RNA, 22 nt, Human
cagacagaccagugaugaccau

SEQ ID NO: 802756 - RNA, 23 nt, Human
cagagcacagcccaggagcugcu

SEQ ID NO: 802757 - RNA, 20 nt, Human
cagagguguguagagggaag

SEQ ID NO: 802758 - RNA, 21 nt, Human
cagcaaaccagagaacccccc

SEQ ID NO: 802759 - RNA, 24 nt, Human
cagcaaaccagagaaccccccucu

SEQ ID NO: 802760 - RNA, 18 nt, Human
cagcacaucugucccccu

SEQ ID NO: 802761 - RNA, 24 nt, Human
cagcacuuugggaggccaaggugg

SEQ ID NO: 802762 - RNA, 19 nt, Human
cagcauccgcagucaucag

SEQ ID NO: 802763 - RNA, 20 nt, Human
cagcccaggagcugcuccag

SEQ ID NO: 802764 - RNA, 24 nt, Human
cagcugcucaggaggccgaggcag

SEQ ID NO: 802765 - RNA, 23 nt, Human
ccacaggugacuugacuugccuc

SEQ ID NO: 802766 - RNA, 24 nt, Human
ccacuauacccauggccacagaaa

SEQ ID NO: 802767 - RNA, 20 nt, Human
ccacugcacuccagccuggg

SEQ ID NO: 802768 - RNA, 20 nt, Human
ccacugcacuccagccuggg

SEQ ID NO: 802769 - RNA, 21 nt, Human
ccacugcacuccagccugggc

SEQ ID NO: 802770 - RNA, 21 nt, Human
ccacugcacuccagccugggc

SEQ ID NO: 802771 - RNA, 24 nt, Human
ccacugcacuccagccugggcgac

SEQ ID NO: 802772 - RNA, 21 nt, Human
ccagaggaucccuccccuuaa

SEQ ID NO: 802773 - RNA, 19 nt, Human
ccagcuuugucuccugaca

SEQ ID NO: 802774 - RNA, 19 nt, Human
cccacaggccacaggugac

SEQ ID NO: 802775 - RNA, 18 nt, Human
cccacauucagccccaca

SEQ ID NO: 802776 - RNA, 18 nt, Human
cccagaggaucccucccc

SEQ ID NO: 802777 - RNA, 21 nt, Human
cccaggagcugcuccaggagg

SEQ ID NO: 802778 - RNA, 21 nt, Human
cccauggccacagaaagaaac

SEQ ID NO: 802779 - RNA, 22 nt, Human
ccccaggacaaauccaguccac

SEQ ID NO: 802780 - RNA, 19 nt, Human
ccccaucacuccuccucuc

SEQ ID NO: 802781 - RNA, 22 nt, Human
ccccaucacuccuccucuccca

SEQ ID NO: 802782 - RNA, 19 nt, Human
cccccuccccucuggcucc

SEQ ID NO: 802783 - RNA, 21 nt, Human
ccccugccagcuuugucuccu

SEQ ID NO: 802784 - RNA, 20 nt, Human
ccccuuggguccgucacagc

SEQ ID NO: 802785 - RNA, 18 nt, Human
cccuggacccugggaccc

SEQ ID NO: 802786 - RNA, 22 nt, Human
ccgggcccacauucagccccac

SEQ ID NO: 802787 - RNA, 20 nt, Human
ccgucgcagcccugguccug

SEQ ID NO: 802788 - RNA, 19 nt, Human
ccucaagaaccugagggca

SEQ ID NO: 802789 - RNA, 23 nt, Human
ccucugggcgaccagagauguuc

SEQ ID NO: 802790 - RNA, 18 nt, Human
ccuggaaaggcccuggag

SEQ ID NO: 802791 - RNA, 22 nt, Human
ccuggcaagggaggcucccugu

SEQ ID NO: 802792 - RNA, 19 nt, Human
ccugggacccuauuugccc

SEQ ID NO: 802793 - RNA, 22 nt, Human
ccugggcgacagagcgagacuc

SEQ ID NO: 802794 - RNA, 22 nt, Human
ccugguuaacacggugaaaccc

SEQ ID NO: 802795 - RNA, 23 nt, Human
ccugguuaacacggugaaacccc

SEQ ID NO: 802796 - RNA, 24 nt, Human
ccugguuaacacggugaaaccccg

SEQ ID NO: 802797 - RNA, 22 nt, Human
ccuguaaucccagcacuuuggg

SEQ ID NO: 802798 - RNA, 19 nt, Human
ccuguacacagcacaucug

SEQ ID NO: 802799 - RNA, 21 nt, Human
ccuguagucccagcugcucag

SEQ ID NO: 802800 - RNA, 24 nt, Human
cgagaccauccugguuaacacggu

SEQ ID NO: 802801 - RNA, 24 nt, Human
cgaggcaggaggauggcgugaacc

SEQ ID NO: 802802 - RNA, 26 nt, Human
cgccacugcacuccagccugggcgac

SEQ ID NO: 802803 - RNA, 23 nt, Human
cgccuguaaucccagcacuuugg

SEQ ID NO: 802804 - RNA, 24 nt, Human
cgccuguagucccagcugcucagg

SEQ ID NO: 802805 - RNA, 21 nt, Human
cggcccuguaaauggugaggc

SEQ ID NO: 802806 - RNA, 26 nt, Human
cggcuccggcucuggcuucggggccc

SEQ ID NO: 802807 - RNA, 26 nt, Human
cggcucuggcuucggggccccggcuu

SEQ ID NO: 802808 - RNA, 24 nt, Human
cguagcaugcgccuguagucccag

SEQ ID NO: 802809 - RNA, 22 nt, Human
cucacgccuguaaucccagcac

SEQ ID NO: 802810 - RNA, 24 nt, Human
cucacgccuguaaucccagcacuu

SEQ ID NO: 802811 - RNA, 23 nt, Human
cuccaggucaacaggcauguuua

SEQ ID NO: 802812 - RNA, 21 nt, Human
cuccugacaccgaaacagccc

SEQ ID NO: 802813 - RNA, 27 nt, Human
cucugucucaaaaaaaaaaaaaaaaaa

SEQ ID NO: 802814 - RNA, 21 nt, Human
cugacacccacgaucccugcc

SEQ ID NO: 802815 - RNA, 20 nt, Human
cugacaccgaaacagcccgu

SEQ ID NO: 802816 - RNA, 20 nt, Human
cuggccugccuggaagagca

SEQ ID NO: 802817 - RNA, 23 nt, Human
cugggcgaccagagauguucagc

SEQ ID NO: 802818 - RNA, 19 nt, Human
cuugcagugagcugagauc

SEQ ID NO: 802819 - RNA, 21 nt, Human
cuugcagugagcugagaucgc

SEQ ID NO: 802820 - RNA, 23 nt, Human
gaaagaacagacaacagagcaga

SEQ ID NO: 802821 - RNA, 21 nt, Human
gaagaagccaguguggcccag

SEQ ID NO: 802822 - RNA, 24 nt, Human
gacagagcgagacucugucucaaa

SEQ ID NO: 802823 - RNA, 20 nt, Human
gaccagugaugaccaugggc

SEQ ID NO: 802824 - RNA, 23 nt, Human
gagaucgcgccacugcacuccag

SEQ ID NO: 802825 - RNA, 22 nt, Human
gagcugcuccaggagggggcag

SEQ ID NO: 802826 - RNA, 23 nt, Human
gagcuugcagugagcugagaucg

SEQ ID NO: 802827 - RNA, 23 nt, Human
gaggcaggaggauggcgugaacc

SEQ ID NO: 802828 - RNA, 22 nt, Human
gaucucaauaaaccucugcaac

SEQ ID NO: 802829 - RNA, 23 nt, Human
gcaacaccgggcccacauucagc

SEQ ID NO: 802830 - RNA, 25 nt, Human
gcacagcccaggagcugcuccagga

SEQ ID NO: 802831 - RNA, 24 nt, Human
gcacuccagccugggcgacagagc

SEQ ID NO: 802832 - RNA, 20 nt, Human
gcaggggcugggcaggguga

SEQ ID NO: 802833 - RNA, 22 nt, Human
gccacugcacuccagccugggc

SEQ ID NO: 802834 - RNA, 24 nt, Human
gccacugcacuccagccugggcga

SEQ ID NO: 802835 - RNA, 18 nt, Human
gcccagcgccacuugcug

SEQ ID NO: 802836 - RNA, 18 nt, Human
gccgggcgugguggcuca

SEQ ID NO: 802837 - RNA, 21 nt, Human
gccgucgcagcccugguccug

SEQ ID NO: 802838 - RNA, 24 nt, Human
gcgacagagcgagacucugucuca

SEQ ID NO: 802839 - RNA, 19 nt, Human
gcgccacuugcuggccugc

SEQ ID NO: 802840 - RNA, 21 nt, Human
gcgccugcacaggacaggaag

SEQ ID NO: 802841 - RNA, 20 nt, Human
gcugagaucgcgccacugca

SEQ ID NO: 802842 - RNA, 18 nt, Human
ggagcuugcagugagcug

SEQ ID NO: 802843 - RNA, 24 nt, Human
ggagcuugcagugagcugagaucg

SEQ ID NO: 802844 - RNA, 21 nt, Human
ggccgggcgugguggcucacg

SEQ ID NO: 802845 - RNA, 23 nt, Human
ggcgugguggcucacgccuguaa

SEQ ID NO: 802846 - RNA, 21 nt, Human
ggcucacgccuguaaucccag

SEQ ID NO: 802847 - RNA, 20 nt, Human
ggcugggcagggugaggggc

SEQ ID NO: 802848 - RNA, 20 nt, Human
gggaaggcaaacaaggcugc

SEQ ID NO: 802849 - RNA, 18 nt, Human
gggaagggggccuagagg

SEQ ID NO: 802850 - RNA, 22 nt, Human
gggacaucccauggaaagccuc

SEQ ID NO: 802851 - RNA, 18 nt, Human
gggagucagggaaagaac

SEQ ID NO: 802852 - RNA, 21 nt, Human
gggcaaaacccaccagcuccg

SEQ ID NO: 802853 - RNA, 21 nt, Human
gggcagggugaggggcggaag

SEQ ID NO: 802854 - RNA, 21 nt, Human
gggcaguccccaacuggcuuc

SEQ ID NO: 802855 - RNA, 19 nt, Human
gggcucggagaagaaacaa

SEQ ID NO: 802856 - RNA, 19 nt, Human
ggugaggggcggaagugcu

SEQ ID NO: 802857 - RNA, 21 nt, Human
gguggaucacaaggucaggag

SEQ ID NO: 802858 - RNA, 24 nt, Human
gguggcucacgccuguaaucccag

SEQ ID NO: 802859 - RNA, 20 nt, Human
ggugggaaggcaaacaaggc

SEQ ID NO: 802860 - RNA, 25 nt, Human
gugguggcucacgccuguaauccca

SEQ ID NO: 802861 - RNA, 22 nt, Human
uaacacggugaaaccccgucuc

SEQ ID NO: 802862 - RNA, 24 nt, Human
uaacacggugaaaccccgucucua

SEQ ID NO: 802863 - RNA, 21 nt, Human
uaaggaaccgagaugagcacc

SEQ ID NO: 802864 - RNA, 18 nt, Human
uacaaauuacacacacau

SEQ ID NO: 802865 - RNA, 18 nt, Human
ucaaacagagcacagccc

SEQ ID NO: 802866 - RNA, 19 nt, Human
ucaaacagagcacagccca

SEQ ID NO: 802867 - RNA, 18 nt, Human
ucacaaggucaggagauc

SEQ ID NO: 802868 - RNA, 24 nt, Human
ucacaaggucaggagaucgagacc

SEQ ID NO: 802869 - RNA, 23 nt, Human
ucagaaucagguugggcagggcu

SEQ ID NO: 802870 - RNA, 21 nt, Human
ucagcaggcgccccucccugg

SEQ ID NO: 802871 - RNA, 23 nt, Human
uccacuauacccauggccacaga

SEQ ID NO: 802872 - RNA, 23 nt, Human
uccagccugggcgacagagcgag

SEQ ID NO: 802873 - RNA, 24 nt, Human
uccagccugggcgacagagcgaga

SEQ ID NO: 802874 - RNA, 21 nt, Human
ucccagagauagcuuauagca

SEQ ID NO: 802875 - RNA, 18 nt, Human
ucccauagccaucccaga

SEQ ID NO: 802876 - RNA, 20 nt, Human
ucccccuccccucuggcucc

SEQ ID NO: 802877 - RNA, 21 nt, Human
uccccuuagucaucuuccucc

SEQ ID NO: 802878 - RNA, 23 nt, Human
ucccuccccuuagucaucuuccu

SEQ ID NO: 802879 - RNA, 22 nt, Human
ucccucugugaaaacuaagucu

SEQ ID NO: 802880 - RNA, 19 nt, Human
ucccugaggaggaagaggc

SEQ ID NO: 802881 - RNA, 18 nt, Human
ucccuggaccgggguggc

SEQ ID NO: 802882 - RNA, 21 nt, Human
ucccuggaccgggguggcaga

SEQ ID NO: 802883 - RNA, 19 nt, Human
uccucgaccucgaaggccc

SEQ ID NO: 802884 - RNA, 22 nt, Human
uccucgaccucgaaggccccau

SEQ ID NO: 802885 - RNA, 23 nt, Human
ucgcgccacugcacuccagccug

SEQ ID NO: 802886 - RNA, 24 nt, Human
ucucuacuaaaaauacaaaaaauu

SEQ ID NO: 802887 - RNA, 23 nt, Human
ucugucucaaaaaaaaaaaaaaa

SEQ ID NO: 802888 - RNA, 20 nt, Human
ucuuaugacaaaggaucugg

SEQ ID NO: 802889 - RNA, 22 nt, Human
ugagcugagaucgcgccacugc

SEQ ID NO: 802890 - RNA, 19 nt, Human
ugaggaaacuccucgagag

SEQ ID NO: 802891 - RNA, 18 nt, Human
ugagggaaacugagaucc

SEQ ID NO: 802892 - RNA, 22 nt, Human
ugagggcagagaucccucuugg

SEQ ID NO: 802893 - RNA, 21 nt, Human
ugaggggcggaagugcucagc

SEQ ID NO: 802894 - RNA, 21 nt, Human
ugcagaaaagguggcgguccc

SEQ ID NO: 802895 - RNA, 19 nt, Human
ugccgcuguggcccgaggc

SEQ ID NO: 802896 - RNA, 27 nt, Human
ugccuggaagagcagaacccuggaggc

SEQ ID NO: 802897 - RNA, 23 nt, Human
ugcgccuguagucccagcugcuc

SEQ ID NO: 802898 - RNA, 19 nt, Human
uggaccgggguggcagagg

SEQ ID NO: 802899 - RNA, 19 nt, Human
uggaguugguggcgccagc

SEQ ID NO: 802900 - RNA, 22 nt, Human
uggcagaggaaagccuaaguga

SEQ ID NO: 802901 - RNA, 19 nt, Human
uggcaggcggugagggcag

SEQ ID NO: 802902 - RNA, 20 nt, Human
uggcaggcggugagggcaga

SEQ ID NO: 802903 - RNA, 19 nt, Human
uggcaggggcugggcaggg

SEQ ID NO: 802904 - RNA, 21 nt, Human
uggcaggggcugggcagggug

SEQ ID NO: 802905 - RNA, 20 nt, Human
uggcaguugagguugucugu

SEQ ID NO: 802906 - RNA, 23 nt, Human
uggccacagaaagaaacaugaaa

SEQ ID NO: 802907 - RNA, 18 nt, Human
uggcccagcgccacuugc

SEQ ID NO: 802908 - RNA, 19 nt, Human
uggccgaggagccaccucu

SEQ ID NO: 802909 - RNA, 19 nt, Human
uggccugccuggaagagca

SEQ ID NO: 802910 - RNA, 22 nt, Human
uggcucacgccuguaaucccag

SEQ ID NO: 802911 - RNA, 24 nt, Human
uggcucacgccuguaaucccagca

SEQ ID NO: 802912 - RNA, 23 nt, Human
uggcuccugacacccacgauccc

SEQ ID NO: 802913 - RNA, 23 nt, Human
ugggaggccaagguggguggauc

SEQ ID NO: 802914 - RNA, 24 nt, Human
ugggaggccaagguggguggauca

SEQ ID NO: 802915 - RNA, 22 nt, Human
ugggaguuccaaucccugcaug

SEQ ID NO: 802916 - RNA, 24 nt, Human
ugggaguuccaaucccugcaugug

SEQ ID NO: 802917 - RNA, 24 nt, Human
ugguccuggcaagggaggcucccc

SEQ ID NO: 802918 - RNA, 24 nt, Human
uucaaacagagcacagcccaggag

SEQ ID NO: 802919 - RNA, 21 nt, Human
uucaagugcacccuuccuacc

SEQ ID NO: 802920 - RNA, 23 nt, Human
uucagcauuuacaaauuacacac

SEQ ID NO: 802921 - RNA, 18 nt, Human
uugcagugagcugagauc

SEQ ID NO: 802922 - RNA, 22 nt, Human
uugcagugagcugagaucgcgc

SEQ ID NO: 802923 - RNA, 22 nt, Human
uugucucgggcaccuggaggga

SEQ ID NO: 802924 - RNA, 24 nt, Human
uuuccacuauacccauggccacag

SEQ ID NO: 802925 - RNA, 23 nt, Human
aaaaagcucaaauucagcugggc

SEQ ID NO: 802926 - RNA, 18 nt, Human
aaacaaaacaaaacaaaa

SEQ ID NO: 802927 - RNA, 23 nt, Human
aaacagauuuaaaagaucagcug

SEQ ID NO: 802928 - RNA, 22 nt, Human
aaacuagcauacaacgccuccu

SEQ ID NO: 802929 - RNA, 21 nt, Human
aaagaagacagauuuccaaag

SEQ ID NO: 802930 - RNA, 19 nt, Human
aaagcaaaaaguacccuuc

SEQ ID NO: 802931 - RNA, 22 nt, Human
aaauauauacuauacuugugug

SEQ ID NO: 802932 - RNA, 19 nt, Human
aaaugacauacaauaacau

SEQ ID NO: 802933 - RNA, 21 nt, Human
aacaugguaagacccuugucu

SEQ ID NO: 802934 - RNA, 22 nt, Human
aacccuuaaggccaaggggcaa

SEQ ID NO: 802935 - RNA, 21 nt, Human
aagaacaccgcaggcaggaag

SEQ ID NO: 802936 - RNA, 23 nt, Human
aagaagucaggaucaaaagacua

SEQ ID NO: 802937 - RNA, 18 nt, Human
aagaucagcugggcgugg

SEQ ID NO: 802938 - RNA, 18 nt, Human
aagcaaacaaaaaugaca

SEQ ID NO: 802939 - RNA, 18 nt, Human
aagcucaucgaacaggac

SEQ ID NO: 802940 - RNA, 18 nt, Human
aagcuuuauuugcuauuu

SEQ ID NO: 802941 - RNA, 19 nt, Human
aaggaaaaugaggugagca

SEQ ID NO: 802942 - RNA, 18 nt, Human
aaggugucuaaaauaggu

SEQ ID NO: 802943 - RNA, 22 nt, Human
aaucacuugagcccagguguua

SEQ ID NO: 802944 - RNA, 26 nt, Human
aaucacuugagcccagguguuaguga

SEQ ID NO: 802945 - RNA, 24 nt, Human
acaaaacaaaacaaaacacuagca

SEQ ID NO: 802946 - RNA, 21 nt, Human
acaaagcagcuaucagcacca

SEQ ID NO: 802947 - RNA, 22 nt, Human
acagagcaagaccgugucucaa

SEQ ID NO: 802948 - RNA, 18 nt, Human
acaggacacaaggugggc

SEQ ID NO: 802949 - RNA, 22 nt, Human
accaaagcucaucgaacaggac

SEQ ID NO: 802950 - RNA, 24 nt, Human
accagcuugggcaauauagugaga

SEQ ID NO: 802951 - RNA, 23 nt, Human
accuguagucccagcuacuuggg

SEQ ID NO: 802952 - RNA, 19 nt, Human
acgaugcacacagccccac

SEQ ID NO: 802953 - RNA, 18 nt, Human
acuccacuccagcuugag

SEQ ID NO: 802954 - RNA, 24 nt, Human
acuccacuccagcuugagcaacag

SEQ ID NO: 802955 - RNA, 24 nt, Human
acugcauuccagccuggccaacag

SEQ ID NO: 802956 - RNA, 24 nt, Human
acugcauuccagccuggccaacag

SEQ ID NO: 802957 - RNA, 23 nt, Human
agaaguucgagaccagccugggc

SEQ ID NO: 802958 - RNA, 22 nt, Human
agaaucacuugagaccaaguuu

SEQ ID NO: 802959 - RNA, 19 nt, Human
agagccuggcgaggacagg

SEQ ID NO: 802960 - RNA, 22 nt, Human
agcacaguacgguuuccagcuu

SEQ ID NO: 802961 - RNA, 20 nt, Human
agcacuuugggaggcugagg

SEQ ID NO: 802962 - RNA, 22 nt, Human
agcacuuugggaggcugaggag

SEQ ID NO: 802963 - RNA, 24 nt, Human
agcacuuugggaggcugaggaggg

SEQ ID NO: 802964 - RNA, 18 nt, Human
agcaggucucagagguca

SEQ ID NO: 802965 - RNA, 22 nt, Human
agccugggcaacaugguaagac

SEQ ID NO: 802966 - RNA, 24 nt, Human
agccugggcaacaugguaagaccc

SEQ ID NO: 802967 - RNA, 25 nt, Human
agccugggcaacaugguaagacccu

SEQ ID NO: 802968 - RNA, 24 nt, Human
agcuacuugggaggcugagguggg

SEQ ID NO: 802969 - RNA, 23 nt, Human
agcugggcguggugaugugcgcc

SEQ ID NO: 802970 - RNA, 23 nt, Human
agcuugggcaauauagugagauc

SEQ ID NO: 802971 - RNA, 25 nt, Human
agcuugggcaauauagugagauccu

SEQ ID NO: 802972 - RNA, 19 nt, Human
aggaaagagagacagcagc

SEQ ID NO: 802973 - RNA, 18 nt, Human
aggaagaaacggcagcag

SEQ ID NO: 802974 - RNA, 19 nt, Human
aggaagagaaaugaggggg

SEQ ID NO: 802975 - RNA, 22 nt, Human
aggaagaucuucagggcuugcc

SEQ ID NO: 802976 - RNA, 21 nt, Human
aggacacaaggugggcuccgg

SEQ ID NO: 802977 - RNA, 23 nt, Human
aggaggaagagaaaugaggggga

SEQ ID NO: 802978 - RNA, 23 nt, Human
aggcaaacacaauugucugaaac

SEQ ID NO: 802979 - RNA, 18 nt, Human
aggcaguagaaucacuug

SEQ ID NO: 802980 - RNA, 25 nt, Human
aggcggcauaaaucauucagaagcc

SEQ ID NO: 802981 - RNA, 24 nt, Human
aggcugaggagggacaauugcuug

SEQ ID NO: 802982 - RNA, 24 nt, Human
aggcugaggcaguagaaucacuug

SEQ ID NO: 802983 - RNA, 24 nt, Human
aggcugaggugggagaaucacuug

SEQ ID NO: 802984 - RNA, 19 nt, Human
agggagagccuggcgagga

SEQ ID NO: 802985 - RNA, 18 nt, Human
agggucuuucuaaauccu

SEQ ID NO: 802986 - RNA, 22 nt, Human
agguagccagggagaaggaaag

SEQ ID NO: 802987 - RNA, 25 nt, Human
aggucugaugauucauaagcaaagg

SEQ ID NO: 802988 - RNA, 24 nt, Human
aggugaggaggaagagaaaugagg

SEQ ID NO: 802989 - RNA, 24 nt, Human
aggugcaguggcucaugucuguaa

SEQ ID NO: 802990 - RNA, 18 nt, Human
aggugggagaaucacuug

SEQ ID NO: 802991 - RNA, 23 nt, Human
aggugggagaaucacuugagccc

SEQ ID NO: 802992 - RNA, 21 nt, Human
agguguaaaaggcuggguggg

SEQ ID NO: 802993 - RNA, 21 nt, Human
agguguaaaaggcuggguggg

SEQ ID NO: 802994 - RNA, 24 nt, Human
aguggcucaugucuguaauccgag

SEQ ID NO: 802995 - RNA, 22 nt, Human
auccugaggcuaucaggucagg

SEQ ID NO: 802996 - RNA, 24 nt, Human
aucgugccacuccacuccagcuug

SEQ ID NO: 802997 - RNA, 23 nt, Human
auugcuugagcccaggaguugga

SEQ ID NO: 802998 - RNA, 19 nt, Human
auuucugaggccuugucau

SEQ ID NO: 802999 - RNA, 26 nt, Human
caaaacaaaacaaaacacuagcaggg

SEQ ID NO: 803000 - RNA, 22 nt, Human
caaaaccacccacauggacguu

SEQ ID NO: 803001 - RNA, 23 nt, Human
caagaacaccgcaggcaggaagc

SEQ ID NO: 803002 - RNA, 21 nt, Human
caaggcggcauaaaucauuca

SEQ ID NO: 803003 - RNA, 22 nt, Human
cacaucuuuccuccuguccuuu

SEQ ID NO: 803004 - RNA, 18 nt, Human
caccgagacuacagcaga

SEQ ID NO: 803005 - RNA, 23 nt, Human
caccuguagucccagcuacuugg

SEQ ID NO: 803006 - RNA, 24 nt, Human
caccuguagucccagcuacuuggg

SEQ ID NO: 803007 - RNA, 24 nt, Human
cacuccacuccagcuugagcaaca

SEQ ID NO: 803008 - RNA, 22 nt, Human
cacuccagcuugagcaacagag

SEQ ID NO: 803009 - RNA, 18 nt, Human
cacugcauuccagccugg

SEQ ID NO: 803010 - RNA, 21 nt, Human
cacugcauuccagccuggcca

SEQ ID NO: 803011 - RNA, 24 nt, Human
cacugcauuccagccuggccaaca

SEQ ID NO: 803012 - RNA, 22 nt, Human
cagaaaaacaaaacaaaacaaa

SEQ ID NO: 803013 - RNA, 21 nt, Human
cagagguuauguggugagcac

SEQ ID NO: 803014 - RNA, 20 nt, Human
cagauuuccaacugcucuuc

SEQ ID NO: 803015 - RNA, 23 nt, Human
cagcacaguacaaaauuaucuuc

SEQ ID NO: 803016 - RNA, 24 nt, Human
cagcacuuugggaggcugaggcag

SEQ ID NO: 803017 - RNA, 24 nt, Human
cagcuacuugggaggcugaggugg

SEQ ID NO: 803018 - RNA, 24 nt, Human
caggccuguaaucccagcacuuug

SEQ ID NO: 803019 - RNA, 18 nt, Human
cauagaauuaauugauua

SEQ ID NO: 803020 - RNA, 19 nt, Human
caugcaucuguucugaggc

SEQ ID NO: 803021 - RNA, 23 nt, Human
cauuccagccuggccaacagagc

SEQ ID NO: 803022 - RNA, 22 nt, Human
ccaaagcuuuauuugcuauuuu

SEQ ID NO: 803023 - RNA, 22 nt, Human
ccaaauggccacggagaacuga

SEQ ID NO: 803024 - RNA, 19 nt, Human
ccacagaaugucuccccau

SEQ ID NO: 803025 - RNA, 20 nt, Human
ccacuccacuccagcuugag

SEQ ID NO: 803026 - RNA, 21 nt, Human
ccacuccacuccagcuugagc

SEQ ID NO: 803027 - RNA, 19 nt, Human
ccacugcauuccagccugg

SEQ ID NO: 803028 - RNA, 19 nt, Human
ccacugcauuccagccugg

SEQ ID NO: 803029 - RNA, 20 nt, Human
ccacugcauuccagccuggc

SEQ ID NO: 803030 - RNA, 21 nt, Human
ccagauuuccaacugcucuuc

SEQ ID NO: 803031 - RNA, 20 nt, Human
ccagcagcccacgucauguc

SEQ ID NO: 803032 - RNA, 20 nt, Human
ccagccuggccaacagagca

SEQ ID NO: 803033 - RNA, 24 nt, Human
ccagcgguaauacccugcaccgag

SEQ ID NO: 803034 - RNA, 19 nt, Human
cccaaagcagauccccuuu

SEQ ID NO: 803035 - RNA, 18 nt, Human
cccacucgcuaaugggac

SEQ ID NO: 803036 - RNA, 19 nt, Human
cccagguguuuauccuaac

SEQ ID NO: 803037 - RNA, 19 nt, Human
cccccuggaaaacaccgcc

SEQ ID NO: 803038 - RNA, 18 nt, Human
cccugaauccugaggcua

SEQ ID NO: 803039 - RNA, 21 nt, Human
cccugcaccgagacuacagca

SEQ ID NO: 803040 - RNA, 19 nt, Human
ccgagcccaaagcagaucc

SEQ ID NO: 803041 - RNA, 22 nt, Human
ccggccucacagcccugcaguu

SEQ ID NO: 803042 - RNA, 19 nt, Human
ccucaccagggcccaggug

SEQ ID NO: 803043 - RNA, 20 nt, Human
ccuccuguccuuuaacguaa

SEQ ID NO: 803044 - RNA, 21 nt, Human
ccugagagguagccagggaga

SEQ ID NO: 803045 - RNA, 22 nt, Human
ccuguaaucccagcacuuuggg

SEQ ID NO: 803046 - RNA, 21 nt, Human
ccuguagucccagcuacuugg

SEQ ID NO: 803047 - RNA, 23 nt, Human
ccugucaucuaggcuacucugga

SEQ ID NO: 803048 - RNA, 21 nt, Human
ccuguccuuuaacguaaacac

SEQ ID NO: 803049 - RNA, 22 nt, Human
cgacugaagcaguugcaggcau

SEQ ID NO: 803050 - RNA, 24 nt, Human
cgagaccagccugggcaacauggu

SEQ ID NO: 803051 - RNA, 22 nt, Human
cgugaaagagggucgcucuuga

SEQ ID NO: 803052 - RNA, 20 nt, Human
cgugucucaagaaaagaaaa

SEQ ID NO: 803053 - RNA, 23 nt, Human
cuaaagcaaacaaaaaugacaua

SEQ ID NO: 803054 - RNA, 21 nt, Human
cuagggcaggucugaugauuc

SEQ ID NO: 803055 - RNA, 19 nt, Human
cucacagcccugcaguugc

SEQ ID NO: 803056 - RNA, 21 nt, Human
cucacuccauuuagaaugggg

SEQ ID NO: 803057 - RNA, 24 nt, Human
cucaggccuguaaucccagcacuu

SEQ ID NO: 803058 - RNA, 24 nt, Human
cucaugucuguaauccgagcacuu

SEQ ID NO: 803059 - RNA, 21 nt, Human
cucuaaacuuccugagcccac

SEQ ID NO: 803060 - RNA, 19 nt, Human
cuguaauccgagcacuuug

SEQ ID NO: 803061 - RNA, 21 nt, Human
cuguaauccgagcacuuuggg

SEQ ID NO: 803062 - RNA, 18 nt, Human
cuuggagcugaugaaggu

SEQ ID NO: 803063 - RNA, 19 nt, Human
gaagaaacggcagcagcuc

SEQ ID NO: 803064 - RNA, 21 nt, Human
gaagaugagggaggaagcuga

SEQ ID NO: 803065 - RNA, 18 nt, Human
gaccuugucucagaaaaa

SEQ ID NO: 803066 - RNA, 21 nt, Human
gagaaaacaaacuaucaucag

SEQ ID NO: 803067 - RNA, 18 nt, Human
gagacaaaugaacuccug

SEQ ID NO: 803068 - RNA, 24 nt, Human
gagaugagaggauugcuugagccc

SEQ ID NO: 803069 - RNA, 18 nt, Human
gagcaaccacugaaggag

SEQ ID NO: 803070 - RNA, 24 nt, Human
gagcacuuugggaggcugaggagg

SEQ ID NO: 803071 - RNA, 24 nt, Human
gagcagcuaaggucucuuuuagga

SEQ ID NO: 803072 - RNA, 24 nt, Human
gagcccaaagcagauccccuuuag

SEQ ID NO: 803073 - RNA, 21 nt, Human
gaggugcuuucacaaaugcag

SEQ ID NO: 803074 - RNA, 18 nt, Human
gaugcacacagccccacu

SEQ ID NO: 803075 - RNA, 24 nt, Human
gauugcuugagcccaggaguugga

SEQ ID NO: 803076 - RNA, 21 nt, Human
gauugugccacugcauuccag

SEQ ID NO: 803077 - RNA, 24 nt, Human
gcauuccagccuggccaacagagc

SEQ ID NO: 803078 - RNA, 20 nt, Human
gccaaggggcaaaggucacc

SEQ ID NO: 803079 - RNA, 22 nt, Human
gccacuccacuccagcuugagc

SEQ ID NO: 803080 - RNA, 19 nt, Human
gccacugcauuccagccug

SEQ ID NO: 803081 - RNA, 22 nt, Human
gccugaagugcugucuggggag

SEQ ID NO: 803082 - RNA, 19 nt, Human
gccuguaaaguuuaaaacc

SEQ ID NO: 803083 - RNA, 25 nt, Human
gcgggagcggcucuucucacuccug

SEQ ID NO: 803084 - RNA, 20 nt, Human
gcugcaguuuaugaacccuu

SEQ ID NO: 803085 - RNA, 21 nt, Human
ggaagaucuucagggcuugcc

SEQ ID NO: 803086 - RNA, 20 nt, Human
ggacaauugcuugagcccag

SEQ ID NO: 803087 - RNA, 22 nt, Human
ggagggacaauugcuugagccc

SEQ ID NO: 803088 - RNA, 18 nt, Human
ggaguuggaggcuggagu

SEQ ID NO: 803089 - RNA, 23 nt, Human
ggcaugguggcucaggccuguaa

SEQ ID NO: 803090 - RNA, 23 nt, Human
ggccuguaaucccagcacuuugg

SEQ ID NO: 803091 - RNA, 23 nt, Human
gggaaggcacauucagagaccac

SEQ ID NO: 803092 - RNA, 18 nt, Human
ggggagacaauuccagcc

SEQ ID NO: 803093 - RNA, 24 nt, Human
gguagcauacaccuguagucccag

SEQ ID NO: 803094 - RNA, 23 nt, Human
ggucugaugauucauaagcaaag

SEQ ID NO: 803095 - RNA, 24 nt, Human
gguggcucaggccuguaaucccag

SEQ ID NO: 803096 - RNA, 19 nt, Human
guggaggugaggaggaaga

SEQ ID NO: 803097 - RNA, 22 nt, Human
guguauauauauauauuuccac

SEQ ID NO: 803098 - RNA, 22 nt, Human
gugugucucugugugugugugu

SEQ ID NO: 803099 - RNA, 25 nt, Human
guuauagaaaaauaaaaggagguga

SEQ ID NO: 803100 - RNA, 18 nt, Human
guucaaagaagacucugg

SEQ ID NO: 803101 - RNA, 23 nt, Human
guucaaggcggcauaaaucauuc

SEQ ID NO: 803102 - RNA, 18 nt, Human
guugggucuucccgucug

SEQ ID NO: 803103 - RNA, 19 nt, Human
uaaaaagcaaaaccaccca

SEQ ID NO: 803104 - RNA, 25 nt, Human
uaaaaagcaaaaccacccacaugga

SEQ ID NO: 803105 - RNA, 23 nt, Human
uaaaacauaaacuggaucuuuaa

SEQ ID NO: 803106 - RNA, 20 nt, Human
uaaaaccacaggcucaugcc

SEQ ID NO: 803107 - RNA, 24 nt, Human
uaaagugccucucgucugccuucc

SEQ ID NO: 803108 - RNA, 19 nt, Human
uaaauccuuugcccagccu

SEQ ID NO: 803109 - RNA, 23 nt, Human
uaacuucuaaacagcuuggauag

SEQ ID NO: 803110 - RNA, 25 nt, Human
uaacuugccggaaaccucaggccga

SEQ ID NO: 803111 - RNA, 19 nt, Human
uaagagcagguccuuuccu

SEQ ID NO: 803112 - RNA, 24 nt, Human
uaagcaaaggcaccaccacuuggg

SEQ ID NO: 803113 - RNA, 24 nt, Human
uacaccuguagucccagcuacuug

SEQ ID NO: 803114 - RNA, 18 nt, Human
uacauaaaaagcaaaacc

SEQ ID NO: 803115 - RNA, 19 nt, Human
uagaaaacagcauaauuug

SEQ ID NO: 803116 - RNA, 20 nt, Human
uagaaaacagcauaauuugu

SEQ ID NO: 803117 - RNA, 24 nt, Human
uagagauucuuucugggacuggau

SEQ ID NO: 803118 - RNA, 20 nt, Human
uagauguggaguggguccua

SEQ ID NO: 803119 - RNA, 23 nt, Human
uaggcaaaggaccaugaagaagg

SEQ ID NO: 803120 - RNA, 22 nt, Human
uagggauaagauaaccugaggu

SEQ ID NO: 803121 - RNA, 18 nt, Human
uagucugaaugcaacauc

SEQ ID NO: 803122 - RNA, 23 nt, Human
uaucaaguuucaaagaaaauuag

SEQ ID NO: 803123 - RNA, 21 nt, Human
uauuaaaaagcucaaauucag

SEQ ID NO: 803124 - RNA, 21 nt, Human
uauucgcacaucuuuccuccu

SEQ ID NO: 803125 - RNA, 21 nt, Human
ucaacccagcgguaauacccu

SEQ ID NO: 803126 - RNA, 22 nt, Human
ucacacugauguucuuggagcu

SEQ ID NO: 803127 - RNA, 24 nt, Human
ucaccaaaaaaaaagaauagaaaa

SEQ ID NO: 803128 - RNA, 19 nt, Human
ucagaagccggcucacggc

SEQ ID NO: 803129 - RNA, 18 nt, Human
ucagcugggcaugguggc

SEQ ID NO: 803130 - RNA, 22 nt, Human
ucagcugggcguggugaugugc

SEQ ID NO: 803131 - RNA, 24 nt, Human
ucagcugggcguggugaugugcgc

SEQ ID NO: 803132 - RNA, 20 nt, Human
uccagggagagccuggcgag

SEQ ID NO: 803133 - RNA, 21 nt, Human
uccauuuuaaggguuaacuug

SEQ ID NO: 803134 - RNA, 24 nt, Human
ucccaaacccagaugcaugaggcu

SEQ ID NO: 803135 - RNA, 25 nt, Human
ucccaaacccagaugcaugaggcuc

SEQ ID NO: 803136 - RNA, 23 nt, Human
uccggccucacagcccugcaguu

SEQ ID NO: 803137 - RNA, 26 nt, Human
uccuaucccuccagccccucggaauc

SEQ ID NO: 803138 - RNA, 23 nt, Human
uccuugcuuagccucaaagagag

SEQ ID NO: 803139 - RNA, 18 nt, Human
ucgaacaggacacaaggu

SEQ ID NO: 803140 - RNA, 25 nt, Human
ucuaaaauagguagaaaugcaaauu

SEQ ID NO: 803141 - RNA, 22 nt, Human
ucuagcgggagcggcucuucuc

SEQ ID NO: 803142 - RNA, 21 nt, Human
ucuauccaugcccauccaccc

SEQ ID NO: 803143 - RNA, 20 nt, Human
ucucacuccugucacgcugg

SEQ ID NO: 803144 - RNA, 21 nt, Human
ucucacuccugucacgcugga

SEQ ID NO: 803145 - RNA, 22 nt, Human
ucuccaggucaaucucauuuuc

SEQ ID NO: 803146 - RNA, 24 nt, Human
ucugggacuggauaaagugccucu

SEQ ID NO: 803147 - RNA, 19 nt, Human
ucuguucugaggccaguuu

SEQ ID NO: 803148 - RNA, 20 nt, Human
ucuucccgucuggauccagg

SEQ ID NO: 803149 - RNA, 18 nt, Human
ugaacccuuaaggccaag

SEQ ID NO: 803150 - RNA, 19 nt, Human
ugaauccccaaauggccac

SEQ ID NO: 803151 - RNA, 20 nt, Human
ugaaugcaacaucuuuguac

SEQ ID NO: 803152 - RNA, 24 nt, Human
ugacccacugugauugucuucccu

SEQ ID NO: 803153 - RNA, 24 nt, Human
ugagacagagagacaaaugaacuc

SEQ ID NO: 803154 - RNA, 23 nt, Human
ugagagguagccagggagaagga

SEQ ID NO: 803155 - RNA, 23 nt, Human
ugagaguuuugcaugaggaccau

SEQ ID NO: 803156 - RNA, 20 nt, Human
ugagcaaaagcaaaaaguac

SEQ ID NO: 803157 - RNA, 23 nt, Human
ugagcccagaaguucgagaccag

SEQ ID NO: 803158 - RNA, 20 nt, Human
ugaggcaguagaaucacuug

SEQ ID NO: 803159 - RNA, 25 nt, Human
ugaggcaguagaaucacuugagacc

SEQ ID NO: 803160 - RNA, 19 nt, Human
ugagggggagagagauugu

SEQ ID NO: 803161 - RNA, 19 nt, Human
ugagggggagagagauugu

SEQ ID NO: 803162 - RNA, 20 nt, Human
ugaggugggagaaucacuug

SEQ ID NO: 803163 - RNA, 24 nt, Human
ugaggugggagaaucacuugagcc

SEQ ID NO: 803164 - RNA, 19 nt, Human
ugauacccuuaguuggccu

SEQ ID NO: 803165 - RNA, 19 nt, Human
ugauuuggcgcgucccccu

SEQ ID NO: 803166 - RNA, 20 nt, Human
ugcaaaggcucccaaucauc

SEQ ID NO: 803167 - RNA, 20 nt, Human
ugcaugaggcucccaggugu

SEQ ID NO: 803168 - RNA, 18 nt, Human
ugcugucccuggugcuga

SEQ ID NO: 803169 - RNA, 23 nt, Human
uggaguggguccuaucccuccag

SEQ ID NO: 803170 - RNA, 24 nt, Human
uggauuuucaaaggccaaaagccu

SEQ ID NO: 803171 - RNA, 22 nt, Human
uggcucaggccuguaaucccag

SEQ ID NO: 803172 - RNA, 24 nt, Human
uggcucaggccuguaaucccagca

SEQ ID NO: 803173 - RNA, 24 nt, Human
uggcucaugucuguaauccgagca

SEQ ID NO: 803174 - RNA, 21 nt, Human
uggcuucuuggugauacccuu

SEQ ID NO: 803175 - RNA, 19 nt, Human
ugggaaggccaaaggggag

SEQ ID NO: 803176 - RNA, 23 nt, Human
ugggaaggccaaaggggagggcg

SEQ ID NO: 803177 - RNA, 19 nt, Human
ugggaggcugaggagggac

SEQ ID NO: 803178 - RNA, 23 nt, Human
ugggaggcugaggagggacaauu

SEQ ID NO: 803179 - RNA, 24 nt, Human
ugggaggcugaggcaguagaauca

SEQ ID NO: 803180 - RNA, 19 nt, Human
ugggaggcugaggugggag

SEQ ID NO: 803181 - RNA, 24 nt, Human
ugggaggcugaggugggagaauca

SEQ ID NO: 803182 - RNA, 19 nt, Human
ugguaagacccuugucucu

SEQ ID NO: 803183 - RNA, 23 nt, Human
ugguagcauacaccuguaguccc

SEQ ID NO: 803184 - RNA, 24 nt, Human
ugguagcauacaccuguaguccca

SEQ ID NO: 803185 - RNA, 22 nt, Human
ugguaugauuuaggaaacagca

SEQ ID NO: 803186 - RNA, 20 nt, Human
uggugcuggaggagacaagg

SEQ ID NO: 803187 - RNA, 18 nt, Human
ugguggaggugaggagga

SEQ ID NO: 803188 - RNA, 24 nt, Human
ugguggcucaggccuguaauccca

SEQ ID NO: 803189 - RNA, 18 nt, Human
ugucucaagaaaagaaaa

SEQ ID NO: 803190 - RNA, 23 nt, Human
ugucugaaaccacaugauuuggc

SEQ ID NO: 803191 - RNA, 18 nt, Human
ugugcaggaagaaacggc

SEQ ID NO: 803192 - RNA, 22 nt, Human
uguguauauauauauauuucca

SEQ ID NO: 803193 - RNA, 18 nt, Human
uguguguguauauauaua

SEQ ID NO: 803194 - RNA, 18 nt, Human
uguguguguauauauaua

SEQ ID NO: 803195 - RNA, 19 nt, Human
ugugugugucucugugugu

SEQ ID NO: 803196 - RNA, 19 nt, Human
ugugugugucucugugugu

SEQ ID NO: 803197 - RNA, 23 nt, Human
uguguguguguguauauauauau

SEQ ID NO: 803198 - RNA, 23 nt, Human
ugugugugugugucucugugugu

SEQ ID NO: 803199 - RNA, 21 nt, Human
ugugugugugugucucuguuu

SEQ ID NO: 803200 - RNA, 30 nt, Human
ugugugugugugugucucugugugugugug

SEQ ID NO: 803201 - RNA, 27 nt, Human
uuaacauagaauuaauugauuauuuuu

SEQ ID NO: 803202 - RNA, 21 nt, Human
uuaacuugccggaaaccucag

SEQ ID NO: 803203 - RNA, 21 nt, Human
uucaaggagggugaacuuugu

SEQ ID NO: 803204 - RNA, 20 nt, Human
uuccaaaaaaagaccugccc

SEQ ID NO: 803205 - RNA, 19 nt, Human
uucccuguggugcuggagg

SEQ ID NO: 803206 - RNA, 21 nt, Human
uugagcugagacaugacuaau

SEQ ID NO: 803207 - RNA, 21 nt, Human
uugcuugagcccagaaguucg

SEQ ID NO: 803208 - RNA, 24 nt, Human
uugcuugagcccaggaguuggagg

SEQ ID NO: 803209 - RNA, 24 nt, Human
uugcuuuaucgccuucuaaagcaa

SEQ ID NO: 803210 - RNA, 23 nt, Human
uuggauagggauaagauaaccug

SEQ ID NO: 803211 - RNA, 25 nt, Human
uugggaggcugaggcaguagaauca

SEQ ID NO: 803212 - RNA, 25 nt, Human
uugggaggcugaggugggagaauca

SEQ ID NO: 803213 - RNA, 22 nt, Human
uuggugauacccuuaguuggcc

SEQ ID NO: 803214 - RNA, 23 nt, Human
uugugccacugcauuccagccug

SEQ ID NO: 803215 - RNA, 24 nt, Human
uuguguuuuaacacacggugaggg

SEQ ID NO: 803216 - RNA, 28 nt, Human
uuuggcuucuuggugauacccuuaguug

SEQ ID NO: 803217 - RNA, 22 nt, Human
uuugggaggcugaggagggaca

SEQ ID NO: 803218 - RNA, 21 nt, Human
aaaaaaaaaagaaaggaaaag

SEQ ID NO: 803219 - RNA, 21 nt, Human
aaaaaagagagagacaaaaaa

SEQ ID NO: 803220 - RNA, 27 nt, Human
aaaaacuuaguaagaagcuguagacaa

SEQ ID NO: 803221 - RNA, 24 nt, Human
aaaacacuuugcaacuacuucacu

SEQ ID NO: 803222 - RNA, 24 nt, Human
aaaauacucuauuguuucauuucu

SEQ ID NO: 803223 - RNA, 20 nt, Human
aaagcagaauauaagaaaau

SEQ ID NO: 803224 - RNA, 20 nt, Human
aaauacucuauuguuucauu

SEQ ID NO: 803225 - RNA, 21 nt, Human
aacacacuugucacacaauca

SEQ ID NO: 803226 - RNA, 21 nt, Human
aacacugacuaugucccaugc

SEQ ID NO: 803227 - RNA, 21 nt, Human
aacccgauggcaauacgaaaa

SEQ ID NO: 803228 - RNA, 22 nt, Human
aacgugaaaaugacuuuaauaa

SEQ ID NO: 803229 - RNA, 18 nt, Human
aauuacacugcaaagauc

SEQ ID NO: 803230 - RNA, 18 nt, Human
acaugcuuucucuucucu

SEQ ID NO: 803231 - RNA, 19 nt, Human
accaaagcgcagggaccag

SEQ ID NO: 803232 - RNA, 23 nt, Human
accuccccauacacaguaaaaac

SEQ ID NO: 803233 - RNA, 22 nt, Human
agcacuucccugggggaaaaac

SEQ ID NO: 803234 - RNA, 23 nt, Human
agccaggugguuccacagcagug

SEQ ID NO: 803235 - RNA, 22 nt, Human
agcuacaaaaacacuguaccga

SEQ ID NO: 803236 - RNA, 18 nt, Human
agggauuaguaaaaacua

SEQ ID NO: 803237 - RNA, 24 nt, Human
auaaagcaaaugaccaaaaccucu

SEQ ID NO: 803238 - RNA, 21 nt, Human
auaguguuauuguugcauggu

SEQ ID NO: 803239 - RNA, 22 nt, Human
auuacacaccugucccaaggca

SEQ ID NO: 803240 - RNA, 20 nt, Human
caaaaacacuguaccgaaau

SEQ ID NO: 803241 - RNA, 19 nt, Human
caaaaagcuacucuuugca

SEQ ID NO: 803242 - RNA, 23 nt, Human
caaaacaagagaauaaaacuucc

SEQ ID NO: 803243 - RNA, 21 nt, Human
caaaugaccaaaaccucuuuu

SEQ ID NO: 803244 - RNA, 19 nt, Human
caacccgauggcaauacga

SEQ ID NO: 803245 - RNA, 22 nt, Human
caacccgauggcaauacgaaaa

SEQ ID NO: 803246 - RNA, 21 nt, Human
caacuaaauuacaggauaccc

SEQ ID NO: 803247 - RNA, 24 nt, Human
caagagaauaaaacuuccaugcaa

SEQ ID NO: 803248 - RNA, 21 nt, Human
caccccaagccaccuacaagc

SEQ ID NO: 803249 - RNA, 23 nt, Human
cacccuccauucgcaugacugcu

SEQ ID NO: 803250 - RNA, 21 nt, Human
caccuacaagcauuuaaaaga

SEQ ID NO: 803251 - RNA, 20 nt, Human
cacuguuggaaaaacaagag

SEQ ID NO: 803252 - RNA, 18 nt, Human
cagaaugaacagaagagu

SEQ ID NO: 803253 - RNA, 19 nt, Human
cagcacgauagcacacccc

SEQ ID NO: 803254 - RNA, 22 nt, Human
cagcacgauagcacaccccaag

SEQ ID NO: 803255 - RNA, 19 nt, Human
ccaaaaaugucugcauuuu

SEQ ID NO: 803256 - RNA, 20 nt, Human
ccacaauucaucacauucaa

SEQ ID NO: 803257 - RNA, 19 nt, Human
ccccugaagcauacuguuc

SEQ ID NO: 803258 - RNA, 23 nt, Human
ccuacaaucuguaaacuaauuac

SEQ ID NO: 803259 - RNA, 22 nt, Human
cuaacauuacacaccuguccca

SEQ ID NO: 803260 - RNA, 22 nt, Human
cuagacacccacuugcuaaaag

SEQ ID NO: 803261 - RNA, 19 nt, Human
gaagagguugaggaagggg

SEQ ID NO: 803262 - RNA, 21 nt, Human
gaaguauauauauuauaccaa

SEQ ID NO: 803263 - RNA, 20 nt, Human
gaauuacacugcaaagaucu

SEQ ID NO: 803264 - RNA, 21 nt, Human
gacugcuuucaguauuugcag

SEQ ID NO: 803265 - RNA, 19 nt, Human
gcccacugauaauaaaccu

SEQ ID NO: 803266 - RNA, 21 nt, Human
ggaaggauguuuaagcaacau

SEQ ID NO: 803267 - RNA, 25 nt, Human
gggcaagucuuugguuuugaaggau

SEQ ID NO: 803268 - RNA, 20 nt, Human
gucccgauucuuacaaugcu

SEQ ID NO: 803269 - RNA, 18 nt, Human
gugcaugacaaaauaagu

SEQ ID NO: 803270 - RNA, 18 nt, Human
uaaaaagcagaauauaag

SEQ ID NO: 803271 - RNA, 22 nt, Human
uaaaauaaagcaaaugaccaaa

SEQ ID NO: 803272 - RNA, 24 nt, Human
uaaauaaauaagugcacuccccuc

SEQ ID NO: 803273 - RNA, 18 nt, Human
uaacacaaaaucaaaaau

SEQ ID NO: 803274 - RNA, 18 nt, Human
uaacaguagaaaaugaca

SEQ ID NO: 803275 - RNA, 20 nt, Human
uaacucccaacuacaauccc

SEQ ID NO: 803276 - RNA, 24 nt, Human
uaacugacauacuuaaauaacuuu

SEQ ID NO: 803277 - RNA, 24 nt, Human
uaagauaaacauacguaccuuugc

SEQ ID NO: 803278 - RNA, 23 nt, Human
uaauaaauacuacaaccucccca

SEQ ID NO: 803279 - RNA, 21 nt, Human
uacaaaaacacuguaccgaaa

SEQ ID NO: 803280 - RNA, 18 nt, Human
uacaguguuaucugucau

SEQ ID NO: 803281 - RNA, 24 nt, Human
uagacacccacuugcuaaaaguuu

SEQ ID NO: 803282 - RNA, 21 nt, Human
uagcauugccagugcacgaca

SEQ ID NO: 803283 - RNA, 26 nt, Human
uauaacaaaaaucugaugaaaauuau

SEQ ID NO: 803284 - RNA, 20 nt, Human
uauuaaaaguaaagggcugc

SEQ ID NO: 803285 - RNA, 21 nt, Human
uauugcauaaagagauauccc

SEQ ID NO: 803286 - RNA, 18 nt, Human
uauuguugcaugguuauu

SEQ ID NO: 803287 - RNA, 22 nt, Human
uauuucucucucuccucuaaga

SEQ ID NO: 803288 - RNA, 24 nt, Human
uauuuugcauucugcagaggucug

SEQ ID NO: 803289 - RNA, 19 nt, Human
ucaaacacuuaacaucaau

SEQ ID NO: 803290 - RNA, 18 nt, Human
ucaaguuuuaaaucaccu

SEQ ID NO: 803291 - RNA, 21 nt, Human
ucacaaguaaauauuaguaga

SEQ ID NO: 803292 - RNA, 23 nt, Human
ucagcaggucauguacaaaggga

SEQ ID NO: 803293 - RNA, 26 nt, Human
ucagugaaaagugugccuaaaaaugu

SEQ ID NO: 803294 - RNA, 19 nt, Human
uccaugacuagggcuucaa

SEQ ID NO: 803295 - RNA, 21 nt, Human
ucugcagaggucuguguaugg

SEQ ID NO: 803296 - RNA, 26 nt, Human
ugaagaacauguaaucauaaaguuca

SEQ ID NO: 803297 - RNA, 21 nt, Human
ugaaguguaaccaauaaucug

SEQ ID NO: 803298 - RNA, 22 nt, Human
ugacacaagaaucuacaaaaca

SEQ ID NO: 803299 - RNA, 26 nt, Human
ugagguauugcauaaagagauauccc

SEQ ID NO: 803300 - RNA, 24 nt, Human
ugaugaaguuggcacuucaaacac

SEQ ID NO: 803301 - RNA, 19 nt, Human
uggaaauucagccaaguag

SEQ ID NO: 803302 - RNA, 24 nt, Human
uuaaaaugcuauaauaaauacuac

SEQ ID NO: 803303 - RNA, 19 nt, Human
uuaaugauggauagggcau

SEQ ID NO: 803304 - RNA, 25 nt, Human
uuaccccugaagcauacuguucaac

SEQ ID NO: 803305 - RNA, 23 nt, Human
uuaguaagaagcuguagacaauu

SEQ ID NO: 803306 - RNA, 25 nt, Human
uuccuggggcuuugaccagauaagu

SEQ ID NO: 803307 - RNA, 23 nt, Human
uugcaggaaguuuggauccucuu

SEQ ID NO: 803308 - RNA, 20 nt, Human
uugcauucugcagaggucug

SEQ ID NO: 803309 - RNA, 21 nt, Human
uuuaauauuucucucucuccu

SEQ ID NO: 803310 - RNA, 18 nt, Human
uuugaauauuagacagca

SEQ ID NO: 803311 - RNA, 22 nt, Human
uuuguuauuuuaauuucuaccu

SEQ ID NO: 803312 - RNA, 21 nt, Human
aaaagcugagagaacuuacgg

SEQ ID NO: 803313 - RNA, 19 nt, Human
aaacaauguacccaacaac

SEQ ID NO: 803314 - RNA, 25 nt, Human
aaacacaacaucugaaauuuaaaac

SEQ ID NO: 803315 - RNA, 25 nt, Human
aaacagcaaauccagugaagccaaa

SEQ ID NO: 803316 - RNA, 24 nt, Human
aaagugcugggauuacaggcguga

SEQ ID NO: 803317 - RNA, 18 nt, Human
aacaggcugcgcgaaauc

SEQ ID NO: 803318 - RNA, 22 nt, Human
aaccaaagauaaggagaaacaa

SEQ ID NO: 803319 - RNA, 21 nt, Human
aaccaggugagcaccuuggaa

SEQ ID NO: 803320 - RNA, 22 nt, Human
aaccugcaggaagaagggaagg

SEQ ID NO: 803321 - RNA, 24 nt, Human
aacuuggaugaaaugaggaaacuc

SEQ ID NO: 803322 - RNA, 21 nt, Human
aagaagaaaagagauauaaag

SEQ ID NO: 803323 - RNA, 20 nt, Human
aagcauaaccaugauacaaa

SEQ ID NO: 803324 - RNA, 23 nt, Human
aaggagaaacaauuuuaagacaa

SEQ ID NO: 803325 - RNA, 19 nt, Human
aagugcugggauuacaggc

SEQ ID NO: 803326 - RNA, 19 nt, Human
aagugcugggauuacaggc

SEQ ID NO: 803327 - RNA, 20 nt, Human
aaucucuaaggcaacaccca

SEQ ID NO: 803328 - RNA, 21 nt, Human
acacacaugugcacacacaca

SEQ ID NO: 803329 - RNA, 19 nt, Human
acagcacagacugcugaaa

SEQ ID NO: 803330 - RNA, 20 nt, Human
accaggugagcaccuuggaa

SEQ ID NO: 803331 - RNA, 18 nt, Human
accuguggaagggaggcg

SEQ ID NO: 803332 - RNA, 22 nt, Human
acgagaacacggaggugagagg

SEQ ID NO: 803333 - RNA, 20 nt, Human
acggaggugaccggaaacuc

SEQ ID NO: 803334 - RNA, 20 nt, Human
acggaggugagaggaaacuc

SEQ ID NO: 803335 - RNA, 20 nt, Human
acggaggugagaggaaacuc

SEQ ID NO: 803336 - RNA, 20 nt, Human
acggaggugagaggaaacuc

SEQ ID NO: 803337 - RNA, 21 nt, Human
acggaggugagaggaaacucu

SEQ ID NO: 803338 - RNA, 21 nt, Human
acggaggugagaggaaacucu

SEQ ID NO: 803339 - RNA, 21 nt, Human
acggaggugagaggaaacucu

SEQ ID NO: 803340 - RNA, 18 nt, Human
acgggguuucaccguguu

SEQ ID NO: 803341 - RNA, 19 nt, Human
acgggguuucaccguguua

SEQ ID NO: 803342 - RNA, 20 nt, Human
acgggguuucaccguguuag

SEQ ID NO: 803343 - RNA, 24 nt, Human
acgggguuucaccguguuagccag

SEQ ID NO: 803344 - RNA, 18 nt, Human
acuacagccaccacgccc

SEQ ID NO: 803345 - RNA, 19 nt, Human
agaaaaaagacccauuacc

SEQ ID NO: 803346 - RNA, 19 nt, Human
agaauuuuccaaaacugau

SEQ ID NO: 803347 - RNA, 20 nt, Human
agacaaaauccacagaaggc

SEQ ID NO: 803348 - RNA, 20 nt, Human
agacagaagacaaacagcaa

SEQ ID NO: 803349 - RNA, 29 nt, Human
agacagaagacaaacagcaaagggacccc

SEQ ID NO: 803350 - RNA, 24 nt, Human
agagacccaugagacagaagacaa

SEQ ID NO: 803351 - RNA, 19 nt, Human
agagcagcucaacccacgg

SEQ ID NO: 803352 - RNA, 23 nt, Human
agaggugagaggaaaugcuggag

SEQ ID NO: 803353 - RNA, 22 nt, Human
agcacagacugcugaaaaccaa

SEQ ID NO: 803354 - RNA, 20 nt, Human
agccaaaaccuggggcuuuu

SEQ ID NO: 803355 - RNA, 19 nt, Human
aggaaagacacgcugcuca

SEQ ID NO: 803356 - RNA, 20 nt, Human
aggaagauaaaacaauccua

SEQ ID NO: 803357 - RNA, 24 nt, Human
aggagaggcgaagagaaauaguuc

SEQ ID NO: 803358 - RNA, 22 nt, Human
aggcaagaagugaaaaggagag

SEQ ID NO: 803359 - RNA, 25 nt, Human
aggcuggagugcaguggcgcgaucu

SEQ ID NO: 803360 - RNA, 24 nt, Human
agggcccccaggggaaaggagggc

SEQ ID NO: 803361 - RNA, 23 nt, Human
aggugagaggaaacucuggagag

SEQ ID NO: 803362 - RNA, 23 nt, Human
aggugagaggaaacucuggagag

SEQ ID NO: 803363 - RNA, 23 nt, Human
aggugagaggaaacucuggagag

SEQ ID NO: 803364 - RNA, 21 nt, Human
aguagagacgggguuucaccg

SEQ ID NO: 803365 - RNA, 19 nt, Human
agucaaagcauaaccauga

SEQ ID NO: 803366 - RNA, 20 nt, Human
agugcaguggcgcgaucucg

SEQ ID NO: 803367 - RNA, 23 nt, Human
agugcaguggcgcgaucucggcu

SEQ ID NO: 803368 - RNA, 24 nt, Human
agugcaguggcgcgaucucggcuc

SEQ ID NO: 803369 - RNA, 18 nt, Human
agugcugggauuacaggc

SEQ ID NO: 803370 - RNA, 24 nt, Human
auacauucuucucaagugcacagu

SEQ ID NO: 803371 - RNA, 24 nt, Human
auagaacacaugacagaagagacg

SEQ ID NO: 803372 - RNA, 22 nt, Human
auagcaagaaugaugaagaaca

SEQ ID NO: 803373 - RNA, 19 nt, Human
auaguaaaaaaaaaaaaaa

SEQ ID NO: 803374 - RNA, 26 nt, Human
auccaagaccacgcacuaccauaggg

SEQ ID NO: 803375 - RNA, 26 nt, Human
auccaagaccacgcacuaccauaggg

SEQ ID NO: 803376 - RNA, 25 nt, Human
auccaagcaaacacucagcacaaga

SEQ ID NO: 803377 - RNA, 25 nt, Human
auccagugaagccaaaaccuggggc

SEQ ID NO: 803378 - RNA, 21 nt, Human
augcacucccugaggcucacc

SEQ ID NO: 803379 - RNA, 20 nt, Human
auucucccgccucagccucc

SEQ ID NO: 803380 - RNA, 18 nt, Human
caaaauagccccaaaaca

SEQ ID NO: 803381 - RNA, 24 nt, Human
caaagauaaggagaaacaauuuua

SEQ ID NO: 803382 - RNA, 25 nt, Human
caaagcauaaccaugauacaaagaa

SEQ ID NO: 803383 - RNA, 23 nt, Human
cacaacagaagacaggauucgua

SEQ ID NO: 803384 - RNA, 24 nt, Human
cacacaaaacaauguacccaacaa

SEQ ID NO: 803385 - RNA, 20 nt, Human
cacauaacuaagaagaaaac

SEQ ID NO: 803386 - RNA, 22 nt, Human
cacauaacuaagaagaaaacac

SEQ ID NO: 803387 - RNA, 24 nt, Human
caccguguuagccaggauggucuc

SEQ ID NO: 803388 - RNA, 21 nt, Human
caccugacacacacaaaacaa

SEQ ID NO: 803389 - RNA, 20 nt, Human
cacguauagcaaaaacucac

SEQ ID NO: 803390 - RNA, 19 nt, Human
cacugcaagcuccgucucc

SEQ ID NO: 803391 - RNA, 21 nt, Human
cagaagacaguggagcccauc

SEQ ID NO: 803392 - RNA, 20 nt, Human
cagaaggcaagaagugaaaa

SEQ ID NO: 803393 - RNA, 20 nt, Human
cagacaaacaaaagcugaga

SEQ ID NO: 803394 - RNA, 18 nt, Human
cagccuccugaguagcug

SEQ ID NO: 803395 - RNA, 24 nt, Human
caggaaaugcuaaugaacucaagg

SEQ ID NO: 803396 - RNA, 20 nt, Human
caggcacagcacagacugcu

SEQ ID NO: 803397 - RNA, 18 nt, Human
caguagaaggagggaaga

SEQ ID NO: 803398 - RNA, 23 nt, Human
ccaaaacacguauagcaaaaacu

SEQ ID NO: 803399 - RNA, 22 nt, Human
ccaaagugcugggauuacaggc

SEQ ID NO: 803400 - RNA, 22 nt, Human
ccaaagugcugggauuacaggc

SEQ ID NO: 803401 - RNA, 24 nt, Human
ccaaagugcugggauuacaggcgu

SEQ ID NO: 803402 - RNA, 28 nt, Human
ccacagccucaggagaggggggaacgcc

SEQ ID NO: 803403 - RNA, 20 nt, Human
ccaccacgcccggcuaauuu

SEQ ID NO: 803404 - RNA, 21 nt, Human
ccacgcacuccccaagaacac

SEQ ID NO: 803405 - RNA, 21 nt, Human
ccacgcacuccccgagaacac

SEQ ID NO: 803406 - RNA, 21 nt, Human
ccacgcacuccccgagaacac

SEQ ID NO: 803407 - RNA, 21 nt, Human
ccacgcacuccccgagaacac

SEQ ID NO: 803408 - RNA, 21 nt, Human
ccacgcacuccccgagaacac

SEQ ID NO: 803409 - RNA, 21 nt, Human
ccacgcacuccccgagaacac

SEQ ID NO: 803410 - RNA, 21 nt, Human
ccacgcacucccugagaacac

SEQ ID NO: 803411 - RNA, 21 nt, Human
ccacgcacucccugagaacac

SEQ ID NO: 803412 - RNA, 25 nt, Human
ccagggacagcagcucauccuccuu

SEQ ID NO: 803413 - RNA, 22 nt, Human
cccaggcuggagugcaguggcg

SEQ ID NO: 803414 - RNA, 18 nt, Human
cccaguuaaaccuucaga

SEQ ID NO: 803415 - RNA, 18 nt, Human
ccccaagcccaguuaaac

SEQ ID NO: 803416 - RNA, 20 nt, Human
cccugagaacacggagguga

SEQ ID NO: 803417 - RNA, 23 nt, Human
ccgccucagccuccugaguagcu

SEQ ID NO: 803418 - RNA, 18 nt, Human
ccugaccucgugauccac

SEQ ID NO: 803419 - RNA, 19 nt, Human
ccugagaacacggagguga

SEQ ID NO: 803420 - RNA, 18 nt, Human
ccugccgugucccugggg

SEQ ID NO: 803421 - RNA, 22 nt, Human
cgagaacacagaggugagagga

SEQ ID NO: 803422 - RNA, 22 nt, Human
cgagaacacggaggugagagga

SEQ ID NO: 803423 - RNA, 22 nt, Human
cgagaacacggaggugagagga

SEQ ID NO: 803424 - RNA, 22 nt, Human
cgagaacacggaggugagagga

SEQ ID NO: 803425 - RNA, 22 nt, Human
cgagaacacggaggugagagga

SEQ ID NO: 803426 - RNA, 22 nt, Human
cgagaacacggaggugagagga

SEQ ID NO: 803427 - RNA, 20 nt, Human
cgagucaagacaccguuggg

SEQ ID NO: 803428 - RNA, 19 nt, Human
cgccgcugagagcagcagc

SEQ ID NO: 803429 - RNA, 25 nt, Human
cgccucagccuccugaguagcugcg

SEQ ID NO: 803430 - RNA, 21 nt, Human
cgcugcucagggccugggaug

SEQ ID NO: 803431 - RNA, 18 nt, Human
cggcuuggcgggaaucgg

SEQ ID NO: 803432 - RNA, 21 nt, Human
cgggagacccugaccagcaac

SEQ ID NO: 803433 - RNA, 24 nt, Human
cuaaagauacugaaaauaagagga

SEQ ID NO: 803434 - RNA, 22 nt, Human
cuagccaaagguggugcugcag

SEQ ID NO: 803435 - RNA, 21 nt, Human
cucacugaaaccauauuuacc

SEQ ID NO: 803436 - RNA, 24 nt, Human
cuccugaccucgugauccacucgc

SEQ ID NO: 803437 - RNA, 21 nt, Human
cuccuggguucacgccauucu

SEQ ID NO: 803438 - RNA, 24 nt, Human
cucgcucugucgcccaggcuggag

SEQ ID NO: 803439 - RNA, 20 nt, Human
cucugucgcccaggcuggag

SEQ ID NO: 803440 - RNA, 21 nt, Human
cugaagcgcuggcgagccccg

SEQ ID NO: 803441 - RNA, 21 nt, Human
cugaauagucucaccucuguu

SEQ ID NO: 803442 - RNA, 19 nt, Human
cugacuccagccucacggg

SEQ ID NO: 803443 - RNA, 20 nt, Human
cuucacaguuucaaaggacu

SEQ ID NO: 803444 - RNA, 25 nt, Human
gaagagggagaacaggggaaaaaau

SEQ ID NO: 803445 - RNA, 20 nt, Human
gacacacacaaaacaaugua

SEQ ID NO: 803446 - RNA, 22 nt, Human
gaccucgugauccacucgccuc

SEQ ID NO: 803447 - RNA, 22 nt, Human
gaccucgugauccacucgccuc

SEQ ID NO: 803448 - RNA, 24 nt, Human
gaccucgugauccacucgccucgg

SEQ ID NO: 803449 - RNA, 19 nt, Human
gacuacagccaccacgccc

SEQ ID NO: 803450 - RNA, 21 nt, Human
gagaacacggaggugagagga

SEQ ID NO: 803451 - RNA, 24 nt, Human
gagacgggguuucaccguguuagc

SEQ ID NO: 803452 - RNA, 20 nt, Human
gagaggaaacucuggagagg

SEQ ID NO: 803453 - RNA, 20 nt, Human
gagaggaaacucuggagagg

SEQ ID NO: 803454 - RNA, 21 nt, Human
gagcaacaggauuagucaaug

SEQ ID NO: 803455 - RNA, 20 nt, Human
gagcaggguaaccacucccc

SEQ ID NO: 803456 - RNA, 21 nt, Human
gaggaacaaaauugauaaauc

SEQ ID NO: 803457 - RNA, 18 nt, Human
gauuacaggcgugagcca

SEQ ID NO: 803458 - RNA, 23 nt, Human
gauuacaggcgugagccacagca

SEQ ID NO: 803459 - RNA, 24 nt, Human
gcaacaggucacugacaccuuuuc

SEQ ID NO: 803460 - RNA, 19 nt, Human
gcccaggcuggagugcagu

SEQ ID NO: 803461 - RNA, 20 nt, Human
gcccaggcuggagugcagug

SEQ ID NO: 803462 - RNA, 23 nt, Human
gcccggcuaauuuuuuguauuuu

SEQ ID NO: 803463 - RNA, 23 nt, Human
gccucggccucccaaagugcugg

SEQ ID NO: 803464 - RNA, 19 nt, Human
gcuggagugcaguggcgcg

SEQ ID NO: 803465 - RNA, 23 nt, Human
ggaaaacaacaggcugcgcgaaa

SEQ ID NO: 803466 - RNA, 20 nt, Human
ggaacuggcagaugggaggg

SEQ ID NO: 803467 - RNA, 21 nt, Human
ggaagggaggcggacgagagc

SEQ ID NO: 803468 - RNA, 24 nt, Human
ggaauuccggcagagaugagaacg

SEQ ID NO: 803469 - RNA, 22 nt, Human
ggagcaacaaauaacaaugaac

SEQ ID NO: 803470 - RNA, 24 nt, Human
ggcagggagcaggggaaaggaggg

SEQ ID NO: 803471 - RNA, 21 nt, Human
ggcgcucuuccggcaccacac

SEQ ID NO: 803472 - RNA, 23 nt, Human
gggagacccugaccagcaacgcc

SEQ ID NO: 803473 - RNA, 22 nt, Human
gggcgaggcuucacaguuucaa

SEQ ID NO: 803474 - RNA, 20 nt, Human
ggggaaaggagggcccccag

SEQ ID NO: 803475 - RNA, 19 nt, Human
gggguggaguccacugagu

SEQ ID NO: 803476 - RNA, 23 nt, Human
gggguuucaccguguuagccagg

SEQ ID NO: 803477 - RNA, 22 nt, Human
ggguuucaccguguuagccagg

SEQ ID NO: 803478 - RNA, 20 nt, Human
ggucucgaucuccugaccuc

SEQ ID NO: 803479 - RNA, 22 nt, Human
guaaaaaaaaaaaaaauggcua

SEQ ID NO: 803480 - RNA, 23 nt, Human
guagagacgggguuucaccgugu

SEQ ID NO: 803481 - RNA, 18 nt, Human
gucaguaaggguacagga

SEQ ID NO: 803482 - RNA, 25 nt, Human
gucuccuggguucacgccauucucc

SEQ ID NO: 803483 - RNA, 18 nt, Human
gugagaggaaacucugga

SEQ ID NO: 803484 - RNA, 18 nt, Human
gugagaggaaacucugga

SEQ ID NO: 803485 - RNA, 26 nt, Human
gugagaggaaacucuggagaggagaa

SEQ ID NO: 803486 - RNA, 26 nt, Human
gugagaggaaacucuggagaggagaa

SEQ ID NO: 803487 - RNA, 26 nt, Human
gugagaggaaacucuggagaggagaa

SEQ ID NO: 803488 - RNA, 20 nt, Human
gugagaggaaaugcuggaga

SEQ ID NO: 803489 - RNA, 20 nt, Human
gugagaggaaaugcuggaga

SEQ ID NO: 803490 - RNA, 22 nt, Human
gugaguggaaaugcuggagaag

SEQ ID NO: 803491 - RNA, 24 nt, Human
gugauccacucgccucggccuccc

SEQ ID NO: 803492 - RNA, 25 nt, Human
uaaaaaaaaaaaaaauggcuaagaa

SEQ ID NO: 803493 - RNA, 18 nt, Human
uaaauccaguacaguaga

SEQ ID NO: 803494 - RNA, 21 nt, Human
uaagacaaagaaaaaagaccc

SEQ ID NO: 803495 - RNA, 22 nt, Human
uaagacaaagaaaaaagaccca

SEQ ID NO: 803496 - RNA, 20 nt, Human
uaaggagaaacaauuuuaag

SEQ ID NO: 803497 - RNA, 20 nt, Human
uaagugaaggaaagcuguga

SEQ ID NO: 803498 - RNA, 25 nt, Human
uaauuuuuuguauuuuuuaguagag

SEQ ID NO: 803499 - RNA, 26 nt, Human
uaauuuuuuguauuuuuuaguagaga

SEQ ID NO: 803500 - RNA, 22 nt, Human
uacacacaugugcacacacaca

SEQ ID NO: 803501 - RNA, 23 nt, Human
uacaggcgugagccacagcaccc

SEQ ID NO: 803502 - RNA, 23 nt, Human
uacauggguuuggaagugaugca

SEQ ID NO: 803503 - RNA, 28 nt, Human
uaccaaaauuaacacaaaaauaaacaaa

SEQ ID NO: 803504 - RNA, 19 nt, Human
uacguaaaaagaaaauuac

SEQ ID NO: 803505 - RNA, 25 nt, Human
uagcaagaaugaugaagaacaccag

SEQ ID NO: 803506 - RNA, 21 nt, Human
uaguagagacgggguuucacc

SEQ ID NO: 803507 - RNA, 24 nt, Human
uaguagagacgggguuucaccgug

SEQ ID NO: 803508 - RNA, 25 nt, Human
uauagaaaaaagaagaaaagagaua

SEQ ID NO: 803509 - RNA, 20 nt, Human
uaugaugucucuauaaggug

SEQ ID NO: 803510 - RNA, 24 nt, Human
ucaacagagaaucggcauccacaa

SEQ ID NO: 803511 - RNA, 22 nt, Human
ucaccccucccuccuagccaaa

SEQ ID NO: 803512 - RNA, 24 nt, Human
ucaccguguuagccaggauggucu

SEQ ID NO: 803513 - RNA, 19 nt, Human
ucacgccauucucccgccu

SEQ ID NO: 803514 - RNA, 23 nt, Human
ucacugcaagcuccgucuccugg

SEQ ID NO: 803515 - RNA, 24 nt, Human
ucacugcaagcuccgucuccuggg

SEQ ID NO: 803516 - RNA, 19 nt, Human
ucacugggcagggagcagg

SEQ ID NO: 803517 - RNA, 19 nt, Human
uccaagaaaaauacguaaa

SEQ ID NO: 803518 - RNA, 23 nt, Human
uccaagaccacgcacucccugag

SEQ ID NO: 803519 - RNA, 23 nt, Human
uccaagaccacgcacucccugag

SEQ ID NO: 803520 - RNA, 19 nt, Human
uccacagaaggcaagaagu

SEQ ID NO: 803521 - RNA, 19 nt, Human
uccacagccucaggagagg

SEQ ID NO: 803522 - RNA, 19 nt, Human
uccagggacagcagcucau

SEQ ID NO: 803523 - RNA, 24 nt, Human
ucccaaagugcugggauuacaggc

SEQ ID NO: 803524 - RNA, 18 nt, Human
ucccagauuugaguucug

SEQ ID NO: 803525 - RNA, 19 nt, Human
ucccugagaacacggaggu

SEQ ID NO: 803526 - RNA, 19 nt, Human
ucccugagaacacggaggu

SEQ ID NO: 803527 - RNA, 21 nt, Human
ucccugagaacacggagguga

SEQ ID NO: 803528 - RNA, 24 nt, Human
uccuggguucacgccauucucccg

SEQ ID NO: 803529 - RNA, 21 nt, Human
uccuuggucuggagucaccuu

SEQ ID NO: 803530 - RNA, 24 nt, Human
ucgcccaggcuggagugcaguggc

SEQ ID NO: 803531 - RNA, 24 nt, Human
ucgccucggccucccaaagugcug

SEQ ID NO: 803532 - RNA, 24 nt, Human
ucgcucugucgcccaggcuggagu

SEQ ID NO: 803533 - RNA, 24 nt, Human
ucuaaaaccacguagacaggaggc

SEQ ID NO: 803534 - RNA, 19 nt, Human
ucuaaggaaaacaacaggc

SEQ ID NO: 803535 - RNA, 19 nt, Human
ucuaaggcaacacccaaga

SEQ ID NO: 803536 - RNA, 19 nt, Human
ucucgcucugucgcccagg

SEQ ID NO: 803537 - RNA, 22 nt, Human
ucucgcucugucgcccaggcug

SEQ ID NO: 803538 - RNA, 23 nt, Human
ucucgcucugucgcccaggcugg

SEQ ID NO: 803539 - RNA, 24 nt, Human
ucucgcucugucgcccaggcugga

SEQ ID NO: 803540 - RNA, 26 nt, Human
ucucgcucugucgcccaggcuggagu

SEQ ID NO: 803541 - RNA, 27 nt, Human
ucucgcucugucgcccaggcuggagug

SEQ ID NO: 803542 - RNA, 24 nt, Human
ucugacaccacgcacuccccaaga

SEQ ID NO: 803543 - RNA, 24 nt, Human
ucugacaccacgcacuccccgaga

SEQ ID NO: 803544 - RNA, 24 nt, Human
ucugacaccacgcacuccccgaga

SEQ ID NO: 803545 - RNA, 24 nt, Human
ucugacaccacgcacuccccgaga

SEQ ID NO: 803546 - RNA, 24 nt, Human
ucugacaccacgcacuccccgaga

SEQ ID NO: 803547 - RNA, 24 nt, Human
ucugucgcccaggcuggagugcag

SEQ ID NO: 803548 - RNA, 20 nt, Human
ugaaaaauagaacacaugac

SEQ ID NO: 803549 - RNA, 24 nt, Human
ugaaaaucagcccucauuggagca

SEQ ID NO: 803550 - RNA, 20 nt, Human
ugaaacacagaacuggcagc

SEQ ID NO: 803551 - RNA, 26 nt, Human
ugaagcaaacacugaugucuaggaac

SEQ ID NO: 803552 - RNA, 23 nt, Human
ugaagcgcuggcgagccccgccg

SEQ ID NO: 803553 - RNA, 19 nt, Human
ugaauggaaagcuuaggug

SEQ ID NO: 803554 - RNA, 20 nt, Human
ugacaaaauagccccaaaac

SEQ ID NO: 803555 - RNA, 23 nt, Human
ugaccucgugauccacucgccuc

SEQ ID NO: 803556 - RNA, 19 nt, Human
ugaccuggucuccucuccc

SEQ ID NO: 803557 - RNA, 19 nt, Human
ugagaacacggaggugacc

SEQ ID NO: 803558 - RNA, 21 nt, Human
ugagaggaaacucuggagagg

SEQ ID NO: 803559 - RNA, 21 nt, Human
ugagaggaaaugcuggagagg

SEQ ID NO: 803560 - RNA, 21 nt, Human
ugagaggaaaugcuggagagg

SEQ ID NO: 803561 - RNA, 19 nt, Human
ugagugcaaugguacaauc

SEQ ID NO: 803562 - RNA, 23 nt, Human
ugaguucuguauauuccaagaaa

SEQ ID NO: 803563 - RNA, 22 nt, Human
ugcaguggcgcgaucucggcuc

SEQ ID NO: 803564 - RNA, 25 nt, Human
ugcugggauuacaggcgugagccac

SEQ ID NO: 803565 - RNA, 21 nt, Human
uggaagcugagccccaagccc

SEQ ID NO: 803566 - RNA, 18 nt, Human
uggagaggagcaggaugg

SEQ ID NO: 803567 - RNA, 18 nt, Human
uggagaggagcaggaugg

SEQ ID NO: 803568 - RNA, 18 nt, Human
uggagaggagcaggaugg

SEQ ID NO: 803569 - RNA, 18 nt, Human
uggagaggagcaggaugg

SEQ ID NO: 803570 - RNA, 18 nt, Human
uggagaggagcaggaugg

SEQ ID NO: 803571 - RNA, 24 nt, Human
uggaggccacccagccaacgcggu

SEQ ID NO: 803572 - RNA, 23 nt, Human
uggagugcaguggcgcgaucucg

SEQ ID NO: 803573 - RNA, 24 nt, Human
uggagugcaguggcgcgaucucgg

SEQ ID NO: 803574 - RNA, 22 nt, Human
uggcagaugggagggaccuucu

SEQ ID NO: 803575 - RNA, 25 nt, Human
ugggaauggcaaaaaucauccaccu

SEQ ID NO: 803576 - RNA, 20 nt, Human
ugggagccagaagacagugg

SEQ ID NO: 803577 - RNA, 20 nt, Human
ugggauguuucuucugagug

SEQ ID NO: 803578 - RNA, 22 nt, Human
ugggauguuucuucugagugca

SEQ ID NO: 803579 - RNA, 18 nt, Human
ugggauuacaggcgugag

SEQ ID NO: 803580 - RNA, 19 nt, Human
ugggauuacaggcgugagc

SEQ ID NO: 803581 - RNA, 21 nt, Human
ugggauuacaggcgugagcca

SEQ ID NO: 803582 - RNA, 22 nt, Human
ugggauuacaggcgugagccac

SEQ ID NO: 803583 - RNA, 22 nt, Human
ugggauuacaggcgugagccac

SEQ ID NO: 803584 - RNA, 22 nt, Human
ugggauuacaggcgugagccac

SEQ ID NO: 803585 - RNA, 23 nt, Human
ugggauuacaggcgugagccaca

SEQ ID NO: 803586 - RNA, 26 nt, Human
ugggauuacaggcgugagccacagca

SEQ ID NO: 803587 - RNA, 27 nt, Human
ugggauuacaggcgugagccacagcac

SEQ ID NO: 803588 - RNA, 24 nt, Human
ugggcagggagcaggggaaaggag

SEQ ID NO: 803589 - RNA, 24 nt, Human
uggguucacgccauucucccgccu

SEQ ID NO: 803590 - RNA, 24 nt, Human
uguacccaacaacucaaaauacau

SEQ ID NO: 803591 - RNA, 23 nt, Human
ugucaccccucccuccuagccaa

SEQ ID NO: 803592 - RNA, 20 nt, Human
uguugcaaauuuccaaaaau

SEQ ID NO: 803593 - RNA, 19 nt, Human
uuaaaacugaaagaaaaca

SEQ ID NO: 803594 - RNA, 18 nt, Human
uuaguagagacgggguuu

SEQ ID NO: 803595 - RNA, 22 nt, Human
uuaguagagacgggguuucacc

SEQ ID NO: 803596 - RNA, 24 nt, Human
uuaguagagacgggguuucaccgu

SEQ ID NO: 803597 - RNA, 27 nt, Human
uucaaaggagcaacaaauaacaaugaa

SEQ ID NO: 803598 - RNA, 19 nt, Human
uucguaaaucuaaaaccac

SEQ ID NO: 803599 - RNA, 24 nt, Human
uuggagcaugaagcugcaggaagg

SEQ ID NO: 803600 - RNA, 22 nt, Human
uugucacugggcagggagcagg

SEQ ID NO: 803601 - RNA, 19 nt, Human
uuucaccguguuagccagg

SEQ ID NO: 803602 - RNA, 19 nt, Human
uuugaguucuguauauucc

SEQ ID NO: 803603 - RNA, 18 nt, Human
uuuggaaaagaggaacaa

SEQ ID NO: 803604 - RNA, 22 nt, Human
uuuuggaaaagaggaacaaaau

SEQ ID NO: 803605 - RNA, 24 nt, Human
uuuuuaguagagacgggguuucac

SEQ ID NO: 803606 - RNA, 22 nt, Human
uuuuuguauuuuuuaguagaga

SEQ ID NO: 803607 - RNA, 23 nt, Human
uuuuuuaguagagacgggguuuc

SEQ ID NO: 803608 - RNA, 25 nt, Human
uuuuuuguauuuuuuaguagagacg

SEQ ID NO: 803609 - RNA, 18 nt, Human
aaaaaaaaucacagggca

SEQ ID NO: 803610 - RNA, 19 nt, Human
aaaauccucuaaaaaugac

SEQ ID NO: 803611 - RNA, 19 nt, Human
aaacaaaugaauuagcucu

SEQ ID NO: 803612 - RNA, 22 nt, Human
aaagagccauaaaacuuuaucc

SEQ ID NO: 803613 - RNA, 21 nt, Human
aacagacuuaauuuaaagcac

SEQ ID NO: 803614 - RNA, 18 nt, Human
aagcaccagaagcugugu

SEQ ID NO: 803615 - RNA, 24 nt, Human
aagcgucacaaaucccaauaguuc

SEQ ID NO: 803616 - RNA, 21 nt, Human
aaguguuagcgguugugggcu

SEQ ID NO: 803617 - RNA, 26 nt, Human
aauuagcucuuaauggacaaagccau

SEQ ID NO: 803618 - RNA, 20 nt, Human
aauuuaugaacagccuccaa

SEQ ID NO: 803619 - RNA, 25 nt, Human
acaaucccuucauauuccuuuacuu

SEQ ID NO: 803620 - RNA, 20 nt, Human
acacaaaccauauacaugau

SEQ ID NO: 803621 - RNA, 22 nt, Human
acacagcaaggauaaaugauuu

SEQ ID NO: 803622 - RNA, 21 nt, Human
agaaagagcauucuaaaagca

SEQ ID NO: 803623 - RNA, 21 nt, Human
agaaucuuuaguuauagacac

SEQ ID NO: 803624 - RNA, 23 nt, Human
agcuaaggccuaaaaucuaaaac

SEQ ID NO: 803625 - RNA, 21 nt, Human
aggaaucugacacuuugaaug

SEQ ID NO: 803626 - RNA, 21 nt, Human
aguaauaggaagaaaauggga

SEQ ID NO: 803627 - RNA, 22 nt, Human
auaagaaaccuuaggcacacaa

SEQ ID NO: 803628 - RNA, 18 nt, Human
auacuuagauuuugcagg

SEQ ID NO: 803629 - RNA, 23 nt, Human
auacuuauauguauauaagaaac

SEQ ID NO: 803630 - RNA, 19 nt, Human
aucuggugaagaaauaauu

SEQ ID NO: 803631 - RNA, 20 nt, Human
auggacauuuuguuuuuuac

SEQ ID NO: 803632 - RNA, 23 nt, Human
caaaauacuaaaacaagucaaug

SEQ ID NO: 803633 - RNA, 22 nt, Human
caaaucccaauaguuccaaaaa

SEQ ID NO: 803634 - RNA, 20 nt, Human
caacuucucauuaucuaacu

SEQ ID NO: 803635 - RNA, 22 nt, Human
caccaaaauuguaaguguuagc

SEQ ID NO: 803636 - RNA, 23 nt, Human
caccuucuaccaauugucaaaau

SEQ ID NO: 803637 - RNA, 18 nt, Human
cacugcacuagcaaaggc

SEQ ID NO: 803638 - RNA, 24 nt, Human
cagcaaggauaaaugauuucucuu

SEQ ID NO: 803639 - RNA, 21 nt, Human
cauguuguuuggguaauccuu

SEQ ID NO: 803640 - RNA, 18 nt, Human
cccaauaguuccaaaaau

SEQ ID NO: 803641 - RNA, 18 nt, Human
cgaucaagacagcugcag

SEQ ID NO: 803642 - RNA, 20 nt, Human
cucaaaacagauacuuugca

SEQ ID NO: 803643 - RNA, 23 nt, Human
cucagacuugaaaugggugagau

SEQ ID NO: 803644 - RNA, 22 nt, Human
cucuucugaaaccuauccuguu

SEQ ID NO: 803645 - RNA, 22 nt, Human
cugcaacaagcgucacaaaucc

SEQ ID NO: 803646 - RNA, 18 nt, Human
cuuggauuagucaaaagc

SEQ ID NO: 803647 - RNA, 19 nt, Human
cuuguugaagcagcugaag

SEQ ID NO: 803648 - RNA, 20 nt, Human
gaagcagcugaagcaauaaa

SEQ ID NO: 803649 - RNA, 21 nt, Human
gcaaaggcauuaagaggggga

SEQ ID NO: 803650 - RNA, 20 nt, Human
gccuaaaaucuaaaacauaa

SEQ ID NO: 803651 - RNA, 20 nt, Human
ggguuggggaggcaugugau

SEQ ID NO: 803652 - RNA, 21 nt, Human
ggguuggggaggcaugugaug

SEQ ID NO: 803653 - RNA, 21 nt, Human
gguaguuuuuauucuucaagu

SEQ ID NO: 803654 - RNA, 18 nt, Human
ggucuaucaauggacauu

SEQ ID NO: 803655 - RNA, 22 nt, Human
guaaacagacuuaauuuaaagc

SEQ ID NO: 803656 - RNA, 21 nt, Human
guaugcaaauaugcacaaaca

SEQ ID NO: 803657 - RNA, 22 nt, Human
uaaaaauagaaagugcuuuuaa

SEQ ID NO: 803658 - RNA, 25 nt, Human
uaaaacaagucaaugaauuaccccc

SEQ ID NO: 803659 - RNA, 23 nt, Human
uaaaagaacacaaaccauauaca

SEQ ID NO: 803660 - RNA, 24 nt, Human
uaaacagacuuaauuuaaagcacc

SEQ ID NO: 803661 - RNA, 23 nt, Human
uaaacugcaacaagcgucacaaa

SEQ ID NO: 803662 - RNA, 20 nt, Human
uaacagcaccuugaaaaaau

SEQ ID NO: 803663 - RNA, 26 nt, Human
uaauaggaagaaaaugggaagacuaa

SEQ ID NO: 803664 - RNA, 22 nt, Human
uacaaucacaaugcugcagaac

SEQ ID NO: 803665 - RNA, 18 nt, Human
uacaaugaguuuuucuuu

SEQ ID NO: 803666 - RNA, 22 nt, Human
uacaugauuagaauacauacug

SEQ ID NO: 803667 - RNA, 20 nt, Human
uauagucacaguuaagaaua

SEQ ID NO: 803668 - RNA, 18 nt, Human
uauuucauugaaaauucu

SEQ ID NO: 803669 - RNA, 21 nt, Human
uauuuuacacaggagaaauau

SEQ ID NO: 803670 - RNA, 19 nt, Human
uccauacucccaaggaauc

SEQ ID NO: 803671 - RNA, 21 nt, Human
ucccaaaucuaguaugcuaag

SEQ ID NO: 803672 - RNA, 24 nt, Human
ucccaaggaaucugacacuuugaa

SEQ ID NO: 803673 - RNA, 23 nt, Human
ucccucaucuccuuuuggaaaca

SEQ ID NO: 803674 - RNA, 22 nt, Human
ucuagcaaugauuggaagaugu

SEQ ID NO: 803675 - RNA, 18 nt, Human
ugaaaaaauacacugcac

SEQ ID NO: 803676 - RNA, 27 nt, Human
ugaaauaauaauucagcuuauuuuuaa

SEQ ID NO: 803677 - RNA, 23 nt, Human
ugaaccuguuaaaauccucuaaa

SEQ ID NO: 803678 - RNA, 21 nt, Human
ugagaaaggugggaugaaacu

SEQ ID NO: 803679 - RNA, 23 nt, Human
ugagaggacacaguaaaagaaca

SEQ ID NO: 803680 - RNA, 23 nt, Human
ugauguuaacuacaacaacggaa

SEQ ID NO: 803681 - RNA, 24 nt, Human
ugcacaaacaauagacaauaggaa

SEQ ID NO: 803682 - RNA, 21 nt, Human
uggaacaauggcaccaugaaa

SEQ ID NO: 803683 - RNA, 22 nt, Human
ugguaaauuguuaaaaucagga

SEQ ID NO: 803684 - RNA, 18 nt, Human
ugguuaagcaccagaagc

SEQ ID NO: 803685 - RNA, 23 nt, Human
uguaguaccauuccucuuguuuu

SEQ ID NO: 803686 - RNA, 23 nt, Human
uguaugcaaauaugcacaaacaa

SEQ ID NO: 803687 - RNA, 18 nt, Human
uguauuuuaucaccuuga

SEQ ID NO: 803688 - RNA, 21 nt, Human
uguuagcgguugugggcuucc

SEQ ID NO: 803689 - RNA, 20 nt, Human
uguuugcuuuugcaccaaaa

SEQ ID NO: 803690 - RNA, 20 nt, Human
uguuugcuuuugcaccaaaa

SEQ ID NO: 803691 - RNA, 23 nt, Human
uuaaaauccucuaaaaaugacuc

SEQ ID NO: 803692 - RNA, 20 nt, Human
uuaaugccuguuuuccuguu

SEQ ID NO: 803693 - RNA, 21 nt, Human
uuaauggacaaagccauguuu

SEQ ID NO: 803694 - RNA, 19 nt, Human
uuaggcacacaaaauacua

SEQ ID NO: 803695 - RNA, 23 nt, Human
uugaauaagcuuuuaaaaaaaau

SEQ ID NO: 803696 - RNA, 18 nt, Human
uuuccuugcuucaugaga

SEQ ID NO: 803697 - RNA, 21 nt, Human
uuugcuacuucuuuuaaaaau

SEQ ID NO: 803698 - RNA, 24 nt, Human
uuugcuacuucuuuuaaaaauauu

SEQ ID NO: 803699 - RNA, 23 nt, Human
uuuuguuaucauuauuauuuuuu

SEQ ID NO: 803700 - RNA, 22 nt, Human
aaaaaacccccaaaaaccaaag

SEQ ID NO: 803701 - RNA, 19 nt, Human
aaaaacaaaaaacaccaaa

SEQ ID NO: 803702 - RNA, 23 nt, Human
aaaaaccaguagcauuucuucca

SEQ ID NO: 803703 - RNA, 19 nt, Human
aaaaacccccaaaaaccaa

SEQ ID NO: 803704 - RNA, 22 nt, Human
aaaaagaaaagacauacaucga

SEQ ID NO: 803705 - RNA, 21 nt, Human
aaaaagacuuuuacccauauu

SEQ ID NO: 803706 - RNA, 26 nt, Human
aaaacaaacaaacaaacaaaaaaaca

SEQ ID NO: 803707 - RNA, 25 nt, Human
aaaagaaaagacauacaucgacaaa

SEQ ID NO: 803708 - RNA, 21 nt, Human
aaaauagcacacauacaaagc

SEQ ID NO: 803709 - RNA, 23 nt, Human
aaaauguaaaaagaaaaccaaag

SEQ ID NO: 803710 - RNA, 24 nt, Human
aaacaaacaaaaaaacaaaaaaca

SEQ ID NO: 803711 - RNA, 26 nt, Human
aaacaaacaaaaaaacaaaaaacacu

SEQ ID NO: 803712 - RNA, 19 nt, Human
aaacaagauaccaaauuuc

SEQ ID NO: 803713 - RNA, 23 nt, Human
aaacagaauggauagcauaaaca

SEQ ID NO: 803714 - RNA, 18 nt, Human
aaacauguuugaauagau

SEQ ID NO: 803715 - RNA, 18 nt, Human
aaagccacuaaacuaaug

SEQ ID NO: 803716 - RNA, 23 nt, Human
aacaaaaaaacaaaaaacaccaa

SEQ ID NO: 803717 - RNA, 24 nt, Human
aacaaaaaaacaaaaaacaccaaa

SEQ ID NO: 803718 - RNA, 23 nt, Human
aacaaacaaaaaaacaaaaaaca

SEQ ID NO: 803719 - RNA, 24 nt, Human
aacaaacaaacaaacaaaaaaaca

SEQ ID NO: 803720 - RNA, 18 nt, Human
aacucuggauaaacuaau

SEQ ID NO: 803721 - RNA, 18 nt, Human
aacugcccaaaaaacccc

SEQ ID NO: 803722 - RNA, 19 nt, Human
aacugcccaaaaaaccccc

SEQ ID NO: 803723 - RNA, 24 nt, Human
aagaaaaaaaggaugcuagcacag

SEQ ID NO: 803724 - RNA, 18 nt, Human
aagagaggcuucuguucu

SEQ ID NO: 803725 - RNA, 24 nt, Human
aagcaacagcaacuauccuuaaag

SEQ ID NO: 803726 - RNA, 28 nt, Human
aagcaacagcaacuauccuuaaagcuca

SEQ ID NO: 803727 - RNA, 23 nt, Human
aagcagaaaaucaauaucccaga

SEQ ID NO: 803728 - RNA, 20 nt, Human
aagcucaaaacugauuacag

SEQ ID NO: 803729 - RNA, 23 nt, Human
aagggaauguaaguuaaucaugg

SEQ ID NO: 803730 - RNA, 18 nt, Human
aagugcacuagcuuaaaa

SEQ ID NO: 803731 - RNA, 21 nt, Human
acaacacgcauaaaggucaua

SEQ ID NO: 803732 - RNA, 20 nt, Human
acacuauuaucuauguugca

SEQ ID NO: 803733 - RNA, 22 nt, Human
acagaauggauagcauaaacag

SEQ ID NO: 803734 - RNA, 23 nt, Human
accaaauuucauguuuggaaacu

SEQ ID NO: 803735 - RNA, 21 nt, Human
acugaaucaguauggacugaa

SEQ ID NO: 803736 - RNA, 18 nt, Human
acugcccaaaaaaccccc

SEQ ID NO: 803737 - RNA, 25 nt, Human
agaaaauaaccucucccaaucaccu

SEQ ID NO: 803738 - RNA, 21 nt, Human
agcaaaaaaacaaacaaacaa

SEQ ID NO: 803739 - RNA, 18 nt, Human
agcacuuagaauuaacuu

SEQ ID NO: 803740 - RNA, 23 nt, Human
agcauuucuuccaacacaaaacc

SEQ ID NO: 803741 - RNA, 21 nt, Human
agccauauagaaggcauugca

SEQ ID NO: 803742 - RNA, 21 nt, Human
agcuaacaucagguccgacgu

SEQ ID NO: 803743 - RNA, 18 nt, Human
agcuaauccuaaaacacu

SEQ ID NO: 803744 - RNA, 20 nt, Human
agucugcaucaggaagaacc

SEQ ID NO: 803745 - RNA, 22 nt, Human
aguuauuucaacuuucuaaaaa

SEQ ID NO: 803746 - RNA, 19 nt, Human
auagcacacauacaaagcc

SEQ ID NO: 803747 - RNA, 24 nt, Human
auaguuuaguauaacaaaaauaaa

SEQ ID NO: 803748 - RNA, 21 nt, Human
augaagcacacaaaaaauaaa

SEQ ID NO: 803749 - RNA, 23 nt, Human
augaagcacacaaaaaauaaacu

SEQ ID NO: 803750 - RNA, 23 nt, Human
augaucucucaaaauguucagaa

SEQ ID NO: 803751 - RNA, 22 nt, Human
caaaaaaacaaaaaacaccaaa

SEQ ID NO: 803752 - RNA, 18 nt, Human
caaaaaacaccaaacaaa

SEQ ID NO: 803753 - RNA, 20 nt, Human
caaaaaacccccaaaaacca

SEQ ID NO: 803754 - RNA, 24 nt, Human
caaaaagccaugcaaaaaggucaa

SEQ ID NO: 803755 - RNA, 22 nt, Human
caaaauagcacacauacaaagc

SEQ ID NO: 803756 - RNA, 24 nt, Human
caaaauagcacacauacaaagcca

SEQ ID NO: 803757 - RNA, 25 nt, Human
caaacaaacaaaaaaacaaaaaaca

SEQ ID NO: 803758 - RNA, 18 nt, Human
caaacaaagugaaacuag

SEQ ID NO: 803759 - RNA, 27 nt, Human
caaacaaauacuuuguuugccucuuuu

SEQ ID NO: 803760 - RNA, 23 nt, Human
caaagaaaaacauuuucaaaaag

SEQ ID NO: 803761 - RNA, 18 nt, Human
caaagaauuuaagggaga

SEQ ID NO: 803762 - RNA, 19 nt, Human
caaguagauaaaaccagua

SEQ ID NO: 803763 - RNA, 21 nt, Human
cacaugacuccuacgcuaaca

SEQ ID NO: 803764 - RNA, 24 nt, Human
cacuccgauucucacuaaaaacag

SEQ ID NO: 803765 - RNA, 18 nt, Human
cagaauacaaaaacaaaa

SEQ ID NO: 803766 - RNA, 29 nt, Human
cagaauggauagcauaaacauguuugaau

SEQ ID NO: 803767 - RNA, 26 nt, Human
cagcccccucuggauaaguccugucu

SEQ ID NO: 803768 - RNA, 19 nt, Human
cagcuuagaaauaguguuu

SEQ ID NO: 803769 - RNA, 21 nt, Human
cauaaccauacauguuucaga

SEQ ID NO: 803770 - RNA, 24 nt, Human
cauacauucagaacccaagcaaca

SEQ ID NO: 803771 - RNA, 21 nt, Human
caucaggaagaaccgggccag

SEQ ID NO: 803772 - RNA, 18 nt, Human
caugcgcaaauggcauca

SEQ ID NO: 803773 - RNA, 19 nt, Human
ccaaaaaacccccaaaaac

SEQ ID NO: 803774 - RNA, 27 nt, Human
ccaaaaaacccccaaaaaccaaagucu

SEQ ID NO: 803775 - RNA, 24 nt, Human
ccaaaauguaaaaagaaaaccaaa

SEQ ID NO: 803776 - RNA, 25 nt, Human
ccaaaugaagcacacaaaaaauaaa

SEQ ID NO: 803777 - RNA, 20 nt, Human
ccugcagcccccucuggaua

SEQ ID NO: 803778 - RNA, 22 nt, Human
cguguguccuuuacuaugacuc

SEQ ID NO: 803779 - RNA, 24 nt, Human
cuauagacaaaguaugcccaagag

SEQ ID NO: 803780 - RNA, 20 nt, Human
cucauaguaugucuaauaac

SEQ ID NO: 803781 - RNA, 19 nt, Human
cucgccugcagcccccucu

SEQ ID NO: 803782 - RNA, 18 nt, Human
cugaaaucacauccagug

SEQ ID NO: 803783 - RNA, 22 nt, Human
cugaaaucacauccagugacac

SEQ ID NO: 803784 - RNA, 20 nt, Human
cugcagggccagaacuuguc

SEQ ID NO: 803785 - RNA, 19 nt, Human
cugcccaaaaaacccccaa

SEQ ID NO: 803786 - RNA, 23 nt, Human
cugcccaaaaaacccccaaaaac

SEQ ID NO: 803787 - RNA, 19 nt, Human
cuugauccauucugaacuu

SEQ ID NO: 803788 - RNA, 22 nt, Human
cuuggccucugucuuuaaaaug

SEQ ID NO: 803789 - RNA, 23 nt, Human
gaaagcaaacaccuaauccuuac

SEQ ID NO: 803790 - RNA, 21 nt, Human
gaagaccaagaauacucaaau

SEQ ID NO: 803791 - RNA, 21 nt, Human
gaagauauuuauucccaaacc

SEQ ID NO: 803792 - RNA, 22 nt, Human
gaccuacacccacauauacaua

SEQ ID NO: 803793 - RNA, 18 nt, Human
gagaaggcagcuuagaaa

SEQ ID NO: 803794 - RNA, 19 nt, Human
gcaaacaccuaauccuuac

SEQ ID NO: 803795 - RNA, 18 nt, Human
gcagcaaaaaaacaaaca

SEQ ID NO: 803796 - RNA, 25 nt, Human
gcagcaaaaaaacaaacaaacaaac

SEQ ID NO: 803797 - RNA, 19 nt, Human
gcccccucuggauaagucc

SEQ ID NO: 803798 - RNA, 23 nt, Human
gccuuguguauuuauagguugua

SEQ ID NO: 803799 - RNA, 21 nt, Human
ggauaccuggccugauggcuc

SEQ ID NO: 803800 - RNA, 24 nt, Human
ggcauuugagauauaaagugaaaa

SEQ ID NO: 803801 - RNA, 20 nt, Human
ggggguccuguccagccucu

SEQ ID NO: 803802 - RNA, 18 nt, Human
gggguccuguccagccuc

SEQ ID NO: 803803 - RNA, 23 nt, Human
ggucgcuccggcggggcacgaga

SEQ ID NO: 803804 - RNA, 20 nt, Human
guagaaaauaaccucuccca

SEQ ID NO: 803805 - RNA, 18 nt, Human
guuucagaaauauaagga

SEQ ID NO: 803806 - RNA, 26 nt, Human
guuuuuuccucugcauuuaaagaguu

SEQ ID NO: 803807 - RNA, 24 nt, Human
uaaacaaaaacuccaaaugaagca

SEQ ID NO: 803808 - RNA, 19 nt, Human
uaaacaaguagauaaaacc

SEQ ID NO: 803809 - RNA, 27 nt, Human
uaaacaaguagauaaaaccaguaacau

SEQ ID NO: 803810 - RNA, 18 nt, Human
uaaaggcuuucaaaacag

SEQ ID NO: 803811 - RNA, 26 nt, Human
uaaauaaaacaaaaacugagggcugu

SEQ ID NO: 803812 - RNA, 22 nt, Human
uaacacucacacagagcagagu

SEQ ID NO: 803813 - RNA, 21 nt, Human
uaacaggcaaacaagaaaacu

SEQ ID NO: 803814 - RNA, 23 nt, Human
uaauccuuacuauauacugacua

SEQ ID NO: 803815 - RNA, 27 nt, Human
uacacugaaauaaaucuucaaaaaggu

SEQ ID NO: 803816 - RNA, 22 nt, Human
uaccacuucuccccacauaaag

SEQ ID NO: 803817 - RNA, 21 nt, Human
uagaaaaagacuuuuacccau

SEQ ID NO: 803818 - RNA, 25 nt, Human
uagaaaauuuauacaucagcagcca

SEQ ID NO: 803819 - RNA, 24 nt, Human
uagcacuuagaauuaacuuauugc

SEQ ID NO: 803820 - RNA, 22 nt, Human
uauacaucagcagccauauaga

SEQ ID NO: 803821 - RNA, 21 nt, Human
uauagacaaaguaugcccaag

SEQ ID NO: 803822 - RNA, 24 nt, Human
uauauaaacaaaaacuccaaauga

SEQ ID NO: 803823 - RNA, 21 nt, Human
ucaaaacuuagaaggucaaag

SEQ ID NO: 803824 - RNA, 21 nt, Human
ucaacuauguuuuuuccucug

SEQ ID NO: 803825 - RNA, 18 nt, Human
ucaaugguggcagcagca

SEQ ID NO: 803826 - RNA, 20 nt, Human
uccaacacaaaaccuucaaa

SEQ ID NO: 803827 - RNA, 21 nt, Human
uccaacacaaaaccuucaaag

SEQ ID NO: 803828 - RNA, 23 nt, Human
uccauuuuuaccacuucucccca

SEQ ID NO: 803829 - RNA, 22 nt, Human
uccuucagaaagcaaacaccua

SEQ ID NO: 803830 - RNA, 22 nt, Human
ucuaaagagaggcuucuguucu

SEQ ID NO: 803831 - RNA, 23 nt, Human
ucuaauaacugcccaaaaaaccc

SEQ ID NO: 803832 - RNA, 28 nt, Human
ugaagcacacaaaaaauaaacuugaaaa

SEQ ID NO: 803833 - RNA, 19 nt, Human
ugaagucauaucuaagcaa

SEQ ID NO: 803834 - RNA, 25 nt, Human
ugacaaaaauguaaaggcuuucaaa

SEQ ID NO: 803835 - RNA, 23 nt, Human
ugacuagggucaugaagucauau

SEQ ID NO: 803836 - RNA, 24 nt, Human
ugauuuaggagucugguauuaccu

SEQ ID NO: 803837 - RNA, 23 nt, Human
ugcaaacaaauacuuuguuugcc

SEQ ID NO: 803838 - RNA, 24 nt, Human
ugcaaacaaauacuuuguuugccu

SEQ ID NO: 803839 - RNA, 20 nt, Human
ugcagcaauaaaaccauaaa

SEQ ID NO: 803840 - RNA, 22 nt, Human
ugcccaaaaaacccccaaaaac

SEQ ID NO: 803841 - RNA, 21 nt, Human
uggcagcagcaaaaaaacaaa

SEQ ID NO: 803842 - RNA, 21 nt, Human
ugggaguugcacuuacuuuua

SEQ ID NO: 803843 - RNA, 23 nt, Human
uguagaaaaaaauuaaauggcua

SEQ ID NO: 803844 - RNA, 23 nt, Human
uguauaacaggcaaacaagaaaa

SEQ ID NO: 803845 - RNA, 23 nt, Human
uuaaaagugcuugcaugcugcag

SEQ ID NO: 803846 - RNA, 18 nt, Human
uuacugaauuuuucaaaa

SEQ ID NO: 803847 - RNA, 23 nt, Human
uucagaauacaaaaacaaaaauc

SEQ ID NO: 803848 - RNA, 24 nt, Human
uuccaacacaaaaccuucaaagug

SEQ ID NO: 803849 - RNA, 20 nt, Human
uucccaaaauguaaaaagaa

SEQ ID NO: 803850 - RNA, 20 nt, Human
uucccaaaccaacucuaaau

SEQ ID NO: 803851 - RNA, 19 nt, Human
uugcaugaguuugaggcca

SEQ ID NO: 803852 - RNA, 19 nt, Human
uuuauaaacucuggauaaa

SEQ ID NO: 803853 - RNA, 21 nt, Human
uuugauaguaaaacuggugag

SEQ ID NO: 803854 - RNA, 21 nt, Human
uuugaucuuggccucugucuu

SEQ ID NO: 803855 - RNA, 19 nt, Human
uuuguacaaaauaaacaag

SEQ ID NO: 803856 - RNA, 19 nt, Human
aaacaccucuuugaucaag

SEQ ID NO: 803857 - RNA, 18 nt, Human
aacaaaagucuacacaca

SEQ ID NO: 803858 - RNA, 18 nt, Human
aacuuccuacagaaacac

SEQ ID NO: 803859 - RNA, 18 nt, Human
aacuuccuacagaaacac

SEQ ID NO: 803860 - RNA, 24 nt, Human
aauacagugauggaaacaagacaa

SEQ ID NO: 803861 - RNA, 24 nt, Human
aauuuguagcauacuugccagugg

SEQ ID NO: 803862 - RNA, 20 nt, Human
acaagggagcuuucuuugca

SEQ ID NO: 803863 - RNA, 19 nt, Human
acagugauggaaacaagac

SEQ ID NO: 803864 - RNA, 22 nt, Human
accauuacccugcuucugucau

SEQ ID NO: 803865 - RNA, 23 nt, Human
acugacugcagauuccuggggua

SEQ ID NO: 803866 - RNA, 20 nt, Human
agaaggugaggccagcauuc

SEQ ID NO: 803867 - RNA, 19 nt, Human
aggaugggaguggggaagg

SEQ ID NO: 803868 - RNA, 21 nt, Human
aggaugggaguggggaaggaa

SEQ ID NO: 803869 - RNA, 22 nt, Human
caaacacaagaccauuacccug

SEQ ID NO: 803870 - RNA, 20 nt, Human
caacaaaagucuacacacag

SEQ ID NO: 803871 - RNA, 24 nt, Human
caagacaaucuuuuaucuuccucu

SEQ ID NO: 803872 - RNA, 20 nt, Human
caagcagauuuuaucugaaa

SEQ ID NO: 803873 - RNA, 19 nt, Human
cacaaagaagcacauuuca

SEQ ID NO: 803874 - RNA, 19 nt, Human
cacaugguuacaauccagu

SEQ ID NO: 803875 - RNA, 19 nt, Human
cagaaguccuuaauaaaca

SEQ ID NO: 803876 - RNA, 23 nt, Human
cagagaacuuccuacagaaacac

SEQ ID NO: 803877 - RNA, 18 nt, Human
cagcaucacugccaucug

SEQ ID NO: 803878 - RNA, 18 nt, Human
caguauucugggauuguu

SEQ ID NO: 803879 - RNA, 19 nt, Human
caucacugccaucuggacu

SEQ ID NO: 803880 - RNA, 24 nt, Human
cccccaauucaaggcuaauaucua

SEQ ID NO: 803881 - RNA, 19 nt, Human
cccuucuaauccaagcucu

SEQ ID NO: 803882 - RNA, 30 nt, Human
cucacccauaucuuaaguauuucuccgggg

SEQ ID NO: 803883 - RNA, 30 nt, Human
cuguucacauuuaaaauuacuuugugaucc

SEQ ID NO: 803884 - RNA, 18 nt, Human
cuugugucuucauggucu

SEQ ID NO: 803885 - RNA, 22 nt, Human
gaaaaguaaaauauagguuacg

SEQ ID NO: 803886 - RNA, 23 nt, Human
gaaaaguaaaauauagguuacgg

SEQ ID NO: 803887 - RNA, 24 nt, Human
gaaggaaagaagacuuauuaggga

SEQ ID NO: 803888 - RNA, 22 nt, Human
gaccuauauuuugcuuuuccuc

SEQ ID NO: 803889 - RNA, 20 nt, Human
gccaggaggagaugccuggc

SEQ ID NO: 803890 - RNA, 20 nt, Human
gccaucuggacucugaacaa

SEQ ID NO: 803891 - RNA, 20 nt, Human
ggaagcuugaagcuaacuca

SEQ ID NO: 803892 - RNA, 23 nt, Human
ggaaggaaguauggcuuacaagg

SEQ ID NO: 803893 - RNA, 23 nt, Human
gggaaggaaguauggcuuacaag

SEQ ID NO: 803894 - RNA, 25 nt, Human
gggaaggaaguauggcuuacaaggg

SEQ ID NO: 803895 - RNA, 23 nt, Human
gggaaggaaugaucuauacggca

SEQ ID NO: 803896 - RNA, 19 nt, Human
guuacaauccaguauuuga

SEQ ID NO: 803897 - RNA, 21 nt, Human
uaagaaaugccuaaugagcac

SEQ ID NO: 803898 - RNA, 21 nt, Human
uacaagggagcuuucuuugca

SEQ ID NO: 803899 - RNA, 23 nt, Human
uagguacaacauagauaacuuca

SEQ ID NO: 803900 - RNA, 23 nt, Human
uauaugauuaaacuuaugugagu

SEQ ID NO: 803901 - RNA, 20 nt, Human
uauucaagacacaagcagau

SEQ ID NO: 803902 - RNA, 21 nt, Human
ucuacacacaguauucuggga

SEQ ID NO: 803903 - RNA, 21 nt, Human
ucuauacggcagacugccuuu

SEQ ID NO: 803904 - RNA, 19 nt, Human
ucuauuccauuugauagca

SEQ ID NO: 803905 - RNA, 22 nt, Human
ucuucaguugaaugacaauagu

SEQ ID NO: 803906 - RNA, 18 nt, Human
ucuuuuaucuuccucuuc

SEQ ID NO: 803907 - RNA, 20 nt, Human
ugaccgagaaaccacuguau

SEQ ID NO: 803908 - RNA, 21 nt, Human
ugacuucuccaucuugucuag

SEQ ID NO: 803909 - RNA, 20 nt, Human
ugagaauguuuagagcauuu

SEQ ID NO: 803910 - RNA, 23 nt, Human
ugagcacaacaaaagucuacaca

SEQ ID NO: 803911 - RNA, 26 nt, Human
ugagcacaacaaaagucuacacacag

SEQ ID NO: 803912 - RNA, 23 nt, Human
ugaguagcagauuuuuuuuuaua

SEQ ID NO: 803913 - RNA, 19 nt, Human
ugccaguggugacuucucc

SEQ ID NO: 803914 - RNA, 19 nt, Human
uggggaaggaaguauggcu

SEQ ID NO: 803915 - RNA, 23 nt, Human
ugugauguuuugagaauguuuag

SEQ ID NO: 803916 - RNA, 20 nt, Human
uguggacugagauugagaua

SEQ ID NO: 803917 - RNA, 18 nt, Human
uguggaugauagagaagg

SEQ ID NO: 803918 - RNA, 27 nt, Human
uuaaaauaacuaaaaugugucaaaguc

SEQ ID NO: 803919 - RNA, 23 nt, Human
uucaagacacaagcagauuuuuu

SEQ ID NO: 803920 - RNA, 20 nt, Human
uucaguugaaugacaauagu

SEQ ID NO: 803921 - RNA, 19 nt, Human
uucaucuaauuagagacau

SEQ ID NO: 803922 - RNA, 24 nt, Human
uucuccaucuugucuaggagggag

SEQ ID NO: 803923 - RNA, 21 nt, Human
uuggggagcucauuccaugac

SEQ ID NO: 803924 - RNA, 23 nt, Human
uuugggagaagugagauauuuau

SEQ ID NO: 803925 - RNA, 19 nt, Human
aaacaaaauggcagaccua

SEQ ID NO: 803926 - RNA, 22 nt, Human
aaaccaaaaaaauaaaacacac

SEQ ID NO: 803927 - RNA, 22 nt, Human
aaacccaaauuuuuacucggcc

SEQ ID NO: 803928 - RNA, 22 nt, Human
aaacgccauaaacccaaauuuu

SEQ ID NO: 803929 - RNA, 21 nt, Human
aaauacaagucaauaccacaa

SEQ ID NO: 803930 - RNA, 22 nt, Human
aaccaaaaaaauaaaacacacc

SEQ ID NO: 803931 - RNA, 26 nt, Human
aacccaugaagcgccaucauccccuu

SEQ ID NO: 803932 - RNA, 22 nt, Human
aacuccuuccccacagucucca

SEQ ID NO: 803933 - RNA, 23 nt, Human
aacucuagaaaacucaguguuga

SEQ ID NO: 803934 - RNA, 19 nt, Human
aagcaagacuuuguacaaa

SEQ ID NO: 803935 - RNA, 18 nt, Human
aauggcagcaggacgggc

SEQ ID NO: 803936 - RNA, 24 nt, Human
acacacucauugggacacauaaga

SEQ ID NO: 803937 - RNA, 18 nt, Human
acccugagagcugacagu

SEQ ID NO: 803938 - RNA, 21 nt, Human
accgcgagcguaaggaacaag

SEQ ID NO: 803939 - RNA, 20 nt, Human
acuccauguccaaaugaagu

SEQ ID NO: 803940 - RNA, 21 nt, Human
acugugggcauuugcuccaaa

SEQ ID NO: 803941 - RNA, 21 nt, Human
aggaggcaaggcugcaccugu

SEQ ID NO: 803942 - RNA, 22 nt, Human
agguaggaaguaaauauuagga

SEQ ID NO: 803943 - RNA, 19 nt, Human
aggugugcuuugauguggu

SEQ ID NO: 803944 - RNA, 22 nt, Human
agucaauaccacaagauggcac

SEQ ID NO: 803945 - RNA, 21 nt, Human
aguguugaaguaugggaagaa

SEQ ID NO: 803946 - RNA, 21 nt, Human
auaaaacacacccacaaacaa

SEQ ID NO: 803947 - RNA, 24 nt, Human
augcaggaaaggcugcggaucuga

SEQ ID NO: 803948 - RNA, 22 nt, Human
augcucauucucuggggcuucu

SEQ ID NO: 803949 - RNA, 22 nt, Human
caaauuaugcugcucacauugg

SEQ ID NO: 803950 - RNA, 20 nt, Human
cacacaguggugccagucag

SEQ ID NO: 803951 - RNA, 19 nt, Human
cacagguugcuauccacug

SEQ ID NO: 803952 - RNA, 21 nt, Human
caccaagcagggaaugcucau

SEQ ID NO: 803953 - RNA, 21 nt, Human
cacccugagagcugacaguug

SEQ ID NO: 803954 - RNA, 24 nt, Human
caccugaaacgccauaaacccaaa

SEQ ID NO: 803955 - RNA, 18 nt, Human
cacugugccagucacaaa

SEQ ID NO: 803956 - RNA, 18 nt, Human
cacuguggaccaugcagg

SEQ ID NO: 803957 - RNA, 19 nt, Human
cauccgcaguauucacaca

SEQ ID NO: 803958 - RNA, 21 nt, Human
cauccgcaguauucacacauc

SEQ ID NO: 803959 - RNA, 18 nt, Human
cauucucuggggcuucuc

SEQ ID NO: 803960 - RNA, 18 nt, Human
cauuguguggggaucgca

SEQ ID NO: 803961 - RNA, 24 nt, Human
ccacagggugcguuuucacucagc

SEQ ID NO: 803962 - RNA, 24 nt, Human
ccacugcuccaccuucaccauccg

SEQ ID NO: 803963 - RNA, 24 nt, Human
ccaucauccccuggcuacaaaaca

SEQ ID NO: 803964 - RNA, 20 nt, Human
ccaucauguuuucuuccucc

SEQ ID NO: 803965 - RNA, 21 nt, Human
cccacagucuccacccuccaa

SEQ ID NO: 803966 - RNA, 18 nt, Human
ccgcaguauucacacauc

SEQ ID NO: 803967 - RNA, 19 nt, Human
ccuccaauuuacaugcaga

SEQ ID NO: 803968 - RNA, 19 nt, Human
ccuccacagcgcagggacc

SEQ ID NO: 803969 - RNA, 22 nt, Human
ccugaaacgccauaaacccaaa

SEQ ID NO: 803970 - RNA, 18 nt, Human
ccuucagaaaugaccuag

SEQ ID NO: 803971 - RNA, 20 nt, Human
ccuugaguucagugaugguc

SEQ ID NO: 803972 - RNA, 21 nt, Human
cucaaaagacugaauuauaaa

SEQ ID NO: 803973 - RNA, 24 nt, Human
cucauucucuggggcuucuccaaa

SEQ ID NO: 803974 - RNA, 25 nt, Human
cuccacucuguuagauuguacugga

SEQ ID NO: 803975 - RNA, 22 nt, Human
cucccaguuccaaacaggaaga

SEQ ID NO: 803976 - RNA, 21 nt, Human
cugcaccugugagucuucagc

SEQ ID NO: 803977 - RNA, 19 nt, Human
cugugggaauuccaucaug

SEQ ID NO: 803978 - RNA, 23 nt, Human
cuucaggaugcuguccugaaagg

SEQ ID NO: 803979 - RNA, 22 nt, Human
gaacaagcacacaguggugcca

SEQ ID NO: 803980 - RNA, 23 nt, Human
gaacuggaagcaauuuucauuca

SEQ ID NO: 803981 - RNA, 26 nt, Human
gcaaggcacagaacacagcugcuucu

SEQ ID NO: 803982 - RNA, 23 nt, Human
gcaggaaaggcugcggaucugaa

SEQ ID NO: 803983 - RNA, 19 nt, Human
gcauuucuccacacagugc

SEQ ID NO: 803984 - RNA, 21 nt, Human
ggaauuccaucauguuuucuu

SEQ ID NO: 803985 - RNA, 18 nt, Human
gucagaggcuucuguugg

SEQ ID NO: 803986 - RNA, 22 nt, Human
gucugagagcuacaaaagagaa

SEQ ID NO: 803987 - RNA, 22 nt, Human
gugcguuuucacucagcuggca

SEQ ID NO: 803988 - RNA, 18 nt, Human
guuguuuuagauauuauu

SEQ ID NO: 803989 - RNA, 22 nt, Human
uaaaacacacccacaaacaacu

SEQ ID NO: 803990 - RNA, 23 nt, Human
uaaaacacacccacaaacaacuu

SEQ ID NO: 803991 - RNA, 21 nt, Human
uacaaaacaaaauacaauauu

SEQ ID NO: 803992 - RNA, 25 nt, Human
uacaaacaauuaucuucauaaaaug

SEQ ID NO: 803993 - RNA, 20 nt, Human
uagcagguggcgaguucuuc

SEQ ID NO: 803994 - RNA, 24 nt, Human
ucacugggcagguuuucuccuggg

SEQ ID NO: 803995 - RNA, 24 nt, Human
ucagaaaccucccacugaaagagg

SEQ ID NO: 803996 - RNA, 22 nt, Human
ucagaggcuucuguuggggagg

SEQ ID NO: 803997 - RNA, 27 nt, Human
ucagauaauuaaauuugaaagaagaau

SEQ ID NO: 803998 - RNA, 21 nt, Human
uccaaaguccccacucagaca

SEQ ID NO: 803999 - RNA, 21 nt, Human
uccacagcgcagggaccucag

SEQ ID NO: 804000 - RNA, 20 nt, Human
uccacccuccaauuuacaug

SEQ ID NO: 804001 - RNA, 24 nt, Human
uccacucuguuagauuguacugga

SEQ ID NO: 804002 - RNA, 22 nt, Human
uccaugcugacuggcuugccau

SEQ ID NO: 804003 - RNA, 23 nt, Human
ucccuugggaaaaccaaaaaaau

SEQ ID NO: 804004 - RNA, 24 nt, Human
uccuuuggaggccuguugcucuca

SEQ ID NO: 804005 - RNA, 18 nt, Human
ucgcaugacugugggcau

SEQ ID NO: 804006 - RNA, 23 nt, Human
ucuccaauuuaaccacauauuuc

SEQ ID NO: 804007 - RNA, 19 nt, Human
ucuccaucguaggcuaagg

SEQ ID NO: 804008 - RNA, 23 nt, Human
ucuccaucguaggcuaaggucag

SEQ ID NO: 804009 - RNA, 18 nt, Human
ucugcaguccgaggcuug

SEQ ID NO: 804010 - RNA, 18 nt, Human
ucuguggggcauggccgu

SEQ ID NO: 804011 - RNA, 19 nt, Human
ugaaacgccauaaacccaa

SEQ ID NO: 804012 - RNA, 23 nt, Human
ugaaauuacaaaagcagaguuug

SEQ ID NO: 804013 - RNA, 26 nt, Human
ugaagcgccaucauccccuggcuaaa

SEQ ID NO: 804014 - RNA, 20 nt, Human
ugacuguauuuuccucugga

SEQ ID NO: 804015 - RNA, 21 nt, Human
ugagaaaagcgccaccugaaa

SEQ ID NO: 804016 - RNA, 20 nt, Human
ugaguucagugauggucuua

SEQ ID NO: 804017 - RNA, 21 nt, Human
ugcaggaaaggcugcggaucu

SEQ ID NO: 804018 - RNA, 24 nt, Human
ugcaguccaugcugagccgucaca

SEQ ID NO: 804019 - RNA, 18 nt, Human
ugccaaggacccagcugu

SEQ ID NO: 804020 - RNA, 20 nt, Human
ugccaaggacccagcuguag

SEQ ID NO: 804021 - RNA, 23 nt, Human
ugccaaggacccagcuguagcag

SEQ ID NO: 804022 - RNA, 20 nt, Human
ugccgaauggcagcaggacg

SEQ ID NO: 804023 - RNA, 22 nt, Human
ugcuccaaaguccccacucaga

SEQ ID NO: 804024 - RNA, 21 nt, Human
ugcuccaccuucaccauccgc

SEQ ID NO: 804025 - RNA, 19 nt, Human
ugcugcucacauuggucca

SEQ ID NO: 804026 - RNA, 19 nt, Human
uggaccaugcaggaaaggc

SEQ ID NO: 804027 - RNA, 18 nt, Human
uggcagucuccugggcaa

SEQ ID NO: 804028 - RNA, 25 nt, Human
uggcauaaugauaaaucgaguccgg

SEQ ID NO: 804029 - RNA, 24 nt, Human
uggccacaggucugugaacacucu

SEQ ID NO: 804030 - RNA, 22 nt, Human
ugggcauuugcuccaaaguccc

SEQ ID NO: 804031 - RNA, 18 nt, Human
ugggggcagcugucuugg

SEQ ID NO: 804032 - RNA, 25 nt, Human
uguccaagccguccacccugagagc

SEQ ID NO: 804033 - RNA, 18 nt, Human
ugugaacacucuguccaa

SEQ ID NO: 804034 - RNA, 24 nt, Human
ugugggcauuugcuccaaaguccc

SEQ ID NO: 804035 - RNA, 18 nt, Human
ugugguuuuggcuucuug

SEQ ID NO: 804036 - RNA, 20 nt, Human
uguguagugauaacauuugc

SEQ ID NO: 804037 - RNA, 18 nt, Human
uguuccaaagacuugcuu

SEQ ID NO: 804038 - RNA, 21 nt, Human
uuaugcugcugaagaucaagu

SEQ ID NO: 804039 - RNA, 24 nt, Human
uucucacaaccacagacuccaccc

SEQ ID NO: 804040 - RNA, 21 nt, Human
uucucucuguguucaugaaaa

SEQ ID NO: 804041 - RNA, 20 nt, Human
uugaaagucuuuaaaccaaa

SEQ ID NO: 804042 - RNA, 22 nt, Human
uuucaacaccuaugauuacaaa

SEQ ID NO: 804043 - RNA, 20 nt, Human
uuucugcaggcuggaaugca

SEQ ID NO: 804044 - RNA, 19 nt, Human
uuugauguauauuaaauga

SEQ ID NO: 804045 - RNA, 23 nt, Human
uuuggcuucuugcaaacaaggua

SEQ ID NO: 804046 - RNA, 21 nt, Human
uuuguacaaacaggaucggug

SEQ ID NO: 804047 - RNA, 20 nt, Human
aaaacaaacacaaaagccuu

SEQ ID NO: 804048 - RNA, 24 nt, Human
aaacugcacacgcauaaaacguaa

SEQ ID NO: 804049 - RNA, 21 nt, Human
aacacaaaagccuuauagaua

SEQ ID NO: 804050 - RNA, 24 nt, Human
aacacacauccccuucuaugccuc

SEQ ID NO: 804051 - RNA, 19 nt, Human
aacauuuccccauccugca

SEQ ID NO: 804052 - RNA, 22 nt, Human
aacuggggaaaaacaaacacaa

SEQ ID NO: 804053 - RNA, 21 nt, Human
aagacauacugggacagaaca

SEQ ID NO: 804054 - RNA, 22 nt, Human
aagcaauucuaacuucagccaa

SEQ ID NO: 804055 - RNA, 20 nt, Human
aaugcauuuuagaaaaugau

SEQ ID NO: 804056 - RNA, 25 nt, Human
acaacaugcacgaauaggcuacaca

SEQ ID NO: 804057 - RNA, 21 nt, Human
acacacacacauacacauaua

SEQ ID NO: 804058 - RNA, 21 nt, Human
acacacacauacacauauagc

SEQ ID NO: 804059 - RNA, 24 nt, Human
acacacauccccuucuaugccucu

SEQ ID NO: 804060 - RNA, 19 nt, Human
acacauacacauacauaua

SEQ ID NO: 804061 - RNA, 20 nt, Human
acacauacauauauguauac

SEQ ID NO: 804062 - RNA, 22 nt, Human
acauauuauaacccauauacaa

SEQ ID NO: 804063 - RNA, 23 nt, Human
accacauacagaugaugucugug

SEQ ID NO: 804064 - RNA, 21 nt, Human
accagauuaaugacaccugua

SEQ ID NO: 804065 - RNA, 19 nt, Human
accugaacuaaucacaacc

SEQ ID NO: 804066 - RNA, 21 nt, Human
acugcagcaguacugcagcua

SEQ ID NO: 804067 - RNA, 18 nt, Human
agcaauucuaacuucagc

SEQ ID NO: 804068 - RNA, 18 nt, Human
agcuuaucugucagcaca

SEQ ID NO: 804069 - RNA, 18 nt, Human
aguuacuggacuuggacu

SEQ ID NO: 804070 - RNA, 23 nt, Human
auaauacacaacaugcacgaaua

SEQ ID NO: 804071 - RNA, 23 nt, Human
auacacauacauauauguauaca

SEQ ID NO: 804072 - RNA, 23 nt, Human
auggacagacacuuauaaauacc

SEQ ID NO: 804073 - RNA, 18 nt, Human
auucuacaucuauuccuu

SEQ ID NO: 804074 - RNA, 23 nt, Human
caacacacauccccuucuaugcc

SEQ ID NO: 804075 - RNA, 25 nt, Human
caaguugauaaagcuucauaaaaca

SEQ ID NO: 804076 - RNA, 20 nt, Human
cacacacacauacacauaua

SEQ ID NO: 804077 - RNA, 21 nt, Human
caccauauuggggcacaggau

SEQ ID NO: 804078 - RNA, 22 nt, Human
cacccaaaauacagaacaccca

SEQ ID NO: 804079 - RNA, 21 nt, Human
cacuguacagcuguguguaca

SEQ ID NO: 804080 - RNA, 21 nt, Human
cagaacacccauuuucagauu

SEQ ID NO: 804081 - RNA, 21 nt, Human
cagaacaccuaguaaccugaa

SEQ ID NO: 804082 - RNA, 24 nt, Human
cagauaucaugaaaauaaaguccu

SEQ ID NO: 804083 - RNA, 23 nt, Human
cagcugaguuaauuacgccaugu

SEQ ID NO: 804084 - RNA, 21 nt, Human
caguuacuggacuuggacugu

SEQ ID NO: 804085 - RNA, 18 nt, Human
cauacauauauguauaca

SEQ ID NO: 804086 - RNA, 22 nt, Human
cauaccaggaggcucugaacac

SEQ ID NO: 804087 - RNA, 24 nt, Human
cauggacagacacuuauaaauacc

SEQ ID NO: 804088 - RNA, 25 nt, Human
ccacuccaucagaacaccuaguaac

SEQ ID NO: 804089 - RNA, 20 nt, Human
cccaaaauacagaacaccca

SEQ ID NO: 804090 - RNA, 19 nt, Human
ccuccgccuccuccccagg

SEQ ID NO: 804091 - RNA, 18 nt, Human
ccuccuccccaggcgcgg

SEQ ID NO: 804092 - RNA, 20 nt, Human
cgcgcuccuccagccgcugc

SEQ ID NO: 804093 - RNA, 25 nt, Human
cguguacacacacacauacacauau

SEQ ID NO: 804094 - RNA, 25 nt, Human
cguuauaccaaacugcacacgcaua

SEQ ID NO: 804095 - RNA, 19 nt, Human
cuaccugaauaacaucaua

SEQ ID NO: 804096 - RNA, 18 nt, Human
cuccuccagccgcugccu

SEQ ID NO: 804097 - RNA, 20 nt, Human
cuggugauuuuucucaaccg

SEQ ID NO: 804098 - RNA, 22 nt, Human
cuguucucucaucacccuuccc

SEQ ID NO: 804099 - RNA, 18 nt, Human
gacgcagcgacugccagc

SEQ ID NO: 804100 - RNA, 21 nt, Human
gagcuuaucugucagcacauc

SEQ ID NO: 804101 - RNA, 23 nt, Human
gagcuuaucugucagcacauccu

SEQ ID NO: 804102 - RNA, 21 nt, Human
gcugcagucagcaaggguccu

SEQ ID NO: 804103 - RNA, 19 nt, Human
gcugccuccgccuccuccc

SEQ ID NO: 804104 - RNA, 21 nt, Human
gcugccuccgccuccucccca

SEQ ID NO: 804105 - RNA, 18 nt, Human
ggcggcggcgggagcggg

SEQ ID NO: 804106 - RNA, 21 nt, Human
ggcgggcggcggcgggagcgg

SEQ ID NO: 804107 - RNA, 22 nt, Human
guggguggaucacugcagcagu

SEQ ID NO: 804108 - RNA, 24 nt, Human
guguacacacacacauacacauag

SEQ ID NO: 804109 - RNA, 23 nt, Human
uaaaaaggaacuauccagaauua

SEQ ID NO: 804110 - RNA, 21 nt, Human
uaaaacaguacuaaaaaggaa

SEQ ID NO: 804111 - RNA, 21 nt, Human
uaaaugaaacugucuucccuc

SEQ ID NO: 804112 - RNA, 21 nt, Human
uaacuggugacccaaagacau

SEQ ID NO: 804113 - RNA, 22 nt, Human
uaagaagguaacuggugaccca

SEQ ID NO: 804114 - RNA, 22 nt, Human
uacacacacacauacacauaua

SEQ ID NO: 804115 - RNA, 26 nt, Human
uacacacacacauacacauauagcug

SEQ ID NO: 804116 - RNA, 22 nt, Human
uacacauauagcuggacacuac

SEQ ID NO: 804117 - RNA, 18 nt, Human
uacauauauguauacaua

SEQ ID NO: 804118 - RNA, 24 nt, Human
uacauauauguauacauauauaca

SEQ ID NO: 804119 - RNA, 24 nt, Human
uagagcacugacuccacguuauac

SEQ ID NO: 804120 - RNA, 22 nt, Human
uauauaauacacaacaugcacg

SEQ ID NO: 804121 - RNA, 22 nt, Human
uauauacacauacacauacaua

SEQ ID NO: 804122 - RNA, 26 nt, Human
uauauacacauacacauacauauaug

SEQ ID NO: 804123 - RNA, 29 nt, Human
uauauacacauacacauacauauauguag

SEQ ID NO: 804124 - RNA, 22 nt, Human
uauauguauacauauauacaca

SEQ ID NO: 804125 - RNA, 21 nt, Human
uauuauaacccauauacaacc

SEQ ID NO: 804126 - RNA, 22 nt, Human
ucacugcagcaguacugcagcu

SEQ ID NO: 804127 - RNA, 21 nt, Human
ucagaacaccuaguaaccuga

SEQ ID NO: 804128 - RNA, 21 nt, Human
ucagucaagcaauucuaacuu

SEQ ID NO: 804129 - RNA, 24 nt, Human
ucauaccaggaggcucugaacacc

SEQ ID NO: 804130 - RNA, 19 nt, Human
uccacaugauauagaaauu

SEQ ID NO: 804131 - RNA, 22 nt, Human
uccauguagucccauacuuaau

SEQ ID NO: 804132 - RNA, 21 nt, Human
ucccgcgccgcgcgcucagug

SEQ ID NO: 804133 - RNA, 23 nt, Human
uccuccagccgcugccuccgccu

SEQ ID NO: 804134 - RNA, 21 nt, Human
ucgcgcuccuccagccgcugc

SEQ ID NO: 804135 - RNA, 26 nt, Human
ucuauauacacauacacauacauaua

SEQ ID NO: 804136 - RNA, 20 nt, Human
ucuggugauuuuucucaacc

SEQ ID NO: 804137 - RNA, 21 nt, Human
ugacaccuguacaggggccag

SEQ ID NO: 804138 - RNA, 24 nt, Human
ugacccaaagacauacugggacag

SEQ ID NO: 804139 - RNA, 23 nt, Human
ugaggaucaugaagccaaguuga

SEQ ID NO: 804140 - RNA, 22 nt, Human
ugcacguguacacacacacaua

SEQ ID NO: 804141 - RNA, 19 nt, Human
uguacagcuguguguacau

SEQ ID NO: 804142 - RNA, 20 nt, Human
uguauacauauauacacaac

SEQ ID NO: 804143 - RNA, 20 nt, Human
uguauacauauauacacaca

SEQ ID NO: 804144 - RNA, 27 nt, Human
uguauacauauauacacacacuguaca

SEQ ID NO: 804145 - RNA, 24 nt, Human
uguauuacauauuauaacccauau

SEQ ID NO: 804146 - RNA, 22 nt, Human
ugucugugaacauuuccccauc

SEQ ID NO: 804147 - RNA, 26 nt, Human
uguguacaugcacguguacacacaca

SEQ ID NO: 804148 - RNA, 23 nt, Human
uucagccaacuggggaaaaacaa

SEQ ID NO: 804149 - RNA, 19 nt, Human
uugguccaauccacaugau

SEQ ID NO: 804150 - RNA, 21 nt, Human
uuguagcagugauuacagaua

SEQ ID NO: 804151 - RNA, 26 nt, Human
uuuaaagugccccuucauguauagca

SEQ ID NO: 804152 - RNA, 23 nt, Human
uuuaagaagguaacuggugaccc

SEQ ID NO: 804153 - RNA, 20 nt, Human
uuuccugauuuaaagugccc

SEQ ID NO: 804154 - RNA, 21 nt, Human
aaaaaucagcccccaaaccca

SEQ ID NO: 804155 - RNA, 23 nt, Human
aaaaaucagcccccaaacccagu

SEQ ID NO: 804156 - RNA, 25 nt, Human
aaacacagcgacaguacauacagcc

SEQ ID NO: 804157 - RNA, 21 nt, Human
aaacucagaacaaaaauacaa

SEQ ID NO: 804158 - RNA, 20 nt, Human
aaacugcuggggcuggcggc

SEQ ID NO: 804159 - RNA, 22 nt, Human
aaagaaauaaaaaucagccccc

SEQ ID NO: 804160 - RNA, 18 nt, Human
aaauuacauugacgagau

SEQ ID NO: 804161 - RNA, 20 nt, Human
aaauuacauugacgagauuu

SEQ ID NO: 804162 - RNA, 18 nt, Human
aacaaaaaaacacagcga

SEQ ID NO: 804163 - RNA, 19 nt, Human
aacacaaaacaaagauccc

SEQ ID NO: 804164 - RNA, 21 nt, Human
aaccaauggcaggcgcucccc

SEQ ID NO: 804165 - RNA, 24 nt, Human
aaccaggcccauucacuaccaacc

SEQ ID NO: 804166 - RNA, 18 nt, Human
aagaaaaaaagcccccaa

SEQ ID NO: 804167 - RNA, 19 nt, Human
aagaaaaaaagcccccaaa

SEQ ID NO: 804168 - RNA, 22 nt, Human
aagaaaaaaagcccccaaagaa

SEQ ID NO: 804169 - RNA, 27 nt, Human
aagaaauaaaaaucagcccccaaaccc

SEQ ID NO: 804170 - RNA, 18 nt, Human
aagacccccugugcaggg

SEQ ID NO: 804171 - RNA, 20 nt, Human
aagcacagcaaacaucguac

SEQ ID NO: 804172 - RNA, 21 nt, Human
aauagaaaccacagaaauuac

SEQ ID NO: 804173 - RNA, 23 nt, Human
aaugucagccaggcggggccuga

SEQ ID NO: 804174 - RNA, 21 nt, Human
acacagguugggugcggccag

SEQ ID NO: 804175 - RNA, 22 nt, Human
acacuggggugggggaggucag

SEQ ID NO: 804176 - RNA, 25 nt, Human
acagacgggcacacacgcacaccac

SEQ ID NO: 804177 - RNA, 24 nt, Human
accaagaaggcggccagcacuggg

SEQ ID NO: 804178 - RNA, 22 nt, Human
accaagaagggagggaaggggg

SEQ ID NO: 804179 - RNA, 18 nt, Human
acgaggcugugggccugg

SEQ ID NO: 804180 - RNA, 22 nt, Human
acgcuauguccauucaccuggc

SEQ ID NO: 804181 - RNA, 19 nt, Human
acuaaagccaaaagcacca

SEQ ID NO: 804182 - RNA, 21 nt, Human
agaagggagggaaggggggug

SEQ ID NO: 804183 - RNA, 21 nt, Human
agaggaaggccagggcagagc

SEQ ID NO: 804184 - RNA, 21 nt, Human
agaggcccugcuggagggggc

SEQ ID NO: 804185 - RNA, 21 nt, Human
agaggcccuggucccccgccu

SEQ ID NO: 804186 - RNA, 18 nt, Human
agcaggggcugagggaug

SEQ ID NO: 804187 - RNA, 23 nt, Human
agcccgcagccccagccugcccu

SEQ ID NO: 804188 - RNA, 18 nt, Human
agcccuggccucaccgcc

SEQ ID NO: 804189 - RNA, 21 nt, Human
agccggcucggguccagcccc

SEQ ID NO: 804190 - RNA, 18 nt, Human
agccucgcucccacuuca

SEQ ID NO: 804191 - RNA, 19 nt, Human
agccuggccccagggaggg

SEQ ID NO: 804192 - RNA, 21 nt, Human
agcugaauagaaaccacagaa

SEQ ID NO: 804193 - RNA, 21 nt, Human
agcugccggcugcucugggag

SEQ ID NO: 804194 - RNA, 20 nt, Human
aggaaggagagcuguggagg

SEQ ID NO: 804195 - RNA, 22 nt, Human
aggccggggggguaaaccagga

SEQ ID NO: 804196 - RNA, 20 nt, Human
aggcuggaggagggggaaau

SEQ ID NO: 804197 - RNA, 24 nt, Human
agggaaggggggugccagcggucc

SEQ ID NO: 804198 - RNA, 18 nt, Human
agggcccagccuugaccc

SEQ ID NO: 804199 - RNA, 19 nt, Human
agggcugggcuggcugggc

SEQ ID NO: 804200 - RNA, 22 nt, Human
agggggaaaugcaaaaugguuc

SEQ ID NO: 804201 - RNA, 19 nt, Human
auacagccauggcccuaca

SEQ ID NO: 804202 - RNA, 24 nt, Human
augaagaaacgcuacugcagccuu

SEQ ID NO: 804203 - RNA, 24 nt, Human
auguccauucaccuggcaggcagc

SEQ ID NO: 804204 - RNA, 21 nt, Human
caaaacaaagaucccacagga

SEQ ID NO: 804205 - RNA, 25 nt, Human
caaaacaaagaucccacaggagagg

SEQ ID NO: 804206 - RNA, 26 nt, Human
caaagaaauaaaaaucagcccccaaa

SEQ ID NO: 804207 - RNA, 20 nt, Human
caagcccagaggaaagacug

SEQ ID NO: 804208 - RNA, 19 nt, Human
cacaccacggucaggaguc

SEQ ID NO: 804209 - RNA, 18 nt, Human
cacagaaauuacauugac

SEQ ID NO: 804210 - RNA, 21 nt, Human
cacagaggaaggccagggcag

SEQ ID NO: 804211 - RNA, 22 nt, Human
cacagcgacaguacauacagcc

SEQ ID NO: 804212 - RNA, 21 nt, Human
caccgccucucacgcuauguc

SEQ ID NO: 804213 - RNA, 21 nt, Human
cacggagggcuggggccucca

SEQ ID NO: 804214 - RNA, 20 nt, Human
cacggcaccgaaaacucaga

SEQ ID NO: 804215 - RNA, 22 nt, Human
cacggcaccgaaaacucagaac

SEQ ID NO: 804216 - RNA, 22 nt, Human
cagacaccagcacaaagaaagg

SEQ ID NO: 804217 - RNA, 23 nt, Human
cagacgggcacacacgcacacca

SEQ ID NO: 804218 - RNA, 24 nt, Human
cagcaggcaccagccagaugcccc

SEQ ID NO: 804219 - RNA, 22 nt, Human
cagcugcccucuggcugccccu

SEQ ID NO: 804220 - RNA, 20 nt, Human
caggcccuugggcugccugu

SEQ ID NO: 804221 - RNA, 18 nt, Human
cagugcuggcacggggag

SEQ ID NO: 804222 - RNA, 24 nt, Human
cauggauggaaauggaaccaagaa

SEQ ID NO: 804223 - RNA, 21 nt, Human
ccaaagaaauaaaaaucagcc

SEQ ID NO: 804224 - RNA, 22 nt, Human
ccacggucaggagucccgagac

SEQ ID NO: 804225 - RNA, 21 nt, Human
ccagcacuggguggcggguga

SEQ ID NO: 804226 - RNA, 19 nt, Human
ccagcagggcaggugcuga

SEQ ID NO: 804227 - RNA, 22 nt, Human
ccagcccggacuugggcucaca

SEQ ID NO: 804228 - RNA, 20 nt, Human
ccagcggucccccucagccc

SEQ ID NO: 804229 - RNA, 21 nt, Human
ccagggccgggaccgggaggg

SEQ ID NO: 804230 - RNA, 20 nt, Human
ccagggccucucuccuggcc

SEQ ID NO: 804231 - RNA, 22 nt, Human
ccagggccucucuccuggcccu

SEQ ID NO: 804232 - RNA, 22 nt, Human
cccaaagaaauaaaaaucagcc

SEQ ID NO: 804233 - RNA, 20 nt, Human
cccagccuugaccccugcac

SEQ ID NO: 804234 - RNA, 25 nt, Human
cccagccuugaccccugcacguggc

SEQ ID NO: 804235 - RNA, 21 nt, Human
cccagggccacccuguccucc

SEQ ID NO: 804236 - RNA, 18 nt, Human
ccccaggcccauggacuc

SEQ ID NO: 804237 - RNA, 22 nt, Human
ccccagggccacccuguccucc

SEQ ID NO: 804238 - RNA, 19 nt, Human
ccccucagcccgcagcccc

SEQ ID NO: 804239 - RNA, 24 nt, Human
cccgcagccccagccugcccuaga

SEQ ID NO: 804240 - RNA, 18 nt, Human
cccgccccacugcagggc

SEQ ID NO: 804241 - RNA, 22 nt, Human
cccggacuugggcucacacugc

SEQ ID NO: 804242 - RNA, 21 nt, Human
cccggcucggcugcgcucggc

SEQ ID NO: 804243 - RNA, 20 nt, Human
cccuccccacucugcccucc

SEQ ID NO: 804244 - RNA, 20 nt, Human
ccgcagccccagccugcccu

SEQ ID NO: 804245 - RNA, 22 nt, Human
ccgggcuccugggaugcuguac

SEQ ID NO: 804246 - RNA, 19 nt, Human
ccgguggguggcccaggug

SEQ ID NO: 804247 - RNA, 21 nt, Human
ccgguggguggcccaggugga

SEQ ID NO: 804248 - RNA, 26 nt, Human
ccucaccgccucucacgcuaugucca

SEQ ID NO: 804249 - RNA, 19 nt, Human
ccuccggaugcgcgcggcc

SEQ ID NO: 804250 - RNA, 27 nt, Human
ccucgagggcugggcuggcugggccag

SEQ ID NO: 804251 - RNA, 19 nt, Human
ccucuggcugccccuggcc

SEQ ID NO: 804252 - RNA, 19 nt, Human
ccuggagcaccccaugaag

SEQ ID NO: 804253 - RNA, 19 nt, Human
cgacccccgccuggccgcc

SEQ ID NO: 804254 - RNA, 18 nt, Human
cgcuccugggcccggccc

SEQ ID NO: 804255 - RNA, 22 nt, Human
cggagagaggcccugcuggagg

SEQ ID NO: 804256 - RNA, 23 nt, Human
cggaugcgcgcggccugcgcggg

SEQ ID NO: 804257 - RNA, 23 nt, Human
cggcaggaggggugagccugugg

SEQ ID NO: 804258 - RNA, 21 nt, Human
cggcucggcugcgcucggcuc

SEQ ID NO: 804259 - RNA, 27 nt, Human
cgggaggaaggagagcuguggagggaa

SEQ ID NO: 804260 - RNA, 25 nt, Human
cggguccagccccucaggccgggcu

SEQ ID NO: 804261 - RNA, 20 nt, Human
cgucuccacugugccccugc

SEQ ID NO: 804262 - RNA, 21 nt, Human
cgugcagggcuggggcaucgg

SEQ ID NO: 804263 - RNA, 22 nt, Human
cgugucccugucccucaguggc

SEQ ID NO: 804264 - RNA, 23 nt, Human
cguuuccuuucuucaaccuuggu

SEQ ID NO: 804265 - RNA, 19 nt, Human
cuaaaaaaacaaaaaaaca

SEQ ID NO: 804266 - RNA, 21 nt, Human
cucagaacaaaaauacaacca

SEQ ID NO: 804267 - RNA, 23 nt, Human
cucagcccgcagccccagccugc

SEQ ID NO: 804268 - RNA, 19 nt, Human
cuccagcccggacuugggc

SEQ ID NO: 804269 - RNA, 22 nt, Human
cucccagacagcugcuccggcc

SEQ ID NO: 804270 - RNA, 22 nt, Human
cucccucuuguccccagggcca

SEQ ID NO: 804271 - RNA, 23 nt, Human
cucuggcugccccuggccuuggc

SEQ ID NO: 804272 - RNA, 24 nt, Human
cugcccccuugucugggguucugg

SEQ ID NO: 804273 - RNA, 21 nt, Human
cugcuggggcuggcggcccgc

SEQ ID NO: 804274 - RNA, 19 nt, Human
cuggccccagggaggggau

SEQ ID NO: 804275 - RNA, 22 nt, Human
cuggccccagggcaggagcaaa

SEQ ID NO: 804276 - RNA, 20 nt, Human
cuggcccuaggccuggagaa

SEQ ID NO: 804277 - RNA, 21 nt, Human
cuggcugccccuggccuuggc

SEQ ID NO: 804278 - RNA, 19 nt, Human
cuggcugggccagggccgg

SEQ ID NO: 804279 - RNA, 23 nt, Human
cugggccagggccgggaccggga

SEQ ID NO: 804280 - RNA, 23 nt, Human
cugggcuggcugggccagggccg

SEQ ID NO: 804281 - RNA, 20 nt, Human
cuggggcagagcuggcccca

SEQ ID NO: 804282 - RNA, 22 nt, Human
cuucagggacccgucgaccccc

SEQ ID NO: 804283 - RNA, 22 nt, Human
cuuggggccccaggcccaugga

SEQ ID NO: 804284 - RNA, 21 nt, Human
gaacaaaaauacaaccaaugg

SEQ ID NO: 804285 - RNA, 27 nt, Human
gagcggucgcagggcguuuggcgggca

SEQ ID NO: 804286 - RNA, 18 nt, Human
gaggcuggaagcccuggc

SEQ ID NO: 804287 - RNA, 20 nt, Human
gagggaaggggggugccagc

SEQ ID NO: 804288 - RNA, 24 nt, Human
gagggguguccaggcccuugggcu

SEQ ID NO: 804289 - RNA, 18 nt, Human
gcaacaacacagguuggg

SEQ ID NO: 804290 - RNA, 18 nt, Human
gcacacacgcacaccacg

SEQ ID NO: 804291 - RNA, 24 nt, Human
gcacguggagggaccacgggguga

SEQ ID NO: 804292 - RNA, 20 nt, Human
gcaggcaccagccagaugcc

SEQ ID NO: 804293 - RNA, 20 nt, Human
gcagggcaggugcugaggga

SEQ ID NO: 804294 - RNA, 20 nt, Human
gccccacugcagggcccagc

SEQ ID NO: 804295 - RNA, 19 nt, Human
gcccccaaagaaauaaaaa

SEQ ID NO: 804296 - RNA, 20 nt, Human
gcccuaggccuggagaacuc

SEQ ID NO: 804297 - RNA, 21 nt, Human
gcccuggccucaccgccucuc

SEQ ID NO: 804298 - RNA, 22 nt, Human
gcccuggccucaccgccucuca

SEQ ID NO: 804299 - RNA, 24 nt, Human
gcgguacgggcccagagccccugc

SEQ ID NO: 804300 - RNA, 18 nt, Human
gcuccucccucuuguccc

SEQ ID NO: 804301 - RNA, 22 nt, Human
gcugcgcucggcuccgcucggc

SEQ ID NO: 804302 - RNA, 19 nt, Human
gcugggccagggccgggac

SEQ ID NO: 804303 - RNA, 18 nt, Human
ggaaagacugggcagguu

SEQ ID NO: 804304 - RNA, 21 nt, Human
ggaaagacugggcagguuggc

SEQ ID NO: 804305 - RNA, 21 nt, Human
ggaaauggaaccaagaaggga

SEQ ID NO: 804306 - RNA, 22 nt, Human
ggaccacggggugaccucaggg

SEQ ID NO: 804307 - RNA, 23 nt, Human
ggacuccccuccccacucugccc

SEQ ID NO: 804308 - RNA, 22 nt, Human
ggagagcuguggagggaagggc

SEQ ID NO: 804309 - RNA, 18 nt, Human
ggagccucgcucccacuu

SEQ ID NO: 804310 - RNA, 21 nt, Human
ggagggcaagcggccugcaga

SEQ ID NO: 804311 - RNA, 18 nt, Human
ggauggaaauggaaccaa

SEQ ID NO: 804312 - RNA, 20 nt, Human
ggcagagccuggccccaggg

SEQ ID NO: 804313 - RNA, 18 nt, Human
ggcagagcuggccccagg

SEQ ID NO: 804314 - RNA, 18 nt, Human
ggcaggcgcuccccucca

SEQ ID NO: 804315 - RNA, 23 nt, Human
ggccauggcagcaggcaccagcc

SEQ ID NO: 804316 - RNA, 20 nt, Human
ggcgggaggaaggagagcug

SEQ ID NO: 804317 - RNA, 18 nt, Human
ggcucugggccagcuagg

SEQ ID NO: 804318 - RNA, 22 nt, Human
gggaaaugcaaaaugguucagg

SEQ ID NO: 804319 - RNA, 20 nt, Human
gggaaguuggcacguggggu

SEQ ID NO: 804320 - RNA, 18 nt, Human
gggcaggugcugagggag

SEQ ID NO: 804321 - RNA, 21 nt, Human
gggccagggccgggaccggga

SEQ ID NO: 804322 - RNA, 22 nt, Human
gggcgggaggaaggagagcugu

SEQ ID NO: 804323 - RNA, 20 nt, Human
gggcuccacguggccccugc

SEQ ID NO: 804324 - RNA, 18 nt, Human
gggcugggcuggcugggc

SEQ ID NO: 804325 - RNA, 21 nt, Human
ggggaaguuggcacguggggu

SEQ ID NO: 804326 - RNA, 22 nt, Human
ggggcagagcuggccccagggc

SEQ ID NO: 804327 - RNA, 18 nt, Human
gggggaaaugcaaaaugg

SEQ ID NO: 804328 - RNA, 22 nt, Human
gggggcucagaaugucagccag

SEQ ID NO: 804329 - RNA, 23 nt, Human
gggguccacagaagugccgggcg

SEQ ID NO: 804330 - RNA, 24 nt, Human
ggggugagccugugggugggcggg

SEQ ID NO: 804331 - RNA, 19 nt, Human
gggugagagugggggcugg

SEQ ID NO: 804332 - RNA, 19 nt, Human
gguggcugccgggcgcggu

SEQ ID NO: 804333 - RNA, 23 nt, Human
gguugggugcggccagggcuugu

SEQ ID NO: 804334 - RNA, 18 nt, Human
gucaugggauggaguagu

SEQ ID NO: 804335 - RNA, 19 nt, Human
gugccagggccucucuccu

SEQ ID NO: 804336 - RNA, 19 nt, Human
gugggggaaggggguuugg

SEQ ID NO: 804337 - RNA, 18 nt, Human
gugggguuugaaccccuu

SEQ ID NO: 804338 - RNA, 21 nt, Human
uaaaaaaacaaaaaaacacag

SEQ ID NO: 804339 - RNA, 25 nt, Human
uaaaaaaacaaaaaaacacagcgac

SEQ ID NO: 804340 - RNA, 25 nt, Human
uaaacacaaaacaaagaucccacag

SEQ ID NO: 804341 - RNA, 19 nt, Human
uacaaccaauggcaggcgc

SEQ ID NO: 804342 - RNA, 24 nt, Human
uacacaaccauuaugguuaaacac

SEQ ID NO: 804343 - RNA, 20 nt, Human
uacacuaaagccaaaagcac

SEQ ID NO: 804344 - RNA, 21 nt, Human
uagaaagucacagacgggcac

SEQ ID NO: 804345 - RNA, 19 nt, Human
uagcugccggcugcucugg

SEQ ID NO: 804346 - RNA, 23 nt, Human
ucagcccgcagccccagccugcc

SEQ ID NO: 804347 - RNA, 22 nt, Human
ucauccgcgcgcuccugggccc

SEQ ID NO: 804348 - RNA, 22 nt, Human
uccauucaccuggcaggcagcc

SEQ ID NO: 804349 - RNA, 19 nt, Human
ucccaaccaggcccauuca

SEQ ID NO: 804350 - RNA, 21 nt, Human
ucccagacagcugcuccggcc

SEQ ID NO: 804351 - RNA, 22 nt, Human
ucccagacagcugcuccggccu

SEQ ID NO: 804352 - RNA, 23 nt, Human
ucccagacagcugcuccggccuc

SEQ ID NO: 804353 - RNA, 21 nt, Human
uccccacucugcccucccaua

SEQ ID NO: 804354 - RNA, 25 nt, Human
uccccagggccacccuguccuccca

SEQ ID NO: 804355 - RNA, 23 nt, Human
ucccccucagcccgcagccccag

SEQ ID NO: 804356 - RNA, 18 nt, Human
ucccucuuguccccaggg

SEQ ID NO: 804357 - RNA, 20 nt, Human
uccugggcccggcccggccc

SEQ ID NO: 804358 - RNA, 18 nt, Human
ucucuccuggcccuaggc

SEQ ID NO: 804359 - RNA, 18 nt, Human
ucucugggugggggaagg

SEQ ID NO: 804360 - RNA, 20 nt, Human
ucucugggugggggaagggg

SEQ ID NO: 804361 - RNA, 18 nt, Human
ucugcagagggagcgugc

SEQ ID NO: 804362 - RNA, 18 nt, Human
ucuggcagccggcaggag

SEQ ID NO: 804363 - RNA, 19 nt, Human
ucugggugggggaaggggg

SEQ ID NO: 804364 - RNA, 19 nt, Human
ucuguggcacccccuggag

SEQ ID NO: 804365 - RNA, 18 nt, Human
ugaacuaagaaggggucc

SEQ ID NO: 804366 - RNA, 20 nt, Human
ugacgagauuuuuaguauuu

SEQ ID NO: 804367 - RNA, 26 nt, Human
ugagcagguggcacguguuguaauga

SEQ ID NO: 804368 - RNA, 25 nt, Human
ugagccugugggugggcgggcugca

SEQ ID NO: 804369 - RNA, 18 nt, Human
ugaggacauuuccggucc

SEQ ID NO: 804370 - RNA, 23 nt, Human
ugaugugggguggcucugggagg

SEQ ID NO: 804371 - RNA, 19 nt, Human
ugauuuuccccguuuccuu

SEQ ID NO: 804372 - RNA, 24 nt, Human
ugcagagggagcgugccgggauag

SEQ ID NO: 804373 - RNA, 19 nt, Human
ugcagggugagaguggggg

SEQ ID NO: 804374 - RNA, 21 nt, Human
ugccaagaaaaaaagccccca

SEQ ID NO: 804375 - RNA, 18 nt, Human
ugcccaggccgggggggu

SEQ ID NO: 804376 - RNA, 18 nt, Human
ugccucaccaccccucuc

SEQ ID NO: 804377 - RNA, 19 nt, Human
ugcgcgcggccugcgcggg

SEQ ID NO: 804378 - RNA, 18 nt, Human
ugcggggaggggacagga

SEQ ID NO: 804379 - RNA, 23 nt, Human
ugcucccaaccaggcccauucac

SEQ ID NO: 804380 - RNA, 22 nt, Human
ugcuccggccucggcuccagcc

SEQ ID NO: 804381 - RNA, 19 nt, Human
ugcugagggagagagugaa

SEQ ID NO: 804382 - RNA, 20 nt, Human
ugcuggggcuggcggcccgc

SEQ ID NO: 804383 - RNA, 21 nt, Human
ugcuggggcuggcggcccgcc

SEQ ID NO: 804384 - RNA, 27 nt, Human
uggacuccccuccccacucugcccucc

SEQ ID NO: 804385 - RNA, 23 nt, Human
uggagcaccccaugaagagggag

SEQ ID NO: 804386 - RNA, 19 nt, Human
uggaguuugggggugaggu

SEQ ID NO: 804387 - RNA, 18 nt, Human
uggcacaggcaucgagcc

SEQ ID NO: 804388 - RNA, 19 nt, Human
uggcacggggaggggaagu

SEQ ID NO: 804389 - RNA, 22 nt, Human
uggcacggggaggggaaguugg

SEQ ID NO: 804390 - RNA, 24 nt, Human
uggcagcaggcaccagccagaugc

SEQ ID NO: 804391 - RNA, 21 nt, Human
uggcccagguggaagcggcag

SEQ ID NO: 804392 - RNA, 19 nt, Human
uggcccggggcgcgggcuu

SEQ ID NO: 804393 - RNA, 24 nt, Human
uggcccuaggccuggagaacuccc

SEQ ID NO: 804394 - RNA, 24 nt, Human
uggcugggccagggccgggaccgg

SEQ ID NO: 804395 - RNA, 25 nt, Human
uggcuguggcggggccuccgagggg

SEQ ID NO: 804396 - RNA, 21 nt, Human
uggggagggguguccaggccc

SEQ ID NO: 804397 - RNA, 23 nt, Human
uggggcaucggcuggcagcagcg

SEQ ID NO: 804398 - RNA, 23 nt, Human
ugggggaaggggguuuggcacca

SEQ ID NO: 804399 - RNA, 23 nt, Human
ugggggcuggccauggcagcagg

SEQ ID NO: 804400 - RNA, 21 nt, Human
ugggugggcaaugggccaggg

SEQ ID NO: 804401 - RNA, 24 nt, Human
ugggugggggaaggggguuuggca

SEQ ID NO: 804402 - RNA, 21 nt, Human
ugugcagggugagaguggggg

SEQ ID NO: 804403 - RNA, 22 nt, Human
uguggagggaagggccgggcgg

SEQ ID NO: 804404 - RNA, 24 nt, Human
uguggcggggccuccgaggggggc

SEQ ID NO: 804405 - RNA, 20 nt, Human
uguggggggcccugggguag

SEQ ID NO: 804406 - RNA, 24 nt, Human
uucccgaggacaguccuccugggg

SEQ ID NO: 804407 - RNA, 21 nt, Human
uugaccccugcacguggccau

SEQ ID NO: 804408 - RNA, 20 nt, Human
uuggcgggcacccacgccag

SEQ ID NO: 804409 - RNA, 22 nt, Human
uuuggcaccaagaaggcggcca

SEQ ID NO: 804410 - RNA, 18 nt, Human
aaacaugguguacaugua

SEQ ID NO: 804411 - RNA, 21 nt, Human
aacaugguguacauguaugua

SEQ ID NO: 804412 - RNA, 23 nt, Human
acaaugaucucuugccuuuuucc

SEQ ID NO: 804413 - RNA, 20 nt, Human
agacagacaguuccuuggau

SEQ ID NO: 804414 - RNA, 19 nt, Human
agagaaacacagcugacac

SEQ ID NO: 804415 - RNA, 21 nt, Human
aggcauacucaucaaaauuca

SEQ ID NO: 804416 - RNA, 24 nt, Human
agguaugugcaggggacuccugga

SEQ ID NO: 804417 - RNA, 20 nt, Human
auaucaagucuccccaaccc

SEQ ID NO: 804418 - RNA, 21 nt, Human
auaucaagucuccccaacccc

SEQ ID NO: 804419 - RNA, 18 nt, Human
auccagcaagagcuugcc

SEQ ID NO: 804420 - RNA, 25 nt, Human
caagagaaacacagcugacacgaug

SEQ ID NO: 804421 - RNA, 19 nt, Human
caggggacuccuggagauc

SEQ ID NO: 804422 - RNA, 26 nt, Human
ccaauauugauggcguuacuccucuu

SEQ ID NO: 804423 - RNA, 23 nt, Human
ccagaaaaggugucacacuuuug

SEQ ID NO: 804424 - RNA, 19 nt, Human
ccccaaccccaccuggagg

SEQ ID NO: 804425 - RNA, 18 nt, Human
cggaaucaagagaaacac

SEQ ID NO: 804426 - RNA, 21 nt, Human
cgggugucacggaaucaagag

SEQ ID NO: 804427 - RNA, 24 nt, Human
cugcagcaguuuucuuugagacag

SEQ ID NO: 804428 - RNA, 19 nt, Human
cuugccuucugcucagcac

SEQ ID NO: 804429 - RNA, 21 nt, Human
cuuggagggggcagcaccguc

SEQ ID NO: 804430 - RNA, 19 nt, Human
gacucagucugugaagcua

SEQ ID NO: 804431 - RNA, 21 nt, Human
gagaagguaugugcaggggac

SEQ ID NO: 804432 - RNA, 19 nt, Human
gcaagagcuugccuucugc

SEQ ID NO: 804433 - RNA, 19 nt, Human
gcagcaccgucagaccaau

SEQ ID NO: 804434 - RNA, 21 nt, Human
gcagcaguuuucuuugagaca

SEQ ID NO: 804435 - RNA, 20 nt, Human
gcucagcacacuccugggag

SEQ ID NO: 804436 - RNA, 19 nt, Human
ggagauccaagucaaugcg

SEQ ID NO: 804437 - RNA, 24 nt, Human
gguguacauguauguauuuguaua

SEQ ID NO: 804438 - RNA, 23 nt, Human
guguacauguauguauuuguaua

SEQ ID NO: 804439 - RNA, 21 nt, Human
uccuuggagggggcagcaccg

SEQ ID NO: 804440 - RNA, 22 nt, Human
ucuaaaauccacaacagguaaa

SEQ ID NO: 804441 - RNA, 25 nt, Human
ucuccccaaccccaccuggaggggu

SEQ ID NO: 804442 - RNA, 21 nt, Human
ugauuugcuccuuaaaggggc

SEQ ID NO: 804443 - RNA, 23 nt, Human
ugggaauugagcucucccuuuuc

SEQ ID NO: 804444 - RNA, 23 nt, Human
ugugcuuucuuuuguguacaagu

SEQ ID NO: 804445 - RNA, 24 nt, Human
uguggagacucagucugugaagcu

SEQ ID NO: 804446 - RNA, 22 nt, Human
uuccuugcccagaaaagguguc

SEQ ID NO: 804447 - RNA, 23 nt, Human
uuugaccacaggaauucucugca

SEQ ID NO: 804448 - RNA, 20 nt, Human
uuuuguguacaaguuugggg

SEQ ID NO: 804449 - RNA, 23 nt, Human
uuuuguguacaaguuugggguuu

SEQ ID NO: 804450 - RNA, 23 nt, Human
uuuuuuggcauuaaacucuauuu

SEQ ID NO: 804451 - RNA, 18 nt, Human
uuuuuuuuuuuuuuuuug

SEQ ID NO: 804452 - RNA, 22 nt, Human
uuuuuuuuuuuuuuuuuuuggc

SEQ ID NO: 804453 - RNA, 25 nt, Human
uuuuuuuuuuuuuuuuuuuuugggg

SEQ ID NO: 804454 - RNA, 19 nt, Human
aagagaaaccuccacccuu

SEQ ID NO: 804455 - RNA, 23 nt, Human
agaaaaaaaaaagugggagagaa

SEQ ID NO: 804456 - RNA, 24 nt, Human
cacugcucaaccucccugggcuuc

SEQ ID NO: 804457 - RNA, 22 nt, Human
ccuccacccuuccggagcacgu

SEQ ID NO: 804458 - RNA, 23 nt, Human
cgagcccgaggcgcgagcggcgg

SEQ ID NO: 804459 - RNA, 20 nt, Human
cgcucuuuagaccaaggacu

SEQ ID NO: 804460 - RNA, 20 nt, Human
cucccugggcuuccagagca

SEQ ID NO: 804461 - RNA, 21 nt, Human
gaagagaaaccuccacccuuc

SEQ ID NO: 804462 - RNA, 20 nt, Human
gagccgagcccgaggcgcga

SEQ ID NO: 804463 - RNA, 24 nt, Human
ucucacugcucaaccucccugggc

SEQ ID NO: 804464 - RNA, 19 nt, Human
uuagucccuucccucucuc

SEQ ID NO: 804465 - RNA, 24 nt, Human
uuuagaaaaaaaaaagugggagag

SEQ ID NO: 804466 - RNA, 26 nt, Human
aaaaaacuuguaaaauauggugccaa

SEQ ID NO: 804467 - RNA, 22 nt, Human
aaaaauaugccaaucuagacaa

SEQ ID NO: 804468 - RNA, 18 nt, Human
aaaacguuuccugccuuc

SEQ ID NO: 804469 - RNA, 23 nt, Human
aaacagccuaacaauuuaagagu

SEQ ID NO: 804470 - RNA, 26 nt, Human
aaacguuuccugccuucucuuuugug

SEQ ID NO: 804471 - RNA, 21 nt, Human
aaacuuguaaaauauggugcc

SEQ ID NO: 804472 - RNA, 27 nt, Human
aaagaaaaaauacaaauggauagaaaa

SEQ ID NO: 804473 - RNA, 20 nt, Human
aaagccaccacagccaccag

SEQ ID NO: 804474 - RNA, 25 nt, Human
aaauagucuagcucaaaccuagagc

SEQ ID NO: 804475 - RNA, 18 nt, Human
aaauggauagaaaaagau

SEQ ID NO: 804476 - RNA, 23 nt, Human
aacagcuacauacagaucucuac

SEQ ID NO: 804477 - RNA, 22 nt, Human
aaccauucaaaccagucucuga

SEQ ID NO: 804478 - RNA, 24 nt, Human
aauauucauuugauacccccaaaa

SEQ ID NO: 804479 - RNA, 23 nt, Human
aaucaaacauuuucagcccaagg

SEQ ID NO: 804480 - RNA, 21 nt, Human
aaugguaaaaaaaaaaaaaaa

SEQ ID NO: 804481 - RNA, 23 nt, Human
acagcaaccucuucuagcuuucc

SEQ ID NO: 804482 - RNA, 21 nt, Human
acccugagucuuagagaacuc

SEQ ID NO: 804483 - RNA, 22 nt, Human
acuggcagaaaaucucaaagca

SEQ ID NO: 804484 - RNA, 24 nt, Human
agacaagauaaaaaucaaacauuu

SEQ ID NO: 804485 - RNA, 26 nt, Human
agacacgcacacucacacacacucuc

SEQ ID NO: 804486 - RNA, 19 nt, Human
agaggcacgcucgggcugg

SEQ ID NO: 804487 - RNA, 23 nt, Human
agagggcagaggcacgcucggga

SEQ ID NO: 804488 - RNA, 24 nt, Human
agcauauaacuccauauuuucaca

SEQ ID NO: 804489 - RNA, 20 nt, Human
agcgugcacgugcacacaca

SEQ ID NO: 804490 - RNA, 20 nt, Human
agugcagaccugcugaaggu

SEQ ID NO: 804491 - RNA, 20 nt, Human
auaaaaaucaaacauuuuca

SEQ ID NO: 804492 - RNA, 21 nt, Human
augauacagagggcagaggca

SEQ ID NO: 804493 - RNA, 20 nt, Human
augccaaucuagacaagaua

SEQ ID NO: 804494 - RNA, 22 nt, Human
cacaaaguucucuuuccaaaca

SEQ ID NO: 804495 - RNA, 22 nt, Human
cacagccaccaguggagaugga

SEQ ID NO: 804496 - RNA, 21 nt, Human
cagaggcacgcucgggcuggg

SEQ ID NO: 804497 - RNA, 21 nt, Human
caggaagacuguaaagcagug

SEQ ID NO: 804498 - RNA, 18 nt, Human
ccccaccucaaaaugucc

SEQ ID NO: 804499 - RNA, 18 nt, Human
ccuaaauguccugggaau

SEQ ID NO: 804500 - RNA, 23 nt, Human
ccucaaaauguccuucaggaaga

SEQ ID NO: 804501 - RNA, 18 nt, Human
ccucugucaaugauacag

SEQ ID NO: 804502 - RNA, 18 nt, Human
ccuggcauggacaugauc

SEQ ID NO: 804503 - RNA, 21 nt, Human
ccuguccagucuuggccuugg

SEQ ID NO: 804504 - RNA, 22 nt, Human
ccuuuauguagagugcgcacau

SEQ ID NO: 804505 - RNA, 22 nt, Human
cgugcacacacagagacacgca

SEQ ID NO: 804506 - RNA, 31 nt, Human
cgugcacgugcacacacagagacacgcacag

SEQ ID NO: 804507 - RNA, 24 nt, Human
cuagaguuugaagauggcuuaaaa

SEQ ID NO: 804508 - RNA, 21 nt, Human
cuagcuuuccuguuuuguguu

SEQ ID NO: 804509 - RNA, 23 nt, Human
cuaucuuaaguaaaauguuaaaa

SEQ ID NO: 804510 - RNA, 21 nt, Human
cucuucuagcuuuccuguuuu

SEQ ID NO: 804511 - RNA, 19 nt, Human
gauacagcuggaacaggag

SEQ ID NO: 804512 - RNA, 24 nt, Human
gauguuuacaguauacaguggggg

SEQ ID NO: 804513 - RNA, 21 nt, Human
gauuucgcaaggaggaaaaaa

SEQ ID NO: 804514 - RNA, 18 nt, Human
gcuggcacaaaugcagaa

SEQ ID NO: 804515 - RNA, 25 nt, Human
ggaaaaaaacuuguaaaauauggug

SEQ ID NO: 804516 - RNA, 19 nt, Human
ggggaaaaacuugguagca

SEQ ID NO: 804517 - RNA, 23 nt, Human
ggugagauggguucuggugucag

SEQ ID NO: 804518 - RNA, 19 nt, Human
uaaagccccuuggccuuuc

SEQ ID NO: 804519 - RNA, 20 nt, Human
uaagaguuaugaauguagua

SEQ ID NO: 804520 - RNA, 18 nt, Human
uaauucccacccugaguc

SEQ ID NO: 804521 - RNA, 20 nt, Human
uacaaaggacaucuaacaag

SEQ ID NO: 804522 - RNA, 20 nt, Human
uacagaucucuacaggaacc

SEQ ID NO: 804523 - RNA, 18 nt, Human
uacagccucugucaauga

SEQ ID NO: 804524 - RNA, 26 nt, Human
uacaguauacaguggggggaagcaag

SEQ ID NO: 804525 - RNA, 19 nt, Human
uagagucaacugucaguuc

SEQ ID NO: 804526 - RNA, 23 nt, Human
uagaguuugaagauggcuuaaaa

SEQ ID NO: 804527 - RNA, 22 nt, Human
uagauuacaaacucaaggauau

SEQ ID NO: 804528 - RNA, 22 nt, Human
uaguaaaagauaaagccccuug

SEQ ID NO: 804529 - RNA, 22 nt, Human
uaguuuaacuggcagaaaaucc

SEQ ID NO: 804530 - RNA, 23 nt, Human
uauaauauucauuugauaccccc

SEQ ID NO: 804531 - RNA, 23 nt, Human
uaucugauacagcuggaacagga

SEQ ID NO: 804532 - RNA, 18 nt, Human
uaugccaccuuccugcug

SEQ ID NO: 804533 - RNA, 18 nt, Human
ucaaaccagucucugagc

SEQ ID NO: 804534 - RNA, 20 nt, Human
uccaacaauccaaagccacc

SEQ ID NO: 804535 - RNA, 22 nt, Human
uccagccagauguagccaaaug

SEQ ID NO: 804536 - RNA, 19 nt, Human
uccauaccaacuuccaaga

SEQ ID NO: 804537 - RNA, 20 nt, Human
ucucugagcuuugaaggccc

SEQ ID NO: 804538 - RNA, 26 nt, Human
ucuuagagaacucagccauagccuaa

SEQ ID NO: 804539 - RNA, 19 nt, Human
ucuucuagcuuuccuguuu

SEQ ID NO: 804540 - RNA, 18 nt, Human
ucuuucacugggucgggg

SEQ ID NO: 804541 - RNA, 23 nt, Human
ucuuucuuaauuaacuuccaagu

SEQ ID NO: 804542 - RNA, 22 nt, Human
ugaagcccaguuauauggcccu

SEQ ID NO: 804543 - RNA, 18 nt, Human
ugaaggugauggucuucc

SEQ ID NO: 804544 - RNA, 19 nt, Human
ugacacauaggagaauaaa

SEQ ID NO: 804545 - RNA, 19 nt, Human
ugcagaaaugcccaggcuu

SEQ ID NO: 804546 - RNA, 18 nt, Human
ugccauuuuaagccacag

SEQ ID NO: 804547 - RNA, 22 nt, Human
ugcuagaguuugaagauggcuu

SEQ ID NO: 804548 - RNA, 19 nt, Human
uggauagaaaaagauacaa

SEQ ID NO: 804549 - RNA, 23 nt, Human
uggcacaaaugcagaaaugcccc

SEQ ID NO: 804550 - RNA, 18 nt, Human
uguaacuagauuacaaac

SEQ ID NO: 804551 - RNA, 22 nt, Human
uguagccaaaugucuaauggac

SEQ ID NO: 804552 - RNA, 21 nt, Human
uguaugccuuacuucuguaac

SEQ ID NO: 804553 - RNA, 19 nt, Human
ugugagaagaggaaaaaaa

SEQ ID NO: 804554 - RNA, 25 nt, Human
uguggugagauggguucugguguca

SEQ ID NO: 804555 - RNA, 21 nt, Human
uguguguguaugccuuacuuc

SEQ ID NO: 804556 - RNA, 19 nt, Human
uuaaauagccuauaggaac

SEQ ID NO: 804557 - RNA, 22 nt, Human
uuaaauagccuauaggaacucc

SEQ ID NO: 804558 - RNA, 25 nt, Human
uuaacuggcagaaaaucucaaagca

SEQ ID NO: 804559 - RNA, 21 nt, Human
uuagagaacucagccauagcc

SEQ ID NO: 804560 - RNA, 19 nt, Human
uuccccugcugaugacucc

SEQ ID NO: 804561 - RNA, 27 nt, Human
uucgcaaggaggaaaaaagcaauuacc

SEQ ID NO: 804562 - RNA, 21 nt, Human
uucucuuuccaaacauacagc

SEQ ID NO: 804563 - RNA, 23 nt, Human
uugaaggcccccccaccucaaaa

SEQ ID NO: 804564 - RNA, 22 nt, Human
uugccuacuaguaaaagauaaa

SEQ ID NO: 804565 - RNA, 26 nt, Human
uuucuuaauuaacuuccaagugaaca

SEQ ID NO: 804566 - RNA, 21 nt, Human
uuuguguguguguaugccuua

SEQ ID NO: 804567 - RNA, 22 nt, Human
aaagauggaguucugagaaaaa

SEQ ID NO: 804568 - RNA, 25 nt, Human
aaagcaaacauuaaaacaguaaugu

SEQ ID NO: 804569 - RNA, 21 nt, Human
aaaugaaagccuucauagaaa

SEQ ID NO: 804570 - RNA, 22 nt, Human
aagcaaacauuaaaacagggaa

SEQ ID NO: 804571 - RNA, 21 nt, Human
acccugaaaucuccguaucuu

SEQ ID NO: 804572 - RNA, 21 nt, Human
acugaaaacuucuuuuuuuuu

SEQ ID NO: 804573 - RNA, 24 nt, Human
agcggcgaccgcuccgcccccacg

SEQ ID NO: 804574 - RNA, 21 nt, Human
auagaauaugcugaaccuuga

SEQ ID NO: 804575 - RNA, 18 nt, Human
augaaaaaaaauguaugc

SEQ ID NO: 804576 - RNA, 19 nt, Human
auucucuggagaagguuuu

SEQ ID NO: 804577 - RNA, 20 nt, Human
caaagcaaacauuaaaacag

SEQ ID NO: 804578 - RNA, 23 nt, Human
caucugaagaguacaaagaugga

SEQ ID NO: 804579 - RNA, 23 nt, Human
cauucaacgccgccgcccucucc

SEQ ID NO: 804580 - RNA, 21 nt, Human
cccacgagacccgcagccgcc

SEQ ID NO: 804581 - RNA, 21 nt, Human
cccccacgagacccgcagccg

SEQ ID NO: 804582 - RNA, 18 nt, Human
cccuaaagaaaacugaaa

SEQ ID NO: 804583 - RNA, 24 nt, Human
ccgcccccacgagacccgcagccg

SEQ ID NO: 804584 - RNA, 19 nt, Human
ccgccgcccucuccacccg

SEQ ID NO: 804585 - RNA, 22 nt, Human
cggcagcggcgaccgcuccgcc

SEQ ID NO: 804586 - RNA, 23 nt, Human
cggcggcagcggcgaccgcuccg

SEQ ID NO: 804587 - RNA, 20 nt, Human
cguaucuugacacacacauu

SEQ ID NO: 804588 - RNA, 19 nt, Human
cugaaauauacuuuaaccc

SEQ ID NO: 804589 - RNA, 21 nt, Human
cuucauauagaauaugcugaa

SEQ ID NO: 804590 - RNA, 19 nt, Human
gcccuaaagaaaacugaaa

SEQ ID NO: 804591 - RNA, 24 nt, Human
gcugaaccuugaccauuuuugauu

SEQ ID NO: 804592 - RNA, 23 nt, Human
gggauguacaaaugaaagccuuc

SEQ ID NO: 804593 - RNA, 18 nt, Human
guaucuugacacacacau

SEQ ID NO: 804594 - RNA, 26 nt, Human
uacacugaaauaaagcaauuagaggu

SEQ ID NO: 804595 - RNA, 21 nt, Human
uaccaccuugugaucuucaua

SEQ ID NO: 804596 - RNA, 18 nt, Human
uacccaaaccuucuucac

SEQ ID NO: 804597 - RNA, 19 nt, Human
uaugccacagugucuauau

SEQ ID NO: 804598 - RNA, 22 nt, Human
uauguugcccuaaagaaaacug

SEQ ID NO: 804599 - RNA, 21 nt, Human
ucaaaucccgacccgagcugc

SEQ ID NO: 804600 - RNA, 20 nt, Human
ucaacgccgccgcccucuca

SEQ ID NO: 804601 - RNA, 18 nt, Human
ucagaacugaaaacuucu

SEQ ID NO: 804602 - RNA, 19 nt, Human
uccaggucuugcuugauuc

SEQ ID NO: 804603 - RNA, 21 nt, Human
uccgccacacauucaacgccg

SEQ ID NO: 804604 - RNA, 24 nt, Human
ucuccguaucuugacacacacauu

SEQ ID NO: 804605 - RNA, 20 nt, Human
ugaaauauacuuuaacccuu

SEQ ID NO: 804606 - RNA, 26 nt, Human
ugacacacacauuuuaacggaaaaaa

SEQ ID NO: 804607 - RNA, 26 nt, Human
ugcaguuuacccaaaccuucuucaca

SEQ ID NO: 804608 - RNA, 22 nt, Human
uggagaagguuuugucagacuc

SEQ ID NO: 804609 - RNA, 23 nt, Human
uggaguucugagaaaaaaggguu

SEQ ID NO: 804610 - RNA, 19 nt, Human
ugggaggaaucagauugug

SEQ ID NO: 804611 - RNA, 20 nt, Human
uguaugccacagugucuaua

SEQ ID NO: 804612 - RNA, 19 nt, Human
uguccggcggcgcgcggag

SEQ ID NO: 804613 - RNA, 19 nt, Human
uguccggcggcgcgcggag

SEQ ID NO: 804614 - RNA, 23 nt, Human
uucaucugaagaguacaaagaug

SEQ ID NO: 804615 - RNA, 18 nt, Human
uugcuugauucucuggag

SEQ ID NO: 804616 - RNA, 25 nt, Human
uuuacccaaaccuucuucacaucca

SEQ ID NO: 804617 - RNA, 24 nt, Human
uuuuaaauucaaauauauguugcc

SEQ ID NO: 804618 - RNA, 19 nt, Human
aaaaaguccugcgcccaac

SEQ ID NO: 804619 - RNA, 21 nt, Human
aaaauacaaaacaacaacuaa

SEQ ID NO: 804620 - RNA, 18 nt, Human
aaacaaaacuaaaaaucg

SEQ ID NO: 804621 - RNA, 25 nt, Human
aaacaacaaaauacaaaacaacaac

SEQ ID NO: 804622 - RNA, 21 nt, Human
aaacaacaacuaaaaccaaaa

SEQ ID NO: 804623 - RNA, 20 nt, Human
aaacggaaggugcaggauuc

SEQ ID NO: 804624 - RNA, 22 nt, Human
aaagcaaaagggccagugaggu

SEQ ID NO: 804625 - RNA, 21 nt, Human
aacaaaauacaaaacaacaac

SEQ ID NO: 804626 - RNA, 24 nt, Human
aacaacaaaauacaaaacaacaac

SEQ ID NO: 804627 - RNA, 22 nt, Human
aacuaaaaccaaaaacagccaa

SEQ ID NO: 804628 - RNA, 22 nt, Human
aacuuccuauguauccugacac

SEQ ID NO: 804629 - RNA, 21 nt, Human
aagaagaggagggauauggga

SEQ ID NO: 804630 - RNA, 18 nt, Human
aagcaaaagggccaguga

SEQ ID NO: 804631 - RNA, 25 nt, Human
aaggcagcucugcccugaagcguca

SEQ ID NO: 804632 - RNA, 18 nt, Human
aaguacccuuagagcucc

SEQ ID NO: 804633 - RNA, 23 nt, Human
aauagugcuccaggcaaaagcca

SEQ ID NO: 804634 - RNA, 26 nt, Human
acaacuaaaaccaaaaacagccaaca

SEQ ID NO: 804635 - RNA, 23 nt, Human
acaccgaaucuuccaugccuggc

SEQ ID NO: 804636 - RNA, 22 nt, Human
accccuucuucuccucccucug

SEQ ID NO: 804637 - RNA, 23 nt, Human
accgaaucuuccaugccuggcgu

SEQ ID NO: 804638 - RNA, 24 nt, Human
accgaaucuuccaugccuggcgug

SEQ ID NO: 804639 - RNA, 22 nt, Human
acugucccuaccuccagccacu

SEQ ID NO: 804640 - RNA, 19 nt, Human
agaaaaacggaaggugcag

SEQ ID NO: 804641 - RNA, 23 nt, Human
agaaacuuagcaucgcucuccca

SEQ ID NO: 804642 - RNA, 27 nt, Human
agaauggacacaauugauucccaagua

SEQ ID NO: 804643 - RNA, 18 nt, Human
agagaauucuuguccugc

SEQ ID NO: 804644 - RNA, 20 nt, Human
agcauccugagcugccccuc

SEQ ID NO: 804645 - RNA, 28 nt, Human
agccagguggccccaaaaggauggccuu

SEQ ID NO: 804646 - RNA, 18 nt, Human
agccucuggcucaagccc

SEQ ID NO: 804647 - RNA, 18 nt, Human
aggcaaaagccaggcugg

SEQ ID NO: 804648 - RNA, 25 nt, Human
aggcaaaagccaggcuggugaagga

SEQ ID NO: 804649 - RNA, 19 nt, Human
aggcaggggaugaaggagg

SEQ ID NO: 804650 - RNA, 20 nt, Human
aggcaggggaugaaggaggg

SEQ ID NO: 804651 - RNA, 25 nt, Human
aggcaggggaugaaggaggggcugg

SEQ ID NO: 804652 - RNA, 20 nt, Human
aggcgcaggggaagugaagc

SEQ ID NO: 804653 - RNA, 19 nt, Human
aggcggcggcagcggcggc

SEQ ID NO: 804654 - RNA, 18 nt, Human
agggacaggagcugccgc

SEQ ID NO: 804655 - RNA, 20 nt, Human
auauugucuuugugcugcca

SEQ ID NO: 804656 - RNA, 20 nt, Human
augcaaagaagaggagggau

SEQ ID NO: 804657 - RNA, 19 nt, Human
caaaagccaggcuggugaa

SEQ ID NO: 804658 - RNA, 22 nt, Human
caaaauacaaaacaacaacuaa

SEQ ID NO: 804659 - RNA, 20 nt, Human
caaagugccaugcuaaugca

SEQ ID NO: 804660 - RNA, 21 nt, Human
caaagugccaugcuaaugcaa

SEQ ID NO: 804661 - RNA, 26 nt, Human
caacaacuaaaaccaaaaacagccaa

SEQ ID NO: 804662 - RNA, 21 nt, Human
caaccucucuccagccccaca

SEQ ID NO: 804663 - RNA, 25 nt, Human
cacaaccaacugucccuaccuccag

SEQ ID NO: 804664 - RNA, 18 nt, Human
cacagccugaacccaggg

SEQ ID NO: 804665 - RNA, 23 nt, Human
cacagccugaacccagggacagg

SEQ ID NO: 804666 - RNA, 22 nt, Human
caccccuucuucuccucccucu

SEQ ID NO: 804667 - RNA, 21 nt, Human
caccgaaucuuccaugccugg

SEQ ID NO: 804668 - RNA, 23 nt, Human
caccugcggcucggaagccugag

SEQ ID NO: 804669 - RNA, 24 nt, Human
cacugcguggggacaggaggguuc

SEQ ID NO: 804670 - RNA, 21 nt, Human
cacuggucaggcccuggaagc

SEQ ID NO: 804671 - RNA, 25 nt, Human
cagcccgggacagcacgggcccccu

SEQ ID NO: 804672 - RNA, 19 nt, Human
cagcggacagccagcccaa

SEQ ID NO: 804673 - RNA, 20 nt, Human
cagcucacuuaaggaggcuu

SEQ ID NO: 804674 - RNA, 21 nt, Human
caggaucaggcucccgggaag

SEQ ID NO: 804675 - RNA, 23 nt, Human
cagggcucauuccuuggcugugg

SEQ ID NO: 804676 - RNA, 22 nt, Human
cauaaaguugaaaugugagcac

SEQ ID NO: 804677 - RNA, 19 nt, Human
caugcuaaugcaacaugcu

SEQ ID NO: 804678 - RNA, 19 nt, Human
ccaaaaacagccaacaccc

SEQ ID NO: 804679 - RNA, 23 nt, Human
ccaacugucccuaccuccagcca

SEQ ID NO: 804680 - RNA, 24 nt, Human
ccaacugucccuaccuccagccac

SEQ ID NO: 804681 - RNA, 20 nt, Human
ccacagggcucauuccuugg

SEQ ID NO: 804682 - RNA, 21 nt, Human
ccacagggcucauuccuuggc

SEQ ID NO: 804683 - RNA, 20 nt, Human
ccacugagcccugggcguga

SEQ ID NO: 804684 - RNA, 23 nt, Human
ccacugcagaagagcucucuggc

SEQ ID NO: 804685 - RNA, 26 nt, Human
ccagacccagcaccagccgcacggcu

SEQ ID NO: 804686 - RNA, 21 nt, Human
ccagacccagcaccagccgcc

SEQ ID NO: 804687 - RNA, 23 nt, Human
ccagagccaguccagacccagca

SEQ ID NO: 804688 - RNA, 23 nt, Human
cccacaaccaacugucccuaccu

SEQ ID NO: 804689 - RNA, 18 nt, Human
cccacuggagagaccuca

SEQ ID NO: 804690 - RNA, 19 nt, Human
ccccacaaccucucuccag

SEQ ID NO: 804691 - RNA, 21 nt, Human
cccccugccuccagccuaggc

SEQ ID NO: 804692 - RNA, 26 nt, Human
cccccugccuccagccuaggcguccg

SEQ ID NO: 804693 - RNA, 22 nt, Human
ccccggcaaaaaguccugcgcc

SEQ ID NO: 804694 - RNA, 25 nt, Human
cccgccgccgaggcugcaccggggc

SEQ ID NO: 804695 - RNA, 21 nt, Human
cccuagcuccacacagaggca

SEQ ID NO: 804696 - RNA, 18 nt, Human
cccugggaugguguugcc

SEQ ID NO: 804697 - RNA, 18 nt, Human
ccucgcuuccuccccaca

SEQ ID NO: 804698 - RNA, 21 nt, Human
ccuggaagaggguucccuucc

SEQ ID NO: 804699 - RNA, 27 nt, Human
ccugguagcauccugagcugccccucu

SEQ ID NO: 804700 - RNA, 23 nt, Human
ccuucacggcccaucagcuccag

SEQ ID NO: 804701 - RNA, 22 nt, Human
ccuuuggagaaaaauaggcccc

SEQ ID NO: 804702 - RNA, 24 nt, Human
cgaugcuucuuggagccagguggc

SEQ ID NO: 804703 - RNA, 20 nt, Human
cgugaaaagcaaaagggccc

SEQ ID NO: 804704 - RNA, 21 nt, Human
cuaaaaccaaaaacagccaac

SEQ ID NO: 804705 - RNA, 23 nt, Human
cuaaacaaauagugcuccaggca

SEQ ID NO: 804706 - RNA, 19 nt, Human
cuacgccgcuucggucugc

SEQ ID NO: 804707 - RNA, 20 nt, Human
cuccccacaaccucucucca

SEQ ID NO: 804708 - RNA, 25 nt, Human
cucggaagccugagcccagcccggg

SEQ ID NO: 804709 - RNA, 24 nt, Human
cugcguggggacaggaggguucuu

SEQ ID NO: 804710 - RNA, 21 nt, Human
cugcuuugcccaccugguggg

SEQ ID NO: 804711 - RNA, 18 nt, Human
cuggcacgccacccccac

SEQ ID NO: 804712 - RNA, 20 nt, Human
cuggcgcugcuggacugugg

SEQ ID NO: 804713 - RNA, 21 nt, Human
cuggcgcugcuggacuguggc

SEQ ID NO: 804714 - RNA, 25 nt, Human
cuugacccuagcuccacacagaggc

SEQ ID NO: 804715 - RNA, 20 nt, Human
gaaaagcaaaagggccagug

SEQ ID NO: 804716 - RNA, 22 nt, Human
gaaggggagaugacagagaggc

SEQ ID NO: 804717 - RNA, 24 nt, Human
gagccaguccagacccagcaccag

SEQ ID NO: 804718 - RNA, 21 nt, Human
gaggcggcggcagcggcggcg

SEQ ID NO: 804719 - RNA, 24 nt, Human
gaucacaguuaaaagcuuucuggu

SEQ ID NO: 804720 - RNA, 23 nt, Human
gaugcuucuuggagccagguggc

SEQ ID NO: 804721 - RNA, 19 nt, Human
gcaaaaagcaaucuggcua

SEQ ID NO: 804722 - RNA, 18 nt, Human
gcaggggaugaaggaggg

SEQ ID NO: 804723 - RNA, 20 nt, Human
gcaggggaugaaggaggggc

SEQ ID NO: 804724 - RNA, 22 nt, Human
gcauccucgcuuccuccccaca

SEQ ID NO: 804725 - RNA, 18 nt, Human
gcccugaagcgucacccc

SEQ ID NO: 804726 - RNA, 18 nt, Human
gccuaauuuuucuguaaa

SEQ ID NO: 804727 - RNA, 24 nt, Human
gccuaguggcaggcacgcauccuc

SEQ ID NO: 804728 - RNA, 24 nt, Human
gccucugcaaggccucaagguggg

SEQ ID NO: 804729 - RNA, 20 nt, Human
gcggcagcggcggcgaaacc

SEQ ID NO: 804730 - RNA, 21 nt, Human
gcggcggcagcggcggcgaaa

SEQ ID NO: 804731 - RNA, 19 nt, Human
gcucaggucuguggcaucc

SEQ ID NO: 804732 - RNA, 21 nt, Human
gcuccaggcaaaagccaggcu

SEQ ID NO: 804733 - RNA, 25 nt, Human
ggacauccggcuggugaauguaggg

SEQ ID NO: 804734 - RNA, 19 nt, Human
ggaggcggcggcagcggcg

SEQ ID NO: 804735 - RNA, 19 nt, Human
ggaggcuuuucuguccaca

SEQ ID NO: 804736 - RNA, 22 nt, Human
ggauccgccagagccaguccag

SEQ ID NO: 804737 - RNA, 22 nt, Human
ggcagcggcggcgaaacccgcc

SEQ ID NO: 804738 - RNA, 20 nt, Human
ggccgccucucggccgcucu

SEQ ID NO: 804739 - RNA, 26 nt, Human
ggccguacaagcacagaaaaacggaa

SEQ ID NO: 804740 - RNA, 22 nt, Human
ggccuuuggagaaaaauaggcc

SEQ ID NO: 804741 - RNA, 21 nt, Human
ggcgagcugauggggccuuga

SEQ ID NO: 804742 - RNA, 21 nt, Human
ggcggcagcggcggcgaaacc

SEQ ID NO: 804743 - RNA, 22 nt, Human
gggaaauaugcaaagaagagga

SEQ ID NO: 804744 - RNA, 18 nt, Human
gggcugggaaggggagau

SEQ ID NO: 804745 - RNA, 21 nt, Human
gggcuugcggcggcgccgccg

SEQ ID NO: 804746 - RNA, 20 nt, Human
ggggcgggggaagggggcgg

SEQ ID NO: 804747 - RNA, 18 nt, Human
ggucccggcgagcugaug

SEQ ID NO: 804748 - RNA, 25 nt, Human
ggugaaggaggcaggggaugaagga

SEQ ID NO: 804749 - RNA, 19 nt, Human
gucccaugcucucacugca

SEQ ID NO: 804750 - RNA, 25 nt, Human
guccugaaugguccacagagaaggc

SEQ ID NO: 804751 - RNA, 20 nt, Human
guggugcaaauacacacugc

SEQ ID NO: 804752 - RNA, 22 nt, Human
uaaaacaacaaaauacaaaaca

SEQ ID NO: 804753 - RNA, 20 nt, Human
uaaaaccaaaaacagccaac

SEQ ID NO: 804754 - RNA, 24 nt, Human
uaaaaccaaaaacagccaacaccc

SEQ ID NO: 804755 - RNA, 25 nt, Human
uaaaaccaaaaacagccaacaccca

SEQ ID NO: 804756 - RNA, 20 nt, Human
uaaaaggcagcucugcccug

SEQ ID NO: 804757 - RNA, 25 nt, Human
uaaaaggcagcucugcccugaagcg

SEQ ID NO: 804758 - RNA, 24 nt, Human
uacacugcguggggacaggagggu

SEQ ID NO: 804759 - RNA, 22 nt, Human
uacugguccacauuuaguguuc

SEQ ID NO: 804760 - RNA, 18 nt, Human
uagaagccgcagggcugc

SEQ ID NO: 804761 - RNA, 22 nt, Human
uagcaaaaccugagucugcauc

SEQ ID NO: 804762 - RNA, 23 nt, Human
uagcaucgcucucccagagugaa

SEQ ID NO: 804763 - RNA, 23 nt, Human
uaggggagguuucaccuuuagau

SEQ ID NO: 804764 - RNA, 18 nt, Human
ucacugcagcgaggcagg

SEQ ID NO: 804765 - RNA, 23 nt, Human
ucacuuggccgccucucggccgc

SEQ ID NO: 804766 - RNA, 23 nt, Human
ucaggcucccgggaaggccgcac

SEQ ID NO: 804767 - RNA, 19 nt, Human
uccaaaauuaccuuucacu

SEQ ID NO: 804768 - RNA, 21 nt, Human
uccaaaauuaccuuucacuug

SEQ ID NO: 804769 - RNA, 22 nt, Human
uccagccccacaaccaacuguc

SEQ ID NO: 804770 - RNA, 19 nt, Human
ucccaaguacccuuagagc

SEQ ID NO: 804771 - RNA, 21 nt, Human
ucccaaguacccuuagagcuc

SEQ ID NO: 804772 - RNA, 18 nt, Human
ucccacuggagagaccuc

SEQ ID NO: 804773 - RNA, 18 nt, Human
ucccaugcucucacugca

SEQ ID NO: 804774 - RNA, 19 nt, Human
uccccaagaccagcgaugc

SEQ ID NO: 804775 - RNA, 19 nt, Human
uccccacaaccucucucca

SEQ ID NO: 804776 - RNA, 24 nt, Human
uccccacaaccucucuccagcccc

SEQ ID NO: 804777 - RNA, 21 nt, Human
ucccuaccuccagccacuagg

SEQ ID NO: 804778 - RNA, 23 nt, Human
ucccugggaugguguugccuaag

SEQ ID NO: 804779 - RNA, 21 nt, Human
uccgccaggaucaggcucccg

SEQ ID NO: 804780 - RNA, 21 nt, Human
uccgcuccccgcagguuucug

SEQ ID NO: 804781 - RNA, 18 nt, Human
uccugggccacugagccc

SEQ ID NO: 804782 - RNA, 18 nt, Human
uccugggccacugagccc

SEQ ID NO: 804783 - RNA, 20 nt, Human
uccugggucccaggguggac

SEQ ID NO: 804784 - RNA, 26 nt, Human
ucggaagccugagcccagcccgggac

SEQ ID NO: 804785 - RNA, 21 nt, Human
ucucccagagugaauagaagc

SEQ ID NO: 804786 - RNA, 22 nt, Human
ucucccugggaugguguugccu

SEQ ID NO: 804787 - RNA, 19 nt, Human
ucuguaaacauaaaacugc

SEQ ID NO: 804788 - RNA, 20 nt, Human
ucuguaaacauaaaacugcu

SEQ ID NO: 804789 - RNA, 24 nt, Human
ucuguaaacauaaaacugcucuua

SEQ ID NO: 804790 - RNA, 20 nt, Human
ugaaggaggcaggggaugaa

SEQ ID NO: 804791 - RNA, 21 nt, Human
ugacagagaggcuucacagag

SEQ ID NO: 804792 - RNA, 26 nt, Human
ugagcacauagcaaaaccugagucug

SEQ ID NO: 804793 - RNA, 21 nt, Human
ugagcagagugccugaucaca

SEQ ID NO: 804794 - RNA, 24 nt, Human
ugagcccugggcgugaaaagcaaa

SEQ ID NO: 804795 - RNA, 20 nt, Human
ugaguggggaggagggagga

SEQ ID NO: 804796 - RNA, 24 nt, Human
ugcaaaaagcaaucuggcuaaagg

SEQ ID NO: 804797 - RNA, 20 nt, Human
ugcaaagagaacuaaacaaa

SEQ ID NO: 804798 - RNA, 24 nt, Human
ugcaccggggcuugcggcggcgcc

SEQ ID NO: 804799 - RNA, 24 nt, Human
ugcagcgaggcagguuaaucuguu

SEQ ID NO: 804800 - RNA, 20 nt, Human
uggcacgccacccccacugg

SEQ ID NO: 804801 - RNA, 25 nt, Human
uggcaggcacgcauccucgcuuccu

SEQ ID NO: 804802 - RNA, 21 nt, Human
uggcauccagagauaaaaggc

SEQ ID NO: 804803 - RNA, 18 nt, Human
uggcuaaagggauuuggg

SEQ ID NO: 804804 - RNA, 20 nt, Human
uggcucaagcccgauuacga

SEQ ID NO: 804805 - RNA, 18 nt, Human
uggcugggacucagcucc

SEQ ID NO: 804806 - RNA, 20 nt, Human
ugggaaggggagaugacaga

SEQ ID NO: 804807 - RNA, 18 nt, Human
uggggaggagggaggagg

SEQ ID NO: 804808 - RNA, 19 nt, Human
uggggaggagggaggaggu

SEQ ID NO: 804809 - RNA, 23 nt, Human
uggggaggagggaggaggugaag

SEQ ID NO: 804810 - RNA, 19 nt, Human
uggggccuugagaggcgcc

SEQ ID NO: 804811 - RNA, 19 nt, Human
uggggggcgggggaagggg

SEQ ID NO: 804812 - RNA, 18 nt, Human
uggugaauguaggggagg

SEQ ID NO: 804813 - RNA, 22 nt, Human
uguggcccgcagccugagcacc

SEQ ID NO: 804814 - RNA, 20 nt, Human
uuauuuuuucaaaacaaaac

SEQ ID NO: 804815 - RNA, 21 nt, Human
uuccugauagucaaccacagg

SEQ ID NO: 804816 - RNA, 18 nt, Human
uugacccuagcuccacac

SEQ ID NO: 804817 - RNA, 22 nt, Human
uugauacugguccacauuuagu

SEQ ID NO: 804818 - RNA, 22 nt, Human
uuggcugggacucagcucccca

SEQ ID NO: 804819 - RNA, 24 nt, Human
aagaauacagaguauuaucacagc

SEQ ID NO: 804820 - RNA, 23 nt, Human
agacagaaauauuauacauccuu

SEQ ID NO: 804821 - RNA, 19 nt, Human
agucagcaguugaauucag

SEQ ID NO: 804822 - RNA, 19 nt, Human
auuuacauagcuuuuccca

SEQ ID NO: 804823 - RNA, 21 nt, Human
caacuccauaggaaaauagau

SEQ ID NO: 804824 - RNA, 24 nt, Human
caaguaaaugccaacauuuaacac

SEQ ID NO: 804825 - RNA, 22 nt, Human
cacuggaaaaaaaaaaaaaaau

SEQ ID NO: 804826 - RNA, 21 nt, Human
cagaauauaugcacagcacug

SEQ ID NO: 804827 - RNA, 25 nt, Human
cauaauagaaacaacuccauaggaa

SEQ ID NO: 804828 - RNA, 24 nt, Human
cgcaaacauaguauauuuaaaaua

SEQ ID NO: 804829 - RNA, 22 nt, Human
gucaauacaaguaaaugccaac

SEQ ID NO: 804830 - RNA, 21 nt, Human
guugaucuuaaaacuaagcac

SEQ ID NO: 804831 - RNA, 21 nt, Human
uacaagcaaauauuuucaggg

SEQ ID NO: 804832 - RNA, 24 nt, Human
uagauaggcacaaaaauucagcca

SEQ ID NO: 804833 - RNA, 27 nt, Human
uagauaggcacaaaaauucagccacug

SEQ ID NO: 804834 - RNA, 23 nt, Human
uaggacaucaacaauguuuccca

SEQ ID NO: 804835 - RNA, 23 nt, Human
uauaaauaccugacaagcaaacc

SEQ ID NO: 804836 - RNA, 24 nt, Human
ugcacagcacuggaaaaaaaaaaa

SEQ ID NO: 804837 - RNA, 18 nt, Human
ugccuaguaaguacagga

SEQ ID NO: 804838 - RNA, 18 nt, Human
uuaaaauauauuuagcag

SEQ ID NO: 804839 - RNA, 23 nt, Human
uuaucacagcauucaguuuacaa

SEQ ID NO: 804840 - RNA, 24 nt, Human
uucaggggaaaaaaucacauaaga

SEQ ID NO: 804841 - RNA, 18 nt, Human
uugaucuuaaaacuaagc

SEQ ID NO: 804842 - RNA, 23 nt, Human
uuggucaauacaaguaaaugcca

SEQ ID NO: 804843 - RNA, 21 nt, Human
uuuaaaauauauuuagcagca

SEQ ID NO: 804844 - RNA, 19 nt, Human
uuuauuagaauaccauuua

SEQ ID NO: 804845 - RNA, 24 nt, Human
aaaaauuauauuuuuaauuauaga

SEQ ID NO: 804846 - RNA, 18 nt, Human
aaacaagugcuuagcucu

SEQ ID NO: 804847 - RNA, 19 nt, Human
aacaaaaaaacaugcuccu

SEQ ID NO: 804848 - RNA, 22 nt, Human
aaccugugucucauuuuuccuu

SEQ ID NO: 804849 - RNA, 29 nt, Human
aagaagccaaaagcagcagcagugggcac

SEQ ID NO: 804850 - RNA, 26 nt, Human
aagaagccaaaagcagccguuaugaa

SEQ ID NO: 804851 - RNA, 22 nt, Human
aagccaaaagcagcagcaggaa

SEQ ID NO: 804852 - RNA, 23 nt, Human
aagcugauacccauaguggcuca

SEQ ID NO: 804853 - RNA, 18 nt, Human
aagcugcauucagcugga

SEQ ID NO: 804854 - RNA, 18 nt, Human
aagcugcauucagcugga

SEQ ID NO: 804855 - RNA, 22 nt, Human
aaggagcuaauuagaaacaaug

SEQ ID NO: 804856 - RNA, 19 nt, Human
acaaagacagaccuuacag

SEQ ID NO: 804857 - RNA, 20 nt, Human
accaucagcaacauauauga

SEQ ID NO: 804858 - RNA, 24 nt, Human
accuccaagaagccaaaagcagca

SEQ ID NO: 804859 - RNA, 18 nt, Human
acuccagucccauuuucu

SEQ ID NO: 804860 - RNA, 24 nt, Human
acucgcagcucucccuuuccccag

SEQ ID NO: 804861 - RNA, 24 nt, Human
agaaaacaggcacaaaguguucac

SEQ ID NO: 804862 - RNA, 20 nt, Human
agaaaagacauauuugaguu

SEQ ID NO: 804863 - RNA, 18 nt, Human
agaaagaggagacagcug

SEQ ID NO: 804864 - RNA, 21 nt, Human
agaaggagaaaaguuacaauc

SEQ ID NO: 804865 - RNA, 22 nt, Human
agaauaggacaaucgaccuauu

SEQ ID NO: 804866 - RNA, 22 nt, Human
agacaauggaagucgagcacuu

SEQ ID NO: 804867 - RNA, 21 nt, Human
agacucagauucccgaggccu

SEQ ID NO: 804868 - RNA, 19 nt, Human
agauacaaaugcaugagca

SEQ ID NO: 804869 - RNA, 20 nt, Human
agauauuccucacuccaguc

SEQ ID NO: 804870 - RNA, 23 nt, Human
agauuguucauguauggagauag

SEQ ID NO: 804871 - RNA, 24 nt, Human
agauuguucauguauggagauagc

SEQ ID NO: 804872 - RNA, 21 nt, Human
agcaauaaagcacaguagaaa

SEQ ID NO: 804873 - RNA, 19 nt, Human
agcagcagcaggaacuggu

SEQ ID NO: 804874 - RNA, 19 nt, Human
agcugggugcuuagaagcc

SEQ ID NO: 804875 - RNA, 22 nt, Human
aggagacagcugguguggcccu

SEQ ID NO: 804876 - RNA, 19 nt, Human
aggcagagucucuaguugc

SEQ ID NO: 804877 - RNA, 21 nt, Human
aggcagaucccugagaccaca

SEQ ID NO: 804878 - RNA, 21 nt, Human
aggcagccagggacuugggag

SEQ ID NO: 804879 - RNA, 22 nt, Human
aggcagccagggacuugggagc

SEQ ID NO: 804880 - RNA, 23 nt, Human
aggcagccagggacuugggagca

SEQ ID NO: 804881 - RNA, 20 nt, Human
agggacuugggagcagaagg

SEQ ID NO: 804882 - RNA, 22 nt, Human
aguuaccaagaacaugugucac

SEQ ID NO: 804883 - RNA, 19 nt, Human
auaaagcacaguagaaaua

SEQ ID NO: 804884 - RNA, 21 nt, Human
auaacaaaaaaacaugcuccu

SEQ ID NO: 804885 - RNA, 21 nt, Human
auaucguaggcugauccuaaa

SEQ ID NO: 804886 - RNA, 19 nt, Human
augaaggaaccccccugga

SEQ ID NO: 804887 - RNA, 23 nt, Human
auucagcuggaguuccucggaac

SEQ ID NO: 804888 - RNA, 24 nt, Human
auuuucugggcaccaauucccuuc

SEQ ID NO: 804889 - RNA, 21 nt, Human
caaaagaaaagauauuccuca

SEQ ID NO: 804890 - RNA, 19 nt, Human
caaaagcagcagcaggaac

SEQ ID NO: 804891 - RNA, 28 nt, Human
caaaagcagcagcaggaacuggagaccc

SEQ ID NO: 804892 - RNA, 20 nt, Human
caaacacuaggauaacugug

SEQ ID NO: 804893 - RNA, 18 nt, Human
caaagcagccauuaccac

SEQ ID NO: 804894 - RNA, 19 nt, Human
caacaggagaacuuugaca

SEQ ID NO: 804895 - RNA, 19 nt, Human
caacauucacaauaaagaa

SEQ ID NO: 804896 - RNA, 20 nt, Human
caagugcuuagcucuguaca

SEQ ID NO: 804897 - RNA, 21 nt, Human
cacaaagaugcaagcuuuaaa

SEQ ID NO: 804898 - RNA, 18 nt, Human
cacaaggguucgccucca

SEQ ID NO: 804899 - RNA, 22 nt, Human
cacaucacccaagaacaugcua

SEQ ID NO: 804900 - RNA, 20 nt, Human
caccagcaacuaagcugcau

SEQ ID NO: 804901 - RNA, 24 nt, Human
cacuccagucccauuuucugggca

SEQ ID NO: 804902 - RNA, 22 nt, Human
cagaauuucaaauggcuuguca

SEQ ID NO: 804903 - RNA, 22 nt, Human
cagaauuucaaauggcuuguca

SEQ ID NO: 804904 - RNA, 22 nt, Human
cagaucccugagaccacagagg

SEQ ID NO: 804905 - RNA, 19 nt, Human
cagcagcaggaacugguug

SEQ ID NO: 804906 - RNA, 20 nt, Human
cagcagcaggaacugguugg

SEQ ID NO: 804907 - RNA, 18 nt, Human
cagcauuuguccccuggu

SEQ ID NO: 804908 - RNA, 18 nt, Human
cagcuagauuguucaugu

SEQ ID NO: 804909 - RNA, 21 nt, Human
caggaaaagcagcuagcagac

SEQ ID NO: 804910 - RNA, 19 nt, Human
caggcgaagcccagauauc

SEQ ID NO: 804911 - RNA, 26 nt, Human
caguagaaauaaacuggggguaguac

SEQ ID NO: 804912 - RNA, 21 nt, Human
caguuucuauuagaaaaacca

SEQ ID NO: 804913 - RNA, 22 nt, Human
cauaaggaaaacuguucuacau

SEQ ID NO: 804914 - RNA, 22 nt, Human
caucuauggccacucccaagcu

SEQ ID NO: 804915 - RNA, 19 nt, Human
ccaaaaccugagagaccgc

SEQ ID NO: 804916 - RNA, 21 nt, Human
ccaagaagccaaaagcagcag

SEQ ID NO: 804917 - RNA, 20 nt, Human
ccaccccaacaugcuuggau

SEQ ID NO: 804918 - RNA, 19 nt, Human
ccacucccaagcugauacc

SEQ ID NO: 804919 - RNA, 24 nt, Human
ccagagccgcagcguucucucaga

SEQ ID NO: 804920 - RNA, 23 nt, Human
ccaggccuaggcauucaccagca

SEQ ID NO: 804921 - RNA, 19 nt, Human
ccaucagcaacauauauga

SEQ ID NO: 804922 - RNA, 19 nt, Human
cccagagagaccacuggcu

SEQ ID NO: 804923 - RNA, 18 nt, Human
cccagccaggaugaggga

SEQ ID NO: 804924 - RNA, 24 nt, Human
ccucagacucgcaggcagcucaga

SEQ ID NO: 804925 - RNA, 21 nt, Human
ccuccagggagagagagcagg

SEQ ID NO: 804926 - RNA, 22 nt, Human
cucagacccgcagguagaucuc

SEQ ID NO: 804927 - RNA, 23 nt, Human
cucagaccuggcguucaggaaga

SEQ ID NO: 804928 - RNA, 26 nt, Human
cucgcagcucucccuuuccccagcca

SEQ ID NO: 804929 - RNA, 19 nt, Human
cuuccaccccaacaugcuu

SEQ ID NO: 804930 - RNA, 19 nt, Human
gaaaagcagcuagcagaca

SEQ ID NO: 804931 - RNA, 18 nt, Human
gacaaacacauacaaaca

SEQ ID NO: 804932 - RNA, 19 nt, Human
gacaauggaagucgagcac

SEQ ID NO: 804933 - RNA, 23 nt, Human
gaccacagaggcuggccgagaaa

SEQ ID NO: 804934 - RNA, 21 nt, Human
gacuugcaggcgaagcccaga

SEQ ID NO: 804935 - RNA, 20 nt, Human
gagaaaagacauauuugagu

SEQ ID NO: 804936 - RNA, 18 nt, Human
gagaccacagaggcuggc

SEQ ID NO: 804937 - RNA, 21 nt, Human
gagaccacagaggcuggccga

SEQ ID NO: 804938 - RNA, 19 nt, Human
gagcacuggggaaagcagg

SEQ ID NO: 804939 - RNA, 20 nt, Human
gaggcagccagggacuuggg

SEQ ID NO: 804940 - RNA, 23 nt, Human
gagucugaugcaugaguucuaua

SEQ ID NO: 804941 - RNA, 20 nt, Human
gauacaaaugcaugagcaac

SEQ ID NO: 804942 - RNA, 22 nt, Human
gcagaucccugagaccacagag

SEQ ID NO: 804943 - RNA, 22 nt, Human
gccuuggagagggaagugaugg

SEQ ID NO: 804944 - RNA, 27 nt, Human
gcuaagauaaacacugggauguggccc

SEQ ID NO: 804945 - RNA, 20 nt, Human
ggaagggacucugugguucc

SEQ ID NO: 804946 - RNA, 20 nt, Human
ggaagggacucugugguucc

SEQ ID NO: 804947 - RNA, 22 nt, Human
ggacucaauuccacuugcuccu

SEQ ID NO: 804948 - RNA, 18 nt, Human
ggacucugugguuccuuc

SEQ ID NO: 804949 - RNA, 23 nt, Human
ggagauaacauucccaaagcuga

SEQ ID NO: 804950 - RNA, 21 nt, Human
ggcagccagggacuugggagc

SEQ ID NO: 804951 - RNA, 22 nt, Human
gguguggcaauuuaggcagagu

SEQ ID NO: 804952 - RNA, 22 nt, Human
guaaauaacaaaaaaacaugcu

SEQ ID NO: 804953 - RNA, 22 nt, Human
gugcagaggcagccagggacuu

SEQ ID NO: 804954 - RNA, 20 nt, Human
guggcucacagaagcaacag

SEQ ID NO: 804955 - RNA, 21 nt, Human
guguggcaauuuaggcagagu

SEQ ID NO: 804956 - RNA, 20 nt, Human
uaacauucccaaagcugagg

SEQ ID NO: 804957 - RNA, 18 nt, Human
uacaguuaggucauggaa

SEQ ID NO: 804958 - RNA, 19 nt, Human
uacccauaguggcucacag

SEQ ID NO: 804959 - RNA, 20 nt, Human
uaccuggacugagauuagga

SEQ ID NO: 804960 - RNA, 21 nt, Human
uaccuggacugagauuaggaa

SEQ ID NO: 804961 - RNA, 24 nt, Human
uagaaaacaggcacaaaguguuca

SEQ ID NO: 804962 - RNA, 24 nt, Human
uagaauaauacaaacacuaggaua

SEQ ID NO: 804963 - RNA, 19 nt, Human
uagcagacagcgcuccugu

SEQ ID NO: 804964 - RNA, 21 nt, Human
uagcaucaacacuugagauau

SEQ ID NO: 804965 - RNA, 19 nt, Human
uagcugggugcuuagaagc

SEQ ID NO: 804966 - RNA, 19 nt, Human
uagugaagggagucugaug

SEQ ID NO: 804967 - RNA, 23 nt, Human
uauuucuuaauuccuaccuggac

SEQ ID NO: 804968 - RNA, 23 nt, Human
ucaaaagaaaagauauuccucac

SEQ ID NO: 804969 - RNA, 22 nt, Human
ucaggaagauucuagagagcac

SEQ ID NO: 804970 - RNA, 21 nt, Human
uccaaaaccugagagaccgcg

SEQ ID NO: 804971 - RNA, 18 nt, Human
uccacaauugacaaacac

SEQ ID NO: 804972 - RNA, 21 nt, Human
uccacuagaucgucgucucca

SEQ ID NO: 804973 - RNA, 23 nt, Human
uccagggagagagagcaggaaaa

SEQ ID NO: 804974 - RNA, 21 nt, Human
uccccaaagaaaauucauaaa

SEQ ID NO: 804975 - RNA, 22 nt, Human
uccccuggucuucagauuucca

SEQ ID NO: 804976 - RNA, 18 nt, Human
ucccugaaggacucaauu

SEQ ID NO: 804977 - RNA, 19 nt, Human
ucccugagaccacagaggc

SEQ ID NO: 804978 - RNA, 21 nt, Human
uccuaaagacucagauucccg

SEQ ID NO: 804979 - RNA, 20 nt, Human
uccucggaacgggaggacuc

SEQ ID NO: 804980 - RNA, 18 nt, Human
uccuugggaagggacucu

SEQ ID NO: 804981 - RNA, 19 nt, Human
ucgcagcucucccuuuccc

SEQ ID NO: 804982 - RNA, 19 nt, Human
ucgcaggcagcucagaaac

SEQ ID NO: 804983 - RNA, 21 nt, Human
ucguaggcugauccuaaagac

SEQ ID NO: 804984 - RNA, 26 nt, Human
ucuccaaaaccugagagaccgcgaac

SEQ ID NO: 804985 - RNA, 20 nt, Human
ucucccuuuccccagccagg

SEQ ID NO: 804986 - RNA, 21 nt, Human
ucucucagaccuggcguucag

SEQ ID NO: 804987 - RNA, 21 nt, Human
ugaaaaaaggacauuucucac

SEQ ID NO: 804988 - RNA, 25 nt, Human
ugacaaacacauacaaaaggguuuc

SEQ ID NO: 804989 - RNA, 18 nt, Human
ugacauuuauuaaaacca

SEQ ID NO: 804990 - RNA, 22 nt, Human
ugaccaauaccauaaggaaaac

SEQ ID NO: 804991 - RNA, 20 nt, Human
ugagaaaagacauauuugag

SEQ ID NO: 804992 - RNA, 21 nt, Human
ugcaaaaagcauuagugaagg

SEQ ID NO: 804993 - RNA, 19 nt, Human
uggaagauggguuacuuua

SEQ ID NO: 804994 - RNA, 18 nt, Human
uggcagaaagaggagaca

SEQ ID NO: 804995 - RNA, 20 nt, Human
uggccgagaaaccaccagca

SEQ ID NO: 804996 - RNA, 19 nt, Human
ugggaagggacucuguggu

SEQ ID NO: 804997 - RNA, 23 nt, Human
uggggcaagaacaguagggaagg

SEQ ID NO: 804998 - RNA, 21 nt, Human
uggggguacucucaaaagaaa

SEQ ID NO: 804999 - RNA, 23 nt, Human
uguacauacacaugcccugaugc

SEQ ID NO: 805000 - RNA, 24 nt, Human
uguacauacacaugcccugaugca

SEQ ID NO: 805001 - RNA, 19 nt, Human
ugucacccgacaauuaaaa

SEQ ID NO: 805002 - RNA, 19 nt, Human
uuaaagauuagaagggaaa

SEQ ID NO: 805003 - RNA, 22 nt, Human
uuaacaccaaguccuaaaaagc

SEQ ID NO: 805004 - RNA, 19 nt, Human
uuagugaagggagucugau

SEQ ID NO: 805005 - RNA, 23 nt, Human
uucaguuucuauuagaaaaacca

SEQ ID NO: 805006 - RNA, 21 nt, Human
uucaucgugcaaaaucuugcc

SEQ ID NO: 805007 - RNA, 20 nt, Human
uucugcguggggaagagcuc

SEQ ID NO: 805008 - RNA, 23 nt, Human
uuguucauuaauucuccacaacc

SEQ ID NO: 805009 - RNA, 21 nt, Human
uuucuauuagaaaaaccacag

SEQ ID NO: 805010 - RNA, 24 nt, Human
aaaaaaaaaaaaagugacacaagg

SEQ ID NO: 805011 - RNA, 28 nt, Human
aaaaaaaaaaaaagugacacaagguaaa

SEQ ID NO: 805012 - RNA, 22 nt, Human
aaaaaaacaaaacacaacaccu

SEQ ID NO: 805013 - RNA, 23 nt, Human
aaaaaacauuacuuagcacacug

SEQ ID NO: 805014 - RNA, 20 nt, Human
aaaacaaaacacaacaccuc

SEQ ID NO: 805015 - RNA, 20 nt, Human
aaacaaaacacaacaccuca

SEQ ID NO: 805016 - RNA, 21 nt, Human
aaacaagcaaacaugauagaa

SEQ ID NO: 805017 - RNA, 18 nt, Human
aaagaaaaaaagaaaggg

SEQ ID NO: 805018 - RNA, 18 nt, Human
aaauauacaauauguaua

SEQ ID NO: 805019 - RNA, 24 nt, Human
aacaacagcgaaacuccauccccc

SEQ ID NO: 805020 - RNA, 21 nt, Human
aacagcgaaacuccauccccc

SEQ ID NO: 805021 - RNA, 20 nt, Human
aacauggugaaacccugucu

SEQ ID NO: 805022 - RNA, 21 nt, Human
aacauggugaaacccugucuc

SEQ ID NO: 805023 - RNA, 24 nt, Human
aacugaagcaagauagguucacaa

SEQ ID NO: 805024 - RNA, 23 nt, Human
aagaucgugcuauugcacuccag

SEQ ID NO: 805025 - RNA, 24 nt, Human
aagcacaagaaucgcuugaacucg

SEQ ID NO: 805026 - RNA, 24 nt, Human
aauagagugagacccuguuucaaa

SEQ ID NO: 805027 - RNA, 24 nt, Human
aaucacuugaacccgguaggcaga

SEQ ID NO: 805028 - RNA, 20 nt, Human
aaucgcuugaacucgguagg

SEQ ID NO: 805029 - RNA, 24 nt, Human
acaaacacaaaaaaaauuuaagug

SEQ ID NO: 805030 - RNA, 19 nt, Human
acaacagcgaaacuccauc

SEQ ID NO: 805031 - RNA, 20 nt, Human
acaacagcgaaacuccaucc

SEQ ID NO: 805032 - RNA, 20 nt, Human
acagcgaaacuccauccccc

SEQ ID NO: 805033 - RNA, 24 nt, Human
accaacacggagaaacccugucuc

SEQ ID NO: 805034 - RNA, 23 nt, Human
acccugucucuacaaaaauacaa

SEQ ID NO: 805035 - RNA, 24 nt, Human
accugaggucaggaguuugagacc

SEQ ID NO: 805036 - RNA, 24 nt, Human
acuccagccugggcaauagaguga

SEQ ID NO: 805037 - RNA, 23 nt, Human
agaaaaaaaaaaaaaacaaagga

SEQ ID NO: 805038 - RNA, 23 nt, Human
agaaaaaaaaaaaaaacaaagga

SEQ ID NO: 805039 - RNA, 25 nt, Human
agaaaaaaagaaaggguagaaagag

SEQ ID NO: 805040 - RNA, 26 nt, Human
agacaggcagaucaccugaggucagg

SEQ ID NO: 805041 - RNA, 22 nt, Human
agacugggcaacauggugaaac

SEQ ID NO: 805042 - RNA, 24 nt, Human
agacugggcaacauggugaaaccc

SEQ ID NO: 805043 - RNA, 24 nt, Human
agagguugcggugagccaagaucg

SEQ ID NO: 805044 - RNA, 22 nt, Human
agaucaccugaggucaggaguu

SEQ ID NO: 805045 - RNA, 21 nt, Human
agcacaagcaacugacaccuu

SEQ ID NO: 805046 - RNA, 24 nt, Human
agcacuuugggacauccagguggg

SEQ ID NO: 805047 - RNA, 18 nt, Human
agccugaccaacacggag

SEQ ID NO: 805048 - RNA, 22 nt, Human
agccugggcaauagagugagac

SEQ ID NO: 805049 - RNA, 25 nt, Human
agccugggcaauagagugagacccu

SEQ ID NO: 805050 - RNA, 23 nt, Human
agcugggcaugguggugcaugcc

SEQ ID NO: 805051 - RNA, 18 nt, Human
aggaggaaaccaacugaa

SEQ ID NO: 805052 - RNA, 20 nt, Human
aggaguuugagaccagccug

SEQ ID NO: 805053 - RNA, 24 nt, Human
aggcacaagaaucacuugaacccg

SEQ ID NO: 805054 - RNA, 21 nt, Human
aggcagaaggugcagugagcc

SEQ ID NO: 805055 - RNA, 24 nt, Human
aggcagaaggugcagugagccgag

SEQ ID NO: 805056 - RNA, 24 nt, Human
aggcagagguugcggugagccaag

SEQ ID NO: 805057 - RNA, 26 nt, Human
aggcagaucaccugaggucaggaguu

SEQ ID NO: 805058 - RNA, 24 nt, Human
aggcugaagcacaagaaucgcuug

SEQ ID NO: 805059 - RNA, 18 nt, Human
aguccucaagccugugcu

SEQ ID NO: 805060 - RNA, 24 nt, Human
agugcacuccagccugggcaauag

SEQ ID NO: 805061 - RNA, 24 nt, Human
auaaagaauucuuaaaauauacaa

SEQ ID NO: 805062 - RNA, 22 nt, Human
auaaagacucuuuguaagugua

SEQ ID NO: 805063 - RNA, 22 nt, Human
auacuaaaaauguggccaagca

SEQ ID NO: 805064 - RNA, 24 nt, Human
auagagugagacccuguuucaaaa

SEQ ID NO: 805065 - RNA, 20 nt, Human
aucaccugaggucaggaguu

SEQ ID NO: 805066 - RNA, 24 nt, Human
aucaccugaggucaggaguuugag

SEQ ID NO: 805067 - RNA, 24 nt, Human
aucacgccagugcacuccagccug

SEQ ID NO: 805068 - RNA, 24 nt, Human
aucauuaaaaaaacaaaacacaac

SEQ ID NO: 805069 - RNA, 24 nt, Human
aucgugcuauugcacuccagccug

SEQ ID NO: 805070 - RNA, 21 nt, Human
augguccauauaauauuaaaa

SEQ ID NO: 805071 - RNA, 18 nt, Human
auugcacuccagccuggg

SEQ ID NO: 805072 - RNA, 20 nt, Human
auugcacuccagccugggca

SEQ ID NO: 805073 - RNA, 24 nt, Human
auugcacuccagccugggcaacaa

SEQ ID NO: 805074 - RNA, 26 nt, Human
auugcacuccagccugggcaacaaca

SEQ ID NO: 805075 - RNA, 21 nt, Human
caaaaauacaaaaauuagcca

SEQ ID NO: 805076 - RNA, 19 nt, Human
caaaauuagcugggcaugg

SEQ ID NO: 805077 - RNA, 18 nt, Human
caacaacagcgaaacucc

SEQ ID NO: 805078 - RNA, 21 nt, Human
caacaacagcgaaacuccauc

SEQ ID NO: 805079 - RNA, 24 nt, Human
caacacggagaaacccugucucua

SEQ ID NO: 805080 - RNA, 27 nt, Human
caacacggagaaacccugucucuaaua

SEQ ID NO: 805081 - RNA, 22 nt, Human
caacagcgaaacuccauccccc

SEQ ID NO: 805082 - RNA, 22 nt, Human
caacauggugaaacccugucuc

SEQ ID NO: 805083 - RNA, 24 nt, Human
caacauggugaaacccugucucua

SEQ ID NO: 805084 - RNA, 24 nt, Human
caagacaggcagaucaccugaggu

SEQ ID NO: 805085 - RNA, 26 nt, Human
caagacaggcagaucaccugagguca

SEQ ID NO: 805086 - RNA, 20 nt, Human
caauaguacuuagcuuuacc

SEQ ID NO: 805087 - RNA, 21 nt, Human
caauggccaguccacuucuaa

SEQ ID NO: 805088 - RNA, 23 nt, Human
caccugaggucaggaguuugaga

SEQ ID NO: 805089 - RNA, 26 nt, Human
cacgccagugcacuccagccugggca

SEQ ID NO: 805090 - RNA, 19 nt, Human
cacuauauaaagaaaaaaa

SEQ ID NO: 805091 - RNA, 20 nt, Human
cacuauauaaagaaaaaaag

SEQ ID NO: 805092 - RNA, 22 nt, Human
cacuccagccugggcaauagag

SEQ ID NO: 805093 - RNA, 24 nt, Human
cacuccagccugggcaauagagug

SEQ ID NO: 805094 - RNA, 27 nt, Human
cacugccaacaaaugucaacacagaaa

SEQ ID NO: 805095 - RNA, 24 nt, Human
cacuggucuuaaaaaguguuacgc

SEQ ID NO: 805096 - RNA, 21 nt, Human
cagaacuccccugcuucaccu

SEQ ID NO: 805097 - RNA, 24 nt, Human
cagaucaccugaggucaggaguuu

SEQ ID NO: 805098 - RNA, 27 nt, Human
cagaucaccugaggucaggaguuugag

SEQ ID NO: 805099 - RNA, 19 nt, Human
cagccugaccaacacggag

SEQ ID NO: 805100 - RNA, 18 nt, Human
cagccugggcaacaacag

SEQ ID NO: 805101 - RNA, 21 nt, Human
cagcgaaacuccauccccccc

SEQ ID NO: 805102 - RNA, 27 nt, Human
caggaggcugaagcacaagaaucgcuu

SEQ ID NO: 805103 - RNA, 27 nt, Human
caggaggcugaggcacaagaaucacuu

SEQ ID NO: 805104 - RNA, 19 nt, Human
cagugcacuccagccuggg

SEQ ID NO: 805105 - RNA, 22 nt, Human
cagugcacuccagccugggcaa

SEQ ID NO: 805106 - RNA, 23 nt, Human
cagugcacuccagccugggcaau

SEQ ID NO: 805107 - RNA, 24 nt, Human
cagugcacuccagccugggcaaua

SEQ ID NO: 805108 - RNA, 19 nt, Human
caguugaugcuaacuucuu

SEQ ID NO: 805109 - RNA, 21 nt, Human
ccaaauggaauccaaauuguc

SEQ ID NO: 805110 - RNA, 20 nt, Human
ccaggauuccucgcugccga

SEQ ID NO: 805111 - RNA, 21 nt, Human
ccagugcacuccagccugggc

SEQ ID NO: 805112 - RNA, 23 nt, Human
ccagugcacuccagccugggcaa

SEQ ID NO: 805113 - RNA, 24 nt, Human
ccagugcacuccagccugggcaau

SEQ ID NO: 805114 - RNA, 24 nt, Human
ccauaguccuccagccuguuuccc

SEQ ID NO: 805115 - RNA, 23 nt, Human
cccaucugccuaauauuuaggag

SEQ ID NO: 805116 - RNA, 19 nt, Human
cccauggaaucuagcacuu

SEQ ID NO: 805117 - RNA, 19 nt, Human
cccgguaggcagagguugc

SEQ ID NO: 805118 - RNA, 24 nt, Human
ccggaggccaagacaggcagauca

SEQ ID NO: 805119 - RNA, 21 nt, Human
ccuauaaucccagcuacucag

SEQ ID NO: 805120 - RNA, 21 nt, Human
ccuauagucccagcuacucag

SEQ ID NO: 805121 - RNA, 22 nt, Human
ccugaccaacacggagaaaccc

SEQ ID NO: 805122 - RNA, 24 nt, Human
ccugaccaacacggagaaacccug

SEQ ID NO: 805123 - RNA, 22 nt, Human
ccugaggucaggaguuugagac

SEQ ID NO: 805124 - RNA, 24 nt, Human
cgagaucacgccagugcacuccag

SEQ ID NO: 805125 - RNA, 24 nt, Human
cgccagugcacuccagccugggca

SEQ ID NO: 805126 - RNA, 20 nt, Human
cgcugccgauuccacaccgc

SEQ ID NO: 805127 - RNA, 18 nt, Human
cuaaaaauguggccaagc

SEQ ID NO: 805128 - RNA, 19 nt, Human
cuaggagauuagaaauguu

SEQ ID NO: 805129 - RNA, 20 nt, Human
cuauugcacuccagccuggg

SEQ ID NO: 805130 - RNA, 24 nt, Human
cuauugcacuccagccugggcaac

SEQ ID NO: 805131 - RNA, 26 nt, Human
cucauauaacaauauuuuauauuuga

SEQ ID NO: 805132 - RNA, 19 nt, Human
cuccaucccccccuccaaa

SEQ ID NO: 805133 - RNA, 23 nt, Human
cuccgcugagagccuccucaaug

SEQ ID NO: 805134 - RNA, 21 nt, Human
cugggcaacauggugaaaccc

SEQ ID NO: 805135 - RNA, 23 nt, Human
cugggcaacauggugaaacccug

SEQ ID NO: 805136 - RNA, 24 nt, Human
cugggcaacauggugaaacccugu

SEQ ID NO: 805137 - RNA, 23 nt, Human
cuggucuuaaaaaguguuacgcc

SEQ ID NO: 805138 - RNA, 24 nt, Human
cuggucuuaaaaaguguuacgccg

SEQ ID NO: 805139 - RNA, 23 nt, Human
cuugaacucgguaggcagaaggu

SEQ ID NO: 805140 - RNA, 21 nt, Human
gaacucgguaggcagaaggug

SEQ ID NO: 805141 - RNA, 20 nt, Human
gaccauaguccuccagccug

SEQ ID NO: 805142 - RNA, 19 nt, Human
gacccuguuucaaaaagaa

SEQ ID NO: 805143 - RNA, 21 nt, Human
gagcauaacauagacagggca

SEQ ID NO: 805144 - RNA, 22 nt, Human
gaguugauuuuuagucccuauu

SEQ ID NO: 805145 - RNA, 25 nt, Human
gauaaagacucuuuguaaguguaaa

SEQ ID NO: 805146 - RNA, 24 nt, Human
gaucaccugaggucaggaguuuga

SEQ ID NO: 805147 - RNA, 23 nt, Human
gcacuccagccugggcaauagag

SEQ ID NO: 805148 - RNA, 24 nt, Human
gcacuccagccugggcaauagagu

SEQ ID NO: 805149 - RNA, 21 nt, Human
gcagaucaccugaggucagga

SEQ ID NO: 805150 - RNA, 22 nt, Human
gccagugcacuccagccugggc

SEQ ID NO: 805151 - RNA, 26 nt, Human
gccagugcacuccagccugggcaaua

SEQ ID NO: 805152 - RNA, 20 nt, Human
gccuguuucccaguacaaaa

SEQ ID NO: 805153 - RNA, 19 nt, Human
gcgaaacuccauccccccc

SEQ ID NO: 805154 - RNA, 22 nt, Human
gcuauugcacuccagccugggc

SEQ ID NO: 805155 - RNA, 24 nt, Human
gcuauugcacuccagccugggcaa

SEQ ID NO: 805156 - RNA, 23 nt, Human
gcugaagcacaagaaucgcuugg

SEQ ID NO: 805157 - RNA, 21 nt, Human
gcugaucuguccaauaacucc

SEQ ID NO: 805158 - RNA, 18 nt, Human
ggagcuucucugugcucc

SEQ ID NO: 805159 - RNA, 23 nt, Human
ggcaugguggugcaugccuauaa

SEQ ID NO: 805160 - RNA, 24 nt, Human
ggccuauagucccagcuacucagg

SEQ ID NO: 805161 - RNA, 19 nt, Human
ggucaggaguuugagacca

SEQ ID NO: 805162 - RNA, 24 nt, Human
gguggugcaugccuauaaucccag

SEQ ID NO: 805163 - RNA, 18 nt, Human
guauaucugcacuauaua

SEQ ID NO: 805164 - RNA, 23 nt, Human
gugacucacccauggaaucuagc

SEQ ID NO: 805165 - RNA, 20 nt, Human
gugcagugagccgagaucac

SEQ ID NO: 805166 - RNA, 22 nt, Human
guuucaaaaagaaaaaaaaaaa

SEQ ID NO: 805167 - RNA, 23 nt, Human
uaaaaaaacaaaacacaacaccu

SEQ ID NO: 805168 - RNA, 24 nt, Human
uaaaaaaacaaaacacaacaccuc

SEQ ID NO: 805169 - RNA, 21 nt, Human
uaaaaaguguuacgccggagg

SEQ ID NO: 805170 - RNA, 18 nt, Human
uaaaaauacaaaauuagc

SEQ ID NO: 805171 - RNA, 19 nt, Human
uaaaaauacaaaauuagcu

SEQ ID NO: 805172 - RNA, 18 nt, Human
uaaaauauaaucagaugg

SEQ ID NO: 805173 - RNA, 24 nt, Human
uaaagaaaaaaagaaaggguagaa

SEQ ID NO: 805174 - RNA, 20 nt, Human
uaacaaaagguaaaauacug

SEQ ID NO: 805175 - RNA, 22 nt, Human
uaacaaaagguaaaauacuggc

SEQ ID NO: 805176 - RNA, 26 nt, Human
uaacaauauuuuauauuugacagugu

SEQ ID NO: 805177 - RNA, 24 nt, Human
uaaccaaaguccuagaaaaaaguu

SEQ ID NO: 805178 - RNA, 18 nt, Human
uaacuuauucaucaguac

SEQ ID NO: 805179 - RNA, 19 nt, Human
uaagaaaacuucaaaaaug

SEQ ID NO: 805180 - RNA, 19 nt, Human
uacaauagagcauacuaaa

SEQ ID NO: 805181 - RNA, 20 nt, Human
uacaguugaugcuaacuucu

SEQ ID NO: 805182 - RNA, 21 nt, Human
uacauaccauaaauagaugaa

SEQ ID NO: 805183 - RNA, 19 nt, Human
uaggaggaaaccaacugaa

SEQ ID NO: 805184 - RNA, 22 nt, Human
uaggaggaaaccaacugaagca

SEQ ID NO: 805185 - RNA, 21 nt, Human
uaggcagagguugcggugagc

SEQ ID NO: 805186 - RNA, 22 nt, Human
uaggcuaccauuuuaaaguucu

SEQ ID NO: 805187 - RNA, 26 nt, Human
uaguaguaauauuaaaaauaaauuuc

SEQ ID NO: 805188 - RNA, 23 nt, Human
uaguccuccagccuguuucccag

SEQ ID NO: 805189 - RNA, 22 nt, Human
uauugcacuccagccugggcaa

SEQ ID NO: 805190 - RNA, 24 nt, Human
uauugcacuccagccugggcaaca

SEQ ID NO: 805191 - RNA, 22 nt, Human
uauuuugcacacuguauauaaa

SEQ ID NO: 805192 - RNA, 19 nt, Human
ucaaagcugggagcuucuc

SEQ ID NO: 805193 - RNA, 22 nt, Human
ucacaauugaaaaaauuaaagc

SEQ ID NO: 805194 - RNA, 23 nt, Human
ucacgccagugcacuccagccug

SEQ ID NO: 805195 - RNA, 21 nt, Human
ucacuugaacccgguaggcag

SEQ ID NO: 805196 - RNA, 22 nt, Human
ucagcuaagacuuuucucucca

SEQ ID NO: 805197 - RNA, 23 nt, Human
uccagccugggcaauagagugag

SEQ ID NO: 805198 - RNA, 24 nt, Human
uccagccugggcaauagagugaga

SEQ ID NO: 805199 - RNA, 18 nt, Human
uccaucccccccuccaaa

SEQ ID NO: 805200 - RNA, 21 nt, Human
ucccauuuggaauguuuccaa

SEQ ID NO: 805201 - RNA, 27 nt, Human
uccgcugagagccuccucaauggccaa

SEQ ID NO: 805202 - RNA, 26 nt, Human
uccuaaaaaaaaaaaaagugacacaa

SEQ ID NO: 805203 - RNA, 18 nt, Human
uccucgcugccgauucca

SEQ ID NO: 805204 - RNA, 21 nt, Human
ucgcuugaacucgguaggcag

SEQ ID NO: 805205 - RNA, 24 nt, Human
ucgugcuacgaagugagaaacaag

SEQ ID NO: 805206 - RNA, 21 nt, Human
ucuuccauaagaaaacuucaa

SEQ ID NO: 805207 - RNA, 21 nt, Human
ugaaaagaaugaaagugaaaa

SEQ ID NO: 805208 - RNA, 19 nt, Human
ugaagucaauuuucuugag

SEQ ID NO: 805209 - RNA, 21 nt, Human
ugacuaguauuuuaccuuaug

SEQ ID NO: 805210 - RNA, 24 nt, Human
ugagaccagccugaccaacacgga

SEQ ID NO: 805211 - RNA, 22 nt, Human
ugagccaagaucgugcuauugc

SEQ ID NO: 805212 - RNA, 20 nt, Human
ugaggcacaagaaucacuug

SEQ ID NO: 805213 - RNA, 24 nt, Human
ugaggcacaagaaucacuugaacc

SEQ ID NO: 805214 - RNA, 18 nt, Human
ugaggucaggaguuugag

SEQ ID NO: 805215 - RNA, 25 nt, Human
ugaguuuuuccuaaaaaaaaaaaaa

SEQ ID NO: 805216 - RNA, 18 nt, Human
ugcacuccagccugggca

SEQ ID NO: 805217 - RNA, 19 nt, Human
ugcacuccagccugggcaa

SEQ ID NO: 805218 - RNA, 19 nt, Human
ugcacuccagccugggcaa

SEQ ID NO: 805219 - RNA, 20 nt, Human
ugcacuccagccugggcaac

SEQ ID NO: 805220 - RNA, 23 nt, Human
ugccaacaaaugucaacacagaa

SEQ ID NO: 805221 - RNA, 18 nt, Human
ugccuauaaucccagcua

SEQ ID NO: 805222 - RNA, 24 nt, Human
ugccuauaaucccagcuacucagg

SEQ ID NO: 805223 - RNA, 19 nt, Human
uggaacacuuuuaucuaca

SEQ ID NO: 805224 - RNA, 23 nt, Human
uggaauguuuccaacaggaugua

SEQ ID NO: 805225 - RNA, 20 nt, Human
uggauucuaaauuuccaccu

SEQ ID NO: 805226 - RNA, 24 nt, Human
ugggcaacauggugaaacccuguc

SEQ ID NO: 805227 - RNA, 21 nt, Human
ugggcaauagagugagacccu

SEQ ID NO: 805228 - RNA, 22 nt, Human
uggguauaauacacaagucccc

SEQ ID NO: 805229 - RNA, 19 nt, Human
uggucagaguggcucgugc

SEQ ID NO: 805230 - RNA, 20 nt, Human
ugguccauauaauauuaaaa

SEQ ID NO: 805231 - RNA, 22 nt, Human
uggugcaugccuauaaucccag

SEQ ID NO: 805232 - RNA, 24 nt, Human
ugguggugcaugccuauaauccca

SEQ ID NO: 805233 - RNA, 21 nt, Human
uguguauaucugcacuauaua

SEQ ID NO: 805234 - RNA, 22 nt, Human
uuaaaauauauuacaacaucac

SEQ ID NO: 805235 - RNA, 23 nt, Human
uuagaauacuaaaaauguggcca

SEQ ID NO: 805236 - RNA, 24 nt, Human
uuagcugggcaugguggugcaugc

SEQ ID NO: 805237 - RNA, 22 nt, Human
uuaggaggaaaccaacugaagc

SEQ ID NO: 805238 - RNA, 18 nt, Human
uuauaaauguacuucucu

SEQ ID NO: 805239 - RNA, 22 nt, Human
uugauguuuuugaccaagcaug

SEQ ID NO: 805240 - RNA, 22 nt, Human
uugcggugagccaagaucgugc

SEQ ID NO: 805241 - RNA, 18 nt, Human
uuuaccgagaccuauuca

SEQ ID NO: 805242 - RNA, 23 nt, Human
uuuuaucuacaaguuuaaaaaaa

SEQ ID NO: 805243 - RNA, 20 nt, Human
uuuucuaucuuccauaagaa

SEQ ID NO: 805244 - RNA, 20 nt, Human
aaacaaaaauggggcauuga

SEQ ID NO: 805245 - RNA, 19 nt, Human
aagggaggcuggaguacau

SEQ ID NO: 805246 - RNA, 23 nt, Human
acugaacacauaaaagacaugcc

SEQ ID NO: 805247 - RNA, 22 nt, Human
agaagaaaaggacguuucagag

SEQ ID NO: 805248 - RNA, 20 nt, Human
agauaccucagaacaaaaug

SEQ ID NO: 805249 - RNA, 25 nt, Human
aggcaggcugguacaggccggaccc

SEQ ID NO: 805250 - RNA, 19 nt, Human
aggcaggcugguacaggcu

SEQ ID NO: 805251 - RNA, 21 nt, Human
aggugucaaaggccuagaacc

SEQ ID NO: 805252 - RNA, 24 nt, Human
caaaccugcucuuaaaagccacac

SEQ ID NO: 805253 - RNA, 19 nt, Human
caaaggccuagaaccagau

SEQ ID NO: 805254 - RNA, 27 nt, Human
caaauacaaggaaucacacauuuaaau

SEQ ID NO: 805255 - RNA, 24 nt, Human
caaggaagauccagauauucugcc

SEQ ID NO: 805256 - RNA, 20 nt, Human
caauuucagauguaggacac

SEQ ID NO: 805257 - RNA, 23 nt, Human
caccucgguuaaaagaaaaacaa

SEQ ID NO: 805258 - RNA, 20 nt, Human
caguggaauuucucugguug

SEQ ID NO: 805259 - RNA, 26 nt, Human
ccagugagccauucaguugggaugca

SEQ ID NO: 805260 - RNA, 19 nt, Human
ccccuuuaugagaaaugca

SEQ ID NO: 805261 - RNA, 22 nt, Human
cugaacacauaaaagacaugcc

SEQ ID NO: 805262 - RNA, 23 nt, Human
cugauguggacuguguuuccccu

SEQ ID NO: 805263 - RNA, 22 nt, Human
gaacacauaaaagacaugccag

SEQ ID NO: 805264 - RNA, 18 nt, Human
gcucuaaaauccucuggg

SEQ ID NO: 805265 - RNA, 22 nt, Human
gcuggaguacaugauucuucug

SEQ ID NO: 805266 - RNA, 21 nt, Human
gcugguacaggcucccucugg

SEQ ID NO: 805267 - RNA, 23 nt, Human
gugauaggagcaaauacaaggaa

SEQ ID NO: 805268 - RNA, 23 nt, Human
uaaaagaaaaacaaaaauggggc

SEQ ID NO: 805269 - RNA, 20 nt, Human
uaaauuagcaugauagaaac

SEQ ID NO: 805270 - RNA, 24 nt, Human
uaacucauuccucucauucuccuu

SEQ ID NO: 805271 - RNA, 24 nt, Human
uacaaaauccaaggaagauccaga

SEQ ID NO: 805272 - RNA, 19 nt, Human
uacugcaucuuucacucag

SEQ ID NO: 805273 - RNA, 19 nt, Human
uagaaaaaugcauaaccac

SEQ ID NO: 805274 - RNA, 23 nt, Human
uccuccccuuuaugagaaaugca

SEQ ID NO: 805275 - RNA, 19 nt, Human
uccucugggcuuauggcua

SEQ ID NO: 805276 - RNA, 19 nt, Human
uccuggagaaggcaggcug

SEQ ID NO: 805277 - RNA, 18 nt, Human
ugauaggagcaaauacaa

SEQ ID NO: 805278 - RNA, 18 nt, Human
ugcugggcaugaguccca

SEQ ID NO: 805279 - RNA, 21 nt, Human
uguaaaauuccuugcuguaau

SEQ ID NO: 805280 - RNA, 24 nt, Human
uuaacucauuccucucauucuccu

SEQ ID NO: 805281 - RNA, 22 nt, Human
uugcugggcaugagucccaugc

SEQ ID NO: 805282 - RNA, 23 nt, Human
uuucugaaagcuguucuucaggg

SEQ ID NO: 805283 - RNA, 18 nt, Human
uuuuccuaucuacaccuc

SEQ ID NO: 805284 - RNA, 21 nt, Human
aaaaaguaagugccaccgaaa

SEQ ID NO: 805285 - RNA, 19 nt, Human
aaacaaacacaauuagaga

SEQ ID NO: 805286 - RNA, 22 nt, Human
aaacaccuaaauagacauuucu

SEQ ID NO: 805287 - RNA, 20 nt, Human
aaauacauacucucucuaca

SEQ ID NO: 805288 - RNA, 19 nt, Human
aacaagagcacaaaauuca

SEQ ID NO: 805289 - RNA, 22 nt, Human
aaccuuccuccauauuucuuuc

SEQ ID NO: 805290 - RNA, 27 nt, Human
aacgguuugaauguucugaagguuuga

SEQ ID NO: 805291 - RNA, 21 nt, Human
aacuaccagcaacccacuacc

SEQ ID NO: 805292 - RNA, 18 nt, Human
aacuagaaaggaaacaag

SEQ ID NO: 805293 - RNA, 18 nt, Human
aacuuccaucucuugcuc

SEQ ID NO: 805294 - RNA, 20 nt, Human
aacuugcugggauuacaggc

SEQ ID NO: 805295 - RNA, 24 nt, Human
aacuugcugggauuacaggcguga

SEQ ID NO: 805296 - RNA, 19 nt, Human
aagaaacacugcaguugac

SEQ ID NO: 805297 - RNA, 23 nt, Human
aagaggccagagaaauaagagaa

SEQ ID NO: 805298 - RNA, 24 nt, Human
aaggaggccguaacagauaagcac

SEQ ID NO: 805299 - RNA, 22 nt, Human
aaucucugcucacugcaaccuc

SEQ ID NO: 805300 - RNA, 25 nt, Human
aaucugaggcaggaaagggcauggu

SEQ ID NO: 805301 - RNA, 22 nt, Human
aauggacaaaaaaguaucuaaa

SEQ ID NO: 805302 - RNA, 21 nt, Human
aauguaaacaccuaaauagac

SEQ ID NO: 805303 - RNA, 24 nt, Human
aauuuuguauuuuuaguagagaua

SEQ ID NO: 805304 - RNA, 24 nt, Human
acaaagcacaaaggcccucaccag

SEQ ID NO: 805305 - RNA, 21 nt, Human
acagaguuucaguuuccuauu

SEQ ID NO: 805306 - RNA, 18 nt, Human
accaccacaccuggcccc

SEQ ID NO: 805307 - RNA, 22 nt, Human
accauguuuguagaucaugcuc

SEQ ID NO: 805308 - RNA, 19 nt, Human
accgaaaaagcaauaacug

SEQ ID NO: 805309 - RNA, 26 nt, Human
acugcaguugacuguuucauugcauu

SEQ ID NO: 805310 - RNA, 21 nt, Human
agaauggacaaaaaaguaucu

SEQ ID NO: 805311 - RNA, 19 nt, Human
agacaggccaguaggcagg

SEQ ID NO: 805312 - RNA, 18 nt, Human
agacauuaauaagaacaa

SEQ ID NO: 805313 - RNA, 22 nt, Human
agaccugaaauuuaagcccaau

SEQ ID NO: 805314 - RNA, 24 nt, Human
agagauaaaaggaggccguaacag

SEQ ID NO: 805315 - RNA, 18 nt, Human
agauuagaaggcaguaca

SEQ ID NO: 805316 - RNA, 18 nt, Human
agcacaaaauucacuuau

SEQ ID NO: 805317 - RNA, 24 nt, Human
agcagagagugacaugauagggag

SEQ ID NO: 805318 - RNA, 22 nt, Human
agccgccacugacagagagaca

SEQ ID NO: 805319 - RNA, 22 nt, Human
agcuucagauggggaguuuggg

SEQ ID NO: 805320 - RNA, 18 nt, Human
aggaaacaagucugaaua

SEQ ID NO: 805321 - RNA, 22 nt, Human
aggaguuccauauggcuacagc

SEQ ID NO: 805322 - RNA, 19 nt, Human
aggcaggaaagggcauggu

SEQ ID NO: 805323 - RNA, 18 nt, Human
aggggcaaaaaaaguaag

SEQ ID NO: 805324 - RNA, 18 nt, Human
agguauauuuuucccuuc

SEQ ID NO: 805325 - RNA, 20 nt, Human
aguaaaaggcagaggccagc

SEQ ID NO: 805326 - RNA, 25 nt, Human
aguaaaggaaacagaucaaagcugg

SEQ ID NO: 805327 - RNA, 20 nt, Human
aguacaacagaaauuaagag

SEQ ID NO: 805328 - RNA, 21 nt, Human
aguagcuaggauuacaggcau

SEQ ID NO: 805329 - RNA, 23 nt, Human
aguuucaaccauuaacuguuuau

SEQ ID NO: 805330 - RNA, 27 nt, Human
auaauaaugaaaauaagcuuuuguauc

SEQ ID NO: 805331 - RNA, 19 nt, Human
aucaugccuuuggauuucc

SEQ ID NO: 805332 - RNA, 24 nt, Human
augaucugcccgccucagccuccc

SEQ ID NO: 805333 - RNA, 18 nt, Human
augguacuuaauagcuug

SEQ ID NO: 805334 - RNA, 23 nt, Human
auugagaauucguaccagugccu

SEQ ID NO: 805335 - RNA, 22 nt, Human
caaacaaaucaaauacacauug

SEQ ID NO: 805336 - RNA, 26 nt, Human
caacccacuaccuauucucacaaaau

SEQ ID NO: 805337 - RNA, 21 nt, Human
caacucagcuuucucuucuag

SEQ ID NO: 805338 - RNA, 22 nt, Human
caagauuagaaggcaguacaac

SEQ ID NO: 805339 - RNA, 21 nt, Human
cacaagcauacccuuagaggg

SEQ ID NO: 805340 - RNA, 22 nt, Human
cacacaauaugcaucaagcauu

SEQ ID NO: 805341 - RNA, 22 nt, Human
caccaccacgccuggcuaauuu

SEQ ID NO: 805342 - RNA, 19 nt, Human
caccgcccagccugccucc

SEQ ID NO: 805343 - RNA, 23 nt, Human
caccuggccccucauuuucuguu

SEQ ID NO: 805344 - RNA, 24 nt, Human
cacucuuguugcccaggcuggagu

SEQ ID NO: 805345 - RNA, 18 nt, Human
cacugcaaccucugccuc

SEQ ID NO: 805346 - RNA, 21 nt, Human
cacugcaaccucugccucccg

SEQ ID NO: 805347 - RNA, 24 nt, Human
cagaaaaaccuaacuucugauuaa

SEQ ID NO: 805348 - RNA, 24 nt, Human
cagcaacccacuaccuauucuccu

SEQ ID NO: 805349 - RNA, 26 nt, Human
caucacguuacccagucugugguauu

SEQ ID NO: 805350 - RNA, 18 nt, Human
caugcucaggacauagaa

SEQ ID NO: 805351 - RNA, 22 nt, Human
ccaacuugcugggauuacaggc

SEQ ID NO: 805352 - RNA, 22 nt, Human
ccaacuugcugggauuacaggc

SEQ ID NO: 805353 - RNA, 24 nt, Human
ccaacuugcugggauuacaggcgu

SEQ ID NO: 805354 - RNA, 19 nt, Human
ccaagcagugaaacaagaa

SEQ ID NO: 805355 - RNA, 23 nt, Human
ccaagcagugaaacaagaacuga

SEQ ID NO: 805356 - RNA, 21 nt, Human
ccaccgcccagccugccucca

SEQ ID NO: 805357 - RNA, 19 nt, Human
ccacguuggucaggcuggu

SEQ ID NO: 805358 - RNA, 22 nt, Human
ccacguuggucaggcuggucuc

SEQ ID NO: 805359 - RNA, 23 nt, Human
ccacguuggucaggcuggucucg

SEQ ID NO: 805360 - RNA, 18 nt, Human
ccagagcaggcagcagcc

SEQ ID NO: 805361 - RNA, 19 nt, Human
ccagccugccuccagagca

SEQ ID NO: 805362 - RNA, 23 nt, Human
cccguguucaagcaauucuccug

SEQ ID NO: 805363 - RNA, 20 nt, Human
cccuucaaaaauaaacauaa

SEQ ID NO: 805364 - RNA, 24 nt, Human
ccucccguguucaagcaauucucc

SEQ ID NO: 805365 - RNA, 22 nt, Human
ccugaccccagaugaucugccc

SEQ ID NO: 805366 - RNA, 23 nt, Human
ccugaguagcuaggauuacaggc

SEQ ID NO: 805367 - RNA, 24 nt, Human
ccugaguagcuaggauuacaggca

SEQ ID NO: 805368 - RNA, 19 nt, Human
ccuuagaggggcaaaaaaa

SEQ ID NO: 805369 - RNA, 19 nt, Human
cgccacugacagagagaca

SEQ ID NO: 805370 - RNA, 21 nt, Human
cgcccagccugccuccagagc

SEQ ID NO: 805371 - RNA, 22 nt, Human
cggagagacagaagcuagacca

SEQ ID NO: 805372 - RNA, 19 nt, Human
cggccgccaccgcccagcc

SEQ ID NO: 805373 - RNA, 22 nt, Human
cguaacagauaagcacacugua

SEQ ID NO: 805374 - RNA, 18 nt, Human
cuaacuguugcauuggaa

SEQ ID NO: 805375 - RNA, 24 nt, Human
cuaauuuuguauuuuuaguagaga

SEQ ID NO: 805376 - RNA, 19 nt, Human
cuagucuuaauaaucagaa

SEQ ID NO: 805377 - RNA, 23 nt, Human
cucacugcaaccucugccucccg

SEQ ID NO: 805378 - RNA, 26 nt, Human
cuccugaccccagaugaucugcccgc

SEQ ID NO: 805379 - RNA, 24 nt, Human
cuccugaguagcuaggauuacagg

SEQ ID NO: 805380 - RNA, 18 nt, Human
cucuuguugcccaggcug

SEQ ID NO: 805381 - RNA, 21 nt, Human
cugaaucagaaaaaccuaacu

SEQ ID NO: 805382 - RNA, 24 nt, Human
cugaguagcuaggauuacaggcau

SEQ ID NO: 805383 - RNA, 24 nt, Human
cugcaaccucugccucccguguuc

SEQ ID NO: 805384 - RNA, 23 nt, Human
cugccucaggcuccugaguagcu

SEQ ID NO: 805385 - RNA, 19 nt, Human
cuugcccucucuuacccuu

SEQ ID NO: 805386 - RNA, 18 nt, Human
gaacaccaacacuuacag

SEQ ID NO: 805387 - RNA, 20 nt, Human
gaacuuaaggaacaccaaca

SEQ ID NO: 805388 - RNA, 24 nt, Human
gacaaagaaaccaguuaagagaca

SEQ ID NO: 805389 - RNA, 24 nt, Human
gacaaagcacaaaggcccucacca

SEQ ID NO: 805390 - RNA, 24 nt, Human
gaccccagaugaucugcccgccuc

SEQ ID NO: 805391 - RNA, 22 nt, Human
gaguagcuaggauuacaggcau

SEQ ID NO: 805392 - RNA, 24 nt, Human
gaguagcuaggauuacaggcaugc

SEQ ID NO: 805393 - RNA, 22 nt, Human
gaucugagauucagagagacag

SEQ ID NO: 805394 - RNA, 18 nt, Human
gauuacaggcgugagcca

SEQ ID NO: 805395 - RNA, 21 nt, Human
gauuacaggcgugagccacca

SEQ ID NO: 805396 - RNA, 22 nt, Human
gauuacaggcgugagccaccac

SEQ ID NO: 805397 - RNA, 20 nt, Human
gcaccaccacgccuggcuaa

SEQ ID NO: 805398 - RNA, 22 nt, Human
gcaguacaacagaaauuaagag

SEQ ID NO: 805399 - RNA, 22 nt, Human
gcauucucacugagaauucgua

SEQ ID NO: 805400 - RNA, 19 nt, Human
gcccaggcuggaguacaau

SEQ ID NO: 805401 - RNA, 23 nt, Human
gccuaauggagauguuuagguca

SEQ ID NO: 805402 - RNA, 23 nt, Human
gccucagccucccaacuugcugg

SEQ ID NO: 805403 - RNA, 25 nt, Human
gcuggaguacaauggcgcaaucucu

SEQ ID NO: 805404 - RNA, 23 nt, Human
gcuggucucgaacuccugacccc

SEQ ID NO: 805405 - RNA, 19 nt, Human
ggauuacaggcaugcacca

SEQ ID NO: 805406 - RNA, 22 nt, Human
ggauuacaggcaugcaccacca

SEQ ID NO: 805407 - RNA, 19 nt, Human
ggauuacaggcgugagcca

SEQ ID NO: 805408 - RNA, 22 nt, Human
gggaagacggagagacagaagc

SEQ ID NO: 805409 - RNA, 26 nt, Human
gggaagacggagagacagaagcuuca

SEQ ID NO: 805410 - RNA, 19 nt, Human
ggucagagaacugaaagga

SEQ ID NO: 805411 - RNA, 24 nt, Human
guaaauaucucaggagcuaaaauu

SEQ ID NO: 805412 - RNA, 20 nt, Human
guagcuaggauuacaggcau

SEQ ID NO: 805413 - RNA, 26 nt, Human
uaaaacaaacacaauuagagaacuua

SEQ ID NO: 805414 - RNA, 23 nt, Human
uaaaauacaaacaagagcacaaa

SEQ ID NO: 805415 - RNA, 21 nt, Human
uaaaguaaaggaaacagauca

SEQ ID NO: 805416 - RNA, 23 nt, Human
uaaauccaauuaacuaccagcaa

SEQ ID NO: 805417 - RNA, 20 nt, Human
uaacuagaaaggaaacaagu

SEQ ID NO: 805418 - RNA, 23 nt, Human
uaagaacaaaugccaucguuuuc

SEQ ID NO: 805419 - RNA, 20 nt, Human
uaaggaacaccaacacuuac

SEQ ID NO: 805420 - RNA, 21 nt, Human
uaauggagauguuuaggucau

SEQ ID NO: 805421 - RNA, 19 nt, Human
uacaaacaagagcacaaaa

SEQ ID NO: 805422 - RNA, 18 nt, Human
uacaacucagcuuucucu

SEQ ID NO: 805423 - RNA, 18 nt, Human
uacacaagcauacccuua

SEQ ID NO: 805424 - RNA, 24 nt, Human
uacagaccugaaauuuaagcccaa

SEQ ID NO: 805425 - RNA, 22 nt, Human
uacaggcaugcaccaccacgcc

SEQ ID NO: 805426 - RNA, 21 nt, Human
uacaggcgugagccaccacca

SEQ ID NO: 805427 - RNA, 25 nt, Human
uacaggcgugagccaccaccacacc

SEQ ID NO: 805428 - RNA, 18 nt, Human
uacagguauauuuuuccc

SEQ ID NO: 805429 - RNA, 23 nt, Human
uacccuucaaaaauaaacauaac

SEQ ID NO: 805430 - RNA, 22 nt, Human
uacuaaaauccauaugggucag

SEQ ID NO: 805431 - RNA, 23 nt, Human
uagcaaaaugaaacugaugccag

SEQ ID NO: 805432 - RNA, 24 nt, Human
uagcaaaaugaaacugaugccaga

SEQ ID NO: 805433 - RNA, 24 nt, Human
uagcaaacaaaucaaauacacauu

SEQ ID NO: 805434 - RNA, 24 nt, Human
uagcacugagacacauuuuuucca

SEQ ID NO: 805435 - RNA, 18 nt, Human
uaggagacaaaaauugac

SEQ ID NO: 805436 - RNA, 24 nt, Human
uaggauuacaggcaugcaccacca

SEQ ID NO: 805437 - RNA, 22 nt, Human
uaggugacuugcccaagacuac

SEQ ID NO: 805438 - RNA, 23 nt, Human
uauaggugacuugcccaagacua

SEQ ID NO: 805439 - RNA, 21 nt, Human
uauugugagcuauuccuccua

SEQ ID NO: 805440 - RNA, 24 nt, Human
ucacccaccaagauacuguuugaa

SEQ ID NO: 805441 - RNA, 22 nt, Human
ucacucuuguugcccaggcugg

SEQ ID NO: 805442 - RNA, 23 nt, Human
ucacucuuguugcccaggcugga

SEQ ID NO: 805443 - RNA, 19 nt, Human
ucacugcaaccucugccuc

SEQ ID NO: 805444 - RNA, 22 nt, Human
ucacugcaaccucugccucccg

SEQ ID NO: 805445 - RNA, 23 nt, Human
ucacugcaaccucugccucccgu

SEQ ID NO: 805446 - RNA, 27 nt, Human
ucacugcaaccucugccucccguguuc

SEQ ID NO: 805447 - RNA, 18 nt, Human
ucacuggauuuggcaaca

SEQ ID NO: 805448 - RNA, 21 nt, Human
ucaugccuuuggauuucccag

SEQ ID NO: 805449 - RNA, 24 nt, Human
ucauugcauucucacugagaauuc

SEQ ID NO: 805450 - RNA, 23 nt, Human
ucauuugccuauauucaaauccc

SEQ ID NO: 805451 - RNA, 24 nt, Human
uccacagaguuucaguuuccuauu

SEQ ID NO: 805452 - RNA, 24 nt, Human
ucccaacuugcugggauuacaggc

SEQ ID NO: 805453 - RNA, 19 nt, Human
ucccagguuccagaacugu

SEQ ID NO: 805454 - RNA, 21 nt, Human
ucccguguucaagcaauucuc

SEQ ID NO: 805455 - RNA, 24 nt, Human
ucccguguucaagcaauucuccug

SEQ ID NO: 805456 - RNA, 23 nt, Human
uccugaaucagaaaaaccuaacu

SEQ ID NO: 805457 - RNA, 23 nt, Human
uccugaccccagaugaucugccc

SEQ ID NO: 805458 - RNA, 19 nt, Human
uccugaguagcuaggauua

SEQ ID NO: 805459 - RNA, 24 nt, Human
uccugaguagcuaggauuacaggc

SEQ ID NO: 805460 - RNA, 18 nt, Human
ucggccgccaccgcccag

SEQ ID NO: 805461 - RNA, 21 nt, Human
ucuaucaaauuucucugaggu

SEQ ID NO: 805462 - RNA, 21 nt, Human
ucucugagguacucacucauu

SEQ ID NO: 805463 - RNA, 21 nt, Human
ucugcccgccucagccuccca

SEQ ID NO: 805464 - RNA, 24 nt, Human
ucugccucccguguucaagcaauu

SEQ ID NO: 805465 - RNA, 20 nt, Human
ucuuuguacauucaaaagga

SEQ ID NO: 805466 - RNA, 24 nt, Human
ugaaaaaauaaucucagugaguuu

SEQ ID NO: 805467 - RNA, 20 nt, Human
ugaaaacuuaugcuaacugu

SEQ ID NO: 805468 - RNA, 26 nt, Human
ugaagaaaugaugacacuagguagaa

SEQ ID NO: 805469 - RNA, 21 nt, Human
ugaaucagaaaaaccuaacuu

SEQ ID NO: 805470 - RNA, 28 nt, Human
ugacaaagcacaaaggcccucaccagau

SEQ ID NO: 805471 - RNA, 19 nt, Human
ugacagagagacaagccgg

SEQ ID NO: 805472 - RNA, 19 nt, Human
ugagagcaagaggccagag

SEQ ID NO: 805473 - RNA, 21 nt, Human
ugagaguuuucacuggauuug

SEQ ID NO: 805474 - RNA, 21 nt, Human
ugaggaggcaaaauuuaagcu

SEQ ID NO: 805475 - RNA, 21 nt, Human
ugaguuccaaaaaaaaaaaaa

SEQ ID NO: 805476 - RNA, 22 nt, Human
ugauggaggccaagauuagaag

SEQ ID NO: 805477 - RNA, 21 nt, Human
ugcccaggcuggaguacaaug

SEQ ID NO: 805478 - RNA, 24 nt, Human
ugcccaggcuggaguacaauggcg

SEQ ID NO: 805479 - RNA, 21 nt, Human
ugccucaggcuccugaguagc

SEQ ID NO: 805480 - RNA, 24 nt, Human
ugccucaggcuccugaguagcuag

SEQ ID NO: 805481 - RNA, 24 nt, Human
ugcugggauuacaggcgugagcca

SEQ ID NO: 805482 - RNA, 24 nt, Human
uggacaaaaaaguaucuaaaagcu

SEQ ID NO: 805483 - RNA, 18 nt, Human
ugggauuacaggcgugag

SEQ ID NO: 805484 - RNA, 19 nt, Human
ugggauuacaggcgugagc

SEQ ID NO: 805485 - RNA, 22 nt, Human
ugggauuacaggcgugagccac

SEQ ID NO: 805486 - RNA, 23 nt, Human
ugggauuacaggcgugagccacc

SEQ ID NO: 805487 - RNA, 24 nt, Human
ugggauuacaggcgugagccacca

SEQ ID NO: 805488 - RNA, 19 nt, Human
uggggaguuugggaaggca

SEQ ID NO: 805489 - RNA, 20 nt, Human
ugguacuuaauagcuuggau

SEQ ID NO: 805490 - RNA, 24 nt, Human
uggucaggcuggucucgaacuccu

SEQ ID NO: 805491 - RNA, 18 nt, Human
ugugauaaggauggugag

SEQ ID NO: 805492 - RNA, 23 nt, Human
uuaacuaccagcaacccacuacc

SEQ ID NO: 805493 - RNA, 23 nt, Human
uuaauagcuuggauuuucucauu

SEQ ID NO: 805494 - RNA, 24 nt, Human
uuacagaugaaaaaauaaucucag

SEQ ID NO: 805495 - RNA, 21 nt, Human
uucaagcaauucuccugccuc

SEQ ID NO: 805496 - RNA, 25 nt, Human
uucaagcaauucuccugccucaggc

SEQ ID NO: 805497 - RNA, 24 nt, Human
uucacucuuguugcccaggcugga

SEQ ID NO: 805498 - RNA, 19 nt, Human
uucagguagccaagucacc

SEQ ID NO: 805499 - RNA, 23 nt, Human
uuccagaacugugagccaaauaa

SEQ ID NO: 805500 - RNA, 23 nt, Human
uucuccugccucaggcuccugag

SEQ ID NO: 805501 - RNA, 19 nt, Human
uugaaugcuacaaaaagca

SEQ ID NO: 805502 - RNA, 24 nt, Human
uuucacucuuguugcccaggcugg

SEQ ID NO: 805503 - RNA, 24 nt, Human
uuuccuuaauaaaauacaaacaag

SEQ ID NO: 805504 - RNA, 19 nt, Human
uuuuguauuuuuaguagag

SEQ ID NO: 805505 - RNA, 20 nt, Human
uuuuguauuuuuaguagaga

SEQ ID NO: 805506 - RNA, 19 nt, Human
aaaaaaacuugcugaagca

SEQ ID NO: 805507 - RNA, 23 nt, Human
aaaaaaauagaaaauacucaaga

SEQ ID NO: 805508 - RNA, 21 nt, Human
aaaaaagaaaacccagaucau

SEQ ID NO: 805509 - RNA, 23 nt, Human
aaaaaagacaaauccauaauaug

SEQ ID NO: 805510 - RNA, 20 nt, Human
aaaaaauacuauagaagaau

SEQ ID NO: 805511 - RNA, 22 nt, Human
aaaauacaccaaagaaauauga

SEQ ID NO: 805512 - RNA, 20 nt, Human
aaaauacucaagagcuguga

SEQ ID NO: 805513 - RNA, 18 nt, Human
aaacaagucacuuguccu

SEQ ID NO: 805514 - RNA, 18 nt, Human
aaacaugacuauuguaac

SEQ ID NO: 805515 - RNA, 23 nt, Human
aaacuguaaggcccuuaguuugg

SEQ ID NO: 805516 - RNA, 21 nt, Human
aaacuguugguacccaaccca

SEQ ID NO: 805517 - RNA, 23 nt, Human
aaacuuggaagaaucacugaaua

SEQ ID NO: 805518 - RNA, 18 nt, Human
aaagaaagagaagugaau

SEQ ID NO: 805519 - RNA, 21 nt, Human
aaagaaagagaagugaauuca

SEQ ID NO: 805520 - RNA, 24 nt, Human
aaagcgaagcuaauagcuuauaaa

SEQ ID NO: 805521 - RNA, 19 nt, Human
aaauagcuuuaaaaaaaga

SEQ ID NO: 805522 - RNA, 26 nt, Human
aacaaaaugagcaaaaaauacacuaa

SEQ ID NO: 805523 - RNA, 22 nt, Human
aacaagaagaacaguccccucg

SEQ ID NO: 805524 - RNA, 21 nt, Human
aagaaaaaccuaaagccaucu

SEQ ID NO: 805525 - RNA, 20 nt, Human
aagagacccuuuccaguuca

SEQ ID NO: 805526 - RNA, 20 nt, Human
aagcaaaguaucagaggccc

SEQ ID NO: 805527 - RNA, 22 nt, Human
aagcaaaguaucagaggcccca

SEQ ID NO: 805528 - RNA, 21 nt, Human
aagcccagguacucgcagcag

SEQ ID NO: 805529 - RNA, 23 nt, Human
aagucuuaagacacuagaagggg

SEQ ID NO: 805530 - RNA, 18 nt, Human
acaaaauaaauacuguac

SEQ ID NO: 805531 - RNA, 19 nt, Human
acaaauccauaauauggcc

SEQ ID NO: 805532 - RNA, 22 nt, Human
acaccaagucccuguaugacca

SEQ ID NO: 805533 - RNA, 18 nt, Human
acagacuuuuuucuucuu

SEQ ID NO: 805534 - RNA, 23 nt, Human
acaguagauguuugauaaauacc

SEQ ID NO: 805535 - RNA, 18 nt, Human
acaguaugcaccuuggau

SEQ ID NO: 805536 - RNA, 24 nt, Human
accaauacuaccccuccccaucac

SEQ ID NO: 805537 - RNA, 21 nt, Human
accccuccccaucacccccca

SEQ ID NO: 805538 - RNA, 23 nt, Human
accucccagccacaccccacgcc

SEQ ID NO: 805539 - RNA, 18 nt, Human
acuaccccuccccaucac

SEQ ID NO: 805540 - RNA, 20 nt, Human
acugaaaauacaucaagaca

SEQ ID NO: 805541 - RNA, 26 nt, Human
agaaaaaaauagaaaauacucaagag

SEQ ID NO: 805542 - RNA, 22 nt, Human
agaaaagcaaaaaucacaagaa

SEQ ID NO: 805543 - RNA, 22 nt, Human
agaaaggcuacuucauaaacua

SEQ ID NO: 805544 - RNA, 20 nt, Human
agacaggguuuacacggguu

SEQ ID NO: 805545 - RNA, 25 nt, Human
agagggaaggugggauauaaggucg

SEQ ID NO: 805546 - RNA, 19 nt, Human
agauaucaucagcagaaau

SEQ ID NO: 805547 - RNA, 22 nt, Human
aggaaaaaaauacuauagaaga

SEQ ID NO: 805548 - RNA, 23 nt, Human
aggaaaaaaauacuauagaagaa

SEQ ID NO: 805549 - RNA, 18 nt, Human
aggauacugaacuacuac

SEQ ID NO: 805550 - RNA, 19 nt, Human
aggcaaaagaugggaaaua

SEQ ID NO: 805551 - RNA, 25 nt, Human
agggaagaauggcugcaacagcagc

SEQ ID NO: 805552 - RNA, 22 nt, Human
agggggaaggggagaaccuaag

SEQ ID NO: 805553 - RNA, 21 nt, Human
aguaaauaccagagccaacaa

SEQ ID NO: 805554 - RNA, 21 nt, Human
aguagaaaagucuuuucugaa

SEQ ID NO: 805555 - RNA, 21 nt, Human
augauggggagugcagaggga

SEQ ID NO: 805556 - RNA, 20 nt, Human
auuaauuaccaaguugaagc

SEQ ID NO: 805557 - RNA, 19 nt, Human
auuacuguuaagcccaggu

SEQ ID NO: 805558 - RNA, 20 nt, Human
auucucaccuuucuaaccac

SEQ ID NO: 805559 - RNA, 22 nt, Human
auuuaaaaaccuucacauucuu

SEQ ID NO: 805560 - RNA, 30 nt, Human
caaaauaaaaacaugacuauuguaacaccu

SEQ ID NO: 805561 - RNA, 24 nt, Human
caaaauaaaauucaagcccugaca

SEQ ID NO: 805562 - RNA, 20 nt, Human
caacaagaagaacagucccc

SEQ ID NO: 805563 - RNA, 22 nt, Human
caacaagcucauugcuuuggaa

SEQ ID NO: 805564 - RNA, 20 nt, Human
caacagcaacagaaugagaa

SEQ ID NO: 805565 - RNA, 24 nt, Human
caagaagaacaguccccucggacc

SEQ ID NO: 805566 - RNA, 20 nt, Human
caagacacuaccaacaacaa

SEQ ID NO: 805567 - RNA, 20 nt, Human
caagggcagagaccacaacu

SEQ ID NO: 805568 - RNA, 22 nt, Human
cacacgggcuacuccaaauuag

SEQ ID NO: 805569 - RNA, 22 nt, Human
cacaguaccuucacuuuagaau

SEQ ID NO: 805570 - RNA, 20 nt, Human
caccaagucccuguaugacc

SEQ ID NO: 805571 - RNA, 20 nt, Human
cacccauuuuacuccaaauc

SEQ ID NO: 805572 - RNA, 22 nt, Human
cacccauuuuacuccaaaucca

SEQ ID NO: 805573 - RNA, 19 nt, Human
caccccaccucccagccac

SEQ ID NO: 805574 - RNA, 24 nt, Human
caccccaccucccagccacacccc

SEQ ID NO: 805575 - RNA, 19 nt, Human
caccucaggucccugacug

SEQ ID NO: 805576 - RNA, 18 nt, Human
cacgcaaaucacuguccc

SEQ ID NO: 805577 - RNA, 27 nt, Human
cagaaacaaaauaaauacuguacacuu

SEQ ID NO: 805578 - RNA, 22 nt, Human
cagcagaaaugaaaaugcaaaa

SEQ ID NO: 805579 - RNA, 22 nt, Human
cagcagcaguacgaagaaggcc

SEQ ID NO: 805580 - RNA, 21 nt, Human
cagguacucgcagcagcuacc

SEQ ID NO: 805581 - RNA, 24 nt, Human
cagguauggagcauaaaaguauca

SEQ ID NO: 805582 - RNA, 20 nt, Human
caguauuaagauuacauuac

SEQ ID NO: 805583 - RNA, 20 nt, Human
cagucacucugaaccagaaa

SEQ ID NO: 805584 - RNA, 23 nt, Human
caugaaaaagagggaagggcuuc

SEQ ID NO: 805585 - RNA, 21 nt, Human
ccaaaagcacccauuuuacuc

SEQ ID NO: 805586 - RNA, 23 nt, Human
ccaaagaaauaugagaguauguc

SEQ ID NO: 805587 - RNA, 22 nt, Human
ccacacacgggcuacuccaaau

SEQ ID NO: 805588 - RNA, 20 nt, Human
ccagauacuuaaccucaaua

SEQ ID NO: 805589 - RNA, 21 nt, Human
ccaugagauaaagggaugcau

SEQ ID NO: 805590 - RNA, 20 nt, Human
cccaacaagaagaacagucc

SEQ ID NO: 805591 - RNA, 21 nt, Human
cccaccucccagccacacccc

SEQ ID NO: 805592 - RNA, 20 nt, Human
cccacgcaaaucacugucca

SEQ ID NO: 805593 - RNA, 21 nt, Human
cccagauccacugugucuccc

SEQ ID NO: 805594 - RNA, 20 nt, Human
cccaucaccccccaaaaaaa

SEQ ID NO: 805595 - RNA, 21 nt, Human
cccauuuuacuccaaauccau

SEQ ID NO: 805596 - RNA, 21 nt, Human
ccccaacaagaagaacagucc

SEQ ID NO: 805597 - RNA, 18 nt, Human
ccccacaaguucccuggg

SEQ ID NO: 805598 - RNA, 20 nt, Human
ccccaccagguccaaaaugg

SEQ ID NO: 805599 - RNA, 21 nt, Human
ccccaucaccccccaaaaaaa

SEQ ID NO: 805600 - RNA, 22 nt, Human
ccccccaaaaaaacuugcugaa

SEQ ID NO: 805601 - RNA, 19 nt, Human
ccccuccccaucacccccc

SEQ ID NO: 805602 - RNA, 22 nt, Human
ccccuccccaucaccccccaaa

SEQ ID NO: 805603 - RNA, 19 nt, Human
ccccuuucuuuccaccugg

SEQ ID NO: 805604 - RNA, 22 nt, Human
cccuccuucuuccucuccccca

SEQ ID NO: 805605 - RNA, 18 nt, Human
ccuaaagccaucuuucag

SEQ ID NO: 805606 - RNA, 18 nt, Human
ccuacacugguuucuuuc

SEQ ID NO: 805607 - RNA, 18 nt, Human
ccucauucuccccacaag

SEQ ID NO: 805608 - RNA, 22 nt, Human
ccuucaccuuuaucuaguaccu

SEQ ID NO: 805609 - RNA, 22 nt, Human
cgcugaaaguuuucuaacuuag

SEQ ID NO: 805610 - RNA, 23 nt, Human
cuaaaaccaauacuaccccuccc

SEQ ID NO: 805611 - RNA, 23 nt, Human
cuaaauacaacuuuaaacaaguc

SEQ ID NO: 805612 - RNA, 23 nt, Human
cuaaauuagugagauauuucucc

SEQ ID NO: 805613 - RNA, 20 nt, Human
cuacuaaaaaugaauccaca

SEQ ID NO: 805614 - RNA, 19 nt, Human
cuaggacaccaccaagacu

SEQ ID NO: 805615 - RNA, 24 nt, Human
cucccagccacaccccacgccauu

SEQ ID NO: 805616 - RNA, 23 nt, Human
cuccccacaaguucccuggggag

SEQ ID NO: 805617 - RNA, 23 nt, Human
cugaaaauacaucaagacacuac

SEQ ID NO: 805618 - RNA, 19 nt, Human
cuucuaggaaggcuacagu

SEQ ID NO: 805619 - RNA, 24 nt, Human
gaacaucaucucauagggcaagcc

SEQ ID NO: 805620 - RNA, 22 nt, Human
gaagaacaguccccucggaccg

SEQ ID NO: 805621 - RNA, 22 nt, Human
gaagauaccuucaagggcagag

SEQ ID NO: 805622 - RNA, 21 nt, Human
gaagcaaaguaucagaggccc

SEQ ID NO: 805623 - RNA, 19 nt, Human
gacauuuugaaaaagaaau

SEQ ID NO: 805624 - RNA, 25 nt, Human
gagacccuuuccaguucaaggcacc

SEQ ID NO: 805625 - RNA, 19 nt, Human
gagugcagagggaaggugg

SEQ ID NO: 805626 - RNA, 23 nt, Human
gccacaccccacgccauugucac

SEQ ID NO: 805627 - RNA, 21 nt, Human
gcugaguaaaaaaaagacaaa

SEQ ID NO: 805628 - RNA, 19 nt, Human
gcuguuuuaggaagcaaag

SEQ ID NO: 805629 - RNA, 21 nt, Human
ggaccgugggcauaaaaacca

SEQ ID NO: 805630 - RNA, 20 nt, Human
gggaaaauagaagcuacuau

SEQ ID NO: 805631 - RNA, 23 nt, Human
gggaugguacuuuccuaauucuu

SEQ ID NO: 805632 - RNA, 18 nt, Human
gggcuuguuuccucugag

SEQ ID NO: 805633 - RNA, 23 nt, Human
ggggaugguacuuuccuaauucu

SEQ ID NO: 805634 - RNA, 24 nt, Human
gguaaacuacuuggagaucaaggg

SEQ ID NO: 805635 - RNA, 19 nt, Human
guaaaaaaaagacaaaucc

SEQ ID NO: 805636 - RNA, 22 nt, Human
guaaaggaaaaaagaaaaccca

SEQ ID NO: 805637 - RNA, 20 nt, Human
gugcuaaaaaaaucaaaaca

SEQ ID NO: 805638 - RNA, 23 nt, Human
uaaaacagaaacaaaauaaauac

SEQ ID NO: 805639 - RNA, 19 nt, Human
uaaagggaugcauuauggc

SEQ ID NO: 805640 - RNA, 20 nt, Human
uaaaguagcaugcccugggc

SEQ ID NO: 805641 - RNA, 22 nt, Human
uaaauacacacaaaagaucuau

SEQ ID NO: 805642 - RNA, 20 nt, Human
uaaccaccucauucucccca

SEQ ID NO: 805643 - RNA, 23 nt, Human
uaaccagauacuuaaccucaaua

SEQ ID NO: 805644 - RNA, 30 nt, Human
uaagaaauaaaaaaaguaaauacacacaaa

SEQ ID NO: 805645 - RNA, 19 nt, Human
uaagcuacuuaaagacuua

SEQ ID NO: 805646 - RNA, 21 nt, Human
uaagguauaaccucugcagca

SEQ ID NO: 805647 - RNA, 24 nt, Human
uaagugacuuauucaagguuacac

SEQ ID NO: 805648 - RNA, 22 nt, Human
uaauguggaaguuauacguagc

SEQ ID NO: 805649 - RNA, 20 nt, Human
uaauuccaugacuuccuuca

SEQ ID NO: 805650 - RNA, 26 nt, Human
uacaaaacuaguaaauaccagagcca

SEQ ID NO: 805651 - RNA, 18 nt, Human
uacaguuucgaaagguuu

SEQ ID NO: 805652 - RNA, 18 nt, Human
uaccacaaaguucagcca

SEQ ID NO: 805653 - RNA, 23 nt, Human
uaccacugaaaauacaucaagac

SEQ ID NO: 805654 - RNA, 25 nt, Human
uaccacugaaaauacaucaagacac

SEQ ID NO: 805655 - RNA, 20 nt, Human
uacccagauaagauucagac

SEQ ID NO: 805656 - RNA, 23 nt, Human
uacccaucuuuccacugguuuug

SEQ ID NO: 805657 - RNA, 24 nt, Human
uacccuaccacugaaaauacauca

SEQ ID NO: 805658 - RNA, 21 nt, Human
uagaagcuacuauaagcaaau

SEQ ID NO: 805659 - RNA, 25 nt, Human
uagcaaaacguuacuacaaaacuag

SEQ ID NO: 805660 - RNA, 22 nt, Human
uauacugugugggaagguaggg

SEQ ID NO: 805661 - RNA, 20 nt, Human
uaucaucagcagaaaugaaa

SEQ ID NO: 805662 - RNA, 21 nt, Human
uauuccaacaugcuugcuucu

SEQ ID NO: 805663 - RNA, 22 nt, Human
uauuccaaucaacucuaucuau

SEQ ID NO: 805664 - RNA, 19 nt, Human
ucaaaacagaaguaauaca

SEQ ID NO: 805665 - RNA, 18 nt, Human
ucaaggaagcacaugaac

SEQ ID NO: 805666 - RNA, 18 nt, Human
ucacagauuugaaaccuc

SEQ ID NO: 805667 - RNA, 21 nt, Human
ucacaguaaaugugaaaguuc

SEQ ID NO: 805668 - RNA, 21 nt, Human
ucagagugucacaggucuugc

SEQ ID NO: 805669 - RNA, 19 nt, Human
ucagcagaaaugaaaaugc

SEQ ID NO: 805670 - RNA, 21 nt, Human
ucagcagaaaugaaaaugcaa

SEQ ID NO: 805671 - RNA, 21 nt, Human
ucauagggcaagccgaaaacu

SEQ ID NO: 805672 - RNA, 22 nt, Human
uccaaauuuacaaaugagaaaa

SEQ ID NO: 805673 - RNA, 19 nt, Human
uccaauggaucccagcuga

SEQ ID NO: 805674 - RNA, 22 nt, Human
uccacacacgggcuacuccaaa

SEQ ID NO: 805675 - RNA, 22 nt, Human
uccacugugucuccccacgcaa

SEQ ID NO: 805676 - RNA, 22 nt, Human
uccccaucaccccccaaaaaaa

SEQ ID NO: 805677 - RNA, 25 nt, Human
uccccuuucuuuccaccugguuuca

SEQ ID NO: 805678 - RNA, 18 nt, Human
ucuccagaaaucuuccaa

SEQ ID NO: 805679 - RNA, 24 nt, Human
ucucuuaaaaugaaccuuuucacc

SEQ ID NO: 805680 - RNA, 21 nt, Human
ucuguaaaaauaaaagguuac

SEQ ID NO: 805681 - RNA, 22 nt, Human
ucuuccccuuucuuuccaccug

SEQ ID NO: 805682 - RNA, 19 nt, Human
ugaaaaagaaauggccaaa

SEQ ID NO: 805683 - RNA, 19 nt, Human
ugaaaaaggcagaaagaau

SEQ ID NO: 805684 - RNA, 20 nt, Human
ugaaaaaggcagaaagaauc

SEQ ID NO: 805685 - RNA, 24 nt, Human
ugaaaauacaucaagacacuacca

SEQ ID NO: 805686 - RNA, 21 nt, Human
ugaaccagaaaggcuacuuca

SEQ ID NO: 805687 - RNA, 23 nt, Human
ugaagcacuggcaaaguuagaca

SEQ ID NO: 805688 - RNA, 19 nt, Human
ugaagcauuucuuuaauug

SEQ ID NO: 805689 - RNA, 23 nt, Human
ugaauucagagugucacaggucu

SEQ ID NO: 805690 - RNA, 26 nt, Human
ugacaagagacccuuuccaguucaag

SEQ ID NO: 805691 - RNA, 22 nt, Human
ugacauuguaaauuauaaucca

SEQ ID NO: 805692 - RNA, 23 nt, Human
ugacuaaagaaaaaaauagaaaa

SEQ ID NO: 805693 - RNA, 20 nt, Human
ugagaagaaaaucacaaugu

SEQ ID NO: 805694 - RNA, 24 nt, Human
ugagauaagaugacucuacccauc

SEQ ID NO: 805695 - RNA, 18 nt, Human
ugccccacccccagaaau

SEQ ID NO: 805696 - RNA, 20 nt, Human
ugcuaaaaaaaucaaaacag

SEQ ID NO: 805697 - RNA, 23 nt, Human
ugcugaguggguguggcacagug

SEQ ID NO: 805698 - RNA, 22 nt, Human
ugcuuuggaaauagacauuugc

SEQ ID NO: 805699 - RNA, 18 nt, Human
uggaaaaacuauaaacau

SEQ ID NO: 805700 - RNA, 23 nt, Human
uggaaagaauacuaaauacaacu

SEQ ID NO: 805701 - RNA, 22 nt, Human
uggaaauagacauuugcuuccu

SEQ ID NO: 805702 - RNA, 18 nt, Human
uggaauggggacacaaga

SEQ ID NO: 805703 - RNA, 20 nt, Human
uggcacagugaaaaugcagc

SEQ ID NO: 805704 - RNA, 18 nt, Human
uggggagugcagagggaa

SEQ ID NO: 805705 - RNA, 22 nt, Human
uggggagugcagagggaaggug

SEQ ID NO: 805706 - RNA, 20 nt, Human
uguggcccuuccccacaugu

SEQ ID NO: 805707 - RNA, 22 nt, Human
ugugggaagguaggggaaucag

SEQ ID NO: 805708 - RNA, 19 nt, Human
uguggggaugguacuuucc

SEQ ID NO: 805709 - RNA, 23 nt, Human
uguugagaagaaaaucacaaugu

SEQ ID NO: 805710 - RNA, 23 nt, Human
uguuuuuggaaaaauugagguuu

SEQ ID NO: 805711 - RNA, 22 nt, Human
uuaccaaccaaaauacaccaaa

SEQ ID NO: 805712 - RNA, 18 nt, Human
uuagugaaauagugcaga

SEQ ID NO: 805713 - RNA, 21 nt, Human
uucacaguaaaugugaaaguu

SEQ ID NO: 805714 - RNA, 20 nt, Human
uuccacugguuuuggcauag

SEQ ID NO: 805715 - RNA, 20 nt, Human
uuccaguucaaggucucuuu

SEQ ID NO: 805716 - RNA, 24 nt, Human
uucgacaaaagcccaggucuucug

SEQ ID NO: 805717 - RNA, 20 nt, Human
uugaaaaaggcagaaagaaa

SEQ ID NO: 805718 - RNA, 20 nt, Human
uugggaacauuucugcccca

SEQ ID NO: 805719 - RNA, 27 nt, Human
uuuaaaaaccuucacauucuuacaucu

SEQ ID NO: 805720 - RNA, 27 nt, Human
uuuaagguucuacccuccuucuuccuc

SEQ ID NO: 805721 - RNA, 24 nt, Human
uuuccacagcaugaaacuguuaug

SEQ ID NO: 805722 - RNA, 18 nt, Human
uuugaaaaaggcagaaag

SEQ ID NO: 805723 - RNA, 23 nt, Human
uuugaaaccucuaaaaccaauac

SEQ ID NO: 805724 - RNA, 20 nt, Human
aacagguaacagacccaggg

SEQ ID NO: 805725 - RNA, 22 nt, Human
aacagguaacagacccagggug

SEQ ID NO: 805726 - RNA, 19 nt, Human
aaccacagucucaaguccc

SEQ ID NO: 805727 - RNA, 23 nt, Human
aagaaauauugcauaugaggagg

SEQ ID NO: 805728 - RNA, 23 nt, Human
aagaaucacccacuuucagaauc

SEQ ID NO: 805729 - RNA, 18 nt, Human
aagcagcauccuuccugg

SEQ ID NO: 805730 - RNA, 20 nt, Human
aagcagcuugcucacucagg

SEQ ID NO: 805731 - RNA, 23 nt, Human
aagcaggugagaugucaccagag

SEQ ID NO: 805732 - RNA, 28 nt, Human
aagcggguggcggagugggaggucgacc

SEQ ID NO: 805733 - RNA, 19 nt, Human
aagcuccagggucuuuugc

SEQ ID NO: 805734 - RNA, 21 nt, Human
aagcuuuuguguauaaauguu

SEQ ID NO: 805735 - RNA, 18 nt, Human
aagucccagaagcuucag

SEQ ID NO: 805736 - RNA, 18 nt, Human
aaucccaggacgcuccuc

SEQ ID NO: 805737 - RNA, 25 nt, Human
acacagcauguucgcuauugucucc

SEQ ID NO: 805738 - RNA, 23 nt, Human
acacuccagggcagcagccagac

SEQ ID NO: 805739 - RNA, 22 nt, Human
acacucuuccuccaggucucca

SEQ ID NO: 805740 - RNA, 18 nt, Human
acagaccgaauauaguca

SEQ ID NO: 805741 - RNA, 19 nt, Human
acagcgccccccacccuuu

SEQ ID NO: 805742 - RNA, 19 nt, Human
acagcuuugggggagaggg

SEQ ID NO: 805743 - RNA, 23 nt, Human
acaggcaggaucuccagccgcac

SEQ ID NO: 805744 - RNA, 19 nt, Human
acagucucaagucccagaa

SEQ ID NO: 805745 - RNA, 24 nt, Human
acagugaucccucggaacuccucu

SEQ ID NO: 805746 - RNA, 22 nt, Human
accacgcuggcuggcuugaugc

SEQ ID NO: 805747 - RNA, 18 nt, Human
accacucacuagaccacc

SEQ ID NO: 805748 - RNA, 18 nt, Human
acccgggcccaugagcuc

SEQ ID NO: 805749 - RNA, 19 nt, Human
acucagggguacacagcaa

SEQ ID NO: 805750 - RNA, 18 nt, Human
acuccaccuccagcacca

SEQ ID NO: 805751 - RNA, 22 nt, Human
acugggccaggcaaagcacauc

SEQ ID NO: 805752 - RNA, 23 nt, Human
agaagaagcaggagggcugagag

SEQ ID NO: 805753 - RNA, 23 nt, Human
agagaaaaauacagcuuuggggg

SEQ ID NO: 805754 - RNA, 21 nt, Human
agagaccugggacagccccca

SEQ ID NO: 805755 - RNA, 21 nt, Human
agaguguguccuguccagccc

SEQ ID NO: 805756 - RNA, 24 nt, Human
agaugguuccggcccugaccagga

SEQ ID NO: 805757 - RNA, 20 nt, Human
agcaaggccugcugccuccc

SEQ ID NO: 805758 - RNA, 19 nt, Human
agccaggaucugccugggu

SEQ ID NO: 805759 - RNA, 21 nt, Human
agcccuguacagcugggagau

SEQ ID NO: 805760 - RNA, 19 nt, Human
agccuggucagguggaucc

SEQ ID NO: 805761 - RNA, 21 nt, Human
agcuccugccugcucaccucc

SEQ ID NO: 805762 - RNA, 23 nt, Human
agcugggcucccauccgaagcag

SEQ ID NO: 805763 - RNA, 23 nt, Human
aggacuagcaagccccaaacccc

SEQ ID NO: 805764 - RNA, 21 nt, Human
aggaggccccacagagaccug

SEQ ID NO: 805765 - RNA, 23 nt, Human
aggcaggcagggcgcucacuggg

SEQ ID NO: 805766 - RNA, 21 nt, Human
aggcagggcgcucacugggga

SEQ ID NO: 805767 - RNA, 22 nt, Human
agggaugcuggugcuuccagau

SEQ ID NO: 805768 - RNA, 19 nt, Human
aggugguggugagcgagau

SEQ ID NO: 805769 - RNA, 24 nt, Human
agguuggagacagauggagguggg

SEQ ID NO: 805770 - RNA, 24 nt, Human
aguggaggggagggguaagggagg

SEQ ID NO: 805771 - RNA, 18 nt, Human
auagagcccaccuccaaa

SEQ ID NO: 805772 - RNA, 20 nt, Human
auagagcccaccuccaaagg

SEQ ID NO: 805773 - RNA, 22 nt, Human
auaugcaggcaccacugccugc

SEQ ID NO: 805774 - RNA, 24 nt, Human
aucagcuccaccacagugaucccu

SEQ ID NO: 805775 - RNA, 24 nt, Human
aucccaggcaccacucacuagacc

SEQ ID NO: 805776 - RNA, 22 nt, Human
augcaugacugcgcugggguug

SEQ ID NO: 805777 - RNA, 23 nt, Human
auggcugcuugcauccagaagcc

SEQ ID NO: 805778 - RNA, 18 nt, Human
auugcauaugaggaggcc

SEQ ID NO: 805779 - RNA, 22 nt, Human
caacagaugaaugagugggugg

SEQ ID NO: 805780 - RNA, 23 nt, Human
caagauagcagaggcgcugagca

SEQ ID NO: 805781 - RNA, 21 nt, Human
caagcccugguuccaucccuu

SEQ ID NO: 805782 - RNA, 22 nt, Human
caaggaauguguucuaaucuca

SEQ ID NO: 805783 - RNA, 18 nt, Human
caaggggcagagcccagc

SEQ ID NO: 805784 - RNA, 24 nt, Human
caagucccagaagcuucagacuga

SEQ ID NO: 805785 - RNA, 20 nt, Human
cacacagcaaacagguaaca

SEQ ID NO: 805786 - RNA, 22 nt, Human
cacagcaaacagguaacagacc

SEQ ID NO: 805787 - RNA, 23 nt, Human
cacagcaaacagguaacagaccc

SEQ ID NO: 805788 - RNA, 23 nt, Human
caccagacccauacagaagcuga

SEQ ID NO: 805789 - RNA, 18 nt, Human
caccccaggcacaagcau

SEQ ID NO: 805790 - RNA, 19 nt, Human
caccccagucaccacagac

SEQ ID NO: 805791 - RNA, 19 nt, Human
caccuccucuaaggacaaa

SEQ ID NO: 805792 - RNA, 25 nt, Human
caccuucagggagcccucccugucg

SEQ ID NO: 805793 - RNA, 24 nt, Human
cacugccugccucuggcuuucugc

SEQ ID NO: 805794 - RNA, 24 nt, Human
cagaaccacagucucaagucccag

SEQ ID NO: 805795 - RNA, 19 nt, Human
cagcagccagaccugaggc

SEQ ID NO: 805796 - RNA, 22 nt, Human
cagcagucaccugagccucagu

SEQ ID NO: 805797 - RNA, 21 nt, Human
cagcgggauuccaucgacacu

SEQ ID NO: 805798 - RNA, 18 nt, Human
cagcuccaccacagugau

SEQ ID NO: 805799 - RNA, 22 nt, Human
caggaauagagcccaccuccaa

SEQ ID NO: 805800 - RNA, 22 nt, Human
caggugagaugucaccagaccc

SEQ ID NO: 805801 - RNA, 18 nt, Human
caggugcaggcgcucauu

SEQ ID NO: 805802 - RNA, 24 nt, Human
caguaacucauuuauagacaaugu

SEQ ID NO: 805803 - RNA, 21 nt, Human
cagucaccugagccucaguuu

SEQ ID NO: 805804 - RNA, 21 nt, Human
caucaaaagcaggugagaugu

SEQ ID NO: 805805 - RNA, 21 nt, Human
caucuuugcuuuuuuuagagg

SEQ ID NO: 805806 - RNA, 21 nt, Human
caugggaaugccucauacccc

SEQ ID NO: 805807 - RNA, 20 nt, Human
ccaaagcuauugcccuccuu

SEQ ID NO: 805808 - RNA, 21 nt, Human
ccaacccccaagcgcgugugc

SEQ ID NO: 805809 - RNA, 18 nt, Human
ccacuccaucccaggcac

SEQ ID NO: 805810 - RNA, 21 nt, Human
ccacugcaaccccugguggga

SEQ ID NO: 805811 - RNA, 23 nt, Human
ccagcaccacgcgcucgcccaca

SEQ ID NO: 805812 - RNA, 22 nt, Human
ccagcuacgugucugggagcca

SEQ ID NO: 805813 - RNA, 21 nt, Human
ccaucccaggcaccacucacu

SEQ ID NO: 805814 - RNA, 24 nt, Human
ccauggcaccuacccccaagccac

SEQ ID NO: 805815 - RNA, 22 nt, Human
cccaagccgagaggcccugaga

SEQ ID NO: 805816 - RNA, 24 nt, Human
cccacagagaccugggacagcccc

SEQ ID NO: 805817 - RNA, 19 nt, Human
cccaggccucucuccucuc

SEQ ID NO: 805818 - RNA, 21 nt, Human
cccaguggggccuggcccugg

SEQ ID NO: 805819 - RNA, 18 nt, Human
cccaucucccucccucuu

SEQ ID NO: 805820 - RNA, 19 nt, Human
cccauggcaccuaccccca

SEQ ID NO: 805821 - RNA, 19 nt, Human
ccccaaacagaccauaagc

SEQ ID NO: 805822 - RNA, 24 nt, Human
ccccaggucucagguuggagaccc

SEQ ID NO: 805823 - RNA, 19 nt, Human
ccccauuccccucccaggc

SEQ ID NO: 805824 - RNA, 19 nt, Human
cccccaggccucucuccuc

SEQ ID NO: 805825 - RNA, 19 nt, Human
cccccugccuacaccacuc

SEQ ID NO: 805826 - RNA, 22 nt, Human
ccccucccaggccuucuuucuc

SEQ ID NO: 805827 - RNA, 22 nt, Human
ccccuugugcuucccgagagcc

SEQ ID NO: 805828 - RNA, 18 nt, Human
cccucccucuuucuccuc

SEQ ID NO: 805829 - RNA, 26 nt, Human
cccucccucuuucuccucuuccuccc

SEQ ID NO: 805830 - RNA, 24 nt, Human
cccuccugccacuaccuucccaac

SEQ ID NO: 805831 - RNA, 22 nt, Human
cccuggccucugggucccagac

SEQ ID NO: 805832 - RNA, 18 nt, Human
cccuuguuuucuuuguug

SEQ ID NO: 805833 - RNA, 24 nt, Human
ccggcccugaccaggaggccugug

SEQ ID NO: 805834 - RNA, 20 nt, Human
ccgggccgggggcuguggca

SEQ ID NO: 805835 - RNA, 24 nt, Human
ccuacaccacucccaagacagagu

SEQ ID NO: 805836 - RNA, 21 nt, Human
ccuacccccaagccacugcaa

SEQ ID NO: 805837 - RNA, 20 nt, Human
ccucaguggccgcugacucu

SEQ ID NO: 805838 - RNA, 21 nt, Human
ccuccaggucuccauggaggc

SEQ ID NO: 805839 - RNA, 19 nt, Human
ccucccaggccuucuuucu

SEQ ID NO: 805840 - RNA, 19 nt, Human
ccucccugucggcagggcc

SEQ ID NO: 805841 - RNA, 23 nt, Human
ccuccucuaaggacaaagccaaa

SEQ ID NO: 805842 - RNA, 22 nt, Human
ccucuccaaggaggccccacag

SEQ ID NO: 805843 - RNA, 21 nt, Human
ccucuugacuccucaucuguu

SEQ ID NO: 805844 - RNA, 19 nt, Human
ccugcccaaugggcccaga

SEQ ID NO: 805845 - RNA, 22 nt, Human
ccugccuacaccacucccaaga

SEQ ID NO: 805846 - RNA, 18 nt, Human
ccugucgcccaccuucag

SEQ ID NO: 805847 - RNA, 19 nt, Human
cguuccuaucucagggccu

SEQ ID NO: 805848 - RNA, 18 nt, Human
cucacagaacuguggccu

SEQ ID NO: 805849 - RNA, 22 nt, Human
cucaggacuagcaagccccaaa

SEQ ID NO: 805850 - RNA, 22 nt, Human
cucagggguacacagcaagucc

SEQ ID NO: 805851 - RNA, 19 nt, Human
cucaucuguucccucaaau

SEQ ID NO: 805852 - RNA, 18 nt, Human
cuccaaggaggccccaca

SEQ ID NO: 805853 - RNA, 25 nt, Human
cucccccaccgucaggugcaggcgc

SEQ ID NO: 805854 - RNA, 23 nt, Human
cuccuuguagagggagacgucca

SEQ ID NO: 805855 - RNA, 19 nt, Human
cucugcugugcugucccuc

SEQ ID NO: 805856 - RNA, 18 nt, Human
cucugggucccagacccu

SEQ ID NO: 805857 - RNA, 25 nt, Human
cucugggucccagacccuguagcuc

SEQ ID NO: 805858 - RNA, 23 nt, Human
cugagccucaguuuccccaucug

SEQ ID NO: 805859 - RNA, 21 nt, Human
cugauucuaccugcuacaugc

SEQ ID NO: 805860 - RNA, 18 nt, Human
cugauuuguggacacuga

SEQ ID NO: 805861 - RNA, 23 nt, Human
cugcccgcccacuccaucccagg

SEQ ID NO: 805862 - RNA, 26 nt, Human
cugccugccucucucuauguguacug

SEQ ID NO: 805863 - RNA, 21 nt, Human
cugccugccucuggcuuucug

SEQ ID NO: 805864 - RNA, 26 nt, Human
cuggagaagcgaaggagcugggcucc

SEQ ID NO: 805865 - RNA, 20 nt, Human
cuggcucuuucugacagccu

SEQ ID NO: 805866 - RNA, 21 nt, Human
cuggcuguaaagaggagcgcu

SEQ ID NO: 805867 - RNA, 21 nt, Human
cugugccuguuuccucaucug

SEQ ID NO: 805868 - RNA, 23 nt, Human
cugugcugucccucacccucaaa

SEQ ID NO: 805869 - RNA, 26 nt, Human
cuuauaacaugaaaauaaacauuucc

SEQ ID NO: 805870 - RNA, 22 nt, Human
cuuccugccaacagcgcccccc

SEQ ID NO: 805871 - RNA, 24 nt, Human
cuuccugggaucccagacgcccca

SEQ ID NO: 805872 - RNA, 25 nt, Human
cuuggcuuucacuugguggcgacuc

SEQ ID NO: 805873 - RNA, 21 nt, Human
cuuucugcugcgcagagaauc

SEQ ID NO: 805874 - RNA, 19 nt, Human
cuuugggggagagggcagg

SEQ ID NO: 805875 - RNA, 21 nt, Human
gacaggauguggucuccaggg

SEQ ID NO: 805876 - RNA, 20 nt, Human
gacaugucacaggggcuguu

SEQ ID NO: 805877 - RNA, 22 nt, Human
gacgagggccccaaacagacca

SEQ ID NO: 805878 - RNA, 22 nt, Human
gagagaccccagcugucacucc

SEQ ID NO: 805879 - RNA, 23 nt, Human
gagagcccaaggcccauagagcc

SEQ ID NO: 805880 - RNA, 25 nt, Human
gagcagccugucgcccaccuucagg

SEQ ID NO: 805881 - RNA, 24 nt, Human
gagugggggaaaggguagaggggg

SEQ ID NO: 805882 - RNA, 18 nt, Human
gaucccagacgccccaac

SEQ ID NO: 805883 - RNA, 18 nt, Human
gauugcccuucucccacu

SEQ ID NO: 805884 - RNA, 18 nt, Human
gcaccacugccugccucu

SEQ ID NO: 805885 - RNA, 23 nt, Human
gcaccacugccugccucuggcuu

SEQ ID NO: 805886 - RNA, 23 nt, Human
gccagggaaacgucggccccucc

SEQ ID NO: 805887 - RNA, 22 nt, Human
gccccgugcagcgggauuccau

SEQ ID NO: 805888 - RNA, 19 nt, Human
gcccuggccucuggguccc

SEQ ID NO: 805889 - RNA, 20 nt, Human
gcccuggccucuggguccca

SEQ ID NO: 805890 - RNA, 19 nt, Human
gcggagccuggucaggugg

SEQ ID NO: 805891 - RNA, 23 nt, Human
gcggugcagcugcucacuccucu

SEQ ID NO: 805892 - RNA, 22 nt, Human
gcugaaaucaaagaaucaccca

SEQ ID NO: 805893 - RNA, 19 nt, Human
gcugacucuggggcacagg

SEQ ID NO: 805894 - RNA, 21 nt, Human
gcuggugccaucgauggacag

SEQ ID NO: 805895 - RNA, 20 nt, Human
gcuuagcagagguccagaga

SEQ ID NO: 805896 - RNA, 24 nt, Human
gcuuugggggagagggcaggugga

SEQ ID NO: 805897 - RNA, 23 nt, Human
ggacacccuccacugggcaagag

SEQ ID NO: 805898 - RNA, 19 nt, Human
ggacaugucacaggggcug

SEQ ID NO: 805899 - RNA, 20 nt, Human
ggagacagauggagguggga

SEQ ID NO: 805900 - RNA, 25 nt, Human
ggagacagauggaggugggaguggg

SEQ ID NO: 805901 - RNA, 27 nt, Human
ggagagggcagguggaaggggacaugu

SEQ ID NO: 805902 - RNA, 18 nt, Human
ggaggggcuugggcugag

SEQ ID NO: 805903 - RNA, 18 nt, Human
ggcagguccccaaggggg

SEQ ID NO: 805904 - RNA, 21 nt, Human
ggccaggcaaagcacaucccc

SEQ ID NO: 805905 - RNA, 18 nt, Human
ggccuucuuucucuuccu

SEQ ID NO: 805906 - RNA, 18 nt, Human
ggcggagugggggaaagg

SEQ ID NO: 805907 - RNA, 26 nt, Human
ggcuaaagagacuccauaugcaggca

SEQ ID NO: 805908 - RNA, 18 nt, Human
ggcuggcuccugucuuca

SEQ ID NO: 805909 - RNA, 18 nt, Human
gggaaugccucauacccc

SEQ ID NO: 805910 - RNA, 22 nt, Human
gggcacaggcaggaucuccagc

SEQ ID NO: 805911 - RNA, 23 nt, Human
gggcgguggcauggcuggccccg

SEQ ID NO: 805912 - RNA, 21 nt, Human
gggcuguggcaggagggcacg

SEQ ID NO: 805913 - RNA, 21 nt, Human
ggggagagggcagguggaagg

SEQ ID NO: 805914 - RNA, 21 nt, Human
gggggagagggcagguggaag

SEQ ID NO: 805915 - RNA, 25 nt, Human
ggucacacagcuauggcugcuugca

SEQ ID NO: 805916 - RNA, 20 nt, Human
ggugccaucgauggacagga

SEQ ID NO: 805917 - RNA, 19 nt, Human
gguuguguucuggugaggu

SEQ ID NO: 805918 - RNA, 19 nt, Human
guacagcugggagaucugg

SEQ ID NO: 805919 - RNA, 19 nt, Human
gugaucguccagaggggcu

SEQ ID NO: 805920 - RNA, 21 nt, Human
gugcagggcuccgcuccuguc

SEQ ID NO: 805921 - RNA, 18 nt, Human
guggcugcacugccgcag

SEQ ID NO: 805922 - RNA, 24 nt, Human
guuggagacagauggaggugggag

SEQ ID NO: 805923 - RNA, 25 nt, Human
uaaaaagcaaacuucuacucuaggu

SEQ ID NO: 805924 - RNA, 21 nt, Human
uaaagccccucacccuggucc

SEQ ID NO: 805925 - RNA, 19 nt, Human
uaacauccaacaugugugg

SEQ ID NO: 805926 - RNA, 23 nt, Human
uaacaugaaaauaaacauuuccu

SEQ ID NO: 805927 - RNA, 19 nt, Human
uaaccagacaaaauucuca

SEQ ID NO: 805928 - RNA, 20 nt, Human
uaaccagacaaaauucucag

SEQ ID NO: 805929 - RNA, 24 nt, Human
uacaaggaauguguucuaaucuca

SEQ ID NO: 805930 - RNA, 20 nt, Human
uacaccacucccaagacaga

SEQ ID NO: 805931 - RNA, 20 nt, Human
uacaccacucccaagacaga

SEQ ID NO: 805932 - RNA, 21 nt, Human
uacaccacucccaagacagag

SEQ ID NO: 805933 - RNA, 22 nt, Human
uacaccacucccaagacagagu

SEQ ID NO: 805934 - RNA, 20 nt, Human
uacagccccuugugcuuccc

SEQ ID NO: 805935 - RNA, 22 nt, Human
uacaugcccagcccuguacagc

SEQ ID NO: 805936 - RNA, 18 nt, Human
uacccccauuuucuggcu

SEQ ID NO: 805937 - RNA, 21 nt, Human
uaggucaggacaagcgggcgg

SEQ ID NO: 805938 - RNA, 18 nt, Human
uaguucagucuugcagua

SEQ ID NO: 805939 - RNA, 19 nt, Human
uaguucagucuugcaguau

SEQ ID NO: 805940 - RNA, 19 nt, Human
ucaaaagugagggcucuuu

SEQ ID NO: 805941 - RNA, 22 nt, Human
ucaccagacccauacagaagcu

SEQ ID NO: 805942 - RNA, 23 nt, Human
ucacuccuggcugcaaguccccc

SEQ ID NO: 805943 - RNA, 20 nt, Human
ucacuggauggcaggugaau

SEQ ID NO: 805944 - RNA, 19 nt, Human
ucaggagcgggcgggggca

SEQ ID NO: 805945 - RNA, 20 nt, Human
ucagggagggcaccaagggg

SEQ ID NO: 805946 - RNA, 23 nt, Human
ucagggccuuugcacuagcugug

SEQ ID NO: 805947 - RNA, 18 nt, Human
ucauacuccaccuccagc

SEQ ID NO: 805948 - RNA, 25 nt, Human
ucauacuccaccuccagcaccacgc

SEQ ID NO: 805949 - RNA, 24 nt, Human
uccaacccagacaggguuggugac

SEQ ID NO: 805950 - RNA, 19 nt, Human
uccaccacgcuggcuggcu

SEQ ID NO: 805951 - RNA, 20 nt, Human
uccaccacgcuggcuggcuu

SEQ ID NO: 805952 - RNA, 23 nt, Human
uccaccaucaagggucccgaagc

SEQ ID NO: 805953 - RNA, 22 nt, Human
ucccagaagcuucagacugaga

SEQ ID NO: 805954 - RNA, 23 nt, Human
ucccaggccuucuuucucuuccu

SEQ ID NO: 805955 - RNA, 21 nt, Human
ucccaucucccucccucuuuc

SEQ ID NO: 805956 - RNA, 21 nt, Human
ucccccugccuacaccacucc

SEQ ID NO: 805957 - RNA, 19 nt, Human
ucccgaagcauuagccacc

SEQ ID NO: 805958 - RNA, 21 nt, Human
ucccgaagcauuagccaccgu

SEQ ID NO: 805959 - RNA, 19 nt, Human
ucccucggaacuccucugg

SEQ ID NO: 805960 - RNA, 23 nt, Human
ucccuuguuuucuuuguugcacu

SEQ ID NO: 805961 - RNA, 20 nt, Human
uccuccaggucuccauggag

SEQ ID NO: 805962 - RNA, 21 nt, Human
uccucuggaaugcucugucug

SEQ ID NO: 805963 - RNA, 23 nt, Human
uccugccaacagcgccccccacc

SEQ ID NO: 805964 - RNA, 24 nt, Human
uccugccaacagcgccccccaccc

SEQ ID NO: 805965 - RNA, 18 nt, Human
uccugugaccgagaacuc

SEQ ID NO: 805966 - RNA, 23 nt, Human
ucggcagagaugguuccggcccu

SEQ ID NO: 805967 - RNA, 21 nt, Human
ucucagguuggagacccuggg

SEQ ID NO: 805968 - RNA, 24 nt, Human
ucucagguuggagacccugggcuu

SEQ ID NO: 805969 - RNA, 27 nt, Human
ucuccagccccauuccccucccaggcc

SEQ ID NO: 805970 - RNA, 18 nt, Human
ucucccacucccccaccg

SEQ ID NO: 805971 - RNA, 18 nt, Human
ucucccaucucccucccu

SEQ ID NO: 805972 - RNA, 19 nt, Human
ucucccucccucuuucucc

SEQ ID NO: 805973 - RNA, 22 nt, Human
ucugucugcggcacgccaggga

SEQ ID NO: 805974 - RNA, 18 nt, Human
ugaaaauaaacauuuccu

SEQ ID NO: 805975 - RNA, 24 nt, Human
ugaaaauaaacauuuccuuuuuaa

SEQ ID NO: 805976 - RNA, 18 nt, Human
ugaaucaucaaaagcagg

SEQ ID NO: 805977 - RNA, 21 nt, Human
ugacuuguuccggagggaggu

SEQ ID NO: 805978 - RNA, 19 nt, Human
ugagauagucaggcccagc

SEQ ID NO: 805979 - RNA, 24 nt, Human
ugagaugcugaaaucaaagaauca

SEQ ID NO: 805980 - RNA, 21 nt, Human
ugagcggacgugcagaugggu

SEQ ID NO: 805981 - RNA, 22 nt, Human
ugagcucuuggcucuacuggcu

SEQ ID NO: 805982 - RNA, 23 nt, Human
ugcaggcaccacugccugccucu

SEQ ID NO: 805983 - RNA, 21 nt, Human
ugcccagcccuguacagcugg

SEQ ID NO: 805984 - RNA, 19 nt, Human
ugcccuagacacucucugg

SEQ ID NO: 805985 - RNA, 23 nt, Human
ugccucugaggccucaguggccg

SEQ ID NO: 805986 - RNA, 24 nt, Human
ugccuggguggccccuuaggaguu

SEQ ID NO: 805987 - RNA, 25 nt, Human
ugccuguuuccucaucuguaaugau

SEQ ID NO: 805988 - RNA, 22 nt, Human
ugcucacuccucugcacuuuca

SEQ ID NO: 805989 - RNA, 23 nt, Human
uggaguagggcccaucguccgcc

SEQ ID NO: 805990 - RNA, 19 nt, Human
uggcauggcuggccccgug

SEQ ID NO: 805991 - RNA, 22 nt, Human
uggcauggcuggccccgugcaa

SEQ ID NO: 805992 - RNA, 23 nt, Human
uggcgagagaccccagcugucac

SEQ ID NO: 805993 - RNA, 22 nt, Human
uggcgucuugacuauuuccacc

SEQ ID NO: 805994 - RNA, 21 nt, Human
uggcuuugcugggaggaagug

SEQ ID NO: 805995 - RNA, 21 nt, Human
ugggacaaagacuuagacgag

SEQ ID NO: 805996 - RNA, 24 nt, Human
ugggacaaagacuuagacgagggc

SEQ ID NO: 805997 - RNA, 22 nt, Human
ugggagccaggaucugccuggg

SEQ ID NO: 805998 - RNA, 19 nt, Human
ugggauggacaaacucggg

SEQ ID NO: 805999 - RNA, 21 nt, Human
ugggcccagaaccacagucuc

SEQ ID NO: 806000 - RNA, 23 nt, Human
ugggcccagaaccacagucucaa

SEQ ID NO: 806001 - RNA, 18 nt, Human
ugggggagagggcaggug

SEQ ID NO: 806002 - RNA, 19 nt, Human
uggguuguguucuggugag

SEQ ID NO: 806003 - RNA, 19 nt, Human
uguacagcugggagaucug

SEQ ID NO: 806004 - RNA, 19 nt, Human
uguagcucaccugcccuag

SEQ ID NO: 806005 - RNA, 20 nt, Human
uguggacuugggcaaauuac

SEQ ID NO: 806006 - RNA, 20 nt, Human
uguucgcuauugucuccccu

SEQ ID NO: 806007 - RNA, 18 nt, Human
uguuuggggcagccuucc

SEQ ID NO: 806008 - RNA, 24 nt, Human
uuaacauccaacauguguggguug

SEQ ID NO: 806009 - RNA, 19 nt, Human
uucccaagccgagaggccc

SEQ ID NO: 806010 - RNA, 24 nt, Human
uuccggagggaggugguggugagc

SEQ ID NO: 806011 - RNA, 21 nt, Human
uuccucaucuguaaugauggg

SEQ ID NO: 806012 - RNA, 21 nt, Human
uuccugguggccgagucucua

SEQ ID NO: 806013 - RNA, 22 nt, Human
uucuuaagggaggcuccucugg

SEQ ID NO: 806014 - RNA, 21 nt, Human
uugcccuucucccacuccccc

SEQ ID NO: 806015 - RNA, 23 nt, Human
uugggggagagggcagguggaag

SEQ ID NO: 806016 - RNA, 22 nt, Human
uuucaagucggggaugaaccau

SEQ ID NO: 806017 - RNA, 18 nt, Human
aaaaaaaaaaacacccag

SEQ ID NO: 806018 - RNA, 20 nt, Human
aaaaaaaaaaacacccagaa

SEQ ID NO: 806019 - RNA, 18 nt, Human
aaaaaaaaaacacccaga

SEQ ID NO: 806020 - RNA, 22 nt, Human
aaaaacacccagaaauuuagag

SEQ ID NO: 806021 - RNA, 23 nt, Human
aaaaaccuuaaaauaaauucuaa

SEQ ID NO: 806022 - RNA, 18 nt, Human
aaaaauaaaaacaaagca

SEQ ID NO: 806023 - RNA, 23 nt, Human
aaaaguuuucuucaaguggggaa

SEQ ID NO: 806024 - RNA, 19 nt, Human
aaacagacaugaaauaucc

SEQ ID NO: 806025 - RNA, 21 nt, Human
aaacagacaugaaauauccac

SEQ ID NO: 806026 - RNA, 19 nt, Human
aaacaugcacguaugcucc

SEQ ID NO: 806027 - RNA, 20 nt, Human
aaacuacucuuccucucccc

SEQ ID NO: 806028 - RNA, 21 nt, Human
aaagcagcagacugaaauuca

SEQ ID NO: 806029 - RNA, 19 nt, Human
aaagugcugggauuacagg

SEQ ID NO: 806030 - RNA, 21 nt, Human
aaaguuccaaauaugaaaaca

SEQ ID NO: 806031 - RNA, 24 nt, Human
aaauauccacaucaugaaaaaaua

SEQ ID NO: 806032 - RNA, 26 nt, Human
aacacaacccccucgcuuaagcuacc

SEQ ID NO: 806033 - RNA, 19 nt, Human
aacuggaagacagacagac

SEQ ID NO: 806034 - RNA, 25 nt, Human
aagaaagaaauacacuauaauuaaa

SEQ ID NO: 806035 - RNA, 22 nt, Human
aagacaaagaaauagaagaaaa

SEQ ID NO: 806036 - RNA, 24 nt, Human
aagcaauccaccugccuuggcuuc

SEQ ID NO: 806037 - RNA, 24 nt, Human
aagcagacugcauguauauaugaa

SEQ ID NO: 806038 - RNA, 20 nt, Human
aagcagcagacugaaauuca

SEQ ID NO: 806039 - RNA, 28 nt, Human
aagcccgcagcacaacugcucccagagc

SEQ ID NO: 806040 - RNA, 26 nt, Human
aagcccgcagcacaacugcucccagg

SEQ ID NO: 806041 - RNA, 19 nt, Human
aaguagccucugacucaaa

SEQ ID NO: 806042 - RNA, 18 nt, Human
aagugcugggauuacagg

SEQ ID NO: 806043 - RNA, 19 nt, Human
aagugcugggauuacaggc

SEQ ID NO: 806044 - RNA, 22 nt, Human
aaucucugcucacugcaaucuc

SEQ ID NO: 806045 - RNA, 25 nt, Human
aaugacacuguaaacuguggcaaug

SEQ ID NO: 806046 - RNA, 18 nt, Human
acaaaacaagaaaaagag

SEQ ID NO: 806047 - RNA, 21 nt, Human
acaaaacaagaaaaagaguca

SEQ ID NO: 806048 - RNA, 23 nt, Human
acaaaguuccaaauaugaaaaca

SEQ ID NO: 806049 - RNA, 19 nt, Human
acaacaaaauaaccuacaa

SEQ ID NO: 806050 - RNA, 20 nt, Human
acaaggucaacaaaacggua

SEQ ID NO: 806051 - RNA, 20 nt, Human
acaccauuuuacuuuuaaaa

SEQ ID NO: 806052 - RNA, 22 nt, Human
acacugcacgucccagacagac

SEQ ID NO: 806053 - RNA, 23 nt, Human
acagacaugaaauauccacagca

SEQ ID NO: 806054 - RNA, 18 nt, Human
acagcagcagaaacaaac

SEQ ID NO: 806055 - RNA, 22 nt, Human
acaggcauccacacaaccaaag

SEQ ID NO: 806056 - RNA, 18 nt, Human
acauacacuccccuccuc

SEQ ID NO: 806057 - RNA, 19 nt, Human
acccacaauaucaugcaua

SEQ ID NO: 806058 - RNA, 21 nt, Human
acccagaaauuuagaguucaa

SEQ ID NO: 806059 - RNA, 18 nt, Human
acccauagaaacuccuca

SEQ ID NO: 806060 - RNA, 22 nt, Human
acccugguggaagcagccaucu

SEQ ID NO: 806061 - RNA, 18 nt, Human
acgggguuucgccauguu

SEQ ID NO: 806062 - RNA, 19 nt, Human
acgggguuucgccauguug

SEQ ID NO: 806063 - RNA, 24 nt, Human
acgggguuucgccauguugcucag

SEQ ID NO: 806064 - RNA, 18 nt, Human
acuacacuacaauuaaag

SEQ ID NO: 806065 - RNA, 19 nt, Human
acuacucuuccucucccca

SEQ ID NO: 806066 - RNA, 25 nt, Human
acugccugccaaugucagucauuug

SEQ ID NO: 806067 - RNA, 21 nt, Human
acuuugggguuucacagcagc

SEQ ID NO: 806068 - RNA, 24 nt, Human
agaaaaagagucagcaguacacua

SEQ ID NO: 806069 - RNA, 22 nt, Human
agaagagagaacuucucucugu

SEQ ID NO: 806070 - RNA, 28 nt, Human
agacaaagaaauagaagaaaagggaccc

SEQ ID NO: 806071 - RNA, 21 nt, Human
agacaccucaugggacaaaga

SEQ ID NO: 806072 - RNA, 22 nt, Human
agacagacagacaaacugaauc

SEQ ID NO: 806073 - RNA, 25 nt, Human
agacagacagacaaacugaaucaaa

SEQ ID NO: 806074 - RNA, 22 nt, Human
agagggcagaaacacaccuuug

SEQ ID NO: 806075 - RNA, 25 nt, Human
agaggggaaggacagacagacagac

SEQ ID NO: 806076 - RNA, 23 nt, Human
agcacaacugcucccagagccac

SEQ ID NO: 806077 - RNA, 24 nt, Human
agcacaacugcucccagagccacc

SEQ ID NO: 806078 - RNA, 25 nt, Human
agcacaacugcucccagagccaccc

SEQ ID NO: 806079 - RNA, 19 nt, Human
agcacaugcaacacaaccc

SEQ ID NO: 806080 - RNA, 20 nt, Human
agcacaugcaacacaacccc

SEQ ID NO: 806081 - RNA, 22 nt, Human
aggcaagaccugagugggcagc

SEQ ID NO: 806082 - RNA, 22 nt, Human
aggcugugacacacaagcacca

SEQ ID NO: 806083 - RNA, 21 nt, Human
agguucaagugauucuccugc

SEQ ID NO: 806084 - RNA, 22 nt, Human
agguucaagugauucuccugcc

SEQ ID NO: 806085 - RNA, 23 nt, Human
agguucaagugauucuccugccu

SEQ ID NO: 806086 - RNA, 18 nt, Human
aguaaaagggcccccaaa

SEQ ID NO: 806087 - RNA, 21 nt, Human
agugcaguggcacaaucucug

SEQ ID NO: 806088 - RNA, 18 nt, Human
agugcugggauuacaggc

SEQ ID NO: 806089 - RNA, 21 nt, Human
auagaaacuccucaagagaag

SEQ ID NO: 806090 - RNA, 18 nt, Human
auagaacaacuacacuac

SEQ ID NO: 806091 - RNA, 19 nt, Human
auagaagaaaauauccaca

SEQ ID NO: 806092 - RNA, 25 nt, Human
augcacuuucaagaauggcagacaa

SEQ ID NO: 806093 - RNA, 20 nt, Human
augcaucggcauacucucuu

SEQ ID NO: 806094 - RNA, 23 nt, Human
auguacucaguaaggcauauaua

SEQ ID NO: 806095 - RNA, 24 nt, Human
auuaaaagaucugucuagauaggg

SEQ ID NO: 806096 - RNA, 21 nt, Human
auuuacaagcauuuauuuaca

SEQ ID NO: 806097 - RNA, 22 nt, Human
caaaaacaaugaaaugcaucgg

SEQ ID NO: 806098 - RNA, 23 nt, Human
caaaacaagaaaaagagucagca

SEQ ID NO: 806099 - RNA, 21 nt, Human
caaagaacaagguauacaaaa

SEQ ID NO: 806100 - RNA, 23 nt, Human
caaagacaccucaugggacaaag

SEQ ID NO: 806101 - RNA, 23 nt, Human
caaagugcugggauuacaggcac

SEQ ID NO: 806102 - RNA, 25 nt, Human
caaagugcugggauuacaggcaccu

SEQ ID NO: 806103 - RNA, 24 nt, Human
caacugcaacaggaccaagcuaaa

SEQ ID NO: 806104 - RNA, 21 nt, Human
caagagcaugcugacuuacaa

SEQ ID NO: 806105 - RNA, 22 nt, Human
caagcaagagcaugcugacuua

SEQ ID NO: 806106 - RNA, 19 nt, Human
caagcacaaacuucauuca

SEQ ID NO: 806107 - RNA, 20 nt, Human
caagcacaaacuucauucag

SEQ ID NO: 806108 - RNA, 21 nt, Human
caagcagacugcauguauaua

SEQ ID NO: 806109 - RNA, 22 nt, Human
caagugauucuccugccucagc

SEQ ID NO: 806110 - RNA, 18 nt, Human
cacaauaucaugcauaag

SEQ ID NO: 806111 - RNA, 19 nt, Human
cacacaagcaccacaccgg

SEQ ID NO: 806112 - RNA, 21 nt, Human
cacacaagcaccacaccggcu

SEQ ID NO: 806113 - RNA, 21 nt, Human
cacacacaucacacacaacca

SEQ ID NO: 806114 - RNA, 22 nt, Human
cacacaucacacacaaccagau

SEQ ID NO: 806115 - RNA, 19 nt, Human
cacagcagcagaaacaaac

SEQ ID NO: 806116 - RNA, 21 nt, Human
cacagcagcagaaacaaacau

SEQ ID NO: 806117 - RNA, 18 nt, Human
cacagcauuaagguaccc

SEQ ID NO: 806118 - RNA, 25 nt, Human
cacaugcaacacaacccccucgcuu

SEQ ID NO: 806119 - RNA, 18 nt, Human
caccaccaaauuaaauga

SEQ ID NO: 806120 - RNA, 19 nt, Human
caccaccaaauuaaaugaa

SEQ ID NO: 806121 - RNA, 22 nt, Human
caccaccaccaaauuaaaugaa

SEQ ID NO: 806122 - RNA, 19 nt, Human
cacccugaaaaaagaagag

SEQ ID NO: 806123 - RNA, 20 nt, Human
cacccugaaaaaagaagaga

SEQ ID NO: 806124 - RNA, 23 nt, Human
caccugccuuggcuucccaaagu

SEQ ID NO: 806125 - RNA, 24 nt, Human
caccugccuuggcuucccaaagug

SEQ ID NO: 806126 - RNA, 22 nt, Human
cacucuggcuggagugcagugg

SEQ ID NO: 806127 - RNA, 23 nt, Human
cacugauacagauaaugcaaaaa

SEQ ID NO: 806128 - RNA, 23 nt, Human
cacuguaugcuggggagaaaggc

SEQ ID NO: 806129 - RNA, 23 nt, Human
cacuuaggaaacuuucaaauuca

SEQ ID NO: 806130 - RNA, 21 nt, Human
cagacagaccaaugacuaaua

SEQ ID NO: 806131 - RNA, 18 nt, Human
cagacgggguuucgccau

SEQ ID NO: 806132 - RNA, 25 nt, Human
cagcaccucacccugaaaaaagaag

SEQ ID NO: 806133 - RNA, 19 nt, Human
cagcagaaacaaacauaaa

SEQ ID NO: 806134 - RNA, 24 nt, Human
cagcagaaacacaauacgagccuc

SEQ ID NO: 806135 - RNA, 18 nt, Human
cagcagcagaaacaaaca

SEQ ID NO: 806136 - RNA, 27 nt, Human
cagcagcagaaacaaacauaaauccag

SEQ ID NO: 806137 - RNA, 24 nt, Human
cagcauuaagguacccuauagcca

SEQ ID NO: 806138 - RNA, 18 nt, Human
cagcauuagcauucucua

SEQ ID NO: 806139 - RNA, 25 nt, Human
cagcuaacuuacuaaaguuauucac

SEQ ID NO: 806140 - RNA, 18 nt, Human
caggaaccugcagcugaa

SEQ ID NO: 806141 - RNA, 25 nt, Human
caguaacugggauuacaggcacaug

SEQ ID NO: 806142 - RNA, 24 nt, Human
cauaaucaauacucuuuugguacc

SEQ ID NO: 806143 - RNA, 23 nt, Human
cauacacacacaucacacacaac

SEQ ID NO: 806144 - RNA, 28 nt, Human
cauacacacacaucacacacaaccagau

SEQ ID NO: 806145 - RNA, 22 nt, Human
cauauacccuacaauaacugcc

SEQ ID NO: 806146 - RNA, 23 nt, Human
caugcagaugaacuccacaugaa

SEQ ID NO: 806147 - RNA, 23 nt, Human
cauguuaacauuaaagggggcau

SEQ ID NO: 806148 - RNA, 24 nt, Human
cauguugcucagguuggugucgaa

SEQ ID NO: 806149 - RNA, 22 nt, Human
cauuacauguagcuaggucuuu

SEQ ID NO: 806150 - RNA, 20 nt, Human
cauuccaaaugcauuuugac

SEQ ID NO: 806151 - RNA, 22 nt, Human
ccaaaagagggcagaaacacac

SEQ ID NO: 806152 - RNA, 19 nt, Human
ccaaagugcugggauuaca

SEQ ID NO: 806153 - RNA, 23 nt, Human
ccaaagugcugggauuacaggca

SEQ ID NO: 806154 - RNA, 22 nt, Human
ccaacaaauccaauucccacag

SEQ ID NO: 806155 - RNA, 24 nt, Human
ccagagccacccucuggccagaaa

SEQ ID NO: 806156 - RNA, 18 nt, Human
ccaggugaagaacgaaga

SEQ ID NO: 806157 - RNA, 22 nt, Human
ccaguaacugggauuacaggca

SEQ ID NO: 806158 - RNA, 19 nt, Human
cccaaagaaagauuauuac

SEQ ID NO: 806159 - RNA, 24 nt, Human
cccaaagugcugggauuacaggca

SEQ ID NO: 806160 - RNA, 23 nt, Human
cccagguucaagugauucuccuc

SEQ ID NO: 806161 - RNA, 23 nt, Human
cccagguucaagugauucuccug

SEQ ID NO: 806162 - RNA, 23 nt, Human
cccaguaacugggauuacaggca

SEQ ID NO: 806163 - RNA, 22 nt, Human
ccccaaaaggcagcucacugua

SEQ ID NO: 806164 - RNA, 18 nt, Human
ccccaaaauauucugcuu

SEQ ID NO: 806165 - RNA, 23 nt, Human
cccccaaacuauaggacgugacc

SEQ ID NO: 806166 - RNA, 21 nt, Human
ccccuggcacguucccagucc

SEQ ID NO: 806167 - RNA, 19 nt, Human
ccuaaaccacaaucagcau

SEQ ID NO: 806168 - RNA, 22 nt, Human
ccuacaaucagagcucacaggc

SEQ ID NO: 806169 - RNA, 22 nt, Human
ccucuggccagaaacgggcccc

SEQ ID NO: 806170 - RNA, 19 nt, Human
ccucuggccuagcuaaggc

SEQ ID NO: 806171 - RNA, 21 nt, Human
ccugggcucaagcaauccacc

SEQ ID NO: 806172 - RNA, 23 nt, Human
ccugggcucaagcaauccaccug

SEQ ID NO: 806173 - RNA, 24 nt, Human
cgggguuucgccauguugcucagg

SEQ ID NO: 806174 - RNA, 24 nt, Human
cgugauuaaccauauacccuacaa

SEQ ID NO: 806175 - RNA, 21 nt, Human
cguucccaguccuugacuagu

SEQ ID NO: 806176 - RNA, 19 nt, Human
cuaaaccacaaucagcauu

SEQ ID NO: 806177 - RNA, 20 nt, Human
cucaagcaauccaccugccu

SEQ ID NO: 806178 - RNA, 24 nt, Human
cucaagcaauccaccugccuuggc

SEQ ID NO: 806179 - RNA, 20 nt, Human
cucaugggacaaagaaaauu

SEQ ID NO: 806180 - RNA, 18 nt, Human
cucccagagccacccucu

SEQ ID NO: 806181 - RNA, 19 nt, Human
cucccagagccacccucug

SEQ ID NO: 806182 - RNA, 19 nt, Human
cucccagguucaagugauu

SEQ ID NO: 806183 - RNA, 19 nt, Human
cucccggcuacaaggcugu

SEQ ID NO: 806184 - RNA, 30 nt, Human
cucuacacaacaaaugggggcucucaagaa

SEQ ID NO: 806185 - RNA, 20 nt, Human
cucuggagagaaagaccaug

SEQ ID NO: 806186 - RNA, 22 nt, Human
cugaaaggcaacaguaauuuaa

SEQ ID NO: 806187 - RNA, 21 nt, Human
cugagugggcagccucugucc

SEQ ID NO: 806188 - RNA, 20 nt, Human
cugaguguuaucaguguucu

SEQ ID NO: 806189 - RNA, 21 nt, Human
cugcaacaguuagaguucucc

SEQ ID NO: 806190 - RNA, 22 nt, Human
cugccucagccuccccaguaac

SEQ ID NO: 806191 - RNA, 24 nt, Human
cugcucccagagccacccucuggc

SEQ ID NO: 806192 - RNA, 23 nt, Human
cuguaacauccuaaaccacaauc

SEQ ID NO: 806193 - RNA, 18 nt, Human
cugucacucuggcuggag

SEQ ID NO: 806194 - RNA, 24 nt, Human
cuuacaaagacaccucaugggacc

SEQ ID NO: 806195 - RNA, 22 nt, Human
cuuuaaaaaaaaaaacacccag

SEQ ID NO: 806196 - RNA, 22 nt, Human
cuuucuaagaaugauucucugg

SEQ ID NO: 806197 - RNA, 18 nt, Human
gaaacacugauacagaua

SEQ ID NO: 806198 - RNA, 18 nt, Human
gaagaggaagaauuacaa

SEQ ID NO: 806199 - RNA, 20 nt, Human
gacacuucuuacagguguau

SEQ ID NO: 806200 - RNA, 20 nt, Human
gaggggacugggggaaggcg

SEQ ID NO: 806201 - RNA, 24 nt, Human
gauuacaggcacaugccaccaugc

SEQ ID NO: 806202 - RNA, 21 nt, Human
gauucuccugccucagccucc

SEQ ID NO: 806203 - RNA, 24 nt, Human
gcaacaguuagaguucucccccag

SEQ ID NO: 806204 - RNA, 24 nt, Human
gcaauccaccugccuuggcuuccc

SEQ ID NO: 806205 - RNA, 22 nt, Human
gcaaucuccaucucccagguuc

SEQ ID NO: 806206 - RNA, 23 nt, Human
gccacaugcagaugaacuccaca

SEQ ID NO: 806207 - RNA, 21 nt, Human
gcccaaagaaagauuauuaca

SEQ ID NO: 806208 - RNA, 24 nt, Human
gcccagcuaauuuuuuuguauuuu

SEQ ID NO: 806209 - RNA, 19 nt, Human
gcccgcagcacaacugcuc

SEQ ID NO: 806210 - RNA, 22 nt, Human
gccuuggcuucccaaagugcug

SEQ ID NO: 806211 - RNA, 24 nt, Human
gccuuggcuucccaaagugcuggg

SEQ ID NO: 806212 - RNA, 25 nt, Human
gcuggagugcaguggcacaaucucu

SEQ ID NO: 806213 - RNA, 22 nt, Human
ggaaacaagucauaaaguacag

SEQ ID NO: 806214 - RNA, 23 nt, Human
ggaaggacagacagacagacaaa

SEQ ID NO: 806215 - RNA, 19 nt, Human
ggacugggggaaggcgggc

SEQ ID NO: 806216 - RNA, 23 nt, Human
gggaaacaagucauaaaguacag

SEQ ID NO: 806217 - RNA, 23 nt, Human
gggcaaggauggcaaagacuggg

SEQ ID NO: 806218 - RNA, 20 nt, Human
ggggacccaaagucaaaagu

SEQ ID NO: 806219 - RNA, 23 nt, Human
gggguuucgccauguugcucagg

SEQ ID NO: 806220 - RNA, 22 nt, Human
ggguuucgccauguugcucagg

SEQ ID NO: 806221 - RNA, 19 nt, Human
gguccaaaauuucccaagu

SEQ ID NO: 806222 - RNA, 23 nt, Human
ggugaaggugacuuauuuuuauc

SEQ ID NO: 806223 - RNA, 18 nt, Human
guaaaccucagaaauuac

SEQ ID NO: 806224 - RNA, 22 nt, Human
guauauaugaauauaucauaca

SEQ ID NO: 806225 - RNA, 24 nt, Human
gugauucuccugccucagccuccc

SEQ ID NO: 806226 - RNA, 20 nt, Human
guucccaguccuugacuagu

SEQ ID NO: 806227 - RNA, 19 nt, Human
uaaaacugacuauggcauc

SEQ ID NO: 806228 - RNA, 20 nt, Human
uaaaacugacuauggcauca

SEQ ID NO: 806229 - RNA, 24 nt, Human
uaaaagggcccccaaacuauagga

SEQ ID NO: 806230 - RNA, 24 nt, Human
uaaaaguauauguggcaccuucca

SEQ ID NO: 806231 - RNA, 18 nt, Human
uaaaaugaguauagaacc

SEQ ID NO: 806232 - RNA, 24 nt, Human
uaaaauguccagagcaucauacgu

SEQ ID NO: 806233 - RNA, 26 nt, Human
uaaacucuaucaauuaccuauucgug

SEQ ID NO: 806234 - RNA, 18 nt, Human
uaaaguacagcacaaaac

SEQ ID NO: 806235 - RNA, 23 nt, Human
uaaauucuaauuuuaauugcuac

SEQ ID NO: 806236 - RNA, 20 nt, Human
uaacaaacaugggaucacua

SEQ ID NO: 806237 - RNA, 18 nt, Human
uaacaggcuccuucuaca

SEQ ID NO: 806238 - RNA, 22 nt, Human
uaacaugaugguauuaguacug

SEQ ID NO: 806239 - RNA, 21 nt, Human
uaacucuagacauacacuccc

SEQ ID NO: 806240 - RNA, 19 nt, Human
uaagacuaagacccauaaa

SEQ ID NO: 806241 - RNA, 24 nt, Human
uaagguacccuauagccaucaucc

SEQ ID NO: 806242 - RNA, 18 nt, Human
uaauacagauuaaucuca

SEQ ID NO: 806243 - RNA, 25 nt, Human
uacaagguacuuuuaucugcauucc

SEQ ID NO: 806244 - RNA, 23 nt, Human
uacaaucagagcucacaggcacc

SEQ ID NO: 806245 - RNA, 22 nt, Human
uacacuaaagauccucaaguau

SEQ ID NO: 806246 - RNA, 22 nt, Human
uacagacgggguuucgccaugu

SEQ ID NO: 806247 - RNA, 24 nt, Human
uacaggcacaugccaccaugccca

SEQ ID NO: 806248 - RNA, 18 nt, Human
uaccauaaccuaaaaaga

SEQ ID NO: 806249 - RNA, 26 nt, Human
uaccauaaccuaaaaagacacuucuu

SEQ ID NO: 806250 - RNA, 18 nt, Human
uaccauaggacugggacu

SEQ ID NO: 806251 - RNA, 19 nt, Human
uacccauagaaacuccuca

SEQ ID NO: 806252 - RNA, 19 nt, Human
uacccuauagccaucaucc

SEQ ID NO: 806253 - RNA, 21 nt, Human
uacuccaagucauguuaacau

SEQ ID NO: 806254 - RNA, 22 nt, Human
uacuguacaaggucaagaaagc

SEQ ID NO: 806255 - RNA, 24 nt, Human
uacuuuuaaaacugucacuuuaaa

SEQ ID NO: 806256 - RNA, 21 nt, Human
uagaaccaugaguuagugccg

SEQ ID NO: 806257 - RNA, 18 nt, Human
uagcaugcaggcuuaaaa

SEQ ID NO: 806258 - RNA, 21 nt, Human
uagccucugacucaaacaccu

SEQ ID NO: 806259 - RNA, 19 nt, Human
uagcuaggucuuuaucucc

SEQ ID NO: 806260 - RNA, 24 nt, Human
uauaucauacauacauauguagug

SEQ ID NO: 806261 - RNA, 26 nt, Human
uauaucucuacacaacaaaugggggc

SEQ ID NO: 806262 - RNA, 25 nt, Human
uaucaaaaguuuucuucaagugggg

SEQ ID NO: 806263 - RNA, 21 nt, Human
uaucuaaacaacaaaauaacc

SEQ ID NO: 806264 - RNA, 25 nt, Human
uaucuaaacaacaaaauaaccuaca

SEQ ID NO: 806265 - RNA, 18 nt, Human
uaugcaaaucacgugggu

SEQ ID NO: 806266 - RNA, 24 nt, Human
uauguaucauuccugcuguccaag

SEQ ID NO: 806267 - RNA, 24 nt, Human
uauuacaaaguuccaaauaugaaa

SEQ ID NO: 806268 - RNA, 24 nt, Human
uauuacagacgggguuucgccaug

SEQ ID NO: 806269 - RNA, 26 nt, Human
uauuauuauuuuuugagauggagucu

SEQ ID NO: 806270 - RNA, 20 nt, Human
uauucugcauccauuucuca

SEQ ID NO: 806271 - RNA, 20 nt, Human
uauugugagcagucucaauu

SEQ ID NO: 806272 - RNA, 19 nt, Human
ucaaagucuaaugcugaaa

SEQ ID NO: 806273 - RNA, 20 nt, Human
ucaagauaaggccacucuga

SEQ ID NO: 806274 - RNA, 19 nt, Human
ucaagugauucuccugccu

SEQ ID NO: 806275 - RNA, 24 nt, Human
ucaauaaaggaaaaucagaaauuu

SEQ ID NO: 806276 - RNA, 24 nt, Human
ucacugcaaucuccaucucccagg

SEQ ID NO: 806277 - RNA, 25 nt, Human
ucacugcaaucuccaucucccaggg

SEQ ID NO: 806278 - RNA, 22 nt, Human
ucagaacacuacagaaagccaa

SEQ ID NO: 806279 - RNA, 23 nt, Human
ucagaacacuacagaaagccaac

SEQ ID NO: 806280 - RNA, 22 nt, Human
ucaggggaaagagaaaccagua

SEQ ID NO: 806281 - RNA, 20 nt, Human
ucagucauuuguaccacugu

SEQ ID NO: 806282 - RNA, 24 nt, Human
ucauuugagaacaaaagccauuuu

SEQ ID NO: 806283 - RNA, 23 nt, Human
uccaaguggauuuuccuagagac

SEQ ID NO: 806284 - RNA, 21 nt, Human
uccacacaaccaaagauuucu

SEQ ID NO: 806285 - RNA, 24 nt, Human
uccacaucaugaaaaaauaugguu

SEQ ID NO: 806286 - RNA, 21 nt, Human
uccauaauaaagagagcuaga

SEQ ID NO: 806287 - RNA, 19 nt, Human
ucccaaagcucaggcucca

SEQ ID NO: 806288 - RNA, 24 nt, Human
ucccaaagugcugggauuacaggc

SEQ ID NO: 806289 - RNA, 21 nt, Human
ucccagguucaagugauucuc

SEQ ID NO: 806290 - RNA, 24 nt, Human
ucccagguucaagugauucuccug

SEQ ID NO: 806291 - RNA, 24 nt, Human
uccccaguaacugggauuacaggc

SEQ ID NO: 806292 - RNA, 19 nt, Human
ucccuucuucccuuuaaag

SEQ ID NO: 806293 - RNA, 18 nt, Human
uccugggcucaagcaauc

SEQ ID NO: 806294 - RNA, 19 nt, Human
uccugggcucaagcaaucc

SEQ ID NO: 806295 - RNA, 24 nt, Human
uccugggcucaagcaauccaccug

SEQ ID NO: 806296 - RNA, 22 nt, Human
ucgccauguugcucagguuggu

SEQ ID NO: 806297 - RNA, 20 nt, Human
ucuaagcacaugcaacacaa

SEQ ID NO: 806298 - RNA, 21 nt, Human
ucuacacaacaaaugggggcu

SEQ ID NO: 806299 - RNA, 19 nt, Human
ucucccagguucaagugau

SEQ ID NO: 806300 - RNA, 24 nt, Human
ucucccagguucaagugauucucc

SEQ ID NO: 806301 - RNA, 25 nt, Human
ucuccugccucagccuccccaguaa

SEQ ID NO: 806302 - RNA, 22 nt, Human
ucucuggagagaaagaccaugu

SEQ ID NO: 806303 - RNA, 22 nt, Human
ucucuuaucauuugagaacaaa

SEQ ID NO: 806304 - RNA, 24 nt, Human
ucugucacucuggcuggagugcag

SEQ ID NO: 806305 - RNA, 19 nt, Human
ucuugcagaauuauaacag

SEQ ID NO: 806306 - RNA, 24 nt, Human
ucuugcucugucacucuggcugga

SEQ ID NO: 806307 - RNA, 23 nt, Human
ucuuuaucuccugaaugcuccuc

SEQ ID NO: 806308 - RNA, 18 nt, Human
ugaaaaaagaagagaggg

SEQ ID NO: 806309 - RNA, 21 nt, Human
ugaaaaaagaagagaggggaa

SEQ ID NO: 806310 - RNA, 24 nt, Human
ugaaaaauaaaagaaaaucagcaa

SEQ ID NO: 806311 - RNA, 19 nt, Human
ugaaagggcaaggcuucca

SEQ ID NO: 806312 - RNA, 26 nt, Human
ugaaauuccuaacuccaauuuauauu

SEQ ID NO: 806313 - RNA, 23 nt, Human
ugaacacaggcauccacacaacc

SEQ ID NO: 806314 - RNA, 19 nt, Human
ugaagaacgaagaggaagg

SEQ ID NO: 806315 - RNA, 24 nt, Human
ugaauggucuguggaagaccagaa

SEQ ID NO: 806316 - RNA, 20 nt, Human
ugacacuguaaacuguggca

SEQ ID NO: 806317 - RNA, 20 nt, Human
ugacaucaaguacuaacuau

SEQ ID NO: 806318 - RNA, 24 nt, Human
ugaccauuuugcugauaaucaagc

SEQ ID NO: 806319 - RNA, 22 nt, Human
ugagauggagucuugcucuguc

SEQ ID NO: 806320 - RNA, 20 nt, Human
ugauucuccugccucagccu

SEQ ID NO: 806321 - RNA, 20 nt, Human
ugauuuggccaugauuccuc

SEQ ID NO: 806322 - RNA, 22 nt, Human
ugcauuauucugcauccauuuc

SEQ ID NO: 806323 - RNA, 24 nt, Human
ugccucagccuccccaguaacugg

SEQ ID NO: 806324 - RNA, 19 nt, Human
ugccuuggcuucccaaagu

SEQ ID NO: 806325 - RNA, 20 nt, Human
ugcuauaucucuacacaaca

SEQ ID NO: 806326 - RNA, 24 nt, Human
ugcucagguuggugucgaacuccu

SEQ ID NO: 806327 - RNA, 24 nt, Human
ugcucugucacucuggcuggagug

SEQ ID NO: 806328 - RNA, 21 nt, Human
ugcugggauuacaggcaccug

SEQ ID NO: 806329 - RNA, 20 nt, Human
ugcuuccaauuucaacacag

SEQ ID NO: 806330 - RNA, 22 nt, Human
uggaagcaagguacauuccaaa

SEQ ID NO: 806331 - RNA, 26 nt, Human
uggaaugaaguccugcuucagcugcu

SEQ ID NO: 806332 - RNA, 22 nt, Human
uggaggggacugggggaaggcg

SEQ ID NO: 806333 - RNA, 19 nt, Human
uggagucuugcucugucac

SEQ ID NO: 806334 - RNA, 18 nt, Human
uggagugcaguggcacaa

SEQ ID NO: 806335 - RNA, 22 nt, Human
uggagugcaguggcacaaucuc

SEQ ID NO: 806336 - RNA, 19 nt, Human
uggcaacaucuaggggcaa

SEQ ID NO: 806337 - RNA, 24 nt, Human
uggcacaaucucugcucacugcaa

SEQ ID NO: 806338 - RNA, 22 nt, Human
uggcacauuuuugaaaugauca

SEQ ID NO: 806339 - RNA, 18 nt, Human
uggcaugacauaaaugca

SEQ ID NO: 806340 - RNA, 25 nt, Human
uggccuagcuaaggcacucuauucu

SEQ ID NO: 806341 - RNA, 23 nt, Human
uggcuggagugcaguggcacaau

SEQ ID NO: 806342 - RNA, 20 nt, Human
ugggauccuggccuuucuaa

SEQ ID NO: 806343 - RNA, 21 nt, Human
ugggauuacaggcacaugcca

SEQ ID NO: 806344 - RNA, 22 nt, Human
ugggauuacaggcacaugccac

SEQ ID NO: 806345 - RNA, 24 nt, Human
ugggauuacaggcacaugccacca

SEQ ID NO: 806346 - RNA, 25 nt, Human
ugggauuacaggcacaugccaccau

SEQ ID NO: 806347 - RNA, 19 nt, Human
ugggauuacaggcaccugc

SEQ ID NO: 806348 - RNA, 23 nt, Human
ugggauuacaggcaccugcccca

SEQ ID NO: 806349 - RNA, 21 nt, Human
uggggaaauggacaagcugga

SEQ ID NO: 806350 - RNA, 20 nt, Human
uggggacccaaagucaaaag

SEQ ID NO: 806351 - RNA, 23 nt, Human
uggggacccaaagucaaaaguuc

SEQ ID NO: 806352 - RNA, 22 nt, Human
uggggcaugaagucacccacaa

SEQ ID NO: 806353 - RNA, 20 nt, Human
ugguggaagcagccaucuuu

SEQ ID NO: 806354 - RNA, 24 nt, Human
uguacaucacauuaucugacacuu

SEQ ID NO: 806355 - RNA, 19 nt, Human
ugucaguaaaccucagaaa

SEQ ID NO: 806356 - RNA, 20 nt, Human
ugucaguaaaccucagaaau

SEQ ID NO: 806357 - RNA, 21 nt, Human
ugucgaacuccugggcucaag

SEQ ID NO: 806358 - RNA, 19 nt, Human
uguuuauuuuuauuauuau

SEQ ID NO: 806359 - RNA, 21 nt, Human
uuaaaaaaaaaaacacccaga

SEQ ID NO: 806360 - RNA, 22 nt, Human
uuaacaaacaugggaucacuau

SEQ ID NO: 806361 - RNA, 21 nt, Human
uuaagacuaagacccauaaac

SEQ ID NO: 806362 - RNA, 22 nt, Human
uuacauaaucaauaaaggaaaa

SEQ ID NO: 806363 - RNA, 23 nt, Human
uuacauaucaacacaguggugcc

SEQ ID NO: 806364 - RNA, 24 nt, Human
uuagaauuaaaaguauuucaauaa

SEQ ID NO: 806365 - RNA, 24 nt, Human
uuauuacagacgggguuucgccau

SEQ ID NO: 806366 - RNA, 21 nt, Human
uucaagugauucuccugccuc

SEQ ID NO: 806367 - RNA, 23 nt, Human
uucaagugauucuccugccucag

SEQ ID NO: 806368 - RNA, 24 nt, Human
uucaagugauucuccugccucagc

SEQ ID NO: 806369 - RNA, 18 nt, Human
uucagaguaagggccaca

SEQ ID NO: 806370 - RNA, 23 nt, Human
uucauucaagcacaaacuucauu

SEQ ID NO: 806371 - RNA, 21 nt, Human
uuccaaauaugaaaacacacu

SEQ ID NO: 806372 - RNA, 19 nt, Human
uuccaggucaagaacuuac

SEQ ID NO: 806373 - RNA, 21 nt, Human
uuccuggaagguucuaaugcu

SEQ ID NO: 806374 - RNA, 25 nt, Human
uucuauagaguacuuaaauccagaa

SEQ ID NO: 806375 - RNA, 18 nt, Human
uucucaaauucucaacug

SEQ ID NO: 806376 - RNA, 19 nt, Human
uucuucauaggucauagag

SEQ ID NO: 806377 - RNA, 20 nt, Human
uugaaagggcaaggcuucca

SEQ ID NO: 806378 - RNA, 22 nt, Human
uugacugacuauaaaauaaacc

SEQ ID NO: 806379 - RNA, 21 nt, Human
uugagauggagucuugcucug

SEQ ID NO: 806380 - RNA, 19 nt, Human
uuguuuacuaaagagcaaa

SEQ ID NO: 806381 - RNA, 25 nt, Human
uuuacuuuuauuacaauaaauaauu

SEQ ID NO: 806382 - RNA, 20 nt, Human
uuuaucccaugccccccuca

SEQ ID NO: 806383 - RNA, 24 nt, Human
uuuaucccaugccccccucaaaua

SEQ ID NO: 806384 - RNA, 19 nt, Human
uuucgccauguugcucagg

SEQ ID NO: 806385 - RNA, 20 nt, Human
uuucuaagaaugauucucug

SEQ ID NO: 806386 - RNA, 23 nt, Human
uuuuuauuacagacgggguuucg

SEQ ID NO: 806387 - RNA, 21 nt, Human
uuuuuuguauuuuuauuacag

SEQ ID NO: 806388 - RNA, 24 nt, Human
uuuuuuguauuuuuauuacagacg

SEQ ID NO: 806389 - RNA, 25 nt, Human
aaaaaacaauaaacauuguuaaaac

SEQ ID NO: 806390 - RNA, 22 nt, Human
aaaaagacagacauauuaaaaa

SEQ ID NO: 806391 - RNA, 28 nt, Human
aaaaagacagacauauuaaaaauacagg

SEQ ID NO: 806392 - RNA, 22 nt, Human
aaaaaggaaauguuaaaaaaaa

SEQ ID NO: 806393 - RNA, 20 nt, Human
aaaacaaaaagacagacaua

SEQ ID NO: 806394 - RNA, 24 nt, Human
aaaauuuggcgaauguucaaauaa

SEQ ID NO: 806395 - RNA, 23 nt, Human
aaacaaaaagacagacauauuaa

SEQ ID NO: 806396 - RNA, 19 nt, Human
aaacagguaagaaaacuca

SEQ ID NO: 806397 - RNA, 23 nt, Human
aaaccaaacauacuuuaaaguaa

SEQ ID NO: 806398 - RNA, 19 nt, Human
aaacuccaguuuuguuugg

SEQ ID NO: 806399 - RNA, 22 nt, Human
aaagaagcccacuuuccccaaa

SEQ ID NO: 806400 - RNA, 24 nt, Human
aaaggaaauguuaaaaaaaaaaag

SEQ ID NO: 806401 - RNA, 22 nt, Human
aaaugcagccaaaauguaucug

SEQ ID NO: 806402 - RNA, 25 nt, Human
aacaauuucacaugcgaguaggguu

SEQ ID NO: 806403 - RNA, 24 nt, Human
aacacauaaacccaccucaggcca

SEQ ID NO: 806404 - RNA, 19 nt, Human
aacaggcccccccaagaaa

SEQ ID NO: 806405 - RNA, 21 nt, Human
aacuccaguuuuguuugguau

SEQ ID NO: 806406 - RNA, 23 nt, Human
aagauuugguuagagagaaaguu

SEQ ID NO: 806407 - RNA, 19 nt, Human
aagcaaaaccuacauguau

SEQ ID NO: 806408 - RNA, 19 nt, Human
aagcucuaaccuguaacag

SEQ ID NO: 806409 - RNA, 20 nt, Human
aaggaggagauacuaagggc

SEQ ID NO: 806410 - RNA, 22 nt, Human
aauaccaagaauaaaaccagug

SEQ ID NO: 806411 - RNA, 19 nt, Human
aauaucccuuacuaauacu

SEQ ID NO: 806412 - RNA, 19 nt, Human
aaucauaguuacauacuug

SEQ ID NO: 806413 - RNA, 22 nt, Human
aauccuacuucgugcaacacac

SEQ ID NO: 806414 - RNA, 18 nt, Human
aauugauagacaaacacc

SEQ ID NO: 806415 - RNA, 19 nt, Human
acaaaacaaggauaaaaag

SEQ ID NO: 806416 - RNA, 20 nt, Human
acaaaacaaggauaaaaagu

SEQ ID NO: 806417 - RNA, 22 nt, Human
acaaagaagcccacuuucccca

SEQ ID NO: 806418 - RNA, 24 nt, Human
acaacugucugccacugacugcaa

SEQ ID NO: 806419 - RNA, 30 nt, Human
acaagacugaaaacgucuguaucccaugcc

SEQ ID NO: 806420 - RNA, 19 nt, Human
acaagcugaaccuguucuu

SEQ ID NO: 806421 - RNA, 23 nt, Human
acacacacacacacacacacaca

SEQ ID NO: 806422 - RNA, 23 nt, Human
acacacacacacacacacacaca

SEQ ID NO: 806423 - RNA, 23 nt, Human
acacacacacacacacacacaca

SEQ ID NO: 806424 - RNA, 23 nt, Human
acacacacacacacacacacaca

SEQ ID NO: 806425 - RNA, 23 nt, Human
acacacacacacacacacacaca

SEQ ID NO: 806426 - RNA, 23 nt, Human
acacacacacacacacacacaca

SEQ ID NO: 806427 - RNA, 24 nt, Human
acacacacacacacacacacccag

SEQ ID NO: 806428 - RNA, 24 nt, Human
acacacacacacacacacccagag

SEQ ID NO: 806429 - RNA, 24 nt, Human
acagaaaaaaaaauccaaacaaaa

SEQ ID NO: 806430 - RNA, 24 nt, Human
acagaauggccagaaaacuguaug

SEQ ID NO: 806431 - RNA, 23 nt, Human
acauaaacccaccucaggccagc

SEQ ID NO: 806432 - RNA, 18 nt, Human
acauaugaucauaugaag

SEQ ID NO: 806433 - RNA, 23 nt, Human
accauuuacaacuccuccaucac

SEQ ID NO: 806434 - RNA, 25 nt, Human
acuaagacacagagacaacagacug

SEQ ID NO: 806435 - RNA, 23 nt, Human
acuaguuuaucagaugguugcac

SEQ ID NO: 806436 - RNA, 23 nt, Human
agaaaaaaaaauccaaacaaaaa

SEQ ID NO: 806437 - RNA, 21 nt, Human
agaaaaacaaaccagcauaag

SEQ ID NO: 806438 - RNA, 23 nt, Human
agaauagccagggcaucuaagca

SEQ ID NO: 806439 - RNA, 22 nt, Human
agacaacagacuggcuaguuac

SEQ ID NO: 806440 - RNA, 18 nt, Human
agacaccacucagaaugg

SEQ ID NO: 806441 - RNA, 19 nt, Human
agagggaaaacagcuugag

SEQ ID NO: 806442 - RNA, 18 nt, Human
agaugagugccacacuca

SEQ ID NO: 806443 - RNA, 20 nt, Human
agccacugaaugcaggcaaa

SEQ ID NO: 806444 - RNA, 22 nt, Human
agcuaaagaguauguuaaauau

SEQ ID NO: 806445 - RNA, 20 nt, Human
agcuuuaaaaaggaaauguu

SEQ ID NO: 806446 - RNA, 25 nt, Human
aggaaaaacaaaguaaccacuuaaa

SEQ ID NO: 806447 - RNA, 21 nt, Human
aggaaaauggaaaauauacaa

SEQ ID NO: 806448 - RNA, 23 nt, Human
agggagaccugcagagcugucug

SEQ ID NO: 806449 - RNA, 24 nt, Human
agucaagugaugucaaucacacaa

SEQ ID NO: 806450 - RNA, 19 nt, Human
agugcaguaucaagaaaug

SEQ ID NO: 806451 - RNA, 19 nt, Human
auaaaauacucuucaguua

SEQ ID NO: 806452 - RNA, 19 nt, Human
auagcacaaagaagcccac

SEQ ID NO: 806453 - RNA, 18 nt, Human
auaguuaaaaagauacaa

SEQ ID NO: 806454 - RNA, 18 nt, Human
aucauucaccaaggacag

SEQ ID NO: 806455 - RNA, 27 nt, Human
augaaaaccaaacauacuuuaaaguaa

SEQ ID NO: 806456 - RNA, 20 nt, Human
augaugccauaugagaucaa

SEQ ID NO: 806457 - RNA, 22 nt, Human
auuacagaaauacacagaacag

SEQ ID NO: 806458 - RNA, 25 nt, Human
auuacagaaauacacagaacagagg

SEQ ID NO: 806459 - RNA, 19 nt, Human
auucaccacuagcaaaacc

SEQ ID NO: 806460 - RNA, 21 nt, Human
caaaaagacagacauauuaaa

SEQ ID NO: 806461 - RNA, 20 nt, Human
caaaacacacacacacacac

SEQ ID NO: 806462 - RNA, 23 nt, Human
caaaaccaauggaaaaauguaac

SEQ ID NO: 806463 - RNA, 21 nt, Human
caaaauaucauugauuaaagc

SEQ ID NO: 806464 - RNA, 24 nt, Human
caaaauguaucuguggcuaauuaa

SEQ ID NO: 806465 - RNA, 21 nt, Human
caaaguaaccacuuaaaaaac

SEQ ID NO: 806466 - RNA, 20 nt, Human
caaauacauauuuguguaua

SEQ ID NO: 806467 - RNA, 19 nt, Human
caacagcaauaauugugua

SEQ ID NO: 806468 - RNA, 20 nt, Human
caacaggaguaauaauuaag

SEQ ID NO: 806469 - RNA, 22 nt, Human
caacuccuccaucaccauuucu

SEQ ID NO: 806470 - RNA, 18 nt, Human
caagaaauguugcauaac

SEQ ID NO: 806471 - RNA, 22 nt, Human
caagaagcacaucauagcugga

SEQ ID NO: 806472 - RNA, 21 nt, Human
caauaaaaugggugcaccaca

SEQ ID NO: 806473 - RNA, 22 nt, Human
cacaaugcucauaauguuagcc

SEQ ID NO: 806474 - RNA, 20 nt, Human
cacacacacacacacacaca

SEQ ID NO: 806475 - RNA, 20 nt, Human
cacacacacacacacacaca

SEQ ID NO: 806476 - RNA, 20 nt, Human
cacacacacacacacacaca

SEQ ID NO: 806477 - RNA, 20 nt, Human
cacacacacacacacacaca

SEQ ID NO: 806478 - RNA, 20 nt, Human
cacacacacacacacacaca

SEQ ID NO: 806479 - RNA, 20 nt, Human
cacacacacacacacacaca

SEQ ID NO: 806480 - RNA, 20 nt, Human
cacacacacacacacacaca

SEQ ID NO: 806481 - RNA, 20 nt, Human
cacacacacacacacacaca

SEQ ID NO: 806482 - RNA, 20 nt, Human
cacacacacacacacacaca

SEQ ID NO: 806483 - RNA, 20 nt, Human
cacacacacacacacacaca

SEQ ID NO: 806484 - RNA, 20 nt, Human
cacacacacacacacacaca

SEQ ID NO: 806485 - RNA, 22 nt, Human
cacacacacacacacacacaca

SEQ ID NO: 806486 - RNA, 22 nt, Human
cacacacacacacacacacaca

SEQ ID NO: 806487 - RNA, 22 nt, Human
cacacacacacacacacacaca

SEQ ID NO: 806488 - RNA, 22 nt, Human
cacacacacacacacacacaca

SEQ ID NO: 806489 - RNA, 22 nt, Human
cacacacacacacacacacaca

SEQ ID NO: 806490 - RNA, 26 nt, Human
cacacacacacacacacacacacaca

SEQ ID NO: 806491 - RNA, 26 nt, Human
cacacacacacacacacacacacaca

SEQ ID NO: 806492 - RNA, 26 nt, Human
cacacacacacacacacacacacaca

SEQ ID NO: 806493 - RNA, 26 nt, Human
cacacacacacacacacacacacaca

SEQ ID NO: 806494 - RNA, 26 nt, Human
cacacacacacacacacacacacaca

SEQ ID NO: 806495 - RNA, 26 nt, Human
cacacacacacacacacacacacaca

SEQ ID NO: 806496 - RNA, 30 nt, Human; identical to SEQ ID NO: 326474

SEQ ID NO: 806497 - RNA, 28 nt, Human
cacacacacacacacacacacacaccca

SEQ ID NO: 806498 - RNA, 18 nt, Human
cacacacacacccagagc

SEQ ID NO: 806499 - RNA, 27 nt, Human
cacagaacagaggauaaauacaaucac

SEQ ID NO: 806500 - RNA, 23 nt, Human
cacagagacaacagacuggcuag

SEQ ID NO: 806501 - RNA, 31 nt, Human
cacaucgaaaagugccauauuguaaaucauu

SEQ ID NO: 806502 - RNA, 19 nt, Human
caccaaagauuaauaucaa

SEQ ID NO: 806503 - RNA, 22 nt, Human
caccuauucuucauaaaaacaa

SEQ ID NO: 806504 - RNA, 21 nt, Human
cagaaaaagaucugaaugcau

SEQ ID NO: 806505 - RNA, 22 nt, Human
cagaagcacuccccccaacccc

SEQ ID NO: 806506 - RNA, 22 nt, Human
cagacuacagaaaaagaucuga

SEQ ID NO: 806507 - RNA, 20 nt, Human
caggaucaaauaaaaaauuc

SEQ ID NO: 806508 - RNA, 26 nt, Human
caggaucaaauaaaaaauucuacuag

SEQ ID NO: 806509 - RNA, 21 nt, Human
cagguaagaaaacucaaauga

SEQ ID NO: 806510 - RNA, 23 nt, Human
caucaccauuucucuauagugca

SEQ ID NO: 806511 - RNA, 23 nt, Human
caugcaagaaaggaggagauacu

SEQ ID NO: 806512 - RNA, 24 nt, Human
cauuaaagaaaaacaaaccagcau

SEQ ID NO: 806513 - RNA, 19 nt, Human
cauucaccaaggacagucc

SEQ ID NO: 806514 - RNA, 20 nt, Human
cauucuacagcucugaacgc

SEQ ID NO: 806515 - RNA, 20 nt, Human
cauuugaaguccauaugauu

SEQ ID NO: 806516 - RNA, 19 nt, Human
cauuuuuaaaaaauggaaa

SEQ ID NO: 806517 - RNA, 23 nt, Human
ccaaaauaucauugauuaaagca

SEQ ID NO: 806518 - RNA, 24 nt, Human
ccacacaccaacagaauggccaga

SEQ ID NO: 806519 - RNA, 27 nt, Human
ccaugcaagaaaggaggagauacuaag

SEQ ID NO: 806520 - RNA, 21 nt, Human
cccaaaagucuaaucauaguu

SEQ ID NO: 806521 - RNA, 20 nt, Human
cccacaggcccaaucugacc

SEQ ID NO: 806522 - RNA, 19 nt, Human
cccagagccauccuccccc

SEQ ID NO: 806523 - RNA, 24 nt, Human
cccauaauuuaaaauccaugaggc

SEQ ID NO: 806524 - RNA, 22 nt, Human
ccccaaaacaaaaagacagaca

SEQ ID NO: 806525 - RNA, 26 nt, Human
ccccaagaaaacuaccuucaggaaaa

SEQ ID NO: 806526 - RNA, 19 nt, Human
ccccccaagaaaacuaccu

SEQ ID NO: 806527 - RNA, 22 nt, Human
ccccugaugcaccaaagauuaa

SEQ ID NO: 806528 - RNA, 22 nt, Human
ccucacccauauuauuucugga

SEQ ID NO: 806529 - RNA, 21 nt, Human
ccucugagauuccagggaaga

SEQ ID NO: 806530 - RNA, 19 nt, Human
cgugauacuuccaccaugu

SEQ ID NO: 806531 - RNA, 25 nt, Human
cuaauuucaaaaaaacugaaggaau

SEQ ID NO: 806532 - RNA, 26 nt, Human
cuaauuucaaaaaaacugaaggaauc

SEQ ID NO: 806533 - RNA, 20 nt, Human
cuacacuauuuucccauaau

SEQ ID NO: 806534 - RNA, 18 nt, Human
cuccuccaucaccauuuc

SEQ ID NO: 806535 - RNA, 22 nt, Human
cucgcaccacaucaggugguuu

SEQ ID NO: 806536 - RNA, 19 nt, Human
cucuaaaggcagagcugag

SEQ ID NO: 806537 - RNA, 21 nt, Human
cugaguuagccucuacauuua

SEQ ID NO: 806538 - RNA, 21 nt, Human
cugcaacagauuuuuuuuggu

SEQ ID NO: 806539 - RNA, 23 nt, Human
cuggacgcaacagucaagugaug

SEQ ID NO: 806540 - RNA, 19 nt, Human
cuggacuaagacacagaga

SEQ ID NO: 806541 - RNA, 22 nt, Human
cugggacucuucagguuuaaag

SEQ ID NO: 806542 - RNA, 18 nt, Human
cuguaccuaaagucugcc

SEQ ID NO: 806543 - RNA, 22 nt, Human
cugucacaaacuaagagcuaua

SEQ ID NO: 806544 - RNA, 20 nt, Human
cuuuuuuuugugguuaaaca

SEQ ID NO: 806545 - RNA, 22 nt, Human
gaaaaaaaaauccaaacaaaaa

SEQ ID NO: 806546 - RNA, 22 nt, Human
gaacacagccacacuaauuuac

SEQ ID NO: 806547 - RNA, 21 nt, Human
gaacagaccuuagucuguauc

SEQ ID NO: 806548 - RNA, 22 nt, Human
gaagugugcacguuugugaaua

SEQ ID NO: 806549 - RNA, 19 nt, Human
gagucuuaguuaucaagcc

SEQ ID NO: 806550 - RNA, 19 nt, Human
gcaacacccgguauaaagc

SEQ ID NO: 806551 - RNA, 21 nt, Human
gccaaaaccaauggaaaaaug

SEQ ID NO: 806552 - RNA, 22 nt, Human
ggaaaaacaaaguaaccacuua

SEQ ID NO: 806553 - RNA, 20 nt, Human
ggacagucccaaggcaucua

SEQ ID NO: 806554 - RNA, 23 nt, Human
ggauguagucugggacucuucag

SEQ ID NO: 806555 - RNA, 22 nt, Human
gugaaguacaauucaaaaccug

SEQ ID NO: 806556 - RNA, 20 nt, Human
gugaccaaaucaaggagaac

SEQ ID NO: 806557 - RNA, 20 nt, Human
uaaaaccagugaagaacugc

SEQ ID NO: 806558 - RNA, 25 nt, Human
uaaaagauacuacacauuuguaacu

SEQ ID NO: 806559 - RNA, 23 nt, Human
uaaaaugggugcaccacacacca

SEQ ID NO: 806560 - RNA, 19 nt, Human
uaaaccccugaugcaccaa

SEQ ID NO: 806561 - RNA, 22 nt, Human
uaacaaagcucuaaccuguaac

SEQ ID NO: 806562 - RNA, 21 nt, Human
uaacagaaaaaaaaauccaaa

SEQ ID NO: 806563 - RNA, 22 nt, Human
uaacaggcccccccaagaaaac

SEQ ID NO: 806564 - RNA, 21 nt, Human
uaacaugccacucacauuaua

SEQ ID NO: 806565 - RNA, 22 nt, Human
uaaccugguacacgugcaguga

SEQ ID NO: 806566 - RNA, 22 nt, Human
uaagaaaaguucgcaggaucaa

SEQ ID NO: 806567 - RNA, 20 nt, Human
uaagcauauguccagccaga

SEQ ID NO: 806568 - RNA, 23 nt, Human
uaagcauauguccagccagaauc

SEQ ID NO: 806569 - RNA, 23 nt, Human
uaauaaaacacaaaacaaggaua

SEQ ID NO: 806570 - RNA, 22 nt, Human
uaauauaacaggcccccccaag

SEQ ID NO: 806571 - RNA, 24 nt, Human
uacaacuccuccaucaccauuucu

SEQ ID NO: 806572 - RNA, 25 nt, Human
uacagaauaaagcuauagcauguga

SEQ ID NO: 806573 - RNA, 18 nt, Human
uaccaagaauaaaaccag

SEQ ID NO: 806574 - RNA, 26 nt, Human
uacccaaauccuacuucgugcaacac

SEQ ID NO: 806575 - RNA, 23 nt, Human
uacgugaaguacaauucaaaacc

SEQ ID NO: 806576 - RNA, 25 nt, Human
uacugaccauguguuuaucuuacac

SEQ ID NO: 806577 - RNA, 21 nt, Human
uacugccaaauggccaauacc

SEQ ID NO: 806578 - RNA, 24 nt, Human
uagaucuacaaaucaaaauaguuc

SEQ ID NO: 806579 - RNA, 20 nt, Human
uagccagggcaucuaagcag

SEQ ID NO: 806580 - RNA, 18 nt, Human
uaguguggguaguucaga

SEQ ID NO: 806581 - RNA, 25 nt, Human
uauaagaaaaguucgcaggaucaaa

SEQ ID NO: 806582 - RNA, 24 nt, Human
uauacaauaucuuacaaaaauuuu

SEQ ID NO: 806583 - RNA, 20 nt, Human
uauauauacuguaacacauu

SEQ ID NO: 806584 - RNA, 21 nt, Human
uaucaagaaauguugcauaac

SEQ ID NO: 806585 - RNA, 20 nt, Human
uaucauugauuaaagcauca

SEQ ID NO: 806586 - RNA, 24 nt, Human
uaucuaaaacuacacuauuugugg

SEQ ID NO: 806587 - RNA, 22 nt, Human
uauuaaggaaaaacaaaguaac

SEQ ID NO: 806588 - RNA, 18 nt, Human
uauuagaagccaaaacca

SEQ ID NO: 806589 - RNA, 23 nt, Human
uauuguugugccccaaaacaaaa

SEQ ID NO: 806590 - RNA, 21 nt, Human
uauuuuaucuugaauaaggaa

SEQ ID NO: 806591 - RNA, 19 nt, Human
ucaaaaacuaccagauuuu

SEQ ID NO: 806592 - RNA, 21 nt, Human
ucaaaacacacacacacacac

SEQ ID NO: 806593 - RNA, 31 nt, Human
ucaaaacacacacacacacacacacacacag

SEQ ID NO: 806594 - RNA, 22 nt, Human
ucaaacuguagcauguaggaua

SEQ ID NO: 806595 - RNA, 20 nt, Human
ucacaaacuaagagcuauaa

SEQ ID NO: 806596 - RNA, 18 nt, Human
ucacacaaguagugaaaa

SEQ ID NO: 806597 - RNA, 20 nt, Human
ucacuuuuauuuccaaguuu

SEQ ID NO: 806598 - RNA, 22 nt, Human
ucagaauaaccuaacuuaagug

SEQ ID NO: 806599 - RNA, 20 nt, Human
ucaggugguuucuuugcuuc

SEQ ID NO: 806600 - RNA, 24 nt, Human
uccacuucuacugucaagaagcac

SEQ ID NO: 806601 - RNA, 22 nt, Human
uccccaaauaaaaauaacuuaa

SEQ ID NO: 806602 - RNA, 27 nt, Human
uccccccaaccccuguuuuuaauaccu

SEQ ID NO: 806603 - RNA, 18 nt, Human
uccgcagaaauguauuca

SEQ ID NO: 806604 - RNA, 21 nt, Human
ucuaauacauaacaguaacac

SEQ ID NO: 806605 - RNA, 30 nt, Human
ucucauaaaugaauuuucauaaaaacacaa

SEQ ID NO: 806606 - RNA, 19 nt, Human
ucucugcagaagugugcac

SEQ ID NO: 806607 - RNA, 26 nt, Human
ucucugcagaagugugcacguuugug

SEQ ID NO: 806608 - RNA, 21 nt, Human
ucuggacuaagacacagagac

SEQ ID NO: 806609 - RNA, 25 nt, Human
ucuggacuaagacacagagacaacc

SEQ ID NO: 806610 - RNA, 18 nt, Human
ucuuugcuuccuuggaug

SEQ ID NO: 806611 - RNA, 26 nt, Human
ugaacaaaaaacuacuaaacaccaca

SEQ ID NO: 806612 - RNA, 22 nt, Human
ugaauaaggaaguuggagagca

SEQ ID NO: 806613 - RNA, 26 nt, Human
ugacuaaaauaaaagauacuacacau

SEQ ID NO: 806614 - RNA, 18 nt, Human
ugacucugguuugggagg

SEQ ID NO: 806615 - RNA, 21 nt, Human
ugagcugaacaaaaaacuacu

SEQ ID NO: 806616 - RNA, 18 nt, Human
ugaggcaaugacaaauag

SEQ ID NO: 806617 - RNA, 18 nt, Human
ugauagacaaacaccaag

SEQ ID NO: 806618 - RNA, 20 nt, Human
ugcaagaaaggaggagauac

SEQ ID NO: 806619 - RNA, 25 nt, Human
ugcauaaccucaacacauaaaccca

SEQ ID NO: 806620 - RNA, 23 nt, Human
ugcauguguguaauccaucucuu

SEQ ID NO: 806621 - RNA, 21 nt, Human
ugccccaaaacaaaaagacag

SEQ ID NO: 806622 - RNA, 23 nt, Human
ugcuaggucuagucaaauguccc

SEQ ID NO: 806623 - RNA, 20 nt, Human
ugcuuuaagaaagguggcga

SEQ ID NO: 806624 - RNA, 22 nt, Human
ugcuuuuuuuugugguuaaaca

SEQ ID NO: 806625 - RNA, 18 nt, Human
uggaagcaaaaccuacau

SEQ ID NO: 806626 - RNA, 24 nt, Human
uggaagcaaaaccuacauguauaa

SEQ ID NO: 806627 - RNA, 22 nt, Human
uggauaacaaagcucuaaccug

SEQ ID NO: 806628 - RNA, 18 nt, Human
uggcagaaucacauagcu

SEQ ID NO: 806629 - RNA, 21 nt, Human
uggcauuugaaguccauauga

SEQ ID NO: 806630 - RNA, 19 nt, Human
uggccagaaaacuguaugu

SEQ ID NO: 806631 - RNA, 18 nt, Human
uggcuaauuaaaugcugc

SEQ ID NO: 806632 - RNA, 20 nt, Human
uguaaacagguaagaaaacu

SEQ ID NO: 806633 - RNA, 20 nt, Human
uguauguuucuuuacuuuua

SEQ ID NO: 806634 - RNA, 18 nt, Human
ugucacaaacuaagagcu

SEQ ID NO: 806635 - RNA, 22 nt, Human
ugucugccacugacugcaaaau

SEQ ID NO: 806636 - RNA, 22 nt, Human
ugugaaauuacaauauauuuau

SEQ ID NO: 806637 - RNA, 18 nt, Human
uguguauauagauauaca

SEQ ID NO: 806638 - RNA, 18 nt, Human
uguguauauagauauaca

SEQ ID NO: 806639 - RNA, 20 nt, Human
uguguauauagauauacaua

SEQ ID NO: 806640 - RNA, 26 nt, Human
uguuuaguacaagcugaaccuguucu

SEQ ID NO: 806641 - RNA, 19 nt, Human
uuaaaagugauuucauacu

SEQ ID NO: 806642 - RNA, 27 nt, Human
uuaaaguaaauaccauuguaaauccug

SEQ ID NO: 806643 - RNA, 20 nt, Human
uuacagaaauacacagaaca

SEQ ID NO: 806644 - RNA, 18 nt, Human
uuacagaauaaagcuaua

SEQ ID NO: 806645 - RNA, 20 nt, Human
uuaggagaaagaaaaugcca

SEQ ID NO: 806646 - RNA, 20 nt, Human
uucaaacacaacagcaauaa

SEQ ID NO: 806647 - RNA, 23 nt, Human
uucaagaagugaaacauuacaga

SEQ ID NO: 806648 - RNA, 21 nt, Human
uucucuuauucuaaugcaugu

SEQ ID NO: 806649 - RNA, 19 nt, Human
uugaaaccagaaauauccc

SEQ ID NO: 806650 - RNA, 22 nt, Human
uugaaaccagaaauaucccuua

SEQ ID NO: 806651 - RNA, 24 nt, Human
uugaaaccagaaauaucccuuacu

SEQ ID NO: 806652 - RNA, 22 nt, Human
uugcauaaccucaacacauaaa

SEQ ID NO: 806653 - RNA, 21 nt, Human
uuggaacacagccacacuaau

SEQ ID NO: 806654 - RNA, 23 nt, Human
uuggcacugaguuagccucuaca

SEQ ID NO: 806655 - RNA, 23 nt, Human
uuguuugguauucucgcaccaca

SEQ ID NO: 806656 - RNA, 24 nt, Human
uuuaaacucauaauuaauuacacu

SEQ ID NO: 806657 - RNA, 23 nt, Human
uuucauaggaauuaaucauggcu

SEQ ID NO: 806658 - RNA, 18 nt, Human
uuugcuguaccuaaaguc

SEQ ID NO: 806659 - RNA, 33 nt, Human
uuuucaaaacacacacacacacacacacacagu

SEQ ID NO: 806660 - RNA, 22 nt, Human
aaacagcccugaugccuuucca

SEQ ID NO: 806661 - RNA, 18 nt, Human
aaagugcuggauuacagg

SEQ ID NO: 806662 - RNA, 23 nt, Human
aaagugcuggauuacaggcauga

SEQ ID NO: 806663 - RNA, 18 nt, Human
aacaaauuuacauagaua

SEQ ID NO: 806664 - RNA, 20 nt, Human
aacauagugagaucccaucu

SEQ ID NO: 806665 - RNA, 21 nt, Human
aacauagugagaucccaucuc

SEQ ID NO: 806666 - RNA, 18 nt, Human
aacaugggauuggaaaga

SEQ ID NO: 806667 - RNA, 24 nt, Human
aaccacguggauuccccacaaacg

SEQ ID NO: 806668 - RNA, 23 nt, Human
aaccaggcgugguggugcacgcc

SEQ ID NO: 806669 - RNA, 22 nt, Human
aagagcacgacccugucgcaaa

SEQ ID NO: 806670 - RNA, 19 nt, Human
aaggaaccaaaacuagaac

SEQ ID NO: 806671 - RNA, 22 nt, Human
aagugcugggagcacacaaaga

SEQ ID NO: 806672 - RNA, 24 nt, Human
aauuuuguauuucugauagagacg

SEQ ID NO: 806673 - RNA, 23 nt, Human
acagacacacgaauggaggaaca

SEQ ID NO: 806674 - RNA, 22 nt, Human
accacguggauuccccacaaac

SEQ ID NO: 806675 - RNA, 18 nt, Human
acgggguuucuccauguu

SEQ ID NO: 806676 - RNA, 21 nt, Human
acgggguuucuccauguugcc

SEQ ID NO: 806677 - RNA, 23 nt, Human
acgggguuucuccauguugccua

SEQ ID NO: 806678 - RNA, 24 nt, Human
acgggguuucuccauguugccuag

SEQ ID NO: 806679 - RNA, 25 nt, Human
acucaucuuagccucccaaagugcu

SEQ ID NO: 806680 - RNA, 23 nt, Human
acucaugcugaaggugcucucuu

SEQ ID NO: 806681 - RNA, 18 nt, Human
acucugucauccaggcug

SEQ ID NO: 806682 - RNA, 25 nt, Human
acucugucauccaggcuggagugca

SEQ ID NO: 806683 - RNA, 20 nt, Human
acugcaguccagucugggag

SEQ ID NO: 806684 - RNA, 24 nt, Human
acuggccaagugugguggcucaca

SEQ ID NO: 806685 - RNA, 19 nt, Human
agaaaagaaggaagugcug

SEQ ID NO: 806686 - RNA, 23 nt, Human
agaagaaaggcugggagacagaa

SEQ ID NO: 806687 - RNA, 26 nt, Human
agacacagcccaucacaggauaccca

SEQ ID NO: 806688 - RNA, 18 nt, Human
agagagaagaaaggcugg

SEQ ID NO: 806689 - RNA, 22 nt, Human
agaugcuggggguugguucuga

SEQ ID NO: 806690 - RNA, 21 nt, Human
agauggugaaaagcagcucag

SEQ ID NO: 806691 - RNA, 19 nt, Human
agcaauccacucaucuuag

SEQ ID NO: 806692 - RNA, 24 nt, Human
agcacuuugggaggcugagguggg

SEQ ID NO: 806693 - RNA, 21 nt, Human
agccugagcaacauagugaga

SEQ ID NO: 806694 - RNA, 24 nt, Human
agcucugagggaggcugagguggg

SEQ ID NO: 806695 - RNA, 18 nt, Human
aggagcugacccagggca

SEQ ID NO: 806696 - RNA, 19 nt, Human
aggcaugaaccacugcacc

SEQ ID NO: 806697 - RNA, 24 nt, Human
aggcgugguggugcacgccuguag

SEQ ID NO: 806698 - RNA, 24 nt, Human
aggcugaggugggaggaucacuug

SEQ ID NO: 806699 - RNA, 24 nt, Human
aggcugaggugggaggaucacuug

SEQ ID NO: 806700 - RNA, 18 nt, Human
aggugggaggaucacuug

SEQ ID NO: 806701 - RNA, 23 nt, Human
aggugggaggaucacuugagccc

SEQ ID NO: 806702 - RNA, 21 nt, Human
aggugggaggaucacuugggu

SEQ ID NO: 806703 - RNA, 24 nt, Human
aggugggaggaucacuugggucug

SEQ ID NO: 806704 - RNA, 20 nt, Human
agugcaguggugggguccug

SEQ ID NO: 806705 - RNA, 25 nt, Human
agugcaguggugggguccugggcuc

SEQ ID NO: 806706 - RNA, 23 nt, Human
aguggcuggggccacaggcaugu

SEQ ID NO: 806707 - RNA, 18 nt, Human
auaaaaacuggccugaaa

SEQ ID NO: 806708 - RNA, 23 nt, Human
auacuccacugcucacaaugcgc

SEQ ID NO: 806709 - RNA, 18 nt, Human
auagagaaguuguccaca

SEQ ID NO: 806710 - RNA, 22 nt, Human
auagagacgggguuucuccaug

SEQ ID NO: 806711 - RNA, 20 nt, Human
auccacaaacuuagaaucac

SEQ ID NO: 806712 - RNA, 22 nt, Human
auggguccuugcugauugaccu

SEQ ID NO: 806713 - RNA, 23 nt, Human
auggguccuugcugauugaccug

SEQ ID NO: 806714 - RNA, 24 nt, Human
auugugccacugcaguccagucug

SEQ ID NO: 806715 - RNA, 24 nt, Human
caaacuuagaaucacuugcaucca

SEQ ID NO: 806716 - RNA, 22 nt, Human
caaagucacccagcauccauga

SEQ ID NO: 806717 - RNA, 23 nt, Human
caaagugcuggauuacaggcaug

SEQ ID NO: 806718 - RNA, 24 nt, Human
caaccacguggauuccccacaaac

SEQ ID NO: 806719 - RNA, 19 nt, Human
caagaggucccgaucccuc

SEQ ID NO: 806720 - RNA, 24 nt, Human
caauccacucaucuuagccuccca

SEQ ID NO: 806721 - RNA, 27 nt, Human
cacaaauccacaaacuuagaaucacuu

SEQ ID NO: 806722 - RNA, 19 nt, Human
cacaaugcgcgcccugaau

SEQ ID NO: 806723 - RNA, 24 nt, Human
cacaccuguaaucccagcacuuug

SEQ ID NO: 806724 - RNA, 23 nt, Human
cacacgaauggaggaacauggga

SEQ ID NO: 806725 - RNA, 21 nt, Human
cacaggcaugugccaccacac

SEQ ID NO: 806726 - RNA, 19 nt, Human
cacagggcuaaguaaagca

SEQ ID NO: 806727 - RNA, 19 nt, Human
caccuguaaucccagcacu

SEQ ID NO: 806728 - RNA, 24 nt, Human
caccuguaaucccagcacuuuggg

SEQ ID NO: 806729 - RNA, 18 nt, Human
cacgccuguagucccagc

SEQ ID NO: 806730 - RNA, 18 nt, Human
cacucugcccccgaacuu

SEQ ID NO: 806731 - RNA, 23 nt, Human
cacucugucauccaggcuggagu

SEQ ID NO: 806732 - RNA, 24 nt, Human
cacucugucauccaggcuggagug

SEQ ID NO: 806733 - RNA, 23 nt, Human
cacugucaaacagcccugaugcc

SEQ ID NO: 806734 - RNA, 18 nt, Human
cagcaacaacucaugcug

SEQ ID NO: 806735 - RNA, 23 nt, Human
cagcaacaacucaugcugaaggu

SEQ ID NO: 806736 - RNA, 24 nt, Human
cagcacuuugggaggcugaggugg

SEQ ID NO: 806737 - RNA, 22 nt, Human
cagcauccaugauagaggaagg

SEQ ID NO: 806738 - RNA, 22 nt, Human
cagcccaucacaggauacccaa

SEQ ID NO: 806739 - RNA, 18 nt, Human
cagccuucacucaguuuu

SEQ ID NO: 806740 - RNA, 26 nt, Human
cagggcuguuuuuacaagagguuuug

SEQ ID NO: 806741 - RNA, 24 nt, Human
caguauuuaaaaaccacuguacca

SEQ ID NO: 806742 - RNA, 25 nt, Human
cauagugagaucccaucucuacaaa

SEQ ID NO: 806743 - RNA, 24 nt, Human
cauccaggcuggagugcaguggug

SEQ ID NO: 806744 - RNA, 21 nt, Human
cauguugccuaggcuggucuc

SEQ ID NO: 806745 - RNA, 24 nt, Human
cauguugccuaggcuggucucgaa

SEQ ID NO: 806746 - RNA, 18 nt, Human
ccaaagugcuggauuaca

SEQ ID NO: 806747 - RNA, 23 nt, Human
ccaaagugcuggauuacaggcau

SEQ ID NO: 806748 - RNA, 21 nt, Human
ccaccacacucggcuaaauuu

SEQ ID NO: 806749 - RNA, 20 nt, Human
ccacugcaguccagucuggg

SEQ ID NO: 806750 - RNA, 24 nt, Human
ccacugcaguccagucugggagac

SEQ ID NO: 806751 - RNA, 21 nt, Human
ccaggcuggagugcaguggug

SEQ ID NO: 806752 - RNA, 23 nt, Human
ccauguugccuaggcuggucucg

SEQ ID NO: 806753 - RNA, 24 nt, Human
cccaaagugcuggauuacaggcau

SEQ ID NO: 806754 - RNA, 20 nt, Human
cccaucucagcguucagagu

SEQ ID NO: 806755 - RNA, 18 nt, Human
ccccacucugcccccgaa

SEQ ID NO: 806756 - RNA, 21 nt, Human
ccgggcuuugggggagggugg

SEQ ID NO: 806757 - RNA, 18 nt, Human
ccuaggcucaagcaaucc

SEQ ID NO: 806758 - RNA, 19 nt, Human
ccuccaagaggucccgauc

SEQ ID NO: 806759 - RNA, 25 nt, Human
ccugcaaccaugaggcccucaaggc

SEQ ID NO: 806760 - RNA, 20 nt, Human
ccugggcucaagugaccuuc

SEQ ID NO: 806761 - RNA, 22 nt, Human
ccuguaaccagagugaacacag

SEQ ID NO: 806762 - RNA, 22 nt, Human
ccuguagucccagcucugaggg

SEQ ID NO: 806763 - RNA, 24 nt, Human
ccuguggagaccaucaucgaggcc

SEQ ID NO: 806764 - RNA, 24 nt, Human
cgagaucagccugagcaacauagu

SEQ ID NO: 806765 - RNA, 21 nt, Human
cgccuguagucccagcucuga

SEQ ID NO: 806766 - RNA, 24 nt, Human
cgggguuucuccauguugccuagg

SEQ ID NO: 806767 - RNA, 19 nt, Human
cuauccacaaauccacaaa

SEQ ID NO: 806768 - RNA, 24 nt, Human
cucaagugaccuucccaucucagc

SEQ ID NO: 806769 - RNA, 22 nt, Human
cucacaccuguaaucccagcac

SEQ ID NO: 806770 - RNA, 24 nt, Human
cucacaccuguaaucccagcacuu

SEQ ID NO: 806771 - RNA, 24 nt, Human
cucacucugucauccaggcuggag

SEQ ID NO: 806772 - RNA, 24 nt, Human
cuccauguugccuaggcuggucuc

SEQ ID NO: 806773 - RNA, 22 nt, Human
cucucauaaacaggaacuuuau

SEQ ID NO: 806774 - RNA, 22 nt, Human
cugcagugagcuaugauugugc

SEQ ID NO: 806775 - RNA, 20 nt, Human
gaacacaggucauagcagcc

SEQ ID NO: 806776 - RNA, 23 nt, Human
gaccuaaaauuaaaaaaaacaca

SEQ ID NO: 806777 - RNA, 23 nt, Human
gagacgggguuucuccauguugc

SEQ ID NO: 806778 - RNA, 22 nt, Human
gaggugggaggaucacuugggu

SEQ ID NO: 806779 - RNA, 23 nt, Human
gagugcaguggugggguccuggg

SEQ ID NO: 806780 - RNA, 24 nt, Human
gaucacuugagcccaggagcucga

SEQ ID NO: 806781 - RNA, 19 nt, Human
gaucuuccagcaacaacuc

SEQ ID NO: 806782 - RNA, 23 nt, Human
gauuacaggcaugaaccacugca

SEQ ID NO: 806783 - RNA, 19 nt, Human
gcaacaacucaugcugaag

SEQ ID NO: 806784 - RNA, 22 nt, Human
gcccaggagcucgagaucagcc

SEQ ID NO: 806785 - RNA, 22 nt, Human
gccuguagucccagcucugagg

SEQ ID NO: 806786 - RNA, 26 nt, Human
gcuggagugcaguggugggguccugg

SEQ ID NO: 806787 - RNA, 19 nt, Human
ggaggaacaugggauugga

SEQ ID NO: 806788 - RNA, 23 nt, Human
ggaucacuugagcccaggagcuc

SEQ ID NO: 806789 - RNA, 22 nt, Human
ggauuacaggcaugaaccacug

SEQ ID NO: 806790 - RNA, 20 nt, Human
ggcagagauggguccuugcu

SEQ ID NO: 806791 - RNA, 24 nt, Human
ggcaggugaaacucugaagccaga

SEQ ID NO: 806792 - RNA, 23 nt, Human
ggcucaagcaauccacucaucuu

SEQ ID NO: 806793 - RNA, 21 nt, Human
ggcucacaccuguaaucccag

SEQ ID NO: 806794 - RNA, 25 nt, Human
gggaagagguggugacuucccaaag

SEQ ID NO: 806795 - RNA, 23 nt, Human
gggaggcugaggugggaggauca

SEQ ID NO: 806796 - RNA, 22 nt, Human
gggaggucaaagcugcagugag

SEQ ID NO: 806797 - RNA, 21 nt, Human
ggggaggguggggugcauggg

SEQ ID NO: 806798 - RNA, 23 nt, Human
ggggccacaggcaugugccacca

SEQ ID NO: 806799 - RNA, 23 nt, Human
gggguuucuccauguugccuagg

SEQ ID NO: 806800 - RNA, 23 nt, Human
gguccugggcucaagugaccuuc

SEQ ID NO: 806801 - RNA, 24 nt, Human
gguggcucacaccuguaaucccag

SEQ ID NO: 806802 - RNA, 21 nt, Human
ggugggaggaucacuuggguc

SEQ ID NO: 806803 - RNA, 19 nt, Human
gucaaacagcccugaugcc

SEQ ID NO: 806804 - RNA, 19 nt, Human
guccugggcucaagugacc

SEQ ID NO: 806805 - RNA, 25 nt, Human
guccugggcucaagugaccuuccca

SEQ ID NO: 806806 - RNA, 24 nt, Human
gucugggaggucaaagcugcagug

SEQ ID NO: 806807 - RNA, 24 nt, Human
gugaacacaggucauagcagccuu

SEQ ID NO: 806808 - RNA, 22 nt, Human
gugggcaggugaaacucugaag

SEQ ID NO: 806809 - RNA, 23 nt, Human
guggugcacgccuguagucccag

SEQ ID NO: 806810 - RNA, 18 nt, Human
gugugguggcucacaccu

SEQ ID NO: 806811 - RNA, 24 nt, Human
guuuauuuuaaacaaauuuacaua

SEQ ID NO: 806812 - RNA, 24 nt, Human
uaaauuuuguauuucugauagaga

SEQ ID NO: 806813 - RNA, 22 nt, Human
uaacaaagacaugcugccucuu

SEQ ID NO: 806814 - RNA, 23 nt, Human
uaacagacacacgaauggaggaa

SEQ ID NO: 806815 - RNA, 19 nt, Human
uaaccagagugaacacagg

SEQ ID NO: 806816 - RNA, 18 nt, Human
uaagcaacuuuguggagc

SEQ ID NO: 806817 - RNA, 24 nt, Human
uaaguaaagcaccacuucccagga

SEQ ID NO: 806818 - RNA, 22 nt, Human
uacaggcaugaaccacugcacc

SEQ ID NO: 806819 - RNA, 22 nt, Human
uacucagggcuguuuuuacaag

SEQ ID NO: 806820 - RNA, 22 nt, Human
uagaugacaggcaacagucugc

SEQ ID NO: 806821 - RNA, 22 nt, Human
uagcaguggcaccaguggcugc

SEQ ID NO: 806822 - RNA, 21 nt, Human
uagugaacgugcauccaucug

SEQ ID NO: 806823 - RNA, 18 nt, Human
uauacuggccaagugugg

SEQ ID NO: 806824 - RNA, 23 nt, Human
uauuuaaaaaccacuguaccaag

SEQ ID NO: 806825 - RNA, 19 nt, Human
ucacacccagagucaugca

SEQ ID NO: 806826 - RNA, 23 nt, Human
ucacuagcaguggcaccaguggc

SEQ ID NO: 806827 - RNA, 23 nt, Human
ucacucugcaaaaggaaccaaaa

SEQ ID NO: 806828 - RNA, 24 nt, Human
ucacucugucauccaggcuggagu

SEQ ID NO: 806829 - RNA, 21 nt, Human
ucagcguucagaguggcuggg

SEQ ID NO: 806830 - RNA, 24 nt, Human
ucauccaggcuggagugcaguggu

SEQ ID NO: 806831 - RNA, 20 nt, Human
ucaucgaggccauggcccca

SEQ ID NO: 806832 - RNA, 24 nt, Human
ucaucuuagccucccaaagugcug

SEQ ID NO: 806833 - RNA, 20 nt, Human
uccacaaacuuagaaucacu

SEQ ID NO: 806834 - RNA, 20 nt, Human
uccacaggccuccuggacug

SEQ ID NO: 806835 - RNA, 24 nt, Human
uccacaggccuccuggacugugcc

SEQ ID NO: 806836 - RNA, 20 nt, Human
uccacagggcuaaguaaagc

SEQ ID NO: 806837 - RNA, 21 nt, Human
uccacucaucuuagccuccca

SEQ ID NO: 806838 - RNA, 23 nt, Human
uccaggugcuguggcaauauucc

SEQ ID NO: 806839 - RNA, 18 nt, Human
uccaugauagaggaaggg

SEQ ID NO: 806840 - RNA, 23 nt, Human
ucccaaagugcuggauuacaggc

SEQ ID NO: 806841 - RNA, 20 nt, Human
ucccagaagucagucuuccc

SEQ ID NO: 806842 - RNA, 18 nt, Human
uccuaggcucaagcaauc

SEQ ID NO: 806843 - RNA, 21 nt, Human
uccuaggcucaagcaauccac

SEQ ID NO: 806844 - RNA, 20 nt, Human
uccugggcucaagugaccuu

SEQ ID NO: 806845 - RNA, 23 nt, Human
ucucacucugucauccaggcugg

SEQ ID NO: 806846 - RNA, 24 nt, Human
ucucacucugucauccaggcugga

SEQ ID NO: 806847 - RNA, 23 nt, Human
ucucgaacuccuaggcucaagca

SEQ ID NO: 806848 - RNA, 24 nt, Human
ucugucauccaggcuggagugcag

SEQ ID NO: 806849 - RNA, 23 nt, Human
ucuuccagcaacaacucaugcug

SEQ ID NO: 806850 - RNA, 20 nt, Human
ugaacacaggucauagcagc

SEQ ID NO: 806851 - RNA, 19 nt, Human
ugacccagggcagagaugg

SEQ ID NO: 806852 - RNA, 20 nt, Human
ugacuuauggaagcucagca

SEQ ID NO: 806853 - RNA, 18 nt, Human
ugacuugguucuucucag

SEQ ID NO: 806854 - RNA, 22 nt, Human
ugagacaaggucucacucuguc

SEQ ID NO: 806855 - RNA, 23 nt, Human
ugagauggugaaaagcagcucag

SEQ ID NO: 806856 - RNA, 23 nt, Human
ugagcccaggagcucgagaucag

SEQ ID NO: 806857 - RNA, 20 nt, Human
ugagggaggcugagguggga

SEQ ID NO: 806858 - RNA, 22 nt, Human
ugagggaggcugaggugggagg

SEQ ID NO: 806859 - RNA, 19 nt, Human
ugaggugggaggaucacuu

SEQ ID NO: 806860 - RNA, 19 nt, Human
ugaggugggaggaucacuu

SEQ ID NO: 806861 - RNA, 20 nt, Human
ugaggugggaggaucacuug

SEQ ID NO: 806862 - RNA, 21 nt, Human
ugaggugggaggaucacuuga

SEQ ID NO: 806863 - RNA, 22 nt, Human
ugaggugggaggaucacuugag

SEQ ID NO: 806864 - RNA, 23 nt, Human
ugaggugggaggaucacuugagc

SEQ ID NO: 806865 - RNA, 24 nt, Human
ugaggugggaggaucacuugagcc

SEQ ID NO: 806866 - RNA, 23 nt, Human
ugaggugggaggaucacuugggu

SEQ ID NO: 806867 - RNA, 22 nt, Human
ugauagagacgggguuucucca

SEQ ID NO: 806868 - RNA, 24 nt, Human
ugauagagacgggguuucuccaug

SEQ ID NO: 806869 - RNA, 19 nt, Human
ugauagaggaagggccugg

SEQ ID NO: 806870 - RNA, 20 nt, Human
ugcaaaaggaaccaaaacua

SEQ ID NO: 806871 - RNA, 24 nt, Human
ugccuaggcuggucucgaacuccu

SEQ ID NO: 806872 - RNA, 23 nt, Human
ugcucucuucugagcagcccuug

SEQ ID NO: 806873 - RNA, 21 nt, Human
uggaaagaccuguggagacca

SEQ ID NO: 806874 - RNA, 20 nt, Human
uggagugcaguggugggguc

SEQ ID NO: 806875 - RNA, 24 nt, Human
uggagugcaguggugggguccugg

SEQ ID NO: 806876 - RNA, 20 nt, Human
uggauuacaggcaugaacca

SEQ ID NO: 806877 - RNA, 23 nt, Human
uggauuacaggcaugaaccacug

SEQ ID NO: 806878 - RNA, 24 nt, Human
uggccaagugugguggcucacacc

SEQ ID NO: 806879 - RNA, 21 nt, Human
uggcucacaccuguaauccca

SEQ ID NO: 806880 - RNA, 22 nt, Human
uggcucacaccuguaaucccag

SEQ ID NO: 806881 - RNA, 24 nt, Human
uggcucacaccuguaaucccagca

SEQ ID NO: 806882 - RNA, 19 nt, Human
ugggaggcugaggugggag

SEQ ID NO: 806883 - RNA, 24 nt, Human
ugggaggcugaggugggaggauca

SEQ ID NO: 806884 - RNA, 24 nt, Human
ugggcaggugaaacucugaagcca

SEQ ID NO: 806885 - RNA, 24 nt, Human
ugggcucaagugaccuucccaucu

SEQ ID NO: 806886 - RNA, 24 nt, Human
uggggccacaggcaugugccacca

SEQ ID NO: 806887 - RNA, 18 nt, Human
ugggggaggguggggugc

SEQ ID NO: 806888 - RNA, 22 nt, Human
ugggggaggguggggugcaugg

SEQ ID NO: 806889 - RNA, 21 nt, Human
uggggugcaugggggaggugc

SEQ ID NO: 806890 - RNA, 21 nt, Human
uggugaaaagcagcucaggau

SEQ ID NO: 806891 - RNA, 18 nt, Human
uggugcacgccuguaguc

SEQ ID NO: 806892 - RNA, 21 nt, Human
uggugcacgccuguaguccca

SEQ ID NO: 806893 - RNA, 24 nt, Human
ugguggcucacaccuguaauccca

SEQ ID NO: 806894 - RNA, 19 nt, Human
uggugggguccugggcuca

SEQ ID NO: 806895 - RNA, 24 nt, Human
ugguggugcacgccuguaguccca

SEQ ID NO: 806896 - RNA, 22 nt, Human
ugugccacugcaguccagucug

SEQ ID NO: 806897 - RNA, 28 nt, Human
uguggucaggugcuuuacuauuucagcc

SEQ ID NO: 806898 - RNA, 19 nt, Human
uuaaaaaaccugacuuggu

SEQ ID NO: 806899 - RNA, 24 nt, Human
uuaaccaggcgugguggugcacgc

SEQ ID NO: 806900 - RNA, 26 nt, Human
uugaauaaagccugauucccccacuc

SEQ ID NO: 806901 - RNA, 25 nt, Human
uugggaggcugaggugggaggauca

SEQ ID NO: 806902 - RNA, 20 nt, Human
uuuaaacaaauuuacauaga

SEQ ID NO: 806903 - RNA, 18 nt, Human
uuuguuuuguuuuguuug

SEQ ID NO: 806904 - RNA, 25 nt, Human
aaaaaugauaaagcuguucauacaa

SEQ ID NO: 806905 - RNA, 19 nt, Human
aaaacauucugcaaauaua

SEQ ID NO: 806906 - RNA, 21 nt, Human
aaaagcaguuuggaaaccagg

SEQ ID NO: 806907 - RNA, 22 nt, Human
aaacaaaaguaacaaccagucu

SEQ ID NO: 806908 - RNA, 20 nt, Human
aaacaccuucaagcacaaau

SEQ ID NO: 806909 - RNA, 26 nt, Human
aaacuaacaaaggaguaagacuuuca

SEQ ID NO: 806910 - RNA, 23 nt, Human
aaagaaaaaaaauggcuaaaaaa

SEQ ID NO: 806911 - RNA, 22 nt, Human
aacaucuuccaauaacacacca

SEQ ID NO: 806912 - RNA, 19 nt, Human
aaccagcauggaugaagcu

SEQ ID NO: 806913 - RNA, 22 nt, Human
aaccauaaugauguucacagga

SEQ ID NO: 806914 - RNA, 21 nt, Human
aagaaaguggcaaaagccaaa

SEQ ID NO: 806915 - RNA, 20 nt, Human
aauuguacaacaaaacaaaa

SEQ ID NO: 806916 - RNA, 18 nt, Human
acacuccuacuucucuca

SEQ ID NO: 806917 - RNA, 21 nt, Human
agaaacaaaacuaacaaagga

SEQ ID NO: 806918 - RNA, 23 nt, Human
agaaaguggcaaaagccaaacaa

SEQ ID NO: 806919 - RNA, 21 nt, Human
agaggagcuuggaaggauugu

SEQ ID NO: 806920 - RNA, 22 nt, Human
agcaaaacucauggaaagccua

SEQ ID NO: 806921 - RNA, 20 nt, Human
agcuagaacucacucagaac

SEQ ID NO: 806922 - RNA, 23 nt, Human
aggaagaaaguggcaaaagggac

SEQ ID NO: 806923 - RNA, 22 nt, Human
auaucaaaaacaccuucaagca

SEQ ID NO: 806924 - RNA, 21 nt, Human
caaaagccaaacaauuucaua

SEQ ID NO: 806925 - RNA, 24 nt, Human
caaauuagcauuuuaacaucuucc

SEQ ID NO: 806926 - RNA, 18 nt, Human
cacuaagaaugcuggucu

SEQ ID NO: 806927 - RNA, 19 nt, Human
cagaauacaucacuuggau

SEQ ID NO: 806928 - RNA, 23 nt, Human
cagauacacuccuacuucucuca

SEQ ID NO: 806929 - RNA, 25 nt, Human
cauauaaaaauaccuuuaaaccaag

SEQ ID NO: 806930 - RNA, 19 nt, Human
caucagagguuccuauuug

SEQ ID NO: 806931 - RNA, 23 nt, Human
ccaccccaaagaaaaaaaauggc

SEQ ID NO: 806932 - RNA, 19 nt, Human
ccagaauacaucacuugga

SEQ ID NO: 806933 - RNA, 28 nt, Human
cccaaagaaaaaaaauggcuaaaaaauu

SEQ ID NO: 806934 - RNA, 24 nt, Human
ccccaaagaaaaaaaauggcuaaa

SEQ ID NO: 806935 - RNA, 20 nt, Human
ccccuaaucuuagguuucca

SEQ ID NO: 806936 - RNA, 19 nt, Human
gaaaauaaauaagccauag

SEQ ID NO: 806937 - RNA, 19 nt, Human
gagcaguuaucugcccugc

SEQ ID NO: 806938 - RNA, 19 nt, Human
gcaaaggcaaggaagaaag

SEQ ID NO: 806939 - RNA, 19 nt, Human
gguggucuccucuucugcc

SEQ ID NO: 806940 - RNA, 25 nt, Human
guacaguaguugugcagaaacaaaa

SEQ ID NO: 806941 - RNA, 22 nt, Human
guacuaauuguacaacaaaaca

SEQ ID NO: 806942 - RNA, 23 nt, Human
gugcagaaacaaaacuaacaaag

SEQ ID NO: 806943 - RNA, 22 nt, Human
uaaaaauaccuuuaaaccaagg

SEQ ID NO: 806944 - RNA, 18 nt, Human
uaaaugagauaaagugcu

SEQ ID NO: 806945 - RNA, 21 nt, Human
uaacaaaggaguaagacuuuc

SEQ ID NO: 806946 - RNA, 21 nt, Human
uacaaaaccauaaugauguuc

SEQ ID NO: 806947 - RNA, 20 nt, Human
uacaacaaaacaaaaguaac

SEQ ID NO: 806948 - RNA, 23 nt, Human
uacaacaauucacuuuaaaacau

SEQ ID NO: 806949 - RNA, 22 nt, Human
uauaaaaugggauuugacucaa

SEQ ID NO: 806950 - RNA, 18 nt, Human
uauauacaacaugugacu

SEQ ID NO: 806951 - RNA, 25 nt, Human
ucaauggcaucagauccaccccaaa

SEQ ID NO: 806952 - RNA, 26 nt, Human
ucauauaaaaauaccuuuaaaccaag

SEQ ID NO: 806953 - RNA, 18 nt, Human
uccaaaagugcuauaaaa

SEQ ID NO: 806954 - RNA, 27 nt, Human
uccaaauaucaaaaacaccuucaagca

SEQ ID NO: 806955 - RNA, 18 nt, Human
uccaaauuccacaaaugg

SEQ ID NO: 806956 - RNA, 26 nt, Human
ucuaccauauagcaaaggcaaggaag

SEQ ID NO: 806957 - RNA, 21 nt, Human
ucuccagcugaggauucugcu

SEQ ID NO: 806958 - RNA, 24 nt, Human
ucugcugacccgguggucuccucu

SEQ ID NO: 806959 - RNA, 18 nt, Human
ucuugaacaauagacaua

SEQ ID NO: 806960 - RNA, 26 nt, Human
ugaauaagaaccauaacacagaaaua

SEQ ID NO: 806961 - RNA, 22 nt, Human
ugagauaaagugcuguuacugg

SEQ ID NO: 806962 - RNA, 23 nt, Human
uggaaaaguacaguaguugugca

SEQ ID NO: 806963 - RNA, 24 nt, Human
uggaaggauuguuccaggagcacu

SEQ ID NO: 806964 - RNA, 21 nt, Human
uggauguacaucacuugguca

SEQ ID NO: 806965 - RNA, 22 nt, Human
uguacaaaaccauaaugauguu

SEQ ID NO: 806966 - RNA, 24 nt, Human
uguacaaaaccauaaugauguuca

SEQ ID NO: 806967 - RNA, 18 nt, Human
ugugcagaaacaaaacua

SEQ ID NO: 806968 - RNA, 22 nt, Human
uuacucuugaacaauagacaua

SEQ ID NO: 806969 - RNA, 21 nt, Human
uuagaggagcuuggaaggauu

SEQ ID NO: 806970 - RNA, 19 nt, Human
uuccauuccaaacuggagc

SEQ ID NO: 806971 - RNA, 25 nt, Human
uugaauccacuugaccaccaaucau

SEQ ID NO: 806972 - RNA, 22 nt, Human
uuuaccaccaggagucaacacu

SEQ ID NO: 806973 - RNA, 22 nt, Human
aaaaaaaaaaaaaaaaucaaag

SEQ ID NO: 806974 - RNA, 26 nt, Human
aaaauauaauuuccauugugcaccaa

SEQ ID NO: 806975 - RNA, 22 nt, Human
aaacaaaaaaaaaccacagccc

SEQ ID NO: 806976 - RNA, 19 nt, Human
aaacaaaacaaaacaaaaa

SEQ ID NO: 806977 - RNA, 23 nt, Human
aaagaacacaaauguguagauaa

SEQ ID NO: 806978 - RNA, 22 nt, Human
aaaggcacagaaaggaagaaac

SEQ ID NO: 806979 - RNA, 20 nt, Human
aaauacauucugggguccaa

SEQ ID NO: 806980 - RNA, 18 nt, Human
aaauggccaguaaaagca

SEQ ID NO: 806981 - RNA, 23 nt, Human
aacaaaacaaaaaaaaaccacag

SEQ ID NO: 806982 - RNA, 21 nt, Human
aacuuuaugagccuaccuuga

SEQ ID NO: 806983 - RNA, 23 nt, Human
aagcaaaaacaaaauggagggac

SEQ ID NO: 806984 - RNA, 21 nt, Human
aagcuccaucaaaguaugcaa

SEQ ID NO: 806985 - RNA, 22 nt, Human
aaggaagaaacagugggcaagg

SEQ ID NO: 806986 - RNA, 19 nt, Human
acaaaaaaaaaccacagcc

SEQ ID NO: 806987 - RNA, 24 nt, Human
acaaaacaaaaaaaaaccacagcc

SEQ ID NO: 806988 - RNA, 26 nt, Human
acaaaacaaaaaaaaaccacagccuu

SEQ ID NO: 806989 - RNA, 23 nt, Human
acaaaacaaaacaaaaaaaaacc

SEQ ID NO: 806990 - RNA, 21 nt, Human
acacaaauuaaagcaaaaaca

SEQ ID NO: 806991 - RNA, 20 nt, Human
acaggcucucuccagaaaaa

SEQ ID NO: 806992 - RNA, 18 nt, Human
acagguuaagcuaucuuc

SEQ ID NO: 806993 - RNA, 21 nt, Human
accaaaacaaagguuuuucug

SEQ ID NO: 806994 - RNA, 21 nt, Human
accaaaugccucugaaacucu

SEQ ID NO: 806995 - RNA, 22 nt, Human
acugcaaaggauugcaauucca

SEQ ID NO: 806996 - RNA, 24 nt, Human
agaacacaaauuaaagcaaaaaca

SEQ ID NO: 806997 - RNA, 18 nt, Human
agcacugacccagccacc

SEQ ID NO: 806998 - RNA, 22 nt, Human
agcagacauacauaccguccuu

SEQ ID NO: 806999 - RNA, 20 nt, Human
agcuauuuuucaugccacag

SEQ ID NO: 807000 - RNA, 18 nt, Human
agcugcuguguaccauug

SEQ ID NO: 807001 - RNA, 20 nt, Human
aggaauagccccuggaggga

SEQ ID NO: 807002 - RNA, 21 nt, Human
aggcuuacaagauguucucga

SEQ ID NO: 807003 - RNA, 22 nt, Human
agggagggaaaugcaaguuggg

SEQ ID NO: 807004 - RNA, 18 nt, Human
aguaaauucaggcaagca

SEQ ID NO: 807005 - RNA, 22 nt, Human
auauacaaacauguuucaaaac

SEQ ID NO: 807006 - RNA, 24 nt, Human
auguacucagaaaacggggugcua

SEQ ID NO: 807007 - RNA, 19 nt, Human
auguguacacauacacaua

SEQ ID NO: 807008 - RNA, 22 nt, Human
auuuuaaagaaagcaaaagcua

SEQ ID NO: 807009 - RNA, 25 nt, Human
caaaacaaaacaaaaaaaaaccaca

SEQ ID NO: 807010 - RNA, 23 nt, Human
caaaacaaagguuuuucuguagc

SEQ ID NO: 807011 - RNA, 19 nt, Human
caaaaccagagcagcagac

SEQ ID NO: 807012 - RNA, 21 nt, Human
caaacauguuucaaaaccaga

SEQ ID NO: 807013 - RNA, 23 nt, Human
caaagaaaagucucagaucccac

SEQ ID NO: 807014 - RNA, 19 nt, Human
caaauacauucuggggucc

SEQ ID NO: 807015 - RNA, 25 nt, Human
caaauuagaaacagcguuacuauca

SEQ ID NO: 807016 - RNA, 21 nt, Human
caacagacagcagguggcccu

SEQ ID NO: 807017 - RNA, 22 nt, Human
caauauauaacauggauaaaac

SEQ ID NO: 807018 - RNA, 19 nt, Human
cacaaaucgccuaagacag

SEQ ID NO: 807019 - RNA, 21 nt, Human
cacaauacucacacugauaag

SEQ ID NO: 807020 - RNA, 22 nt, Human
cacaggucugccccuacucccu

SEQ ID NO: 807021 - RNA, 20 nt, Human
caccaaaguaagaaaaccua

SEQ ID NO: 807022 - RNA, 21 nt, Human
caccauagucacaauacucac

SEQ ID NO: 807023 - RNA, 26 nt, Human
caccauagucacaauacucacacuga

SEQ ID NO: 807024 - RNA, 20 nt, Human
caccccacaaaucgccuaag

SEQ ID NO: 807025 - RNA, 21 nt, Human
caccgaggcugcacuggaagc

SEQ ID NO: 807026 - RNA, 22 nt, Human
cagaacacaaauuaaagcaaaa

SEQ ID NO: 807027 - RNA, 25 nt, Human
caggaaaaagcacuauguggugagg

SEQ ID NO: 807028 - RNA, 18 nt, Human
caugaaucaaagggauca

SEQ ID NO: 807029 - RNA, 21 nt, Human
cauggagagagaaaccugaca

SEQ ID NO: 807030 - RNA, 20 nt, Human
cauguuucaaaaccagagca

SEQ ID NO: 807031 - RNA, 23 nt, Human
cauuuggcucagacagggucauu

SEQ ID NO: 807032 - RNA, 20 nt, Human
cauuuuuguucucaaauagg

SEQ ID NO: 807033 - RNA, 19 nt, Human
ccacaggagggccgguuca

SEQ ID NO: 807034 - RNA, 21 nt, Human
cccacacaaauacucaacaca

SEQ ID NO: 807035 - RNA, 21 nt, Human
cccagccaccuaucugcccaa

SEQ ID NO: 807036 - RNA, 24 nt, Human
cccagccaccuaucugcccaagag

SEQ ID NO: 807037 - RNA, 25 nt, Human
cccaugugaaaaaaaaaaaaaaaaa

SEQ ID NO: 807038 - RNA, 22 nt, Human
cccuucugcaaaucuugaagag

SEQ ID NO: 807039 - RNA, 24 nt, Human
cgguucagaagaaauggcaaaggg

SEQ ID NO: 807040 - RNA, 22 nt, Human
cguucuacauuuuuccagccca

SEQ ID NO: 807041 - RNA, 24 nt, Human
cuaaagaacacaaauguguagaua

SEQ ID NO: 807042 - RNA, 22 nt, Human
cuaaauauaacaaucucucacu

SEQ ID NO: 807043 - RNA, 18 nt, Human
cucaaaggcacagaaagg

SEQ ID NO: 807044 - RNA, 23 nt, Human
cuccauuaucccucccagcuuca

SEQ ID NO: 807045 - RNA, 20 nt, Human
cucccaauauuccuacaguu

SEQ ID NO: 807046 - RNA, 18 nt, Human
cuucccugagaaagcuga

SEQ ID NO: 807047 - RNA, 24 nt, Human
gaaaaaaaaaaaaaaaaaucaaag

SEQ ID NO: 807048 - RNA, 22 nt, Human
gaaaagucucagaucccacuga

SEQ ID NO: 807049 - RNA, 24 nt, Human
gaaaagucucagaucccacugaaa

SEQ ID NO: 807050 - RNA, 22 nt, Human
gaacccuucucuuucaccauac

SEQ ID NO: 807051 - RNA, 24 nt, Human
gaagcagacauacauaccguccuu

SEQ ID NO: 807052 - RNA, 19 nt, Human
gaaucuaagacuuucccau

SEQ ID NO: 807053 - RNA, 19 nt, Human
gaucaagaagagagaagac

SEQ ID NO: 807054 - RNA, 23 nt, Human
gaucguguuccuguaacuuuagc

SEQ ID NO: 807055 - RNA, 22 nt, Human
gcugcacuggaagcagacauac

SEQ ID NO: 807056 - RNA, 21 nt, Human
ggcaaacaaaacaaaacaaag

SEQ ID NO: 807057 - RNA, 22 nt, Human
ggcauaugaaacccuuuucaca

SEQ ID NO: 807058 - RNA, 20 nt, Human
gguaagggcaaagagaaaau

SEQ ID NO: 807059 - RNA, 23 nt, Human
gguagagaggggaguggaaggag

SEQ ID NO: 807060 - RNA, 28 nt, Human
gguucagaagaaauggcaaagggagucu

SEQ ID NO: 807061 - RNA, 23 nt, Human
guaaaacauucucaaucugcccc

SEQ ID NO: 807062 - RNA, 19 nt, Human
guaauaaaaugauccaaag

SEQ ID NO: 807063 - RNA, 19 nt, Human
gucuuuggaugaaucccaa

SEQ ID NO: 807064 - RNA, 23 nt, Human
guguguuucaccaaaugccucug

SEQ ID NO: 807065 - RNA, 23 nt, Human
guuucauucacugcaccccacaa

SEQ ID NO: 807066 - RNA, 19 nt, Human
guuucgcaccugcccuuuc

SEQ ID NO: 807067 - RNA, 20 nt, Human
guuucgcaccugcccuuuca

SEQ ID NO: 807068 - RNA, 24 nt, Human
uaaaacauucucaaucugccccuc

SEQ ID NO: 807069 - RNA, 20 nt, Human
uaaaauggccaguaaaagca

SEQ ID NO: 807070 - RNA, 18 nt, Human
uaaagaaagcaaaagcua

SEQ ID NO: 807071 - RNA, 20 nt, Human
uaaagcaaaaacaaaaugga

SEQ ID NO: 807072 - RNA, 22 nt, Human
uaaaguagaaaauauaauuucc

SEQ ID NO: 807073 - RNA, 22 nt, Human
uaaauuucuagaauauaaaaac

SEQ ID NO: 807074 - RNA, 21 nt, Human
uaacaaucucucacuucuggu

SEQ ID NO: 807075 - RNA, 23 nt, Human
uaacacaggaauuacaauaaugc

SEQ ID NO: 807076 - RNA, 23 nt, Human
uaacauggauaaaacuucgaaug

SEQ ID NO: 807077 - RNA, 19 nt, Human
uaaguugaaaaugauuuua

SEQ ID NO: 807078 - RNA, 19 nt, Human
uaauuuccauugugcacca

SEQ ID NO: 807079 - RNA, 20 nt, Human
uaccuccauuaucccuccca

SEQ ID NO: 807080 - RNA, 21 nt, Human
uacuuuuugcuuucccauuuu

SEQ ID NO: 807081 - RNA, 21 nt, Human
uagcaguccucucauuucuac

SEQ ID NO: 807082 - RNA, 21 nt, Human
uagcugcagugagaacaaaug

SEQ ID NO: 807083 - RNA, 23 nt, Human
uagggaucguguuccuguaacuu

SEQ ID NO: 807084 - RNA, 24 nt, Human
uauacaaaagaaauguugauuauc

SEQ ID NO: 807085 - RNA, 21 nt, Human
uaucaacugggcuaaacaguu

SEQ ID NO: 807086 - RNA, 20 nt, Human
uaugaaacccuuuucacaac

SEQ ID NO: 807087 - RNA, 27 nt, Human
uauuuucuuccagcggaaacaguuuca

SEQ ID NO: 807088 - RNA, 24 nt, Human
ucaaaauuaagaacccacacaaau

SEQ ID NO: 807089 - RNA, 18 nt, Human
ucaaagucuccaaucgac

SEQ ID NO: 807090 - RNA, 21 nt, Human
ucaaugaaaacuagggaucgu

SEQ ID NO: 807091 - RNA, 25 nt, Human
ucacuuguucacauaaaccagaccc

SEQ ID NO: 807092 - RNA, 19 nt, Human
ucagaacaagcugcugugu

SEQ ID NO: 807093 - RNA, 20 nt, Human
ucagaacacaaauuaaagca

SEQ ID NO: 807094 - RNA, 19 nt, Human
ucagacagggucauuuuau

SEQ ID NO: 807095 - RNA, 22 nt, Human
ucagaguauacuuugggucagg

SEQ ID NO: 807096 - RNA, 22 nt, Human
uccagaaaaaugcauauguacc

SEQ ID NO: 807097 - RNA, 18 nt, Human
uccagcuuggcaacagcu

SEQ ID NO: 807098 - RNA, 22 nt, Human
uccgguucuuuuuggcuccagc

SEQ ID NO: 807099 - RNA, 19 nt, Human
uccuuuuguaaucucuuuu

SEQ ID NO: 807100 - RNA, 19 nt, Human
ucuacagucuguauuucuu

SEQ ID NO: 807101 - RNA, 22 nt, Human
ucuccuuucguauacgaaaugu

SEQ ID NO: 807102 - RNA, 24 nt, Human
ucuguaaugagaacaaaccggggc

SEQ ID NO: 807103 - RNA, 29 nt, Human
ucuuguucauuugaacccuucucuuucaa

SEQ ID NO: 807104 - RNA, 25 nt, Human
ucuuuaguuucauucacugcacccc

SEQ ID NO: 807105 - RNA, 18 nt, Human
ugaaaaugauuuuauugg

SEQ ID NO: 807106 - RNA, 22 nt, Human
ugaaaauugggaggagcugcac

SEQ ID NO: 807107 - RNA, 19 nt, Human
ugaaacccuuuucacaacu

SEQ ID NO: 807108 - RNA, 21 nt, Human
ugaaucccaaaugaaaacuaa

SEQ ID NO: 807109 - RNA, 20 nt, Human
ugacaguuaacacucugacu

SEQ ID NO: 807110 - RNA, 24 nt, Human
ugacccagccaccuaucugcccaa

SEQ ID NO: 807111 - RNA, 25 nt, Human
ugagggaaaaccuuaaggggucuca

SEQ ID NO: 807112 - RNA, 23 nt, Human
ugaugcugcgaagugaaaauacu

SEQ ID NO: 807113 - RNA, 25 nt, Human
ugcaacaacucuuuaguuucauuca

SEQ ID NO: 807114 - RNA, 24 nt, Human
ugccacaggaguacaauauauaac

SEQ ID NO: 807115 - RNA, 23 nt, Human
ugcuaaacaaagaaaagucucag

SEQ ID NO: 807116 - RNA, 21 nt, Human
ugcuuucauuuuccaaaagug

SEQ ID NO: 807117 - RNA, 20 nt, Human
uggaagcagacauacauacc

SEQ ID NO: 807118 - RNA, 21 nt, Human
uggaaggaguguuccuggagu

SEQ ID NO: 807119 - RNA, 20 nt, Human
uggcaaacaaaacaaaacaa

SEQ ID NO: 807120 - RNA, 26 nt, Human
uggcaaacaaaacaaaacaaaaaaaa

SEQ ID NO: 807121 - RNA, 20 nt, Human
uggcaaagggagucuagugu

SEQ ID NO: 807122 - RNA, 19 nt, Human
uggccauuucucuauaacc

SEQ ID NO: 807123 - RNA, 23 nt, Human
uggcuccagcuuggcaacagcuu

SEQ ID NO: 807124 - RNA, 21 nt, Human
ugggaggagcugcaccgaggc

SEQ ID NO: 807125 - RNA, 25 nt, Human
ugguggagggacuccaaaccagaau

SEQ ID NO: 807126 - RNA, 22 nt, Human
uguguacacauacacauauaua

SEQ ID NO: 807127 - RNA, 21 nt, Human
uuaccuccauuaucccuccca

SEQ ID NO: 807128 - RNA, 24 nt, Human
uuagaagcucuggguuuuguuuug

SEQ ID NO: 807129 - RNA, 23 nt, Human
uuccagaaacacuuuuaauuccu

SEQ ID NO: 807130 - RNA, 18 nt, Human
uucccaugugaaaaaaaa

SEQ ID NO: 807131 - RNA, 25 nt, Human
uuccgguucuuuuuggcuccagcuu

SEQ ID NO: 807132 - RNA, 18 nt, Human
uucugcaaaucuugaaga

SEQ ID NO: 807133 - RNA, 23 nt, Human
uuggaagcuuuuagaagcucugg

SEQ ID NO: 807134 - RNA, 27 nt, Human
uuggaugaaucccaaaugaaaacuaaa

SEQ ID NO: 807135 - RNA, 20 nt, Human
uuucaggaaaaagcacuaug

SEQ ID NO: 807136 - RNA, 18 nt, Human
uuucauucacugcacccc

SEQ ID NO: 807137 - RNA, 22 nt, Human
uuucauucacugcaccccacaa

SEQ ID NO: 807138 - RNA, 22 nt, Human
uuucuacucacuuguucacaua

SEQ ID NO: 807139 - RNA, 21 nt, Human
uuuguaaucucuuuuugucuu

SEQ ID NO: 807140 - RNA, 19 nt, Human
uuuucaggaaaaagcacua

SEQ ID NO: 807141 - RNA, 29 nt, Human
aaaagaccagguaaacuuacagugggcac

SEQ ID NO: 807142 - RNA, 19 nt, Human
aaacagguagaauuggaac

SEQ ID NO: 807143 - RNA, 19 nt, Human
aaagcaaaugaguacaaaa

SEQ ID NO: 807144 - RNA, 19 nt, Human
aaaggacaagcugcagaac

SEQ ID NO: 807145 - RNA, 19 nt, Human
aaagugcuggaauuacagg

SEQ ID NO: 807146 - RNA, 24 nt, Human
aaagugcuggaauuacaggcauga

SEQ ID NO: 807147 - RNA, 23 nt, Human
aacacacaggaaugaugcaucca

SEQ ID NO: 807148 - RNA, 19 nt, Human
aaccauugaggccaauuaa

SEQ ID NO: 807149 - RNA, 22 nt, Human
aagaaacagaaaagcugguacc

SEQ ID NO: 807150 - RNA, 25 nt, Human
aagcaaucuucccaccucaaccucc

SEQ ID NO: 807151 - RNA, 24 nt, Human
aagcagccagggagugaccagguu

SEQ ID NO: 807152 - RNA, 25 nt, Human
aagcagucuuccugccucggccucc

SEQ ID NO: 807153 - RNA, 18 nt, Human
aagcauucugguuccuca

SEQ ID NO: 807154 - RNA, 21 nt, Human
aagcuaccccacaccaaugcc

SEQ ID NO: 807155 - RNA, 24 nt, Human
aagcuaccccacaccaaugccacc

SEQ ID NO: 807156 - RNA, 22 nt, Human
aagcugccuccccucgcaggcu

SEQ ID NO: 807157 - RNA, 26 nt, Human
aagugcuggaauuacaggcaugagcc

SEQ ID NO: 807158 - RNA, 21 nt, Human
aauuacaggcaugagccacca

SEQ ID NO: 807159 - RNA, 21 nt, Human
acaaaaagcaaaugaguacaa

SEQ ID NO: 807160 - RNA, 18 nt, Human
acaaaaucugccuucucu

SEQ ID NO: 807161 - RNA, 18 nt, Human
acacuguguucccacgga

SEQ ID NO: 807162 - RNA, 24 nt, Human
acagaaugugagaagauacagaac

SEQ ID NO: 807163 - RNA, 20 nt, Human
accucaaccuccugaguagc

SEQ ID NO: 807164 - RNA, 18 nt, Human
accuguggccaucaugcu

SEQ ID NO: 807165 - RNA, 19 nt, Human
acuacaggugugugccacc

SEQ ID NO: 807166 - RNA, 22 nt, Human
agacagaagaggcagcccaagg

SEQ ID NO: 807167 - RNA, 22 nt, Human
agacagacauucaagacaaacu

SEQ ID NO: 807168 - RNA, 22 nt, Human
agauaggucaagaacccagaac

SEQ ID NO: 807169 - RNA, 19 nt, Human
agauguguccuacucuugu

SEQ ID NO: 807170 - RNA, 18 nt, Human
agccaccacacucagccu

SEQ ID NO: 807171 - RNA, 20 nt, Human
agccaccacacucagccuua

SEQ ID NO: 807172 - RNA, 26 nt, Human
agcuacuuuuauaauaaaauuucuau

SEQ ID NO: 807173 - RNA, 21 nt, Human
aggaaacuguuccaaacagaa

SEQ ID NO: 807174 - RNA, 21 nt, Human
aggcucugaagcgcgcagucc

SEQ ID NO: 807175 - RNA, 23 nt, Human
aguagcugggacuacaggugugu

SEQ ID NO: 807176 - RNA, 19 nt, Human
agugcaguggcaugaucag

SEQ ID NO: 807177 - RNA, 27 nt, Human
auaaaacaacaagaugucaucucagag

SEQ ID NO: 807178 - RNA, 18 nt, Human
auacuguaacacacagga

SEQ ID NO: 807179 - RNA, 20 nt, Human
auugcugcaaccauugaggc

SEQ ID NO: 807180 - RNA, 21 nt, Human
caaaacuaccuucacaacuaa

SEQ ID NO: 807181 - RNA, 23 nt, Human
caaaagaauucuccaaacgugaa

SEQ ID NO: 807182 - RNA, 19 nt, Human
caaaaggacaagcugcaga

SEQ ID NO: 807183 - RNA, 24 nt, Human
caaagugcuggaauuacaggcaug

SEQ ID NO: 807184 - RNA, 20 nt, Human
caaccucaaacuccugggcu

SEQ ID NO: 807185 - RNA, 24 nt, Human
caaccucaaacuccugggcucaag

SEQ ID NO: 807186 - RNA, 27 nt, Human
caagcaaucuucccaccucaaccuccu

SEQ ID NO: 807187 - RNA, 22 nt, Human
caagcagucuuccugccucggc

SEQ ID NO: 807188 - RNA, 20 nt, Human
caaggaacuccagaugaacc

SEQ ID NO: 807189 - RNA, 24 nt, Human
caccucaaccuccugaguagcugg

SEQ ID NO: 807190 - RNA, 21 nt, Human
cacugcaaccucaaacuccug

SEQ ID NO: 807191 - RNA, 23 nt, Human
cacugcaaccucaaacuccuggg

SEQ ID NO: 807192 - RNA, 24 nt, Human
cagaaagaggacugaccuguggcc

SEQ ID NO: 807193 - RNA, 22 nt, Human
cagcccggccccggcggaagcu

SEQ ID NO: 807194 - RNA, 21 nt, Human
caggcacagaaagaggacuga

SEQ ID NO: 807195 - RNA, 24 nt, Human
caugguucucagacaaaaagcaaa

SEQ ID NO: 807196 - RNA, 19 nt, Human
ccaaagugcuggaauuaca

SEQ ID NO: 807197 - RNA, 24 nt, Human
ccaaagugcuggaauuacaggcau

SEQ ID NO: 807198 - RNA, 21 nt, Human
ccagagaaaacuaacaguaca

SEQ ID NO: 807199 - RNA, 24 nt, Human
ccaggcuggucuugaacuccuggg

SEQ ID NO: 807200 - RNA, 18 nt, Human
ccccagagaaaacuaaca

SEQ ID NO: 807201 - RNA, 24 nt, Human
ccccuggccgcugcaucuuggccu

SEQ ID NO: 807202 - RNA, 18 nt, Human
cccgcgcuggggcuggaa

SEQ ID NO: 807203 - RNA, 21 nt, Human
cccuccugucucgggcuucag

SEQ ID NO: 807204 - RNA, 19 nt, Human
ccggccccuggccgcugca

SEQ ID NO: 807205 - RNA, 22 nt, Human
ccuauguugcccaggcuggucu

SEQ ID NO: 807206 - RNA, 22 nt, Human
ccugaguagcugggacuacagg

SEQ ID NO: 807207 - RNA, 23 nt, Human
ccugaguagcugggacuacaggu

SEQ ID NO: 807208 - RNA, 19 nt, Human
ccugagugaagcagccagg

SEQ ID NO: 807209 - RNA, 20 nt, Human
ccugagugaagcagccaggg

SEQ ID NO: 807210 - RNA, 23 nt, Human
ccugggcucaagcagucuuccug

SEQ ID NO: 807211 - RNA, 24 nt, Human
cggagucuuccuauguugcccagg

SEQ ID NO: 807212 - RNA, 20 nt, Human
cggcucgcgggagaaagcgg

SEQ ID NO: 807213 - RNA, 23 nt, Human
cgggaauaaucacaaaaucugcc

SEQ ID NO: 807214 - RNA, 21 nt, Human
cgggagaaagcgggaacggcg

SEQ ID NO: 807215 - RNA, 23 nt, Human
cuaaaagggaaaaaaaacgaucu

SEQ ID NO: 807216 - RNA, 24 nt, Human
cucaagcaaucuucccaccucaac

SEQ ID NO: 807217 - RNA, 21 nt, Human
cucacugcaaccucaaacucc

SEQ ID NO: 807218 - RNA, 24 nt, Human
cucacugcaaccucaaacuccugg

SEQ ID NO: 807219 - RNA, 23 nt, Human
cuccagaugaacccauggucuac

SEQ ID NO: 807220 - RNA, 20 nt, Human
cuccugggcucaagcaaucu

SEQ ID NO: 807221 - RNA, 23 nt, Human
cuccugggcucaagcaaucuucc

SEQ ID NO: 807222 - RNA, 19 nt, Human
cuccugggcucaagcaguc

SEQ ID NO: 807223 - RNA, 23 nt, Human
cuccugggcucaagcagucuucc

SEQ ID NO: 807224 - RNA, 25 nt, Human
cuccugggcucaagcagucuuccug

SEQ ID NO: 807225 - RNA, 20 nt, Human
cuccuuuuacuacaaaggaa

SEQ ID NO: 807226 - RNA, 23 nt, Human
cugccucggccucccaaagugcu

SEQ ID NO: 807227 - RNA, 19 nt, Human
cuggucuugaacuccuggg

SEQ ID NO: 807228 - RNA, 24 nt, Human
cuucccaccucaaccuccugagua

SEQ ID NO: 807229 - RNA, 20 nt, Human
gaacagauguguccuacucu

SEQ ID NO: 807230 - RNA, 19 nt, Human
gaauuacaggcaugagcca

SEQ ID NO: 807231 - RNA, 21 nt, Human
gagaaucugucccuucuguuc

SEQ ID NO: 807232 - RNA, 22 nt, Human
gagacagauaggucaagaaccc

SEQ ID NO: 807233 - RNA, 26 nt, Human
gaguagcugggacuacaggugugugc

SEQ ID NO: 807234 - RNA, 21 nt, Human
gaguaguuuguugaaauggcc

SEQ ID NO: 807235 - RNA, 25 nt, Human
gcaacagagaaauuggugacaugag

SEQ ID NO: 807236 - RNA, 21 nt, Human
gccccaugguuucuauugugc

SEQ ID NO: 807237 - RNA, 24 nt, Human
gccuaggcuagagugcaguggcau

SEQ ID NO: 807238 - RNA, 19 nt, Human
gcuagagugcaguggcaug

SEQ ID NO: 807239 - RNA, 20 nt, Human
ggaacggcggcggcggcggc

SEQ ID NO: 807240 - RNA, 18 nt, Human
ggacaagcugcagaacca

SEQ ID NO: 807241 - RNA, 22 nt, Human
ggacugaccuguggccaucaug

SEQ ID NO: 807242 - RNA, 21 nt, Human
ggagaaagcgggaacggcggc

SEQ ID NO: 807243 - RNA, 23 nt, Human
ggagucuuccuauguugcccagg

SEQ ID NO: 807244 - RNA, 22 nt, Human
ggcagcccuuuuuccauccaag

SEQ ID NO: 807245 - RNA, 22 nt, Human
ggccgcugcaucuuggccuccg

SEQ ID NO: 807246 - RNA, 18 nt, Human
ggcuggucuugaacuccu

SEQ ID NO: 807247 - RNA, 23 nt, Human
gggaaaaaaaacgaucuuaaugu

SEQ ID NO: 807248 - RNA, 20 nt, Human
gggaacggcggcggcggcgg

SEQ ID NO: 807249 - RNA, 18 nt, Human
gggaugcuccaggcucug

SEQ ID NO: 807250 - RNA, 18 nt, Human
gggguccugcucuguagc

SEQ ID NO: 807251 - RNA, 19 nt, Human
ggugcuugauggaugaaug

SEQ ID NO: 807252 - RNA, 18 nt, Human
gugcccuaaaagaucagc

SEQ ID NO: 807253 - RNA, 20 nt, Human
gugugccaccauccccagcu

SEQ ID NO: 807254 - RNA, 21 nt, Human
guuuaagagacagacauucaa

SEQ ID NO: 807255 - RNA, 25 nt, Human
uaaaaauagacaugguucucagaca

SEQ ID NO: 807256 - RNA, 20 nt, Human
uaaaacagguagaauuggaa

SEQ ID NO: 807257 - RNA, 23 nt, Human
uaaaagcuacuggguucucuaga

SEQ ID NO: 807258 - RNA, 23 nt, Human
uaagagacagacauucaagacaa

SEQ ID NO: 807259 - RNA, 24 nt, Human
uaagcccucaaucugauacuuggc

SEQ ID NO: 807260 - RNA, 21 nt, Human
uacacaaaacuaccuucacaa

SEQ ID NO: 807261 - RNA, 23 nt, Human
uacagaaugugagaagauacaga

SEQ ID NO: 807262 - RNA, 24 nt, Human
uacaggcaugagccaccacacuca

SEQ ID NO: 807263 - RNA, 19 nt, Human
uacaguauacagaauguga

SEQ ID NO: 807264 - RNA, 22 nt, Human
uacccagaaugaucccugccau

SEQ ID NO: 807265 - RNA, 19 nt, Human
uaccgagcuaaaagggaaa

SEQ ID NO: 807266 - RNA, 25 nt, Human
uagaaugcagccaaauaggaaacug

SEQ ID NO: 807267 - RNA, 19 nt, Human
uagagugcaguggcaugau

SEQ ID NO: 807268 - RNA, 21 nt, Human
uagagugcaguggcaugauca

SEQ ID NO: 807269 - RNA, 23 nt, Human
uagcaaaacacuaaaauucaugc

SEQ ID NO: 807270 - RNA, 22 nt, Human
uaggaaaagaccagguaaacuu

SEQ ID NO: 807271 - RNA, 25 nt, Human
uauguagagacggagucuuccuaug

SEQ ID NO: 807272 - RNA, 23 nt, Human
uauguugcccaggcuggucuuga

SEQ ID NO: 807273 - RNA, 24 nt, Human
uauguugcccaggcuggucuugaa

SEQ ID NO: 807274 - RNA, 18 nt, Human
ucaaaagauuacugaagu

SEQ ID NO: 807275 - RNA, 24 nt, Human
ucacugcaaccucaaacuccuggg

SEQ ID NO: 807276 - RNA, 21 nt, Human
ucaggcaugucuccccgcgcu

SEQ ID NO: 807277 - RNA, 22 nt, Human
ucaucaguuugaagaaaaagaa

SEQ ID NO: 807278 - RNA, 19 nt, Human
uccagauaauagcagccau

SEQ ID NO: 807279 - RNA, 22 nt, Human
uccauacccgccuggauuuuca

SEQ ID NO: 807280 - RNA, 24 nt, Human
ucccaaagugcuggaauuacaggc

SEQ ID NO: 807281 - RNA, 19 nt, Human
uccccgcgcuggggcugga

SEQ ID NO: 807282 - RNA, 20 nt, Human
ucccggccgcucagacugug

SEQ ID NO: 807283 - RNA, 19 nt, Human
ucccuucuguucuguucuc

SEQ ID NO: 807284 - RNA, 24 nt, Human
uccuauguugcccaggcuggucuu

SEQ ID NO: 807285 - RNA, 18 nt, Human
uccucaguuuucucaaag

SEQ ID NO: 807286 - RNA, 24 nt, Human
uccugaguagcugggacuacaggu

SEQ ID NO: 807287 - RNA, 20 nt, Human
uccugggcucaagcaaucuu

SEQ ID NO: 807288 - RNA, 24 nt, Human
uccugggcucaagcaaucuuccca

SEQ ID NO: 807289 - RNA, 20 nt, Human
uccugggcucaagcagucuu

SEQ ID NO: 807290 - RNA, 24 nt, Human
uccugggcucaagcagucuuccug

SEQ ID NO: 807291 - RNA, 22 nt, Human
ucgagauaauggagaaucuguc

SEQ ID NO: 807292 - RNA, 21 nt, Human
ucgcucccaaauucaggcaug

SEQ ID NO: 807293 - RNA, 18 nt, Human
ucggccucccaaagugcu

SEQ ID NO: 807294 - RNA, 19 nt, Human
ucuccccgcgcuggggcug

SEQ ID NO: 807295 - RNA, 18 nt, Human
ucucgcuuuggaaacugg

SEQ ID NO: 807296 - RNA, 24 nt, Human
ucuggccuugaaaugaggggcaga

SEQ ID NO: 807297 - RNA, 24 nt, Human
ucuguagccuaggcuagagugcag

SEQ ID NO: 807298 - RNA, 19 nt, Human
ucuuccuauguugcccagg

SEQ ID NO: 807299 - RNA, 23 nt, Human
ucuuccuauguugcccaggcugg

SEQ ID NO: 807300 - RNA, 24 nt, Human
ucuuccuauguugcccaggcuggu

SEQ ID NO: 807301 - RNA, 24 nt, Human
ucuugaacuccugggcucaagcag

SEQ ID NO: 807302 - RNA, 22 nt, Human
ugaaaaguuaaauuccacauaa

SEQ ID NO: 807303 - RNA, 22 nt, Human
ugaaacaaagaaagucaaaaag

SEQ ID NO: 807304 - RNA, 25 nt, Human
ugaaacaaagaaagucaaaaagaua

SEQ ID NO: 807305 - RNA, 25 nt, Human
ugaagaaaaagaaauggcucuaaag

SEQ ID NO: 807306 - RNA, 18 nt, Human
ugaagcagccagggagug

SEQ ID NO: 807307 - RNA, 21 nt, Human
ugaccuguggccaucaugcuu

SEQ ID NO: 807308 - RNA, 18 nt, Human
ugagauggucauuuuguu

SEQ ID NO: 807309 - RNA, 19 nt, Human
ugaguacaaacgcugggac

SEQ ID NO: 807310 - RNA, 18 nt, Human
ugagugaagcagccaggg

SEQ ID NO: 807311 - RNA, 21 nt, Human
ugcaacagagaaauuggugac

SEQ ID NO: 807312 - RNA, 20 nt, Human
ugcagcuccuuuuccaaaag

SEQ ID NO: 807313 - RNA, 18 nt, Human
ugccaugaguuaaaguca

SEQ ID NO: 807314 - RNA, 23 nt, Human
ugccaugaguuaaagucaugaaa

SEQ ID NO: 807315 - RNA, 24 nt, Human
ugcccaggcuggucuugaacuccu

SEQ ID NO: 807316 - RNA, 28 nt, Human
ugcccaggcuggucuugaacuccugggc

SEQ ID NO: 807317 - RNA, 22 nt, Human
ugcccuaaaagaucagccuaga

SEQ ID NO: 807318 - RNA, 25 nt, Human
ugccuccccucgcaggcugccggcc

SEQ ID NO: 807319 - RNA, 21 nt, Human
ugccucggccucccaaagugc

SEQ ID NO: 807320 - RNA, 24 nt, Human
ugccucggccucccaaagugcugg

SEQ ID NO: 807321 - RNA, 24 nt, Human
ugcucuguagccuaggcuagagug

SEQ ID NO: 807322 - RNA, 18 nt, Human
uggaauuacaggcaugag

SEQ ID NO: 807323 - RNA, 22 nt, Human
uggaauuacaggcaugagccac

SEQ ID NO: 807324 - RNA, 24 nt, Human
uggaauuacaggcaugagccacca

SEQ ID NO: 807325 - RNA, 24 nt, Human
uggaauuacaggcaugagccacca

SEQ ID NO: 807326 - RNA, 20 nt, Human
uggacugggugaagucaggc

SEQ ID NO: 807327 - RNA, 19 nt, Human
uggcaguguacauuggagg

SEQ ID NO: 807328 - RNA, 22 nt, Human
uggcaugaucagcucacugcaa

SEQ ID NO: 807329 - RNA, 18 nt, Human
ugggacuacaggugugug

SEQ ID NO: 807330 - RNA, 21 nt, Human
ugggacuacaggugugugcca

SEQ ID NO: 807331 - RNA, 22 nt, Human
ugggacuacaggugugugccac

SEQ ID NO: 807332 - RNA, 24 nt, Human
ugggacuacaggugugugccacca

SEQ ID NO: 807333 - RNA, 25 nt, Human
ugggacuacaggugugugccaccau

SEQ ID NO: 807334 - RNA, 21 nt, Human
ugggaggcugagagucacauc

SEQ ID NO: 807335 - RNA, 19 nt, Human
ugggaugcuccaggcucug

SEQ ID NO: 807336 - RNA, 22 nt, Human
ugggcucaagcaaucuucccac

SEQ ID NO: 807337 - RNA, 24 nt, Human
ugggcucaagcagucuuccugccu

SEQ ID NO: 807338 - RNA, 24 nt, Human
uguagagacggagucuuccuaugu

SEQ ID NO: 807339 - RNA, 20 nt, Human
ugugagaagauacagaacuc

SEQ ID NO: 807340 - RNA, 20 nt, Human
ugugugccaccauccccagc

SEQ ID NO: 807341 - RNA, 22 nt, Human
uguucuguucucuauuccuuca

SEQ ID NO: 807342 - RNA, 22 nt, Human
uguucuucccaugaggucucca

SEQ ID NO: 807343 - RNA, 18 nt, Human
uguuguccucagaguaga

SEQ ID NO: 807344 - RNA, 21 nt, Human
uuaagacagaagaggcagccc

SEQ ID NO: 807345 - RNA, 27 nt, Human
uucaaagaaacagaaaagcugguaccc

SEQ ID NO: 807346 - RNA, 24 nt, Human
uucaggcaugucuccccgcgcugg

SEQ ID NO: 807347 - RNA, 23 nt, Human
uucaugcaacagagaaauuggug

SEQ ID NO: 807348 - RNA, 22 nt, Human
uucugcucagaaggcuccucuc

SEQ ID NO: 807349 - RNA, 23 nt, Human
uuggagaagcuucuguuuuggga

SEQ ID NO: 807350 - RNA, 24 nt, Human
uuggcaguguacauuggaggucac

SEQ ID NO: 807351 - RNA, 25 nt, Human
uuuuaaccuaacaugguuuagagau

SEQ ID NO: 807352 - RNA, 22 nt, Human
aaaaaaaaaacaagauggcagg

SEQ ID NO: 807353 - RNA, 27 nt, Human
aaaaaaacaagauggcagcagugggca

SEQ ID NO: 807354 - RNA, 21 nt, Human
aaaaaccaaugaguguaauaa

SEQ ID NO: 807355 - RNA, 20 nt, Human
aaaaccaucacuacuuacag

SEQ ID NO: 807356 - RNA, 18 nt, Human
aaaauuagcugggcaugg

SEQ ID NO: 807357 - RNA, 18 nt, Human
aaagcucuuacauaagcu

SEQ ID NO: 807358 - RNA, 20 nt, Human
aaagucccgguuugccccuc

SEQ ID NO: 807359 - RNA, 18 nt, Human
aacacgguaaaaccccau

SEQ ID NO: 807360 - RNA, 18 nt, Human
aacacgguaaaaccccau

SEQ ID NO: 807361 - RNA, 19 nt, Human
aacacgguaaaaccccauu

SEQ ID NO: 807362 - RNA, 21 nt, Human
aacacgguaaaaccccauuuc

SEQ ID NO: 807363 - RNA, 24 nt, Human
aacugaggucaggaguucgagacc

SEQ ID NO: 807364 - RNA, 21 nt, Human
aagaaaacaaagcguugagug

SEQ ID NO: 807365 - RNA, 23 nt, Human
aagaacaaagauuuucaagagga

SEQ ID NO: 807366 - RNA, 21 nt, Human
aagagaaaaauauuaaaagga

SEQ ID NO: 807367 - RNA, 19 nt, Human
aagcucucuccccgcccag

SEQ ID NO: 807368 - RNA, 20 nt, Human
aagggcacucccaaacugag

SEQ ID NO: 807369 - RNA, 21 nt, Human
aagggcacucccaaacugagg

SEQ ID NO: 807370 - RNA, 24 nt, Human
aaucacuugaacccaggaggcgga

SEQ ID NO: 807371 - RNA, 19 nt, Human
aaugcccaugguaauagcc

SEQ ID NO: 807372 - RNA, 22 nt, Human
acaacuaccuaggaaaugucau

SEQ ID NO: 807373 - RNA, 19 nt, Human
acaagagcgaaacuccauc

SEQ ID NO: 807374 - RNA, 20 nt, Human
acaagagcgaaacuccaucu

SEQ ID NO: 807375 - RNA, 21 nt, Human
acaagagcgaaacuccaucuc

SEQ ID NO: 807376 - RNA, 24 nt, Human
acacagauucaggggaagcaaaga

SEQ ID NO: 807377 - RNA, 19 nt, Human
acagucaauuucugcaaaa

SEQ ID NO: 807378 - RNA, 19 nt, Human
accaucacuacuuacagcc

SEQ ID NO: 807379 - RNA, 23 nt, Human
accauuguacuccgccugggcaa

SEQ ID NO: 807380 - RNA, 24 nt, Human
accauuguacuccgccugggcaac

SEQ ID NO: 807381 - RNA, 24 nt, Human
acccaggaggcggagguugcagug

SEQ ID NO: 807382 - RNA, 24 nt, Human
accccauuucuacuaaaaauacaa

SEQ ID NO: 807383 - RNA, 27 nt, Human
acccuaaagaauucauagcugaaaaac

SEQ ID NO: 807384 - RNA, 18 nt, Human
acuaugacauggaacaaa

SEQ ID NO: 807385 - RNA, 27 nt, Human
agagaaaaaaagccuaaguuaccagaa

SEQ ID NO: 807386 - RNA, 19 nt, Human
agagagugggaugauggga

SEQ ID NO: 807387 - RNA, 22 nt, Human
agauggcagcagaguuaacuua

SEQ ID NO: 807388 - RNA, 24 nt, Human
agcacuuugggaggcugaggcagg

SEQ ID NO: 807389 - RNA, 23 nt, Human
agcgugguggcucaggccuguaa

SEQ ID NO: 807390 - RNA, 20 nt, Human
agcugaccauauagaacuua

SEQ ID NO: 807391 - RNA, 21 nt, Human
agcuuugggaaacaggaguag

SEQ ID NO: 807392 - RNA, 22 nt, Human
aggcaggcggaucaacugaggu

SEQ ID NO: 807393 - RNA, 26 nt, Human
aggcaggcggaucaacugaggucagg

SEQ ID NO: 807394 - RNA, 21 nt, Human
aggcggagguugcagugagcc

SEQ ID NO: 807395 - RNA, 24 nt, Human
aggcggagguugcagugagccgag

SEQ ID NO: 807396 - RNA, 18 nt, Human
aggcugaggcaggcggau

SEQ ID NO: 807397 - RNA, 24 nt, Human
aggcugaggcaggcggaucaacug

SEQ ID NO: 807398 - RNA, 24 nt, Human
aggcuguggcaggagaaucacuug

SEQ ID NO: 807399 - RNA, 22 nt, Human
agucaauuucugcaaaacuuca

SEQ ID NO: 807400 - RNA, 23 nt, Human
agucccgguuugccccucuugcc

SEQ ID NO: 807401 - RNA, 19 nt, Human
auaaaacagguuacacugu

SEQ ID NO: 807402 - RNA, 22 nt, Human
auacuauaaucaauaaaaacca

SEQ ID NO: 807403 - RNA, 18 nt, Human
aucacacguuugugaaca

SEQ ID NO: 807404 - RNA, 20 nt, Human
aucucaaaaaaaaaaaaaag

SEQ ID NO: 807405 - RNA, 19 nt, Human
augaagcugaaaagaacgu

SEQ ID NO: 807406 - RNA, 19 nt, Human
augguacuacucuuucccu

SEQ ID NO: 807407 - RNA, 21 nt, Human
auuugcuaaauaaauuucuac

SEQ ID NO: 807408 - RNA, 19 nt, Human
caaagcccugcucccacca

SEQ ID NO: 807409 - RNA, 19 nt, Human
caacuaccuaggaaauguc

SEQ ID NO: 807410 - RNA, 19 nt, Human
cacacaagccuccucccca

SEQ ID NO: 807411 - RNA, 27 nt, Human
cacacaagccuccuccccacacgcagc

SEQ ID NO: 807412 - RNA, 30 nt, Human
cacacaagccuccuccccacacgcagcccu

SEQ ID NO: 807413 - RNA, 22 nt, Human
cacacgcagcccccuccucacc

SEQ ID NO: 807414 - RNA, 20 nt, Human
caccuguaaucccagcuacu

SEQ ID NO: 807415 - RNA, 24 nt, Human
caccuguaaucccagcuacuuggg

SEQ ID NO: 807416 - RNA, 23 nt, Human
cacgccccucacagcaaaccaaa

SEQ ID NO: 807417 - RNA, 22 nt, Human
cagaaaacagcagcucugccac

SEQ ID NO: 807418 - RNA, 23 nt, Human
cagaaucguccagcuccugacca

SEQ ID NO: 807419 - RNA, 24 nt, Human
cagcacuuugggaggcugaggcag

SEQ ID NO: 807420 - RNA, 26 nt, Human
cagcacuuugggaggcugaggcaggc

SEQ ID NO: 807421 - RNA, 18 nt, Human
cagcagccagguauuggc

SEQ ID NO: 807422 - RNA, 22 nt, Human
cagcagcucugccacaguacuu

SEQ ID NO: 807423 - RNA, 18 nt, Human
cagcccccuccucacccg

SEQ ID NO: 807424 - RNA, 24 nt, Human
caggccuguaagcccagcacuuug

SEQ ID NO: 807425 - RNA, 24 nt, Human
caggcggaucaacugaggucagga

SEQ ID NO: 807426 - RNA, 19 nt, Human
cagggcccaccugccccuc

SEQ ID NO: 807427 - RNA, 19 nt, Human
cagguauuggcacguggcu

SEQ ID NO: 807428 - RNA, 20 nt, Human
cagugagccgagaucccacc

SEQ ID NO: 807429 - RNA, 18 nt, Human
cauuguacuccgccuggg

SEQ ID NO: 807430 - RNA, 21 nt, Human
cauuguacuccgccugggcaa

SEQ ID NO: 807431 - RNA, 22 nt, Human
cauuguacuccgccugggcaac

SEQ ID NO: 807432 - RNA, 23 nt, Human
cauuguacuccgccugggcaaca

SEQ ID NO: 807433 - RNA, 21 nt, Human
ccaaacauauucugccaaaaa

SEQ ID NO: 807434 - RNA, 20 nt, Human
ccaacagagaacaaaugccc

SEQ ID NO: 807435 - RNA, 21 nt, Human
ccaauaucuaacacaugaagg

SEQ ID NO: 807436 - RNA, 22 nt, Human
ccacagaggguuuuuccaaugg

SEQ ID NO: 807437 - RNA, 19 nt, Human
ccauuguacuccgccuggg

SEQ ID NO: 807438 - RNA, 20 nt, Human
ccauuguacuccgccugggc

SEQ ID NO: 807439 - RNA, 24 nt, Human
ccauuguacuccgccugggcaaca

SEQ ID NO: 807440 - RNA, 23 nt, Human
cccagacuacgaguuaagacagc

SEQ ID NO: 807441 - RNA, 18 nt, Human
cccaugguaauagccugg

SEQ ID NO: 807442 - RNA, 23 nt, Human
ccccacacgcagcccccuccuca

SEQ ID NO: 807443 - RNA, 22 nt, Human
ccccuacuuccaccuccuuucc

SEQ ID NO: 807444 - RNA, 21 nt, Human
cccuacuuccaccuccuuucc

SEQ ID NO: 807445 - RNA, 22 nt, Human
cccuacuuccaccuccuuuccc

SEQ ID NO: 807446 - RNA, 24 nt, Human
cccuacuuccaccuccuuucccca

SEQ ID NO: 807447 - RNA, 21 nt, Human
cccuggcucaacagguguugc

SEQ ID NO: 807448 - RNA, 18 nt, Human
ccgcccagccggcuggcg

SEQ ID NO: 807449 - RNA, 22 nt, Human
ccuacucccuggcucaacaggu

SEQ ID NO: 807450 - RNA, 19 nt, Human
ccuacucgcuccucuuccu

SEQ ID NO: 807451 - RNA, 20 nt, Human
ccuacucgcuccucuuccuc

SEQ ID NO: 807452 - RNA, 20 nt, Human
ccuauuuaaugaagcugaaa

SEQ ID NO: 807453 - RNA, 21 nt, Human
ccucacacaagccuccucccc

SEQ ID NO: 807454 - RNA, 23 nt, Human
ccucacagcaaaccaaagcccug

SEQ ID NO: 807455 - RNA, 22 nt, Human
ccucacccgcgauucccucucc

SEQ ID NO: 807456 - RNA, 18 nt, Human
ccuccgaaagucccgguu

SEQ ID NO: 807457 - RNA, 20 nt, Human
ccuccgaaagucccgguuug

SEQ ID NO: 807458 - RNA, 21 nt, Human
ccucucccacgccccucacag

SEQ ID NO: 807459 - RNA, 18 nt, Human
ccucucuccccuacuucc

SEQ ID NO: 807460 - RNA, 21 nt, Human
ccucuugccuacucgcuccuc

SEQ ID NO: 807461 - RNA, 22 nt, Human
ccucuugccuacucgcuccucu

SEQ ID NO: 807462 - RNA, 23 nt, Human
ccugcaggcuaaggaaaaggggc

SEQ ID NO: 807463 - RNA, 24 nt, Human
ccuggccaacacgguaaaacccca

SEQ ID NO: 807464 - RNA, 21 nt, Human
ccuguaaucccagcuacuugg

SEQ ID NO: 807465 - RNA, 23 nt, Human
ccuugggcaaccgauggagaucu

SEQ ID NO: 807466 - RNA, 23 nt, Human
cgaaacuccaucucaaaaaaaaa

SEQ ID NO: 807467 - RNA, 24 nt, Human
cgagaccagccuggccaacacggu

SEQ ID NO: 807468 - RNA, 21 nt, Human
cgcagcccccuccucacccgc

SEQ ID NO: 807469 - RNA, 24 nt, Human
cggaucaacugaggucaggaguuc

SEQ ID NO: 807470 - RNA, 21 nt, Human
cucaagacaacuguauuuaau

SEQ ID NO: 807471 - RNA, 20 nt, Human
cucacacaagccuccucccc

SEQ ID NO: 807472 - RNA, 21 nt, Human
cucacacaagccuccucccca

SEQ ID NO: 807473 - RNA, 24 nt, Human
cucaggccuguaagcccagcacuu

SEQ ID NO: 807474 - RNA, 19 nt, Human
cuccaucucaaaaaaaaaa

SEQ ID NO: 807475 - RNA, 27 nt, Human
cucccaaacugagguccucagugggac

SEQ ID NO: 807476 - RNA, 19 nt, Human
cuccuccccacacgcagcc

SEQ ID NO: 807477 - RNA, 18 nt, Human
cuccucuuccucucuccc

SEQ ID NO: 807478 - RNA, 20 nt, Human
cugagguccucagugggacg

SEQ ID NO: 807479 - RNA, 19 nt, Human
cugccaaaaaggaagcuuc

SEQ ID NO: 807480 - RNA, 23 nt, Human
cuggccaacacgguaaaacccca

SEQ ID NO: 807481 - RNA, 21 nt, Human
cuguaaucccagcuacuuggg

SEQ ID NO: 807482 - RNA, 19 nt, Human
cuuauacuacaucccagga

SEQ ID NO: 807483 - RNA, 21 nt, Human
cuugccuacucgcuccucuuc

SEQ ID NO: 807484 - RNA, 22 nt, Human
cuugccuacucgcuccucuucc

SEQ ID NO: 807485 - RNA, 21 nt, Human
cuuggcccucagcucccagcc

SEQ ID NO: 807486 - RNA, 19 nt, Human
gaagagagaaaaaaagccu

SEQ ID NO: 807487 - RNA, 25 nt, Human
gacuuaucauacccucaagacaacu

SEQ ID NO: 807488 - RNA, 23 nt, Human
gagaaucacuugaacccaggagg

SEQ ID NO: 807489 - RNA, 18 nt, Human
gagguuccuccauuugcu

SEQ ID NO: 807490 - RNA, 22 nt, Human
gagguugcagugagccgagauc

SEQ ID NO: 807491 - RNA, 24 nt, Human
gaucaacugaggucaggaguucga

SEQ ID NO: 807492 - RNA, 19 nt, Human
gauccaugaagguuuccuu

SEQ ID NO: 807493 - RNA, 22 nt, Human
gcaggagaaucacuugaaccca

SEQ ID NO: 807494 - RNA, 22 nt, Human
gccaauaucuaacacaugaagg

SEQ ID NO: 807495 - RNA, 22 nt, Human
gcccccuccucacccgcgauuc

SEQ ID NO: 807496 - RNA, 23 nt, Human
gccccucuugccuacucgcuccu

SEQ ID NO: 807497 - RNA, 20 nt, Human
gcugcuucucccugccacuc

SEQ ID NO: 807498 - RNA, 18 nt, Human
ggaaaaaaaaaaaaaaca

SEQ ID NO: 807499 - RNA, 24 nt, Human
ggaagauccaugaagguuuccuug

SEQ ID NO: 807500 - RNA, 21 nt, Human
ggacauauguauccugugccc

SEQ ID NO: 807501 - RNA, 19 nt, Human
ggacugcccugcccauugc

SEQ ID NO: 807502 - RNA, 22 nt, Human
ggaggcggagguugcagugagc

SEQ ID NO: 807503 - RNA, 18 nt, Human
ggagguugcagugagccg

SEQ ID NO: 807504 - RNA, 20 nt, Human
ggagguugcagugagccgag

SEQ ID NO: 807505 - RNA, 22 nt, Human
ggagguugcagugagccgagau

SEQ ID NO: 807506 - RNA, 23 nt, Human
ggagguugcagugagccgagauc

SEQ ID NO: 807507 - RNA, 22 nt, Human
ggaucaacugaggucaggaguu

SEQ ID NO: 807508 - RNA, 23 nt, Human
ggaucaacugaggucaggaguuc

SEQ ID NO: 807509 - RNA, 18 nt, Human
ggaugcaaacaaccuccu

SEQ ID NO: 807510 - RNA, 24 nt, Human
ggcaccuguaaucccagcuacuug

SEQ ID NO: 807511 - RNA, 22 nt, Human
ggcaggagaaucacuugaaccc

SEQ ID NO: 807512 - RNA, 23 nt, Human
gggaagcaaagagagugggccaa

SEQ ID NO: 807513 - RNA, 24 nt, Human
gggcaugguggcaggcaccuguaa

SEQ ID NO: 807514 - RNA, 19 nt, Human
ggggaagcaaagagagugg

SEQ ID NO: 807515 - RNA, 24 nt, Human
gguggcaggcaccuguaaucccag

SEQ ID NO: 807516 - RNA, 19 nt, Human
guagagcugcuauaguacc

SEQ ID NO: 807517 - RNA, 26 nt, Human
guccaagaggcuuauagcuccacaga

SEQ ID NO: 807518 - RNA, 19 nt, Human
guguugcucuguaugcuca

SEQ ID NO: 807519 - RNA, 19 nt, Human
guugcagugagccgagauc

SEQ ID NO: 807520 - RNA, 22 nt, Human
uaaagaacaaagauuuucaaga

SEQ ID NO: 807521 - RNA, 21 nt, Human
uaaaggaaaaaaaaaaaaaac

SEQ ID NO: 807522 - RNA, 18 nt, Human
uaacacaugaaggaaaca

SEQ ID NO: 807523 - RNA, 20 nt, Human
uaacacaugaaggaaacacu

SEQ ID NO: 807524 - RNA, 22 nt, Human
uaagacaggcaagggaagaucc

SEQ ID NO: 807525 - RNA, 25 nt, Human
uaagcccagcacuuugggaggcuga

SEQ ID NO: 807526 - RNA, 20 nt, Human
uaagucaaaaaagcaauuca

SEQ ID NO: 807527 - RNA, 31 nt, Human
uaagucaaaaaagcaauucaucgacuacaaa

SEQ ID NO: 807528 - RNA, 18 nt, Human
uaauaaucacuuaucaaa

SEQ ID NO: 807529 - RNA, 21 nt, Human
uaauagccuggagagacuucu

SEQ ID NO: 807530 - RNA, 18 nt, Human
uaaugccaacaaaaucug

SEQ ID NO: 807531 - RNA, 22 nt, Human
uacagcuccaacagagaacaaa

SEQ ID NO: 807532 - RNA, 21 nt, Human
uacuguacccuugauccuggu

SEQ ID NO: 807533 - RNA, 25 nt, Human
uagcugaaaaaccacuucaauauau

SEQ ID NO: 807534 - RNA, 20 nt, Human
uaggaaaugucauauuuaac

SEQ ID NO: 807535 - RNA, 18 nt, Human
uaggcaaucugaagccac

SEQ ID NO: 807536 - RNA, 23 nt, Human
ucaaaaaaaaaaaaaaggaagau

SEQ ID NO: 807537 - RNA, 18 nt, Human
ucaaaagaagagagaaaa

SEQ ID NO: 807538 - RNA, 19 nt, Human
ucacacaagccuccucccc

SEQ ID NO: 807539 - RNA, 20 nt, Human
ucacagcaaaccaaagcccu

SEQ ID NO: 807540 - RNA, 22 nt, Human
ucacagcaaaccaaagcccugc

SEQ ID NO: 807541 - RNA, 24 nt, Human
ucacuacuuacagccuugggcaac

SEQ ID NO: 807542 - RNA, 22 nt, Human
ucaggccuguaagcccagcacu

SEQ ID NO: 807543 - RNA, 22 nt, Human
ucaucgcuaaaaccaucacuac

SEQ ID NO: 807544 - RNA, 22 nt, Human
uccaucucaaaaaaaaaaaaaa

SEQ ID NO: 807545 - RNA, 25 nt, Human
ucccaggaaccacugaaacuauccu

SEQ ID NO: 807546 - RNA, 21 nt, Human
ucccgguuugccccucuugcc

SEQ ID NO: 807547 - RNA, 23 nt, Human
uccucacccgcgauucccucucc

SEQ ID NO: 807548 - RNA, 23 nt, Human
ucuaggaagaagaguccaagagg

SEQ ID NO: 807549 - RNA, 18 nt, Human
ucucccugccacucagca

SEQ ID NO: 807550 - RNA, 19 nt, Human
ucuguaugcucauucgugu

SEQ ID NO: 807551 - RNA, 24 nt, Human
ucugugacuaagacaggccggggc

SEQ ID NO: 807552 - RNA, 23 nt, Human
ucuuuuacugaaacagggaggga

SEQ ID NO: 807553 - RNA, 21 nt, Human
ugaaggaaacacagaagacgc

SEQ ID NO: 807554 - RNA, 19 nt, Human
ugagagagugggaugaugg

SEQ ID NO: 807555 - RNA, 19 nt, Human
ugagccgagaucccaccau

SEQ ID NO: 807556 - RNA, 21 nt, Human
ugagcuaaaaauggcuucuca

SEQ ID NO: 807557 - RNA, 20 nt, Human
ugaggcaggcggaucaacug

SEQ ID NO: 807558 - RNA, 26 nt, Human
ugaggcaggcggaucaacugagguca

SEQ ID NO: 807559 - RNA, 23 nt, Human
ugagguccucagugggacgggga

SEQ ID NO: 807560 - RNA, 19 nt, Human
ugaguggagucuagggaug

SEQ ID NO: 807561 - RNA, 21 nt, Human
ugauuaagugcucacacccag

SEQ ID NO: 807562 - RNA, 20 nt, Human
ugccaaaaguucucuuaagg

SEQ ID NO: 807563 - RNA, 21 nt, Human
ugccaaaaguucucuuaaggg

SEQ ID NO: 807564 - RNA, 21 nt, Human
ugccaacaaaaucugccaaaa

SEQ ID NO: 807565 - RNA, 22 nt, Human
ugcccagacuacgaguuaagac

SEQ ID NO: 807566 - RNA, 27 nt, Human
ugcccugcccauugcuuggcccucagc

SEQ ID NO: 807567 - RNA, 20 nt, Human
ugccuacucgcuccucuucc

SEQ ID NO: 807568 - RNA, 18 nt, Human
ugcguucaugaguggagu

SEQ ID NO: 807569 - RNA, 18 nt, Human
ugcucuguaugcucauuc

SEQ ID NO: 807570 - RNA, 22 nt, Human
ugcuuggcccucagcucccagc

SEQ ID NO: 807571 - RNA, 23 nt, Human
uggaacaaauaaaaauuugggau

SEQ ID NO: 807572 - RNA, 20 nt, Human
uggacuccaagcucucuccc

SEQ ID NO: 807573 - RNA, 24 nt, Human
uggagucuagggauguuaccaaga

SEQ ID NO: 807574 - RNA, 18 nt, Human
uggcaggagaaucacuug

SEQ ID NO: 807575 - RNA, 22 nt, Human
uggcaggcaccuguaaucccag

SEQ ID NO: 807576 - RNA, 21 nt, Human
uggcucaggccuguaagccca

SEQ ID NO: 807577 - RNA, 24 nt, Human
uggcucaggccuguaagcccagca

SEQ ID NO: 807578 - RNA, 18 nt, Human
ugggaggcugaggcaggc

SEQ ID NO: 807579 - RNA, 20 nt, Human
ugggaggcugaggcaggcgg

SEQ ID NO: 807580 - RNA, 24 nt, Human
ugggaggcugaggcaggcggauca

SEQ ID NO: 807581 - RNA, 18 nt, Human
ugggaggcuguggcagga

SEQ ID NO: 807582 - RNA, 24 nt, Human
ugggaggcuguggcaggagaauca

SEQ ID NO: 807583 - RNA, 24 nt, Human
ugggaugaugggaggugacagcag

SEQ ID NO: 807584 - RNA, 21 nt, Human
ugggaugcaaacaaccuccuc

SEQ ID NO: 807585 - RNA, 21 nt, Human
uggugcccaggauguucugaa

SEQ ID NO: 807586 - RNA, 24 nt, Human
ugguggcaggcaccuguaauccca

SEQ ID NO: 807587 - RNA, 18 nt, Human
ugguggcucaggccugua

SEQ ID NO: 807588 - RNA, 20 nt, Human
uguaaagaacaaagauuuuc

SEQ ID NO: 807589 - RNA, 21 nt, Human
uguacuccgccugggcaacaa

SEQ ID NO: 807590 - RNA, 21 nt, Human
uguggacuuaucauacccuca

SEQ ID NO: 807591 - RNA, 24 nt, Human
uguggcaggagaaucacuugaacc

SEQ ID NO: 807592 - RNA, 24 nt, Human
ugugggaugcaaacaaccuccucu

SEQ ID NO: 807593 - RNA, 21 nt, Human
uguugccaauaucuaacacau

SEQ ID NO: 807594 - RNA, 22 nt, Human
uuacaacuaccuaggaaauguc

SEQ ID NO: 807595 - RNA, 24 nt, Human
uuaccaaguuguucacuucuacau

SEQ ID NO: 807596 - RNA, 18 nt, Human
uuagcugggcaugguggc

SEQ ID NO: 807597 - RNA, 22 nt, Human
uucagaaaacagcagcucugcc

SEQ ID NO: 807598 - RNA, 22 nt, Human
uucaucaucuuuuacugaaaca

SEQ ID NO: 807599 - RNA, 21 nt, Human
uucaugaguggagucuaggga

SEQ ID NO: 807600 - RNA, 24 nt, Human
uuccagauguacugcauucauucc

SEQ ID NO: 807601 - RNA, 24 nt, Human
uugaacccaggaggcggagguugc

SEQ ID NO: 807602 - RNA, 19 nt, Human
uugcagugagccgagaucc

SEQ ID NO: 807603 - RNA, 22 nt, Human
uugcagugagccgagaucccac

SEQ ID NO: 807604 - RNA, 21 nt, Human
uugcagugagccgagaucccc

SEQ ID NO: 807605 - RNA, 20 nt, Human
uugcagugagccgagauccg

SEQ ID NO: 807606 - RNA, 25 nt, Human
uugggaggcugaggcaggcggauca

SEQ ID NO: 807607 - RNA, 22 nt, Human
uuuaucaagcauaauaaucacu

SEQ ID NO: 807608 - RNA, 20 nt, Human
uuucagaaagcaaacagcag

SEQ ID NO: 807609 - RNA, 19 nt, Human
uuucagauuuuugacacag

SEQ ID NO: 807610 - RNA, 21 nt, Human
uuucuacuaaaaauacaaaaa

SEQ ID NO: 807611 - RNA, 18 nt, Human
aagagggacugucccgua

SEQ ID NO: 807612 - RNA, 26 nt, Human
acugaaguucuuguaacuugggaugg

SEQ ID NO: 807613 - RNA, 21 nt, Human
agacccaggaggcuguggaga

SEQ ID NO: 807614 - RNA, 27 nt, Human
agcuggagggugagaccucucccugug

SEQ ID NO: 807615 - RNA, 22 nt, Human
auccuccagaugugaggaguag

SEQ ID NO: 807616 - RNA, 23 nt, Human
caccgcuguccgggcgcuggugc

SEQ ID NO: 807617 - RNA, 20 nt, Human
caggagccugcuuccaaaga

SEQ ID NO: 807618 - RNA, 20 nt, Human
caggaggcuguggagauugc

SEQ ID NO: 807619 - RNA, 20 nt, Human
ccaaggcugaccauccuccu

SEQ ID NO: 807620 - RNA, 19 nt, Human
ccccuccaaaaccccuccu

SEQ ID NO: 807621 - RNA, 26 nt, Human
cccguaauugagagaugcuccaaggc

SEQ ID NO: 807622 - RNA, 20 nt, Human
cccuccugcuggaauccucc

SEQ ID NO: 807623 - RNA, 21 nt, Human
ccgcggcggcggcggcggcuu

SEQ ID NO: 807624 - RNA, 23 nt, Human
ccuccaaaaccccuccugcugga

SEQ ID NO: 807625 - RNA, 21 nt, Human
ccuccagaugugaggaguagg

SEQ ID NO: 807626 - RNA, 24 nt, Human
ccuccagaugugaggaguaggagc

SEQ ID NO: 807627 - RNA, 18 nt, Human
ccuccugcuggaauccuc

SEQ ID NO: 807628 - RNA, 22 nt, Human
ccuccugcuggaauccuccaga

SEQ ID NO: 807629 - RNA, 18 nt, Human
ccuuccccacuucuagag

SEQ ID NO: 807630 - RNA, 21 nt, Human
cgcaagcagguccccuccaaa

SEQ ID NO: 807631 - RNA, 24 nt, Human
cgcaagcagguccccuccaaaacc

SEQ ID NO: 807632 - RNA, 21 nt, Human
cgcggcggcggcggcggcggc

SEQ ID NO: 807633 - RNA, 18 nt, Human
cggcggcggcgguggcgg

SEQ ID NO: 807634 - RNA, 18 nt, Human
cuccugcugcacacccag

SEQ ID NO: 807635 - RNA, 19 nt, Human
cucucccuguggaucugga

SEQ ID NO: 807636 - RNA, 19 nt, Human
cugcugcacacccagcagc

SEQ ID NO: 807637 - RNA, 25 nt, Human
gaagccgcggcggcggcggcggcgg

SEQ ID NO: 807638 - RNA, 21 nt, Human
gaagcuacacaucuggccuuc

SEQ ID NO: 807639 - RNA, 23 nt, Human
gacaggguuccgcgcccuguccc

SEQ ID NO: 807640 - RNA, 24 nt, Human
gagaagcucccaaaagagagggaa

SEQ ID NO: 807641 - RNA, 23 nt, Human
gagccugcuuccaaagagggacu

SEQ ID NO: 807642 - RNA, 20 nt, Human
gcaagcagguccccuccaaa

SEQ ID NO: 807643 - RNA, 19 nt, Human
gcacaggagccugcuucca

SEQ ID NO: 807644 - RNA, 18 nt, Human
gcagacagaucaaggcug

SEQ ID NO: 807645 - RNA, 21 nt, Human
gcagguccccuccaaaacccc

SEQ ID NO: 807646 - RNA, 18 nt, Human
gcccuguccagccucccc

SEQ ID NO: 807647 - RNA, 20 nt, Human
gcggcggcggcggcggcggc

SEQ ID NO: 807648 - RNA, 20 nt, Human
gcggcggcggcggcggcggc

SEQ ID NO: 807649 - RNA, 24 nt, Human
gcggcggcggcggcggcggcggcg

SEQ ID NO: 807650 - RNA, 20 nt, Human
gcggcggcggcggcggcggu

SEQ ID NO: 807651 - RNA, 23 nt, Human
gcggcggcggcggcggcgguggc

SEQ ID NO: 807652 - RNA, 20 nt, Human
gcggcggcggcggcgguggc

SEQ ID NO: 807653 - RNA, 23 nt, Human
gcggcggcggcggcgguggcggc

SEQ ID NO: 807654 - RNA, 24 nt, Human
gcggcggcggcgguggcggcggca

SEQ ID NO: 807655 - RNA, 20 nt, Human
gcggcggcgguggcggcggc

SEQ ID NO: 807656 - RNA, 24 nt, Human
gcggcggcgguggcggcggcagcg

SEQ ID NO: 807657 - RNA, 20 nt, Human
gcggcgguggcggcggcagc

SEQ ID NO: 807658 - RNA, 20 nt, Human
ggcggcggcggcggcggcgg

SEQ ID NO: 807659 - RNA, 20 nt, Human
ggcggcggcggcggcggcgg

SEQ ID NO: 807660 - RNA, 23 nt, Human
ggcggcggcggcggcggcggcgg

SEQ ID NO: 807661 - RNA, 19 nt, Human
ggcggcggcggcggcggug

SEQ ID NO: 807662 - RNA, 23 nt, Human
ggcggcggcggcggcgguggcgg

SEQ ID NO: 807663 - RNA, 23 nt, Human
ggcggcggcggcgguggcggcgg

SEQ ID NO: 807664 - RNA, 21 nt, Human
gguccccuccaaaaccccucc

SEQ ID NO: 807665 - RNA, 18 nt, Human
ggugagaccucucccugu

SEQ ID NO: 807666 - RNA, 22 nt, Human
gguggcggcggcagcggcggcg

SEQ ID NO: 807667 - RNA, 22 nt, Human
gguuuaacauccacagcuggag

SEQ ID NO: 807668 - RNA, 20 nt, Human
guaggagcagacagaucaag

SEQ ID NO: 807669 - RNA, 25 nt, Human
guccccuccaaaaccccuccugcug

SEQ ID NO: 807670 - RNA, 32 nt, Human
gugcugaagccgcggcggcggcggcggcgacg

SEQ ID NO: 807671 - RNA, 20 nt, Human
guggcggcggcagcggcggg

SEQ ID NO: 807672 - RNA, 24 nt, Human
uagucucacugaaguucuuguaac

SEQ ID NO: 807673 - RNA, 24 nt, Human
uccaaaaccccuccugcuggaauc

SEQ ID NO: 807674 - RNA, 21 nt, Human
uccacagcuggagggugagac

SEQ ID NO: 807675 - RNA, 22 nt, Human
uccacagcuggagggugagacc

SEQ ID NO: 807676 - RNA, 21 nt, Human
ucccuaggaugggggucccuu

SEQ ID NO: 807677 - RNA, 18 nt, Human
ucccuuagucucacugaa

SEQ ID NO: 807678 - RNA, 25 nt, Human
uccucuggucaguaaggaacccuga

SEQ ID NO: 807679 - RNA, 18 nt, Human
uccugcuggaauccucca

SEQ ID NO: 807680 - RNA, 23 nt, Human
ucgcaagcagguccccuccaaaa

SEQ ID NO: 807681 - RNA, 26 nt, Human
ucgcaagcagguccccuccaaaaccc

SEQ ID NO: 807682 - RNA, 18 nt, Human
ucucccuguggaucugga

SEQ ID NO: 807683 - RNA, 22 nt, Human
ucuuguaacuugggaugggggc

SEQ ID NO: 807684 - RNA, 22 nt, Human
ugggaugggggccaggucagcc

SEQ ID NO: 807685 - RNA, 20 nt, Human
uggucaguaaggaacccuga

SEQ ID NO: 807686 - RNA, 23 nt, Human
uguccgggcgcuggugcugaagc

SEQ ID NO: 807687 - RNA, 23 nt, Human
uucugcccagagaagcucccaaa

SEQ ID NO: 807688 - RNA, 26 nt, Human
aaaaaaaaaaaauaauaacaaaaaag

SEQ ID NO: 807689 - RNA, 22 nt, Human
aaaaaacaaaaaagcagacuug

SEQ ID NO: 807690 - RNA, 23 nt, Human
aaaaaacaaaaaagcagacuugc

SEQ ID NO: 807691 - RNA, 22 nt, Human
aaacaaagucaaaacaagagua

SEQ ID NO: 807692 - RNA, 21 nt, Human
aaagacaaguaggaaaggcca

SEQ ID NO: 807693 - RNA, 20 nt, Human
aaaggccagagccaagaaca

SEQ ID NO: 807694 - RNA, 19 nt, Human
aaaugccauauucuuguaa

SEQ ID NO: 807695 - RNA, 24 nt, Human
aacaaaaaaauaaagcauccaaaa

SEQ ID NO: 807696 - RNA, 24 nt, Human
aacaaaaaaauaaagcauccaaag

SEQ ID NO: 807697 - RNA, 21 nt, Human
aacaaaaaacaaaaaagcaga

SEQ ID NO: 807698 - RNA, 20 nt, Human
aacaagguccaggcaaugua

SEQ ID NO: 807699 - RNA, 21 nt, Human
aacauuaaaagcaaaaagcag

SEQ ID NO: 807700 - RNA, 26 nt, Human
aagaagagacacaugaugguacagaa

SEQ ID NO: 807701 - RNA, 24 nt, Human
aagaaggaaggggaaggcagaaga

SEQ ID NO: 807702 - RNA, 20 nt, Human
aagagagagauacagaugaa

SEQ ID NO: 807703 - RNA, 19 nt, Human
aagcaaaaagcagaccuga

SEQ ID NO: 807704 - RNA, 30 nt, Human
aagcaaaauaagaaguauaagugaccugag

SEQ ID NO: 807705 - RNA, 20 nt, Human
aagcaaagagagcaaaggac

SEQ ID NO: 807706 - RNA, 22 nt, Human
aagcaaagagagcaaaggacug

SEQ ID NO: 807707 - RNA, 25 nt, Human
aagcaagaagagacacaugauggua

SEQ ID NO: 807708 - RNA, 18 nt, Human
aagcaagcagaggcccac

SEQ ID NO: 807709 - RNA, 23 nt, Human
aagccacaccuagaacaaaaaaa

SEQ ID NO: 807710 - RNA, 22 nt, Human
aaggaaggggaaggcagaagag

SEQ ID NO: 807711 - RNA, 24 nt, Human
aagggaaaggaagcaucccucuca

SEQ ID NO: 807712 - RNA, 19 nt, Human
aaguucucagcuaccuccc

SEQ ID NO: 807713 - RNA, 20 nt, Human
acaaagccacaccuagaaca

SEQ ID NO: 807714 - RNA, 18 nt, Human
acaaugcuaauggucaca

SEQ ID NO: 807715 - RNA, 19 nt, Human
acaaugguaucuggauucu

SEQ ID NO: 807716 - RNA, 20 nt, Human
acacauaccagcccgcccau

SEQ ID NO: 807717 - RNA, 20 nt, Human
acagagcaaaaaaaaaaaaa

SEQ ID NO: 807718 - RNA, 20 nt, Human
acagggagcacacaucuaaa

SEQ ID NO: 807719 - RNA, 18 nt, Human
acaggugaaaagagagag

SEQ ID NO: 807720 - RNA, 20 nt, Human
acagugaacacauguccaca

SEQ ID NO: 807721 - RNA, 21 nt, Human
accacaaaggaggaaacagca

SEQ ID NO: 807722 - RNA, 21 nt, Human
accaggaagccaacuggggcu

SEQ ID NO: 807723 - RNA, 20 nt, Human
acuaaaguccaaagggucua

SEQ ID NO: 807724 - RNA, 23 nt, Human
acuuaauggcuugauagugacac

SEQ ID NO: 807725 - RNA, 24 nt, Human
agaaccccuacuauggcacucugc

SEQ ID NO: 807726 - RNA, 21 nt, Human
agaaggaaggggaaggcagaa

SEQ ID NO: 807727 - RNA, 18 nt, Human
agaagguagggaagaaca

SEQ ID NO: 807728 - RNA, 25 nt, Human
agagcaaaggacugcugaaaguggg

SEQ ID NO: 807729 - RNA, 19 nt, Human
agagggaggaaaugaggga

SEQ ID NO: 807730 - RNA, 20 nt, Human
agauacagaugaaaccaggu

SEQ ID NO: 807731 - RNA, 22 nt, Human
agauucugcccaucccaauccc

SEQ ID NO: 807732 - RNA, 23 nt, Human
agcaaaaagcagaccugauguga

SEQ ID NO: 807733 - RNA, 18 nt, Human
agcagauccacuuggccu

SEQ ID NO: 807734 - RNA, 24 nt, Human
agccagaaauaaagcaggugacau

SEQ ID NO: 807735 - RNA, 18 nt, Human
agcccacuccuggggcua

SEQ ID NO: 807736 - RNA, 19 nt, Human
agcuggugaccccagaccc

SEQ ID NO: 807737 - RNA, 23 nt, Human
aggaagcauuaaaacaaagucaa

SEQ ID NO: 807738 - RNA, 24 nt, Human
aggaagcauuaaaacaaagucaaa

SEQ ID NO: 807739 - RNA, 23 nt, Human
aggaaggggaaggcagaagagga

SEQ ID NO: 807740 - RNA, 19 nt, Human
aggaggaaacagcaggagg

SEQ ID NO: 807741 - RNA, 18 nt, Human
aggcaaaagaacaugauc

SEQ ID NO: 807742 - RNA, 26 nt, Human
aggcaaaagaacaugaucauaaaugc

SEQ ID NO: 807743 - RNA, 23 nt, Human
aggcacuugggucuuaggaagca

SEQ ID NO: 807744 - RNA, 26 nt, Human
aggcagaagaggaggaaaggggaccc

SEQ ID NO: 807745 - RNA, 29 nt, Human
aggcaggcaagcaaaauaagagggacccc

SEQ ID NO: 807746 - RNA, 23 nt, Human
aggccagagccaagaacaagguc

SEQ ID NO: 807747 - RNA, 24 nt, Human
aggcuaccacaaaggaggaaacag

SEQ ID NO: 807748 - RNA, 18 nt, Human
agguagggaagaacaggu

SEQ ID NO: 807749 - RNA, 25 nt, Human
auaaccccuucaauucucauuuucc

SEQ ID NO: 807750 - RNA, 21 nt, Human
aucccaauccccaucccccag

SEQ ID NO: 807751 - RNA, 19 nt, Human
augcaugcaaacuuacaac

SEQ ID NO: 807752 - RNA, 22 nt, Human
auucugcccaucccaaucccca

SEQ ID NO: 807753 - RNA, 19 nt, Human
caaaaaacaaaaaagcaga

SEQ ID NO: 807754 - RNA, 23 nt, Human
caaaaccagaguuaugagaccag

SEQ ID NO: 807755 - RNA, 21 nt, Human
caaagccacaccuagaacaaa

SEQ ID NO: 807756 - RNA, 22 nt, Human
caaaucccccaccuagcacacc

SEQ ID NO: 807757 - RNA, 19 nt, Human
caacagaacagucucucuc

SEQ ID NO: 807758 - RNA, 21 nt, Human
caacuaggcauccuauuuguu

SEQ ID NO: 807759 - RNA, 18 nt, Human
caaggaccauccucucca

SEQ ID NO: 807760 - RNA, 19 nt, Human
caaugcuaauggucacaca

SEQ ID NO: 807761 - RNA, 23 nt, Human
cacaccuagaacaaaaaaauaaa

SEQ ID NO: 807762 - RNA, 21 nt, Human
cacagaccacaggccaaagcc

SEQ ID NO: 807763 - RNA, 23 nt, Human
cacagaccacaggccaaagccag

SEQ ID NO: 807764 - RNA, 23 nt, Human
cacagcauaaugacagugaacac

SEQ ID NO: 807765 - RNA, 18 nt, Human
cacauguccacacauacc

SEQ ID NO: 807766 - RNA, 24 nt, Human
cacauguccacacauaccagcccg

SEQ ID NO: 807767 - RNA, 23 nt, Human
caccuagaacaaaaaaauaaagc

SEQ ID NO: 807768 - RNA, 23 nt, Human
caccuagcacacccuugcuacag

SEQ ID NO: 807769 - RNA, 19 nt, Human
cacuaacguagaaaagcaa

SEQ ID NO: 807770 - RNA, 19 nt, Human
cacuggucguccuggagga

SEQ ID NO: 807771 - RNA, 21 nt, Human
cagaacacagcaacaauuucc

SEQ ID NO: 807772 - RNA, 21 nt, Human
cagaaccccuacuauggcacu

SEQ ID NO: 807773 - RNA, 24 nt, Human
cagaccacaggccaaagccagaaa

SEQ ID NO: 807774 - RNA, 21 nt, Human
cagagcuugaggaugcacugg

SEQ ID NO: 807775 - RNA, 23 nt, Human
caggagacagguucaggguuugc

SEQ ID NO: 807776 - RNA, 22 nt, Human
caggagcagcccagcaggaggu

SEQ ID NO: 807777 - RNA, 23 nt, Human
caucaaaagagacuaccaaucuc

SEQ ID NO: 807778 - RNA, 19 nt, Human
caugaugguacagaacaca

SEQ ID NO: 807779 - RNA, 20 nt, Human
caugcaugcaaacuuacaac

SEQ ID NO: 807780 - RNA, 19 nt, Human
ccaaauuauucuuccaaaa

SEQ ID NO: 807781 - RNA, 21 nt, Human
ccaaggaccauccucuccacu

SEQ ID NO: 807782 - RNA, 22 nt, Human
ccaaguucucagcuaccucccc

SEQ ID NO: 807783 - RNA, 20 nt, Human
ccacaccuagaacaaaaaaa

SEQ ID NO: 807784 - RNA, 23 nt, Human
cccacagaacaggaaguucuggc

SEQ ID NO: 807785 - RNA, 22 nt, Human
cccagaaccccuacuauggcac

SEQ ID NO: 807786 - RNA, 21 nt, Human
cccagaagcaagaagagacac

SEQ ID NO: 807787 - RNA, 23 nt, Human
cccagacccacagaacaggaagu

SEQ ID NO: 807788 - RNA, 18 nt, Human
cccauuagacuaaaaugg

SEQ ID NO: 807789 - RNA, 21 nt, Human
ccccaucacuaucaccaucaa

SEQ ID NO: 807790 - RNA, 19 nt, Human
cccucccauacucuaucac

SEQ ID NO: 807791 - RNA, 21 nt, Human
ccucccauacucuaucacuga

SEQ ID NO: 807792 - RNA, 20 nt, Human
cguagaaaagcaagaggcua

SEQ ID NO: 807793 - RNA, 23 nt, Human
cuaaagcccacuccuggggcuau

SEQ ID NO: 807794 - RNA, 22 nt, Human
cuagaacaaaaaaauaaagcau

SEQ ID NO: 807795 - RNA, 21 nt, Human
cucagggauaagagagggaaa

SEQ ID NO: 807796 - RNA, 25 nt, Human
cucucauuucuuuuugagacuccuu

SEQ ID NO: 807797 - RNA, 19 nt, Human
cuggcccugaaggagcaga

SEQ ID NO: 807798 - RNA, 21 nt, Human
cugguuuccucaacucucuuu

SEQ ID NO: 807799 - RNA, 22 nt, Human
cuuacccacccucagggggacc

SEQ ID NO: 807800 - RNA, 23 nt, Human
cuucaaagacacgcugugacccu

SEQ ID NO: 807801 - RNA, 20 nt, Human
cuugaggaugcacuggucgu

SEQ ID NO: 807802 - RNA, 21 nt, Human
gaaaagagagagauacagauc

SEQ ID NO: 807803 - RNA, 18 nt, Human
gaaagaagaaugagaggg

SEQ ID NO: 807804 - RNA, 24 nt, Human
gaacaaaaaaauaaagcauccaaa

SEQ ID NO: 807805 - RNA, 23 nt, Human
gaacagguguagauacaguccuu

SEQ ID NO: 807806 - RNA, 20 nt, Human
gaagcaagaagagacacaug

SEQ ID NO: 807807 - RNA, 23 nt, Human
gaccaguacaagcugauaacaau

SEQ ID NO: 807808 - RNA, 19 nt, Human
gagcaaaggacugcugaaa

SEQ ID NO: 807809 - RNA, 21 nt, Human
gauaagagagggaaaggccca

SEQ ID NO: 807810 - RNA, 22 nt, Human
gcaauggaaacgcuugcauaga

SEQ ID NO: 807811 - RNA, 19 nt, Human
gcacaucuguaucuuccca

SEQ ID NO: 807812 - RNA, 23 nt, Human
gcauguacaaagccacaccuaga

SEQ ID NO: 807813 - RNA, 23 nt, Human
gccagagccaagaacaaggucca

SEQ ID NO: 807814 - RNA, 19 nt, Human
gccaguaggguuccuggaa

SEQ ID NO: 807815 - RNA, 21 nt, Human
gcggaggcagcuucaaagaca

SEQ ID NO: 807816 - RNA, 21 nt, Human
gcuggugaccccagacccaca

SEQ ID NO: 807817 - RNA, 22 nt, Human
ggaaaggccagagccaagaaca

SEQ ID NO: 807818 - RNA, 22 nt, Human
ggaagaacagguguagauacag

SEQ ID NO: 807819 - RNA, 19 nt, Human
ggagcagcccagcaggagg

SEQ ID NO: 807820 - RNA, 24 nt, Human
ggcccagcucugcuuuuacaccca

SEQ ID NO: 807821 - RNA, 20 nt, Human
ggcccugaaggagcagagcu

SEQ ID NO: 807822 - RNA, 23 nt, Human
ggcggcggaggcagcuucaaaga

SEQ ID NO: 807823 - RNA, 19 nt, Human
gggaaggcagaagaggagg

SEQ ID NO: 807824 - RNA, 26 nt, Human
gggaaggcagaagaggaggaaaggag

SEQ ID NO: 807825 - RNA, 20 nt, Human
ggggcugacagcaacccaga

SEQ ID NO: 807826 - RNA, 20 nt, Human
ggucuuaggaagcauuaaaa

SEQ ID NO: 807827 - RNA, 23 nt, Human
ggugacaucucagcuggugaccc

SEQ ID NO: 807828 - RNA, 21 nt, Human
guagaaaaaugugguuuuuca

SEQ ID NO: 807829 - RNA, 19 nt, Human
gucaagugccauucugcag

SEQ ID NO: 807830 - RNA, 24 nt, Human
guuuuucaguuguuuucucugugg

SEQ ID NO: 807831 - RNA, 19 nt, Human
uaaaagcaaaaagcagacc

SEQ ID NO: 807832 - RNA, 26 nt, Human
uaaaagcaaaaagcagaccugauguu

SEQ ID NO: 807833 - RNA, 20 nt, Human
uaaagcaggugacaucucaa

SEQ ID NO: 807834 - RNA, 21 nt, Human
uaacagagauacagguuuuua

SEQ ID NO: 807835 - RNA, 20 nt, Human
uaacaugugacacuaacgua

SEQ ID NO: 807836 - RNA, 23 nt, Human
uaacauuaaaagcaaaaagcaga

SEQ ID NO: 807837 - RNA, 24 nt, Human
uaacauuaaaagcaaaaagcagac

SEQ ID NO: 807838 - RNA, 22 nt, Human
uaacccggagauccaaaacagg

SEQ ID NO: 807839 - RNA, 20 nt, Human
uaacuaaaguccaaaggguc

SEQ ID NO: 807840 - RNA, 20 nt, Human
uacaaagccacaccuagaac

SEQ ID NO: 807841 - RNA, 22 nt, Human
uacaaagccacaccuagaacaa

SEQ ID NO: 807842 - RNA, 22 nt, Human
uacaacuauuuauacuguuuaa

SEQ ID NO: 807843 - RNA, 24 nt, Human
uacacagaaaaaaagauugacauu

SEQ ID NO: 807844 - RNA, 21 nt, Human
uacagaugaaaccagguugac

SEQ ID NO: 807845 - RNA, 19 nt, Human
uaccacaaaggaggaaaca

SEQ ID NO: 807846 - RNA, 23 nt, Human
uagaaugaggccucccuaacaaa

SEQ ID NO: 807847 - RNA, 21 nt, Human
uagggaagaacagguguagau

SEQ ID NO: 807848 - RNA, 19 nt, Human
uauagcauucuucugcaug

SEQ ID NO: 807849 - RNA, 19 nt, Human
uaucacagaccacaggcca

SEQ ID NO: 807850 - RNA, 23 nt, Human
uaucacagaccacaggccaaagc

SEQ ID NO: 807851 - RNA, 24 nt, Human
uaucagaauuuuugaaagaguuuc

SEQ ID NO: 807852 - RNA, 18 nt, Human
ucaaaacaagaguaaaca

SEQ ID NO: 807853 - RNA, 18 nt, Human
ucaagcaagcagaggccc

SEQ ID NO: 807854 - RNA, 21 nt, Human
ucaagcaagcagaggcccaca

SEQ ID NO: 807855 - RNA, 22 nt, Human
ucagcuaccuccccagcuguau

SEQ ID NO: 807856 - RNA, 18 nt, Human
uccaaggaccauccucuc

SEQ ID NO: 807857 - RNA, 22 nt, Human
ucccccaggagaagcuugagau

SEQ ID NO: 807858 - RNA, 24 nt, Human
uccucaacuaggcauccuauuugu

SEQ ID NO: 807859 - RNA, 23 nt, Human
ucuauaguacacagaggccaaca

SEQ ID NO: 807860 - RNA, 19 nt, Human
ucugauuuugcaggcccac

SEQ ID NO: 807861 - RNA, 20 nt, Human
ucugugguacuauuuaaaca

SEQ ID NO: 807862 - RNA, 21 nt, Human
ucuuacccacccucagggagg

SEQ ID NO: 807863 - RNA, 20 nt, Human
ucuucccagaaccccuacua

SEQ ID NO: 807864 - RNA, 18 nt, Human
ugaaagugggaaagcugg

SEQ ID NO: 807865 - RNA, 20 nt, Human
ugaacacauguccacacaua

SEQ ID NO: 807866 - RNA, 20 nt, Human
ugacagcaacccagacaaaa

SEQ ID NO: 807867 - RNA, 22 nt, Human
ugagagggaggaaaugagggau

SEQ ID NO: 807868 - RNA, 24 nt, Human
ugagguagaagcaaagagagcaaa

SEQ ID NO: 807869 - RNA, 23 nt, Human
ugagguccagauggccagaggcu

SEQ ID NO: 807870 - RNA, 22 nt, Human
ugagguccuuguugaccaggaa

SEQ ID NO: 807871 - RNA, 20 nt, Human
ugcaccccaucacuaucacc

SEQ ID NO: 807872 - RNA, 18 nt, Human
ugcauggccagcaugaac

SEQ ID NO: 807873 - RNA, 19 nt, Human
ugcuacagcuuuaagccaa

SEQ ID NO: 807874 - RNA, 22 nt, Human
ugcuccaaaucccccaccuagc

SEQ ID NO: 807875 - RNA, 26 nt, Human
ugcuuaacauaugaacaguccgggug

SEQ ID NO: 807876 - RNA, 20 nt, Human
ugcuuuuacacccacuggaa

SEQ ID NO: 807877 - RNA, 22 nt, Human
ugggucuuaggaagcauuaaaa

SEQ ID NO: 807878 - RNA, 20 nt, Human
uuaaaagcaaaaagcagacc

SEQ ID NO: 807879 - RNA, 25 nt, Human
uuacacagaaaaaaagauugacauu

SEQ ID NO: 807880 - RNA, 20 nt, Human
uucacagaacacagcaacaa

SEQ ID NO: 807881 - RNA, 20 nt, Human
uucccagaaccccuacuaug

SEQ ID NO: 807882 - RNA, 21 nt, Human
uuggagacuaaagcccacucc

SEQ ID NO: 807883 - RNA, 21 nt, Human
uuugcuccaaaucccccaccu

SEQ ID NO: 807884 - RNA, 19 nt, Human
uuuguucauaaccccuuca

SEQ ID NO: 807885 - RNA, 22 nt, Human
uuuucaguuguuuucucugugg

SEQ ID NO: 807886 - RNA, 22 nt, Human
uuuuccaagcuagggagguccc

SEQ ID NO: 807887 - RNA, 25 nt, Human
aaacacgcaccaggggaaaugagcc

SEQ ID NO: 807888 - RNA, 24 nt, Human
aaaguucugggauuacaggcauga

SEQ ID NO: 807889 - RNA, 18 nt, Human
aacacaaaagcgaugucc

SEQ ID NO: 807890 - RNA, 21 nt, Human
aacauggcgaaacccuguguc

SEQ ID NO: 807891 - RNA, 22 nt, Human
aacauggcgaaacccugugucu

SEQ ID NO: 807892 - RNA, 19 nt, Human
aagcaaggcccucaagccc

SEQ ID NO: 807893 - RNA, 21 nt, Human
aagcaggagugaauuugaggu

SEQ ID NO: 807894 - RNA, 23 nt, Human
aagcgauucccgauggcggcggg

SEQ ID NO: 807895 - RNA, 19 nt, Human
aaguagcugggauuacagg

SEQ ID NO: 807896 - RNA, 25 nt, Human
aaguagcugggauuacaggcgcccg

SEQ ID NO: 807897 - RNA, 27 nt, Human
aagugauccuccugccucggccuccca

SEQ ID NO: 807898 - RNA, 22 nt, Human
acagacaaucccacagaagaac

SEQ ID NO: 807899 - RNA, 21 nt, Human
acagcacagucuuguacacug

SEQ ID NO: 807900 - RNA, 19 nt, Human
acaggcgcccgccaccacg

SEQ ID NO: 807901 - RNA, 21 nt, Human
accacugcacuccagccuagg

SEQ ID NO: 807902 - RNA, 22 nt, Human
accacugcacuccagccuaggc

SEQ ID NO: 807903 - RNA, 18 nt, Human
accauguuggccaggcug

SEQ ID NO: 807904 - RNA, 24 nt, Human
accgcagagccucuuccccgcccu

SEQ ID NO: 807905 - RNA, 20 nt, Human
acucuuauaggccaggcugg

SEQ ID NO: 807906 - RNA, 24 nt, Human
acugcacuccagccuaggcgacag

SEQ ID NO: 807907 - RNA, 26 nt, Human
acugcacuccagccuaggcgacagag

SEQ ID NO: 807908 - RNA, 18 nt, Human
agaacccgaggcucucuc

SEQ ID NO: 807909 - RNA, 20 nt, Human
agaagacagacaaucccaca

SEQ ID NO: 807910 - RNA, 22 nt, Human
agaagacagacaaucccacaga

SEQ ID NO: 807911 - RNA, 22 nt, Human
agaagcaaggaggagacgcaag

SEQ ID NO: 807912 - RNA, 25 nt, Human
agacagacaggaggaggacggaggu

SEQ ID NO: 807913 - RNA, 19 nt, Human
agagaagcaaggaggagac

SEQ ID NO: 807914 - RNA, 19 nt, Human
agagccucuuccccgcccu

SEQ ID NO: 807915 - RNA, 24 nt, Human
agcaccuugggaggcugagguggg

SEQ ID NO: 807916 - RNA, 23 nt, Human
agccacagacucggaggcagcac

SEQ ID NO: 807917 - RNA, 18 nt, Human
agccacgcuggacagcac

SEQ ID NO: 807918 - RNA, 23 nt, Human
agccaggugcgguggugcgugcc

SEQ ID NO: 807919 - RNA, 23 nt, Human
agcugaggcaggaggauugcuug

SEQ ID NO: 807920 - RNA, 20 nt, Human
agcugcagggcgugcggaac

SEQ ID NO: 807921 - RNA, 21 nt, Human
aggagaaaaaaauugccuaaa

SEQ ID NO: 807922 - RNA, 18 nt, Human
aggaggacggagguuucu

SEQ ID NO: 807923 - RNA, 20 nt, Human
aggaggacggagguuucugg

SEQ ID NO: 807924 - RNA, 21 nt, Human
aggaggacggagguuucuggg

SEQ ID NO: 807925 - RNA, 23 nt, Human
aggaggcauggggagggcagggc

SEQ ID NO: 807926 - RNA, 24 nt, Human
aggcaggaggauugcuugagcccg

SEQ ID NO: 807927 - RNA, 20 nt, Human
aggcauggggagggcagggc

SEQ ID NO: 807928 - RNA, 23 nt, Human
aggcauggggagggcagggcccg

SEQ ID NO: 807929 - RNA, 19 nt, Human
aggcgagguggcucaugcc

SEQ ID NO: 807930 - RNA, 24 nt, Human
aggcgagguggcucaugccuguaa

SEQ ID NO: 807931 - RNA, 23 nt, Human
aggcugaggugggcagaccacua

SEQ ID NO: 807932 - RNA, 18 nt, Human
agggcagggcccgcccgu

SEQ ID NO: 807933 - RNA, 22 nt, Human
aggucgaggcugcagugagcug

SEQ ID NO: 807934 - RNA, 21 nt, Human
agugcaauggcgcgaucucag

SEQ ID NO: 807935 - RNA, 24 nt, Human
auggagcaugugaaauguggcccu

SEQ ID NO: 807936 - RNA, 18 nt, Human
augggguuucaccauguu

SEQ ID NO: 807937 - RNA, 22 nt, Human
augggguuucaccauguuggcc

SEQ ID NO: 807938 - RNA, 24 nt, Human
augggguuucaccauguuggccag

SEQ ID NO: 807939 - RNA, 23 nt, Human
auugcuugagcccgggaggucga

SEQ ID NO: 807940 - RNA, 23 nt, Human
caaaaagcaacaucucaacagca

SEQ ID NO: 807941 - RNA, 24 nt, Human
caaaguucugggauuacaggcaug

SEQ ID NO: 807942 - RNA, 25 nt, Human
caacaguguguaccacgaacgcucc

SEQ ID NO: 807943 - RNA, 22 nt, Human
caaccacuuugaaaaagaacuc

SEQ ID NO: 807944 - RNA, 20 nt, Human
caaccuccgccucccggguu

SEQ ID NO: 807945 - RNA, 22 nt, Human
caagcaauucucuugccucagc

SEQ ID NO: 807946 - RNA, 27 nt, Human
caagcaauucucuugccucagccaccc

SEQ ID NO: 807947 - RNA, 20 nt, Human
caagucuucgguuagcguca

SEQ ID NO: 807948 - RNA, 22 nt, Human
caagugauccuccugccucggc

SEQ ID NO: 807949 - RNA, 27 nt, Human
caagugauccuccugccucggccuccc

SEQ ID NO: 807950 - RNA, 25 nt, Human
cacaggccaaggggcagugcagaac

SEQ ID NO: 807951 - RNA, 25 nt, Human
caccaaagaagauacaacuuguaaa

SEQ ID NO: 807952 - RNA, 27 nt, Human
caccaaagaagauacaacuuguaaaug

SEQ ID NO: 807953 - RNA, 26 nt, Human
caccacugcacuccagccuaggcgac

SEQ ID NO: 807954 - RNA, 19 nt, Human
caccaggggaaaugagccu

SEQ ID NO: 807955 - RNA, 21 nt, Human
caccauguuggccaggcuggu

SEQ ID NO: 807956 - RNA, 24 nt, Human
caccauguuggccaggcuggucuc

SEQ ID NO: 807957 - RNA, 27 nt, Human
caccauguuggccaggcuggucucaaa

SEQ ID NO: 807958 - RNA, 20 nt, Human
cacgcgaagacagacaggag

SEQ ID NO: 807959 - RNA, 21 nt, Human
cacugcaaccuccgccucccg

SEQ ID NO: 807960 - RNA, 23 nt, Human
cacugcaaccuccgccucccggg

SEQ ID NO: 807961 - RNA, 19 nt, Human
cacugcacuccagccuagg

SEQ ID NO: 807962 - RNA, 20 nt, Human
cacugcacuccagccuaggc

SEQ ID NO: 807963 - RNA, 20 nt, Human
cacugcacuccagccuaggc

SEQ ID NO: 807964 - RNA, 22 nt, Human
cacugcacuccagccuaggcga

SEQ ID NO: 807965 - RNA, 25 nt, Human
cacugcacuccagccuaggcgacaa

SEQ ID NO: 807966 - RNA, 25 nt, Human
cacugcacuccagccuaggcgacag

SEQ ID NO: 807967 - RNA, 24 nt, Human
cacuuugaaaaagaacucgguggg

SEQ ID NO: 807968 - RNA, 19 nt, Human
cagagacccugucucaaca

SEQ ID NO: 807969 - RNA, 18 nt, Human
cagcaccugcaacauucc

SEQ ID NO: 807970 - RNA, 23 nt, Human
cagcaccuugggaggcugaggug

SEQ ID NO: 807971 - RNA, 24 nt, Human
cagcaccuugggaggcugaggugg

SEQ ID NO: 807972 - RNA, 19 nt, Human
caggaguuccacaccagcc

SEQ ID NO: 807973 - RNA, 20 nt, Human
caggcagagcugggcuucug

SEQ ID NO: 807974 - RNA, 21 nt, Human
caggccaaggggcagugcaga

SEQ ID NO: 807975 - RNA, 18 nt, Human
caggccccccagacaagc

SEQ ID NO: 807976 - RNA, 21 nt, Human
caggcgcccgccaccacgccu

SEQ ID NO: 807977 - RNA, 24 nt, Human
cauguuggccaggcuggucucaaa

SEQ ID NO: 807978 - RNA, 24 nt, Human
ccaaaguucugggauuacaggcau

SEQ ID NO: 807979 - RNA, 22 nt, Human
ccaaguagcugggauuacaggc

SEQ ID NO: 807980 - RNA, 24 nt, Human
ccacccaaguagcugggauuacag

SEQ ID NO: 807981 - RNA, 19 nt, Human
ccacugcacuccagccuag

SEQ ID NO: 807982 - RNA, 21 nt, Human
ccacugcacuccagccuaggc

SEQ ID NO: 807983 - RNA, 24 nt, Human
ccacugcacuccagccuaggcgac

SEQ ID NO: 807984 - RNA, 24 nt, Human
cccaaaguucugggauuacaggca

SEQ ID NO: 807985 - RNA, 23 nt, Human
cccaaguagcugggauuacaggc

SEQ ID NO: 807986 - RNA, 23 nt, Human
cccaaguagcugggauuacaggc

SEQ ID NO: 807987 - RNA, 19 nt, Human
cccagggaaagacacgcaa

SEQ ID NO: 807988 - RNA, 20 nt, Human
ccccccagacaagcagcccc

SEQ ID NO: 807989 - RNA, 19 nt, Human
cccccgcagcccggccccu

SEQ ID NO: 807990 - RNA, 18 nt, Human
ccccgcuggugcgcgucu

SEQ ID NO: 807991 - RNA, 18 nt, Human
ccccgggccgugugaccu

SEQ ID NO: 807992 - RNA, 19 nt, Human
cccggccccuccagggggc

SEQ ID NO: 807993 - RNA, 20 nt, Human
cccggguucaagcaauucuc

SEQ ID NO: 807994 - RNA, 22 nt, Human
cccguaggacccucugugacca

SEQ ID NO: 807995 - RNA, 27 nt, Human
ccgccucccggguucaagcaauucuuu

SEQ ID NO: 807996 - RNA, 24 nt, Human
ccucccggguucaagcaauucucu

SEQ ID NO: 807997 - RNA, 19 nt, Human
ccuccugccucggccuccc

SEQ ID NO: 807998 - RNA, 22 nt, Human
ccuggaggagaaaaaaauugcc

SEQ ID NO: 807999 - RNA, 20 nt, Human
ccuggauggucaauugauuu

SEQ ID NO: 808000 - RNA, 19 nt, Human
ccuguaauccagcaccuug

SEQ ID NO: 808001 - RNA, 21 nt, Human
ccuguaguuccagcuacucag

SEQ ID NO: 808002 - RNA, 22 nt, Human
ccuguaguuccagcuacucagg

SEQ ID NO: 808003 - RNA, 23 nt, Human
cgaagacagacaggaggaggacg

SEQ ID NO: 808004 - RNA, 22 nt, Human
cgcccgugcugggccugcuggg

SEQ ID NO: 808005 - RNA, 24 nt, Human
cgcccgugcugggccugcugggcc

SEQ ID NO: 808006 - RNA, 22 nt, Human
cuaacaacagccacagcugcag

SEQ ID NO: 808007 - RNA, 22 nt, Human
cucaacacaaaagcgauguccu

SEQ ID NO: 808008 - RNA, 24 nt, Human
cucaagugauccuccugccucggc

SEQ ID NO: 808009 - RNA, 24 nt, Human
cucacugcaaccuccgccucccgg

SEQ ID NO: 808010 - RNA, 24 nt, Human
cucagccacccaaguagcugggau

SEQ ID NO: 808011 - RNA, 23 nt, Human
cucaugccuguaauccagcaccu

SEQ ID NO: 808012 - RNA, 25 nt, Human
cuccagggggcaccgcagagccucu

SEQ ID NO: 808013 - RNA, 21 nt, Human
cuccgcgcugagcugcagggc

SEQ ID NO: 808014 - RNA, 22 nt, Human
cucuuauaggccaggcuggagu

SEQ ID NO: 808015 - RNA, 24 nt, Human
cugcaaccuccgccucccggguuc

SEQ ID NO: 808016 - RNA, 22 nt, Human
cugcagugagcugugacugcac

SEQ ID NO: 808017 - RNA, 20 nt, Human
cugccucggccucccaaagu

SEQ ID NO: 808018 - RNA, 24 nt, Human
cugcugggccaaugcuggaggugc

SEQ ID NO: 808019 - RNA, 23 nt, Human
cuugaccucaagugauccuccug

SEQ ID NO: 808020 - RNA, 20 nt, Human
cuugugccguggaauacaca

SEQ ID NO: 808021 - RNA, 23 nt, Human
gaaggacggaucuagaacccgag

SEQ ID NO: 808022 - RNA, 22 nt, Human
gaccucaagugauccuccugcc

SEQ ID NO: 808023 - RNA, 24 nt, Human
gaccucaagugauccuccugccuc

SEQ ID NO: 808024 - RNA, 23 nt, Human
gagaagaagacagacaaucccac

SEQ ID NO: 808025 - RNA, 27 nt, Human
gagaagaagacagacaaucccacagaa

SEQ ID NO: 808026 - RNA, 21 nt, Human
gagugcaauggcgcgaucuca

SEQ ID NO: 808027 - RNA, 20 nt, Human
gaguguaaacuugcacaacc

SEQ ID NO: 808028 - RNA, 18 nt, Human
gauuacaggcaugagcca

SEQ ID NO: 808029 - RNA, 21 nt, Human
gauuacaggcaugagccacug

SEQ ID NO: 808030 - RNA, 24 nt, Human
gauuacaggcaugagccacugugc

SEQ ID NO: 808031 - RNA, 18 nt, Human
gauuacaggcgcccgcca

SEQ ID NO: 808032 - RNA, 24 nt, Human
gauugcuugagcccgggaggucga

SEQ ID NO: 808033 - RNA, 24 nt, Human
gcaauucucuugccucagccaccc

SEQ ID NO: 808034 - RNA, 25 nt, Human
gcaccacgcgaagacagaaguccac

SEQ ID NO: 808035 - RNA, 27 nt, Human
gcagccccgggccgugugaccucgugc

SEQ ID NO: 808036 - RNA, 24 nt, Human
gcccgggaggucgaggcugcagug

SEQ ID NO: 808037 - RNA, 18 nt, Human
gcccugugcggcuccgcc

SEQ ID NO: 808038 - RNA, 21 nt, Human
gccucagcccugacuuccacc

SEQ ID NO: 808039 - RNA, 23 nt, Human
gccuggcuaauuuuuuguauuuu

SEQ ID NO: 808040 - RNA, 23 nt, Human
gccuguaauccagcaccuuggga

SEQ ID NO: 808041 - RNA, 25 nt, Human
gccuucgcaacaguguguaccacca

SEQ ID NO: 808042 - RNA, 20 nt, Human
gcgugccuguaguuccagcu

SEQ ID NO: 808043 - RNA, 19 nt, Human
gcugcagugagcugugacu

SEQ ID NO: 808044 - RNA, 19 nt, Human
gcuggagugcaauggcgcg

SEQ ID NO: 808045 - RNA, 22 nt, Human
gcugggccugcugggccaaugc

SEQ ID NO: 808046 - RNA, 18 nt, Human
ggaaacauggcgaaaccc

SEQ ID NO: 808047 - RNA, 22 nt, Human
ggaauacacaaacacgcaccag

SEQ ID NO: 808048 - RNA, 21 nt, Human
ggagcaugugaaauguggccc

SEQ ID NO: 808049 - RNA, 24 nt, Human
ggauuacaggcaugagccacugug

SEQ ID NO: 808050 - RNA, 22 nt, Human
ggccccccagacaagcagcccc

SEQ ID NO: 808051 - RNA, 20 nt, Human
ggcgacagagacccugucuc

SEQ ID NO: 808052 - RNA, 18 nt, Human
ggcucaugccuguaaucc

SEQ ID NO: 808053 - RNA, 18 nt, Human
ggcugcagggcaggaggc

SEQ ID NO: 808054 - RNA, 21 nt, Human
gggaaagacacgcaaucucac

SEQ ID NO: 808055 - RNA, 25 nt, Human
gggcagccguugcccacaggucgcu

SEQ ID NO: 808056 - RNA, 18 nt, Human
gggcugcagggcaggagg

SEQ ID NO: 808057 - RNA, 22 nt, Human
gggguuucaccauguuggccag

SEQ ID NO: 808058 - RNA, 18 nt, Human
ggguuucaccauguuggc

SEQ ID NO: 808059 - RNA, 22 nt, Human
ggguuucaccauguuggccagg

SEQ ID NO: 808060 - RNA, 21 nt, Human
gguggcucaugccuguaaucc

SEQ ID NO: 808061 - RNA, 23 nt, Human
gguggcucaugccuguaauccag

SEQ ID NO: 808062 - RNA, 22 nt, Human
gguggugcgugccuguaguucc

SEQ ID NO: 808063 - RNA, 23 nt, Human
gguggugcgugccuguaguucca

SEQ ID NO: 808064 - RNA, 18 nt, Human
guagcugggauuacaggc

SEQ ID NO: 808065 - RNA, 26 nt, Human
gugaagcaaggcccucaagcccagug

SEQ ID NO: 808066 - RNA, 18 nt, Human
guggugcgugccuguagu

SEQ ID NO: 808067 - RNA, 23 nt, Human
uaacaacagccacagcugcagag

SEQ ID NO: 808068 - RNA, 22 nt, Human
uaauuuuuuguauuuuuaguag

SEQ ID NO: 808069 - RNA, 23 nt, Human
uaauuuuuuguauuuuuaguaga

SEQ ID NO: 808070 - RNA, 22 nt, Human
uacaggcaugagccacugugcc

SEQ ID NO: 808071 - RNA, 22 nt, Human
uacaggcgcccgccaccacgcc

SEQ ID NO: 808072 - RNA, 22 nt, Human
uagaaaugggguuucaccaugu

SEQ ID NO: 808073 - RNA, 24 nt, Human
uagaacccgaggcucucucaggaa

SEQ ID NO: 808074 - RNA, 19 nt, Human
uagcugaugccagugaggc

SEQ ID NO: 808075 - RNA, 20 nt, Human
uaggcgagguggcucaugcc

SEQ ID NO: 808076 - RNA, 24 nt, Human
uaguagaaaugggguuucaccaug

SEQ ID NO: 808077 - RNA, 26 nt, Human
uaguagaaaugggguuucaccauguu

SEQ ID NO: 808078 - RNA, 20 nt, Human
ucaagcccaguguggccccg

SEQ ID NO: 808079 - RNA, 20 nt, Human
ucacacacaggccaaggggc

SEQ ID NO: 808080 - RNA, 23 nt, Human
ucacaccggaagugcggcucaca

SEQ ID NO: 808081 - RNA, 23 nt, Human
ucacaccggaagugcggcucaca

SEQ ID NO: 808082 - RNA, 23 nt, Human
ucacaccggaagugcggcucaca

SEQ ID NO: 808083 - RNA, 23 nt, Human
ucacugcaaccuccgccucccgg

SEQ ID NO: 808084 - RNA, 24 nt, Human
ucacugcaaccuccgccucccggg

SEQ ID NO: 808085 - RNA, 25 nt, Human
ucacugcaaccuccgccucccgggu

SEQ ID NO: 808086 - RNA, 27 nt, Human
ucacugcaaccuccgccucccggguuc

SEQ ID NO: 808087 - RNA, 22 nt, Human
ucacuggugaucugggaaacca

SEQ ID NO: 808088 - RNA, 24 nt, Human
ucccaaaguucugggauuacaggc

SEQ ID NO: 808089 - RNA, 21 nt, Human
ucccggguucaagcaauucuc

SEQ ID NO: 808090 - RNA, 21 nt, Human
ucccggguucaagcaauucuc

SEQ ID NO: 808091 - RNA, 24 nt, Human
uccgccucccggguucaagcaauu

SEQ ID NO: 808092 - RNA, 18 nt, Human
ucggugggcuaggcgagg

SEQ ID NO: 808093 - RNA, 20 nt, Human
ucugggugcaugaagagcuc

SEQ ID NO: 808094 - RNA, 18 nt, Human
ucuguccucagcuguuuu

SEQ ID NO: 808095 - RNA, 19 nt, Human
ucuguccucagcuguuuuc

SEQ ID NO: 808096 - RNA, 23 nt, Human
ucugugaccaggcagagcugggc

SEQ ID NO: 808097 - RNA, 23 nt, Human
ugaaaugccugcguucuguccuc

SEQ ID NO: 808098 - RNA, 18 nt, Human
ugaccaggcagagcuggg

SEQ ID NO: 808099 - RNA, 18 nt, Human
ugaccucaagugauccuc

SEQ ID NO: 808100 - RNA, 21 nt, Human
ugaccucaagugauccuccug

SEQ ID NO: 808101 - RNA, 24 nt, Human
ugaccucaagugauccuccugccu

SEQ ID NO: 808102 - RNA, 23 nt, Human
ugacugcaccacugcacuccagc

SEQ ID NO: 808103 - RNA, 21 nt, Human
ugagaaaagacgucauaaagg

SEQ ID NO: 808104 - RNA, 19 nt, Human
ugagaagaagacagacaau

SEQ ID NO: 808105 - RNA, 24 nt, Human
ugagcccgggaggucgaggcugca

SEQ ID NO: 808106 - RNA, 24 nt, Human
ugaggcaggaggauugcuugagcc

SEQ ID NO: 808107 - RNA, 25 nt, Human
ugaggcaggaggauugcuugagccc

SEQ ID NO: 808108 - RNA, 18 nt, Human
ugaggugggcagacagcc

SEQ ID NO: 808109 - RNA, 21 nt, Human
ugcaccacugcacuccagccu

SEQ ID NO: 808110 - RNA, 20 nt, Human
ugcagggcaggaggcauggg

SEQ ID NO: 808111 - RNA, 24 nt, Human
ugccucagccacccaaguagcugg

SEQ ID NO: 808112 - RNA, 24 nt, Human
ugccucggccucccaaaguucugg

SEQ ID NO: 808113 - RNA, 21 nt, Human
ugccuguaauccagcaccuug

SEQ ID NO: 808114 - RNA, 23 nt, Human
ugccuguaauccagcaccuuggg

SEQ ID NO: 808115 - RNA, 24 nt, Human
ugccuguaguuccagcuacucagg

SEQ ID NO: 808116 - RNA, 18 nt, Human
ugcugggccugcugggcc

SEQ ID NO: 808117 - RNA, 22 nt, Human
uggaauacacaaacacgcacca

SEQ ID NO: 808118 - RNA, 24 nt, Human
uggagugcaauggcgcgaucucag

SEQ ID NO: 808119 - RNA, 22 nt, Human
uggaucauacaccucaacacaa

SEQ ID NO: 808120 - RNA, 24 nt, Human
uggccaggcuggucucaaacucuu

SEQ ID NO: 808121 - RNA, 24 nt, Human
uggcgcgaucucagcucacugcaa

SEQ ID NO: 808122 - RNA, 19 nt, Human
uggcucaugccuguaaucc

SEQ ID NO: 808123 - RNA, 23 nt, Human
uggcucaugccuguaauccagca

SEQ ID NO: 808124 - RNA, 19 nt, Human
ugggaggcugaggugggca

SEQ ID NO: 808125 - RNA, 20 nt, Human
ugggaggcugaggugggcag

SEQ ID NO: 808126 - RNA, 22 nt, Human
ugggaggcugaggugggcagac

SEQ ID NO: 808127 - RNA, 18 nt, Human
ugggauuacaggcaugag

SEQ ID NO: 808128 - RNA, 21 nt, Human
ugggauuacaggcaugagcca

SEQ ID NO: 808129 - RNA, 22 nt, Human
ugggauuacaggcaugagccac

SEQ ID NO: 808130 - RNA, 22 nt, Human
ugggauuacaggcaugagccac

SEQ ID NO: 808131 - RNA, 22 nt, Human
ugggauuacaggcaugagccac

SEQ ID NO: 808132 - RNA, 23 nt, Human
ugggauuacaggcaugagccacu

SEQ ID NO: 808133 - RNA, 24 nt, Human
ugggauuacaggcaugagccacug

SEQ ID NO: 808134 - RNA, 21 nt, Human
ugggauuacaggcgcccgcca

SEQ ID NO: 808135 - RNA, 22 nt, Human
ugggauuacaggcgcccgccac

SEQ ID NO: 808136 - RNA, 24 nt, Human
ugggauuacaggcgcccgccacca

SEQ ID NO: 808137 - RNA, 20 nt, Human
ugggccugcugggccaaugc

SEQ ID NO: 808138 - RNA, 21 nt, Human
ugggcuguccaguagggcagc

SEQ ID NO: 808139 - RNA, 24 nt, Human
ugggguuucaccauguuggccagg

SEQ ID NO: 808140 - RNA, 18 nt, Human
uggugcgugccuguaguu

SEQ ID NO: 808141 - RNA, 21 nt, Human
uguauuuuuaguagaaauggg

SEQ ID NO: 808142 - RNA, 23 nt, Human
uguccaguagggcagccguugcc

SEQ ID NO: 808143 - RNA, 20 nt, Human
ugugcacuggcagaaggacg

SEQ ID NO: 808144 - RNA, 25 nt, Human
uguggcccuuguggaggaggaccug

SEQ ID NO: 808145 - RNA, 18 nt, Human
uuaguagaaaugggguuu

SEQ ID NO: 808146 - RNA, 22 nt, Human
uuaguagaaaugggguuucacc

SEQ ID NO: 808147 - RNA, 24 nt, Human
uuaguagaaaugggguuucaccau

SEQ ID NO: 808148 - RNA, 25 nt, Human
uuaguggcacauaagaauauuuucu

SEQ ID NO: 808149 - RNA, 23 nt, Human
uuccagcuacucaggagcugagg

SEQ ID NO: 808150 - RNA, 22 nt, Human
uucuucaauuuaucagcaucag

SEQ ID NO: 808151 - RNA, 18 nt, Human
uugcuugagcccgggagg

SEQ ID NO: 808152 - RNA, 23 nt, Human
uugcuugagcccgggaggucgag

SEQ ID NO: 808153 - RNA, 24 nt, Human
uugcuugagcccgggaggucgagg

SEQ ID NO: 808154 - RNA, 22 nt, Human
uuuaaguuuaaauagccagaug

SEQ ID NO: 808155 - RNA, 24 nt, Human
uuucaccauguuggccaggcuggu

SEQ ID NO: 808156 - RNA, 25 nt, Human
uuucuggaucucgaugcguaugugg

SEQ ID NO: 808157 - RNA, 24 nt, Human
uuuuacucuuauaggccaggcugg

SEQ ID NO: 808158 - RNA, 24 nt, Human
uuuuuaguagaaaugggguuucac

SEQ ID NO: 808159 - RNA, 19 nt, Human
uuuuuguauuuuuaguaga

SEQ ID NO: 808160 - RNA, 18 nt, Human
uuuuuuguauuuuuagua

SEQ ID NO: 808161 - RNA, 22 nt, Human
aaacaccaagagccccacugcu

SEQ ID NO: 808162 - RNA, 20 nt, Human
aaagagagguggggggcugc

SEQ ID NO: 808163 - RNA, 21 nt, Human
aaagcccgccuuguccccaga

SEQ ID NO: 808164 - RNA, 27 nt, Human
aaauaacagcuuuaccagcagauccca

SEQ ID NO: 808165 - RNA, 18 nt, Human
aagaagugauagaguuuc

SEQ ID NO: 808166 - RNA, 22 nt, Human
aagcccgccuuguccccagaac

SEQ ID NO: 808167 - RNA, 23 nt, Human
aagggccagugaagccacaggug

SEQ ID NO: 808168 - RNA, 25 nt, Human
aaguggcuaauuguguuucucuaug

SEQ ID NO: 808169 - RNA, 18 nt, Human
aaugguaugaagcaaacc

SEQ ID NO: 808170 - RNA, 23 nt, Human
agagagguggggggcugcugagc

SEQ ID NO: 808171 - RNA, 21 nt, Human
agaggggcgcgggcggcgaug

SEQ ID NO: 808172 - RNA, 18 nt, Human
agauucccguuuccccac

SEQ ID NO: 808173 - RNA, 24 nt, Human
agcauucuuguagauccucugcuc

SEQ ID NO: 808174 - RNA, 19 nt, Human
agccugcagacuggagcua

SEQ ID NO: 808175 - RNA, 20 nt, Human
aggaugaagagggggaaagg

SEQ ID NO: 808176 - RNA, 24 nt, Human
aggcagcaugaaacaccaagagcc

SEQ ID NO: 808177 - RNA, 19 nt, Human
aggcaugguuuuggcuucu

SEQ ID NO: 808178 - RNA, 21 nt, Human
agggagaggcaggcccaagca

SEQ ID NO: 808179 - RNA, 19 nt, Human
agggaucagucccuaaacc

SEQ ID NO: 808180 - RNA, 19 nt, Human
agggcuggcagaugccacc

SEQ ID NO: 808181 - RNA, 22 nt, Human
agguggggggcugcugagcugg

SEQ ID NO: 808182 - RNA, 19 nt, Human
aguacccauuuccguguga

SEQ ID NO: 808183 - RNA, 25 nt, Human
auaaggcagcaugaaacaccaagag

SEQ ID NO: 808184 - RNA, 19 nt, Human
augaaacaccaagagcccc

SEQ ID NO: 808185 - RNA, 20 nt, Human
augaaacaccaagagcccca

SEQ ID NO: 808186 - RNA, 20 nt, Human
augaagcaaaccagcuuccc

SEQ ID NO: 808187 - RNA, 25 nt, Human
augcaucugauggaaugaggagggu

SEQ ID NO: 808188 - RNA, 18 nt, Human
auuugcauugucucuaac

SEQ ID NO: 808189 - RNA, 18 nt, Human
caaagcaaaacgggauca

SEQ ID NO: 808190 - RNA, 28 nt, Human
caaauaacagcuuuaccagcagauccca

SEQ ID NO: 808191 - RNA, 22 nt, Human
cacaaugauagucagaaagacc

SEQ ID NO: 808192 - RNA, 19 nt, Human
caccaaguacccauuuccg

SEQ ID NO: 808193 - RNA, 20 nt, Human
cagacaccaccaccccgggu

SEQ ID NO: 808194 - RNA, 18 nt, Human
cagagccugcagacugga

SEQ ID NO: 808195 - RNA, 19 nt, Human
cagagcuucugccaggcuc

SEQ ID NO: 808196 - RNA, 21 nt, Human
cagaucccaaugguaugaagg

SEQ ID NO: 808197 - RNA, 23 nt, Human
cagcaugaaacaccaagagcccc

SEQ ID NO: 808198 - RNA, 18 nt, Human
caggccagaagcuccugg

SEQ ID NO: 808199 - RNA, 20 nt, Human
cagguggaaaagagccuucc

SEQ ID NO: 808200 - RNA, 21 nt, Human
cagugagggagccccgcugga

SEQ ID NO: 808201 - RNA, 18 nt, Human
caugaaacaccaagagcc

SEQ ID NO: 808202 - RNA, 19 nt, Human
ccaacauuugcauugucuc

SEQ ID NO: 808203 - RNA, 18 nt, Human
ccaaccacagagcuucug

SEQ ID NO: 808204 - RNA, 21 nt, Human
ccaagagccccacugcuuucu

SEQ ID NO: 808205 - RNA, 22 nt, Human
cccacacagaagggguggguuc

SEQ ID NO: 808206 - RNA, 19 nt, Human
cccacgaaagcccgccuug

SEQ ID NO: 808207 - RNA, 21 nt, Human
cccccuaccacaaugauaguc

SEQ ID NO: 808208 - RNA, 25 nt, Human
ccccuaccacaaugauagucagaaa

SEQ ID NO: 808209 - RNA, 19 nt, Human
cccugaggacaaccugggg

SEQ ID NO: 808210 - RNA, 20 nt, Human
cccugaggacaaccuggggc

SEQ ID NO: 808211 - RNA, 18 nt, Human
ccgcuggcucccaccuuc

SEQ ID NO: 808212 - RNA, 22 nt, Human
ccuaggauugggacccugagga

SEQ ID NO: 808213 - RNA, 24 nt, Human
ccucaggugccuugugguugccaa

SEQ ID NO: 808214 - RNA, 20 nt, Human
ccugggaauaggggugcugg

SEQ ID NO: 808215 - RNA, 18 nt, Human
cucaagcuuucugaggcu

SEQ ID NO: 808216 - RNA, 18 nt, Human
cucccaccuucuggccug

SEQ ID NO: 808217 - RNA, 22 nt, Human
cuccugggaauaggggugcugg

SEQ ID NO: 808218 - RNA, 18 nt, Human
cucugaacugggccagac

SEQ ID NO: 808219 - RNA, 25 nt, Human
cugaggcugguugagagcacuccug

SEQ ID NO: 808220 - RNA, 22 nt, Human
cugccaccaucuuggccauuca

SEQ ID NO: 808221 - RNA, 21 nt, Human
cuggaaggcuuccuauagguu

SEQ ID NO: 808222 - RNA, 23 nt, Human
cuuccaugcacacccugcccuag

SEQ ID NO: 808223 - RNA, 20 nt, Human
gagagaauaaagagaggugg

SEQ ID NO: 808224 - RNA, 24 nt, Human
gagagaauaaagagaggugggggg

SEQ ID NO: 808225 - RNA, 22 nt, Human
gagagguggggggcugcugagc

SEQ ID NO: 808226 - RNA, 21 nt, Human
gagccugcagacuggagcuag

SEQ ID NO: 808227 - RNA, 18 nt, Human
gagcuugcggcccggcac

SEQ ID NO: 808228 - RNA, 18 nt, Human
gaucuccuuccuucaguu

SEQ ID NO: 808229 - RNA, 18 nt, Human
gauugggacccugaggac

SEQ ID NO: 808230 - RNA, 22 nt, Human
gcagcugagugagaaguguagc

SEQ ID NO: 808231 - RNA, 19 nt, Human
gccauucauggugauccag

SEQ ID NO: 808232 - RNA, 19 nt, Human
gccucaggugccuuguggu

SEQ ID NO: 808233 - RNA, 19 nt, Human
gcuaugacauccuuggccc

SEQ ID NO: 808234 - RNA, 23 nt, Human
gcucccacgaaagcccgccuugu

SEQ ID NO: 808235 - RNA, 25 nt, Human
gcuggagugaggaacuaggggcuca

SEQ ID NO: 808236 - RNA, 18 nt, Human
gcuggcagaugccaccag

SEQ ID NO: 808237 - RNA, 18 nt, Human
ggcaggcugagcacggcu

SEQ ID NO: 808238 - RNA, 22 nt, Human
ggcaugguuuuggcuucuggag

SEQ ID NO: 808239 - RNA, 18 nt, Human
ggggggcugcugagcugg

SEQ ID NO: 808240 - RNA, 24 nt, Human
gggugcugggucuuaacacgguuc

SEQ ID NO: 808241 - RNA, 23 nt, Human
ggucugggucaucugugugguca

SEQ ID NO: 808242 - RNA, 21 nt, Human
gguggggggcugcugagcugg

SEQ ID NO: 808243 - RNA, 21 nt, Human
gguugcccugaucacagccga

SEQ ID NO: 808244 - RNA, 22 nt, Human
guggggggcugcugagcuggca

SEQ ID NO: 808245 - RNA, 19 nt, Human
uaaacccuggaggaacacg

SEQ ID NO: 808246 - RNA, 24 nt, Human
uaacggugagauaggaaaucucaa

SEQ ID NO: 808247 - RNA, 23 nt, Human
uaacugggcaccccugucaaguu

SEQ ID NO: 808248 - RNA, 19 nt, Human
uacacacaagaagccagaa

SEQ ID NO: 808249 - RNA, 22 nt, Human
uacagcagagacuucgcugcag

SEQ ID NO: 808250 - RNA, 19 nt, Human
uagcugaaaaaguggcuaa

SEQ ID NO: 808251 - RNA, 18 nt, Human
ucaaagcaaaacgggauc

SEQ ID NO: 808252 - RNA, 24 nt, Human
uccaacauuugcauugucucuaac

SEQ ID NO: 808253 - RNA, 29 nt, Human
uccauaguucuugcuuccauggguccucc

SEQ ID NO: 808254 - RNA, 18 nt, Human
uccaugcacacccugccc

SEQ ID NO: 808255 - RNA, 19 nt, Human
uccaugcacacccugcccu

SEQ ID NO: 808256 - RNA, 23 nt, Human
ucucuucaaagcaaaacgggauc

SEQ ID NO: 808257 - RNA, 20 nt, Human
ucugucccuguuagugcuuu

SEQ ID NO: 808258 - RNA, 22 nt, Human
ugaaacaccaagagccccacug

SEQ ID NO: 808259 - RNA, 26 nt, Human
ugaagaagugauagaguuucuuuucc

SEQ ID NO: 808260 - RNA, 22 nt, Human
ugaagcaaaccagcuucccguu

SEQ ID NO: 808261 - RNA, 21 nt, Human
ugagaaguguagggugcagcu

SEQ ID NO: 808262 - RNA, 24 nt, Human
ugagauaggaaaucucaaagggcc

SEQ ID NO: 808263 - RNA, 22 nt, Human
ugagcacggcucccacgaaagc

SEQ ID NO: 808264 - RNA, 20 nt, Human
ugagcugguucauucccugg

SEQ ID NO: 808265 - RNA, 20 nt, Human
ugaggaacuaggggcucaga

SEQ ID NO: 808266 - RNA, 19 nt, Human
ugaucucugcaacuuucuc

SEQ ID NO: 808267 - RNA, 21 nt, Human
ugcagugagggagccccgcug

SEQ ID NO: 808268 - RNA, 22 nt, Human
ugccacagucaccccguguguc

SEQ ID NO: 808269 - RNA, 19 nt, Human
ugccccgauucuacaaaug

SEQ ID NO: 808270 - RNA, 26 nt, Human
ugcccuaggauugggacccugaggac

SEQ ID NO: 808271 - RNA, 22 nt, Human
uggcugcagauggucaggccag

SEQ ID NO: 808272 - RNA, 18 nt, Human
ugggagugccauggccuc

SEQ ID NO: 808273 - RNA, 22 nt, Human
ugggagugccauggccucaggu

SEQ ID NO: 808274 - RNA, 19 nt, Human
ugggucugggucaucugug

SEQ ID NO: 808275 - RNA, 20 nt, Human
ugguaugaagcaaaccagcu

SEQ ID NO: 808276 - RNA, 20 nt, Human
uguagggcuuggcuuccugg

SEQ ID NO: 808277 - RNA, 22 nt, Human
ugugcaggaugcggaucaaagg

SEQ ID NO: 808278 - RNA, 20 nt, Human
ugugcagugagggagccccg

SEQ ID NO: 808279 - RNA, 18 nt, Human
uguggcaaauacccacca

SEQ ID NO: 808280 - RNA, 19 nt, Human
uguggcaaauacccaccac

SEQ ID NO: 808281 - RNA, 20 nt, Human
uuagaggggcgcgggcggcg

SEQ ID NO: 808282 - RNA, 19 nt, Human
uuccagcucacacuggaag

SEQ ID NO: 808283 - RNA, 21 nt, Human
uuggcuucuggaggcuguuuu

SEQ ID NO: 808284 - RNA, 25 nt, Human
aaaaaaaagaaaauuugcuugacaa

SEQ ID NO: 808285 - RNA, 26 nt, Human
aaaauaaauaaauaauaagcugagca

SEQ ID NO: 808286 - RNA, 23 nt, Human
aaauccagaaggaagcucagccc

SEQ ID NO: 808287 - RNA, 21 nt, Human
aacauagcaagaccccauguc

SEQ ID NO: 808288 - RNA, 19 nt, Human
aagccagaguccaggagaa

SEQ ID NO: 808289 - RNA, 23 nt, Human
acaacuucaucccucagacagag

SEQ ID NO: 808290 - RNA, 20 nt, Human
acaaggaagcacucccgaau

SEQ ID NO: 808291 - RNA, 20 nt, Human
acaaugagagccuggaggga

SEQ ID NO: 808292 - RNA, 21 nt, Human
acagacugcuccuccuggggc

SEQ ID NO: 808293 - RNA, 21 nt, Human
accagagugagacccugucuc

SEQ ID NO: 808294 - RNA, 22 nt, Human
accugugcccgcuuugcccccc

SEQ ID NO: 808295 - RNA, 24 nt, Human
acuccagccuggacaccagaguga

SEQ ID NO: 808296 - RNA, 23 nt, Human
acugaccagagcucccagcuacc

SEQ ID NO: 808297 - RNA, 24 nt, Human
acugcacuccagccuggacaccag

SEQ ID NO: 808298 - RNA, 26 nt, Human
acugcacuccagccuggacaccagag

SEQ ID NO: 808299 - RNA, 18 nt, Human
agaaccccaaugguacug

SEQ ID NO: 808300 - RNA, 21 nt, Human
agaagucacccuggcgcaaua

SEQ ID NO: 808301 - RNA, 18 nt, Human
agagccuggagggaugga

SEQ ID NO: 808302 - RNA, 19 nt, Human
agcacuuugggaggcugag

SEQ ID NO: 808303 - RNA, 19 nt, Human
agccugggcaauguaguga

SEQ ID NO: 808304 - RNA, 20 nt, Human
agccugggcaauguagugag

SEQ ID NO: 808305 - RNA, 23 nt, Human
agccugggcaauguagugaggcc

SEQ ID NO: 808306 - RNA, 24 nt, Human
agcuacuuaggaggcugagguggg

SEQ ID NO: 808307 - RNA, 18 nt, Human
agcugagcaugguggugc

SEQ ID NO: 808308 - RNA, 20 nt, Human
aggaguuugagaccagccug

SEQ ID NO: 808309 - RNA, 24 nt, Human
aggaucacuugagcccaggaguuu

SEQ ID NO: 808310 - RNA, 20 nt, Human
aggcaacaggcauggaugga

SEQ ID NO: 808311 - RNA, 18 nt, Human
aggcaagaggaucacuug

SEQ ID NO: 808312 - RNA, 24 nt, Human
aggcaagaggaucacuugagccca

SEQ ID NO: 808313 - RNA, 19 nt, Human
aggcagggaggggaaugca

SEQ ID NO: 808314 - RNA, 18 nt, Human
aggcccgccagggcaugc

SEQ ID NO: 808315 - RNA, 24 nt, Human
aggcugaggugggaggauugguug

SEQ ID NO: 808316 - RNA, 21 nt, Human
agggaccucuaaggcggagag

SEQ ID NO: 808317 - RNA, 18 nt, Human
agggaggcuuggugggga

SEQ ID NO: 808318 - RNA, 23 nt, Human
aggggauagggcaggcccgggga

SEQ ID NO: 808319 - RNA, 23 nt, Human
aggggauagggcaggcccggggc

SEQ ID NO: 808320 - RNA, 26 nt, Human
aggggaugcagugaggggagagauug

SEQ ID NO: 808321 - RNA, 20 nt, Human
aggggccacucuggccagua

SEQ ID NO: 808322 - RNA, 23 nt, Human
aggugggaggauugguugaaccc

SEQ ID NO: 808323 - RNA, 18 nt, Human
aguagggagcacaggcug

SEQ ID NO: 808324 - RNA, 24 nt, Human
aguccagaggaucacuugagcuug

SEQ ID NO: 808325 - RNA, 24 nt, Human
aguggcucauacguauaaucccag

SEQ ID NO: 808326 - RNA, 22 nt, Human
auagcaagaccccaugucuaca

SEQ ID NO: 808327 - RNA, 19 nt, Human
augcagugaggggagagau

SEQ ID NO: 808328 - RNA, 18 nt, Human
auggaggguaccauggug

SEQ ID NO: 808329 - RNA, 24 nt, Human
auugcaccacugcacuccagccug

SEQ ID NO: 808330 - RNA, 18 nt, Human
caaccaccaggacccagc

SEQ ID NO: 808331 - RNA, 20 nt, Human
caagagucuauuuuaauguc

SEQ ID NO: 808332 - RNA, 22 nt, Human
caaggcaagaggaucacuugag

SEQ ID NO: 808333 - RNA, 24 nt, Human
caaggcaagaggaucacuugagcc

SEQ ID NO: 808334 - RNA, 21 nt, Human
caagguuccacaggguuccuu

SEQ ID NO: 808335 - RNA, 24 nt, Human
caccagagugagacccugucucuu

SEQ ID NO: 808336 - RNA, 23 nt, Human
cacuccagagaggcgcuggcagg

SEQ ID NO: 808337 - RNA, 22 nt, Human
cacuccagccuggacaccagag

SEQ ID NO: 808338 - RNA, 23 nt, Human
cacuccagccuggacaccagagu

SEQ ID NO: 808339 - RNA, 24 nt, Human
cacuccagccuggacaccagagug

SEQ ID NO: 808340 - RNA, 18 nt, Human
cacugcacuccagccugg

SEQ ID NO: 808341 - RNA, 19 nt, Human
cacugcacuccagccugga

SEQ ID NO: 808342 - RNA, 21 nt, Human
cacugcacuccagccuggaca

SEQ ID NO: 808343 - RNA, 19 nt, Human
cagaaccccaaugguacug

SEQ ID NO: 808344 - RNA, 20 nt, Human
cagaaggaagcucagcccau

SEQ ID NO: 808345 - RNA, 21 nt, Human
cagagcucccagcuaccccuc

SEQ ID NO: 808346 - RNA, 22 nt, Human
cagcaccaaacacacugauccc

SEQ ID NO: 808347 - RNA, 20 nt, Human
cagcacuuuggcaggccaag

SEQ ID NO: 808348 - RNA, 21 nt, Human
cagcacuuuggcaggccaagg

SEQ ID NO: 808349 - RNA, 18 nt, Human
cagcacuuugggaggcug

SEQ ID NO: 808350 - RNA, 25 nt, Human
cagcacuuugggaggcugaguccag

SEQ ID NO: 808351 - RNA, 22 nt, Human
cagcagaggcagaauguaaaac

SEQ ID NO: 808352 - RNA, 22 nt, Human
cagcccaucccccuggaagcca

SEQ ID NO: 808353 - RNA, 23 nt, Human
cagcuacaguugccaacauggaa

SEQ ID NO: 808354 - RNA, 24 nt, Human
cagcuacuuaggaggcugaggugg

SEQ ID NO: 808355 - RNA, 21 nt, Human
cagcugcccacagaaccccaa

SEQ ID NO: 808356 - RNA, 20 nt, Human
caggaauuuaaggcuaugau

SEQ ID NO: 808357 - RNA, 19 nt, Human
caggcccuagaccacaccu

SEQ ID NO: 808358 - RNA, 20 nt, Human
caggggcaggucgacaguuc

SEQ ID NO: 808359 - RNA, 19 nt, Human
caggggccacucuggccag

SEQ ID NO: 808360 - RNA, 24 nt, Human
cauaaaauacaaugaaguuuuaaa

SEQ ID NO: 808361 - RNA, 22 nt, Human
cauacguauaaucccagcacuu

SEQ ID NO: 808362 - RNA, 24 nt, Human
cauacguauaaucccagcacuuug

SEQ ID NO: 808363 - RNA, 25 nt, Human
cauagcaagaccccaugucuacaaa

SEQ ID NO: 808364 - RNA, 25 nt, Human
caucuaagauccgacagauaggccc

SEQ ID NO: 808365 - RNA, 24 nt, Human
caucucaggguccauuuuccugga

SEQ ID NO: 808366 - RNA, 21 nt, Human
cauggauggagaugggcugaa

SEQ ID NO: 808367 - RNA, 24 nt, Human
cauggauggagaugggcugaucaa

SEQ ID NO: 808368 - RNA, 22 nt, Human
ccaccugccagcaccaagaguc

SEQ ID NO: 808369 - RNA, 19 nt, Human
ccacugcacuccagccugg

SEQ ID NO: 808370 - RNA, 19 nt, Human
ccacugcacuccagccugg

SEQ ID NO: 808371 - RNA, 20 nt, Human
ccacugcacuccagccugga

SEQ ID NO: 808372 - RNA, 21 nt, Human
ccacugcacuccagccuggac

SEQ ID NO: 808373 - RNA, 22 nt, Human
ccacugcacuccagccuggaca

SEQ ID NO: 808374 - RNA, 25 nt, Human
ccacugcacuccagccuggacacca

SEQ ID NO: 808375 - RNA, 24 nt, Human
ccagcuaccccuccagcugggccc

SEQ ID NO: 808376 - RNA, 22 nt, Human
ccagcugcccacagaaccccaa

SEQ ID NO: 808377 - RNA, 24 nt, Human
cccaaccaccaggacccagcugcc

SEQ ID NO: 808378 - RNA, 24 nt, Human
cccacagaaccccaaugguacugg

SEQ ID NO: 808379 - RNA, 19 nt, Human
cccacgguccccaaccacc

SEQ ID NO: 808380 - RNA, 22 nt, Human
ccccaaugguacugggccacag

SEQ ID NO: 808381 - RNA, 20 nt, Human
ccccagccccggguguuccc

SEQ ID NO: 808382 - RNA, 19 nt, Human
cccgcuuugccccccuucc

SEQ ID NO: 808383 - RNA, 20 nt, Human
cccgcuuugccccccuuccu

SEQ ID NO: 808384 - RNA, 20 nt, Human
cccugguucugacgcccacu

SEQ ID NO: 808385 - RNA, 19 nt, Human
ccuagaccacaccugggga

SEQ ID NO: 808386 - RNA, 21 nt, Human
ccuccagcugggcccuggccc

SEQ ID NO: 808387 - RNA, 21 nt, Human
ccuccugugccuggcccaggc

SEQ ID NO: 808388 - RNA, 21 nt, Human
ccuggagccaggggauagggc

SEQ ID NO: 808389 - RNA, 18 nt, Human
ccuggaggcuggugcgac

SEQ ID NO: 808390 - RNA, 21 nt, Human
ccuggcccaggccugccucuc

SEQ ID NO: 808391 - RNA, 24 nt, Human
ccugggcaacauagcaagacccca

SEQ ID NO: 808392 - RNA, 19 nt, Human
ccugucuggauggaaggca

SEQ ID NO: 808393 - RNA, 29 nt, Human
cgacagauaggccccuucccacggucccc

SEQ ID NO: 808394 - RNA, 19 nt, Human
cgacaguucucauccuccc

SEQ ID NO: 808395 - RNA, 22 nt, Human
cgagcgagaccucuggaggggu

SEQ ID NO: 808396 - RNA, 20 nt, Human
cuagcccuggagccagggga

SEQ ID NO: 808397 - RNA, 19 nt, Human
cucaggccccagccccggg

SEQ ID NO: 808398 - RNA, 20 nt, Human
cuccagcugggcccuggccc

SEQ ID NO: 808399 - RNA, 18 nt, Human
cuccuccuggggcuccac

SEQ ID NO: 808400 - RNA, 31 nt, Human
cugccagcggcgggcggcgcggcuccucucu

SEQ ID NO: 808401 - RNA, 20 nt, Human
cugggguaggauucccuagg

SEQ ID NO: 808402 - RNA, 21 nt, Human
cuguagucccagcuacuuagg

SEQ ID NO: 808403 - RNA, 19 nt, Human
cuugagaaugaagguccca

SEQ ID NO: 808404 - RNA, 26 nt, Human
cuuggcuacaaacgcagauuccagcc

SEQ ID NO: 808405 - RNA, 21 nt, Human
cuuucagagaucuccagaaag

SEQ ID NO: 808406 - RNA, 22 nt, Human
cuuucuggagccaggaaaauuc

SEQ ID NO: 808407 - RNA, 23 nt, Human
cuuugggccugucuggauggaag

SEQ ID NO: 808408 - RNA, 20 nt, Human
gaaauuuguaugaggguggg

SEQ ID NO: 808409 - RNA, 22 nt, Human
gacaaggacaagguuccacagg

SEQ ID NO: 808410 - RNA, 21 nt, Human
gacaagguuccacaggguucc

SEQ ID NO: 808411 - RNA, 22 nt, Human
gacaccagagugagacccuguc

SEQ ID NO: 808412 - RNA, 25 nt, Human
gaccucuggaggggucugugccgac

SEQ ID NO: 808413 - RNA, 18 nt, Human
gagcgagaccucuggagg

SEQ ID NO: 808414 - RNA, 19 nt, Human
gagcucccagcuaccccuc

SEQ ID NO: 808415 - RNA, 21 nt, Human
gagcucccagcuaccccuccg

SEQ ID NO: 808416 - RNA, 24 nt, Human
gaucacuugagcccaggaguuuga

SEQ ID NO: 808417 - RNA, 24 nt, Human
gcacuccagccuggacaccagagu

SEQ ID NO: 808418 - RNA, 20 nt, Human
gcagagguaaggcaaacacu

SEQ ID NO: 808419 - RNA, 22 nt, Human
gcccaggaguuugagaccagcc

SEQ ID NO: 808420 - RNA, 24 nt, Human
gccccacagccucuuucuggagcc

SEQ ID NO: 808421 - RNA, 21 nt, Human
gcuccaggaggcaauucucuu

SEQ ID NO: 808422 - RNA, 21 nt, Human
gcuguggccucgaaaggagga

SEQ ID NO: 808423 - RNA, 24 nt, Human
gcuuugccccccuuccuucuagca

SEQ ID NO: 808424 - RNA, 23 nt, Human
ggaggguaccauggugacgggcu

SEQ ID NO: 808425 - RNA, 19 nt, Human
ggaggugagagagaggagg

SEQ ID NO: 808426 - RNA, 20 nt, Human
ggaggugagagagaggaggg

SEQ ID NO: 808427 - RNA, 22 nt, Human
ggaucacuugagcccaggaguu

SEQ ID NO: 808428 - RNA, 18 nt, Human
ggcaugcuggauggcugu

SEQ ID NO: 808429 - RNA, 18 nt, Human
ggcccagugcuccuggag

SEQ ID NO: 808430 - RNA, 18 nt, Human
ggccucgaaaggaggaua

SEQ ID NO: 808431 - RNA, 18 nt, Human
gggacuccucccgcccaa

SEQ ID NO: 808432 - RNA, 18 nt, Human
gggacugaccagagcucc

SEQ ID NO: 808433 - RNA, 22 nt, Human
gggcccuggcccagugcuccug

SEQ ID NO: 808434 - RNA, 23 nt, Human
ggggguguucaaggauuccaugc

SEQ ID NO: 808435 - RNA, 19 nt, Human
gggguacaguucuuucugg

SEQ ID NO: 808436 - RNA, 18 nt, Human
gggguguucaaggauucc

SEQ ID NO: 808437 - RNA, 18 nt, Human
gguacugggccacagagg

SEQ ID NO: 808438 - RNA, 19 nt, Human
ggugagagagaggagggac

SEQ ID NO: 808439 - RNA, 21 nt, Human
ggugcuguggccucgaaagga

SEQ ID NO: 808440 - RNA, 22 nt, Human
gguggaggacucaggccccagc

SEQ ID NO: 808441 - RNA, 19 nt, Human
gguugaggggugccaagug

SEQ ID NO: 808442 - RNA, 20 nt, Human
gucgagggauggaggguacc

SEQ ID NO: 808443 - RNA, 22 nt, Human
gucgagggauggaggguaccau

SEQ ID NO: 808444 - RNA, 24 nt, Human
guggcucauacguauaaucccagc

SEQ ID NO: 808445 - RNA, 22 nt, Human
uaaauccucaucucagggucca

SEQ ID NO: 808446 - RNA, 23 nt, Human
uaagagaggguugaggggugcca

SEQ ID NO: 808447 - RNA, 19 nt, Human
uagcaagaccccaugucua

SEQ ID NO: 808448 - RNA, 19 nt, Human
uagcaguagcuguggucuc

SEQ ID NO: 808449 - RNA, 22 nt, Human
uaggaggcugaggugggaggau

SEQ ID NO: 808450 - RNA, 24 nt, Human
uaggaggcugaggugggaggauug

SEQ ID NO: 808451 - RNA, 19 nt, Human
ucacuugagcccaggaguu

SEQ ID NO: 808452 - RNA, 18 nt, Human
ucaggccccagccccggg

SEQ ID NO: 808453 - RNA, 18 nt, Human
ucaggggguguucaagga

SEQ ID NO: 808454 - RNA, 23 nt, Human
uccagccuggacaccagagugag

SEQ ID NO: 808455 - RNA, 24 nt, Human
uccagccuggacaccagagugaga

SEQ ID NO: 808456 - RNA, 18 nt, Human
uccaucccagcaccccag

SEQ ID NO: 808457 - RNA, 22 nt, Human
uccccaggggaugcagugaggg

SEQ ID NO: 808458 - RNA, 20 nt, Human
ucccccagcagagguuccug

SEQ ID NO: 808459 - RNA, 19 nt, Human
ucccuucuuccccagggga

SEQ ID NO: 808460 - RNA, 22 nt, Human
uccugggcgcggggucuguggg

SEQ ID NO: 808461 - RNA, 19 nt, Human
ucgagggauggaggguacc

SEQ ID NO: 808462 - RNA, 19 nt, Human
ucucaggguccauuuuccu

SEQ ID NO: 808463 - RNA, 24 nt, Human
ucucugguggggucggggggggug

SEQ ID NO: 808464 - RNA, 22 nt, Human
ucugaggcaggcaggcccuaga

SEQ ID NO: 808465 - RNA, 20 nt, Human
ucuggggacagagggaugca

SEQ ID NO: 808466 - RNA, 27 nt, Human
ucuuggcugagacagcuccugagaagc

SEQ ID NO: 808467 - RNA, 22 nt, Human
ucuuuauucccuuugcagauuc

SEQ ID NO: 808468 - RNA, 26 nt, Human
ugaagaggccuugugagacagggagc

SEQ ID NO: 808469 - RNA, 19 nt, Human
ugaagaucgggucuuccag

SEQ ID NO: 808470 - RNA, 19 nt, Human
ugaaggucccaugccugcu

SEQ ID NO: 808471 - RNA, 21 nt, Human
ugaccagagcucccagcuacc

SEQ ID NO: 808472 - RNA, 26 nt, Human
ugagacagggagcacagaagacaugu

SEQ ID NO: 808473 - RNA, 23 nt, Human
ugagcccaggaguuugagaccag

SEQ ID NO: 808474 - RNA, 18 nt, Human
ugaggugggaggauuggu

SEQ ID NO: 808475 - RNA, 20 nt, Human
ugaggugggaggauugguug

SEQ ID NO: 808476 - RNA, 18 nt, Human
ugaguagggagcacaggc

SEQ ID NO: 808477 - RNA, 21 nt, Human
ugcaccacugcacuccagccu

SEQ ID NO: 808478 - RNA, 23 nt, Human
ugcagacagacugcuccuccugg

SEQ ID NO: 808479 - RNA, 21 nt, Human
ugcagagguaaggcaaacacu

SEQ ID NO: 808480 - RNA, 25 nt, Human
uggaauccaagacaaggaagcacuc

SEQ ID NO: 808481 - RNA, 22 nt, Human
uggaggcuggugcgacugaagg

SEQ ID NO: 808482 - RNA, 19 nt, Human
uggagguagaagucacccu

SEQ ID NO: 808483 - RNA, 22 nt, Human
uggcaggccaaggcaagaggau

SEQ ID NO: 808484 - RNA, 24 nt, Human
uggcaggccaaggcaagaggauca

SEQ ID NO: 808485 - RNA, 23 nt, Human
uggcaggggccacucuggccagu

SEQ ID NO: 808486 - RNA, 23 nt, Human
uggccagcccucguguaagaaga

SEQ ID NO: 808487 - RNA, 24 nt, Human
uggcuggaugcuguugcuauggca

SEQ ID NO: 808488 - RNA, 20 nt, Human
uggcugugucgagggaugga

SEQ ID NO: 808489 - RNA, 24 nt, Human
ugggaggcugaguccagaggauca

SEQ ID NO: 808490 - RNA, 22 nt, Human
ugggcaacauagcaagacccca

SEQ ID NO: 808491 - RNA, 24 nt, Human
ugggccacagaggcugggcauaga

SEQ ID NO: 808492 - RNA, 20 nt, Human
uggggacagagggaugcaca

SEQ ID NO: 808493 - RNA, 23 nt, Human
uggggaggugagagagaggaggg

SEQ ID NO: 808494 - RNA, 21 nt, Human
ugggggaccugugccccacag

SEQ ID NO: 808495 - RNA, 21 nt, Human
uggggucggggggggugggcg

SEQ ID NO: 808496 - RNA, 21 nt, Human
ugggugaagaucgggucuucc

SEQ ID NO: 808497 - RNA, 19 nt, Human
ugggugcuguggccucgaa

SEQ ID NO: 808498 - RNA, 24 nt, Human
ugguacccacuggcuggaugcugu

SEQ ID NO: 808499 - RNA, 20 nt, Human
ugguacugggccacagaggc

SEQ ID NO: 808500 - RNA, 18 nt, Human
uggugcauaacuguaguc

SEQ ID NO: 808501 - RNA, 25 nt, Human
ugguggggaggugagagagaggagg

SEQ ID NO: 808502 - RNA, 18 nt, Human
ugguggggucgggggggg

SEQ ID NO: 808503 - RNA, 20 nt, Human
ugguggggucggggggggug

SEQ ID NO: 808504 - RNA, 24 nt, Human
ugguggugcauaacuguaguccca

SEQ ID NO: 808505 - RNA, 23 nt, Human
uguagugaggccccaucucuaaa

SEQ ID NO: 808506 - RNA, 23 nt, Human
uguucaaggauuccaugcugucu

SEQ ID NO: 808507 - RNA, 19 nt, Human
uucacagccucauuguggg

SEQ ID NO: 808508 - RNA, 19 nt, Human
uuccuggaauccaagacaa

SEQ ID NO: 808509 - RNA, 19 nt, Human
uuccuggaucagcaccaaa

SEQ ID NO: 808510 - RNA, 22 nt, Human
uugagcccaggaguuugagacc

SEQ ID NO: 808511 - RNA, 18 nt, Human
uugagcuugagaucagcc

SEQ ID NO: 808512 - RNA, 23 nt, Human
uugcaccacugcacuccagccug

SEQ ID NO: 808513 - RNA, 25 nt, Human
uugggaggcugaguccagaggauca

SEQ ID NO: 808514 - RNA, 18 nt, Human
uuuccaucccagcacccc

SEQ ID NO: 808515 - RNA, 19 nt, Human
aagggcuacaucugcaagg

SEQ ID NO: 808516 - RNA, 18 nt, Human
acccucacguggcagggc

SEQ ID NO: 808517 - RNA, 19 nt, Human
agaggguuaggagggagag

SEQ ID NO: 808518 - RNA, 23 nt, Human
aggaggaucaaugugugugucug

SEQ ID NO: 808519 - RNA, 21 nt, Human
aggcaggacucugcuggaagu

SEQ ID NO: 808520 - RNA, 18 nt, Human
aggcccuccccucucccc

SEQ ID NO: 808521 - RNA, 20 nt, Human
aggugggcggggccaggggg

SEQ ID NO: 808522 - RNA, 18 nt, Human
agugaggaaaaggaagau

SEQ ID NO: 808523 - RNA, 22 nt, Human
cagggcuaggacaaggggcagg

SEQ ID NO: 808524 - RNA, 27 nt, Human
cccugaggcccuccccucuccccaucu

SEQ ID NO: 808525 - RNA, 21 nt, Human
ccucugguguccguuucucuc

SEQ ID NO: 808526 - RNA, 19 nt, Human
ccuucccccuucuuugccu

SEQ ID NO: 808527 - RNA, 19 nt, Human
ccuucuuugccuugggcuu

SEQ ID NO: 808528 - RNA, 18 nt, Human
cugagaggaucucugugu

SEQ ID NO: 808529 - RNA, 18 nt, Human
cuuugccuugggcuuucu

SEQ ID NO: 808530 - RNA, 19 nt, Human
cuuugggagccaacugagc

SEQ ID NO: 808531 - RNA, 23 nt, Human
gaaaaggaagauagaaccaagga

SEQ ID NO: 808532 - RNA, 21 nt, Human
gagccaacugagcauuuggaa

SEQ ID NO: 808533 - RNA, 22 nt, Human
gagccaacugagcauuuggaaa

SEQ ID NO: 808534 - RNA, 24 nt, Human
gagcucccaccgaacaccccuugg

SEQ ID NO: 808535 - RNA, 22 nt, Human
gaggugggcggggccagggggu

SEQ ID NO: 808536 - RNA, 20 nt, Human
gcauuuauggggauggggag

SEQ ID NO: 808537 - RNA, 27 nt, Human
gcccugaggcccuccccucuccccauc

SEQ ID NO: 808538 - RNA, 18 nt, Human
ggagaagagagaguggcg

SEQ ID NO: 808539 - RNA, 19 nt, Human
ggagauggggcuggagaag

SEQ ID NO: 808540 - RNA, 20 nt, Human
ggagauggggcuggagaagg

SEQ ID NO: 808541 - RNA, 19 nt, Human
ggagccaacugagcauuug

SEQ ID NO: 808542 - RNA, 22 nt, Human
ggauugggaggaggcaggacuc

SEQ ID NO: 808543 - RNA, 23 nt, Human
ggcaaggagaggguuaggaggga

SEQ ID NO: 808544 - RNA, 18 nt, Human
ggcggggccagggggugg

SEQ ID NO: 808545 - RNA, 20 nt, Human
ggcuggagaaggggguuggc

SEQ ID NO: 808546 - RNA, 24 nt, Human
ggguaaaagagggagcccugaggc

SEQ ID NO: 808547 - RNA, 22 nt, Human
gguguaugugucugugaagaug

SEQ ID NO: 808548 - RNA, 22 nt, Human
guggcagggcuaggacaagggg

SEQ ID NO: 808549 - RNA, 24 nt, Human
gugggcggggccaggggguggggu

SEQ ID NO: 808550 - RNA, 24 nt, Human
gugguaggcagacauguaugaaua

SEQ ID NO: 808551 - RNA, 21 nt, Human
gugugugcauguauguguaug

SEQ ID NO: 808552 - RNA, 21 nt, Human
gugugugugugcauguaugug

SEQ ID NO: 808553 - RNA, 21 nt, Human
guuuuuuuuuuugaaagaacu

SEQ ID NO: 808554 - RNA, 23 nt, Human
uaaaagagggagcccugaggccc

SEQ ID NO: 808555 - RNA, 24 nt, Human
uaacgugugugugugcauguaugu

SEQ ID NO: 808556 - RNA, 19 nt, Human
ucaaugugugugucugugg

SEQ ID NO: 808557 - RNA, 18 nt, Human
ucccaugccagccuccag

SEQ ID NO: 808558 - RNA, 20 nt, Human
ucccccuucuuugccuuggg

SEQ ID NO: 808559 - RNA, 21 nt, Human
ucugguguccguuucucucuu

SEQ ID NO: 808560 - RNA, 22 nt, Human
ucuugcuuuuuugguuguguuu

SEQ ID NO: 808561 - RNA, 19 nt, Human
ugaaagaacuuuggauuug

SEQ ID NO: 808562 - RNA, 20 nt, Human
ugaggugggcggggccaggg

SEQ ID NO: 808563 - RNA, 23 nt, Human
ugaggugggcggggccagggggu

SEQ ID NO: 808564 - RNA, 18 nt, Human
ugcaaggagcugaggagg

SEQ ID NO: 808565 - RNA, 24 nt, Human
ugcauuuauggggauggggagcug

SEQ ID NO: 808566 - RNA, 24 nt, Human
ugccugucccuggaggcuggaccc

SEQ ID NO: 808567 - RNA, 23 nt, Human
ugcuggaagugggguguguggug

SEQ ID NO: 808568 - RNA, 19 nt, Human
uggaaagaguuugugagcg

SEQ ID NO: 808569 - RNA, 22 nt, Human
uggaaagaguuugugagcggug

SEQ ID NO: 808570 - RNA, 18 nt, Human
uggaaguggggugugugg

SEQ ID NO: 808571 - RNA, 24 nt, Human
uggagauggggcuggagaaggggg

SEQ ID NO: 808572 - RNA, 19 nt, Human
uggcagagggguuucuggu

SEQ ID NO: 808573 - RNA, 23 nt, Human
ugggaggaggcaggacucugcug

SEQ ID NO: 808574 - RNA, 26 nt, Human
ugggaggaggcaggacucugcuggaa

SEQ ID NO: 808575 - RNA, 20 nt, Human
ugggcggggccagggggugg

SEQ ID NO: 808576 - RNA, 23 nt, Human
ugggcggggccaggggguggggu

SEQ ID NO: 808577 - RNA, 24 nt, Human
ugggcucccugcccaugccaggcu

SEQ ID NO: 808578 - RNA, 18 nt, Human
ugggguaaaagagggagc

SEQ ID NO: 808579 - RNA, 24 nt, Human
ugggguguguggugcccacugagg

SEQ ID NO: 808580 - RNA, 19 nt, Human
ugguuagaguuuugugggc

SEQ ID NO: 808581 - RNA, 24 nt, Human
ugguuguguuucaguuuuuuuuuu

SEQ ID NO: 808582 - RNA, 20 nt, Human
uguggggauugggaggaggc

SEQ ID NO: 808583 - RNA, 18 nt, Human
ugugucugugaagauggg

SEQ ID NO: 808584 - RNA, 19 nt, Human
ugugugcauguauguguau

SEQ ID NO: 808585 - RNA, 19 nt, Human
ugugugcauguauguguau

SEQ ID NO: 808586 - RNA, 22 nt, Human
ugugugcauguauguguaugca

SEQ ID NO: 808587 - RNA, 22 nt, Human
ugugugguaggcagacauguau

SEQ ID NO: 808588 - RNA, 18 nt, Human
uguuuucucaguggaaca

SEQ ID NO: 808589 - RNA, 22 nt, Human
uuaguucauuccucuggugucc

SEQ ID NO: 808590 - RNA, 24 nt, Human
uuaguucauuccucugguguccgu

SEQ ID NO: 808591 - RNA, 23 nt, Human
uuccuucccccuucuuugccuug

SEQ ID NO: 808592 - RNA, 18 nt, Human
uucucccaugccagccuc

SEQ ID NO: 808593 - RNA, 21 nt, Human
uugccuugggcuuucuuuuuc

SEQ ID NO: 808594 - RNA, 21 nt, Human
uuucugguggcggcauccccu

SEQ ID NO: 808595 - RNA, 25 nt, Human
aaacaagaaaaauauuguaagucua

SEQ ID NO: 808596 - RNA, 26 nt, Human
aaacaagaaaaauauuguaagucuag

SEQ ID NO: 808597 - RNA, 20 nt, Human
aaauagcuugcccaaauucu

SEQ ID NO: 808598 - RNA, 19 nt, Human
aacucaucucuucacucca

SEQ ID NO: 808599 - RNA, 22 nt, Human
aagcauuauaaaagaagggguc

SEQ ID NO: 808600 - RNA, 19 nt, Human
aaggggucauaaugaguga

SEQ ID NO: 808601 - RNA, 27 nt, Human
aauaacuguaaaggcuuuggaauguua

SEQ ID NO: 808602 - RNA, 19 nt, Human
acaaacaagaaaccgcuca

SEQ ID NO: 808603 - RNA, 24 nt, Human
acaaccugagccucaguuuucuua

SEQ ID NO: 808604 - RNA, 18 nt, Human
acacacaaugucacgggc

SEQ ID NO: 808605 - RNA, 22 nt, Human
acuacuauuacaauauuuaauc

SEQ ID NO: 808606 - RNA, 18 nt, Human
agaaugaaaucuuuccua

SEQ ID NO: 808607 - RNA, 18 nt, Human
aggaacacaaacuacagc

SEQ ID NO: 808608 - RNA, 23 nt, Human
aggaacacaaacuacagcauaca

SEQ ID NO: 808609 - RNA, 26 nt, Human
aggcaggcaagugacagugggcauuu

SEQ ID NO: 808610 - RNA, 22 nt, Human
auguggagauggcuacauauac

SEQ ID NO: 808611 - RNA, 23 nt, Human
caaaaacaaaccauguuauugca

SEQ ID NO: 808612 - RNA, 23 nt, Human
cacccaggaacacacaaugucac

SEQ ID NO: 808613 - RNA, 20 nt, Human
cagcuaacagagcauaugua

SEQ ID NO: 808614 - RNA, 19 nt, Human
cagugggcauuucuaacuc

SEQ ID NO: 808615 - RNA, 21 nt, Human
ccuguccucccuuguugaaag

SEQ ID NO: 808616 - RNA, 23 nt, Human
cuugcccaaauucuugcagcuaa

SEQ ID NO: 808617 - RNA, 18 nt, Human
cuuuuuggcuacauaagu

SEQ ID NO: 808618 - RNA, 19 nt, Human
gaaaaagucccuguccucc

SEQ ID NO: 808619 - RNA, 20 nt, Human
gaacucaucucuucacucca

SEQ ID NO: 808620 - RNA, 21 nt, Human
gggucauaaugagugaugugg

SEQ ID NO: 808621 - RNA, 20 nt, Human
guagauacuaaauaugugcu

SEQ ID NO: 808622 - RNA, 18 nt, Human
uaaacagaacucaucucu

SEQ ID NO: 808623 - RNA, 22 nt, Human
uaaccaaacagcacguagauac

SEQ ID NO: 808624 - RNA, 23 nt, Human
uaaugagugauguggagauggcu

SEQ ID NO: 808625 - RNA, 18 nt, Human
uaguuccaggaacacaaa

SEQ ID NO: 808626 - RNA, 21 nt, Human
uauaaaagaaggggucauaau

SEQ ID NO: 808627 - RNA, 22 nt, Human
uauaaaagaaggggucauaaug

SEQ ID NO: 808628 - RNA, 24 nt, Human
uauaacuuuauuuucuucuuugug

SEQ ID NO: 808629 - RNA, 21 nt, Human
uauaguacagaaacaagaaaa

SEQ ID NO: 808630 - RNA, 19 nt, Human
uaucuuacagcuguaggaa

SEQ ID NO: 808631 - RNA, 21 nt, Human
uauucauucuagaaugaaauc

SEQ ID NO: 808632 - RNA, 23 nt, Human
ucaaggcaggcaagugacagugg

SEQ ID NO: 808633 - RNA, 26 nt, Human
uccacagucuauugcauuuugcgugc

SEQ ID NO: 808634 - RNA, 23 nt, Human
ucuauucauucuagaaugaaauc

SEQ ID NO: 808635 - RNA, 21 nt, Human
ucuccccuaaacagaacucau

SEQ ID NO: 808636 - RNA, 21 nt, Human
ugucacgggcaucugcuguag

SEQ ID NO: 808637 - RNA, 25 nt, Human
uuaauggaucuccccuaaacagaac

SEQ ID NO: 808638 - RNA, 20 nt, Human
uucaaagucauagcaguuac

SEQ ID NO: 808639 - RNA, 22 nt, Human
uucuucaucaucacaauaagau

SEQ ID NO: 808640 - RNA, 20 nt, Human
uuugaaaugucucacaaaac

SEQ ID NO: 808641 - RNA, 22 nt, Human
aaaaugaacacgucccucuucc

SEQ ID NO: 808642 - RNA, 19 nt, Human
aaaauucucuuuuggauuu

SEQ ID NO: 808643 - RNA, 22 nt, Human
aacacggucacagccugagcgc

SEQ ID NO: 808644 - RNA, 20 nt, Human
aacaguucagccaacccccc

SEQ ID NO: 808645 - RNA, 23 nt, Human
aacugaauccagcuuccagccuc

SEQ ID NO: 808646 - RNA, 20 nt, Human
aacuucgcugcagcucuugg

SEQ ID NO: 808647 - RNA, 18 nt, Human
aacuucuauccuuuucuc

SEQ ID NO: 808648 - RNA, 20 nt, Human
aacuucuucccuugguucuc

SEQ ID NO: 808649 - RNA, 22 nt, Human
aagauuagugcauccuaaauaa

SEQ ID NO: 808650 - RNA, 23 nt, Human
aagcaguauaacgguauugcagg

SEQ ID NO: 808651 - RNA, 22 nt, Human
aaucucacagggggaguuuaga

SEQ ID NO: 808652 - RNA, 28 nt, Human
acacgccuccgcccagauggcuccaaaa

SEQ ID NO: 808653 - RNA, 18 nt, Human
acagaaagaccacaaugc

SEQ ID NO: 808654 - RNA, 28 nt, Human
accccaacuucuucccuugguucuccaa

SEQ ID NO: 808655 - RNA, 19 nt, Human
acuacagcuuuuagcaacu

SEQ ID NO: 808656 - RNA, 25 nt, Human
acugaaaugcaagagaccaagauua

SEQ ID NO: 808657 - RNA, 21 nt, Human
agaaaaaaaaaccagaaaaau

SEQ ID NO: 808658 - RNA, 23 nt, Human
agaaugagucccauuacacugcc

SEQ ID NO: 808659 - RNA, 21 nt, Human
agacugaaaugcaagagacca

SEQ ID NO: 808660 - RNA, 25 nt, Human
agacugaaucuauacaagagaucca

SEQ ID NO: 808661 - RNA, 23 nt, Human
agagcacauuuuauuaacacaga

SEQ ID NO: 808662 - RNA, 18 nt, Human
agcaacuggaagaagacu

SEQ ID NO: 808663 - RNA, 20 nt, Human
agcaagaaugauucaauggu

SEQ ID NO: 808664 - RNA, 18 nt, Human
agcagaacugggggcugg

SEQ ID NO: 808665 - RNA, 18 nt, Human
agcagcaauguacgggaa

SEQ ID NO: 808666 - RNA, 19 nt, Human
agccugagcgccugacuuc

SEQ ID NO: 808667 - RNA, 20 nt, Human
aggaaggucaauuugggaaa

SEQ ID NO: 808668 - RNA, 19 nt, Human
aggagaaaaaaaaaccaga

SEQ ID NO: 808669 - RNA, 22 nt, Human
aggagaaauuauucaaagagaa

SEQ ID NO: 808670 - RNA, 19 nt, Human
agggcugaaagcugagagc

SEQ ID NO: 808671 - RNA, 22 nt, Human
aucaccagcacaaagaaguaau

SEQ ID NO: 808672 - RNA, 18 nt, Human
auucaagauguuuccacu

SEQ ID NO: 808673 - RNA, 19 nt, Human
caacugaauccagcuucca

SEQ ID NO: 808674 - RNA, 20 nt, Human
caaggagcuuauucccuuca

SEQ ID NO: 808675 - RNA, 30 nt, Human
cacacgccuccgcccagauggcuccaaaac

SEQ ID NO: 808676 - RNA, 18 nt, Human
cacugccugcugggcagc

SEQ ID NO: 808677 - RNA, 19 nt, Human
cagacugcaccaaaacuga

SEQ ID NO: 808678 - RNA, 21 nt, Human
cagcaauguacgggaaguucc

SEQ ID NO: 808679 - RNA, 23 nt, Human
cagcacaaagaaguaaucagaau

SEQ ID NO: 808680 - RNA, 20 nt, Human
cagcacagaaaucuggaaug

SEQ ID NO: 808681 - RNA, 25 nt, Human
cagcucacacagacucccagaauca

SEQ ID NO: 808682 - RNA, 24 nt, Human
caggagauaugccugaacccugaa

SEQ ID NO: 808683 - RNA, 22 nt, Human
cagggggaguuuagacccuggu

SEQ ID NO: 808684 - RNA, 27 nt, Human
cauccuaaauaaacaggucuugucaac

SEQ ID NO: 808685 - RNA, 23 nt, Human
cauuacacugccugcugggcagc

SEQ ID NO: 808686 - RNA, 18 nt, Human
ccaaaggagaagucccau

SEQ ID NO: 808687 - RNA, 23 nt, Human
ccaacucuaaaauccagauuagc

SEQ ID NO: 808688 - RNA, 24 nt, Human
ccagagccuccuuugugcuucuuc

SEQ ID NO: 808689 - RNA, 24 nt, Human
ccagcugguacuucuuugaugugg

SEQ ID NO: 808690 - RNA, 18 nt, Human
ccaguggaggguaauucc

SEQ ID NO: 808691 - RNA, 21 nt, Human
cccacagcgguggucuccuuu

SEQ ID NO: 808692 - RNA, 22 nt, Human
ccccaaggagcuuauucccuuc

SEQ ID NO: 808693 - RNA, 23 nt, Human
ccccaaggagcuuauucccuuca

SEQ ID NO: 808694 - RNA, 23 nt, Human
cccuugcaauccuucugucccuc

SEQ ID NO: 808695 - RNA, 25 nt, Human
cgugaaaaagccacacucuugacua

SEQ ID NO: 808696 - RNA, 22 nt, Human
cuccucaggggucugagucccu

SEQ ID NO: 808697 - RNA, 23 nt, Human
cuccucuccccauuuccaucucc

SEQ ID NO: 808698 - RNA, 22 nt, Human
cucggucuccccacagcggugg

SEQ ID NO: 808699 - RNA, 25 nt, Human
cucuccccauuuccaucuccagcaa

SEQ ID NO: 808700 - RNA, 23 nt, Human
cucuguccuugagcagaacuggg

SEQ ID NO: 808701 - RNA, 21 nt, Human
cugagagccaucauccagcag

SEQ ID NO: 808702 - RNA, 25 nt, Human
cugaugacaaugcuuaccccccaaa

SEQ ID NO: 808703 - RNA, 22 nt, Human
cuugcaauccuucugucccucc

SEQ ID NO: 808704 - RNA, 18 nt, Human
cuuguauuuucuggaaua

SEQ ID NO: 808705 - RNA, 21 nt, Human
gaagcaggauugggcaaggga

SEQ ID NO: 808706 - RNA, 20 nt, Human
gacauauauacccccauaaa

SEQ ID NO: 808707 - RNA, 25 nt, Human
gagccccaguguaauccauuuacug

SEQ ID NO: 808708 - RNA, 19 nt, Human
gagccuugcuaaacagccu

SEQ ID NO: 808709 - RNA, 25 nt, Human
gaggaccugaguggcauacuacagu

SEQ ID NO: 808710 - RNA, 26 nt, Human
gaggaccugaguggcauacuacagug

SEQ ID NO: 808711 - RNA, 21 nt, Human
ggcaagggagaaagugggcua

SEQ ID NO: 808712 - RNA, 20 nt, Human
ggcagcacccacuccucagg

SEQ ID NO: 808713 - RNA, 18 nt, Human
gggcagcacccacuccuc

SEQ ID NO: 808714 - RNA, 25 nt, Human
gggcugaaaagcaguauaacgguau

SEQ ID NO: 808715 - RNA, 18 nt, Human
gggggaguuuagacccug

SEQ ID NO: 808716 - RNA, 20 nt, Human
gguaagacugaaaugcaaga

SEQ ID NO: 808717 - RNA, 22 nt, Human
ggugucaacgguuugguuuccc

SEQ ID NO: 808718 - RNA, 26 nt, Human
gucuccccacagcgguggucuccuuu

SEQ ID NO: 808719 - RNA, 27 nt, Human
gugaaaaagccacacucuugacuagaa

SEQ ID NO: 808720 - RNA, 18 nt, Human
gugauuuuaauuugcauu

SEQ ID NO: 808721 - RNA, 19 nt, Human
uaaagcaccagcugguacu

SEQ ID NO: 808722 - RNA, 18 nt, Human
uaacacacgccuccgccc

SEQ ID NO: 808723 - RNA, 27 nt, Human
uaacacagaaagaccacaaugcaccuu

SEQ ID NO: 808724 - RNA, 24 nt, Human
uaagacugaaaugcaagagaccaa

SEQ ID NO: 808725 - RNA, 24 nt, Human
uacaaaggggaagcaaaacacauc

SEQ ID NO: 808726 - RNA, 30 nt, Human
uacccccauaaauccauuauuacauucaaa

SEQ ID NO: 808727 - RNA, 25 nt, Human
uaccccccaaaaauguauuaaaggc

SEQ ID NO: 808728 - RNA, 19 nt, Human
uagcaacugaauccagcuu

SEQ ID NO: 808729 - RNA, 23 nt, Human
uaggaaugugcuugaacccugaa

SEQ ID NO: 808730 - RNA, 21 nt, Human
uaguacagaauaaacuugguu

SEQ ID NO: 808731 - RNA, 25 nt, Human
uaguacagaauaaacuugguuacaa

SEQ ID NO: 808732 - RNA, 24 nt, Human
uagugauauuucauugugauuuua

SEQ ID NO: 808733 - RNA, 24 nt, Human
uauuagggaguggucucaggaaac

SEQ ID NO: 808734 - RNA, 23 nt, Human
uauucagagcacauuuuauuaac

SEQ ID NO: 808735 - RNA, 21 nt, Human
ucaaaauauguucuaguagca

SEQ ID NO: 808736 - RNA, 28 nt, Human
ucacugaugacaaugcuuaccccccaaa

SEQ ID NO: 808737 - RNA, 24 nt, Human
ucagagccuugcuaaacagccugc

SEQ ID NO: 808738 - RNA, 22 nt, Human
ucagccaacccccaugggcagg

SEQ ID NO: 808739 - RNA, 20 nt, Human
uccagauuagcauccaaaaa

SEQ ID NO: 808740 - RNA, 22 nt, Human
uccagauuagcauccaaaaggc

SEQ ID NO: 808741 - RNA, 21 nt, Human
uccauuuuccaaaaccugauu

SEQ ID NO: 808742 - RNA, 24 nt, Human
ucccauuacacugccugcugggca

SEQ ID NO: 808743 - RNA, 19 nt, Human
uccugcaacuucgcugcag

SEQ ID NO: 808744 - RNA, 19 nt, Human
uccuucugucccuccucuc

SEQ ID NO: 808745 - RNA, 21 nt, Human
ucuauacaagagauccaaagg

SEQ ID NO: 808746 - RNA, 19 nt, Human
ucuauccuuuucucugucc

SEQ ID NO: 808747 - RNA, 19 nt, Human
ucuauccuuuucucugucc

SEQ ID NO: 808748 - RNA, 22 nt, Human
ucucaaacuucuauccuuuucu

SEQ ID NO: 808749 - RNA, 21 nt, Human
ucuccaaagaacaggagccac

SEQ ID NO: 808750 - RNA, 23 nt, Human
ucuccaagcuucugagguuaaag

SEQ ID NO: 808751 - RNA, 19 nt, Human
ucuguccuugagcagaacu

SEQ ID NO: 808752 - RNA, 25 nt, Human
ugaacucugagcuccuucgagcccc

SEQ ID NO: 808753 - RNA, 18 nt, Human
ugaauuuuugugcuguca

SEQ ID NO: 808754 - RNA, 19 nt, Human
ugacauauauacccccaua

SEQ ID NO: 808755 - RNA, 25 nt, Human
ugacauauauacccccauaaaucca

SEQ ID NO: 808756 - RNA, 18 nt, Human
ugagucccugcuccacag

SEQ ID NO: 808757 - RNA, 18 nt, Human
ugcagcucuugggggucu

SEQ ID NO: 808758 - RNA, 20 nt, Human
uggaauaguauguaaaugaa

SEQ ID NO: 808759 - RNA, 20 nt, Human
ugguacuucuuugauguggu

SEQ ID NO: 808760 - RNA, 19 nt, Human
ugguagguacauguuuaac

SEQ ID NO: 808761 - RNA, 23 nt, Human
uguaguacagaauaaacuugguu

SEQ ID NO: 808762 - RNA, 22 nt, Human
ugucccuccucuccccauuucc

SEQ ID NO: 808763 - RNA, 20 nt, Human
uguccuugagcagaacuggg

SEQ ID NO: 808764 - RNA, 22 nt, Human
ugucuuuaucaaaauauguucu

SEQ ID NO: 808765 - RNA, 26 nt, Human
uuauucauuguguggauauacaaucu

SEQ ID NO: 808766 - RNA, 25 nt, Human
uuccccaaaguuaccaaguguuccc

SEQ ID NO: 808767 - RNA, 22 nt, Human
uugacauauauacccccauaaa

SEQ ID NO: 808768 - RNA, 19 nt, Human
uuucccgagaagccaacuc

SEQ ID NO: 808769 - RNA, 24 nt, Human
uuuuagcaacuggaagaagacuga

SEQ ID NO: 808770 - RNA, 22 nt, Human
uuuuccuaacuaacacacgccu

SEQ ID NO: 808771 - RNA, 21 nt, Human
uuuuucuucuuucauucagcc

SEQ ID NO: 808772 - RNA, 27 nt, Human
aaaaacagugagagaugaccgguaccc

SEQ ID NO: 808773 - RNA, 18 nt, Human
aaaagaagcaaacuggga

SEQ ID NO: 808774 - RNA, 25 nt, Human
aaaaugccucuuuauuuacauccuu

SEQ ID NO: 808775 - RNA, 18 nt, Human
aaagcuuacaauuuacaa

SEQ ID NO: 808776 - RNA, 22 nt, Human
aaaugccucuuuauuuacaucc

SEQ ID NO: 808777 - RNA, 19 nt, Human
aacugggaagagaaagaca

SEQ ID NO: 808778 - RNA, 18 nt, Human
aagaaagccuugccuaca

SEQ ID NO: 808779 - RNA, 19 nt, Human
aagaagaaaggaaggaaga

SEQ ID NO: 808780 - RNA, 20 nt, Human
aagaagaaaggaaggaagac

SEQ ID NO: 808781 - RNA, 22 nt, Human
aagaagcaaacugggaagagaa

SEQ ID NO: 808782 - RNA, 23 nt, Human
aagacucaacauauuugaaaaac

SEQ ID NO: 808783 - RNA, 18 nt, Human
aauaagaagaaaggaagg

SEQ ID NO: 808784 - RNA, 22 nt, Human
aauagcugcaacaagagacucu

SEQ ID NO: 808785 - RNA, 22 nt, Human
aauauuuguaaacuuaaauugc

SEQ ID NO: 808786 - RNA, 23 nt, Human
aaugacggagaauuccagaaaaa

SEQ ID NO: 808787 - RNA, 21 nt, Human
accaacugacccuuuauagaa

SEQ ID NO: 808788 - RNA, 20 nt, Human
acccuuuauagaaagaguuu

SEQ ID NO: 808789 - RNA, 19 nt, Human
accucuuuuuggagcccac

SEQ ID NO: 808790 - RNA, 19 nt, Human
acucuauggcucauaaacu

SEQ ID NO: 808791 - RNA, 26 nt, Human
agaaaagaagcaaacugggaagagaa

SEQ ID NO: 808792 - RNA, 19 nt, Human
agagaugacaagaacugaa

SEQ ID NO: 808793 - RNA, 20 nt, Human
agcuguuuaagcaggaauuu

SEQ ID NO: 808794 - RNA, 18 nt, Human
augcaaaauguuuauuug

SEQ ID NO: 808795 - RNA, 24 nt, Human
caccccgacaacaugacucaucuu

SEQ ID NO: 808796 - RNA, 22 nt, Human
cagagugccaauuuuucagaac

SEQ ID NO: 808797 - RNA, 20 nt, Human
cagcaaauuauagccugugg

SEQ ID NO: 808798 - RNA, 20 nt, Human
caggacaucacaccccgaca

SEQ ID NO: 808799 - RNA, 20 nt, Human
caugcaaaauguuuauuugg

SEQ ID NO: 808800 - RNA, 22 nt, Human
caugcuagaaaagaagcaaacu

SEQ ID NO: 808801 - RNA, 26 nt, Human
cauggaauaagacucaacauauuuga

SEQ ID NO: 808802 - RNA, 18 nt, Human
cccggcccgggagggcuc

SEQ ID NO: 808803 - RNA, 18 nt, Human
cccucgccgccgccgccc

SEQ ID NO: 808804 - RNA, 18 nt, Human
cccuuuuuuuuccuuucu

SEQ ID NO: 808805 - RNA, 18 nt, Human
ccgccgccgccgcgcucg

SEQ ID NO: 808806 - RNA, 20 nt, Human
ccgucgccgcccucgccgcc

SEQ ID NO: 808807 - RNA, 23 nt, Human
ccgucgccgcccucgccgccgcc

SEQ ID NO: 808808 - RNA, 19 nt, Human
ccuuacugucuguggcugc

SEQ ID NO: 808809 - RNA, 22 nt, Human
ccuuucaccuucucaccuacua

SEQ ID NO: 808810 - RNA, 23 nt, Human
cgccgcccucgccgccgccgccc

SEQ ID NO: 808811 - RNA, 24 nt, Human
cgccgcgcucgggaagcggguccc

SEQ ID NO: 808812 - RNA, 23 nt, Human
cugugggccaaaacuggccaugc

SEQ ID NO: 808813 - RNA, 19 nt, Human
cuuaauggauauauauuac

SEQ ID NO: 808814 - RNA, 21 nt, Human
cuugcucguauccuggagacc

SEQ ID NO: 808815 - RNA, 18 nt, Human
cuuuuuggagcccacuga

SEQ ID NO: 808816 - RNA, 22 nt, Human
gaccucuuuuuggagcccacug

SEQ ID NO: 808817 - RNA, 23 nt, Human
gagaaagacaagagaaauucaua

SEQ ID NO: 808818 - RNA, 20 nt, Human
gaugacaagaacugaaaaaa

SEQ ID NO: 808819 - RNA, 18 nt, Human
gccgccgccgcccacccg

SEQ ID NO: 808820 - RNA, 20 nt, Human
gcggguccccgucgccgccc

SEQ ID NO: 808821 - RNA, 21 nt, Human
gcggguccccgucgccgcccu

SEQ ID NO: 808822 - RNA, 21 nt, Human
gcucagcauuuucccugcagc

SEQ ID NO: 808823 - RNA, 20 nt, Human
ggcucagcauuuucccugca

SEQ ID NO: 808824 - RNA, 21 nt, Human
uaaaugcaaagaaaaaucuua

SEQ ID NO: 808825 - RNA, 21 nt, Human
uaagaaagccuugccuacacc

SEQ ID NO: 808826 - RNA, 20 nt, Human
uacaaagcuuacaauuuaca

SEQ ID NO: 808827 - RNA, 25 nt, Human
uaccaucauaaaugcuuuauaacca

SEQ ID NO: 808828 - RNA, 20 nt, Human
uaccuggagaugaaaaugac

SEQ ID NO: 808829 - RNA, 21 nt, Human
uaccuggagaugaaaaugacu

SEQ ID NO: 808830 - RNA, 21 nt, Human
ucaacauauuugaaaaacagu

SEQ ID NO: 808831 - RNA, 18 nt, Human
uccccagccuacaaaaga

SEQ ID NO: 808832 - RNA, 18 nt, Human
uccccgucgccgcccucg

SEQ ID NO: 808833 - RNA, 21 nt, Human
ucgccgcccucgccgccgccg

SEQ ID NO: 808834 - RNA, 24 nt, Human
ucgccgcccucgccgccgccgccc

SEQ ID NO: 808835 - RNA, 18 nt, Human
ucgccgccgccgcccacc

SEQ ID NO: 808836 - RNA, 23 nt, Human
ucuguggcugcuuuugcggcaca

SEQ ID NO: 808837 - RNA, 23 nt, Human
ugaaaaacagugagagaugacaa

SEQ ID NO: 808838 - RNA, 28 nt, Human
ugaaaaugacuaaacuuguggauggugg

SEQ ID NO: 808839 - RNA, 20 nt, Human
ugacaagaacugaaaaaaga

SEQ ID NO: 808840 - RNA, 23 nt, Human
ugacaagaacugaaaaaagaaaa

SEQ ID NO: 808841 - RNA, 21 nt, Human
ugauaaaugagucuguuuucu

SEQ ID NO: 808842 - RNA, 18 nt, Human
uggaauaagacucaacau

SEQ ID NO: 808843 - RNA, 18 nt, Human
uggauggugaaaauguaa

SEQ ID NO: 808844 - RNA, 23 nt, Human
uggcauaauuuugauagcaaacu

SEQ ID NO: 808845 - RNA, 26 nt, Human
ugggcugggaaaauccuguucuucaa

SEQ ID NO: 808846 - RNA, 18 nt, Human
uguggcuccccagccuac

SEQ ID NO: 808847 - RNA, 25 nt, Human
uuaguuagaaugacggagaauucca

SEQ ID NO: 808848 - RNA, 21 nt, Human
uuaucuuuagucaugcuagaa

SEQ ID NO: 808849 - RNA, 19 nt, Human
uuccagaaaaauuacugca

SEQ ID NO: 808850 - RNA, 19 nt, Human
uuccauuuguucuaugucc

SEQ ID NO: 808851 - RNA, 19 nt, Human
acccucaaaucagggcccc

SEQ ID NO: 808852 - RNA, 19 nt, Human
agagacacguucuccugcc

SEQ ID NO: 808853 - RNA, 19 nt, Human
agccagagacacguucucc

SEQ ID NO: 808854 - RNA, 20 nt, Human
aggacccccagccaggcccc

SEQ ID NO: 808855 - RNA, 23 nt, Human
ccagagacacguucuccugccaa

SEQ ID NO: 808856 - RNA, 20 nt, Human
ccccaccgagacgauucccu

SEQ ID NO: 808857 - RNA, 24 nt, Human
ccccagccaggccccggcaccccc

SEQ ID NO: 808858 - RNA, 26 nt, Human
ccccagccaggccccggcacccccac

SEQ ID NO: 808859 - RNA, 25 nt, Human
cccuggggaaacggacgacucgugg

SEQ ID NO: 808860 - RNA, 21 nt, Human
ccugccaagaccggcccuggc

SEQ ID NO: 808861 - RNA, 20 nt, Human
gaaagggcuuuagaccacgu

SEQ ID NO: 808862 - RNA, 18 nt, Human
gacaggcugcacuccagg

SEQ ID NO: 808863 - RNA, 21 nt, Human
gagcccggcaggacccccagc

SEQ ID NO: 808864 - RNA, 21 nt, Human
gcacccccaccgagacgauuc

SEQ ID NO: 808865 - RNA, 19 nt, Human
ggacaggcugcacuccagg

SEQ ID NO: 808866 - RNA, 26 nt, Human
ggcccaggcuuccugcucgcugaggc

SEQ ID NO: 808867 - RNA, 18 nt, Human
uacagcauccaacagugg

SEQ ID NO: 808868 - RNA, 26 nt, Human
ucccuggggaaacggacgacucgugg

SEQ ID NO: 808869 - RNA, 18 nt, Human
ucguccugcuguucccug

SEQ ID NO: 808870 - RNA, 28 nt, Human
uggggaaacggacgacucguggcaggac

SEQ ID NO: 808871 - RNA, 24 nt, Human
uucuccugccaagaccggcccugg

SEQ ID NO: 808872 - RNA, 21 nt, Human
aaaaagaaaacuucuaaaagg

SEQ ID NO: 808873 - RNA, 20 nt, Human
aaaacugcaggaacagaggg

SEQ ID NO: 808874 - RNA, 26 nt, Human
aaaagaagagacacagaagauccaaa

SEQ ID NO: 808875 - RNA, 18 nt, Human
aaagaagagacacagaag

SEQ ID NO: 808876 - RNA, 21 nt, Human
aaaggaacucuggggcccagg

SEQ ID NO: 808877 - RNA, 24 nt, Human
aaagugcugagauuacaggcauga

SEQ ID NO: 808878 - RNA, 19 nt, Human
aaccaggucaaucgcagau

SEQ ID NO: 808879 - RNA, 24 nt, Human
aaccucuugggcucaagcaauccu

SEQ ID NO: 808880 - RNA, 25 nt, Human
aagcaauccucccaccucagccucu

SEQ ID NO: 808881 - RNA, 25 nt, Human
aagcaauccucccgucuuagccucu

SEQ ID NO: 808882 - RNA, 21 nt, Human
aaguagcugggaccacaggca

SEQ ID NO: 808883 - RNA, 27 nt, Human
aaguagcugggaccacaggcaugagcc

SEQ ID NO: 808884 - RNA, 26 nt, Human
aagugcugagauuacaggcaugagcc

SEQ ID NO: 808885 - RNA, 19 nt, Human
aaucauggcucacugcagc

SEQ ID NO: 808886 - RNA, 18 nt, Human
accccaaaacugcaggaa

SEQ ID NO: 808887 - RNA, 22 nt, Human
accccaaaacugcaggaacaga

SEQ ID NO: 808888 - RNA, 23 nt, Human
accucagccucucaaguagcugg

SEQ ID NO: 808889 - RNA, 19 nt, Human
acucuguuguccaggcugg

SEQ ID NO: 808890 - RNA, 20 nt, Human
acucuguuguccaggcugga

SEQ ID NO: 808891 - RNA, 25 nt, Human
acucuguuguccaggcuggagugca

SEQ ID NO: 808892 - RNA, 18 nt, Human
acugcagccucaaccucu

SEQ ID NO: 808893 - RNA, 24 nt, Human
agaaaaguagggucauaagccaga

SEQ ID NO: 808894 - RNA, 20 nt, Human
agaaauaucauucuucaguc

SEQ ID NO: 808895 - RNA, 19 nt, Human
agauuacaggcaugagcca

SEQ ID NO: 808896 - RNA, 22 nt, Human
agauuacaggcaugagccacca

SEQ ID NO: 808897 - RNA, 19 nt, Human
agccagagagaauaaauac

SEQ ID NO: 808898 - RNA, 21 nt, Human
aggaacagagggucauaugac

SEQ ID NO: 808899 - RNA, 27 nt, Human
augaaccccaaaacugcaggaacagag

SEQ ID NO: 808900 - RNA, 20 nt, Human
augaauacuuaaaaaaaucc

SEQ ID NO: 808901 - RNA, 18 nt, Human
augcuggucuugaacucc

SEQ ID NO: 808902 - RNA, 22 nt, Human
auggaguuuucaaaaugugccc

SEQ ID NO: 808903 - RNA, 24 nt, Human
auuugugcuuuuaaugaaccccaa

SEQ ID NO: 808904 - RNA, 24 nt, Human
caaaggaacucuggggcccaggac

SEQ ID NO: 808905 - RNA, 23 nt, Human
caaagugcugagauuacaggcau

SEQ ID NO: 808906 - RNA, 24 nt, Human
caaagugcugagauuacaggcaug

SEQ ID NO: 808907 - RNA, 22 nt, Human
caaccucuugggcucaagcaau

SEQ ID NO: 808908 - RNA, 22 nt, Human
cacaggcaugagccaccaugcc

SEQ ID NO: 808909 - RNA, 18 nt, Human
cacugcagccucaaccuc

SEQ ID NO: 808910 - RNA, 23 nt, Human
cagccucaaccucuugggcucaa

SEQ ID NO: 808911 - RNA, 24 nt, Human
cagccucaaccucuugggcucaag

SEQ ID NO: 808912 - RNA, 20 nt, Human
caggaggggcaaaaaagaaa

SEQ ID NO: 808913 - RNA, 24 nt, Human
caggguuuuacucuguuguccagg

SEQ ID NO: 808914 - RNA, 23 nt, Human
cccaugcuggucuugaacuccug

SEQ ID NO: 808915 - RNA, 19 nt, Human
ccucaaccucuugggcuca

SEQ ID NO: 808916 - RNA, 21 nt, Human
ccucaaccucuugggcucaag

SEQ ID NO: 808917 - RNA, 26 nt, Human
ccucccaccucagccucucaaguagc

SEQ ID NO: 808918 - RNA, 22 nt, Human
ccucccgucuuagccucucaaa

SEQ ID NO: 808919 - RNA, 26 nt, Human
ccucccgucuuagccucucaaagugc

SEQ ID NO: 808920 - RNA, 24 nt, Human
ccucuugggcucaagcaauccucc

SEQ ID NO: 808921 - RNA, 21 nt, Human
cucaagcaauccucccaccuc

SEQ ID NO: 808922 - RNA, 24 nt, Human
cucaagcaauccucccaccucagc

SEQ ID NO: 808923 - RNA, 20 nt, Human
cucacugcagccucaaccuc

SEQ ID NO: 808924 - RNA, 24 nt, Human
cucacugcagccucaaccucuugg

SEQ ID NO: 808925 - RNA, 24 nt, Human
cucagccucucaaguagcugggac

SEQ ID NO: 808926 - RNA, 21 nt, Human
cucucaaagugcugagauuac

SEQ ID NO: 808927 - RNA, 24 nt, Human
cucucaaguagcugggaccacagg

SEQ ID NO: 808928 - RNA, 25 nt, Human
cucuugggcucaagcaauccuccca

SEQ ID NO: 808929 - RNA, 22 nt, Human
cugcagccucaaccucuugggc

SEQ ID NO: 808930 - RNA, 23 nt, Human
cugcagccucaaccucuugggcu

SEQ ID NO: 808931 - RNA, 21 nt, Human
cuggggcccaggacaccaaga

SEQ ID NO: 808932 - RNA, 25 nt, Human
gaaaaagaaaacuucuaaaagguac

SEQ ID NO: 808933 - RNA, 23 nt, Human
gacaggguuuuacucuguugucc

SEQ ID NO: 808934 - RNA, 20 nt, Human
gagacaggguuuuacucugu

SEQ ID NO: 808935 - RNA, 18 nt, Human
gauuacaggcaugagcca

SEQ ID NO: 808936 - RNA, 24 nt, Human
gauuacaggcaugagccaccauac

SEQ ID NO: 808937 - RNA, 21 nt, Human
gcucacugcagccucaaccuc

SEQ ID NO: 808938 - RNA, 19 nt, Human
gcuggagugcagcagcaua

SEQ ID NO: 808939 - RNA, 24 nt, Human
ggaccacaggcaugagccaccaug

SEQ ID NO: 808940 - RNA, 23 nt, Human
ggcaaaaaagaaauacgccauau

SEQ ID NO: 808941 - RNA, 22 nt, Human
gguaugaaacugugggaaaaga

SEQ ID NO: 808942 - RNA, 25 nt, Human
ggucugguaacccuuggcaauucua

SEQ ID NO: 808943 - RNA, 22 nt, Human
guagagacgguaucucacuaug

SEQ ID NO: 808944 - RNA, 24 nt, Human
guccaggcuggagugcagcagcau

SEQ ID NO: 808945 - RNA, 19 nt, Human
guggggggggcaggagggg

SEQ ID NO: 808946 - RNA, 23 nt, Human
guuuuacucuguuguccaggcug

SEQ ID NO: 808947 - RNA, 24 nt, Human
guuuuacucuguuguccaggcugg

SEQ ID NO: 808948 - RNA, 24 nt, Human
uaaaagaagagacacagaagaucc

SEQ ID NO: 808949 - RNA, 24 nt, Human
uaacuguauugaaaaucagguaau

SEQ ID NO: 808950 - RNA, 22 nt, Human
uaaugaaccccaaaacugcagg

SEQ ID NO: 808951 - RNA, 24 nt, Human
uaaugaaccccaaaacugcaggaa

SEQ ID NO: 808952 - RNA, 22 nt, Human
uacacaugucauugauaauuag

SEQ ID NO: 808953 - RNA, 21 nt, Human
uacaggcaugagccaccauac

SEQ ID NO: 808954 - RNA, 22 nt, Human
uagagacgguaucucacuaugu

SEQ ID NO: 808955 - RNA, 24 nt, Human
uaugaaaaugucgcuaugcaggcc

SEQ ID NO: 808956 - RNA, 24 nt, Human
uauguuccccaugcuggucuugaa

SEQ ID NO: 808957 - RNA, 23 nt, Human
ucaaagugcugagauuacaggca

SEQ ID NO: 808958 - RNA, 24 nt, Human
ucaaagugcugagauuacaggcau

SEQ ID NO: 808959 - RNA, 19 nt, Human
ucaagcaauccucccgucu

SEQ ID NO: 808960 - RNA, 23 nt, Human
ucacugcagccucaaccucuugg

SEQ ID NO: 808961 - RNA, 23 nt, Human
ucacugcagccucaaccucuugg

SEQ ID NO: 808962 - RNA, 24 nt, Human
ucacugcagccucaaccucuuggg

SEQ ID NO: 808963 - RNA, 19 nt, Human
uccaaagaugccaccugga

SEQ ID NO: 808964 - RNA, 24 nt, Human
uccagaauaaauuaucuuuaaaga

SEQ ID NO: 808965 - RNA, 20 nt, Human
ucccaagcugggagggaguu

SEQ ID NO: 808966 - RNA, 18 nt, Human
uccuggauucaagcaauc

SEQ ID NO: 808967 - RNA, 24 nt, Human
ucucaaagugcugagauuacaggc

SEQ ID NO: 808968 - RNA, 24 nt, Human
ucucaaguagcugggaccacaggc

SEQ ID NO: 808969 - RNA, 18 nt, Human
ucuccauuaguaugugcu

SEQ ID NO: 808970 - RNA, 21 nt, Human
ucuggagaggucugguaaccc

SEQ ID NO: 808971 - RNA, 24 nt, Human
ucuggagaggucugguaacccuug

SEQ ID NO: 808972 - RNA, 24 nt, Human
ucuguuguccaggcuggagugcag

SEQ ID NO: 808973 - RNA, 23 nt, Human
ucuugaacuccuggauucaagca

SEQ ID NO: 808974 - RNA, 24 nt, Human
ugaaaagacugaguuuuacacuga

SEQ ID NO: 808975 - RNA, 18 nt, Human
ugaaccccaaaacugcag

SEQ ID NO: 808976 - RNA, 24 nt, Human
ugaacuccuggauucaagcaaucc

SEQ ID NO: 808977 - RNA, 25 nt, Human
ugaacuccuggauucaagcaauccu

SEQ ID NO: 808978 - RNA, 22 nt, Human
ugagauuacaggcaugagccac

SEQ ID NO: 808979 - RNA, 23 nt, Human
ugagauuacaggcaugagccacc

SEQ ID NO: 808980 - RNA, 24 nt, Human
ugagauuacaggcaugagccacca

SEQ ID NO: 808981 - RNA, 26 nt, Human
ugagauuacaggcaugagccaccaua

SEQ ID NO: 808982 - RNA, 18 nt, Human
uggaaaaagugcauuugg

SEQ ID NO: 808983 - RNA, 21 nt, Human
uggauucaagcaauccucccg

SEQ ID NO: 808984 - RNA, 22 nt, Human
uggccuauggaauggauaauau

SEQ ID NO: 808985 - RNA, 24 nt, Human
uggcucacugcagccucaaccucu

SEQ ID NO: 808986 - RNA, 24 nt, Human
ugggaccacaggcaugagccacca

SEQ ID NO: 808987 - RNA, 24 nt, Human
uggggcccaggacaccaagguguu

SEQ ID NO: 808988 - RNA, 18 nt, Human
uggggggggcaggagggg

SEQ ID NO: 808989 - RNA, 18 nt, Human
ugguggggggggcaggag

SEQ ID NO: 808990 - RNA, 19 nt, Human
uguccaggcuggagugcag

SEQ ID NO: 808991 - RNA, 20 nt, Human
uguccaggcuggagugcagc

SEQ ID NO: 808992 - RNA, 19 nt, Human
uguuguccaggcuggagug

SEQ ID NO: 808993 - RNA, 21 nt, Human
uuaaaguaguaugaaaauguc

SEQ ID NO: 808994 - RNA, 21 nt, Human
uuaagggaaaaaguauggaaa

SEQ ID NO: 808995 - RNA, 26 nt, Human
uuaagggaaaaaguauggaaauuuau

SEQ ID NO: 808996 - RNA, 22 nt, Human
uuaauacaauacgauuuaugga

SEQ ID NO: 808997 - RNA, 20 nt, Human
uuacucuguuguccaggcug

SEQ ID NO: 808998 - RNA, 22 nt, Human
uuacucuguuguccaggcugga

SEQ ID NO: 808999 - RNA, 24 nt, Human
uuacucuguuguccaggcuggagu

SEQ ID NO: 809000 - RNA, 24 nt, Human
uuagccucucaaagugcugagauu

SEQ ID NO: 809001 - RNA, 21 nt, Human
uuaguaugugcuucccaagcu

SEQ ID NO: 809002 - RNA, 21 nt, Human
uugauacugugcacaaccuac

SEQ ID NO: 809003 - RNA, 21 nt, Human
uugguggggggggcaggaggg

SEQ ID NO: 809004 - RNA, 24 nt, Human
uuguagagacgguaucucacuaug

SEQ ID NO: 809005 - RNA, 24 nt, Human
uuuguagagacgguaucucacuau

SEQ ID NO: 809006 - RNA, 23 nt, Human
uuuuacucuguuguccaggcugg

SEQ ID NO: 809007 - RNA, 24 nt, Human
uuuuacucuguuguccaggcugga

SEQ ID NO: 809008 - RNA, 21 nt, Human
aaaugcauccuggcacagucc

SEQ ID NO: 809009 - RNA, 18 nt, Human
aacacagacucagaaauc

SEQ ID NO: 809010 - RNA, 19 nt, Human
aacacagggacuuggcugg

SEQ ID NO: 809011 - RNA, 21 nt, Human
aacucauuuucuucaucuugg

SEQ ID NO: 809012 - RNA, 18 nt, Human
aacugggcugcagaaaaa

SEQ ID NO: 809013 - RNA, 18 nt, Human
aagcagccaggaggcaag

SEQ ID NO: 809014 - RNA, 22 nt, Human
aagcagccaggaggcaaguuga

SEQ ID NO: 809015 - RNA, 22 nt, Human
aagcccagcacagugccugcug

SEQ ID NO: 809016 - RNA, 19 nt, Human
aaggauggcugguggggca

SEQ ID NO: 809017 - RNA, 18 nt, Human
aagguugucacaagcuga

SEQ ID NO: 809018 - RNA, 23 nt, Human
aauugucucuucaaggauggcug

SEQ ID NO: 809019 - RNA, 18 nt, Human
acacagacucagaaauca

SEQ ID NO: 809020 - RNA, 26 nt, Human
acacagacucagaaaucaggaaagcc

SEQ ID NO: 809021 - RNA, 20 nt, Human
acagcccacgagguucgcug

SEQ ID NO: 809022 - RNA, 22 nt, Human
accaggguccacagucucugcc

SEQ ID NO: 809023 - RNA, 21 nt, Human
acccuaggccucccaauuccu

SEQ ID NO: 809024 - RNA, 21 nt, Human
agaaagacuggucuccacagg

SEQ ID NO: 809025 - RNA, 18 nt, Human
agacaaggccugcaaaug

SEQ ID NO: 809026 - RNA, 24 nt, Human
agaggaaggggagcauaguccgag

SEQ ID NO: 809027 - RNA, 20 nt, Human
agcagaggaaggggagcaua

SEQ ID NO: 809028 - RNA, 19 nt, Human
agcagcagggugguggggg

SEQ ID NO: 809029 - RNA, 22 nt, Human
aggaaagauggggggucauagg

SEQ ID NO: 809030 - RNA, 22 nt, Human
aggaugcuguauucccugugga

SEQ ID NO: 809031 - RNA, 21 nt, Human
aggccugcaaauguccugcug

SEQ ID NO: 809032 - RNA, 21 nt, Human
agggacugugaggucugggau

SEQ ID NO: 809033 - RNA, 18 nt, Human
agguggcgguagagauga

SEQ ID NO: 809034 - RNA, 24 nt, Human
aguugccuuuagggcuaccucuau

SEQ ID NO: 809035 - RNA, 22 nt, Human
auucucagcccugaagaaugga

SEQ ID NO: 809036 - RNA, 19 nt, Human
caaaacaggggucagugac

SEQ ID NO: 809037 - RNA, 22 nt, Human
cacacuggcacaucucaguaac

SEQ ID NO: 809038 - RNA, 18 nt, Human
cacagugccugcuggggc

SEQ ID NO: 809039 - RNA, 18 nt, Human
cacccuccuccucuuucc

SEQ ID NO: 809040 - RNA, 19 nt, Human
cacgugggcauaccagggu

SEQ ID NO: 809041 - RNA, 19 nt, Human
cacugugugucagaaagac

SEQ ID NO: 809042 - RNA, 25 nt, Human
cacuugcaagcccaagcuuccagcc

SEQ ID NO: 809043 - RNA, 19 nt, Human
cacuugguuaaagcccuca

SEQ ID NO: 809044 - RNA, 21 nt, Human
cagagagcagcccugaugcuc

SEQ ID NO: 809045 - RNA, 21 nt, Human
cagaggccuuguaugacuucu

SEQ ID NO: 809046 - RNA, 21 nt, Human
cagcaaacauaaaugaaagca

SEQ ID NO: 809047 - RNA, 26 nt, Human
cagccugagacagugcugagccuccu

SEQ ID NO: 809048 - RNA, 18 nt, Human
cagguuccauuccucucc

SEQ ID NO: 809049 - RNA, 18 nt, Human
caguccuggcuggagaca

SEQ ID NO: 809050 - RNA, 19 nt, Human
cagugaccuuaaggagcag

SEQ ID NO: 809051 - RNA, 21 nt, Human
cauccuugcucuccccuuacc

SEQ ID NO: 809052 - RNA, 24 nt, Human
caucucaguaacaccuccaaacac

SEQ ID NO: 809053 - RNA, 21 nt, Human
ccaccauucguaacacaggga

SEQ ID NO: 809054 - RNA, 22 nt, Human
ccacccuaggccucccaauucc

SEQ ID NO: 809055 - RNA, 21 nt, Human
ccagccugagacagugcugag

SEQ ID NO: 809056 - RNA, 20 nt, Human
ccaugaggcuacagcuccau

SEQ ID NO: 809057 - RNA, 20 nt, Human
ccauggugccagccuggagc

SEQ ID NO: 809058 - RNA, 18 nt, Human
cccaaugucuugcccaag

SEQ ID NO: 809059 - RNA, 19 nt, Human
cccacagaacugggcugca

SEQ ID NO: 809060 - RNA, 23 nt, Human
cccacagaacugggcugcagaaa

SEQ ID NO: 809061 - RNA, 18 nt, Human
cccuccuccucuuuccua

SEQ ID NO: 809062 - RNA, 24 nt, Human
cccugacuagagcccugucagagc

SEQ ID NO: 809063 - RNA, 18 nt, Human
cccugaugcucuucuagu

SEQ ID NO: 809064 - RNA, 18 nt, Human
cccugccugggcuugucc

SEQ ID NO: 809065 - RNA, 19 nt, Human
ccuagaccugcaugugagg

SEQ ID NO: 809066 - RNA, 20 nt, Human
ccuccagccugagacagugc

SEQ ID NO: 809067 - RNA, 20 nt, Human
ccugcaugugagguagacag

SEQ ID NO: 809068 - RNA, 23 nt, Human
ccugggcuuguccuguuugggag

SEQ ID NO: 809069 - RNA, 23 nt, Human
ccuuaccuacauuugcuuuccua

SEQ ID NO: 809070 - RNA, 19 nt, Human
ccuugguccaaguuccugg

SEQ ID NO: 809071 - RNA, 18 nt, Human
cgagcagcaggguggugg

SEQ ID NO: 809072 - RNA, 25 nt, Human
cguaacacagggacuuggcuggccu

SEQ ID NO: 809073 - RNA, 22 nt, Human
cucagcccugauauucaucaac

SEQ ID NO: 809074 - RNA, 22 nt, Human
cuccugaaacacaggcuggaaa

SEQ ID NO: 809075 - RNA, 18 nt, Human
cugcugaagcagccagga

SEQ ID NO: 809076 - RNA, 24 nt, Human
cuggauugcucgaguccaccucuu

SEQ ID NO: 809077 - RNA, 23 nt, Human
cuugcaagcccaagcuuccagcc

SEQ ID NO: 809078 - RNA, 21 nt, Human
gagaaaaguccaguagacaag

SEQ ID NO: 809079 - RNA, 22 nt, Human
gagcaaaagagcuggauaaaaa

SEQ ID NO: 809080 - RNA, 23 nt, Human
gagcucugguucucucugacggu

SEQ ID NO: 809081 - RNA, 18 nt, Human
gauaagggcugcccuggc

SEQ ID NO: 809082 - RNA, 20 nt, Human
gauucuagucaguguugcuc

SEQ ID NO: 809083 - RNA, 23 nt, Human
gcaaaacaggggucagugaccuu

SEQ ID NO: 809084 - RNA, 23 nt, Human
gccaaaugcaaagaacuguucua

SEQ ID NO: 809085 - RNA, 21 nt, Human
gccaggacgguagcggggaug

SEQ ID NO: 809086 - RNA, 18 nt, Human
gccccuaagcccagcaca

SEQ ID NO: 809087 - RNA, 27 nt, Human
gcccugaagaauggagggcauuguagu

SEQ ID NO: 809088 - RNA, 18 nt, Human
gccuuguaugacuucugu

SEQ ID NO: 809089 - RNA, 19 nt, Human
gcucagucugggcuccugg

SEQ ID NO: 809090 - RNA, 30 nt, Human
gcuguguggccucaagcaaagcauucccuu

SEQ ID NO: 809091 - RNA, 24 nt, Human
ggcaagcaugauccagcacagucc

SEQ ID NO: 809092 - RNA, 18 nt, Human
ggccuuguaugacuucug

SEQ ID NO: 809093 - RNA, 20 nt, Human
ggcggaggaaagaugggggg

SEQ ID NO: 809094 - RNA, 24 nt, Human
gggcggaggaaagaugggggguca

SEQ ID NO: 809095 - RNA, 18 nt, Human
ggggauggagugagggaa

SEQ ID NO: 809096 - RNA, 18 nt, Human
gguagccccuaagcccag

SEQ ID NO: 809097 - RNA, 23 nt, Human
gucccggauccacuugcaagccc

SEQ ID NO: 809098 - RNA, 22 nt, Human
uaaaaacggaagucucaccaca

SEQ ID NO: 809099 - RNA, 21 nt, Human
uaaagcagggcacaaccuauu

SEQ ID NO: 809100 - RNA, 24 nt, Human
uaagcccagcacagugccugcugg

SEQ ID NO: 809101 - RNA, 19 nt, Human
uaaguagagccaaaugcaa

SEQ ID NO: 809102 - RNA, 18 nt, Human
uaauucuagcuccagguu

SEQ ID NO: 809103 - RNA, 24 nt, Human
uacagcuccauucucagggccagg

SEQ ID NO: 809104 - RNA, 18 nt, Human
uagagaugaggacagugg

SEQ ID NO: 809105 - RNA, 21 nt, Human
uagcagacagccccuuggccc

SEQ ID NO: 809106 - RNA, 20 nt, Human
uagcuccagguuccauuccu

SEQ ID NO: 809107 - RNA, 21 nt, Human
ucagaaagacuggucuccaca

SEQ ID NO: 809108 - RNA, 23 nt, Human
ucagaaaucaggaaagccacaaa

SEQ ID NO: 809109 - RNA, 25 nt, Human
ucagcccugauauucaucaacugcc

SEQ ID NO: 809110 - RNA, 23 nt, Human
ucagcgacuuuaaacagcuuucc

SEQ ID NO: 809111 - RNA, 24 nt, Human
ucagcugcaggcgucaggauccag

SEQ ID NO: 809112 - RNA, 20 nt, Human
ucaggggcggaggaaagaug

SEQ ID NO: 809113 - RNA, 24 nt, Human
ucaugcccacccuaggccucccaa

SEQ ID NO: 809114 - RNA, 19 nt, Human
uccacagucucugcccaga

SEQ ID NO: 809115 - RNA, 19 nt, Human
uccacagucucugcccaga

SEQ ID NO: 809116 - RNA, 22 nt, Human
uccaccugcugaagcagccagg

SEQ ID NO: 809117 - RNA, 24 nt, Human
uccaugcagcccugccugggcuug

SEQ ID NO: 809118 - RNA, 18 nt, Human
ucccuguggagggcaagc

SEQ ID NO: 809119 - RNA, 23 nt, Human
uccucacccuagaccugcaugug

SEQ ID NO: 809120 - RNA, 23 nt, Human
uccugcuccugcucucagcugca

SEQ ID NO: 809121 - RNA, 19 nt, Human
uccugcucucagcugcagg

SEQ ID NO: 809122 - RNA, 18 nt, Human
ucgcugaccuccagccug

SEQ ID NO: 809123 - RNA, 18 nt, Human
ucuccaugcagcccugcc

SEQ ID NO: 809124 - RNA, 20 nt, Human
ucugugcauccuugcucucc

SEQ ID NO: 809125 - RNA, 24 nt, Human
ugacauuuugcggcucagggcagu

SEQ ID NO: 809126 - RNA, 19 nt, Human
ugacuucuguccuggggaa

SEQ ID NO: 809127 - RNA, 21 nt, Human
ugacuucuguccuggggaagg

SEQ ID NO: 809128 - RNA, 18 nt, Human
ugauaagggcugcccugg

SEQ ID NO: 809129 - RNA, 22 nt, Human
ugaucagcgacuuuaaacagcc

SEQ ID NO: 809130 - RNA, 20 nt, Human
ugccaauugcauccuagagc

SEQ ID NO: 809131 - RNA, 18 nt, Human
ugcccagacagaaugcuc

SEQ ID NO: 809132 - RNA, 21 nt, Human
ugcccuugccgggcugcacug

SEQ ID NO: 809133 - RNA, 21 nt, Human
ugccugcuggggcgcuuggca

SEQ ID NO: 809134 - RNA, 18 nt, Human
ugccugggcuuguccugu

SEQ ID NO: 809135 - RNA, 24 nt, Human
ugcuaccaaccugcuguguggccu

SEQ ID NO: 809136 - RNA, 18 nt, Human
ugcuggggcgcuuggcag

SEQ ID NO: 809137 - RNA, 19 nt, Human
uggaagagcugcacccaca

SEQ ID NO: 809138 - RNA, 18 nt, Human
uggccaggacgguagcgg

SEQ ID NO: 809139 - RNA, 20 nt, Human
uggccagggcccugcugcuu

SEQ ID NO: 809140 - RNA, 21 nt, Human
ugggcauaccaggguccacag

SEQ ID NO: 809141 - RNA, 20 nt, Human
ugguagccccuaagcccagc

SEQ ID NO: 809142 - RNA, 19 nt, Human
uggugccagccuggagcuc

SEQ ID NO: 809143 - RNA, 26 nt, Human
ugguggggcagcuccucaggguccuc

SEQ ID NO: 809144 - RNA, 21 nt, Human
ugucacauccauuuauugucc

SEQ ID NO: 809145 - RNA, 18 nt, Human
ugucagaaagacuggucu

SEQ ID NO: 809146 - RNA, 18 nt, Human
ugugagcaaaagagcugg

SEQ ID NO: 809147 - RNA, 24 nt, Human
ugugcacacauguagauuuccuga

SEQ ID NO: 809148 - RNA, 21 nt, Human
uguguccucugucccacgugg

SEQ ID NO: 809149 - RNA, 19 nt, Human
uguguggccucaagcaaag

SEQ ID NO: 809150 - RNA, 24 nt, Human
uguucuacuuuucucucucugugc

SEQ ID NO: 809151 - RNA, 18 nt, Human
uucaucaacugcccugaa

SEQ ID NO: 809152 - RNA, 21 nt, Human
uucaugccgcuuugcacuugg

SEQ ID NO: 809153 - RNA, 18 nt, Human
uuuccugcuccugcucuc

SEQ ID NO: 809154 - RNA, 20 nt, Human
uuugcucagucugggcuccu

SEQ ID NO: 809155 - RNA, 18 nt, Human
aaaagcauucuccaaaug

SEQ ID NO: 809156 - RNA, 22 nt, Human
caacccccugccccccgccagg

SEQ ID NO: 809157 - RNA, 22 nt, Human
cacagaggcccaggcagaggcc

SEQ ID NO: 809158 - RNA, 22 nt, Human
cagcuucuugcugucuccagga

SEQ ID NO: 809159 - RNA, 21 nt, Human
cauuucacucuuccugaguuu

SEQ ID NO: 809160 - RNA, 18 nt, Human
cccaggcagaggccgggc

SEQ ID NO: 809161 - RNA, 19 nt, Human
ccccaguugcccauugcca

SEQ ID NO: 809162 - RNA, 22 nt, Human
cccccgccagggcaagccacag

SEQ ID NO: 809163 - RNA, 26 nt, Human
cccccggggcuggcacagaggcccag

SEQ ID NO: 809164 - RNA, 26 nt, Human
cccccuguacacccuucuacuccgag

SEQ ID NO: 809165 - RNA, 19 nt, Human
cccugccccccgccagggc

SEQ ID NO: 809166 - RNA, 21 nt, Human
gaaagacugaguaacuggggg

SEQ ID NO: 809167 - RNA, 22 nt, Human
gaggcccaggcagaggccgggc

SEQ ID NO: 809168 - RNA, 24 nt, Human
gaggcccaggcagaggccgggcuu

SEQ ID NO: 809169 - RNA, 19 nt, Human
gcccauugccauguccugc

SEQ ID NO: 809170 - RNA, 25 nt, Human
gccugagguugucgugucgcgcucg

SEQ ID NO: 809171 - RNA, 19 nt, Human
uaaaagcauucuccaaaug

SEQ ID NO: 809172 - RNA, 22 nt, Human
uccugccaacccccugcccccc

SEQ ID NO: 809173 - RNA, 18 nt, Human
ugagauuggccagacacg

SEQ ID NO: 809174 - RNA, 21 nt, Human
ugaguaacuggggggcccccg

SEQ ID NO: 809175 - RNA, 19 nt, Human
ugccaacccccugcccccc

SEQ ID NO: 809176 - RNA, 20 nt, Human
uggcacagaggcccaggcag

SEQ ID NO: 809177 - RNA, 21 nt, Human
uucacucuuccugaguuucgg

SEQ ID NO: 809178 - RNA, 26 nt, Human
uuccugaccuuggcugugggggcagg

SEQ ID NO: 809179 - RNA, 18 nt, Human
uugcccauugccaugucc

SEQ ID NO: 809180 - RNA, 24 nt, Human
uuuauuaucgucuccacuuuugau

SEQ ID NO: 809181 - RNA, 24 nt, Human
aaaaaaaaaagaaaaccaaaaagg

SEQ ID NO: 809182 - RNA, 22 nt, Human
aaagaaaaccaaaaagggagac

SEQ ID NO: 809183 - RNA, 19 nt, Human
aacauggugaaaccccguu

SEQ ID NO: 809184 - RNA, 20 nt, Human
aacauggugaaaccccguuu

SEQ ID NO: 809185 - RNA, 21 nt, Human
aacauggugaaaccccguuuc

SEQ ID NO: 809186 - RNA, 21 nt, Human
aacauggugaaaccccguuuc

SEQ ID NO: 809187 - RNA, 24 nt, Human
aauugcuugaacccgggaggcgga

SEQ ID NO: 809188 - RNA, 22 nt, Human
acacagcacgacugucucaaaa

SEQ ID NO: 809189 - RNA, 19 nt, Human
acagacgaggacauucaca

SEQ ID NO: 809190 - RNA, 18 nt, Human
accccguuucuacuaaaa

SEQ ID NO: 809191 - RNA, 21 nt, Human
acgaggacauucacaaggaug

SEQ ID NO: 809192 - RNA, 27 nt, Human
acgcugggugucccagguccucccugc

SEQ ID NO: 809193 - RNA, 18 nt, Human
acugcacuccagccuagg

SEQ ID NO: 809194 - RNA, 26 nt, Human
acugcacuccagccuaggugacacag

SEQ ID NO: 809195 - RNA, 20 nt, Human
acugcuccugaggcuggagg

SEQ ID NO: 809196 - RNA, 21 nt, Human
acugcuccugaggcuggaggc

SEQ ID NO: 809197 - RNA, 24 nt, Human
agaaaaaaaaaaagaaaaccaaaa

SEQ ID NO: 809198 - RNA, 22 nt, Human
agaauugcuugaacccgggagg

SEQ ID NO: 809199 - RNA, 20 nt, Human
agcacuuugggaggccgcag

SEQ ID NO: 809200 - RNA, 24 nt, Human
agcccagaggaggaagcccuggau

SEQ ID NO: 809201 - RNA, 22 nt, Human
agccugagcaacauggugaaac

SEQ ID NO: 809202 - RNA, 24 nt, Human
agccugagcaacauggugaaaccc

SEQ ID NO: 809203 - RNA, 23 nt, Human
agcugggcguggcagcgugugcc

SEQ ID NO: 809204 - RNA, 19 nt, Human
aggaagcccuggauugggc

SEQ ID NO: 809205 - RNA, 20 nt, Human
aggaagcccuggauugggcu

SEQ ID NO: 809206 - RNA, 21 nt, Human
aggaggacgggcccgggcucc

SEQ ID NO: 809207 - RNA, 24 nt, Human
aggcaggagaauugcuugaacccg

SEQ ID NO: 809208 - RNA, 21 nt, Human
aggcggagguugcagugagcc

SEQ ID NO: 809209 - RNA, 24 nt, Human
aggcggagguugcagugagccgag

SEQ ID NO: 809210 - RNA, 21 nt, Human
aggcugaggcaggagaauugc

SEQ ID NO: 809211 - RNA, 24 nt, Human
aggcugaggcaggagaauugcuug

SEQ ID NO: 809212 - RNA, 26 nt, Human
aggcuggaggcagcuuuaacccaaag

SEQ ID NO: 809213 - RNA, 21 nt, Human
agggagccucaggacaccugg

SEQ ID NO: 809214 - RNA, 22 nt, Human
augccacccuagaaagcagagc

SEQ ID NO: 809215 - RNA, 23 nt, Human
auugugccacugcacuccagccu

SEQ ID NO: 809216 - RNA, 22 nt, Human
caaagucagcaaccagcagccc

SEQ ID NO: 809217 - RNA, 19 nt, Human
caacauggugaaaccccgu

SEQ ID NO: 809218 - RNA, 24 nt, Human
caacauggugaaaccccguuucua

SEQ ID NO: 809219 - RNA, 18 nt, Human
cacccuagaaagcagagc

SEQ ID NO: 809220 - RNA, 23 nt, Human
cacccuagaaagcagagcccaga

SEQ ID NO: 809221 - RNA, 23 nt, Human
cacuccagccuaggugacacagc

SEQ ID NO: 809222 - RNA, 19 nt, Human
cacugcacuccagccuagg

SEQ ID NO: 809223 - RNA, 21 nt, Human
cacugcacuccagccuaggug

SEQ ID NO: 809224 - RNA, 22 nt, Human
cacugcacuccagccuagguga

SEQ ID NO: 809225 - RNA, 23 nt, Human
cacugcacuccagccuaggugac

SEQ ID NO: 809226 - RNA, 24 nt, Human
cacugcacuccagccuaggugaca

SEQ ID NO: 809227 - RNA, 21 nt, Human
cagaggguggcaaauguggca

SEQ ID NO: 809228 - RNA, 24 nt, Human
cagcacuuugggaggccgcagcag

SEQ ID NO: 809229 - RNA, 28 nt, Human
cagcacuuugggaggccgcagcaggcgg

SEQ ID NO: 809230 - RNA, 18 nt, Human
cagcagcccgagggagag

SEQ ID NO: 809231 - RNA, 24 nt, Human
cagcgugugccuguagucccagcu

SEQ ID NO: 809232 - RNA, 24 nt, Human
cagcuaucugggaggcugaggcag

SEQ ID NO: 809233 - RNA, 21 nt, Human
caggacaccuggucucaggcu

SEQ ID NO: 809234 - RNA, 18 nt, Human
ccacacugcuccugaggc

SEQ ID NO: 809235 - RNA, 19 nt, Human
ccacugcacuccagccuag

SEQ ID NO: 809236 - RNA, 20 nt, Human
ccacugcacuccagccuagg

SEQ ID NO: 809237 - RNA, 20 nt, Human
ccacugcacuccagccuagg

SEQ ID NO: 809238 - RNA, 21 nt, Human
ccacugcacuccagccuaggu

SEQ ID NO: 809239 - RNA, 24 nt, Human
ccacugcacuccagccuaggugac

SEQ ID NO: 809240 - RNA, 18 nt, Human
ccagaggaggaagcccug

SEQ ID NO: 809241 - RNA, 19 nt, Human
ccccaggcccagaaaugcc

SEQ ID NO: 809242 - RNA, 18 nt, Human
ccccugggacagcugagg

SEQ ID NO: 809243 - RNA, 21 nt, Human
cccugggacagcugagggccc

SEQ ID NO: 809244 - RNA, 28 nt, Human
ccucccugcaaauggcgggggugggggc

SEQ ID NO: 809245 - RNA, 24 nt, Human
ccugagcaacauggugaaaccccg

SEQ ID NO: 809246 - RNA, 21 nt, Human
ccugcaaauggcggggguggg

SEQ ID NO: 809247 - RNA, 19 nt, Human
ccuguagucccagcuaucu

SEQ ID NO: 809248 - RNA, 21 nt, Human
ccuguagucccagcuaucugg

SEQ ID NO: 809249 - RNA, 20 nt, Human
cgccugugaucccagcacuu

SEQ ID NO: 809250 - RNA, 24 nt, Human
cgccugugaucccagcacuuuggg

SEQ ID NO: 809251 - RNA, 24 nt, Human
cgggaggcggagguugcagugagc

SEQ ID NO: 809252 - RNA, 22 nt, Human
cucaaaaagaaaaaaaaaaaga

SEQ ID NO: 809253 - RNA, 24 nt, Human
cucaaaaagaaaaaaaaaaagaaa

SEQ ID NO: 809254 - RNA, 26 nt, Human
cuccugaggcuggaggcaggguaccc

SEQ ID NO: 809255 - RNA, 19 nt, Human
cuggcccucaucuuccucc

SEQ ID NO: 809256 - RNA, 23 nt, Human
cugggaggcugaggcaggagaau

SEQ ID NO: 809257 - RNA, 23 nt, Human
cugucucaaaaagaaaaaaaaaa

SEQ ID NO: 809258 - RNA, 21 nt, Human
cugugcccaggacuggugggc

SEQ ID NO: 809259 - RNA, 19 nt, Human
gaauggaauccgcuaguga

SEQ ID NO: 809260 - RNA, 22 nt, Human
gacagcugagggcccucuuggg

SEQ ID NO: 809261 - RNA, 23 nt, Human
gagauugugccacugcacuccag

SEQ ID NO: 809262 - RNA, 25 nt, Human
gagcacggacagaggaaggggcugg

SEQ ID NO: 809263 - RNA, 23 nt, Human
gaggaggacgggcccgggcugcc

SEQ ID NO: 809264 - RNA, 23 nt, Human
gagguugcagugagccgagauug

SEQ ID NO: 809265 - RNA, 21 nt, Human
gagucuguaaauccagugggu

SEQ ID NO: 809266 - RNA, 19 nt, Human
gcagcaggcggauugccug

SEQ ID NO: 809267 - RNA, 21 nt, Human
gcccacugcccccugggacag

SEQ ID NO: 809268 - RNA, 24 nt, Human
gcgcagagcugaugugguccccag

SEQ ID NO: 809269 - RNA, 20 nt, Human
gcgcaguggcuggcgccugu

SEQ ID NO: 809270 - RNA, 20 nt, Human
gcuagugaacauguuuguuu

SEQ ID NO: 809271 - RNA, 22 nt, Human
ggagguugcagugagccgagau

SEQ ID NO: 809272 - RNA, 24 nt, Human
ggagguugcagugagccgagauug

SEQ ID NO: 809273 - RNA, 25 nt, Human
ggcccgggcugccggggcaggcugg

SEQ ID NO: 809274 - RNA, 24 nt, Human
ggcgccugugaucccagcacuuug

SEQ ID NO: 809275 - RNA, 20 nt, Human
ggcuggagucuguaaaucca

SEQ ID NO: 809276 - RNA, 18 nt, Human
gggcagcugugcccagga

SEQ ID NO: 809277 - RNA, 19 nt, Human
gggcagcugugcccaggac

SEQ ID NO: 809278 - RNA, 24 nt, Human
gggcgcaguggcuggcgccuguga

SEQ ID NO: 809279 - RNA, 18 nt, Human
gggcguggcagcgugugc

SEQ ID NO: 809280 - RNA, 21 nt, Human
ggggugggggcugcugauggc

SEQ ID NO: 809281 - RNA, 21 nt, Human
gguggcugggguuggccugag

SEQ ID NO: 809282 - RNA, 21 nt, Human
ggugggggcugcugauggcag

SEQ ID NO: 809283 - RNA, 21 nt, Human
guaaauccagugggugacaug

SEQ ID NO: 809284 - RNA, 22 nt, Human
gucucaaaaagaaaaaaaaaaa

SEQ ID NO: 809285 - RNA, 24 nt, Human
guggcaucagaguuguucugggcc

SEQ ID NO: 809286 - RNA, 24 nt, Human
guugcagugagccgagauugugcc

SEQ ID NO: 809287 - RNA, 19 nt, Human
uagcacggcugggucagga

SEQ ID NO: 809288 - RNA, 25 nt, Human
ucacaaggauggagaaaccaagguu

SEQ ID NO: 809289 - RNA, 19 nt, Human
ucagcugggcguggcagcg

SEQ ID NO: 809290 - RNA, 24 nt, Human
ucagcugggcguggcagcgugugc

SEQ ID NO: 809291 - RNA, 19 nt, Human
uccccaggcccagaaaugc

SEQ ID NO: 809292 - RNA, 20 nt, Human
ugaaacagacgaggacauuc

SEQ ID NO: 809293 - RNA, 26 nt, Human
ugagcacggacagaggaaggggcugg

SEQ ID NO: 809294 - RNA, 22 nt, Human
ugagccgagauugugccacugc

SEQ ID NO: 809295 - RNA, 24 nt, Human
ugaggcaggagaauugcuugaacc

SEQ ID NO: 809296 - RNA, 25 nt, Human
ugaggcaggagaauugcuugaaccc

SEQ ID NO: 809297 - RNA, 18 nt, Human
ugauggcagguuggggug

SEQ ID NO: 809298 - RNA, 25 nt, Human
ugcacuguccaguuuggagacugcu

SEQ ID NO: 809299 - RNA, 19 nt, Human
ugcccuggccagcugguga

SEQ ID NO: 809300 - RNA, 23 nt, Human
ugccuguagucccagcuaucugg

SEQ ID NO: 809301 - RNA, 24 nt, Human
ugccuguagucccagcuaucuggg

SEQ ID NO: 809302 - RNA, 24 nt, Human
uggcagcgugugccuguaguccca

SEQ ID NO: 809303 - RNA, 23 nt, Human
uggcaucagaguuguucugggcc

SEQ ID NO: 809304 - RNA, 25 nt, Human
uggcgggggugggggcugccgacuc

SEQ ID NO: 809305 - RNA, 21 nt, Human
uggcuggcgccugugauccca

SEQ ID NO: 809306 - RNA, 24 nt, Human
uggcuggcgccugugaucccagca

SEQ ID NO: 809307 - RNA, 24 nt, Human
ugggacagcugagggcccucuugg

SEQ ID NO: 809308 - RNA, 22 nt, Human
ugggaggccgcagcaggcggau

SEQ ID NO: 809309 - RNA, 19 nt, Human
ugggaggcugaggcaggag

SEQ ID NO: 809310 - RNA, 22 nt, Human
ugggaggcugaggcaggagaau

SEQ ID NO: 809311 - RNA, 25 nt, Human
ugggcccuugugcacuguccaguuu

SEQ ID NO: 809312 - RNA, 25 nt, Human
ugggccgggcgcaguggcuggcgcc

SEQ ID NO: 809313 - RNA, 22 nt, Human
ugggucaggagaacugcaucug

SEQ ID NO: 809314 - RNA, 22 nt, Human
uguagggcagcugugcccagga

SEQ ID NO: 809315 - RNA, 24 nt, Human
uguccggguagcacggcuggguca

SEQ ID NO: 809316 - RNA, 20 nt, Human
uguggcagugcagggagccu

SEQ ID NO: 809317 - RNA, 22 nt, Human
uguggcagugcagggagccuca

SEQ ID NO: 809318 - RNA, 20 nt, Human
uuaagggagacacacugggc

SEQ ID NO: 809319 - RNA, 24 nt, Human
uugaacccgggaggcggagguugc

SEQ ID NO: 809320 - RNA, 22 nt, Human
uugcagugagccgagauugugc

SEQ ID NO: 809321 - RNA, 24 nt, Human
uugcuugaacccgggaggcggagg

SEQ ID NO: 809322 - RNA, 19 nt, Human
uugugguggcaucagaguu

SEQ ID NO: 809323 - RNA, 22 nt, Human
aaaaagaccccuucagagagca

SEQ ID NO: 809324 - RNA, 21 nt, Human
aaaagugugaauacagcucug

SEQ ID NO: 809325 - RNA, 18 nt, Human
aaagaacucacuaccucu

SEQ ID NO: 809326 - RNA, 18 nt, Human
aaagggagugguggagac

SEQ ID NO: 809327 - RNA, 26 nt, Human
aaccacggaaagugaaaccacagaua

SEQ ID NO: 809328 - RNA, 25 nt, Human
aaccccucccagaccuuuucuacua

SEQ ID NO: 809329 - RNA, 18 nt, Human
aagccaguccaccuucca

SEQ ID NO: 809330 - RNA, 24 nt, Human
aaggaccaccaggaaccccaggca

SEQ ID NO: 809331 - RNA, 20 nt, Human
aagggagugguggagacuac

SEQ ID NO: 809332 - RNA, 19 nt, Human
aagguaucaucuuccaaaa

SEQ ID NO: 809333 - RNA, 23 nt, Human
aauauuuaaggccauauauuuaa

SEQ ID NO: 809334 - RNA, 23 nt, Human
acaaacauugacacugaagccau

SEQ ID NO: 809335 - RNA, 23 nt, Human
acacacacacacacacacacaca

SEQ ID NO: 809336 - RNA, 25 nt, Human
acacuuccuucaaucauuucuccug

SEQ ID NO: 809337 - RNA, 23 nt, Human
acagaauucuccaucagagugag

SEQ ID NO: 809338 - RNA, 21 nt, Human
accaggaaccccaggcagggc

SEQ ID NO: 809339 - RNA, 19 nt, Human
accccucccagaccuuuuc

SEQ ID NO: 809340 - RNA, 20 nt, Human
accucacgaauacaucaguc

SEQ ID NO: 809341 - RNA, 25 nt, Human
acugagcuaacuggcuacccgaaag

SEQ ID NO: 809342 - RNA, 25 nt, Human
acuggaguacaaaaaauaucucagu

SEQ ID NO: 809343 - RNA, 21 nt, Human
acuguaucauuaccaucccca

SEQ ID NO: 809344 - RNA, 23 nt, Human
agaacaguacacaauuuaaaaca

SEQ ID NO: 809345 - RNA, 22 nt, Human
agaauaaauucuuucugcugga

SEQ ID NO: 809346 - RNA, 27 nt, Human
agacaagaaggggaggagaagggaccc

SEQ ID NO: 809347 - RNA, 19 nt, Human
agacccuccccgcaccccc

SEQ ID NO: 809348 - RNA, 22 nt, Human
agacgaauccccauccuccuga

SEQ ID NO: 809349 - RNA, 22 nt, Human
agagugagagagugaagucuau

SEQ ID NO: 809350 - RNA, 24 nt, Human
agccauaguaaaugcaucacagcc

SEQ ID NO: 809351 - RNA, 25 nt, Human
agcccugcaagacucucccuaaaaa

SEQ ID NO: 809352 - RNA, 23 nt, Human
aggaaaucauggagacccaggac

SEQ ID NO: 809353 - RNA, 18 nt, Human
agggauuccccuuuccag

SEQ ID NO: 809354 - RNA, 21 nt, Human
aggggagacaagaaggggagg

SEQ ID NO: 809355 - RNA, 25 nt, Human
agugaaaugaaaccacggaaaguga

SEQ ID NO: 809356 - RNA, 21 nt, Human
aguuauuguauuuuucuaaaa

SEQ ID NO: 809357 - RNA, 19 nt, Human
auagggaaaccccuaaagg

SEQ ID NO: 809358 - RNA, 24 nt, Human
aucucaccuuccucugaaauccac

SEQ ID NO: 809359 - RNA, 23 nt, Human
augaaaccacggaaagugaaacc

SEQ ID NO: 809360 - RNA, 20 nt, Human
auuuaacguuuuuggacugu

SEQ ID NO: 809361 - RNA, 24 nt, Human
caaaaaauguaauacaccaagcuc

SEQ ID NO: 809362 - RNA, 26 nt, Human
caaaaagaccccuucagagagcauga

SEQ ID NO: 809363 - RNA, 23 nt, Human
caaaaagcugucaugucucccuc

SEQ ID NO: 809364 - RNA, 18 nt, Human
caacaagaagaaaucaac

SEQ ID NO: 809365 - RNA, 20 nt, Human
caacaagaagaaaucaaccc

SEQ ID NO: 809366 - RNA, 24 nt, Human
caagaguccucagccucucagaca

SEQ ID NO: 809367 - RNA, 20 nt, Human
cacacacacacacacacaca

SEQ ID NO: 809368 - RNA, 20 nt, Human
cacacacacacacacacaca

SEQ ID NO: 809369 - RNA, 20 nt, Human
cacacacacacacacacaca

SEQ ID NO: 809370 - RNA, 20 nt, Human
cacacacacacacacacaca

SEQ ID NO: 809371 - RNA, 22 nt, Human
cacacacacacacacacacaca

SEQ ID NO: 809372 - RNA, 19 nt, Human
cacacuguggccuuaacuu

SEQ ID NO: 809373 - RNA, 19 nt, Human
caccaggaaccccaggcag

SEQ ID NO: 809374 - RNA, 24 nt, Human
cacccgggcuggggugcaguggcg

SEQ ID NO: 809375 - RNA, 22 nt, Human
caccugcugcagccgccugcug

SEQ ID NO: 809376 - RNA, 24 nt, Human
cacuuccuucaaucauuucuccug

SEQ ID NO: 809377 - RNA, 26 nt, Human
cagaacaaguuucuguucaugucuuu

SEQ ID NO: 809378 - RNA, 21 nt, Human
cagacccuccccgcacccccc

SEQ ID NO: 809379 - RNA, 20 nt, Human
cagccgccugcugauuccag

SEQ ID NO: 809380 - RNA, 23 nt, Human
cagccgccugcugauuccaggga

SEQ ID NO: 809381 - RNA, 18 nt, Human
cagggcaagagaaggagg

SEQ ID NO: 809382 - RNA, 20 nt, Human
caucaccugcugcagccgcc

SEQ ID NO: 809383 - RNA, 20 nt, Human
cauguauguccucugauucu

SEQ ID NO: 809384 - RNA, 21 nt, Human
cauugucaauagcaaccaaca

SEQ ID NO: 809385 - RNA, 18 nt, Human
ccaauuuuuuauuguucu

SEQ ID NO: 809386 - RNA, 18 nt, Human
ccaccucaccccugagcc

SEQ ID NO: 809387 - RNA, 23 nt, Human
ccagcagaacaaguuucuguuca

SEQ ID NO: 809388 - RNA, 18 nt, Human
ccaguggaugccugaaac

SEQ ID NO: 809389 - RNA, 18 nt, Human
cccugaggucucugcugc

SEQ ID NO: 809390 - RNA, 23 nt, Human
cccuucagagagcaugaaaaaaa

SEQ ID NO: 809391 - RNA, 21 nt, Human
ccgcaaaagucauacaaucac

SEQ ID NO: 809392 - RNA, 26 nt, Human
ccgcaccccccacacacuucuggguc

SEQ ID NO: 809393 - RNA, 23 nt, Human
ccuccagcccuuuagagcauggg

SEQ ID NO: 809394 - RNA, 19 nt, Human
ccugcaagacucucccuaa

SEQ ID NO: 809395 - RNA, 18 nt, Human
ccuuucucccugaggucu

SEQ ID NO: 809396 - RNA, 20 nt, Human
cgcacacacacacacacaca

SEQ ID NO: 809397 - RNA, 23 nt, Human
cuacaaacauugacacugaagcc

SEQ ID NO: 809398 - RNA, 18 nt, Human
cuaugccaaacuugaguu

SEQ ID NO: 809399 - RNA, 22 nt, Human
cucaaccaaagaacucacuacc

SEQ ID NO: 809400 - RNA, 23 nt, Human
cucaccuuuucacuuaaaagaag

SEQ ID NO: 809401 - RNA, 24 nt, Human
cuccccgcaccccccacacacuuc

SEQ ID NO: 809402 - RNA, 24 nt, Human
cucgcucugucacccgggcugggg

SEQ ID NO: 809403 - RNA, 23 nt, Human
cucucaccuuuucacuuaaaaga

SEQ ID NO: 809404 - RNA, 19 nt, Human
cucucagacacuuuuuggc

SEQ ID NO: 809405 - RNA, 18 nt, Human
cugcagacugccugccug

SEQ ID NO: 809406 - RNA, 23 nt, Human
cugugaacuuggaccugccccuc

SEQ ID NO: 809407 - RNA, 19 nt, Human
cuugccaauuuuuacaugg

SEQ ID NO: 809408 - RNA, 19 nt, Human
cuuggaguuauaguaaaau

SEQ ID NO: 809409 - RNA, 23 nt, Human
gaaaccacagauagaacugaauc

SEQ ID NO: 809410 - RNA, 20 nt, Human
gaaaugaaaccacggaaagu

SEQ ID NO: 809411 - RNA, 22 nt, Human
gaacuuggaccugccccucuag

SEQ ID NO: 809412 - RNA, 21 nt, Human
gacaaauauccuucaaccucc

SEQ ID NO: 809413 - RNA, 21 nt, Human
gaccacagugaaaugaaaccc

SEQ ID NO: 809414 - RNA, 19 nt, Human
gacccuccccgcacccccc

SEQ ID NO: 809415 - RNA, 24 nt, Human
gagcaggaagacucaagauuucuu

SEQ ID NO: 809416 - RNA, 27 nt, Human
gagccuuuucuucucaucaauaggcuu

SEQ ID NO: 809417 - RNA, 23 nt, Human
gagugguggagacuacagugagc

SEQ ID NO: 809418 - RNA, 24 nt, Human
gcaaaagucauacaaucacaggcc

SEQ ID NO: 809419 - RNA, 22 nt, Human
gcucugaggcacacacccauuc

SEQ ID NO: 809420 - RNA, 22 nt, Human
gcugucaugucucccucuccac

SEQ ID NO: 809421 - RNA, 18 nt, Human
ggacugugauugaccaca

SEQ ID NO: 809422 - RNA, 18 nt, Human
ggucagcuguuuccuccu

SEQ ID NO: 809423 - RNA, 20 nt, Human
ggugcaguggcgcaauccug

SEQ ID NO: 809424 - RNA, 27 nt, Human
gugaacuuaauuuuauuccguauuuac

SEQ ID NO: 809425 - RNA, 22 nt, Human
gugaacuuggaccugccccucu

SEQ ID NO: 809426 - RNA, 18 nt, Human
uaaaaagcacaaagcuac

SEQ ID NO: 809427 - RNA, 23 nt, Human
uaaaauagcugaauagauuggac

SEQ ID NO: 809428 - RNA, 22 nt, Human
uaaaucgccucaauugacacaa

SEQ ID NO: 809429 - RNA, 24 nt, Human
uaacccacugagcuaacuggcuac

SEQ ID NO: 809430 - RNA, 23 nt, Human
uaaccucuaaacaagagcuugua

SEQ ID NO: 809431 - RNA, 20 nt, Human
uaagacacagcauccuguag

SEQ ID NO: 809432 - RNA, 21 nt, Human
uaagccaguccaccuuccaua

SEQ ID NO: 809433 - RNA, 19 nt, Human
uaaggaaacuaggcucaga

SEQ ID NO: 809434 - RNA, 21 nt, Human
uaauuuguuagacgaaucccc

SEQ ID NO: 809435 - RNA, 24 nt, Human
uacuaaaugacucagaggugggug

SEQ ID NO: 809436 - RNA, 18 nt, Human
uagaacugaaucagacug

SEQ ID NO: 809437 - RNA, 22 nt, Human
uagcaacaucacaugucuggaa

SEQ ID NO: 809438 - RNA, 22 nt, Human
uagcagaaaugucccauuuccu

SEQ ID NO: 809439 - RNA, 18 nt, Human
uagcagaauuuggaguca

SEQ ID NO: 809440 - RNA, 19 nt, Human
uagcagaauuuggagucag

SEQ ID NO: 809441 - RNA, 23 nt, Human
uagcagccuuaucaaacaguuga

SEQ ID NO: 809442 - RNA, 21 nt, Human
uagccgaauugccagcaucac

SEQ ID NO: 809443 - RNA, 22 nt, Human
uaggaaacuacagacugaauca

SEQ ID NO: 809444 - RNA, 22 nt, Human
uaggugacagcugagcaaaaag

SEQ ID NO: 809445 - RNA, 24 nt, Human
uaucuaaggacgaugagcauucca

SEQ ID NO: 809446 - RNA, 21 nt, Human
ucaaaaacuaggagcacaagu

SEQ ID NO: 809447 - RNA, 18 nt, Human
ucaaaaagaccccuucag

SEQ ID NO: 809448 - RNA, 20 nt, Human
ucaaaaucauguauguccuc

SEQ ID NO: 809449 - RNA, 22 nt, Human
ucacccgggcuggggugcagug

SEQ ID NO: 809450 - RNA, 23 nt, Human
ucagagagcaugaaaaaaauauu

SEQ ID NO: 809451 - RNA, 22 nt, Human
ucagaggaucucuccaaagggu

SEQ ID NO: 809452 - RNA, 20 nt, Human
ucagggcaagagaaggagga

SEQ ID NO: 809453 - RNA, 23 nt, Human
uccacuaucaaaaacuaggagca

SEQ ID NO: 809454 - RNA, 23 nt, Human
uccacuguaucauuaccaucccc

SEQ ID NO: 809455 - RNA, 20 nt, Human
uccaggaaagagucuaugcc

SEQ ID NO: 809456 - RNA, 22 nt, Human
ucccucuccaccucaccccuga

SEQ ID NO: 809457 - RNA, 24 nt, Human
ucgcucugucacccgggcuggggu

SEQ ID NO: 809458 - RNA, 25 nt, Human
ucuaaaaagcacaaagcuacuccau

SEQ ID NO: 809459 - RNA, 18 nt, Human
ucuaagacccccagugga

SEQ ID NO: 809460 - RNA, 24 nt, Human
ucuacagcauggauaugccagaca

SEQ ID NO: 809461 - RNA, 23 nt, Human
ucuccaccucaccccugagccuu

SEQ ID NO: 809462 - RNA, 22 nt, Human
ucucccugaggucucugcugca

SEQ ID NO: 809463 - RNA, 19 nt, Human
ucucgcucugucacccggg

SEQ ID NO: 809464 - RNA, 23 nt, Human
ucucgcucugucacccgggcugg

SEQ ID NO: 809465 - RNA, 23 nt, Human
ucucgcucugucacccgggcugg

SEQ ID NO: 809466 - RNA, 24 nt, Human
ucucgcucugucacccgggcuggg

SEQ ID NO: 809467 - RNA, 24 nt, Human
ucugucacccgggcuggggugcag

SEQ ID NO: 809468 - RNA, 25 nt, Human
ugaaaauuuucauuuaacguuuuug

SEQ ID NO: 809469 - RNA, 25 nt, Human
ugaaaccacagauaaggaaggacua

SEQ ID NO: 809470 - RNA, 18 nt, Human
ugaaaccacagauagaac

SEQ ID NO: 809471 - RNA, 20 nt, Human
ugaacuuggaccugccccuc

SEQ ID NO: 809472 - RNA, 21 nt, Human
ugacucacuggaucccaauac

SEQ ID NO: 809473 - RNA, 20 nt, Human
ugagcccugcaagacucucc

SEQ ID NO: 809474 - RNA, 21 nt, Human
ugagcuggagggcacagguuu

SEQ ID NO: 809475 - RNA, 22 nt, Human
ugaggucucugcugcaaaagca

SEQ ID NO: 809476 - RNA, 21 nt, Human
ugccaaggucauagcucugug

SEQ ID NO: 809477 - RNA, 19 nt, Human
ugccugccugugaccucug

SEQ ID NO: 809478 - RNA, 19 nt, Human
uggaugccugaaaccacag

SEQ ID NO: 809479 - RNA, 19 nt, Human
ugggauggagcaggaagac

SEQ ID NO: 809480 - RNA, 21 nt, Human
ugggauggagcaggaagacuc

SEQ ID NO: 809481 - RNA, 24 nt, Human
uggggugcaguggcgcaauccugg

SEQ ID NO: 809482 - RNA, 22 nt, Human
ugggugaacuuaauuuuauuug

SEQ ID NO: 809483 - RNA, 21 nt, Human
uguauguccucugauucuguc

SEQ ID NO: 809484 - RNA, 23 nt, Human
ugugaggaagggcagaacucuga

SEQ ID NO: 809485 - RNA, 18 nt, Human
ugugugugugcgcacaca

SEQ ID NO: 809486 - RNA, 23 nt, Human
uuagaacaaaucucuagaaaagu

SEQ ID NO: 809487 - RNA, 18 nt, Human
uuaguacauuugugugga

SEQ ID NO: 809488 - RNA, 24 nt, Human
uuauuguuaguucugccguuugcu

SEQ ID NO: 809489 - RNA, 18 nt, Human
uucacauuuuucccuuau

SEQ ID NO: 809490 - RNA, 20 nt, Human
uucacuuaaaagaagcacuu

SEQ ID NO: 809491 - RNA, 19 nt, Human
uuccaaaacaacgucuaug

SEQ ID NO: 809492 - RNA, 21 nt, Human
uucuagaaugacaugggaaua

SEQ ID NO: 809493 - RNA, 19 nt, Human
uugacacugaagccauagu

SEQ ID NO: 809494 - RNA, 18 nt, Human
uuggacuuuggggcucuc

SEQ ID NO: 809495 - RNA, 23 nt, Human
uuuaaacuaugcagacccucccc

SEQ ID NO: 809496 - RNA, 18 nt, Human
uuuaacguuuuuggacug

SEQ ID NO: 809497 - RNA, 19 nt, Human
uuuaaugucuuuucacauc

SEQ ID NO: 809498 - RNA, 19 nt, Human
uuucacuuuguuccucuga

SEQ ID NO: 809499 - RNA, 24 nt, Human
uuucugguuccuagcagaauuugg

SEQ ID NO: 809500 - RNA, 23 nt, Human
uuuggugagcccugcaagacucu

SEQ ID NO: 809501 - RNA, 18 nt, Human
uuuuaugcagaggagcaa

SEQ ID NO: 809502 - RNA, 25 nt, Human
aaaaauauagauucccaggcucucc

SEQ ID NO: 809503 - RNA, 21 nt, Human
aaaacacaaauguguaagucc

SEQ ID NO: 809504 - RNA, 20 nt, Human
aaaaguuggaaaaaaacugc

SEQ ID NO: 809505 - RNA, 19 nt, Human
aaaauuaugacaggacaaa

SEQ ID NO: 809506 - RNA, 22 nt, Human
aaacaggagacugcuugcaagg

SEQ ID NO: 809507 - RNA, 23 nt, Human
aaacucagcagguuaugucaaaa

SEQ ID NO: 809508 - RNA, 22 nt, Human
aacuuaaaauaaaaguuggaaa

SEQ ID NO: 809509 - RNA, 22 nt, Human
aagaaaaacagaaaauguccaa

SEQ ID NO: 809510 - RNA, 20 nt, Human
aagagaaaacaaaacacaaa

SEQ ID NO: 809511 - RNA, 22 nt, Human
aagagucaaaagcuauacacuu

SEQ ID NO: 809512 - RNA, 23 nt, Human
aaguuugggcuuuuuuuuuccuu

SEQ ID NO: 809513 - RNA, 19 nt, Human
aaucucaucauccuuccac

SEQ ID NO: 809514 - RNA, 18 nt, Human
acaaaacuaaaaaguuga

SEQ ID NO: 809515 - RNA, 21 nt, Human
acacaaauucacaaauguucu

SEQ ID NO: 809516 - RNA, 21 nt, Human
accaaaaagugaccuaaucau

SEQ ID NO: 809517 - RNA, 21 nt, Human
acccuaucucauaagucucug

SEQ ID NO: 809518 - RNA, 19 nt, Human
accuuggguaaacaaaacu

SEQ ID NO: 809519 - RNA, 23 nt, Human
acuaaaugcugaaaaaacaaaga

SEQ ID NO: 809520 - RNA, 18 nt, Human
acucaucccaaaucacug

SEQ ID NO: 809521 - RNA, 25 nt, Human
acuuugaaggaacaaaacuaaaaag

SEQ ID NO: 809522 - RNA, 22 nt, Human
agaauucuuuacaccacaccuu

SEQ ID NO: 809523 - RNA, 22 nt, Human
agagacuauuccgagguucugu

SEQ ID NO: 809524 - RNA, 20 nt, Human
agaguacauauucacaacaa

SEQ ID NO: 809525 - RNA, 19 nt, Human
agcagaaguagagacaacu

SEQ ID NO: 809526 - RNA, 18 nt, Human
aggaaaaggcauacugaa

SEQ ID NO: 809527 - RNA, 22 nt, Human
aggauaaaagcugaaagcaaaa

SEQ ID NO: 809528 - RNA, 19 nt, Human
aguaguaguguuagccucu

SEQ ID NO: 809529 - RNA, 20 nt, Human
agucacauuauuuucauuuu

SEQ ID NO: 809530 - RNA, 21 nt, Human
aguuggaaaaaaacugcaugu

SEQ ID NO: 809531 - RNA, 18 nt, Human
auaaaguauacuguauac

SEQ ID NO: 809532 - RNA, 21 nt, Human
auacugaauacuuuuacuuca

SEQ ID NO: 809533 - RNA, 22 nt, Human
augaauuuuauaaaaccaaacu

SEQ ID NO: 809534 - RNA, 18 nt, Human
auuggaggguuggccuga

SEQ ID NO: 809535 - RNA, 22 nt, Human
caaaaaaaaccuaaguguccug

SEQ ID NO: 809536 - RNA, 24 nt, Human
caaaacacaaauguguaaguccca

SEQ ID NO: 809537 - RNA, 21 nt, Human
caaaaccugaaacgucccaaa

SEQ ID NO: 809538 - RNA, 25 nt, Human
caaaaccugaaacgucccaaaacau

SEQ ID NO: 809539 - RNA, 22 nt, Human
caacuucauuuagggaaauuac

SEQ ID NO: 809540 - RNA, 18 nt, Human
caauaaagauggggccca

SEQ ID NO: 809541 - RNA, 21 nt, Human
cacaaauguguaagucccaga

SEQ ID NO: 809542 - RNA, 19 nt, Human
cacaacaaccucuuuuagg

SEQ ID NO: 809543 - RNA, 21 nt, Human
caccacacugcuucucuagcu

SEQ ID NO: 809544 - RNA, 18 nt, Human
cacccaaccaaaaccuga

SEQ ID NO: 809545 - RNA, 24 nt, Human
cacucucaggauaaaagcugaaag

SEQ ID NO: 809546 - RNA, 20 nt, Human
cacuucaaaagagucaaaag

SEQ ID NO: 809547 - RNA, 23 nt, Human
cacuuuguagguagaauuagaag

SEQ ID NO: 809548 - RNA, 22 nt, Human
cagaccaauuaaaucagaaucu

SEQ ID NO: 809549 - RNA, 19 nt, Human
caucagaaauaauauucua

SEQ ID NO: 809550 - RNA, 25 nt, Human
caugcaaagauuuuggggacaacca

SEQ ID NO: 809551 - RNA, 23 nt, Human
cauggcacacauuuacuuauaua

SEQ ID NO: 809552 - RNA, 18 nt, Human
cauuuagaaucacauaau

SEQ ID NO: 809553 - RNA, 25 nt, Human
ccaaccuuugccucugaaucucuua

SEQ ID NO: 809554 - RNA, 19 nt, Human
ccaggcucuccccuggaga

SEQ ID NO: 809555 - RNA, 24 nt, Human
cccaaaacauuaaaaacaaauaaa

SEQ ID NO: 809556 - RNA, 18 nt, Human
ccccuggagaacaugauu

SEQ ID NO: 809557 - RNA, 30 nt, Human
ccccuggagaacaugauucaauguuucuag

SEQ ID NO: 809558 - RNA, 19 nt, Human
ccucuauacaacacugacu

SEQ ID NO: 809559 - RNA, 19 nt, Human
ccucucagagcccacaccu

SEQ ID NO: 809560 - RNA, 23 nt, Human
ccucuugcuuuugucuaaagucc

SEQ ID NO: 809561 - RNA, 20 nt, Human
ccuugucugagcaaagacua

SEQ ID NO: 809562 - RNA, 26 nt, Human
cuaaaugcugaaaaaacaaagaguuc

SEQ ID NO: 809563 - RNA, 25 nt, Human
cuccucuuaccauaaaucaauacca

SEQ ID NO: 809564 - RNA, 21 nt, Human
cuccuggggccugccuccauu

SEQ ID NO: 809565 - RNA, 23 nt, Human
cucucagagcccacaccucuuaa

SEQ ID NO: 809566 - RNA, 26 nt, Human
cucuuaaccagccucuuuuuguuugc

SEQ ID NO: 809567 - RNA, 20 nt, Human
cugaaacuuguggggccuac

SEQ ID NO: 809568 - RNA, 18 nt, Human
cugacucugaagaaaaug

SEQ ID NO: 809569 - RNA, 19 nt, Human
cuguauacaguguucuccu

SEQ ID NO: 809570 - RNA, 21 nt, Human
cuguauacaguguucuccucc

SEQ ID NO: 809571 - RNA, 20 nt, Human
cugucucuucugucuuuucu

SEQ ID NO: 809572 - RNA, 26 nt, Human
cuucacaucugcacaugcacccauga

SEQ ID NO: 809573 - RNA, 18 nt, Human
cuugcagcccacaggcca

SEQ ID NO: 809574 - RNA, 19 nt, Human
cuuguggggccuacucuuc

SEQ ID NO: 809575 - RNA, 24 nt, Human
cuuuacaccacaccacacugcuuc

SEQ ID NO: 809576 - RNA, 20 nt, Human
cuuuaucgcuuguacccuuc

SEQ ID NO: 809577 - RNA, 24 nt, Human
gaaaaggauacccuggaugacaga

SEQ ID NO: 809578 - RNA, 23 nt, Human
gaaucacauaauguuagaacugg

SEQ ID NO: 809579 - RNA, 22 nt, Human
gaauuuuauaaaaccaaacuuu

SEQ ID NO: 809580 - RNA, 18 nt, Human
gagguuaaguuugggcuu

SEQ ID NO: 809581 - RNA, 20 nt, Human
gaucaagcuuguccaacuug

SEQ ID NO: 809582 - RNA, 21 nt, Human
gaugacagacaucaagaaaaa

SEQ ID NO: 809583 - RNA, 19 nt, Human
gccacauguggcccaaggu

SEQ ID NO: 809584 - RNA, 21 nt, Human
gccccaaggucagaauuccug

SEQ ID NO: 809585 - RNA, 19 nt, Human
gcugcacacuacuggcuau

SEQ ID NO: 809586 - RNA, 18 nt, Human
gcuuuuuuuuuccuucuu

SEQ ID NO: 809587 - RNA, 18 nt, Human
ggaaaagccaauugagag

SEQ ID NO: 809588 - RNA, 23 nt, Human
ggaaauauguaucuccucuuacc

SEQ ID NO: 809589 - RNA, 19 nt, Human
ggaaauggaaauauguauc

SEQ ID NO: 809590 - RNA, 19 nt, Human
ggccugagcaaugggaguu

SEQ ID NO: 809591 - RNA, 21 nt, Human
gggcccaggaaaacucagcag

SEQ ID NO: 809592 - RNA, 24 nt, Human
guggggccuacucuuccccuaauc

SEQ ID NO: 809593 - RNA, 18 nt, Human
uaaaaacaaauaaaggca

SEQ ID NO: 809594 - RNA, 21 nt, Human
uaaaacaaaacuacuaguuac

SEQ ID NO: 809595 - RNA, 18 nt, Human
uaacagguuuccuuuucu

SEQ ID NO: 809596 - RNA, 27 nt, Human
uaacagguuuccuuuucucuuauguuc

SEQ ID NO: 809597 - RNA, 19 nt, Human
uaacuagcacacuauucca

SEQ ID NO: 809598 - RNA, 25 nt, Human
uaacuagcacacuauuccacuuugu

SEQ ID NO: 809599 - RNA, 23 nt, Human
uacaacacugacucucaauaaac

SEQ ID NO: 809600 - RNA, 20 nt, Human
uacccuagauuauugagcua

SEQ ID NO: 809601 - RNA, 24 nt, Human
uacccugaaacuuguggggccuac

SEQ ID NO: 809602 - RNA, 24 nt, Human
uagaaucacauaauguuagaacug

SEQ ID NO: 809603 - RNA, 19 nt, Human
uaggaaauggaaauaugua

SEQ ID NO: 809604 - RNA, 27 nt, Human
uaggcacccuuacuuuuugaaagcuuu

SEQ ID NO: 809605 - RNA, 21 nt, Human
uauaaagaaaaacagaaaaug

SEQ ID NO: 809606 - RNA, 18 nt, Human
uaucacaggcuuugugag

SEQ ID NO: 809607 - RNA, 19 nt, Human
uaugacuauaaacucagau

SEQ ID NO: 809608 - RNA, 25 nt, Human
uauggccccaaggucagaauuccug

SEQ ID NO: 809609 - RNA, 20 nt, Human
uauuucagaguuuuuacaua

SEQ ID NO: 809610 - RNA, 24 nt, Human
ucaaaaaagagaaaacaaaacaca

SEQ ID NO: 809611 - RNA, 22 nt, Human
ucaaagcauaaauugggaaagu

SEQ ID NO: 809612 - RNA, 18 nt, Human
ucaaccuuggguaaacaa

SEQ ID NO: 809613 - RNA, 18 nt, Human
ucaauacccaagaauaga

SEQ ID NO: 809614 - RNA, 20 nt, Human
ucacuuagggagucaaaaaa

SEQ ID NO: 809615 - RNA, 18 nt, Human
ucaguauaaauacauuua

SEQ ID NO: 809616 - RNA, 19 nt, Human
ucauaagucucugaacuaa

SEQ ID NO: 809617 - RNA, 24 nt, Human
ucauaagucucugaacuaaggucu

SEQ ID NO: 809618 - RNA, 20 nt, Human
ucauagaaacaggagacugc

SEQ ID NO: 809619 - RNA, 22 nt, Human
uccaauaaagauggggcccaga

SEQ ID NO: 809620 - RNA, 22 nt, Human
uccacccaaccaaaaccugaaa

SEQ ID NO: 809621 - RNA, 25 nt, Human
ucccucuauacaacacugacucuca

SEQ ID NO: 809622 - RNA, 23 nt, Human
uccugauugaauccuccuggggc

SEQ ID NO: 809623 - RNA, 25 nt, Human
uccuuuaucgcuuguacccuucaga

SEQ ID NO: 809624 - RNA, 24 nt, Human
ucuaaaguccauuuucuuagcuga

SEQ ID NO: 809625 - RNA, 23 nt, Human
ucuuauacucuccacucuuuuau

SEQ ID NO: 809626 - RNA, 24 nt, Human
ucuuauguucuccuugaguucuua

SEQ ID NO: 809627 - RNA, 20 nt, Human
ucuucccuaagaaucugcua

SEQ ID NO: 809628 - RNA, 21 nt, Human
ucuuuacaccacaccacacug

SEQ ID NO: 809629 - RNA, 18 nt, Human
ugaaaaaacaaagaguuc

SEQ ID NO: 809630 - RNA, 21 nt, Human
ugaaaaaacaaagaguucaag

SEQ ID NO: 809631 - RNA, 23 nt, Human
ugaaaauccuagaguagacucau

SEQ ID NO: 809632 - RNA, 22 nt, Human
ugaaagcaaaauucuaaaacaa

SEQ ID NO: 809633 - RNA, 19 nt, Human
ugaaucucuuaaccagccu

SEQ ID NO: 809634 - RNA, 19 nt, Human
ugaccuaaucauuucaaag

SEQ ID NO: 809635 - RNA, 21 nt, Human
ugacucaacacaaauucacaa

SEQ ID NO: 809636 - RNA, 22 nt, Human
ugagauaugugagaaacauuua

SEQ ID NO: 809637 - RNA, 22 nt, Human
ugauggguacuauauauacuac

SEQ ID NO: 809638 - RNA, 20 nt, Human
ugauuugaggcugaucaucu

SEQ ID NO: 809639 - RNA, 18 nt, Human
ugcacauaaucaaaacug

SEQ ID NO: 809640 - RNA, 22 nt, Human
ugcccagaauucuuuacaccac

SEQ ID NO: 809641 - RNA, 24 nt, Human
ugcccagaauucuuuacaccacac

SEQ ID NO: 809642 - RNA, 19 nt, Human
ugcgggcccaggaaaacuc

SEQ ID NO: 809643 - RNA, 23 nt, Human
uggaaaaaaacugcaugugaaua

SEQ ID NO: 809644 - RNA, 18 nt, Human
uggauuagugguucucaa

SEQ ID NO: 809645 - RNA, 19 nt, Human
uggcccauggaagccgaaa

SEQ ID NO: 809646 - RNA, 23 nt, Human
ugggcuuuuuuuuuccuucuuuu

SEQ ID NO: 809647 - RNA, 18 nt, Human
uguccugaagugacacug

SEQ ID NO: 809648 - RNA, 23 nt, Human
ugucuacuuacuguugcuacaug

SEQ ID NO: 809649 - RNA, 19 nt, Human
uguuguuguuucuucuuuu

SEQ ID NO: 809650 - RNA, 25 nt, Human
uguuucuucuuucaauuaaauuuca

SEQ ID NO: 809651 - RNA, 21 nt, Human
uuaaaaacaaauaaaggcaaa

SEQ ID NO: 809652 - RNA, 24 nt, Human
uuaaaauaaaaguuggaaaaaaac

SEQ ID NO: 809653 - RNA, 26 nt, Human
uuaaaauaaaaguuggaaaaaaacug

SEQ ID NO: 809654 - RNA, 23 nt, Human
uuaaacggggaaaagccaauuga

SEQ ID NO: 809655 - RNA, 21 nt, Human
uuagcccuuggcuuuuucaca

SEQ ID NO: 809656 - RNA, 21 nt, Human
uucaauacccaagaauagacu

SEQ ID NO: 809657 - RNA, 22 nt, Human
uucacaacaaccucuuuuagga

SEQ ID NO: 809658 - RNA, 19 nt, Human
uucauagaaacaggagacu

SEQ ID NO: 809659 - RNA, 18 nt, Human
uucccaggcucuccccug

SEQ ID NO: 809660 - RNA, 18 nt, Human
uuccccuaaucauaaccc

SEQ ID NO: 809661 - RNA, 21 nt, Human
uucuaugaucacaaauauggc

SEQ ID NO: 809662 - RNA, 23 nt, Human
uucucagagguuaaguuugggcu

SEQ ID NO: 809663 - RNA, 22 nt, Human
uucuuugauaccaagaaaagga

SEQ ID NO: 809664 - RNA, 25 nt, Human
uugaccagaagaagcaaauuaauac

SEQ ID NO: 809665 - RNA, 19 nt, Human
uuggucaaagucacagagc

SEQ ID NO: 809666 - RNA, 23 nt, Human
uuuaaaaaucucaucauccuucc

SEQ ID NO: 809667 - RNA, 27 nt, Human
uuuaaaaaucucaucauccuuccacuu

SEQ ID NO: 809668 - RNA, 27 nt, Human
uuuccucaauuaauccuugggcaaaca

SEQ ID NO: 809669 - RNA, 22 nt, Human
uuucucagagguuaaguuuggg

SEQ ID NO: 809670 - RNA, 20 nt, Human
uuugaccagaagaagcaaau

SEQ ID NO: 809671 - RNA, 26 nt, Human
uuuuucaauucaaccuuggguaaaca

SEQ ID NO: 809672 - RNA, 21 nt, Human
uuuuucuuuuuuaagaaaaug

SEQ ID NO: 809673 - RNA, 25 nt, Human
uuuuuuguuguuguuucuucuuuca

SEQ ID NO: 809674 - RNA, 23 nt, Human
aaaaaaaacaaaaaagcaugcag

SEQ ID NO: 809675 - RNA, 19 nt, Human
aaaaaacaaaaaagcaugc

SEQ ID NO: 809676 - RNA, 18 nt, Human
aaaaaauucuaaccaaca

SEQ ID NO: 809677 - RNA, 22 nt, Human
aaaaaguaaaaacaaauauaac

SEQ ID NO: 809678 - RNA, 23 nt, Human
aaaaaguaaaaacaaauauaacu

SEQ ID NO: 809679 - RNA, 21 nt, Human
aaaagcaugcaggcucuacag

SEQ ID NO: 809680 - RNA, 21 nt, Human
aaaauaaccaaaacaagagga

SEQ ID NO: 809681 - RNA, 23 nt, Human
aaacaacaacaacaaaaaaaaac

SEQ ID NO: 809682 - RNA, 22 nt, Human
aaacaagaggaacccacaccca

SEQ ID NO: 809683 - RNA, 23 nt, Human
aaacaagaggaacccacacccaa

SEQ ID NO: 809684 - RNA, 18 nt, Human
aaacaugcaaaaggccaa

SEQ ID NO: 809685 - RNA, 22 nt, Human
aaagagagagaaagagagagac

SEQ ID NO: 809686 - RNA, 22 nt, Human
aaauuauaaaauguaacuauaa

SEQ ID NO: 809687 - RNA, 24 nt, Human
aaauucacuuucuaaccaaaacaa

SEQ ID NO: 809688 - RNA, 26 nt, Human
aacaacaacaacaaaaaaaaacaaaa

SEQ ID NO: 809689 - RNA, 22 nt, Human
aacagcaauggugugccuaacc

SEQ ID NO: 809690 - RNA, 22 nt, Human
aaccaaauuucucaaagucaaa

SEQ ID NO: 809691 - RNA, 24 nt, Human
aaccaugcuucacaaaacaauaau

SEQ ID NO: 809692 - RNA, 18 nt, Human
aacucuacaaaaguugaa

SEQ ID NO: 809693 - RNA, 18 nt, Human
aagaaaaaacaacaacaa

SEQ ID NO: 809694 - RNA, 18 nt, Human
aagaggaaacaggcucag

SEQ ID NO: 809695 - RNA, 22 nt, Human
aagcaacagaauaaacaguuuu

SEQ ID NO: 809696 - RNA, 19 nt, Human
aaggaccuuuuuguagcaa

SEQ ID NO: 809697 - RNA, 23 nt, Human
aaggaccuuuuuguagcaauccu

SEQ ID NO: 809698 - RNA, 23 nt, Human
aaggaggcauuccuucauaagcu

SEQ ID NO: 809699 - RNA, 23 nt, Human
aauugugugcugacaaauucuug

SEQ ID NO: 809700 - RNA, 23 nt, Human
acaaauauaacuuaagaaaaaac

SEQ ID NO: 809701 - RNA, 25 nt, Human
acaaauucuugaguguguaacaaag

SEQ ID NO: 809702 - RNA, 25 nt, Human
acaacaacaacaaaaaaaaacaaaa

SEQ ID NO: 809703 - RNA, 26 nt, Human
acaacaacaacaaaaaaaaacaaaaa

SEQ ID NO: 809704 - RNA, 25 nt, Human
accaugcuucacaaaacaauaaugg

SEQ ID NO: 809705 - RNA, 23 nt, Human
acccaacaccucucccucccccu

SEQ ID NO: 809706 - RNA, 22 nt, Human
accucucccucccccuucuacu

SEQ ID NO: 809707 - RNA, 20 nt, Human
acgcaaaaagguacuauggc

SEQ ID NO: 809708 - RNA, 19 nt, Human
acguaguuucuaaaagggg

SEQ ID NO: 809709 - RNA, 22 nt, Human
agaaaaaacaacaacaacaaaa

SEQ ID NO: 809710 - RNA, 24 nt, Human
agaaaaaacaacaacaacaaaaaa

SEQ ID NO: 809711 - RNA, 25 nt, Human
agaaagagagagaccuuuggaggaa

SEQ ID NO: 809712 - RNA, 22 nt, Human
agaaagcuaagaggaaacaggc

SEQ ID NO: 809713 - RNA, 23 nt, Human
agaauaaacaguuuucaucaaaa

SEQ ID NO: 809714 - RNA, 23 nt, Human
aggaaauaugcuuauucaaaagc

SEQ ID NO: 809715 - RNA, 21 nt, Human
aggaagugcagccgcugcccc

SEQ ID NO: 809716 - RNA, 20 nt, Human
agguugcugagggaaaacuu

SEQ ID NO: 809717 - RNA, 27 nt, Human
aguuaaaaaaggaauuccaaugagcuu

SEQ ID NO: 809718 - RNA, 26 nt, Human
auaaaauguaacuauaaaugaccccc

SEQ ID NO: 809719 - RNA, 22 nt, Human
aucuucaggucucaggacuuuu

SEQ ID NO: 809720 - RNA, 21 nt, Human
augauuuccuucaauuacaga

SEQ ID NO: 809721 - RNA, 20 nt, Human
augcagguccaaacagcccu

SEQ ID NO: 809722 - RNA, 22 nt, Human
auguacacuacaaugacaaaau

SEQ ID NO: 809723 - RNA, 18 nt, Human
caaaaaaagagagagaaa

SEQ ID NO: 809724 - RNA, 24 nt, Human
caaaaaccgcagaaaauaaacuuc

SEQ ID NO: 809725 - RNA, 18 nt, Human
caaaacaagaggaaccca

SEQ ID NO: 809726 - RNA, 22 nt, Human
caaaacaagaggaacccacacc

SEQ ID NO: 809727 - RNA, 23 nt, Human
caaaacaagaggaacccacaccc

SEQ ID NO: 809728 - RNA, 24 nt, Human
caaaauaaccaaaacaagaggaac

SEQ ID NO: 809729 - RNA, 26 nt, Human
caaaauaaccaaaacaagaggaaccc

SEQ ID NO: 809730 - RNA, 23 nt, Human
caacaaaaaaaaacaaaaaagca

SEQ ID NO: 809731 - RNA, 24 nt, Human
caacaaaaaaaaacaaaaaagcau

SEQ ID NO: 809732 - RNA, 24 nt, Human
caacaacaaaaaaaaacaaaaaag

SEQ ID NO: 809733 - RNA, 18 nt, Human
caaccaugcuucacaaaa

SEQ ID NO: 809734 - RNA, 18 nt, Human
caagaggaacccacaccc

SEQ ID NO: 809735 - RNA, 21 nt, Human
caagaggaacccacacccaag

SEQ ID NO: 809736 - RNA, 22 nt, Human
caagaggaacccacacccaagc

SEQ ID NO: 809737 - RNA, 25 nt, Human
cacauuucuuucccuauuucuccca

SEQ ID NO: 809738 - RNA, 19 nt, Human
caccucucccucccccuuc

SEQ ID NO: 809739 - RNA, 20 nt, Human
cagaaugcacauuucaucuc

SEQ ID NO: 809740 - RNA, 22 nt, Human
cagcauuaaaggguaggcacac

SEQ ID NO: 809741 - RNA, 20 nt, Human
caguaaaugaaauuacgugc

SEQ ID NO: 809742 - RNA, 24 nt, Human
caguuaaaaaaggaauuccaauga

SEQ ID NO: 809743 - RNA, 23 nt, Human
cauguacacuacaaugacaaaau

SEQ ID NO: 809744 - RNA, 31 nt, Human
cauguacacuacaaugacaaaauuuacauag

SEQ ID NO: 809745 - RNA, 21 nt, Human
cauucagaaugcacauuucau

SEQ ID NO: 809746 - RNA, 24 nt, Human
cauuucuuucccuauuucucccau

SEQ ID NO: 809747 - RNA, 21 nt, Human
ccacauaggauuaaaccucuc

SEQ ID NO: 809748 - RNA, 23 nt, Human
ccacuagcuaauuucaaccaugc

SEQ ID NO: 809749 - RNA, 23 nt, Human
cccaaacauuacgcaaaaaggua

SEQ ID NO: 809750 - RNA, 21 nt, Human
cccacacccaagcuaugucaa

SEQ ID NO: 809751 - RNA, 23 nt, Human
cccuuauuauaauuuuaaaagcc

SEQ ID NO: 809752 - RNA, 26 nt, Human
ccuacaaucugaaaugacacaauacu

SEQ ID NO: 809753 - RNA, 23 nt, Human
ccucacuuguuggugagaccaaa

SEQ ID NO: 809754 - RNA, 24 nt, Human
ccucugggugagcacuaauagcuu

SEQ ID NO: 809755 - RNA, 23 nt, Human
ccugaccaccuuucucagcagau

SEQ ID NO: 809756 - RNA, 22 nt, Human
ccuuauggucccgccggccgcc

SEQ ID NO: 809757 - RNA, 21 nt, Human
ccuucaauuacagaugaaaac

SEQ ID NO: 809758 - RNA, 21 nt, Human
cggccgccgcacagagggaaa

SEQ ID NO: 809759 - RNA, 24 nt, Human
cucucugaacaauaaacucuacaa

SEQ ID NO: 809760 - RNA, 22 nt, Human
cugaaaucaaucuaaccaaccc

SEQ ID NO: 809761 - RNA, 23 nt, Human
cuucucaagcaacagaauaaaca

SEQ ID NO: 809762 - RNA, 24 nt, Human
cuugcaaaaaccgcagaaaauaaa

SEQ ID NO: 809763 - RNA, 25 nt, Human
cuuucagguucacagucuuuaaaua

SEQ ID NO: 809764 - RNA, 19 nt, Human
cuuucccuauuucucccau

SEQ ID NO: 809765 - RNA, 18 nt, Human
gaguguguaacaaaggag

SEQ ID NO: 809766 - RNA, 18 nt, Human
gcagguccaaacagcccu

SEQ ID NO: 809767 - RNA, 24 nt, Human
gccuaaccuuugaacacacagguu

SEQ ID NO: 809768 - RNA, 22 nt, Human
gcuaauuaucagaaaaagucaa

SEQ ID NO: 809769 - RNA, 18 nt, Human
ggaauuuuuauugcaacu

SEQ ID NO: 809770 - RNA, 22 nt, Human
ggaugccaaaaacagaaaaaaa

SEQ ID NO: 809771 - RNA, 19 nt, Human
ggcauuccuucauaagcuu

SEQ ID NO: 809772 - RNA, 18 nt, Human
ggcuauuuuauauugcag

SEQ ID NO: 809773 - RNA, 18 nt, Human
ggcuuugcuuauucuugc

SEQ ID NO: 809774 - RNA, 21 nt, Human
guuaccuugggguuuuuuucu

SEQ ID NO: 809775 - RNA, 24 nt, Human
guugaacuuuuagggccagauuuu

SEQ ID NO: 809776 - RNA, 26 nt, Human
uaaaaaaaaaacccaacaccucuccc

SEQ ID NO: 809777 - RNA, 21 nt, Human
uaaaaugcuauugaacccaaa

SEQ ID NO: 809778 - RNA, 25 nt, Human
uaaauaaaaacuuaaaaaaaaaacc

SEQ ID NO: 809779 - RNA, 24 nt, Human
uaaccaaaacaagaggaacccaca

SEQ ID NO: 809780 - RNA, 23 nt, Human
uaagaaaaaacaacaacaacaaa

SEQ ID NO: 809781 - RNA, 24 nt, Human
uaagauggcuuuccaauuugcagu

SEQ ID NO: 809782 - RNA, 24 nt, Human
uaagcccuuauggucccgccggcc

SEQ ID NO: 809783 - RNA, 20 nt, Human
uaagcuuagcccuuugcuuu

SEQ ID NO: 809784 - RNA, 23 nt, Human
uaauugcuccaaaguuuccaggc

SEQ ID NO: 809785 - RNA, 20 nt, Human
uacaaucuucaggucucagg

SEQ ID NO: 809786 - RNA, 21 nt, Human
uacacaaaauaaccaaaacaa

SEQ ID NO: 809787 - RNA, 23 nt, Human
uacacaaaauaaccaaaacaaga

SEQ ID NO: 809788 - RNA, 20 nt, Human
uagcacaucaauucuguaaa

SEQ ID NO: 809789 - RNA, 23 nt, Human
uaggaugccaaaaacagaaaaaa

SEQ ID NO: 809790 - RNA, 25 nt, Human
uaggcacaccauucuucugcugcuc

SEQ ID NO: 809791 - RNA, 26 nt, Human
uauaaaauguaacuauaaaugaccca

SEQ ID NO: 809792 - RNA, 18 nt, Human
uaucuguucucugugagg

SEQ ID NO: 809793 - RNA, 18 nt, Human
ucaaaugaaauuacagca

SEQ ID NO: 809794 - RNA, 19 nt, Human
ucaaaugaaauuacagcaa

SEQ ID NO: 809795 - RNA, 23 nt, Human
ucagcaaacuuucuaugauuucc

SEQ ID NO: 809796 - RNA, 18 nt, Human
ucagcagauuagaauaua

SEQ ID NO: 809797 - RNA, 18 nt, Human
uccaaacagcccuucaag

SEQ ID NO: 809798 - RNA, 19 nt, Human
uccccggccaccgccgccc

SEQ ID NO: 809799 - RNA, 21 nt, Human
uccugggcuacugaauauccc

SEQ ID NO: 809800 - RNA, 23 nt, Human
ucggguuaccuugggguuuuuuu

SEQ ID NO: 809801 - RNA, 26 nt, Human
ucugagaaaguuuagaguuugguuug

SEQ ID NO: 809802 - RNA, 20 nt, Human
ugaaaaauuaaauuccaugg

SEQ ID NO: 809803 - RNA, 21 nt, Human
ugaaaucaaucuaaccaaccc

SEQ ID NO: 809804 - RNA, 19 nt, Human
ugaaauuacagcaaaggua

SEQ ID NO: 809805 - RNA, 19 nt, Human
ugaacccaaacuguuuuuu

SEQ ID NO: 809806 - RNA, 22 nt, Human
ugaacugugugcuaaacaacca

SEQ ID NO: 809807 - RNA, 23 nt, Human
ugacccaauaauuaugucaguga

SEQ ID NO: 809808 - RNA, 23 nt, Human
ugagguaacucaauucucuuuug

SEQ ID NO: 809809 - RNA, 22 nt, Human
ugauaugcauccuaaaucauaa

SEQ ID NO: 809810 - RNA, 19 nt, Human
ugauugaauuguuagaacu

SEQ ID NO: 809811 - RNA, 18 nt, Human
ugccaaaaacagaaaaaa

SEQ ID NO: 809812 - RNA, 19 nt, Human
ugccaaaaacagaaaaaaa

SEQ ID NO: 809813 - RNA, 22 nt, Human
ugccaaaaacagaaaaaaauuc

SEQ ID NO: 809814 - RNA, 22 nt, Human
ugcuaaacaaccaugaauauca

SEQ ID NO: 809815 - RNA, 19 nt, Human
ugcuccaaaguuuccaggc

SEQ ID NO: 809816 - RNA, 20 nt, Human
uggagggggguuaaauauau

SEQ ID NO: 809817 - RNA, 23 nt, Human
uggaucaguuaaaaaaggaauuc

SEQ ID NO: 809818 - RNA, 20 nt, Human
ugugaauaauuuuguauaau

SEQ ID NO: 809819 - RNA, 20 nt, Human
uuaacuccccggccaccgcc

SEQ ID NO: 809820 - RNA, 19 nt, Human
uuaauagugagaagaaaau

SEQ ID NO: 809821 - RNA, 22 nt, Human
uuagcacaucaauucuguaaaa

SEQ ID NO: 809822 - RNA, 19 nt, Human
uucauuaauguggacacug

SEQ ID NO: 809823 - RNA, 19 nt, Human
uuccaccaccuuccccucu

SEQ ID NO: 809824 - RNA, 25 nt, Human
uucucaagcaacagaauaaacaguu

SEQ ID NO: 809825 - RNA, 18 nt, Human
uucuucuuaguuuuuucu

SEQ ID NO: 809826 - RNA, 22 nt, Human
uuggaaauaucuggaccucccc

SEQ ID NO: 809827 - RNA, 18 nt, Human
uuuaaaagcccaucucag

SEQ ID NO: 809828 - RNA, 24 nt, Human
uuuacacugaaacuccaauaaugu

SEQ ID NO: 809829 - RNA, 21 nt, Human
uuugcuaaaaugaggcauccu

SEQ ID NO: 809830 - RNA, 22 nt, Human
aaaaaucaaucauaggaggaaa

SEQ ID NO: 809831 - RNA, 19 nt, Human
aaaaauggacaacagagga

SEQ ID NO: 809832 - RNA, 21 nt, Human
aaacaucuggugauaaaaaug

SEQ ID NO: 809833 - RNA, 19 nt, Human
aacaauacaaauaaaauau

SEQ ID NO: 809834 - RNA, 22 nt, Human
aacauaaauaacacugucaaac

SEQ ID NO: 809835 - RNA, 19 nt, Human
aacuagauuguguugcuau

SEQ ID NO: 809836 - RNA, 23 nt, Human
aagaagccagaauauuuauuugc

SEQ ID NO: 809837 - RNA, 18 nt, Human
aagagcgggaaagggagg

SEQ ID NO: 809838 - RNA, 20 nt, Human
aaggagaacuuaacuuaggg

SEQ ID NO: 809839 - RNA, 21 nt, Human
aaggaggccugggacgcggug

SEQ ID NO: 809840 - RNA, 21 nt, Human
aagggagggggaguggcagag

SEQ ID NO: 809841 - RNA, 19 nt, Human
aaguuuggaaauuguuugc

SEQ ID NO: 809842 - RNA, 18 nt, Human
aaucauaggaggaaaaga

SEQ ID NO: 809843 - RNA, 25 nt, Human
acaacaauacaaauaaaauauuuuu

SEQ ID NO: 809844 - RNA, 22 nt, Human
acauagcuaggacacuuguuag

SEQ ID NO: 809845 - RNA, 24 nt, Human
aggaaggaauacagcuagcaagaa

SEQ ID NO: 809846 - RNA, 22 nt, Human
aggcgacggcuguggcaggagc

SEQ ID NO: 809847 - RNA, 19 nt, Human
agggaggaaaaggggcuga

SEQ ID NO: 809848 - RNA, 21 nt, Human
caacagaggaccaaugcuccu

SEQ ID NO: 809849 - RNA, 21 nt, Human
caagcaagauguggccaaaac

SEQ ID NO: 809850 - RNA, 20 nt, Human
cacauaaaagccaaacugag

SEQ ID NO: 809851 - RNA, 18 nt, Human
cagagggagggaaggagg

SEQ ID NO: 809852 - RNA, 19 nt, Human
caggaaauguuaugaucac

SEQ ID NO: 809853 - RNA, 22 nt, Human
caucagcaagcaagauguggcc

SEQ ID NO: 809854 - RNA, 23 nt, Human
caucagcaagcaagauguggcca

SEQ ID NO: 809855 - RNA, 23 nt, Human
ccaugccaagcagaaaacucaua

SEQ ID NO: 809856 - RNA, 20 nt, Human
cccaugauauaaaguaaagu

SEQ ID NO: 809857 - RNA, 22 nt, Human
ccugcuucguauccaggcucuc

SEQ ID NO: 809858 - RNA, 21 nt, Human
cgcacagcugaauggccucca

SEQ ID NO: 809859 - RNA, 22 nt, Human
cgccgaggcugaggcgcggggc

SEQ ID NO: 809860 - RNA, 23 nt, Human
cucucaguacccuaaaauaaacu

SEQ ID NO: 809861 - RNA, 20 nt, Human
cugaauggccuccaggcuga

SEQ ID NO: 809862 - RNA, 24 nt, Human
gaagugcugacaauucuaggcuuc

SEQ ID NO: 809863 - RNA, 22 nt, Human
gagccgccgcgaaggcgacggc

SEQ ID NO: 809864 - RNA, 22 nt, Human
gaggaaaaggggcugaguaaga

SEQ ID NO: 809865 - RNA, 23 nt, Human
gaguggcagagggagggaaggag

SEQ ID NO: 809866 - RNA, 19 nt, Human
gauacacaacuauuugagg

SEQ ID NO: 809867 - RNA, 18 nt, Human
gcagagggagggaaggag

SEQ ID NO: 809868 - RNA, 20 nt, Human
gcaucuaggcaauaaagugu

SEQ ID NO: 809869 - RNA, 23 nt, Human
ggaaaacacuaaaaugguucuga

SEQ ID NO: 809870 - RNA, 21 nt, Human
ggcaauaaagugucaaaagga

SEQ ID NO: 809871 - RNA, 22 nt, Human
ggcuguugagggcaugauccag

SEQ ID NO: 809872 - RNA, 18 nt, Human
gggaaagggagggggagu

SEQ ID NO: 809873 - RNA, 18 nt, Human
gggaaagggagggggagu

SEQ ID NO: 809874 - RNA, 18 nt, Human
gggagggaaggaggccug

SEQ ID NO: 809875 - RNA, 19 nt, Human
gggagggaaggaggccugg

SEQ ID NO: 809876 - RNA, 18 nt, Human
ggggaguggcagagggag

SEQ ID NO: 809877 - RNA, 18 nt, Human
guggggcuguugagggca

SEQ ID NO: 809878 - RNA, 19 nt, Human
uaaaauagguauuuuggau

SEQ ID NO: 809879 - RNA, 23 nt, Human
uaaacaccauuuauaagccauua

SEQ ID NO: 809880 - RNA, 18 nt, Human
uaaauaacauagcuagga

SEQ ID NO: 809881 - RNA, 25 nt, Human
uaauauaaauaacauaaauaacacu

SEQ ID NO: 809882 - RNA, 25 nt, Human
uagauuaaaaugaaugcauauuuaa

SEQ ID NO: 809883 - RNA, 27 nt, Human
uaggaaggaauacagcuagccgaccuc

SEQ ID NO: 809884 - RNA, 21 nt, Human
uaugaucacuuucacccauga

SEQ ID NO: 809885 - RNA, 18 nt, Human
uaugugucuguaguauau

SEQ ID NO: 809886 - RNA, 21 nt, Human
ucaaaucuaaauaacauagcu

SEQ ID NO: 809887 - RNA, 24 nt, Human
ucagaaacagacuuauuucagagg

SEQ ID NO: 809888 - RNA, 22 nt, Human
ucaguagauuaaaaugaaugca

SEQ ID NO: 809889 - RNA, 20 nt, Human
uccucaucagcaagcaagau

SEQ ID NO: 809890 - RNA, 18 nt, Human
ucugaagcccgccugcuu

SEQ ID NO: 809891 - RNA, 19 nt, Human
ugacacaaugaaaauggaa

SEQ ID NO: 809892 - RNA, 21 nt, Human
ugacacaaugaaaauggaagc

SEQ ID NO: 809893 - RNA, 26 nt, Human
ugacacaaugaaaauggaagcacuuu

SEQ ID NO: 809894 - RNA, 18 nt, Human
ugacauguacacaguugc

SEQ ID NO: 809895 - RNA, 21 nt, Human
ugagggcaugauccaggcgcg

SEQ ID NO: 809896 - RNA, 20 nt, Human
ugccacugucuugugauuug

SEQ ID NO: 809897 - RNA, 22 nt, Human
ugcuccuaagggaggaaaaggg

SEQ ID NO: 809898 - RNA, 24 nt, Human
uggcagagggagggaaggaggccu

SEQ ID NO: 809899 - RNA, 22 nt, Human
uggcaggagcuccgcggagugu

SEQ ID NO: 809900 - RNA, 20 nt, Human
ugggacgcggugaugcggcg

SEQ ID NO: 809901 - RNA, 19 nt, Human
uggugacaguggcaugugc

SEQ ID NO: 809902 - RNA, 24 nt, Human
ugucaaaaggagaacuuaacuuag

SEQ ID NO: 809903 - RNA, 19 nt, Human
uguucccgucccggucgca

SEQ ID NO: 809904 - RNA, 22 nt, Human
uguugaagaaauucacauucuc

SEQ ID NO: 809905 - RNA, 22 nt, Human
uucauugggaauauacauuuuu

SEQ ID NO: 809906 - RNA, 19 nt, Human
uuugagguucaggaaaugu

SEQ ID NO: 809907 - RNA, 19 nt, Human
uuuuaagaaggaauagcaa

SEQ ID NO: 809908 - RNA, 24 nt, Human
aaaaaacagcaacaaaaaacuuau

SEQ ID NO: 809909 - RNA, 26 nt, Human
aaaaaagaaaaaacagcaacaaaaaa

SEQ ID NO: 809910 - RNA, 22 nt, Human
aaaaacgaaagcaacuaaagaa

SEQ ID NO: 809911 - RNA, 24 nt, Human
aaaaagaaaaaacagcaacaaaaa

SEQ ID NO: 809912 - RNA, 25 nt, Human
aaaaagaaaaaacagcaacaaaaaa

SEQ ID NO: 809913 - RNA, 24 nt, Human
aaaaaggaauccuuccaaaacgga

SEQ ID NO: 809914 - RNA, 18 nt, Human
aaaaggaaaaauacugau

SEQ ID NO: 809915 - RNA, 20 nt, Human
aaauauccaauccuggaauc

SEQ ID NO: 809916 - RNA, 23 nt, Human
aaccaccacaauuucaucaauga

SEQ ID NO: 809917 - RNA, 20 nt, Human
aagaaaaaacagcaacaaaa

SEQ ID NO: 809918 - RNA, 23 nt, Human
aagaaaagucauucuuacaacua

SEQ ID NO: 809919 - RNA, 26 nt, Human
aagaagagguggaacuuaccccagaa

SEQ ID NO: 809920 - RNA, 18 nt, Human
aaucaccucccugaucug

SEQ ID NO: 809921 - RNA, 22 nt, Human
aaucagaauacccaucaaagug

SEQ ID NO: 809922 - RNA, 23 nt, Human
aauggacuuccaacagggauauc

SEQ ID NO: 809923 - RNA, 19 nt, Human
acaaaacauaaaaaagaaa

SEQ ID NO: 809924 - RNA, 18 nt, Human
acaaaauuaacaauacag

SEQ ID NO: 809925 - RNA, 23 nt, Human
acagaaaaaggaauccuuccaaa

SEQ ID NO: 809926 - RNA, 25 nt, Human
accccagaauucagacagcaugcua

SEQ ID NO: 809927 - RNA, 24 nt, Human
agacaguaccugguuaaaagcuca

SEQ ID NO: 809928 - RNA, 18 nt, Human
agcaaucagaauacccau

SEQ ID NO: 809929 - RNA, 18 nt, Human
agcacaauucuggcugca

SEQ ID NO: 809930 - RNA, 22 nt, Human
agcacuuucauaagaauucaua

SEQ ID NO: 809931 - RNA, 23 nt, Human
aggaaaaauacugauucaaagaa

SEQ ID NO: 809932 - RNA, 24 nt, Human
aggaaaaauacugauucaaagaaa

SEQ ID NO: 809933 - RNA, 19 nt, Human
aggcaucccagucuucucu

SEQ ID NO: 809934 - RNA, 18 nt, Human
aguccauaacacugaaca

SEQ ID NO: 809935 - RNA, 27 nt, Human
auaaaaaagaaaaaacagcaacaaaaa

SEQ ID NO: 809936 - RNA, 20 nt, Human
augcauucuugcaaaagaaa

SEQ ID NO: 809937 - RNA, 22 nt, Human
auuucaucaucucucucuucuc

SEQ ID NO: 809938 - RNA, 26 nt, Human
caaaacauaaaaaagaaaaaacagca

SEQ ID NO: 809939 - RNA, 20 nt, Human
caaaacggagguucuugggc

SEQ ID NO: 809940 - RNA, 22 nt, Human
caaaagaugacuguuguuagac

SEQ ID NO: 809941 - RNA, 23 nt, Human
caacaauguuuacaaaaugccaa

SEQ ID NO: 809942 - RNA, 23 nt, Human
caagaugagugagacugaugcca

SEQ ID NO: 809943 - RNA, 25 nt, Human
cacaguacacagacugaugcucagg

SEQ ID NO: 809944 - RNA, 18 nt, Human
caccacaauuucaucaau

SEQ ID NO: 809945 - RNA, 20 nt, Human
caccgcuuucuccucuucca

SEQ ID NO: 809946 - RNA, 20 nt, Human
caccggggcaccaagaugag

SEQ ID NO: 809947 - RNA, 19 nt, Human
cacuccaucuuuccagucc

SEQ ID NO: 809948 - RNA, 25 nt, Human
cacugcagaugucacugacccuguu

SEQ ID NO: 809949 - RNA, 22 nt, Human
cacuuaggaguuauaaccgucc

SEQ ID NO: 809950 - RNA, 26 nt, Human
cagauauaacaaguacaacuugaaug

SEQ ID NO: 809951 - RNA, 20 nt, Human
cauaaaaaagaaaaaacagc

SEQ ID NO: 809952 - RNA, 22 nt, Human
caucauaaaaaacgaaagcaac

SEQ ID NO: 809953 - RNA, 18 nt, Human
caugccaacuuugaaucc

SEQ ID NO: 809954 - RNA, 19 nt, Human
cauuucaaauuuuguguca

SEQ ID NO: 809955 - RNA, 21 nt, Human
cauuucaucaucucucucuuc

SEQ ID NO: 809956 - RNA, 21 nt, Human
ccaaaaguucuuacucugccc

SEQ ID NO: 809957 - RNA, 22 nt, Human
ccaacccugaaaaaaaccuuug

SEQ ID NO: 809958 - RNA, 23 nt, Human
ccccagaauucagacagcaugcu

SEQ ID NO: 809959 - RNA, 26 nt, Human
ccccccaaccauaacugcauacaacu

SEQ ID NO: 809960 - RNA, 21 nt, Human
ccccccaccccccagacucaa

SEQ ID NO: 809961 - RNA, 22 nt, Human
ccccccaccccccagacucaaa

SEQ ID NO: 809962 - RNA, 23 nt, Human
ccccccaccccccagacucaaaa

SEQ ID NO: 809963 - RNA, 19 nt, Human
ccccccagacucaaaaaga

SEQ ID NO: 809964 - RNA, 19 nt, Human
ccccccuuccccccacccc

SEQ ID NO: 809965 - RNA, 22 nt, Human
ccccccuuccccccacccccca

SEQ ID NO: 809966 - RNA, 24 nt, Human
ccccccuuccccccaccccccaga

SEQ ID NO: 809967 - RNA, 25 nt, Human
ccccccuuccccccaccccccagac

SEQ ID NO: 809968 - RNA, 22 nt, Human
cccccuuccccccaccccccag

SEQ ID NO: 809969 - RNA, 18 nt, Human
ccccucgucuuuuccucc

SEQ ID NO: 809970 - RNA, 19 nt, Human
ccccuuccccccacccccc

SEQ ID NO: 809971 - RNA, 19 nt, Human
cccuuucuuccuucugauc

SEQ ID NO: 809972 - RNA, 26 nt, Human
ccgaaacuuuaagucacuuccuggua

SEQ ID NO: 809973 - RNA, 18 nt, Human
ccuccagaaagacacuca

SEQ ID NO: 809974 - RNA, 20 nt, Human
ccucuccgcgacggugagga

SEQ ID NO: 809975 - RNA, 21 nt, Human
ccugaaaggcaucccagucuu

SEQ ID NO: 809976 - RNA, 25 nt, Human
cggggcaccaagaugagugagacug

SEQ ID NO: 809977 - RNA, 24 nt, Human
cgucccuuucuuccuucugaucuu

SEQ ID NO: 809978 - RNA, 22 nt, Human
cgugcaaaaggaaaaauacuga

SEQ ID NO: 809979 - RNA, 19 nt, Human
cucacaaacauucccccca

SEQ ID NO: 809980 - RNA, 20 nt, Human
cucucucuucuccauccucc

SEQ ID NO: 809981 - RNA, 24 nt, Human
cugaagcccuucuacuuucacugg

SEQ ID NO: 809982 - RNA, 22 nt, Human
cugacaauuaugacaagcaguu

SEQ ID NO: 809983 - RNA, 22 nt, Human
cugacccuguuuuaccuugaau

SEQ ID NO: 809984 - RNA, 20 nt, Human
cugccaccgcuuucuccucu

SEQ ID NO: 809985 - RNA, 19 nt, Human
cuuaccccagaauucagac

SEQ ID NO: 809986 - RNA, 21 nt, Human
gaaagcaacuaaagaagaggu

SEQ ID NO: 809987 - RNA, 22 nt, Human
gaagccccccuuccccccaccc

SEQ ID NO: 809988 - RNA, 18 nt, Human
gaauccccucgucuuuuc

SEQ ID NO: 809989 - RNA, 23 nt, Human
gagguucuugggcaauuacuuug

SEQ ID NO: 809990 - RNA, 19 nt, Human
gaguuuuggagacuucuca

SEQ ID NO: 809991 - RNA, 21 nt, Human
gcaaaguauucuacagaaaaa

SEQ ID NO: 809992 - RNA, 24 nt, Human
gcaguugcuuuuuuaacauuuucc

SEQ ID NO: 809993 - RNA, 21 nt, Human
gcgacggugaggacacaguac

SEQ ID NO: 809994 - RNA, 20 nt, Human
gcucuuguaaacaccggggc

SEQ ID NO: 809995 - RNA, 24 nt, Human
ggaaauacgggccuggagcucggg

SEQ ID NO: 809996 - RNA, 18 nt, Human
ggauccuucaaccugaaa

SEQ ID NO: 809997 - RNA, 19 nt, Human
ggcuucuugagcaguuggu

SEQ ID NO: 809998 - RNA, 26 nt, Human
gguaacgugcccacuccccugaaagg

SEQ ID NO: 809999 - RNA, 24 nt, Human
gugaacagaaccaaaagaugacug

SEQ ID NO: 810000 - RNA, 23 nt, Human
gugcuuugaauaaaacaugagcu

SEQ ID NO: 810001 - RNA, 25 nt, Human
uaacaaguacaacuugaaaggguuc

SEQ ID NO: 810002 - RNA, 23 nt, Human
uaacaauacagauaacaguccua

SEQ ID NO: 810003 - RNA, 21 nt, Human
uaacuuccagggcuccaaacu

SEQ ID NO: 810004 - RNA, 21 nt, Human
uaagauaggucugccaauuga

SEQ ID NO: 810005 - RNA, 23 nt, Human
uaaugaagccccccuucccccca

SEQ ID NO: 810006 - RNA, 19 nt, Human
uaauuaaugaagccccccu

SEQ ID NO: 810007 - RNA, 20 nt, Human
uaauuaaugaagccccccuu

SEQ ID NO: 810008 - RNA, 20 nt, Human
uaauuuugguuuuuucuucc

SEQ ID NO: 810009 - RNA, 24 nt, Human
uacaaauucugaacaaaaggacau

SEQ ID NO: 810010 - RNA, 18 nt, Human
uacacuuaggaucuucuu

SEQ ID NO: 810011 - RNA, 23 nt, Human
uacaugaaagagaauucaacaau

SEQ ID NO: 810012 - RNA, 20 nt, Human
uaccccagaauucagacagc

SEQ ID NO: 810013 - RNA, 25 nt, Human
uaccuuuugccuuagaaaugcauuc

SEQ ID NO: 810014 - RNA, 22 nt, Human
uagccaacccugaaaaaaaccu

SEQ ID NO: 810015 - RNA, 22 nt, Human
ucaaaaagauuuacaaagauaa

SEQ ID NO: 810016 - RNA, 22 nt, Human
ucaaaauacacuaccuaauuua

SEQ ID NO: 810017 - RNA, 20 nt, Human
ucagcuuucagagauaauuu

SEQ ID NO: 810018 - RNA, 21 nt, Human
uccaucuuuccaguccauaac

SEQ ID NO: 810019 - RNA, 24 nt, Human
uccccccaccccccagacucaaaa

SEQ ID NO: 810020 - RNA, 23 nt, Human
uccgugcucucugcgaaccccuc

SEQ ID NO: 810021 - RNA, 24 nt, Human
uccucauugucuucuucuacgucc

SEQ ID NO: 810022 - RNA, 18 nt, Human
uccucugacaccaucugg

SEQ ID NO: 810023 - RNA, 19 nt, Human
uccuuggugucagcuuuca

SEQ ID NO: 810024 - RNA, 22 nt, Human
ucgcucucuagccaacccugaa

SEQ ID NO: 810025 - RNA, 21 nt, Human
ucucucucuucuccauccucc

SEQ ID NO: 810026 - RNA, 27 nt, Human
ucuggcugcaauaguuuccuccagaaa

SEQ ID NO: 810027 - RNA, 19 nt, Human
ucuguaauaacuuccaggg

SEQ ID NO: 810028 - RNA, 18 nt, Human
ucuucucugaaaagacug

SEQ ID NO: 810029 - RNA, 24 nt, Human
ucuucuucuacgucccuuucuucc

SEQ ID NO: 810030 - RNA, 25 nt, Human
ugaaaaagaaacaguguacaugaaa

SEQ ID NO: 810031 - RNA, 25 nt, Human
ugaaaagacugugggacauccaggu

SEQ ID NO: 810032 - RNA, 23 nt, Human
ugaacaaaacauaaaaaagaaaa

SEQ ID NO: 810033 - RNA, 24 nt, Human
ugaagccccccuuccccccacccc

SEQ ID NO: 810034 - RNA, 30 nt, Human
ugaauaaauauccaauccuggaaucagaaa

SEQ ID NO: 810035 - RNA, 21 nt, Human
ugacaagcaguuaggcaauau

SEQ ID NO: 810036 - RNA, 22 nt, Human
ugacuuaggagcagcuugagcc

SEQ ID NO: 810037 - RNA, 25 nt, Human
ugacuuaggagcagcuugagcuuua

SEQ ID NO: 810038 - RNA, 22 nt, Human
ugagcaguugguaccauccaag

SEQ ID NO: 810039 - RNA, 19 nt, Human
ugcaaaagaaacacuacca

SEQ ID NO: 810040 - RNA, 22 nt, Human
ugcaauaguuuccuccagaaag

SEQ ID NO: 810041 - RNA, 24 nt, Human
ugcucaggauccacgccuucuaau

SEQ ID NO: 810042 - RNA, 20 nt, Human
uggaaauacgggccuggagc

SEQ ID NO: 810043 - RNA, 20 nt, Human
uggaggauggaguuuguggc

SEQ ID NO: 810044 - RNA, 18 nt, Human
uggcacaaaauuaacaau

SEQ ID NO: 810045 - RNA, 30 nt, Human
uguccaguaggcagguggaaauacgggccc

SEQ ID NO: 810046 - RNA, 26 nt, Human
uuagaaaugcauucuugcaaaagaaa

SEQ ID NO: 810047 - RNA, 27 nt, Human
uuaggaucuucuuccucauugucuucu

SEQ ID NO: 810048 - RNA, 20 nt, Human
uuccccccaccccccagacu

SEQ ID NO: 810049 - RNA, 24 nt, Human
uucuacgucccuuucuuccuucug

SEQ ID NO: 810050 - RNA, 18 nt, Human
uugaauguacaaauucug

SEQ ID NO: 810051 - RNA, 26 nt, Human
uuucaucaucucucucuucuccaucc

SEQ ID NO: 810052 - RNA, 23 nt, Human
uuuugaguuuuggagacuucuca

SEQ ID NO: 810053 - RNA, 19 nt, Human
acauaccauggacauaaaa

SEQ ID NO: 810054 - RNA, 18 nt, Human
accauggcaacugcaccu

SEQ ID NO: 810055 - RNA, 20 nt, Human
cacaaacaaggaagcgcagc

SEQ ID NO: 810056 - RNA, 18 nt, Human
cacagagacagcuguguu

SEQ ID NO: 810057 - RNA, 19 nt, Human
caccauggcaacugcaccu

SEQ ID NO: 810058 - RNA, 21 nt, Human
caccauggcaacugcaccuca

SEQ ID NO: 810059 - RNA, 22 nt, Human
caccggaaauaagaugcagagc

SEQ ID NO: 810060 - RNA, 20 nt, Human
ccauggcaacugcaccucac

SEQ ID NO: 810061 - RNA, 24 nt, Human
cgccaccggaaauaagaugcagag

SEQ ID NO: 810062 - RNA, 23 nt, Human
cucacaaacaaggaagcgcagcc

SEQ ID NO: 810063 - RNA, 23 nt, Human
cuggacagaucucggccuuucuc

SEQ ID NO: 810064 - RNA, 20 nt, Human
gcaacugcaccucaccgcca

SEQ ID NO: 810065 - RNA, 19 nt, Human
gcagagcccuucuccaaac

SEQ ID NO: 810066 - RNA, 20 nt, Human
gcagagcccuucuccaaacg

SEQ ID NO: 810067 - RNA, 20 nt, Human
gccagaguagugagagaagg

SEQ ID NO: 810068 - RNA, 27 nt, Human
uaaauugaauagauuauuauuuaggua

SEQ ID NO: 810069 - RNA, 24 nt, Human
uacauaccauggacauaaaaugaa

SEQ ID NO: 810070 - RNA, 18 nt, Human
uagcucacaaacaaggaa

SEQ ID NO: 810071 - RNA, 23 nt, Human
uagcucacaaacaaggaagcgca

SEQ ID NO: 810072 - RNA, 18 nt, Human
ugagagaaggugcucugu

SEQ ID NO: 810073 - RNA, 22 nt, Human
ugauccggagcgcacagagaca

SEQ ID NO: 810074 - RNA, 24 nt, Human
uggacauaaaaugaaaaugcauau

SEQ ID NO: 810075 - RNA, 24 nt, Human
aaaaaaaacaagaaacaagacaag

SEQ ID NO: 810076 - RNA, 26 nt, Human
aaaaaaaaggaaggaaagaaacaaaa

SEQ ID NO: 810077 - RNA, 28 nt, Human
aaaaaaacaagaaacaagacaagaaaaa

SEQ ID NO: 810078 - RNA, 20 nt, Human
aaaaacaagaaacaagacaa

SEQ ID NO: 810079 - RNA, 24 nt, Human
aaaaaggaaagaaaggaaaaaaga

SEQ ID NO: 810080 - RNA, 23 nt, Human
aaaaauagugaagcucauuacaa

SEQ ID NO: 810081 - RNA, 21 nt, Human
aaaacacagcagcaugaaaca

SEQ ID NO: 810082 - RNA, 20 nt, Human
aaaaguucuacuggagaaug

SEQ ID NO: 810083 - RNA, 27 nt, Human
aaacaaacacccagaucacauacacuc

SEQ ID NO: 810084 - RNA, 28 nt, Human
aaacaaacacccagaucacauacacucc

SEQ ID NO: 810085 - RNA, 18 nt, Human
aaacaagaaacaagacaa

SEQ ID NO: 810086 - RNA, 22 nt, Human
aaacauauuuuucagucacaag

SEQ ID NO: 810087 - RNA, 19 nt, Human
aaaggcauaaaugagaaca

SEQ ID NO: 810088 - RNA, 20 nt, Human
aaccagauucugcuaaguuu

SEQ ID NO: 810089 - RNA, 21 nt, Human
aaggugcaauuuuaaaugaaa

SEQ ID NO: 810090 - RNA, 22 nt, Human
aaggugcaauuuuaaaugaaau

SEQ ID NO: 810091 - RNA, 23 nt, Human
aaguucuacuggagaaugaaaaa

SEQ ID NO: 810092 - RNA, 26 nt, Human
aauaauaacagagauaaacaaacacc

SEQ ID NO: 810093 - RNA, 20 nt, Human
aauuaagaaaagaaacuaca

SEQ ID NO: 810094 - RNA, 20 nt, Human
aauuucuguugugugcaaau

SEQ ID NO: 810095 - RNA, 22 nt, Human
acaagacaagaaaaaggaaaga

SEQ ID NO: 810096 - RNA, 23 nt, Human
acacacacacacgccaacauaca

SEQ ID NO: 810097 - RNA, 25 nt, Human
acacacacgccaacauacaugcaca

SEQ ID NO: 810098 - RNA, 33 nt, Human
acacacacgccaacauacaugcacacacauagu

SEQ ID NO: 810099 - RNA, 25 nt, Human
acacacaugcaaacacacauuuacu

SEQ ID NO: 810100 - RNA, 23 nt, Human
acagaaaauugcaaauguacaau

SEQ ID NO: 810101 - RNA, 25 nt, Human
acauacaugcacacacauacaggga

SEQ ID NO: 810102 - RNA, 19 nt, Human
acugauggaggaagaaugu

SEQ ID NO: 810103 - RNA, 26 nt, Human
acuuugaacaucuauuuuggaguucu

SEQ ID NO: 810104 - RNA, 22 nt, Human
agaaaaaaaaggaaggaaagaa

SEQ ID NO: 810105 - RNA, 24 nt, Human
agaaaagaaacuacaagaaaaaaa

SEQ ID NO: 810106 - RNA, 21 nt, Human
agaaaggaaaaaagaaaaaaa

SEQ ID NO: 810107 - RNA, 23 nt, Human
agacacaugacuguuuacaguac

SEQ ID NO: 810108 - RNA, 25 nt, Human
agacagaagggaagcacaauacauu

SEQ ID NO: 810109 - RNA, 23 nt, Human
agaguaccuuaauuuuuuacuaa

SEQ ID NO: 810110 - RNA, 23 nt, Human
agccucccgggcggccgcgggcg

SEQ ID NO: 810111 - RNA, 23 nt, Human
agcgguccccgaagccgcgggcg

SEQ ID NO: 810112 - RNA, 23 nt, Human
agcugcccaaaggguccagccuc

SEQ ID NO: 810113 - RNA, 21 nt, Human
aggaaaaaagaaaaaaaagga

SEQ ID NO: 810114 - RNA, 21 nt, Human
aggcggagcgggaagcugggc

SEQ ID NO: 810115 - RNA, 25 nt, Human
auaugcaugcacacacacacacggu

SEQ ID NO: 810116 - RNA, 21 nt, Human
auaugcaugcacacacacagu

SEQ ID NO: 810117 - RNA, 26 nt, Human
aucacauacacuccccaacacacaca

SEQ ID NO: 810118 - RNA, 20 nt, Human
auccauuucugaaaauaauu

SEQ ID NO: 810119 - RNA, 31 nt, Human
augcacacacacacacgccaacauacaugca

SEQ ID NO: 810120 - RNA, 29 nt, Human
augcaugcacacacacacacgccaacaua

SEQ ID NO: 810121 - RNA, 19 nt, Human
caaauagaccagcuauaaa

SEQ ID NO: 810122 - RNA, 23 nt, Human
caagaaaaaaaaacaagaaacaa

SEQ ID NO: 810123 - RNA, 24 nt, Human
caagaaaaaggaaagaaaggaaaa

SEQ ID NO: 810124 - RNA, 21 nt, Human
caaugcugcaaaauugccaaa

SEQ ID NO: 810125 - RNA, 19 nt, Human
cacaaaaauaaauaaccag

SEQ ID NO: 810126 - RNA, 20 nt, Human
cacacacaugcaaacacaca

SEQ ID NO: 810127 - RNA, 31 nt, Human
cacaugcaaacacacauuuacuaauaugcag

SEQ ID NO: 810128 - RNA, 20 nt, Human
caccauggucgugcccaggc

SEQ ID NO: 810129 - RNA, 22 nt, Human
caccauguggucucagucaaau

SEQ ID NO: 810130 - RNA, 18 nt, Human
cacccagaucacauacac

SEQ ID NO: 810131 - RNA, 20 nt, Human
cagaaaauugcaaauguaca

SEQ ID NO: 810132 - RNA, 25 nt, Human
cagagauaaacaaacacccagauca

SEQ ID NO: 810133 - RNA, 21 nt, Human
cagcugcgcggggaaggcgga

SEQ ID NO: 810134 - RNA, 22 nt, Human
cauacuguuucucaucugcuga

SEQ ID NO: 810135 - RNA, 20 nt, Human
cauuuugggaaaaccaaauc

SEQ ID NO: 810136 - RNA, 20 nt, Human
ccaaaaggacugaacacaaa

SEQ ID NO: 810137 - RNA, 18 nt, Human
ccaacacacacaugcaaa

SEQ ID NO: 810138 - RNA, 22 nt, Human
ccaacacacacaugcaaacaca

SEQ ID NO: 810139 - RNA, 23 nt, Human
cccagaucacauacacuccccaa

SEQ ID NO: 810140 - RNA, 24 nt, Human
ccgaagccgcgggcgacgucccac

SEQ ID NO: 810141 - RNA, 20 nt, Human
cguuccuggccagccgccuc

SEQ ID NO: 810142 - RNA, 21 nt, Human
cugcaagaauccagaaugcaa

SEQ ID NO: 810143 - RNA, 22 nt, Human
cugcaagaauccagaaugcaag

SEQ ID NO: 810144 - RNA, 25 nt, Human
gcaugcacacacacacacgccaaca

SEQ ID NO: 810145 - RNA, 18 nt, Human
gcccaaaggguccagccu

SEQ ID NO: 810146 - RNA, 18 nt, Human
gccgcagcgguccccgaa

SEQ ID NO: 810147 - RNA, 19 nt, Human
gcggagcgggaagcugggc

SEQ ID NO: 810148 - RNA, 22 nt, Human
gcggagcgggaagcugggcuca

SEQ ID NO: 810149 - RNA, 18 nt, Human
ggaaaaccaaaucucugu

SEQ ID NO: 810150 - RNA, 22 nt, Human
ggacauaguuuccauccuuuuu

SEQ ID NO: 810151 - RNA, 20 nt, Human
ggagaaugaaaaagcuuucc

SEQ ID NO: 810152 - RNA, 21 nt, Human
guacaauagauugcagcaaaa

SEQ ID NO: 810153 - RNA, 19 nt, Human
guauauauuucucuacccu

SEQ ID NO: 810154 - RNA, 18 nt, Human
gucggcgccgggggaagg

SEQ ID NO: 810155 - RNA, 18 nt, Human
guggccgucggcgccggg

SEQ ID NO: 810156 - RNA, 24 nt, Human
guguuccaaaaggacugaacacaa

SEQ ID NO: 810157 - RNA, 23 nt, Human
uaaacaaacacccagaucacaua

SEQ ID NO: 810158 - RNA, 22 nt, Human
uaacagagauaaacaaacaccc

SEQ ID NO: 810159 - RNA, 18 nt, Human
uaacuaucugcaguaaca

SEQ ID NO: 810160 - RNA, 18 nt, Human
uaagaaaagaauccagag

SEQ ID NO: 810161 - RNA, 19 nt, Human
uaagaaaagaauccagagg

SEQ ID NO: 810162 - RNA, 24 nt, Human
uaagaaaccaaggcaaauuuacca

SEQ ID NO: 810163 - RNA, 25 nt, Human
uaagcuggaagcuacguguuccaau

SEQ ID NO: 810164 - RNA, 28 nt, Human
uacaagaaaaaaaaacaagaaacaagac

SEQ ID NO: 810165 - RNA, 25 nt, Human
uacacaaaaauaaauaaccagauuc

SEQ ID NO: 810166 - RNA, 22 nt, Human
uacaguacaugauaucugugaa

SEQ ID NO: 810167 - RNA, 24 nt, Human
uacauaauucaauaaccacacaaa

SEQ ID NO: 810168 - RNA, 20 nt, Human
uacauuguguucauuuguuc

SEQ ID NO: 810169 - RNA, 19 nt, Human
uagaacagaugauaaaaca

SEQ ID NO: 810170 - RNA, 21 nt, Human
uagaaguaaaacugaggacau

SEQ ID NO: 810171 - RNA, 21 nt, Human
uagagacagaagggaagcaca

SEQ ID NO: 810172 - RNA, 21 nt, Human
uaggaaaaaccuaaagauuag

SEQ ID NO: 810173 - RNA, 18 nt, Human
uauaggaaaaaccuaaag

SEQ ID NO: 810174 - RNA, 22 nt, Human
uauuuuggaguucuaaugaaua

SEQ ID NO: 810175 - RNA, 32 nt, Human
ucacauacacuccccaacacacacaugcagug

SEQ ID NO: 810176 - RNA, 23 nt, Human
ucauauacauuuuuugagaagcu

SEQ ID NO: 810177 - RNA, 19 nt, Human
uccagaggaaaaacaauag

SEQ ID NO: 810178 - RNA, 21 nt, Human
uccagaggaaaaacaauagac

SEQ ID NO: 810179 - RNA, 25 nt, Human
uccagccucggcccgcguuccuggc

SEQ ID NO: 810180 - RNA, 20 nt, Human
uccuugaguugucagugucu

SEQ ID NO: 810181 - RNA, 25 nt, Human
ucuucugaagagccacauucuagag

SEQ ID NO: 810182 - RNA, 22 nt, Human
ugaaaacacagcagcaugaaac

SEQ ID NO: 810183 - RNA, 23 nt, Human
ugaaaacacagcagcaugaaaca

SEQ ID NO: 810184 - RNA, 23 nt, Human
ugaaauaacaacaacauacuuaa

SEQ ID NO: 810185 - RNA, 21 nt, Human
ugaagcucauuacaauuucug

SEQ ID NO: 810186 - RNA, 20 nt, Human
ugagcaaauagaccagcuau

SEQ ID NO: 810187 - RNA, 28 nt, Human
ugcaaacacacauuuacuaauaugcaug

SEQ ID NO: 810188 - RNA, 18 nt, Human
ugcacucaaauagagaaa

SEQ ID NO: 810189 - RNA, 19 nt, Human
ugccaagaaacuaaagcuc

SEQ ID NO: 810190 - RNA, 20 nt, Human
ugccaagaaacuaaagcucu

SEQ ID NO: 810191 - RNA, 20 nt, Human
ugccaagaaacuaaagcucu

SEQ ID NO: 810192 - RNA, 18 nt, Human
uggccagccgccucugcu

SEQ ID NO: 810193 - RNA, 18 nt, Human
uggccgucggcgccgggg

SEQ ID NO: 810194 - RNA, 21 nt, Human
ugggauuauuaggauaauuau

SEQ ID NO: 810195 - RNA, 22 nt, Human
ugugugcaaauggacaaaggca

SEQ ID NO: 810196 - RNA, 24 nt, Human
uguugugugcaaauggacaaaggc

SEQ ID NO: 810197 - RNA, 24 nt, Human
uuaggaacauggccacagcuuuug

SEQ ID NO: 810198 - RNA, 21 nt, Human
uuccuggccagccgccucugc

SEQ ID NO: 810199 - RNA, 21 nt, Human
uugcugcaagaauccagaaug

SEQ ID NO: 810200 - RNA, 21 nt, Human
aaaaaaacaagaggacuugac

SEQ ID NO: 810201 - RNA, 18 nt, Human
aaaaccaaagaagcaaaa

SEQ ID NO: 810202 - RNA, 19 nt, Human
aaaaccuacuaaaagggga

SEQ ID NO: 810203 - RNA, 26 nt, Human
aaaauaggcaagaauauauaagacca

SEQ ID NO: 810204 - RNA, 22 nt, Human
aaacacgacaacaaagcugcuc

SEQ ID NO: 810205 - RNA, 27 nt, Human
aaacacgacaacaaagcugcucuaacc

SEQ ID NO: 810206 - RNA, 22 nt, Human
aaacauuaccagauaggcauga

SEQ ID NO: 810207 - RNA, 18 nt, Human
aaaccaaagaagcaaaaa

SEQ ID NO: 810208 - RNA, 27 nt, Human
aaccauauugagaggacaaacagccuc

SEQ ID NO: 810209 - RNA, 20 nt, Human
aagccacccucaaagagaaa

SEQ ID NO: 810210 - RNA, 18 nt, Human
aagggcuccggccagacc

SEQ ID NO: 810211 - RNA, 18 nt, Human
aagugaucauagcuaugg

SEQ ID NO: 810212 - RNA, 18 nt, Human
aaguggucuucacaaaag

SEQ ID NO: 810213 - RNA, 22 nt, Human
acaaagcauuucccaguauaaa

SEQ ID NO: 810214 - RNA, 23 nt, Human
acagaaaaagaauuuuucuuucc

SEQ ID NO: 810215 - RNA, 24 nt, Human
acccaagggcuccggccagaccaa

SEQ ID NO: 810216 - RNA, 20 nt, Human
acccucaaagagaaauaacc

SEQ ID NO: 810217 - RNA, 22 nt, Human
acuugguacaaagcauuuccca

SEQ ID NO: 810218 - RNA, 18 nt, Human
agacagagguuggcuaag

SEQ ID NO: 810219 - RNA, 23 nt, Human
agcaaaaauaagcuucagagggc

SEQ ID NO: 810220 - RNA, 21 nt, Human
agcacagguccccgugacaac

SEQ ID NO: 810221 - RNA, 22 nt, Human
agcuauggaugaggccucgggc

SEQ ID NO: 810222 - RNA, 19 nt, Human
aggaggaaggagcugagaa

SEQ ID NO: 810223 - RNA, 18 nt, Human
agggcaagugaucauagc

SEQ ID NO: 810224 - RNA, 22 nt, Human
agugaaauuuacacaggaggaa

SEQ ID NO: 810225 - RNA, 20 nt, Human
aucuggugucaaagucucag

SEQ ID NO: 810226 - RNA, 19 nt, Human
caaacagccuccauaaagu

SEQ ID NO: 810227 - RNA, 18 nt, Human
caaagagaaauaacccau

SEQ ID NO: 810228 - RNA, 24 nt, Human
cacaaaauaggcaagaauauauaa

SEQ ID NO: 810229 - RNA, 21 nt, Human
cacaaacagcugaaagaaucu

SEQ ID NO: 810230 - RNA, 22 nt, Human
cagagguuggcuaaggggaugg

SEQ ID NO: 810231 - RNA, 18 nt, Human
caugagguacagaaaaag

SEQ ID NO: 810232 - RNA, 20 nt, Human
cauguccuuaacuuguuuca

SEQ ID NO: 810233 - RNA, 23 nt, Human
ccacccucaaagagaaauaaccc

SEQ ID NO: 810234 - RNA, 21 nt, Human
ccagauaggcaugagguacag

SEQ ID NO: 810235 - RNA, 20 nt, Human
ccaggucuuacucaccagaa

SEQ ID NO: 810236 - RNA, 20 nt, Human
ccccaggucuuacucaccag

SEQ ID NO: 810237 - RNA, 22 nt, Human
cccucaaagagaaauaacccau

SEQ ID NO: 810238 - RNA, 22 nt, Human
ccuauaguuggccuugagaggg

SEQ ID NO: 810239 - RNA, 18 nt, Human
ccucccugacaacccuca

SEQ ID NO: 810240 - RNA, 19 nt, Human
ccucccugacaacccucau

SEQ ID NO: 810241 - RNA, 18 nt, Human
cuccaggaaaguuggggc

SEQ ID NO: 810242 - RNA, 19 nt, Human
gaaagggcuuuaagggcac

SEQ ID NO: 810243 - RNA, 19 nt, Human
gacuaacaaguaagguaaa

SEQ ID NO: 810244 - RNA, 24 nt, Human
gagguuggcuaaggggaugggugg

SEQ ID NO: 810245 - RNA, 22 nt, Human
gccaaacauuccccaggucuua

SEQ ID NO: 810246 - RNA, 24 nt, Human
ggaaacaguggggcguagacuaac

SEQ ID NO: 810247 - RNA, 25 nt, Human
gggaagagaauccagaaacacgaca

SEQ ID NO: 810248 - RNA, 19 nt, Human
ggggauggguggaaacagu

SEQ ID NO: 810249 - RNA, 21 nt, Human
ggggauggguggaaacagugg

SEQ ID NO: 810250 - RNA, 22 nt, Human
ggggauggguggaaacaguggg

SEQ ID NO: 810251 - RNA, 22 nt, Human
guccccgugacaacagcaucac

SEQ ID NO: 810252 - RNA, 19 nt, Human
uaaauaucuacaucuggug

SEQ ID NO: 810253 - RNA, 24 nt, Human
uaaccaauguuccagagaaagcca

SEQ ID NO: 810254 - RNA, 19 nt, Human
uaagguaaaguccagggag

SEQ ID NO: 810255 - RNA, 19 nt, Human
uaauagccuuucagaauuu

SEQ ID NO: 810256 - RNA, 18 nt, Human
uacuugucuauaucaggu

SEQ ID NO: 810257 - RNA, 26 nt, Human
uagcaggaaaaccuacuaaaagggga

SEQ ID NO: 810258 - RNA, 19 nt, Human
uaggagacugucaaaacau

SEQ ID NO: 810259 - RNA, 26 nt, Human
uauaaacagcauaggguaguucuaga

SEQ ID NO: 810260 - RNA, 25 nt, Human
uauaccccaggaaggaaaggacaac

SEQ ID NO: 810261 - RNA, 24 nt, Human
uauugagaggacaaacagccucca

SEQ ID NO: 810262 - RNA, 19 nt, Human
uauuuggaggagcacaaag

SEQ ID NO: 810263 - RNA, 19 nt, Human
ucaccagaaauuaacauag

SEQ ID NO: 810264 - RNA, 23 nt, Human
uccagagaaagccacccucaaag

SEQ ID NO: 810265 - RNA, 20 nt, Human
ucccaguauaaacagcauag

SEQ ID NO: 810266 - RNA, 21 nt, Human
uccucccagcacagguccccg

SEQ ID NO: 810267 - RNA, 24 nt, Human
ucgggcuccaggaaaguuggggca

SEQ ID NO: 810268 - RNA, 22 nt, Human
ucuuuccagcuccagauaaaua

SEQ ID NO: 810269 - RNA, 21 nt, Human
ucuuugggcaagauaaaaaaa

SEQ ID NO: 810270 - RNA, 22 nt, Human
ugaaugacaacaguucuaacuu

SEQ ID NO: 810271 - RNA, 19 nt, Human
ugacaacccucaucuacug

SEQ ID NO: 810272 - RNA, 19 nt, Human
ugagagggagcucuuuggg

SEQ ID NO: 810273 - RNA, 21 nt, Human
ugagagggagcucuuugggca

SEQ ID NO: 810274 - RNA, 22 nt, Human
uggcaguauccaauucagguuu

SEQ ID NO: 810275 - RNA, 20 nt, Human
uguaagaagggaagacagug

SEQ ID NO: 810276 - RNA, 24 nt, Human
uuacgcaaaauggggaagagaauc

SEQ ID NO: 810277 - RNA, 21 nt, Human
uugcuuuucaugucugugggu

SEQ ID NO: 810278 - RNA, 18 nt, Human
aaaaagaaaaaagaaaaa

SEQ ID NO: 810279 - RNA, 25 nt, Human
aaaagaaaaaagaaaaagaaaagaa

SEQ ID NO: 810280 - RNA, 19 nt, Human
aaaagaaaaagaaaagaaa

SEQ ID NO: 810281 - RNA, 18 nt, Human
aaggcuggaggccgcucc

SEQ ID NO: 810282 - RNA, 19 nt, Human
aaguacuuguccugcaccc

SEQ ID NO: 810283 - RNA, 23 nt, Human
aauggcaggaagcauauuaggug

SEQ ID NO: 810284 - RNA, 18 nt, Human
acaaagcguucuuuagag

SEQ ID NO: 810285 - RNA, 22 nt, Human
acacacacaaagaggcaacacc

SEQ ID NO: 810286 - RNA, 21 nt, Human
acaccaagaacagacugaaac

SEQ ID NO: 810287 - RNA, 23 nt, Human
acaccaccucacccucaaugaac

SEQ ID NO: 810288 - RNA, 21 nt, Human
acagacgaagcacuugaugug

SEQ ID NO: 810289 - RNA, 18 nt, Human
acagauccgagcggugga

SEQ ID NO: 810290 - RNA, 22 nt, Human
acagcggggaaggguggcguga

SEQ ID NO: 810291 - RNA, 22 nt, Human
acccacugcggacggggaaaca

SEQ ID NO: 810292 - RNA, 18 nt, Human
accuaaugacagacacca

SEQ ID NO: 810293 - RNA, 22 nt, Human
accuaaugacagacaccaacgc

SEQ ID NO: 810294 - RNA, 21 nt, Human
accugugugacgagaaaaaga

SEQ ID NO: 810295 - RNA, 21 nt, Human
acgcugggaaggugggcuggg

SEQ ID NO: 810296 - RNA, 21 nt, Human
agaaaaagaaaaaagaaaaag

SEQ ID NO: 810297 - RNA, 23 nt, Human
agaaaaagaaaaaagaaaaagaa

SEQ ID NO: 810298 - RNA, 22 nt, Human
agacaccgccagccacagcaca

SEQ ID NO: 810299 - RNA, 25 nt, Human
agcaaggaaaacagugguggcuaua

SEQ ID NO: 810300 - RNA, 21 nt, Human
agcaaggugugugggaggggu

SEQ ID NO: 810301 - RNA, 26 nt, Human
agccggcagacggcacacacgaagca

SEQ ID NO: 810302 - RNA, 23 nt, Human
agggagcucuguguaugaggacc

SEQ ID NO: 810303 - RNA, 20 nt, Human
auauuguguaggcaucuagg

SEQ ID NO: 810304 - RNA, 22 nt, Human
aucuccauccuucucuccccaa

SEQ ID NO: 810305 - RNA, 22 nt, Human
auggacacagagaagccagagc

SEQ ID NO: 810306 - RNA, 19 nt, Human
caaccaucaucaacaagcc

SEQ ID NO: 810307 - RNA, 25 nt, Human
cacaccaagaacagacugaaaccac

SEQ ID NO: 810308 - RNA, 23 nt, Human
cacagcucacgucccggccaccu

SEQ ID NO: 810309 - RNA, 18 nt, Human
caccccauggacacagag

SEQ ID NO: 810310 - RNA, 25 nt, Human
cacccuaacacacaccuaaugacag

SEQ ID NO: 810311 - RNA, 25 nt, Human
caccgccagccacagcacaaggacg

SEQ ID NO: 810312 - RNA, 21 nt, Human
cagccucucccugacaccaag

SEQ ID NO: 810313 - RNA, 20 nt, Human
cagcucacgucccggccacc

SEQ ID NO: 810314 - RNA, 21 nt, Human
cauggaggggcgcuggcggaa

SEQ ID NO: 810315 - RNA, 27 nt, Human
ccaagaacagacugaaaccacacagau

SEQ ID NO: 810316 - RNA, 24 nt, Human
ccaagaacagacugaaaccacacc

SEQ ID NO: 810317 - RNA, 23 nt, Human
ccaccucugucccccacgugccc

SEQ ID NO: 810318 - RNA, 18 nt, Human
cccaagacuuggaaaaau

SEQ ID NO: 810319 - RNA, 24 nt, Human
cccacgugcccagcaccggggcca

SEQ ID NO: 810320 - RNA, 23 nt, Human
ccccaacagcgugugguugucug

SEQ ID NO: 810321 - RNA, 23 nt, Human
cccccucccuagccgagcugggc

SEQ ID NO: 810322 - RNA, 21 nt, Human
ccccgucugcgagucugccug

SEQ ID NO: 810323 - RNA, 19 nt, Human
cccuggccucggcgcccgg

SEQ ID NO: 810324 - RNA, 21 nt, Human
ccgaagggccgugugcccacc

SEQ ID NO: 810325 - RNA, 22 nt, Human
ccgacaccaccucacccucaau

SEQ ID NO: 810326 - RNA, 22 nt, Human
ccgcccaccccauggacacaga

SEQ ID NO: 810327 - RNA, 18 nt, Human
ccgucugcgagucugccu

SEQ ID NO: 810328 - RNA, 25 nt, Human
ccucacagcucacgucccggccacc

SEQ ID NO: 810329 - RNA, 20 nt, Human
ccucccgcccaccccauggg

SEQ ID NO: 810330 - RNA, 21 nt, Human
ccucccuagccgagcugggcg

SEQ ID NO: 810331 - RNA, 19 nt, Human
ccuggccucggcgcccggc

SEQ ID NO: 810332 - RNA, 19 nt, Human
ccugucuugucccuuguug

SEQ ID NO: 810333 - RNA, 22 nt, Human
cgacacagccacucuacagccu

SEQ ID NO: 810334 - RNA, 21 nt, Human
cgacaccaccucacccucaau

SEQ ID NO: 810335 - RNA, 21 nt, Human
cgcagcugaagcagcgggugc

SEQ ID NO: 810336 - RNA, 18 nt, Human
cggacggggaaacagacu

SEQ ID NO: 810337 - RNA, 21 nt, Human
cgggaugcccugcuggcuuca

SEQ ID NO: 810338 - RNA, 25 nt, Human
cuaaaaacucccccucccuagccga

SEQ ID NO: 810339 - RNA, 20 nt, Human
cuaucuccauccuaucucca

SEQ ID NO: 810340 - RNA, 20 nt, Human
cucacaggcaggaacaucgg

SEQ ID NO: 810341 - RNA, 19 nt, Human
cuggaggaggaacgcagcg

SEQ ID NO: 810342 - RNA, 21 nt, Human
gaaaaaagaaaaagaaaagaa

SEQ ID NO: 810343 - RNA, 21 nt, Human
gaaaaagaaaaaagaaaaaga

SEQ ID NO: 810344 - RNA, 22 nt, Human
gaagaagccgcccucggccagg

SEQ ID NO: 810345 - RNA, 18 nt, Human
gagccucugguaguccag

SEQ ID NO: 810346 - RNA, 19 nt, Human
gaggaccacaccaagaaca

SEQ ID NO: 810347 - RNA, 24 nt, Human
gaggaggauguuuucuccccaaga

SEQ ID NO: 810348 - RNA, 20 nt, Human
gaggcaacacccacugcgga

SEQ ID NO: 810349 - RNA, 23 nt, Human
gcagccaccugugugcuccaucu

SEQ ID NO: 810350 - RNA, 22 nt, Human
gccaggggccccuggccucggc

SEQ ID NO: 810351 - RNA, 19 nt, Human
gcccagcgccgacaccacc

SEQ ID NO: 810352 - RNA, 27 nt, Human
gccgacaccaccucacccucaaugaac

SEQ ID NO: 810353 - RNA, 21 nt, Human
gcgggugccguagagccucug

SEQ ID NO: 810354 - RNA, 19 nt, Human
ggacccccucccgcccacc

SEQ ID NO: 810355 - RNA, 20 nt, Human
gggaugcccugcuggcuuca

SEQ ID NO: 810356 - RNA, 24 nt, Human
gggugugugcgguucucgccaggg

SEQ ID NO: 810357 - RNA, 18 nt, Human
ggugcaucaagagcuacg

SEQ ID NO: 810358 - RNA, 23 nt, Human
gucccggccaccucuguccccca

SEQ ID NO: 810359 - RNA, 20 nt, Human
guggaaacccuugauuccag

SEQ ID NO: 810360 - RNA, 19 nt, Human
uaacagcaaggaaaacagu

SEQ ID NO: 810361 - RNA, 22 nt, Human
uacagccucucccugacaccaa

SEQ ID NO: 810362 - RNA, 21 nt, Human
uagagccucugguaguccagc

SEQ ID NO: 810363 - RNA, 18 nt, Human
uagccgagcugggcgggu

SEQ ID NO: 810364 - RNA, 24 nt, Human
uaucagcauccugugacggccggu

SEQ ID NO: 810365 - RNA, 22 nt, Human
uccccgggggggaagggcagcc

SEQ ID NO: 810366 - RNA, 20 nt, Human
ucgaucuggaggaggaacgc

SEQ ID NO: 810367 - RNA, 18 nt, Human
ucgcuccuggggcaugug

SEQ ID NO: 810368 - RNA, 20 nt, Human
ucuccauccuaucuccaucc

SEQ ID NO: 810369 - RNA, 20 nt, Human
ucuccauccuaucuccaucc

SEQ ID NO: 810370 - RNA, 22 nt, Human
ucucccugacaccaagccacag

SEQ ID NO: 810371 - RNA, 22 nt, Human
ucugaugcccgacacagccacu

SEQ ID NO: 810372 - RNA, 24 nt, Human
ugacgagaaaaagaaaaaagaaaa

SEQ ID NO: 810373 - RNA, 20 nt, Human
ugagaagagccacaucucca

SEQ ID NO: 810374 - RNA, 18 nt, Human
ugagacaccgccagccac

SEQ ID NO: 810375 - RNA, 20 nt, Human
ugagacaccgccagccacag

SEQ ID NO: 810376 - RNA, 22 nt, Human
ugccguagagccucugguaguc

SEQ ID NO: 810377 - RNA, 21 nt, Human
ugcuaaaaacucccccucccu

SEQ ID NO: 810378 - RNA, 23 nt, Human
uggaaaaauaacagcaaggaaaa

SEQ ID NO: 810379 - RNA, 18 nt, Human
ugggaaggugggcugggc

SEQ ID NO: 810380 - RNA, 24 nt, Human
ugggaucagauaugacauugcacu

SEQ ID NO: 810381 - RNA, 19 nt, Human
uggggcaggcuggcagccg

SEQ ID NO: 810382 - RNA, 21 nt, Human
ugucccagacgcucacugccc

SEQ ID NO: 810383 - RNA, 23 nt, Human
uguccugcacccgcagcaccucg

SEQ ID NO: 810384 - RNA, 18 nt, Human
ugugacggccggugcugc

SEQ ID NO: 810385 - RNA, 21 nt, Human
uucuuuagaggggucugucuc

SEQ ID NO: 810386 - RNA, 21 nt, Human
uugaaggucacucgguccccg

SEQ ID NO: 810387 - RNA, 24 nt, Human
uuugguguuucauccaccucucag

SEQ ID NO: 810388 - RNA, 24 nt, Human
uuuuccaggcuuccugggaucaga

SEQ ID NO: 810389 - RNA, 19 nt, Human
aaacagcucccccgccccc

SEQ ID NO: 810390 - RNA, 19 nt, Human
aaacagcucccccgccccc

SEQ ID NO: 810391 - RNA, 24 nt, Human
aaagugcugggauuacaggcguga

SEQ ID NO: 810392 - RNA, 21 nt, Human
aaccagcucccgucccucccc

SEQ ID NO: 810393 - RNA, 19 nt, Human
aagugcugggauuacaggc

SEQ ID NO: 810394 - RNA, 19 nt, Human
aagugcugggauuacaggc

SEQ ID NO: 810395 - RNA, 27 nt, Human
aauaaaauagaaacagcucccccgccc

SEQ ID NO: 810396 - RNA, 19 nt, Human
accagcucccgucccuccc

SEQ ID NO: 810397 - RNA, 21 nt, Human
accagcucccgucccuccccc

SEQ ID NO: 810398 - RNA, 23 nt, Human
accauguuggucaggcuggucuc

SEQ ID NO: 810399 - RNA, 24 nt, Human
accuugugauuugcccaccucagc

SEQ ID NO: 810400 - RNA, 19 nt, Human
agagauugaucaauaaaua

SEQ ID NO: 810401 - RNA, 23 nt, Human
aggcaggaucacgcgaaaccaga

SEQ ID NO: 810402 - RNA, 18 nt, Human
agugcugggauuacaggc

SEQ ID NO: 810403 - RNA, 21 nt, Human
augggguuucaccauguuggu

SEQ ID NO: 810404 - RNA, 23 nt, Human
augggguuucaccauguugguca

SEQ ID NO: 810405 - RNA, 24 nt, Human
augggguuucaccauguuggucag

SEQ ID NO: 810406 - RNA, 24 nt, Human
auuuuuguauuuuuaguagagaug

SEQ ID NO: 810407 - RNA, 24 nt, Human
caaagugcugggauuacaggcgug

SEQ ID NO: 810408 - RNA, 19 nt, Human
caaccagcucccgucccuc

SEQ ID NO: 810409 - RNA, 21 nt, Human
caccauguuggucaggcuggu

SEQ ID NO: 810410 - RNA, 24 nt, Human
caccauguuggucaggcuggucuc

SEQ ID NO: 810411 - RNA, 22 nt, Human
cacccccaguugggcacggccu

SEQ ID NO: 810412 - RNA, 24 nt, Human
caccucagcuucccaaagugcugg

SEQ ID NO: 810413 - RNA, 20 nt, Human
cagcucccccgcccccuguu

SEQ ID NO: 810414 - RNA, 24 nt, Human
cagcucccccgcccccuguucccc

SEQ ID NO: 810415 - RNA, 23 nt, Human
cagcucccgucccucccccaccc

SEQ ID NO: 810416 - RNA, 21 nt, Human
cagcucccgucccuccccccc

SEQ ID NO: 810417 - RNA, 20 nt, Human
caggaucacgcgaaaccaga

SEQ ID NO: 810418 - RNA, 22 nt, Human
ccaaagugcugggauuacaggc

SEQ ID NO: 810419 - RNA, 22 nt, Human
ccaaagugcugggauuacaggc

SEQ ID NO: 810420 - RNA, 24 nt, Human
ccaaagugcugggauuacaggcgu

SEQ ID NO: 810421 - RNA, 19 nt, Human
ccccaaccagcucccgucc

SEQ ID NO: 810422 - RNA, 26 nt, Human
ccccaaccagcucccgucccuccccc

SEQ ID NO: 810423 - RNA, 18 nt, Human
ccccaccccaccccgcag

SEQ ID NO: 810424 - RNA, 19 nt, Human
ccccaccccaccccgcaga

SEQ ID NO: 810425 - RNA, 22 nt, Human
ccccuagaaccacccccaguuu

SEQ ID NO: 810426 - RNA, 19 nt, Human
ccccucccuccccggcccc

SEQ ID NO: 810427 - RNA, 24 nt, Human
ccccuguuccccuagaaccacccc

SEQ ID NO: 810428 - RNA, 21 nt, Human
cccgucccucccccaccccac

SEQ ID NO: 810429 - RNA, 18 nt, Human
cccucccccaccccaccc

SEQ ID NO: 810430 - RNA, 25 nt, Human
cccuguuccccuagaaccaccccca

SEQ ID NO: 810431 - RNA, 23 nt, Human
ccgcccccuguuccccuagaacc

SEQ ID NO: 810432 - RNA, 20 nt, Human
ccucccccaccccaccccgc

SEQ ID NO: 810433 - RNA, 22 nt, Human
ccucccccaccccaccccgcag

SEQ ID NO: 810434 - RNA, 20 nt, Human
cgaaaccagaauuccuuccc

SEQ ID NO: 810435 - RNA, 21 nt, Human
cgaaaccagaauuccuuccgg

SEQ ID NO: 810436 - RNA, 19 nt, Human
cggccuguggagccccauc

SEQ ID NO: 810437 - RNA, 18 nt, Human
cgucccucccccacccca

SEQ ID NO: 810438 - RNA, 18 nt, Human
cucccccaccccaccccg

SEQ ID NO: 810439 - RNA, 21 nt, Human
cucccgucccucccccacccc

SEQ ID NO: 810440 - RNA, 22 nt, Human
cuccugaccuugugauuugccc

SEQ ID NO: 810441 - RNA, 28 nt, Human
cugcuaagccaccccaaccagcucccgu

SEQ ID NO: 810442 - RNA, 22 nt, Human
gaccuugugauuugcccaccuc

SEQ ID NO: 810443 - RNA, 24 nt, Human
gaccuugugauuugcccaccucag

SEQ ID NO: 810444 - RNA, 24 nt, Human
gagaugggguuucaccauguuggu

SEQ ID NO: 810445 - RNA, 18 nt, Human
gagccccaucccugcagg

SEQ ID NO: 810446 - RNA, 18 nt, Human
gaggaggggcccgggaag

SEQ ID NO: 810447 - RNA, 18 nt, Human
gcuaagccaccccaacca

SEQ ID NO: 810448 - RNA, 18 nt, Human
ggaaucagagacacggac

SEQ ID NO: 810449 - RNA, 19 nt, Human
ggcccgggaagaggggguu

SEQ ID NO: 810450 - RNA, 23 nt, Human
ggcuggucucaaacuccugaccu

SEQ ID NO: 810451 - RNA, 21 nt, Human
gggggcacggaaggggggugg

SEQ ID NO: 810452 - RNA, 21 nt, Human
gggggguggaggggggucccc

SEQ ID NO: 810453 - RNA, 22 nt, Human
gggguuucaccauguuggucag

SEQ ID NO: 810454 - RNA, 19 nt, Human
ggguccccucccuccccgg

SEQ ID NO: 810455 - RNA, 22 nt, Human
ggguuucaccauguuggucagg

SEQ ID NO: 810456 - RNA, 20 nt, Human
ggucucaaacuccugaccuu

SEQ ID NO: 810457 - RNA, 18 nt, Human
guacagaaggucgugggg

SEQ ID NO: 810458 - RNA, 23 nt, Human
guagagaugggguuucaccaugu

SEQ ID NO: 810459 - RNA, 24 nt, Human
gugauuugcccaccucagcuuccc

SEQ ID NO: 810460 - RNA, 22 nt, Human
uaagccaccccaaccagcuccc

SEQ ID NO: 810461 - RNA, 24 nt, Human
uaauuuuuguauuuuuaguagaga

SEQ ID NO: 810462 - RNA, 23 nt, Human
uagaaacagcucccccgcccccu

SEQ ID NO: 810463 - RNA, 22 nt, Human
uagagaugggguuucaccaugu

SEQ ID NO: 810464 - RNA, 24 nt, Human
uaguagagaugggguuucaccaug

SEQ ID NO: 810465 - RNA, 26 nt, Human
uaguagagaugggguuucaccauguu

SEQ ID NO: 810466 - RNA, 24 nt, Human
ucccaaagugcugggauuacaggc

SEQ ID NO: 810467 - RNA, 19 nt, Human
uccccuagaaccaccccca

SEQ ID NO: 810468 - RNA, 19 nt, Human
ucccgucccucccccaccc

SEQ ID NO: 810469 - RNA, 20 nt, Human
ucccgucccucccccacccc

SEQ ID NO: 810470 - RNA, 23 nt, Human
ugauuugcccaccucagcuuccc

SEQ ID NO: 810471 - RNA, 24 nt, Human
ugauuugcccaccucagcuuccca

SEQ ID NO: 810472 - RNA, 20 nt, Human
ugcugggauuacaggcguga

SEQ ID NO: 810473 - RNA, 18 nt, Human
ugggauuacaggcgugag

SEQ ID NO: 810474 - RNA, 19 nt, Human
ugggauuacaggcgugagc

SEQ ID NO: 810475 - RNA, 20 nt, Human
uggggggaggaccaggggag

SEQ ID NO: 810476 - RNA, 24 nt, Human
ugggguuucaccauguuggucagg

SEQ ID NO: 810477 - RNA, 24 nt, Human
uggucaggcuggucucaaacuccu

SEQ ID NO: 810478 - RNA, 21 nt, Human
uguauuuuuaguagagauggg

SEQ ID NO: 810479 - RNA, 18 nt, Human
uuaguagagaugggguuu

SEQ ID NO: 810480 - RNA, 22 nt, Human
uuaguagagaugggguuucacc

SEQ ID NO: 810481 - RNA, 24 nt, Human
uuaguagagaugggguuucaccau

SEQ ID NO: 810482 - RNA, 19 nt, Human
uuccggagagcaaauccgu

SEQ ID NO: 810483 - RNA, 20 nt, Human
uuggggggcacggaaggggg

SEQ ID NO: 810484 - RNA, 23 nt, Human
uuguauuuuuaguagagaugggg

SEQ ID NO: 810485 - RNA, 24 nt, Human
uuucaccauguuggucaggcuggu

SEQ ID NO: 810486 - RNA, 21 nt, Human
uuugcccaccucagcuuccca

SEQ ID NO: 810487 - RNA, 19 nt, Human
uuuguguccaccccccucc

SEQ ID NO: 810488 - RNA, 24 nt, Human
uuuuuaguagagaugggguuucac

SEQ ID NO: 810489 - RNA, 20 nt, Human
uuuuuguauuuuuaguagag

SEQ ID NO: 810490 - RNA, 20 nt, Human
aaacacaaauaaacaagaca

SEQ ID NO: 810491 - RNA, 20 nt, Human
aaagagacaaagacucgggg

SEQ ID NO: 810492 - RNA, 22 nt, Human
aacaagcccugauccccaccaa

SEQ ID NO: 810493 - RNA, 18 nt, Human
aaccaggaagaggugucc

SEQ ID NO: 810494 - RNA, 18 nt, Human
aaccgagcccaggcccgg

SEQ ID NO: 810495 - RNA, 21 nt, Human
aaccugggugaagggagaggc

SEQ ID NO: 810496 - RNA, 20 nt, Human
aagagccaaggccaggcagu

SEQ ID NO: 810497 - RNA, 24 nt, Human
aagagccaaggccaggcaguggga

SEQ ID NO: 810498 - RNA, 25 nt, Human
aagcccagaggccuggauccuagga

SEQ ID NO: 810499 - RNA, 19 nt, Human
aagcccugauccccaccaa

SEQ ID NO: 810500 - RNA, 23 nt, Human
aaggaggggcaaguggaggcucc

SEQ ID NO: 810501 - RNA, 18 nt, Human
aagggggcuggcaccucu

SEQ ID NO: 810502 - RNA, 20 nt, Human
aagucaucaugcagagcggg

SEQ ID NO: 810503 - RNA, 21 nt, Human
acaggcgcgccgcccggcccc

SEQ ID NO: 810504 - RNA, 19 nt, Human
accaaacaccuccuugaca

SEQ ID NO: 810505 - RNA, 18 nt, Human
acccagugagccagggcc

SEQ ID NO: 810506 - RNA, 23 nt, Human
accccacacaccccagcccccag

SEQ ID NO: 810507 - RNA, 24 nt, Human
accccacacaccccagcccccagc

SEQ ID NO: 810508 - RNA, 22 nt, Human
acccccuccccuccccucucug

SEQ ID NO: 810509 - RNA, 20 nt, Human
acccugaggggaggaagguc

SEQ ID NO: 810510 - RNA, 18 nt, Human
accgagcccaggcccggc

SEQ ID NO: 810511 - RNA, 22 nt, Human
accucacuuccacagagcccag

SEQ ID NO: 810512 - RNA, 26 nt, Human
accuggcagcaaagacccaggcccaa

SEQ ID NO: 810513 - RNA, 19 nt, Human
agaaagacagggacccaaa

SEQ ID NO: 810514 - RNA, 20 nt, Human
agacagaaaggcggcuaaac

SEQ ID NO: 810515 - RNA, 21 nt, Human
agaccaccccacacaccccag

SEQ ID NO: 810516 - RNA, 18 nt, Human
agaccccuccugacccac

SEQ ID NO: 810517 - RNA, 22 nt, Human
agagaaagacagggacccaaaa

SEQ ID NO: 810518 - RNA, 24 nt, Human
agagaaggaggggcaaguggaggc

SEQ ID NO: 810519 - RNA, 21 nt, Human
agagaggcugcagagcucaaa

SEQ ID NO: 810520 - RNA, 23 nt, Human
agagcagauagagaacccccucc

SEQ ID NO: 810521 - RNA, 21 nt, Human
agagcggggccaagaagugga

SEQ ID NO: 810522 - RNA, 28 nt, Human
agagcggggccaagaaguggacagagaa

SEQ ID NO: 810523 - RNA, 18 nt, Human
agaggccaggacucaggu

SEQ ID NO: 810524 - RNA, 20 nt, Human
agagucccuccaccuugaga

SEQ ID NO: 810525 - RNA, 19 nt, Human
agaugguaauuagggaaca

SEQ ID NO: 810526 - RNA, 20 nt, Human
agccccaggccgcccccagc

SEQ ID NO: 810527 - RNA, 19 nt, Human
agcgggacccagugagcca

SEQ ID NO: 810528 - RNA, 20 nt, Human
agcgguggggaaugaagugg

SEQ ID NO: 810529 - RNA, 18 nt, Human
agcugcccggcccagccc

SEQ ID NO: 810530 - RNA, 20 nt, Human
agcuggugccaucuggcuuu

SEQ ID NO: 810531 - RNA, 20 nt, Human
aggaagagguguccacgcug

SEQ ID NO: 810532 - RNA, 21 nt, Human
aggaaggagacaggcucagag

SEQ ID NO: 810533 - RNA, 23 nt, Human
aggaaggagacaggcucagagaa

SEQ ID NO: 810534 - RNA, 21 nt, Human
aggagagaggcugcagagcuc

SEQ ID NO: 810535 - RNA, 22 nt, Human
aggagcagggagugaccacagg

SEQ ID NO: 810536 - RNA, 25 nt, Human
aggagcugcggggagcugggggagg

SEQ ID NO: 810537 - RNA, 21 nt, Human
aggcagugcccugccucccuc

SEQ ID NO: 810538 - RNA, 22 nt, Human
aggccaggacucaggugaggga

SEQ ID NO: 810539 - RNA, 20 nt, Human
aggcccagccaggccggcuc

SEQ ID NO: 810540 - RNA, 23 nt, Human
aggccugaaggccugaaggagcc

SEQ ID NO: 810541 - RNA, 18 nt, Human
aggcucagagaaagacag

SEQ ID NO: 810542 - RNA, 20 nt, Human
aggcucagagaaagacaggg

SEQ ID NO: 810543 - RNA, 19 nt, Human
agggacccaaaagagacaa

SEQ ID NO: 810544 - RNA, 18 nt, Human
agggccacccugaguucu

SEQ ID NO: 810545 - RNA, 21 nt, Human
agggcccauugguggggggag

SEQ ID NO: 810546 - RNA, 24 nt, Human
agggggccaagggggcuggcaccu

SEQ ID NO: 810547 - RNA, 18 nt, Human
agguagaugcccugccuu

SEQ ID NO: 810548 - RNA, 23 nt, Human
aggucccugguccucucagccag

SEQ ID NO: 810549 - RNA, 21 nt, Human
agucaaaagacacugcgaacc

SEQ ID NO: 810550 - RNA, 24 nt, Human
aguggcacuggcagagucugcaca

SEQ ID NO: 810551 - RNA, 22 nt, Human
aguggggaagggacuucuuagg

SEQ ID NO: 810552 - RNA, 23 nt, Human
aguuauuuguugugugacuacau

SEQ ID NO: 810553 - RNA, 19 nt, Human
auaaguccaaagugccaca

SEQ ID NO: 810554 - RNA, 19 nt, Human
auacaagugaaaacgaggc

SEQ ID NO: 810555 - RNA, 25 nt, Human
auaccaguuuccaugacaacuccua

SEQ ID NO: 810556 - RNA, 18 nt, Human
auagagaacccccucccc

SEQ ID NO: 810557 - RNA, 19 nt, Human
auccggagcagcuggugcc

SEQ ID NO: 810558 - RNA, 24 nt, Human
aucucaauucccccugggccccaa

SEQ ID NO: 810559 - RNA, 19 nt, Human
aucuugcuccuccaaguca

SEQ ID NO: 810560 - RNA, 22 nt, Human
caaaaccucacuuccacagagc

SEQ ID NO: 810561 - RNA, 18 nt, Human
caaaagacacugcgaacc

SEQ ID NO: 810562 - RNA, 21 nt, Human
caaagacccaggcccaagccc

SEQ ID NO: 810563 - RNA, 24 nt, Human
caaagacccaggcccaagcccaau

SEQ ID NO: 810564 - RNA, 22 nt, Human
caaccccacggagccgagggcc

SEQ ID NO: 810565 - RNA, 23 nt, Human
caacuccuagccucugcacaccc

SEQ ID NO: 810566 - RNA, 22 nt, Human
caagcccaauccugcauccucc

SEQ ID NO: 810567 - RNA, 20 nt, Human
caagucaaaagacacugcga

SEQ ID NO: 810568 - RNA, 24 nt, Human
caaugcuggucugaacagggcuga

SEQ ID NO: 810569 - RNA, 21 nt, Human
cacaaacacaaauaaacaaga

SEQ ID NO: 810570 - RNA, 18 nt, Human
cacaccccagcccccagc

SEQ ID NO: 810571 - RNA, 22 nt, Human
cacauccggagcagcuggugcc

SEQ ID NO: 810572 - RNA, 20 nt, Human
caccaagacucccccuucaa

SEQ ID NO: 810573 - RNA, 25 nt, Human
cacccaaacuccaaggaccagucaa

SEQ ID NO: 810574 - RNA, 18 nt, Human
caccccacacaccccagc

SEQ ID NO: 810575 - RNA, 23 nt, Human
caccccacacaccccagccccca

SEQ ID NO: 810576 - RNA, 18 nt, Human
cacccggaacccccuccc

SEQ ID NO: 810577 - RNA, 18 nt, Human
caccgcgcaggggagggu

SEQ ID NO: 810578 - RNA, 21 nt, Human
caccgcgcauaaguugggggc

SEQ ID NO: 810579 - RNA, 25 nt, Human
cacgcgcaagcacccgcgucacgcg

SEQ ID NO: 810580 - RNA, 18 nt, Human
cagaaagugggggcgacu

SEQ ID NO: 810581 - RNA, 24 nt, Human
cagaagguccccaaacuaacccug

SEQ ID NO: 810582 - RNA, 21 nt, Human
cagcaaagacccaggcccaag

SEQ ID NO: 810583 - RNA, 21 nt, Human
cagcgguggggaaugaagugg

SEQ ID NO: 810584 - RNA, 19 nt, Human
caggagcaccccccuuuua

SEQ ID NO: 810585 - RNA, 20 nt, Human
caggagcagggagugaccac

SEQ ID NO: 810586 - RNA, 23 nt, Human
caggagccccugacccauucucc

SEQ ID NO: 810587 - RNA, 23 nt, Human
caggcaagagggcuccaccuccc

SEQ ID NO: 810588 - RNA, 25 nt, Human
caggcucagagaaagacagggaccc

SEQ ID NO: 810589 - RNA, 23 nt, Human
caggcucauaccaguuuccauga

SEQ ID NO: 810590 - RNA, 23 nt, Human
cagggacccaaaagagacaaaga

SEQ ID NO: 810591 - RNA, 19 nt, Human
caguggcagcuucaggagc

SEQ ID NO: 810592 - RNA, 24 nt, Human
caugaaaaugaacacguguguaug

SEQ ID NO: 810593 - RNA, 25 nt, Human
caugacaacuccuagccucugcaca

SEQ ID NO: 810594 - RNA, 26 nt, Human
cauucacauacauaugaguucaugug

SEQ ID NO: 810595 - RNA, 29 nt, Human
cauucacauacauaugaguucaugugugg

SEQ ID NO: 810596 - RNA, 21 nt, Human
ccaaaccacacugcccaaugc

SEQ ID NO: 810597 - RNA, 24 nt, Human
ccaaaccacacugcccaaugcugg

SEQ ID NO: 810598 - RNA, 27 nt, Human
ccaaaccacacugcccaaugcuggucu

SEQ ID NO: 810599 - RNA, 21 nt, Human
ccaaccccacggagccgaggg

SEQ ID NO: 810600 - RNA, 20 nt, Human
ccaagucaaaagacacugcg

SEQ ID NO: 810601 - RNA, 18 nt, Human
ccaccaagacucccccuu

SEQ ID NO: 810602 - RNA, 19 nt, Human
ccaccgcccuccuucccac

SEQ ID NO: 810603 - RNA, 20 nt, Human
ccagaaagugggggcgacug

SEQ ID NO: 810604 - RNA, 21 nt, Human
ccagccccgccuccgccuccg

SEQ ID NO: 810605 - RNA, 23 nt, Human
cccaaaccacacugcccaaugcu

SEQ ID NO: 810606 - RNA, 21 nt, Human
cccacugccaaccucucugaa

SEQ ID NO: 810607 - RNA, 19 nt, Human
cccaggccgccucccagac

SEQ ID NO: 810608 - RNA, 19 nt, Human
cccaggcucugcuccuucc

SEQ ID NO: 810609 - RNA, 19 nt, Human
cccagugagccagggcccc

SEQ ID NO: 810610 - RNA, 23 nt, Human
cccauucuccagaguccagcccc

SEQ ID NO: 810611 - RNA, 26 nt, Human
cccauucugcggcgggaagccaggag

SEQ ID NO: 810612 - RNA, 20 nt, Human
ccccaaccccacggagccga

SEQ ID NO: 810613 - RNA, 20 nt, Human
ccccacacaccccagccccc

SEQ ID NO: 810614 - RNA, 23 nt, Human
ccccacacaccccagcccccagc

SEQ ID NO: 810615 - RNA, 24 nt, Human
ccccacacaccccagcccccagca

SEQ ID NO: 810616 - RNA, 30 nt, Human
ccccacacaccccagcccccagcagagcaa

SEQ ID NO: 810617 - RNA, 19 nt, Human
ccccaccaagacucccccu

SEQ ID NO: 810618 - RNA, 20 nt, Human
ccccacggagccgagggccc

SEQ ID NO: 810619 - RNA, 19 nt, Human
ccccacugccaaccucucu

SEQ ID NO: 810620 - RNA, 18 nt, Human
ccccagcacucccugagc

SEQ ID NO: 810621 - RNA, 22 nt, Human
ccccagcacucccugagcaauc

SEQ ID NO: 810622 - RNA, 22 nt, Human
ccccaggccgccucccagaccc

SEQ ID NO: 810623 - RNA, 18 nt, Human
cccccaaccccacggagc

SEQ ID NO: 810624 - RNA, 25 nt, Human
cccccaaugugggcaggcacauccg

SEQ ID NO: 810625 - RNA, 20 nt, Human
ccccccaaccccacggagcc

SEQ ID NO: 810626 - RNA, 27 nt, Human
cccccggcuggauuccaacccuuccgg

SEQ ID NO: 810627 - RNA, 21 nt, Human
ccccggccccggccccggccc

SEQ ID NO: 810628 - RNA, 21 nt, Human
ccccggccccggcccuggccc

SEQ ID NO: 810629 - RNA, 25 nt, Human
ccccggccccggcccuggcccgcgc

SEQ ID NO: 810630 - RNA, 21 nt, Human
ccccuccugacccacugaucc

SEQ ID NO: 810631 - RNA, 21 nt, Human
ccccuucuuucucgcaugccc

SEQ ID NO: 810632 - RNA, 18 nt, Human
cccgcgcgccgccacucg

SEQ ID NO: 810633 - RNA, 18 nt, Human
cccggccccccucaccuc

SEQ ID NO: 810634 - RNA, 25 nt, Human
cccggccccggccccggcccuggcc

SEQ ID NO: 810635 - RNA, 25 nt, Human
cccggccccggccccggcccuggcc

SEQ ID NO: 810636 - RNA, 25 nt, Human
cccggccccggcccuggcccgcgcg

SEQ ID NO: 810637 - RNA, 31 nt, Human
cccggccccggcuccggcuccggccccggcc

SEQ ID NO: 810638 - RNA, 31 nt, Human
cccggcuccggcuccggccccggccccggcc

SEQ ID NO: 810639 - RNA, 21 nt, Human
cccucaaccccagccggggcc

SEQ ID NO: 810640 - RNA, 22 nt, Human
cccucaaccccagccggggccc

SEQ ID NO: 810641 - RNA, 18 nt, Human
cccuccuucccacccaag

SEQ ID NO: 810642 - RNA, 22 nt, Human
cccuggccagcccccgcccgga

SEQ ID NO: 810643 - RNA, 21 nt, Human
cccuucuucuucccugcuccc

SEQ ID NO: 810644 - RNA, 21 nt, Human
ccgccucccagacccggcccc

SEQ ID NO: 810645 - RNA, 24 nt, Human
ccgccuccgccuccgcggcgcccc

SEQ ID NO: 810646 - RNA, 18 nt, Human
ccggccccccucaccucc

SEQ ID NO: 810647 - RNA, 20 nt, Human
ccggcccuggcccgcgcgcc

SEQ ID NO: 810648 - RNA, 18 nt, Human
ccgggcccugagagccac

SEQ ID NO: 810649 - RNA, 23 nt, Human
ccuacagagcugguugcugaggg

SEQ ID NO: 810650 - RNA, 20 nt, Human
ccuccccucucugggcccac

SEQ ID NO: 810651 - RNA, 19 nt, Human
ccucuggaggcugcuccaa

SEQ ID NO: 810652 - RNA, 20 nt, Human
ccucuggguaacagugaaca

SEQ ID NO: 810653 - RNA, 23 nt, Human
ccugagagccacacauccaggga

SEQ ID NO: 810654 - RNA, 20 nt, Human
ccugguccucucagccaggu

SEQ ID NO: 810655 - RNA, 21 nt, Human
ccuguaagcagggcaguggug

SEQ ID NO: 810656 - RNA, 21 nt, Human
ccuucccacccaagucaaaag

SEQ ID NO: 810657 - RNA, 22 nt, Human
ccuuuggggucuccugccuccc

SEQ ID NO: 810658 - RNA, 21 nt, Human
cgccucccagacccggccccc

SEQ ID NO: 810659 - RNA, 21 nt, Human
cgcggcucuuagggaguccac

SEQ ID NO: 810660 - RNA, 23 nt, Human
cggagccgagggcccauaagucc

SEQ ID NO: 810661 - RNA, 19 nt, Human
cggcgggaagccaggagcc

SEQ ID NO: 810662 - RNA, 23 nt, Human
cggcuccggccccggccccggcc

SEQ ID NO: 810663 - RNA, 23 nt, Human
cggcuccggcuccggccccggcc

SEQ ID NO: 810664 - RNA, 19 nt, Human
cggcucgacgcggcggcgg

SEQ ID NO: 810665 - RNA, 19 nt, Human
cggggggaaugugaagagg

SEQ ID NO: 810666 - RNA, 21 nt, Human
cgguggggaaugaagugggua

SEQ ID NO: 810667 - RNA, 22 nt, Human
cguguguaugaaaaugugugug

SEQ ID NO: 810668 - RNA, 22 nt, Human
cucaauucccccugggccccaa

SEQ ID NO: 810669 - RNA, 23 nt, Human
cucagccccaggccgcccccagc

SEQ ID NO: 810670 - RNA, 23 nt, Human
cucauaccaguuuccaugacaac

SEQ ID NO: 810671 - RNA, 19 nt, Human
cuccagaguccagcccccc

SEQ ID NO: 810672 - RNA, 22 nt, Human
cuccaugcucagccccaggccc

SEQ ID NO: 810673 - RNA, 23 nt, Human
cucccacccaaacuccaaggacc

SEQ ID NO: 810674 - RNA, 21 nt, Human
cucccugagcaaucacucugg

SEQ ID NO: 810675 - RNA, 24 nt, Human
cuccgcggcgcccccggcccuggc

SEQ ID NO: 810676 - RNA, 21 nt, Human
cuccugacccacugauccuga

SEQ ID NO: 810677 - RNA, 19 nt, Human
cucgacgcggcggcggcgg

SEQ ID NO: 810678 - RNA, 21 nt, Human
cucucugaaacccuacagcuu

SEQ ID NO: 810679 - RNA, 21 nt, Human
cugaugaccaggacuuaggca

SEQ ID NO: 810680 - RNA, 18 nt, Human
cugccccucuggcagagc

SEQ ID NO: 810681 - RNA, 20 nt, Human
cugccccucuggcagagcuc

SEQ ID NO: 810682 - RNA, 21 nt, Human
cugccccucuggcagagcucc

SEQ ID NO: 810683 - RNA, 19 nt, Human
cugggccccaaaccacacu

SEQ ID NO: 810684 - RNA, 19 nt, Human
cugugacugcgugucuggg

SEQ ID NO: 810685 - RNA, 23 nt, Human
cuucagaagguccccaaacuaac

SEQ ID NO: 810686 - RNA, 20 nt, Human
cuucuucuucccugcucccc

SEQ ID NO: 810687 - RNA, 24 nt, Human
gaaggaggggcaaguggaggcucc

SEQ ID NO: 810688 - RNA, 22 nt, Human
gacaaggggacagccagcggga

SEQ ID NO: 810689 - RNA, 18 nt, Human
gagaaagacagggaccca

SEQ ID NO: 810690 - RNA, 20 nt, Human
gagaaagacagggacccaaa

SEQ ID NO: 810691 - RNA, 20 nt, Human
gagaggcaugggaggccugg

SEQ ID NO: 810692 - RNA, 22 nt, Human
gagcagauagagaacccccuuc

SEQ ID NO: 810693 - RNA, 20 nt, Human
gagccaaggccaggcagugc

SEQ ID NO: 810694 - RNA, 24 nt, Human
gagccagagccaggagucuggaaa

SEQ ID NO: 810695 - RNA, 22 nt, Human
gagccccugacccauucuccag

SEQ ID NO: 810696 - RNA, 19 nt, Human
gagcccgaaagagaaggag

SEQ ID NO: 810697 - RNA, 21 nt, Human
gaggagugaauucacucagca

SEQ ID NO: 810698 - RNA, 22 nt, Human
gaggcuccauuuugagaaaugc

SEQ ID NO: 810699 - RNA, 19 nt, Human
gcagagcggggccaagaag

SEQ ID NO: 810700 - RNA, 19 nt, Human
gccacacauccagggagcc

SEQ ID NO: 810701 - RNA, 18 nt, Human
gcccaggcaagagggcuc

SEQ ID NO: 810702 - RNA, 25 nt, Human
gccggggccccggggccagcggcag

SEQ ID NO: 810703 - RNA, 22 nt, Human
gccguccccccggcuggauucc

SEQ ID NO: 810704 - RNA, 21 nt, Human
gccuggguggcuugagggccc

SEQ ID NO: 810705 - RNA, 23 nt, Human
gcgcaggggaggguccgaggggc

SEQ ID NO: 810706 - RNA, 19 nt, Human
gcggcggcggcggugguca

SEQ ID NO: 810707 - RNA, 18 nt, Human
gcuuuggggcccucagcc

SEQ ID NO: 810708 - RNA, 19 nt, Human
ggaagcgccugugaacagg

SEQ ID NO: 810709 - RNA, 24 nt, Human
ggagccccuucuucuucccugcuc

SEQ ID NO: 810710 - RNA, 21 nt, Human
ggagcccucccuccgacgccc

SEQ ID NO: 810711 - RNA, 21 nt, Human
ggagccgagggcccauaaguc

SEQ ID NO: 810712 - RNA, 22 nt, Human
ggagccuccacaggcucugccc

SEQ ID NO: 810713 - RNA, 22 nt, Human
ggcaagagggcuccaccucccc

SEQ ID NO: 810714 - RNA, 22 nt, Human
ggcagaagcccagaggccugga

SEQ ID NO: 810715 - RNA, 23 nt, Human
ggcagagguaccucaggggugca

SEQ ID NO: 810716 - RNA, 20 nt, Human
ggcagcgguggggaaugaag

SEQ ID NO: 810717 - RNA, 23 nt, Human
ggccaccuggcagcaaagaccca

SEQ ID NO: 810718 - RNA, 19 nt, Human
ggccaggcagugcccugcc

SEQ ID NO: 810719 - RNA, 19 nt, Human
ggcccagccaggccggcuc

SEQ ID NO: 810720 - RNA, 21 nt, Human
ggcucgacgcggcggcggcgg

SEQ ID NO: 810721 - RNA, 22 nt, Human
gggccggagacggaucugaaga

SEQ ID NO: 810722 - RNA, 21 nt, Human
gggcuggagcugguucagggc

SEQ ID NO: 810723 - RNA, 19 nt, Human
ggggaagggacuucuuagg

SEQ ID NO: 810724 - RNA, 18 nt, Human
ggggggaaugugaagagg

SEQ ID NO: 810725 - RNA, 22 nt, Human
guggcuuuggggcccucagccc

SEQ ID NO: 810726 - RNA, 18 nt, Human
gugugacuaggaagguga

SEQ ID NO: 810727 - RNA, 19 nt, Human
guugcauuuccccacuuca

SEQ ID NO: 810728 - RNA, 19 nt, Human
uaaauaagaaacccgcggc

SEQ ID NO: 810729 - RNA, 21 nt, Human
uaaguccaaagugccacagag

SEQ ID NO: 810730 - RNA, 26 nt, Human
uagugggcugaggagagcagagggcu

SEQ ID NO: 810731 - RNA, 28 nt, Human
ucacaaacacaaauaaacaagacauugc

SEQ ID NO: 810732 - RNA, 18 nt, Human
ucagccuuuggggccauc

SEQ ID NO: 810733 - RNA, 22 nt, Human
ucaggccuggccagcggccucg

SEQ ID NO: 810734 - RNA, 24 nt, Human
ucauagggccacccugaguucuug

SEQ ID NO: 810735 - RNA, 18 nt, Human
ucauuguuccagcacaaa

SEQ ID NO: 810736 - RNA, 25 nt, Human
uccacagagcccaggcaagagggcu

SEQ ID NO: 810737 - RNA, 20 nt, Human
uccacagaggccaggacuca

SEQ ID NO: 810738 - RNA, 23 nt, Human
uccacaggcgcgccgcccggccc

SEQ ID NO: 810739 - RNA, 22 nt, Human
uccaugacaacuccuagccucu

SEQ ID NO: 810740 - RNA, 22 nt, Human
ucccagacccggccccccucac

SEQ ID NO: 810741 - RNA, 23 nt, Human
ucccagacccggccccccucacc

SEQ ID NO: 810742 - RNA, 22 nt, Human
uccccaggccgccucccagacc

SEQ ID NO: 810743 - RNA, 28 nt, Human
uccccaggccgccucccagacccggccc

SEQ ID NO: 810744 - RNA, 22 nt, Human
uccccaggcucugcuccuuccu

SEQ ID NO: 810745 - RNA, 21 nt, Human
uccccuggcuggagugggcug

SEQ ID NO: 810746 - RNA, 20 nt, Human
ucccuccaccuugagacccc

SEQ ID NO: 810747 - RNA, 23 nt, Human
ucccugagcaaucacucuggccc

SEQ ID NO: 810748 - RNA, 26 nt, Human
ucccugcuccccuggcuggagugggc

SEQ ID NO: 810749 - RNA, 22 nt, Human
uccgcggcgcccccggcccugg

SEQ ID NO: 810750 - RNA, 31 nt, Human
uccggcuccggccccggccccggccccggcc

SEQ ID NO: 810751 - RNA, 18 nt, Human
uccugccucccagaggug

SEQ ID NO: 810752 - RNA, 19 nt, Human
ucggagcugcccggcccag

SEQ ID NO: 810753 - RNA, 18 nt, Human
ucucaauucccccugggc

SEQ ID NO: 810754 - RNA, 18 nt, Human
ucugaaacccuacagcuu

SEQ ID NO: 810755 - RNA, 19 nt, Human
ucugaguucuuccuuuggu

SEQ ID NO: 810756 - RNA, 19 nt, Human
ucugcagcugcugccccuc

SEQ ID NO: 810757 - RNA, 22 nt, Human
ucugcggcgggaagccaggagc

SEQ ID NO: 810758 - RNA, 24 nt, Human
ucuuggagcccgaaagagaaggag

SEQ ID NO: 810759 - RNA, 20 nt, Human
ugaaaaauauacaagugaaa

SEQ ID NO: 810760 - RNA, 19 nt, Human
ugaaaacaucaugugaguc

SEQ ID NO: 810761 - RNA, 18 nt, Human
ugaaaacgaggccauaaa

SEQ ID NO: 810762 - RNA, 28 nt, Human
ugaaacccuacagcuucagaaggucccc

SEQ ID NO: 810763 - RNA, 22 nt, Human
ugaacaggguuggcaguggcac

SEQ ID NO: 810764 - RNA, 21 nt, Human
ugacaucaguaacaagcccug

SEQ ID NO: 810765 - RNA, 23 nt, Human
ugaccaaacaccuccuugacauc

SEQ ID NO: 810766 - RNA, 19 nt, Human
ugacuacaugcacaggagc

SEQ ID NO: 810767 - RNA, 21 nt, Human
ugagaggcaugggaggccugg

SEQ ID NO: 810768 - RNA, 21 nt, Human
ugagaguggugggagccuggg

SEQ ID NO: 810769 - RNA, 21 nt, Human
ugagcggucugaucuugcucc

SEQ ID NO: 810770 - RNA, 20 nt, Human
ugaguucaugugugaauuca

SEQ ID NO: 810771 - RNA, 18 nt, Human
ugaguucuuggcagaagc

SEQ ID NO: 810772 - RNA, 21 nt, Human
ugcaagccuccacccggaacc

SEQ ID NO: 810773 - RNA, 20 nt, Human
ugcacugggaguaggagugu

SEQ ID NO: 810774 - RNA, 21 nt, Human
ugcagcugcugccccucuggc

SEQ ID NO: 810775 - RNA, 23 nt, Human
ugccuggacagacuugucaguaa

SEQ ID NO: 810776 - RNA, 21 nt, Human
uggaggcugcuccaaaaccuc

SEQ ID NO: 810777 - RNA, 24 nt, Human
uggcagagcucccuacagagcugg

SEQ ID NO: 810778 - RNA, 19 nt, Human
uggcagcuucaggagcagg

SEQ ID NO: 810779 - RNA, 19 nt, Human
uggccucauuacagggcag

SEQ ID NO: 810780 - RNA, 23 nt, Human
uggcuugagggcccauugguggg

SEQ ID NO: 810781 - RNA, 19 nt, Human
uggcuuuggggcccucagc

SEQ ID NO: 810782 - RNA, 18 nt, Human
ugggagccuggguggcuu

SEQ ID NO: 810783 - RNA, 22 nt, Human
ugggagccuggguggcuugagg

SEQ ID NO: 810784 - RNA, 24 nt, Human
ugggccccaaaccacacugcccaa

SEQ ID NO: 810785 - RNA, 23 nt, Human
uggggcaguggcagcuucaggag

SEQ ID NO: 810786 - RNA, 19 nt, Human
uggguaguaacaagagccu

SEQ ID NO: 810787 - RNA, 19 nt, Human
ugggugaagggagaggcug

SEQ ID NO: 810788 - RNA, 25 nt, Human
uggucacaaacacaaauaaacaaga

SEQ ID NO: 810789 - RNA, 22 nt, Human
ugugaaaacaucaugugagucu

SEQ ID NO: 810790 - RNA, 23 nt, Human
ugugaagaggagggagccccuuc

SEQ ID NO: 810791 - RNA, 18 nt, Human
ugugacugcgugucuggg

SEQ ID NO: 810792 - RNA, 21 nt, Human
uguggaucaggggucauuaga

SEQ ID NO: 810793 - RNA, 22 nt, Human
ugugugaauucacauguguaua

SEQ ID NO: 810794 - RNA, 22 nt, Human
uguugcauuuccccacuucagc

SEQ ID NO: 810795 - RNA, 20 nt, Human
uguuugauauaucaguucaa

SEQ ID NO: 810796 - RNA, 18 nt, Human
uucagcgagcacggagaa

SEQ ID NO: 810797 - RNA, 21 nt, Human
uuccagcacaaagggccacgg

SEQ ID NO: 810798 - RNA, 23 nt, Human
uuccccuucuuucucgcaugccc

SEQ ID NO: 810799 - RNA, 21 nt, Human
uucccugcuccccuggcugga

SEQ ID NO: 810800 - RNA, 21 nt, Human
uugagaccccuccugacccac

SEQ ID NO: 810801 - RNA, 24 nt, Human
uuggcaguggcacuggcagcggug

SEQ ID NO: 810802 - RNA, 21 nt, Human
aacagacgacgggcgugcccc

SEQ ID NO: 810803 - RNA, 26 nt, Human
aacagcaccaagccacgccacccguc

SEQ ID NO: 810804 - RNA, 21 nt, Human
aacuggaccagucccagccuc

SEQ ID NO: 810805 - RNA, 23 nt, Human
acagacgacgggcgugccccgug

SEQ ID NO: 810806 - RNA, 21 nt, Human
acagccgaguccagcuaaagc

SEQ ID NO: 810807 - RNA, 22 nt, Human
acagccucuugggggaggagug

SEQ ID NO: 810808 - RNA, 18 nt, Human
accaugacaggcauagug

SEQ ID NO: 810809 - RNA, 19 nt, Human
acccaacacacucaggcca

SEQ ID NO: 810810 - RNA, 23 nt, Human
acccagcauagcuuguccagccc

SEQ ID NO: 810811 - RNA, 25 nt, Human
accgcaggaacccagcugcgggcag

SEQ ID NO: 810812 - RNA, 26 nt, Human
agaaggccaggggcaagcagugggca

SEQ ID NO: 810813 - RNA, 24 nt, Human
agacagccccgaccagaggcaucc

SEQ ID NO: 810814 - RNA, 18 nt, Human
agacccagcauagcuugu

SEQ ID NO: 810815 - RNA, 19 nt, Human
agcaccaagccacgccacc

SEQ ID NO: 810816 - RNA, 21 nt, Human
agcccccuggccuggcacccc

SEQ ID NO: 810817 - RNA, 18 nt, Human
agcccuggccacagccuc

SEQ ID NO: 810818 - RNA, 19 nt, Human
aggcaggcagggcacuugg

SEQ ID NO: 810819 - RNA, 23 nt, Human
aggcaggcagggcacuuggggcu

SEQ ID NO: 810820 - RNA, 21 nt, Human
aggcagggcacuuggggcuuc

SEQ ID NO: 810821 - RNA, 18 nt, Human
aggccaggggcaagcaga

SEQ ID NO: 810822 - RNA, 23 nt, Human
aggccaggggcaagcagagggca

SEQ ID NO: 810823 - RNA, 19 nt, Human
aggcuggggaccgaggccu

SEQ ID NO: 810824 - RNA, 18 nt, Human
agggcacagagcuugccu

SEQ ID NO: 810825 - RNA, 22 nt, Human
agggcacagagcuugccucucg

SEQ ID NO: 810826 - RNA, 22 nt, Human
aguucagugucuggagugagcc

SEQ ID NO: 810827 - RNA, 18 nt, Human
caaaaucacuccugcuuc

SEQ ID NO: 810828 - RNA, 22 nt, Human
caagcagagggcaccuuugcac

SEQ ID NO: 810829 - RNA, 24 nt, Human
caagcagagggcaccuuugcacua

SEQ ID NO: 810830 - RNA, 18 nt, Human
cacacacgccaccugggg

SEQ ID NO: 810831 - RNA, 22 nt, Human
cacccaggcuggggaccgaggc

SEQ ID NO: 810832 - RNA, 22 nt, Human
cacccuaccugcagcucaucuc

SEQ ID NO: 810833 - RNA, 21 nt, Human
cacuacgccgccaggcacgcc

SEQ ID NO: 810834 - RNA, 20 nt, Human
cacugcuagcuaagcaaggu

SEQ ID NO: 810835 - RNA, 22 nt, Human
cagccacccuggcucuccagga

SEQ ID NO: 810836 - RNA, 22 nt, Human
cagccgaguccagcuaaagcca

SEQ ID NO: 810837 - RNA, 19 nt, Human
cagcugcgggcagcuggaa

SEQ ID NO: 810838 - RNA, 22 nt, Human
cagcuggaacccaacacacuca

SEQ ID NO: 810839 - RNA, 23 nt, Human
ccaagccacgccacccgucauga

SEQ ID NO: 810840 - RNA, 18 nt, Human
ccacaccguccuugcaua

SEQ ID NO: 810841 - RNA, 18 nt, Human
ccagacagccccgaccag

SEQ ID NO: 810842 - RNA, 21 nt, Human
ccccagggcuggccucagucc

SEQ ID NO: 810843 - RNA, 23 nt, Human
ccccagggcuggccucaguccug

SEQ ID NO: 810844 - RNA, 20 nt, Human
ccccggaacuucugccgagc

SEQ ID NO: 810845 - RNA, 20 nt, Human
ccccgugacagaccagggag

SEQ ID NO: 810846 - RNA, 20 nt, Human
ccccuggccuggcaccccgu

SEQ ID NO: 810847 - RNA, 28 nt, Human
cccgcaggugcccgcauugacccgccag

SEQ ID NO: 810848 - RNA, 25 nt, Human
cccgccgggaacccaucagccccca

SEQ ID NO: 810849 - RNA, 22 nt, Human
cccucuucccuccucaggaccc

SEQ ID NO: 810850 - RNA, 18 nt, Human
ccgagcccuguggccguc

SEQ ID NO: 810851 - RNA, 23 nt, Human
ccgggaacccaucagcccccagg

SEQ ID NO: 810852 - RNA, 24 nt, Human
ccuccaaaggagacacacagccga

SEQ ID NO: 810853 - RNA, 19 nt, Human
ccucgggggagaagggcuc

SEQ ID NO: 810854 - RNA, 22 nt, Human
ccucuugggggaggagugaaca

SEQ ID NO: 810855 - RNA, 24 nt, Human
ccuggcaccccgugagccucgcca

SEQ ID NO: 810856 - RNA, 24 nt, Human
ccuggccacagccuccgccuuggc

SEQ ID NO: 810857 - RNA, 21 nt, Human
ccuuacacaauacgcacugcu

SEQ ID NO: 810858 - RNA, 19 nt, Human
cgccaggcacgccaugucc

SEQ ID NO: 810859 - RNA, 20 nt, Human
cgccaggcacgccauguccc

SEQ ID NO: 810860 - RNA, 18 nt, Human
cggccaagcuccagccuu

SEQ ID NO: 810861 - RNA, 20 nt, Human
cgggaacccaucagcccccc

SEQ ID NO: 810862 - RNA, 19 nt, Human
cucaggccacuccauggcu

SEQ ID NO: 810863 - RNA, 25 nt, Human
cuccaggaccucugcagccggcacc

SEQ ID NO: 810864 - RNA, 20 nt, Human
cuccgccuuggcuccuggcc

SEQ ID NO: 810865 - RNA, 18 nt, Human
cuccuggcucccaguccu

SEQ ID NO: 810866 - RNA, 21 nt, Human
cugaaggccucacaucaucaa

SEQ ID NO: 810867 - RNA, 24 nt, Human
cugcuacaugcugggcgccugggg

SEQ ID NO: 810868 - RNA, 18 nt, Human
cuuccaacuuccuucugg

SEQ ID NO: 810869 - RNA, 19 nt, Human
cuuggcuccuggcucccag

SEQ ID NO: 810870 - RNA, 22 nt, Human
gaaauccuaguuaccugcagaa

SEQ ID NO: 810871 - RNA, 20 nt, Human
gcaccgucuacacuaaccug

SEQ ID NO: 810872 - RNA, 18 nt, Human
gccaugucccuggagggc

SEQ ID NO: 810873 - RNA, 21 nt, Human
gcccaacacucacccaggcug

SEQ ID NO: 810874 - RNA, 19 nt, Human
gccuuggcuccuggcuccc

SEQ ID NO: 810875 - RNA, 20 nt, Human
gccuuggcuccuggcuccca

SEQ ID NO: 810876 - RNA, 19 nt, Human
gcggcgcgugccgccgauu

SEQ ID NO: 810877 - RNA, 19 nt, Human
ggaacagcaccaagccacg

SEQ ID NO: 810878 - RNA, 20 nt, Human
ggaacuucugccgagcccuu

SEQ ID NO: 810879 - RNA, 21 nt, Human
ggccagcaccaugacaggcau

SEQ ID NO: 810880 - RNA, 19 nt, Human
ggcuccuggcucccagucc

SEQ ID NO: 810881 - RNA, 18 nt, Human
gggcacagcgggaagagc

SEQ ID NO: 810882 - RNA, 21 nt, Human
gggcacagcgggaagagcggc

SEQ ID NO: 810883 - RNA, 28 nt, Human
gggcaguguggccaucagccgggccccc

SEQ ID NO: 810884 - RNA, 18 nt, Human
gggcuucacuggcucccu

SEQ ID NO: 810885 - RNA, 20 nt, Human
gucccuggagggcacgggug

SEQ ID NO: 810886 - RNA, 24 nt, Human
uacacaauacgcacugcuagcuaa

SEQ ID NO: 810887 - RNA, 21 nt, Human
uacgcacugcuagcuaagcaa

SEQ ID NO: 810888 - RNA, 19 nt, Human
ucccacgagcacacacgcc

SEQ ID NO: 810889 - RNA, 22 nt, Human
ucccacgagcacacacgccacc

SEQ ID NO: 810890 - RNA, 18 nt, Human
uccuggcucccaguccuc

SEQ ID NO: 810891 - RNA, 22 nt, Human
uccuugccucugccguccaggg

SEQ ID NO: 810892 - RNA, 23 nt, Human
uccuugccucugccguccagggg

SEQ ID NO: 810893 - RNA, 22 nt, Human
ucgcccaggaaggccugugucc

SEQ ID NO: 810894 - RNA, 23 nt, Human
ugacaccuggacacgccggccaa

SEQ ID NO: 810895 - RNA, 23 nt, Human
ugagccucgcccacaggggcugg

SEQ ID NO: 810896 - RNA, 18 nt, Human
ugaggcagaaggccaggg

SEQ ID NO: 810897 - RNA, 25 nt, Human
ugagggcauccgaggcuacuggcca

SEQ ID NO: 810898 - RNA, 23 nt, Human
ugccucugccguccagggguggg

SEQ ID NO: 810899 - RNA, 19 nt, Human
ugcggcgucaccgcaggaa

SEQ ID NO: 810900 - RNA, 18 nt, Human
ugcuacaugcugggcgcc

SEQ ID NO: 810901 - RNA, 21 nt, Human
ugcugggcgccuggggaacag

SEQ ID NO: 810902 - RNA, 23 nt, Human
ugcuuccaacuuccuucuggucu

SEQ ID NO: 810903 - RNA, 22 nt, Human
uggcgcaggaguccaguggacg

SEQ ID NO: 810904 - RNA, 24 nt, Human
uggcgcaggaguccaguggacggc

SEQ ID NO: 810905 - RNA, 22 nt, Human
uggcucccaguccuccucuccu

SEQ ID NO: 810906 - RNA, 24 nt, Human
uggcuccuggcucccaguccuccu

SEQ ID NO: 810907 - RNA, 22 nt, Human
uggcucucucccucuucccucc

SEQ ID NO: 810908 - RNA, 23 nt, Human
uggcuggugcccguccuguaguc

SEQ ID NO: 810909 - RNA, 22 nt, Human
ugggccaugaccacagggcagu

SEQ ID NO: 810910 - RNA, 20 nt, Human
uguagucccuccucucgcga

SEQ ID NO: 810911 - RNA, 19 nt, Human
ugucccuggagggcacggg

SEQ ID NO: 810912 - RNA, 21 nt, Human
uguggccaucagccgugucca

SEQ ID NO: 810913 - RNA, 23 nt, Human
uuccaacuuccuucuggucucaa

SEQ ID NO: 810914 - RNA, 20 nt, Human
uucugccgagcccuguggcc

SEQ ID NO: 810915 - RNA, 21 nt, Human
uugcauaggucucgcgguuga

SEQ ID NO: 810916 - RNA, 19 nt, Human
uugccucucgaccccgccg

SEQ ID NO: 810917 - RNA, 19 nt, Human
aaacagaggcagacacagg

SEQ ID NO: 810918 - RNA, 22 nt, Human
aagcucaaaccuggggccaugg

SEQ ID NO: 810919 - RNA, 21 nt, Human
aagcuguggggacagugcugg

SEQ ID NO: 810920 - RNA, 24 nt, Human
acacucaccacaagaugcaaggac

SEQ ID NO: 810921 - RNA, 23 nt, Human
accacaagaugcaaggaccacaa

SEQ ID NO: 810922 - RNA, 27 nt, Human
accccuaccccuuuccccccucccccc

SEQ ID NO: 810923 - RNA, 21 nt, Human
accccuuuccccccucccccc

SEQ ID NO: 810924 - RNA, 21 nt, Human
accccuuuccccccucccccc

SEQ ID NO: 810925 - RNA, 18 nt, Human
accuggaggugagggcuc

SEQ ID NO: 810926 - RNA, 23 nt, Human
acuggcccagcagacacacacac

SEQ ID NO: 810927 - RNA, 19 nt, Human
agaagaaacuccccuccuc

SEQ ID NO: 810928 - RNA, 18 nt, Human
agagagacaaauccacag

SEQ ID NO: 810929 - RNA, 18 nt, Human
agagugaagaggggccuu

SEQ ID NO: 810930 - RNA, 21 nt, Human
agauggcuccagagagggaga

SEQ ID NO: 810931 - RNA, 22 nt, Human
agauguugagagagaagccuca

SEQ ID NO: 810932 - RNA, 20 nt, Human
agcggugguggcgguggugg

SEQ ID NO: 810933 - RNA, 18 nt, Human
agcugggcugggccgggc

SEQ ID NO: 810934 - RNA, 22 nt, Human
aggcagacacagggcacaaggg

SEQ ID NO: 810935 - RNA, 26 nt, Human
aggcagacacagggcacaagggugug

SEQ ID NO: 810936 - RNA, 18 nt, Human
aggcccagaggccaggga

SEQ ID NO: 810937 - RNA, 23 nt, Human
aggggaaaaggauuccccacugg

SEQ ID NO: 810938 - RNA, 18 nt, Human
aggggggccaggacucug

SEQ ID NO: 810939 - RNA, 18 nt, Human
aggggugaggacacccag

SEQ ID NO: 810940 - RNA, 23 nt, Human
agggugugggaaauggggagaua

SEQ ID NO: 810941 - RNA, 26 nt, Human
aggguuggcagcggugguggcggugg

SEQ ID NO: 810942 - RNA, 20 nt, Human
agugugaauucccuuccaga

SEQ ID NO: 810943 - RNA, 25 nt, Human
aucaacaccccccaccccuaccccu

SEQ ID NO: 810944 - RNA, 23 nt, Human
augaggcugagggagaggugaag

SEQ ID NO: 810945 - RNA, 24 nt, Human
auugagcaggaagugagccugaug

SEQ ID NO: 810946 - RNA, 19 nt, Human
cacaagaugcaaggaccac

SEQ ID NO: 810947 - RNA, 22 nt, Human
cacaagaugcaaggaccacaaa

SEQ ID NO: 810948 - RNA, 20 nt, Human
cacacucaccacaagaugca

SEQ ID NO: 810949 - RNA, 18 nt, Human
caccccccaccccuaccc

SEQ ID NO: 810950 - RNA, 24 nt, Human
caccccccaccccuaccccuuucc

SEQ ID NO: 810951 - RNA, 21 nt, Human
caccccccuccccgauccaca

SEQ ID NO: 810952 - RNA, 22 nt, Human
caccccccuccccgauccacag

SEQ ID NO: 810953 - RNA, 21 nt, Human
cagaagaaacuccccuccucc

SEQ ID NO: 810954 - RNA, 21 nt, Human
cagacacacacacacucacca

SEQ ID NO: 810955 - RNA, 25 nt, Human
cagacacagggcacaaggguguggg

SEQ ID NO: 810956 - RNA, 23 nt, Human
cagcagacacacacacacucacc

SEQ ID NO: 810957 - RNA, 20 nt, Human
cagccccugagcugggcugg

SEQ ID NO: 810958 - RNA, 19 nt, Human
caggggggccaggacucug

SEQ ID NO: 810959 - RNA, 20 nt, Human
cagggucaauacacagccaa

SEQ ID NO: 810960 - RNA, 22 nt, Human
caucaacaccccccaccccuac

SEQ ID NO: 810961 - RNA, 24 nt, Human
caucucuggcccauucaacaacuu

SEQ ID NO: 810962 - RNA, 22 nt, Human
cauucuuguuugaaaaacaaga

SEQ ID NO: 810963 - RNA, 24 nt, Human
cauucuuguuugaaaaacaagaca

SEQ ID NO: 810964 - RNA, 18 nt, Human
ccaaaaugagugggguga

SEQ ID NO: 810965 - RNA, 18 nt, Human
ccaccccccuccccgauc

SEQ ID NO: 810966 - RNA, 22 nt, Human
ccagagaagagauaaaauacag

SEQ ID NO: 810967 - RNA, 22 nt, Human
ccaggugagugugagcccaagg

SEQ ID NO: 810968 - RNA, 21 nt, Human
ccaugguuggggaagggggac

SEQ ID NO: 810969 - RNA, 18 nt, Human
cccagcagacacacacac

SEQ ID NO: 810970 - RNA, 21 nt, Human
cccagcagacacacacacacu

SEQ ID NO: 810971 - RNA, 22 nt, Human
ccccaccccccuccccgaucca

SEQ ID NO: 810972 - RNA, 25 nt, Human
ccccaccccccuccccgauccacag

SEQ ID NO: 810973 - RNA, 18 nt, Human
ccccagcgcccaacacgg

SEQ ID NO: 810974 - RNA, 22 nt, Human
cccccaccccccuccccgaucc

SEQ ID NO: 810975 - RNA, 22 nt, Human
cccccuccccccaccccccucc

SEQ ID NO: 810976 - RNA, 24 nt, Human
ccccgauccacagcuaagucaaac

SEQ ID NO: 810977 - RNA, 22 nt, Human
ccccuaccccuuuccccccucc

SEQ ID NO: 810978 - RNA, 24 nt, Human
cccuuuguccucaggaacugggga

SEQ ID NO: 810979 - RNA, 18 nt, Human
ccgugucuucacucccag

SEQ ID NO: 810980 - RNA, 26 nt, Human
ccuacagugggacaguugguagggac

SEQ ID NO: 810981 - RNA, 18 nt, Human
ccuggcucccccagcgcc

SEQ ID NO: 810982 - RNA, 18 nt, Human
ccuggggccaugguuggg

SEQ ID NO: 810983 - RNA, 22 nt, Human
cgaggagcucaaagccugaggg

SEQ ID NO: 810984 - RNA, 21 nt, Human
cggacgagaagcaaucuauac

SEQ ID NO: 810985 - RNA, 19 nt, Human
cggccaguugggccgcugc

SEQ ID NO: 810986 - RNA, 20 nt, Human
cgggcuccuaggccugcacu

SEQ ID NO: 810987 - RNA, 22 nt, Human
cucaaucaagagaguuuccacu

SEQ ID NO: 810988 - RNA, 18 nt, Human
cuccccccaccccccucc

SEQ ID NO: 810989 - RNA, 22 nt, Human
cuccccccaccccccuccccga

SEQ ID NO: 810990 - RNA, 25 nt, Human
cuccccccaccccccuccccgaucc

SEQ ID NO: 810991 - RNA, 22 nt, Human
cucugacuggggcagcuuccuc

SEQ ID NO: 810992 - RNA, 18 nt, Human
cugcacagcucuggaucc

SEQ ID NO: 810993 - RNA, 19 nt, Human
cuggcccucugacuggggc

SEQ ID NO: 810994 - RNA, 19 nt, Human
cuggcugcaucucuggccc

SEQ ID NO: 810995 - RNA, 22 nt, Human
cuucacucccaggaagguugcg

SEQ ID NO: 810996 - RNA, 21 nt, Human
cuugcgggcaaggaggcuguc

SEQ ID NO: 810997 - RNA, 21 nt, Human
gagcaggaagugagccugaug

SEQ ID NO: 810998 - RNA, 24 nt, Human
gaggguuggcagcggugguggcgg

SEQ ID NO: 810999 - RNA, 19 nt, Human
gcacuuuggggauggcugg

SEQ ID NO: 811000 - RNA, 22 nt, Human
gcagaagaaacuccccuccucc

SEQ ID NO: 811001 - RNA, 20 nt, Human
gcccaagagaguaaggggcc

SEQ ID NO: 811002 - RNA, 20 nt, Human
gccugggcugcacagcucug

SEQ ID NO: 811003 - RNA, 19 nt, Human
gcgggcaaggaggcugucc

SEQ ID NO: 811004 - RNA, 21 nt, Human
ggaaaaggauuccccacuggc

SEQ ID NO: 811005 - RNA, 23 nt, Human
ggaaauggggagauauggagagg

SEQ ID NO: 811006 - RNA, 21 nt, Human
ggaagugaggggcuggauucu

SEQ ID NO: 811007 - RNA, 19 nt, Human
ggagcuacuggaccuggag

SEQ ID NO: 811008 - RNA, 23 nt, Human
ggaggguuggcagcggugguggc

SEQ ID NO: 811009 - RNA, 20 nt, Human
ggauggggacaucuggacug

SEQ ID NO: 811010 - RNA, 18 nt, Human
ggcccuggcucccccagc

SEQ ID NO: 811011 - RNA, 18 nt, Human
gggaaauggggagauaug

SEQ ID NO: 811012 - RNA, 22 nt, Human
gggacaguugguagggacuccg

SEQ ID NO: 811013 - RNA, 19 nt, Human
gggauggcugguguggagc

SEQ ID NO: 811014 - RNA, 22 nt, Human
gggccaugguuggggaaggggg

SEQ ID NO: 811015 - RNA, 25 nt, Human
gggccucugacacagugaugaaaca

SEQ ID NO: 811016 - RNA, 18 nt, Human
gggcugggccgggcuagg

SEQ ID NO: 811017 - RNA, 24 nt, Human
ggggguggggggcguggggggagg

SEQ ID NO: 811018 - RNA, 27 nt, Human
ggggguggggggcguggggggaggguu

SEQ ID NO: 811019 - RNA, 21 nt, Human
gggguggggggcgugggggga

SEQ ID NO: 811020 - RNA, 22 nt, Human
gggguggggggcguggggggag

SEQ ID NO: 811021 - RNA, 27 nt, Human
ggguuggcagcggugguggcgguggug

SEQ ID NO: 811022 - RNA, 19 nt, Human
ggugagugugagcccaagg

SEQ ID NO: 811023 - RNA, 18 nt, Human
gguggcagcggugguggc

SEQ ID NO: 811024 - RNA, 19 nt, Human
gguuggcagcggugguggc

SEQ ID NO: 811025 - RNA, 29 nt, Human
gguuggcagcggugguggcggugguggug

SEQ ID NO: 811026 - RNA, 18 nt, Human
gguugggauccgggcgcc

SEQ ID NO: 811027 - RNA, 24 nt, Human
gugcugggugcacugccaaggagu

SEQ ID NO: 811028 - RNA, 24 nt, Human
guggcgguggugguggcagcggug

SEQ ID NO: 811029 - RNA, 19 nt, Human
guggcuguuuucugcagac

SEQ ID NO: 811030 - RNA, 21 nt, Human
gugguggcagcggugguggca

SEQ ID NO: 811031 - RNA, 21 nt, Human
gugguggcgguggugguggca

SEQ ID NO: 811032 - RNA, 23 nt, Human
gugguggcgguggugguggcagc

SEQ ID NO: 811033 - RNA, 21 nt, Human
uaaaauacagcucugcuguga

SEQ ID NO: 811034 - RNA, 24 nt, Human
uaaaauacagcucugcugugagca

SEQ ID NO: 811035 - RNA, 19 nt, Human
uaacauaucacgcuagcuu

SEQ ID NO: 811036 - RNA, 21 nt, Human
uaagaugaauagauuuaauca

SEQ ID NO: 811037 - RNA, 23 nt, Human
uacacagccaaaagcauauacuc

SEQ ID NO: 811038 - RNA, 20 nt, Human
uaccaaggaugggcagggau

SEQ ID NO: 811039 - RNA, 22 nt, Human
uaccaaggaugggcagggauua

SEQ ID NO: 811040 - RNA, 18 nt, Human
uagagagacaaauccaca

SEQ ID NO: 811041 - RNA, 24 nt, Human
uauguaguauauauacuauauaca

SEQ ID NO: 811042 - RNA, 19 nt, Human
ucaaacucccaaggacagu

SEQ ID NO: 811043 - RNA, 18 nt, Human
ucaacaacuugguccugg

SEQ ID NO: 811044 - RNA, 18 nt, Human
ucaauacacagccaaaag

SEQ ID NO: 811045 - RNA, 20 nt, Human
ucacucccaggaagguugcg

SEQ ID NO: 811046 - RNA, 25 nt, Human
uccacagcuaagucaaaccgggguc

SEQ ID NO: 811047 - RNA, 21 nt, Human
uccagcuugcaguggcugagg

SEQ ID NO: 811048 - RNA, 19 nt, Human
uccccccuccccccacccc

SEQ ID NO: 811049 - RNA, 20 nt, Human
ucccuguaccuggcccucug

SEQ ID NO: 811050 - RNA, 18 nt, Human
uccuugccgggagaacuc

SEQ ID NO: 811051 - RNA, 20 nt, Human
ucucacccaggcacaggccc

SEQ ID NO: 811052 - RNA, 22 nt, Human
ucugacuggggcagcuuccucc

SEQ ID NO: 811053 - RNA, 19 nt, Human
ugaaaaacaagacauaaaa

SEQ ID NO: 811054 - RNA, 23 nt, Human
ugacuggggcagcuuccuccgag

SEQ ID NO: 811055 - RNA, 23 nt, Human
ugagcagagugaagaggggccuu

SEQ ID NO: 811056 - RNA, 24 nt, Human
ugaggacacccagggcggcagcua

SEQ ID NO: 811057 - RNA, 23 nt, Human
ugaggggcuggauucugcagaag

SEQ ID NO: 811058 - RNA, 18 nt, Human
ugaguggggugaucccag

SEQ ID NO: 811059 - RNA, 24 nt, Human
ugcaaggaccacaaagcucaaacc

SEQ ID NO: 811060 - RNA, 21 nt, Human
ugcggggguggggggcguggg

SEQ ID NO: 811061 - RNA, 27 nt, Human
uggaaugacacaggcaggggcugagug

SEQ ID NO: 811062 - RNA, 18 nt, Human
uggacccugacuggccca

SEQ ID NO: 811063 - RNA, 18 nt, Human
uggacugagcugcccugc

SEQ ID NO: 811064 - RNA, 19 nt, Human
uggauggggacaucuggac

SEQ ID NO: 811065 - RNA, 20 nt, Human
uggcagcggugguggcggug

SEQ ID NO: 811066 - RNA, 20 nt, Human
uggcccucugacuggggcag

SEQ ID NO: 811067 - RNA, 23 nt, Human
uggcccucugacuggggcagcuu

SEQ ID NO: 811068 - RNA, 19 nt, Human
uggcgguggaaugacacag

SEQ ID NO: 811069 - RNA, 20 nt, Human
uggcgguggugguggcagcc

SEQ ID NO: 811070 - RNA, 23 nt, Human
uggcgguggugguggcagcggug

SEQ ID NO: 811071 - RNA, 24 nt, Human
uggcgguggugguggcagcggugg

SEQ ID NO: 811072 - RNA, 23 nt, Human
uggcugguguggagcuacuggac

SEQ ID NO: 811073 - RNA, 20 nt, Human
ugggaaauggggagauaugg

SEQ ID NO: 811074 - RNA, 20 nt, Human
ugggcugggccgggcuaggc

SEQ ID NO: 811075 - RNA, 20 nt, Human
ugguggcgguggugguggcc

SEQ ID NO: 811076 - RNA, 20 nt, Human
uggugguggcagcgguggug

SEQ ID NO: 811077 - RNA, 22 nt, Human
uggugguggcagcggugguggc

SEQ ID NO: 811078 - RNA, 25 nt, Human
uguggccaggcccuuuguccucagg

SEQ ID NO: 811079 - RNA, 24 nt, Human
ugugggaaauggggagauauggag

SEQ ID NO: 811080 - RNA, 19 nt, Human
uucuuuguucccuacagug

SEQ ID NO: 811081 - RNA, 18 nt, Human
uuggcagcggugguggcg

SEQ ID NO: 811082 - RNA, 22 nt, Human
aaaaaaccaaaacaaaacaaaa

SEQ ID NO: 811083 - RNA, 25 nt, Human
aaaaagaaacuugggaaggcuauuu

SEQ ID NO: 811084 - RNA, 21 nt, Human
aaacaagaauuuggaccaaaa

SEQ ID NO: 811085 - RNA, 19 nt, Human
aaaccaaaacaaaacaaaa

SEQ ID NO: 811086 - RNA, 19 nt, Human
aaugaaaagacacaaugga

SEQ ID NO: 811087 - RNA, 23 nt, Human
aaugaaaagacacaauggaaaga

SEQ ID NO: 811088 - RNA, 21 nt, Human
acaaaacagugcuguuucaga

SEQ ID NO: 811089 - RNA, 19 nt, Human
acaaugugagcucaguguu

SEQ ID NO: 811090 - RNA, 23 nt, Human
acacagcaucccacugaaguaga

SEQ ID NO: 811091 - RNA, 20 nt, Human
acagcuuuucaacuguuaac

SEQ ID NO: 811092 - RNA, 24 nt, Human
acuagguacuuuguaaacacacga

SEQ ID NO: 811093 - RNA, 21 nt, Human
agacagcgauccgagcccgga

SEQ ID NO: 811094 - RNA, 19 nt, Human
agaggcccccccuagcccu

SEQ ID NO: 811095 - RNA, 19 nt, Human
agaggguggggagaaagaa

SEQ ID NO: 811096 - RNA, 19 nt, Human
agagguugugggggagccg

SEQ ID NO: 811097 - RNA, 22 nt, Human
agcaagagacagaaacacacag

SEQ ID NO: 811098 - RNA, 19 nt, Human
agcagggggcgguggaggg

SEQ ID NO: 811099 - RNA, 21 nt, Human
agcagggggcgguggaggggc

SEQ ID NO: 811100 - RNA, 20 nt, Human
agccauugggucgcuugcug

SEQ ID NO: 811101 - RNA, 23 nt, Human
agcccuccugcgggggccugcgg

SEQ ID NO: 811102 - RNA, 19 nt, Human
agcucaguguucagggcca

SEQ ID NO: 811103 - RNA, 21 nt, Human
agcucucggccuaccucguuc

SEQ ID NO: 811104 - RNA, 23 nt, Human
aggaggggcagcagggggcggug

SEQ ID NO: 811105 - RNA, 18 nt, Human
aggaguuuguugcuugga

SEQ ID NO: 811106 - RNA, 18 nt, Human
aggcccccccuagcccuc

SEQ ID NO: 811107 - RNA, 24 nt, Human
aggggcagcagggggcgguggagg

SEQ ID NO: 811108 - RNA, 21 nt, Human
aggugcugcugguggugaugg

SEQ ID NO: 811109 - RNA, 23 nt, Human
aguaaaaagaggguggggagaaa

SEQ ID NO: 811110 - RNA, 19 nt, Human
aguuuguugcuuggaacua

SEQ ID NO: 811111 - RNA, 22 nt, Human
aucaagaaaugaguuguccaca

SEQ ID NO: 811112 - RNA, 21 nt, Human
aucugagggucuggacucgca

SEQ ID NO: 811113 - RNA, 18 nt, Human
auuggacuuuuggaccau

SEQ ID NO: 811114 - RNA, 28 nt, Human
caaaacaaaacaaaacagugcuguuuca

SEQ ID NO: 811115 - RNA, 19 nt, Human
caaaacaaaacagugcugu

SEQ ID NO: 811116 - RNA, 19 nt, Human
caagagacagaaacacaca

SEQ ID NO: 811117 - RNA, 21 nt, Human
caagggagacugucuuuuggc

SEQ ID NO: 811118 - RNA, 20 nt, Human
cacagcucaggugguguugg

SEQ ID NO: 811119 - RNA, 19 nt, Human
cacugcaguuacuuucugc

SEQ ID NO: 811120 - RNA, 19 nt, Human
cacugcaguuacuuucugc

SEQ ID NO: 811121 - RNA, 27 nt, Human
cagcaagagacagaaacacacagcaaa

SEQ ID NO: 811122 - RNA, 19 nt, Human
cagccucuacagaguuucu

SEQ ID NO: 811123 - RNA, 24 nt, Human
cagcucaggugguguuggcggcag

SEQ ID NO: 811124 - RNA, 24 nt, Human
caggaggggcagcagggggcggug

SEQ ID NO: 811125 - RNA, 23 nt, Human
cagggccacaugaauagaggucu

SEQ ID NO: 811126 - RNA, 23 nt, Human
cauguccagccacuuuucugucc

SEQ ID NO: 811127 - RNA, 23 nt, Human
ccagaggcccccccuagcccucc

SEQ ID NO: 811128 - RNA, 19 nt, Human
ccagcaagagacagaaaca

SEQ ID NO: 811129 - RNA, 22 nt, Human
ccccagaggcccccccuagccc

SEQ ID NO: 811130 - RNA, 25 nt, Human
ccccagaggcccccccuagcccucc

SEQ ID NO: 811131 - RNA, 20 nt, Human
ccccgccccagaggcccccc

SEQ ID NO: 811132 - RNA, 23 nt, Human
ccccgccccagaggcccccccua

SEQ ID NO: 811133 - RNA, 20 nt, Human
ccccggcucuauucuaauac

SEQ ID NO: 811134 - RNA, 18 nt, Human
ccccuggccaugcuguac

SEQ ID NO: 811135 - RNA, 23 nt, Human
ccccugggguugaagcgggcggc

SEQ ID NO: 811136 - RNA, 21 nt, Human
cccgccccagaggcccccccu

SEQ ID NO: 811137 - RNA, 21 nt, Human
ccgguaaaauccucacucccu

SEQ ID NO: 811138 - RNA, 20 nt, Human
ccucuaagguuuccuagccu

SEQ ID NO: 811139 - RNA, 18 nt, Human
cgcccggagucacggcga

SEQ ID NO: 811140 - RNA, 22 nt, Human
cgcuccgguguuuucuccucuu

SEQ ID NO: 811141 - RNA, 21 nt, Human
cggccuaccucguucauaucg

SEQ ID NO: 811142 - RNA, 19 nt, Human
cgggggccugcgggggcgc

SEQ ID NO: 811143 - RNA, 19 nt, Human
cuccacgauagcacugugc

SEQ ID NO: 811144 - RNA, 21 nt, Human
cuccccaacacgaauucuuuu

SEQ ID NO: 811145 - RNA, 22 nt, Human
cuccgguguuuucuccucuuug

SEQ ID NO: 811146 - RNA, 19 nt, Human
cucugggauggugaggugg

SEQ ID NO: 811147 - RNA, 20 nt, Human
cugcagagagauucucccca

SEQ ID NO: 811148 - RNA, 20 nt, Human
cugccuuuuagugcuuggag

SEQ ID NO: 811149 - RNA, 23 nt, Human
cuuacaaacuuccagcaaauugc

SEQ ID NO: 811150 - RNA, 21 nt, Human
cuugcccccuggccaugcugu

SEQ ID NO: 811151 - RNA, 20 nt, Human
gaaaaagaaacuugggaagg

SEQ ID NO: 811152 - RNA, 23 nt, Human
gaaaugaguuguccacaaagcca

SEQ ID NO: 811153 - RNA, 20 nt, Human
gacucccccucaccuaguug

SEQ ID NO: 811154 - RNA, 19 nt, Human
gagacagcuuuucaacugu

SEQ ID NO: 811155 - RNA, 18 nt, Human
gagauucuccccaacacg

SEQ ID NO: 811156 - RNA, 21 nt, Human
gaggggaguuaguaaaaagag

SEQ ID NO: 811157 - RNA, 18 nt, Human
gaggggcagcagggggcg

SEQ ID NO: 811158 - RNA, 21 nt, Human
gcaaucuuaagucgcuagcca

SEQ ID NO: 811159 - RNA, 18 nt, Human
gcagcaguggcgguggcc

SEQ ID NO: 811160 - RNA, 20 nt, Human
gcaguggcgguggccuuggu

SEQ ID NO: 811161 - RNA, 24 nt, Human
gccccagaggcccccccuagcccu

SEQ ID NO: 811162 - RNA, 18 nt, Human
gcgggggcgcuguguccc

SEQ ID NO: 811163 - RNA, 21 nt, Human
gcugaguuccucugguccccu

SEQ ID NO: 811164 - RNA, 19 nt, Human
gcugcuguugcugcugcuu

SEQ ID NO: 811165 - RNA, 24 nt, Human
ggaggggaguuaguaaaaagaggg

SEQ ID NO: 811166 - RNA, 18 nt, Human
ggaggggcuguaguggug

SEQ ID NO: 811167 - RNA, 22 nt, Human
gggagccguggagaaguugugg

SEQ ID NO: 811168 - RNA, 19 nt, Human
gggauuguccagcaagaga

SEQ ID NO: 811169 - RNA, 18 nt, Human
gggcagcagggggcggug

SEQ ID NO: 811170 - RNA, 24 nt, Human
gggcagcagggggcgguggagggg

SEQ ID NO: 811171 - RNA, 21 nt, Human
ggggggaggauaaguuggaaa

SEQ ID NO: 811172 - RNA, 21 nt, Human
gucuucagagguuguggggga

SEQ ID NO: 811173 - RNA, 26 nt, Human
gugauagucuggugggggcggugggg

SEQ ID NO: 811174 - RNA, 19 nt, Human
gugguggcagcaguggcgg

SEQ ID NO: 811175 - RNA, 25 nt, Human
gugguggcagcaguggcgguggccu

SEQ ID NO: 811176 - RNA, 19 nt, Human
guguuggcggcagacagcg

SEQ ID NO: 811177 - RNA, 18 nt, Human
guugucuucucccaaaag

SEQ ID NO: 811178 - RNA, 24 nt, Human
uaaauaaaaaaccaaaacaaaaca

SEQ ID NO: 811179 - RNA, 19 nt, Human
uaaaugaaaagcaaucuua

SEQ ID NO: 811180 - RNA, 20 nt, Human
uaaccagcagccuugacuuu

SEQ ID NO: 811181 - RNA, 21 nt, Human
uacaguaucaagagagacaaa

SEQ ID NO: 811182 - RNA, 23 nt, Human
uaccucguucauaucguccuuca

SEQ ID NO: 811183 - RNA, 23 nt, Human
uacuuuguaaacacacgaucugg

SEQ ID NO: 811184 - RNA, 26 nt, Human
uauacugccuuuuagugcuuggaguu

SEQ ID NO: 811185 - RNA, 23 nt, Human
uaucaagaaaugaguuguccaca

SEQ ID NO: 811186 - RNA, 21 nt, Human
uauccuggaguuuagacaggg

SEQ ID NO: 811187 - RNA, 22 nt, Human
uauggggauguuucugcagaga

SEQ ID NO: 811188 - RNA, 21 nt, Human
ucaaggaacccuggagcgcaa

SEQ ID NO: 811189 - RNA, 28 nt, Human
ucagggccacaugaauagaggucuucag

SEQ ID NO: 811190 - RNA, 21 nt, Human
uccaaggagccccgccccaga

SEQ ID NO: 811191 - RNA, 19 nt, Human
uccaccaagcugacaagag

SEQ ID NO: 811192 - RNA, 21 nt, Human
uccagcaagagacagaaacac

SEQ ID NO: 811193 - RNA, 23 nt, Human
uccagggaaaaagaaacuuggga

SEQ ID NO: 811194 - RNA, 18 nt, Human
uccauuguuuauuuggag

SEQ ID NO: 811195 - RNA, 19 nt, Human
uccucccuuuccuuucgcu

SEQ ID NO: 811196 - RNA, 18 nt, Human
ucuaagguuuccuagccu

SEQ ID NO: 811197 - RNA, 21 nt, Human
ucuaauugcauuugacagcuc

SEQ ID NO: 811198 - RNA, 22 nt, Human
ucuauccugcaagcuucaggaa

SEQ ID NO: 811199 - RNA, 24 nt, Human
ucucccaaaagagggagacagcuu

SEQ ID NO: 811200 - RNA, 19 nt, Human
ucucggggugacugagccc

SEQ ID NO: 811201 - RNA, 19 nt, Human
ucuuuucaaggaacccugg

SEQ ID NO: 811202 - RNA, 19 nt, Human
ugaaaagacacaauggaaa

SEQ ID NO: 811203 - RNA, 19 nt, Human
ugaaaagacacaauggaaa

SEQ ID NO: 811204 - RNA, 24 nt, Human
ugaaaagacacaauggaaagauua

SEQ ID NO: 811205 - RNA, 19 nt, Human
ugacaagagccacuaggua

SEQ ID NO: 811206 - RNA, 24 nt, Human
ugacugagcccccuccaaggagcc

SEQ ID NO: 811207 - RNA, 22 nt, Human
ugagggucuggacucgcaauaa

SEQ ID NO: 811208 - RNA, 21 nt, Human
ugcaccgagucauguccagcc

SEQ ID NO: 811209 - RNA, 21 nt, Human
ugcagagaaacacauuucuaa

SEQ ID NO: 811210 - RNA, 24 nt, Human
ugccaccauuauugcuacuguuca

SEQ ID NO: 811211 - RNA, 25 nt, Human
ugccaccauuauugcuacuguucag

SEQ ID NO: 811212 - RNA, 24 nt, Human
ugccagcuuuccuugcccccuggc

SEQ ID NO: 811213 - RNA, 30 nt, Human
ugccagcuuuccuugcccccuggccauuac

SEQ ID NO: 811214 - RNA, 26 nt, Human
ugcuacuguucagcaggugcugcugg

SEQ ID NO: 811215 - RNA, 24 nt, Human
uggaaacaaacccugauuaacuua

SEQ ID NO: 811216 - RNA, 20 nt, Human
uggaacuaguaccuccucau

SEQ ID NO: 811217 - RNA, 19 nt, Human
uggagaaguugugggggag

SEQ ID NO: 811218 - RNA, 20 nt, Human
uggagcgcaaucagggcuga

SEQ ID NO: 811219 - RNA, 19 nt, Human
uggaggggcuguaguggug

SEQ ID NO: 811220 - RNA, 22 nt, Human
uggcggcagacagcgauccgag

SEQ ID NO: 811221 - RNA, 21 nt, Human
uggcgguggccuugguguguu

SEQ ID NO: 811222 - RNA, 26 nt, Human
ugggaggccgcaggaggggcagcagg

SEQ ID NO: 811223 - RNA, 21 nt, Human
uggggcugcuguugcugcugc

SEQ ID NO: 811224 - RNA, 19 nt, Human
ugggggagccguggagaag

SEQ ID NO: 811225 - RNA, 26 nt, Human
ugguggcagcaguggcgguggccuug

SEQ ID NO: 811226 - RNA, 18 nt, Human
uggugggggcgguggggc

SEQ ID NO: 811227 - RNA, 20 nt, Human
uggugggggcgguggggcug

SEQ ID NO: 811228 - RNA, 22 nt, Human
ugguguuggcggcagacagcga

SEQ ID NO: 811229 - RNA, 23 nt, Human
uguccugcagagagauucucccc

SEQ ID NO: 811230 - RNA, 21 nt, Human
ugugggggagccguggagaag

SEQ ID NO: 811231 - RNA, 19 nt, Human
uuaguaaaaagaggguggg

SEQ ID NO: 811232 - RNA, 21 nt, Human
uucuauuccucacccccggcu

SEQ ID NO: 811233 - RNA, 19 nt, Human
uuggaacuaguaccuccuc

SEQ ID NO: 811234 - RNA, 19 nt, Human
uuggaccaugcuuuuuucu

SEQ ID NO: 811235 - RNA, 25 nt, Human
uuggacuuuuggaccaugcuuuuuu

SEQ ID NO: 811236 - RNA, 20 nt, Human
uugugggggaggggaguuag

SEQ ID NO: 811237 - RNA, 20 nt, Human
uuugacagcucuggagaagu

SEQ ID NO: 811238 - RNA, 20 nt, Human
uuuuuccucccuuuccuuuc

SEQ ID NO: 811239 - RNA, 19 nt, Human
aaaaaacccaaguaggaca

SEQ ID NO: 811240 - RNA, 23 nt, Human
aaaacaaacaaaaaacccaagua

SEQ ID NO: 811241 - RNA, 27 nt, Human
aaaacaauaaaaacaaacaaaaaaccc

SEQ ID NO: 811242 - RNA, 23 nt, Human
aaacaaaaaacccaaguaggaca

SEQ ID NO: 811243 - RNA, 24 nt, Human
aaacauacaccaucuuuaaaagcc

SEQ ID NO: 811244 - RNA, 18 nt, Human
aaacccuccuucuccuuc

SEQ ID NO: 811245 - RNA, 19 nt, Human
aaacccucgccccaccccc

SEQ ID NO: 811246 - RNA, 19 nt, Human
aaaccuuccuucucauacu

SEQ ID NO: 811247 - RNA, 21 nt, Human
aaacugaaacagaaacgggga

SEQ ID NO: 811248 - RNA, 18 nt, Human
aaagagcuggcgaggaca

SEQ ID NO: 811249 - RNA, 20 nt, Human
aacacagugagacccugucu

SEQ ID NO: 811250 - RNA, 21 nt, Human
aacacagugagacccugucuc

SEQ ID NO: 811251 - RNA, 25 nt, Human
aagaaaaugaaucacaagccauaua

SEQ ID NO: 811252 - RNA, 25 nt, Human
aagaagccacgagauccaacaaaug

SEQ ID NO: 811253 - RNA, 24 nt, Human
aagcaagaaacugcagggggaaga

SEQ ID NO: 811254 - RNA, 23 nt, Human
aagguaucacuauguugcccagg

SEQ ID NO: 811255 - RNA, 18 nt, Human
aaguccccagauccccuc

SEQ ID NO: 811256 - RNA, 22 nt, Human
aagugcuaggauuacaggcgug

SEQ ID NO: 811257 - RNA, 23 nt, Human
aagugcuaggauuacaggcguga

SEQ ID NO: 811258 - RNA, 24 nt, Human
acacuccagccugggcaacagagc

SEQ ID NO: 811259 - RNA, 25 nt, Human
acagagcaagauccuaucucuaaaa

SEQ ID NO: 811260 - RNA, 22 nt, Human
acccugucucuacaaaaaauaa

SEQ ID NO: 811261 - RNA, 22 nt, Human
accugagcagcucuuuaaaaaa

SEQ ID NO: 811262 - RNA, 18 nt, Human
acguugugacucaggcug

SEQ ID NO: 811263 - RNA, 18 nt, Human
acuacacuccagccuggg

SEQ ID NO: 811264 - RNA, 24 nt, Human
acuacacuccagccugggcaacag

SEQ ID NO: 811265 - RNA, 24 nt, Human
acuauguugcccaggcugguuuag

SEQ ID NO: 811266 - RNA, 23 nt, Human
acucaccccucgcucgugugcac

SEQ ID NO: 811267 - RNA, 20 nt, Human
acugaacgcaagggcagcuc

SEQ ID NO: 811268 - RNA, 24 nt, Human
agaaaaaaacauuuuuacuagaag

SEQ ID NO: 811269 - RNA, 18 nt, Human
agaaagcaagaaacugca

SEQ ID NO: 811270 - RNA, 21 nt, Human
agaaagcaagaaacugcaggg

SEQ ID NO: 811271 - RNA, 18 nt, Human
agagcccaucguacuaga

SEQ ID NO: 811272 - RNA, 20 nt, Human
agcaaaaacaauaaaaacaa

SEQ ID NO: 811273 - RNA, 21 nt, Human
agcgagugcuccccuggcuga

SEQ ID NO: 811274 - RNA, 23 nt, Human
agcugggcgugguggugcaugcc

SEQ ID NO: 811275 - RNA, 24 nt, Human
aggaucacuugaggucagcagcuc

SEQ ID NO: 811276 - RNA, 24 nt, Human
aggcaugguggcucaugccuguaa

SEQ ID NO: 811277 - RNA, 24 nt, Human
aggcgggaggaucgcuugagccug

SEQ ID NO: 811278 - RNA, 24 nt, Human
aggcugaggugggaggaucacuug

SEQ ID NO: 811279 - RNA, 23 nt, Human
aggggucugggaucugccagggg

SEQ ID NO: 811280 - RNA, 18 nt, Human
aggugggaggaucacuug

SEQ ID NO: 811281 - RNA, 23 nt, Human
aggugggaggaucacuugagguc

SEQ ID NO: 811282 - RNA, 21 nt, Human
agucuacuacagaaacccucg

SEQ ID NO: 811283 - RNA, 24 nt, Human
agugcuuuggcaggcugagguggg

SEQ ID NO: 811284 - RNA, 23 nt, Human
aguuaaggcgggaggaucgcuug

SEQ ID NO: 811285 - RNA, 24 nt, Human
aucauaccacuacacuccagccug

SEQ ID NO: 811286 - RNA, 24 nt, Human
auccaaacccaggccugccaucac

SEQ ID NO: 811287 - RNA, 23 nt, Human
aucgcuugagccugggaguucaa

SEQ ID NO: 811288 - RNA, 22 nt, Human
augaagacagggagccaggcag

SEQ ID NO: 811289 - RNA, 21 nt, Human
augccugggcuacacccacaa

SEQ ID NO: 811290 - RNA, 20 nt, Human
caaacauacaccaucuuuaa

SEQ ID NO: 811291 - RNA, 18 nt, Human
caaagagcuggcgaggac

SEQ ID NO: 811292 - RNA, 19 nt, Human
caaagagcuggcgaggaca

SEQ ID NO: 811293 - RNA, 22 nt, Human
caacacagugagacccugucuc

SEQ ID NO: 811294 - RNA, 24 nt, Human
caacacagugagacccugucucua

SEQ ID NO: 811295 - RNA, 24 nt, Human
caagguaucacuauguugcccagg

SEQ ID NO: 811296 - RNA, 21 nt, Human
caaucaaaccagaacgucuga

SEQ ID NO: 811297 - RNA, 24 nt, Human
cacacacguuuauauauauuugga

SEQ ID NO: 811298 - RNA, 22 nt, Human
cacagcccugccucugucaagc

SEQ ID NO: 811299 - RNA, 20 nt, Human
caccaucuuuaaaagccaag

SEQ ID NO: 811300 - RNA, 19 nt, Human
cacccacaacaaucaaacc

SEQ ID NO: 811301 - RNA, 21 nt, Human
cacccccaaaacaccucuaaa

SEQ ID NO: 811302 - RNA, 24 nt, Human
caccgcccuucccaacaugcccaa

SEQ ID NO: 811303 - RNA, 25 nt, Human
caccgcccuucccaacaugcccaaa

SEQ ID NO: 811304 - RNA, 24 nt, Human
caccuaggcucugggaccugccaa

SEQ ID NO: 811305 - RNA, 26 nt, Human
cacuacacuccagccugggcaacaga

SEQ ID NO: 811306 - RNA, 19 nt, Human
cacuauguugcccaggcug

SEQ ID NO: 811307 - RNA, 23 nt, Human
cacuauguugcccaggcugguuu

SEQ ID NO: 811308 - RNA, 31 nt, Human
cacuauguugcccaggcugguuuaggacucc

SEQ ID NO: 811309 - RNA, 22 nt, Human
cacucugcacacacaucacaga

SEQ ID NO: 811310 - RNA, 22 nt, Human
cacugcagcaggucccgggggc

SEQ ID NO: 811311 - RNA, 19 nt, Human
cacugcccucucuuucugc

SEQ ID NO: 811312 - RNA, 20 nt, Human
cacuggggcuugaaaggugg

SEQ ID NO: 811313 - RNA, 18 nt, Human
cagaacccuugggggagc

SEQ ID NO: 811314 - RNA, 24 nt, Human
cagagcaagauccuaucucuaaaa

SEQ ID NO: 811315 - RNA, 19 nt, Human
cagauaaaauacucaaccc

SEQ ID NO: 811316 - RNA, 28 nt, Human
cagauaaaauacucaacccccugaaagg

SEQ ID NO: 811317 - RNA, 19 nt, Human
cagcaugaaacuaaucccc

SEQ ID NO: 811318 - RNA, 22 nt, Human
cagccacggccacucaccccuc

SEQ ID NO: 811319 - RNA, 19 nt, Human
caggugucacacccaaguc

SEQ ID NO: 811320 - RNA, 20 nt, Human
cagugcagcgagugcucccc

SEQ ID NO: 811321 - RNA, 23 nt, Human
cauggacccuccagaugccccuu

SEQ ID NO: 811322 - RNA, 20 nt, Human
cauuucaaauauguccuggc

SEQ ID NO: 811323 - RNA, 23 nt, Human
ccaagugcuaggauuacaggcgu

SEQ ID NO: 811324 - RNA, 24 nt, Human
ccaccgcccuucccaacaugccca

SEQ ID NO: 811325 - RNA, 21 nt, Human
ccacuacacuccagccugggc

SEQ ID NO: 811326 - RNA, 23 nt, Human
ccacuacacuccagccugggcaa

SEQ ID NO: 811327 - RNA, 24 nt, Human
ccacuacacuccagccugggcaac

SEQ ID NO: 811328 - RNA, 24 nt, Human
cccaaaacaccucuaaauuucaga

SEQ ID NO: 811329 - RNA, 24 nt, Human
cccaagugcuaggauuacaggcgu

SEQ ID NO: 811330 - RNA, 30 nt, Human
cccacagccacggccacucaccccucgcuu

SEQ ID NO: 811331 - RNA, 21 nt, Human
cccacgcaccaguacuccuuc

SEQ ID NO: 811332 - RNA, 19 nt, Human
cccauguauuagauagaac

SEQ ID NO: 811333 - RNA, 22 nt, Human
ccccaacaaaagauuaaaaaga

SEQ ID NO: 811334 - RNA, 24 nt, Human
ccccacccccaaaacaccucuaaa

SEQ ID NO: 811335 - RNA, 24 nt, Human
ccccagagguagaaucauuuuacc

SEQ ID NO: 811336 - RNA, 20 nt, Human
ccccaggcugccagcugcuu

SEQ ID NO: 811337 - RNA, 20 nt, Human
cccccaaaacaccucuaaau

SEQ ID NO: 811338 - RNA, 18 nt, Human
cccccucaagcuagcuuu

SEQ ID NO: 811339 - RNA, 21 nt, Human
ccccggcaaaaguccuugaag

SEQ ID NO: 811340 - RNA, 25 nt, Human
cccucaagcuagcuuuugagcccag

SEQ ID NO: 811341 - RNA, 25 nt, Human
ccgcccuucccaacaugcccaaacc

SEQ ID NO: 811342 - RNA, 25 nt, Human
ccucgccccacccccaaaacaccuc

SEQ ID NO: 811343 - RNA, 25 nt, Human
ccucgccccacccccaaaacaccuc

SEQ ID NO: 811344 - RNA, 26 nt, Human
ccucgccccacccccaaaacaccucu

SEQ ID NO: 811345 - RNA, 22 nt, Human
ccucugccccuugcaaaggggc

SEQ ID NO: 811346 - RNA, 21 nt, Human
ccugagcucaagugauccgcc

SEQ ID NO: 811347 - RNA, 22 nt, Human
ccugagcucaagugauccgccu

SEQ ID NO: 811348 - RNA, 23 nt, Human
ccugagcucaagugauccgccug

SEQ ID NO: 811349 - RNA, 20 nt, Human
ccugcauccuugggcagggu

SEQ ID NO: 811350 - RNA, 22 nt, Human
ccuggccaggcaugguggcuca

SEQ ID NO: 811351 - RNA, 19 nt, Human
ccuggggcaucugcccccu

SEQ ID NO: 811352 - RNA, 23 nt, Human
ccuggggcaucugcccccucaag

SEQ ID NO: 811353 - RNA, 20 nt, Human
ccuguaaucccagugcuuug

SEQ ID NO: 811354 - RNA, 19 nt, Human
ccuguagucccagcuacuc

SEQ ID NO: 811355 - RNA, 25 nt, Human
ccuguagucccagcuacucaggcag

SEQ ID NO: 811356 - RNA, 19 nt, Human
ccuuagacacccaucccaa

SEQ ID NO: 811357 - RNA, 24 nt, Human
ccuuagacacccaucccaaacccu

SEQ ID NO: 811358 - RNA, 23 nt, Human
ccuuggucccaggguccuaaggc

SEQ ID NO: 811359 - RNA, 23 nt, Human
cgaacaccccccggcaaaagucc

SEQ ID NO: 811360 - RNA, 24 nt, Human
cgaacaccccccggcaaaaguccu

SEQ ID NO: 811361 - RNA, 19 nt, Human
cgaggacacaaauaugggg

SEQ ID NO: 811362 - RNA, 19 nt, Human
cgccccacccccaaaacac

SEQ ID NO: 811363 - RNA, 20 nt, Human
cgccccacccccaaaacacc

SEQ ID NO: 811364 - RNA, 26 nt, Human
cgccccacccccaaaacaccucuaaa

SEQ ID NO: 811365 - RNA, 23 nt, Human
cgccugccacugccucccaaguu

SEQ ID NO: 811366 - RNA, 19 nt, Human
cggcucccuccggagccug

SEQ ID NO: 811367 - RNA, 21 nt, Human
cgguaggguugccagguuuag

SEQ ID NO: 811368 - RNA, 24 nt, Human
cgugagccaccaugccuggccugu

SEQ ID NO: 811369 - RNA, 23 nt, Human
cgugugcacagccuccccacaua

SEQ ID NO: 811370 - RNA, 20 nt, Human
cuaaacgcuggaacgaagca

SEQ ID NO: 811371 - RNA, 19 nt, Human
cuaagguuuuccugcaacu

SEQ ID NO: 811372 - RNA, 20 nt, Human
cuaauccccaacaaaagauu

SEQ ID NO: 811373 - RNA, 25 nt, Human
cuacagaaacccucgccccaccccc

SEQ ID NO: 811374 - RNA, 22 nt, Human
cuacuacagaaacccucgcccc

SEQ ID NO: 811375 - RNA, 19 nt, Human
cuagaagaccgacugccua

SEQ ID NO: 811376 - RNA, 21 nt, Human
cucaagugauccgccugccac

SEQ ID NO: 811377 - RNA, 24 nt, Human
cucaugccuguaaucccagugcuu

SEQ ID NO: 811378 - RNA, 21 nt, Human
cuccagaugccccuucauccu

SEQ ID NO: 811379 - RNA, 19 nt, Human
cucccacucccaaggggac

SEQ ID NO: 811380 - RNA, 21 nt, Human
cuccucccacuuccaguaccc

SEQ ID NO: 811381 - RNA, 21 nt, Human
cuuucugcaacucccccucca

SEQ ID NO: 811382 - RNA, 23 nt, Human
cuuucugcaacucccccuccacc

SEQ ID NO: 811383 - RNA, 22 nt, Human
gaagcacgccccaggcugccag

SEQ ID NO: 811384 - RNA, 18 nt, Human
gaccuugccuccucccac

SEQ ID NO: 811385 - RNA, 18 nt, Human
gaucacuugaggucagca

SEQ ID NO: 811386 - RNA, 19 nt, Human
gaucacuugaggucagcag

SEQ ID NO: 811387 - RNA, 24 nt, Human
gaucacuugaggucagcagcucga

SEQ ID NO: 811388 - RNA, 22 nt, Human
gauccccucuccucacccucac

SEQ ID NO: 811389 - RNA, 18 nt, Human
gaucgcuugagccuggga

SEQ ID NO: 811390 - RNA, 21 nt, Human
gauuaagaaaaugaaucacaa

SEQ ID NO: 811391 - RNA, 18 nt, Human
gauuacaggcgugagcca

SEQ ID NO: 811392 - RNA, 21 nt, Human
gauuacaggcgugagccacca

SEQ ID NO: 811393 - RNA, 22 nt, Human
gauuacaggcgugagccaccau

SEQ ID NO: 811394 - RNA, 19 nt, Human
gccaagcaacaagccaggu

SEQ ID NO: 811395 - RNA, 22 nt, Human
gccaggcaugguggcucaugcc

SEQ ID NO: 811396 - RNA, 23 nt, Human
gccagguuuagcaaaaacaauaa

SEQ ID NO: 811397 - RNA, 22 nt, Human
gccccaggcugccagcugcuuc

SEQ ID NO: 811398 - RNA, 20 nt, Human
gccugccacugccucccaag

SEQ ID NO: 811399 - RNA, 24 nt, Human
gcuccaaaguccugggucagacca

SEQ ID NO: 811400 - RNA, 22 nt, Human
ggaaagaucacaauuuugcucc

SEQ ID NO: 811401 - RNA, 20 nt, Human
ggagcugggacaccuggggc

SEQ ID NO: 811402 - RNA, 22 nt, Human
ggauuacaggcgugagccacca

SEQ ID NO: 811403 - RNA, 24 nt, Human
ggauuacaggcgugagccaccaug

SEQ ID NO: 811404 - RNA, 22 nt, Human
ggccaggcaugguggcucaugg

SEQ ID NO: 811405 - RNA, 22 nt, Human
ggguaaggcccccacgcaccag

SEQ ID NO: 811406 - RNA, 24 nt, Human
gguccuggccacagcccugccucu

SEQ ID NO: 811407 - RNA, 24 nt, Human
gguggcucaugccuguaaucccag

SEQ ID NO: 811408 - RNA, 18 nt, Human
guacaggaugaggaugcc

SEQ ID NO: 811409 - RNA, 18 nt, Human
guaccaugucuauuccca

SEQ ID NO: 811410 - RNA, 19 nt, Human
guggguggcuccaaagucc

SEQ ID NO: 811411 - RNA, 22 nt, Human
uaaaaaaucccaugccugggcu

SEQ ID NO: 811412 - RNA, 21 nt, Human
uaaauuggaauuaccugagca

SEQ ID NO: 811413 - RNA, 19 nt, Human
uaagggcagaaacaaagau

SEQ ID NO: 811414 - RNA, 18 nt, Human
uacacgaagcucacuccu

SEQ ID NO: 811415 - RNA, 22 nt, Human
uacagaaacccucgccccaccc

SEQ ID NO: 811416 - RNA, 22 nt, Human
uacaggcgugagccaccaugcc

SEQ ID NO: 811417 - RNA, 22 nt, Human
uacaggcgugagccaccaugcc

SEQ ID NO: 811418 - RNA, 23 nt, Human
uacaggcgugagccaccaugccu

SEQ ID NO: 811419 - RNA, 18 nt, Human
uacagugugagugugagg

SEQ ID NO: 811420 - RNA, 24 nt, Human
uaccacuacacuccagccugggca

SEQ ID NO: 811421 - RNA, 22 nt, Human
uacuccuucugaccuaacaccc

SEQ ID NO: 811422 - RNA, 21 nt, Human
uagacacccaucccaaacccu

SEQ ID NO: 811423 - RNA, 22 nt, Human
uagagacaagguaucacuaugu

SEQ ID NO: 811424 - RNA, 26 nt, Human
uagauaauguacacgaagcucacucc

SEQ ID NO: 811425 - RNA, 20 nt, Human
uagcaaaaacaauaaaaaca

SEQ ID NO: 811426 - RNA, 25 nt, Human
uagcaaaaacaauaaaaacaaacaa

SEQ ID NO: 811427 - RNA, 18 nt, Human
uaggauuacaggcgugag

SEQ ID NO: 811428 - RNA, 22 nt, Human
uaggauuacaggcgugagccac

SEQ ID NO: 811429 - RNA, 24 nt, Human
uaggauuacaggcgugagccacca

SEQ ID NO: 811430 - RNA, 25 nt, Human
uaggauuacaggcgugagccaccau

SEQ ID NO: 811431 - RNA, 24 nt, Human
uagucccagcuacucaggcaguua

SEQ ID NO: 811432 - RNA, 18 nt, Human
uauguugcccaggcuggu

SEQ ID NO: 811433 - RNA, 22 nt, Human
uauguugcccaggcugguuuag

SEQ ID NO: 811434 - RNA, 23 nt, Human
uauguugcccaggcugguuuagg

SEQ ID NO: 811435 - RNA, 21 nt, Human
ucaacuccugccuuagacacu

SEQ ID NO: 811436 - RNA, 18 nt, Human
ucaagagacccucuccuc

SEQ ID NO: 811437 - RNA, 24 nt, Human
ucacaauuuugcucccacucccaa

SEQ ID NO: 811438 - RNA, 22 nt, Human
ucacacccaaguccccagaucc

SEQ ID NO: 811439 - RNA, 20 nt, Human
ucagaccagugcaaccccau

SEQ ID NO: 811440 - RNA, 21 nt, Human
ucaugccuguaaucccagugc

SEQ ID NO: 811441 - RNA, 20 nt, Human
uccaguacccucugccccuu

SEQ ID NO: 811442 - RNA, 23 nt, Human
ucccaagugcuaggauuacaggc

SEQ ID NO: 811443 - RNA, 21 nt, Human
ucccuccggagccuguuccca

SEQ ID NO: 811444 - RNA, 18 nt, Human
uccuagaagaccgacugc

SEQ ID NO: 811445 - RNA, 22 nt, Human
uccucacccucacugcccucuc

SEQ ID NO: 811446 - RNA, 23 nt, Human
uccuggccacagcccugccucug

SEQ ID NO: 811447 - RNA, 18 nt, Human
ucgccccacccccaaaac

SEQ ID NO: 811448 - RNA, 23 nt, Human
ucgcuugagccugggaguucaag

SEQ ID NO: 811449 - RNA, 24 nt, Human
ucgcuugagccugggaguucaagg

SEQ ID NO: 811450 - RNA, 23 nt, Human
ucuaaaaauaacaucugucccau

SEQ ID NO: 811451 - RNA, 18 nt, Human
ucucauggacccuccaga

SEQ ID NO: 811452 - RNA, 21 nt, Human
ucugaccuaacacccaggcca

SEQ ID NO: 811453 - RNA, 23 nt, Human
ucugaccuaacacccaggccaaa

SEQ ID NO: 811454 - RNA, 21 nt, Human
ugaagaaaguaagguuggacu

SEQ ID NO: 811455 - RNA, 21 nt, Human
ugaccuaacacccaggccaaa

SEQ ID NO: 811456 - RNA, 27 nt, Human
ugaccuaacacccaggccaaagcuaug

SEQ ID NO: 811457 - RNA, 24 nt, Human
ugagccugggaguucaagguugug

SEQ ID NO: 811458 - RNA, 18 nt, Human
ugagcucaagugauccgc

SEQ ID NO: 811459 - RNA, 21 nt, Human
ugaggcaacacagugagaccc

SEQ ID NO: 811460 - RNA, 24 nt, Human
ugagggccccaucucauggacccu

SEQ ID NO: 811461 - RNA, 19 nt, Human
ugaggugggaggaucacuu

SEQ ID NO: 811462 - RNA, 24 nt, Human
ugaggugggaggaucacuugaggu

SEQ ID NO: 811463 - RNA, 26 nt, Human
ugaggugggaggaucacuugagguca

SEQ ID NO: 811464 - RNA, 21 nt, Human
ugauagcagaccuugccuccu

SEQ ID NO: 811465 - RNA, 18 nt, Human
ugcccacagccacggcca

SEQ ID NO: 811466 - RNA, 19 nt, Human
ugcccaggcugguuuagga

SEQ ID NO: 811467 - RNA, 24 nt, Human
ugcccaggcugguuuaggacuccu

SEQ ID NO: 811468 - RNA, 28 nt, Human
ugcccaggcugguuuaggacuccugagc

SEQ ID NO: 811469 - RNA, 22 nt, Human
ugccccgcacuagcugcuauga

SEQ ID NO: 811470 - RNA, 18 nt, Human
ugccccuucauccucucu

SEQ ID NO: 811471 - RNA, 24 nt, Human
ugccuguagucccagcuacucagg

SEQ ID NO: 811472 - RNA, 23 nt, Human
ugccuuagacacccaucccaaac

SEQ ID NO: 811473 - RNA, 24 nt, Human
ugccuuagacacccaucccaaacc

SEQ ID NO: 811474 - RNA, 24 nt, Human
ugcuaggauuacaggcgugagcca

SEQ ID NO: 811475 - RNA, 20 nt, Human
ugcuuccgcccaccuuuccc

SEQ ID NO: 811476 - RNA, 19 nt, Human
uggcacugcagcagguccc

SEQ ID NO: 811477 - RNA, 24 nt, Human
uggcaggcugaggugggaggauca

SEQ ID NO: 811478 - RNA, 24 nt, Human
uggccaaagagcuggcgaggacac

SEQ ID NO: 811479 - RNA, 24 nt, Human
uggccaggcaugguggcucaugcc

SEQ ID NO: 811480 - RNA, 18 nt, Human
uggcgaggacacaaauau

SEQ ID NO: 811481 - RNA, 22 nt, Human
uggcucaugccuguaaucccag

SEQ ID NO: 811482 - RNA, 24 nt, Human
uggcucaugccuguaaucccagug

SEQ ID NO: 811483 - RNA, 21 nt, Human
ugggacaccuggggcaucugc

SEQ ID NO: 811484 - RNA, 23 nt, Human
ugggaccugccaccaaggggucu

SEQ ID NO: 811485 - RNA, 18 nt, Human
uggugcaugccuguaguc

SEQ ID NO: 811486 - RNA, 24 nt, Human
ugguggcucaugccuguaauccca

SEQ ID NO: 811487 - RNA, 24 nt, Human
ugguggugcaugccuguaguccca

SEQ ID NO: 811488 - RNA, 19 nt, Human
uguaacccaggccucugca

SEQ ID NO: 811489 - RNA, 20 nt, Human
uguaacccaggccucugcag

SEQ ID NO: 811490 - RNA, 18 nt, Human
uguccuggccaggcaugg

SEQ ID NO: 811491 - RNA, 19 nt, Human
ugugacaguucgcaaagaa

SEQ ID NO: 811492 - RNA, 23 nt, Human
uguggguggcuccaaaguccugg

SEQ ID NO: 811493 - RNA, 21 nt, Human
uuaaaagccaagcaacaagcc

SEQ ID NO: 811494 - RNA, 22 nt, Human
uuagacacccaucccaaacccu

SEQ ID NO: 811495 - RNA, 19 nt, Human
uuagcugggcgugguggug

SEQ ID NO: 811496 - RNA, 24 nt, Human
uuagcugggcgugguggugcaugc

SEQ ID NO: 811497 - RNA, 22 nt, Human
uucaaacuuaacugggcauccu

SEQ ID NO: 811498 - RNA, 22 nt, Human
uucaaagcuaaaagaaaaaaac

SEQ ID NO: 811499 - RNA, 19 nt, Human
uucaaauauguccuggcca

SEQ ID NO: 811500 - RNA, 18 nt, Human
uucacucugcacacacau

SEQ ID NO: 811501 - RNA, 23 nt, Human
uuccugcaacuuucccaaccgcc

SEQ ID NO: 811502 - RNA, 24 nt, Human
uugagccugggaguucaagguugu

SEQ ID NO: 811503 - RNA, 25 nt, Human
uuggcaggcugaggugggaggauca

SEQ ID NO: 811504 - RNA, 24 nt, Human
uuguggugagcuaugaucauacca

SEQ ID NO: 811505 - RNA, 21 nt, Human
uuuaggacuccugagcucaag

SEQ ID NO: 811506 - RNA, 20 nt, Human
uuucaaauauguccuggcca

SEQ ID NO: 811507 - RNA, 23 nt, Human
aaaguaaaauugccuugcugaaa

SEQ ID NO: 811508 - RNA, 18 nt, Human
aagaaaggaacuccuccc

SEQ ID NO: 811509 - RNA, 20 nt, Human
acacacccgcacccccuuca

SEQ ID NO: 811510 - RNA, 19 nt, Human
acaccgcccccaacacaca

SEQ ID NO: 811511 - RNA, 18 nt, Human
acagaguaugaggagucc

SEQ ID NO: 811512 - RNA, 24 nt, Human
accaagauaucugugcuggacgug

SEQ ID NO: 811513 - RNA, 19 nt, Human
acccaccccccacccgugc

SEQ ID NO: 811514 - RNA, 19 nt, Human
accuccaggauuauccucu

SEQ ID NO: 811515 - RNA, 23 nt, Human
acgaacuuccuucaaaccuccuu

SEQ ID NO: 811516 - RNA, 22 nt, Human
acucuuauuacuaccuagggca

SEQ ID NO: 811517 - RNA, 24 nt, Human
acuuuaaggcaagaucggaguccc

SEQ ID NO: 811518 - RNA, 19 nt, Human
agagcugugguccacggcg

SEQ ID NO: 811519 - RNA, 22 nt, Human
agauccgcauaggaacaugaaa

SEQ ID NO: 811520 - RNA, 21 nt, Human
agcaucacccccucccaaagc

SEQ ID NO: 811521 - RNA, 22 nt, Human
agcccacaccgcccccaacaca

SEQ ID NO: 811522 - RNA, 19 nt, Human
agcuaguguggguggcuuc

SEQ ID NO: 811523 - RNA, 19 nt, Human
aggaagaugcccacucaac

SEQ ID NO: 811524 - RNA, 23 nt, Human
aggaagaugcccacucaaccucc

SEQ ID NO: 811525 - RNA, 22 nt, Human
aggacacacaugcacugcagcg

SEQ ID NO: 811526 - RNA, 21 nt, Human
aggacacaguagcagggacaa

SEQ ID NO: 811527 - RNA, 23 nt, Human
aggagacccuauacuagcagcua

SEQ ID NO: 811528 - RNA, 21 nt, Human
aggcaagaggagcccccaggg

SEQ ID NO: 811529 - RNA, 18 nt, Human
aggcaggaaaguggugug

SEQ ID NO: 811530 - RNA, 19 nt, Human
aggcaggagccccagcaca

SEQ ID NO: 811531 - RNA, 19 nt, Human
agggcagaggucuccaaac

SEQ ID NO: 811532 - RNA, 22 nt, Human
agggccugaggccgcacccaga

SEQ ID NO: 811533 - RNA, 18 nt, Human
agggggugggggggaugc

SEQ ID NO: 811534 - RNA, 21 nt, Human
agggugaaagcucugcccagc

SEQ ID NO: 811535 - RNA, 24 nt, Human
aggugaugaguuggaggcugggga

SEQ ID NO: 811536 - RNA, 22 nt, Human
agguggccccagggcccaaaca

SEQ ID NO: 811537 - RNA, 19 nt, Human
aggugguggagugaaagaa

SEQ ID NO: 811538 - RNA, 21 nt, Human
aggugguggagugaaagaagc

SEQ ID NO: 811539 - RNA, 18 nt, Human
aucacccccucccaaagc

SEQ ID NO: 811540 - RNA, 24 nt, Human
aucccaaaaccauccccccaaccc

SEQ ID NO: 811541 - RNA, 22 nt, Human
auuggcauagcccugggugaaa

SEQ ID NO: 811542 - RNA, 18 nt, Human
caaaacagcuucuggggc

SEQ ID NO: 811543 - RNA, 21 nt, Human
caaaaccauccccccaacccc

SEQ ID NO: 811544 - RNA, 20 nt, Human
caaacccugggccacggacc

SEQ ID NO: 811545 - RNA, 19 nt, Human
caagacagugaccuaaagc

SEQ ID NO: 811546 - RNA, 21 nt, Human
cacagaguaugaggaguccaa

SEQ ID NO: 811547 - RNA, 21 nt, Human
cacagccuauaccccuuccuu

SEQ ID NO: 811548 - RNA, 21 nt, Human
caccccccacccgugcuccca

SEQ ID NO: 811549 - RNA, 21 nt, Human
cacccccucccaaagcccccc

SEQ ID NO: 811550 - RNA, 22 nt, Human
caccccuuucuccugguuccca

SEQ ID NO: 811551 - RNA, 22 nt, Human
caccgcccccaacacacacucc

SEQ ID NO: 811552 - RNA, 22 nt, Human
caccugugaugcaggugggaag

SEQ ID NO: 811553 - RNA, 20 nt, Human
cagcacacacccgcaccccc

SEQ ID NO: 811554 - RNA, 21 nt, Human
cagcaguggcauuagauccgc

SEQ ID NO: 811555 - RNA, 20 nt, Human
cagcaucacccccucccaaa

SEQ ID NO: 811556 - RNA, 19 nt, Human
cagccugccccuccagugg

SEQ ID NO: 811557 - RNA, 23 nt, Human
cagccuggucagccccgagguag

SEQ ID NO: 811558 - RNA, 20 nt, Human
cagcgccucugacugccagg

SEQ ID NO: 811559 - RNA, 19 nt, Human
cagcuaggagacccugcca

SEQ ID NO: 811560 - RNA, 24 nt, Human
caggacagcacacacccgcacccc

SEQ ID NO: 811561 - RNA, 22 nt, Human
caggagccccagcacaccgcuc

SEQ ID NO: 811562 - RNA, 20 nt, Human
cauagguuggguuugggugc

SEQ ID NO: 811563 - RNA, 22 nt, Human
caucacccccucccaaagcccc

SEQ ID NO: 811564 - RNA, 26 nt, Human
caucacccccucccaaagccccccca

SEQ ID NO: 811565 - RNA, 22 nt, Human
caucccaaaaccauccccccaa

SEQ ID NO: 811566 - RNA, 23 nt, Human
caucccaggagcacccacaagga

SEQ ID NO: 811567 - RNA, 20 nt, Human
cauccccccaacccccaucc

SEQ ID NO: 811568 - RNA, 24 nt, Human
caugaaaccaguccaugaugccaa

SEQ ID NO: 811569 - RNA, 24 nt, Human
caugaugccaaaaagguuggggac

SEQ ID NO: 811570 - RNA, 27 nt, Human
ccaacccccauccauggaaaaauuguc

SEQ ID NO: 811571 - RNA, 21 nt, Human
ccacccagaccucuuccaacc

SEQ ID NO: 811572 - RNA, 22 nt, Human
ccaccccccacccgugcuccca

SEQ ID NO: 811573 - RNA, 20 nt, Human
ccagagcucccuuugccaac

SEQ ID NO: 811574 - RNA, 18 nt, Human
ccaggacagcacacaccc

SEQ ID NO: 811575 - RNA, 18 nt, Human
ccauuccagcugugggca

SEQ ID NO: 811576 - RNA, 18 nt, Human
cccaaacacagcuuugaa

SEQ ID NO: 811577 - RNA, 21 nt, Human
cccacagcagggucccagagc

SEQ ID NO: 811578 - RNA, 23 nt, Human
ccccaacccccauccauggaaaa

SEQ ID NO: 811579 - RNA, 20 nt, Human
ccccaagagcaagagagaau

SEQ ID NO: 811580 - RNA, 21 nt, Human
ccccacccagaccucuuccaa

SEQ ID NO: 811581 - RNA, 18 nt, Human
ccccaggacagcacacac

SEQ ID NO: 811582 - RNA, 24 nt, Human
ccccaggacagcacacacccgcac

SEQ ID NO: 811583 - RNA, 20 nt, Human
ccccauccauggaaaaauug

SEQ ID NO: 811584 - RNA, 18 nt, Human
ccccgaaaagcagcuggc

SEQ ID NO: 811585 - RNA, 22 nt, Human
cccgaaaagcagcuggcccccg

SEQ ID NO: 811586 - RNA, 19 nt, Human
cccggcugcuguuccugcu

SEQ ID NO: 811587 - RNA, 20 nt, Human
cccucagucugcaagcugug

SEQ ID NO: 811588 - RNA, 21 nt, Human
cccucccuccucaggguccca

SEQ ID NO: 811589 - RNA, 23 nt, Human
cccugcaucccaggaagaugccc

SEQ ID NO: 811590 - RNA, 20 nt, Human
cccugggccacuggaggccc

SEQ ID NO: 811591 - RNA, 23 nt, Human
ccuagcccaggccugguuugggg

SEQ ID NO: 811592 - RNA, 19 nt, Human
ccuauacuagcagcuagga

SEQ ID NO: 811593 - RNA, 20 nt, Human
ccucaggccacccuccggcu

SEQ ID NO: 811594 - RNA, 21 nt, Human
ccucccaaagcccccccauag

SEQ ID NO: 811595 - RNA, 23 nt, Human
ccucccaaagcccccccauaggu

SEQ ID NO: 811596 - RNA, 23 nt, Human
ccucggagacucugaacucgcug

SEQ ID NO: 811597 - RNA, 18 nt, Human
ccucugugugccucaguu

SEQ ID NO: 811598 - RNA, 18 nt, Human
ccuggcugcccucccucc

SEQ ID NO: 811599 - RNA, 24 nt, Human
ccugggccacuggaggcccgagag

SEQ ID NO: 811600 - RNA, 24 nt, Human
ccugguucccaccccggcucccac

SEQ ID NO: 811601 - RNA, 21 nt, Human
ccugguuuggggccugagagg

SEQ ID NO: 811602 - RNA, 24 nt, Human
cggcuguucuugcaccuuccauuc

SEQ ID NO: 811603 - RNA, 26 nt, Human
cucacagccuauaccccuuccuuauu

SEQ ID NO: 811604 - RNA, 22 nt, Human
cucaucugcuuacccacccccc

SEQ ID NO: 811605 - RNA, 21 nt, Human
cuccaaacccugggccacgga

SEQ ID NO: 811606 - RNA, 25 nt, Human
cucccuccucagggucccacagccc

SEQ ID NO: 811607 - RNA, 19 nt, Human
cuccucagggucccacagc

SEQ ID NO: 811608 - RNA, 23 nt, Human
cuccuccacgcagccugccccuc

SEQ ID NO: 811609 - RNA, 18 nt, Human
cuccugccuugggucugc

SEQ ID NO: 811610 - RNA, 21 nt, Human
cuccugguucccaccccggcu

SEQ ID NO: 811611 - RNA, 18 nt, Human
cugccaauggacauagga

SEQ ID NO: 811612 - RNA, 24 nt, Human
cugggacacucagccucccugagc

SEQ ID NO: 811613 - RNA, 22 nt, Human
cugggccacggaccaguacuga

SEQ ID NO: 811614 - RNA, 19 nt, Human
cuuccagagcccacaccgc

SEQ ID NO: 811615 - RNA, 25 nt, Human
cuucuggggccaggcaagcagggcc

SEQ ID NO: 811616 - RNA, 19 nt, Human
cuuugccaacccuccuaau

SEQ ID NO: 811617 - RNA, 20 nt, Human
gaaaggacagagguggcccc

SEQ ID NO: 811618 - RNA, 23 nt, Human
gaaaggacagagguggccccagg

SEQ ID NO: 811619 - RNA, 18 nt, Human
gaccuaaagcuuucugcu

SEQ ID NO: 811620 - RNA, 23 nt, Human
gacuaccugggcucaaauucaaa

SEQ ID NO: 811621 - RNA, 23 nt, Human
gagccugcgguugugcuggaagc

SEQ ID NO: 811622 - RNA, 22 nt, Human
gagcucccuuugccaacccucc

SEQ ID NO: 811623 - RNA, 20 nt, Human
gaggccgcacccagagcucc

SEQ ID NO: 811624 - RNA, 22 nt, Human
gcacagcaucacccccucccaa

SEQ ID NO: 811625 - RNA, 18 nt, Human
gcagcccaggauccuaua

SEQ ID NO: 811626 - RNA, 19 nt, Human
gcagcuaggagacccugcc

SEQ ID NO: 811627 - RNA, 18 nt, Human
gcauaguguagcugggga

SEQ ID NO: 811628 - RNA, 23 nt, Human
gcccaggccugguuuggggccug

SEQ ID NO: 811629 - RNA, 21 nt, Human
gccccagcacaccgcucucug

SEQ ID NO: 811630 - RNA, 18 nt, Human
gcccccccauagguuggg

SEQ ID NO: 811631 - RNA, 24 nt, Human
gccggcgggauggccuggggcagc

SEQ ID NO: 811632 - RNA, 19 nt, Human
gccugaugaucugaggugg

SEQ ID NO: 811633 - RNA, 18 nt, Human
gcgccucugacugccagg

SEQ ID NO: 811634 - RNA, 18 nt, Human
gcuaguguggguggcuuc

SEQ ID NO: 811635 - RNA, 21 nt, Human
gcucccucagcggccagcugu

SEQ ID NO: 811636 - RNA, 24 nt, Human
gcugugggcaggacaagccugguu

SEQ ID NO: 811637 - RNA, 22 nt, Human
ggaagaugcccacucaaccucc

SEQ ID NO: 811638 - RNA, 23 nt, Human
ggacagcacacacccgcaccccc

SEQ ID NO: 811639 - RNA, 22 nt, Human
ggagcaagcauucccaccugag

SEQ ID NO: 811640 - RNA, 19 nt, Human
ggaggaagagcgccuggcc

SEQ ID NO: 811641 - RNA, 19 nt, Human
ggcagaggucuccaaaccc

SEQ ID NO: 811642 - RNA, 26 nt, Human
ggcccuggcucggcugcauucuugag

SEQ ID NO: 811643 - RNA, 19 nt, Human
ggccuggaagacugaaggc

SEQ ID NO: 811644 - RNA, 21 nt, Human
ggccugguuuggggccugaga

SEQ ID NO: 811645 - RNA, 23 nt, Human
ggccugguuuggggccuggcuug

SEQ ID NO: 811646 - RNA, 21 nt, Human
gggauggucauuaacggccug

SEQ ID NO: 811647 - RNA, 18 nt, Human
ggggagggcagugguucc

SEQ ID NO: 811648 - RNA, 22 nt, Human
gggggugggggggaugcgggca

SEQ ID NO: 811649 - RNA, 23 nt, Human
ggucccaucccaggagcacccac

SEQ ID NO: 811650 - RNA, 18 nt, Human
gguggagugaaagaagca

SEQ ID NO: 811651 - RNA, 29 nt, Human
ggugggggggaugcgggcaccaggccaug

SEQ ID NO: 811652 - RNA, 19 nt, Human
gguuggaggaggcuggucc

SEQ ID NO: 811653 - RNA, 23 nt, Human
gguugugcuggaagcuggggugg

SEQ ID NO: 811654 - RNA, 18 nt, Human
gguuuggggccugagagg

SEQ ID NO: 811655 - RNA, 22 nt, Human
guaaaauugccuugcugaaaga

SEQ ID NO: 811656 - RNA, 24 nt, Human
gucuccaaacccugggccacggac

SEQ ID NO: 811657 - RNA, 22 nt, Human
gugcacccgcugggcgcacaca

SEQ ID NO: 811658 - RNA, 20 nt, Human
guggggcaggguaguguggg

SEQ ID NO: 811659 - RNA, 19 nt, Human
guugugcuggaagcugggg

SEQ ID NO: 811660 - RNA, 18 nt, Human
uaacggccugcuaucucc

SEQ ID NO: 811661 - RNA, 20 nt, Human
uaaggcaagaucggaguccc

SEQ ID NO: 811662 - RNA, 21 nt, Human
uaauaugaggauuacaugagu

SEQ ID NO: 811663 - RNA, 23 nt, Human
uacacugagcagggauggggaug

SEQ ID NO: 811664 - RNA, 21 nt, Human
uacccaccccccacccgugcu

SEQ ID NO: 811665 - RNA, 19 nt, Human
uacuaguggcuaggagacc

SEQ ID NO: 811666 - RNA, 21 nt, Human
uagaaaaauuuuaaacagcca

SEQ ID NO: 811667 - RNA, 22 nt, Human
uagggcagaggucuccaaaccc

SEQ ID NO: 811668 - RNA, 20 nt, Human
uaguggaggcccaccgacuc

SEQ ID NO: 811669 - RNA, 22 nt, Human
uaguguagcuggggagggcagu

SEQ ID NO: 811670 - RNA, 24 nt, Human
uaguguggguggcuucugccccaa

SEQ ID NO: 811671 - RNA, 22 nt, Human
ucacugccuggugacucaucug

SEQ ID NO: 811672 - RNA, 21 nt, Human
ucacuggacccccagccuggu

SEQ ID NO: 811673 - RNA, 20 nt, Human
ucagagcugugguccacggc

SEQ ID NO: 811674 - RNA, 24 nt, Human
ucagccccgagguagggcuggagg

SEQ ID NO: 811675 - RNA, 24 nt, Human
ucaucccaaaaccauccccccaac

SEQ ID NO: 811676 - RNA, 20 nt, Human
ucaucugcacagugaggaau

SEQ ID NO: 811677 - RNA, 24 nt, Human
uccaaacccugggccacggaccag

SEQ ID NO: 811678 - RNA, 19 nt, Human
uccaccugugaugcagggg

SEQ ID NO: 811679 - RNA, 21 nt, Human
uccacgcagccugccccucca

SEQ ID NO: 811680 - RNA, 21 nt, Human
uccaguggggccccaggccug

SEQ ID NO: 811681 - RNA, 18 nt, Human
ucccaaagcccccccaua

SEQ ID NO: 811682 - RNA, 19 nt, Human
ucccagagcuggacuaccu

SEQ ID NO: 811683 - RNA, 24 nt, Human
ucccagccaggcuggcacucccac

SEQ ID NO: 811684 - RNA, 23 nt, Human
ucccaggaagaugcccacucaac

SEQ ID NO: 811685 - RNA, 24 nt, Human
ucccagugggguggggcuggcuuu

SEQ ID NO: 811686 - RNA, 23 nt, Human
uccccaggacagcacacacccgc

SEQ ID NO: 811687 - RNA, 21 nt, Human
uccccgaaaagcagcuggccc

SEQ ID NO: 811688 - RNA, 24 nt, Human
uccccgaaaagcagcuggcccccg

SEQ ID NO: 811689 - RNA, 19 nt, Human
ucccugagcaggugcuggc

SEQ ID NO: 811690 - RNA, 21 nt, Human
ucccugagcaggugcuggcuc

SEQ ID NO: 811691 - RNA, 22 nt, Human
uccuccacgcagccugccccuc

SEQ ID NO: 811692 - RNA, 20 nt, Human
uccugguucccaccccggcu

SEQ ID NO: 811693 - RNA, 22 nt, Human
uccugguucccaccccggcucc

SEQ ID NO: 811694 - RNA, 23 nt, Human
ucuccaaacccugggccacggac

SEQ ID NO: 811695 - RNA, 22 nt, Human
ucuccagugaagauguagaggu

SEQ ID NO: 811696 - RNA, 20 nt, Human
ucuccugguucccaccccgg

SEQ ID NO: 811697 - RNA, 19 nt, Human
ucugcggccuggcacagag

SEQ ID NO: 811698 - RNA, 22 nt, Human
ucuggggccaggcaagcagggc

SEQ ID NO: 811699 - RNA, 18 nt, Human
ucugugcuggacgugcuc

SEQ ID NO: 811700 - RNA, 23 nt, Human
ucugugcuggacgugcucacagg

SEQ ID NO: 811701 - RNA, 21 nt, Human
ugaccuggggacuguggagug

SEQ ID NO: 811702 - RNA, 22 nt, Human
ugagaggugaugaguuggaggc

SEQ ID NO: 811703 - RNA, 18 nt, Human
ugaggccgcacccagagc

SEQ ID NO: 811704 - RNA, 21 nt, Human
ugaguaaaugugcauuaauau

SEQ ID NO: 811705 - RNA, 20 nt, Human
ugccaggcaagaggagcccc

SEQ ID NO: 811706 - RNA, 19 nt, Human
ugccaggggguggggggga

SEQ ID NO: 811707 - RNA, 18 nt, Human
ugcccagagaaguacugg

SEQ ID NO: 811708 - RNA, 20 nt, Human
ugccccaaggccugcccagc

SEQ ID NO: 811709 - RNA, 21 nt, Human
ugccccaaggccugcccagcc

SEQ ID NO: 811710 - RNA, 24 nt, Human
ugcccuaagauaucuaaccucugu

SEQ ID NO: 811711 - RNA, 20 nt, Human
ugccucaguuucccauucug

SEQ ID NO: 811712 - RNA, 21 nt, Human
ugccucaguuucccauucugu

SEQ ID NO: 811713 - RNA, 20 nt, Human
ugcugcggauacccacugag

SEQ ID NO: 811714 - RNA, 19 nt, Human
uggaaaggacagagguggc

SEQ ID NO: 811715 - RNA, 20 nt, Human
uggaaggcaaugcccaggaa

SEQ ID NO: 811716 - RNA, 20 nt, Human
uggacccccagccuggucag

SEQ ID NO: 811717 - RNA, 18 nt, Human
uggagggccagggugaaa

SEQ ID NO: 811718 - RNA, 19 nt, Human
uggcaacaggccugggaca

SEQ ID NO: 811719 - RNA, 18 nt, Human
uggcacagcaucaccccc

SEQ ID NO: 811720 - RNA, 24 nt, Human
uggcacagcaucacccccucccaa

SEQ ID NO: 811721 - RNA, 19 nt, Human
uggcauagcccugggugaa

SEQ ID NO: 811722 - RNA, 19 nt, Human
uggggaccacugaccuggg

SEQ ID NO: 811723 - RNA, 20 nt, Human
uggggaggaagagcgccugg

SEQ ID NO: 811724 - RNA, 23 nt, Human
uggggaggaagagcgccuggccu

SEQ ID NO: 811725 - RNA, 21 nt, Human
uggggagggcagugguuaggg

SEQ ID NO: 811726 - RNA, 18 nt, Human
uggggccaggcaagcagg

SEQ ID NO: 811727 - RNA, 23 nt, Human
ugguauguuaaacuuucagagca

SEQ ID NO: 811728 - RNA, 20 nt, Human
ugguucccaccccggcuccc

SEQ ID NO: 811729 - RNA, 19 nt, Human
uuacccaccccccacccgu

SEQ ID NO: 811730 - RNA, 24 nt, Human
uucccaccugagcucugccuccug

SEQ ID NO: 811731 - RNA, 18 nt, Human
uugugcuggaagcugggg

SEQ ID NO: 811732 - RNA, 18 nt, Human
uuucugcugcagcccagg

SEQ ID NO: 811733 - RNA, 21 nt, Human
aaaaaccagacggcaaguucc

SEQ ID NO: 811734 - RNA, 21 nt, Human
aaaaagcaccuucagagagcu

SEQ ID NO: 811735 - RNA, 21 nt, Human
aaaagcaucacaaaucuacaa

SEQ ID NO: 811736 - RNA, 26 nt, Human
aaaagccauuuccagaaauguuuguc

SEQ ID NO: 811737 - RNA, 20 nt, Human
aaacauagcuauagagguac

SEQ ID NO: 811738 - RNA, 18 nt, Human
aaagcuacguaucaaccu

SEQ ID NO: 811739 - RNA, 20 nt, Human
aaaguaucuuucaccucccu

SEQ ID NO: 811740 - RNA, 22 nt, Human
aaccacagcuaauccagcaacc

SEQ ID NO: 811741 - RNA, 20 nt, Human
aaccucaggacuaaugauau

SEQ ID NO: 811742 - RNA, 24 nt, Human
aacgacagauacaacucucaagaa

SEQ ID NO: 811743 - RNA, 18 nt, Human
aagaaaaggaacuaaagc

SEQ ID NO: 811744 - RNA, 20 nt, Human
aagaagaaaagcaucacaaa

SEQ ID NO: 811745 - RNA, 18 nt, Human
aagucugagaaaaaccag

SEQ ID NO: 811746 - RNA, 21 nt, Human
aagugacccauuuuagaaaau

SEQ ID NO: 811747 - RNA, 19 nt, Human
aaugacugaaagaaaagga

SEQ ID NO: 811748 - RNA, 24 nt, Human
aauucuuuacugaguguggggggg

SEQ ID NO: 811749 - RNA, 21 nt, Human
acaaaaaccagggauaauucu

SEQ ID NO: 811750 - RNA, 21 nt, Human
acaagaaaccacagcuaaucc

SEQ ID NO: 811751 - RNA, 24 nt, Human
acacugacauuagacaagaaacca

SEQ ID NO: 811752 - RNA, 21 nt, Human
acagagaacagccauuuucua

SEQ ID NO: 811753 - RNA, 24 nt, Human
acuaagacaaugacugaaagaaaa

SEQ ID NO: 811754 - RNA, 25 nt, Human
acuacaaguaccauuuuuauacugg

SEQ ID NO: 811755 - RNA, 20 nt, Human
acugaaagaaaaggaacuaa

SEQ ID NO: 811756 - RNA, 21 nt, Human
agaagucugagaaaaaccaga

SEQ ID NO: 811757 - RNA, 20 nt, Human
agacaagaaaccacagcuaa

SEQ ID NO: 811758 - RNA, 23 nt, Human
agacaaugacugaaagaaaagga

SEQ ID NO: 811759 - RNA, 20 nt, Human
agacggcaaguuccggauca

SEQ ID NO: 811760 - RNA, 22 nt, Human
agacugggcucccggaaggcca

SEQ ID NO: 811761 - RNA, 18 nt, Human
agggcacccacuggucac

SEQ ID NO: 811762 - RNA, 22 nt, Human
aguguggggggguguugaggag

SEQ ID NO: 811763 - RNA, 23 nt, Human
auccuugugaagaugauguacug

SEQ ID NO: 811764 - RNA, 22 nt, Human
aucuuucaccucccucccgcug

SEQ ID NO: 811765 - RNA, 25 nt, Human
caaaugucaacacacaguuuccagu

SEQ ID NO: 811766 - RNA, 22 nt, Human
caacaugucuccagacaucacc

SEQ ID NO: 811767 - RNA, 20 nt, Human
caaccuuuuccccaccccag

SEQ ID NO: 811768 - RNA, 19 nt, Human
caccuacccccuacuccca

SEQ ID NO: 811769 - RNA, 18 nt, Human
caccucccucccgcugcc

SEQ ID NO: 811770 - RNA, 21 nt, Human
caccugcgaccccggcggcac

SEQ ID NO: 811771 - RNA, 20 nt, Human
caccuucagagagcugaagg

SEQ ID NO: 811772 - RNA, 21 nt, Human
cagagagcugaaggaaaauca

SEQ ID NO: 811773 - RNA, 19 nt, Human
cagcugcagucucuaaaac

SEQ ID NO: 811774 - RNA, 19 nt, Human
caggguuucucaaccucag

SEQ ID NO: 811775 - RNA, 19 nt, Human
ccaauccauaauacauacc

SEQ ID NO: 811776 - RNA, 19 nt, Human
cccacauaaauaucugagg

SEQ ID NO: 811777 - RNA, 21 nt, Human
cccauccucaaaugucaacac

SEQ ID NO: 811778 - RNA, 22 nt, Human
ccccaccuacccccuacuccca

SEQ ID NO: 811779 - RNA, 19 nt, Human
cccccuacucccaaauggc

SEQ ID NO: 811780 - RNA, 18 nt, Human
cccgacugagugcccaga

SEQ ID NO: 811781 - RNA, 21 nt, Human
cccuccgggacccuacccacu

SEQ ID NO: 811782 - RNA, 18 nt, Human
ccgccgcuucccuggccg

SEQ ID NO: 811783 - RNA, 20 nt, Human
ccgccgcuucccuggccgcc

SEQ ID NO: 811784 - RNA, 19 nt, Human
ccgcucaccugcgaccccg

SEQ ID NO: 811785 - RNA, 21 nt, Human
ccgcucaccugcgaccccggc

SEQ ID NO: 811786 - RNA, 22 nt, Human
ccuccagcauagaaccgcucac

SEQ ID NO: 811787 - RNA, 24 nt, Human
ccucccgcugccuccuuugggacc

SEQ ID NO: 811788 - RNA, 20 nt, Human
ccuccgggacccuacccacu

SEQ ID NO: 811789 - RNA, 25 nt, Human
ccuccgggacccuacccacugcgag

SEQ ID NO: 811790 - RNA, 21 nt, Human
ccugggcccuccccagccucc

SEQ ID NO: 811791 - RNA, 26 nt, Human
cguaucaaccuugaaaaucagaaaac

SEQ ID NO: 811792 - RNA, 21 nt, Human
cguccaaaaagagccccuggg

SEQ ID NO: 811793 - RNA, 21 nt, Human
cguggccugggcccuccccag

SEQ ID NO: 811794 - RNA, 25 nt, Human
cuaauccagcaaccaucauuauauc

SEQ ID NO: 811795 - RNA, 18 nt, Human
cucaccugcgaccccggc

SEQ ID NO: 811796 - RNA, 23 nt, Human
cuccaauccauaauacauaccua

SEQ ID NO: 811797 - RNA, 21 nt, Human
cuccgggacccuacccacugc

SEQ ID NO: 811798 - RNA, 19 nt, Human
cucuaaaacucgugguagg

SEQ ID NO: 811799 - RNA, 22 nt, Human
cugccaauggcauaauauaacc

SEQ ID NO: 811800 - RNA, 21 nt, Human
cuucacauucagaaauaacga

SEQ ID NO: 811801 - RNA, 22 nt, Human
cuucaucacuuccuauauucaa

SEQ ID NO: 811802 - RNA, 19 nt, Human
cuuggauuguggaaaaagc

SEQ ID NO: 811803 - RNA, 22 nt, Human
cuugugaagaugauguacugcc

SEQ ID NO: 811804 - RNA, 20 nt, Human
cuuuaaaauugcgucuugcu

SEQ ID NO: 811805 - RNA, 18 nt, Human
cuuuguuccucagggaag

SEQ ID NO: 811806 - RNA, 20 nt, Human
gaaaaagaauucuuuucaaa

SEQ ID NO: 811807 - RNA, 20 nt, Human
gaaaaggaacuaaagcuuua

SEQ ID NO: 811808 - RNA, 19 nt, Human
gaaaauucuuuacugagug

SEQ ID NO: 811809 - RNA, 19 nt, Human
gaaggcuauuuauagaugg

SEQ ID NO: 811810 - RNA, 24 nt, Human
gaaugcugcaaagcacaaaaacca

SEQ ID NO: 811811 - RNA, 20 nt, Human
gaccccggcggcaccucccc

SEQ ID NO: 811812 - RNA, 22 nt, Human
gaugugaaaacaauuugaggaa

SEQ ID NO: 811813 - RNA, 19 nt, Human
gcaaagcacaaaaaccagg

SEQ ID NO: 811814 - RNA, 22 nt, Human
gcaaagcacaaaaaccagggau

SEQ ID NO: 811815 - RNA, 22 nt, Human
ggccugggcccuccccagccuc

SEQ ID NO: 811816 - RNA, 21 nt, Human
guggccugggcccuccccagc

SEQ ID NO: 811817 - RNA, 18 nt, Human
guggcuuuccccuccccu

SEQ ID NO: 811818 - RNA, 20 nt, Human
uaaaacuauaaaacauagcu

SEQ ID NO: 811819 - RNA, 27 nt, Human
uaaaaugugaaaauaugucauuuuaga

SEQ ID NO: 811820 - RNA, 18 nt, Human
uaaagcauuaauagugag

SEQ ID NO: 811821 - RNA, 21 nt, Human
uacacagacaauacaagacuc

SEQ ID NO: 811822 - RNA, 24 nt, Human
uacacaguaacauuucauaguuaa

SEQ ID NO: 811823 - RNA, 21 nt, Human
uacacaguuaggcuaggacag

SEQ ID NO: 811824 - RNA, 22 nt, Human
uacccaaacuaagacaaugacu

SEQ ID NO: 811825 - RNA, 18 nt, Human
uacucugugucacuucuc

SEQ ID NO: 811826 - RNA, 19 nt, Human
uacucugugucacuucucu

SEQ ID NO: 811827 - RNA, 21 nt, Human
uagacugggcucccggaaggc

SEQ ID NO: 811828 - RNA, 20 nt, Human
uaguguaauaagugcuucuc

SEQ ID NO: 811829 - RNA, 19 nt, Human
uauaaaacauagcuauaga

SEQ ID NO: 811830 - RNA, 18 nt, Human
uauacuacacaguaacau

SEQ ID NO: 811831 - RNA, 25 nt, Human
uauacugguaucauuuuuacuagcu

SEQ ID NO: 811832 - RNA, 24 nt, Human
uauagagguacacaguuaggcuag

SEQ ID NO: 811833 - RNA, 25 nt, Human
uauaucaccugauaugagaaaaauc

SEQ ID NO: 811834 - RNA, 22 nt, Human
uauucacuuauaagauuucagu

SEQ ID NO: 811835 - RNA, 23 nt, Human
uauuuauagauggaaacauggga

SEQ ID NO: 811836 - RNA, 19 nt, Human
ucaagaagaaaagcaucac

SEQ ID NO: 811837 - RNA, 19 nt, Human
ucaccaaauuggucuucug

SEQ ID NO: 811838 - RNA, 20 nt, Human
ucacggagccgccgcuuccc

SEQ ID NO: 811839 - RNA, 20 nt, Human
ucacuuggauuguggaaaaa

SEQ ID NO: 811840 - RNA, 18 nt, Human
ucauuggguucaagcuca

SEQ ID NO: 811841 - RNA, 18 nt, Human
uccagaaauguuuguccu

SEQ ID NO: 811842 - RNA, 19 nt, Human
uccagaaauguuugucuuc

SEQ ID NO: 811843 - RNA, 22 nt, Human
uccccagccuccccggucaggc

SEQ ID NO: 811844 - RNA, 19 nt, Human
ucccgacugagugcccaga

SEQ ID NO: 811845 - RNA, 24 nt, Human
ucccgcuacgucgcagcccuugga

SEQ ID NO: 811846 - RNA, 18 nt, Human
ucccucccgcugccuccu

SEQ ID NO: 811847 - RNA, 31 nt, Human
ucccugccaaaaaguauguucuucucuaaaa

SEQ ID NO: 811848 - RNA, 20 nt, Human
uccucaaaaaauacuuacug

SEQ ID NO: 811849 - RNA, 23 nt, Human
ucuacaauaucaaacccuaccca

SEQ ID NO: 811850 - RNA, 19 nt, Human
ucuaugcccaaucacagag

SEQ ID NO: 811851 - RNA, 24 nt, Human
ucucucuggguauuaaaugagagu

SEQ ID NO: 811852 - RNA, 18 nt, Human
ucuuuacugagugugggg

SEQ ID NO: 811853 - RNA, 22 nt, Human
ugacauuagacaagaaaccaca

SEQ ID NO: 811854 - RNA, 21 nt, Human
ugacugaaagaaaaggaacua

SEQ ID NO: 811855 - RNA, 20 nt, Human
ugagaaggcuauuuauagau

SEQ ID NO: 811856 - RNA, 23 nt, Human
ugagcuucacauucagaaauaac

SEQ ID NO: 811857 - RNA, 25 nt, Human
ugaggaaugcugcaaagcacaaaaa

SEQ ID NO: 811858 - RNA, 18 nt, Human
ugaugagguugcugcugg

SEQ ID NO: 811859 - RNA, 25 nt, Human
ugcaaagcacaaaaaccagggauaa

SEQ ID NO: 811860 - RNA, 19 nt, Human
ugcccagaaacuucugcag

SEQ ID NO: 811861 - RNA, 23 nt, Human
ugccgcugaccccuccgggaccc

SEQ ID NO: 811862 - RNA, 20 nt, Human
ugcugguaggagucccggug

SEQ ID NO: 811863 - RNA, 21 nt, Human
uggaaaaagcaccuucagaga

SEQ ID NO: 811864 - RNA, 25 nt, Human
uggcauaauauaaccaggcaacuuu

SEQ ID NO: 811865 - RNA, 22 nt, Human
ugggaagaaucgaguuagacug

SEQ ID NO: 811866 - RNA, 21 nt, Human
ugggaauaaaauaccuauaau

SEQ ID NO: 811867 - RNA, 19 nt, Human
ugggaccguccaaaaagag

SEQ ID NO: 811868 - RNA, 19 nt, Human
uggggggguguugaggagg

SEQ ID NO: 811869 - RNA, 19 nt, Human
uggguacacagacaauaca

SEQ ID NO: 811870 - RNA, 19 nt, Human
uguuugucuuccuguccuc

SEQ ID NO: 811871 - RNA, 20 nt, Human
uuaaagcuacguaucaaccu

SEQ ID NO: 811872 - RNA, 20 nt, Human
uuaaaguaauaacugucaac

SEQ ID NO: 811873 - RNA, 21 nt, Human
uuacaaaccuucuaugcccaa

SEQ ID NO: 811874 - RNA, 22 nt, Human
uuacuagcuucaacuauucacu

SEQ ID NO: 811875 - RNA, 23 nt, Human
uuacugaaaugacauuuuuguac

SEQ ID NO: 811876 - RNA, 23 nt, Human
uucaacaucauuauuauuugaua

SEQ ID NO: 811877 - RNA, 23 nt, Human
uucaauauacuacacaguaacau

SEQ ID NO: 811878 - RNA, 19 nt, Human
uucacuucccugccaaaaa

SEQ ID NO: 811879 - RNA, 24 nt, Human
uucaugauaagucagaauuaagaa

SEQ ID NO: 811880 - RNA, 24 nt, Human
uuccccaccuacccccuacuccca

SEQ ID NO: 811881 - RNA, 21 nt, Human
uuccuagauacuucaugauaa

SEQ ID NO: 811882 - RNA, 25 nt, Human
uucucugagcuucacauucagaaau

SEQ ID NO: 811883 - RNA, 20 nt, Human
uucucuguauuguuuucugg

SEQ ID NO: 811884 - RNA, 19 nt, Human
uugaaaaucagaaaacaca

SEQ ID NO: 811885 - RNA, 19 nt, Human
uuggaccaaacccggcagc

SEQ ID NO: 811886 - RNA, 24 nt, Human
uuuccagaaauguuugucuuccug

SEQ ID NO: 811887 - RNA, 22 nt, Human
uuuuccuugcauacccauccuc

SEQ ID NO: 811888 - RNA, 19 nt, Human
aaaagggaaagggauuuug

SEQ ID NO: 811889 - RNA, 20 nt, Human
aaagccccccauuggcccuc

SEQ ID NO: 811890 - RNA, 19 nt, Human
acagacaaggaggaagagg

SEQ ID NO: 811891 - RNA, 20 nt, Human
acagcggagggucccgaggg

SEQ ID NO: 811892 - RNA, 18 nt, Human
accaggggaagccaggac

SEQ ID NO: 811893 - RNA, 18 nt, Human
agagggagggagggaaag

SEQ ID NO: 811894 - RNA, 19 nt, Human
agaggugugcaggggcccu

SEQ ID NO: 811895 - RNA, 23 nt, Human
aggaagagggagggagggaaagc

SEQ ID NO: 811896 - RNA, 27 nt, Human
aggacuggagaccacaggacagaaacc

SEQ ID NO: 811897 - RNA, 18 nt, Human
aggaggaagagggaggga

SEQ ID NO: 811898 - RNA, 23 nt, Human
aggaggaagagggagggagggaa

SEQ ID NO: 811899 - RNA, 21 nt, Human
aguccagagcagcccccagca

SEQ ID NO: 811900 - RNA, 25 nt, Human
auaugcacauguguuugugugugug

SEQ ID NO: 811901 - RNA, 26 nt, Human
auggagacgagaaaaagggaaaggga

SEQ ID NO: 811902 - RNA, 24 nt, Human
auguguuugugugugugugugugg

SEQ ID NO: 811903 - RNA, 21 nt, Human
cacacgacagcggaggguccc

SEQ ID NO: 811904 - RNA, 19 nt, Human
cacauugaacacugggaaa

SEQ ID NO: 811905 - RNA, 18 nt, Human
cagcagggcaucucgggc

SEQ ID NO: 811906 - RNA, 21 nt, Human
cagccauccccaaaguccaga

SEQ ID NO: 811907 - RNA, 24 nt, Human
cagcccccuccugcgaucucggcc

SEQ ID NO: 811908 - RNA, 31 nt, Human
cagcccccuccugcgaucucggcccugcccc

SEQ ID NO: 811909 - RNA, 23 nt, Human
caguggguccuuugauggaaucc

SEQ ID NO: 811910 - RNA, 20 nt, Human
cauccccaaaguccagagca

SEQ ID NO: 811911 - RNA, 23 nt, Human
cauguguuugugugugugugugu

SEQ ID NO: 811912 - RNA, 18 nt, Human
ccagagcagcccccagca

SEQ ID NO: 811913 - RNA, 21 nt, Human
ccagagcgagaaugcugggga

SEQ ID NO: 811914 - RNA, 21 nt, Human
ccaggacuggagaccacagga

SEQ ID NO: 811915 - RNA, 20 nt, Human
ccagucccagcgguggcugg

SEQ ID NO: 811916 - RNA, 20 nt, Human
ccauccccaaaguccagagc

SEQ ID NO: 811917 - RNA, 23 nt, Human
cccaggacuggagaccacaggac

SEQ ID NO: 811918 - RNA, 20 nt, Human
ccccaaaguccagagcagcc

SEQ ID NO: 811919 - RNA, 23 nt, Human
ccccaaaguccagagcagccccc

SEQ ID NO: 811920 - RNA, 20 nt, Human
ccccauuggcccucugaggc

SEQ ID NO: 811921 - RNA, 19 nt, Human
cccccagcaucuguggugc

SEQ ID NO: 811922 - RNA, 22 nt, Human
ccccggaguagaacgcaagaca

SEQ ID NO: 811923 - RNA, 23 nt, Human
ccgugaaagccccccauuggccc

SEQ ID NO: 811924 - RNA, 19 nt, Human
ccucccaccuagggacggg

SEQ ID NO: 811925 - RNA, 18 nt, Human
ccugccgccgccaccccc

SEQ ID NO: 811926 - RNA, 21 nt, Human
ccugccgccgccacccccgga

SEQ ID NO: 811927 - RNA, 20 nt, Human
ccuugggcccgugaaagccc

SEQ ID NO: 811928 - RNA, 21 nt, Human
ccuugggcccgugaaagcccc

SEQ ID NO: 811929 - RNA, 24 nt, Human
cgugggcagcagggcaucucgggc

SEQ ID NO: 811930 - RNA, 21 nt, Human
cucagcccugcagggcugggg

SEQ ID NO: 811931 - RNA, 22 nt, Human
cucccucccaccuagggacggg

SEQ ID NO: 811932 - RNA, 18 nt, Human
cugccucuagggugcccc

SEQ ID NO: 811933 - RNA, 26 nt, Human
cugccucuagggugccccaggacugg

SEQ ID NO: 811934 - RNA, 20 nt, Human
cugugcacaguuucacaccc

SEQ ID NO: 811935 - RNA, 21 nt, Human
gacagccauccccaaagucca

SEQ ID NO: 811936 - RNA, 25 nt, Human
gacagccauccccaaaguccagagc

SEQ ID NO: 811937 - RNA, 21 nt, Human
gacgagaaaaagggaaaggga

SEQ ID NO: 811938 - RNA, 19 nt, Human
gcagggccaugcugggguc

SEQ ID NO: 811939 - RNA, 20 nt, Human
gcccggagcguuuccccgcu

SEQ ID NO: 811940 - RNA, 21 nt, Human
ggaugaccgugugcgggacca

SEQ ID NO: 811941 - RNA, 21 nt, Human
ggcaggggugugaucacaagg

SEQ ID NO: 811942 - RNA, 21 nt, Human
ggcaggggugugaucacaagg

SEQ ID NO: 811943 - RNA, 21 nt, Human
ggcaggggugugaucacaagg

SEQ ID NO: 811944 - RNA, 22 nt, Human
gggagugggcguggcccggagc

SEQ ID NO: 811945 - RNA, 22 nt, Human
gggcagcagggcaucucgggca

SEQ ID NO: 811946 - RNA, 21 nt, Human
guggacgguucugcaccuaca

SEQ ID NO: 811947 - RNA, 21 nt, Human
uacccagauguucauggagac

SEQ ID NO: 811948 - RNA, 19 nt, Human
uacuggaguggaauccagu

SEQ ID NO: 811949 - RNA, 20 nt, Human
uaugcacauguguuugugug

SEQ ID NO: 811950 - RNA, 20 nt, Human
ucacaaggaaggggcagggg

SEQ ID NO: 811951 - RNA, 20 nt, Human
ucacaaggaaggggcagggg

SEQ ID NO: 811952 - RNA, 20 nt, Human
ucacaaggaaggggcagggg

SEQ ID NO: 811953 - RNA, 20 nt, Human
ucacaaggaaggggcagggg

SEQ ID NO: 811954 - RNA, 21 nt, Human
ucagcccugcagggcuggggc

SEQ ID NO: 811955 - RNA, 22 nt, Human
uccccgcugaggucuuucacaa

SEQ ID NO: 811956 - RNA, 18 nt, Human
uccccugcucugccucua

SEQ ID NO: 811957 - RNA, 23 nt, Human
ucucccgucugucagccccuuuu

SEQ ID NO: 811958 - RNA, 24 nt, Human
ucugcaccuacagugcguacacag

SEQ ID NO: 811959 - RNA, 19 nt, Human
ucuggacucccucccaccu

SEQ ID NO: 811960 - RNA, 20 nt, Human
ugaagcugcagggguggcuc

SEQ ID NO: 811961 - RNA, 23 nt, Human
ugcacauguguuugugugugugu

SEQ ID NO: 811962 - RNA, 25 nt, Human
ugcccagagcgagaaugcuggggac

SEQ ID NO: 811963 - RNA, 20 nt, Human
ugcguacacagcacagcgug

SEQ ID NO: 811964 - RNA, 21 nt, Human
ugcguacacagcacagcgugg

SEQ ID NO: 811965 - RNA, 19 nt, Human
uggaauccccugcucugcc

SEQ ID NO: 811966 - RNA, 18 nt, Human
uggaguggaauccagucu

SEQ ID NO: 811967 - RNA, 22 nt, Human
uggcucagacacacgacagcgg

SEQ ID NO: 811968 - RNA, 18 nt, Human
ugggaaaggucagggcag

SEQ ID NO: 811969 - RNA, 21 nt, Human
ugggcagaggugugcaggggc

SEQ ID NO: 811970 - RNA, 19 nt, Human
ugggcauuuucccaagccu

SEQ ID NO: 811971 - RNA, 22 nt, Human
ugggcauuuucccaagccuugg

SEQ ID NO: 811972 - RNA, 21 nt, Human
uggguccuuugauggaauccc

SEQ ID NO: 811973 - RNA, 24 nt, Human
ugggugcacaugugucacagacaa

SEQ ID NO: 811974 - RNA, 19 nt, Human
ugugaucacaaggaagggg

SEQ ID NO: 811975 - RNA, 19 nt, Human
ugugaucacaaggaagggg

SEQ ID NO: 811976 - RNA, 19 nt, Human
ugugaucacaaggaagggg

SEQ ID NO: 811977 - RNA, 20 nt, Human
ugugcacaguuucacaccca

SEQ ID NO: 811978 - RNA, 22 nt, Human
ugugcaggggcccugugaagcu

SEQ ID NO: 811979 - RNA, 19 nt, Human
ugugugauaugcacaugug

SEQ ID NO: 811980 - RNA, 18 nt, Human
ugugugggugcacaugug

SEQ ID NO: 811981 - RNA, 19 nt, Human
ugugugugugggugcacau

SEQ ID NO: 811982 - RNA, 21 nt, Human
ugugugugugggugcacaugu

SEQ ID NO: 811983 - RNA, 23 nt, Human
ugugugugugugugggugcacau

SEQ ID NO: 811984 - RNA, 19 nt, Human
ugugugugugugugugggu

SEQ ID NO: 811985 - RNA, 20 nt, Human
ugugugugugugugugggug

SEQ ID NO: 811986 - RNA, 20 nt, Human
uguugcuaagugccuauacu

SEQ ID NO: 811987 - RNA, 21 nt, Human
uugugugugugugugugggug

SEQ ID NO: 811988 - RNA, 24 nt, Human
aaaaauaaauauccuuauaccucc

SEQ ID NO: 811989 - RNA, 28 nt, Human
aaaaauauaauccaaauuaagcaaaaaa

SEQ ID NO: 811990 - RNA, 22 nt, Human
aaagaaguuauccauacacuuc

SEQ ID NO: 811991 - RNA, 19 nt, Human
aaagugcucggauuacagg

SEQ ID NO: 811992 - RNA, 24 nt, Human
aaagugcucggauuacaggcguga

SEQ ID NO: 811993 - RNA, 25 nt, Human
aaaucacuucaggccaagaguugga

SEQ ID NO: 811994 - RNA, 19 nt, Human
aacagagugagacccuguc

SEQ ID NO: 811995 - RNA, 21 nt, Human
aacagagugagacccugucuc

SEQ ID NO: 811996 - RNA, 24 nt, Human
aacagagugagacccugucucaaa

SEQ ID NO: 811997 - RNA, 20 nt, Human
aaccuccacuucccagguuc

SEQ ID NO: 811998 - RNA, 20 nt, Human
aacucgcgaaaccccaucuc

SEQ ID NO: 811999 - RNA, 24 nt, Human
aagcaaaaaaaggaaauuuauugg

SEQ ID NO: 812000 - RNA, 20 nt, Human
aagcacgcaccaccacaccc

SEQ ID NO: 812001 - RNA, 18 nt, Human
aaucacuucaggccaaga

SEQ ID NO: 812002 - RNA, 22 nt, Human
aaucccuuaucacuagguuggg

SEQ ID NO: 812003 - RNA, 22 nt, Human
acacacacauaaacagaaaucu

SEQ ID NO: 812004 - RNA, 21 nt, Human
acaccacugcacuccagccug

SEQ ID NO: 812005 - RNA, 24 nt, Human
acaccacugcacuccagccugggc

SEQ ID NO: 812006 - RNA, 23 nt, Human
acagagcgagacucugucugaaa

SEQ ID NO: 812007 - RNA, 24 nt, Human
acagagugagacccugucucaaaa

SEQ ID NO: 812008 - RNA, 30 nt, Human
acagauguggccaggcgcgguggcucacgg

SEQ ID NO: 812009 - RNA, 24 nt, Human
accaauguggugaaaccccgucuc

SEQ ID NO: 812010 - RNA, 22 nt, Human
accacugcacuccagccugggc

SEQ ID NO: 812011 - RNA, 24 nt, Human
acccaggaggcagaggcugcagug

SEQ ID NO: 812012 - RNA, 24 nt, Human
accccgucucuacuaaaaauacaa

SEQ ID NO: 812013 - RNA, 24 nt, Human
accgcauuccagccuggauaacag

SEQ ID NO: 812014 - RNA, 26 nt, Human
accgcauuccagccuggauaacagag

SEQ ID NO: 812015 - RNA, 24 nt, Human
accucggccucccaaagugcucgg

SEQ ID NO: 812016 - RNA, 23 nt, Human
accuguagucccagcuacucagg

SEQ ID NO: 812017 - RNA, 20 nt, Human
acgggguuucuccauguugg

SEQ ID NO: 812018 - RNA, 21 nt, Human
acgggguuucuccauguuggu

SEQ ID NO: 812019 - RNA, 24 nt, Human
acgggguuucuccauguuggucag

SEQ ID NO: 812020 - RNA, 18 nt, Human
acuaaccaaaaagaacuc

SEQ ID NO: 812021 - RNA, 24 nt, Human
acuaagaaacacuaaaauaguuuu

SEQ ID NO: 812022 - RNA, 24 nt, Human
acugcacuccagccugggcaacag

SEQ ID NO: 812023 - RNA, 24 nt, Human
acugcacuccagccugggcaacag

SEQ ID NO: 812024 - RNA, 22 nt, Human
agaaaaacgcgaaacuuagcca

SEQ ID NO: 812025 - RNA, 19 nt, Human
agagccauucauuaaacaa

SEQ ID NO: 812026 - RNA, 20 nt, Human
agaggcugcagugagccaag

SEQ ID NO: 812027 - RNA, 22 nt, Human
agaguuggagaccagccugggc

SEQ ID NO: 812028 - RNA, 19 nt, Human
agcaauaucuuuguuugau

SEQ ID NO: 812029 - RNA, 20 nt, Human
agcacuuugggagucugagg

SEQ ID NO: 812030 - RNA, 20 nt, Human
agccaccgcacugggucuua

SEQ ID NO: 812031 - RNA, 24 nt, Human
agccugaccaauguggugaaaccc

SEQ ID NO: 812032 - RNA, 24 nt, Human
agccugggcaacagagcgagacuc

SEQ ID NO: 812033 - RNA, 19 nt, Human
agccugggcaacucgcgaa

SEQ ID NO: 812034 - RNA, 23 nt, Human
agccugggcaacucgcgaaaccc

SEQ ID NO: 812035 - RNA, 24 nt, Human
agcuacucaggaggcugagguggg

SEQ ID NO: 812036 - RNA, 21 nt, Human
agcugggauuacaagcacgca

SEQ ID NO: 812037 - RNA, 21 nt, Human
aggaggcagaggcugcaguga

SEQ ID NO: 812038 - RNA, 21 nt, Human
aggaggcugaggugggagggu

SEQ ID NO: 812039 - RNA, 19 nt, Human
aggcaaaaauauaauccaa

SEQ ID NO: 812040 - RNA, 24 nt, Human
aggcagaggcugcagugagccaag

SEQ ID NO: 812041 - RNA, 23 nt, Human
aggcaggaggauugcuugaaccc

SEQ ID NO: 812042 - RNA, 26 nt, Human
aggccaagaguuggagaccagccugg

SEQ ID NO: 812043 - RNA, 24 nt, Human
aggcgcgguggcucacgcccauaa

SEQ ID NO: 812044 - RNA, 21 nt, Human
aggcugaggcaggaggauugc

SEQ ID NO: 812045 - RNA, 24 nt, Human
aggcugaggcaggaggauugcuug

SEQ ID NO: 812046 - RNA, 24 nt, Human
aggcugaggugggagggucgcuug

SEQ ID NO: 812047 - RNA, 24 nt, Human
agguaugguggcaggcaccuguaa

SEQ ID NO: 812048 - RNA, 24 nt, Human
aggugaucugcccaccucggccuc

SEQ ID NO: 812049 - RNA, 24 nt, Human
aggugggagggucgcuugagccug

SEQ ID NO: 812050 - RNA, 21 nt, Human
agguucaagugauucuccugc

SEQ ID NO: 812051 - RNA, 22 nt, Human
agguucaagugauucuccugcc

SEQ ID NO: 812052 - RNA, 23 nt, Human
agguucaagugauucuccugccu

SEQ ID NO: 812053 - RNA, 19 nt, Human
agguugggggaaauaauug

SEQ ID NO: 812054 - RNA, 22 nt, Human
aguagagacgggguuucuccau

SEQ ID NO: 812055 - RNA, 19 nt, Human
aguagcugggauuacaagc

SEQ ID NO: 812056 - RNA, 24 nt, Human
agugacucaucccuauaaucucag

SEQ ID NO: 812057 - RNA, 24 nt, Human
aucaccuaaagucaggaguucgag

SEQ ID NO: 812058 - RNA, 19 nt, Human
auugcuugaacccaggagg

SEQ ID NO: 812059 - RNA, 24 nt, Human
auugugucaccgcauuccagccug

SEQ ID NO: 812060 - RNA, 18 nt, Human
auuucugucucucaucuc

SEQ ID NO: 812061 - RNA, 19 nt, Human
caaaggacuucauugaucc

SEQ ID NO: 812062 - RNA, 24 nt, Human
caaagugcucggauuacaggcgug

SEQ ID NO: 812063 - RNA, 21 nt, Human
caacauuacaagugaaguuua

SEQ ID NO: 812064 - RNA, 21 nt, Human
caagcacgcaccaccacaccc

SEQ ID NO: 812065 - RNA, 20 nt, Human
caagugauucuccugccuca

SEQ ID NO: 812066 - RNA, 24 nt, Human
caauguggugaaaccccgucucua

SEQ ID NO: 812067 - RNA, 19 nt, Human
cacaccuguagucccagcu

SEQ ID NO: 812068 - RNA, 18 nt, Human
caccgcauuccagccugg

SEQ ID NO: 812069 - RNA, 19 nt, Human
caccgcauuccagccugga

SEQ ID NO: 812070 - RNA, 19 nt, Human
caccgcauuccagccugga

SEQ ID NO: 812071 - RNA, 20 nt, Human
caccgcauuccagccuggau

SEQ ID NO: 812072 - RNA, 24 nt, Human
caccgcauuccagccuggauaaca

SEQ ID NO: 812073 - RNA, 23 nt, Human
caccuaaagucaggaguucgaga

SEQ ID NO: 812074 - RNA, 21 nt, Human
caccuguaaucccagcuacuc

SEQ ID NO: 812075 - RNA, 24 nt, Human
caccuguaaucccagcuacucagg

SEQ ID NO: 812076 - RNA, 24 nt, Human
caccuguagucccagcuacucagg

SEQ ID NO: 812077 - RNA, 23 nt, Human
cacgcaccaccacacccggcuaa

SEQ ID NO: 812078 - RNA, 24 nt, Human
cacgcccauaaucccagcacuuug

SEQ ID NO: 812079 - RNA, 23 nt, Human
cacuccagccugggcaacagagc

SEQ ID NO: 812080 - RNA, 24 nt, Human
cacuccagccugggcaacagagcg

SEQ ID NO: 812081 - RNA, 19 nt, Human
cacucuaugcacacauaua

SEQ ID NO: 812082 - RNA, 19 nt, Human
cacucuaugcacacauaua

SEQ ID NO: 812083 - RNA, 18 nt, Human
cacugcacuccagccugg

SEQ ID NO: 812084 - RNA, 19 nt, Human
cacugcacuccagccuggg

SEQ ID NO: 812085 - RNA, 21 nt, Human
cacugcacuccagccugggca

SEQ ID NO: 812086 - RNA, 23 nt, Human
cacugcacuccagccugggcaac

SEQ ID NO: 812087 - RNA, 24 nt, Human
cacugcacuccagccugggcaaca

SEQ ID NO: 812088 - RNA, 25 nt, Human
cacugcacuccagccugggcaacaa

SEQ ID NO: 812089 - RNA, 18 nt, Human
cagauuguaaaauacacu

SEQ ID NO: 812090 - RNA, 18 nt, Human
cagcacuuugggaagccg

SEQ ID NO: 812091 - RNA, 20 nt, Human
cagcacuuugggaagccgag

SEQ ID NO: 812092 - RNA, 18 nt, Human
cagcacuuugggagucug

SEQ ID NO: 812093 - RNA, 20 nt, Human
cagcacuuugggagucugag

SEQ ID NO: 812094 - RNA, 24 nt, Human
cagccauaaugugaaaaaaacuaa

SEQ ID NO: 812095 - RNA, 20 nt, Human
cagccuggauaacagaguga

SEQ ID NO: 812096 - RNA, 24 nt, Human
cagcuacucaggaggcugaggcag

SEQ ID NO: 812097 - RNA, 24 nt, Human
cagcuacucaggaggcugaggugg

SEQ ID NO: 812098 - RNA, 24 nt, Human
caucccuauaaucucagcacuuug

SEQ ID NO: 812099 - RNA, 22 nt, Human
cauuccagccuggauaacagag

SEQ ID NO: 812100 - RNA, 24 nt, Human
cauuccagccuggauaacagagug

SEQ ID NO: 812101 - RNA, 22 nt, Human
ccaaagugcucggauuacaggc

SEQ ID NO: 812102 - RNA, 24 nt, Human
ccaaagugcucggauuacaggcgu

SEQ ID NO: 812103 - RNA, 27 nt, Human
ccaaauuuauuuauuuauuuauuuauu

SEQ ID NO: 812104 - RNA, 20 nt, Human
ccacugcacuccagccuggg

SEQ ID NO: 812105 - RNA, 20 nt, Human
ccacugcacuccagccuggg

SEQ ID NO: 812106 - RNA, 21 nt, Human
ccacugcacuccagccugggc

SEQ ID NO: 812107 - RNA, 22 nt, Human
ccacugcacuccagccugggca

SEQ ID NO: 812108 - RNA, 23 nt, Human
ccacugcacuccagccugggcaa

SEQ ID NO: 812109 - RNA, 24 nt, Human
ccacugcacuccagccugggcaac

SEQ ID NO: 812110 - RNA, 21 nt, Human
ccaucucuacagaaaaacgcg

SEQ ID NO: 812111 - RNA, 19 nt, Human
ccauguuggucaggcuggu

SEQ ID NO: 812112 - RNA, 22 nt, Human
ccauguuggucaggcuggucuc

SEQ ID NO: 812113 - RNA, 23 nt, Human
ccauguuggucaggcuggucucg

SEQ ID NO: 812114 - RNA, 18 nt, Human
cccaggcuggaguacaau

SEQ ID NO: 812115 - RNA, 23 nt, Human
cccagguucaagugauucuccuc

SEQ ID NO: 812116 - RNA, 23 nt, Human
cccagguucaagugauucuccug

SEQ ID NO: 812117 - RNA, 23 nt, Human
cccgcaaaggacuucauugaucc

SEQ ID NO: 812118 - RNA, 23 nt, Human
ccuaaagucaggaguucgagauc

SEQ ID NO: 812119 - RNA, 23 nt, Human
ccugaccaauguggugaaacccc

SEQ ID NO: 812120 - RNA, 24 nt, Human
ccugaccaauguggugaaaccccg

SEQ ID NO: 812121 - RNA, 24 nt, Human
ccugaccucaggugaucugcccac

SEQ ID NO: 812122 - RNA, 19 nt, Human
ccugaguagcugggauuac

SEQ ID NO: 812123 - RNA, 22 nt, Human
ccugggcaacagagcgagacuc

SEQ ID NO: 812124 - RNA, 23 nt, Human
ccugggcaacucgcgaaacccca

SEQ ID NO: 812125 - RNA, 21 nt, Human
ccuguaaucccagcuacucag

SEQ ID NO: 812126 - RNA, 21 nt, Human
ccuguagucccagcuacucag

SEQ ID NO: 812127 - RNA, 18 nt, Human
cgagaucagccugaccaa

SEQ ID NO: 812128 - RNA, 24 nt, Human
cgcucuuguugcccaggcuggagu

SEQ ID NO: 812129 - RNA, 20 nt, Human
cggauuacaggcgugagcca

SEQ ID NO: 812130 - RNA, 23 nt, Human
cggauuacaggcgugagccaccg

SEQ ID NO: 812131 - RNA, 29 nt, Human
cggcuaauuuuguauuuuuaguagagacg

SEQ ID NO: 812132 - RNA, 24 nt, Human
cguguggaucaccuaaagucagga

SEQ ID NO: 812133 - RNA, 19 nt, Human
cuaagccagguauagaaca

SEQ ID NO: 812134 - RNA, 22 nt, Human
cucacgcccauaaucccagcac

SEQ ID NO: 812135 - RNA, 24 nt, Human
cucacgcccauaaucccagcacuu

SEQ ID NO: 812136 - RNA, 27 nt, Human
cucacuauucaagauggcccagcugcc

SEQ ID NO: 812137 - RNA, 24 nt, Human
cucacuguaaccuccacuucccag

SEQ ID NO: 812138 - RNA, 18 nt, Human
cucaggaggcugaggugg

SEQ ID NO: 812139 - RNA, 24 nt, Human
cucaucccuauaaucucagcacuu

SEQ ID NO: 812140 - RNA, 24 nt, Human
cuccauguuggucaggcuggucuc

SEQ ID NO: 812141 - RNA, 18 nt, Human
cucgcgaaaccccaucuc

SEQ ID NO: 812142 - RNA, 20 nt, Human
cucggauuacaggcgugagc

SEQ ID NO: 812143 - RNA, 22 nt, Human
cugcagugagccaugauugugu

SEQ ID NO: 812144 - RNA, 23 nt, Human
cugccucacccuccugaguagcu

SEQ ID NO: 812145 - RNA, 21 nt, Human
cuggauccaggagaucaagcu

SEQ ID NO: 812146 - RNA, 24 nt, Human
cuguaaccuccacuucccagguuc

SEQ ID NO: 812147 - RNA, 21 nt, Human
cuguaaucccagcuacucagg

SEQ ID NO: 812148 - RNA, 19 nt, Human
cuuaaaccaaauuuagagc

SEQ ID NO: 812149 - RNA, 24 nt, Human
cuucccagguucaagugauucucc

SEQ ID NO: 812150 - RNA, 22 nt, Human
cuugcaguuccagaauaaaacc

SEQ ID NO: 812151 - RNA, 24 nt, Human
gaaaaaaacuaagaaacacuaaaa

SEQ ID NO: 812152 - RNA, 20 nt, Human
gaagaugaagagccauucau

SEQ ID NO: 812153 - RNA, 24 nt, Human
gaccucaggugaucugcccaccuc

SEQ ID NO: 812154 - RNA, 23 nt, Human
gagacgggguuucuccauguugg

SEQ ID NO: 812155 - RNA, 24 nt, Human
gagacgggguuucuccauguuggu

SEQ ID NO: 812156 - RNA, 25 nt, Human
gagaugggcaaaucacuucaggcca

SEQ ID NO: 812157 - RNA, 21 nt, Human
gaggugggagggucgcuugag

SEQ ID NO: 812158 - RNA, 24 nt, Human
gaguagcugggauuacaagcacgc

SEQ ID NO: 812159 - RNA, 24 nt, Human
gaucaccuaaagucaggaguucga

SEQ ID NO: 812160 - RNA, 23 nt, Human
gauggugaugguguagcugucag

SEQ ID NO: 812161 - RNA, 18 nt, Human
gauuacaggcgugagcca

SEQ ID NO: 812162 - RNA, 22 nt, Human
gauuacaggcgugagccaccgc

SEQ ID NO: 812163 - RNA, 23 nt, Human
gauuacaggcgugagccaccgca

SEQ ID NO: 812164 - RNA, 24 nt, Human
gauugcuugaacccaggaggcaga

SEQ ID NO: 812165 - RNA, 24 nt, Human
gcacuccagccugggcaacagagc

SEQ ID NO: 812166 - RNA, 23 nt, Human
gcagaggcugcagugagccaaga

SEQ ID NO: 812167 - RNA, 22 nt, Human
gcaggaggauugcuugaaccca

SEQ ID NO: 812168 - RNA, 24 nt, Human
gcauuccagccuggauaacagagu

SEQ ID NO: 812169 - RNA, 24 nt, Human
gccugggaaguugaggcugcagug

SEQ ID NO: 812170 - RNA, 23 nt, Human
gcuggucucgaacuccugaccuc

SEQ ID NO: 812171 - RNA, 20 nt, Human
ggaucaccuaaagucaggaa

SEQ ID NO: 812172 - RNA, 21 nt, Human
ggauuacaggcgugagccacc

SEQ ID NO: 812173 - RNA, 22 nt, Human
ggauuacaggcgugagccaccg

SEQ ID NO: 812174 - RNA, 19 nt, Human
ggcaccuguaaucccagcu

SEQ ID NO: 812175 - RNA, 24 nt, Human
ggcuggucucgaacuccugaccuc

SEQ ID NO: 812176 - RNA, 23 nt, Human
gggguuucuccauguuggucagg

SEQ ID NO: 812177 - RNA, 22 nt, Human
ggguuucuccauguuggucagg

SEQ ID NO: 812178 - RNA, 19 nt, Human
ggucucgaacuccugaccu

SEQ ID NO: 812179 - RNA, 19 nt, Human
ggucuuaaaccaaauuuag

SEQ ID NO: 812180 - RNA, 24 nt, Human
gguggcaggcaccuguaaucccag

SEQ ID NO: 812181 - RNA, 24 nt, Human
gguggcucacgcccauaaucccag

SEQ ID NO: 812182 - RNA, 23 nt, Human
guaaccuucugaaacuuucugaa

SEQ ID NO: 812183 - RNA, 23 nt, Human
guagagacgggguuucuccaugu

SEQ ID NO: 812184 - RNA, 20 nt, Human
guagagcacaccuguagucc

SEQ ID NO: 812185 - RNA, 18 nt, Human
guagcugggauuacaagc

SEQ ID NO: 812186 - RNA, 24 nt, Human
gugaucugcccaccucggccuccc

SEQ ID NO: 812187 - RNA, 19 nt, Human
gugauucuccugccucacc

SEQ ID NO: 812188 - RNA, 21 nt, Human
uaaaaauacaaaaauuagcca

SEQ ID NO: 812189 - RNA, 18 nt, Human
uaaaguuuacuguaaccu

SEQ ID NO: 812190 - RNA, 20 nt, Human
uaaauccuugaaacuugcag

SEQ ID NO: 812191 - RNA, 23 nt, Human
uaaauccuugaaacuugcaguuc

SEQ ID NO: 812192 - RNA, 22 nt, Human
uaacagagugagacccugucuc

SEQ ID NO: 812193 - RNA, 24 nt, Human
uaaccaaaaagaacucacuaauau

SEQ ID NO: 812194 - RNA, 22 nt, Human
uaacggauacucaugaacugaa

SEQ ID NO: 812195 - RNA, 24 nt, Human
uaagaaacacuaaaauaguuuuau

SEQ ID NO: 812196 - RNA, 19 nt, Human
uaaguugaauauuucacuc

SEQ ID NO: 812197 - RNA, 23 nt, Human
uaaguugaauauuucacucuaug

SEQ ID NO: 812198 - RNA, 22 nt, Human
uaauccuaagagaucaggucaa

SEQ ID NO: 812199 - RNA, 21 nt, Human
uacaccacugcacuccagccu

SEQ ID NO: 812200 - RNA, 23 nt, Human
uacacugaagcuaaacacauggg

SEQ ID NO: 812201 - RNA, 21 nt, Human
uacaggcgugagccaccgcac

SEQ ID NO: 812202 - RNA, 22 nt, Human
uacaggcgugagccaccgcacu

SEQ ID NO: 812203 - RNA, 22 nt, Human
uagagcacaccuguagucccag

SEQ ID NO: 812204 - RNA, 24 nt, Human
uaguagagacgggguuucuccaug

SEQ ID NO: 812205 - RNA, 18 nt, Human
uauauaaacagagaauga

SEQ ID NO: 812206 - RNA, 20 nt, Human
uauucaagauggcccagcug

SEQ ID NO: 812207 - RNA, 19 nt, Human
ucaacauuacaagugaagu

SEQ ID NO: 812208 - RNA, 19 nt, Human
ucaagugauucuccugccu

SEQ ID NO: 812209 - RNA, 20 nt, Human
ucaccgcauuccagccugga

SEQ ID NO: 812210 - RNA, 21 nt, Human
ucaccgcauuccagccuggau

SEQ ID NO: 812211 - RNA, 24 nt, Human
ucacuguaaccuccacuucccagg

SEQ ID NO: 812212 - RNA, 25 nt, Human
ucacuguaaccuccacuucccaggu

SEQ ID NO: 812213 - RNA, 23 nt, Human
ucauuaaacaaaugaaaguauua

SEQ ID NO: 812214 - RNA, 20 nt, Human
uccaaauuaagcaaaaaaag

SEQ ID NO: 812215 - RNA, 19 nt, Human
uccagccuggauaacagag

SEQ ID NO: 812216 - RNA, 23 nt, Human
uccagccuggauaacagagugag

SEQ ID NO: 812217 - RNA, 24 nt, Human
uccagccuggauaacagagugaga

SEQ ID NO: 812218 - RNA, 23 nt, Human
uccagccugggcaacagagcgag

SEQ ID NO: 812219 - RNA, 24 nt, Human
uccagccugggcaacagagcgaga

SEQ ID NO: 812220 - RNA, 20 nt, Human
uccauacacuucuuaaacca

SEQ ID NO: 812221 - RNA, 20 nt, Human
uccaugaggcaaaaauauaa

SEQ ID NO: 812222 - RNA, 22 nt, Human
uccaugaggcaaaaauauaauc

SEQ ID NO: 812223 - RNA, 24 nt, Human
ucccaaagugcucggauuacaggc

SEQ ID NO: 812224 - RNA, 21 nt, Human
ucccagguucaagugauucuc

SEQ ID NO: 812225 - RNA, 24 nt, Human
ucccagguucaagugauucuccug

SEQ ID NO: 812226 - RNA, 18 nt, Human
uccugaguagcugggauu

SEQ ID NO: 812227 - RNA, 22 nt, Human
uccuucauucuuuccucuuuca

SEQ ID NO: 812228 - RNA, 21 nt, Human
ucgacaaauaaaauguaacaa

SEQ ID NO: 812229 - RNA, 21 nt, Human
ucgcucuuguugcccaggcug

SEQ ID NO: 812230 - RNA, 22 nt, Human
ucgcucuuguugcccaggcugg

SEQ ID NO: 812231 - RNA, 23 nt, Human
ucgcucuuguugcccaggcugga

SEQ ID NO: 812232 - RNA, 24 nt, Human
ucgcuugagccugggaaguugagg

SEQ ID NO: 812233 - RNA, 18 nt, Human
ucggauuacaggcgugag

SEQ ID NO: 812234 - RNA, 22 nt, Human
ucggauuacaggcgugagccac

SEQ ID NO: 812235 - RNA, 24 nt, Human
ucggauuacaggcgugagccaccg

SEQ ID NO: 812236 - RNA, 23 nt, Human
ucucgaacuccugaccucaggug

SEQ ID NO: 812237 - RNA, 21 nt, Human
ucucuacuaaaaauacaaaaa

SEQ ID NO: 812238 - RNA, 20 nt, Human
ucugucugaaaaaaaaaaaa

SEQ ID NO: 812239 - RNA, 19 nt, Human
ugaaaaaaacuaagaaaca

SEQ ID NO: 812240 - RNA, 21 nt, Human
ugaaaaaaacuaagaaacacu

SEQ ID NO: 812241 - RNA, 23 nt, Human
ugaaaaaaacuaagaaacacuaa

SEQ ID NO: 812242 - RNA, 24 nt, Human
ugaaaagaaacaaaauuuaguacu

SEQ ID NO: 812243 - RNA, 25 nt, Human
ugaaauaugaacuacauucaaagaa

SEQ ID NO: 812244 - RNA, 25 nt, Human
ugaacugaaauaugaacuacauuca

SEQ ID NO: 812245 - RNA, 24 nt, Human
ugaaggcuguguauucaacuuuca

SEQ ID NO: 812246 - RNA, 24 nt, Human
ugaccaauguggugaaaccccguc

SEQ ID NO: 812247 - RNA, 18 nt, Human
ugaccucaggugaucugc

SEQ ID NO: 812248 - RNA, 20 nt, Human
ugaccucaggugaucugccc

SEQ ID NO: 812249 - RNA, 21 nt, Human
ugaccucaggugaucugccca

SEQ ID NO: 812250 - RNA, 24 nt, Human
ugaccucaggugaucugcccaccu

SEQ ID NO: 812251 - RNA, 18 nt, Human
ugacucaucccuauaauc

SEQ ID NO: 812252 - RNA, 23 nt, Human
ugacucauucuuucugccagcaa

SEQ ID NO: 812253 - RNA, 20 nt, Human
ugagaaggaguuucgcucuu

SEQ ID NO: 812254 - RNA, 24 nt, Human
ugagccugggaaguugaggcugca

SEQ ID NO: 812255 - RNA, 24 nt, Human
ugaggcaggaggauugcuugaacc

SEQ ID NO: 812256 - RNA, 25 nt, Human
ugaggcaggaggauugcuugaaccc

SEQ ID NO: 812257 - RNA, 26 nt, Human
ugaggcguguggaucaccuaaaguca

SEQ ID NO: 812258 - RNA, 23 nt, Human
ugaggcugcagugagccaugauu

SEQ ID NO: 812259 - RNA, 18 nt, Human
ugaggugggagggucgcu

SEQ ID NO: 812260 - RNA, 20 nt, Human
ugaggugggagggucgcuug

SEQ ID NO: 812261 - RNA, 23 nt, Human
ugaggugggagggucgcuugagc

SEQ ID NO: 812262 - RNA, 24 nt, Human
ugaggugggagggucgcuugagcc

SEQ ID NO: 812263 - RNA, 21 nt, Human
ugagucauucuucuucaaguu

SEQ ID NO: 812264 - RNA, 24 nt, Human
ugaucugcccaccucggccuccca

SEQ ID NO: 812265 - RNA, 21 nt, Human
ugauuaacaguuucaucugaa

SEQ ID NO: 812266 - RNA, 25 nt, Human
ugcacacauauauucacucuaugca

SEQ ID NO: 812267 - RNA, 19 nt, Human
ugccauaucaccaguuuau

SEQ ID NO: 812268 - RNA, 21 nt, Human
ugcccaggcuggaguacaaug

SEQ ID NO: 812269 - RNA, 24 nt, Human
ugcccaggcuggaguacaauggcg

SEQ ID NO: 812270 - RNA, 24 nt, Human
ugcccuacaccuucaucuuccuca

SEQ ID NO: 812271 - RNA, 21 nt, Human
ugccucacccuccugaguagc

SEQ ID NO: 812272 - RNA, 24 nt, Human
ugccucacccuccugaguagcugg

SEQ ID NO: 812273 - RNA, 21 nt, Human
uggauaacagagugagacccu

SEQ ID NO: 812274 - RNA, 21 nt, Human
uggaucaccuaaagucaggag

SEQ ID NO: 812275 - RNA, 24 nt, Human
uggaucaccuaaagucaggaguuc

SEQ ID NO: 812276 - RNA, 27 nt, Human
uggaucaccuaaagucaggaguucgag

SEQ ID NO: 812277 - RNA, 24 nt, Human
uggcgcgaucuucgcucacuguaa

SEQ ID NO: 812278 - RNA, 22 nt, Human
uggcucacgcccauaaucccag

SEQ ID NO: 812279 - RNA, 24 nt, Human
uggcucacgcccauaaucccagca

SEQ ID NO: 812280 - RNA, 24 nt, Human
ugggaagccgagaugggcaaauca

SEQ ID NO: 812281 - RNA, 20 nt, Human
ugggaaguugaggcugcagg

SEQ ID NO: 812282 - RNA, 19 nt, Human
ugggagucugaggcgugug

SEQ ID NO: 812283 - RNA, 21 nt, Human
ugggauuacaagcacgcacca

SEQ ID NO: 812284 - RNA, 24 nt, Human
ugggauuacaagcacgcaccacca

SEQ ID NO: 812285 - RNA, 24 nt, Human
ugggcaaaucacuucaggccaaga

SEQ ID NO: 812286 - RNA, 24 nt, Human
uggucaggcuggucucgaacuccu

SEQ ID NO: 812287 - RNA, 19 nt, Human
uggugaaaccccgucucua

SEQ ID NO: 812288 - RNA, 24 nt, Human
ugguggcaggcaccuguaauccca

SEQ ID NO: 812289 - RNA, 21 nt, Human
uguauuuuuaguagagacggg

SEQ ID NO: 812290 - RNA, 23 nt, Human
uuacaccacugcacuccagccug

SEQ ID NO: 812291 - RNA, 18 nt, Human
uuaccauuuguuaaaaau

SEQ ID NO: 812292 - RNA, 22 nt, Human
uuacugcccauaggaauacccg

SEQ ID NO: 812293 - RNA, 21 nt, Human
uuacuguaaccuucugaaacu

SEQ ID NO: 812294 - RNA, 18 nt, Human
uuaguagagacgggguuu

SEQ ID NO: 812295 - RNA, 24 nt, Human
uuaguagagacgggguuucuccau

SEQ ID NO: 812296 - RNA, 18 nt, Human
uuauuuauuuauuuauuu

SEQ ID NO: 812297 - RNA, 25 nt, Human
uuauuuauuuauuuauuuauuuauu

SEQ ID NO: 812298 - RNA, 24 nt, Human
uuauuuauuuauuuauuuauuuuu

SEQ ID NO: 812299 - RNA, 21 nt, Human
uucaagugauucuccugccuc

SEQ ID NO: 812300 - RNA, 23 nt, Human
uucaagugauucuccugccucac

SEQ ID NO: 812301 - RNA, 19 nt, Human
uucacucuaugcacacaua

SEQ ID NO: 812302 - RNA, 19 nt, Human
uucacucuaugcacacaua

SEQ ID NO: 812303 - RNA, 21 nt, Human
uucacucuaugcacacauaua

SEQ ID NO: 812304 - RNA, 18 nt, Human
uucccagguucaagugau

SEQ ID NO: 812305 - RNA, 19 nt, Human
uucccagguucaagugauu

SEQ ID NO: 812306 - RNA, 24 nt, Human
uucgcucuuguugcccaggcugga

SEQ ID NO: 812307 - RNA, 24 nt, Human
uugcuugaacccaggaggcagagg

SEQ ID NO: 812308 - RNA, 19 nt, Human
uuguaaaauacacugaagc

SEQ ID NO: 812309 - RNA, 23 nt, Human
uuguauuuuuaguagagacgggg

SEQ ID NO: 812310 - RNA, 22 nt, Human
uuuagagcccacccacaaaaga

SEQ ID NO: 812311 - RNA, 22 nt, Human
uuucacucuaugcacacauaua

SEQ ID NO: 812312 - RNA, 23 nt, Human
uuucgcucuuguugcccaggcug

SEQ ID NO: 812313 - RNA, 24 nt, Human
uuucgcucuuguugcccaggcugg

SEQ ID NO: 812314 - RNA, 21 nt, Human
uuucuccauguuggucaggcu

SEQ ID NO: 812315 - RNA, 22 nt, Human
uuucugccagcaauaucuuugu

SEQ ID NO: 812316 - RNA, 20 nt, Human
uuugagaaggaguuucgcuc

SEQ ID NO: 812317 - RNA, 19 nt, Human
uuuuguauuuuuaguagag

SEQ ID NO: 812318 - RNA, 20 nt, Human
uuuuguauuuuuaguagaga

SEQ ID NO: 812319 - RNA, 22 nt, Human
uuuuuaguagagacgggguuuc

SEQ ID NO: 812320 - RNA, 19 nt, Human
aaaaaaacaaaggagcaca

SEQ ID NO: 812321 - RNA, 23 nt, Human
aaaaaagaagaggguaugugugg

SEQ ID NO: 812322 - RNA, 24 nt, Human
aaaaacaaaggagcacagaaaaga

SEQ ID NO: 812323 - RNA, 18 nt, Human
aaacagggcucuccaccc

SEQ ID NO: 812324 - RNA, 20 nt, Human
aaagaaagauaggagaaaac

SEQ ID NO: 812325 - RNA, 22 nt, Human
aaagaagaggguauguguggug

SEQ ID NO: 812326 - RNA, 21 nt, Human
aaagccagaaccaggccagga

SEQ ID NO: 812327 - RNA, 18 nt, Human
aaaggugggggaguccgg

SEQ ID NO: 812328 - RNA, 18 nt, Human
aaaugucuucuucaggcc

SEQ ID NO: 812329 - RNA, 28 nt, Human
aacccagagaggaaaggugggggagucc

SEQ ID NO: 812330 - RNA, 22 nt, Human
aagaaaaagcgagagaaaaaaa

SEQ ID NO: 812331 - RNA, 18 nt, Human
aagaaagauaggagaaaa

SEQ ID NO: 812332 - RNA, 26 nt, Human
aagaaaugagauaaucugaaagaaga

SEQ ID NO: 812333 - RNA, 24 nt, Human
aagaggcacgcaaccaaagccaga

SEQ ID NO: 812334 - RNA, 19 nt, Human
aagcagaaaaggaugggug

SEQ ID NO: 812335 - RNA, 23 nt, Human
aagcagaaaaggauggguguccg

SEQ ID NO: 812336 - RNA, 19 nt, Human
aagccaagcccccuccccu

SEQ ID NO: 812337 - RNA, 25 nt, Human
aauacagagacagauccagaagaaa

SEQ ID NO: 812338 - RNA, 18 nt, Human
acucccaccucgcccgga

SEQ ID NO: 812339 - RNA, 19 nt, Human
acugcauuggauauucucu

SEQ ID NO: 812340 - RNA, 18 nt, Human
acuggagagccugcuggg

SEQ ID NO: 812341 - RNA, 25 nt, Human
agaaaaagagggaaaugcuggggag

SEQ ID NO: 812342 - RNA, 22 nt, Human
agaaagaagggguugggauggg

SEQ ID NO: 812343 - RNA, 21 nt, Human
agaaggauacggugaagaaga

SEQ ID NO: 812344 - RNA, 23 nt, Human
agaccggggccgggcgggggggc

SEQ ID NO: 812345 - RNA, 24 nt, Human
agagaaaaaaggcaggucaaaggg

SEQ ID NO: 812346 - RNA, 23 nt, Human
agagaaggauacggugaagaaga

SEQ ID NO: 812347 - RNA, 20 nt, Human
agagaggaaaggugggggag

SEQ ID NO: 812348 - RNA, 21 nt, Human
agaggggaggaaggagggagg

SEQ ID NO: 812349 - RNA, 19 nt, Human
agcaggcuggguggggggg

SEQ ID NO: 812350 - RNA, 18 nt, Human
agccccccggcggcucag

SEQ ID NO: 812351 - RNA, 21 nt, Human
aggagaaaacacagccaggaa

SEQ ID NO: 812352 - RNA, 26 nt, Human
aggagaaaacacagccaggaagagga

SEQ ID NO: 812353 - RNA, 19 nt, Human
aggaggcaggcagagagga

SEQ ID NO: 812354 - RNA, 22 nt, Human
aggagggaggcaagccaaggaa

SEQ ID NO: 812355 - RNA, 21 nt, Human
aggcugccuccccggcacagc

SEQ ID NO: 812356 - RNA, 18 nt, Human
agggaagaagagcuggga

SEQ ID NO: 812357 - RNA, 22 nt, Human
aggggaggaaggagggaggcaa

SEQ ID NO: 812358 - RNA, 21 nt, Human
agggguugggauggggaaggg

SEQ ID NO: 812359 - RNA, 19 nt, Human
agguaguggcaaggguggg

SEQ ID NO: 812360 - RNA, 24 nt, Human
aggucuaaagaaaaggugggaggg

SEQ ID NO: 812361 - RNA, 18 nt, Human
auccagaagaaaugagau

SEQ ID NO: 812362 - RNA, 21 nt, Human
aucccaaauuccaugaaauag

SEQ ID NO: 812363 - RNA, 21 nt, Human
augccaccagagggggcugga

SEQ ID NO: 812364 - RNA, 23 nt, Human
augggggagacagaaggguggga

SEQ ID NO: 812365 - RNA, 22 nt, Human
caagugaguccagaccaaccaa

SEQ ID NO: 812366 - RNA, 18 nt, Human
cacagcauccauggcagg

SEQ ID NO: 812367 - RNA, 20 nt, Human
cacagcauccauggcaggau

SEQ ID NO: 812368 - RNA, 21 nt, Human
caccaaacccccacccgcagc

SEQ ID NO: 812369 - RNA, 23 nt, Human
caccaaacccccacccgcagcga

SEQ ID NO: 812370 - RNA, 27 nt, Human
caccaaacccccacccgcagcgaaguu

SEQ ID NO: 812371 - RNA, 20 nt, Human
caccucugcccugccuggga

SEQ ID NO: 812372 - RNA, 24 nt, Human
cacuucccuucucuccuucaggga

SEQ ID NO: 812373 - RNA, 19 nt, Human
cagagacagauccagaaga

SEQ ID NO: 812374 - RNA, 21 nt, Human
cagagggacagcaggccccuu

SEQ ID NO: 812375 - RNA, 20 nt, Human
cagcaacucugagagagaaa

SEQ ID NO: 812376 - RNA, 19 nt, Human
cagccacaaccucaaacag

SEQ ID NO: 812377 - RNA, 18 nt, Human
cagcggcaguguugcggg

SEQ ID NO: 812378 - RNA, 20 nt, Human
caucacgggggaggcugggc

SEQ ID NO: 812379 - RNA, 22 nt, Human
cauuuucuuccuccucuccauu

SEQ ID NO: 812380 - RNA, 20 nt, Human
ccaaagccagaaccaggccc

SEQ ID NO: 812381 - RNA, 23 nt, Human
ccagagagggaucagccacaacc

SEQ ID NO: 812382 - RNA, 22 nt, Human
cccacccgcagcgaaguugagg

SEQ ID NO: 812383 - RNA, 21 nt, Human
cccagaagugccuccucccac

SEQ ID NO: 812384 - RNA, 22 nt, Human
cccagaguugggaugugggggc

SEQ ID NO: 812385 - RNA, 18 nt, Human
ccccacccgcagcgaagu

SEQ ID NO: 812386 - RNA, 19 nt, Human
ccccagaagugccuccucc

SEQ ID NO: 812387 - RNA, 23 nt, Human
ccccagaagugccuccucccacc

SEQ ID NO: 812388 - RNA, 23 nt, Human
cccccagaagugccuccucccac

SEQ ID NO: 812389 - RNA, 23 nt, Human
ccccuccuucuguuguuuuccca

SEQ ID NO: 812390 - RNA, 21 nt, Human
ccccuggggacccugcagucc

SEQ ID NO: 812391 - RNA, 19 nt, Human
ccccuuaggcuagggagcc

SEQ ID NO: 812392 - RNA, 23 nt, Human
cccuccuucuguuguuuucccau

SEQ ID NO: 812393 - RNA, 23 nt, Human
ccggagaguccccucucucccca

SEQ ID NO: 812394 - RNA, 19 nt, Human
ccucagagggacagcaggc

SEQ ID NO: 812395 - RNA, 21 nt, Human
ccucagagggacagcaggccc

SEQ ID NO: 812396 - RNA, 21 nt, Human
ccuugagggaggggguuggca

SEQ ID NO: 812397 - RNA, 21 nt, Human
cgcaaccaaagccagaaccag

SEQ ID NO: 812398 - RNA, 19 nt, Human
cgggcgaggccucggggcg

SEQ ID NO: 812399 - RNA, 21 nt, Human
cgggggaggcugggccaggca

SEQ ID NO: 812400 - RNA, 22 nt, Human
cuaauaccagagagggaucagc

SEQ ID NO: 812401 - RNA, 19 nt, Human
cuagggcuuccugcuccca

SEQ ID NO: 812402 - RNA, 23 nt, Human
cucaagugccucuaacccucugc

SEQ ID NO: 812403 - RNA, 21 nt, Human
cucagccccccggcggcucag

SEQ ID NO: 812404 - RNA, 19 nt, Human
cuccucccaccacaacucc

SEQ ID NO: 812405 - RNA, 21 nt, Human
cuccucccaccacaacuccca

SEQ ID NO: 812406 - RNA, 19 nt, Human
cucugagagagaaaagccc

SEQ ID NO: 812407 - RNA, 24 nt, Human
cucugccucaugcaggggagggag

SEQ ID NO: 812408 - RNA, 27 nt, Human
cuuaggacaccaaacccccacccgcag

SEQ ID NO: 812409 - RNA, 24 nt, Human
gaaaaaaacaaaggagcacagaaa

SEQ ID NO: 812410 - RNA, 22 nt, Human
gaaagaagacagggaaagaaaa

SEQ ID NO: 812411 - RNA, 18 nt, Human
gaagaagagaaagaaaga

SEQ ID NO: 812412 - RNA, 18 nt, Human
gaagaagagcugggagcu

SEQ ID NO: 812413 - RNA, 22 nt, Human
gaauacagagacagauccagaa

SEQ ID NO: 812414 - RNA, 20 nt, Human
gacugcauuggauauucucu

SEQ ID NO: 812415 - RNA, 25 nt, Human
gagaaaaaaacaaaggagcacagaa

SEQ ID NO: 812416 - RNA, 23 nt, Human
gagaaggauacggugaagaagag

SEQ ID NO: 812417 - RNA, 23 nt, Human
gagacagcggcaguguugcggga

SEQ ID NO: 812418 - RNA, 21 nt, Human
gagagacugcuccaacccaga

SEQ ID NO: 812419 - RNA, 19 nt, Human
gaggaggggcuggccgaug

SEQ ID NO: 812420 - RNA, 21 nt, Human
gaggcacgcaaccaaagccag

SEQ ID NO: 812421 - RNA, 21 nt, Human
gaggggcuggccgaugaggag

SEQ ID NO: 812422 - RNA, 27 nt, Human
gauccccuccuucuguuguuuucccau

SEQ ID NO: 812423 - RNA, 19 nt, Human
gaugaggagaaaaagaggg

SEQ ID NO: 812424 - RNA, 21 nt, Human
gcaguaacccagcucagugcu

SEQ ID NO: 812425 - RNA, 19 nt, Human
gccugggaagcaugugaga

SEQ ID NO: 812426 - RNA, 18 nt, Human
gcgcggccucagcccccc

SEQ ID NO: 812427 - RNA, 21 nt, Human
gcuggggcucaggcugccucc

SEQ ID NO: 812428 - RNA, 21 nt, Human
ggaagaagagaaagaaagaua

SEQ ID NO: 812429 - RNA, 19 nt, Human
ggacuacuaaacuugucac

SEQ ID NO: 812430 - RNA, 19 nt, Human
ggagacagaagggugggag

SEQ ID NO: 812431 - RNA, 19 nt, Human
ggagaugcacugagacccc

SEQ ID NO: 812432 - RNA, 23 nt, Human
ggagcuggaugcaaagggggagg

SEQ ID NO: 812433 - RNA, 19 nt, Human
ggagggcguggagcaaugg

SEQ ID NO: 812434 - RNA, 21 nt, Human
ggcaagggugggggaagauga

SEQ ID NO: 812435 - RNA, 18 nt, Human
ggccacaagugaguccag

SEQ ID NO: 812436 - RNA, 19 nt, Human
ggccgaugaggagaaaaag

SEQ ID NO: 812437 - RNA, 18 nt, Human
ggcgggggcaguuagacc

SEQ ID NO: 812438 - RNA, 19 nt, Human
ggcuggaggaggggcuggc

SEQ ID NO: 812439 - RNA, 22 nt, Human
gggaagaagagcugggagcugg

SEQ ID NO: 812440 - RNA, 21 nt, Human
gggcaggcagggccggacccu

SEQ ID NO: 812441 - RNA, 21 nt, Human
gggccuuggagccgggcgagg

SEQ ID NO: 812442 - RNA, 22 nt, Human
ggggaaaaacuaauaccagaga

SEQ ID NO: 812443 - RNA, 19 nt, Human
ggggaggcugggccaggca

SEQ ID NO: 812444 - RNA, 20 nt, Human
gggggccuugcucaagugcc

SEQ ID NO: 812445 - RNA, 26 nt, Human
ggguauguguggugggcauuccuggg

SEQ ID NO: 812446 - RNA, 21 nt, Human
guauguguggugggcauuccu

SEQ ID NO: 812447 - RNA, 20 nt, Human
guccccucuuccuagggcuu

SEQ ID NO: 812448 - RNA, 19 nt, Human
guugggagaggaaaaauaa

SEQ ID NO: 812449 - RNA, 24 nt, Human
uaaacaagaguuugacuagaaaaa

SEQ ID NO: 812450 - RNA, 19 nt, Human
uaauagccuccaagauuag

SEQ ID NO: 812451 - RNA, 20 nt, Human
uagagaaggauacggugaag

SEQ ID NO: 812452 - RNA, 23 nt, Human
uagagguggaggaugcaccuccu

SEQ ID NO: 812453 - RNA, 23 nt, Human
uaguguaggggaaaaaaucugcc

SEQ ID NO: 812454 - RNA, 19 nt, Human
uauuuuuuucuucuuaugg

SEQ ID NO: 812455 - RNA, 18 nt, Human
ucacagcuucugcuucca

SEQ ID NO: 812456 - RNA, 23 nt, Human
ucacuucccuucucuccuucagg

SEQ ID NO: 812457 - RNA, 20 nt, Human
ucagccccccggcggcucag

SEQ ID NO: 812458 - RNA, 18 nt, Human
ucagggaaggauggaauu

SEQ ID NO: 812459 - RNA, 19 nt, Human
ucauauguaaacaaucuag

SEQ ID NO: 812460 - RNA, 21 nt, Human
ucauuuucuuccuccucucca

SEQ ID NO: 812461 - RNA, 18 nt, Human
uccaacccagagaggaaa

SEQ ID NO: 812462 - RNA, 24 nt, Human
uccaacccagagaggaaagguggg

SEQ ID NO: 812463 - RNA, 21 nt, Human
uccagaagaaaugagauaauc

SEQ ID NO: 812464 - RNA, 18 nt, Human
ucccaaauuccaugaaau

SEQ ID NO: 812465 - RNA, 26 nt, Human
ucccagaguugggaugugggggccuu

SEQ ID NO: 812466 - RNA, 22 nt, Human
ucccccagaagugccuccuccc

SEQ ID NO: 812467 - RNA, 18 nt, Human
uccggagagacugcucca

SEQ ID NO: 812468 - RNA, 18 nt, Human
uccucccaccacaacucc

SEQ ID NO: 812469 - RNA, 24 nt, Human
uccuucuucauuuucuuccuccuu

SEQ ID NO: 812470 - RNA, 18 nt, Human
uccuugagggaggggguu

SEQ ID NO: 812471 - RNA, 20 nt, Human
ucuccacccaccugucaccc

SEQ ID NO: 812472 - RNA, 18 nt, Human
ucuuccuccucuccauuc

SEQ ID NO: 812473 - RNA, 19 nt, Human
ugaaagaagacagggaaag

SEQ ID NO: 812474 - RNA, 23 nt, Human
ugaaagaagacagggaaagaaaa

SEQ ID NO: 812475 - RNA, 24 nt, Human
ugaagaggcacgcaaccaaagcca

SEQ ID NO: 812476 - RNA, 23 nt, Human
ugacucccaccucugcccugccu

SEQ ID NO: 812477 - RNA, 19 nt, Human
ugagaggggaggaaggagg

SEQ ID NO: 812478 - RNA, 18 nt, Human
ugagauaaucugaaagaa

SEQ ID NO: 812479 - RNA, 20 nt, Human
ugauguaaagggggaaggga

SEQ ID NO: 812480 - RNA, 23 nt, Human
uggauggagauagggaagaagag

SEQ ID NO: 812481 - RNA, 22 nt, Human
uggcgcggccucagccccccgg

SEQ ID NO: 812482 - RNA, 18 nt, Human
ugggagaagucaguggca

SEQ ID NO: 812483 - RNA, 24 nt, Human
ugggagaggaaaaauaaaucaaaa

SEQ ID NO: 812484 - RNA, 25 nt, Human
ugggagaggaaaaauaaaucaaaau

SEQ ID NO: 812485 - RNA, 23 nt, Human
ugggagcuggaugcaaaggggga

SEQ ID NO: 812486 - RNA, 28 nt, Human
ugggagcuggaugcaaagggggaggggg

SEQ ID NO: 812487 - RNA, 20 nt, Human
ugggagggcguggagcaaug

SEQ ID NO: 812488 - RNA, 21 nt, Human
ugggagggcguggagcaaugg

SEQ ID NO: 812489 - RNA, 23 nt, Human
ugggagggcguggagcaauggag

SEQ ID NO: 812490 - RNA, 18 nt, Human
ugggauggggaagggagu

SEQ ID NO: 812491 - RNA, 18 nt, Human
ugggggggcgagguagug

SEQ ID NO: 812492 - RNA, 21 nt, Human
uggguagagaaggauacggug

SEQ ID NO: 812493 - RNA, 26 nt, Human
ugugggggccuugcucaagugccucu

SEQ ID NO: 812494 - RNA, 19 nt, Human
uguggugggcauuccuggg

SEQ ID NO: 812495 - RNA, 22 nt, Human
uuauuuuuuucuucuuaugguu

SEQ ID NO: 812496 - RNA, 20 nt, Human
uuccuagggcuuccugcucc

SEQ ID NO: 812497 - RNA, 25 nt, Human
uuccugcaagacuugguguuggcgg

SEQ ID NO: 812498 - RNA, 20 nt, Human
uuccuugagggaggggguug

SEQ ID NO: 812499 - RNA, 25 nt, Human
uucggugagggaggaggcaggcaga

SEQ ID NO: 812500 - RNA, 23 nt, Human
uucugauguaaagggggaaggga

SEQ ID NO: 812501 - RNA, 21 nt, Human
uugcuccaucccagcaucacg

SEQ ID NO: 812502 - RNA, 21 nt, Human
uuggauggagauagggaagaa

SEQ ID NO: 812503 - RNA, 22 nt, Human
uuuaaaggggcagggagaagag

SEQ ID NO: 812504 - RNA, 18 nt, Human
uuuaaucaaaggccacaa

SEQ ID NO: 812505 - RNA, 21 nt, Human
uuucacuaggccucagaggga

SEQ ID NO: 812506 - RNA, 23 nt, Human
uuucacuucccuucucuccuuca

SEQ ID NO: 812507 - RNA, 18 nt, Human
aggcugugguccucagga

SEQ ID NO: 812508 - RNA, 18 nt, Human
caggccccuccagucgug

SEQ ID NO: 812509 - RNA, 19 nt, Human
cccaggcugugguccucag

SEQ ID NO: 812510 - RNA, 19 nt, Human
ccccuccagucgugugccc

SEQ ID NO: 812511 - RNA, 21 nt, Human
ccggggccuggcuucucaggc

SEQ ID NO: 812512 - RNA, 23 nt, Human
ccuugcugccggggccuggcuuc

SEQ ID NO: 812513 - RNA, 18 nt, Human
cgugugcccaggcugugg

SEQ ID NO: 812514 - RNA, 20 nt, Human
cugggugcauacuccucgcu

SEQ ID NO: 812515 - RNA, 21 nt, Human
ggcugugguccucaggaggcc

SEQ ID NO: 812516 - RNA, 21 nt, Human
gggcuuggguuugguccccag

SEQ ID NO: 812517 - RNA, 18 nt, Human
gguccucaggaggcccug

SEQ ID NO: 812518 - RNA, 27 nt, Human
uccacgguggugcugaccagguagagg

SEQ ID NO: 812519 - RNA, 26 nt, Human
ugcccaggcugugguccucaggaggc

SEQ ID NO: 812520 - RNA, 23 nt, Human
uggguuugguccccagcagugcc

SEQ ID NO: 812521 - RNA, 21 nt, Human
uggugcugaccagguagaggg

SEQ ID NO: 812522 - RNA, 18 nt, Human
uugcugccggggccuggc

SEQ ID NO: 812523 - RNA, 18 nt, Human
uugguccccagcagugcc

SEQ ID NO: 812524 - RNA, 19 nt, Human
uugguccccagcagugccu

SEQ ID NO: 812525 - RNA, 19 nt, Human
aacaccagccgcagacgcg

SEQ ID NO: 812526 - RNA, 19 nt, Human
acaagcucgggagagaagc

SEQ ID NO: 812527 - RNA, 18 nt, Human
agaauacaacagauuccc

SEQ ID NO: 812528 - RNA, 21 nt, Human
caagcucgggagagaagccaa

SEQ ID NO: 812529 - RNA, 19 nt, Human
caccagccgcagacgcgcc

SEQ ID NO: 812530 - RNA, 23 nt, Human
cagaauacaacagauucccauuu

SEQ ID NO: 812531 - RNA, 22 nt, Human
cagccaccgccacagccgccuc

SEQ ID NO: 812532 - RNA, 23 nt, Human
cagccaccgccacagccgccucg

SEQ ID NO: 812533 - RNA, 19 nt, Human
cagcugcaacagcagagga

SEQ ID NO: 812534 - RNA, 23 nt, Human
ccauugaaaaaggcaucguuccu

SEQ ID NO: 812535 - RNA, 23 nt, Human
cccgcugcacccuaggcccagcc

SEQ ID NO: 812536 - RNA, 18 nt, Human
cccuaggcccagccgccu

SEQ ID NO: 812537 - RNA, 24 nt, Human
ccgcagacgcgcccgcugcacccu

SEQ ID NO: 812538 - RNA, 24 nt, Human
ccgccucagccaccgccacagccg

SEQ ID NO: 812539 - RNA, 21 nt, Human
ccuaggcccagccgccucagc

SEQ ID NO: 812540 - RNA, 20 nt, Human
ccucauaaucuaguguugcu

SEQ ID NO: 812541 - RNA, 20 nt, Human
cgccucagccaccgccacag

SEQ ID NO: 812542 - RNA, 21 nt, Human
cuugcagcugcaacagcagag

SEQ ID NO: 812543 - RNA, 19 nt, Human
gagggcgcuggcagggcuc

SEQ ID NO: 812544 - RNA, 22 nt, Human
gccaacaccagccgcagacgcg

SEQ ID NO: 812545 - RNA, 22 nt, Human
uaaaaaaucagaauacaacaga

SEQ ID NO: 812546 - RNA, 26 nt, Human
uauauaugaaugaaagaucagaauga

SEQ ID NO: 812547 - RNA, 21 nt, Human
ucgggagagaagccaacaaaa

SEQ ID NO: 812548 - RNA, 22 nt, Human
ucuagagaugcgccaacaccag

SEQ ID NO: 812549 - RNA, 20 nt, Human
ucuuuuucucuccauacucu

SEQ ID NO: 812550 - RNA, 20 nt, Human
ugccucuuuuucucuccaua

SEQ ID NO: 812551 - RNA, 19 nt, Human
ugcuaauaaaaaaucagaa

SEQ ID NO: 812552 - RNA, 20 nt, Human
uguuuugggccacagaauca

SEQ ID NO: 812553 - RNA, 23 nt, Human
uuaaaaugaaauuagcuaggcau

SEQ ID NO: 812554 - RNA, 20 nt, Human
aaaaaacuuggcuaccugac

SEQ ID NO: 812555 - RNA, 18 nt, Human
aaaaaauagaaacagugc

SEQ ID NO: 812556 - RNA, 21 nt, Human
aaaaauuaacccuucugccca

SEQ ID NO: 812557 - RNA, 24 nt, Human
aaacaugaucucagcucacugcaa

SEQ ID NO: 812558 - RNA, 19 nt, Human
aaagugcugggauuacugg

SEQ ID NO: 812559 - RNA, 24 nt, Human
aaagugcugggauuacuggcguga

SEQ ID NO: 812560 - RNA, 22 nt, Human
aaauccaaauccuuuaaucaga

SEQ ID NO: 812561 - RNA, 23 nt, Human
aacaaaauuaaaaacacauucuu

SEQ ID NO: 812562 - RNA, 24 nt, Human
aacaauucuugugccucagccucc

SEQ ID NO: 812563 - RNA, 31 nt, Human
aacuacaaaaaaaacucugguauuuaacagg

SEQ ID NO: 812564 - RNA, 23 nt, Human
aacugaguguaacacuucaauau

SEQ ID NO: 812565 - RNA, 22 nt, Human
aagaagugagcaauuucagaug

SEQ ID NO: 812566 - RNA, 20 nt, Human
aagacuuaaaaaaauagaaa

SEQ ID NO: 812567 - RNA, 19 nt, Human
aagcauucugaagagaauc

SEQ ID NO: 812568 - RNA, 25 nt, Human
aagcauucugaagagaaucaaauuc

SEQ ID NO: 812569 - RNA, 26 nt, Human
aagugcugggauuacuggcgugagcc

SEQ ID NO: 812570 - RNA, 18 nt, Human
acaaucuuuauucuccuu

SEQ ID NO: 812571 - RNA, 24 nt, Human
acacaaccugcaguucucaaugcu

SEQ ID NO: 812572 - RNA, 22 nt, Human
acccggguucaaacaauucuug

SEQ ID NO: 812573 - RNA, 21 nt, Human
acuacagguguaugccaccau

SEQ ID NO: 812574 - RNA, 22 nt, Human
agaaaaauuuaaacaugauuua

SEQ ID NO: 812575 - RNA, 20 nt, Human
agaagaaaaucagauuuaaa

SEQ ID NO: 812576 - RNA, 19 nt, Human
agcacuguuuacauguaca

SEQ ID NO: 812577 - RNA, 21 nt, Human
agcaguucaaaaaccuuggca

SEQ ID NO: 812578 - RNA, 23 nt, Human
agcugggacuacagguguaugcc

SEQ ID NO: 812579 - RNA, 23 nt, Human
aggguuucaccacguuggccagg

SEQ ID NO: 812580 - RNA, 24 nt, Human
aggugaucugcccgccucggccuc

SEQ ID NO: 812581 - RNA, 18 nt, Human
aguagcugggacuacagg

SEQ ID NO: 812582 - RNA, 25 nt, Human
aguagcugggacuacagguguaugc

SEQ ID NO: 812583 - RNA, 22 nt, Human
agucucaacuaugcaaauuugu

SEQ ID NO: 812584 - RNA, 19 nt, Human
auaauuugaagaaauguca

SEQ ID NO: 812585 - RNA, 20 nt, Human
auaggguuucaccacguugg

SEQ ID NO: 812586 - RNA, 24 nt, Human
auaggguuucaccacguuggccag

SEQ ID NO: 812587 - RNA, 19 nt, Human
auccaggauuaauguaagg

SEQ ID NO: 812588 - RNA, 21 nt, Human
caaaagcauucugaagagaau

SEQ ID NO: 812589 - RNA, 28 nt, Human
caaacaauucuugugccucagccucccg

SEQ ID NO: 812590 - RNA, 24 nt, Human
caaagugcugggauuacuggcgug

SEQ ID NO: 812591 - RNA, 19 nt, Human
cacaaucuuuauucuccuu

SEQ ID NO: 812592 - RNA, 25 nt, Human
cacaguaucaaacaauugaaacaaa

SEQ ID NO: 812593 - RNA, 21 nt, Human
caccacguuggccaggcuggu

SEQ ID NO: 812594 - RNA, 24 nt, Human
caccacguuggccaggcuggucuc

SEQ ID NO: 812595 - RNA, 27 nt, Human
caccacguuggccaggcuggucucaaa

SEQ ID NO: 812596 - RNA, 24 nt, Human
cacguuggccaggcuggucucaaa

SEQ ID NO: 812597 - RNA, 23 nt, Human
cacugcaaccucugccacccggg

SEQ ID NO: 812598 - RNA, 24 nt, Human
cagacaaacauuaacaaaauuaaa

SEQ ID NO: 812599 - RNA, 21 nt, Human
cagcaguucaaaaaccuuggc

SEQ ID NO: 812600 - RNA, 23 nt, Human
cagugcuauguauaacagacaaa

SEQ ID NO: 812601 - RNA, 22 nt, Human
ccaaagugcugggauuacuggc

SEQ ID NO: 812602 - RNA, 24 nt, Human
ccaaagugcugggauuacuggcgu

SEQ ID NO: 812603 - RNA, 23 nt, Human
cccaacacaguacugaaauaccu

SEQ ID NO: 812604 - RNA, 23 nt, Human
cccgaguagcugggacuacaggu

SEQ ID NO: 812605 - RNA, 24 nt, Human
cccgaguagcugggacuacaggug

SEQ ID NO: 812606 - RNA, 19 nt, Human
cccggguucaaacaauucu

SEQ ID NO: 812607 - RNA, 19 nt, Human
cccggguucaaacaauucu

SEQ ID NO: 812608 - RNA, 22 nt, Human
ccugaccucaggugaucugccc

SEQ ID NO: 812609 - RNA, 23 nt, Human
ccugcaguucucaaugcuaucuc

SEQ ID NO: 812610 - RNA, 20 nt, Human
cgaaaauaaaagucuauuuc

SEQ ID NO: 812611 - RNA, 23 nt, Human
cgcagaaacaugaucucagcuca

SEQ ID NO: 812612 - RNA, 24 nt, Human
cgccucggccucccaaagugcugg

SEQ ID NO: 812613 - RNA, 22 nt, Human
cuauguauaacagacaaacauu

SEQ ID NO: 812614 - RNA, 19 nt, Human
cucaaugcuaucucaagau

SEQ ID NO: 812615 - RNA, 21 nt, Human
cucacugcaaccucugccacc

SEQ ID NO: 812616 - RNA, 24 nt, Human
cucacugcaaccucugccacccgg

SEQ ID NO: 812617 - RNA, 24 nt, Human
cucagccucccgaguagcugggac

SEQ ID NO: 812618 - RNA, 18 nt, Human
cuccaaagacauacuaca

SEQ ID NO: 812619 - RNA, 26 nt, Human
cuccugaccucaggugaucugcccgc

SEQ ID NO: 812620 - RNA, 22 nt, Human
cugaaagaaaaaaaaguuggau

SEQ ID NO: 812621 - RNA, 24 nt, Human
cugcaaccucugccacccggguuc

SEQ ID NO: 812622 - RNA, 19 nt, Human
cuuggcaaagccaguuauc

SEQ ID NO: 812623 - RNA, 25 nt, Human
cuugugccucagccucccgaguagc

SEQ ID NO: 812624 - RNA, 21 nt, Human
cuuuuuguauuuuuaguagag

SEQ ID NO: 812625 - RNA, 24 nt, Human
cuuuuuguauuuuuaguagagaua

SEQ ID NO: 812626 - RNA, 24 nt, Human
gaccucaggugaucugcccgccuc

SEQ ID NO: 812627 - RNA, 24 nt, Human
gacuacagguguaugccaccaugc

SEQ ID NO: 812628 - RNA, 18 nt, Human
gagcaauuucagaugucc

SEQ ID NO: 812629 - RNA, 18 nt, Human
gauuacuggcgugagcca

SEQ ID NO: 812630 - RNA, 21 nt, Human
gauuacuggcgugagccacua

SEQ ID NO: 812631 - RNA, 22 nt, Human
gauuacuggcgugagccacuac

SEQ ID NO: 812632 - RNA, 21 nt, Human
gcagaaacaugaucucagcuc

SEQ ID NO: 812633 - RNA, 28 nt, Human
gcccaacacaguacugaaauaccuuacc

SEQ ID NO: 812634 - RNA, 27 nt, Human
gcucugucacccaggcuaggagcgcag

SEQ ID NO: 812635 - RNA, 23 nt, Human
gcuggucucaaacuccugaccuc

SEQ ID NO: 812636 - RNA, 24 nt, Human
ggacuacagguguaugccaccaug

SEQ ID NO: 812637 - RNA, 24 nt, Human
ggagucucaacuaugcaaauuugu

SEQ ID NO: 812638 - RNA, 24 nt, Human
ggcuggucucaaacuccugaccuc

SEQ ID NO: 812639 - RNA, 21 nt, Human
ggguuucaccacguuggccag

SEQ ID NO: 812640 - RNA, 22 nt, Human
ggguuucaccacguuggccagg

SEQ ID NO: 812641 - RNA, 21 nt, Human
gguuauuuuaccaaauucaga

SEQ ID NO: 812642 - RNA, 24 nt, Human
gugaucugcccgccucggccuccc

SEQ ID NO: 812643 - RNA, 22 nt, Human
gugccucagccucccgaguagc

SEQ ID NO: 812644 - RNA, 19 nt, Human
guuaaaaaucaaaagagca

SEQ ID NO: 812645 - RNA, 20 nt, Human
uaaaguuuuucagagaccua

SEQ ID NO: 812646 - RNA, 24 nt, Human
uaacaaaauuaaaaacacauucuu

SEQ ID NO: 812647 - RNA, 22 nt, Human
uaacagacaaacauuaacaaaa

SEQ ID NO: 812648 - RNA, 20 nt, Human
uaacagaguacuuacauaua

SEQ ID NO: 812649 - RNA, 22 nt, Human
uaacauaaaacaguuggaaguc

SEQ ID NO: 812650 - RNA, 18 nt, Human
uaacuguuuuaaggaguu

SEQ ID NO: 812651 - RNA, 22 nt, Human
uaaggcaaauuaagacuuaaaa

SEQ ID NO: 812652 - RNA, 24 nt, Human
uaaucagaaaacacaguaaacuac

SEQ ID NO: 812653 - RNA, 26 nt, Human
uaaucuuuuuguauuuuuaguagaga

SEQ ID NO: 812654 - RNA, 21 nt, Human
uaccaguuguguuccccuaac

SEQ ID NO: 812655 - RNA, 18 nt, Human
uaccugacaguuuaggcc

SEQ ID NO: 812656 - RNA, 24 nt, Human
uacuggcgugagccacuacaccug

SEQ ID NO: 812657 - RNA, 22 nt, Human
uagagauaggguuucaccacgu

SEQ ID NO: 812658 - RNA, 19 nt, Human
uagcaucauugggaauuuc

SEQ ID NO: 812659 - RNA, 19 nt, Human
uaguagagauaggguuuca

SEQ ID NO: 812660 - RNA, 26 nt, Human
uaguagagauaggguuucaccacguu

SEQ ID NO: 812661 - RNA, 21 nt, Human
ucacaaucuuuauucuccuua

SEQ ID NO: 812662 - RNA, 23 nt, Human
ucacuccuuaauauucaugcaga

SEQ ID NO: 812663 - RNA, 24 nt, Human
ucacugcaaccucugccacccggg

SEQ ID NO: 812664 - RNA, 23 nt, Human
ucagccucccgaguagcugggac

SEQ ID NO: 812665 - RNA, 18 nt, Human
ucagugccaugcauggua

SEQ ID NO: 812666 - RNA, 18 nt, Human
ucauugggaauuucguca

SEQ ID NO: 812667 - RNA, 24 nt, Human
ucccaaagugcugggauuacuggc

SEQ ID NO: 812668 - RNA, 23 nt, Human
ucccgaguagcugggacuacagg

SEQ ID NO: 812669 - RNA, 24 nt, Human
ucccgaguagcugggacuacaggu

SEQ ID NO: 812670 - RNA, 18 nt, Human
ucccugagcacucuuucu

SEQ ID NO: 812671 - RNA, 18 nt, Human
ucggccucccaaagugcu

SEQ ID NO: 812672 - RNA, 24 nt, Human
ucucaagauuuacagcuccaaaga

SEQ ID NO: 812673 - RNA, 25 nt, Human
ucugucacccaggcuaggagcgcag

SEQ ID NO: 812674 - RNA, 19 nt, Human
ucuugcucugucacccagg

SEQ ID NO: 812675 - RNA, 23 nt, Human
ucuugcucugucacccaggcuag

SEQ ID NO: 812676 - RNA, 23 nt, Human
ucuugcucugucacccaggcuag

SEQ ID NO: 812677 - RNA, 25 nt, Human
ucuugcucugucacccaggcuagga

SEQ ID NO: 812678 - RNA, 18 nt, Human
ugaaauaccuuacccuga

SEQ ID NO: 812679 - RNA, 20 nt, Human
ugaaauaccuuacccugaaa

SEQ ID NO: 812680 - RNA, 18 nt, Human
ugaccucaggugaucugc

SEQ ID NO: 812681 - RNA, 20 nt, Human
ugaccucaggugaucugccc

SEQ ID NO: 812682 - RNA, 24 nt, Human
ugaccucaggugaucugcccgccu

SEQ ID NO: 812683 - RNA, 22 nt, Human
ugagauggagucuugcucuguc

SEQ ID NO: 812684 - RNA, 22 nt, Human
ugccucagccucccgaguagcu

SEQ ID NO: 812685 - RNA, 24 nt, Human
ugccucagccucccgaguagcugg

SEQ ID NO: 812686 - RNA, 19 nt, Human
ugcuaucucaagauuuaca

SEQ ID NO: 812687 - RNA, 25 nt, Human
ugcucugucacccaggcuaggagcg

SEQ ID NO: 812688 - RNA, 19 nt, Human
uggagucuugcucugucac

SEQ ID NO: 812689 - RNA, 24 nt, Human
uggccaggcuggucucaaacuccu

SEQ ID NO: 812690 - RNA, 21 nt, Human
ugggacuacagguguaugcca

SEQ ID NO: 812691 - RNA, 22 nt, Human
ugggacuacagguguaugccac

SEQ ID NO: 812692 - RNA, 24 nt, Human
ugggacuacagguguaugccacca

SEQ ID NO: 812693 - RNA, 25 nt, Human
ugggacuacagguguaugccaccau

SEQ ID NO: 812694 - RNA, 18 nt, Human
ugggauuacuggcgugag

SEQ ID NO: 812695 - RNA, 19 nt, Human
ugggauuacuggcgugagc

SEQ ID NO: 812696 - RNA, 22 nt, Human
ugggauuacuggcgugagccac

SEQ ID NO: 812697 - RNA, 22 nt, Human
ugggauuacuggcgugagccac

SEQ ID NO: 812698 - RNA, 24 nt, Human
ugggauuacuggcgugagccacua

SEQ ID NO: 812699 - RNA, 18 nt, Human
uguaaauaauugcuuucu

SEQ ID NO: 812700 - RNA, 21 nt, Human
uguaaauaauugcuuucuaca

SEQ ID NO: 812701 - RNA, 21 nt, Human
uguacagugggugucucauau

SEQ ID NO: 812702 - RNA, 18 nt, Human
uguucugaagaucuucaa

SEQ ID NO: 812703 - RNA, 18 nt, Human
uuaaagaaaugugaaucc

SEQ ID NO: 812704 - RNA, 18 nt, Human
uuaguagagauaggguuu

SEQ ID NO: 812705 - RNA, 22 nt, Human
uuaguagagauaggguuucacc

SEQ ID NO: 812706 - RNA, 18 nt, Human
uuaguguuccuuuuaaug

SEQ ID NO: 812707 - RNA, 23 nt, Human
uucaaacaauucuugugccucag

SEQ ID NO: 812708 - RNA, 23 nt, Human
uuggaacaaauuuucccugagca

SEQ ID NO: 812709 - RNA, 24 nt, Human
uuuaaucagaaaacacaguaaacu

SEQ ID NO: 812710 - RNA, 22 nt, Human
uuuaucaacuaaaagacucacu

SEQ ID NO: 812711 - RNA, 21 nt, Human
uuucaccacguuggccaggcu

SEQ ID NO: 812712 - RNA, 24 nt, Human
uuuuuaguagagauaggguuucac

SEQ ID NO: 812713 - RNA, 21 nt, Human
uuuuuguauuuuuaguagaga

SEQ ID NO: 812714 - RNA, 18 nt, Human
aaaagggauuaaagggua

SEQ ID NO: 812715 - RNA, 20 nt, Human
aaacuugaaauuuccgagua

SEQ ID NO: 812716 - RNA, 24 nt, Human
aaauaaauaaccuugaaauaaugu

SEQ ID NO: 812717 - RNA, 18 nt, Human
aagcuucugcuuggcgau

SEQ ID NO: 812718 - RNA, 24 nt, Human
acaccagacuaccacuaauuugau

SEQ ID NO: 812719 - RNA, 20 nt, Human
accaucauagaaaacugauc

SEQ ID NO: 812720 - RNA, 18 nt, Human
accugaaaaauucugaug

SEQ ID NO: 812721 - RNA, 22 nt, Human
acuaaucugaccccagcuacau

SEQ ID NO: 812722 - RNA, 26 nt, Human
acuacaguuuccaaacucggcucaca

SEQ ID NO: 812723 - RNA, 22 nt, Human
agaaaauaguuuauuuaaacaa

SEQ ID NO: 812724 - RNA, 19 nt, Human
agacaggaugugucucugg

SEQ ID NO: 812725 - RNA, 23 nt, Human
agacuaccaucauagaaaacuga

SEQ ID NO: 812726 - RNA, 19 nt, Human
agagaagucaauagcagag

SEQ ID NO: 812727 - RNA, 25 nt, Human
auaaaacuuuuccauuuguuuuuuu

SEQ ID NO: 812728 - RNA, 18 nt, Human
auaaggccaacccucccu

SEQ ID NO: 812729 - RNA, 18 nt, Human
caaaguagugcaugggaa

SEQ ID NO: 812730 - RNA, 20 nt, Human
caacuggcagcccucaacuc

SEQ ID NO: 812731 - RNA, 23 nt, Human
caacuggcagcccucaacucuca

SEQ ID NO: 812732 - RNA, 24 nt, Human
cacagagcauacugggaggggaag

SEQ ID NO: 812733 - RNA, 24 nt, Human
cacauaaauccuagacuggccaac

SEQ ID NO: 812734 - RNA, 19 nt, Human
cacauauaccaaagaaaac

SEQ ID NO: 812735 - RNA, 18 nt, Human
cagaaugauccaccaucu

SEQ ID NO: 812736 - RNA, 23 nt, Human
caggucagguucagucaacauuu

SEQ ID NO: 812737 - RNA, 22 nt, Human
caugggcagauaggggcacaaa

SEQ ID NO: 812738 - RNA, 22 nt, Human
cauuaagugcuauaaauucuug

SEQ ID NO: 812739 - RNA, 19 nt, Human
ccaaagaaaacuuucaagu

SEQ ID NO: 812740 - RNA, 24 nt, Human
ccaaagaaaacuuucaagucaucc

SEQ ID NO: 812741 - RNA, 22 nt, Human
ccaacccucccuuauuuuaaaa

SEQ ID NO: 812742 - RNA, 18 nt, Human
ccaccccagacuaccuca

SEQ ID NO: 812743 - RNA, 21 nt, Human
ccagacuaccacuaauuugau

SEQ ID NO: 812744 - RNA, 21 nt, Human
cccaaaauaaacagcuugggc

SEQ ID NO: 812745 - RNA, 22 nt, Human
ccccaccccagacuaccucaac

SEQ ID NO: 812746 - RNA, 24 nt, Human
ccccagacuaccucaacuucuagc

SEQ ID NO: 812747 - RNA, 18 nt, Human
ccgccaccccacucucca

SEQ ID NO: 812748 - RNA, 21 nt, Human
cucacuaucacuacaguuucc

SEQ ID NO: 812749 - RNA, 18 nt, Human
cuccaacuggcagcccuc

SEQ ID NO: 812750 - RNA, 21 nt, Human
cuccgccaccccacucuccaa

SEQ ID NO: 812751 - RNA, 21 nt, Human
cugaaaacguagcagaggcag

SEQ ID NO: 812752 - RNA, 21 nt, Human
cuuaacuuugacauuugugau

SEQ ID NO: 812753 - RNA, 22 nt, Human
cuuggcucccuucuggagaguc

SEQ ID NO: 812754 - RNA, 24 nt, Human
cuuggcucccuucuggagagucug

SEQ ID NO: 812755 - RNA, 19 nt, Human
gaaaaaacagagaugauga

SEQ ID NO: 812756 - RNA, 18 nt, Human
gaaaacguagcagaggca

SEQ ID NO: 812757 - RNA, 18 nt, Human
gaaaccuguuuaucagau

SEQ ID NO: 812758 - RNA, 20 nt, Human
gaagguaauaugcaggucag

SEQ ID NO: 812759 - RNA, 22 nt, Human
gagaaaauugccuauaacugac

SEQ ID NO: 812760 - RNA, 19 nt, Human
gaucaccuaaugaauuuaa

SEQ ID NO: 812761 - RNA, 19 nt, Human
gcagaggcaggccugcccc

SEQ ID NO: 812762 - RNA, 24 nt, Human
gcaggucagguucagucaacauuu

SEQ ID NO: 812763 - RNA, 20 nt, Human
gcuccgccaccccacucucc

SEQ ID NO: 812764 - RNA, 21 nt, Human
ggaauuucucuaaacugguac

SEQ ID NO: 812765 - RNA, 19 nt, Human
ggggaagaagauacugaaa

SEQ ID NO: 812766 - RNA, 23 nt, Human
ggggaagaagauacugaaaacgu

SEQ ID NO: 812767 - RNA, 23 nt, Human
guaaagcuuggaauuucucuaaa

SEQ ID NO: 812768 - RNA, 23 nt, Human
gucagguucagucaacauuucuu

SEQ ID NO: 812769 - RNA, 25 nt, Human
uaaauccuagacuggccaacucaua

SEQ ID NO: 812770 - RNA, 21 nt, Human
uaagcuucugcuuggcgauua

SEQ ID NO: 812771 - RNA, 18 nt, Human
uaccucacuauuuucagu

SEQ ID NO: 812772 - RNA, 22 nt, Human
uagaagaaaauaguuuauuuaa

SEQ ID NO: 812773 - RNA, 19 nt, Human
uagcgaaauggaaucugca

SEQ ID NO: 812774 - RNA, 22 nt, Human
uauaaaucuuugauaagccauu

SEQ ID NO: 812775 - RNA, 23 nt, Human
uauaaaucuuugauaagccauuu

SEQ ID NO: 812776 - RNA, 19 nt, Human
uauaacugaccaagccuau

SEQ ID NO: 812777 - RNA, 27 nt, Human
uauacauaacccaauuaaaugaauaug

SEQ ID NO: 812778 - RNA, 24 nt, Human
uauguacuaauccagaaaucuacu

SEQ ID NO: 812779 - RNA, 24 nt, Human
uauugaagaaaaaacagagaugau

SEQ ID NO: 812780 - RNA, 25 nt, Human
ucagucaacauuucuuguguugaac

SEQ ID NO: 812781 - RNA, 18 nt, Human
ucaucccuguggccccaa

SEQ ID NO: 812782 - RNA, 18 nt, Human
uccagaaugauccaccau

SEQ ID NO: 812783 - RNA, 21 nt, Human
ucccaauagaacuaaucugac

SEQ ID NO: 812784 - RNA, 20 nt, Human
ucccacucaaccugucgccu

SEQ ID NO: 812785 - RNA, 22 nt, Human
uccccaccccagacuaccucaa

SEQ ID NO: 812786 - RNA, 23 nt, Human
ucuagccaauugugcaggcuccg

SEQ ID NO: 812787 - RNA, 24 nt, Human
ucuccaacuggcagcccucaacuc

SEQ ID NO: 812788 - RNA, 22 nt, Human
ucugaagugucaaacaaacccc

SEQ ID NO: 812789 - RNA, 21 nt, Human
ucuuucuuggccucccaagac

SEQ ID NO: 812790 - RNA, 24 nt, Human
ugaaaacuagguguuuguuuucaa

SEQ ID NO: 812791 - RNA, 18 nt, Human
ugaacaaagaucaagcau

SEQ ID NO: 812792 - RNA, 19 nt, Human
ugacaaaucuuaacuuuga

SEQ ID NO: 812793 - RNA, 21 nt, Human
ugauagacacaaauguucuau

SEQ ID NO: 812794 - RNA, 24 nt, Human
ugcaugggaagcagcacaccaaaa

SEQ ID NO: 812795 - RNA, 24 nt, Human
ugccccacucgacuaaaucuauug

SEQ ID NO: 812796 - RNA, 21 nt, Human
ugcucacuaucacuacaguuu

SEQ ID NO: 812797 - RNA, 20 nt, Human
uggcaggcucccacucaacc

SEQ ID NO: 812798 - RNA, 22 nt, Human
uggcaggcucccacucaaccug

SEQ ID NO: 812799 - RNA, 24 nt, Human
uggccccaaaauaaacagcuuggg

SEQ ID NO: 812800 - RNA, 24 nt, Human
ugggcagauaggggcacaaagugg

SEQ ID NO: 812801 - RNA, 25 nt, Human
ugggcagauaggggcacaaaguggu

SEQ ID NO: 812802 - RNA, 20 nt, Human
uguaaagcuuggaauuucuc

SEQ ID NO: 812803 - RNA, 19 nt, Human
uguuccaaaagcacagagc

SEQ ID NO: 812804 - RNA, 19 nt, Human
uuauaugugucagaugagg

SEQ ID NO: 812805 - RNA, 25 nt, Human
uucaacuccagaaugauccaccauc

SEQ ID NO: 812806 - RNA, 18 nt, Human
uucaugggcagauagggg

SEQ ID NO: 812807 - RNA, 22 nt, Human
uuccuggaucuccccacacacc

SEQ ID NO: 812808 - RNA, 20 nt, Human
uuccuggcaauacuuucuaa

SEQ ID NO: 812809 - RNA, 22 nt, Human
uugcugauagacacaaauguuc

SEQ ID NO: 812810 - RNA, 24 nt, Human
uuuaaauccaagccaacuccauau

SEQ ID NO: 812811 - RNA, 21 nt, Human
uuuccuggcaauacuuucuaa

SEQ ID NO: 812812 - RNA, 18 nt, Human
aaaaaacagcagaaaaaa

SEQ ID NO: 812813 - RNA, 25 nt, Human
aaaaagcugcuucucgccuugcuga

SEQ ID NO: 812814 - RNA, 19 nt, Human
aaaaaggagaugcacagaa

SEQ ID NO: 812815 - RNA, 19 nt, Human
aaacagcaagagaucauag

SEQ ID NO: 812816 - RNA, 21 nt, Human
aaacagcaagagaucauagau

SEQ ID NO: 812817 - RNA, 21 nt, Human
aaauaaauagauaaauaaaua

SEQ ID NO: 812818 - RNA, 20 nt, Human
aacccaaaauauccaaaagc

SEQ ID NO: 812819 - RNA, 23 nt, Human
aaccccaagugcaauuccaguac

SEQ ID NO: 812820 - RNA, 22 nt, Human
aacuccuaucuccugacaccuc

SEQ ID NO: 812821 - RNA, 26 nt, Human
aagaaaaaggacuauuuuccaaaugu

SEQ ID NO: 812822 - RNA, 21 nt, Human
aagaaaccucagaagccagca

SEQ ID NO: 812823 - RNA, 19 nt, Human
aagccagcaggagcccaag

SEQ ID NO: 812824 - RNA, 18 nt, Human
aagcugacaagaaaccuc

SEQ ID NO: 812825 - RNA, 19 nt, Human
aauuccugccuccauucuc

SEQ ID NO: 812826 - RNA, 20 nt, Human
acacacacacacacacaaaa

SEQ ID NO: 812827 - RNA, 23 nt, Human
acacacacacacacacacacaca

SEQ ID NO: 812828 - RNA, 23 nt, Human
acacacacacacacacacacaca

SEQ ID NO: 812829 - RNA, 23 nt, Human
acacacacacacacacacacaca

SEQ ID NO: 812830 - RNA, 23 nt, Human
acacacacacacacacacacaca

SEQ ID NO: 812831 - RNA, 23 nt, Human
acacacacacacacacacacaca

SEQ ID NO: 812832 - RNA, 23 nt, Human
acacacacacacacacacacaca

SEQ ID NO: 812833 - RNA, 23 nt, Human
acacacacacacacacacacaca

SEQ ID NO: 812834 - RNA, 23 nt, Human
acacacacacacacacacacaca

SEQ ID NO: 812835 - RNA, 21 nt, Human
acauggcauauccaagccccu

SEQ ID NO: 812836 - RNA, 18 nt, Human
accacgggccuccuguga

SEQ ID NO: 812837 - RNA, 23 nt, Human
acccagagaggggugggguggga

SEQ ID NO: 812838 - RNA, 21 nt, Human
acuucugcccuuccucagggg

SEQ ID NO: 812839 - RNA, 25 nt, Human
agaaaaaaaaaggagaugcacagaa

SEQ ID NO: 812840 - RNA, 19 nt, Human
agacuggcuggcgcugggg

SEQ ID NO: 812841 - RNA, 23 nt, Human
agagagacagucaucaaauaaau

SEQ ID NO: 812842 - RNA, 22 nt, Human
agaguugucuugaugaaggcag

SEQ ID NO: 812843 - RNA, 18 nt, Human
agcccgggcaggcagcag

SEQ ID NO: 812844 - RNA, 22 nt, Human
agcccgggcaggcagcagagaa

SEQ ID NO: 812845 - RNA, 20 nt, Human
agccucugcgccccaagaag

SEQ ID NO: 812846 - RNA, 26 nt, Human
agccucugggcuguuuacaucuuuuu

SEQ ID NO: 812847 - RNA, 24 nt, Human
agcuuacccucucugcccagcccc

SEQ ID NO: 812848 - RNA, 19 nt, Human
aggcacuguguccucuggu

SEQ ID NO: 812849 - RNA, 23 nt, Human
aggcugcacuggguggcauccag

SEQ ID NO: 812850 - RNA, 22 nt, Human
aggguggguggguaggugccag

SEQ ID NO: 812851 - RNA, 24 nt, Human
agguggggagaauuaccacgggcc

SEQ ID NO: 812852 - RNA, 19 nt, Human
agucagcuggugaggggga

SEQ ID NO: 812853 - RNA, 18 nt, Human
auaggaugggaaagauug

SEQ ID NO: 812854 - RNA, 22 nt, Human
augcaguggccucuucacagcu

SEQ ID NO: 812855 - RNA, 23 nt, Human
auggcgguggcggugagacuuuc

SEQ ID NO: 812856 - RNA, 19 nt, Human
auggggaggcugggucguc

SEQ ID NO: 812857 - RNA, 27 nt, Human
caaaaugguccccuagaguugucuuga

SEQ ID NO: 812858 - RNA, 26 nt, Human
caaagugcugaaacguggauuccagu

SEQ ID NO: 812859 - RNA, 21 nt, Human
caaccuguccugacucuucca

SEQ ID NO: 812860 - RNA, 21 nt, Human
caacuccuaucuccugacacc

SEQ ID NO: 812861 - RNA, 24 nt, Human
caacuccuaucuccugacaccucc

SEQ ID NO: 812862 - RNA, 24 nt, Human
caagaaaaaggacuauuuuccaaa

SEQ ID NO: 812863 - RNA, 21 nt, Human
caagacauggcauauccaagc

SEQ ID NO: 812864 - RNA, 22 nt, Human
caagccccucuccccugcacuc

SEQ ID NO: 812865 - RNA, 23 nt, Human
caagccccucuccccugcacucc

SEQ ID NO: 812866 - RNA, 21 nt, Human
caagucaaacguccccaucug

SEQ ID NO: 812867 - RNA, 27 nt, Human
cacacacacacacaaaaccucuguaua

SEQ ID NO: 812868 - RNA, 20 nt, Human
cacacacacacacacacaca

SEQ ID NO: 812869 - RNA, 20 nt, Human
cacacacacacacacacaca

SEQ ID NO: 812870 - RNA, 20 nt, Human
cacacacacacacacacaca

SEQ ID NO: 812871 - RNA, 20 nt, Human
cacacacacacacacacaca

SEQ ID NO: 812872 - RNA, 20 nt, Human
cacacacacacacacacaca

SEQ ID NO: 812873 - RNA, 20 nt, Human
cacacacacacacacacaca

SEQ ID NO: 812874 - RNA, 20 nt, Human
cacacacacacacacacaca

SEQ ID NO: 812875 - RNA, 20 nt, Human
cacacacacacacacacaca

SEQ ID NO: 812876 - RNA, 20 nt, Human
cacacacacacacacacaca

SEQ ID NO: 812877 - RNA, 20 nt, Human
cacacacacacacacacaca

SEQ ID NO: 812878 - RNA, 20 nt, Human
cacacacacacacacacaca

SEQ ID NO: 812879 - RNA, 20 nt, Human
cacacacacacacacacaca

SEQ ID NO: 812880 - RNA, 20 nt, Human
cacacacacacacacacaca

SEQ ID NO: 812881 - RNA, 20 nt, Human
cacacacacacacacacaca

SEQ ID NO: 812882 - RNA, 20 nt, Human
cacacacacacacacacaca

SEQ ID NO: 812883 - RNA, 20 nt, Human
cacacacacacacacacaca

SEQ ID NO: 812884 - RNA, 22 nt, Human
cacacacacacacacacacaca

SEQ ID NO: 812885 - RNA, 22 nt, Human
cacacacacacacacacacaca

SEQ ID NO: 812886 - RNA, 22 nt, Human
cacacacacacacacacacaca

SEQ ID NO: 812887 - RNA, 22 nt, Human
cacacacacacacacacacaca

SEQ ID NO: 812888 - RNA, 22 nt, Human
cacacacacacacacacacaca

SEQ ID NO: 812889 - RNA, 22 nt, Human
cacacacacacacacacacaca

SEQ ID NO: 812890 - RNA, 22 nt, Human
cacacacacacacacacacaca

SEQ ID NO: 812891 - RNA, 18 nt, Human
caccaagaaggcggggag

SEQ ID NO: 812892 - RNA, 18 nt, Human
cacugcuuccaagaaaaa

SEQ ID NO: 812893 - RNA, 23 nt, Human
cacuguagcucauaagccucugg

SEQ ID NO: 812894 - RNA, 26 nt, Human
cagcagaaaaaaaaaggagaugcaca

SEQ ID NO: 812895 - RNA, 21 nt, Human
cagccugggcagaggggaggg

SEQ ID NO: 812896 - RNA, 18 nt, Human
cagcucccggcucugucc

SEQ ID NO: 812897 - RNA, 18 nt, Human
cagcugaacccuuccguu

SEQ ID NO: 812898 - RNA, 22 nt, Human
caggcaccugccaucuggccuu

SEQ ID NO: 812899 - RNA, 18 nt, Human
caguggccucuucacagc

SEQ ID NO: 812900 - RNA, 20 nt, Human
cauccuggcaaaauuccuga

SEQ ID NO: 812901 - RNA, 20 nt, Human
cauggcccucaaaauacaag

SEQ ID NO: 812902 - RNA, 25 nt, Human
ccaaaauauccaaaagcugggaccg

SEQ ID NO: 812903 - RNA, 26 nt, Human
ccaacacacacacacacacacacaca

SEQ ID NO: 812904 - RNA, 22 nt, Human
ccaacccccaccuaaguugcaa

SEQ ID NO: 812905 - RNA, 22 nt, Human
ccaagaaaaaggacuauuuucc

SEQ ID NO: 812906 - RNA, 19 nt, Human
ccacaagccuccggaaagc

SEQ ID NO: 812907 - RNA, 23 nt, Human
ccacgggccuccugugagcagug

SEQ ID NO: 812908 - RNA, 19 nt, Human
ccaggguguuccaggcuua

SEQ ID NO: 812909 - RNA, 19 nt, Human
ccauaacccaaaauaucca

SEQ ID NO: 812910 - RNA, 19 nt, Human
ccaucuggccuucugcagu

SEQ ID NO: 812911 - RNA, 24 nt, Human
ccauggguugauaggaugggaaag

SEQ ID NO: 812912 - RNA, 19 nt, Human
ccauuggucuccucuuuca

SEQ ID NO: 812913 - RNA, 18 nt, Human
cccaaaggggccggggcg

SEQ ID NO: 812914 - RNA, 21 nt, Human
cccaacacacacacacacaca

SEQ ID NO: 812915 - RNA, 22 nt, Human
cccaacuguuggugcccaaggg

SEQ ID NO: 812916 - RNA, 18 nt, Human
cccaccaagucaaacguc

SEQ ID NO: 812917 - RNA, 20 nt, Human
cccaccuaaguugcaacucc

SEQ ID NO: 812918 - RNA, 22 nt, Human
cccacucaccuuuggccucuca

SEQ ID NO: 812919 - RNA, 24 nt, Human
cccacucaccuuuggccucucaaa

SEQ ID NO: 812920 - RNA, 19 nt, Human
cccauaacccaaaauaucc

SEQ ID NO: 812921 - RNA, 24 nt, Human
cccauaacccaaaauauccaaaag

SEQ ID NO: 812922 - RNA, 26 nt, Human
ccccagccaggggggacuugggguga

SEQ ID NO: 812923 - RNA, 22 nt, Human
ccccauaacccaaaauauccaa

SEQ ID NO: 812924 - RNA, 23 nt, Human
ccccauggguugauaggauggga

SEQ ID NO: 812925 - RNA, 18 nt, Human
cccccuuacccucuucuc

SEQ ID NO: 812926 - RNA, 20 nt, Human
ccccguuaucuugaaccugg

SEQ ID NO: 812927 - RNA, 18 nt, Human
ccccuuacccucuucucc

SEQ ID NO: 812928 - RNA, 22 nt, Human
ccccuuacccucuucuccucuu

SEQ ID NO: 812929 - RNA, 18 nt, Human
cccugaugaaacagcaag

SEQ ID NO: 812930 - RNA, 20 nt, Human
cccugcacucuggauucggg

SEQ ID NO: 812931 - RNA, 21 nt, Human
ccgagcucugggaccgcgagg

SEQ ID NO: 812932 - RNA, 22 nt, Human
ccucagaagccagcaggagccc

SEQ ID NO: 812933 - RNA, 19 nt, Human
ccucugguggcacccaguu

SEQ ID NO: 812934 - RNA, 20 nt, Human
ccucugguggcacccaguuc

SEQ ID NO: 812935 - RNA, 19 nt, Human
ccugccaucuggccuucug

SEQ ID NO: 812936 - RNA, 19 nt, Human
ccuucggcgggacuucugc

SEQ ID NO: 812937 - RNA, 22 nt, Human
cgccccagcccgggcaggcagc

SEQ ID NO: 812938 - RNA, 19 nt, Human
cgcucgccaucgccaaccc

SEQ ID NO: 812939 - RNA, 21 nt, Human
cgggcaggcagcagagaaagg

SEQ ID NO: 812940 - RNA, 25 nt, Human
cgguccucucucccucgcucccucc

SEQ ID NO: 812941 - RNA, 23 nt, Human
cguccggggcgcuguccaaagug

SEQ ID NO: 812942 - RNA, 19 nt, Human
cuaggacccaaaugucuuc

SEQ ID NO: 812943 - RNA, 20 nt, Human
cuccaacccccaccuaaguu

SEQ ID NO: 812944 - RNA, 19 nt, Human
cucugagcuggcugagccu

SEQ ID NO: 812945 - RNA, 24 nt, Human
cucugggaccgcgaggggcagcgg

SEQ ID NO: 812946 - RNA, 23 nt, Human
cugaacgcucgccaucgccaacc

SEQ ID NO: 812947 - RNA, 18 nt, Human
cugacaccucccaccaag

SEQ ID NO: 812948 - RNA, 23 nt, Human
cugaugccucucacagcuguccu

SEQ ID NO: 812949 - RNA, 22 nt, Human
cugccccugucccaggcaccug

SEQ ID NO: 812950 - RNA, 18 nt, Human
cuggcaggcgccaaccgg

SEQ ID NO: 812951 - RNA, 21 nt, Human
cuggcuggcgcuggggccugg

SEQ ID NO: 812952 - RNA, 20 nt, Human
cugggccucagggcuguccu

SEQ ID NO: 812953 - RNA, 22 nt, Human
cugggcuuucuucgcccuucug

SEQ ID NO: 812954 - RNA, 23 nt, Human
cuucugggccaaccccagggugu

SEQ ID NO: 812955 - RNA, 22 nt, Human
cuugcagagggucuuggagcag

SEQ ID NO: 812956 - RNA, 18 nt, Human
cuugucucucucccaacu

SEQ ID NO: 812957 - RNA, 19 nt, Human
cuuuucuucuucuuuuucu

SEQ ID NO: 812958 - RNA, 20 nt, Human
gacccagcuuuucugagggu

SEQ ID NO: 812959 - RNA, 19 nt, Human
gagaaagagagacagucau

SEQ ID NO: 812960 - RNA, 22 nt, Human
gagagacagucaucaaauaaau

SEQ ID NO: 812961 - RNA, 21 nt, Human
gagcugcugugccccauccug

SEQ ID NO: 812962 - RNA, 21 nt, Human
gaggggcagcggugauggcgg

SEQ ID NO: 812963 - RNA, 18 nt, Human
gauucgggucuuuucccc

SEQ ID NO: 812964 - RNA, 19 nt, Human
gccagaacuucucaaaaag

SEQ ID NO: 812965 - RNA, 20 nt, Human
gcccgguauggggaggcugg

SEQ ID NO: 812966 - RNA, 21 nt, Human
gcggugauggcgguggcggug

SEQ ID NO: 812967 - RNA, 23 nt, Human
gcugaucuagagagugaagcccc

SEQ ID NO: 812968 - RNA, 27 nt, Human
gcugggcucuguccccuuaccaugcug

SEQ ID NO: 812969 - RNA, 21 nt, Human
ggaccgguccucucucccucg

SEQ ID NO: 812970 - RNA, 21 nt, Human
ggauuucuucuuuuucuucuu

SEQ ID NO: 812971 - RNA, 18 nt, Human
ggcaggcagcagagaaag

SEQ ID NO: 812972 - RNA, 20 nt, Human
gggacuucugcccuuccuca

SEQ ID NO: 812973 - RNA, 20 nt, Human
gggaggcuggcagcgcgaag

SEQ ID NO: 812974 - RNA, 21 nt, Human
gggcagaggggagggggcugg

SEQ ID NO: 812975 - RNA, 19 nt, Human
gggcagcggugauggcggu

SEQ ID NO: 812976 - RNA, 20 nt, Human
gggcagggcuuaggucuggg

SEQ ID NO: 812977 - RNA, 23 nt, Human
gggcauccggggagguggggaga

SEQ ID NO: 812978 - RNA, 18 nt, Human
ggggacaggaggcugggg

SEQ ID NO: 812979 - RNA, 20 nt, Human
ggggagggcaggugguuggg

SEQ ID NO: 812980 - RNA, 26 nt, Human
ggggagggcaggugguugggggaggg

SEQ ID NO: 812981 - RNA, 20 nt, Human
gggggcgacacccagcuccc

SEQ ID NO: 812982 - RNA, 20 nt, Human
ggguacaggccugacccucc

SEQ ID NO: 812983 - RNA, 18 nt, Human
ggguagggagacgucacu

SEQ ID NO: 812984 - RNA, 23 nt, Human
ggguggggugggagagaucggag

SEQ ID NO: 812985 - RNA, 20 nt, Human
gucuccauggagggagacug

SEQ ID NO: 812986 - RNA, 22 nt, Human
guuccaggcuuagagccuucag

SEQ ID NO: 812987 - RNA, 21 nt, Human
uaaaaaacagcagaaaaaaaa

SEQ ID NO: 812988 - RNA, 20 nt, Human
uaaaaagguuugcuaggagc

SEQ ID NO: 812989 - RNA, 22 nt, Human
uaacccaaaauauccaaaagcu

SEQ ID NO: 812990 - RNA, 24 nt, Human
uaacccaaaauauccaaaagcugg

SEQ ID NO: 812991 - RNA, 19 nt, Human
uaauuuaggagaucccccc

SEQ ID NO: 812992 - RNA, 21 nt, Human
uagggagugauccugcuaugu

SEQ ID NO: 812993 - RNA, 22 nt, Human
uagucuuugugggcagggcuua

SEQ ID NO: 812994 - RNA, 20 nt, Human
ucacugcuuccaagaaaaag

SEQ ID NO: 812995 - RNA, 19 nt, Human
ucagggagaaggccaauag

SEQ ID NO: 812996 - RNA, 25 nt, Human
uccaaacgggggcgacacccagcuc

SEQ ID NO: 812997 - RNA, 18 nt, Human
uccaaauguuuucccugg

SEQ ID NO: 812998 - RNA, 20 nt, Human
uccauuagucuuugugggca

SEQ ID NO: 812999 - RNA, 21 nt, Human
ucccaagcugacaagaaaccu

SEQ ID NO: 813000 - RNA, 22 nt, Human
ucccaagcugacaagaaaccuc

SEQ ID NO: 813001 - RNA, 22 nt, Human
ucccaccaagucaaacgucccc

SEQ ID NO: 813002 - RNA, 30 nt, Human
uccccauaacccaaaauauccaaaagcugg

SEQ ID NO: 813003 - RNA, 19 nt, Human
ucccucagucagcucaauu

SEQ ID NO: 813004 - RNA, 20 nt, Human
uccuucugggccaaccccag

SEQ ID NO: 813005 - RNA, 22 nt, Human
ucgcucccuccgugcccugucc

SEQ ID NO: 813006 - RNA, 23 nt, Human
ucucaaaucccauccauaaaaaa

SEQ ID NO: 813007 - RNA, 25 nt, Human
ucuugugccucuucucaucucuucu

SEQ ID NO: 813008 - RNA, 22 nt, Human
ucuuugugggcagggcuuaggu

SEQ ID NO: 813009 - RNA, 22 nt, Human
ugaaacucacccacaagccucc

SEQ ID NO: 813010 - RNA, 19 nt, Human
ugaaggguggguggguagg

SEQ ID NO: 813011 - RNA, 21 nt, Human
ugacaagaaaccucagaagcc

SEQ ID NO: 813012 - RNA, 23 nt, Human
ugacaagaaaccucagaagccag

SEQ ID NO: 813013 - RNA, 23 nt, Human
ugacaccucccaccaagucaaac

SEQ ID NO: 813014 - RNA, 18 nt, Human
ugagcugggacaacgggg

SEQ ID NO: 813015 - RNA, 23 nt, Human
ugagcugggacaacgggguuauu

SEQ ID NO: 813016 - RNA, 18 nt, Human
ugaggaccuccuucucuu

SEQ ID NO: 813017 - RNA, 18 nt, Human
ugagggugagaucaaggu

SEQ ID NO: 813018 - RNA, 20 nt, Human
ugagguugcagggccccugu

SEQ ID NO: 813019 - RNA, 21 nt, Human
ugagguugcagggccccugug

SEQ ID NO: 813020 - RNA, 19 nt, Human
ugauggcgguggcggugag

SEQ ID NO: 813021 - RNA, 24 nt, Human
ugcacagaaauaauuuaggagauc

SEQ ID NO: 813022 - RNA, 23 nt, Human
ugccaggcugcacuggguggcau

SEQ ID NO: 813023 - RNA, 20 nt, Human
ugccaucuggccuucugcag

SEQ ID NO: 813024 - RNA, 25 nt, Human
ugcccagccccagccaggggggacu

SEQ ID NO: 813025 - RNA, 23 nt, Human
ugcccuguccugcugcuguugcc

SEQ ID NO: 813026 - RNA, 23 nt, Human
ugcccuuccucaggggaccggcc

SEQ ID NO: 813027 - RNA, 18 nt, Human
ugcuguugccaccacaaa

SEQ ID NO: 813028 - RNA, 18 nt, Human
uggacugggccucagggc

SEQ ID NO: 813029 - RNA, 24 nt, Human
uggagggagacugaaguccagucu

SEQ ID NO: 813030 - RNA, 19 nt, Human
uggcacuggggaauguuca

SEQ ID NO: 813031 - RNA, 18 nt, Human
ugggaaguggggcuggag

SEQ ID NO: 813032 - RNA, 22 nt, Human
ugggaaguggggcuggagacca

SEQ ID NO: 813033 - RNA, 22 nt, Human
ugggagagaucggaguucaggg

SEQ ID NO: 813034 - RNA, 21 nt, Human
ugggagcagcagcugaacccu

SEQ ID NO: 813035 - RNA, 23 nt, Human
ugggagggauaaagaauguuugg

SEQ ID NO: 813036 - RNA, 22 nt, Human
uggggcuggagaccaaccuguc

SEQ ID NO: 813037 - RNA, 25 nt, Human
uggggugagggcaaaaauaaaggug

SEQ ID NO: 813038 - RNA, 21 nt, Human
uggggugggagagaucggagu

SEQ ID NO: 813039 - RNA, 23 nt, Human
uggggugggagggauaaagaaug

SEQ ID NO: 813040 - RNA, 21 nt, Human
ugguagaggcuccuagcaggc

SEQ ID NO: 813041 - RNA, 18 nt, Human
uggugccucccuaaggga

SEQ ID NO: 813042 - RNA, 19 nt, Human
uguccuugcagagggucuu

SEQ ID NO: 813043 - RNA, 21 nt, Human
ugucuccauggagggagacug

SEQ ID NO: 813044 - RNA, 21 nt, Human
ugugccccauccuggcaaaau

SEQ ID NO: 813045 - RNA, 21 nt, Human
uguggaugaagcagcuggugg

SEQ ID NO: 813046 - RNA, 22 nt, Human
uguggaugaagcagcugguggu

SEQ ID NO: 813047 - RNA, 18 nt, Human
uguuggugcccaagggcu

SEQ ID NO: 813048 - RNA, 21 nt, Human
uguuggugcccaagggcucgg

SEQ ID NO: 813049 - RNA, 19 nt, Human
uuccaguacuaaaccaggg

SEQ ID NO: 813050 - RNA, 30 nt, Human
uucccaagcugacaagaaaccucagaagcc

SEQ ID NO: 813051 - RNA, 22 nt, Human
uuccccauaacccaaaauaucc

SEQ ID NO: 813052 - RNA, 20 nt, Human
uuccgaguggauuucuucuu

SEQ ID NO: 813053 - RNA, 18 nt, Human
uuccucaggggaccggcc

SEQ ID NO: 813054 - RNA, 22 nt, Human
uuccucgccagaacuucucaaa

SEQ ID NO: 813055 - RNA, 19 nt, Human
uuccuggccagggcucaau

SEQ ID NO: 813056 - RNA, 21 nt, Human
uucgacuuugugcagccuugg

SEQ ID NO: 813057 - RNA, 26 nt, Human
uucuucgcccuucugggucggcucca

SEQ ID NO: 813058 - RNA, 21 nt, Human
uugauaggaugggaaagauug

SEQ ID NO: 813059 - RNA, 19 nt, Human
uuggacuaguggggcaucc

SEQ ID NO: 813060 - RNA, 21 nt, Human
uuugguggcucugggaagccu

SEQ ID NO: 813061 - RNA, 21 nt, Human
uuugugucagccaugcagugg

SEQ ID NO: 813062 - RNA, 24 nt, Human
uuugugucagccaugcaguggccu

SEQ ID NO: 813063 - RNA, 19 nt, Human
aaaaacaaaaacaaacccc

SEQ ID NO: 813064 - RNA, 20 nt, Human
aaaaacaaaaacaaaccccu

SEQ ID NO: 813065 - RNA, 25 nt, Human
aaaaacaaaccccuuuucucccuga

SEQ ID NO: 813066 - RNA, 21 nt, Human
aaaacaaaaacaaaccccuuu

SEQ ID NO: 813067 - RNA, 25 nt, Human
aaacaaaccccuuuucucccugagg

SEQ ID NO: 813068 - RNA, 22 nt, Human
aaacacacagauacaacaaacc

SEQ ID NO: 813069 - RNA, 21 nt, Human
aaccacuugagaacagaauga

SEQ ID NO: 813070 - RNA, 25 nt, Human
aagcacacuacugcuuaauaugaau

SEQ ID NO: 813071 - RNA, 23 nt, Human
aagcagaagguugucauucagga

SEQ ID NO: 813072 - RNA, 24 nt, Human
aagcgugugugugugugugugugg

SEQ ID NO: 813073 - RNA, 26 nt, Human
aaugccuauggagggcaggggugggg

SEQ ID NO: 813074 - RNA, 19 nt, Human
acauauuugccuggacucu

SEQ ID NO: 813075 - RNA, 22 nt, Human
acgacggagccugggcgcgcgu

SEQ ID NO: 813076 - RNA, 19 nt, Human
acuccaccuccaaccuggc

SEQ ID NO: 813077 - RNA, 23 nt, Human
acugaaucccucuccucugcagu

SEQ ID NO: 813078 - RNA, 22 nt, Human
agaaaagaagugggugucagaa

SEQ ID NO: 813079 - RNA, 21 nt, Human
agacaggagagagauucagag

SEQ ID NO: 813080 - RNA, 24 nt, Human
agagagaaagguggaggugguugg

SEQ ID NO: 813081 - RNA, 19 nt, Human
agcaggauucauuguaggu

SEQ ID NO: 813082 - RNA, 21 nt, Human
agcauugcuaauggccaggug

SEQ ID NO: 813083 - RNA, 19 nt, Human
agccgaacaagaccuuaga

SEQ ID NO: 813084 - RNA, 21 nt, Human
agccggcuggcccggucggcg

SEQ ID NO: 813085 - RNA, 26 nt, Human
aggaaaaaaaaaaaaagcgcaaaaag

SEQ ID NO: 813086 - RNA, 20 nt, Human
aggaagggggagauggguca

SEQ ID NO: 813087 - RNA, 18 nt, Human
aggaguucucuuagggga

SEQ ID NO: 813088 - RNA, 20 nt, Human
aggcaggagcggaagagaag

SEQ ID NO: 813089 - RNA, 26 nt, Human
aggcaggagcggaagagaagggaccc

SEQ ID NO: 813090 - RNA, 24 nt, Human
aggcagguagguagacuguauggg

SEQ ID NO: 813091 - RNA, 21 nt, Human
agggagaaugaggggguuagc

SEQ ID NO: 813092 - RNA, 21 nt, Human
agggagagcgggcuuuuaagg

SEQ ID NO: 813093 - RNA, 24 nt, Human
agggcagggguggggguggggggu

SEQ ID NO: 813094 - RNA, 20 nt, Human
agguggaggugguugggggc

SEQ ID NO: 813095 - RNA, 22 nt, Human
aggugggggcagggggaagaag

SEQ ID NO: 813096 - RNA, 19 nt, Human
auaaggaaaacgcucccuc

SEQ ID NO: 813097 - RNA, 23 nt, Human
auacaacaaaccacuugagaaca

SEQ ID NO: 813098 - RNA, 25 nt, Human
caaaccacuugagaacagaaugacc

SEQ ID NO: 813099 - RNA, 21 nt, Human
caaagcucaauucccggcugc

SEQ ID NO: 813100 - RNA, 22 nt, Human
caacucagguaccuacaggcaa

SEQ ID NO: 813101 - RNA, 21 nt, Human
caagaaacuacaaauagaaac

SEQ ID NO: 813102 - RNA, 21 nt, Human
cacacagauacaacaaaccac

SEQ ID NO: 813103 - RNA, 19 nt, Human
caccaaacauauuugccug

SEQ ID NO: 813104 - RNA, 21 nt, Human
cacgggggagggggcaggcag

SEQ ID NO: 813105 - RNA, 20 nt, Human
cacuccucccucuuucucuc

SEQ ID NO: 813106 - RNA, 25 nt, Human
cagccgccaagucauuaguaaccga

SEQ ID NO: 813107 - RNA, 25 nt, Human
cagcucaauguuagcuuauagacug

SEQ ID NO: 813108 - RNA, 21 nt, Human
cagcuccuagcucagaugcuc

SEQ ID NO: 813109 - RNA, 22 nt, Human
caggaugagcacuuugagcuug

SEQ ID NO: 813110 - RNA, 23 nt, Human
caggcagaggauccagggcgcgc

SEQ ID NO: 813111 - RNA, 18 nt, Human
caggcugagccucagcug

SEQ ID NO: 813112 - RNA, 22 nt, Human
cagggauuaugagucccagucc

SEQ ID NO: 813113 - RNA, 21 nt, Human
caugcuugcaccugauuuccc

SEQ ID NO: 813114 - RNA, 20 nt, Human
cauucaacaaacauguauua

SEQ ID NO: 813115 - RNA, 18 nt, Human
ccacccacacacgcgccc

SEQ ID NO: 813116 - RNA, 23 nt, Human
ccaggcucuccaggccuaggaag

SEQ ID NO: 813117 - RNA, 21 nt, Human
cccagccucgauggcacugau

SEQ ID NO: 813118 - RNA, 19 nt, Human
cccagcucugauauccaau

SEQ ID NO: 813119 - RNA, 19 nt, Human
cccccuuacccucuaauuc

SEQ ID NO: 813120 - RNA, 22 nt, Human
cccugcuaauggccuggcaccu

SEQ ID NO: 813121 - RNA, 21 nt, Human
ccggaggcuucuagcucgcgc

SEQ ID NO: 813122 - RNA, 24 nt, Human
ccuauggagggcaggggugggggu

SEQ ID NO: 813123 - RNA, 21 nt, Human
ccucccuggccgccugugcca

SEQ ID NO: 813124 - RNA, 21 nt, Human
ccuguggauggccucccaccc

SEQ ID NO: 813125 - RNA, 22 nt, Human
ccuucuucuucuucuaagagcc

SEQ ID NO: 813126 - RNA, 22 nt, Human
ccuuucucuccgggaagggcgg

SEQ ID NO: 813127 - RNA, 24 nt, Human
cgagcugccagggagggacugggg

SEQ ID NO: 813128 - RNA, 19 nt, Human
cgcucagcaucuuuaggca

SEQ ID NO: 813129 - RNA, 21 nt, Human
cggaggcuucuagcucgcgcc

SEQ ID NO: 813130 - RNA, 18 nt, Human
cgggaagggcggggguag

SEQ ID NO: 813131 - RNA, 23 nt, Human
cgggggagggggcaggcagagga

SEQ ID NO: 813132 - RNA, 20 nt, Human
cucacacaucaggagaagac

SEQ ID NO: 813133 - RNA, 20 nt, Human
cucacagacaaucucuccca

SEQ ID NO: 813134 - RNA, 22 nt, Human
cucccuggccgccugugccacc

SEQ ID NO: 813135 - RNA, 24 nt, Human
gaaaacgcucccucuccuugcuga

SEQ ID NO: 813136 - RNA, 23 nt, Human
gaaagccgggagcugauccagaa

SEQ ID NO: 813137 - RNA, 21 nt, Human
gacaggugagaggcacaggag

SEQ ID NO: 813138 - RNA, 20 nt, Human
gagaggcacaggagacuugg

SEQ ID NO: 813139 - RNA, 21 nt, Human
gagaguuuucaggccacugaa

SEQ ID NO: 813140 - RNA, 20 nt, Human
gagcauugcuaauggccagg

SEQ ID NO: 813141 - RNA, 19 nt, Human
gagcccgaccacgcccgcg

SEQ ID NO: 813142 - RNA, 21 nt, Human
gagcgggcuuuuaaggcugug

SEQ ID NO: 813143 - RNA, 21 nt, Human
gagggagaaugaggggguuag

SEQ ID NO: 813144 - RNA, 18 nt, Human
gaggugcagacacagcug

SEQ ID NO: 813145 - RNA, 23 nt, Human
gagugugugugugugugugugug

SEQ ID NO: 813146 - RNA, 21 nt, Human
gauucuguagggaggucggag

SEQ ID NO: 813147 - RNA, 21 nt, Human
gcaggagaagcuccugcagag

SEQ ID NO: 813148 - RNA, 18 nt, Human
gcaggagcggaagagaag

SEQ ID NO: 813149 - RNA, 20 nt, Human
gcaggggugggggugggggg

SEQ ID NO: 813150 - RNA, 21 nt, Human
gcagggguggggguggggggu

SEQ ID NO: 813151 - RNA, 19 nt, Human
gcaggucagagauauuagu

SEQ ID NO: 813152 - RNA, 23 nt, Human
gccacccacacacgcgccccggg

SEQ ID NO: 813153 - RNA, 19 nt, Human
gcggugggggaggguuggg

SEQ ID NO: 813154 - RNA, 18 nt, Human
gcugcgcgaggcgcggag

SEQ ID NO: 813155 - RNA, 18 nt, Human
gcugggucacgucuuucc

SEQ ID NO: 813156 - RNA, 26 nt, Human
ggaaucagggggcuggcggcaggugg

SEQ ID NO: 813157 - RNA, 27 nt, Human
ggacuggggugcgauucuguagggagg

SEQ ID NO: 813158 - RNA, 29 nt, Human
ggagaagcgugugugugugugugugugug

SEQ ID NO: 813159 - RNA, 22 nt, Human
ggagacuuggucugguacacca

SEQ ID NO: 813160 - RNA, 23 nt, Human
ggcagaugcuucccuuccuugca

SEQ ID NO: 813161 - RNA, 18 nt, Human
gggaagaagcgggugcag

SEQ ID NO: 813162 - RNA, 19 nt, Human
gggaggucggagagccggc

SEQ ID NO: 813163 - RNA, 20 nt, Human
gggggagggggcaggcagag

SEQ ID NO: 813164 - RNA, 19 nt, Human
ggggugggggugggggguu

SEQ ID NO: 813165 - RNA, 23 nt, Human
gggugaggaguucucuuagggga

SEQ ID NO: 813166 - RNA, 24 nt, Human
guacaccaugauggguccaaaacu

SEQ ID NO: 813167 - RNA, 18 nt, Human
guagaguuucuuuggacu

SEQ ID NO: 813168 - RNA, 20 nt, Human
guagaguuucuuuggacugg

SEQ ID NO: 813169 - RNA, 19 nt, Human
gugcagagaguggggugug

SEQ ID NO: 813170 - RNA, 20 nt, Human
gugcgugggcccucccuggc

SEQ ID NO: 813171 - RNA, 18 nt, Human
guggauggccucccaccc

SEQ ID NO: 813172 - RNA, 18 nt, Human
guguguggugugccucuu

SEQ ID NO: 813173 - RNA, 21 nt, Human
gugugugugugugugugugug

SEQ ID NO: 813174 - RNA, 21 nt, Human
gugugugugugugugugugug

SEQ ID NO: 813175 - RNA, 21 nt, Human
gugugugugugugugugugug

SEQ ID NO: 813176 - RNA, 18 nt, Human
guuuauaaacuuaggcac

SEQ ID NO: 813177 - RNA, 19 nt, Human
uaaaauaaggaaaacgcuc

SEQ ID NO: 813178 - RNA, 23 nt, Human
uaaacacacagauacaacaaacc

SEQ ID NO: 813179 - RNA, 25 nt, Human
uaaacacacagauacaacaaaccac

SEQ ID NO: 813180 - RNA, 21 nt, Human
uaaccgaguuguccuacuaaa

SEQ ID NO: 813181 - RNA, 21 nt, Human
uacaacaaaccacuugagaac

SEQ ID NO: 813182 - RNA, 22 nt, Human
uacaacaaaccacuugagaaca

SEQ ID NO: 813183 - RNA, 26 nt, Human
uacaacaaaccacuugagaacagaau

SEQ ID NO: 813184 - RNA, 28 nt, Human
uacaacaaaccacuugagaacagaauga

SEQ ID NO: 813185 - RNA, 19 nt, Human
uacaggacuggugccccac

SEQ ID NO: 813186 - RNA, 22 nt, Human
uacagucuugucaagagguuuc

SEQ ID NO: 813187 - RNA, 19 nt, Human
uaccuggguucugaucugg

SEQ ID NO: 813188 - RNA, 18 nt, Human
uacuaggaacaaaucagc

SEQ ID NO: 813189 - RNA, 20 nt, Human
uacuuuacauacagagcccu

SEQ ID NO: 813190 - RNA, 28 nt, Human
uagauaaacacacagauacaacaaacca

SEQ ID NO: 813191 - RNA, 21 nt, Human
uaggagaaaagaggaagcugg

SEQ ID NO: 813192 - RNA, 20 nt, Human
uaguuuauaaacuuaggcac

SEQ ID NO: 813193 - RNA, 21 nt, Human
ucaacucagguaccuacaggc

SEQ ID NO: 813194 - RNA, 19 nt, Human
ucacgggggagggggcagg

SEQ ID NO: 813195 - RNA, 21 nt, Human
ucagaccauugucugagcucu

SEQ ID NO: 813196 - RNA, 19 nt, Human
ucccaagcaagggagaagc

SEQ ID NO: 813197 - RNA, 21 nt, Human
ucccaagcaagggagaagcgu

SEQ ID NO: 813198 - RNA, 21 nt, Human
ucccacaaaacacuucagcuu

SEQ ID NO: 813199 - RNA, 18 nt, Human
ucccagggguucuccugc

SEQ ID NO: 813200 - RNA, 21 nt, Human
ucccggggugaggaaucucca

SEQ ID NO: 813201 - RNA, 18 nt, Human
ucccuauucccccauccc

SEQ ID NO: 813202 - RNA, 21 nt, Human
ucccuccaauauguucaagga

SEQ ID NO: 813203 - RNA, 21 nt, Human
ucccucuuucucucaccuaca

SEQ ID NO: 813204 - RNA, 24 nt, Human
uccuagcaaaggaggcauuuguuu

SEQ ID NO: 813205 - RNA, 20 nt, Human
ucgaagagaucucgggcagc

SEQ ID NO: 813206 - RNA, 18 nt, Human
ucucacagacaaucucuc

SEQ ID NO: 813207 - RNA, 19 nt, Human
ucucacagacaaucucucc

SEQ ID NO: 813208 - RNA, 20 nt, Human
ucucagauucagccugguua

SEQ ID NO: 813209 - RNA, 20 nt, Human
ucuccaggccuaggaaggug

SEQ ID NO: 813210 - RNA, 22 nt, Human
ucuccuguaacccguuguuacc

SEQ ID NO: 813211 - RNA, 20 nt, Human
ucuccuugcugaggcaaggg

SEQ ID NO: 813212 - RNA, 21 nt, Human
ucugcaguccaucaaacauag

SEQ ID NO: 813213 - RNA, 27 nt, Human
ucuggcucuguugcuagaaggucggac

SEQ ID NO: 813214 - RNA, 23 nt, Human
ucuguguguucucucucacuccu

SEQ ID NO: 813215 - RNA, 24 nt, Human
ucuuacagcuccuuggacccaaga

SEQ ID NO: 813216 - RNA, 25 nt, Human
ucuucaggaagugggagaacaaggu

SEQ ID NO: 813217 - RNA, 21 nt, Human
ucuucuucuucuaagagccuu

SEQ ID NO: 813218 - RNA, 20 nt, Human
ugaaaucauugcauuuucca

SEQ ID NO: 813219 - RNA, 18 nt, Human
ugacuggaaucacuggca

SEQ ID NO: 813220 - RNA, 23 nt, Human
ugagaaaaacaaaaacaaacccc

SEQ ID NO: 813221 - RNA, 23 nt, Human
ugagaacagaaugacccuugcuu

SEQ ID NO: 813222 - RNA, 21 nt, Human
ugagaggaaguaagucacaag

SEQ ID NO: 813223 - RNA, 21 nt, Human
ugagaggcacaggagacuugg

SEQ ID NO: 813224 - RNA, 24 nt, Human
ugagaggcuuugcaggcuccccgg

SEQ ID NO: 813225 - RNA, 18 nt, Human
ugagaggugcagacacag

SEQ ID NO: 813226 - RNA, 19 nt, Human
ugaggcagagggacagccc

SEQ ID NO: 813227 - RNA, 21 nt, Human
ugaggcagagggacagcccug

SEQ ID NO: 813228 - RNA, 18 nt, Human
ugaggggguuagcaacac

SEQ ID NO: 813229 - RNA, 20 nt, Human
ugaucugugcauuauuuucu

SEQ ID NO: 813230 - RNA, 20 nt, Human
ugcagagggguuucucaagg

SEQ ID NO: 813231 - RNA, 20 nt, Human
ugccagcuccuagcucagau

SEQ ID NO: 813232 - RNA, 23 nt, Human
ugccaggcugagccucagcuggg

SEQ ID NO: 813233 - RNA, 20 nt, Human
ugccagggagggacuggggu

SEQ ID NO: 813234 - RNA, 20 nt, Human
ugccuggaaaggccuugguu

SEQ ID NO: 813235 - RNA, 23 nt, Human
ugcuacaggacuggugccccacu

SEQ ID NO: 813236 - RNA, 19 nt, Human
ugcugacuuacucaagaaa

SEQ ID NO: 813237 - RNA, 23 nt, Human
uggaaucacuggcacuuuuucug

SEQ ID NO: 813238 - RNA, 21 nt, Human
uggaccaggcaucagaagccc

SEQ ID NO: 813239 - RNA, 22 nt, Human
uggacgugggugucagcauggc

SEQ ID NO: 813240 - RNA, 23 nt, Human
uggacgugggugucagcauggcu

SEQ ID NO: 813241 - RNA, 22 nt, Human
uggcggcagguguagaggagag

SEQ ID NO: 813242 - RNA, 19 nt, Human
uggcgguggcagcagugcg

SEQ ID NO: 813243 - RNA, 20 nt, Human
ugggaaagacagugcgaggu

SEQ ID NO: 813244 - RNA, 19 nt, Human
ugggagccaaaggaagggu

SEQ ID NO: 813245 - RNA, 19 nt, Human
ugggagcgagggagaauga

SEQ ID NO: 813246 - RNA, 21 nt, Human
ugggagcgagggagaaugagg

SEQ ID NO: 813247 - RNA, 24 nt, Human
ugggagugggagccaaaggaaggg

SEQ ID NO: 813248 - RNA, 19 nt, Human
ugggggcagggggaagaag

SEQ ID NO: 813249 - RNA, 24 nt, Human
ugguaggaagggggagauggguca

SEQ ID NO: 813250 - RNA, 18 nt, Human
uggugucuagccaggccu

SEQ ID NO: 813251 - RNA, 20 nt, Human
uggugugccucuuugcuaca

SEQ ID NO: 813252 - RNA, 25 nt, Human
ugguuguuucucagauucagccugg

SEQ ID NO: 813253 - RNA, 23 nt, Human
ugucacagguacagucccagggg

SEQ ID NO: 813254 - RNA, 25 nt, Human
ugucacagguacagucccagggguu

SEQ ID NO: 813255 - RNA, 21 nt, Human
ugucuguguaggagggugagg

SEQ ID NO: 813256 - RNA, 19 nt, Human
uguggaauagauaaacaca

SEQ ID NO: 813257 - RNA, 26 nt, Human
uguggauggccucccacccuucaaag

SEQ ID NO: 813258 - RNA, 27 nt, Human
uguggauggccucccacccuucaaagg

SEQ ID NO: 813259 - RNA, 24 nt, Human
uguguguguguguggugugccucu

SEQ ID NO: 813260 - RNA, 19 nt, Human
ugugugugugugugugagu

SEQ ID NO: 813261 - RNA, 18 nt, Human
ugugugugugugugugug

SEQ ID NO: 813262 - RNA, 18 nt, Human
ugugugugugugugugug

SEQ ID NO: 813263 - RNA, 18 nt, Human
ugugugugugugugugug

SEQ ID NO: 813264 - RNA, 18 nt, Human
ugugugugugugugugug

SEQ ID NO: 813265 - RNA, 18 nt, Human
ugugugugugugugugug

SEQ ID NO: 813266 - RNA, 18 nt, Human
ugugugugugugugugug

SEQ ID NO: 813267 - RNA, 18 nt, Human
ugugugugugugugugug

SEQ ID NO: 813268 - RNA, 18 nt, Human
ugugugugugugugugug

SEQ ID NO: 813269 - RNA, 18 nt, Human
ugugugugugugugugug

SEQ ID NO: 813270 - RNA, 18 nt, Human
ugugugugugugugugug

SEQ ID NO: 813271 - RNA, 18 nt, Human
ugugugugugugugugug

SEQ ID NO: 813272 - RNA, 22 nt, Human
uguguguguguguguguggugu

SEQ ID NO: 813273 - RNA, 26 nt, Human
ugugugugugugugugugugagugaa

SEQ ID NO: 813274 - RNA, 21 nt, Human
ugugugugugugugugugugu

SEQ ID NO: 813275 - RNA, 21 nt, Human
ugugugugugugugugugugu

SEQ ID NO: 813276 - RNA, 21 nt, Human
ugugugugugugugugugugu

SEQ ID NO: 813277 - RNA, 21 nt, Human
ugugugugugugugugugugu

SEQ ID NO: 813278 - RNA, 21 nt, Human
ugugugugugugugugugugu

SEQ ID NO: 813279 - RNA, 21 nt, Human
ugugugugugugugugugugu

SEQ ID NO: 813280 - RNA, 21 nt, Human
ugugugugugugugugugugu

SEQ ID NO: 813281 - RNA, 21 nt, Human
ugugugugugugugugugugu

SEQ ID NO: 813282 - RNA, 21 nt, Human
ugugugugugugugugugugu

SEQ ID NO: 813283 - RNA, 22 nt, Human
ugugugugugugugugugugug

SEQ ID NO: 813284 - RNA, 22 nt, Human
ugugugugugugugugugugug

SEQ ID NO: 813285 - RNA, 22 nt, Human
ugugugugugugugugugugug

SEQ ID NO: 813286 - RNA, 22 nt, Human
ugugugugugugugugugugug

SEQ ID NO: 813287 - RNA, 22 nt, Human
ugugugugugugugugugugug

SEQ ID NO: 813288 - RNA, 22 nt, Human
ugugugugugugugugugugug

SEQ ID NO: 813289 - RNA, 22 nt, Human
uguucucucucacuccucccuc

SEQ ID NO: 813290 - RNA, 21 nt, Human
uuaccuggguucugaucuggc

SEQ ID NO: 813291 - RNA, 23 nt, Human
uuaccuggguucugaucuggcuc

SEQ ID NO: 813292 - RNA, 20 nt, Human
uuccaggggggaugcccugc

SEQ ID NO: 813293 - RNA, 23 nt, Human
uuccugccuguccuugagagucc

SEQ ID NO: 813294 - RNA, 23 nt, Human
uucguuuggauacagucuuguca

SEQ ID NO: 813295 - RNA, 19 nt, Human
uugaaucugagaggcuuug

SEQ ID NO: 813296 - RNA, 19 nt, Human
uugaccaaaugaugugccu

SEQ ID NO: 813297 - RNA, 18 nt, Human
uugcuuucccggaguccc

SEQ ID NO: 813298 - RNA, 19 nt, Human
uuuggacgugggugucagc

SEQ ID NO: 813299 - RNA, 27 nt, Human
uuuucuugagcuuucucccuuucuccu

SEQ ID NO: 813300 - RNA, 19 nt, Human
aaccagccagucuccaccu

SEQ ID NO: 813301 - RNA, 23 nt, Human
aaggagcaggcccagggccuggg

SEQ ID NO: 813302 - RNA, 22 nt, Human
aaggcgccgcaggagguguagg

SEQ ID NO: 813303 - RNA, 22 nt, Human
aaggggaggcagacccuccccg

SEQ ID NO: 813304 - RNA, 23 nt, Human
aagugcugagggaggugguguga

SEQ ID NO: 813305 - RNA, 25 nt, Human
acagaggaagggcucaggaccugga

SEQ ID NO: 813306 - RNA, 23 nt, Human
acagccccucuccucuccugugc

SEQ ID NO: 813307 - RNA, 25 nt, Human
agagaagccaccacccuggccugga

SEQ ID NO: 813308 - RNA, 22 nt, Human
agagauugcugggggagcaugg

SEQ ID NO: 813309 - RNA, 23 nt, Human
agaggaagggcucaggaccugga

SEQ ID NO: 813310 - RNA, 23 nt, Human
agagguuucugcaccccagaggu

SEQ ID NO: 813311 - RNA, 20 nt, Human
agaucaggggaacaggggag

SEQ ID NO: 813312 - RNA, 21 nt, Human
agcaggcccagggccugggca

SEQ ID NO: 813313 - RNA, 23 nt, Human
agccagaacccaggaagaguccc

SEQ ID NO: 813314 - RNA, 23 nt, Human
agcugauugucauucggagaagc

SEQ ID NO: 813315 - RNA, 23 nt, Human
agcugggaaauggggagccuggg

SEQ ID NO: 813316 - RNA, 19 nt, Human
aggacagagaggcuaggcc

SEQ ID NO: 813317 - RNA, 20 nt, Human
aggagccagaacccaggaag

SEQ ID NO: 813318 - RNA, 22 nt, Human
aggagcugggaaauggggagcc

SEQ ID NO: 813319 - RNA, 25 nt, Human
aggccaggggacagaggcugcaggg

SEQ ID NO: 813320 - RNA, 23 nt, Human
aggccaugcagugacugggaagg

SEQ ID NO: 813321 - RNA, 19 nt, Human
aggcccccuucuuccuccc

SEQ ID NO: 813322 - RNA, 18 nt, Human
aggcugaagggugagcug

SEQ ID NO: 813323 - RNA, 18 nt, Human
aggcugugcugggagcug

SEQ ID NO: 813324 - RNA, 21 nt, Human
agggaagagugggcuugggaa

SEQ ID NO: 813325 - RNA, 18 nt, Human
agggaaggacagagaggc

SEQ ID NO: 813326 - RNA, 23 nt, Human
agggagguggugugacacuuuua

SEQ ID NO: 813327 - RNA, 21 nt, Human
agggcgaggaaggggaggcag

SEQ ID NO: 813328 - RNA, 19 nt, Human
aggggacagaggcugcagg

SEQ ID NO: 813329 - RNA, 23 nt, Human
aggggacagaggcugcaggggcc

SEQ ID NO: 813330 - RNA, 23 nt, Human
agggugagcugagggaagagugg

SEQ ID NO: 813331 - RNA, 20 nt, Human
aggugggaggcaguggcccu

SEQ ID NO: 813332 - RNA, 22 nt, Human
augcuuccuggggagaggcaca

SEQ ID NO: 813333 - RNA, 21 nt, Human
augguucccacagaggcucca

SEQ ID NO: 813334 - RNA, 19 nt, Human
caacccagccuggcagucc

SEQ ID NO: 813335 - RNA, 21 nt, Human
caagaaggaacaggcugaagg

SEQ ID NO: 813336 - RNA, 19 nt, Human
cagcccucccucccuccca

SEQ ID NO: 813337 - RNA, 19 nt, Human
cagcugcacgggcuggggu

SEQ ID NO: 813338 - RNA, 23 nt, Human
cagcugggguugggggcaccggg

SEQ ID NO: 813339 - RNA, 23 nt, Human
caggaagaguccccacauccauu

SEQ ID NO: 813340 - RNA, 19 nt, Human
caggagucauauccugguc

SEQ ID NO: 813341 - RNA, 18 nt, Human
caggucagaccugccccc

SEQ ID NO: 813342 - RNA, 24 nt, Human
caguccagaggccgucccuggcca

SEQ ID NO: 813343 - RNA, 23 nt, Human
caguggcccuuccuccacucccu

SEQ ID NO: 813344 - RNA, 19 nt, Human
cauccccugcccacagaau

SEQ ID NO: 813345 - RNA, 21 nt, Human
ccaacccagccuggcagucca

SEQ ID NO: 813346 - RNA, 22 nt, Human
ccaagcugcugacucuccauga

SEQ ID NO: 813347 - RNA, 19 nt, Human
ccacagaggcuccacccaa

SEQ ID NO: 813348 - RNA, 21 nt, Human
ccacccaggaguccuccccuc

SEQ ID NO: 813349 - RNA, 20 nt, Human
ccacuggcccacuuucccuc

SEQ ID NO: 813350 - RNA, 22 nt, Human
ccaguguggccggcugcgggug

SEQ ID NO: 813351 - RNA, 19 nt, Human
ccaugagggggaggcugcu

SEQ ID NO: 813352 - RNA, 21 nt, Human
ccauuccuggaguagagcagc

SEQ ID NO: 813353 - RNA, 22 nt, Human
cccaaaucuggaggcaagaggu

SEQ ID NO: 813354 - RNA, 21 nt, Human
cccacagaaucaccugcccac

SEQ ID NO: 813355 - RNA, 22 nt, Human
cccacagaaucaccugcccacc

SEQ ID NO: 813356 - RNA, 20 nt, Human
cccaggaaggcagcccacac

SEQ ID NO: 813357 - RNA, 18 nt, Human
ccccaacccagccuggca

SEQ ID NO: 813358 - RNA, 19 nt, Human
ccccaccccaugcccacca

SEQ ID NO: 813359 - RNA, 20 nt, Human
ccccgaaucuccgaagggcc

SEQ ID NO: 813360 - RNA, 20 nt, Human
ccccuaggugacccccuccc

SEQ ID NO: 813361 - RNA, 21 nt, Human
cccgagggaggggaagggcaa

SEQ ID NO: 813362 - RNA, 18 nt, Human
cccuaaggccuggcgggg

SEQ ID NO: 813363 - RNA, 22 nt, Human
cccucugcuggacccagagggc

SEQ ID NO: 813364 - RNA, 27 nt, Human
cccugcccacagaaucaccugcccacc

SEQ ID NO: 813365 - RNA, 20 nt, Human
cccuggguccccaacccagc

SEQ ID NO: 813366 - RNA, 20 nt, Human
cccuucuuccucccagcucc

SEQ ID NO: 813367 - RNA, 20 nt, Human
ccucugcccuggaugcuucc

SEQ ID NO: 813368 - RNA, 24 nt, Human
ccuggccacaauggcucccagaag

SEQ ID NO: 813369 - RNA, 18 nt, Human
ccuggggagaggcacaga

SEQ ID NO: 813370 - RNA, 21 nt, Human
ccuggggcacagccccucucc

SEQ ID NO: 813371 - RNA, 24 nt, Human
ccuugugggcauccuuccggguga

SEQ ID NO: 813372 - RNA, 18 nt, Human
ccuuucuuccucuuuccc

SEQ ID NO: 813373 - RNA, 19 nt, Human
cgggcccuaaggccuggcg

SEQ ID NO: 813374 - RNA, 23 nt, Human
cggggugagggugggggaccgcg

SEQ ID NO: 813375 - RNA, 18 nt, Human
cggugugcugcuugcccc

SEQ ID NO: 813376 - RNA, 21 nt, Human
cgucaaaggcuguccacccag

SEQ ID NO: 813377 - RNA, 20 nt, Human
cuccaguguggccggcugcg

SEQ ID NO: 813378 - RNA, 21 nt, Human
cuccccaccccaugcccacca

SEQ ID NO: 813379 - RNA, 21 nt, Human
cugagggaagagugggcuugg

SEQ ID NO: 813380 - RNA, 20 nt, Human
cugcagcugggguugggggc

SEQ ID NO: 813381 - RNA, 24 nt, Human
cuuccuggggagaggcacagaggc

SEQ ID NO: 813382 - RNA, 21 nt, Human
cuugcccacugccucucaccg

SEQ ID NO: 813383 - RNA, 21 nt, Human
gaacgaaccaggcguccccag

SEQ ID NO: 813384 - RNA, 18 nt, Human
gaacucaggaaagagcag

SEQ ID NO: 813385 - RNA, 19 nt, Human
gacaggaaggaauuccuga

SEQ ID NO: 813386 - RNA, 21 nt, Human
gacaggaaggaauuccugaug

SEQ ID NO: 813387 - RNA, 21 nt, Human
gacccccuccccacuggccca

SEQ ID NO: 813388 - RNA, 22 nt, Human
gacccccuccccacuggcccac

SEQ ID NO: 813389 - RNA, 20 nt, Human
gagcagcugcacgggcuggg

SEQ ID NO: 813390 - RNA, 21 nt, Human
gagcaggcccagggccugggc

SEQ ID NO: 813391 - RNA, 20 nt, Human
gagcagguuggcuggaacug

SEQ ID NO: 813392 - RNA, 18 nt, Human
gagccagaacccaggaag

SEQ ID NO: 813393 - RNA, 20 nt, Human
gagccuggggcacagccccu

SEQ ID NO: 813394 - RNA, 21 nt, Human
gagcugagggaagagugggcu

SEQ ID NO: 813395 - RNA, 18 nt, Human
gaggaggcugcagcuggg

SEQ ID NO: 813396 - RNA, 19 nt, Human
gaggaugagaggacacagg

SEQ ID NO: 813397 - RNA, 27 nt, Human
gaggcaagagguuucugcaccccagag

SEQ ID NO: 813398 - RNA, 19 nt, Human
gaggcugcuucucugaagg

SEQ ID NO: 813399 - RNA, 22 nt, Human
gagggggaggcugcuuucaggg

SEQ ID NO: 813400 - RNA, 22 nt, Human
gagguuuggaaucccaagggca

SEQ ID NO: 813401 - RNA, 20 nt, Human
gcaagaaggaacaggcugaa

SEQ ID NO: 813402 - RNA, 18 nt, Human
gcaguagagggccuuggg

SEQ ID NO: 813403 - RNA, 23 nt, Human
gcauguaaacauucuuagguggc

SEQ ID NO: 813404 - RNA, 26 nt, Human
gccagaacccaggaagaguccccagu

SEQ ID NO: 813405 - RNA, 18 nt, Human
gccagcccucccucccuc

SEQ ID NO: 813406 - RNA, 18 nt, Human
gcucccagaagacugugg

SEQ ID NO: 813407 - RNA, 23 nt, Human
gcugggguugggggcaccgggag

SEQ ID NO: 813408 - RNA, 19 nt, Human
gcuguccacccaggagucc

SEQ ID NO: 813409 - RNA, 22 nt, Human
ggaaggaauuccugauggugaa

SEQ ID NO: 813410 - RNA, 18 nt, Human
ggaaggcauguguugggg

SEQ ID NO: 813411 - RNA, 22 nt, Human
ggacgucaaaggcuguccaccu

SEQ ID NO: 813412 - RNA, 21 nt, Human
ggagcacauccccugcccaca

SEQ ID NO: 813413 - RNA, 19 nt, Human
ggagguguaggcagagauu

SEQ ID NO: 813414 - RNA, 20 nt, Human
ggcggcgggaggaugagagg

SEQ ID NO: 813415 - RNA, 21 nt, Human
ggcugcagcugggguuggggg

SEQ ID NO: 813416 - RNA, 19 nt, Human
gggagggaaggcauguguu

SEQ ID NO: 813417 - RNA, 21 nt, Human
gggcagaggugaggcuggggg

SEQ ID NO: 813418 - RNA, 20 nt, Human
gggcaguagagggccuuggg

SEQ ID NO: 813419 - RNA, 18 nt, Human
gggccuguccagauaggc

SEQ ID NO: 813420 - RNA, 18 nt, Human
ggggaagugcugagggag

SEQ ID NO: 813421 - RNA, 24 nt, Human
ggggaggaggcugcagcugggguu

SEQ ID NO: 813422 - RNA, 24 nt, Human
ggggagggaaggcauguguugggg

SEQ ID NO: 813423 - RNA, 19 nt, Human
ggggccagcugucuguugg

SEQ ID NO: 813424 - RNA, 19 nt, Human
ggggccggggugagggugg

SEQ ID NO: 813425 - RNA, 20 nt, Human
gggguugggggcaccgggag

SEQ ID NO: 813426 - RNA, 21 nt, Human
gggugagggugggggaccgcg

SEQ ID NO: 813427 - RNA, 24 nt, Human
gggugaugguggcuggacgcagcc

SEQ ID NO: 813428 - RNA, 21 nt, Human
ggguggacaggugcaggaugg

SEQ ID NO: 813429 - RNA, 19 nt, Human
ggugaggcugggggcccua

SEQ ID NO: 813430 - RNA, 22 nt, Human
gguguuggggugggguggacag

SEQ ID NO: 813431 - RNA, 23 nt, Human
guccacccaggaguccuccccuc

SEQ ID NO: 813432 - RNA, 19 nt, Human
guccccaacccagccuggc

SEQ ID NO: 813433 - RNA, 22 nt, Human
gugacacuuuuacagaggaagg

SEQ ID NO: 813434 - RNA, 20 nt, Human
guggcccuuccuccacuccc

SEQ ID NO: 813435 - RNA, 18 nt, Human
guggcugagccuuccccg

SEQ ID NO: 813436 - RNA, 21 nt, Human
guguuggggugggguggacag

SEQ ID NO: 813437 - RNA, 18 nt, Human
guugguccaccugucucu

SEQ ID NO: 813438 - RNA, 21 nt, Human
uaaagcccccuccaacuuccc

SEQ ID NO: 813439 - RNA, 19 nt, Human
ucaaaggcuguccacccag

SEQ ID NO: 813440 - RNA, 19 nt, Human
ucaggaccuggaggccugg

SEQ ID NO: 813441 - RNA, 23 nt, Human
ucagggggaggaggcugcagcug

SEQ ID NO: 813442 - RNA, 21 nt, Human
ucaguugggagcccuagggag

SEQ ID NO: 813443 - RNA, 19 nt, Human
uccaguguggccggcugcg

SEQ ID NO: 813444 - RNA, 19 nt, Human
ucccacagaggcuccaccc

SEQ ID NO: 813445 - RNA, 22 nt, Human
ucccacagaggcuccacccaaa

SEQ ID NO: 813446 - RNA, 23 nt, Human
uccccuaggugacccccucccca

SEQ ID NO: 813447 - RNA, 19 nt, Human
ucccucugcuggacccaga

SEQ ID NO: 813448 - RNA, 20 nt, Human
ucccucugcuggacccagag

SEQ ID NO: 813449 - RNA, 19 nt, Human
ucccugcuccccaccccau

SEQ ID NO: 813450 - RNA, 23 nt, Human
ucccugcuccccaccccaugccc

SEQ ID NO: 813451 - RNA, 18 nt, Human
ucccuggaugucuuggcu

SEQ ID NO: 813452 - RNA, 21 nt, Human
ucccuggaugucuuggcuugc

SEQ ID NO: 813453 - RNA, 22 nt, Human
ucccuggguccccaacccagcc

SEQ ID NO: 813454 - RNA, 23 nt, Human
ucccuggguccccaacccagccu

SEQ ID NO: 813455 - RNA, 21 nt, Human
uccgggugaugguggcuggac

SEQ ID NO: 813456 - RNA, 20 nt, Human
uccuaugguucccacagagg

SEQ ID NO: 813457 - RNA, 23 nt, Human
uccuggggagaggcacagaggca

SEQ ID NO: 813458 - RNA, 22 nt, Human
uccuggggcagaggugaggcug

SEQ ID NO: 813459 - RNA, 24 nt, Human
ucucaccgaguuguccaggaugga

SEQ ID NO: 813460 - RNA, 19 nt, Human
ucugcagagaagccaccac

SEQ ID NO: 813461 - RNA, 19 nt, Human
ucugugacucagggaagga

SEQ ID NO: 813462 - RNA, 19 nt, Human
ugaagggguggggggacuu

SEQ ID NO: 813463 - RNA, 21 nt, Human
ugacacuuuuacagaggaagg

SEQ ID NO: 813464 - RNA, 24 nt, Human
ugacaguggcuuccaggguguugg

SEQ ID NO: 813465 - RNA, 20 nt, Human
ugagcagacccugcaucuga

SEQ ID NO: 813466 - RNA, 24 nt, Human
ugagcagacccugcaucugaguca

SEQ ID NO: 813467 - RNA, 23 nt, Human
ugaggcugggggcccuacauuca

SEQ ID NO: 813468 - RNA, 19 nt, Human
ugaggucaguugggagccc

SEQ ID NO: 813469 - RNA, 21 nt, Human
ugaguagaccgauguucccug

SEQ ID NO: 813470 - RNA, 21 nt, Human
ugaguagaccgauguucccug

SEQ ID NO: 813471 - RNA, 22 nt, Human
ugcacgggcuggggucagggca

SEQ ID NO: 813472 - RNA, 19 nt, Human
ugcagcugggguugggggc

SEQ ID NO: 813473 - RNA, 22 nt, Human
ugcccacccaucuccaagauca

SEQ ID NO: 813474 - RNA, 22 nt, Human
ugcccaggaaggcagcccacac

SEQ ID NO: 813475 - RNA, 20 nt, Human
ugcugagugaagcugggggu

SEQ ID NO: 813476 - RNA, 21 nt, Human
ugcugggagcugcuccagugu

SEQ ID NO: 813477 - RNA, 25 nt, Human
uggaaaggggucggaggagggcaag

SEQ ID NO: 813478 - RNA, 21 nt, Human
uggaguucagaagacugagca

SEQ ID NO: 813479 - RNA, 21 nt, Human
uggccacaauggcucccagaa

SEQ ID NO: 813480 - RNA, 22 nt, Human
ugggaagggcuuggggaggggu

SEQ ID NO: 813481 - RNA, 22 nt, Human
ugggaagggcuuggggaggggu

SEQ ID NO: 813482 - RNA, 23 nt, Human
ugggcauccuuccgggugauggu

SEQ ID NO: 813483 - RNA, 21 nt, Human
ugggcuggggacccaucacuc

SEQ ID NO: 813484 - RNA, 21 nt, Human
uggggagaggcacagaggcag

SEQ ID NO: 813485 - RNA, 19 nt, Human
uggggcaggucagaccugc

SEQ ID NO: 813486 - RNA, 19 nt, Human
uggggccgcggguggcgcg

SEQ ID NO: 813487 - RNA, 19 nt, Human
uggggggccggggugaggg

SEQ ID NO: 813488 - RNA, 19 nt, Human
uggggggccggggugaggg

SEQ ID NO: 813489 - RNA, 18 nt, Human
uggguuuugcgucucugc

SEQ ID NO: 813490 - RNA, 24 nt, Human
ugguggcaaggagcaggcccaggg

SEQ ID NO: 813491 - RNA, 19 nt, Human
ugugauggcuacuucccuu

SEQ ID NO: 813492 - RNA, 27 nt, Human
ugugggcauccuuccgggugauggugg

SEQ ID NO: 813493 - RNA, 22 nt, Human
uguuggggugagcagacccugc

SEQ ID NO: 813494 - RNA, 21 nt, Human
uuccaggguguuggggugggg

SEQ ID NO: 813495 - RNA, 23 nt, Human
uucccgagggaggggaagggcaa

SEQ ID NO: 813496 - RNA, 24 nt, Human
uuccugaguguucugggagcuucu

SEQ ID NO: 813497 - RNA, 21 nt, Human
uuccuggggagaggcacagag

SEQ ID NO: 813498 - RNA, 19 nt, Human
uucuuccucccagcuccaa

SEQ ID NO: 813499 - RNA, 19 nt, Human
aaaagaaacauaaaaaaaa

SEQ ID NO: 813500 - RNA, 23 nt, Human
aaaccaauaauucccccaaaaaa

SEQ ID NO: 813501 - RNA, 27 nt, Human
aacaggaaauaaaaaauaagggacccc

SEQ ID NO: 813502 - RNA, 25 nt, Human
aacauaaaaaaaaaaaccaauaauu

SEQ ID NO: 813503 - RNA, 21 nt, Human
aaccacuugacgcggaccacc

SEQ ID NO: 813504 - RNA, 22 nt, Human
aagaaacauaaaaaaaaaaacc

SEQ ID NO: 813505 - RNA, 21 nt, Human
aagcgccccuccccaccgaau

SEQ ID NO: 813506 - RNA, 20 nt, Human
aagggugcuugggaagccca

SEQ ID NO: 813507 - RNA, 23 nt, Human
accaggcacuugugcgacaccgu

SEQ ID NO: 813508 - RNA, 20 nt, Human
accgaauccccagucugcau

SEQ ID NO: 813509 - RNA, 25 nt, Human
accuggugccuuugacagacacucc

SEQ ID NO: 813510 - RNA, 24 nt, Human
acucacccgggcauccacgugcac

SEQ ID NO: 813511 - RNA, 22 nt, Human
agcagcagccuggagggccggc

SEQ ID NO: 813512 - RNA, 23 nt, Human
agcggcucugugaucuuggaggg

SEQ ID NO: 813513 - RNA, 24 nt, Human
agguuggggcggccggcagagagg

SEQ ID NO: 813514 - RNA, 27 nt, Human
augcgugcacacacgugcaugcacaca

SEQ ID NO: 813515 - RNA, 20 nt, Human
caaaagaaacauaaaaaaaa

SEQ ID NO: 813516 - RNA, 18 nt, Human
caacaaacaaaauuccaa

SEQ ID NO: 813517 - RNA, 18 nt, Human
caagcagggacccugggc

SEQ ID NO: 813518 - RNA, 26 nt, Human
cacacacgugcaugcacacacacuca

SEQ ID NO: 813519 - RNA, 21 nt, Human
cacagaauuugccaacaaaca

SEQ ID NO: 813520 - RNA, 22 nt, Human
cacagaauuugccaacaaacaa

SEQ ID NO: 813521 - RNA, 21 nt, Human
caccaggcacuugugcgacac

SEQ ID NO: 813522 - RNA, 23 nt, Human
cacccgggcccccacgcagcagc

SEQ ID NO: 813523 - RNA, 25 nt, Human
cacccgggcccccacgcagcagcag

SEQ ID NO: 813524 - RNA, 28 nt, Human
cacgugcacaccuggccccaugcacacg

SEQ ID NO: 813525 - RNA, 22 nt, Human
cacuucucuauccuggggggug

SEQ ID NO: 813526 - RNA, 24 nt, Human
cagcagccuggagggccggccugg

SEQ ID NO: 813527 - RNA, 18 nt, Human
cagcaucugcucauacug

SEQ ID NO: 813528 - RNA, 25 nt, Human
cagcgguucuuccuccgggcccucc

SEQ ID NO: 813529 - RNA, 19 nt, Human
cagggacccugggcuuggg

SEQ ID NO: 813530 - RNA, 19 nt, Human
cagguggcccgcagggccc

SEQ ID NO: 813531 - RNA, 25 nt, Human
caucuccuugccgcgcacgauggcc

SEQ ID NO: 813532 - RNA, 21 nt, Human
caugcacacaacgcacguggu

SEQ ID NO: 813533 - RNA, 22 nt, Human
caugcacacgccugcaggagcg

SEQ ID NO: 813534 - RNA, 22 nt, Human
cauuuucguccacaugcgagga

SEQ ID NO: 813535 - RNA, 18 nt, Human
ccaaaaaacaaacccaaa

SEQ ID NO: 813536 - RNA, 18 nt, Human
ccaggcccaccaccaggc

SEQ ID NO: 813537 - RNA, 21 nt, Human
ccauccugagagggugggggc

SEQ ID NO: 813538 - RNA, 20 nt, Human
cccaccaccaggcacuugug

SEQ ID NO: 813539 - RNA, 20 nt, Human
cccacccggcucuguucccc

SEQ ID NO: 813540 - RNA, 18 nt, Human
cccaugcacacgccugca

SEQ ID NO: 813541 - RNA, 20 nt, Human
ccccacccggcucuguuccc

SEQ ID NO: 813542 - RNA, 19 nt, Human
ccccacgcagcagcagccu

SEQ ID NO: 813543 - RNA, 21 nt, Human
cccccaaaaaacaaacccaaa

SEQ ID NO: 813544 - RNA, 25 nt, Human
cccccaaaaaacaaacccaaagucu

SEQ ID NO: 813545 - RNA, 22 nt, Human
ccccgauacggaucaucuccuu

SEQ ID NO: 813546 - RNA, 21 nt, Human
ccccuccccaccgaaucccca

SEQ ID NO: 813547 - RNA, 25 nt, Human
cccucccgcagcggcucugugaucu

SEQ ID NO: 813548 - RNA, 18 nt, Human
cccucggggcacaggugg

SEQ ID NO: 813549 - RNA, 18 nt, Human
ccgcccucggggcacagg

SEQ ID NO: 813550 - RNA, 19 nt, Human
ccgccgggaggcugcggcu

SEQ ID NO: 813551 - RNA, 20 nt, Human
ccgcucagccagcgguucuu

SEQ ID NO: 813552 - RNA, 18 nt, Human
ccucuccaccuggugccu

SEQ ID NO: 813553 - RNA, 19 nt, Human
ccucucccucuucucuccc

SEQ ID NO: 813554 - RNA, 23 nt, Human
ccucucccucuucucucccuaac

SEQ ID NO: 813555 - RNA, 24 nt, Human
ccucuggcuggagacccgcagggc

SEQ ID NO: 813556 - RNA, 20 nt, Human
ccuggccaagugcuugcaac

SEQ ID NO: 813557 - RNA, 20 nt, Human
ccuggccccaugcacacgcc

SEQ ID NO: 813558 - RNA, 21 nt, Human
ccuucaccucccgcucagcca

SEQ ID NO: 813559 - RNA, 19 nt, Human
ccuuugacagacacuccgg

SEQ ID NO: 813560 - RNA, 21 nt, Human
cgcaugcacacaacgcacgug

SEQ ID NO: 813561 - RNA, 26 nt, Human
cgcaugcacacaacgcacguggucuc

SEQ ID NO: 813562 - RNA, 21 nt, Human
cgcgcgcuccaugaaguccuu

SEQ ID NO: 813563 - RNA, 21 nt, Human
cgcucgcaugcacacaacgca

SEQ ID NO: 813564 - RNA, 18 nt, Human
cggcagagaggaacacgg

SEQ ID NO: 813565 - RNA, 26 nt, Human
cguggccgggcgacaguuucagcacc

SEQ ID NO: 813566 - RNA, 20 nt, Human
cguggugggcucguaggugc

SEQ ID NO: 813567 - RNA, 18 nt, Human
cucauacugcuccaggcc

SEQ ID NO: 813568 - RNA, 22 nt, Human
cuccaggcccaccaccaggcac

SEQ ID NO: 813569 - RNA, 24 nt, Human
cuccaugaaguccuuccucuggcu

SEQ ID NO: 813570 - RNA, 25 nt, Human
cucccuccuggguggggaggggcca

SEQ ID NO: 813571 - RNA, 18 nt, Human
cuccuggguggggagggg

SEQ ID NO: 813572 - RNA, 18 nt, Human
cuggccccaugcacacgc

SEQ ID NO: 813573 - RNA, 21 nt, Human
cuggguggggaggggccaggc

SEQ ID NO: 813574 - RNA, 23 nt, Human
cuuuuuuuuuaugaaaaaagauc

SEQ ID NO: 813575 - RNA, 18 nt, Human
gaacacggcacagucccc

SEQ ID NO: 813576 - RNA, 18 nt, Human
gaggaacacggcacaguc

SEQ ID NO: 813577 - RNA, 22 nt, Human
gaggcugcggcuggacuucugg

SEQ ID NO: 813578 - RNA, 22 nt, Human
gaucacacagaauuugccaaca

SEQ ID NO: 813579 - RNA, 19 nt, Human
gcacgggcacgccguccgu

SEQ ID NO: 813580 - RNA, 20 nt, Human
gcaugcacacaacgcacgug

SEQ ID NO: 813581 - RNA, 31 nt, Human
gcaugugcacaugcgugcacacacgugcaug

SEQ ID NO: 813582 - RNA, 19 nt, Human
gccaacaaacaaaauucca

SEQ ID NO: 813583 - RNA, 19 nt, Human
gccgcccucggggcacagg

SEQ ID NO: 813584 - RNA, 22 nt, Human
gccggcuccugccucucccucu

SEQ ID NO: 813585 - RNA, 20 nt, Human
gccugugccgggcccucucc

SEQ ID NO: 813586 - RNA, 21 nt, Human
gcucagccagcgguucuuccu

SEQ ID NO: 813587 - RNA, 18 nt, Human
ggacccugggcuugggcc

SEQ ID NO: 813588 - RNA, 20 nt, Human
ggcacugagggguuggaagg

SEQ ID NO: 813589 - RNA, 24 nt, Human
ggcaugugcacaugcgugcacaca

SEQ ID NO: 813590 - RNA, 21 nt, Human
ggccgggcgacaguuucagca

SEQ ID NO: 813591 - RNA, 19 nt, Human
gggcagggccccuggcaca

SEQ ID NO: 813592 - RNA, 20 nt, Human
ggggggugugcuggggacug

SEQ ID NO: 813593 - RNA, 27 nt, Human
ggggugugcuggggacugaccacuggg

SEQ ID NO: 813594 - RNA, 19 nt, Human
gggugggccugugccgggc

SEQ ID NO: 813595 - RNA, 20 nt, Human
ggucuccucggggugguaga

SEQ ID NO: 813596 - RNA, 18 nt, Human
ggugcuugggaagcccag

SEQ ID NO: 813597 - RNA, 18 nt, Human
gguggggaggggccaggc

SEQ ID NO: 813598 - RNA, 19 nt, Human
guacaguacacuugguggg

SEQ ID NO: 813599 - RNA, 22 nt, Human
guacuucuuggucuucagcauc

SEQ ID NO: 813600 - RNA, 24 nt, Human
gugcccgcgagguaguacaggccc

SEQ ID NO: 813601 - RNA, 25 nt, Human
gugccgggcccucuccaccuggucg

SEQ ID NO: 813602 - RNA, 25 nt, Human
guggccgggcgacaguuucagcacc

SEQ ID NO: 813603 - RNA, 18 nt, Human
guugccccacgacuccca

SEQ ID NO: 813604 - RNA, 18 nt, Human
uaggugcccgcgagguag

SEQ ID NO: 813605 - RNA, 27 nt, Human
uccaaaagaaacauaaaaaaaaaaacc

SEQ ID NO: 813606 - RNA, 20 nt, Human
uccacgugcacaccuggccc

SEQ ID NO: 813607 - RNA, 23 nt, Human
uccacgugcacaccuggccccau

SEQ ID NO: 813608 - RNA, 18 nt, Human
uccccaccgaauccccag

SEQ ID NO: 813609 - RNA, 19 nt, Human
ucccccaaaaaacaaaccc

SEQ ID NO: 813610 - RNA, 22 nt, Human
ucccccaaaaaacaaacccaaa

SEQ ID NO: 813611 - RNA, 23 nt, Human
uccgcgccauggcagugauggag

SEQ ID NO: 813612 - RNA, 27 nt, Human
uccguggagaagaucaugcccguggug

SEQ ID NO: 813613 - RNA, 24 nt, Human
ucucccucuucucucccuaacaaa

SEQ ID NO: 813614 - RNA, 20 nt, Human
ucugccuucaccucccgcuc

SEQ ID NO: 813615 - RNA, 23 nt, Human
ugagggguuggaagguggggcug

SEQ ID NO: 813616 - RNA, 24 nt, Human
ugccaacaaacaaaauuccaaaag

SEQ ID NO: 813617 - RNA, 19 nt, Human
ugcuugcccgggcuggucu

SEQ ID NO: 813618 - RNA, 19 nt, Human
uggcagugauggagauggg

SEQ ID NO: 813619 - RNA, 21 nt, Human
uggcagugauggagauggguc

SEQ ID NO: 813620 - RNA, 20 nt, Human
uggcccgcagggcccggcgg

SEQ ID NO: 813621 - RNA, 20 nt, Human
uggcuggagacccgcagggc

SEQ ID NO: 813622 - RNA, 19 nt, Human
ugggaagcccagagugagc

SEQ ID NO: 813623 - RNA, 20 nt, Human
uggggacugggaggccggug

SEQ ID NO: 813624 - RNA, 21 nt, Human
uggggcccaagcagggacccu

SEQ ID NO: 813625 - RNA, 18 nt, Human
uggggcggccggcagaga

SEQ ID NO: 813626 - RNA, 19 nt, Human
ugguggggugggcgggggg

SEQ ID NO: 813627 - RNA, 20 nt, Human
ugguggggugggcggggggu

SEQ ID NO: 813628 - RNA, 19 nt, Human
ugugcgacaccgucugcac

SEQ ID NO: 813629 - RNA, 19 nt, Human
uucccuugaaggcuugggg

SEQ ID NO: 813630 - RNA, 24 nt, Human
uuccucuggcuggagacccgcagg

SEQ ID NO: 813631 - RNA, 23 nt, Human
uugguggggugggcggggggugu

SEQ ID NO: 813632 - RNA, 20 nt, Human
uugguuucccuugaaggcuu

SEQ ID NO: 813633 - RNA, 21 nt, Human
uuucccuugaaggcuuggggc

SEQ ID NO: 813634 - RNA, 25 nt, Human
uuucuggggcccaagcagggacccu

SEQ ID NO: 813635 - RNA, 24 nt, Human
uuuggaccagggugggccugugcc

SEQ ID NO: 813636 - RNA, 26 nt, Human
aaaaagagagagagagaaagacaaaa

SEQ ID NO: 813637 - RNA, 18 nt, Human
aaaaggaacugggcggcg

SEQ ID NO: 813638 - RNA, 19 nt, Human
aaacaggaccaagucagcg

SEQ ID NO: 813639 - RNA, 23 nt, Human
aaagacaaaaaaggaacugggcg

SEQ ID NO: 813640 - RNA, 20 nt, Human
aaagagagagagagaaagac

SEQ ID NO: 813641 - RNA, 25 nt, Human
aauacaaaagaaaaacgaaaccaaa

SEQ ID NO: 813642 - RNA, 21 nt, Human
acaaaaaaggaacugggcggc

SEQ ID NO: 813643 - RNA, 18 nt, Human
accagugcucccgccccg

SEQ ID NO: 813644 - RNA, 26 nt, Human
accccuuccuucucuccuccuccccc

SEQ ID NO: 813645 - RNA, 27 nt, Human
accccuuccuucucuccuccuccccca

SEQ ID NO: 813646 - RNA, 22 nt, Human
acuggaauuguaggcaacugga

SEQ ID NO: 813647 - RNA, 24 nt, Human
agaaaaacgaaaccaaaucgcagg

SEQ ID NO: 813648 - RNA, 22 nt, Human
agaaagacaaaaaaggaacugg

SEQ ID NO: 813649 - RNA, 18 nt, Human
agacaaaaaaggaacugg

SEQ ID NO: 813650 - RNA, 20 nt, Human
agagaaagacaaaaaaggaa

SEQ ID NO: 813651 - RNA, 22 nt, Human
agcaccugggagcaccucgggc

SEQ ID NO: 813652 - RNA, 20 nt, Human
agcgacggggucaggcggga

SEQ ID NO: 813653 - RNA, 21 nt, Human
agcgcgggccgggcggggggc

SEQ ID NO: 813654 - RNA, 21 nt, Human
aggccuggggucugguggguu

SEQ ID NO: 813655 - RNA, 22 nt, Human
caccgggccuccggugaggccu

SEQ ID NO: 813656 - RNA, 23 nt, Human
caccgggccuccggugaggccug

SEQ ID NO: 813657 - RNA, 22 nt, Human
cagaaaaaaaaaaaaaaaagag

SEQ ID NO: 813658 - RNA, 24 nt, Human
caggaccaagucagcgacuggaau

SEQ ID NO: 813659 - RNA, 20 nt, Human
ccaccccuuccuucucuccu

SEQ ID NO: 813660 - RNA, 23 nt, Human
ccagugcucccgccccguccccc

SEQ ID NO: 813661 - RNA, 18 nt, Human
ccccccaccccuuccuuc

SEQ ID NO: 813662 - RNA, 21 nt, Human
ccccgggacccccggccuccg

SEQ ID NO: 813663 - RNA, 19 nt, Human
ccccgggaccccgggaccc

SEQ ID NO: 813664 - RNA, 22 nt, Human
ccccgggaccccgggacccccg

SEQ ID NO: 813665 - RNA, 18 nt, Human
ccccugcugcggggggag

SEQ ID NO: 813666 - RNA, 19 nt, Human
ccccuuccuucucuccucc

SEQ ID NO: 813667 - RNA, 20 nt, Human
cccggccucggacgccggcc

SEQ ID NO: 813668 - RNA, 28 nt, Human
cccgggacccccggccuccgggugcggg

SEQ ID NO: 813669 - RNA, 20 nt, Human
cccgucccccuugcagggga

SEQ ID NO: 813670 - RNA, 25 nt, Human
cccuuccuucucuccuccuccccca

SEQ ID NO: 813671 - RNA, 18 nt, Human
ccgugagccuggcacagg

SEQ ID NO: 813672 - RNA, 21 nt, Human
ccuuccuucucuccuccuccc

SEQ ID NO: 813673 - RNA, 18 nt, Human
ccuucucuccuccucccc

SEQ ID NO: 813674 - RNA, 20 nt, Human
cgccagaaaaaaaaaaaaaa

SEQ ID NO: 813675 - RNA, 23 nt, Human
cgccccgucccccuugcagggga

SEQ ID NO: 813676 - RNA, 18 nt, Human
cgggaccccgggaccccc

SEQ ID NO: 813677 - RNA, 21 nt, Human
cggggaccggagucccaaggc

SEQ ID NO: 813678 - RNA, 21 nt, Human
cggggucaggcgggacucgcg

SEQ ID NO: 813679 - RNA, 21 nt, Human
cgggguccgccgccgcccgug

SEQ ID NO: 813680 - RNA, 20 nt, Human
cggugaggccuggggucugg

SEQ ID NO: 813681 - RNA, 24 nt, Human
cucaccgccagaaaaaaaaaaaaa

SEQ ID NO: 813682 - RNA, 18 nt, Human
cucuccuccucccccaga

SEQ ID NO: 813683 - RNA, 22 nt, Human
gaaguuuccaggccccccaccc

SEQ ID NO: 813684 - RNA, 23 nt, Human
gacuggaauuguaggcaacugga

SEQ ID NO: 813685 - RNA, 19 nt, Human
gagaaagacaaaaaaggaa

SEQ ID NO: 813686 - RNA, 20 nt, Human
gagggcagugcgggcgggag

SEQ ID NO: 813687 - RNA, 20 nt, Human
gcaacuggaggucggggucc

SEQ ID NO: 813688 - RNA, 21 nt, Human
gccagaaaaaaaaaaaaaaaa

SEQ ID NO: 813689 - RNA, 19 nt, Human
gccggccccgccccgggac

SEQ ID NO: 813690 - RNA, 25 nt, Human
gggcagugcgggcgggagcgcgggc

SEQ ID NO: 813691 - RNA, 22 nt, Human
ggggagggcagugcgggcggga

SEQ ID NO: 813692 - RNA, 19 nt, Human
ggguccgccgccgcccgug

SEQ ID NO: 813693 - RNA, 20 nt, Human
ggguugcaggaaaaauaaag

SEQ ID NO: 813694 - RNA, 22 nt, Human
guuccguggucaccgggccucc

SEQ ID NO: 813695 - RNA, 24 nt, Human
uacaaacaaaaauaguucucuaca

SEQ ID NO: 813696 - RNA, 19 nt, Human
uagcaccugggagcaccuc

SEQ ID NO: 813697 - RNA, 24 nt, Human
ucaccgccagaaaaaaaaaaaaaa

SEQ ID NO: 813698 - RNA, 26 nt, Human
ucaccgccagaaaaaaaaaaaaaaaa

SEQ ID NO: 813699 - RNA, 22 nt, Human
ucccgccccgucccccuugcag

SEQ ID NO: 813700 - RNA, 21 nt, Human
uccguggucaccgggccuccg

SEQ ID NO: 813701 - RNA, 23 nt, Human
ugcggggggagggcagugcgggc

SEQ ID NO: 813702 - RNA, 19 nt, Human
ugcugcggggggagggcag

SEQ ID NO: 813703 - RNA, 21 nt, Human
uggggcgagcagcguuucucc

SEQ ID NO: 813704 - RNA, 19 nt, Human
uuccaggccccccaccccu

SEQ ID NO: 813705 - RNA, 22 nt, Human
uucucuccuccucccccagacg

SEQ ID NO: 813706 - RNA, 18 nt, Human
uuuuuuuuuuuuuuuuug

SEQ ID NO: 813707 - RNA, 21 nt, Human
uuuuuuuuuuuuuuuuugcag

SEQ ID NO: 813708 - RNA, 21 nt, Human
aaaacuaaacaauagagcaaa

SEQ ID NO: 813709 - RNA, 22 nt, Human
aaacaauagagcaaaacaaacc

SEQ ID NO: 813710 - RNA, 21 nt, Human
aacacaaaaauagcaccagaa

SEQ ID NO: 813711 - RNA, 18 nt, Human
aagcccucucacccuuug

SEQ ID NO: 813712 - RNA, 20 nt, Human
aauggccuacaacaccuucc

SEQ ID NO: 813713 - RNA, 20 nt, Human
acagaguggaccaucucagg

SEQ ID NO: 813714 - RNA, 23 nt, Human
acccaaguaaaaacuaaacaaua

SEQ ID NO: 813715 - RNA, 23 nt, Human
accucagcucugacaucaaggcc

SEQ ID NO: 813716 - RNA, 19 nt, Human
agagcaaaacaaaccaugg

SEQ ID NO: 813717 - RNA, 21 nt, Human
agcaaaacaaaccauggaucu

SEQ ID NO: 813718 - RNA, 26 nt, Human
agcaacagcagcaagacuaagaggga

SEQ ID NO: 813719 - RNA, 22 nt, Human
agcaagacuaagagggaaccua

SEQ ID NO: 813720 - RNA, 21 nt, Human
agcacagaccucaggcuugca

SEQ ID NO: 813721 - RNA, 18 nt, Human
agccgcgcccaucugaaa

SEQ ID NO: 813722 - RNA, 20 nt, Human
agcuggccaaggaggcaggc

SEQ ID NO: 813723 - RNA, 23 nt, Human
agcuguguggucucaaaagggcu

SEQ ID NO: 813724 - RNA, 19 nt, Human
aggcggagcccagagcucc

SEQ ID NO: 813725 - RNA, 22 nt, Human
aggcggucugggccugauuugg

SEQ ID NO: 813726 - RNA, 20 nt, Human
aggcucuagagggcggccau

SEQ ID NO: 813727 - RNA, 20 nt, Human
agggagagcgccgccaugca

SEQ ID NO: 813728 - RNA, 18 nt, Human
agggaggaggcaugaccc

SEQ ID NO: 813729 - RNA, 21 nt, Human
aguuccauacgggaacccggu

SEQ ID NO: 813730 - RNA, 19 nt, Human
aucacaucagcagagacug

SEQ ID NO: 813731 - RNA, 23 nt, Human
caaagcaucaccaccucagcucu

SEQ ID NO: 813732 - RNA, 24 nt, Human
caagaaaacagcuguguggucuca

SEQ ID NO: 813733 - RNA, 20 nt, Human
caaggaagccuguauucaca

SEQ ID NO: 813734 - RNA, 22 nt, Human
caauagagcaaaacaaaccaug

SEQ ID NO: 813735 - RNA, 21 nt, Human
cacaaaaauagcaccagaaac

SEQ ID NO: 813736 - RNA, 24 nt, Human
cacaagaagucaaguggccacaga

SEQ ID NO: 813737 - RNA, 21 nt, Human
caccagaaacuucagaguaac

SEQ ID NO: 813738 - RNA, 18 nt, Human
cacccaauacccccauua

SEQ ID NO: 813739 - RNA, 18 nt, Human
caccucagcucugacauc

SEQ ID NO: 813740 - RNA, 25 nt, Human
caccucagcucugacaucaaggccu

SEQ ID NO: 813741 - RNA, 21 nt, Human
cacgugcgucccaggccuggg

SEQ ID NO: 813742 - RNA, 20 nt, Human
cacuugguuugcgacacucc

SEQ ID NO: 813743 - RNA, 20 nt, Human
cacuuuggaauuccagcaac

SEQ ID NO: 813744 - RNA, 24 nt, Human
cagaccucaggcuugcagcccggc

SEQ ID NO: 813745 - RNA, 23 nt, Human
cagcaagaaagggaaugcugccc

SEQ ID NO: 813746 - RNA, 18 nt, Human
cagcagcaagacuaagag

SEQ ID NO: 813747 - RNA, 20 nt, Human
cagcccggcaggggaggcag

SEQ ID NO: 813748 - RNA, 18 nt, Human
caugacccuguggucaga

SEQ ID NO: 813749 - RNA, 18 nt, Human
caugacccuguggucaga

SEQ ID NO: 813750 - RNA, 22 nt, Human
ccaaggaggcaggccgagacag

SEQ ID NO: 813751 - RNA, 25 nt, Human
ccagcaacagcagcaagacuaagag

SEQ ID NO: 813752 - RNA, 21 nt, Human
ccgcgcccaucugaaaucaca

SEQ ID NO: 813753 - RNA, 19 nt, Human
ccgcgggagcuggcacagg

SEQ ID NO: 813754 - RNA, 19 nt, Human
ccucagggccccuccgcac

SEQ ID NO: 813755 - RNA, 25 nt, Human
ccucucacccuuugacccaccuuca

SEQ ID NO: 813756 - RNA, 22 nt, Human
ccuguggucagagggaggaggc

SEQ ID NO: 813757 - RNA, 22 nt, Human
ccuguggucagagggaggaggc

SEQ ID NO: 813758 - RNA, 20 nt, Human
cgacaagccaugguggggcc

SEQ ID NO: 813759 - RNA, 23 nt, Human
cgcaggggugugggcugagggga

SEQ ID NO: 813760 - RNA, 19 nt, Human
cggcucagaagcaacccuu

SEQ ID NO: 813761 - RNA, 21 nt, Human
cggucccaggcucuugcuccu

SEQ ID NO: 813762 - RNA, 22 nt, Human
cucaaaagggcugcaguggccc

SEQ ID NO: 813763 - RNA, 18 nt, Human
cugaccccgucuguccca

SEQ ID NO: 813764 - RNA, 21 nt, Human
cugcagccccagcccugagca

SEQ ID NO: 813765 - RNA, 23 nt, Human
cuucaagauacuuauggagagaa

SEQ ID NO: 813766 - RNA, 20 nt, Human
cuugcagcccggcaggggag

SEQ ID NO: 813767 - RNA, 27 nt, Human
gaagcccucucacccuuugacccaccu

SEQ ID NO: 813768 - RNA, 21 nt, Human
gaccccgucugucccacccaa

SEQ ID NO: 813769 - RNA, 21 nt, Human
gaccccgucugucccacccaa

SEQ ID NO: 813770 - RNA, 19 nt, Human
gagaaggaagcccucucac

SEQ ID NO: 813771 - RNA, 23 nt, Human
gagcccagagcuccguacagcag

SEQ ID NO: 813772 - RNA, 19 nt, Human
gagccggagcuggccaagg

SEQ ID NO: 813773 - RNA, 21 nt, Human
gagggaggaggccuguugugc

SEQ ID NO: 813774 - RNA, 22 nt, Human
gccauggaggcugggagggaac

SEQ ID NO: 813775 - RNA, 21 nt, Human
gcuccggucccaggcucuugc

SEQ ID NO: 813776 - RNA, 23 nt, Human
gcucuugggggaccaggcggcuc

SEQ ID NO: 813777 - RNA, 21 nt, Human
ggagagaagggugagaaggaa

SEQ ID NO: 813778 - RNA, 25 nt, Human
ggcagcacagaccucaggcuugcag

SEQ ID NO: 813779 - RNA, 24 nt, Human
ggccagggcagcggcucugcagcc

SEQ ID NO: 813780 - RNA, 21 nt, Human
ggccauggaggcugggaggga

SEQ ID NO: 813781 - RNA, 18 nt, Human
ggcugcaguggccccguc

SEQ ID NO: 813782 - RNA, 21 nt, Human
gggccucccugaccccgucug

SEQ ID NO: 813783 - RNA, 21 nt, Human
ggggaacgggagguugugcaa

SEQ ID NO: 813784 - RNA, 19 nt, Human
ggggugugggcugagggga

SEQ ID NO: 813785 - RNA, 21 nt, Human
ggucucaaaagggcugcagug

SEQ ID NO: 813786 - RNA, 22 nt, Human
gugugggcugaggggaugggcu

SEQ ID NO: 813787 - RNA, 21 nt, Human
uacacauugcacccaaguaaa

SEQ ID NO: 813788 - RNA, 26 nt, Human
uaccaagaaaacagcuguguggucuc

SEQ ID NO: 813789 - RNA, 21 nt, Human
uaccaccaucccacggcugcc

SEQ ID NO: 813790 - RNA, 21 nt, Human
uacuugguaccaagaaaacag

SEQ ID NO: 813791 - RNA, 25 nt, Human
uagagcaaaacaaaccauggaucuu

SEQ ID NO: 813792 - RNA, 23 nt, Human
ucccacggcugccucaacuuacu

SEQ ID NO: 813793 - RNA, 24 nt, Human
uccguacagcagggaggcucuaga

SEQ ID NO: 813794 - RNA, 24 nt, Human
ucggugcaugagggugcccuggcc

SEQ ID NO: 813795 - RNA, 19 nt, Human
ucggugcccacagggcgca

SEQ ID NO: 813796 - RNA, 25 nt, Human
ucucagggagccggagcuggcccca

SEQ ID NO: 813797 - RNA, 20 nt, Human
ucuccaaacauuggcuucug

SEQ ID NO: 813798 - RNA, 23 nt, Human
ucucccgcagagcaaauggaggc

SEQ ID NO: 813799 - RNA, 18 nt, Human
ucuucaaguacuugguac

SEQ ID NO: 813800 - RNA, 23 nt, Human
ucuuucacccccagccuuccagc

SEQ ID NO: 813801 - RNA, 23 nt, Human
ugaaaagacaagucacuaugaug

SEQ ID NO: 813802 - RNA, 21 nt, Human
ugaauggccuacaacaccuuc

SEQ ID NO: 813803 - RNA, 18 nt, Human
ugcccacagggcgcaggg

SEQ ID NO: 813804 - RNA, 19 nt, Human
ugggggaccaggcggcuca

SEQ ID NO: 813805 - RNA, 26 nt, Human
ugguggggccucccugaccccgucug

SEQ ID NO: 813806 - RNA, 19 nt, Human
uuggaauuccagcaacagc

SEQ ID NO: 813807 - RNA, 25 nt, Human
uugguaccaagaaaacagcugugug

SEQ ID NO: 813808 - RNA, 23 nt, Human
uuggucucuuucaaauaucaaaa

SEQ ID NO: 813809 - RNA, 18 nt, Human
aacucccucugccccucc

SEQ ID NO: 813810 - RNA, 21 nt, Human
aagagcccagcccuucaaggc

SEQ ID NO: 813811 - RNA, 22 nt, Human
aagcaacauuugauugaaucug

SEQ ID NO: 813812 - RNA, 19 nt, Human
acaggagagggaagcaaca

SEQ ID NO: 813813 - RNA, 19 nt, Human
acaguaagggagauggcgu

SEQ ID NO: 813814 - RNA, 23 nt, Human
accagggcugccgccacugcugc

SEQ ID NO: 813815 - RNA, 18 nt, Human
acuccaggaaggcaagag

SEQ ID NO: 813816 - RNA, 18 nt, Human
agaacucccucugccccu

SEQ ID NO: 813817 - RNA, 21 nt, Human
agaacucccucugccccuccu

SEQ ID NO: 813818 - RNA, 20 nt, Human
agagggaagcaacauuugau

SEQ ID NO: 813819 - RNA, 19 nt, Human
agagggccagaggcugagg

SEQ ID NO: 813820 - RNA, 19 nt, Human
agaguccuugcaggucacc

SEQ ID NO: 813821 - RNA, 18 nt, Human
agcaaacagcaccugggg

SEQ ID NO: 813822 - RNA, 22 nt, Human
agccggggcuggggcuggggcu

SEQ ID NO: 813823 - RNA, 23 nt, Human
agcuggguguagaggacagcagc

SEQ ID NO: 813824 - RNA, 19 nt, Human
aggaagcuuggcccauugg

SEQ ID NO: 813825 - RNA, 21 nt, Human
aggccuccaggcgcacacucc

SEQ ID NO: 813826 - RNA, 18 nt, Human
aggcgaagcgcaagggcc

SEQ ID NO: 813827 - RNA, 19 nt, Human
aguggcauggcggcugcag

SEQ ID NO: 813828 - RNA, 24 nt, Human
cacccaccuacaagcuugggcggc

SEQ ID NO: 813829 - RNA, 21 nt, Human
caccccacaguucuuccugga

SEQ ID NO: 813830 - RNA, 18 nt, Human
cacccccacagcagccuc

SEQ ID NO: 813831 - RNA, 22 nt, Human
cacguggccuaugcacaccacc

SEQ ID NO: 813832 - RNA, 19 nt, Human
cagcaacaguaagggagau

SEQ ID NO: 813833 - RNA, 18 nt, Human
cagcaccgaggcugugca

SEQ ID NO: 813834 - RNA, 18 nt, Human
cagcagcugcugggaaga

SEQ ID NO: 813835 - RNA, 19 nt, Human
cagggaggaggcuggcaac

SEQ ID NO: 813836 - RNA, 18 nt, Human
cagggccaugagcccagc

SEQ ID NO: 813837 - RNA, 21 nt, Human
cagggguaaggcagcaggcac

SEQ ID NO: 813838 - RNA, 19 nt, Human
caucaaugcgccccccauc

SEQ ID NO: 813839 - RNA, 20 nt, Human
ccacgcaggcgaagcgcaag

SEQ ID NO: 813840 - RNA, 18 nt, Human
ccacugcacccucggcaa

SEQ ID NO: 813841 - RNA, 20 nt, Human
ccagcccuucaaggcuccug

SEQ ID NO: 813842 - RNA, 20 nt, Human
ccaggacauggggacagagg

SEQ ID NO: 813843 - RNA, 19 nt, Human
ccagggccaugagcccagc

SEQ ID NO: 813844 - RNA, 23 nt, Human
ccagggccuugggggcgccuccc

SEQ ID NO: 813845 - RNA, 23 nt, Human
cccagggccuugggggcgccucc

SEQ ID NO: 813846 - RNA, 22 nt, Human
ccccaccccacaguucuuccug

SEQ ID NO: 813847 - RNA, 18 nt, Human
cccugcagcucucucccu

SEQ ID NO: 813848 - RNA, 21 nt, Human
ccuaugcacaccacccaccua

SEQ ID NO: 813849 - RNA, 22 nt, Human
ccuaugcacaccacccaccuac

SEQ ID NO: 813850 - RNA, 18 nt, Human
ccuccaggagccgccacu

SEQ ID NO: 813851 - RNA, 23 nt, Human
ccucccagcaggcugcucggcuc

SEQ ID NO: 813852 - RNA, 18 nt, Human
ccuccuccaggagccgcc

SEQ ID NO: 813853 - RNA, 23 nt, Human
ccuccugagcaaacagcaccugg

SEQ ID NO: 813854 - RNA, 20 nt, Human
ccucugggagaggguggccu

SEQ ID NO: 813855 - RNA, 20 nt, Human
ccuggccgcucuagcugugu

SEQ ID NO: 813856 - RNA, 23 nt, Human
cgaggagggggugugcaggcggc

SEQ ID NO: 813857 - RNA, 20 nt, Human
cgcagcauggcagcugggug

SEQ ID NO: 813858 - RNA, 24 nt, Human
cgccaccacugcacccucggcaag

SEQ ID NO: 813859 - RNA, 22 nt, Human
cgccacuccuccuccgagaacc

SEQ ID NO: 813860 - RNA, 25 nt, Human
cggcaagaacgagcagauguggaga

SEQ ID NO: 813861 - RNA, 23 nt, Human
cuagcuguguggggcacccccug

SEQ ID NO: 813862 - RNA, 19 nt, Human
cucaaaugaaaucugugcc

SEQ ID NO: 813863 - RNA, 22 nt, Human
cucaugguggccacuuccugag

SEQ ID NO: 813864 - RNA, 24 nt, Human
cuccaggagccgccacuccuccuc

SEQ ID NO: 813865 - RNA, 20 nt, Human
cucccugcagggguaaggca

SEQ ID NO: 813866 - RNA, 25 nt, Human
cuccugcugcaggggcuucccacag

SEQ ID NO: 813867 - RNA, 18 nt, Human
cucgagcuggagccgggg

SEQ ID NO: 813868 - RNA, 19 nt, Human
cucuguucuccuggggucu

SEQ ID NO: 813869 - RNA, 18 nt, Human
cugcaggggcuucccaca

SEQ ID NO: 813870 - RNA, 20 nt, Human
cugccgccacugcugccagc

SEQ ID NO: 813871 - RNA, 20 nt, Human
cuggagccggggcuggggcu

SEQ ID NO: 813872 - RNA, 24 nt, Human
cugucccugcacuugguaacccca

SEQ ID NO: 813873 - RNA, 19 nt, Human
cuuccacgccaccacugca

SEQ ID NO: 813874 - RNA, 19 nt, Human
gaaggcacccccacagcag

SEQ ID NO: 813875 - RNA, 21 nt, Human
gaaggcacccccacagcagcc

SEQ ID NO: 813876 - RNA, 23 nt, Human
gagcugcaguggagcccaggagg

SEQ ID NO: 813877 - RNA, 21 nt, Human
gagcuguaccugcaccgaggc

SEQ ID NO: 813878 - RNA, 19 nt, Human
gcacuaaagggggaagggg

SEQ ID NO: 813879 - RNA, 21 nt, Human
gccccuccuccaggagccgcc

SEQ ID NO: 813880 - RNA, 20 nt, Human
gccucgggucuucuccuuca

SEQ ID NO: 813881 - RNA, 22 nt, Human
gcgcagcuuccggagggggcag

SEQ ID NO: 813882 - RNA, 25 nt, Human
gcgcagcuuccggagggggggaacc

SEQ ID NO: 813883 - RNA, 26 nt, Human
gcgcagcuuccggagggggggaacgc

SEQ ID NO: 813884 - RNA, 24 nt, Human
ggaagagcugcaguggagcccagg

SEQ ID NO: 813885 - RNA, 23 nt, Human
ggaaggcggucccucuccugggg

SEQ ID NO: 813886 - RNA, 22 nt, Human
ggaaugccaucaaugcgccccc

SEQ ID NO: 813887 - RNA, 21 nt, Human
ggacaggaggcuuacagcugg

SEQ ID NO: 813888 - RNA, 19 nt, Human
ggagcccaggagguucugc

SEQ ID NO: 813889 - RNA, 21 nt, Human
ggagccggggcuggggcuggg

SEQ ID NO: 813890 - RNA, 21 nt, Human
ggcagcucaggcgggcccugg

SEQ ID NO: 813891 - RNA, 20 nt, Human
ggcgaagcgcaagggccuua

SEQ ID NO: 813892 - RNA, 23 nt, Human
ggcgcagcuuccggagggggcag

SEQ ID NO: 813893 - RNA, 22 nt, Human
ggcuggggcuggggcuggggcc

SEQ ID NO: 813894 - RNA, 18 nt, Human
ggcuggugguuaggaggc

SEQ ID NO: 813895 - RNA, 21 nt, Human
gggacagagggacaggaggcu

SEQ ID NO: 813896 - RNA, 22 nt, Human
gggcagcucaggcgggcccugg

SEQ ID NO: 813897 - RNA, 22 nt, Human
gggcuggggcuggggcuggggc

SEQ ID NO: 813898 - RNA, 25 nt, Human
gggcuggggcuggggcuggggccuc

SEQ ID NO: 813899 - RNA, 21 nt, Human
gguugguuguuccaucccaga

SEQ ID NO: 813900 - RNA, 26 nt, Human
guaaggcagcaggcacuaaaggggga

SEQ ID NO: 813901 - RNA, 19 nt, Human
gucccaccaggacaugggg

SEQ ID NO: 813902 - RNA, 22 nt, Human
guccucugggagaggguggccu

SEQ ID NO: 813903 - RNA, 23 nt, Human
gugggucccuucugccuccagua

SEQ ID NO: 813904 - RNA, 23 nt, Human
uaaguccagcuuagaccaggggg

SEQ ID NO: 813905 - RNA, 18 nt, Human
uaccugcaccgaggccgc

SEQ ID NO: 813906 - RNA, 20 nt, Human
uagaacucccucugccccuc

SEQ ID NO: 813907 - RNA, 24 nt, Human
uaugcacaccacccaccuacaagc

SEQ ID NO: 813908 - RNA, 20 nt, Human
ucacugggcagcucaggcgg

SEQ ID NO: 813909 - RNA, 21 nt, Human
uccacagagguaaguccagcu

SEQ ID NO: 813910 - RNA, 21 nt, Human
uccacauccaggaagcuuggc

SEQ ID NO: 813911 - RNA, 21 nt, Human
uccacgccaccacugcacccu

SEQ ID NO: 813912 - RNA, 23 nt, Human
uccacgccaccacugcacccucg

SEQ ID NO: 813913 - RNA, 24 nt, Human
uccacgccaccacugcacccucgg

SEQ ID NO: 813914 - RNA, 20 nt, Human
uccccagccgauucaccugg

SEQ ID NO: 813915 - RNA, 22 nt, Human
ucccugugcuccccaccccaca

SEQ ID NO: 813916 - RNA, 23 nt, Human
ucccugugcuccccaccccacag

SEQ ID NO: 813917 - RNA, 18 nt, Human
uccggagggggagacuca

SEQ ID NO: 813918 - RNA, 24 nt, Human
uccggagggggcagcuccggaggg

SEQ ID NO: 813919 - RNA, 19 nt, Human
uccucugggagaggguggc

SEQ ID NO: 813920 - RNA, 21 nt, Human
ucuccuggccgcucuagcugu

SEQ ID NO: 813921 - RNA, 22 nt, Human
ucuccugggggagcggcuucca

SEQ ID NO: 813922 - RNA, 18 nt, Human
ucucgggucccugugcuc

SEQ ID NO: 813923 - RNA, 21 nt, Human
ucugugaccagggccaugagc

SEQ ID NO: 813924 - RNA, 21 nt, Human
ucuuccauguccaagcuccag

SEQ ID NO: 813925 - RNA, 24 nt, Human
ugagccaagagggccagaggcuga

SEQ ID NO: 813926 - RNA, 23 nt, Human
ugagcuguaccugcaccgaggcc

SEQ ID NO: 813927 - RNA, 18 nt, Human
ugcagggaggaggcuggc

SEQ ID NO: 813928 - RNA, 26 nt, Human
ugcagggaggaggcuggcaacacagg

SEQ ID NO: 813929 - RNA, 26 nt, Human
ugcaguggagcccaggagguucugcc

SEQ ID NO: 813930 - RNA, 18 nt, Human
ugcgaggagggggugugc

SEQ ID NO: 813931 - RNA, 21 nt, Human
ugcugggaagagcugcagugg

SEQ ID NO: 813932 - RNA, 21 nt, Human
uggagcccaggagguucugcc

SEQ ID NO: 813933 - RNA, 23 nt, Human
uggcagcuggguguagaggacag

SEQ ID NO: 813934 - RNA, 22 nt, Human
uggccacuuccugagccaggcc

SEQ ID NO: 813935 - RNA, 19 nt, Human
uggcccagggccuuggggg

SEQ ID NO: 813936 - RNA, 22 nt, Human
uggcggcugcagggaggaggcu

SEQ ID NO: 813937 - RNA, 19 nt, Human
ugggagaggguggccuggg

SEQ ID NO: 813938 - RNA, 19 nt, Human
ugggggagcggcuuccaga

SEQ ID NO: 813939 - RNA, 18 nt, Human
uguagaggacagcagcug

SEQ ID NO: 813940 - RNA, 20 nt, Human
ugugaccagggccaugagcc

SEQ ID NO: 813941 - RNA, 27 nt, Human
uuccuggagggcccucugcacuccucc

SEQ ID NO: 813942 - RNA, 21 nt, Human
uucuccuucagagccgcuggu

SEQ ID NO: 813943 - RNA, 18 nt, Human
uuggcccagggccuuggg

SEQ ID NO: 813944 - RNA, 21 nt, Human
cccucacagaggaggugggga

SEQ ID NO: 813945 - RNA, 21 nt, Human
cucagcuccuucacagcacug

SEQ ID NO: 813946 - RNA, 21 nt, Human
gcucucgggggugcucucagc

SEQ ID NO: 813947 - RNA, 23 nt, Human
uggccagcucaucuggauucugc

SEQ ID NO: 813948 - RNA, 18 nt, Human
aaaaaaaaguagagaagc

SEQ ID NO: 813949 - RNA, 23 nt, Human
aaaaacagaaagcauguagcauu

SEQ ID NO: 813950 - RNA, 19 nt, Human
aaacaaaaaaaaguagaga

SEQ ID NO: 813951 - RNA, 24 nt, Human
aaacaaaaaaaaguagagaagcaa

SEQ ID NO: 813952 - RNA, 20 nt, Human
aaagggaccugaagcuuaaa

SEQ ID NO: 813953 - RNA, 22 nt, Human
aacucccacgaacuuucgauac

SEQ ID NO: 813954 - RNA, 21 nt, Human
aagaacaacucccacgaacuu

SEQ ID NO: 813955 - RNA, 22 nt, Human
aagaacagcgugcauaugcuau

SEQ ID NO: 813956 - RNA, 22 nt, Human
aagcaagaacagcgugcauaug

SEQ ID NO: 813957 - RNA, 18 nt, Human
aaguaaccugugaccaca

SEQ ID NO: 813958 - RNA, 22 nt, Human
aagucuggaaaucacacugaau

SEQ ID NO: 813959 - RNA, 22 nt, Human
aauuacaaagaacaacucccac

SEQ ID NO: 813960 - RNA, 21 nt, Human
acaaacaaaaaaaaguagaga

SEQ ID NO: 813961 - RNA, 18 nt, Human
acaaagaacaacucccac

SEQ ID NO: 813962 - RNA, 20 nt, Human
accaaguaaccugugaccac

SEQ ID NO: 813963 - RNA, 22 nt, Human
accccacacucguaccagccca

SEQ ID NO: 813964 - RNA, 20 nt, Human
acugugguuguuggacgccu

SEQ ID NO: 813965 - RNA, 22 nt, Human
agaaacacacccccagcucucc

SEQ ID NO: 813966 - RNA, 20 nt, Human
agcggcuuuccuccaagacu

SEQ ID NO: 813967 - RNA, 23 nt, Human
agggauggagaccccacacucgu

SEQ ID NO: 813968 - RNA, 19 nt, Human
aggggguuccgaagccgau

SEQ ID NO: 813969 - RNA, 21 nt, Human
aguuaacagcaaaacugaauc

SEQ ID NO: 813970 - RNA, 22 nt, Human
aguugguggggcugggcagggc

SEQ ID NO: 813971 - RNA, 21 nt, Human
auauguauaugcauauauaca

SEQ ID NO: 813972 - RNA, 23 nt, Human
auuggggaugauuucauccaggc

SEQ ID NO: 813973 - RNA, 19 nt, Human
auuuucuuuggugguguuu

SEQ ID NO: 813974 - RNA, 20 nt, Human
caaaaaaaaguagagaagca

SEQ ID NO: 813975 - RNA, 19 nt, Human
caaguaaccugugaccaca

SEQ ID NO: 813976 - RNA, 21 nt, Human
caagugaguuacugaugaagc

SEQ ID NO: 813977 - RNA, 18 nt, Human
caccuagggcagcggggc

SEQ ID NO: 813978 - RNA, 20 nt, Human
caccuagggcagcggggcug

SEQ ID NO: 813979 - RNA, 19 nt, Human
cagcggggcugagcacgcu

SEQ ID NO: 813980 - RNA, 24 nt, Human
caguguccaucuaugaccuuccug

SEQ ID NO: 813981 - RNA, 20 nt, Human
cauuguccaggccaagaagu

SEQ ID NO: 813982 - RNA, 19 nt, Human
ccaucagccuugaugccaa

SEQ ID NO: 813983 - RNA, 22 nt, Human
ccaucuccuccuaguuuaaucc

SEQ ID NO: 813984 - RNA, 20 nt, Human
cccacauaguaguagggggu

SEQ ID NO: 813985 - RNA, 26 nt, Human
cccacgaucaagguccacaacccacu

SEQ ID NO: 813986 - RNA, 18 nt, Human
ccuagggcagcggggcug

SEQ ID NO: 813987 - RNA, 22 nt, Human
cgggugguggcaguggugggcc

SEQ ID NO: 813988 - RNA, 24 nt, Human
cucaccacgggggucccuuccaga

SEQ ID NO: 813989 - RNA, 19 nt, Human
cucauuaucagguugccau

SEQ ID NO: 813990 - RNA, 24 nt, Human
cuuaaauucaguuaguuuuggaga

SEQ ID NO: 813991 - RNA, 22 nt, Human
cuuccugcuggacggaggcucc

SEQ ID NO: 813992 - RNA, 18 nt, Human
gacagguggggaugggag

SEQ ID NO: 813993 - RNA, 20 nt, Human
gacagguggggaugggagug

SEQ ID NO: 813994 - RNA, 19 nt, Human
gagcaugcuggggaggcag

SEQ ID NO: 813995 - RNA, 20 nt, Human
gagcauucggucucuuccug

SEQ ID NO: 813996 - RNA, 21 nt, Human
gcaauggucuucaccucuucc

SEQ ID NO: 813997 - RNA, 19 nt, Human
ggagugguggguguggggg

SEQ ID NO: 813998 - RNA, 20 nt, Human
ggcgggugguggcaguggug

SEQ ID NO: 813999 - RNA, 21 nt, Human
gggugguggcaguggugggcc

SEQ ID NO: 814000 - RNA, 23 nt, Human
ggguguggggguggugguggugg

SEQ ID NO: 814001 - RNA, 25 nt, Human
guauaugcauauauacauauauaua

SEQ ID NO: 814002 - RNA, 27 nt, Human
guccacaaugacaaaugaguggcaacc

SEQ ID NO: 814003 - RNA, 22 nt, Human
guggcaguggugggccucgggg

SEQ ID NO: 814004 - RNA, 23 nt, Human
guggugggugugggggugguggu

SEQ ID NO: 814005 - RNA, 23 nt, Human
guguggauauguauaugcauaua

SEQ ID NO: 814006 - RNA, 24 nt, Human
gugugguagcaguggucgaaggcu

SEQ ID NO: 814007 - RNA, 23 nt, Human
guuugugucuuucaaucaacaaa

SEQ ID NO: 814008 - RNA, 20 nt, Human
uaaauuucaaguaggauaua

SEQ ID NO: 814009 - RNA, 19 nt, Human
uacauaggacugaggcccu

SEQ ID NO: 814010 - RNA, 19 nt, Human
uaccaggaaggacuuuccc

SEQ ID NO: 814011 - RNA, 22 nt, Human
uaggccucuuccguagguacug

SEQ ID NO: 814012 - RNA, 24 nt, Human
uauaugcauauauacauauauaua

SEQ ID NO: 814013 - RNA, 22 nt, Human
uauguauaugcauauauacaua

SEQ ID NO: 814014 - RNA, 27 nt, Human
uauguauaugcauauauacauauauau

SEQ ID NO: 814015 - RNA, 21 nt, Human
ucaacaaaucguuuccuucca

SEQ ID NO: 814016 - RNA, 20 nt, Human
ucagucuccaagccugagaa

SEQ ID NO: 814017 - RNA, 22 nt, Human
uccguguagcugggaucauguu

SEQ ID NO: 814018 - RNA, 22 nt, Human
uccugggguggcuuugucccag

SEQ ID NO: 814019 - RNA, 24 nt, Human
ucgauaccacgugcgcuucacaua

SEQ ID NO: 814020 - RNA, 19 nt, Human
ucgccccugcccaaagagu

SEQ ID NO: 814021 - RNA, 21 nt, Human
ucggugacaaaugagaccgaa

SEQ ID NO: 814022 - RNA, 19 nt, Human
ucuacaaugguucgaccau

SEQ ID NO: 814023 - RNA, 19 nt, Human
ucuccaagccugagaacuc

SEQ ID NO: 814024 - RNA, 24 nt, Human
ucugauucggugacaaaugagacc

SEQ ID NO: 814025 - RNA, 21 nt, Human
ucugggaucccauuggagcuc

SEQ ID NO: 814026 - RNA, 24 nt, Human
ucuucaucauauauaacguaggcc

SEQ ID NO: 814027 - RNA, 20 nt, Human
ucuucuucaggaaaggaacu

SEQ ID NO: 814028 - RNA, 18 nt, Human
ugaagcaagaacagcgug

SEQ ID NO: 814029 - RNA, 21 nt, Human
ugacaaaugaguggcaaccuu

SEQ ID NO: 814030 - RNA, 21 nt, Human
ugaccuccaagcccaccagcg

SEQ ID NO: 814031 - RNA, 18 nt, Human
ugagaaaaacagaaagca

SEQ ID NO: 814032 - RNA, 18 nt, Human
ugagaaaaacagaaagca

SEQ ID NO: 814033 - RNA, 22 nt, Human
ugagaaaaacagaaagcaugua

SEQ ID NO: 814034 - RNA, 23 nt, Human
ugagaaaaacagaaagcauguag

SEQ ID NO: 814035 - RNA, 19 nt, Human
ugagaugaccagaauggcc

SEQ ID NO: 814036 - RNA, 20 nt, Human
ugagaugaccagaauggcca

SEQ ID NO: 814037 - RNA, 22 nt, Human
ugagggccauugauaauucucu

SEQ ID NO: 814038 - RNA, 24 nt, Human
ugauagguccguagccaugaggau

SEQ ID NO: 814039 - RNA, 22 nt, Human
ugauguugcggggagcaugcug

SEQ ID NO: 814040 - RNA, 25 nt, Human
ugcacuguaaaccaaguaaccugug

SEQ ID NO: 814041 - RNA, 24 nt, Human
ugcagugucagucuccaagccuga

SEQ ID NO: 814042 - RNA, 22 nt, Human
ugccaucaucgucgugccguuc

SEQ ID NO: 814043 - RNA, 21 nt, Human
ugccuaaaaagucuggaaauc

SEQ ID NO: 814044 - RNA, 22 nt, Human
ugcuauuccuggaaauacugaa

SEQ ID NO: 814045 - RNA, 22 nt, Human
uggaagugauccagugcaucag

SEQ ID NO: 814046 - RNA, 18 nt, Human
uggagaaauccaaaauga

SEQ ID NO: 814047 - RNA, 23 nt, Human
uggagaccccacacucguaccag

SEQ ID NO: 814048 - RNA, 21 nt, Human
uggggaggcaggucacucuuc

SEQ ID NO: 814049 - RNA, 23 nt, Human
uggggaugauuucauccaggcug

SEQ ID NO: 814050 - RNA, 18 nt, Human
uggggaugggaguggugg

SEQ ID NO: 814051 - RNA, 18 nt, Human
uggggcugggcagggcaa

SEQ ID NO: 814052 - RNA, 18 nt, Human
ugguagggggaugggugg

SEQ ID NO: 814053 - RNA, 18 nt, Human
uggugggugugggggugg

SEQ ID NO: 814054 - RNA, 26 nt, Human
ugguggguguggggguggugguggug

SEQ ID NO: 814055 - RNA, 19 nt, Human
uggugguggugguuguccg

SEQ ID NO: 814056 - RNA, 19 nt, Human
uguagugguaggcaggggc

SEQ ID NO: 814057 - RNA, 18 nt, Human
uguauaugcauauauaca

SEQ ID NO: 814058 - RNA, 22 nt, Human
uguggauauguauaugcauaua

SEQ ID NO: 814059 - RNA, 23 nt, Human
uuacaaacaaacaaaaaaaagua

SEQ ID NO: 814060 - RNA, 20 nt, Human
uuccaugugaaucuuggagg

SEQ ID NO: 814061 - RNA, 23 nt, Human
uucccaaaccugacaggcuccug

SEQ ID NO: 814062 - RNA, 20 nt, Human
uuccuggcaccuagggcagc

SEQ ID NO: 814063 - RNA, 19 nt, Human
uuuauucuagcagugggua

SEQ ID NO: 814064 - RNA, 22 nt, Human
uuuuuugaugaccuccaagccc

SEQ ID NO: 814065 - RNA, 21 nt, Human
aaccagaacgugcccugaccu

SEQ ID NO: 814066 - RNA, 25 nt, Human
aagcaggaggugggugggggggacc

SEQ ID NO: 814067 - RNA, 26 nt, Human
aagcaggaggugggugggggggaccc

SEQ ID NO: 814068 - RNA, 25 nt, Human
acacagcccaggagggggggaacgc

SEQ ID NO: 814069 - RNA, 24 nt, Human
agcacagcgcacucagccgcagcc

SEQ ID NO: 814070 - RNA, 20 nt, Human
agcacaggcacagggguagg

SEQ ID NO: 814071 - RNA, 21 nt, Human
agcagcaguggggagccgggg

SEQ ID NO: 814072 - RNA, 18 nt, Human
agccgggguuucuggggc

SEQ ID NO: 814073 - RNA, 21 nt, Human
agccgggguuucuggggcagc

SEQ ID NO: 814074 - RNA, 22 nt, Human
aggagguggguggggaggcugg

SEQ ID NO: 814075 - RNA, 21 nt, Human
aggaguacacaaagcaggagg

SEQ ID NO: 814076 - RNA, 19 nt, Human
aggcaguggcagaggcgcu

SEQ ID NO: 814077 - RNA, 25 nt, Human
agggggaggggaggaguacacaaag

SEQ ID NO: 814078 - RNA, 20 nt, Human
agguggguggggaggcuggg

SEQ ID NO: 814079 - RNA, 21 nt, Human
agguggguggggaggcugggg

SEQ ID NO: 814080 - RNA, 23 nt, Human
aguaccccucgucccuggacaac

SEQ ID NO: 814081 - RNA, 21 nt, Human
cacagcaccuggggacccaga

SEQ ID NO: 814082 - RNA, 22 nt, Human
cacuaagcacagcgcacucagc

SEQ ID NO: 814083 - RNA, 21 nt, Human
cacuucuuauaugaacuccga

SEQ ID NO: 814084 - RNA, 23 nt, Human
cagcaguggggagccgggguuuc

SEQ ID NO: 814085 - RNA, 20 nt, Human
cagccagccgacacaaacug

SEQ ID NO: 814086 - RNA, 20 nt, Human
caggaggggcacacccggcg

SEQ ID NO: 814087 - RNA, 18 nt, Human
caggcucccuccucccuc

SEQ ID NO: 814088 - RNA, 20 nt, Human
ccaggaaagggccggggaca

SEQ ID NO: 814089 - RNA, 24 nt, Human
ccaguacaccaggcucugaccgga

SEQ ID NO: 814090 - RNA, 21 nt, Human
ccauaaguguucagagaaccc

SEQ ID NO: 814091 - RNA, 22 nt, Human
ccaucuuaaagaccugcccucc

SEQ ID NO: 814092 - RNA, 22 nt, Human
ccgcagccucugucugucuccc

SEQ ID NO: 814093 - RNA, 20 nt, Human
ccgugggucccuccgggugg

SEQ ID NO: 814094 - RNA, 19 nt, Human
ccuccggguggcuucgguc

SEQ ID NO: 814095 - RNA, 19 nt, Human
ccuccucccucccuccccc

SEQ ID NO: 814096 - RNA, 20 nt, Human
ccuccucccucccucccccc

SEQ ID NO: 814097 - RNA, 19 nt, Human
ccucugcaaaguaccccuc

SEQ ID NO: 814098 - RNA, 18 nt, Human
ccuggcccguccccaccc

SEQ ID NO: 814099 - RNA, 22 nt, Human
ccuuuauugucuaggaagauug

SEQ ID NO: 814100 - RNA, 24 nt, Human
cgccacacuucccaggaagcacuc

SEQ ID NO: 814101 - RNA, 22 nt, Human
cgucccuggacaaccagaacgu

SEQ ID NO: 814102 - RNA, 21 nt, Human
cuccccccaguacaccaggcu

SEQ ID NO: 814103 - RNA, 25 nt, Human
cucccuccucccucccuccccccag

SEQ ID NO: 814104 - RNA, 19 nt, Human
cucucuucucguggagccu

SEQ ID NO: 814105 - RNA, 18 nt, Human
cucugaccggaccggucc

SEQ ID NO: 814106 - RNA, 18 nt, Human
cucugucugucuccccac

SEQ ID NO: 814107 - RNA, 23 nt, Human
cuuaaagaccugcccuccagccc

SEQ ID NO: 814108 - RNA, 21 nt, Human
cuucaaacgccacacuuccca

SEQ ID NO: 814109 - RNA, 21 nt, Human
gaagacgucauccccuucucc

SEQ ID NO: 814110 - RNA, 22 nt, Human
gagcagcaguggggagccgggg

SEQ ID NO: 814111 - RNA, 22 nt, Human
gagcagcaguggggagccgggg

SEQ ID NO: 814112 - RNA, 24 nt, Human
gagcagcaguggggagccgggguu

SEQ ID NO: 814113 - RNA, 18 nt, Human
gaggcuguccuggaagug

SEQ ID NO: 814114 - RNA, 23 nt, Human
gagguggguggggaggcuggggu

SEQ ID NO: 814115 - RNA, 22 nt, Human
gcugccacuugugccugugggc

SEQ ID NO: 814116 - RNA, 24 nt, Human
ggagggcagagaaccuuggguucc

SEQ ID NO: 814117 - RNA, 23 nt, Human
ggugggcucccggccagccuggu

SEQ ID NO: 814118 - RNA, 19 nt, Human
gguuaguuucucuuccuug

SEQ ID NO: 814119 - RNA, 18 nt, Human
uaacuuggcugugguuag

SEQ ID NO: 814120 - RNA, 22 nt, Human
uacaccaggcucugaccggacc

SEQ ID NO: 814121 - RNA, 21 nt, Human
uaggaacaaaagaacagaaca

SEQ ID NO: 814122 - RNA, 22 nt, Human
ucacacagcccaggaggggcac

SEQ ID NO: 814123 - RNA, 19 nt, Human
uccaggguaugggcuauga

SEQ ID NO: 814124 - RNA, 20 nt, Human
uccccccaguacaccaggcu

SEQ ID NO: 814125 - RNA, 26 nt, Human
ucccuccggguggcuucggucucuuu

SEQ ID NO: 814126 - RNA, 31 nt, Human
ucccuggacaaccagaacgugcccugaccuu

SEQ ID NO: 814127 - RNA, 20 nt, Human
uccuggaaguggccaauucu

SEQ ID NO: 814128 - RNA, 24 nt, Human
uccuuuagccaaggccauuucugg

SEQ ID NO: 814129 - RNA, 23 nt, Human
ucuccccagggcuguaugggagc

SEQ ID NO: 814130 - RNA, 22 nt, Human
ucucguggagccuuacugaaga

SEQ ID NO: 814131 - RNA, 22 nt, Human
ucugcaaaguaccccucguccc

SEQ ID NO: 814132 - RNA, 22 nt, Human
ucugcagccagccgacacaaac

SEQ ID NO: 814133 - RNA, 24 nt, Human
ucugucugucuccccacccgccca

SEQ ID NO: 814134 - RNA, 23 nt, Human
ucuuccuguggcuuuguaggaac

SEQ ID NO: 814135 - RNA, 19 nt, Human
ucuuggguucuuccugugg

SEQ ID NO: 814136 - RNA, 21 nt, Human
ugaaagcagaguuauagcugc

SEQ ID NO: 814137 - RNA, 19 nt, Human
ugaccagagaagcucccgc

SEQ ID NO: 814138 - RNA, 20 nt, Human
ugaccggaccggucccaccg

SEQ ID NO: 814139 - RNA, 23 nt, Human
ugaccucuucccuggcccguccc

SEQ ID NO: 814140 - RNA, 19 nt, Human
ugcaaaguaccccucgucc

SEQ ID NO: 814141 - RNA, 23 nt, Human
ugcccugaccucuucccuggccc

SEQ ID NO: 814142 - RNA, 21 nt, Human
uggacacaaaacaccaaacaa

SEQ ID NO: 814143 - RNA, 20 nt, Human
uggcagaggcgcugggaggc

SEQ ID NO: 814144 - RNA, 20 nt, Human
uggggaggcuggggucacac

SEQ ID NO: 814145 - RNA, 28 nt, Human
uggguucccaacgcauucuaugagcucu

SEQ ID NO: 814146 - RNA, 23 nt, Human
uguaugggagcacaggcacaggg

SEQ ID NO: 814147 - RNA, 22 nt, Human
uuggcugugguuaguuucucuu

SEQ ID NO: 814148 - RNA, 19 nt, Human
uugugcugagggggagggg

SEQ ID NO: 814149 - RNA, 21 nt, Human
uugugcugagggggaggggag

SEQ ID NO: 814150 - RNA, 27 nt, Human
aaaagggauuccuccaaccgagaugga

SEQ ID NO: 814151 - RNA, 18 nt, Human
aaaauuccccaaacuuug

SEQ ID NO: 814152 - RNA, 18 nt, Human
aaagcaagcagagcccag

SEQ ID NO: 814153 - RNA, 23 nt, Human
aaagcaagcagagcccaggucca

SEQ ID NO: 814154 - RNA, 21 nt, Human
aagaugggguuucuccauguu

SEQ ID NO: 814155 - RNA, 23 nt, Human
aagaugggguuucuccauguugc

SEQ ID NO: 814156 - RNA, 22 nt, Human
aagcaagcagagcccaggucca

SEQ ID NO: 814157 - RNA, 23 nt, Human
aagcaagcagagcccagguccac

SEQ ID NO: 814158 - RNA, 23 nt, Human
aagcccgacuggaaaggaaugac

SEQ ID NO: 814159 - RNA, 24 nt, Human
aagcgaucugccugccuuggccuc

SEQ ID NO: 814160 - RNA, 18 nt, Human
aaggacccuugggcaggg

SEQ ID NO: 814161 - RNA, 19 nt, Human
aaguagcugggauuacaga

SEQ ID NO: 814162 - RNA, 26 nt, Human
aaguagcugggauuacagaugcacac

SEQ ID NO: 814163 - RNA, 24 nt, Human
acagucccccuggguccccugccu

SEQ ID NO: 814164 - RNA, 22 nt, Human
acccuauccccuccuaccccca

SEQ ID NO: 814165 - RNA, 20 nt, Human
acuccugguagaaccaggag

SEQ ID NO: 814166 - RNA, 25 nt, Human
acucugucauccaggcugaagugca

SEQ ID NO: 814167 - RNA, 20 nt, Human
agacgcccccuucccucaag

SEQ ID NO: 814168 - RNA, 20 nt, Human
agagaaagaugcggaugaug

SEQ ID NO: 814169 - RNA, 22 nt, Human
agaggaguguggcaggggaggg

SEQ ID NO: 814170 - RNA, 23 nt, Human
agaggccacggggcucaggcagg

SEQ ID NO: 814171 - RNA, 22 nt, Human
agcagaaaagggauuccuccaa

SEQ ID NO: 814172 - RNA, 19 nt, Human
agcagauuaccugaugagc

SEQ ID NO: 814173 - RNA, 23 nt, Human
agccuggagccgggcccgcugcg

SEQ ID NO: 814174 - RNA, 20 nt, Human
agccugguauguagaagcug

SEQ ID NO: 814175 - RNA, 24 nt, Human
agcuggucucgaacuccugggcuc

SEQ ID NO: 814176 - RNA, 21 nt, Human
aggaaugacucccgggggugc

SEQ ID NO: 814177 - RNA, 18 nt, Human
aggagcuggugguaggag

SEQ ID NO: 814178 - RNA, 18 nt, Human
aggagcuggugguaggag

SEQ ID NO: 814179 - RNA, 20 nt, Human
aggcagucaccagagugacu

SEQ ID NO: 814180 - RNA, 23 nt, Human
agggauuuuuuuuuuuccuuaaa

SEQ ID NO: 814181 - RNA, 26 nt, Human
aggguggcagaggaguguggcagggg

SEQ ID NO: 814182 - RNA, 32 nt, Human
aggguggcagaggaguguggcaggggaggggg

SEQ ID NO: 814183 - RNA, 23 nt, Human
agucccccuggguccccugccug

SEQ ID NO: 814184 - RNA, 20 nt, Human
agugcaguggugugauaacu

SEQ ID NO: 814185 - RNA, 21 nt, Human
agugcaguggugugauaacug

SEQ ID NO: 814186 - RNA, 24 nt, Human
agugcaguggugugauaacugcuc

SEQ ID NO: 814187 - RNA, 24 nt, Human
auaaagcaagcagagcccaggucc

SEQ ID NO: 814188 - RNA, 24 nt, Human
auacacuucugucuuuccuuuucu

SEQ ID NO: 814189 - RNA, 21 nt, Human
auccaaaaguuucuucaaagu

SEQ ID NO: 814190 - RNA, 24 nt, Human
auccaggcugaagugcaguggugu

SEQ ID NO: 814191 - RNA, 18 nt, Human
augagcuaugcacgggca

SEQ ID NO: 814192 - RNA, 18 nt, Human
augcggaugaugccccac

SEQ ID NO: 814193 - RNA, 19 nt, Human
auggagcuguuuucugggu

SEQ ID NO: 814194 - RNA, 19 nt, Human
auggccaaggucauaaagc

SEQ ID NO: 814195 - RNA, 18 nt, Human
augggguuucuccauguu

SEQ ID NO: 814196 - RNA, 19 nt, Human
augggguuucuccauguug

SEQ ID NO: 814197 - RNA, 22 nt, Human
caaacuggacugcaugcggguu

SEQ ID NO: 814198 - RNA, 23 nt, Human
caacaucacauggccaaggucau

SEQ ID NO: 814199 - RNA, 21 nt, Human
caagcagagcccagguccacc

SEQ ID NO: 814200 - RNA, 20 nt, Human
caagcuuccucccccacauc

SEQ ID NO: 814201 - RNA, 21 nt, Human
cacaauugaaguagaaggggc

SEQ ID NO: 814202 - RNA, 20 nt, Human
cacagucccccugggucccc

SEQ ID NO: 814203 - RNA, 22 nt, Human
cacauggccaaggucauaaagc

SEQ ID NO: 814204 - RNA, 21 nt, Human
cacccuauccccuccuacccc

SEQ ID NO: 814205 - RNA, 23 nt, Human
cacccuauccccuccuaccccca

SEQ ID NO: 814206 - RNA, 23 nt, Human
cacucugucauccaggcugaagu

SEQ ID NO: 814207 - RNA, 24 nt, Human
cacucugucauccaggcugaagug

SEQ ID NO: 814208 - RNA, 18 nt, Human
cacugcaaccucugccuc

SEQ ID NO: 814209 - RNA, 21 nt, Human
cacugcaaccucugccuccua

SEQ ID NO: 814210 - RNA, 20 nt, Human
cacuuugcaugcaagacuuc

SEQ ID NO: 814211 - RNA, 26 nt, Human
cagagcccagguccaccucuggaguu

SEQ ID NO: 814212 - RNA, 21 nt, Human
cagaugcacaccacuacaccu

SEQ ID NO: 814213 - RNA, 23 nt, Human
caggacaggcacccggcgcugcc

SEQ ID NO: 814214 - RNA, 18 nt, Human
caggcacccggcgcugcc

SEQ ID NO: 814215 - RNA, 18 nt, Human
caggggagcugccucucc

SEQ ID NO: 814216 - RNA, 23 nt, Human
caguacccuccccuugccucuuc

SEQ ID NO: 814217 - RNA, 23 nt, Human
cagucccauuucacagaugggaa

SEQ ID NO: 814218 - RNA, 18 nt, Human
cauggcuaaguacuugcc

SEQ ID NO: 814219 - RNA, 24 nt, Human
cauguugcccaagcuggucucgaa

SEQ ID NO: 814220 - RNA, 19 nt, Human
ccauaugcuggugaggguu

SEQ ID NO: 814221 - RNA, 23 nt, Human
ccauguugcccaagcuggucucg

SEQ ID NO: 814222 - RNA, 19 nt, Human
cccaaacuuugucauuugg

SEQ ID NO: 814223 - RNA, 18 nt, Human
cccaagcuuccuccccca

SEQ ID NO: 814224 - RNA, 21 nt, Human
cccaaggacacccuauccccu

SEQ ID NO: 814225 - RNA, 23 nt, Human
cccaaguagcugggauuacagau

SEQ ID NO: 814226 - RNA, 21 nt, Human
cccacccacuucuacugggca

SEQ ID NO: 814227 - RNA, 19 nt, Human
cccacgccuggcugcuccu

SEQ ID NO: 814228 - RNA, 24 nt, Human
cccccagcccgaggaucucgccgc

SEQ ID NO: 814229 - RNA, 18 nt, Human
ccccuugccucuuccucu

SEQ ID NO: 814230 - RNA, 20 nt, Human
cccuccuacccccacccacu

SEQ ID NO: 814231 - RNA, 21 nt, Human
cccuugccucuuccucuuccc

SEQ ID NO: 814232 - RNA, 23 nt, Human
ccgccucagccucccaaguagcu

SEQ ID NO: 814233 - RNA, 26 nt, Human
ccucaaguuggcuagaauguggggcu

SEQ ID NO: 814234 - RNA, 22 nt, Human
ccuccuagugauccugccgccu

SEQ ID NO: 814235 - RNA, 26 nt, Human
ccuccugggacaagaaucagccaggu

SEQ ID NO: 814236 - RNA, 19 nt, Human
ccuccugggacaagaauug

SEQ ID NO: 814237 - RNA, 23 nt, Human
ccucucaccucuuucccggguga

SEQ ID NO: 814238 - RNA, 18 nt, Human
ccucuuccucuucccucc

SEQ ID NO: 814239 - RNA, 26 nt, Human
ccugccgccucagccucccaaguagc

SEQ ID NO: 814240 - RNA, 22 nt, Human
ccugccuuggccucccaaagug

SEQ ID NO: 814241 - RNA, 21 nt, Human
ccugggcucaagcgaucugcc

SEQ ID NO: 814242 - RNA, 22 nt, Human
ccugggcucaagcgaucugccu

SEQ ID NO: 814243 - RNA, 23 nt, Human
ccuuacccaagcuuccuccccca

SEQ ID NO: 814244 - RNA, 23 nt, Human
ccuucagaaucuuaaauaggaaa

SEQ ID NO: 814245 - RNA, 22 nt, Human
cgaugcuaggaaaauucaaaaa

SEQ ID NO: 814246 - RNA, 22 nt, Human
cggcugcggacagcgaagagga

SEQ ID NO: 814247 - RNA, 23 nt, Human
cgggugccacagucccccugggu

SEQ ID NO: 814248 - RNA, 21 nt, Human
cguaaagaugaagcccgacug

SEQ ID NO: 814249 - RNA, 23 nt, Human
cgugggcacccccagcccgagga

SEQ ID NO: 814250 - RNA, 22 nt, Human
cuaaguacuugccuauguugcu

SEQ ID NO: 814251 - RNA, 27 nt, Human
cuagugauccugccgccucagccuccc

SEQ ID NO: 814252 - RNA, 24 nt, Human
cuauccccuccuacccccacccac

SEQ ID NO: 814253 - RNA, 23 nt, Human
cucaaggggacaucccuggcugc

SEQ ID NO: 814254 - RNA, 24 nt, Human
cucacugcaaccucugccuccuag

SEQ ID NO: 814255 - RNA, 24 nt, Human
cucagccucccaaguagcugggau

SEQ ID NO: 814256 - RNA, 18 nt, Human
cuccaaccgagauggaag

SEQ ID NO: 814257 - RNA, 27 nt, Human
cuccauguugcccaagcuggucucgaa

SEQ ID NO: 814258 - RNA, 23 nt, Human
cucgugggccgggggcuggagga

SEQ ID NO: 814259 - RNA, 23 nt, Human
cucucaccucuuucccgggugaa

SEQ ID NO: 814260 - RNA, 19 nt, Human
cucugugcccaaggcggca

SEQ ID NO: 814261 - RNA, 19 nt, Human
cugcaaccucugccuccua

SEQ ID NO: 814262 - RNA, 22 nt, Human
cugcaugcggguucaucuuccc

SEQ ID NO: 814263 - RNA, 18 nt, Human
cugccuuggccucccaaa

SEQ ID NO: 814264 - RNA, 19 nt, Human
cugggagcaugggaucaag

SEQ ID NO: 814265 - RNA, 21 nt, Human
cuugccggggaggaacugcag

SEQ ID NO: 814266 - RNA, 19 nt, Human
cuuuccuuuucuccuuuuu

SEQ ID NO: 814267 - RNA, 20 nt, Human
cuuugugggggcauaucuga

SEQ ID NO: 814268 - RNA, 21 nt, Human
gaagguaaaaggucugccaga

SEQ ID NO: 814269 - RNA, 19 nt, Human
gaagucagggugggugagc

SEQ ID NO: 814270 - RNA, 24 nt, Human
gacugggcuggggcugucuggggc

SEQ ID NO: 814271 - RNA, 21 nt, Human
gagcggccgcagggcgaggcg

SEQ ID NO: 814272 - RNA, 21 nt, Human
gagcggccgcagggcgaggcg

SEQ ID NO: 814273 - RNA, 26 nt, Human
gagcucacaacuggcagagcccccag

SEQ ID NO: 814274 - RNA, 18 nt, Human
gaggagcuggugguagga

SEQ ID NO: 814275 - RNA, 18 nt, Human
gaggcugggagcauggga

SEQ ID NO: 814276 - RNA, 19 nt, Human
gaggcuuuuggggauuuug

SEQ ID NO: 814277 - RNA, 23 nt, Human
gagggggacaggcuuccgggggc

SEQ ID NO: 814278 - RNA, 21 nt, Human
gagugcuggugcccgaaguug

SEQ ID NO: 814279 - RNA, 20 nt, Human
gaucucgccgcuucccacgc

SEQ ID NO: 814280 - RNA, 22 nt, Human
gaugcggaugaugccccacauc

SEQ ID NO: 814281 - RNA, 26 nt, Human
gcagaggaguguggcaggggaggggg

SEQ ID NO: 814282 - RNA, 23 nt, Human
gccucagccucccaaguagcugg

SEQ ID NO: 814283 - RNA, 25 nt, Human
gccugggcauucccggguuccucug

SEQ ID NO: 814284 - RNA, 21 nt, Human
gccuuggccucccaaaguguu

SEQ ID NO: 814285 - RNA, 24 nt, Human
ggaaaccuucugggcagagcucac

SEQ ID NO: 814286 - RNA, 18 nt, Human
ggaaaggcagcaggacag

SEQ ID NO: 814287 - RNA, 20 nt, Human
ggaaggcaugguucacccgg

SEQ ID NO: 814288 - RNA, 23 nt, Human
ggacaggcacccggcgcugcccg

SEQ ID NO: 814289 - RNA, 19 nt, Human
ggagccuggagccgggccc

SEQ ID NO: 814290 - RNA, 20 nt, Human
ggagcugagccaggaguggg

SEQ ID NO: 814291 - RNA, 19 nt, Human
ggaggagagagaaagaugc

SEQ ID NO: 814292 - RNA, 20 nt, Human
ggagguaggggccgggugcu

SEQ ID NO: 814293 - RNA, 21 nt, Human
ggaguggggacggcaggugcu

SEQ ID NO: 814294 - RNA, 22 nt, Human
ggcugaagugcaguggugugau

SEQ ID NO: 814295 - RNA, 24 nt, Human
ggcugucuggggcuaggccugguu

SEQ ID NO: 814296 - RNA, 20 nt, Human
gggagccuggagccgggccc

SEQ ID NO: 814297 - RNA, 21 nt, Human
gggagguagcaaacgugggca

SEQ ID NO: 814298 - RNA, 18 nt, Human
gggagguuugugggugcu

SEQ ID NO: 814299 - RNA, 19 nt, Human
gggcaaagccugguaugua

SEQ ID NO: 814300 - RNA, 18 nt, Human
gggccgggggcuggagga

SEQ ID NO: 814301 - RNA, 18 nt, Human
gggccgggugcugggcgg

SEQ ID NO: 814302 - RNA, 18 nt, Human
gggcggugggggccuggg

SEQ ID NO: 814303 - RNA, 24 nt, Human
gggcucaagcgaucugccugccuu

SEQ ID NO: 814304 - RNA, 22 nt, Human
ggggcugucuggggcuaggccu

SEQ ID NO: 814305 - RNA, 19 nt, Human
ggugcgggcagaggccggc

SEQ ID NO: 814306 - RNA, 21 nt, Human
ggugcuggugcgggcagaggc

SEQ ID NO: 814307 - RNA, 20 nt, Human
guagcugggauuacagaugc

SEQ ID NO: 814308 - RNA, 18 nt, Human
guccgagcuaguguggga

SEQ ID NO: 814309 - RNA, 21 nt, Human
gucuccccugguaaauuccag

SEQ ID NO: 814310 - RNA, 22 nt, Human
gucucgaacuccugggcucaag

SEQ ID NO: 814311 - RNA, 24 nt, Human
gugauccugccgccucagccuccc

SEQ ID NO: 814312 - RNA, 18 nt, Human
gugcagggcucccggccu

SEQ ID NO: 814313 - RNA, 23 nt, Human
uaaagcaagcagagcccaggucc

SEQ ID NO: 814314 - RNA, 19 nt, Human
uaaauaauauauauauaca

SEQ ID NO: 814315 - RNA, 22 nt, Human
uaaaugaagauggagcuguuuu

SEQ ID NO: 814316 - RNA, 24 nt, Human
uaauuuuuguauuuuugguaaaga

SEQ ID NO: 814317 - RNA, 20 nt, Human
uacccaagcuuccuccccca

SEQ ID NO: 814318 - RNA, 24 nt, Human
uacuggcugacagcuuggcaggua

SEQ ID NO: 814319 - RNA, 18 nt, Human
uagaaccaggaguagggg

SEQ ID NO: 814320 - RNA, 20 nt, Human
uagaagcugcucaaacgcgu

SEQ ID NO: 814321 - RNA, 23 nt, Human
uagaaggggccgaaggcuuggua

SEQ ID NO: 814322 - RNA, 22 nt, Human
uagagccgccaacagaggcugg

SEQ ID NO: 814323 - RNA, 22 nt, Human
uagcagcgggguuugggcuggg

SEQ ID NO: 814324 - RNA, 26 nt, Human
uauauauauacacuucugucuuuccu

SEQ ID NO: 814325 - RNA, 20 nt, Human
uauccccuccuacccccacc

SEQ ID NO: 814326 - RNA, 19 nt, Human
uauuuuugguaaagauggg

SEQ ID NO: 814327 - RNA, 21 nt, Human
ucacccggugggagcagaggc

SEQ ID NO: 814328 - RNA, 19 nt, Human
ucacugcaaccucugccuc

SEQ ID NO: 814329 - RNA, 23 nt, Human
ucacugcaaccucugccuccuag

SEQ ID NO: 814330 - RNA, 24 nt, Human
ucacugcaaccucugccuccuagu

SEQ ID NO: 814331 - RNA, 18 nt, Human
ucagccucccaaguagcu

SEQ ID NO: 814332 - RNA, 20 nt, Human
ucagccucccaaguagcugg

SEQ ID NO: 814333 - RNA, 21 nt, Human
ucaggcagguugcagguccag

SEQ ID NO: 814334 - RNA, 23 nt, Human
ucaguacccuccccuugccucuu

SEQ ID NO: 814335 - RNA, 20 nt, Human
uccaggggauccuucuuuuu

SEQ ID NO: 814336 - RNA, 19 nt, Human
uccauguugcccaagcugg

SEQ ID NO: 814337 - RNA, 19 nt, Human
ucccccacaucuuuagggu

SEQ ID NO: 814338 - RNA, 21 nt, Human
ucccccuggguccccugccug

SEQ ID NO: 814339 - RNA, 22 nt, Human
ucccgggggugcagggcucccg

SEQ ID NO: 814340 - RNA, 22 nt, Human
ucccgggugaaaaaaaaauagu

SEQ ID NO: 814341 - RNA, 19 nt, Human
ucccuagcagggaccagcu

SEQ ID NO: 814342 - RNA, 24 nt, Human
uccuacccccacccacuucuacug

SEQ ID NO: 814343 - RNA, 18 nt, Human
uccucucaccucuuuccc

SEQ ID NO: 814344 - RNA, 18 nt, Human
uccugggcucaagcgauc

SEQ ID NO: 814345 - RNA, 18 nt, Human
uccugggcucaagcgauc

SEQ ID NO: 814346 - RNA, 20 nt, Human
uccugggcucaagcgaucug

SEQ ID NO: 814347 - RNA, 19 nt, Human
ucucacucugucauccagg

SEQ ID NO: 814348 - RNA, 24 nt, Human
ucucacucugucauccaggcugaa

SEQ ID NO: 814349 - RNA, 23 nt, Human
ucucgaacuccugggcucaagcg

SEQ ID NO: 814350 - RNA, 18 nt, Human
ucugaccuuacccaagcu

SEQ ID NO: 814351 - RNA, 19 nt, Human
ucugaccuuacccaagcuu

SEQ ID NO: 814352 - RNA, 21 nt, Human
ucuggcuggcucuuugguugg

SEQ ID NO: 814353 - RNA, 24 nt, Human
ucugucauccaggcugaagugcag

SEQ ID NO: 814354 - RNA, 22 nt, Human
ucugugcccaaggcggcaggaa

SEQ ID NO: 814355 - RNA, 20 nt, Human
ucuuugggcaggaagcuggg

SEQ ID NO: 814356 - RNA, 24 nt, Human
ugaagguagaucgucucaccuccu

SEQ ID NO: 814357 - RNA, 19 nt, Human
ugaagugcaguggugugau

SEQ ID NO: 814358 - RNA, 28 nt, Human
ugaagugcaguggugugauggcucuagc

SEQ ID NO: 814359 - RNA, 21 nt, Human
ugagagacaauugugagcacc

SEQ ID NO: 814360 - RNA, 18 nt, Human
ugagcgccgggacccgag

SEQ ID NO: 814361 - RNA, 18 nt, Human
ugagcgccgggacccgag

SEQ ID NO: 814362 - RNA, 24 nt, Human
ugagggaaaaguuaucagucccau

SEQ ID NO: 814363 - RNA, 21 nt, Human
ugagggggacaggcuuccggg

SEQ ID NO: 814364 - RNA, 20 nt, Human
ugaguggguagggcugacuu

SEQ ID NO: 814365 - RNA, 25 nt, Human
ugcaagacuucauuuugcauuugau

SEQ ID NO: 814366 - RNA, 19 nt, Human
ugccacagucccccugggu

SEQ ID NO: 814367 - RNA, 24 nt, Human
ugcccaagcuggucucgaacuccu

SEQ ID NO: 814368 - RNA, 18 nt, Human
ugccugccuuggccuccc

SEQ ID NO: 814369 - RNA, 21 nt, Human
ugcgccggggccaauaccagg

SEQ ID NO: 814370 - RNA, 22 nt, Human
ugcguuacuggcugacagcuug

SEQ ID NO: 814371 - RNA, 19 nt, Human
uggaaaggaaugacucccg

SEQ ID NO: 814372 - RNA, 19 nt, Human
uggaagaacgaauagccac

SEQ ID NO: 814373 - RNA, 21 nt, Human
uggaaggaaaccuucugggca

SEQ ID NO: 814374 - RNA, 23 nt, Human
uggaaggaaaccuucugggcaga

SEQ ID NO: 814375 - RNA, 22 nt, Human
uggaggagagagaaagaugcgg

SEQ ID NO: 814376 - RNA, 21 nt, Human
uggcagagagcaccuucaaac

SEQ ID NO: 814377 - RNA, 27 nt, Human
uggcagagcccccagaggaggggucaa

SEQ ID NO: 814378 - RNA, 23 nt, Human
uggcagaggaguguggcagggga

SEQ ID NO: 814379 - RNA, 22 nt, Human
uggcagugaccccagggcuggu

SEQ ID NO: 814380 - RNA, 24 nt, Human
uggccaaggucauaaagcaagcag

SEQ ID NO: 814381 - RNA, 19 nt, Human
uggcuggcucuuugguugg

SEQ ID NO: 814382 - RNA, 22 nt, Human
ugggagcagaggcucagcacca

SEQ ID NO: 814383 - RNA, 27 nt, Human
ugggagcugagccaggaguggggacgg

SEQ ID NO: 814384 - RNA, 21 nt, Human
ugggauuacagaugcacacca

SEQ ID NO: 814385 - RNA, 22 nt, Human
ugggauuacagaugcacaccac

SEQ ID NO: 814386 - RNA, 24 nt, Human
ugggauuacagaugcacaccacua

SEQ ID NO: 814387 - RNA, 20 nt, Human
ugggcaggaagcuggggagg

SEQ ID NO: 814388 - RNA, 25 nt, Human
ugggcaggggagcugccucuccugg

SEQ ID NO: 814389 - RNA, 20 nt, Human
ugggcucaagcgaucugccu

SEQ ID NO: 814390 - RNA, 27 nt, Human
ugggcuggggcugucuggggcuaggcc

SEQ ID NO: 814391 - RNA, 22 nt, Human
ugggcuucuugcuuccaguggg

SEQ ID NO: 814392 - RNA, 19 nt, Human
uggggagggaacggggugg

SEQ ID NO: 814393 - RNA, 18 nt, Human
uggggauuuugguggcug

SEQ ID NO: 814394 - RNA, 18 nt, Human
ugggguuucuccauguug

SEQ ID NO: 814395 - RNA, 21 nt, Human
uggguccggcuuucuuugagg

SEQ ID NO: 814396 - RNA, 24 nt, Human
ugguaaagaugggguuucuccaug

SEQ ID NO: 814397 - RNA, 21 nt, Human
uggugguaggagguaggggcc

SEQ ID NO: 814398 - RNA, 26 nt, Human
uguccaggggauccuucuuuuuuuuu

SEQ ID NO: 814399 - RNA, 21 nt, Human
ugugauaacugcucacugcaa

SEQ ID NO: 814400 - RNA, 18 nt, Human
uguggcaguggucaaguu

SEQ ID NO: 814401 - RNA, 21 nt, Human
ugugggacgggagacucuggc

SEQ ID NO: 814402 - RNA, 21 nt, Human
uucaaaaauuccccaaacuuu

SEQ ID NO: 814403 - RNA, 22 nt, Human
uucacagaugggaaaauugaga

SEQ ID NO: 814404 - RNA, 26 nt, Human
uucacagugggagguagcaaacgugg

SEQ ID NO: 814405 - RNA, 18 nt, Human
uuccagucucaccuaaac

SEQ ID NO: 814406 - RNA, 22 nt, Human
uucuccaggccuagcagggcga

SEQ ID NO: 814407 - RNA, 24 nt, Human
uugagggaaaaguuaucaguccca

SEQ ID NO: 814408 - RNA, 20 nt, Human
uugcagaggguggcagagga

SEQ ID NO: 814409 - RNA, 25 nt, Human
uugcagguccagcuuacucuggcug

SEQ ID NO: 814410 - RNA, 21 nt, Human
uugccucuuccucuucccucc

SEQ ID NO: 814411 - RNA, 24 nt, Human
uugguaaagaugggguuucuccau

SEQ ID NO: 814412 - RNA, 25 nt, Human
uugguagggaggcuuuuggggauuu

SEQ ID NO: 814413 - RNA, 19 nt, Human
uugguggcugugaucuucu

SEQ ID NO: 814414 - RNA, 21 nt, Human
uugguggcugugaucuucugu

SEQ ID NO: 814415 - RNA, 23 nt, Human
uuuggaggagagagaaagaugcg

SEQ ID NO: 814416 - RNA, 22 nt, Human
uuuucaugauacagggucucac

SEQ ID NO: 814417 - RNA, 23 nt, Human
uuuuggggauuuugguggcugug

SEQ ID NO: 814418 - RNA, 22 nt, Human
uuuuugguaaagaugggguuuc

SEQ ID NO: 814419 - RNA, 20 nt, Human
uuuuuguauuuuugguaaag

SEQ ID NO: 814420 - RNA, 24 nt, Human
uuuuuuuuuuuuucacuuugcaug

SEQ ID NO: 814421 - RNA, 23 nt, Human
uuuuuuuuuuuuuuuuucacuuu

SEQ ID NO: 814422 - RNA, 26 nt, Human
uuuuuuuuuuuuuuuuucacuuugau

SEQ ID NO: 814423 - RNA, 25 nt, Human
aaaaaaaaggugauuauguccaaga

SEQ ID NO: 814424 - RNA, 18 nt, Human
aaagacuaaugaaaaugg

SEQ ID NO: 814425 - RNA, 18 nt, Human
aaagugcuggauuacagg

SEQ ID NO: 814426 - RNA, 20 nt, Human
aacauagugagaccucaucu

SEQ ID NO: 814427 - RNA, 19 nt, Human
aaccacugaauuaaauuac

SEQ ID NO: 814428 - RNA, 21 nt, Human
accacacugauuacaccaaua

SEQ ID NO: 814429 - RNA, 20 nt, Human
acgggguuuuaguauguugg

SEQ ID NO: 814430 - RNA, 21 nt, Human
acgggguuuuaguauguuggc

SEQ ID NO: 814431 - RNA, 22 nt, Human
acgggguuuuaguauguuggcu

SEQ ID NO: 814432 - RNA, 23 nt, Human
acgggguuuuaguauguuggcug

SEQ ID NO: 814433 - RNA, 24 nt, Human
acuuguugcccaggcuggagugca

SEQ ID NO: 814434 - RNA, 23 nt, Human
agacagaaaaaaaaaagggggac

SEQ ID NO: 814435 - RNA, 24 nt, Human
agacagaaaaaaaaaaggugaggu

SEQ ID NO: 814436 - RNA, 22 nt, Human
agaguucaaguccagccugggc

SEQ ID NO: 814437 - RNA, 18 nt, Human
agaguuucccacauuccu

SEQ ID NO: 814438 - RNA, 19 nt, Human
agccaccgcaccuggccua

SEQ ID NO: 814439 - RNA, 23 nt, Human
agccugggcaacauagugagacc

SEQ ID NO: 814440 - RNA, 23 nt, Human
agccugggcaacauagugagacc

SEQ ID NO: 814441 - RNA, 24 nt, Human
agccugggcaacauagugagaccu

SEQ ID NO: 814442 - RNA, 24 nt, Human
aggcugaggagggaggagugcuug

SEQ ID NO: 814443 - RNA, 25 nt, Human
aggcuggagugcaguggcaugaucu

SEQ ID NO: 814444 - RNA, 21 nt, Human
agggaggagugcuugagccca

SEQ ID NO: 814445 - RNA, 18 nt, Human
aggggaguaaaaagaagg

SEQ ID NO: 814446 - RNA, 21 nt, Human
agguucaagugauucuccugc

SEQ ID NO: 814447 - RNA, 22 nt, Human
agguucaagugauucuccugcc

SEQ ID NO: 814448 - RNA, 18 nt, Human
aguagagacgggguuuua

SEQ ID NO: 814449 - RNA, 20 nt, Human
agucaagauugaaauggcuc

SEQ ID NO: 814450 - RNA, 22 nt, Human
agucagaagcaugauuuguguu

SEQ ID NO: 814451 - RNA, 23 nt, Human
agugauucuccugcccuagccuc

SEQ ID NO: 814452 - RNA, 20 nt, Human
agugcaguggcaugaucuug

SEQ ID NO: 814453 - RNA, 23 nt, Human
agugcaguggcaugaucuuggcu

SEQ ID NO: 814454 - RNA, 24 nt, Human
agugcaguggcaugaucuuggcuc

SEQ ID NO: 814455 - RNA, 23 nt, Human
aguggcucaugccgguaauccca

SEQ ID NO: 814456 - RNA, 22 nt, Human
auagacgauauguuugcccaca

SEQ ID NO: 814457 - RNA, 23 nt, Human
aucaucucuucauuauacugggc

SEQ ID NO: 814458 - RNA, 21 nt, Human
auuuucuggugugugacaagg

SEQ ID NO: 814459 - RNA, 23 nt, Human
caaagugcuggauuacagguacg

SEQ ID NO: 814460 - RNA, 24 nt, Human
caacauagugagaccucaucucuu

SEQ ID NO: 814461 - RNA, 23 nt, Human
caaccuccaccucccagguucaa

SEQ ID NO: 814462 - RNA, 18 nt, Human
caagaguucaaguccagc

SEQ ID NO: 814463 - RNA, 18 nt, Human
caaguccagccugggcaa

SEQ ID NO: 814464 - RNA, 21 nt, Human
caccgcaaccuccaccuccca

SEQ ID NO: 814465 - RNA, 21 nt, Human
caccgcaaccuccaccuccca

SEQ ID NO: 814466 - RNA, 18 nt, Human
caccuggccuacacucau

SEQ ID NO: 814467 - RNA, 20 nt, Human
cacucauuacuuucacaggg

SEQ ID NO: 814468 - RNA, 23 nt, Human
cacucauuacuuucacaggguug

SEQ ID NO: 814469 - RNA, 23 nt, Human
cacuguacagcauuguaaagacc

SEQ ID NO: 814470 - RNA, 21 nt, Human
cacuuguugcccaggcuggag

SEQ ID NO: 814471 - RNA, 23 nt, Human
cagcauuguaaagacaagcagaa

SEQ ID NO: 814472 - RNA, 20 nt, Human
cagccugggcaacauaguga

SEQ ID NO: 814473 - RNA, 19 nt, Human
caguaugaacacgauggug

SEQ ID NO: 814474 - RNA, 21 nt, Human
caugccgguaaucccaacccu

SEQ ID NO: 814475 - RNA, 21 nt, Human
cauucacuacauucaugaggu

SEQ ID NO: 814476 - RNA, 19 nt, Human
ccaaagugcuggauuacag

SEQ ID NO: 814477 - RNA, 21 nt, Human
ccaaagugcuggauuacaggu

SEQ ID NO: 814478 - RNA, 24 nt, Human
ccaccucccagguucaagugauuc

SEQ ID NO: 814479 - RNA, 23 nt, Human
cccagguucaagugauucuccuc

SEQ ID NO: 814480 - RNA, 23 nt, Human
cccagguucaagugauucuccug

SEQ ID NO: 814481 - RNA, 22 nt, Human
ccccuggggcuggugcaguggc

SEQ ID NO: 814482 - RNA, 21 nt, Human
cccuaagcuccucauccuugc

SEQ ID NO: 814483 - RNA, 21 nt, Human
cccuaccacacugauuacacc

SEQ ID NO: 814484 - RNA, 19 nt, Human
cccuggggcuggugcagug

SEQ ID NO: 814485 - RNA, 23 nt, Human
ccgcaaccuccaccucccagguu

SEQ ID NO: 814486 - RNA, 24 nt, Human
ccgcaaccuccaccucccagguuc

SEQ ID NO: 814487 - RNA, 20 nt, Human
ccgguaaucccaacccuuug

SEQ ID NO: 814488 - RNA, 24 nt, Human
ccucccagguucaagugauucucc

SEQ ID NO: 814489 - RNA, 24 nt, Human
ccugggcaacauagugagaccuca

SEQ ID NO: 814490 - RNA, 19 nt, Human
ccuugcugaagguuuucuc

SEQ ID NO: 814491 - RNA, 24 nt, Human
cgcacuuguugcccaggcuggagu

SEQ ID NO: 814492 - RNA, 20 nt, Human
cguuugaaaaauccaguagg

SEQ ID NO: 814493 - RNA, 19 nt, Human
cuaagcuccucauccuugc

SEQ ID NO: 814494 - RNA, 24 nt, Human
cucaccgcaaccuccaccucccag

SEQ ID NO: 814495 - RNA, 24 nt, Human
cucaugccgguaaucccaacccuu

SEQ ID NO: 814496 - RNA, 19 nt, Human
cuccaguaugaacacgagg

SEQ ID NO: 814497 - RNA, 19 nt, Human
cuccaguaugaacacgagg

SEQ ID NO: 814498 - RNA, 19 nt, Human
cucccagguucaagugauu

SEQ ID NO: 814499 - RNA, 19 nt, Human
cuccugcccuagccucgca

SEQ ID NO: 814500 - RNA, 20 nt, Human
cucgugaccucgugaucugc

SEQ ID NO: 814501 - RNA, 22 nt, Human
cucuccagcaugcagucucuga

SEQ ID NO: 814502 - RNA, 24 nt, Human
cuggagugcaguggcaugaucuug

SEQ ID NO: 814503 - RNA, 19 nt, Human
cuuacagucuucaaauucc

SEQ ID NO: 814504 - RNA, 22 nt, Human
cuuggugaauuuucugcucucc

SEQ ID NO: 814505 - RNA, 24 nt, Human
cuuguugcccaggcuggagugcag

SEQ ID NO: 814506 - RNA, 30 nt, Human
cuuuacauucauaugguuucucuccuguau

SEQ ID NO: 814507 - RNA, 21 nt, Human
gacauaggggaguaaaaagaa

SEQ ID NO: 814508 - RNA, 21 nt, Human
gaccucgugaucugcccaccu

SEQ ID NO: 814509 - RNA, 22 nt, Human
gacuacaggcgugccccaccau

SEQ ID NO: 814510 - RNA, 24 nt, Human
gagccaccgcaccuggccuacacu

SEQ ID NO: 814511 - RNA, 19 nt, Human
gaguuuacaagucauaguu

SEQ ID NO: 814512 - RNA, 18 nt, Human
gauuacagguacgagcca

SEQ ID NO: 814513 - RNA, 20 nt, Human
gcccaggcuggagugcagug

SEQ ID NO: 814514 - RNA, 24 nt, Human
gcccaggcuggagugcaguggcau

SEQ ID NO: 814515 - RNA, 19 nt, Human
gcuggagugcaguggcaug

SEQ ID NO: 814516 - RNA, 18 nt, Human
gcuggugcaguggcucau

SEQ ID NO: 814517 - RNA, 20 nt, Human
ggaaagcccuaccacacuga

SEQ ID NO: 814518 - RNA, 18 nt, Human
ggaauaaaaagacuaaug

SEQ ID NO: 814519 - RNA, 22 nt, Human
ggacauaggggaguaaaaagaa

SEQ ID NO: 814520 - RNA, 21 nt, Human
ggauuacagguacgagccacc

SEQ ID NO: 814521 - RNA, 22 nt, Human
ggauuacagguacgagccaccg

SEQ ID NO: 814522 - RNA, 23 nt, Human
gggguuuuaguauguuggcuggg

SEQ ID NO: 814523 - RNA, 22 nt, Human
ggguuuuaguauguuggcuggg

SEQ ID NO: 814524 - RNA, 23 nt, Human
guagagacgggguuuuaguaugu

SEQ ID NO: 814525 - RNA, 23 nt, Human
uaaaaagaaggccuuggugauua

SEQ ID NO: 814526 - RNA, 23 nt, Human
uaagaucugagcugccccuaaaa

SEQ ID NO: 814527 - RNA, 25 nt, Human
uaauuuuuguuauuuuuaguagaga

SEQ ID NO: 814528 - RNA, 22 nt, Human
uacagguacgagccaccgcacc

SEQ ID NO: 814529 - RNA, 23 nt, Human
uacaugccuuuauguagcaaaau

SEQ ID NO: 814530 - RNA, 20 nt, Human
uaccacaguugcuacauuca

SEQ ID NO: 814531 - RNA, 18 nt, Human
uacugggcagucuaagag

SEQ ID NO: 814532 - RNA, 19 nt, Human
uagaauagguccuguuugu

SEQ ID NO: 814533 - RNA, 24 nt, Human
uaguagagacgggguuuuaguaug

SEQ ID NO: 814534 - RNA, 21 nt, Human
uaguuugauucaagcuccauc

SEQ ID NO: 814535 - RNA, 24 nt, Human
uauacugggcagucuaagagggag

SEQ ID NO: 814536 - RNA, 21 nt, Human
ucaaguccagccugggcaaca

SEQ ID NO: 814537 - RNA, 24 nt, Human
ucaccgcaaccuccaccucccagg

SEQ ID NO: 814538 - RNA, 27 nt, Human
ucaccgcaaccuccaccucccagguuc

SEQ ID NO: 814539 - RNA, 20 nt, Human
ucaguucugagacagaaaaa

SEQ ID NO: 814540 - RNA, 22 nt, Human
ucaugccgguaaucccaacccu

SEQ ID NO: 814541 - RNA, 30 nt, Human
ucauuacuuucacaggguuuuuucccacag

SEQ ID NO: 814542 - RNA, 24 nt, Human
uccagccugggcaacauagugaga

SEQ ID NO: 814543 - RNA, 22 nt, Human
ucccaaagugcuggauuacagg

SEQ ID NO: 814544 - RNA, 23 nt, Human
ucccacauuuaaacuugucacuc

SEQ ID NO: 814545 - RNA, 21 nt, Human
ucccagguucaagugauucuc

SEQ ID NO: 814546 - RNA, 24 nt, Human
ucccagguucaagugauucuccug

SEQ ID NO: 814547 - RNA, 24 nt, Human
ucgcaaguaccugggacuacaggc

SEQ ID NO: 814548 - RNA, 23 nt, Human
ucgcacuuguugcccaggcugga

SEQ ID NO: 814549 - RNA, 30 nt, Human
ucgugaccucgugaucugcccaccuuggcc

SEQ ID NO: 814550 - RNA, 21 nt, Human
ucuauaauuccuaaaauacaa

SEQ ID NO: 814551 - RNA, 18 nt, Human
ucucaaguaauuagaccc

SEQ ID NO: 814552 - RNA, 24 nt, Human
ucucagaaggucugagcucugauu

SEQ ID NO: 814553 - RNA, 19 nt, Human
ucuccugcccuagccucgc

SEQ ID NO: 814554 - RNA, 23 nt, Human
ucugagcugcccuggaaagcccu

SEQ ID NO: 814555 - RNA, 22 nt, Human
ucugcuuucccaccuucccaug

SEQ ID NO: 814556 - RNA, 24 nt, Human
ucuuuccaugaauaauuuaguuuu

SEQ ID NO: 814557 - RNA, 21 nt, Human
ugaaaaugguaaauuauuugc

SEQ ID NO: 814558 - RNA, 23 nt, Human
ugaaaaugguaaauuauuugcuu

SEQ ID NO: 814559 - RNA, 22 nt, Human
ugaauucuaugaugucucagaa

SEQ ID NO: 814560 - RNA, 21 nt, Human
ugacaaggugggaccucuggc

SEQ ID NO: 814561 - RNA, 18 nt, Human
ugaggagggaggagugcu

SEQ ID NO: 814562 - RNA, 24 nt, Human
ugaggagggaggagugcuugagcc

SEQ ID NO: 814563 - RNA, 23 nt, Human
ugaucugcccaccuuggcuuccc

SEQ ID NO: 814564 - RNA, 24 nt, Human
ugaucugcccaccuuggcuuccca

SEQ ID NO: 814565 - RNA, 21 nt, Human
ugauuauguccaagagcuuuu

SEQ ID NO: 814566 - RNA, 20 nt, Human
ugauucuccugcccuagccu

SEQ ID NO: 814567 - RNA, 22 nt, Human
ugcaguggcaugaucuuggcuc

SEQ ID NO: 814568 - RNA, 23 nt, Human
ugcccacaaaaggaauaaaaaga

SEQ ID NO: 814569 - RNA, 18 nt, Human
ugcccaggcuggagugca

SEQ ID NO: 814570 - RNA, 21 nt, Human
ugcccaggcuggagugcagug

SEQ ID NO: 814571 - RNA, 22 nt, Human
ugcccaggcuggagugcagugg

SEQ ID NO: 814572 - RNA, 24 nt, Human
ugcccaggcuggagugcaguggca

SEQ ID NO: 814573 - RNA, 24 nt, Human
ugccgguaaucccaacccuuuggg

SEQ ID NO: 814574 - RNA, 19 nt, Human
uggagugcaguggcaugau

SEQ ID NO: 814575 - RNA, 24 nt, Human
uggagugcaguggcaugaucuugg

SEQ ID NO: 814576 - RNA, 20 nt, Human
uggauuacagguacgagcca

SEQ ID NO: 814577 - RNA, 21 nt, Human
uggauuacagguacgagccac

SEQ ID NO: 814578 - RNA, 23 nt, Human
uggauuacagguacgagccaccg

SEQ ID NO: 814579 - RNA, 24 nt, Human
uggcuaaagacuuucccacauuca

SEQ ID NO: 814580 - RNA, 21 nt, Human
uggcucaugccgguaauccca

SEQ ID NO: 814581 - RNA, 22 nt, Human
uggcucaugccgguaaucccaa

SEQ ID NO: 814582 - RNA, 24 nt, Human
ugggacuacaggcgugccccacca

SEQ ID NO: 814583 - RNA, 25 nt, Human
ugggacuacaggcgugccccaccau

SEQ ID NO: 814584 - RNA, 18 nt, Human
ugggaggcugaggaggga

SEQ ID NO: 814585 - RNA, 21 nt, Human
uggugcaguggcucaugccgg

SEQ ID NO: 814586 - RNA, 24 nt, Human
ugugugccacaugaagaguuuccc

SEQ ID NO: 814587 - RNA, 21 nt, Human
uguuguacaugccuuuaugua

SEQ ID NO: 814588 - RNA, 24 nt, Human
uuaaaaacauuccauacuguaaca

SEQ ID NO: 814589 - RNA, 18 nt, Human
uuaguagagacgggguuu

SEQ ID NO: 814590 - RNA, 18 nt, Human
uuaguagagacgggguuu

SEQ ID NO: 814591 - RNA, 24 nt, Human
uuaguagagacgggguuuuaguau

SEQ ID NO: 814592 - RNA, 19 nt, Human
uucaaaaagccuaacauag

SEQ ID NO: 814593 - RNA, 22 nt, Human
uucaagcuccaucaaagaugaa

SEQ ID NO: 814594 - RNA, 26 nt, Human
uucaagugauucuccugcccuagccu

SEQ ID NO: 814595 - RNA, 21 nt, Human
uuccaaugugaaguuucuggu

SEQ ID NO: 814596 - RNA, 24 nt, Human
uucccaccuucccaugguuuuuuu

SEQ ID NO: 814597 - RNA, 24 nt, Human
uucgcacuuguugcccaggcugga

SEQ ID NO: 814598 - RNA, 27 nt, Human
uuuaaacuugucacucgacuaggaagu

SEQ ID NO: 814599 - RNA, 24 nt, Human
uuuccuaguuuuacugcauucauu

SEQ ID NO: 814600 - RNA, 23 nt, Human
uuucgcacuuguugcccaggcug

SEQ ID NO: 814601 - RNA, 24 nt, Human
uuucgcacuuguugcccaggcugg

SEQ ID NO: 814602 - RNA, 22 nt, Human
uuuuuaguagagacgggguuuu

SEQ ID NO: 814603 - RNA, 21 nt, Human
uuuuuguuauuuuuaguagag

SEQ ID NO: 814604 - RNA, 24 nt, Human
uuuuuguuauuuuuaguagagacg

SEQ ID NO: 814605 - RNA, 24 nt, Human
aaaacccuaccaugucccuaaaug

SEQ ID NO: 814606 - RNA, 18 nt, Human
aaaaguccccccaaagcu

SEQ ID NO: 814607 - RNA, 19 nt, Human
aaaccacaccccccacccu

SEQ ID NO: 814608 - RNA, 20 nt, Human
aaaggagcugggugucauua

SEQ ID NO: 814609 - RNA, 20 nt, Human
aaaggagcugggugucauua

SEQ ID NO: 814610 - RNA, 25 nt, Human
aaaguccccccaaagcucauggaga

SEQ ID NO: 814611 - RNA, 24 nt, Human
aaagugcugggauuauaggcguga

SEQ ID NO: 814612 - RNA, 23 nt, Human
aaaucuuucuguaucacugcccc

SEQ ID NO: 814613 - RNA, 19 nt, Human
aaccacaccccccacccug

SEQ ID NO: 814614 - RNA, 22 nt, Human
aaguagcugggauuacaggcac

SEQ ID NO: 814615 - RNA, 25 nt, Human
aaguagcugggauuacaggcaccug

SEQ ID NO: 814616 - RNA, 21 nt, Human
aagugauucucaugccucagc

SEQ ID NO: 814617 - RNA, 19 nt, Human
aagugcugggauuauaggc

SEQ ID NO: 814618 - RNA, 19 nt, Human
aagugcugggauuauaggc

SEQ ID NO: 814619 - RNA, 24 nt, Human
aaugcaguggcacgaucuuggcuc

SEQ ID NO: 814620 - RNA, 18 nt, Human
acagagcuaggaagaagg

SEQ ID NO: 814621 - RNA, 19 nt, Human
acaggcaccugccaccacg

SEQ ID NO: 814622 - RNA, 30 nt, Human
accacaccccccacccugauacaaauccaa

SEQ ID NO: 814623 - RNA, 18 nt, Human
accaccaguucccugcca

SEQ ID NO: 814624 - RNA, 22 nt, Human
accaggcuggucuugaacuccu

SEQ ID NO: 814625 - RNA, 18 nt, Human
accauguuggccaggcug

SEQ ID NO: 814626 - RNA, 19 nt, Human
accccaggacguggcccuc

SEQ ID NO: 814627 - RNA, 18 nt, Human
acgggguuucgccauguu

SEQ ID NO: 814628 - RNA, 24 nt, Human
acgggguuucgccauguucaccag

SEQ ID NO: 814629 - RNA, 19 nt, Human
acuacaggugcgcgccacc

SEQ ID NO: 814630 - RNA, 18 nt, Human
acugcaaucucugccucc

SEQ ID NO: 814631 - RNA, 22 nt, Human
acugcaaucucugccuccuggg

SEQ ID NO: 814632 - RNA, 22 nt, Human
agaagggccuggagaaugugcc

SEQ ID NO: 814633 - RNA, 18 nt, Human
agagguuuucuggcaucg

SEQ ID NO: 814634 - RNA, 24 nt, Human
agagugcugggauuacaggcauga

SEQ ID NO: 814635 - RNA, 24 nt, Human
agcaguucuccugccucagccucc

SEQ ID NO: 814636 - RNA, 26 nt, Human
agccuggucucgaacuccugaccucc

SEQ ID NO: 814637 - RNA, 24 nt, Human
agcugcuggcuuuuggggauggga

SEQ ID NO: 814638 - RNA, 19 nt, Human
agcugcuucuucccagcuc

SEQ ID NO: 814639 - RNA, 21 nt, Human
agcugggaacgguggccccgg

SEQ ID NO: 814640 - RNA, 20 nt, Human
aggcaggaugagaucugggg

SEQ ID NO: 814641 - RNA, 20 nt, Human
aggcaugcaccaccaugccc

SEQ ID NO: 814642 - RNA, 21 nt, Human
aggcgugagccaccguaccca

SEQ ID NO: 814643 - RNA, 25 nt, Human
aggcuggagugcaguggcaugaucu

SEQ ID NO: 814644 - RNA, 25 nt, Human
aggcuggagugcaguggugcaaucu

SEQ ID NO: 814645 - RNA, 21 nt, Human
agggcaaugcugagacccaga

SEQ ID NO: 814646 - RNA, 21 nt, Human
aggucaggagcuaccccagga

SEQ ID NO: 814647 - RNA, 24 nt, Human
aggugauccacccaccucagccuc

SEQ ID NO: 814648 - RNA, 24 nt, Human
aggugauccgccugccucggccuc

SEQ ID NO: 814649 - RNA, 18 nt, Human
aguagcugggacuacagg

SEQ ID NO: 814650 - RNA, 21 nt, Human
aguagcugggauuacaggcau

SEQ ID NO: 814651 - RNA, 23 nt, Human
aguagcugggauuacaggcaugc

SEQ ID NO: 814652 - RNA, 24 nt, Human
agugauucucaugccucagccucc

SEQ ID NO: 814653 - RNA, 18 nt, Human
agugcaguggcaugaucu

SEQ ID NO: 814654 - RNA, 19 nt, Human
agugcaguggcaugaucuu

SEQ ID NO: 814655 - RNA, 20 nt, Human
agugcaguggcaugaucuug

SEQ ID NO: 814656 - RNA, 24 nt, Human
agugcaguggugcaaucucggcug

SEQ ID NO: 814657 - RNA, 18 nt, Human
agugcugggauuacaggc

SEQ ID NO: 814658 - RNA, 20 nt, Human
agugcugggauuacaggcau

SEQ ID NO: 814659 - RNA, 24 nt, Human
aguggcaugaucuuggaucacugc

SEQ ID NO: 814660 - RNA, 18 nt, Human
auacugcaucguuaaaaa

SEQ ID NO: 814661 - RNA, 22 nt, Human
aucaggcuucugucauuuuuuu

SEQ ID NO: 814662 - RNA, 20 nt, Human
aucuggggccagugggcguc

SEQ ID NO: 814663 - RNA, 21 nt, Human
augacuucugaaacacucaaa

SEQ ID NO: 814664 - RNA, 18 nt, Human
augagguuucaccauguu

SEQ ID NO: 814665 - RNA, 20 nt, Human
augagguuucaccauguugg

SEQ ID NO: 814666 - RNA, 24 nt, Human
augagguuucaccauguuggccag

SEQ ID NO: 814667 - RNA, 22 nt, Human
augccucagccucccaaguagc

SEQ ID NO: 814668 - RNA, 23 nt, Human
augccucagccucccaaguagcu

SEQ ID NO: 814669 - RNA, 20 nt, Human
augcuggagcugcgugccuu

SEQ ID NO: 814670 - RNA, 18 nt, Human
augggguuucaccauguu

SEQ ID NO: 814671 - RNA, 22 nt, Human
augggguuucaccauguuggcc

SEQ ID NO: 814672 - RNA, 23 nt, Human
augggguuucaccauguuggcca

SEQ ID NO: 814673 - RNA, 24 nt, Human
augggguuucaccauguuggccag

SEQ ID NO: 814674 - RNA, 24 nt, Human
auuuuuguauuuuuaguagagaug

SEQ ID NO: 814675 - RNA, 24 nt, Human
caaaccacaccccccacccugaua

SEQ ID NO: 814676 - RNA, 23 nt, Human
caaagucugggauuacaggcgug

SEQ ID NO: 814677 - RNA, 24 nt, Human
caaagucugggauuacaggcguga

SEQ ID NO: 814678 - RNA, 24 nt, Human
caaagugcugggauuauaggcgug

SEQ ID NO: 814679 - RNA, 20 nt, Human
caaaugaaaaaccaugggug

SEQ ID NO: 814680 - RNA, 19 nt, Human
caaauguuaaaacccuacc

SEQ ID NO: 814681 - RNA, 22 nt, Human
caagcaguucuccugccucagc

SEQ ID NO: 814682 - RNA, 24 nt, Human
caccacacccagcuaauuuuugua

SEQ ID NO: 814683 - RNA, 22 nt, Human
caccaccaugcccggcuaauuu

SEQ ID NO: 814684 - RNA, 24 nt, Human
caccacgccuggcuaauuuuugua

SEQ ID NO: 814685 - RNA, 24 nt, Human
caccaugcccggcuaauuuuugua

SEQ ID NO: 814686 - RNA, 21 nt, Human
caccauguuggccagccuggu

SEQ ID NO: 814687 - RNA, 24 nt, Human
caccauguuggccagccuggucuc

SEQ ID NO: 814688 - RNA, 25 nt, Human
caccauguuggccagccuggucucg

SEQ ID NO: 814689 - RNA, 18 nt, Human
caccauguuggccaggcu

SEQ ID NO: 814690 - RNA, 22 nt, Human
caccauguuggccaggcuguuc

SEQ ID NO: 814691 - RNA, 24 nt, Human
caccauguuggccaggcuguucuc

SEQ ID NO: 814692 - RNA, 27 nt, Human
caccauguuggccaggcuguucucaaa

SEQ ID NO: 814693 - RNA, 20 nt, Human
cacccaccucagccucccag

SEQ ID NO: 814694 - RNA, 23 nt, Human
cacccaccucagccucccagagu

SEQ ID NO: 814695 - RNA, 19 nt, Human
caccccccacccugauaca

SEQ ID NO: 814696 - RNA, 18 nt, Human
cacccuuggaagauuggg

SEQ ID NO: 814697 - RNA, 24 nt, Human
caccucagccucccagagugcugg

SEQ ID NO: 814698 - RNA, 21 nt, Human
caccucaggugauccgccugc

SEQ ID NO: 814699 - RNA, 24 nt, Human
caccucaggugauccgccugccuc

SEQ ID NO: 814700 - RNA, 23 nt, Human
caccugucucggucucccaaagu

SEQ ID NO: 814701 - RNA, 24 nt, Human
caccugucucggucucccaaagug

SEQ ID NO: 814702 - RNA, 21 nt, Human
cacucaaacgcccgauacccu

SEQ ID NO: 814703 - RNA, 20 nt, Human
cacugaggcucaguuaauug

SEQ ID NO: 814704 - RNA, 21 nt, Human
cacugcaaccucugccuccug

SEQ ID NO: 814705 - RNA, 23 nt, Human
cacugcaaccucugccuccuggg

SEQ ID NO: 814706 - RNA, 18 nt, Human
cacuguaaccucugccuc

SEQ ID NO: 814707 - RNA, 23 nt, Human
cagaauguuuagccggcaggcac

SEQ ID NO: 814708 - RNA, 21 nt, Human
cagagcuaggaagaagggccu

SEQ ID NO: 814709 - RNA, 23 nt, Human
cagagcuaggaagaagggccugg

SEQ ID NO: 814710 - RNA, 24 nt, Human
cagagucuugcucugucgcccagg

SEQ ID NO: 814711 - RNA, 24 nt, Human
cagagugcugggauuacaggcaug

SEQ ID NO: 814712 - RNA, 20 nt, Human
cagccacuuuugucaucuug

SEQ ID NO: 814713 - RNA, 21 nt, Human
cagccgguggcuccacaggaa

SEQ ID NO: 814714 - RNA, 23 nt, Human
cagccgguggcuccacaggaacc

SEQ ID NO: 814715 - RNA, 20 nt, Human
cagccuccugaguagcuggg

SEQ ID NO: 814716 - RNA, 19 nt, Human
cagcgcacuggauuuaucu

SEQ ID NO: 814717 - RNA, 19 nt, Human
cagcucuuuugugcagggg

SEQ ID NO: 814718 - RNA, 19 nt, Human
cagcugggccuggcuggca

SEQ ID NO: 814719 - RNA, 22 nt, Human
caggugauccgccugccucggc

SEQ ID NO: 814720 - RNA, 19 nt, Human
caguggcacgaucuuggcu

SEQ ID NO: 814721 - RNA, 20 nt, Human
caguuaauugugggucuggu

SEQ ID NO: 814722 - RNA, 20 nt, Human
caguucuccugccucagccu

SEQ ID NO: 814723 - RNA, 24 nt, Human
cauguucaccaggcuggucuugaa

SEQ ID NO: 814724 - RNA, 24 nt, Human
cauguuggccaggcuguucucaaa

SEQ ID NO: 814725 - RNA, 21 nt, Human
ccaaagucugggauuacaggc

SEQ ID NO: 814726 - RNA, 20 nt, Human
ccaaagugcugggauuauag

SEQ ID NO: 814727 - RNA, 22 nt, Human
ccaaagugcugggauuauaggc

SEQ ID NO: 814728 - RNA, 24 nt, Human
ccaaagugcugggauuauaggcgu

SEQ ID NO: 814729 - RNA, 20 nt, Human
ccaacccggaacagcguugg

SEQ ID NO: 814730 - RNA, 23 nt, Human
ccaaguagcugggauuacaggca

SEQ ID NO: 814731 - RNA, 20 nt, Human
ccaccacgccuggcuaauuu

SEQ ID NO: 814732 - RNA, 25 nt, Human
ccacccaccucagccucccagagug

SEQ ID NO: 814733 - RNA, 23 nt, Human
ccagagugcugggauuacaggca

SEQ ID NO: 814734 - RNA, 24 nt, Human
ccagagugcugggauuacaggcau

SEQ ID NO: 814735 - RNA, 24 nt, Human
ccagcuauucuucuaccucagccu

SEQ ID NO: 814736 - RNA, 24 nt, Human
cccaaagucugggauuacaggcgu

SEQ ID NO: 814737 - RNA, 23 nt, Human
cccaaguagcugggauuacaggc

SEQ ID NO: 814738 - RNA, 24 nt, Human
cccaaguagcugggauuacaggca

SEQ ID NO: 814739 - RNA, 24 nt, Human
cccagagugcugggauuacaggca

SEQ ID NO: 814740 - RNA, 19 nt, Human
cccaggcuggagugcagug

SEQ ID NO: 814741 - RNA, 19 nt, Human
cccaggcuggagugcagug

SEQ ID NO: 814742 - RNA, 22 nt, Human
cccaggcuggagugcaguggug

SEQ ID NO: 814743 - RNA, 21 nt, Human
ccccagggcaaugcugagacc

SEQ ID NO: 814744 - RNA, 24 nt, Human
ccccagggcaaugcugagacccag

SEQ ID NO: 814745 - RNA, 21 nt, Human
cccccaaagcucauggagacg

SEQ ID NO: 814746 - RNA, 24 nt, Human
cccccaaagcucauggagacgacg

SEQ ID NO: 814747 - RNA, 24 nt, Human
ccccucagcacuaaauaccaccag

SEQ ID NO: 814748 - RNA, 23 nt, Human
cccgaguagcugggauuacaggc

SEQ ID NO: 814749 - RNA, 24 nt, Human
cccgaguagcugggauuacaggca

SEQ ID NO: 814750 - RNA, 21 nt, Human
cccggcuguuugaccucggcc

SEQ ID NO: 814751 - RNA, 23 nt, Human
ccgaguagcugggauuacaggca

SEQ ID NO: 814752 - RNA, 24 nt, Human
ccgaguagcugggauuacaggcau

SEQ ID NO: 814753 - RNA, 22 nt, Human
ccgggguggcggugggugucug

SEQ ID NO: 814754 - RNA, 24 nt, Human
ccucaccucaggugauccgccugc

SEQ ID NO: 814755 - RNA, 21 nt, Human
ccucccgaacaagaacccgcu

SEQ ID NO: 814756 - RNA, 24 nt, Human
ccuccuggguuccagcuauucuuc

SEQ ID NO: 814757 - RNA, 23 nt, Human
ccuccuuacuggcaaacaaaggc

SEQ ID NO: 814758 - RNA, 24 nt, Human
ccucuccuccuuacuggcaaacaa

SEQ ID NO: 814759 - RNA, 19 nt, Human
ccucugccuccuggguuca

SEQ ID NO: 814760 - RNA, 24 nt, Human
ccucugccuccuggguucaagcag

SEQ ID NO: 814761 - RNA, 21 nt, Human
ccugaccucaggugauccacc

SEQ ID NO: 814762 - RNA, 24 nt, Human
ccugaccucaggugauccacccac

SEQ ID NO: 814763 - RNA, 23 nt, Human
ccugaccucaggugauccaccug

SEQ ID NO: 814764 - RNA, 24 nt, Human
ccugaccucaggugauccaccugu

SEQ ID NO: 814765 - RNA, 23 nt, Human
ccugaguagcugggacuacaggu

SEQ ID NO: 814766 - RNA, 24 nt, Human
ccugaguagcugggacuacaggug

SEQ ID NO: 814767 - RNA, 23 nt, Human
ccugccucagccucccgaguagc

SEQ ID NO: 814768 - RNA, 23 nt, Human
ccuggguucaagcaguucuccug

SEQ ID NO: 814769 - RNA, 18 nt, Human
ccugucugugacuuggaa

SEQ ID NO: 814770 - RNA, 18 nt, Human
cgacagguggccucgccg

SEQ ID NO: 814771 - RNA, 18 nt, Human
cgagguagcugcuucuuc

SEQ ID NO: 814772 - RNA, 24 nt, Human
cgccauguucaccaggcuggucuu

SEQ ID NO: 814773 - RNA, 25 nt, Human
cggcauaacgggcggacccccuucu

SEQ ID NO: 814774 - RNA, 27 nt, Human
cggcugcgcccccucucaucgccgccc

SEQ ID NO: 814775 - RNA, 21 nt, Human
cgggugcagcugggcaucgcu

SEQ ID NO: 814776 - RNA, 22 nt, Human
cguggccagcgcccgccagcuc

SEQ ID NO: 814777 - RNA, 21 nt, Human
cguuggcgugucccagccuga

SEQ ID NO: 814778 - RNA, 20 nt, Human
cuaaaugucccagccucccc

SEQ ID NO: 814779 - RNA, 23 nt, Human
cuaauuuuuguauuuuuaguaga

SEQ ID NO: 814780 - RNA, 19 nt, Human
cucacuguaaccucugccu

SEQ ID NO: 814781 - RNA, 24 nt, Human
cucacuguaaccucugccucucag

SEQ ID NO: 814782 - RNA, 24 nt, Human
cucagccucccaaguagcugggau

SEQ ID NO: 814783 - RNA, 24 nt, Human
cucagccucccgaguagcugggau

SEQ ID NO: 814784 - RNA, 24 nt, Human
cucagccuccugaguagcugggac

SEQ ID NO: 814785 - RNA, 25 nt, Human
cucaugccucagccucccaaguagc

SEQ ID NO: 814786 - RNA, 18 nt, Human
cuccgagguagcugcuuc

SEQ ID NO: 814787 - RNA, 21 nt, Human
cuccuggguucaagcaguucu

SEQ ID NO: 814788 - RNA, 21 nt, Human
cuccuggguuccagcuauucu

SEQ ID NO: 814789 - RNA, 22 nt, Human
cucggucucccaaagugcuggg

SEQ ID NO: 814790 - RNA, 19 nt, Human
cucucaucgccgcccgccu

SEQ ID NO: 814791 - RNA, 21 nt, Human
cucucugcaaacacuguccau

SEQ ID NO: 814792 - RNA, 21 nt, Human
cucugccuccuggguuccagc

SEQ ID NO: 814793 - RNA, 23 nt, Human
cucugucgcccaggcuggaaugc

SEQ ID NO: 814794 - RNA, 20 nt, Human
cucugucucccaggcuggag

SEQ ID NO: 814795 - RNA, 21 nt, Human
cucuuguugcccaggcuggag

SEQ ID NO: 814796 - RNA, 24 nt, Human
cugacugcaaucucugccuccugg

SEQ ID NO: 814797 - RNA, 23 nt, Human
cugauccucucaaaggagcuggg

SEQ ID NO: 814798 - RNA, 19 nt, Human
cugcaaccucugccuccug

SEQ ID NO: 814799 - RNA, 23 nt, Human
cugcaaccucugccuccuggguu

SEQ ID NO: 814800 - RNA, 24 nt, Human
cugcaaccucugccuccuggguuc

SEQ ID NO: 814801 - RNA, 24 nt, Human
cugcaaucucugccuccuggguuc

SEQ ID NO: 814802 - RNA, 23 nt, Human
cugccucagccucccgaguagcu

SEQ ID NO: 814803 - RNA, 19 nt, Human
cugcgagcaggagcggagg

SEQ ID NO: 814804 - RNA, 23 nt, Human
cugcuucuucccagcucagggcu

SEQ ID NO: 814805 - RNA, 18 nt, Human
cuggaaucuucuuccaug

SEQ ID NO: 814806 - RNA, 18 nt, Human
cuggagccugucuccucc

SEQ ID NO: 814807 - RNA, 19 nt, Human
cuggagggaaaggcacagg

SEQ ID NO: 814808 - RNA, 24 nt, Human
cuggagugcaguggcaugaucuug

SEQ ID NO: 814809 - RNA, 24 nt, Human
cuguaaccucugccucucagguuu

SEQ ID NO: 814810 - RNA, 23 nt, Human
cugucucggucucccaaagugcu

SEQ ID NO: 814811 - RNA, 23 nt, Human
cuuccaugacgguuaaggcccag

SEQ ID NO: 814812 - RNA, 24 nt, Human
cuuguugcccaggcuggagugcag

SEQ ID NO: 814813 - RNA, 21 nt, Human
cuuucuguaucacugccccuc

SEQ ID NO: 814814 - RNA, 19 nt, Human
gacaagcaagagaaggguc

SEQ ID NO: 814815 - RNA, 21 nt, Human
gacaucugaguuaaaggggcu

SEQ ID NO: 814816 - RNA, 24 nt, Human
gaccucaggugauccacccaccuc

SEQ ID NO: 814817 - RNA, 24 nt, Human
gaccucaggugauccaccugucuc

SEQ ID NO: 814818 - RNA, 20 nt, Human
gagacgggguuucgccaugu

SEQ ID NO: 814819 - RNA, 18 nt, Human
gagaugggguuucaccau

SEQ ID NO: 814820 - RNA, 24 nt, Human
gagaugggguuucaccauguuggc

SEQ ID NO: 814821 - RNA, 20 nt, Human
gaggucaggagcuaccccag

SEQ ID NO: 814822 - RNA, 22 nt, Human
gagguuucaccauguuggccag

SEQ ID NO: 814823 - RNA, 24 nt, Human
gaguagcugggacuacaggugcgc

SEQ ID NO: 814824 - RNA, 19 nt, Human
gagugcugggauuacaggc

SEQ ID NO: 814825 - RNA, 18 nt, Human
gauuacaggcaugagcca

SEQ ID NO: 814826 - RNA, 21 nt, Human
gauuacaggcaugagccacug

SEQ ID NO: 814827 - RNA, 24 nt, Human
gauuacaggcaugagccacugugc

SEQ ID NO: 814828 - RNA, 24 nt, Human
gauuacaggcaugcaccaccaugc

SEQ ID NO: 814829 - RNA, 18 nt, Human
gauuacaggcgugagcca

SEQ ID NO: 814830 - RNA, 21 nt, Human
gauuacaggcgugagccaucg

SEQ ID NO: 814831 - RNA, 24 nt, Human
gauuacaggcgugagccaucgugc

SEQ ID NO: 814832 - RNA, 18 nt, Human
gauuauaggcgugagcca

SEQ ID NO: 814833 - RNA, 21 nt, Human
gauuauaggcgugagccaccg

SEQ ID NO: 814834 - RNA, 24 nt, Human
gauuauaggcgugagccaccguac

SEQ ID NO: 814835 - RNA, 22 nt, Human
gcaaccucugccuccuggguuc

SEQ ID NO: 814836 - RNA, 20 nt, Human
gcaccaccaugcccggcuaa

SEQ ID NO: 814837 - RNA, 21 nt, Human
gccaaaccacaccccccaccc

SEQ ID NO: 814838 - RNA, 24 nt, Human
gccauguucaccaggcuggucuug

SEQ ID NO: 814839 - RNA, 18 nt, Human
gcccagccuggauagcac

SEQ ID NO: 814840 - RNA, 23 nt, Human
gcccaggcuggaaugcaguggca

SEQ ID NO: 814841 - RNA, 20 nt, Human
gcccaggcuggagugcagug

SEQ ID NO: 814842 - RNA, 24 nt, Human
gcccaggcuggagugcaguggcau

SEQ ID NO: 814843 - RNA, 21 nt, Human
gcccgauacccuguaucuucc

SEQ ID NO: 814844 - RNA, 22 nt, Human
gcccggcuaauuuuuguauuuu

SEQ ID NO: 814845 - RNA, 21 nt, Human
gccgggguggcgguggguguc

SEQ ID NO: 814846 - RNA, 24 nt, Human
gccuguugucugugacugcuggug

SEQ ID NO: 814847 - RNA, 21 nt, Human
gcucacuguaaccucugccuc

SEQ ID NO: 814848 - RNA, 20 nt, Human
gcucuuguugcccaggcugg

SEQ ID NO: 814849 - RNA, 21 nt, Human
gcucuuguugcccaggcugga

SEQ ID NO: 814850 - RNA, 25 nt, Human
gcugcgcccccucucaucgccgccc

SEQ ID NO: 814851 - RNA, 19 nt, Human
gcuggaaugcaguggcacg

SEQ ID NO: 814852 - RNA, 19 nt, Human
gcuggagugcaguggcaug

SEQ ID NO: 814853 - RNA, 23 nt, Human
gcuggucuugaacuccugaccuc

SEQ ID NO: 814854 - RNA, 18 nt, Human
ggacucaggaugaggcag

SEQ ID NO: 814855 - RNA, 24 nt, Human
ggauuacaggcaugagccacugug

SEQ ID NO: 814856 - RNA, 24 nt, Human
ggauuacaggcaugcaccaccaug

SEQ ID NO: 814857 - RNA, 24 nt, Human
ggcuggucuugaacuccugaccuc

SEQ ID NO: 814858 - RNA, 22 nt, Human
gggggaggguuuaugacgcauc

SEQ ID NO: 814859 - RNA, 22 nt, Human
gggguuucaccauguuggccag

SEQ ID NO: 814860 - RNA, 21 nt, Human
gggucgggguccauugcauuu

SEQ ID NO: 814861 - RNA, 19 nt, Human
ggucucgaacuccugaccu

SEQ ID NO: 814862 - RNA, 19 nt, Human
ggucuugaacuccugaccu

SEQ ID NO: 814863 - RNA, 23 nt, Human
guagagaugggguuucaccaugu

SEQ ID NO: 814864 - RNA, 18 nt, Human
guagcugggauuacaggc

SEQ ID NO: 814865 - RNA, 18 nt, Human
guagcugggauuacaggc

SEQ ID NO: 814866 - RNA, 20 nt, Human
guagcugggauuacaggcau

SEQ ID NO: 814867 - RNA, 18 nt, Human
gucugguuggcccagccu

SEQ ID NO: 814868 - RNA, 19 nt, Human
gucuguggcuccaaccugg

SEQ ID NO: 814869 - RNA, 24 nt, Human
gucuugcucugucgcccaggcugg

SEQ ID NO: 814870 - RNA, 24 nt, Human
gugauccacccaccucagccuccc

SEQ ID NO: 814871 - RNA, 24 nt, Human
gugauccaccugucucggucuccc

SEQ ID NO: 814872 - RNA, 21 nt, Human
gugauccgccugccucggccu

SEQ ID NO: 814873 - RNA, 22 nt, Human
gugauccgccugccucggccuc

SEQ ID NO: 814874 - RNA, 24 nt, Human
gugauucucaugccucagccuccc

SEQ ID NO: 814875 - RNA, 19 nt, Human
gugcagggguggguggggu

SEQ ID NO: 814876 - RNA, 19 nt, Human
gugggucugguuggcccag

SEQ ID NO: 814877 - RNA, 21 nt, Human
guucuccugccucagccuccc

SEQ ID NO: 814878 - RNA, 18 nt, Human
uaaaaguccccccaaagc

SEQ ID NO: 814879 - RNA, 23 nt, Human
uaaauaccaccaguucccugcca

SEQ ID NO: 814880 - RNA, 20 nt, Human
uaaccccaaaugcaauuccu

SEQ ID NO: 814881 - RNA, 26 nt, Human
uaacgggcggacccccuggaguuucu

SEQ ID NO: 814882 - RNA, 27 nt, Human
uaagugauucucaugccucagccuccc

SEQ ID NO: 814883 - RNA, 24 nt, Human
uaauuuuuguauuuuuaguagaga

SEQ ID NO: 814884 - RNA, 24 nt, Human
uaauuuuuguauuuuuaguagaga

SEQ ID NO: 814885 - RNA, 24 nt, Human
uaauuuuuguauuuuuauuagaga

SEQ ID NO: 814886 - RNA, 22 nt, Human
uacaggcaccugccaccacgcc

SEQ ID NO: 814887 - RNA, 23 nt, Human
uacaggcaugagccacugugccc

SEQ ID NO: 814888 - RNA, 24 nt, Human
uacaggcaugagccacugugcccu

SEQ ID NO: 814889 - RNA, 23 nt, Human
uacaggcaugcaccaccaugccc

SEQ ID NO: 814890 - RNA, 22 nt, Human
uacaggcgugagccaucgugcc

SEQ ID NO: 814891 - RNA, 23 nt, Human
uacaggcgugagccaucgugccu

SEQ ID NO: 814892 - RNA, 24 nt, Human
uacaggugcgcgccaccacaccca

SEQ ID NO: 814893 - RNA, 24 nt, Human
uaccaugucccuaaaugucccagc

SEQ ID NO: 814894 - RNA, 24 nt, Human
uaccucagccuccugaguagcugg

SEQ ID NO: 814895 - RNA, 20 nt, Human
uagagacgggguuucgccau

SEQ ID NO: 814896 - RNA, 21 nt, Human
uagagacgggguuucgccaug

SEQ ID NO: 814897 - RNA, 22 nt, Human
uagagacgggguuucgccaugu

SEQ ID NO: 814898 - RNA, 22 nt, Human
uagagaugagguuucaccaugu

SEQ ID NO: 814899 - RNA, 22 nt, Human
uagagaugggguuucaccaugu

SEQ ID NO: 814900 - RNA, 18 nt, Human
uagccggcaggcaccuuc

SEQ ID NO: 814901 - RNA, 24 nt, Human
uaguagagaugagguuucaccaug

SEQ ID NO: 814902 - RNA, 24 nt, Human
uaguagagaugggguuucaccaug

SEQ ID NO: 814903 - RNA, 24 nt, Human
uauuagagacgggguuucgccaug

SEQ ID NO: 814904 - RNA, 19 nt, Human
uauuuuuuuugagacagag

SEQ ID NO: 814905 - RNA, 20 nt, Human
ucaaaggagcugggugucau

SEQ ID NO: 814906 - RNA, 18 nt, Human
ucaccucaggugauccgc

SEQ ID NO: 814907 - RNA, 23 nt, Human
ucacugcaaccucugccuccugg

SEQ ID NO: 814908 - RNA, 24 nt, Human
ucacugcaaccucugccuccuggg

SEQ ID NO: 814909 - RNA, 25 nt, Human
ucacugcaaccucugccuccugggu

SEQ ID NO: 814910 - RNA, 27 nt, Human
ucacugcaaccucugccuccuggguuc

SEQ ID NO: 814911 - RNA, 19 nt, Human
ucacuguaaccucugccuc

SEQ ID NO: 814912 - RNA, 24 nt, Human
ucacuguaaccucugccucucagg

SEQ ID NO: 814913 - RNA, 20 nt, Human
ucagagccaguuucugagcc

SEQ ID NO: 814914 - RNA, 20 nt, Human
ucagccucccaaguagcugg

SEQ ID NO: 814915 - RNA, 20 nt, Human
ucagccucccgaguagcugg

SEQ ID NO: 814916 - RNA, 23 nt, Human
ucagccuccugaguagcugggac

SEQ ID NO: 814917 - RNA, 19 nt, Human
ucagggcuggcagaggcuc

SEQ ID NO: 814918 - RNA, 21 nt, Human
ucagggcuggcagaggcucgg

SEQ ID NO: 814919 - RNA, 20 nt, Human
ucaggugauccacccaccuc

SEQ ID NO: 814920 - RNA, 21 nt, Human
ucaggugauccaccugucucg

SEQ ID NO: 814921 - RNA, 21 nt, Human
ucaggugauccgccugccucg

SEQ ID NO: 814922 - RNA, 25 nt, Human
uccaacccggaacagcguuggugac

SEQ ID NO: 814923 - RNA, 18 nt, Human
uccacaggaaccugcagg

SEQ ID NO: 814924 - RNA, 20 nt, Human
uccacauaaaagucccccca

SEQ ID NO: 814925 - RNA, 22 nt, Human
uccacauaaaaguccccccaaa

SEQ ID NO: 814926 - RNA, 21 nt, Human
uccacccaccucagccuccca

SEQ ID NO: 814927 - RNA, 22 nt, Human
uccacccaccucagccucccag

SEQ ID NO: 814928 - RNA, 23 nt, Human
ucccaaagucugggauuacaggc

SEQ ID NO: 814929 - RNA, 24 nt, Human
ucccaaagucugggauuacaggcg

SEQ ID NO: 814930 - RNA, 24 nt, Human
ucccaaagugcugggauuauaggc

SEQ ID NO: 814931 - RNA, 24 nt, Human
ucccaaguagcugggauuacaggc

SEQ ID NO: 814932 - RNA, 24 nt, Human
ucccagagugcugggauuacaggc

SEQ ID NO: 814933 - RNA, 19 nt, Human
ucccagccugacgcugggu

SEQ ID NO: 814934 - RNA, 21 nt, Human
ucccaggcuggagugcagugg

SEQ ID NO: 814935 - RNA, 23 nt, Human
ucccaggcuggagugcaguggug

SEQ ID NO: 814936 - RNA, 23 nt, Human
uccccagggcaaugcugagaccc

SEQ ID NO: 814937 - RNA, 24 nt, Human
ucccgaguagcugggauuacaggc

SEQ ID NO: 814938 - RNA, 19 nt, Human
ucccuaaaugucccagccu

SEQ ID NO: 814939 - RNA, 21 nt, Human
uccucuugcuaggucugcccc

SEQ ID NO: 814940 - RNA, 24 nt, Human
uccugaguagcugggacuacaggu

SEQ ID NO: 814941 - RNA, 19 nt, Human
uccuggguucaagcaguuc

SEQ ID NO: 814942 - RNA, 21 nt, Human
uccuggguucaagcaguucuc

SEQ ID NO: 814943 - RNA, 24 nt, Human
uccuggguucaagcaguucuccug

SEQ ID NO: 814944 - RNA, 21 nt, Human
uccuggguuccagcuauucuu

SEQ ID NO: 814945 - RNA, 22 nt, Human
ucgccauguucaccaggcuggu

SEQ ID NO: 814946 - RNA, 24 nt, Human
ucgcccaggcuggaaugcaguggc

SEQ ID NO: 814947 - RNA, 21 nt, Human
ucgcgcaggacccugucccac

SEQ ID NO: 814948 - RNA, 20 nt, Human
ucgggguccauugcauuuug

SEQ ID NO: 814949 - RNA, 24 nt, Human
ucuaccucagccuccugaguagcu

SEQ ID NO: 814950 - RNA, 24 nt, Human
ucucccaggcuggagugcaguggu

SEQ ID NO: 814951 - RNA, 24 nt, Human
ucuccugccucagccucccgagua

SEQ ID NO: 814952 - RNA, 23 nt, Human
ucucgaacuccugaccucaggug

SEQ ID NO: 814953 - RNA, 21 nt, Human
ucucugccuccuggguuccaa

SEQ ID NO: 814954 - RNA, 20 nt, Human
ucugcagcugagacagccuc

SEQ ID NO: 814955 - RNA, 22 nt, Human
ucugcauccgaggaaggucacc

SEQ ID NO: 814956 - RNA, 21 nt, Human
ucugcuguuccaacccggaac

SEQ ID NO: 814957 - RNA, 23 nt, Human
ucuggaggguccgcuggggcuga

SEQ ID NO: 814958 - RNA, 19 nt, Human
ucugguuggcccagccugg

SEQ ID NO: 814959 - RNA, 18 nt, Human
ucuguaucacugccccuc

SEQ ID NO: 814960 - RNA, 24 nt, Human
ucugucgcccaggcuggaaugcag

SEQ ID NO: 814961 - RNA, 19 nt, Human
ucugucucccaggcuggag

SEQ ID NO: 814962 - RNA, 21 nt, Human
ucuguggcuccaaccuggagc

SEQ ID NO: 814963 - RNA, 23 nt, Human
ucuugaacuccugaccucaggug

SEQ ID NO: 814964 - RNA, 22 nt, Human
ucuugcucugucgcccaggcug

SEQ ID NO: 814965 - RNA, 23 nt, Human
ucuugcucugucgcccaggcugg

SEQ ID NO: 814966 - RNA, 24 nt, Human
ucuugcucugucgcccaggcugga

SEQ ID NO: 814967 - RNA, 19 nt, Human
ucuugcucugucucccagg

SEQ ID NO: 814968 - RNA, 23 nt, Human
ucuugcucugucucccaggcugg

SEQ ID NO: 814969 - RNA, 24 nt, Human
ucuugcucugucucccaggcugga

SEQ ID NO: 814970 - RNA, 22 nt, Human
ucuuguugcccaggcuggagug

SEQ ID NO: 814971 - RNA, 19 nt, Human
ugaaaaaccauggguguga

SEQ ID NO: 814972 - RNA, 19 nt, Human
ugaaacacucaaacgcccg

SEQ ID NO: 814973 - RNA, 21 nt, Human
ugaccaggacuuugggggagg

SEQ ID NO: 814974 - RNA, 19 nt, Human
ugaccagugauccgcauuu

SEQ ID NO: 814975 - RNA, 19 nt, Human
ugaccucaggugauccacc

SEQ ID NO: 814976 - RNA, 21 nt, Human
ugaccucaggugauccaccca

SEQ ID NO: 814977 - RNA, 24 nt, Human
ugaccucaggugauccacccaccu

SEQ ID NO: 814978 - RNA, 24 nt, Human
ugaccucaggugauccaccugucu

SEQ ID NO: 814979 - RNA, 18 nt, Human
ugaccucggcaugccugc

SEQ ID NO: 814980 - RNA, 21 nt, Human
ugacgcuggguugggggagca

SEQ ID NO: 814981 - RNA, 24 nt, Human
ugacugcaaucucugccuccuggg

SEQ ID NO: 814982 - RNA, 26 nt, Human
ugacuuggaagcggccccagucuucc

SEQ ID NO: 814983 - RNA, 20 nt, Human
ugagcaacucucugcaaaca

SEQ ID NO: 814984 - RNA, 19 nt, Human
ugagccucugcuguuccaa

SEQ ID NO: 814985 - RNA, 19 nt, Human
ugaggcaggaugagaucug

SEQ ID NO: 814986 - RNA, 18 nt, Human
ugaggggcucagagcugg

SEQ ID NO: 814987 - RNA, 24 nt, Human
ugagguuucaccauguuggccagg

SEQ ID NO: 814988 - RNA, 24 nt, Human
ugcagcugagacagccucuccucc

SEQ ID NO: 814989 - RNA, 22 nt, Human
ugcaguggcacgaucuuggcuc

SEQ ID NO: 814990 - RNA, 18 nt, Human
ugcccaggcuggagugca

SEQ ID NO: 814991 - RNA, 22 nt, Human
ugcccaggcuggagugcagugg

SEQ ID NO: 814992 - RNA, 24 nt, Human
ugcccaggcuggagugcaguggca

SEQ ID NO: 814993 - RNA, 24 nt, Human
ugcccggcuaauuuuuguauuuuu

SEQ ID NO: 814994 - RNA, 24 nt, Human
ugccucagccucccaaguagcugg

SEQ ID NO: 814995 - RNA, 24 nt, Human
ugccucagccucccgaguagcugg

SEQ ID NO: 814996 - RNA, 19 nt, Human
ugccuccuggguuccagcu

SEQ ID NO: 814997 - RNA, 23 nt, Human
ugccucggccucccaaagucugg

SEQ ID NO: 814998 - RNA, 20 nt, Human
ugcgcgccaccacacccagc

SEQ ID NO: 814999 - RNA, 25 nt, Human
ugcucuggaggguccgcuggggcug

SEQ ID NO: 815000 - RNA, 24 nt, Human
ugcucugucgcccaggcuggaaug

SEQ ID NO: 815001 - RNA, 24 nt, Human
ugcucuuguugcccaggcuggagu

SEQ ID NO: 815002 - RNA, 18 nt, Human
ugcugagaggucaaccac

SEQ ID NO: 815003 - RNA, 19 nt, Human
uggaagauugggacucagg

SEQ ID NO: 815004 - RNA, 20 nt, Human
uggaauaaccccaaaugcaa

SEQ ID NO: 815005 - RNA, 24 nt, Human
uggaaugcaguggcacgaucuugg

SEQ ID NO: 815006 - RNA, 21 nt, Human
uggaccacauuagaaaagucu

SEQ ID NO: 815007 - RNA, 23 nt, Human
uggagggaaaggcacaggaaagg

SEQ ID NO: 815008 - RNA, 19 nt, Human
uggagugcaguggcaugau

SEQ ID NO: 815009 - RNA, 24 nt, Human
uggagugcaguggcaugaucuugg

SEQ ID NO: 815010 - RNA, 23 nt, Human
uggagugcaguggugcaaucucg

SEQ ID NO: 815011 - RNA, 24 nt, Human
uggagugcaguggugcaaucucgg

SEQ ID NO: 815012 - RNA, 24 nt, Human
uggcacgaucuuggcucacuguaa

SEQ ID NO: 815013 - RNA, 20 nt, Human
uggcagcugggccuggcugg

SEQ ID NO: 815014 - RNA, 23 nt, Human
uggcaggagcugcuggcuuuugg

SEQ ID NO: 815015 - RNA, 21 nt, Human
uggcaugaucuuggaucacug

SEQ ID NO: 815016 - RNA, 19 nt, Human
uggccaaaccacacccccc

SEQ ID NO: 815017 - RNA, 24 nt, Human
uggccaggcuguucucaaacuccu

SEQ ID NO: 815018 - RNA, 23 nt, Human
uggcggugggugucuguggcucc

SEQ ID NO: 815019 - RNA, 19 nt, Human
uggcuccacaggaaccugc

SEQ ID NO: 815020 - RNA, 20 nt, Human
ugggacaaaucguggcagcu

SEQ ID NO: 815021 - RNA, 25 nt, Human
ugggacaaaucguggcagcugggcc

SEQ ID NO: 815022 - RNA, 22 nt, Human
ugggacuacaggugcgcgccac

SEQ ID NO: 815023 - RNA, 24 nt, Human
ugggacuacaggugcgcgccacca

SEQ ID NO: 815024 - RNA, 18 nt, Human
ugggagguauugacgggg

SEQ ID NO: 815025 - RNA, 21 nt, Human
ugggauuacaggcaccugcca

SEQ ID NO: 815026 - RNA, 22 nt, Human
ugggauuacaggcaccugccac

SEQ ID NO: 815027 - RNA, 24 nt, Human
ugggauuacaggcaccugccacca

SEQ ID NO: 815028 - RNA, 21 nt, Human
ugggauuacaggcaugagcca

SEQ ID NO: 815029 - RNA, 22 nt, Human
ugggauuacaggcaugagccac

SEQ ID NO: 815030 - RNA, 22 nt, Human
ugggauuacaggcaugagccac

SEQ ID NO: 815031 - RNA, 22 nt, Human
ugggauuacaggcaugagccac

SEQ ID NO: 815032 - RNA, 23 nt, Human
ugggauuacaggcaugagccacu

SEQ ID NO: 815033 - RNA, 24 nt, Human
ugggauuacaggcaugagccacug

SEQ ID NO: 815034 - RNA, 21 nt, Human
ugggauuacaggcaugcacca

SEQ ID NO: 815035 - RNA, 24 nt, Human
ugggauuacaggcaugcaccacca

SEQ ID NO: 815036 - RNA, 19 nt, Human
ugggauuacaggcgugagc

SEQ ID NO: 815037 - RNA, 21 nt, Human
ugggauuacaggcgugagcca

SEQ ID NO: 815038 - RNA, 21 nt, Human
ugggauuacaggcgugagcca

SEQ ID NO: 815039 - RNA, 21 nt, Human
ugggauuacaggcgugagcca

SEQ ID NO: 815040 - RNA, 22 nt, Human
ugggauuacaggcgugagccau

SEQ ID NO: 815041 - RNA, 24 nt, Human
ugggauuacaggcgugagccaucg

SEQ ID NO: 815042 - RNA, 27 nt, Human
ugggauuacaggcgugagccaucgugc

SEQ ID NO: 815043 - RNA, 21 nt, Human
ugggauuauaggcgugagcca

SEQ ID NO: 815044 - RNA, 22 nt, Human
ugggauuauaggcgugagccac

SEQ ID NO: 815045 - RNA, 23 nt, Human
ugggauuauaggcgugagccacc

SEQ ID NO: 815046 - RNA, 23 nt, Human
ugggauuauaggcgugagccacc

SEQ ID NO: 815047 - RNA, 24 nt, Human
ugggauuauaggcgugagccaccg

SEQ ID NO: 815048 - RNA, 24 nt, Human
ugggcugcugaccaggacuuuggg

SEQ ID NO: 815049 - RNA, 23 nt, Human
uggggcugaguuggggucuucag

SEQ ID NO: 815050 - RNA, 23 nt, Human
ugggguuucaccauguuggccag

SEQ ID NO: 815051 - RNA, 18 nt, Human
uggguggaaugaguucuu

SEQ ID NO: 815052 - RNA, 22 nt, Human
uggguggaaugaguucuuuccu

SEQ ID NO: 815053 - RNA, 21 nt, Human
uggucucgaacuccugaccuc

SEQ ID NO: 815054 - RNA, 23 nt, Human
uguaaccucugccucucagguuu

SEQ ID NO: 815055 - RNA, 21 nt, Human
uguauuuuuaguagagauggg

SEQ ID NO: 815056 - RNA, 19 nt, Human
ugucaucuuguguuggcuu

SEQ ID NO: 815057 - RNA, 18 nt, Human
ugucccagccugacgcug

SEQ ID NO: 815058 - RNA, 21 nt, Human
ugucccagccugacgcugggu

SEQ ID NO: 815059 - RNA, 22 nt, Human
ugucucaggucaagaugcacug

SEQ ID NO: 815060 - RNA, 21 nt, Human
ugucucccaggcuggagugca

SEQ ID NO: 815061 - RNA, 22 nt, Human
uguggacggugcaggucguggc

SEQ ID NO: 815062 - RNA, 27 nt, Human
uguuggccagccuggucucgaacuccu

SEQ ID NO: 815063 - RNA, 21 nt, Human
uuagaaaagucugucuucuuu

SEQ ID NO: 815064 - RNA, 21 nt, Human
uuagagacgggguuucgccau

SEQ ID NO: 815065 - RNA, 18 nt, Human
uuaguagagaugagguuu

SEQ ID NO: 815066 - RNA, 22 nt, Human
uuaguagagaugagguuucacc

SEQ ID NO: 815067 - RNA, 24 nt, Human
uuaguagagaugagguuucaccau

SEQ ID NO: 815068 - RNA, 18 nt, Human
uuaguagagaugggguuu

SEQ ID NO: 815069 - RNA, 22 nt, Human
uuaguagagaugggguuucacc

SEQ ID NO: 815070 - RNA, 24 nt, Human
uuaguagagaugggguuucaccau

SEQ ID NO: 815071 - RNA, 24 nt, Human
uuauuagagacgggguuucgccau

SEQ ID NO: 815072 - RNA, 21 nt, Human
uucaagcaguucuccugccuc

SEQ ID NO: 815073 - RNA, 18 nt, Human
uucgugaguguggaaggg

SEQ ID NO: 815074 - RNA, 21 nt, Human
uucuggagggaaaggcacagg

SEQ ID NO: 815075 - RNA, 19 nt, Human
uucugggucagguagggcc

SEQ ID NO: 815076 - RNA, 22 nt, Human
uucugggucagguagggccuca

SEQ ID NO: 815077 - RNA, 21 nt, Human
uugacaucugaguuaaagggg

SEQ ID NO: 815078 - RNA, 18 nt, Human
uugcucugucucccaggc

SEQ ID NO: 815079 - RNA, 23 nt, Human
uugcucuuguugcccaggcugga

SEQ ID NO: 815080 - RNA, 19 nt, Human
uuggccagccuggucucga

SEQ ID NO: 815081 - RNA, 23 nt, Human
uuguauuuuuaguagagaugggg

SEQ ID NO: 815082 - RNA, 23 nt, Human
uuuaagugauucucaugccucag

SEQ ID NO: 815083 - RNA, 21 nt, Human
uuucaccauguuggccagccu

SEQ ID NO: 815084 - RNA, 22 nt, Human
uuucaccauguuggccagccug

SEQ ID NO: 815085 - RNA, 21 nt, Human
uuucaccauguuggccaggcu

SEQ ID NO: 815086 - RNA, 22 nt, Human
uuucuuuuuauuuugagacgga

SEQ ID NO: 815087 - RNA, 19 nt, Human
uuugcucuggaggguccgc

SEQ ID NO: 815088 - RNA, 24 nt, Human
uuugcucuuguugcccaggcugga

SEQ ID NO: 815089 - RNA, 24 nt, Human
uuuugcucuuguugcccaggcugg

SEQ ID NO: 815090 - RNA, 20 nt, Human
uuuuguauuuuuaguagaga

SEQ ID NO: 815091 - RNA, 24 nt, Human
uuuuuaguagagaugagguuucac

SEQ ID NO: 815092 - RNA, 24 nt, Human
uuuuuaguagagaugggguuucac

SEQ ID NO: 815093 - RNA, 22 nt, Human
uuuuuauuagagacgggguuuc

SEQ ID NO: 815094 - RNA, 23 nt, Human
uuuuuauuagagacgggguuucg

SEQ ID NO: 815095 - RNA, 20 nt, Human
uuuuuguauuuuuaguagag

SEQ ID NO: 815096 - RNA, 20 nt, Human
uuuuuguauuuuuaguagag

SEQ ID NO: 815097 - RNA, 20 nt, Human
uuuuuguauuuuuauuagag

SEQ ID NO: 815098 - RNA, 23 nt, Human
uuuuuguauuuuuauuagagacg

SEQ ID NO: 815099 - RNA, 24 nt, Human
aaaaaaaaaaaaaaaagaaaagaa

SEQ ID NO: 815100 - RNA, 25 nt, Human
aaaaaaaaaaaagaaaagaaaagaa

SEQ ID NO: 815101 - RNA, 24 nt, Human
aaaacagacaauacaauagaacau

SEQ ID NO: 815102 - RNA, 18 nt, Human
aaaagaauucccaaagcu

SEQ ID NO: 815103 - RNA, 20 nt, Human
aaauuuccuuuguacucuuc

SEQ ID NO: 815104 - RNA, 21 nt, Human
aacaacaacaacaacaacaac

SEQ ID NO: 815105 - RNA, 21 nt, Human
aacaacaacaacaacaacaac

SEQ ID NO: 815106 - RNA, 21 nt, Human
aacaacaacaacaacaacaac

SEQ ID NO: 815107 - RNA, 27 nt, Human
aacaacaacaacaacaacaacaacaac

SEQ ID NO: 815108 - RNA, 27 nt, Human
aacaacaacaacaacaacaacaacaac

SEQ ID NO: 815109 - RNA, 27 nt, Human
aacaacaacaacaacaacaacaacaac

SEQ ID NO: 815110 - RNA, 27 nt, Human
aacaacaacaacaacaacaacaacaac

SEQ ID NO: 815111 - RNA, 27 nt, Human
aacaacaacaacaacaacaacaacaac

SEQ ID NO: 815112 - RNA, 27 nt, Human
aacaacaacaacaacaacaacaacaac

SEQ ID NO: 815113 - RNA, 27 nt, Human
aacaacaacaacaacaacaacaacaac

SEQ ID NO: 815114 - RNA, 19 nt, Human
aacacggugaaacccuguc

SEQ ID NO: 815115 - RNA, 20 nt, Human
aacacggugaaacccugucu

SEQ ID NO: 815116 - RNA, 21 nt, Human
aacacggugaaacccugucuc

SEQ ID NO: 815117 - RNA, 18 nt, Human
aaccucaaugaaacugaa

SEQ ID NO: 815118 - RNA, 22 nt, Human
aagaaaacuuuuccacuaaacu

SEQ ID NO: 815119 - RNA, 19 nt, Human
aagaaaccaauccugaaac

SEQ ID NO: 815120 - RNA, 26 nt, Human
aagaaaccuguauaauaaagacaggc

SEQ ID NO: 815121 - RNA, 24 nt, Human
aagaagacuauuuuccauagaacc

SEQ ID NO: 815122 - RNA, 18 nt, Human
aagacaaguugaaacuca

SEQ ID NO: 815123 - RNA, 25 nt, Human
aaucacauacuggcacucaucuaag

SEQ ID NO: 815124 - RNA, 18 nt, Human
acaaaaccaaaauagaaa

SEQ ID NO: 815125 - RNA, 19 nt, Human
acaaaacucucaaaauggg

SEQ ID NO: 815126 - RNA, 19 nt, Human
acaacaacaacaacaacaa

SEQ ID NO: 815127 - RNA, 19 nt, Human
acaacaacaacaacaacaa

SEQ ID NO: 815128 - RNA, 19 nt, Human
acaacaacaacaacaacaa

SEQ ID NO: 815129 - RNA, 19 nt, Human
acaacaacaacaacaacaa

SEQ ID NO: 815130 - RNA, 19 nt, Human
acaacaacaacaacaacaa

SEQ ID NO: 815131 - RNA, 19 nt, Human
acaacaacaacaacaacaa

SEQ ID NO: 815132 - RNA, 19 nt, Human
acaacaacaacaacaacaa

SEQ ID NO: 815133 - RNA, 19 nt, Human
acaacaacaacaacaacaa

SEQ ID NO: 815134 - RNA, 19 nt, Human
acaacaacaacaacaacaa

SEQ ID NO: 815135 - RNA, 19 nt, Human
acaacaacaacaacaacaa

SEQ ID NO: 815136 - RNA, 19 nt, Human
acaacaacaacaacaacaa

SEQ ID NO: 815137 - RNA, 19 nt, Human
acaacaacaacaacaacaa

SEQ ID NO: 815138 - RNA, 19 nt, Human
acaacaacaacaacaacaa

SEQ ID NO: 815139 - RNA, 19 nt, Human
acaacaacaacaacaacaa

SEQ ID NO: 815140 - RNA, 22 nt, Human
acaacaacaacaacaacaacaa

SEQ ID NO: 815141 - RNA, 22 nt, Human
acaacaacaacaacaacaacaa

SEQ ID NO: 815142 - RNA, 22 nt, Human
acaacaacaacaacaacaacaa

SEQ ID NO: 815143 - RNA, 22 nt, Human
acaacaacaacaacaacaacaa

SEQ ID NO: 815144 - RNA, 24 nt, Human
acaacaacaacaacaacaggugaa

SEQ ID NO: 815145 - RNA, 20 nt, Human
acaaggcagaaaagccagaa

SEQ ID NO: 815146 - RNA, 24 nt, Human
acagagcgagagacugucucaaaa

SEQ ID NO: 815147 - RNA, 21 nt, Human
accaaaaccugucauugaaac

SEQ ID NO: 815148 - RNA, 20 nt, Human
accaagaucgcaccacugca

SEQ ID NO: 815149 - RNA, 19 nt, Human
accacagccaccucaccca

SEQ ID NO: 815150 - RNA, 23 nt, Human
accacagccaccucacccacauu

SEQ ID NO: 815151 - RNA, 24 nt, Human
accacugcacucuagccugggcga

SEQ ID NO: 815152 - RNA, 24 nt, Human
acccugucucuacuaaaaauacaa

SEQ ID NO: 815153 - RNA, 20 nt, Human
acucauggcagaagaauaag

SEQ ID NO: 815154 - RNA, 24 nt, Human
acugcacucuagccugggcgacag

SEQ ID NO: 815155 - RNA, 26 nt, Human
acugcacucuagccugggcgacagag

SEQ ID NO: 815156 - RNA, 20 nt, Human
agaaaagccagaaccgggga

SEQ ID NO: 815157 - RNA, 20 nt, Human
agaaucaaaacagacaauac

SEQ ID NO: 815158 - RNA, 23 nt, Human
agacagaaccugggagaaauuca

SEQ ID NO: 815159 - RNA, 18 nt, Human
agagaccaagaggaccag

SEQ ID NO: 815160 - RNA, 24 nt, Human
agagaggauggaggauuuuggaag

SEQ ID NO: 815161 - RNA, 23 nt, Human
agauauguauauacacaauuaua

SEQ ID NO: 815162 - RNA, 18 nt, Human
agaucugcaggugaggag

SEQ ID NO: 815163 - RNA, 21 nt, Human
agcaagaagacuauuuuccau

SEQ ID NO: 815164 - RNA, 22 nt, Human
agccagaaccggggagugucca

SEQ ID NO: 815165 - RNA, 22 nt, Human
agccauucuugcucaagaaagu

SEQ ID NO: 815166 - RNA, 23 nt, Human
agcugggcgugguggcgggugcc

SEQ ID NO: 815167 - RNA, 22 nt, Human
aggaagauuuagugaagauuca

SEQ ID NO: 815168 - RNA, 22 nt, Human
aggauuuagucaaugucuggca

SEQ ID NO: 815169 - RNA, 22 nt, Human
aggcagaucacaaggucaggag

SEQ ID NO: 815170 - RNA, 18 nt, Human
aggcaggagaauggugug

SEQ ID NO: 815171 - RNA, 24 nt, Human
aggcaggcagaucacaaggucagg

SEQ ID NO: 815172 - RNA, 26 nt, Human
aggcaggcagaucacaaggucaggag

SEQ ID NO: 815173 - RNA, 19 nt, Human
aggcugaggcaggagaaug

SEQ ID NO: 815174 - RNA, 19 nt, Human
agugaaaaaaggaauccuu

SEQ ID NO: 815175 - RNA, 22 nt, Human
auaauaaagacaggcgugcauc

SEQ ID NO: 815176 - RNA, 23 nt, Human
auauaacuauaucuacauguaca

SEQ ID NO: 815177 - RNA, 18 nt, Human
aucagcuucccuucauaa

SEQ ID NO: 815178 - RNA, 21 nt, Human
aucccacuuaaagcacccaaa

SEQ ID NO: 815179 - RNA, 24 nt, Human
aucgcaccacugcacucuagccug

SEQ ID NO: 815180 - RNA, 24 nt, Human
caaaagaauucccaaagcuguuaa

SEQ ID NO: 815181 - RNA, 18 nt, Human
caacaacaacaacaacaa

SEQ ID NO: 815182 - RNA, 18 nt, Human
caacaacaacaacaacaa

SEQ ID NO: 815183 - RNA, 18 nt, Human
caacaacaacaacaacaa

SEQ ID NO: 815184 - RNA, 23 nt, Human
caacaacaacaacaacaacaaca

SEQ ID NO: 815185 - RNA, 23 nt, Human
caacaacaacaacaacaacaaca

SEQ ID NO: 815186 - RNA, 23 nt, Human
caacaacaacaacaacaacaaca

SEQ ID NO: 815187 - RNA, 23 nt, Human
caacaacaacaacaacaacaaca

SEQ ID NO: 815188 - RNA, 29 nt, Human
caacaacaacaacaacaacaacaggugaa

SEQ ID NO: 815189 - RNA, 25 nt, Human
caacaacaacaacaacaacagguga

SEQ ID NO: 815190 - RNA, 21 nt, Human
caaggcagaaaagccagaacc

SEQ ID NO: 815191 - RNA, 20 nt, Human
caaguaaauccacuugcaaa

SEQ ID NO: 815192 - RNA, 22 nt, Human
caaguuugaacagaaacauauu

SEQ ID NO: 815193 - RNA, 19 nt, Human
caccacagccaccucaccc

SEQ ID NO: 815194 - RNA, 24 nt, Human
cacgccuauaaucccaucacuuug

SEQ ID NO: 815195 - RNA, 24 nt, Human
cacucuagccugggcgacagagcg

SEQ ID NO: 815196 - RNA, 19 nt, Human
cacugcacucuagccuggg

SEQ ID NO: 815197 - RNA, 20 nt, Human
cacugcacucuagccugggc

SEQ ID NO: 815198 - RNA, 20 nt, Human
cacugcacucuagccugggc

SEQ ID NO: 815199 - RNA, 22 nt, Human
cacugcacucuagccugggcga

SEQ ID NO: 815200 - RNA, 24 nt, Human
cacugcacucuagccugggcgaca

SEQ ID NO: 815201 - RNA, 22 nt, Human
cacuguggaguucccacuggcu

SEQ ID NO: 815202 - RNA, 21 nt, Human
cagaaucaaaacagacaauac

SEQ ID NO: 815203 - RNA, 22 nt, Human
cagccaccucacccacauucca

SEQ ID NO: 815204 - RNA, 23 nt, Human
cagcuaagcuucccuucaaaguu

SEQ ID NO: 815205 - RNA, 24 nt, Human
cagcuacucaggaggcugaggcag

SEQ ID NO: 815206 - RNA, 25 nt, Human
caguaguaccuuauugcacauugau

SEQ ID NO: 815207 - RNA, 25 nt, Human
cauagaaccaguaaauguuucuucu

SEQ ID NO: 815208 - RNA, 24 nt, Human
caucacuuugggaggccgaggcag

SEQ ID NO: 815209 - RNA, 25 nt, Human
caucacuuugggaggccgaggcagg

SEQ ID NO: 815210 - RNA, 24 nt, Human
cauguguguagauauguauauaca

SEQ ID NO: 815211 - RNA, 25 nt, Human
ccaacauuuucuuagaagccaaaga

SEQ ID NO: 815212 - RNA, 19 nt, Human
ccaagcaauuaauuuccag

SEQ ID NO: 815213 - RNA, 20 nt, Human
ccacugcacucuagccuggg

SEQ ID NO: 815214 - RNA, 21 nt, Human
ccacugcacucuagccugggc

SEQ ID NO: 815215 - RNA, 21 nt, Human
ccacugcacucuagccugggc

SEQ ID NO: 815216 - RNA, 24 nt, Human
ccacugcacucuagccugggcgac

SEQ ID NO: 815217 - RNA, 18 nt, Human
ccccagcacagcugugcc

SEQ ID NO: 815218 - RNA, 19 nt, Human
ccuggaaaacuucaagcuu

SEQ ID NO: 815219 - RNA, 22 nt, Human
ccuggcuaacacggugaaaccc

SEQ ID NO: 815220 - RNA, 24 nt, Human
ccuggcuaacacggugaaacccug

SEQ ID NO: 815221 - RNA, 19 nt, Human
ccuguaguccccagcuacu

SEQ ID NO: 815222 - RNA, 24 nt, Human
cgagaccacccuggcuaacacggu

SEQ ID NO: 815223 - RNA, 23 nt, Human
cgccuauaaucccaucacuuugg

SEQ ID NO: 815224 - RNA, 24 nt, Human
cgccuauaaucccaucacuuuggg

SEQ ID NO: 815225 - RNA, 18 nt, Human
cuaaccaaacagaagccu

SEQ ID NO: 815226 - RNA, 20 nt, Human
cuacauguacacuuuucaua

SEQ ID NO: 815227 - RNA, 18 nt, Human
cuauauggaauuuggcuu

SEQ ID NO: 815228 - RNA, 22 nt, Human
cucacgccuauaaucccaucac

SEQ ID NO: 815229 - RNA, 24 nt, Human
cucacgccuauaaucccaucacuu

SEQ ID NO: 815230 - RNA, 24 nt, Human
cuggcuaacacggugaaacccugu

SEQ ID NO: 815231 - RNA, 18 nt, Human
cuguaaaugaugucccuc

SEQ ID NO: 815232 - RNA, 22 nt, Human
cugucucaaaaaaaaaaaaaaa

SEQ ID NO: 815233 - RNA, 22 nt, Human
cuugaucagucauguaaccacu

SEQ ID NO: 815234 - RNA, 21 nt, Human
gacuacuggagaguccaggau

SEQ ID NO: 815235 - RNA, 22 nt, Human
gagaggauggaggauuuuggaa

SEQ ID NO: 815236 - RNA, 20 nt, Human
gagauuaaagaaaaaaucaa

SEQ ID NO: 815237 - RNA, 25 nt, Human
gagcuacagcuaagcuucccuucaa

SEQ ID NO: 815238 - RNA, 21 nt, Human
gcacaguacccgccuggcacc

SEQ ID NO: 815239 - RNA, 24 nt, Human
gcacucuagccugggcgacagagc

SEQ ID NO: 815240 - RNA, 20 nt, Human
gcgcacaggcugugggcggc

SEQ ID NO: 815241 - RNA, 24 nt, Human
gcuaacacggugaaacccugucuc

SEQ ID NO: 815242 - RNA, 18 nt, Human
ggaaugaccgggcgcggu

SEQ ID NO: 815243 - RNA, 20 nt, Human
ggaggauuuuggaagagaca

SEQ ID NO: 815244 - RNA, 19 nt, Human
ggagguaucauacccaugg

SEQ ID NO: 815245 - RNA, 22 nt, Human
ggaguguccaggggcaccugca

SEQ ID NO: 815246 - RNA, 22 nt, Human
ggcacucgggucccgggcggcg

SEQ ID NO: 815247 - RNA, 18 nt, Human
ggcuuagaaagagaagga

SEQ ID NO: 815248 - RNA, 22 nt, Human
ggggaguguccaggggcaccug

SEQ ID NO: 815249 - RNA, 24 nt, Human
ggggaguguccaggggcaccugca

SEQ ID NO: 815250 - RNA, 19 nt, Human
gguggcucacgccuauaau

SEQ ID NO: 815251 - RNA, 23 nt, Human
gguggcucacgccuauaauccca

SEQ ID NO: 815252 - RNA, 18 nt, Human
gugaaaaaaggaauccuu

SEQ ID NO: 815253 - RNA, 21 nt, Human
gugaaacccugucucuacuaa

SEQ ID NO: 815254 - RNA, 22 nt, Human
uaaaaccaaccauguguguaga

SEQ ID NO: 815255 - RNA, 18 nt, Human
uaaaaggagcuucagggg

SEQ ID NO: 815256 - RNA, 23 nt, Human
uaacaacaacaacaacaacaaca

SEQ ID NO: 815257 - RNA, 25 nt, Human
uaacaacaacaacaacaacaacaac

SEQ ID NO: 815258 - RNA, 22 nt, Human
uaacacggugaaacccugucuc

SEQ ID NO: 815259 - RNA, 24 nt, Human
uaacacggugaaacccugucucua

SEQ ID NO: 815260 - RNA, 21 nt, Human
uaaccaaacagaagccuucag

SEQ ID NO: 815261 - RNA, 22 nt, Human
uaaccaaguucucaugucagcc

SEQ ID NO: 815262 - RNA, 24 nt, Human
uaaccucaaugaaacugaaaguac

SEQ ID NO: 815263 - RNA, 19 nt, Human
uaacuguaacugcccaaca

SEQ ID NO: 815264 - RNA, 21 nt, Human
uaacuguaacugcccaacauu

SEQ ID NO: 815265 - RNA, 18 nt, Human
uaagaaaaacuggagaga

SEQ ID NO: 815266 - RNA, 24 nt, Human
uaagacugaucccacuuaaagcac

SEQ ID NO: 815267 - RNA, 22 nt, Human
uaauuaauucaggagauguguu

SEQ ID NO: 815268 - RNA, 22 nt, Human
uacaaaagaauucccaaagcug

SEQ ID NO: 815269 - RNA, 22 nt, Human
uaccauggagauauguuuuggu

SEQ ID NO: 815270 - RNA, 21 nt, Human
uacucauggcagaagaauaag

SEQ ID NO: 815271 - RNA, 21 nt, Human
uacucauggcagaagaauaag

SEQ ID NO: 815272 - RNA, 21 nt, Human
uagaaagagaaggauuaucau

SEQ ID NO: 815273 - RNA, 22 nt, Human
uagaaccaguaaauguuucuuc

SEQ ID NO: 815274 - RNA, 23 nt, Human
uagauaugguugaauugucauug

SEQ ID NO: 815275 - RNA, 18 nt, Human
uagauauguauauacaca

SEQ ID NO: 815276 - RNA, 22 nt, Human
uagcaagcuauaggagaugucu

SEQ ID NO: 815277 - RNA, 21 nt, Human
uaggauauuuaaugaugaaug

SEQ ID NO: 815278 - RNA, 28 nt, Human
uauguucaaagcaguaauacauacucaa

SEQ ID NO: 815279 - RNA, 23 nt, Human
uauucauccaccacagccaccuc

SEQ ID NO: 815280 - RNA, 24 nt, Human
ucaacccugaauauagcuaacaua

SEQ ID NO: 815281 - RNA, 18 nt, Human
ucacaaggucaggagauc

SEQ ID NO: 815282 - RNA, 24 nt, Human
ucacaaggucaggagaucgagacc

SEQ ID NO: 815283 - RNA, 23 nt, Human
ucagucuuucuuguaaccucaau

SEQ ID NO: 815284 - RNA, 25 nt, Human
uccaagccugaugcuuacaugcaac

SEQ ID NO: 815285 - RNA, 22 nt, Human
ucuaccuagcaagaagacuauu

SEQ ID NO: 815286 - RNA, 23 nt, Human
ucuagccugggcgacagagcgag

SEQ ID NO: 815287 - RNA, 24 nt, Human
ucuagccugggcgacagagcgaga

SEQ ID NO: 815288 - RNA, 24 nt, Human
ucucuacuaaaaauacaaaaaauu

SEQ ID NO: 815289 - RNA, 26 nt, Human
ucucugcggucagcaccuugugucuu

SEQ ID NO: 815290 - RNA, 23 nt, Human
ucuggagguaucauacccauggu

SEQ ID NO: 815291 - RNA, 19 nt, Human
ucuucuaaucuuugaaagc

SEQ ID NO: 815292 - RNA, 23 nt, Human
ugaaaaagcaauauaaaaccaac

SEQ ID NO: 815293 - RNA, 21 nt, Human
ugaaaaagcaauauaaaaccc

SEQ ID NO: 815294 - RNA, 19 nt, Human
ugaaagccaugagcuacag

SEQ ID NO: 815295 - RNA, 21 nt, Human
ugaauagacuaaccaaacaga

SEQ ID NO: 815296 - RNA, 24 nt, Human
ugaccccaauaaauucuccucuaa

SEQ ID NO: 815297 - RNA, 22 nt, Human
ugacuuaauaacaaaacucuca

SEQ ID NO: 815298 - RNA, 22 nt, Human
ugacuuugaguacaacaguagu

SEQ ID NO: 815299 - RNA, 25 nt, Human
ugagaacaccaggucuguuaaaggu

SEQ ID NO: 815300 - RNA, 24 nt, Human
ugagauuaaagaaaaaaucaaccc

SEQ ID NO: 815301 - RNA, 25 nt, Human
ugagcacaaaguucucuguaagagc

SEQ ID NO: 815302 - RNA, 23 nt, Human
ugaggcaggagaauggugugaac

SEQ ID NO: 815303 - RNA, 19 nt, Human
ugaggcuuuugaacuugaa

SEQ ID NO: 815304 - RNA, 22 nt, Human
ugaguacaacaguaguaccuua

SEQ ID NO: 815305 - RNA, 23 nt, Human
ugaugugccuccugguggauguc

SEQ ID NO: 815306 - RNA, 22 nt, Human
ugcaacaagucuuaacuguacc

SEQ ID NO: 815307 - RNA, 19 nt, Human
ugcccaugugacagaaaca

SEQ ID NO: 815308 - RNA, 25 nt, Human
ugccuguaguccccagcuacucagg

SEQ ID NO: 815309 - RNA, 21 nt, Human
ugcugaaauuauuacacacau

SEQ ID NO: 815310 - RNA, 21 nt, Human
uggagagagaacuugaaucau

SEQ ID NO: 815311 - RNA, 22 nt, Human
uggcaccgcgccuggacaccuc

SEQ ID NO: 815312 - RNA, 21 nt, Human
uggcucacgccuauaauccca

SEQ ID NO: 815313 - RNA, 18 nt, Human
ugggaggcagagaugaag

SEQ ID NO: 815314 - RNA, 19 nt, Human
ugggaggcagagaugaaga

SEQ ID NO: 815315 - RNA, 21 nt, Human
ugggaggcagagcuggcagug

SEQ ID NO: 815316 - RNA, 20 nt, Human
ugggaggccgaggcaggcag

SEQ ID NO: 815317 - RNA, 24 nt, Human
ugggaggccgaggcaggcagauca

SEQ ID NO: 815318 - RNA, 20 nt, Human
ugggcaaugggaggcagaga

SEQ ID NO: 815319 - RNA, 18 nt, Human
uggguucugaggcuuuug

SEQ ID NO: 815320 - RNA, 18 nt, Human
uggucaggaacaucacca

SEQ ID NO: 815321 - RNA, 21 nt, Human
ugguggaugugauacuaaugu

SEQ ID NO: 815322 - RNA, 24 nt, Human
ugguggcucacgccuauaauccca

SEQ ID NO: 815323 - RNA, 20 nt, Human
uggugugaacgugggaggca

SEQ ID NO: 815324 - RNA, 23 nt, Human
uguauaaaagcccucccuugccc

SEQ ID NO: 815325 - RNA, 24 nt, Human
ugucuaaaaucuaucuucaaguau

SEQ ID NO: 815326 - RNA, 18 nt, Human
uguguagauauguauaua

SEQ ID NO: 815327 - RNA, 18 nt, Human
ugugugggaagcgguugg

SEQ ID NO: 815328 - RNA, 21 nt, Human
uguuaaagguuacccgucugc

SEQ ID NO: 815329 - RNA, 23 nt, Human
uguugaacagagccugauuccca

SEQ ID NO: 815330 - RNA, 24 nt, Human
uuacagaauguuucuguuucacua

SEQ ID NO: 815331 - RNA, 24 nt, Human
uuagcugggcgugguggcgggugc

SEQ ID NO: 815332 - RNA, 21 nt, Human
uucaaagauguauaaaagccc

SEQ ID NO: 815333 - RNA, 25 nt, Human
uucaagaaauuagaaaggaaugacc

SEQ ID NO: 815334 - RNA, 24 nt, Human
uucacauaaauuauuuaauuauau

SEQ ID NO: 815335 - RNA, 18 nt, Human
uucauauggucaggaaca

SEQ ID NO: 815336 - RNA, 19 nt, Human
uucauccaccacagccacc

SEQ ID NO: 815337 - RNA, 21 nt, Human
uucauccaccacagccaccuc

SEQ ID NO: 815338 - RNA, 20 nt, Human
uuccccagcacagcugugcc

SEQ ID NO: 815339 - RNA, 23 nt, Human
uucuuuugugacuuugaguacaa

SEQ ID NO: 815340 - RNA, 19 nt, Human
uuggaauucaguaaaugug

SEQ ID NO: 815341 - RNA, 25 nt, Human
uugggaggccgaggcaggcagauca

SEQ ID NO: 815342 - RNA, 21 nt, Human
uuuacacugaccccaauaaau

SEQ ID NO: 815343 - RNA, 24 nt, Human
uuuaucagcuucccuucauaagag

SEQ ID NO: 815344 - RNA, 20 nt, Human
uuucugguuuuagaacucug

SEQ ID NO: 815345 - RNA, 20 nt, Human
uuuuccacuaaacucuccug

SEQ ID NO: 815346 - RNA, 22 nt, Human
aaaaagacaugcuacagguccu

SEQ ID NO: 815347 - RNA, 27 nt, Human
aaaacaccuaaccuucuucaccagccc

SEQ ID NO: 815348 - RNA, 20 nt, Human
aaaccagcagcauuggacag

SEQ ID NO: 815349 - RNA, 28 nt, Human
aaagaagccaaaccaaagagcuccugga

SEQ ID NO: 815350 - RNA, 24 nt, Human
aacaacucccugacuaauuccuac

SEQ ID NO: 815351 - RNA, 24 nt, Human
aacuuucuuccucagacaucucca

SEQ ID NO: 815352 - RNA, 24 nt, Human
aagaccacuuaacagacacaacuc

SEQ ID NO: 815353 - RNA, 20 nt, Human
aagguggcacuugccacccu

SEQ ID NO: 815354 - RNA, 21 nt, Human
aaucuugagagacugaacaua

SEQ ID NO: 815355 - RNA, 20 nt, Human
acagacauucucccugaccu

SEQ ID NO: 815356 - RNA, 22 nt, Human
acagaccacaagcacgucacaa

SEQ ID NO: 815357 - RNA, 22 nt, Human
acaggacagauugcugagggaa

SEQ ID NO: 815358 - RNA, 19 nt, Human
acaggguuuucucaguggg

SEQ ID NO: 815359 - RNA, 18 nt, Human
accccacagacacuucca

SEQ ID NO: 815360 - RNA, 21 nt, Human
acccugagauagaaaggaagg

SEQ ID NO: 815361 - RNA, 24 nt, Human
accggucgcucugcgaaaccagca

SEQ ID NO: 815362 - RNA, 20 nt, Human
acuuggucauagggaucaag

SEQ ID NO: 815363 - RNA, 20 nt, Human
agaccagagcgguucaggaa

SEQ ID NO: 815364 - RNA, 22 nt, Human
agaccagagcgguucaggaagg

SEQ ID NO: 815365 - RNA, 19 nt, Human
agaccccacagacacuucc

SEQ ID NO: 815366 - RNA, 25 nt, Human
agagaggcaaagaaagcuaugugga

SEQ ID NO: 815367 - RNA, 21 nt, Human
agcaagcacagaccacaagca

SEQ ID NO: 815368 - RNA, 24 nt, Human
agcaggaaugaaauagcaccaaga

SEQ ID NO: 815369 - RNA, 20 nt, Human
agccaaugcgcagcucuugg

SEQ ID NO: 815370 - RNA, 22 nt, Human
agccagcggcaacgcuuccugg

SEQ ID NO: 815371 - RNA, 21 nt, Human
aggcagggaaacagcgggaaa

SEQ ID NO: 815372 - RNA, 19 nt, Human
agguugaaaaagacaugcu

SEQ ID NO: 815373 - RNA, 19 nt, Human
agucaaauuccaaacacaa

SEQ ID NO: 815374 - RNA, 19 nt, Human
auacuucuccuuccucaca

SEQ ID NO: 815375 - RNA, 24 nt, Human
augaaaagaccacuuaacagacac

SEQ ID NO: 815376 - RNA, 24 nt, Human
caaacacacuaucccuacaccuug

SEQ ID NO: 815377 - RNA, 22 nt, Human
caaaccaaagagcuccuggaac

SEQ ID NO: 815378 - RNA, 18 nt, Human
caaagagcuccuggaaca

SEQ ID NO: 815379 - RNA, 22 nt, Human
caagcacugggguuuuuuuuuu

SEQ ID NO: 815380 - RNA, 18 nt, Human
caauugcugaagcccagg

SEQ ID NO: 815381 - RNA, 20 nt, Human
cacaacaacucccugacuaa

SEQ ID NO: 815382 - RNA, 24 nt, Human
cacccaaacacugcuuguggaacc

SEQ ID NO: 815383 - RNA, 24 nt, Human
caccuucaggaaggcaacacccaa

SEQ ID NO: 815384 - RNA, 25 nt, Human
cacucagccccaaggugacaaccaa

SEQ ID NO: 815385 - RNA, 18 nt, Human
cacucaggaccaaggcag

SEQ ID NO: 815386 - RNA, 22 nt, Human
cacugggguuuuuuuuuucaca

SEQ ID NO: 815387 - RNA, 18 nt, Human
cagacaggacagauugcu

SEQ ID NO: 815388 - RNA, 23 nt, Human
cagagugccaggggagggcacag

SEQ ID NO: 815389 - RNA, 21 nt, Human
cagauugcugagggaagccaa

SEQ ID NO: 815390 - RNA, 21 nt, Human
cagcagcauuggacagguggu

SEQ ID NO: 815391 - RNA, 21 nt, Human
cagccagcggcaacgcuuccu

SEQ ID NO: 815392 - RNA, 22 nt, Human
cagcgaagguggcacuugccac

SEQ ID NO: 815393 - RNA, 21 nt, Human
cagcgggaaagcuucaguccc

SEQ ID NO: 815394 - RNA, 19 nt, Human
cagcucccucgccagggaa

SEQ ID NO: 815395 - RNA, 23 nt, Human
caggaccaaggcagaugagaagc

SEQ ID NO: 815396 - RNA, 28 nt, Human
caggggcugcccucaggaggaggccugc

SEQ ID NO: 815397 - RNA, 19 nt, Human
cagguggucggccgaggag

SEQ ID NO: 815398 - RNA, 21 nt, Human
cagguugaaaaagacaugcua

SEQ ID NO: 815399 - RNA, 19 nt, Human
caucaaaagaagccaaacc

SEQ ID NO: 815400 - RNA, 24 nt, Human
ccaaaucuugagagacugaacaua

SEQ ID NO: 815401 - RNA, 23 nt, Human
ccacugauaggaagcuaaacaca

SEQ ID NO: 815402 - RNA, 21 nt, Human
ccagcggcaacgcuuccuggu

SEQ ID NO: 815403 - RNA, 22 nt, Human
ccaucaaaagaagccaaaccaa

SEQ ID NO: 815404 - RNA, 27 nt, Human
cccacagacacuuccaagcacugccgg

SEQ ID NO: 815405 - RNA, 19 nt, Human
cccaccagcauuuucuacc

SEQ ID NO: 815406 - RNA, 19 nt, Human
ccccacagacacuuccaag

SEQ ID NO: 815407 - RNA, 23 nt, Human
ccuacaacacaacucuagcacag

SEQ ID NO: 815408 - RNA, 21 nt, Human
ccucacucuucaccccuuuca

SEQ ID NO: 815409 - RNA, 19 nt, Human
ccucucagaccugccugcc

SEQ ID NO: 815410 - RNA, 24 nt, Human
ccuggugcuccaggggcugcccuc

SEQ ID NO: 815411 - RNA, 22 nt, Human
ccuugggucucagaaauggaaa

SEQ ID NO: 815412 - RNA, 24 nt, Human
ccuugggucucagaaauggaaagu

SEQ ID NO: 815413 - RNA, 21 nt, Human
ccuugggugaggguaggaagu

SEQ ID NO: 815414 - RNA, 25 nt, Human
cguaauuagacacuuccugucugcc

SEQ ID NO: 815415 - RNA, 21 nt, Human
cguaucuaugacucgguauac

SEQ ID NO: 815416 - RNA, 19 nt, Human
cucacucuucaccccuuuc

SEQ ID NO: 815417 - RNA, 22 nt, Human
cucagaaauggaaagucaaauu

SEQ ID NO: 815418 - RNA, 24 nt, Human
cucagccccaaggugacaaccaaa

SEQ ID NO: 815419 - RNA, 21 nt, Human
cucauaaacacggagacccac

SEQ ID NO: 815420 - RNA, 21 nt, Human
cuccaaaccagaaggaccuaa

SEQ ID NO: 815421 - RNA, 19 nt, Human
cuccacuuccuccaaacca

SEQ ID NO: 815422 - RNA, 19 nt, Human
cuccuggaacacucaggac

SEQ ID NO: 815423 - RNA, 18 nt, Human
cugaauuuuugaaaagaa

SEQ ID NO: 815424 - RNA, 19 nt, Human
cugcagcuaagucacagac

SEQ ID NO: 815425 - RNA, 22 nt, Human
cugcuuuugcaggcagggaaac

SEQ ID NO: 815426 - RNA, 22 nt, Human
cuuggucauagggaucaaguca

SEQ ID NO: 815427 - RNA, 22 nt, Human
gaaaagaccacuuaacagacac

SEQ ID NO: 815428 - RNA, 19 nt, Human
gaaggggauacugacaggu

SEQ ID NO: 815429 - RNA, 21 nt, Human
gacacuuccugucugccucag

SEQ ID NO: 815430 - RNA, 24 nt, Human
gaccgaaugggagcacagacagga

SEQ ID NO: 815431 - RNA, 21 nt, Human
gacuuggucauagggaucaag

SEQ ID NO: 815432 - RNA, 18 nt, Human
gagagagagagaagagua

SEQ ID NO: 815433 - RNA, 20 nt, Human
gagggagagagagagaagag

SEQ ID NO: 815434 - RNA, 19 nt, Human
gcagcccagugugucagaa

SEQ ID NO: 815435 - RNA, 25 nt, Human
gcgggggguggggaagccuguggga

SEQ ID NO: 815436 - RNA, 19 nt, Human
gcuccaggggcugcccuca

SEQ ID NO: 815437 - RNA, 23 nt, Human
gcugcuuuugcaggcagggaaac

SEQ ID NO: 815438 - RNA, 18 nt, Human
ggaaaacagccuccucau

SEQ ID NO: 815439 - RNA, 23 nt, Human
ggaaaacagccuccucauuucug

SEQ ID NO: 815440 - RNA, 18 nt, Human
ggaccaaggcagaugaga

SEQ ID NO: 815441 - RNA, 23 nt, Human
ggcagugagugggggcggggggu

SEQ ID NO: 815442 - RNA, 20 nt, Human
gggcagugagugggggcggg

SEQ ID NO: 815443 - RNA, 18 nt, Human
gggcgggggguggggaag

SEQ ID NO: 815444 - RNA, 28 nt, Human
ggggcgggggguggggaagccuguggga

SEQ ID NO: 815445 - RNA, 18 nt, Human
ggggggagggagagagag

SEQ ID NO: 815446 - RNA, 23 nt, Human
ggguaggaaguuggucccugggg

SEQ ID NO: 815447 - RNA, 24 nt, Human
guaauuagacacuuccugucugcc

SEQ ID NO: 815448 - RNA, 20 nt, Human
gucaaagugaacuacaaaca

SEQ ID NO: 815449 - RNA, 26 nt, Human
guggaaccaaaaucaguuucauucag

SEQ ID NO: 815450 - RNA, 18 nt, Human
uaaacccugagauagaaa

SEQ ID NO: 815451 - RNA, 23 nt, Human
uaaacccugagauagaaaggaag

SEQ ID NO: 815452 - RNA, 21 nt, Human
uaagucacagacauucucccu

SEQ ID NO: 815453 - RNA, 22 nt, Human
uacaaaagacuucucacucagc

SEQ ID NO: 815454 - RNA, 20 nt, Human
uaggaagcuaaacacaggca

SEQ ID NO: 815455 - RNA, 20 nt, Human
uaggaaguuggucccugggg

SEQ ID NO: 815456 - RNA, 19 nt, Human
uauacaauuuaaagcccac

SEQ ID NO: 815457 - RNA, 18 nt, Human
uauagaaugagacuggcu

SEQ ID NO: 815458 - RNA, 24 nt, Human
uaugaaaagaccacuuaacagaca

SEQ ID NO: 815459 - RNA, 18 nt, Human
ucaacaugucugacuaau

SEQ ID NO: 815460 - RNA, 27 nt, Human
ucaccccuuucauuguaaaagaagagc

SEQ ID NO: 815461 - RNA, 24 nt, Human
ucagaggaaaacagccuccucauu

SEQ ID NO: 815462 - RNA, 23 nt, Human
ucagccccaaggugacaaccaaa

SEQ ID NO: 815463 - RNA, 24 nt, Human
ucagccccaaggugacaaccaaaa

SEQ ID NO: 815464 - RNA, 18 nt, Human
ucagugccaggauccacu

SEQ ID NO: 815465 - RNA, 26 nt, Human
ucccuggggcagugagugggggcggg

SEQ ID NO: 815466 - RNA, 22 nt, Human
ucuaaagcaagucucuauaauc

SEQ ID NO: 815467 - RNA, 28 nt, Human
ucuccuagucugcagcuaagucacagac

SEQ ID NO: 815468 - RNA, 28 nt, Human
ucugcagcuaagucacagaccggggucc

SEQ ID NO: 815469 - RNA, 24 nt, Human
ugaaaagaccacuuaacagacaca

SEQ ID NO: 815470 - RNA, 22 nt, Human
ugaaaagccggccuccucuuuc

SEQ ID NO: 815471 - RNA, 22 nt, Human
ugacacauucaagagucaaagu

SEQ ID NO: 815472 - RNA, 22 nt, Human
ugacucauaaacacggagaccc

SEQ ID NO: 815473 - RNA, 18 nt, Human
ugagcaagcacagaccac

SEQ ID NO: 815474 - RNA, 23 nt, Human
ugagguaaggaacugugagaccc

SEQ ID NO: 815475 - RNA, 20 nt, Human
ugaguucccucacaagcacu

SEQ ID NO: 815476 - RNA, 23 nt, Human
ugcagcuaagucacagacauucu

SEQ ID NO: 815477 - RNA, 18 nt, Human
ugccucagagaggcaaag

SEQ ID NO: 815478 - RNA, 21 nt, Human
ugcgaaaccagcagcauugga

SEQ ID NO: 815479 - RNA, 18 nt, Human
ugcgccggggcuugacac

SEQ ID NO: 815480 - RNA, 20 nt, Human
uggaacacucaggaccaagg

SEQ ID NO: 815481 - RNA, 19 nt, Human
ugggacgagcuuuggaagc

SEQ ID NO: 815482 - RNA, 19 nt, Human
ugggaggaggagaccccac

SEQ ID NO: 815483 - RNA, 21 nt, Human
ugggugaggguaggaaguugg

SEQ ID NO: 815484 - RNA, 21 nt, Human
uggugcuccaggggcugcccu

SEQ ID NO: 815485 - RNA, 19 nt, Human
ugguucuaaagcaagucuc

SEQ ID NO: 815486 - RNA, 20 nt, Human
ugugcgcuacauguuacaua

SEQ ID NO: 815487 - RNA, 22 nt, Human
uguggcuagcaucaacaugucu

SEQ ID NO: 815488 - RNA, 21 nt, Human
uuaagcagaaggggauacuga

SEQ ID NO: 815489 - RNA, 21 nt, Human
uuccaucaaaagaagccaaac

SEQ ID NO: 815490 - RNA, 20 nt, Human
uucguggaggcuccacuucc

SEQ ID NO: 815491 - RNA, 23 nt, Human
uugacaccggacggcagcccagu

SEQ ID NO: 815492 - RNA, 18 nt, Human
uugguuuaaaaaaaaaaa

SEQ ID NO: 815493 - RNA, 20 nt, Human
uuuggccacacacacacacg

SEQ ID NO: 815494 - RNA, 22 nt, Human
uuuuguggccuuuuuugguuug

SEQ ID NO: 815495 - RNA, 20 nt, Human
uuuuugguuuguugguuuaa

SEQ ID NO: 815496 - RNA, 21 nt, Human
aagacagagucuugcucuguc

SEQ ID NO: 815497 - RNA, 22 nt, Human
aagaggcagggucuugccaugu

SEQ ID NO: 815498 - RNA, 21 nt, Human
aagcaauccucccaccucagc

SEQ ID NO: 815499 - RNA, 25 nt, Human
aagcaauccucccaccucagccucc

SEQ ID NO: 815500 - RNA, 25 nt, Human
aagcaauccucccgccucagccucc

SEQ ID NO: 815501 - RNA, 25 nt, Human
aagcaauccucccgccucagccucc

SEQ ID NO: 815502 - RNA, 20 nt, Human
aagcagccgcagcacugugg

SEQ ID NO: 815503 - RNA, 20 nt, Human
aaggagcaguggcuggucag

SEQ ID NO: 815504 - RNA, 19 nt, Human
aaggcauaggggucugggc

SEQ ID NO: 815505 - RNA, 18 nt, Human
aaggugaggacagaggug

SEQ ID NO: 815506 - RNA, 26 nt, Human
aaguacuaggauuacagguguaagcc

SEQ ID NO: 815507 - RNA, 21 nt, Human
acacugcccacagccugaaac

SEQ ID NO: 815508 - RNA, 24 nt, Human
acacugggcuuggcacuccaugcc

SEQ ID NO: 815509 - RNA, 22 nt, Human
accucagccuccagaguugcag

SEQ ID NO: 815510 - RNA, 23 nt, Human
accucggccagcuccugcacccu

SEQ ID NO: 815511 - RNA, 19 nt, Human
accugaaaagccccuggug

SEQ ID NO: 815512 - RNA, 21 nt, Human
accuggaccucugacgucaug

SEQ ID NO: 815513 - RNA, 22 nt, Human
agacagaagcagaacuccaggg

SEQ ID NO: 815514 - RNA, 22 nt, Human
agacuggaggcuccaugagggu

SEQ ID NO: 815515 - RNA, 19 nt, Human
agcagccgcagcacugugg

SEQ ID NO: 815516 - RNA, 20 nt, Human
agcagccgcagcacuguggc

SEQ ID NO: 815517 - RNA, 19 nt, Human
agccaccacacuuggccug

SEQ ID NO: 815518 - RNA, 19 nt, Human
agcccccuggccugcacag

SEQ ID NO: 815519 - RNA, 21 nt, Human
agcccucacaccuccugcacu

SEQ ID NO: 815520 - RNA, 18 nt, Human
aggaaccugauuccagac

SEQ ID NO: 815521 - RNA, 22 nt, Human
aggaaccugauuccagacagaa

SEQ ID NO: 815522 - RNA, 19 nt, Human
aggacagagguggcagggg

SEQ ID NO: 815523 - RNA, 20 nt, Human
aggcaggaaccugauuccag

SEQ ID NO: 815524 - RNA, 20 nt, Human
aggcaggcaccucacgggga

SEQ ID NO: 815525 - RNA, 18 nt, Human
aggcagggucuugccaug

SEQ ID NO: 815526 - RNA, 23 nt, Human
aggcagggucuugccauguugcc

SEQ ID NO: 815527 - RNA, 21 nt, Human
aggcaugaggcaucacaucca

SEQ ID NO: 815528 - RNA, 22 nt, Human
aggcaugccuggucagugcugu

SEQ ID NO: 815529 - RNA, 22 nt, Human
aggcuggucuccugagcucugc

SEQ ID NO: 815530 - RNA, 29 nt, Human
aggugaggacagagguggcaggggagggg

SEQ ID NO: 815531 - RNA, 22 nt, Human
agucugcggcaucagggcgcag

SEQ ID NO: 815532 - RNA, 23 nt, Human
agugcaguggugcaauuuuggcu

SEQ ID NO: 815533 - RNA, 24 nt, Human
agugcaguggugcaauuuuggcuc

SEQ ID NO: 815534 - RNA, 26 nt, Human
auccacaggaagcccaaguaugccag

SEQ ID NO: 815535 - RNA, 21 nt, Human
auccucccgccucagccuccc

SEQ ID NO: 815536 - RNA, 21 nt, Human
aucuaagagggaaacccuggc

SEQ ID NO: 815537 - RNA, 22 nt, Human
augcagguuuuucuccaggguu

SEQ ID NO: 815538 - RNA, 26 nt, Human
caaagcucgucagaacggugcccucc

SEQ ID NO: 815539 - RNA, 24 nt, Human
caaaguacuaggauuacaggugua

SEQ ID NO: 815540 - RNA, 27 nt, Human
caagcaauccucccgccucagccuccc

SEQ ID NO: 815541 - RNA, 18 nt, Human
cacaccuccugcacuacu

SEQ ID NO: 815542 - RNA, 20 nt, Human
cacagccccagggcuucagg

SEQ ID NO: 815543 - RNA, 23 nt, Human
cacaggaagcccaaguaugccag

SEQ ID NO: 815544 - RNA, 21 nt, Human
cacauccagcuaauuuuugua

SEQ ID NO: 815545 - RNA, 26 nt, Human
cacaugcacagcaugguuaacagcag

SEQ ID NO: 815546 - RNA, 18 nt, Human
cacccucugcacguccuc

SEQ ID NO: 815547 - RNA, 24 nt, Human
cacgagggugguguuggcccacuu

SEQ ID NO: 815548 - RNA, 22 nt, Human
cacgucuguuccuagccagaag

SEQ ID NO: 815549 - RNA, 23 nt, Human
cacugcagguucugccucccggg

SEQ ID NO: 815550 - RNA, 20 nt, Human
cagaaugucuuugcuggcau

SEQ ID NO: 815551 - RNA, 19 nt, Human
cagcacacugcccacagcc

SEQ ID NO: 815552 - RNA, 19 nt, Human
cagcaccucggccagcucc

SEQ ID NO: 815553 - RNA, 19 nt, Human
cagcagaagcagcacaaga

SEQ ID NO: 815554 - RNA, 24 nt, Human
cagcagcauuguccagcuccugcu

SEQ ID NO: 815555 - RNA, 20 nt, Human
cagcauggaggacacagccu

SEQ ID NO: 815556 - RNA, 21 nt, Human
cagcggggccacaguauccuc

SEQ ID NO: 815557 - RNA, 20 nt, Human
cagcggugagagguggcugg

SEQ ID NO: 815558 - RNA, 20 nt, Human
cagcucuaggucccaucacu

SEQ ID NO: 815559 - RNA, 23 nt, Human
cagggucuugccauguugccagg

SEQ ID NO: 815560 - RNA, 24 nt, Human
cagugaucccagcacaugcucucu

SEQ ID NO: 815561 - RNA, 20 nt, Human
cagugccccacgucuguucc

SEQ ID NO: 815562 - RNA, 24 nt, Human
cauccaggaggggcucagccugcu

SEQ ID NO: 815563 - RNA, 20 nt, Human
cauggugacaagggggccuu

SEQ ID NO: 815564 - RNA, 21 nt, Human
caugugcaggggcccaggugc

SEQ ID NO: 815565 - RNA, 23 nt, Human
cauguugccaggcuggucucgaa

SEQ ID NO: 815566 - RNA, 21 nt, Human
cauuguccagcuccugcuugu

SEQ ID NO: 815567 - RNA, 20 nt, Human
ccaaaguacuaggauuacag

SEQ ID NO: 815568 - RNA, 21 nt, Human
ccaaaguacuaggauuacagg

SEQ ID NO: 815569 - RNA, 24 nt, Human
ccaaaguacuaggauuacaggugu

SEQ ID NO: 815570 - RNA, 20 nt, Human
ccagaaggcacaaggaggcu

SEQ ID NO: 815571 - RNA, 19 nt, Human
ccaggggucccagggcugu

SEQ ID NO: 815572 - RNA, 21 nt, Human
ccaggugcccggcuguacccc

SEQ ID NO: 815573 - RNA, 20 nt, Human
ccaugaggguggggcuuugc

SEQ ID NO: 815574 - RNA, 18 nt, Human
ccauguugccaggcuggu

SEQ ID NO: 815575 - RNA, 21 nt, Human
ccauguugccaggcuggucuc

SEQ ID NO: 815576 - RNA, 22 nt, Human
ccauguugccaggcuggucucg

SEQ ID NO: 815577 - RNA, 19 nt, Human
cccaggcuggagugcagug

SEQ ID NO: 815578 - RNA, 22 nt, Human
cccaggcuggagugcaguggug

SEQ ID NO: 815579 - RNA, 24 nt, Human
cccaggugcccggcuguaccccca

SEQ ID NO: 815580 - RNA, 25 nt, Human
ccccaggccgcccuucagggucugc

SEQ ID NO: 815581 - RNA, 18 nt, Human
ccccagggcuucaggacu

SEQ ID NO: 815582 - RNA, 22 nt, Human
cccccuggcaguuuucccagca

SEQ ID NO: 815583 - RNA, 20 nt, Human
ccccgggacugcagaaacga

SEQ ID NO: 815584 - RNA, 18 nt, Human
ccccuggugaagcugugc

SEQ ID NO: 815585 - RNA, 18 nt, Human
cccgggcuuaagcaaucc

SEQ ID NO: 815586 - RNA, 20 nt, Human
cccucugcacguccuccaag

SEQ ID NO: 815587 - RNA, 19 nt, Human
ccucaacacaugugucucc

SEQ ID NO: 815588 - RNA, 21 nt, Human
ccucaucguccacucucuuca

SEQ ID NO: 815589 - RNA, 21 nt, Human
ccuccaagccgguggugacuu

SEQ ID NO: 815590 - RNA, 24 nt, Human
ccucccaccucagccuccagaguu

SEQ ID NO: 815591 - RNA, 21 nt, Human
ccuccugcacuacugggagcc

SEQ ID NO: 815592 - RNA, 21 nt, Human
ccugcacccucugcacguccu

SEQ ID NO: 815593 - RNA, 18 nt, Human
ccugcuugucagguggag

SEQ ID NO: 815594 - RNA, 18 nt, Human
ccuggccucaagcaaucc

SEQ ID NO: 815595 - RNA, 19 nt, Human
ccuggucagugcuguggcu

SEQ ID NO: 815596 - RNA, 19 nt, Human
cgccaaaaguaagaggauc

SEQ ID NO: 815597 - RNA, 24 nt, Human
cgccucagccucccaaaguacuag

SEQ ID NO: 815598 - RNA, 18 nt, Human
cgcuggggucccucugcc

SEQ ID NO: 815599 - RNA, 23 nt, Human
cggugggaagcccuucccagcuc

SEQ ID NO: 815600 - RNA, 20 nt, Human
cuauaggcaugaggcaucac

SEQ ID NO: 815601 - RNA, 24 nt, Human
cucaagcaauccucccgccucagc

SEQ ID NO: 815602 - RNA, 21 nt, Human
cucacggggaggcacagugcu

SEQ ID NO: 815603 - RNA, 24 nt, Human
cucacugcagguucugccucccgg

SEQ ID NO: 815604 - RNA, 23 nt, Human
cuccucaucguccacucucuuca

SEQ ID NO: 815605 - RNA, 23 nt, Human
cucugcccguaggccacgagcag

SEQ ID NO: 815606 - RNA, 19 nt, Human
cugcacccucugcacgucc

SEQ ID NO: 815607 - RNA, 20 nt, Human
cugcacccucugcacguccu

SEQ ID NO: 815608 - RNA, 19 nt, Human
cugcuugucagguggagga

SEQ ID NO: 815609 - RNA, 23 nt, Human
cuggaggugucuguugagguggu

SEQ ID NO: 815610 - RNA, 18 nt, Human
cuggccucaagcaauccu

SEQ ID NO: 815611 - RNA, 22 nt, Human
cugguagacaucccugcugcug

SEQ ID NO: 815612 - RNA, 21 nt, Human
cuggucuguugcucagggaag

SEQ ID NO: 815613 - RNA, 18 nt, Human
cuucaccaucagaguggg

SEQ ID NO: 815614 - RNA, 21 nt, Human
cuuucuguuccuugagguggg

SEQ ID NO: 815615 - RNA, 18 nt, Human
gaagcccuucccagcucu

SEQ ID NO: 815616 - RNA, 23 nt, Human
gaaugaauaaaugagcuuggaug

SEQ ID NO: 815617 - RNA, 23 nt, Human
gaauuccuggccucaagcaaucc

SEQ ID NO: 815618 - RNA, 18 nt, Human
gacuauaggcaugaggca

SEQ ID NO: 815619 - RNA, 18 nt, Human
gacugcagaaacgagcug

SEQ ID NO: 815620 - RNA, 20 nt, Human
gagcccuggcuuucaugcuc

SEQ ID NO: 815621 - RNA, 19 nt, Human
gaggacagagguggcaggg

SEQ ID NO: 815622 - RNA, 19 nt, Human
gaggaucuugagucccugc

SEQ ID NO: 815623 - RNA, 18 nt, Human
gagggaggagaaagucag

SEQ ID NO: 815624 - RNA, 20 nt, Human
gaggggcucagccugcucug

SEQ ID NO: 815625 - RNA, 18 nt, Human
gaggguggucugcacaug

SEQ ID NO: 815626 - RNA, 18 nt, Human
gauuacagguguaagcca

SEQ ID NO: 815627 - RNA, 21 nt, Human
gauuacagguguaagccacca

SEQ ID NO: 815628 - RNA, 22 nt, Human
gcacagugcugaucacauaggu

SEQ ID NO: 815629 - RNA, 23 nt, Human
gcagaacuccaggggucccaggg

SEQ ID NO: 815630 - RNA, 21 nt, Human
gcagcacaagaggcagcuaga

SEQ ID NO: 815631 - RNA, 18 nt, Human
gccagcuggaggagcugc

SEQ ID NO: 815632 - RNA, 18 nt, Human
gcccuggcuuucaugcuc

SEQ ID NO: 815633 - RNA, 21 nt, Human
gcccuggcuuucaugcucuug

SEQ ID NO: 815634 - RNA, 21 nt, Human
gcucacugcagguucugccuc

SEQ ID NO: 815635 - RNA, 19 nt, Human
ggacacagccuuggccagc

SEQ ID NO: 815636 - RNA, 23 nt, Human
ggacagagguggcaggggagggg

SEQ ID NO: 815637 - RNA, 18 nt, Human
ggaggaacugaggcuugg

SEQ ID NO: 815638 - RNA, 19 nt, Human
ggaggaacugaggcuuggg

SEQ ID NO: 815639 - RNA, 20 nt, Human
ggaggggguggccagcaugg

SEQ ID NO: 815640 - RNA, 19 nt, Human
ggauuacagguguaagcca

SEQ ID NO: 815641 - RNA, 22 nt, Human
ggauuacagguguaagccacca

SEQ ID NO: 815642 - RNA, 19 nt, Human
ggcaggaggaacugaggcu

SEQ ID NO: 815643 - RNA, 20 nt, Human
ggccuuggcacucacuguca

SEQ ID NO: 815644 - RNA, 23 nt, Human
gggcucagccugcucuguugggg

SEQ ID NO: 815645 - RNA, 19 nt, Human
gggcuuugccagccugguu

SEQ ID NO: 815646 - RNA, 21 nt, Human
ggggagggaggagaaagucag

SEQ ID NO: 815647 - RNA, 19 nt, Human
gggucccagggcuguggag

SEQ ID NO: 815648 - RNA, 20 nt, Human
gguggcaggggagggaggag

SEQ ID NO: 815649 - RNA, 20 nt, Human
ggugucuguugaggugguag

SEQ ID NO: 815650 - RNA, 19 nt, Human
gguuuguaccuguuugugu

SEQ ID NO: 815651 - RNA, 18 nt, Human
gucccaguguugccagca

SEQ ID NO: 815652 - RNA, 22 nt, Human
gucugggcccaacagauguccu

SEQ ID NO: 815653 - RNA, 22 nt, Human
guggaggcguugcagaagaugg

SEQ ID NO: 815654 - RNA, 20 nt, Human
guggcaggggagggaggaga

SEQ ID NO: 815655 - RNA, 24 nt, Human
guugcagaagauggcaaagcucgu

SEQ ID NO: 815656 - RNA, 18 nt, Human
uaacgcagcugguuugua

SEQ ID NO: 815657 - RNA, 18 nt, Human
uaagagggaaacccuggc

SEQ ID NO: 815658 - RNA, 27 nt, Human
uaagcaauccucccaccucagccucca

SEQ ID NO: 815659 - RNA, 22 nt, Human
uaauuuuuguauuuuucaaaga

SEQ ID NO: 815660 - RNA, 23 nt, Human
uaauuuuuguauuuuucaaagag

SEQ ID NO: 815661 - RNA, 24 nt, Human
uaauuuuuguauuuuucaaagagg

SEQ ID NO: 815662 - RNA, 20 nt, Human
uacacagagauggagggggu

SEQ ID NO: 815663 - RNA, 21 nt, Human
uacagguguaagccaccacac

SEQ ID NO: 815664 - RNA, 27 nt, Human
uacuaggauuacagguguaagccacca

SEQ ID NO: 815665 - RNA, 19 nt, Human
uagcuccaaggcuggucuc

SEQ ID NO: 815666 - RNA, 22 nt, Human
uaggauuacagguguaagccac

SEQ ID NO: 815667 - RNA, 24 nt, Human
uaggauuacagguguaagccacca

SEQ ID NO: 815668 - RNA, 18 nt, Human
uagugcaggcaggcaccu

SEQ ID NO: 815669 - RNA, 19 nt, Human
uauccccaaugucuacagc

SEQ ID NO: 815670 - RNA, 22 nt, Human
ucaaagaggcagggucuugcca

SEQ ID NO: 815671 - RNA, 23 nt, Human
ucacugcagguucugccucccgg

SEQ ID NO: 815672 - RNA, 24 nt, Human
ucacugcagguucugccucccggg

SEQ ID NO: 815673 - RNA, 23 nt, Human
ucagggcgcagggaggagccuug

SEQ ID NO: 815674 - RNA, 18 nt, Human
ucagguggaggaauggaa

SEQ ID NO: 815675 - RNA, 22 nt, Human
ucagguggaucuaacacugggc

SEQ ID NO: 815676 - RNA, 23 nt, Human
ucagguggaucuaacacugggcu

SEQ ID NO: 815677 - RNA, 18 nt, Human
ucaugucuuaaccccgcc

SEQ ID NO: 815678 - RNA, 21 nt, Human
uccaggaggggcucagccugc

SEQ ID NO: 815679 - RNA, 27 nt, Human
uccaggggucccagggcuguggaggcg

SEQ ID NO: 815680 - RNA, 24 nt, Human
uccaugacucgaagcagccgcagc

SEQ ID NO: 815681 - RNA, 23 nt, Human
ucccaaaguacuaggauuacagg

SEQ ID NO: 815682 - RNA, 22 nt, Human
ucccaggcuggagugcaguggu

SEQ ID NO: 815683 - RNA, 18 nt, Human
ucccgggcuuaagcaauc

SEQ ID NO: 815684 - RNA, 24 nt, Human
ucccgggcuuaagcaauccuccca

SEQ ID NO: 815685 - RNA, 23 nt, Human
ucccugcaggcccaaggagcagu

SEQ ID NO: 815686 - RNA, 21 nt, Human
ucccugguggcugccuggcgc

SEQ ID NO: 815687 - RNA, 24 nt, Human
ucccugguggcugccuggcgccuc

SEQ ID NO: 815688 - RNA, 21 nt, Human
uccuccccauaggcaugccug

SEQ ID NO: 815689 - RNA, 27 nt, Human
uccucccgccucagccucccaaaguac

SEQ ID NO: 815690 - RNA, 23 nt, Human
uccugagcccuggcuuucaugcc

SEQ ID NO: 815691 - RNA, 20 nt, Human
ucucaggacuccuucaggug

SEQ ID NO: 815692 - RNA, 24 nt, Human
ucucccaggcuggagugcaguggu

SEQ ID NO: 815693 - RNA, 21 nt, Human
ucucgaauuccuggccucaag

SEQ ID NO: 815694 - RNA, 24 nt, Human
ucugccucccgggcuuaagcaauc

SEQ ID NO: 815695 - RNA, 19 nt, Human
ucugucucccaggcuggag

SEQ ID NO: 815696 - RNA, 24 nt, Human
ucugucucccaggcuggagugcag

SEQ ID NO: 815697 - RNA, 25 nt, Human
ucuguguguguguguguuugugugu

SEQ ID NO: 815698 - RNA, 20 nt, Human
ucuugagucccugcaggccc

SEQ ID NO: 815699 - RNA, 22 nt, Human
ucuugccauguugccaggcugg

SEQ ID NO: 815700 - RNA, 23 nt, Human
ucuugccauguugccaggcuggu

SEQ ID NO: 815701 - RNA, 19 nt, Human
ucuugcucugucucccagg

SEQ ID NO: 815702 - RNA, 22 nt, Human
ucuugcucugucucccaggcug

SEQ ID NO: 815703 - RNA, 23 nt, Human
ucuugcucugucucccaggcugg

SEQ ID NO: 815704 - RNA, 24 nt, Human
ucuugcucugucucccaggcugga

SEQ ID NO: 815705 - RNA, 22 nt, Human
ucuugguucagcauggaggaca

SEQ ID NO: 815706 - RNA, 19 nt, Human
ugaaaggcagacagaggac

SEQ ID NO: 815707 - RNA, 21 nt, Human
ugaaaggcagacagaggacag

SEQ ID NO: 815708 - RNA, 19 nt, Human
ugacucgaagcagccgcag

SEQ ID NO: 815709 - RNA, 20 nt, Human
ugacugcagacagugauccc

SEQ ID NO: 815710 - RNA, 21 nt, Human
ugagcagaaugucuuugcugg

SEQ ID NO: 815711 - RNA, 25 nt, Human
ugagcagaaugucuuugcuggcauu

SEQ ID NO: 815712 - RNA, 23 nt, Human
ugagcccucugugugugugugug

SEQ ID NO: 815713 - RNA, 24 nt, Human
ugagcccucugugugugugugugu

SEQ ID NO: 815714 - RNA, 18 nt, Human
ugaggacagagguggcag

SEQ ID NO: 815715 - RNA, 19 nt, Human
ugaggacagagguggcagg

SEQ ID NO: 815716 - RNA, 20 nt, Human
ugaggugguaggcgcugggg

SEQ ID NO: 815717 - RNA, 21 nt, Human
ugauucggaugaccucucccc

SEQ ID NO: 815718 - RNA, 22 nt, Human
ugcaaagaaagcagcgaauccc

SEQ ID NO: 815719 - RNA, 23 nt, Human
ugcaaagaaagcagcgaauccca

SEQ ID NO: 815720 - RNA, 22 nt, Human
ugcacaugcuccaugacucgaa

SEQ ID NO: 815721 - RNA, 22 nt, Human
ugcaguggugcaauuuuggcuc

SEQ ID NO: 815722 - RNA, 22 nt, Human
ugccagcagcauuguccagcuc

SEQ ID NO: 815723 - RNA, 23 nt, Human
ugccaggauuucucugaugaggg

SEQ ID NO: 815724 - RNA, 23 nt, Human
ugccauguugccaggcuggucuc

SEQ ID NO: 815725 - RNA, 22 nt, Human
ugccuagcacagggcuuuggag

SEQ ID NO: 815726 - RNA, 24 nt, Human
ugcucugucucccaggcuggagug

SEQ ID NO: 815727 - RNA, 24 nt, Human
uggaaugaaccagguuaggggaug

SEQ ID NO: 815728 - RNA, 18 nt, Human
uggaaugcuacauccuca

SEQ ID NO: 815729 - RNA, 20 nt, Human
uggagcaucccagguauggc

SEQ ID NO: 815730 - RNA, 20 nt, Human
uggaggaauggaaggugugg

SEQ ID NO: 815731 - RNA, 21 nt, Human
uggaggaauggaaggugugga

SEQ ID NO: 815732 - RNA, 20 nt, Human
uggaggagcugcucggggcc

SEQ ID NO: 815733 - RNA, 23 nt, Human
uggaggggguggccagcauggag

SEQ ID NO: 815734 - RNA, 18 nt, Human
uggagguguugcucugga

SEQ ID NO: 815735 - RNA, 19 nt, Human
uggagugcaguggugcaau

SEQ ID NO: 815736 - RNA, 28 nt, Human
uggagugcaguggugcaauucuagcacg

SEQ ID NO: 815737 - RNA, 24 nt, Human
uggagugcaguggugcaauuuugg

SEQ ID NO: 815738 - RNA, 19 nt, Human
uggcagauacacugauggg

SEQ ID NO: 815739 - RNA, 22 nt, Human
uggcagcggugagagguggcug

SEQ ID NO: 815740 - RNA, 20 nt, Human
uggcaggggagggaggagaa

SEQ ID NO: 815741 - RNA, 24 nt, Human
uggccaaaauccucugagucugca

SEQ ID NO: 815742 - RNA, 22 nt, Human
uggccagcuggaggagcugcuc

SEQ ID NO: 815743 - RNA, 20 nt, Human
uggccucaagcaauccuccc

SEQ ID NO: 815744 - RNA, 21 nt, Human
uggccucaagcaauccucccg

SEQ ID NO: 815745 - RNA, 24 nt, Human
uggccucaagcaauccucccgccu

SEQ ID NO: 815746 - RNA, 20 nt, Human
uggcuggucagacacaugca

SEQ ID NO: 815747 - RNA, 27 nt, Human
ugggccgagggugugaguuccuuacuc

SEQ ID NO: 815748 - RNA, 22 nt, Human
uggggcaauagugcaggcaggc

SEQ ID NO: 815749 - RNA, 20 nt, Human
ugguaggcgcuggggucccu

SEQ ID NO: 815750 - RNA, 19 nt, Human
uggugacaagggggccuuc

SEQ ID NO: 815751 - RNA, 24 nt, Human
uggugcaauuuuggcucacugcag

SEQ ID NO: 815752 - RNA, 19 nt, Human
ugguucagcauggaggaca

SEQ ID NO: 815753 - RNA, 18 nt, Human
uguacccccaggccgccc

SEQ ID NO: 815754 - RNA, 20 nt, Human
ugugagaucuaagagggaaa

SEQ ID NO: 815755 - RNA, 21 nt, Human
ugugcuggaggugucuguuga

SEQ ID NO: 815756 - RNA, 27 nt, Human
uguggggauuuucucugaaggugaggc

SEQ ID NO: 815757 - RNA, 23 nt, Human
uguguguguguguguuugugugu

SEQ ID NO: 815758 - RNA, 24 nt, Human
uguguguguguguguuugugugug

SEQ ID NO: 815759 - RNA, 20 nt, Human
uguguguguguguuugugug

SEQ ID NO: 815760 - RNA, 21 nt, Human
uguguguguguguuugugugu

SEQ ID NO: 815761 - RNA, 18 nt, Human
uguguguguuugugugug

SEQ ID NO: 815762 - RNA, 25 nt, Human
uucaaagaggcagggucuugccaug

SEQ ID NO: 815763 - RNA, 20 nt, Human
uuccagcacacugcccacag

SEQ ID NO: 815764 - RNA, 25 nt, Human
uuccuggccucaagcaauccucccg

SEQ ID NO: 815765 - RNA, 21 nt, Human
uucucugacacggcagccugg

SEQ ID NO: 815766 - RNA, 25 nt, Human
uucugaucuuguuggggaccccacu

SEQ ID NO: 815767 - RNA, 19 nt, Human
uugaggugggugguuuuca

SEQ ID NO: 815768 - RNA, 24 nt, Human
uugccaggcuggucucgaauuccu

SEQ ID NO: 815769 - RNA, 18 nt, Human
uugcucugucucccaggc

SEQ ID NO: 815770 - RNA, 21 nt, Human
uuguuggggaccccacuucag

SEQ ID NO: 815771 - RNA, 23 nt, Human
uuguuggggaccccacuucagau

SEQ ID NO: 815772 - RNA, 20 nt, Human
uuuuuguauuuuucaaagag

SEQ ID NO: 815773 - RNA, 23 nt, Human
uuuuuguauuuuucaaagaggca

SEQ ID NO: 815774 - RNA, 18 nt, Human
aaaccagggcaucuaagc

SEQ ID NO: 815775 - RNA, 19 nt, Human
aaaggcacucugggcccag

SEQ ID NO: 815776 - RNA, 21 nt, Human
agacaagagggacaaaccagg

SEQ ID NO: 815777 - RNA, 22 nt, Human
agacaagagggacaaaccaggg

SEQ ID NO: 815778 - RNA, 19 nt, Human
agcagggcgugggguggcu

SEQ ID NO: 815779 - RNA, 19 nt, Human
agcagguccgaugugggga

SEQ ID NO: 815780 - RNA, 18 nt, Human
agcccaacccugaaaggc

SEQ ID NO: 815781 - RNA, 22 nt, Human
agccccguguccucccugccug

SEQ ID NO: 815782 - RNA, 18 nt, Human
agccuccccagccccgcu

SEQ ID NO: 815783 - RNA, 21 nt, Human
agccugggaugccacagcacu

SEQ ID NO: 815784 - RNA, 24 nt, Human
agcugagcugaaugccccggcccc

SEQ ID NO: 815785 - RNA, 26 nt, Human
aggcaguccuugccgugccagcuucc

SEQ ID NO: 815786 - RNA, 23 nt, Human
aggccaguggcaggagagcuggg

SEQ ID NO: 815787 - RNA, 22 nt, Human
aggccuguggugggcagcugga

SEQ ID NO: 815788 - RNA, 20 nt, Human
agggaaccgauccagguuug

SEQ ID NO: 815789 - RNA, 18 nt, Human
agggagcaugggccucag

SEQ ID NO: 815790 - RNA, 19 nt, Human
agggcgugggguggcucag

SEQ ID NO: 815791 - RNA, 25 nt, Human
aguccuuugucuguguucuccaggg

SEQ ID NO: 815792 - RNA, 27 nt, Human
aguggcaggagagcuggguggauuacc

SEQ ID NO: 815793 - RNA, 22 nt, Human
augccugcagccuccccagccc

SEQ ID NO: 815794 - RNA, 22 nt, Human
caacccugaaaggccaguggca

SEQ ID NO: 815795 - RNA, 21 nt, Human
caagagggacaaaccagggca

SEQ ID NO: 815796 - RNA, 19 nt, Human
caccccccacccccugcaa

SEQ ID NO: 815797 - RNA, 23 nt, Human
caccccccacccccugcaaacug

SEQ ID NO: 815798 - RNA, 26 nt, Human
caccgcugauagcugggggcccgugc

SEQ ID NO: 815799 - RNA, 21 nt, Human
cacugggcccguuugggacug

SEQ ID NO: 815800 - RNA, 18 nt, Human
cagcacugccugcaccgc

SEQ ID NO: 815801 - RNA, 19 nt, Human
cagccuccacgaccugggc

SEQ ID NO: 815802 - RNA, 20 nt, Human
cagccucuguggcuguuccc

SEQ ID NO: 815803 - RNA, 22 nt, Human
cagcugcugggcccagccuccc

SEQ ID NO: 815804 - RNA, 19 nt, Human
cagcuggaggcagcagcag

SEQ ID NO: 815805 - RNA, 19 nt, Human
cagcuguggcugcuguggc

SEQ ID NO: 815806 - RNA, 23 nt, Human
caggacuggaagagcccugcuag

SEQ ID NO: 815807 - RNA, 23 nt, Human
caggagacaagagggacaaacca

SEQ ID NO: 815808 - RNA, 19 nt, Human
caggcuccgggccuacacu

SEQ ID NO: 815809 - RNA, 22 nt, Human
caguagcagccugccuugggau

SEQ ID NO: 815810 - RNA, 23 nt, Human
cauugcuggugcagugggggccu

SEQ ID NO: 815811 - RNA, 19 nt, Human
ccacagcacugccugcacc

SEQ ID NO: 815812 - RNA, 23 nt, Human
ccaccagugucucugaugccugc

SEQ ID NO: 815813 - RNA, 21 nt, Human
ccagccucgacucaccccagc

SEQ ID NO: 815814 - RNA, 21 nt, Human
cccagcccaacccugaaaggc

SEQ ID NO: 815815 - RNA, 23 nt, Human
cccaggggccucagagccccagg

SEQ ID NO: 815816 - RNA, 20 nt, Human
ccccaggcuccgagaggggc

SEQ ID NO: 815817 - RNA, 24 nt, Human
cccccugcaaacugcucagucuca

SEQ ID NO: 815818 - RNA, 22 nt, Human
cccccugggucugggguuccug

SEQ ID NO: 815819 - RNA, 24 nt, Human
ccccgcgccgggccugcaggcucc

SEQ ID NO: 815820 - RNA, 23 nt, Human
ccccuccacccuuccucccccug

SEQ ID NO: 815821 - RNA, 21 nt, Human
ccccugcaaacugcucagucu

SEQ ID NO: 815822 - RNA, 22 nt, Human
cccggagcagggcguggggugg

SEQ ID NO: 815823 - RNA, 23 nt, Human
cccggagccugggaugccacagc

SEQ ID NO: 815824 - RNA, 24 nt, Human
cccggcgcuugggugggccugagg

SEQ ID NO: 815825 - RNA, 23 nt, Human
cccgugcugcaggacuggaagag

SEQ ID NO: 815826 - RNA, 23 nt, Human
cccguguccucccugccuggggc

SEQ ID NO: 815827 - RNA, 19 nt, Human
cccugcaaacugcucaguc

SEQ ID NO: 815828 - RNA, 20 nt, Human
cccuggacagagcagggcga

SEQ ID NO: 815829 - RNA, 22 nt, Human
ccgaccugagccugccagccuc

SEQ ID NO: 815830 - RNA, 18 nt, Human
ccggagcagggcgugggg

SEQ ID NO: 815831 - RNA, 22 nt, Human
ccuacacugagcacauccgggg

SEQ ID NO: 815832 - RNA, 23 nt, Human
ccucagagccccaggugccuggg

SEQ ID NO: 815833 - RNA, 18 nt, Human
ccuccgauggccaugggu

SEQ ID NO: 815834 - RNA, 19 nt, Human
ccucggcgcucagccagcu

SEQ ID NO: 815835 - RNA, 24 nt, Human
ccucugcagcccggcgcuugggug

SEQ ID NO: 815836 - RNA, 20 nt, Human
ccucugcauaaggggcuguc

SEQ ID NO: 815837 - RNA, 22 nt, Human
ccugcaccgcugauagcugggg

SEQ ID NO: 815838 - RNA, 27 nt, Human
ccugcagccuccccagccccgcuuccu

SEQ ID NO: 815839 - RNA, 21 nt, Human
ccugcggggaaguccuuuguc

SEQ ID NO: 815840 - RNA, 21 nt, Human
ccuggcagcuuuguccccacc

SEQ ID NO: 815841 - RNA, 18 nt, Human
cgcccugccccgcaccca

SEQ ID NO: 815842 - RNA, 18 nt, Human
cgcugcuuuuucucuuuc

SEQ ID NO: 815843 - RNA, 21 nt, Human
cggagcugcccggagccuggg

SEQ ID NO: 815844 - RNA, 22 nt, Human
cggcgcucagccagcugcagcc

SEQ ID NO: 815845 - RNA, 23 nt, Human
cggucccaagcaagucaccccuu

SEQ ID NO: 815846 - RNA, 18 nt, Human
cuagggcuuuagggaacc

SEQ ID NO: 815847 - RNA, 24 nt, Human
cuccacccuuccucccccuggguc

SEQ ID NO: 815848 - RNA, 23 nt, Human
cuccaggggcagcugcugggccc

SEQ ID NO: 815849 - RNA, 25 nt, Human
cucggggcuucucuuucccuaaggg

SEQ ID NO: 815850 - RNA, 19 nt, Human
cucugggcccagcccaacc

SEQ ID NO: 815851 - RNA, 19 nt, Human
cugcagccccaaaggucua

SEQ ID NO: 815852 - RNA, 21 nt, Human
cugcugggcccagccucccca

SEQ ID NO: 815853 - RNA, 19 nt, Human
cugggcccguuugggacug

SEQ ID NO: 815854 - RNA, 19 nt, Human
cugugguguggcgggaagg

SEQ ID NO: 815855 - RNA, 21 nt, Human
cugugguguggcgggaaggga

SEQ ID NO: 815856 - RNA, 18 nt, Human
cuugguuuucuagcauug

SEQ ID NO: 815857 - RNA, 20 nt, Human
gaccugagccugccagccuc

SEQ ID NO: 815858 - RNA, 24 nt, Human
gagcauggaaaggggacgacaagg

SEQ ID NO: 815859 - RNA, 26 nt, Human
gagcgcagccacggcacgucucacac

SEQ ID NO: 815860 - RNA, 26 nt, Human
gagcugcccggagccugggaugccac

SEQ ID NO: 815861 - RNA, 24 nt, Human
gaggagaaggcuugggaaggcucc

SEQ ID NO: 815862 - RNA, 21 nt, Human
gaggccaccccgggggucagc

SEQ ID NO: 815863 - RNA, 19 nt, Human
gaggguggagaccaggccu

SEQ ID NO: 815864 - RNA, 21 nt, Human
gcaaaggcaguagcagccugc

SEQ ID NO: 815865 - RNA, 23 nt, Human
gcaccccccacccccugcaaacu

SEQ ID NO: 815866 - RNA, 19 nt, Human
gcagcagcagccuguuugc

SEQ ID NO: 815867 - RNA, 23 nt, Human
gcaguagcagccugccuugggau

SEQ ID NO: 815868 - RNA, 21 nt, Human
gccaaaagccccguguccucc

SEQ ID NO: 815869 - RNA, 25 nt, Human
gccagcuuccccgguucagagcuga

SEQ ID NO: 815870 - RNA, 23 nt, Human
gccaugggugucgggcugaggag

SEQ ID NO: 815871 - RNA, 24 nt, Human
gcccagcccaacccugaaaggcca

SEQ ID NO: 815872 - RNA, 24 nt, Human
gcccguuugggacuggguugagcc

SEQ ID NO: 815873 - RNA, 19 nt, Human
gccuacacugagcacaucc

SEQ ID NO: 815874 - RNA, 19 nt, Human
gccuggggcaggccugugg

SEQ ID NO: 815875 - RNA, 18 nt, Human
gcgcucagccagcugcag

SEQ ID NO: 815876 - RNA, 19 nt, Human
gcgggaagggacuuccuga

SEQ ID NO: 815877 - RNA, 22 nt, Human
gcggggaaguccuuugucugug

SEQ ID NO: 815878 - RNA, 19 nt, Human
gcugaggagaaggcuuggg

SEQ ID NO: 815879 - RNA, 18 nt, Human
gcugcagucacugugccu

SEQ ID NO: 815880 - RNA, 19 nt, Human
gcugggcccagccucccca

SEQ ID NO: 815881 - RNA, 24 nt, Human
gcuugcuuggggacuucaagggaa

SEQ ID NO: 815882 - RNA, 19 nt, Human
ggaaggcuccugacccguc

SEQ ID NO: 815883 - RNA, 20 nt, Human
ggacuggaagagcccugcua

SEQ ID NO: 815884 - RNA, 22 nt, Human
ggcccggagcagggcguggggu

SEQ ID NO: 815885 - RNA, 19 nt, Human
ggcggccccuugggugaac

SEQ ID NO: 815886 - RNA, 26 nt, Human
ggcugguggucugagugaccccaggc

SEQ ID NO: 815887 - RNA, 19 nt, Human
gggaaccgauccagguuug

SEQ ID NO: 815888 - RNA, 21 nt, Human
gggcaggccuguggugggcag

SEQ ID NO: 815889 - RNA, 18 nt, Human
gggccccuccacccuucc

SEQ ID NO: 815890 - RNA, 19 nt, Human
gggcgcaggcggcaguguc

SEQ ID NO: 815891 - RNA, 21 nt, Human
ggggaggccgggcugaacggc

SEQ ID NO: 815892 - RNA, 23 nt, Human
gggugggccugaggacccagggg

SEQ ID NO: 815893 - RNA, 25 nt, Human
gguccaggcaggugagcaggucccg

SEQ ID NO: 815894 - RNA, 21 nt, Human
ggucuagggcuuuagggaacc

SEQ ID NO: 815895 - RNA, 23 nt, Human
ggugcagugggggccugagcugg

SEQ ID NO: 815896 - RNA, 19 nt, Human
guaguggcugcggcuuccc

SEQ ID NO: 815897 - RNA, 19 nt, Human
guccuaggagagcauggaa

SEQ ID NO: 815898 - RNA, 18 nt, Human
gucucaagccaggcuggu

SEQ ID NO: 815899 - RNA, 23 nt, Human
gugcagugggggccugagcuggg

SEQ ID NO: 815900 - RNA, 21 nt, Human
gugccuggggcaggccugugg

SEQ ID NO: 815901 - RNA, 22 nt, Human
guggcuccuggcagcuuugucc

SEQ ID NO: 815902 - RNA, 22 nt, Human
gugggccugaggacccaggggg

SEQ ID NO: 815903 - RNA, 18 nt, Human
gugguucuuaagacccuc

SEQ ID NO: 815904 - RNA, 19 nt, Human
uaagaaggucacugccucc

SEQ ID NO: 815905 - RNA, 23 nt, Human
uacacugagcacauccgggggcg

SEQ ID NO: 815906 - RNA, 31 nt, Human
ucacuuuuauuggcuugguuuucuagcauuu

SEQ ID NO: 815907 - RNA, 20 nt, Human
ucagggagcaugggccucag

SEQ ID NO: 815908 - RNA, 19 nt, Human
uccacccuuccucccccug

SEQ ID NO: 815909 - RNA, 20 nt, Human
uccaggggcagcugcugggc

SEQ ID NO: 815910 - RNA, 21 nt, Human
uccaggggcagcugcugggcc

SEQ ID NO: 815911 - RNA, 23 nt, Human
uccccucucacggcccgucaccu

SEQ ID NO: 815912 - RNA, 19 nt, Human
ucuagggcuuuagggaacc

SEQ ID NO: 815913 - RNA, 20 nt, Human
ucuccaggggcagcugcugg

SEQ ID NO: 815914 - RNA, 19 nt, Human
ucuucggggccgugugugg

SEQ ID NO: 815915 - RNA, 18 nt, Human
ugaacggcuccuccccgc

SEQ ID NO: 815916 - RNA, 19 nt, Human
ugaccccaggcuccgagag

SEQ ID NO: 815917 - RNA, 22 nt, Human
ugaccccuggggccccuccacc

SEQ ID NO: 815918 - RNA, 24 nt, Human
ugaggacccagggggagugugcgg

SEQ ID NO: 815919 - RNA, 25 nt, Human
ugaggagaaggcuugggaaggcucc

SEQ ID NO: 815920 - RNA, 24 nt, Human
ugcagcccggcgcuugggugggcc

SEQ ID NO: 815921 - RNA, 21 nt, Human
ugcagccuccccagccccgcu

SEQ ID NO: 815922 - RNA, 19 nt, Human
ugcaggcaggcccggagca

SEQ ID NO: 815923 - RNA, 24 nt, Human
ugcagugcuugcuuggggacuuca

SEQ ID NO: 815924 - RNA, 20 nt, Human
ugccugcagccuccccagcc

SEQ ID NO: 815925 - RNA, 18 nt, Human
ugcuaaggccggagaccc

SEQ ID NO: 815926 - RNA, 24 nt, Human
ugcugccugcgcccugccccgcac

SEQ ID NO: 815927 - RNA, 22 nt, Human
uggcagcccaggguccaggcaa

SEQ ID NO: 815928 - RNA, 22 nt, Human
uggcagcccaggguccaggcag

SEQ ID NO: 815929 - RNA, 18 nt, Human
uggcagcuuuguccccac

SEQ ID NO: 815930 - RNA, 19 nt, Human
uggccaaaagccccguguc

SEQ ID NO: 815931 - RNA, 24 nt, Human
uggcucaguuaagaaggucacugc

SEQ ID NO: 815932 - RNA, 22 nt, Human
uggcuguucccagcccugucug

SEQ ID NO: 815933 - RNA, 18 nt, Human
ugggaaggcuccugaccc

SEQ ID NO: 815934 - RNA, 18 nt, Human
ugggaugccacagcacug

SEQ ID NO: 815935 - RNA, 18 nt, Human
ugggcagcuggaggcagc

SEQ ID NO: 815936 - RNA, 22 nt, Human
ugggcagcuggaggcagcagca

SEQ ID NO: 815937 - RNA, 27 nt, Human
ugggcagcuggaggcagcagcagccug

SEQ ID NO: 815938 - RNA, 18 nt, Human
ugggcccagcccaacccu

SEQ ID NO: 815939 - RNA, 21 nt, Human
ugggcgggagcaagcucuucc

SEQ ID NO: 815940 - RNA, 24 nt, Human
uggggacuucaagggaaggcucuu

SEQ ID NO: 815941 - RNA, 18 nt, Human
uggggaggaggugggaga

SEQ ID NO: 815942 - RNA, 18 nt, Human
uggggauauggcuuccug

SEQ ID NO: 815943 - RNA, 22 nt, Human
uggguugagccaucaggccacc

SEQ ID NO: 815944 - RNA, 19 nt, Human
ugucucugaugccugcagc

SEQ ID NO: 815945 - RNA, 21 nt, Human
ugucuguguucuccaggggca

SEQ ID NO: 815946 - RNA, 19 nt, Human
uguggugggcagcuggagg

SEQ ID NO: 815947 - RNA, 21 nt, Human
ugugguucuuaagacccucaa

SEQ ID NO: 815948 - RNA, 21 nt, Human
uugggaaggcuccugacccgu

SEQ ID NO: 815949 - RNA, 25 nt, Human
uugguaguggcugcggcuucccagg

SEQ ID NO: 815950 - RNA, 20 nt, Human
uuugggggcggggagaaagu

SEQ ID NO: 815951 - RNA, 19 nt, Human
aaccagaggccccuccagg

SEQ ID NO: 815952 - RNA, 20 nt, Human
aaccagaggccccuccaggg

SEQ ID NO: 815953 - RNA, 21 nt, Human
acgcgaaaugggggguccggg

SEQ ID NO: 815954 - RNA, 21 nt, Human
aggcggcgucugcgguggugg

SEQ ID NO: 815955 - RNA, 22 nt, Human
agggcccagccucgggggccuc

SEQ ID NO: 815956 - RNA, 21 nt, Human
agguggaggugguggcggguu

SEQ ID NO: 815957 - RNA, 19 nt, Human
caggggggucaggggagcc

SEQ ID NO: 815958 - RNA, 24 nt, Human
cauucucaaccccucuucugaggg

SEQ ID NO: 815959 - RNA, 21 nt, Human
ccauucucaaccccucuucug

SEQ ID NO: 815960 - RNA, 22 nt, Human
cggccccugucuugggccagga

SEQ ID NO: 815961 - RNA, 19 nt, Human
gaccuccgcugugucgagg

SEQ ID NO: 815962 - RNA, 20 nt, Human
gaggauuccauucucaaccc

SEQ ID NO: 815963 - RNA, 20 nt, Human
gaggggcuccaggcccaaaa

SEQ ID NO: 815964 - RNA, 19 nt, Human
gagguggaggugguggcgg

SEQ ID NO: 815965 - RNA, 21 nt, Human
gcaguggcgccgucauccaca

SEQ ID NO: 815966 - RNA, 20 nt, Human
ggagggggagggcccagccu

SEQ ID NO: 815967 - RNA, 21 nt, Human
ggccccugucuugggccagga

SEQ ID NO: 815968 - RNA, 20 nt, Human
ggcuccaggcccaaaagagu

SEQ ID NO: 815969 - RNA, 19 nt, Human
ggcuggggggcgggggccc

SEQ ID NO: 815970 - RNA, 22 nt, Human
gggagccaucuggggggcuggg

SEQ ID NO: 815971 - RNA, 20 nt, Human
gggagugggagggggagggc

SEQ ID NO: 815972 - RNA, 24 nt, Human
gggcuggggggcgggggcccgggg

SEQ ID NO: 815973 - RNA, 18 nt, Human
ggggagugggagggggag

SEQ ID NO: 815974 - RNA, 21 nt, Human
ggggcgggggcccggggccuc

SEQ ID NO: 815975 - RNA, 18 nt, Human
ggggcuggggggcggggg

SEQ ID NO: 815976 - RNA, 21 nt, Human
gggggcccggggccucccguu

SEQ ID NO: 815977 - RNA, 18 nt, Human
gggggcuggggggcgggg

SEQ ID NO: 815978 - RNA, 19 nt, Human
gggggcuggggggcggggg

SEQ ID NO: 815979 - RNA, 21 nt, Human
ggggggcuggggggcgggggc

SEQ ID NO: 815980 - RNA, 18 nt, Human
ggggucgggucuucgggg

SEQ ID NO: 815981 - RNA, 23 nt, Human
gucgaggggcuccaggcccaaaa

SEQ ID NO: 815982 - RNA, 23 nt, Human
uaggggagugggagggggagggc

SEQ ID NO: 815983 - RNA, 22 nt, Human
uccccgaagccugcggccccug

SEQ ID NO: 815984 - RNA, 20 nt, Human
ucuggggggcuggggggcgg

SEQ ID NO: 815985 - RNA, 23 nt, Human
uggaggggcggggggauuccugc

SEQ ID NO: 815986 - RNA, 22 nt, Human
ugggagggggagggcccagccu

SEQ ID NO: 815987 - RNA, 18 nt, Human
uggggagggaaaggggag

SEQ ID NO: 815988 - RNA, 19 nt, Human
uggggagggaaaggggaga

SEQ ID NO: 815989 - RNA, 18 nt, Human
uggggggcgggggcccgg

SEQ ID NO: 815990 - RNA, 20 nt, Human
uggggggcgggggcccgggg

SEQ ID NO: 815991 - RNA, 18 nt, Human
uggggggcuggggggcgg

SEQ ID NO: 815992 - RNA, 23 nt, Human
uggggggcuggggggcgggguag

SEQ ID NO: 815993 - RNA, 21 nt, Human
ugguaggggagugggaggggg

SEQ ID NO: 815994 - RNA, 24 nt, Human
ugguaggggagugggagggggagg

SEQ ID NO: 815995 - RNA, 21 nt, Human
ugucgaggauggcagggaggu

SEQ ID NO: 815996 - RNA, 18 nt, Human
ugucuugggccaggagug

SEQ ID NO: 815997 - RNA, 20 nt, Human
uuccgagaaaggcggcucuc

SEQ ID NO: 815998 - RNA, 21 nt, Human
aaaaauuuaaaauugcuuuca

SEQ ID NO: 815999 - RNA, 19 nt, Human
aaagcugaccguaccuccc

SEQ ID NO: 816000 - RNA, 21 nt, Human
aaauccuacauuuugguguua

SEQ ID NO: 816001 - RNA, 19 nt, Human
aacuuggaagccagucacu

SEQ ID NO: 816002 - RNA, 18 nt, Human
aagaaauugggaggggag

SEQ ID NO: 816003 - RNA, 19 nt, Human
aaggacccugcugcugccc

SEQ ID NO: 816004 - RNA, 24 nt, Human
aaguaccauaaugcaggaccccag

SEQ ID NO: 816005 - RNA, 19 nt, Human
aaguuccagccaagugcag

SEQ ID NO: 816006 - RNA, 21 nt, Human
aauccauaaacuuucuuccuc

SEQ ID NO: 816007 - RNA, 21 nt, Human
aaugcaaaaauuuauauuuua

SEQ ID NO: 816008 - RNA, 25 nt, Human
aauuuacaccuuuuuuuuuuucuuu

SEQ ID NO: 816009 - RNA, 21 nt, Human
acacagauccacaaguugcuu

SEQ ID NO: 816010 - RNA, 19 nt, Human
acacugugcugacugugaa

SEQ ID NO: 816011 - RNA, 24 nt, Human
acaggcaaggagacgaacgaagau

SEQ ID NO: 816012 - RNA, 19 nt, Human
accauaaugcaggacccca

SEQ ID NO: 816013 - RNA, 18 nt, Human
accccagggggaagccuc

SEQ ID NO: 816014 - RNA, 24 nt, Human
accuuuuuuuuuuucuuuuuuggu

SEQ ID NO: 816015 - RNA, 23 nt, Human
acgaagaugggcacugggcacug

SEQ ID NO: 816016 - RNA, 22 nt, Human
acgcaggggagggguggggggc

SEQ ID NO: 816017 - RNA, 19 nt, Human
agaagggggaagggagcag

SEQ ID NO: 816018 - RNA, 20 nt, Human
agaagggggaagggagcagu

SEQ ID NO: 816019 - RNA, 24 nt, Human
agacagcagaacccagauaggaca

SEQ ID NO: 816020 - RNA, 22 nt, Human
agacauggccaucuaaagccca

SEQ ID NO: 816021 - RNA, 29 nt, Human
agaggugguguggccagggguaggcuccu

SEQ ID NO: 816022 - RNA, 18 nt, Human
agccuugguagaugaagg

SEQ ID NO: 816023 - RNA, 23 nt, Human
agcgguggcucccgggcaguguu

SEQ ID NO: 816024 - RNA, 24 nt, Human
aggagccagcaccaaccgugggag

SEQ ID NO: 816025 - RNA, 20 nt, Human
agggguaggcuccugccucu

SEQ ID NO: 816026 - RNA, 19 nt, Human
aggguuucuggcagcuggu

SEQ ID NO: 816027 - RNA, 24 nt, Human
aggugucgcugucccuccgcuccu

SEQ ID NO: 816028 - RNA, 24 nt, Human
augauagccauuguuuuuugggua

SEQ ID NO: 816029 - RNA, 23 nt, Human
auugugcagacuagaaauacuac

SEQ ID NO: 816030 - RNA, 24 nt, Human
caaaaacauccccaggaaucaagg

SEQ ID NO: 816031 - RNA, 24 nt, Human
caaaaucaaucaaacccacucgca

SEQ ID NO: 816032 - RNA, 22 nt, Human
caaauccuacauuuugguguua

SEQ ID NO: 816033 - RNA, 22 nt, Human
caaggagacgcaggggaggggu

SEQ ID NO: 816034 - RNA, 18 nt, Human
cacacacacacacacaca

SEQ ID NO: 816035 - RNA, 18 nt, Human
caccgagucaccaugucc

SEQ ID NO: 816036 - RNA, 24 nt, Human
cacgaagcccgcaauaaugagggc

SEQ ID NO: 816037 - RNA, 21 nt, Human
cacugagcugcuguuggaagc

SEQ ID NO: 816038 - RNA, 21 nt, Human
cacugggcacugugcucaggg

SEQ ID NO: 816039 - RNA, 23 nt, Human
cacuuccuaacucugucuuuacc

SEQ ID NO: 816040 - RNA, 21 nt, Human
cagagacagauaaauuaaaug

SEQ ID NO: 816041 - RNA, 21 nt, Human
cagcagccugagguccagucu

SEQ ID NO: 816042 - RNA, 22 nt, Human
cagcuccacgccacuguggucg

SEQ ID NO: 816043 - RNA, 24 nt, Human
cagcugguuucugcacgcugaccg

SEQ ID NO: 816044 - RNA, 20 nt, Human
caggaccccagggggaagcc

SEQ ID NO: 816045 - RNA, 21 nt, Human
ccaaaugacuuuuuaauccac

SEQ ID NO: 816046 - RNA, 20 nt, Human
ccaaggaaagagaugagagu

SEQ ID NO: 816047 - RNA, 22 nt, Human
ccaaggaaagagaugagagugu

SEQ ID NO: 816048 - RNA, 19 nt, Human
ccaagugcagcuccacgcc

SEQ ID NO: 816049 - RNA, 21 nt, Human
ccagggguaggcuccugccuc

SEQ ID NO: 816050 - RNA, 18 nt, Human
cccaggacccaaaugacu

SEQ ID NO: 816051 - RNA, 18 nt, Human
cccauacacacacacaca

SEQ ID NO: 816052 - RNA, 20 nt, Human
cccauacacacacacacaca

SEQ ID NO: 816053 - RNA, 18 nt, Human
cccccucuucaucucuuc

SEQ ID NO: 816054 - RNA, 18 nt, Human
ccccucuucaucucuucu

SEQ ID NO: 816055 - RNA, 19 nt, Human
ccccucuucaucucuucuc

SEQ ID NO: 816056 - RNA, 19 nt, Human
ccccucuuccuuuucugcc

SEQ ID NO: 816057 - RNA, 21 nt, Human
ccccuggggaacggcugcugg

SEQ ID NO: 816058 - RNA, 23 nt, Human
ccccugguauucauaggccccuu

SEQ ID NO: 816059 - RNA, 20 nt, Human
ccucaugggauggugauggg

SEQ ID NO: 816060 - RNA, 21 nt, Human
ccuccaggcccaggggggugc

SEQ ID NO: 816061 - RNA, 23 nt, Human
ccucuggagguggagagaaaugu

SEQ ID NO: 816062 - RNA, 18 nt, Human
ccugagucccagcaguag

SEQ ID NO: 816063 - RNA, 25 nt, Human
ccuggccacagugcuacuguagaga

SEQ ID NO: 816064 - RNA, 21 nt, Human
cgcggagacagcagaacccag

SEQ ID NO: 816065 - RNA, 22 nt, Human
cggagacagcagaacccagaua

SEQ ID NO: 816066 - RNA, 20 nt, Human
cuacgcggagacagcagaac

SEQ ID NO: 816067 - RNA, 22 nt, Human
cucaaauguggcccgaacauug

SEQ ID NO: 816068 - RNA, 19 nt, Human
cucacuuuccucuggccac

SEQ ID NO: 816069 - RNA, 25 nt, Human
cucaugaacuucccaacaauucuca

SEQ ID NO: 816070 - RNA, 21 nt, Human
cucccacugggccggaccucc

SEQ ID NO: 816071 - RNA, 20 nt, Human
cucccccucuucaucucuuc

SEQ ID NO: 816072 - RNA, 20 nt, Human
cucccccucuucaucucuuc

SEQ ID NO: 816073 - RNA, 19 nt, Human
cucguggccagcauagcca

SEQ ID NO: 816074 - RNA, 19 nt, Human
cucugaggccagcauguca

SEQ ID NO: 816075 - RNA, 20 nt, Human
cucuguguggggaacagggc

SEQ ID NO: 816076 - RNA, 18 nt, Human
cugcacucugaccgcaug

SEQ ID NO: 816077 - RNA, 26 nt, Human
cugcagccccucuuccuuuucugccu

SEQ ID NO: 816078 - RNA, 20 nt, Human
cugcugcccccagacuuggc

SEQ ID NO: 816079 - RNA, 20 nt, Human
cuggcagcugguguagugga

SEQ ID NO: 816080 - RNA, 19 nt, Human
cuucuccugugcuuguaga

SEQ ID NO: 816081 - RNA, 22 nt, Human
cuucuuucccagugcuucccag

SEQ ID NO: 816082 - RNA, 21 nt, Human
cuugaccuugggcuccuggcc

SEQ ID NO: 816083 - RNA, 23 nt, Human
cuuggcccuugacagagccuugg

SEQ ID NO: 816084 - RNA, 19 nt, Human
cuugugggggccuucccga

SEQ ID NO: 816085 - RNA, 22 nt, Human
cuuucuuccucugucugcagcc

SEQ ID NO: 816086 - RNA, 24 nt, Human
gaacagggcaugaagcauccuuca

SEQ ID NO: 816087 - RNA, 20 nt, Human
gacauggccaucuaaagccc

SEQ ID NO: 816088 - RNA, 18 nt, Human
gacuccugcccuauccuc

SEQ ID NO: 816089 - RNA, 23 nt, Human
gaggaguguaagggggaagggag

SEQ ID NO: 816090 - RNA, 20 nt, Human
gagggcgaugaaaggcacca

SEQ ID NO: 816091 - RNA, 18 nt, Human
gaggggagaagcccuccu

SEQ ID NO: 816092 - RNA, 21 nt, Human
gagguggagagaaaugucagg

SEQ ID NO: 816093 - RNA, 20 nt, Human
gaguguaagggggaagggag

SEQ ID NO: 816094 - RNA, 21 nt, Human
gccccuuuccacagggaauuc

SEQ ID NO: 816095 - RNA, 18 nt, Human
gcccuugacagagccuug

SEQ ID NO: 816096 - RNA, 21 nt, Human
gccuuggcccuugacagagcc

SEQ ID NO: 816097 - RNA, 18 nt, Human
gcugccacugagcugcug

SEQ ID NO: 816098 - RNA, 19 nt, Human
gcugcuguuggaagcaaag

SEQ ID NO: 816099 - RNA, 20 nt, Human
ggagaggaguguaaggggga

SEQ ID NO: 816100 - RNA, 26 nt, Human
ggagaggaguguaagggggaagggag

SEQ ID NO: 816101 - RNA, 18 nt, Human
ggaggcggggcucucggu

SEQ ID NO: 816102 - RNA, 20 nt, Human
ggccacagacuugucuucuc

SEQ ID NO: 816103 - RNA, 19 nt, Human
ggccucaucugcccuguuc

SEQ ID NO: 816104 - RNA, 18 nt, Human
ggcggccaauggacucgg

SEQ ID NO: 816105 - RNA, 19 nt, Human
ggcugccacugagcugcug

SEQ ID NO: 816106 - RNA, 21 nt, Human
ggcuugggugagcgguggcuc

SEQ ID NO: 816107 - RNA, 22 nt, Human
gggcaggcuugcuccccuguuc

SEQ ID NO: 816108 - RNA, 21 nt, Human
gggcgagggccugagucccag

SEQ ID NO: 816109 - RNA, 26 nt, Human
gggcucucgguggcggugguggcggc

SEQ ID NO: 816110 - RNA, 27 nt, Human
ggggcucucgguggcggugguggcggg

SEQ ID NO: 816111 - RNA, 21 nt, Human
ggggggcgggaauaggcaucc

SEQ ID NO: 816112 - RNA, 20 nt, Human
gggguggggggcgggaauag

SEQ ID NO: 816113 - RNA, 19 nt, Human
gggugagcgguggcucccg

SEQ ID NO: 816114 - RNA, 22 nt, Human
gggugccccaccagcaggugcu

SEQ ID NO: 816115 - RNA, 22 nt, Human
gguggagagaaaugucaggggu

SEQ ID NO: 816116 - RNA, 20 nt, Human
gucaguugacagccagacuu

SEQ ID NO: 816117 - RNA, 20 nt, Human
gugaagggccucaucugccc

SEQ ID NO: 816118 - RNA, 21 nt, Human
gugaagggccucaucugcccu

SEQ ID NO: 816119 - RNA, 26 nt, Human
gugcugggugccccaccagcaggucg

SEQ ID NO: 816120 - RNA, 22 nt, Human
guggcggccaggccggguggcu

SEQ ID NO: 816121 - RNA, 19 nt, Human
guguguguguuugugugug

SEQ ID NO: 816122 - RNA, 24 nt, Human
guuacagucaccgagucaccaugu

SEQ ID NO: 816123 - RNA, 23 nt, Human
uaacaaauccuacauuuuggugu

SEQ ID NO: 816124 - RNA, 23 nt, Human
uaagaaauugggaggggagcuuc

SEQ ID NO: 816125 - RNA, 24 nt, Human
uacaugauagccauuguuuuuugg

SEQ ID NO: 816126 - RNA, 21 nt, Human
uaggagaugaaaaucuucuuu

SEQ ID NO: 816127 - RNA, 18 nt, Human
uaggccccuuuccacagg

SEQ ID NO: 816128 - RNA, 22 nt, Human
uauacugcagacaagccaagaa

SEQ ID NO: 816129 - RNA, 23 nt, Human
uauggucagcggcugcugggagc

SEQ ID NO: 816130 - RNA, 24 nt, Human
uaugugacaugaaucucugaggcc

SEQ ID NO: 816131 - RNA, 21 nt, Human
uauugugcagacuagaaauac

SEQ ID NO: 816132 - RNA, 22 nt, Human
ucaaauguggcccgaacauugg

SEQ ID NO: 816133 - RNA, 18 nt, Human
ucaaucaaacccacucgc

SEQ ID NO: 816134 - RNA, 23 nt, Human
ucauaggccccuuuccacaggga

SEQ ID NO: 816135 - RNA, 22 nt, Human
uccagccaagugcagcuccacg

SEQ ID NO: 816136 - RNA, 21 nt, Human
ucccccucuucaucucuucuc

SEQ ID NO: 816137 - RNA, 20 nt, Human
ucccuccaggcccagggggg

SEQ ID NO: 816138 - RNA, 24 nt, Human
uccgcuggguggucugagaggggc

SEQ ID NO: 816139 - RNA, 23 nt, Human
uccuaaacucaugaacuucccaa

SEQ ID NO: 816140 - RNA, 26 nt, Human
ucucaaggacccugcugcugccccca

SEQ ID NO: 816141 - RNA, 23 nt, Human
ucugacuccagcagccugagguc

SEQ ID NO: 816142 - RNA, 19 nt, Human
ucugcagccccucuuccuu

SEQ ID NO: 816143 - RNA, 20 nt, Human
ucugccuuuucaggacacgg

SEQ ID NO: 816144 - RNA, 19 nt, Human
ucugucagccuccauugug

SEQ ID NO: 816145 - RNA, 18 nt, Human
ucuucucuuugucaguug

SEQ ID NO: 816146 - RNA, 20 nt, Human
ucuuucccagugcuucccag

SEQ ID NO: 816147 - RNA, 19 nt, Human
ugaaaaaaauaaagaaacu

SEQ ID NO: 816148 - RNA, 21 nt, Human
ugaaaaaaauaaagaaacuga

SEQ ID NO: 816149 - RNA, 20 nt, Human
ugaaucucugaggccagcau

SEQ ID NO: 816150 - RNA, 20 nt, Human
ugacagagccuugguagaug

SEQ ID NO: 816151 - RNA, 23 nt, Human
ugacagccagacuugaccuuggg

SEQ ID NO: 816152 - RNA, 19 nt, Human
ugaccuugggcuccuggcc

SEQ ID NO: 816153 - RNA, 21 nt, Human
ugagcgguggcucccgggcag

SEQ ID NO: 816154 - RNA, 18 nt, Human
ugaggggagaagcccucc

SEQ ID NO: 816155 - RNA, 20 nt, Human
ugaggggagaagcccuccug

SEQ ID NO: 816156 - RNA, 21 nt, Human
ugcagacaagccaagaaggug

SEQ ID NO: 816157 - RNA, 23 nt, Human
ugccaggucuuuugcuggcuaug

SEQ ID NO: 816158 - RNA, 20 nt, Human
ugccccgaagcugccuacgc

SEQ ID NO: 816159 - RNA, 25 nt, Human
ugccccuucuagaacaggguuucug

SEQ ID NO: 816160 - RNA, 23 nt, Human
ugccgugucccagagguggugug

SEQ ID NO: 816161 - RNA, 24 nt, Human
ugcugcugcccccagacuuggcau

SEQ ID NO: 816162 - RNA, 23 nt, Human
ugcuggaggcggggcucucggug

SEQ ID NO: 816163 - RNA, 25 nt, Human
uggaaauggacgccucucacuuucc

SEQ ID NO: 816164 - RNA, 23 nt, Human
uggauuggcccucucccuccagg

SEQ ID NO: 816165 - RNA, 24 nt, Human
uggcauugaccuugcuguuggcaa

SEQ ID NO: 816166 - RNA, 23 nt, Human
uggcggcagggcgagggccugag

SEQ ID NO: 816167 - RNA, 25 nt, Human
uggcggcagggcgagggccugaguc

SEQ ID NO: 816168 - RNA, 21 nt, Human
uggcggccaauggacucgggg

SEQ ID NO: 816169 - RNA, 19 nt, Human
uggcggccaggccgggugg

SEQ ID NO: 816170 - RNA, 21 nt, Human
ugggagccaaggagccagcac

SEQ ID NO: 816171 - RNA, 22 nt, Human
ugggagccaaggagccagcacc

SEQ ID NO: 816172 - RNA, 21 nt, Human
ugggcuccuggccagacuccu

SEQ ID NO: 816173 - RNA, 19 nt, Human
ugguggcauugaccuugcu

SEQ ID NO: 816174 - RNA, 19 nt, Human
ugucaggggugcggagggu

SEQ ID NO: 816175 - RNA, 22 nt, Human
ugucccagaggugguguggcca

SEQ ID NO: 816176 - RNA, 21 nt, Human
ugucugcagccccucuuccuu

SEQ ID NO: 816177 - RNA, 23 nt, Human
ugugcacacugugcugacuguga

SEQ ID NO: 816178 - RNA, 23 nt, Human
ugugcagacuagaaauacuacag

SEQ ID NO: 816179 - RNA, 24 nt, Human
uguguuugugugugaucaggccca

SEQ ID NO: 816180 - RNA, 25 nt, Human
uguguuugugugugaucaggcccau

SEQ ID NO: 816181 - RNA, 22 nt, Human
uguucccuuccaagccucugga

SEQ ID NO: 816182 - RNA, 19 nt, Human
uguuuugaaagcugaccgu

SEQ ID NO: 816183 - RNA, 22 nt, Human
uuacauuuacaaaaaaggcuuc

SEQ ID NO: 816184 - RNA, 23 nt, Human
uucaggaccugccaggucuuuug

SEQ ID NO: 816185 - RNA, 23 nt, Human
uucauaaagaucuccacaggccc

SEQ ID NO: 816186 - RNA, 24 nt, Human
uucaucucuucucuguguggggaa

SEQ ID NO: 816187 - RNA, 22 nt, Human
uugcaggugcggugcucggagc

SEQ ID NO: 816188 - RNA, 24 nt, Human
uugcuggcuauggucagcggcugc

SEQ ID NO: 816189 - RNA, 18 nt, Human
uuucucaucugucaaagg

SEQ ID NO: 816190 - RNA, 22 nt, Human
uuuuucuuuuuugguacuguac

SEQ ID NO: 816191 - RNA, 26 nt, Human
aacagaauuaaaacucccaagggucu

SEQ ID NO: 816192 - RNA, 21 nt, Human
aagcaguggaggccccacagg

SEQ ID NO: 816193 - RNA, 24 nt, Human
aauugguugggauggcuccgggag

SEQ ID NO: 816194 - RNA, 25 nt, Human
acaguggaagagaggagggucugaa

SEQ ID NO: 816195 - RNA, 22 nt, Human
agaagggacugggucagcaagc

SEQ ID NO: 816196 - RNA, 22 nt, Human
agcaaggaaggggggugcccca

SEQ ID NO: 816197 - RNA, 19 nt, Human
agcaggaagcgccgcugcc

SEQ ID NO: 816198 - RNA, 22 nt, Human
agcaguggaggccccacagggc

SEQ ID NO: 816199 - RNA, 23 nt, Human
aggaagacagcucugugccacuu

SEQ ID NO: 816200 - RNA, 18 nt, Human
aggaggcaugaggggccg

SEQ ID NO: 816201 - RNA, 24 nt, Human
aggagguggggcuggagagggggc

SEQ ID NO: 816202 - RNA, 20 nt, Human
aggcagccccuggacagcug

SEQ ID NO: 816203 - RNA, 23 nt, Human
aggcaggaccagggugggcgggg

SEQ ID NO: 816204 - RNA, 24 nt, Human
aggccccuccaccgugggggcccc

SEQ ID NO: 816205 - RNA, 19 nt, Human
aggggcucccaaggcucag

SEQ ID NO: 816206 - RNA, 21 nt, Human
aggggggcccuggggacacag

SEQ ID NO: 816207 - RNA, 19 nt, Human
aggggguagugggggaugc

SEQ ID NO: 816208 - RNA, 21 nt, Human
agggucugaagguggugagga

SEQ ID NO: 816209 - RNA, 20 nt, Human
aggugcagguggcuggcagg

SEQ ID NO: 816210 - RNA, 22 nt, Human
aggugcagguggcuggcagggg

SEQ ID NO: 816211 - RNA, 23 nt, Human
agguggaggagguggggcuggag

SEQ ID NO: 816212 - RNA, 21 nt, Human
cacagcuuggucauguccucc

SEQ ID NO: 816213 - RNA, 18 nt, Human
cacagggcaaguacaaaa

SEQ ID NO: 816214 - RNA, 19 nt, Human
cacagggcaaguacaaaac

SEQ ID NO: 816215 - RNA, 21 nt, Human
cacagggcaaguacaaaacag

SEQ ID NO: 816216 - RNA, 20 nt, Human
cacccggggucaccggggcc

SEQ ID NO: 816217 - RNA, 25 nt, Human
caccgugggggccccucccaggggc

SEQ ID NO: 816218 - RNA, 20 nt, Human
cacucagcucuccccaauca

SEQ ID NO: 816219 - RNA, 18 nt, Human
cacuccagaccgcacuug

SEQ ID NO: 816220 - RNA, 18 nt, Human
cagauccagcuccaggua

SEQ ID NO: 816221 - RNA, 21 nt, Human
cagcacagaagggagaauugg

SEQ ID NO: 816222 - RNA, 23 nt, Human
cagcagggacagcacagaaggga

SEQ ID NO: 816223 - RNA, 23 nt, Human
cagccccuggacagcuggucaug

SEQ ID NO: 816224 - RNA, 19 nt, Human
caggugcagguggcuggca

SEQ ID NO: 816225 - RNA, 19 nt, Human
cagguggaggagguggggc

SEQ ID NO: 816226 - RNA, 22 nt, Human
caucgcugaggagguagcuccg

SEQ ID NO: 816227 - RNA, 21 nt, Human
ccagcuuagcccacaccgcgg

SEQ ID NO: 816228 - RNA, 19 nt, Human
ccaucgcugaggagguagc

SEQ ID NO: 816229 - RNA, 23 nt, Human
cccaagggucuugucuuuacaaa

SEQ ID NO: 816230 - RNA, 19 nt, Human
cccacaccgcggcccaugg

SEQ ID NO: 816231 - RNA, 23 nt, Human
cccaccccagccccacccggggu

SEQ ID NO: 816232 - RNA, 18 nt, Human
cccagccccacccggggu

SEQ ID NO: 816233 - RNA, 20 nt, Human
ccccuggacagcuggucaug

SEQ ID NO: 816234 - RNA, 19 nt, Human
ccccuugggaggaaacggg

SEQ ID NO: 816235 - RNA, 22 nt, Human
ccccuugggaggaaacgggggc

SEQ ID NO: 816236 - RNA, 24 nt, Human
ccgagccuccgguacggccccggc

SEQ ID NO: 816237 - RNA, 24 nt, Human
ccuccaccgugggggccccuccca

SEQ ID NO: 816238 - RNA, 23 nt, Human
ccugcgcagucgcggcccagagg

SEQ ID NO: 816239 - RNA, 20 nt, Human
ccuggggacacaguguggaa

SEQ ID NO: 816240 - RNA, 24 nt, Human
ccuugggaggaaacgggggcugcu

SEQ ID NO: 816241 - RNA, 18 nt, Human
ccuuggggggaaaagccc

SEQ ID NO: 816242 - RNA, 19 nt, Human
cgccgcugccgccgccgcg

SEQ ID NO: 816243 - RNA, 20 nt, Human
cgcugccgccgccgcggauc

SEQ ID NO: 816244 - RNA, 23 nt, Human
cggccccggccgguccuagcagg

SEQ ID NO: 816245 - RNA, 22 nt, Human
cggcuccgucuagggguuugag

SEQ ID NO: 816246 - RNA, 19 nt, Human
cuccucugaugcuggcccc

SEQ ID NO: 816247 - RNA, 22 nt, Human
cugagggugccugggcacgggg

SEQ ID NO: 816248 - RNA, 23 nt, Human
cugcucucauugcccccauucau

SEQ ID NO: 816249 - RNA, 18 nt, Human
gaagggagccaggacccc

SEQ ID NO: 816250 - RNA, 24 nt, Human
gacacaguguggaacauuuggggg

SEQ ID NO: 816251 - RNA, 22 nt, Human
gacacugguggcugagaggcag

SEQ ID NO: 816252 - RNA, 18 nt, Human
gagaaaaggguuggggga

SEQ ID NO: 816253 - RNA, 21 nt, Human
gaggagguggggcuggagagg

SEQ ID NO: 816254 - RNA, 24 nt, Human
gagggggcauugccccuugggagg

SEQ ID NO: 816255 - RNA, 20 nt, Human
gagggucugaagguggugag

SEQ ID NO: 816256 - RNA, 21 nt, Human
gcaaggaaggggggugcccca

SEQ ID NO: 816257 - RNA, 18 nt, Human
gcacggggccuucggccc

SEQ ID NO: 816258 - RNA, 21 nt, Human
gccaggacccccauuaagugg

SEQ ID NO: 816259 - RNA, 21 nt, Human
gcugaggagguagcuccgggu

SEQ ID NO: 816260 - RNA, 19 nt, Human
gcuggccccaccccagccc

SEQ ID NO: 816261 - RNA, 20 nt, Human
gcuggccccaccccagcccc

SEQ ID NO: 816262 - RNA, 22 nt, Human
gcugggaggggguaguggggga

SEQ ID NO: 816263 - RNA, 19 nt, Human
ggaagacagcucugugcca

SEQ ID NO: 816264 - RNA, 21 nt, Human
ggaggaggcaugaggggccgg

SEQ ID NO: 816265 - RNA, 24 nt, Human
ggaggagggucgguggagcccgag

SEQ ID NO: 816266 - RNA, 23 nt, Human
ggaggagguggggcuggagaggg

SEQ ID NO: 816267 - RNA, 24 nt, Human
ggauggcuccgggagagaaaaggg

SEQ ID NO: 816268 - RNA, 22 nt, Human
ggcaggggcucccaaggcucag

SEQ ID NO: 816269 - RNA, 21 nt, Human
ggcccccagcucugucugcuc

SEQ ID NO: 816270 - RNA, 24 nt, Human
ggcccgaggacggcuccgucuagg

SEQ ID NO: 816271 - RNA, 18 nt, Human
gggauggcuccgggagag

SEQ ID NO: 816272 - RNA, 20 nt, Human
ggggacaggagcaggggccc

SEQ ID NO: 816273 - RNA, 20 nt, Human
gggggcccuggggacacagu

SEQ ID NO: 816274 - RNA, 21 nt, Human
gggggcucgcucccucuccag

SEQ ID NO: 816275 - RNA, 25 nt, Human
gggugccccaggccccuccaccgug

SEQ ID NO: 816276 - RNA, 25 nt, Human
gguggugaggaggaggcaugagggg

SEQ ID NO: 816277 - RNA, 18 nt, Human
ggugguucugggggaagg

SEQ ID NO: 816278 - RNA, 26 nt, Human
gucucccauagaaaagcaguggaggc

SEQ ID NO: 816279 - RNA, 23 nt, Human
gugcagguggcuggcaggggcuc

SEQ ID NO: 816280 - RNA, 21 nt, Human
gugcauaguggcugaagacac

SEQ ID NO: 816281 - RNA, 18 nt, Human
gugccuuggccgcugcag

SEQ ID NO: 816282 - RNA, 22 nt, Human
guggaggagguggggcuggaga

SEQ ID NO: 816283 - RNA, 19 nt, Human
guggugaggaggaggcaug

SEQ ID NO: 816284 - RNA, 24 nt, Human
uacaaaagaaaaggcaggaggcag

SEQ ID NO: 816285 - RNA, 19 nt, Human
uacaguagggggucugcgg

SEQ ID NO: 816286 - RNA, 18 nt, Human
uagcaaucgaaauacagu

SEQ ID NO: 816287 - RNA, 23 nt, Human
uaggaggaacucgacagggaggg

SEQ ID NO: 816288 - RNA, 23 nt, Human
ucccaaggcucagcacucagcuc

SEQ ID NO: 816289 - RNA, 19 nt, Human
ucccaggggccccaggacc

SEQ ID NO: 816290 - RNA, 21 nt, Human
ucccaggggccccaggaccag

SEQ ID NO: 816291 - RNA, 21 nt, Human
ucucugcaaacauuguggggu

SEQ ID NO: 816292 - RNA, 18 nt, Human
ugaagguggugaggagga

SEQ ID NO: 816293 - RNA, 20 nt, Human
ugagcagguggucuccaugc

SEQ ID NO: 816294 - RNA, 23 nt, Human
ugcaggucccaucgcugaggagg

SEQ ID NO: 816295 - RNA, 23 nt, Human
ugccugaacaucucugcaaacau

SEQ ID NO: 816296 - RNA, 23 nt, Human
ugcuggccccaccccagccccac

SEQ ID NO: 816297 - RNA, 21 nt, Human
uggaagagaggagggucugaa

SEQ ID NO: 816298 - RNA, 19 nt, Human
uggagagggggcauugccc

SEQ ID NO: 816299 - RNA, 20 nt, Human
uggagcccgagccuccggua

SEQ ID NO: 816300 - RNA, 20 nt, Human
uggaggagguggggcuggag

SEQ ID NO: 816301 - RNA, 20 nt, Human
uggcaggggcucccaaggcu

SEQ ID NO: 816302 - RNA, 23 nt, Human
uggccacagggcccccagcucug

SEQ ID NO: 816303 - RNA, 22 nt, Human
uggcugaagacacugguggcug

SEQ ID NO: 816304 - RNA, 18 nt, Human
ugggaagggccaggggug

SEQ ID NO: 816305 - RNA, 19 nt, Human
ugggaagggccaggggugg

SEQ ID NO: 816306 - RNA, 18 nt, Human
ugggaggagggucggugg

SEQ ID NO: 816307 - RNA, 23 nt, Human
ugggaggggguagugggggaugc

SEQ ID NO: 816308 - RNA, 26 nt, Human
uggggcuggagagggggcauugcccc

SEQ ID NO: 816309 - RNA, 20 nt, Human
ugggggccccucccaggggc

SEQ ID NO: 816310 - RNA, 25 nt, Human
uggggggaaaagccccccagggccu

SEQ ID NO: 816311 - RNA, 23 nt, Human
ugggucagcaagccuugggggga

SEQ ID NO: 816312 - RNA, 20 nt, Human
uggugaggaggaggcaugaa

SEQ ID NO: 816313 - RNA, 24 nt, Human
ugguugcacagcuuggucaugucc

SEQ ID NO: 816314 - RNA, 21 nt, Human
uucggcccuguaaagugcugg

SEQ ID NO: 816315 - RNA, 21 nt, Human
uugggggacaggagcaggggc

SEQ ID NO: 816316 - RNA, 20 nt, Human
uuuacaaaagaaaaggcagg

SEQ ID NO: 816317 - RNA, 21 nt, Human
aaaaaaugugaugaugccuau

SEQ ID NO: 816318 - RNA, 23 nt, Human
aaaagcaccaugaccgaggacac

SEQ ID NO: 816319 - RNA, 23 nt, Human
aaacccagaagcuuguuguaaga

SEQ ID NO: 816320 - RNA, 21 nt, Human
aagcaccaugaccgaggacac

SEQ ID NO: 816321 - RNA, 22 nt, Human
aagccagcgucauucuuucagg

SEQ ID NO: 816322 - RNA, 24 nt, Human
aagccagcgucauucuuucaggug

SEQ ID NO: 816323 - RNA, 23 nt, Human
aaguauauuguguggaaauaucu

SEQ ID NO: 816324 - RNA, 23 nt, Human
aaucaugauuacuauuuaauuua

SEQ ID NO: 816325 - RNA, 20 nt, Human
acagcuuccacuguggucag

SEQ ID NO: 816326 - RNA, 22 nt, Human
accagccgcccccagccgacag

SEQ ID NO: 816327 - RNA, 18 nt, Human
accccuggccagguuccu

SEQ ID NO: 816328 - RNA, 24 nt, Human
acugaaaauuuaaaauauaaaaca

SEQ ID NO: 816329 - RNA, 22 nt, Human
agaccgugcaggaggaguuugg

SEQ ID NO: 816330 - RNA, 20 nt, Human
agcaccaugaccgaggacac

SEQ ID NO: 816331 - RNA, 21 nt, Human
agcuggauauagugauaagcc

SEQ ID NO: 816332 - RNA, 23 nt, Human
aggaggaguuugguagcaaugga

SEQ ID NO: 816333 - RNA, 24 nt, Human
auccaugaguuauuccacucugca

SEQ ID NO: 816334 - RNA, 22 nt, Human
auguguguuaguguguguaugu

SEQ ID NO: 816335 - RNA, 22 nt, Human
auuauggccacagcccugcuuu

SEQ ID NO: 816336 - RNA, 21 nt, Human
caaaccagcggaagcugaaca

SEQ ID NO: 816337 - RNA, 22 nt, Human
caaauccugaaauguguagaaa

SEQ ID NO: 816338 - RNA, 19 nt, Human
caacgaaaagcaccaugac

SEQ ID NO: 816339 - RNA, 23 nt, Human
caacuugcaaaguagggugaucu

SEQ ID NO: 816340 - RNA, 22 nt, Human
cacagcccugcugucaccccuu

SEQ ID NO: 816341 - RNA, 18 nt, Human
caccaugaccgaggacac

SEQ ID NO: 816342 - RNA, 21 nt, Human
caccaugaccgaggacacuga

SEQ ID NO: 816343 - RNA, 24 nt, Human
caccccuggccagguuccuggggg

SEQ ID NO: 816344 - RNA, 24 nt, Human
caccgacagagagccgagcaccac

SEQ ID NO: 816345 - RNA, 20 nt, Human
cacggcucacugcccugcuc

SEQ ID NO: 816346 - RNA, 22 nt, Human
cacucugucggcuucgaauacc

SEQ ID NO: 816347 - RNA, 22 nt, Human
cacuuugaccuuggauuggggg

SEQ ID NO: 816348 - RNA, 19 nt, Human
cagcuggaggcagcagcgg

SEQ ID NO: 816349 - RNA, 19 nt, Human
caggagccagaugcagaag

SEQ ID NO: 816350 - RNA, 19 nt, Human
caucaagacacccuaauga

SEQ ID NO: 816351 - RNA, 21 nt, Human
cauuauggccacagcccugcu

SEQ ID NO: 816352 - RNA, 24 nt, Human
cauucuuucagguggagucagaga

SEQ ID NO: 816353 - RNA, 24 nt, Human
cauuggccagucuugacaagcccu

SEQ ID NO: 816354 - RNA, 19 nt, Human
ccaacuugcaaaguagggu

SEQ ID NO: 816355 - RNA, 18 nt, Human
ccaccgccgaccaccguc

SEQ ID NO: 816356 - RNA, 18 nt, Human
ccaccgccgaccaccguc

SEQ ID NO: 816357 - RNA, 24 nt, Human
ccaccgccgaccaccgucuugcaa

SEQ ID NO: 816358 - RNA, 25 nt, Human
ccaccgccgaccaccgucuugccgc

SEQ ID NO: 816359 - RNA, 22 nt, Human
ccacuccaucaaugcuaacaca

SEQ ID NO: 816360 - RNA, 25 nt, Human
ccagcccauuccucuggcucgcgcc

SEQ ID NO: 816361 - RNA, 22 nt, Human
ccaguaaaaccuccaucuguca

SEQ ID NO: 816362 - RNA, 20 nt, Human
cccaagaccgugcaggagga

SEQ ID NO: 816363 - RNA, 18 nt, Human
ccccacucugucggcuuc

SEQ ID NO: 816364 - RNA, 24 nt, Human
ccccacuuccucuuuguguaccug

SEQ ID NO: 816365 - RNA, 21 nt, Human
ccccagccgacaggaucaaau

SEQ ID NO: 816366 - RNA, 21 nt, Human
ccccgcugcuguugcugccgc

SEQ ID NO: 816367 - RNA, 21 nt, Human
cccugcugucaccccuucauc

SEQ ID NO: 816368 - RNA, 24 nt, Human
ccgagcaccacgaagaagagcgug

SEQ ID NO: 816369 - RNA, 20 nt, Human
ccgcccccagccgacaggau

SEQ ID NO: 816370 - RNA, 26 nt, Human
ccuauggucacacagagccacucauu

SEQ ID NO: 816371 - RNA, 24 nt, Human
ccuauggucacacagagccggggc

SEQ ID NO: 816372 - RNA, 25 nt, Human
ccuuggauuggggggaggaaaaguc

SEQ ID NO: 816373 - RNA, 24 nt, Human
cgaaaagcaccaugaccgaggaca

SEQ ID NO: 816374 - RNA, 24 nt, Human
cgcugcuguugcugccgcuguugg

SEQ ID NO: 816375 - RNA, 21 nt, Human
cuccaggcugcgggcagcugg

SEQ ID NO: 816376 - RNA, 19 nt, Human
cucgcgccgcacugccguu

SEQ ID NO: 816377 - RNA, 22 nt, Human
cugauagcaccccuggccaggu

SEQ ID NO: 816378 - RNA, 22 nt, Human
cugugcuugccacuggcccggg

SEQ ID NO: 816379 - RNA, 22 nt, Human
cuucacggcucacugcccugcu

SEQ ID NO: 816380 - RNA, 18 nt, Human
cuugcuguacggagguau

SEQ ID NO: 816381 - RNA, 20 nt, Human
gacugguguaacuuaugugu

SEQ ID NO: 816382 - RNA, 19 nt, Human
gagccgagcaccacgaaga

SEQ ID NO: 816383 - RNA, 22 nt, Human
gaggaaaagucuguacacagug

SEQ ID NO: 816384 - RNA, 21 nt, Human
gcacggagucuuccagaguca

SEQ ID NO: 816385 - RNA, 19 nt, Human
gcagcagcggccguggcgc

SEQ ID NO: 816386 - RNA, 19 nt, Human
gccccgcugcuguugcugc

SEQ ID NO: 816387 - RNA, 23 nt, Human
gccuauggucacacagagccacu

SEQ ID NO: 816388 - RNA, 27 nt, Human
gccuuuuuccccacuuccucuuugugu

SEQ ID NO: 816389 - RNA, 23 nt, Human
ggaaaagucuguacacaguggag

SEQ ID NO: 816390 - RNA, 21 nt, Human
ggacgagccucgccuuccccg

SEQ ID NO: 816391 - RNA, 21 nt, Human
ggagucuuccagagucagcau

SEQ ID NO: 816392 - RNA, 24 nt, Human
ggauguuucccucuuucuuuguuu

SEQ ID NO: 816393 - RNA, 22 nt, Human
guccugugguuggaugguguuu

SEQ ID NO: 816394 - RNA, 20 nt, Human
uaaaaaaugugaugaugccu

SEQ ID NO: 816395 - RNA, 21 nt, Human
uaagcugauucucucuucacc

SEQ ID NO: 816396 - RNA, 21 nt, Human
uacuauuuaauuuacaucaug

SEQ ID NO: 816397 - RNA, 21 nt, Human
uaguaguacccucuggugggu

SEQ ID NO: 816398 - RNA, 18 nt, Human
uagugauaagcccucucu

SEQ ID NO: 816399 - RNA, 21 nt, Human
uagugauaagcccucucucag

SEQ ID NO: 816400 - RNA, 22 nt, Human
uauagugauaagcccucucuca

SEQ ID NO: 816401 - RNA, 23 nt, Human
uauggaaagaucaguuaacgcca

SEQ ID NO: 816402 - RNA, 24 nt, Human
uauggaaagaucaguuaacgccag

SEQ ID NO: 816403 - RNA, 20 nt, Human
uauguguguuagugugugua

SEQ ID NO: 816404 - RNA, 21 nt, Human
uauguguguuaguguguguau

SEQ ID NO: 816405 - RNA, 24 nt, Human
uauuccacucugcaccaacuauaa

SEQ ID NO: 816406 - RNA, 24 nt, Human
ucauuuacaucuuugauuuccugg

SEQ ID NO: 816407 - RNA, 22 nt, Human
ucccaaagccucuaaaagacac

SEQ ID NO: 816408 - RNA, 21 nt, Human
uccucggugcugaaaucgugc

SEQ ID NO: 816409 - RNA, 24 nt, Human
uccucuggcucgcgccgcacugcc

SEQ ID NO: 816410 - RNA, 19 nt, Human
uccugaaauguguagaaaa

SEQ ID NO: 816411 - RNA, 22 nt, Human
uccuuggucuuguugaaagccg

SEQ ID NO: 816412 - RNA, 23 nt, Human
uccuuggucuuguugaaagccgu

SEQ ID NO: 816413 - RNA, 21 nt, Human
ucucauuuugccuuuuucccc

SEQ ID NO: 816414 - RNA, 24 nt, Human
ucuggcucgcgccgcacugccguu

SEQ ID NO: 816415 - RNA, 19 nt, Human
ugaaagccguacaugggcu

SEQ ID NO: 816416 - RNA, 21 nt, Human
ugaaagccguacaugggcugc

SEQ ID NO: 816417 - RNA, 21 nt, Human
ugaaccacuccaucaaugcua

SEQ ID NO: 816418 - RNA, 18 nt, Human
ugaagugucauuauggcc

SEQ ID NO: 816419 - RNA, 21 nt, Human
ugaccuuggauuggggggagg

SEQ ID NO: 816420 - RNA, 20 nt, Human
ugagaaaaugguuucuuuuc

SEQ ID NO: 816421 - RNA, 19 nt, Human
ugcaacgaaaagcaccaug

SEQ ID NO: 816422 - RNA, 21 nt, Human
ugcaacgaaaagcaccaugac

SEQ ID NO: 816423 - RNA, 20 nt, Human
ugcaagauguggaugaguga

SEQ ID NO: 816424 - RNA, 23 nt, Human
ugcaccgacagagagccgagcac

SEQ ID NO: 816425 - RNA, 24 nt, Human
ugcgggcagcuggaggcagcagcg

SEQ ID NO: 816426 - RNA, 25 nt, Human
uggaaacagauccgguuccagccca

SEQ ID NO: 816427 - RNA, 21 nt, Human
uggaggcagcagcggccgugg

SEQ ID NO: 816428 - RNA, 19 nt, Human
uggagucagagacucucgg

SEQ ID NO: 816429 - RNA, 19 nt, Human
uggauggaugaaaguaauc

SEQ ID NO: 816430 - RNA, 21 nt, Human
uggauuggggggaggaaaagu

SEQ ID NO: 816431 - RNA, 20 nt, Human
uggcacggagucuuccagag

SEQ ID NO: 816432 - RNA, 18 nt, Human
uggccagguuccuggggg

SEQ ID NO: 816433 - RNA, 22 nt, Human
ugggggcaccaacuugcaaagu

SEQ ID NO: 816434 - RNA, 25 nt, Human
ugggugcacccaagaccgugcagga

SEQ ID NO: 816435 - RNA, 20 nt, Human
uguaagagugcgacuuuaca

SEQ ID NO: 816436 - RNA, 24 nt, Human
ugucccaaagccucuaaaagacac

SEQ ID NO: 816437 - RNA, 18 nt, Human
uguguguauguguguaug

SEQ ID NO: 816438 - RNA, 22 nt, Human
uguguuaguguguguaugugug

SEQ ID NO: 816439 - RNA, 24 nt, Human
uuccccggcugcagacccaccgcc

SEQ ID NO: 816440 - RNA, 20 nt, Human
uucuuuguuuuuauauuccu

SEQ ID NO: 816441 - RNA, 19 nt, Human
uugccacuggcccggguag

SEQ ID NO: 816442 - RNA, 23 nt, Human
uugcugccgcuguuggccgcggc

SEQ ID NO: 816443 - RNA, 19 nt, Human
uuggaaggagaccagccgc

SEQ ID NO: 816444 - RNA, 23 nt, Human
uuggccgcggcgauguugcucuu

SEQ ID NO: 816445 - RNA, 21 nt, Human
uuguggguccugcaacuccuu

SEQ ID NO: 816446 - RNA, 20 nt, Human
uuguuuggggcuuccacguc

SEQ ID NO: 816447 - RNA, 19 nt, Human
uuuacuugcuguacggagg

SEQ ID NO: 816448 - RNA, 20 nt, Human
uuuccaguaaaaccuccauc

SEQ ID NO: 816449 - RNA, 20 nt, Human
uuuuauauuccugugggaau

SEQ ID NO: 816450 - RNA, 19 nt, Human
uuuuuugacagaggacugg

SEQ ID NO: 816451 - RNA, 23 nt, Human
aaccccucggaggccuguggcac

SEQ ID NO: 816452 - RNA, 21 nt, Human
aagagcuucugugagcccagc

SEQ ID NO: 816453 - RNA, 18 nt, Human
acaguggggcgucagggc

SEQ ID NO: 816454 - RNA, 20 nt, Human
acauucagagacgugcccac

SEQ ID NO: 816455 - RNA, 27 nt, Human
accacaacgcaccagucuagacaucuu

SEQ ID NO: 816456 - RNA, 19 nt, Human
accuuccugagacccucug

SEQ ID NO: 816457 - RNA, 20 nt, Human
acgggacacugaguggucac

SEQ ID NO: 816458 - RNA, 21 nt, Human
acucgcgggucucacacaccg

SEQ ID NO: 816459 - RNA, 18 nt, Human
agcugucuuuggccucuc

SEQ ID NO: 816460 - RNA, 20 nt, Human
aggcccccguggucgcccag

SEQ ID NO: 816461 - RNA, 20 nt, Human
aggcgggugggagauaggaa

SEQ ID NO: 816462 - RNA, 18 nt, Human
agggggugggaggugagg

SEQ ID NO: 816463 - RNA, 18 nt, Human
agggggugggaggugagg

SEQ ID NO: 816464 - RNA, 23 nt, Human
agucuagacaucucaggagccug

SEQ ID NO: 816465 - RNA, 19 nt, Human
caagagacgccccggccac

SEQ ID NO: 816466 - RNA, 20 nt, Human
cacccacuugaagcuucugc

SEQ ID NO: 816467 - RNA, 19 nt, Human
cagcacaggggggacaagg

SEQ ID NO: 816468 - RNA, 19 nt, Human
cagcugugaccuccagacc

SEQ ID NO: 816469 - RNA, 19 nt, Human
caggagccugccccagcuc

SEQ ID NO: 816470 - RNA, 25 nt, Human
cagggcccaagagcuucugugagcc

SEQ ID NO: 816471 - RNA, 20 nt, Human
cagggggugggaggugaggg

SEQ ID NO: 816472 - RNA, 19 nt, Human
cccaauacccaagaacacc

SEQ ID NO: 816473 - RNA, 25 nt, Human
cccgccgccgccgccgccgccgccc

SEQ ID NO: 816474 - RNA, 22 nt, Human
cccuagaggcugcacaaccccu

SEQ ID NO: 816475 - RNA, 18 nt, Human
ccgccgccgccgccgccg

SEQ ID NO: 816476 - RNA, 18 nt, Human
ccgccgccgccgccgccg

SEQ ID NO: 816477 - RNA, 23 nt, Human
ccgccgccgccgccgccgcccga

SEQ ID NO: 816478 - RNA, 24 nt, Human
ccgccgccgccgccgccgccgccc

SEQ ID NO: 816479 - RNA, 28 nt, Human
ccucaugaccacgccugcacccaaggcu

SEQ ID NO: 816480 - RNA, 22 nt, Human
ccuccagaccuuccugagaccc

SEQ ID NO: 816481 - RNA, 21 nt, Human
ccucuggccuuucugugacuc

SEQ ID NO: 816482 - RNA, 21 nt, Human
ccuguccccaauacccaagaa

SEQ ID NO: 816483 - RNA, 19 nt, Human
cgccgccgccgccgccgcc

SEQ ID NO: 816484 - RNA, 25 nt, Human
cggccucggcugccuccggccgggc

SEQ ID NO: 816485 - RNA, 23 nt, Human
cgggaggacccgcagacucggcg

SEQ ID NO: 816486 - RNA, 23 nt, Human
cggggccagccacugcguggaga

SEQ ID NO: 816487 - RNA, 21 nt, Human
cucaaaccugugacucagugg

SEQ ID NO: 816488 - RNA, 27 nt, Human
cucaugaccacgccugcacccaaggcu

SEQ ID NO: 816489 - RNA, 23 nt, Human
cugcacccaaggcugcugucugg

SEQ ID NO: 816490 - RNA, 20 nt, Human
cugcggcuggaggggugggg

SEQ ID NO: 816491 - RNA, 22 nt, Human
gacuuguaugcagucucucccu

SEQ ID NO: 816492 - RNA, 19 nt, Human
gaggcugcacaaccccucg

SEQ ID NO: 816493 - RNA, 25 nt, Human
gaguagagcugagggcugugagggg

SEQ ID NO: 816494 - RNA, 22 nt, Human
gcccuagaggcugcacaacccc

SEQ ID NO: 816495 - RNA, 21 nt, Human
gccgccgcccgagcggccucg

SEQ ID NO: 816496 - RNA, 18 nt, Human
gccgcugcuccggcuccu

SEQ ID NO: 816497 - RNA, 24 nt, Human
gccucggcugccuccggccgggcu

SEQ ID NO: 816498 - RNA, 20 nt, Human
gcucccgccgccgccgccgc

SEQ ID NO: 816499 - RNA, 21 nt, Human
gcugccuccggccgggcuggc

SEQ ID NO: 816500 - RNA, 21 nt, Human
ggacaaggggcuggagagggu

SEQ ID NO: 816501 - RNA, 22 nt, Human
ggagauaggaacuggggaagga

SEQ ID NO: 816502 - RNA, 18 nt, Human
ggcuggaaccaggcgggu

SEQ ID NO: 816503 - RNA, 18 nt, Human
ggcugugaggggacagug

SEQ ID NO: 816504 - RNA, 23 nt, Human
gggacaguggggcgucagggaag

SEQ ID NO: 816505 - RNA, 19 nt, Human
gggcccaagagcuucugug

SEQ ID NO: 816506 - RNA, 19 nt, Human
gggcuggaaccaggcgggu

SEQ ID NO: 816507 - RNA, 22 nt, Human
gggcuggaaccaggcggguggg

SEQ ID NO: 816508 - RNA, 25 nt, Human
gggcuggaaccaggcgggugggaga

SEQ ID NO: 816509 - RNA, 19 nt, Human
ggggcuggaaagacgggga

SEQ ID NO: 816510 - RNA, 23 nt, Human
gggggugggaggugagggugcug

SEQ ID NO: 816511 - RNA, 21 nt, Human
ggggugggaggugagggugcu

SEQ ID NO: 816512 - RNA, 18 nt, Human
ggguucguggccucgugg

SEQ ID NO: 816513 - RNA, 22 nt, Human
gguggccuuuaaaagacaacug

SEQ ID NO: 816514 - RNA, 21 nt, Human
gugcccacucgcgggucucac

SEQ ID NO: 816515 - RNA, 19 nt, Human
uagaagggguucuucugua

SEQ ID NO: 816516 - RNA, 18 nt, Human
uagccaaaaacugcggcu

SEQ ID NO: 816517 - RNA, 21 nt, Human
ucacccaggaugccagggccc

SEQ ID NO: 816518 - RNA, 21 nt, Human
ucagugggagaggggaugggg

SEQ ID NO: 816519 - RNA, 23 nt, Human
uccccaauacccaagaacaccgg

SEQ ID NO: 816520 - RNA, 21 nt, Human
ucccgccgccgccgccgccgc

SEQ ID NO: 816521 - RNA, 24 nt, Human
ucccgccgccgccgccgccgccgg

SEQ ID NO: 816522 - RNA, 21 nt, Human
ucccuguucuggggaucuggc

SEQ ID NO: 816523 - RNA, 21 nt, Human
ucucacacaccgauccucacc

SEQ ID NO: 816524 - RNA, 18 nt, Human
ucuggccuuucugugacu

SEQ ID NO: 816525 - RNA, 18 nt, Human
ugaccuccagaccuuccu

SEQ ID NO: 816526 - RNA, 21 nt, Human
ugagcccccaggguacuuccu

SEQ ID NO: 816527 - RNA, 19 nt, Human
ugaggggacaguggggcgu

SEQ ID NO: 816528 - RNA, 21 nt, Human
ugccccagcucucagggggug

SEQ ID NO: 816529 - RNA, 26 nt, Human
ugccccagcucucagggggugggagg

SEQ ID NO: 816530 - RNA, 20 nt, Human
ugggagaggggauggggcug

SEQ ID NO: 816531 - RNA, 21 nt, Human
ugggagaggggauggggcugg

SEQ ID NO: 816532 - RNA, 23 nt, Human
ugggagauaggaacuggggaagg

SEQ ID NO: 816533 - RNA, 22 nt, Human
uggggaaggaccaccaacagca

SEQ ID NO: 816534 - RNA, 23 nt, Human
uguccccaauacccaagaacacc

SEQ ID NO: 816535 - RNA, 19 nt, Human
ugugacucucucucagcug

SEQ ID NO: 816536 - RNA, 24 nt, Human
uuaaaagacaacugugguuauaga

SEQ ID NO: 816537 - RNA, 23 nt, Human
uugaagcuucugccacucagacu

SEQ ID NO: 816538 - RNA, 18 nt, Human
uuuguagccaaaaacugc

SEQ ID NO: 816539 - RNA, 20 nt, Human
aaaaagcaaauaaacuguga

SEQ ID NO: 816540 - RNA, 20 nt, Human
aaacaagaauaaauaacuga

SEQ ID NO: 816541 - RNA, 19 nt, Human
aaacaagaucuuaaaugua

SEQ ID NO: 816542 - RNA, 19 nt, Human
aaagcacagaaauacugau

SEQ ID NO: 816543 - RNA, 23 nt, Human
aaauacauaucuuaauuugacaa

SEQ ID NO: 816544 - RNA, 24 nt, Human
aacuugguguuuaacaauaaaggu

SEQ ID NO: 816545 - RNA, 25 nt, Human
aagaagagcaauaugaugcuaaaga

SEQ ID NO: 816546 - RNA, 18 nt, Human
aagcacagaaauacugau

SEQ ID NO: 816547 - RNA, 26 nt, Human
aauaaauaggaaaaaaccauauugaa

SEQ ID NO: 816548 - RNA, 20 nt, Human
aaucuccuuuuuaaaaaaag

SEQ ID NO: 816549 - RNA, 20 nt, Human
agagugcagccaaauuucug

SEQ ID NO: 816550 - RNA, 24 nt, Human
aggaaauguagauauaaauagagu

SEQ ID NO: 816551 - RNA, 23 nt, Human
augcuaaagaaauagaaagauuc

SEQ ID NO: 816552 - RNA, 24 nt, Human
caaaaagucaagacuguucacaga

SEQ ID NO: 816553 - RNA, 28 nt, Human
caaaauaaugcuaaauuugaagacucag

SEQ ID NO: 816554 - RNA, 19 nt, Human
cacagaguuauccauauuu

SEQ ID NO: 816555 - RNA, 25 nt, Human
cagugaacuaaaugugcacuguuuu

SEQ ID NO: 816556 - RNA, 23 nt, Human
cuaaagaaauagaaagauucaaa

SEQ ID NO: 816557 - RNA, 23 nt, Human
cugcaaaauaauaauuuuucuag

SEQ ID NO: 816558 - RNA, 20 nt, Human
gcaaggguuucucuuaggca

SEQ ID NO: 816559 - RNA, 24 nt, Human
gguuuuugggugaggaaacauacu

SEQ ID NO: 816560 - RNA, 22 nt, Human
gucaagacuguucacagaguua

SEQ ID NO: 816561 - RNA, 20 nt, Human
gugugucgauuuccaagcuu

SEQ ID NO: 816562 - RNA, 18 nt, Human
guugagaaaauuguauga

SEQ ID NO: 816563 - RNA, 26 nt, Human
uaaaaaaagcaaauaaacugugagua

SEQ ID NO: 816564 - RNA, 21 nt, Human
uaaaaaugcuggcauuacugu

SEQ ID NO: 816565 - RNA, 22 nt, Human
uaaaacagcuauaaaaggaaga

SEQ ID NO: 816566 - RNA, 20 nt, Human
uaaagaaaacaaugccucau

SEQ ID NO: 816567 - RNA, 22 nt, Human
uaaagaaauagaaagauucaaa

SEQ ID NO: 816568 - RNA, 23 nt, Human
uaaagagaagucagugaucuauu

SEQ ID NO: 816569 - RNA, 22 nt, Human
uaaauaaaaaugcuggcauuac

SEQ ID NO: 816570 - RNA, 20 nt, Human
uaaauaaagaaaacaaugcc

SEQ ID NO: 816571 - RNA, 24 nt, Human
uaacaagaaugaauggcagauaga

SEQ ID NO: 816572 - RNA, 20 nt, Human
uagcacaaugaacuugcccu

SEQ ID NO: 816573 - RNA, 21 nt, Human
uaggaaaaaaccauauugaag

SEQ ID NO: 816574 - RNA, 28 nt, Human
uccaguuuaugaaaaaacacucuucugu

SEQ ID NO: 816575 - RNA, 21 nt, Human
ucccaggugcaaggguuucuc

SEQ ID NO: 816576 - RNA, 19 nt, Human
ucucagauaacugcaaaau

SEQ ID NO: 816577 - RNA, 24 nt, Human
ucugaagaaggcaaagguugccuc

SEQ ID NO: 816578 - RNA, 25 nt, Human
ucugaagaaggcaaagguugccucg

SEQ ID NO: 816579 - RNA, 18 nt, Human
ugaaguaaaacagcuaua

SEQ ID NO: 816580 - RNA, 25 nt, Human
ugacaaccagucuaaaagaagaaga

SEQ ID NO: 816581 - RNA, 20 nt, Human
ugacaaugaaagaaaccucu

SEQ ID NO: 816582 - RNA, 19 nt, Human
ugaggaaacauacugaagc

SEQ ID NO: 816583 - RNA, 21 nt, Human
ugcaaggguuucucuuaggca

SEQ ID NO: 816584 - RNA, 22 nt, Human
uggaaggaaauguagauauaaa

SEQ ID NO: 816585 - RNA, 20 nt, Human
uguuauugcagucauuugaa

SEQ ID NO: 816586 - RNA, 18 nt, Human
uuaaaacugcauccugcc

SEQ ID NO: 816587 - RNA, 21 nt, Human
uuaaaagugucaaaauaaugc

SEQ ID NO: 816588 - RNA, 22 nt, Human
uuaaauaaaaaugcuggcauua

SEQ ID NO: 816589 - RNA, 23 nt, Human
uugcacugaaaauuuacaucaua

SEQ ID NO: 816590 - RNA, 22 nt, Human
uuuaacaagaaugaauggcaga

SEQ ID NO: 816591 - RNA, 22 nt, Human
uuuccaagcuucugaagaaggc

SEQ ID NO: 816592 - RNA, 31 nt, Human
uuuuacaaaguuucuuuucauaaaaauauaa

SEQ ID NO: 816593 - RNA, 24 nt, Human
aagccagacccagagaccaggaga

SEQ ID NO: 816594 - RNA, 21 nt, Human
acccagagaccaggagaggga

SEQ ID NO: 816595 - RNA, 21 nt, Human
cacagccagagccuggaagcc

SEQ ID NO: 816596 - RNA, 20 nt, Human
cagcacccagaggcugaaga

SEQ ID NO: 816597 - RNA, 20 nt, Human
ccccugaggccagaucauuc

SEQ ID NO: 816598 - RNA, 23 nt, Human
ccucacuggccagcacccagagg

SEQ ID NO: 816599 - RNA, 19 nt, Human
ccugaggucagggccaagg

SEQ ID NO: 816600 - RNA, 23 nt, Human
ccugaggucagggccaaggucag

SEQ ID NO: 816601 - RNA, 23 nt, Human
cgucugguccuccuaccagcuca

SEQ ID NO: 816602 - RNA, 20 nt, Human
cucacuggccagcacccaga

SEQ ID NO: 816603 - RNA, 23 nt, Human
cucccuuaagcccugggucauuu

SEQ ID NO: 816604 - RNA, 20 nt, Human
cuccugaccagguggccugu

SEQ ID NO: 816605 - RNA, 19 nt, Human
gagaaaaagugcaggaaaa

SEQ ID NO: 816606 - RNA, 23 nt, Human
ucagggccaaggucagcguggga

SEQ ID NO: 816607 - RNA, 22 nt, Human
uccacagccagagccuggaagc

SEQ ID NO: 816608 - RNA, 21 nt, Human
uccugaggucagggccaaggu

SEQ ID NO: 816609 - RNA, 18 nt, Human
ugaggccagaucauucuc

SEQ ID NO: 816610 - RNA, 18 nt, Human
uggccuguccccugaggc

SEQ ID NO: 816611 - RNA, 23 nt, Human
uggcuccugaggucagggccucc

SEQ ID NO: 816612 - RNA, 23 nt, Human
uggaaauguacauguaugaugac

SEQ ID NO: 816613 - RNA, 24 nt, Human
uuuucagcugcacaugguggaaau

SEQ ID NO: 816614 - RNA, 18 nt, Human
aaagcaagacaaggaagc

SEQ ID NO: 816615 - RNA, 23 nt, Human
aaagcaagacaaggaagcaugga

SEQ ID NO: 816616 - RNA, 23 nt, Human
aaaguggaaaaacuuuuauuaga

SEQ ID NO: 816617 - RNA, 22 nt, Human
aaaugauuuuaaauaagacauc

SEQ ID NO: 816618 - RNA, 21 nt, Human
aacauuuuucuuuuucuuggg

SEQ ID NO: 816619 - RNA, 23 nt, Human
aacccaaaaacuagucuaaaaaa

SEQ ID NO: 816620 - RNA, 19 nt, Human
aacucccuauuuccucauu

SEQ ID NO: 816621 - RNA, 19 nt, Human
aacugccaaggaaaaaaga

SEQ ID NO: 816622 - RNA, 22 nt, Human
aagacagugcugauuagaaaaa

SEQ ID NO: 816623 - RNA, 20 nt, Human
aagauugacauaaccuuuaa

SEQ ID NO: 816624 - RNA, 19 nt, Human
aagugugugugugugugug

SEQ ID NO: 816625 - RNA, 19 nt, Human
acaaaaaaagguuacauga

SEQ ID NO: 816626 - RNA, 23 nt, Human
acagaacccgcaguagcuucgcu

SEQ ID NO: 816627 - RNA, 19 nt, Human
acccgcaguagcuucgcuc

SEQ ID NO: 816628 - RNA, 22 nt, Human
agaacccgcaguagcuucgcuc

SEQ ID NO: 816629 - RNA, 20 nt, Human
agacaaagcaaacccaaaaa

SEQ ID NO: 816630 - RNA, 28 nt, Human
agaguaaccaaggugaaaaaucugggua

SEQ ID NO: 816631 - RNA, 19 nt, Human
aggaaaaaagaaaaacuca

SEQ ID NO: 816632 - RNA, 19 nt, Human
aggucagaguaaccaaggu

SEQ ID NO: 816633 - RNA, 25 nt, Human
aguacaacuaaauuauuuuuuagcu

SEQ ID NO: 816634 - RNA, 21 nt, Human
aguggaaaaacuuuuauuaga

SEQ ID NO: 816635 - RNA, 19 nt, Human
auaaagcaagacaaggaag

SEQ ID NO: 816636 - RNA, 25 nt, Human
auaaagcaagacaaggaagcaugga

SEQ ID NO: 816637 - RNA, 22 nt, Human
auguuuuccuccuguucaugau

SEQ ID NO: 816638 - RNA, 22 nt, Human
caaagaaugcucuaaagaccca

SEQ ID NO: 816639 - RNA, 18 nt, Human
caaagcaaacccaaaaac

SEQ ID NO: 816640 - RNA, 23 nt, Human
caaagcaaacccaaaaacuaguc

SEQ ID NO: 816641 - RNA, 24 nt, Human
caaagcaaacccaaaaacuagucu

SEQ ID NO: 816642 - RNA, 21 nt, Human
caagacaaggaagcauggagc

SEQ ID NO: 816643 - RNA, 21 nt, Human
cagcgcaggcaccggccucuc

SEQ ID NO: 816644 - RNA, 22 nt, Human
cauggaacacaauauaccuuaa

SEQ ID NO: 816645 - RNA, 24 nt, Human
ccaacagucagagcuauguuuucc

SEQ ID NO: 816646 - RNA, 24 nt, Human
ccacaauaaaagucauacauauug

SEQ ID NO: 816647 - RNA, 18 nt, Human
cuacugagcagggcugca

SEQ ID NO: 816648 - RNA, 20 nt, Human
cuagucuaaaaaagaauucc

SEQ ID NO: 816649 - RNA, 21 nt, Human
cugccugcgcgcucccgaacu

SEQ ID NO: 816650 - RNA, 19 nt, Human
cugcuucgccccacgaugc

SEQ ID NO: 816651 - RNA, 21 nt, Human
cuguaagacaaaaagaucguu

SEQ ID NO: 816652 - RNA, 21 nt, Human
gaacugccaauucuagguuca

SEQ ID NO: 816653 - RNA, 24 nt, Human
gcacugagucuuuucaugcccagu

SEQ ID NO: 816654 - RNA, 19 nt, Human
gucauuuuucacuaaauga

SEQ ID NO: 816655 - RNA, 30 nt, Human
gugcgaaagugugugugugugugugugugg

SEQ ID NO: 816656 - RNA, 19 nt, Human
guggugaagaauuccacaa

SEQ ID NO: 816657 - RNA, 21 nt, Human
gugugugugugugccugcgug

SEQ ID NO: 816658 - RNA, 21 nt, Human
gugugugugugugugugugag

SEQ ID NO: 816659 - RNA, 20 nt, Human
gugugugugugugugugugu

SEQ ID NO: 816660 - RNA, 21 nt, Human
gugugugugugugugugugug

SEQ ID NO: 816661 - RNA, 21 nt, Human
gugugugugugugugugugug

SEQ ID NO: 816662 - RNA, 25 nt, Human
guucucagccuuagaagugugcaga

SEQ ID NO: 816663 - RNA, 22 nt, Human
guuugugugugcgaaagugugu

SEQ ID NO: 816664 - RNA, 24 nt, Human
uaaaagagauaguaauaaaauaug

SEQ ID NO: 816665 - RNA, 22 nt, Human
uaaaauaccuuauaauuucagu

SEQ ID NO: 816666 - RNA, 20 nt, Human
uaaacugccaaggaaaaaag

SEQ ID NO: 816667 - RNA, 23 nt, Human
uaaucucccuguucaauuacaag

SEQ ID NO: 816668 - RNA, 21 nt, Human
uaccauaauuaguacaacuaa

SEQ ID NO: 816669 - RNA, 20 nt, Human
uaccuuauaauuucaguaac

SEQ ID NO: 816670 - RNA, 20 nt, Human
uagaaaaaguguacaaagaa

SEQ ID NO: 816671 - RNA, 24 nt, Human
uauagacaaagcaaacccaaaaac

SEQ ID NO: 816672 - RNA, 18 nt, Human
uauuucaacaacugcugu

SEQ ID NO: 816673 - RNA, 26 nt, Human
uauuuccucauugugugucucuuuca

SEQ ID NO: 816674 - RNA, 21 nt, Human
ucauugugugucucuuucaca

SEQ ID NO: 816675 - RNA, 20 nt, Human
uccacaacauguuuccaaau

SEQ ID NO: 816676 - RNA, 23 nt, Human
uccacaacauguuuccaaauucu

SEQ ID NO: 816677 - RNA, 20 nt, Human
ucccuauuuccucauugugu

SEQ ID NO: 816678 - RNA, 23 nt, Human
ugagaguuacuugaggcaaguuu

SEQ ID NO: 816679 - RNA, 23 nt, Human
ugaggaaguuaggaaaaaagaaa

SEQ ID NO: 816680 - RNA, 18 nt, Human
ugauuaaacugccaagga

SEQ ID NO: 816681 - RNA, 25 nt, Human
ugcagaggaaucagcaagcauucca

SEQ ID NO: 816682 - RNA, 22 nt, Human
ugcaguagcgaagacgagcguc

SEQ ID NO: 816683 - RNA, 21 nt, Human
uggggugagcggucugcuggg

SEQ ID NO: 816684 - RNA, 25 nt, Human
uguacaaagaaugcucuaaagaccc

SEQ ID NO: 816685 - RNA, 25 nt, Human
uguccaauaaauugccuuacuaaca

SEQ ID NO: 816686 - RNA, 18 nt, Human
ugugcagaggaaucagca

SEQ ID NO: 816687 - RNA, 21 nt, Human
ugugcagaggaaucagcaagc

SEQ ID NO: 816688 - RNA, 22 nt, Human
ugugcagaggaaucagcaagca

SEQ ID NO: 816689 - RNA, 24 nt, Human
ugugugccugcgugcgugugugcg

SEQ ID NO: 816690 - RNA, 22 nt, Human
ugugugugccugcgugcgugug

SEQ ID NO: 816691 - RNA, 20 nt, Human
ugugugugcgaaagugugug

SEQ ID NO: 816692 - RNA, 21 nt, Human
ugugugugcgaaagugugugu

SEQ ID NO: 816693 - RNA, 25 nt, Human
ugugugugcgaaagugugugugugu

SEQ ID NO: 816694 - RNA, 25 nt, Human
ugugugugcgaaagugugugugugu

SEQ ID NO: 816695 - RNA, 25 nt, Human
ugugugugcgaaagugugugugugu

SEQ ID NO: 816696 - RNA, 21 nt, Human
ugugugugugugccugcgugc

SEQ ID NO: 816697 - RNA, 18 nt, Human
ugugugugugugugccug

SEQ ID NO: 816698 - RNA, 18 nt, Human
ugugugugugugugugug

SEQ ID NO: 816699 - RNA, 18 nt, Human
ugugugugugugugugug

SEQ ID NO: 816700 - RNA, 18 nt, Human
ugugugugugugugugug

SEQ ID NO: 816701 - RNA, 18 nt, Human
ugugugugugugugugug

SEQ ID NO: 816702 - RNA, 18 nt, Human
ugugugugugugugugug

SEQ ID NO: 816703 - RNA, 18 nt, Human
ugugugugugugugugug

SEQ ID NO: 816704 - RNA, 18 nt, Human
ugugugugugugugugug

SEQ ID NO: 816705 - RNA, 18 nt, Human
ugugugugugugugugug

SEQ ID NO: 816706 - RNA, 19 nt, Human
ugugugugugugugugugc

SEQ ID NO: 816707 - RNA, 21 nt, Human
ugugugugugugugugugugc

SEQ ID NO: 816708 - RNA, 21 nt, Human
ugugugugugugugugugugu

SEQ ID NO: 816709 - RNA, 21 nt, Human
ugugugugugugugugugugu

SEQ ID NO: 816710 - RNA, 21 nt, Human
ugugugugugugugugugugu

SEQ ID NO: 816711 - RNA, 21 nt, Human
ugugugugugugugugugugu

SEQ ID NO: 816712 - RNA, 21 nt, Human
ugugugugugugugugugugu

SEQ ID NO: 816713 - RNA, 21 nt, Human
ugugugugugugugugugugu

SEQ ID NO: 816714 - RNA, 21 nt, Human
ugugugugugugugugugugu

SEQ ID NO: 816715 - RNA, 21 nt, Human
ugugugugugugugugugugu

SEQ ID NO: 816716 - RNA, 21 nt, Human
ugugugugugugugugugugu

SEQ ID NO: 816717 - RNA, 21 nt, Human
ugugugugugugugugugugu

SEQ ID NO: 816718 - RNA, 21 nt, Human
ugugugugugugugugugugu

SEQ ID NO: 816719 - RNA, 21 nt, Human
ugugugugugugugugugugu

SEQ ID NO: 816720 - RNA, 21 nt, Human
ugugugugugugugugugugu

SEQ ID NO: 816721 - RNA, 22 nt, Human
ugugugugugugugugugugug

SEQ ID NO: 816722 - RNA, 22 nt, Human
ugugugugugugugugugugug

SEQ ID NO: 816723 - RNA, 22 nt, Human
ugugugugugugugugugugug

SEQ ID NO: 816724 - RNA, 22 nt, Human
ugugugugugugugugugugug

SEQ ID NO: 816725 - RNA, 22 nt, Human
ugugugugugugugugugugug

SEQ ID NO: 816726 - RNA, 22 nt, Human
uguguguguguguguguguguu

SEQ ID NO: 816727 - RNA, 24 nt, Human
uuaaauuuguuuucaaaugugauu

SEQ ID NO: 816728 - RNA, 23 nt, Human
uuagaacugccaauucuagguuc

SEQ ID NO: 816729 - RNA, 20 nt, Human
uucacuuuugauuacaaaaa

SEQ ID NO: 816730 - RNA, 20 nt, Human
uuccucagguucucagccuu

SEQ ID NO: 816731 - RNA, 22 nt, Human
uuccucagguucucagccuuag

SEQ ID NO: 816732 - RNA, 23 nt, Human
uuuugauuacaaaaaaagguuac

SEQ ID NO: 816733 - RNA, 23 nt, Human
uuuuuaaacuucaaaaauaaucu

SEQ ID NO: 816734 - RNA, 22 nt, Human
aaccaggugcccaaccacagcc

SEQ ID NO: 816735 - RNA, 24 nt, Human
aagagagcugcaggggguuccggg

SEQ ID NO: 816736 - RNA, 21 nt, Human
aagccccccacgaagccccaa

SEQ ID NO: 816737 - RNA, 21 nt, Human
aagccgccucuggaggcaagc

SEQ ID NO: 816738 - RNA, 18 nt, Human
aaggaugauggacuccgg

SEQ ID NO: 816739 - RNA, 23 nt, Human
aagggccccugucccugcaguca

SEQ ID NO: 816740 - RNA, 23 nt, Human
acacgggcuccccagccuggaca

SEQ ID NO: 816741 - RNA, 23 nt, Human
acagcuccucccugcagcccucc

SEQ ID NO: 816742 - RNA, 23 nt, Human
acagcuucagaggagagggaacc

SEQ ID NO: 816743 - RNA, 23 nt, Human
accaugcucaucaucaucacaaa

SEQ ID NO: 816744 - RNA, 19 nt, Human
acccacccacccacccacc

SEQ ID NO: 816745 - RNA, 20 nt, Human
acccacccacccacccaccc

SEQ ID NO: 816746 - RNA, 19 nt, Human
agaggaaggaggagcaggc

SEQ ID NO: 816747 - RNA, 21 nt, Human
agaggcguccccacaccccgc

SEQ ID NO: 816748 - RNA, 21 nt, Human
agaggcuggcugggaggggcu

SEQ ID NO: 816749 - RNA, 22 nt, Human
agaggcuggcugggaggggcug

SEQ ID NO: 816750 - RNA, 24 nt, Human
agaggcuggcugggaggggcuggg

SEQ ID NO: 816751 - RNA, 22 nt, Human
agagggagggaggaagggaggu

SEQ ID NO: 816752 - RNA, 22 nt, Human
agccacugcaaccccacucccu

SEQ ID NO: 816753 - RNA, 26 nt, Human
agccccccggcccugcacaccccagg

SEQ ID NO: 816754 - RNA, 20 nt, Human
agcccgagccuccuagcccu

SEQ ID NO: 816755 - RNA, 22 nt, Human
agcccugugcuggaguguggag

SEQ ID NO: 816756 - RNA, 18 nt, Human
aggacccccuuccucucc

SEQ ID NO: 816757 - RNA, 21 nt, Human
aggagcaggcccagaccaucc

SEQ ID NO: 816758 - RNA, 21 nt, Human
aggaggcuucccuggggcugc

SEQ ID NO: 816759 - RNA, 18 nt, Human
aggagggaguggggcagg

SEQ ID NO: 816760 - RNA, 19 nt, Human
aggagguggguguggggca

SEQ ID NO: 816761 - RNA, 18 nt, Human
aggccaguuccccuccug

SEQ ID NO: 816762 - RNA, 22 nt, Human
aggcggugcuugggggacaggc

SEQ ID NO: 816763 - RNA, 23 nt, Human
agggaaggagugugucaggaugg

SEQ ID NO: 816764 - RNA, 18 nt, Human
aggggcacccagggucag

SEQ ID NO: 816765 - RNA, 24 nt, Human
aggggcacccagggucagggaagg

SEQ ID NO: 816766 - RNA, 21 nt, Human
agguggguguggggcagggcu

SEQ ID NO: 816767 - RNA, 23 nt, Human
aucagagagggggcgggggaguc

SEQ ID NO: 816768 - RNA, 26 nt, Human
aucgucaugcaaauauaacagggagu

SEQ ID NO: 816769 - RNA, 28 nt, Human
aucuccgaguugaggaaaacaauuucgu

SEQ ID NO: 816770 - RNA, 27 nt, Human
auggggucgggcagguggggacacagg

SEQ ID NO: 816771 - RNA, 22 nt, Human
caaaccaggugcccaaccacag

SEQ ID NO: 816772 - RNA, 18 nt, Human
caaagcccccacccucuc

SEQ ID NO: 816773 - RNA, 20 nt, Human
caaaguaagccccucagggc

SEQ ID NO: 816774 - RNA, 21 nt, Human
caaugcucagaaacacaggag

SEQ ID NO: 816775 - RNA, 21 nt, Human
cacagcccagcuccaccaugc

SEQ ID NO: 816776 - RNA, 25 nt, Human
cacagcuucggaaagggaugugggg

SEQ ID NO: 816777 - RNA, 23 nt, Human
cacagcuuggcucccuguccccc

SEQ ID NO: 816778 - RNA, 19 nt, Human
cacaggagguggguguggg

SEQ ID NO: 816779 - RNA, 22 nt, Human
cacccccugcccccagcaggaa

SEQ ID NO: 816780 - RNA, 22 nt, Human
cacccucucccugaagcccccc

SEQ ID NO: 816781 - RNA, 20 nt, Human
cacugggcugggaaguuggg

SEQ ID NO: 816782 - RNA, 20 nt, Human
cacuuaggccccuuauaagc

SEQ ID NO: 816783 - RNA, 23 nt, Human
cagaccccccagaccccacaccc

SEQ ID NO: 816784 - RNA, 23 nt, Human
cagagacccgagucuuagacccc

SEQ ID NO: 816785 - RNA, 21 nt, Human
cagccaacuuggggacuggcg

SEQ ID NO: 816786 - RNA, 19 nt, Human
cagcugcacacucuggggg

SEQ ID NO: 816787 - RNA, 21 nt, Human
cagcuuggcucccuguccccc

SEQ ID NO: 816788 - RNA, 21 nt, Human
caggaaacccaugugggccac

SEQ ID NO: 816789 - RNA, 18 nt, Human
caggacccaaaccaggug

SEQ ID NO: 816790 - RNA, 25 nt, Human
caggccccuaacuccugcugcuggg

SEQ ID NO: 816791 - RNA, 21 nt, Human
cagguucagagcccagggccu

SEQ ID NO: 816792 - RNA, 19 nt, Human
cagguuuugggggccgggg

SEQ ID NO: 816793 - RNA, 22 nt, Human
ccacagcccagcuccaccaugc

SEQ ID NO: 816794 - RNA, 22 nt, Human
ccacgaacccagccugcuccuc

SEQ ID NO: 816795 - RNA, 21 nt, Human
ccacugcaaccccacucccuc

SEQ ID NO: 816796 - RNA, 19 nt, Human
ccaggcaucacagugcacc

SEQ ID NO: 816797 - RNA, 22 nt, Human
ccagucucaggaccgcagauuu

SEQ ID NO: 816798 - RNA, 18 nt, Human
cccaaaagagcuggcccc

SEQ ID NO: 816799 - RNA, 22 nt, Human
cccaaaccaggugcccaaccac

SEQ ID NO: 816800 - RNA, 19 nt, Human
cccacaggccuccugcacu

SEQ ID NO: 816801 - RNA, 24 nt, Human
cccacugcugcugccccagcugcc

SEQ ID NO: 816802 - RNA, 22 nt, Human
cccaucagcauccugacugguc

SEQ ID NO: 816803 - RNA, 18 nt, Human
cccaugugggccacaggc

SEQ ID NO: 816804 - RNA, 20 nt, Human
ccccaaaucucaggaaaccc

SEQ ID NO: 816805 - RNA, 21 nt, Human
ccccacaccccgcugggccag

SEQ ID NO: 816806 - RNA, 22 nt, Human
ccccagaccccacacccucucu

SEQ ID NO: 816807 - RNA, 21 nt, Human
ccccagagcccaacggucacu

SEQ ID NO: 816808 - RNA, 22 nt, Human
ccccagagcccaacggucacuc

SEQ ID NO: 816809 - RNA, 20 nt, Human
ccccaugacagcuccucccu

SEQ ID NO: 816810 - RNA, 22 nt, Human
cccccaaaaggcccccagcccu

SEQ ID NO: 816811 - RNA, 23 nt, Human
cccccacccccaaaagaagaaaa

SEQ ID NO: 816812 - RNA, 23 nt, Human
cccccacccucucccugaagccc

SEQ ID NO: 816813 - RNA, 24 nt, Human
ccccccagaccccacacccucucu

SEQ ID NO: 816814 - RNA, 20 nt, Human
ccccccgccagccccccggg

SEQ ID NO: 816815 - RNA, 21 nt, Human
ccccccggcccugcacacccc

SEQ ID NO: 816816 - RNA, 19 nt, Human
ccccgccagccccccggcc

SEQ ID NO: 816817 - RNA, 19 nt, Human
ccccgcccuggccgccugg

SEQ ID NO: 816818 - RNA, 18 nt, Human
ccccuuccucucccuccu

SEQ ID NO: 816819 - RNA, 19 nt, Human
cccgcugggccagcuccca

SEQ ID NO: 816820 - RNA, 22 nt, Human
cccucgcuccaccgggccucca

SEQ ID NO: 816821 - RNA, 23 nt, Human
cccucucuuggcuuccuuccucc

SEQ ID NO: 816822 - RNA, 21 nt, Human
cccugaccagccuugccccuc

SEQ ID NO: 816823 - RNA, 18 nt, Human
cccuggccgccuggaccc

SEQ ID NO: 816824 - RNA, 21 nt, Human
cccuggccgccuggacccuuc

SEQ ID NO: 816825 - RNA, 25 nt, Human
cccuggggcccagcccaggcgugcu

SEQ ID NO: 816826 - RNA, 21 nt, Human
cccuggguuucaagagcugcu

SEQ ID NO: 816827 - RNA, 22 nt, Human
cccugucccagcccugugcugg

SEQ ID NO: 816828 - RNA, 19 nt, Human
cccuucugcggugggcagg

SEQ ID NO: 816829 - RNA, 18 nt, Human
ccgggacaagagcccuug

SEQ ID NO: 816830 - RNA, 21 nt, Human
ccgggacaagagcccuugagg

SEQ ID NO: 816831 - RNA, 18 nt, Human
ccgggggaggaggucugc

SEQ ID NO: 816832 - RNA, 20 nt, Human
ccuccuuccccgggugggcg

SEQ ID NO: 816833 - RNA, 23 nt, Human
ccucucuuggcuuccuuccuccc

SEQ ID NO: 816834 - RNA, 21 nt, Human
ccugaccuuuagugaggccug

SEQ ID NO: 816835 - RNA, 19 nt, Human
ccugcccaccaacagugcc

SEQ ID NO: 816836 - RNA, 19 nt, Human
ccugcccccagcaggaagg

SEQ ID NO: 816837 - RNA, 18 nt, Human
ccugcuggccugccccag

SEQ ID NO: 816838 - RNA, 22 nt, Human
ccugggccuuggcccccgaguc

SEQ ID NO: 816839 - RNA, 18 nt, Human
ccuggggcccagcccagg

SEQ ID NO: 816840 - RNA, 18 nt, Human
ccuggggcucagccaccu

SEQ ID NO: 816841 - RNA, 20 nt, Human
ccuggggcucagccaccucu

SEQ ID NO: 816842 - RNA, 21 nt, Human
ccuuccaccgggacaagagcc

SEQ ID NO: 816843 - RNA, 20 nt, Human
ccuuuccucuccuuuccguc

SEQ ID NO: 816844 - RNA, 24 nt, Human
cgaccaacuuccaguugagaacau

SEQ ID NO: 816845 - RNA, 18 nt, Human
cgaguugaggaaaacaau

SEQ ID NO: 816846 - RNA, 23 nt, Human
cgcggggaaaagcaaggccggga

SEQ ID NO: 816847 - RNA, 19 nt, Human
cgggacggacagacagucc

SEQ ID NO: 816848 - RNA, 18 nt, Human
cggggaaaagcaaggccg

SEQ ID NO: 816849 - RNA, 19 nt, Human
cuacaaaacgggaacaagc

SEQ ID NO: 816850 - RNA, 18 nt, Human
cucaaagcccccacccuc

SEQ ID NO: 816851 - RNA, 26 nt, Human
cuccaccaugcucaucaucaucacaa

SEQ ID NO: 816852 - RNA, 21 nt, Human
cucccacccuccucgcucccc

SEQ ID NO: 816853 - RNA, 20 nt, Human
cuccccuccucgccccagga

SEQ ID NO: 816854 - RNA, 20 nt, Human
cucccgccugggaaaaacuc

SEQ ID NO: 816855 - RNA, 20 nt, Human
cucccucaccacccucugcc

SEQ ID NO: 816856 - RNA, 25 nt, Human
cucccucaccacccucugccaccgc

SEQ ID NO: 816857 - RNA, 20 nt, Human
cucccugaagccccccacga

SEQ ID NO: 816858 - RNA, 26 nt, Human
cucccugaagccccccacgaagcccc

SEQ ID NO: 816859 - RNA, 18 nt, Human
cucccugcagcccuccag

SEQ ID NO: 816860 - RNA, 19 nt, Human
cucccuggcauggaggagg

SEQ ID NO: 816861 - RNA, 24 nt, Human
cucccuggguuucaagagcugcuc

SEQ ID NO: 816862 - RNA, 19 nt, Human
cuccuggggcucagccacc

SEQ ID NO: 816863 - RNA, 18 nt, Human
cuccuuuccucuccuuuc

SEQ ID NO: 816864 - RNA, 21 nt, Human
cucugcacuucuguucacccc

SEQ ID NO: 816865 - RNA, 19 nt, Human
cucuuuacucccacccucc

SEQ ID NO: 816866 - RNA, 21 nt, Human
cugaagccccccacgaagccc

SEQ ID NO: 816867 - RNA, 22 nt, Human
cugaagccccccacgaagcccc

SEQ ID NO: 816868 - RNA, 21 nt, Human
cugccccagcugccucccggg

SEQ ID NO: 816869 - RNA, 18 nt, Human
cugcccguccuacaggac

SEQ ID NO: 816870 - RNA, 21 nt, Human
cugcucccacaggccuccugc

SEQ ID NO: 816871 - RNA, 24 nt, Human
cugcugccccagcugccucccggg

SEQ ID NO: 816872 - RNA, 21 nt, Human
cugcugcugccccagcugccu

SEQ ID NO: 816873 - RNA, 28 nt, Human
cugcugcugggaacccucccuggggccc

SEQ ID NO: 816874 - RNA, 24 nt, Human
cuguggcccccccugcccucuuuu

SEQ ID NO: 816875 - RNA, 20 nt, Human
cuuaucccuucccugcacuu

SEQ ID NO: 816876 - RNA, 21 nt, Human
cuucccaaaagagcuggcccc

SEQ ID NO: 816877 - RNA, 18 nt, Human
cuucggaaagggaugugg

SEQ ID NO: 816878 - RNA, 24 nt, Human
cuuuggugggcagagagagacucu

SEQ ID NO: 816879 - RNA, 21 nt, Human
gaagggagggagggagggaag

SEQ ID NO: 816880 - RNA, 22 nt, Human
gaaucacagcugcacacucugg

SEQ ID NO: 816881 - RNA, 21 nt, Human
gacccgugacgagguuucccc

SEQ ID NO: 816882 - RNA, 21 nt, Human
gacccucucccuucucccggg

SEQ ID NO: 816883 - RNA, 20 nt, Human
gagagggagggaggaaggga

SEQ ID NO: 816884 - RNA, 19 nt, Human
gagccggggccccccaagc

SEQ ID NO: 816885 - RNA, 24 nt, Human
gagccugcaccugagacguccugg

SEQ ID NO: 816886 - RNA, 19 nt, Human
gagcugcugccaggcuggc

SEQ ID NO: 816887 - RNA, 18 nt, Human
gagcuggccccaggagcg

SEQ ID NO: 816888 - RNA, 21 nt, Human
gaggaaggaggagcaggccca

SEQ ID NO: 816889 - RNA, 20 nt, Human
gaggagggguuggggggcag

SEQ ID NO: 816890 - RNA, 23 nt, Human
gaggggcuucagucccucucuac

SEQ ID NO: 816891 - RNA, 19 nt, Human
gagguggguguggggcagg

SEQ ID NO: 816892 - RNA, 20 nt, Human
gauguggggugggcacaggg

SEQ ID NO: 816893 - RNA, 18 nt, Human
gauuugcuucccaaaaga

SEQ ID NO: 816894 - RNA, 25 nt, Human
gcacugccucaggagggggggaacc

SEQ ID NO: 816895 - RNA, 20 nt, Human
gcacugggcugggaaguugg

SEQ ID NO: 816896 - RNA, 18 nt, Human
gcaggggguuccgggaca

SEQ ID NO: 816897 - RNA, 18 nt, Human
gcaguuggggcucuggcc

SEQ ID NO: 816898 - RNA, 23 nt, Human
gccagccccccggcccugcacac

SEQ ID NO: 816899 - RNA, 19 nt, Human
gcccagggccugagcccag

SEQ ID NO: 816900 - RNA, 20 nt, Human
gcccagggccugagcccagc

SEQ ID NO: 816901 - RNA, 23 nt, Human
gccccaggagaacagucuuuucu

SEQ ID NO: 816902 - RNA, 18 nt, Human
gcccccuccccuccucgc

SEQ ID NO: 816903 - RNA, 21 nt, Human
gccccuaacuccugcugcugg

SEQ ID NO: 816904 - RNA, 19 nt, Human
gcccuugaggaggcuuccc

SEQ ID NO: 816905 - RNA, 18 nt, Human
gccuggcugggaggccag

SEQ ID NO: 816906 - RNA, 20 nt, Human
gcuccgaccucaccagggag

SEQ ID NO: 816907 - RNA, 19 nt, Human
gcuggaguguggaguggca

SEQ ID NO: 816908 - RNA, 21 nt, Human
gcugugcccucccaggaagga

SEQ ID NO: 816909 - RNA, 19 nt, Human
gcuuucuugccuucaugcc

SEQ ID NO: 816910 - RNA, 20 nt, Human
ggaaagcagggcaucagaga

SEQ ID NO: 816911 - RNA, 20 nt, Human
ggacacagaugcaggccagc

SEQ ID NO: 816912 - RNA, 24 nt, Human
ggacaggcagccacugcaacccca

SEQ ID NO: 816913 - RNA, 23 nt, Human
ggacccuucccccaaaaggcccc

SEQ ID NO: 816914 - RNA, 19 nt, Human
ggagagagggagggaggaa

SEQ ID NO: 816915 - RNA, 21 nt, Human
ggaggcaagcaguauggaccc

SEQ ID NO: 816916 - RNA, 18 nt, Human
ggauguggggugggcaca

SEQ ID NO: 816917 - RNA, 21 nt, Human
ggcaggggcaggguaguaggg

SEQ ID NO: 816918 - RNA, 23 nt, Human
ggccaguuccccuccuggaucau

SEQ ID NO: 816919 - RNA, 19 nt, Human
ggcugggaggggcuggggc

SEQ ID NO: 816920 - RNA, 23 nt, Human
ggcugggaggggcuggggcgcca

SEQ ID NO: 816921 - RNA, 21 nt, Human
ggcuuccuuccuccccccgcc

SEQ ID NO: 816922 - RNA, 19 nt, Human
gggaaggagugugucagga

SEQ ID NO: 816923 - RNA, 19 nt, Human
gggcacagggcgggcaggg

SEQ ID NO: 816924 - RNA, 19 nt, Human
gggcagggcugugucuugg

SEQ ID NO: 816925 - RNA, 21 nt, Human
gggcagggcugugucuuggug

SEQ ID NO: 816926 - RNA, 20 nt, Human
gggcaggggucucggaggac

SEQ ID NO: 816927 - RNA, 23 nt, Human
gggcagguuuugggggccggggg

SEQ ID NO: 816928 - RNA, 18 nt, Human
gggcaucagagagggggc

SEQ ID NO: 816929 - RNA, 18 nt, Human
gggccuccaucuccccuc

SEQ ID NO: 816930 - RNA, 27 nt, Human
gggcuucagucccucucuacuccagcu

SEQ ID NO: 816931 - RNA, 19 nt, Human
gggggccucacuguuugug

SEQ ID NO: 816932 - RNA, 25 nt, Human
gggggucagaaagagggaaguggcc

SEQ ID NO: 816933 - RNA, 21 nt, Human
ggggugugaggagggguuggg

SEQ ID NO: 816934 - RNA, 19 nt, Human
gggguuggggggcagguuu

SEQ ID NO: 816935 - RNA, 23 nt, Human
ggugggggggucagaaagaggga

SEQ ID NO: 816936 - RNA, 24 nt, Human
gucagaaagagggaaguggccauu

SEQ ID NO: 816937 - RNA, 18 nt, Human
gucguugggguccccagg

SEQ ID NO: 816938 - RNA, 18 nt, Human
gugacugauccuccaccc

SEQ ID NO: 816939 - RNA, 18 nt, Human
gugcuuuguuugauguug

SEQ ID NO: 816940 - RNA, 23 nt, Human
uaaaacaggaaauugagggaagg

SEQ ID NO: 816941 - RNA, 19 nt, Human
uaauuccugaugccauccc

SEQ ID NO: 816942 - RNA, 21 nt, Human
uaccauggugacagaggcugg

SEQ ID NO: 816943 - RNA, 22 nt, Human
uacccagacacgggcuccccag

SEQ ID NO: 816944 - RNA, 26 nt, Human
uaggaccugucacugguguccuuaau

SEQ ID NO: 816945 - RNA, 21 nt, Human
uaggggucaaaagccccccag

SEQ ID NO: 816946 - RNA, 23 nt, Human
uaggucuccuuuccucuccuuuc

SEQ ID NO: 816947 - RNA, 23 nt, Human
ucacagguucagagcccagggcc

SEQ ID NO: 816948 - RNA, 19 nt, Human
ucacuagggagcauugugu

SEQ ID NO: 816949 - RNA, 25 nt, Human
ucagagcccagggccugagcccagc

SEQ ID NO: 816950 - RNA, 20 nt, Human
ucaggaggggagcccaggug

SEQ ID NO: 816951 - RNA, 25 nt, Human
ucagucccucucuacuccagcuucc

SEQ ID NO: 816952 - RNA, 22 nt, Human
ucccaagucccucagccccaag

SEQ ID NO: 816953 - RNA, 22 nt, Human
ucccacaggccuccugcacugc

SEQ ID NO: 816954 - RNA, 20 nt, Human
uccccaggcuccccgacggc

SEQ ID NO: 816955 - RNA, 23 nt, Human
ucccccaaaaggcccccagcccu

SEQ ID NO: 816956 - RNA, 27 nt, Human
uccccccgccagccccccggcccugca

SEQ ID NO: 816957 - RNA, 19 nt, Human
uccccgacggcuugccccg

SEQ ID NO: 816958 - RNA, 20 nt, Human
uccccgacggcuugccccgc

SEQ ID NO: 816959 - RNA, 22 nt, Human
uccccgacggcuugccccgccc

SEQ ID NO: 816960 - RNA, 19 nt, Human
uccccgcccuggccgccug

SEQ ID NO: 816961 - RNA, 20 nt, Human
ucccucuagucucgucuucc

SEQ ID NO: 816962 - RNA, 18 nt, Human
ucccugaccagccuugcc

SEQ ID NO: 816963 - RNA, 20 nt, Human
ucccugcacuuaggccccuu

SEQ ID NO: 816964 - RNA, 21 nt, Human
ucccugcagucagagagucug

SEQ ID NO: 816965 - RNA, 20 nt, Human
ucccuggggcugcccucccu

SEQ ID NO: 816966 - RNA, 21 nt, Human
ucccuguccccccaucccaca

SEQ ID NO: 816967 - RNA, 23 nt, Human
uccucccucacccccugccccca

SEQ ID NO: 816968 - RNA, 22 nt, Human
uccugaggaagggagggaggga

SEQ ID NO: 816969 - RNA, 18 nt, Human
ucgcccugccucggcucc

SEQ ID NO: 816970 - RNA, 22 nt, Human
ucugcaaggcgccagucacuag

SEQ ID NO: 816971 - RNA, 18 nt, Human
ucugcaggacccaaacca

SEQ ID NO: 816972 - RNA, 21 nt, Human
ucugcaggacccaaaccaggg

SEQ ID NO: 816973 - RNA, 19 nt, Human
ucuucacacccacccaccc

SEQ ID NO: 816974 - RNA, 19 nt, Human
ugaacugggucuucaaggc

SEQ ID NO: 816975 - RNA, 24 nt, Human
ugaagccccccacgaagccccaag

SEQ ID NO: 816976 - RNA, 21 nt, Human
ugagaacaugggugacucucg

SEQ ID NO: 816977 - RNA, 19 nt, Human
ugagacguccugggagcug

SEQ ID NO: 816978 - RNA, 19 nt, Human
ugagauaggagccgagauc

SEQ ID NO: 816979 - RNA, 18 nt, Human
ugagcaugagaguuagag

SEQ ID NO: 816980 - RNA, 20 nt, Human
ugagcuuccccaggcucccc

SEQ ID NO: 816981 - RNA, 21 nt, Human
ugaggaggcuucccuggggcu

SEQ ID NO: 816982 - RNA, 18 nt, Human
ugaggagggguugggggg

SEQ ID NO: 816983 - RNA, 19 nt, Human
ugaggcuaagcugcugugu

SEQ ID NO: 816984 - RNA, 24 nt, Human
ugagggaagggagaggcagauaca

SEQ ID NO: 816985 - RNA, 21 nt, Human
ugccaagggggugugaggagg

SEQ ID NO: 816986 - RNA, 22 nt, Human
ugccauguggcuuucuaggaag

SEQ ID NO: 816987 - RNA, 19 nt, Human
ugccccagaccacagccca

SEQ ID NO: 816988 - RNA, 22 nt, Human
ugccccagcugccucccggggu

SEQ ID NO: 816989 - RNA, 21 nt, Human
ugccucggcuccuuucccguc

SEQ ID NO: 816990 - RNA, 23 nt, Human
ugcugcugggaacccucccuggg

SEQ ID NO: 816991 - RNA, 22 nt, Human
ugcuugcuuuucucaguugugc

SEQ ID NO: 816992 - RNA, 18 nt, Human
ugcuugggggacaggcag

SEQ ID NO: 816993 - RNA, 24 nt, Human
ugcuuuguuugauguugggugggg

SEQ ID NO: 816994 - RNA, 18 nt, Human
uggacuccggcccaucag

SEQ ID NO: 816995 - RNA, 19 nt, Human
uggcacuagcuuuccuggu

SEQ ID NO: 816996 - RNA, 22 nt, Human
uggccccaggagcugcugccag

SEQ ID NO: 816997 - RNA, 21 nt, Human
uggcccccgagucugcucccc

SEQ ID NO: 816998 - RNA, 18 nt, Human
uggcugggaggggcuggg

SEQ ID NO: 816999 - RNA, 22 nt, Human
uggcuuucuaggaagaaaaagc

SEQ ID NO: 817000 - RNA, 21 nt, Human
ugggagcccugacuuccucau

SEQ ID NO: 817001 - RNA, 19 nt, Human
ugggccagcucccacccag

SEQ ID NO: 817002 - RNA, 24 nt, Human
ugggcccaaugcucagaaacacag

SEQ ID NO: 817003 - RNA, 19 nt, Human
uggggacaagggagguggc

SEQ ID NO: 817004 - RNA, 21 nt, Human
uggggacaagggagguggcag

SEQ ID NO: 817005 - RNA, 19 nt, Human
uggggacacaggccauggg

SEQ ID NO: 817006 - RNA, 23 nt, Human
uggggacacaggccauggggaca

SEQ ID NO: 817007 - RNA, 21 nt, Human
uggggccagccaggcaaggcu

SEQ ID NO: 817008 - RNA, 20 nt, Human
uggggcucagccaccucugg

SEQ ID NO: 817009 - RNA, 18 nt, Human
uggggcucuggccuggcu

SEQ ID NO: 817010 - RNA, 19 nt, Human
uggggcugcccucccuggc

SEQ ID NO: 817011 - RNA, 19 nt, Human
ugggggccgggggaggagg

SEQ ID NO: 817012 - RNA, 25 nt, Human
ugguggucaggugugugugugcgug

SEQ ID NO: 817013 - RNA, 21 nt, Human
ugugaggagggguuggggggc

SEQ ID NO: 817014 - RNA, 22 nt, Human
ugugccaagggggugugaggag

SEQ ID NO: 817015 - RNA, 22 nt, Human
uguggaguggcagaggggcaga

SEQ ID NO: 817016 - RNA, 19 nt, Human
uguggggugggcacagggc

SEQ ID NO: 817017 - RNA, 23 nt, Human
ugugugacccugggguugucaac

SEQ ID NO: 817018 - RNA, 24 nt, Human
uucuagccccagaccccccagacc

SEQ ID NO: 817019 - RNA, 21 nt, Human
uucucaaagcccccacccucu

SEQ ID NO: 817020 - RNA, 24 nt, Human
uugggugggggggucagaaagagg

SEQ ID NO: 817021 - RNA, 24 nt, Human
uuucucaaagcccccacccucucc

SEQ ID NO: 817022 - RNA, 18 nt, Human
uuugugaauacuucccuc

SEQ ID NO: 817023 - RNA, 22 nt, Human
aaaaagaauuccagaggucaaa

SEQ ID NO: 817024 - RNA, 21 nt, Human
aaaagcuuuuggcugacugag

SEQ ID NO: 817025 - RNA, 19 nt, Human
aaacaagaaugcuaccaaa

SEQ ID NO: 817026 - RNA, 19 nt, Human
aacaauugacagucacugu

SEQ ID NO: 817027 - RNA, 18 nt, Human
aagaagcaucuucaggac

SEQ ID NO: 817028 - RNA, 27 nt, Human
aagcagagaauaaaaauaaagggaccc

SEQ ID NO: 817029 - RNA, 23 nt, Human
aagcuccuuuugcagcuaaugcc

SEQ ID NO: 817030 - RNA, 24 nt, Human
aaucauccccuauugcugaucaaa

SEQ ID NO: 817031 - RNA, 19 nt, Human
acaacuuuuuuccaaaugu

SEQ ID NO: 817032 - RNA, 19 nt, Human
acaagaaaguucaacaaca

SEQ ID NO: 817033 - RNA, 23 nt, Human
acacacacacacacacacacaca

SEQ ID NO: 817034 - RNA, 23 nt, Human
acacacacacacacacacacaca

SEQ ID NO: 817035 - RNA, 23 nt, Human
acacacacacacacacacacaca

SEQ ID NO: 817036 - RNA, 23 nt, Human
acacacacacacacacacacaca

SEQ ID NO: 817037 - RNA, 22 nt, Human
acaguccugugggccagagaua

SEQ ID NO: 817038 - RNA, 20 nt, Human
acugcagcacaucuggaccc

SEQ ID NO: 817039 - RNA, 21 nt, Human
acuuguaggguucagaugaaa

SEQ ID NO: 817040 - RNA, 25 nt, Human
agaaaaaaagaaaagaaaaaaaucc

SEQ ID NO: 817041 - RNA, 22 nt, Human
agaaaaaaauccaaaagucaag

SEQ ID NO: 817042 - RNA, 22 nt, Human
agaauuucuccaguccccacau

SEQ ID NO: 817043 - RNA, 21 nt, Human
agcacuguucccaaacacacu

SEQ ID NO: 817044 - RNA, 21 nt, Human
agcauaacuuuuccaccaucc

SEQ ID NO: 817045 - RNA, 18 nt, Human
aguccccacauguggcug

SEQ ID NO: 817046 - RNA, 23 nt, Human
agugcagaaaacuggaaaaaccu

SEQ ID NO: 817047 - RNA, 22 nt, Human
auaacuuuuccaccauccauac

SEQ ID NO: 817048 - RNA, 19 nt, Human
auagaaacuuccgucuaca

SEQ ID NO: 817049 - RNA, 23 nt, Human
auuuaaacauuaugcaggaguug

SEQ ID NO: 817050 - RNA, 19 nt, Human
caaaugcaacacaccugug

SEQ ID NO: 817051 - RNA, 18 nt, Human
caagaagcaucuucagga

SEQ ID NO: 817052 - RNA, 22 nt, Human
caagaaugcuaccaaaaugcac

SEQ ID NO: 817053 - RNA, 19 nt, Human
caagaggcuugcugguguc

SEQ ID NO: 817054 - RNA, 20 nt, Human
cacacacacacacacacaca

SEQ ID NO: 817055 - RNA, 20 nt, Human
cacacacacacacacacaca

SEQ ID NO: 817056 - RNA, 20 nt, Human
cacacacacacacacacaca

SEQ ID NO: 817057 - RNA, 20 nt, Human
cacacacacacacacacaca

SEQ ID NO: 817058 - RNA, 20 nt, Human
cacacacacacacacacaca

SEQ ID NO: 817059 - RNA, 20 nt, Human
cacacacacacacacacaca

SEQ ID NO: 817060 - RNA, 22 nt, Human
cacacacacacacacacacaca

SEQ ID NO: 817061 - RNA, 20 nt, Human
cacagaggagcaaaggcggc

SEQ ID NO: 817062 - RNA, 21 nt, Human
caccaaacucuuugaaaagcu

SEQ ID NO: 817063 - RNA, 23 nt, Human
caccagaccuccacaaaucaaac

SEQ ID NO: 817064 - RNA, 23 nt, Human
cacccccuacccaacgucucacu

SEQ ID NO: 817065 - RNA, 19 nt, Human
caccuccuccccaguuaca

SEQ ID NO: 817066 - RNA, 21 nt, Human
cagaguucacugucuggugcc

SEQ ID NO: 817067 - RNA, 24 nt, Human
cagcuucuauagcucuccaaaccu

SEQ ID NO: 817068 - RNA, 22 nt, Human
caggaaauauuuagaggaggaa

SEQ ID NO: 817069 - RNA, 20 nt, Human
cauuuuauacaacuaacuga

SEQ ID NO: 817070 - RNA, 20 nt, Human
ccaaaagucaagaagaauaa

SEQ ID NO: 817071 - RNA, 21 nt, Human
ccaaaagucaagaagaauaag

SEQ ID NO: 817072 - RNA, 19 nt, Human
ccaguuuccagcccugcug

SEQ ID NO: 817073 - RNA, 30 nt, Human
ccccgacaucccaguaaugggaagaccccu

SEQ ID NO: 817074 - RNA, 20 nt, Human
cccugcaccccgucaagcac

SEQ ID NO: 817075 - RNA, 24 nt, Human
ccuccccaguuacacccccuaccc

SEQ ID NO: 817076 - RNA, 22 nt, Human
ccucuacugcagcacaucugga

SEQ ID NO: 817077 - RNA, 21 nt, Human
cgucaagcacugccaucagag

SEQ ID NO: 817078 - RNA, 18 nt, Human
cucaaauguuuuucccac

SEQ ID NO: 817079 - RNA, 18 nt, Human
cuccaggaguuccccaug

SEQ ID NO: 817080 - RNA, 19 nt, Human
cuccuugcuuccuuauccc

SEQ ID NO: 817081 - RNA, 23 nt, Human
cuccuuggauuagcucaguuauc

SEQ ID NO: 817082 - RNA, 21 nt, Human
cucuccuugcuuccuuauccc

SEQ ID NO: 817083 - RNA, 23 nt, Human
cucucugcaagcuccuuuugcag

SEQ ID NO: 817084 - RNA, 18 nt, Human
cuggaauagucauuuauu

SEQ ID NO: 817085 - RNA, 24 nt, Human
gaaaacaguaaagagauggcccuc

SEQ ID NO: 817086 - RNA, 22 nt, Human
gaaaauugagaccauuuuuagg

SEQ ID NO: 817087 - RNA, 20 nt, Human
gaaauauuuagaggaggaaa

SEQ ID NO: 817088 - RNA, 20 nt, Human
gacuagcuggaaaacaaggu

SEQ ID NO: 817089 - RNA, 21 nt, Human
gcaauuucagcacuguuccca

SEQ ID NO: 817090 - RNA, 21 nt, Human
gcuacacaggagcugugugac

SEQ ID NO: 817091 - RNA, 18 nt, Human
gcucaaggaaaagacuga

SEQ ID NO: 817092 - RNA, 19 nt, Human
gcucaaggaaaagacugaa

SEQ ID NO: 817093 - RNA, 20 nt, Human
gcuuccuuaucccaucaaac

SEQ ID NO: 817094 - RNA, 23 nt, Human
gcuuucuucgguccuggaugguu

SEQ ID NO: 817095 - RNA, 24 nt, Human
ggagacccaggaaauaacauggca

SEQ ID NO: 817096 - RNA, 18 nt, Human
ggcuagaggaggcggggu

SEQ ID NO: 817097 - RNA, 22 nt, Human
gggcaggacccugcuguaugug

SEQ ID NO: 817098 - RNA, 18 nt, Human
ggugagggcugcugaguc

SEQ ID NO: 817099 - RNA, 23 nt, Human
guauauguauguauaugcguuua

SEQ ID NO: 817100 - RNA, 20 nt, Human
gucauguucccacccaagga

SEQ ID NO: 817101 - RNA, 23 nt, Human
guuuuauuuauuuauuuauuuug

SEQ ID NO: 817102 - RNA, 28 nt, Human
uaaaacccagcuucuauagcucuccaaa

SEQ ID NO: 817103 - RNA, 19 nt, Human
uaaaacccuuugucccagu

SEQ ID NO: 817104 - RNA, 18 nt, Human
uaacugaacgcugggcuc

SEQ ID NO: 817105 - RNA, 21 nt, Human
uaacuuuuccaccauccauac

SEQ ID NO: 817106 - RNA, 26 nt, Human
uaauuuuuuuuucuauaauagcugcu

SEQ ID NO: 817107 - RNA, 19 nt, Human
uacagagaaugaaauggaa

SEQ ID NO: 817108 - RNA, 20 nt, Human
uacaggaagaacuuuuuggc

SEQ ID NO: 817109 - RNA, 21 nt, Human
uacaucacuugcaauuucagc

SEQ ID NO: 817110 - RNA, 24 nt, Human
uaccaaaaugcacaaagguggaca

SEQ ID NO: 817111 - RNA, 20 nt, Human
uagaaaacaguaaagagaug

SEQ ID NO: 817112 - RNA, 22 nt, Human
uagaaauagaaaaaucaacacc

SEQ ID NO: 817113 - RNA, 23 nt, Human
uagaaauagaaaaaucaacaccc

SEQ ID NO: 817114 - RNA, 18 nt, Human
uagaggcauuuccaaacu

SEQ ID NO: 817115 - RNA, 20 nt, Human
uagcugcuucuugaguucug

SEQ ID NO: 817116 - RNA, 21 nt, Human
uaggguucagaugaaaccacg

SEQ ID NO: 817117 - RNA, 22 nt, Human
uaguuuauaucuuuacccccau

SEQ ID NO: 817118 - RNA, 19 nt, Human
uauauguauguauaugcgu

SEQ ID NO: 817119 - RNA, 24 nt, Human
uauguauguauaugcguuuauaua

SEQ ID NO: 817120 - RNA, 20 nt, Human
uauuaaaauaacauuuuuau

SEQ ID NO: 817121 - RNA, 18 nt, Human
ucaaaaagaauuccagag

SEQ ID NO: 817122 - RNA, 21 nt, Human
ucaaucagcacaugagcuuuc

SEQ ID NO: 817123 - RNA, 21 nt, Human
ucacacacacacacacacaca

SEQ ID NO: 817124 - RNA, 23 nt, Human
ucagagggaaugcucuaauuuuu

SEQ ID NO: 817125 - RNA, 21 nt, Human
ucaggauuauuauagucuggg

SEQ ID NO: 817126 - RNA, 19 nt, Human
ucaggccaaggggcaauaa

SEQ ID NO: 817127 - RNA, 18 nt, Human
ucaucuuucauguauguc

SEQ ID NO: 817128 - RNA, 22 nt, Human
uccaaaagucaagaagaauaag

SEQ ID NO: 817129 - RNA, 21 nt, Human
uccaaagggagagacgauuga

SEQ ID NO: 817130 - RNA, 25 nt, Human
uccaggaguuccccaugaguuuuca

SEQ ID NO: 817131 - RNA, 20 nt, Human
ucccaaacacacuacagucc

SEQ ID NO: 817132 - RNA, 24 nt, Human
ucccaacauaagccacaggguacc

SEQ ID NO: 817133 - RNA, 22 nt, Human
ucccagggaagaaaacucaugu

SEQ ID NO: 817134 - RNA, 23 nt, Human
ucccaguaaugggaagaccccuu

SEQ ID NO: 817135 - RNA, 22 nt, Human
uccccaguuacacccccuaccc

SEQ ID NO: 817136 - RNA, 22 nt, Human
ucuauugucuuuucuucuugcc

SEQ ID NO: 817137 - RNA, 18 nt, Human
ucugcaagcuccuuuugc

SEQ ID NO: 817138 - RNA, 24 nt, Human
ucugcaagcuccuuuugcagcuaa

SEQ ID NO: 817139 - RNA, 20 nt, Human
ucugcccucuacugcagcac

SEQ ID NO: 817140 - RNA, 20 nt, Human
ucuucuugccuucucucaaa

SEQ ID NO: 817141 - RNA, 22 nt, Human
ucuuggauaccaucccuagaug

SEQ ID NO: 817142 - RNA, 22 nt, Human
ugaaaagcuuuuggcugacuga

SEQ ID NO: 817143 - RNA, 25 nt, Human
ugaaauggaaaauugagaccaacug

SEQ ID NO: 817144 - RNA, 21 nt, Human
ugacccccugcagauccuucc

SEQ ID NO: 817145 - RNA, 27 nt, Human
ugagaccauuuuuagguaacucgagua

SEQ ID NO: 817146 - RNA, 28 nt, Human
ugagguuugcuagguguugaccacaggg

SEQ ID NO: 817147 - RNA, 19 nt, Human
ugauaugcauuacaucaca

SEQ ID NO: 817148 - RNA, 21 nt, Human
ugauuccugugcucugcccuc

SEQ ID NO: 817149 - RNA, 18 nt, Human
ugcaagcuccuuuugcag

SEQ ID NO: 817150 - RNA, 22 nt, Human
ugcagaaaacuggaaaaaccug

SEQ ID NO: 817151 - RNA, 18 nt, Human
ugcauggagacccaggaa

SEQ ID NO: 817152 - RNA, 20 nt, Human
ugcuucaggugacccccugc

SEQ ID NO: 817153 - RNA, 24 nt, Human
uggaaaacaaggugcuauaaccca

SEQ ID NO: 817154 - RNA, 19 nt, Human
uggaaggaacccuuccccc

SEQ ID NO: 817155 - RNA, 19 nt, Human
uggagacccaggaaauaac

SEQ ID NO: 817156 - RNA, 23 nt, Human
uggagacccaggaaauaagggag

SEQ ID NO: 817157 - RNA, 21 nt, Human
uggaguauucugagguuugcu

SEQ ID NO: 817158 - RNA, 18 nt, Human
uggcauguuugaacgcuc

SEQ ID NO: 817159 - RNA, 25 nt, Human
uggccacaaagcacuuguauaaaua

SEQ ID NO: 817160 - RNA, 20 nt, Human
uggcuagaggaggcgggguu

SEQ ID NO: 817161 - RNA, 21 nt, Human
uggcuagaggaggcgggguug

SEQ ID NO: 817162 - RNA, 23 nt, Human
uggcugacugaggaaucuuccca

SEQ ID NO: 817163 - RNA, 22 nt, Human
ugggaugucuguacauuuaaaa

SEQ ID NO: 817164 - RNA, 27 nt, Human
ugguggaaggaacccuucccccaauuc

SEQ ID NO: 817165 - RNA, 21 nt, Human
uguauaugcguuuauauacau

SEQ ID NO: 817166 - RNA, 23 nt, Human
ugucaaucagcacaugagcuuuc

SEQ ID NO: 817167 - RNA, 25 nt, Human
ugucccaguguuauacaagaaaguu

SEQ ID NO: 817168 - RNA, 20 nt, Human
ugugaccacagaguucacug

SEQ ID NO: 817169 - RNA, 24 nt, Human
uuagaggcauuuccaaacuuaaaa

SEQ ID NO: 817170 - RNA, 21 nt, Human
uuagauauuuuugagugggau

SEQ ID NO: 817171 - RNA, 20 nt, Human
uucacacacacacacacaca

SEQ ID NO: 817172 - RNA, 21 nt, Human
uucacacacacacacacacac

SEQ ID NO: 817173 - RNA, 19 nt, Human
uucaucauuuucagaaaug

SEQ ID NO: 817174 - RNA, 19 nt, Human
uucuuugguguggcagcug

SEQ ID NO: 817175 - RNA, 23 nt, Human
uugcaauuucagcacuguuccca

SEQ ID NO: 817176 - RNA, 19 nt, Human
uuggggggaaacccacugc

SEQ ID NO: 817177 - RNA, 20 nt, Human
uuuccuucaccuccucccca

SEQ ID NO: 817178 - RNA, 21 nt, Human
aaaacacggcaguucagaaug

SEQ ID NO: 817179 - RNA, 21 nt, Human
aaacccaaaacacggcaguuc

SEQ ID NO: 817180 - RNA, 21 nt, Human
aaaucccccggcguucuuuuc

SEQ ID NO: 817181 - RNA, 20 nt, Human
aaaugauaaaucuuauguuu

SEQ ID NO: 817182 - RNA, 24 nt, Human
aacacgcucccccucuuuccccug

SEQ ID NO: 817183 - RNA, 19 nt, Human
aaccagauuccucauccua

SEQ ID NO: 817184 - RNA, 19 nt, Human
aacccaaguccaauugaau

SEQ ID NO: 817185 - RNA, 19 nt, Human
aacccgagccgcucagaag

SEQ ID NO: 817186 - RNA, 19 nt, Human
aacccgucugcccgcucug

SEQ ID NO: 817187 - RNA, 19 nt, Human
aaccuuaaccucagggaau

SEQ ID NO: 817188 - RNA, 24 nt, Human
aagagaaaagcaaauccgaucaaa

SEQ ID NO: 817189 - RNA, 22 nt, Human
aagccagagaacaguaaaccca

SEQ ID NO: 817190 - RNA, 20 nt, Human
acacaccccucuccgccaag

SEQ ID NO: 817191 - RNA, 25 nt, Human
acacuggcucuccguucucuccugg

SEQ ID NO: 817192 - RNA, 20 nt, Human
acagaaccguccaguaucaa

SEQ ID NO: 817193 - RNA, 22 nt, Human
acagagcugggauauaaacacc

SEQ ID NO: 817194 - RNA, 24 nt, Human
acagggcagcagaggaaaacagaa

SEQ ID NO: 817195 - RNA, 20 nt, Human
acaguguccccaggggcgca

SEQ ID NO: 817196 - RNA, 18 nt, Human
acccacuaagucaugauc

SEQ ID NO: 817197 - RNA, 25 nt, Human
acccagaccccaggcucugccccag

SEQ ID NO: 817198 - RNA, 23 nt, Human
acccaggccgugguggauccagu

SEQ ID NO: 817199 - RNA, 23 nt, Human
accccgaggcccgaacgagauua

SEQ ID NO: 817200 - RNA, 19 nt, Human
accguccaguaucaacacc

SEQ ID NO: 817201 - RNA, 21 nt, Human
accgugacacacagcacacug

SEQ ID NO: 817202 - RNA, 20 nt, Human
accugcuuuguaaggucuca

SEQ ID NO: 817203 - RNA, 23 nt, Human
acucgacauccgauggcaccccu

SEQ ID NO: 817204 - RNA, 19 nt, Human
acugcaccuggggcuccag

SEQ ID NO: 817205 - RNA, 19 nt, Human
acugccucagccuggagcu

SEQ ID NO: 817206 - RNA, 21 nt, Human
agaaaagcaaauccgaucaaa

SEQ ID NO: 817207 - RNA, 24 nt, Human
agaacucugcaaacagugcucccc

SEQ ID NO: 817208 - RNA, 19 nt, Human
agaauaggguggggacggg

SEQ ID NO: 817209 - RNA, 22 nt, Human
agacagugccgaugguuacaca

SEQ ID NO: 817210 - RNA, 20 nt, Human
agaccccaggcucugcccca

SEQ ID NO: 817211 - RNA, 19 nt, Human
agacugccucagccuggag

SEQ ID NO: 817212 - RNA, 21 nt, Human
agagaacaguaaacccaaaac

SEQ ID NO: 817213 - RNA, 20 nt, Human
agagcugggauauaaacacc

SEQ ID NO: 817214 - RNA, 22 nt, Human
agccagagaacaguaaacccaa

SEQ ID NO: 817215 - RNA, 21 nt, Human
agccccaaggcuucugaacag

SEQ ID NO: 817216 - RNA, 21 nt, Human
agcuaaacaaauuaccccgag

SEQ ID NO: 817217 - RNA, 22 nt, Human
agcuacaaagcccagccuggga

SEQ ID NO: 817218 - RNA, 19 nt, Human
agcuggcgggagggggcgg

SEQ ID NO: 817219 - RNA, 20 nt, Human
aggagcucuguggacagucc

SEQ ID NO: 817220 - RNA, 27 nt, Human
aggcaaacgagguguggccucccucuu

SEQ ID NO: 817221 - RNA, 24 nt, Human
aggcagaagagaaaagcaaauccg

SEQ ID NO: 817222 - RNA, 25 nt, Human
aggcagaagagaaaagcaaauccga

SEQ ID NO: 817223 - RNA, 28 nt, Human
aggccagcagcaggagagcagcaggaga

SEQ ID NO: 817224 - RNA, 21 nt, Human
aggcgcccccaagcccugccg

SEQ ID NO: 817225 - RNA, 23 nt, Human
aggcugugucagccuggacuucu

SEQ ID NO: 817226 - RNA, 24 nt, Human
agggagagcucggggaccaggagc

SEQ ID NO: 817227 - RNA, 22 nt, Human
agggaguggcgguggaggaggg

SEQ ID NO: 817228 - RNA, 19 nt, Human
aggggcugaggcccgggac

SEQ ID NO: 817229 - RNA, 21 nt, Human
aggggugcugguuucuggucc

SEQ ID NO: 817230 - RNA, 18 nt, Human
aguagcugugggagaagu

SEQ ID NO: 817231 - RNA, 19 nt, Human
agucccagcugaaccuugc

SEQ ID NO: 817232 - RNA, 18 nt, Human
aguggcgguggaggaggg

SEQ ID NO: 817233 - RNA, 20 nt, Human
auaaaccagauuccucaucc

SEQ ID NO: 817234 - RNA, 19 nt, Human
auccagugagauguggcuc

SEQ ID NO: 817235 - RNA, 21 nt, Human
aucggcugcccugguucucag

SEQ ID NO: 817236 - RNA, 19 nt, Human
aucuggcagccacauggag

SEQ ID NO: 817237 - RNA, 22 nt, Human
auggagcagaagaaccgcccag

SEQ ID NO: 817238 - RNA, 23 nt, Human
auggagcagaagaaccgcccagc

SEQ ID NO: 817239 - RNA, 23 nt, Human
caaagcccagccugggaggccgc

SEQ ID NO: 817240 - RNA, 22 nt, Human
caaauaaauaacccaaguccaa

SEQ ID NO: 817241 - RNA, 18 nt, Human
caaauccgggcacaaaua

SEQ ID NO: 817242 - RNA, 18 nt, Human
caacacagauggugggcc

SEQ ID NO: 817243 - RNA, 24 nt, Human
caacacugaaucucugcauuuacu

SEQ ID NO: 817244 - RNA, 21 nt, Human
caaggaaccacugcccagagc

SEQ ID NO: 817245 - RNA, 20 nt, Human
cacacagcacacuggcucuc

SEQ ID NO: 817246 - RNA, 20 nt, Human
cacagggaggagcucugugg

SEQ ID NO: 817247 - RNA, 18 nt, Human
caccccagggcugccggc

SEQ ID NO: 817248 - RNA, 20 nt, Human
caccccucauuuccugccuc

SEQ ID NO: 817249 - RNA, 22 nt, Human
caccccucuccgccaagcuuca

SEQ ID NO: 817250 - RNA, 19 nt, Human
caccuggggcuccagccuc

SEQ ID NO: 817251 - RNA, 24 nt, Human
cacggccagagccaugcagacgcc

SEQ ID NO: 817252 - RNA, 24 nt, Human
cagaaccguccaguaucaacacca

SEQ ID NO: 817253 - RNA, 26 nt, Human
cagaaccguccaguaucaacaccaac

SEQ ID NO: 817254 - RNA, 18 nt, Human
cagacagcagagggagga

SEQ ID NO: 817255 - RNA, 24 nt, Human
cagagaacaguaaacccaaaacac

SEQ ID NO: 817256 - RNA, 21 nt, Human
cagagcugcucccuggguggg

SEQ ID NO: 817257 - RNA, 27 nt, Human
cagagcugggcgaggcuggacucccag

SEQ ID NO: 817258 - RNA, 20 nt, Human
cagaggaaaacagaaaucau

SEQ ID NO: 817259 - RNA, 18 nt, Human
cagaggguaggagcugga

SEQ ID NO: 817260 - RNA, 21 nt, Human
cagcacacuggcucuccguuc

SEQ ID NO: 817261 - RNA, 22 nt, Human
cagcagaggggcugaggcccgg

SEQ ID NO: 817262 - RNA, 20 nt, Human
cagccaaugccugacagagc

SEQ ID NO: 817263 - RNA, 21 nt, Human
cagcugagccacuuccaaacu

SEQ ID NO: 817264 - RNA, 19 nt, Human
caggaacaagagccacugc

SEQ ID NO: 817265 - RNA, 23 nt, Human
caggacugggaaggcuuccugga

SEQ ID NO: 817266 - RNA, 19 nt, Human
caggagaacagcccagccc

SEQ ID NO: 817267 - RNA, 18 nt, Human
caggccccaggugagaaa

SEQ ID NO: 817268 - RNA, 20 nt, Human
cagggaggagcucuguggac

SEQ ID NO: 817269 - RNA, 18 nt, Human
caggucuggcuugugugg

SEQ ID NO: 817270 - RNA, 18 nt, Human
cagguuuuugcucugugg

SEQ ID NO: 817271 - RNA, 24 nt, Human
caguggcgcuccggcgcccugggu

SEQ ID NO: 817272 - RNA, 19 nt, Human
caguggggguaggcaugga

SEQ ID NO: 817273 - RNA, 19 nt, Human
caguguccccaggggcgca

SEQ ID NO: 817274 - RNA, 20 nt, Human
cauccaggaacaagagccuu

SEQ ID NO: 817275 - RNA, 18 nt, Human
caucgcccgagagcuggu

SEQ ID NO: 817276 - RNA, 22 nt, Human
caugcagugcccaaggaaccac

SEQ ID NO: 817277 - RNA, 21 nt, Human
cauuagccauuaacuccccag

SEQ ID NO: 817278 - RNA, 24 nt, Human
ccaaaagccagagaacaguaaacc

SEQ ID NO: 817279 - RNA, 22 nt, Human
ccaaugccugacagagcuggga

SEQ ID NO: 817280 - RNA, 21 nt, Human
ccacuuccaaacucuugaccc

SEQ ID NO: 817281 - RNA, 22 nt, Human
ccaggccccaggugagaaacac

SEQ ID NO: 817282 - RNA, 25 nt, Human
ccaggccccaggugagaaacaccga

SEQ ID NO: 817283 - RNA, 24 nt, Human
cccaagacugccucagccuggagc

SEQ ID NO: 817284 - RNA, 25 nt, Human
cccaaggaaccacugcccagagcac

SEQ ID NO: 817285 - RNA, 23 nt, Human
cccacccagaccccaggcucugc

SEQ ID NO: 817286 - RNA, 20 nt, Human
cccagagcacacggcccucu

SEQ ID NO: 817287 - RNA, 21 nt, Human
ccccagagucacauaaaccag

SEQ ID NO: 817288 - RNA, 19 nt, Human
ccccaggugagaaacaccg

SEQ ID NO: 817289 - RNA, 20 nt, Human
ccccaggugagaaacaccga

SEQ ID NO: 817290 - RNA, 20 nt, Human
ccccauguacccagagcuca

SEQ ID NO: 817291 - RNA, 22 nt, Human
cccccaagcccugccggcagcc

SEQ ID NO: 817292 - RNA, 21 nt, Human
cccccagagucacauaaacca

SEQ ID NO: 817293 - RNA, 23 nt, Human
cccccucuuuccccugcaauucc

SEQ ID NO: 817294 - RNA, 20 nt, Human
ccccugagggaggggacggg

SEQ ID NO: 817295 - RNA, 24 nt, Human
ccccugcaauuccugagaucaccu

SEQ ID NO: 817296 - RNA, 21 nt, Human
ccccugcauccaggaacaaga

SEQ ID NO: 817297 - RNA, 19 nt, Human
ccccugccugugccgggga

SEQ ID NO: 817298 - RNA, 25 nt, Human
cccgccgccaccccagggcugccgg

SEQ ID NO: 817299 - RNA, 19 nt, Human
cccgggcugacucccagga

SEQ ID NO: 817300 - RNA, 22 nt, Human
cccucuagaccagacugcccac

SEQ ID NO: 817301 - RNA, 23 nt, Human
cccucuagaccagacugcccacc

SEQ ID NO: 817302 - RNA, 24 nt, Human
cccucucccucagggaagacuuug

SEQ ID NO: 817303 - RNA, 20 nt, Human
cccucuccgccaagcuucag

SEQ ID NO: 817304 - RNA, 20 nt, Human
cccuguugugugcaucgccc

SEQ ID NO: 817305 - RNA, 21 nt, Human
ccgaggcagaagagaaaagca

SEQ ID NO: 817306 - RNA, 21 nt, Human
ccgcccggccaacccgucugc

SEQ ID NO: 817307 - RNA, 19 nt, Human
ccggcagcgcggaacccga

SEQ ID NO: 817308 - RNA, 20 nt, Human
ccuacacuaacacgcucccc

SEQ ID NO: 817309 - RNA, 22 nt, Human
ccucagagguccuuccaggggu

SEQ ID NO: 817310 - RNA, 21 nt, Human
ccuccaaugacacuuagcaaa

SEQ ID NO: 817311 - RNA, 20 nt, Human
ccuccagaccugagcugagu

SEQ ID NO: 817312 - RNA, 20 nt, Human
ccugcaauuccugagaucac

SEQ ID NO: 817313 - RNA, 18 nt, Human
ccugccggcagcgcggaa

SEQ ID NO: 817314 - RNA, 28 nt, Human
cgaggcccgaacgagauuaaaagaccgg

SEQ ID NO: 817315 - RNA, 21 nt, Human
cgccguggagcuggggccacu

SEQ ID NO: 817316 - RNA, 24 nt, Human
cgccguggagcuggggccacucug

SEQ ID NO: 817317 - RNA, 22 nt, Human
cggcagcgcggaacccgagccg

SEQ ID NO: 817318 - RNA, 20 nt, Human
cggccagagccaugcagacc

SEQ ID NO: 817319 - RNA, 21 nt, Human
cuacaaagcccagccugggag

SEQ ID NO: 817320 - RNA, 20 nt, Human
cuacagaugcccaggacugg

SEQ ID NO: 817321 - RNA, 19 nt, Human
cucaagaacuugaauagaa

SEQ ID NO: 817322 - RNA, 24 nt, Human
cucacacaccccucuccgccaagc

SEQ ID NO: 817323 - RNA, 23 nt, Human
cucagaagcccgggagccccaag

SEQ ID NO: 817324 - RNA, 18 nt, Human
cuccagcagcugcccaca

SEQ ID NO: 817325 - RNA, 20 nt, Human
cucccaagacugccucagcc

SEQ ID NO: 817326 - RNA, 21 nt, Human
cucccacccagaccccaggcu

SEQ ID NO: 817327 - RNA, 19 nt, Human
cuccuggggggggcccugg

SEQ ID NO: 817328 - RNA, 21 nt, Human
cugcagcuacaaagcccagcc

SEQ ID NO: 817329 - RNA, 19 nt, Human
cugccugagaaggaucccg

SEQ ID NO: 817330 - RNA, 20 nt, Human
cuggauuagaucagcauuug

SEQ ID NO: 817331 - RNA, 21 nt, Human
cugugggugcaggggugcugg

SEQ ID NO: 817332 - RNA, 20 nt, Human
cugugugcugggguuacccc

SEQ ID NO: 817333 - RNA, 21 nt, Human
cuuccaggaaggggugggcac

SEQ ID NO: 817334 - RNA, 20 nt, Human
cuuuccagcgacgaucccga

SEQ ID NO: 817335 - RNA, 18 nt, Human
gaaccagccacgggacac

SEQ ID NO: 817336 - RNA, 20 nt, Human
gaccgcaguggugcaagccc

SEQ ID NO: 817337 - RNA, 19 nt, Human
gacugcccaccagcagggu

SEQ ID NO: 817338 - RNA, 22 nt, Human
gacugcccuccccaaguggcug

SEQ ID NO: 817339 - RNA, 19 nt, Human
gagaauaggguggggacgg

SEQ ID NO: 817340 - RNA, 18 nt, Human
gagagcagcaggagaaca

SEQ ID NO: 817341 - RNA, 18 nt, Human
gagcuggcgggagggggc

SEQ ID NO: 817342 - RNA, 23 nt, Human
gagcugggcgaggcuggacuccc

SEQ ID NO: 817343 - RNA, 19 nt, Human
gaggccacggcagacagug

SEQ ID NO: 817344 - RNA, 23 nt, Human
gagguccuuccagggguuggaca

SEQ ID NO: 817345 - RNA, 18 nt, Human
gcagggcgggaugacggg

SEQ ID NO: 817346 - RNA, 18 nt, Human
gccagagaacaguaaacc

SEQ ID NO: 817347 - RNA, 20 nt, Human
gccagagaacaguaaaccca

SEQ ID NO: 817348 - RNA, 23 nt, Human
gccagagaacaguaaacccaaaa

SEQ ID NO: 817349 - RNA, 24 nt, Human
gccauaauaaagaccucauguacc

SEQ ID NO: 817350 - RNA, 23 nt, Human
gcccacccggaggcagcucccaa

SEQ ID NO: 817351 - RNA, 19 nt, Human
gcccagagcacacggcccu

SEQ ID NO: 817352 - RNA, 18 nt, Human
gccccaaggcuucugaac

SEQ ID NO: 817353 - RNA, 24 nt, Human
gccccaaggcuucugaacagccac

SEQ ID NO: 817354 - RNA, 19 nt, Human
gcccuccccaaguggcugg

SEQ ID NO: 817355 - RNA, 23 nt, Human
gccgccaccccagggcugccggc

SEQ ID NO: 817356 - RNA, 23 nt, Human
gccgggaagggcuuccuagcagg

SEQ ID NO: 817357 - RNA, 18 nt, Human
gccggggcuggaggucuc

SEQ ID NO: 817358 - RNA, 24 nt, Human
gcucgcugugguuggacagagcug

SEQ ID NO: 817359 - RNA, 24 nt, Human
gcugcagcuacaaagcccagccug

SEQ ID NO: 817360 - RNA, 18 nt, Human
ggaauucaaaaggcccug

SEQ ID NO: 817361 - RNA, 22 nt, Human
ggacagucccagcugaaccuug

SEQ ID NO: 817362 - RNA, 20 nt, Human
ggaggaaccugcuuuguaag

SEQ ID NO: 817363 - RNA, 21 nt, Human
ggagggggcggauccggaggg

SEQ ID NO: 817364 - RNA, 21 nt, Human
ggcaccccuucaugcccagcu

SEQ ID NO: 817365 - RNA, 18 nt, Human
ggcauaauccaaucccuc

SEQ ID NO: 817366 - RNA, 21 nt, Human
ggccacggcagacaguguccc

SEQ ID NO: 817367 - RNA, 19 nt, Human
ggccagcagcaggagagca

SEQ ID NO: 817368 - RNA, 24 nt, Human
ggcgggaugacgggugcaggaggc

SEQ ID NO: 817369 - RNA, 18 nt, Human
ggcggugauccaggagug

SEQ ID NO: 817370 - RNA, 21 nt, Human
gggaagggagagcucggggac

SEQ ID NO: 817371 - RNA, 19 nt, Human
gggagcccugagcugucau

SEQ ID NO: 817372 - RNA, 21 nt, Human
gggauuugcuuguagcccagg

SEQ ID NO: 817373 - RNA, 20 nt, Human
gggcacaaauaaauaaccca

SEQ ID NO: 817374 - RNA, 19 nt, Human
gggcacagacccagccugg

SEQ ID NO: 817375 - RNA, 20 nt, Human
gggccagggcucggauagga

SEQ ID NO: 817376 - RNA, 20 nt, Human
gggcuuccucccucagggcu

SEQ ID NO: 817377 - RNA, 18 nt, Human
ggggacggguccugggaa

SEQ ID NO: 817378 - RNA, 22 nt, Human
gggggccgcagucccccggggg

SEQ ID NO: 817379 - RNA, 18 nt, Human
gggggggucgguggggaa

SEQ ID NO: 817380 - RNA, 23 nt, Human
ggggguggucgcagcgcccuuuc

SEQ ID NO: 817381 - RNA, 24 nt, Human
ggugcauggaugcuccuugccuug

SEQ ID NO: 817382 - RNA, 22 nt, Human
gguggggaaaacgccuuuaggu

SEQ ID NO: 817383 - RNA, 18 nt, Human
gguggggaaaagccaggu

SEQ ID NO: 817384 - RNA, 21 nt, Human
gguuuccagcuugcaacacag

SEQ ID NO: 817385 - RNA, 24 nt, Human
guggagcuggggccacucugggag

SEQ ID NO: 817386 - RNA, 21 nt, Human
guggccgggaagggcuuccua

SEQ ID NO: 817387 - RNA, 19 nt, Human
guggcuccggaacuuaccc

SEQ ID NO: 817388 - RNA, 21 nt, Human
guucucaggccuccagaccug

SEQ ID NO: 817389 - RNA, 23 nt, Human
guuucaggccacuuugcucccag

SEQ ID NO: 817390 - RNA, 24 nt, Human
uaaagccaucauggacccucuaga

SEQ ID NO: 817391 - RNA, 22 nt, Human
uaaauaacccaaguccaauuga

SEQ ID NO: 817392 - RNA, 21 nt, Human
uaacgaguuuaagccaaaucc

SEQ ID NO: 817393 - RNA, 21 nt, Human
uaacucgacauccgauggcac

SEQ ID NO: 817394 - RNA, 19 nt, Human
uaaggcgcccccaagcccu

SEQ ID NO: 817395 - RNA, 20 nt, Human
uacaacgaaguagcuguggg

SEQ ID NO: 817396 - RNA, 24 nt, Human
uacacacugugucugugagagugu

SEQ ID NO: 817397 - RNA, 19 nt, Human
uaccaaagaaagcacauag

SEQ ID NO: 817398 - RNA, 19 nt, Human
uaccccgaggcccgaacga

SEQ ID NO: 817399 - RNA, 19 nt, Human
uacccugagaccaccaugc

SEQ ID NO: 817400 - RNA, 25 nt, Human
uaggagcuggaggcucgcuguggga

SEQ ID NO: 817401 - RNA, 24 nt, Human
uauguguccacuuaagugcacugu

SEQ ID NO: 817402 - RNA, 25 nt, Human
uauguuuauuucaucacuaccaaaa

SEQ ID NO: 817403 - RNA, 24 nt, Human
ucaacaccagagcugggcgaggcu

SEQ ID NO: 817404 - RNA, 21 nt, Human
ucacccuaaugaagccaucuu

SEQ ID NO: 817405 - RNA, 20 nt, Human
ucacuaccaaaaggcugugg

SEQ ID NO: 817406 - RNA, 20 nt, Human
ucacugggcuuccucccuca

SEQ ID NO: 817407 - RNA, 20 nt, Human
ucagaaugggagacguccca

SEQ ID NO: 817408 - RNA, 21 nt, Human
ucagcucccucucccucaggg

SEQ ID NO: 817409 - RNA, 21 nt, Human
ucagcugaucagcacagcuaa

SEQ ID NO: 817410 - RNA, 23 nt, Human
uccacaaugaacccaucauaggg

SEQ ID NO: 817411 - RNA, 20 nt, Human
uccagcgacgaucccgaggg

SEQ ID NO: 817412 - RNA, 21 nt, Human
uccagguuuuugcucuguggg

SEQ ID NO: 817413 - RNA, 20 nt, Human
uccagugagauguggcuccg

SEQ ID NO: 817414 - RNA, 22 nt, Human
ucccagagugcagccuuucugg

SEQ ID NO: 817415 - RNA, 24 nt, Human
ucccagcacagugcucagauaucc

SEQ ID NO: 817416 - RNA, 23 nt, Human
ucccaggccccaggugagaaaca

SEQ ID NO: 817417 - RNA, 18 nt, Human
ucccagggcuccagccuc

SEQ ID NO: 817418 - RNA, 22 nt, Human
ucccagggcuccagccucccaa

SEQ ID NO: 817419 - RNA, 23 nt, Human
uccccagggagcucauccacgug

SEQ ID NO: 817420 - RNA, 18 nt, Human
uccccugcaauuccugag

SEQ ID NO: 817421 - RNA, 18 nt, Human
ucccugaacacaagaggc

SEQ ID NO: 817422 - RNA, 26 nt, Human
ucccuuacccaucucacucccuggga

SEQ ID NO: 817423 - RNA, 21 nt, Human
uccuucagccucgguuaggau

SEQ ID NO: 817424 - RNA, 19 nt, Human
ucggcaagaggguucauug

SEQ ID NO: 817425 - RNA, 26 nt, Human
ucuaaggcgcccccaagcccugccgg

SEQ ID NO: 817426 - RNA, 25 nt, Human
ucucccucagggaagacuuugagaa

SEQ ID NO: 817427 - RNA, 21 nt, Human
ucucucguccuccuaacucga

SEQ ID NO: 817428 - RNA, 23 nt, Human
ucugaacagccacuacccggcuu

SEQ ID NO: 817429 - RNA, 23 nt, Human
ucugccccagcccaggcagaggg

SEQ ID NO: 817430 - RNA, 18 nt, Human
ugaaaaggggcaauggug

SEQ ID NO: 817431 - RNA, 24 nt, Human
ugaaaugaggaccaugggacaucu

SEQ ID NO: 817432 - RNA, 19 nt, Human
ugaacagccacuacccggc

SEQ ID NO: 817433 - RNA, 24 nt, Human
ugacagagcugggauauaaacacc

SEQ ID NO: 817434 - RNA, 21 nt, Human
ugacccacuaagucaugaucc

SEQ ID NO: 817435 - RNA, 21 nt, Human
ugagagacagcugagguacug

SEQ ID NO: 817436 - RNA, 26 nt, Human
ugagagacagcugagguacugaccca

SEQ ID NO: 817437 - RNA, 21 nt, Human
ugagccucuguuuucucaccu

SEQ ID NO: 817438 - RNA, 21 nt, Human
ugaggaugucaugugagagac

SEQ ID NO: 817439 - RNA, 21 nt, Human
ugaggcaggguggggaaaacg

SEQ ID NO: 817440 - RNA, 21 nt, Human
ugaggcccgggacgggggugg

SEQ ID NO: 817441 - RNA, 20 nt, Human
ugagggaggggacggguccu

SEQ ID NO: 817442 - RNA, 18 nt, Human
ugaguaaagccaucaugg

SEQ ID NO: 817443 - RNA, 25 nt, Human
ugcaggaaguccagcuaacgggucc

SEQ ID NO: 817444 - RNA, 27 nt, Human
ugcaggggugcugguuucugguccuaa

SEQ ID NO: 817445 - RNA, 22 nt, Human
ugccagcugccugcgacacggg

SEQ ID NO: 817446 - RNA, 19 nt, Human
ugcccaggacugggaaggc

SEQ ID NO: 817447 - RNA, 21 nt, Human
ugcccgcucugcgaccucagc

SEQ ID NO: 817448 - RNA, 22 nt, Human
ugcccugguucucaggccucca

SEQ ID NO: 817449 - RNA, 18 nt, Human
ugccgcugccugagaagg

SEQ ID NO: 817450 - RNA, 22 nt, Human
ugccugagaaggaucccggcuc

SEQ ID NO: 817451 - RNA, 22 nt, Human
ugccuucagcuggcaaaagggg

SEQ ID NO: 817452 - RNA, 20 nt, Human
uggaaaggccacagggagga

SEQ ID NO: 817453 - RNA, 24 nt, Human
uggaaaggccacagggaggagcuc

SEQ ID NO: 817454 - RNA, 18 nt, Human
uggacagaauccgaggca

SEQ ID NO: 817455 - RNA, 21 nt, Human
uggagcuggggccacucuggg

SEQ ID NO: 817456 - RNA, 23 nt, Human
uggauccagugagauguggcucc

SEQ ID NO: 817457 - RNA, 24 nt, Human
uggauguccaccaucggcugcccu

SEQ ID NO: 817458 - RNA, 24 nt, Human
uggcgggcacagacccagccuggg

SEQ ID NO: 817459 - RNA, 18 nt, Human
uggcggggagggcgaggc

SEQ ID NO: 817460 - RNA, 20 nt, Human
uggcgguggaggagggagac

SEQ ID NO: 817461 - RNA, 21 nt, Human
ugggaccaaaagccagagaac

SEQ ID NO: 817462 - RNA, 19 nt, Human
ugggagcccugagcuguca

SEQ ID NO: 817463 - RNA, 20 nt, Human
ugggagggccagggcucgga

SEQ ID NO: 817464 - RNA, 21 nt, Human
uggggaaaagccaggugccug

SEQ ID NO: 817465 - RNA, 19 nt, Human
uggggcuccagccucccag

SEQ ID NO: 817466 - RNA, 20 nt, Human
uggguuuccagcuugcaaca

SEQ ID NO: 817467 - RNA, 18 nt, Human
ugguuggacagagcugcu

SEQ ID NO: 817468 - RNA, 20 nt, Human
ugguuggcuuugcagugugg

SEQ ID NO: 817469 - RNA, 24 nt, Human
ugucaugcaggaaguccagcuacc

SEQ ID NO: 817470 - RNA, 21 nt, Human
ugugaaaugaggaccauggga

SEQ ID NO: 817471 - RNA, 24 nt, Human
ugugcuccagcagcugcccacagu

SEQ ID NO: 817472 - RNA, 19 nt, Human
ugugggugcaggggugcug

SEQ ID NO: 817473 - RNA, 21 nt, Human
ugugguuggacagagcugcuc

SEQ ID NO: 817474 - RNA, 19 nt, Human
ugugugcaucgcccgagag

SEQ ID NO: 817475 - RNA, 20 nt, Human
uuaaagcaccagcggaugau

SEQ ID NO: 817476 - RNA, 25 nt, Human
uucccuggguuuccagcuugcaaca

SEQ ID NO: 817477 - RNA, 19 nt, Human
uucucccacccagacccca

SEQ ID NO: 817478 - RNA, 24 nt, Human
uugccgccauaauaaagaccucau

SEQ ID NO: 817479 - RNA, 20 nt, Human
uugguucugcuucuccggag

SEQ ID NO: 817480 - RNA, 18 nt, Human
uuucucaccuuugaaaag

SEQ ID NO: 817481 - RNA, 19 nt, Human
uuucucaccuuugaaaagg

SEQ ID NO: 817482 - RNA, 25 nt, Human
uuuucucugguuucaggccacuuug

SEQ ID NO: 817483 - RNA, 21 nt, Human
acagcagcaggcgggucagcu

SEQ ID NO: 817484 - RNA, 18 nt, Human
accccggacugcagcagc

SEQ ID NO: 817485 - RNA, 24 nt, Human
agagggccugggagacggcagggg

SEQ ID NO: 817486 - RNA, 19 nt, Human
agggagcagaaugaauucu

SEQ ID NO: 817487 - RNA, 22 nt, Human
agguggcccccaggccuggagc

SEQ ID NO: 817488 - RNA, 24 nt, Human
augcccuauccugacauaauuuca

SEQ ID NO: 817489 - RNA, 20 nt, Human
cacaggacgaguguucccug

SEQ ID NO: 817490 - RNA, 22 nt, Human
cacaggcugaggaugcaagaac

SEQ ID NO: 817491 - RNA, 19 nt, Human
caccaggacaaccagcccc

SEQ ID NO: 817492 - RNA, 21 nt, Human
caccaggacaaccagccccag

SEQ ID NO: 817493 - RNA, 24 nt, Human
caccaggacaaccagccccagguc

SEQ ID NO: 817494 - RNA, 21 nt, Human
caccauggcuguagggaaagg

SEQ ID NO: 817495 - RNA, 20 nt, Human
cagcaaggcaugcccuaucc

SEQ ID NO: 817496 - RNA, 20 nt, Human
cagcaaggcaugcccuaucc

SEQ ID NO: 817497 - RNA, 21 nt, Human
cagcacaggacgaguguuccc

SEQ ID NO: 817498 - RNA, 21 nt, Human
cagccugggccccucuggagc

SEQ ID NO: 817499 - RNA, 18 nt, Human
cagcucagcacaggacga

SEQ ID NO: 817500 - RNA, 26 nt, Human
cagcuuguccuccuagguggccccca

SEQ ID NO: 817501 - RNA, 19 nt, Human
ccaccaggacaaccagccc

SEQ ID NO: 817502 - RNA, 19 nt, Human
ccagccucugacggaagca

SEQ ID NO: 817503 - RNA, 22 nt, Human
cccaggucccggaccucuuucc

SEQ ID NO: 817504 - RNA, 21 nt, Human
cccugguccagagcaggcucc

SEQ ID NO: 817505 - RNA, 24 nt, Human
ccgcugggguuguggcaauggagg

SEQ ID NO: 817506 - RNA, 22 nt, Human
cguccagcaccugcuugggcac

SEQ ID NO: 817507 - RNA, 18 nt, Human
cugaggaugcaagaacgu

SEQ ID NO: 817508 - RNA, 18 nt, Human
cuggagccugcugagugg

SEQ ID NO: 817509 - RNA, 22 nt, Human
cugggguuguggcaauggaggc

SEQ ID NO: 817510 - RNA, 21 nt, Human
gaccccggacugcagcagcuc

SEQ ID NO: 817511 - RNA, 18 nt, Human
gagagggccugggagacg

SEQ ID NO: 817512 - RNA, 19 nt, Human
gagcucacgaccucacacu

SEQ ID NO: 817513 - RNA, 20 nt, Human
gaugcaagaacgucuuccuc

SEQ ID NO: 817514 - RNA, 21 nt, Human
gccugggagacggcaggggca

SEQ ID NO: 817515 - RNA, 19 nt, Human
gccugggccccucuggagc

SEQ ID NO: 817516 - RNA, 22 nt, Human
gccuucagggagcucacgaccu

SEQ ID NO: 817517 - RNA, 20 nt, Human
gcugggguuguggcaaugga

SEQ ID NO: 817518 - RNA, 19 nt, Human
ggaaaaugauggcuucuuc

SEQ ID NO: 817519 - RNA, 18 nt, Human
ggcugcagccugggcccc

SEQ ID NO: 817520 - RNA, 21 nt, Human
ggcuggggaagucuccugugc

SEQ ID NO: 817521 - RNA, 22 nt, Human
ggucccggaccucuuuccuggg

SEQ ID NO: 817522 - RNA, 24 nt, Human
guuugggguccccacagcuugucc

SEQ ID NO: 817523 - RNA, 21 nt, Human
uagguggcccccaggccugga

SEQ ID NO: 817524 - RNA, 24 nt, Human
uccugugccggguggccacccuuc

SEQ ID NO: 817525 - RNA, 18 nt, Human
ucgggguguggcugccgg

SEQ ID NO: 817526 - RNA, 22 nt, Human
ucuugcucgggguguggcugcc

SEQ ID NO: 817527 - RNA, 24 nt, Human
ugacguccagcaccugcuugggca

SEQ ID NO: 817528 - RNA, 22 nt, Human
ugagagggccugggagacggca

SEQ ID NO: 817529 - RNA, 24 nt, Human
ugcauccaccaggacaaccagccc

SEQ ID NO: 817530 - RNA, 18 nt, Human
ugccggguggccacccuc

SEQ ID NO: 817531 - RNA, 19 nt, Human
ugccggguggccacccuuc

SEQ ID NO: 817532 - RNA, 20 nt, Human
ugcgugcauccaccaggaca

SEQ ID NO: 817533 - RNA, 22 nt, Human
uggcaggcugcagccugggccc

SEQ ID NO: 817534 - RNA, 21 nt, Human
ugggagguguggcaggcugca

SEQ ID NO: 817535 - RNA, 20 nt, Human
ugggguuguggcaauggaga

SEQ ID NO: 817536 - RNA, 23 nt, Human
uggugggagguguggcaggcugc

SEQ ID NO: 817537 - RNA, 26 nt, Human
uggugggagguguggcaggcugcagc

SEQ ID NO: 817538 - RNA, 21 nt, Human
uucccugguccagagcaggcu

SEQ ID NO: 817539 - RNA, 24 nt, Human
uuccuggggaugcuauggaaguac

SEQ ID NO: 817540 - RNA, 19 nt, Human
uucugggugcccuuuccca

SEQ ID NO: 817541 - RNA, 18 nt, Human
uugcauccuugucaggcc

SEQ ID NO: 817542 - RNA, 24 nt, Human
uugcucgggguguggcugccgggc

SEQ ID NO: 817543 - RNA, 25 nt, Human
aaaaaaaaaaaaaaaaaaguaggag

SEQ ID NO: 817544 - RNA, 28 nt, Human
aaaaaaaguaggaaaaaaaccgguaccc

SEQ ID NO: 817545 - RNA, 19 nt, Human
aaaaaaccccacuccccca

SEQ ID NO: 817546 - RNA, 18 nt, Human
aaaaccccacucccccac

SEQ ID NO: 817547 - RNA, 18 nt, Human
aaaauggacugaugacua

SEQ ID NO: 817548 - RNA, 24 nt, Human
aaacaaccccuaaaaacuucccuc

SEQ ID NO: 817549 - RNA, 25 nt, Human
aaacaucaccaucaaaauaaaagaa

SEQ ID NO: 817550 - RNA, 22 nt, Human
aaagggauucacugcugcauuu

SEQ ID NO: 817551 - RNA, 22 nt, Human
aaauaaaauaaaauaaaacauc

SEQ ID NO: 817552 - RNA, 20 nt, Human
aaccccuaaaaacuucccuc

SEQ ID NO: 817553 - RNA, 19 nt, Human
aagcaaagaaaaaaaaaaa

SEQ ID NO: 817554 - RNA, 23 nt, Human
aagcaagugcauguuagagaaac

SEQ ID NO: 817555 - RNA, 19 nt, Human
aagcaggguuuuccgcggc

SEQ ID NO: 817556 - RNA, 25 nt, Human
aagcuggaaaaagguaaggacccag

SEQ ID NO: 817557 - RNA, 22 nt, Human
aagggauucacugcugcauuug

SEQ ID NO: 817558 - RNA, 21 nt, Human
aagugcauguuagagaaacaa

SEQ ID NO: 817559 - RNA, 24 nt, Human
accaacaaaagcagcagagaggga

SEQ ID NO: 817560 - RNA, 21 nt, Human
accagaaauccggaugauggg

SEQ ID NO: 817561 - RNA, 18 nt, Human
accauaggaucgcagccu

SEQ ID NO: 817562 - RNA, 21 nt, Human
accaucaaaauaaaagaaccc

SEQ ID NO: 817563 - RNA, 24 nt, Human
acccccccgcacugcaauagccca

SEQ ID NO: 817564 - RNA, 19 nt, Human
accccuaaaaacuucccuc

SEQ ID NO: 817565 - RNA, 23 nt, Human
accccuaaaaacuucccucaaca

SEQ ID NO: 817566 - RNA, 24 nt, Human
acguggaggggggcggagggcggg

SEQ ID NO: 817567 - RNA, 21 nt, Human
acucacgcugcccagccaaug

SEQ ID NO: 817568 - RNA, 23 nt, Human
acuuuaaaaauaacagaaaaaga

SEQ ID NO: 817569 - RNA, 22 nt, Human
agaaaucccagaggaauaugau

SEQ ID NO: 817570 - RNA, 18 nt, Human
agaagaaaaggguuuggg

SEQ ID NO: 817571 - RNA, 18 nt, Human
agaagaaaaggguuuggg

SEQ ID NO: 817572 - RNA, 21 nt, Human
agaggggaaaaaaagaagggg

SEQ ID NO: 817573 - RNA, 23 nt, Human
agcaccaacaaaagcagcagaga

SEQ ID NO: 817574 - RNA, 21 nt, Human
agcaggguuuuccgcggcuuc

SEQ ID NO: 817575 - RNA, 19 nt, Human
aggaaaggagaagaaaagg

SEQ ID NO: 817576 - RNA, 20 nt, Human
aggagugcugaccaaugaaa

SEQ ID NO: 817577 - RNA, 20 nt, Human
agggcacugucaguucuucc

SEQ ID NO: 817578 - RNA, 20 nt, Human
aggguuuggggggguggggg

SEQ ID NO: 817579 - RNA, 21 nt, Human
aggugcuguccaguucccccg

SEQ ID NO: 817580 - RNA, 20 nt, Human
aggugggggugggguagagg

SEQ ID NO: 817581 - RNA, 23 nt, Human
aggugggggugggguagagggug

SEQ ID NO: 817582 - RNA, 22 nt, Human
aucacuguucugagaaaucacu

SEQ ID NO: 817583 - RNA, 18 nt, Human
auccaaccccacaggccc

SEQ ID NO: 817584 - RNA, 23 nt, Human
auguauauauguauagaaccgcg

SEQ ID NO: 817585 - RNA, 22 nt, Human
auuauaaaauccucgaauagaa

SEQ ID NO: 817586 - RNA, 24 nt, Human
caaaacaaccccuaaaaacuuccc

SEQ ID NO: 817587 - RNA, 19 nt, Human
caaucgcugcguuuugugg

SEQ ID NO: 817588 - RNA, 23 nt, Human
cagcaccaacaaaagcagcagag

SEQ ID NO: 817589 - RNA, 24 nt, Human
cagcaccaacaaaagcagcagaga

SEQ ID NO: 817590 - RNA, 19 nt, Human
cagcagagagggauuucca

SEQ ID NO: 817591 - RNA, 22 nt, Human
cagcagcaucucaaaugccagu

SEQ ID NO: 817592 - RNA, 22 nt, Human
cagcagggucgugcugggcuuc

SEQ ID NO: 817593 - RNA, 22 nt, Human
cauaggaucgcagccuaagcac

SEQ ID NO: 817594 - RNA, 23 nt, Human
caucaaaauaaaagaacccaaaa

SEQ ID NO: 817595 - RNA, 24 nt, Human
caucacaaaguaacagcgaccauc

SEQ ID NO: 817596 - RNA, 23 nt, Human
caucacggggcuaauccacaggg

SEQ ID NO: 817597 - RNA, 20 nt, Human
ccaaaacaaccccuaaaaac

SEQ ID NO: 817598 - RNA, 20 nt, Human
ccagaacaucacuguucuga

SEQ ID NO: 817599 - RNA, 18 nt, Human
cccccggggugccugcgg

SEQ ID NO: 817600 - RNA, 19 nt, Human
ccccgaucucaucacaaag

SEQ ID NO: 817601 - RNA, 19 nt, Human
ccccggggugccugcggug

SEQ ID NO: 817602 - RNA, 18 nt, Human
ccccugaaaaaaauaaaa

SEQ ID NO: 817603 - RNA, 20 nt, Human
ccccugaaaaaaauaaaaua

SEQ ID NO: 817604 - RNA, 22 nt, Human
cccgcacugcaauagcccagac

SEQ ID NO: 817605 - RNA, 25 nt, Human
cccgcacugcaauagcccagacgcc

SEQ ID NO: 817606 - RNA, 21 nt, Human
cccggggccgagggcgagggc

SEQ ID NO: 817607 - RNA, 21 nt, Human
cccugcguagccaacagggag

SEQ ID NO: 817608 - RNA, 21 nt, Human
ccuuuacauuuuuuucacagu

SEQ ID NO: 817609 - RNA, 21 nt, Human
ccuuuagaauaugaguucuag

SEQ ID NO: 817610 - RNA, 20 nt, Human
ccuuuccuccccuucggucc

SEQ ID NO: 817611 - RNA, 20 nt, Human
cuacuuaugcccauccaggc

SEQ ID NO: 817612 - RNA, 21 nt, Human
cuccccuauugggguuggggu

SEQ ID NO: 817613 - RNA, 19 nt, Human
cugaaaaaaauaaaauaaa

SEQ ID NO: 817614 - RNA, 20 nt, Human
cugaucuucacugaucagaa

SEQ ID NO: 817615 - RNA, 23 nt, Human
cugguggaguucuugcugugguu

SEQ ID NO: 817616 - RNA, 24 nt, Human
gaaaaaaaccccacucccccacaa

SEQ ID NO: 817617 - RNA, 20 nt, Human
gagaagaaaaggguuugggg

SEQ ID NO: 817618 - RNA, 19 nt, Human
gagaggggaaaaaaagaag

SEQ ID NO: 817619 - RNA, 25 nt, Human
gagccuuaauguagcucaggaaggg

SEQ ID NO: 817620 - RNA, 18 nt, Human
gaggugcuguccaguucc

SEQ ID NO: 817621 - RNA, 28 nt, Human
gcaagcaaagaaaaaaaaaaaaaaaaaa

SEQ ID NO: 817622 - RNA, 22 nt, Human
gcagacuccaucaauaugugug

SEQ ID NO: 817623 - RNA, 22 nt, Human
gcagcaccaacaaaagcagcag

SEQ ID NO: 817624 - RNA, 26 nt, Human
gccaggaaaggagaagaaaaggguuu

SEQ ID NO: 817625 - RNA, 23 nt, Human
gccaugcagcacuuuuuguuuuu

SEQ ID NO: 817626 - RNA, 20 nt, Human
gccuaagcacuagagugaca

SEQ ID NO: 817627 - RNA, 21 nt, Human
gcugggccacaaccagaaauc

SEQ ID NO: 817628 - RNA, 18 nt, Human
ggaaaggagaagaaaagg

SEQ ID NO: 817629 - RNA, 23 nt, Human
ggagaggggaaaaaaagaagggg

SEQ ID NO: 817630 - RNA, 18 nt, Human
ggagggugggugggcacu

SEQ ID NO: 817631 - RNA, 27 nt, Human
gggaaaaauagauaucuaucucucuau

SEQ ID NO: 817632 - RNA, 22 nt, Human
gggccgagggcgagggcacugu

SEQ ID NO: 817633 - RNA, 22 nt, Human
ggggugggguagaggguggggg

SEQ ID NO: 817634 - RNA, 23 nt, Human
ggggugggguagagggugggggc

SEQ ID NO: 817635 - RNA, 20 nt, Human
ggguggauuccuuccucccu

SEQ ID NO: 817636 - RNA, 18 nt, Human
gguaagagggugggugcu

SEQ ID NO: 817637 - RNA, 21 nt, Human
ggucgugcugggcuuucuguc

SEQ ID NO: 817638 - RNA, 22 nt, Human
gguggaguucuugcugugguug

SEQ ID NO: 817639 - RNA, 24 nt, Human
guccucuuaaggcuuuuuuuuuuc

SEQ ID NO: 817640 - RNA, 20 nt, Human
uaaaaaaaagacccccugaa

SEQ ID NO: 817641 - RNA, 21 nt, Human
uaaaaaaaagacccccugaaa

SEQ ID NO: 817642 - RNA, 25 nt, Human
uaaaaaaaagacccccugaaaaaaa

SEQ ID NO: 817643 - RNA, 23 nt, Human
uaaaaacuucccucaacaaaaua

SEQ ID NO: 817644 - RNA, 25 nt, Human
uaaaagaacccaaaacaaccccuaa

SEQ ID NO: 817645 - RNA, 21 nt, Human
uaaaauccucgaauagaauua

SEQ ID NO: 817646 - RNA, 23 nt, Human
uaaaauggacugaugacuagcca

SEQ ID NO: 817647 - RNA, 20 nt, Human
uaaagcgagcaauucauccc

SEQ ID NO: 817648 - RNA, 24 nt, Human
uaaauaaaaccuuuacauuuuuuu

SEQ ID NO: 817649 - RNA, 20 nt, Human
uaaccccaaccguuucccuc

SEQ ID NO: 817650 - RNA, 22 nt, Human
uacuauaauagaaaucaugggu

SEQ ID NO: 817651 - RNA, 18 nt, Human
uagcccagacgccaguca

SEQ ID NO: 817652 - RNA, 25 nt, Human
uaggaaaaaaaccccacucccccac

SEQ ID NO: 817653 - RNA, 19 nt, Human
uaguaauuagaagcaagug

SEQ ID NO: 817654 - RNA, 23 nt, Human
uagugcaaggcaagcaaagaaaa

SEQ ID NO: 817655 - RNA, 19 nt, Human
uauauagauguggauauau

SEQ ID NO: 817656 - RNA, 19 nt, Human
uauauagauguggauauau

SEQ ID NO: 817657 - RNA, 19 nt, Human
uauauccacaaacuaucca

SEQ ID NO: 817658 - RNA, 22 nt, Human
uauauguauauauguauagaac

SEQ ID NO: 817659 - RNA, 22 nt, Human
uauccaggcacguagugcaagg

SEQ ID NO: 817660 - RNA, 24 nt, Human
uaugcaguugcuggggcggggagg

SEQ ID NO: 817661 - RNA, 23 nt, Human
ucaccaucaaaauaaaagaaccc

SEQ ID NO: 817662 - RNA, 19 nt, Human
ucacuagcugauuuauaau

SEQ ID NO: 817663 - RNA, 22 nt, Human
ucagcaaagagcgagcuggcug

SEQ ID NO: 817664 - RNA, 18 nt, Human
uccacaaacuauccaggc

SEQ ID NO: 817665 - RNA, 22 nt, Human
uccaccgcaaauccaauuuacc

SEQ ID NO: 817666 - RNA, 24 nt, Human
ucccagaggaauaugauugaggcc

SEQ ID NO: 817667 - RNA, 21 nt, Human
uccccugucucuuccaccgca

SEQ ID NO: 817668 - RNA, 23 nt, Human
uccccugucucuuccaccgcaaa

SEQ ID NO: 817669 - RNA, 18 nt, Human
ucccugcguagccaacag

SEQ ID NO: 817670 - RNA, 22 nt, Human
ucccugcguagccaacagggag

SEQ ID NO: 817671 - RNA, 24 nt, Human
ucgcagccuaagcacuagagugac

SEQ ID NO: 817672 - RNA, 25 nt, Human
ucgcugcguuuugugguuguccauc

SEQ ID NO: 817673 - RNA, 25 nt, Human
ucucaaggguggauaugugguggaa

SEQ ID NO: 817674 - RNA, 24 nt, Human
ucuccuucucuuucuucugcucuu

SEQ ID NO: 817675 - RNA, 22 nt, Human
ucugaacugccuaccgaucaca

SEQ ID NO: 817676 - RNA, 21 nt, Human
ucugagcgaaggugggggugg

SEQ ID NO: 817677 - RNA, 21 nt, Human
ucuucugcucuuucggaauua

SEQ ID NO: 817678 - RNA, 21 nt, Human
ucuucuuuuccuguucuccuu

SEQ ID NO: 817679 - RNA, 20 nt, Human
ucuuucuucugcucuuucgg

SEQ ID NO: 817680 - RNA, 21 nt, Human
ugaaaaaauaugccauuauaa

SEQ ID NO: 817681 - RNA, 23 nt, Human
ugaaaaaauaugccauuauaaaa

SEQ ID NO: 817682 - RNA, 21 nt, Human
ugacauacuucucaagggugg

SEQ ID NO: 817683 - RNA, 23 nt, Human
ugagaaaucacuucccuuuagaa

SEQ ID NO: 817684 - RNA, 24 nt, Human
ugagcgaaggugggggugggguag

SEQ ID NO: 817685 - RNA, 19 nt, Human
ugagggaggaagagagcgc

SEQ ID NO: 817686 - RNA, 25 nt, Human
ugcaaggcaagcaaagaaaaaaaaa

SEQ ID NO: 817687 - RNA, 22 nt, Human
ugcccagaaguccccccgaggu

SEQ ID NO: 817688 - RNA, 25 nt, Human
ugcugaaaucacgcccgaccgaagg

SEQ ID NO: 817689 - RNA, 20 nt, Human
ugcugggcuuucugucaaaa

SEQ ID NO: 817690 - RNA, 20 nt, Human
ugcuggggcggggagggugg

SEQ ID NO: 817691 - RNA, 21 nt, Human
ugcugguggaguucuugcugu

SEQ ID NO: 817692 - RNA, 20 nt, Human
uggaaugcagacuccaucaa

SEQ ID NO: 817693 - RNA, 24 nt, Human
uggauuccuuccucccuaaccccc

SEQ ID NO: 817694 - RNA, 22 nt, Human
uggcagaucuacuuacaacugc

SEQ ID NO: 817695 - RNA, 24 nt, Human
ugggagagaaacacuucuuuagga

SEQ ID NO: 817696 - RNA, 19 nt, Human
ugggccacaaccagaaauc

SEQ ID NO: 817697 - RNA, 20 nt, Human
uggggcaagaccuuuaugga

SEQ ID NO: 817698 - RNA, 18 nt, Human
uggggcggggaggguggg

SEQ ID NO: 817699 - RNA, 20 nt, Human
uggggcggggagggugggug

SEQ ID NO: 817700 - RNA, 20 nt, Human
ugggggcgagggaagaggag

SEQ ID NO: 817701 - RNA, 24 nt, Human
uggggguggauuccuuccucccua

SEQ ID NO: 817702 - RNA, 18 nt, Human
ugggguagaggguggggg

SEQ ID NO: 817703 - RNA, 23 nt, Human
ugucagaagucaaaguuacuuau

SEQ ID NO: 817704 - RNA, 19 nt, Human
ugucuuucauugaggagug

SEQ ID NO: 817705 - RNA, 22 nt, Human
ugugaacgagaugccgucucca

SEQ ID NO: 817706 - RNA, 18 nt, Human
uguggauauauguauaua

SEQ ID NO: 817707 - RNA, 22 nt, Human
uguggauauauguauauaugua

SEQ ID NO: 817708 - RNA, 22 nt, Human
ugugugguuuuguuugcuuuuu

SEQ ID NO: 817709 - RNA, 21 nt, Human
uuagagaaagagccuuaaugu

SEQ ID NO: 817710 - RNA, 18 nt, Human
uucauccccgaucucauc

SEQ ID NO: 817711 - RNA, 26 nt, Human
uuccucccuaacccccccgcacugca

SEQ ID NO: 817712 - RNA, 23 nt, Human
uuggagaggggaaaaaaagaagg

SEQ ID NO: 817713 - RNA, 24 nt, Human
uuggguacacgccccuccagcccc

SEQ ID NO: 817714 - RNA, 24 nt, Human
uuuaacaaauuucaauaugcaguu

SEQ ID NO: 817715 - RNA, 22 nt, Human
uuuccuguucuccuucucuuuc

SEQ ID NO: 817716 - RNA, 21 nt, Human
uuuuccuguucuccuucucuu

SEQ ID NO: 817717 - RNA, 22 nt, Human
uuuugugguuguccauccuuuu

SEQ ID NO: 817718 - RNA, 22 nt, Human
aaaaacucuauagccaaagaca

SEQ ID NO: 817719 - RNA, 19 nt, Human
aaaagacacuugcuuuacu

SEQ ID NO: 817720 - RNA, 28 nt, Human
aaaccagaaugaaagaauaaugaaucua

SEQ ID NO: 817721 - RNA, 24 nt, Human
aaauaacuauagauaaaauacauc

SEQ ID NO: 817722 - RNA, 23 nt, Human
aaaucaacuuuaacugaugcuga

SEQ ID NO: 817723 - RNA, 28 nt, Human
aagaacuucaaaauauacuuaucacuga

SEQ ID NO: 817724 - RNA, 25 nt, Human
aaucaggaaaaaaaagcucaauauu

SEQ ID NO: 817725 - RNA, 26 nt, Human
accagaaugaaagaauaaugaaucua

SEQ ID NO: 817726 - RNA, 21 nt, Human
acgcucacugcgugucacgca

SEQ ID NO: 817727 - RNA, 18 nt, Human
acugcauuguuuccaauu

SEQ ID NO: 817728 - RNA, 18 nt, Human
agacaaaaccauuccuuc

SEQ ID NO: 817729 - RNA, 21 nt, Human
agcagaucaauauaaaaaaau

SEQ ID NO: 817730 - RNA, 26 nt, Human
aggaaagagaaaaaucaggaaaaaaa

SEQ ID NO: 817731 - RNA, 28 nt, Human
aggaauaacaaagcagauaccgguaccc

SEQ ID NO: 817732 - RNA, 21 nt, Human
aggagcaggucugaaaaauca

SEQ ID NO: 817733 - RNA, 22 nt, Human
auaucuucuuuaaaaaacaaaa

SEQ ID NO: 817734 - RNA, 21 nt, Human
augcucuuaacacaucacaca

SEQ ID NO: 817735 - RNA, 20 nt, Human
auuuagcuggagcuuuccuu

SEQ ID NO: 817736 - RNA, 21 nt, Human
cacagcaccuuaaagaaauaa

SEQ ID NO: 817737 - RNA, 22 nt, Human
cacuuucuacuuccuccuucca

SEQ ID NO: 817738 - RNA, 20 nt, Human
cagaaugaaagaauaaugaa

SEQ ID NO: 817739 - RNA, 22 nt, Human
cagauaccgagucauccauacu

SEQ ID NO: 817740 - RNA, 25 nt, Human
cagcucuccaagaaggaaagccuca

SEQ ID NO: 817741 - RNA, 21 nt, Human
cagcugacgugcccagaagac

SEQ ID NO: 817742 - RNA, 19 nt, Human
cauccauacuuugcuucca

SEQ ID NO: 817743 - RNA, 21 nt, Human
ccagaaugaaagaauaaugaa

SEQ ID NO: 817744 - RNA, 18 nt, Human
ccauacuuugcuuccaag

SEQ ID NO: 817745 - RNA, 21 nt, Human
cccagaagacgaagauggccg

SEQ ID NO: 817746 - RNA, 23 nt, Human
ccccggcccggacggcugggcgu

SEQ ID NO: 817747 - RNA, 19 nt, Human
ccuuuugccuggcggaggg

SEQ ID NO: 817748 - RNA, 23 nt, Human
cgccucgcucgucagaugggagu

SEQ ID NO: 817749 - RNA, 23 nt, Human
cggguaucaggagacacucagcu

SEQ ID NO: 817750 - RNA, 21 nt, Human
cucagcugacgugcccagaag

SEQ ID NO: 817751 - RNA, 24 nt, Human
cugaugcugauauacauuuucaac

SEQ ID NO: 817752 - RNA, 22 nt, Human
cuucagcccuaaccggcucagc

SEQ ID NO: 817753 - RNA, 24 nt, Human
cuucagcccuaaccggcucagcug

SEQ ID NO: 817754 - RNA, 25 nt, Human
cuugaaacaugucuuauggcuaaca

SEQ ID NO: 817755 - RNA, 23 nt, Human
cuugcuuuacuuuggacaaggua

SEQ ID NO: 817756 - RNA, 27 nt, Human
cuuuaaaaaaaaaaacucuauagccaa

SEQ ID NO: 817757 - RNA, 22 nt, Human
cuuuguucaacaaaauauucua

SEQ ID NO: 817758 - RNA, 25 nt, Human
gcaaacaccaaacuuccggcgacga

SEQ ID NO: 817759 - RNA, 23 nt, Human
gccaccauaacucaugaagaaaa

SEQ ID NO: 817760 - RNA, 18 nt, Human
gcggccgccgccuccccc

SEQ ID NO: 817761 - RNA, 18 nt, Human
gcggcgcaaacaccaaac

SEQ ID NO: 817762 - RNA, 21 nt, Human
gguaggcgugaaugcugacua

SEQ ID NO: 817763 - RNA, 23 nt, Human
guaaucuuuaaaaaaaaaaacuc

SEQ ID NO: 817764 - RNA, 24 nt, Human
guucuuaucuaaccuccuuuguuc

SEQ ID NO: 817765 - RNA, 24 nt, Human
uaaaaaaaaaaacucuauagccaa

SEQ ID NO: 817766 - RNA, 25 nt, Human
uaaaaaaauacaguaccaagcuaca

SEQ ID NO: 817767 - RNA, 22 nt, Human
uaaaagugaaaccagaaugaaa

SEQ ID NO: 817768 - RNA, 22 nt, Human
uaacaaagcagauaccgaguca

SEQ ID NO: 817769 - RNA, 23 nt, Human
uaauaugcucuuaacacaucaca

SEQ ID NO: 817770 - RNA, 19 nt, Human
uacugcauuguuuccaauu

SEQ ID NO: 817771 - RNA, 19 nt, Human
uagaaaaagcuaucaagua

SEQ ID NO: 817772 - RNA, 21 nt, Human
uagcuucaaauuccaaaacac

SEQ ID NO: 817773 - RNA, 18 nt, Human
uaggaaagagaaaaauca

SEQ ID NO: 817774 - RNA, 22 nt, Human
uaggaggguaccuuuccuaaug

SEQ ID NO: 817775 - RNA, 21 nt, Human
ucaaagauaggaaagagaaaa

SEQ ID NO: 817776 - RNA, 21 nt, Human
ucacugcgugucacgcaguuu

SEQ ID NO: 817777 - RNA, 18 nt, Human
ucagccaccauaacucau

SEQ ID NO: 817778 - RNA, 22 nt, Human
ucauuuacagcucuccaagaag

SEQ ID NO: 817779 - RNA, 22 nt, Human
ucccccgcggcgcaaacaccaa

SEQ ID NO: 817780 - RNA, 24 nt, Human
ucccccgcggcgcaaacaccaaac

SEQ ID NO: 817781 - RNA, 18 nt, Human
uccugguuaaagucagca

SEQ ID NO: 817782 - RNA, 19 nt, Human
ucuacuuccuccuuccauc

SEQ ID NO: 817783 - RNA, 20 nt, Human
ucuuauggcuaacacguuuc

SEQ ID NO: 817784 - RNA, 18 nt, Human
ucuuccuauuuagcugga

SEQ ID NO: 817785 - RNA, 22 nt, Human
ucuuuaaaaaacaaaacaauaa

SEQ ID NO: 817786 - RNA, 21 nt, Human
ugaaaauacaaucuuuaagcc

SEQ ID NO: 817787 - RNA, 23 nt, Human
ugaaaccagaaugaaagaauaau

SEQ ID NO: 817788 - RNA, 21 nt, Human
ugagaaaagcuggcaugaaug

SEQ ID NO: 817789 - RNA, 28 nt, Human
ugagaaaagcuggcaugaaugcuaaaag

SEQ ID NO: 817790 - RNA, 21 nt, Human
ugccccaaaauauagacucga

SEQ ID NO: 817791 - RNA, 19 nt, Human
ugcugcauguaaacauguc

SEQ ID NO: 817792 - RNA, 23 nt, Human
ugcugcggccgccgccucccccg

SEQ ID NO: 817793 - RNA, 20 nt, Human
ugcuucaaguaagguuucug

SEQ ID NO: 817794 - RNA, 23 nt, Human
uguaaaagauaauaaaauaucuu

SEQ ID NO: 817795 - RNA, 18 nt, Human
uguauguuuaguaaucuu

SEQ ID NO: 817796 - RNA, 20 nt, Human
ugucuaaauaacuauagaua

SEQ ID NO: 817797 - RNA, 20 nt, Human
uguuuuguuaauuuuuuaau

SEQ ID NO: 817798 - RNA, 23 nt, Human
uucaaguugauugaugaaugaug

SEQ ID NO: 817799 - RNA, 19 nt, Human
uucagguucaaucuguuuu

SEQ ID NO: 817800 - RNA, 19 nt, Human
uuccuagaacaugagaaaa

SEQ ID NO: 817801 - RNA, 18 nt, Human
uucuuuaccacuuucuac

SEQ ID NO: 817802 - RNA, 24 nt, Human
uucuuuaccacuuucuacuuccuc

SEQ ID NO: 817803 - RNA, 25 nt, Human
uugcgcaacgcuccucuucagcccu

SEQ ID NO: 817804 - RNA, 26 nt, Human
uuugaaaacuuuuuucuucugaaguc

SEQ ID NO: 817805 - RNA, 20 nt, Human
uuuugaaaacuuuuuucuuc

SEQ ID NO: 817806 - RNA, 24 nt, Human
uuuuucaacauauaaacccuuuaa

SEQ ID NO: 817807 - RNA, 23 nt, Human
aaaauaccuaucauagcauuucc

SEQ ID NO: 817808 - RNA, 21 nt, Human
aaaauuccuucacagucuccu

SEQ ID NO: 817809 - RNA, 23 nt, Human
aaacaacaacaacagagaauauc

SEQ ID NO: 817810 - RNA, 21 nt, Human
aaaucucagaaauuuagaacc

SEQ ID NO: 817811 - RNA, 18 nt, Human
aaaugcccaacucucaaa

SEQ ID NO: 817812 - RNA, 18 nt, Human
aaauguuagauagcugca

SEQ ID NO: 817813 - RNA, 18 nt, Human
aacuaagcaaagcuagca

SEQ ID NO: 817814 - RNA, 22 nt, Human
aaggggagcuuaaauuguaacc

SEQ ID NO: 817815 - RNA, 20 nt, Human
aauaaugaaggacaugcguc

SEQ ID NO: 817816 - RNA, 22 nt, Human
acaacaacagagaauaucugcc

SEQ ID NO: 817817 - RNA, 20 nt, Human
acagcgggggagcugcaccg

SEQ ID NO: 817818 - RNA, 18 nt, Human
accauaaaaacguagcau

SEQ ID NO: 817819 - RNA, 18 nt, Human
acucuacaacgucuugcu

SEQ ID NO: 817820 - RNA, 25 nt, Human
aggaugaaagcuuuccuaggaaaga

SEQ ID NO: 817821 - RNA, 23 nt, Human
aggggcacuggggagcccggggc

SEQ ID NO: 817822 - RNA, 26 nt, Human
aggggccgcuggguuggggcggcggg

SEQ ID NO: 817823 - RNA, 23 nt, Human
aggugcaaguggguggaagaggc

SEQ ID NO: 817824 - RNA, 22 nt, Human
auauauguauauguauaccaaa

SEQ ID NO: 817825 - RNA, 19 nt, Human
augaagguugguaugcccc

SEQ ID NO: 817826 - RNA, 19 nt, Human
auugacuguuguggacauu

SEQ ID NO: 817827 - RNA, 20 nt, Human
caaaacaaaacuccagaaac

SEQ ID NO: 817828 - RNA, 23 nt, Human
caaaacaaaacuccagaaacuua

SEQ ID NO: 817829 - RNA, 26 nt, Human
caaaacaaaacuccagaaacuuaauc

SEQ ID NO: 817830 - RNA, 26 nt, Human
cacaaaauaccuaucauagcauuucc

SEQ ID NO: 817831 - RNA, 19 nt, Human
cacauauacuuaauacuca

SEQ ID NO: 817832 - RNA, 22 nt, Human
caccgccguuccccugcccucu

SEQ ID NO: 817833 - RNA, 20 nt, Human
cacuuuccucccccuugccc

SEQ ID NO: 817834 - RNA, 20 nt, Human
cagcccccggcuucuccccu

SEQ ID NO: 817835 - RNA, 26 nt, Human
cagccgcuugcugcugccgaggcccg

SEQ ID NO: 817836 - RNA, 27 nt, Human
caggggccgcuggguuggggcggcggg

SEQ ID NO: 817837 - RNA, 19 nt, Human
caggugcaaguggguggaa

SEQ ID NO: 817838 - RNA, 20 nt, Human
cagucuccuacuagugacaa

SEQ ID NO: 817839 - RNA, 23 nt, Human
caucucuauucaaaacacugagg

SEQ ID NO: 817840 - RNA, 25 nt, Human
ccagcugcagcccccggcuucuccc

SEQ ID NO: 817841 - RNA, 21 nt, Human
cccagggcccggcagccagcc

SEQ ID NO: 817842 - RNA, 21 nt, Human
cccaucuaaaacaacaacaac

SEQ ID NO: 817843 - RNA, 18 nt, Human
cccgcgcgcgcgcccgcg

SEQ ID NO: 817844 - RNA, 19 nt, Human
cccggcuucuccccucucc

SEQ ID NO: 817845 - RNA, 19 nt, Human
ccgcgcucccccagggccc

SEQ ID NO: 817846 - RNA, 22 nt, Human
ccgcuggguuggggcggcgggg

SEQ ID NO: 817847 - RNA, 22 nt, Human
ccucagaagucaaaacaaaacu

SEQ ID NO: 817848 - RNA, 25 nt, Human
ccucgccauccccgcgcgcgcgccc

SEQ ID NO: 817849 - RNA, 21 nt, Human
ccugcccucuccuccgcccua

SEQ ID NO: 817850 - RNA, 20 nt, Human
cgcgcgcgcgcccgcgcucc

SEQ ID NO: 817851 - RNA, 21 nt, Human
cgcggcgaggccgccuccgcc

SEQ ID NO: 817852 - RNA, 26 nt, Human
cuaagcaaagcuagcacaccucuuuu

SEQ ID NO: 817853 - RNA, 25 nt, Human
cuaauguuauauauauguauaugua

SEQ ID NO: 817854 - RNA, 21 nt, Human
cucuacaacgucuugcuaccc

SEQ ID NO: 817855 - RNA, 19 nt, Human
cugaggcuccacuggacuc

SEQ ID NO: 817856 - RNA, 22 nt, Human
cugcagcccccggcuucucccc

SEQ ID NO: 817857 - RNA, 18 nt, Human
cugcccucuccuccgccc

SEQ ID NO: 817858 - RNA, 18 nt, Human
cugcccucuccuccgccc

SEQ ID NO: 817859 - RNA, 26 nt, Human
cuggaaaauaccucuucauaucuuca

SEQ ID NO: 817860 - RNA, 18 nt, Human
cuggggaguuaaaaacac

SEQ ID NO: 817861 - RNA, 25 nt, Human
cuuaaacuaccauaaaaacguagca

SEQ ID NO: 817862 - RNA, 21 nt, Human
gacugucgccccccgcacucu

SEQ ID NO: 817863 - RNA, 20 nt, Human
gagcccaucuaaaacaacaa

SEQ ID NO: 817864 - RNA, 19 nt, Human
gagcccggggcugccgcgg

SEQ ID NO: 817865 - RNA, 18 nt, Human
gcccggggcugccgcggg

SEQ ID NO: 817866 - RNA, 21 nt, Human
gcgaggccgccuccgcccaca

SEQ ID NO: 817867 - RNA, 23 nt, Human
ggcacaaaagcuuauuuuaaaug

SEQ ID NO: 817868 - RNA, 21 nt, Human
ggccgcuggguuggggcggcg

SEQ ID NO: 817869 - RNA, 20 nt, Human
ggcgugcacgcacacgcacu

SEQ ID NO: 817870 - RNA, 21 nt, Human
gggcacuggggagcccggggc

SEQ ID NO: 817871 - RNA, 19 nt, Human
gggcgcgccgggcaccgcg

SEQ ID NO: 817872 - RNA, 21 nt, Human
uaaaacaacaacaacagagaa

SEQ ID NO: 817873 - RNA, 18 nt, Human
uaaaguuuacauaaaguu

SEQ ID NO: 817874 - RNA, 22 nt, Human
uaaauuguagaaauugacaucu

SEQ ID NO: 817875 - RNA, 26 nt, Human
uaacaccaauggauacacugaaugaa

SEQ ID NO: 817876 - RNA, 18 nt, Human
uaagaaauaaacuaagca

SEQ ID NO: 817877 - RNA, 22 nt, Human
uaagaaauaaacuaagcaaagc

SEQ ID NO: 817878 - RNA, 21 nt, Human
uaagaugaacacauauacuua

SEQ ID NO: 817879 - RNA, 22 nt, Human
uaagccgagacugucgcccccc

SEQ ID NO: 817880 - RNA, 24 nt, Human
uaauacaguaucaaaauuuacaca

SEQ ID NO: 817881 - RNA, 21 nt, Human
uacacaaguuuauuuugucaa

SEQ ID NO: 817882 - RNA, 19 nt, Human
uacagguuuuagaggggag

SEQ ID NO: 817883 - RNA, 25 nt, Human
uacaguaucaaaauuuacacaaggg

SEQ ID NO: 817884 - RNA, 20 nt, Human
uaccaaaaauaagaaauaaa

SEQ ID NO: 817885 - RNA, 21 nt, Human
uaccauugcuaagaugaacac

SEQ ID NO: 817886 - RNA, 21 nt, Human
uagaaccuauccaaaaacugg

SEQ ID NO: 817887 - RNA, 22 nt, Human
uagcacaccucuuuuucaaacc

SEQ ID NO: 817888 - RNA, 22 nt, Human
uauauguauauguauaccaaaa

SEQ ID NO: 817889 - RNA, 20 nt, Human
uaucacuuucuggcaguggu

SEQ ID NO: 817890 - RNA, 23 nt, Human
uaugcauuaggaauuacuaguuu

SEQ ID NO: 817891 - RNA, 27 nt, Human
uaugguagaaaacuccuaccauuaugu

SEQ ID NO: 817892 - RNA, 23 nt, Human
uaugugcaauguacaaucacucc

SEQ ID NO: 817893 - RNA, 22 nt, Human
ucaaaacaaaacuccagaaacu

SEQ ID NO: 817894 - RNA, 22 nt, Human
ucaaaacacugaggcuccacug

SEQ ID NO: 817895 - RNA, 18 nt, Human
uccccugcccucuccucc

SEQ ID NO: 817896 - RNA, 24 nt, Human
uccccugcccucuccuccgcccua

SEQ ID NO: 817897 - RNA, 21 nt, Human
ucuaaaacaacaacaacagag

SEQ ID NO: 817898 - RNA, 21 nt, Human
ucuaucacuuucuggcagugg

SEQ ID NO: 817899 - RNA, 25 nt, Human
ucuuuccuuuuucuucuugucuucu

SEQ ID NO: 817900 - RNA, 22 nt, Human
ugaaaacacugguaccaaaaug

SEQ ID NO: 817901 - RNA, 23 nt, Human
ugaaaguauaacaaaauuccuuc

SEQ ID NO: 817902 - RNA, 20 nt, Human
ugaaugaauaugaagguugg

SEQ ID NO: 817903 - RNA, 20 nt, Human
ugacaucucacagcucgaaa

SEQ ID NO: 817904 - RNA, 24 nt, Human
ugaggcuccacuggacucuuaaaa

SEQ ID NO: 817905 - RNA, 21 nt, Human
ugcagugcaauauuuuaaagu

SEQ ID NO: 817906 - RNA, 24 nt, Human
ugccaugaaucaaaucucagaaau

SEQ ID NO: 817907 - RNA, 19 nt, Human
uggaaacccacucuuuccu

SEQ ID NO: 817908 - RNA, 19 nt, Human
uggacauugaggugagaga

SEQ ID NO: 817909 - RNA, 23 nt, Human
uggcaggugcaaguggguggaag

SEQ ID NO: 817910 - RNA, 21 nt, Human
uggcaguggugaucuccuguu

SEQ ID NO: 817911 - RNA, 18 nt, Human
ugucuagaaacuaaauug

SEQ ID NO: 817912 - RNA, 23 nt, Human
ugucuagaaacuaaauuguagaa

SEQ ID NO: 817913 - RNA, 22 nt, Human
uguggaaacccacucuuuccuu

SEQ ID NO: 817914 - RNA, 27 nt, Human
uguggaaacccacucuuuccuuuuucu

SEQ ID NO: 817915 - RNA, 20 nt, Human
uuccucccccuugcccagcu

SEQ ID NO: 817916 - RNA, 21 nt, Human
uugggaagcuggaaaauaccu

SEQ ID NO: 817917 - RNA, 25 nt, Human
uuggggcggcgggggucgcgcuggg

SEQ ID NO: 817918 - RNA, 23 nt, Human
uuuaaaguuuacauaaaguuuau

SEQ ID NO: 817919 - RNA, 22 nt, Human
uuuguggaaacccacucuuucc

SEQ ID NO: 817920 - RNA, 21 nt, Human
aaccccaguccugccacccac

SEQ ID NO: 817921 - RNA, 20 nt, Human
aagaaacacaauccuaaaca

SEQ ID NO: 817922 - RNA, 22 nt, Human
aagaaggaaacaccagugaaaa

SEQ ID NO: 817923 - RNA, 22 nt, Human
aauaccgggggaaaauagaaug

SEQ ID NO: 817924 - RNA, 21 nt, Human
accccggaccgugccaaucuc

SEQ ID NO: 817925 - RNA, 23 nt, Human
acccgcagacaaaacccaucuuu

SEQ ID NO: 817926 - RNA, 23 nt, Human
agaggcggguugggggcgggggc

SEQ ID NO: 817927 - RNA, 27 nt, Human
aggcgagggggcggguggcaaggggug

SEQ ID NO: 817928 - RNA, 19 nt, Human
agggaccgggaacgggagg

SEQ ID NO: 817929 - RNA, 20 nt, Human
auuggacaguaacagauggc

SEQ ID NO: 817930 - RNA, 23 nt, Human
caaaucacccgcagacaaaaccc

SEQ ID NO: 817931 - RNA, 22 nt, Human
caagaaagacaaaagggaccgg

SEQ ID NO: 817932 - RNA, 19 nt, Human
caaguaacccaaacauaca

SEQ ID NO: 817933 - RNA, 18 nt, Human
caagucagcuugcaaaua

SEQ ID NO: 817934 - RNA, 24 nt, Human
caauuaacauuacugagcucacac

SEQ ID NO: 817935 - RNA, 22 nt, Human
cacaagguaaacuucaaggcaa

SEQ ID NO: 817936 - RNA, 28 nt, Human
cacaaugaacuuaaccaauuaacauuag

SEQ ID NO: 817937 - RNA, 23 nt, Human
cacccgcagacaaaacccaucuu

SEQ ID NO: 817938 - RNA, 23 nt, Human
cagaaaaucacauccuaagguuu

SEQ ID NO: 817939 - RNA, 19 nt, Human
caggagcccaggccggccg

SEQ ID NO: 817940 - RNA, 20 nt, Human
caguccugccacccacuccu

SEQ ID NO: 817941 - RNA, 20 nt, Human
ccaaaaccugugggaaaccc

SEQ ID NO: 817942 - RNA, 21 nt, Human
ccaaaccucacgccauaaagc

SEQ ID NO: 817943 - RNA, 19 nt, Human
ccacacuuugguacccuau

SEQ ID NO: 817944 - RNA, 24 nt, Human
ccaccgcguccaagaaagacaaaa

SEQ ID NO: 817945 - RNA, 19 nt, Human
ccaguccugccacccacuc

SEQ ID NO: 817946 - RNA, 25 nt, Human
ccccaaaccucacgccauaaagccc

SEQ ID NO: 817947 - RNA, 18 nt, Human
ccccgaagaggcggguug

SEQ ID NO: 817948 - RNA, 24 nt, Human
ccccgaagaggcggguugggggcg

SEQ ID NO: 817949 - RNA, 20 nt, Human
cccgcgccgggggggcaccg

SEQ ID NO: 817950 - RNA, 20 nt, Human
ccgcgccgggggggcaccgg

SEQ ID NO: 817951 - RNA, 24 nt, Human
ccggccgauccgcgucccggccac

SEQ ID NO: 817952 - RNA, 26 nt, Human
ccggccgauccgcgucccggccacaa

SEQ ID NO: 817953 - RNA, 23 nt, Human
ccgugccaaucucgccgccgccc

SEQ ID NO: 817954 - RNA, 19 nt, Human
ccucacgccauaaagcccc

SEQ ID NO: 817955 - RNA, 20 nt, Human
ccugccacccacuccuccug

SEQ ID NO: 817956 - RNA, 22 nt, Human
ccugccacccacuccuccugga

SEQ ID NO: 817957 - RNA, 21 nt, Human
cgccauaaagccccgaagagg

SEQ ID NO: 817958 - RNA, 23 nt, Human
cgccccaaaaccugugggaaacc

SEQ ID NO: 817959 - RNA, 24 nt, Human
cgccgccccaaaaccugugggaaa

SEQ ID NO: 817960 - RNA, 19 nt, Human
cggacggagggugggggcg

SEQ ID NO: 817961 - RNA, 19 nt, Human
cgggggccggggcggacuu

SEQ ID NO: 817962 - RNA, 21 nt, Human
cggguugggggcgggggccgg

SEQ ID NO: 817963 - RNA, 25 nt, Human
cuaaacaacauguauuauaccguaa

SEQ ID NO: 817964 - RNA, 20 nt, Human
cuccagauggaucccagccc

SEQ ID NO: 817965 - RNA, 18 nt, Human
cucccuccccaucccagg

SEQ ID NO: 817966 - RNA, 23 nt, Human
cuguucucaguccuggucucacu

SEQ ID NO: 817967 - RNA, 19 nt, Human
cuucagugacuaagaaaca

SEQ ID NO: 817968 - RNA, 19 nt, Human
gaacuuaaaaguaaagaaa

SEQ ID NO: 817969 - RNA, 31 nt, Human
gccccaaaaccugugggaaaccccaguccuu

SEQ ID NO: 817970 - RNA, 25 nt, Human
gccgauccgcgucccggccacaaag

SEQ ID NO: 817971 - RNA, 22 nt, Human
gccgggcaggggagagggaguc

SEQ ID NO: 817972 - RNA, 24 nt, Human
gccugcgaccccggaccgugccaa

SEQ ID NO: 817973 - RNA, 20 nt, Human
gcgccugcgaccccggaccg

SEQ ID NO: 817974 - RNA, 22 nt, Human
gcuccagauggaucccagcccc

SEQ ID NO: 817975 - RNA, 20 nt, Human
gcuuacagccaauacuuuaa

SEQ ID NO: 817976 - RNA, 19 nt, Human
ggaccgggaacgggagggg

SEQ ID NO: 817977 - RNA, 24 nt, Human
ggcgggggccggggcggacuucca

SEQ ID NO: 817978 - RNA, 23 nt, Human
gggaaaccccaguccugccaccc

SEQ ID NO: 817979 - RNA, 25 nt, Human
gggacugaauuuguacuccuggucc

SEQ ID NO: 817980 - RNA, 18 nt, Human
gggcaggggagagggagu

SEQ ID NO: 817981 - RNA, 23 nt, Human
gggcgcagcaagccgggcagggg

SEQ ID NO: 817982 - RNA, 19 nt, Human
ggggcgggggccggggcgg

SEQ ID NO: 817983 - RNA, 18 nt, Human
ggguugggggcgggggcc

SEQ ID NO: 817984 - RNA, 24 nt, Human
gguuagccgauuguuuuccaaaua

SEQ ID NO: 817985 - RNA, 22 nt, Human
uaacccaaacauacaaccaucu

SEQ ID NO: 817986 - RNA, 18 nt, Human
uagaaugugggaaugagg

SEQ ID NO: 817987 - RNA, 22 nt, Human
uaggaucuaaagaauaccgggg

SEQ ID NO: 817988 - RNA, 19 nt, Human
uaguuagcauuaacuagua

SEQ ID NO: 817989 - RNA, 24 nt, Human
uaucaagucagcuugcaaauaaau

SEQ ID NO: 817990 - RNA, 25 nt, Human
uaucauaaggcucuccagcacaagg

SEQ ID NO: 817991 - RNA, 22 nt, Human
uauuggacaguaacagauggcu

SEQ ID NO: 817992 - RNA, 18 nt, Human
ucaacauugucuucaugg

SEQ ID NO: 817993 - RNA, 19 nt, Human
ucacagagggccgccgccc

SEQ ID NO: 817994 - RNA, 19 nt, Human
ucagcggcucugugugcug

SEQ ID NO: 817995 - RNA, 19 nt, Human
ucagugacuaagaaacaca

SEQ ID NO: 817996 - RNA, 18 nt, Human
uccaggggcguggcugcg

SEQ ID NO: 817997 - RNA, 22 nt, Human
ucccagccccaaaccucacgcc

SEQ ID NO: 817998 - RNA, 18 nt, Human
ucccaggaaaucccuugc

SEQ ID NO: 817999 - RNA, 21 nt, Human
uccugagcaccgggcccuggg

SEQ ID NO: 818000 - RNA, 19 nt, Human
ucugcaggagcccaggccg

SEQ ID NO: 818001 - RNA, 22 nt, Human
ucuucauguauauaauuauuuc

SEQ ID NO: 818002 - RNA, 24 nt, Human
ugacuaagaaacacaauccuaaac

SEQ ID NO: 818003 - RNA, 26 nt, Human
ugacuaagaaacacaauccuaaacaa

SEQ ID NO: 818004 - RNA, 21 nt, Human
ugcaggagcccaggccggccg

SEQ ID NO: 818005 - RNA, 23 nt, Human
uggcacugucagccauggcucuu

SEQ ID NO: 818006 - RNA, 22 nt, Human
ugggacugaauuuguacuccug

SEQ ID NO: 818007 - RNA, 21 nt, Human
ugguacccuauguuuuccaua

SEQ ID NO: 818008 - RNA, 23 nt, Human
uguaaaaugauauauucuuuuaa

SEQ ID NO: 818009 - RNA, 18 nt, Human
ugucagccauggcucuug

SEQ ID NO: 818010 - RNA, 19 nt, Human
uuccaggggcguggcugcg

SEQ ID NO: 818011 - RNA, 19 nt, Human
uucgagagcccaaaucacc

SEQ ID NO: 818012 - RNA, 20 nt, Human
uucucaguccuggucucacu

SEQ ID NO: 818013 - RNA, 19 nt, Human
uugcucucuucagucguuu

SEQ ID NO: 818014 - RNA, 23 nt, Human
aaaaaacugaacuucuaaacaaa

SEQ ID NO: 818015 - RNA, 22 nt, Human
aaaaaauaaaauuugggcaccc

SEQ ID NO: 818016 - RNA, 21 nt, Human
aaaaauaccaaagcugugcca

SEQ ID NO: 818017 - RNA, 22 nt, Human
aaaacagugcggcuuccaauua

SEQ ID NO: 818018 - RNA, 21 nt, Human
aaaacuacagauuagggacug

SEQ ID NO: 818019 - RNA, 20 nt, Human
aaagacauaauccuuggguc

SEQ ID NO: 818020 - RNA, 26 nt, Human
aacacauaauuuacaugucaaaucca

SEQ ID NO: 818021 - RNA, 23 nt, Human
aagaaccaggucaccuaaagcug

SEQ ID NO: 818022 - RNA, 25 nt, Human
aagcugaacacaacaguaaagccga

SEQ ID NO: 818023 - RNA, 20 nt, Human
aagucuauagaucuauaacc

SEQ ID NO: 818024 - RNA, 18 nt, Human
aauacauucccaaauccu

SEQ ID NO: 818025 - RNA, 25 nt, Human
aauagagaaaaaauaccaaagcugg

SEQ ID NO: 818026 - RNA, 20 nt, Human
aauagcuauaaaucaauucu

SEQ ID NO: 818027 - RNA, 21 nt, Human
aauucucugacuacuaagaaa

SEQ ID NO: 818028 - RNA, 18 nt, Human
aauuuguaucucuuccuu

SEQ ID NO: 818029 - RNA, 23 nt, Human
acacacacacacacacacacaca

SEQ ID NO: 818030 - RNA, 23 nt, Human
acacacacacacacacacacaca

SEQ ID NO: 818031 - RNA, 23 nt, Human
acacacacacacacacacacaca

SEQ ID NO: 818032 - RNA, 23 nt, Human
acacacacacacacacacacaca

SEQ ID NO: 818033 - RNA, 23 nt, Human
acacuaaaagacaucaaaggaag

SEQ ID NO: 818034 - RNA, 23 nt, Human
accaaaggaagaaaauaaaaaca

SEQ ID NO: 818035 - RNA, 24 nt, Human
accaaaggaagaaaauaaaaacaa

SEQ ID NO: 818036 - RNA, 22 nt, Human
accugugguugcaaaauuguuu

SEQ ID NO: 818037 - RNA, 24 nt, Human
acgcaacuucggagcuuggaaggg

SEQ ID NO: 818038 - RNA, 20 nt, Human
acuuagagacauaguccaaa

SEQ ID NO: 818039 - RNA, 24 nt, Human
agaaaauaaaaacaacucagauac

SEQ ID NO: 818040 - RNA, 22 nt, Human
agaauggaagugcuuuuaaaug

SEQ ID NO: 818041 - RNA, 24 nt, Human
agacaaauguacucuauagucaga

SEQ ID NO: 818042 - RNA, 25 nt, Human
agacaaauguacucuauagucagaa

SEQ ID NO: 818043 - RNA, 18 nt, Human
agacauaguccaaauccc

SEQ ID NO: 818044 - RNA, 22 nt, Human
agagaagaauggucaaggcuaa

SEQ ID NO: 818045 - RNA, 20 nt, Human
agagagaaagaaguaaccaa

SEQ ID NO: 818046 - RNA, 22 nt, Human
agccaaaauuauuuacaaacug

SEQ ID NO: 818047 - RNA, 20 nt, Human
agcccuuguucaaacagcuc

SEQ ID NO: 818048 - RNA, 19 nt, Human
agcuuaacaaauguaaaac

SEQ ID NO: 818049 - RNA, 25 nt, Human
aggaagaaaauaaaaacaacucaga

SEQ ID NO: 818050 - RNA, 20 nt, Human
agggacugaccaaaacaaaa

SEQ ID NO: 818051 - RNA, 19 nt, Human
aggggcagggaaggaaugg

SEQ ID NO: 818052 - RNA, 21 nt, Human
agucugagcuuacugauccug

SEQ ID NO: 818053 - RNA, 24 nt, Human
aguucuuaugaauaccuucauaaa

SEQ ID NO: 818054 - RNA, 18 nt, Human
aguuuggauuuugugaaa

SEQ ID NO: 818055 - RNA, 22 nt, Human
aguuuggauuuugugaaauagg

SEQ ID NO: 818056 - RNA, 19 nt, Human
auagccauaaacaaaucuc

SEQ ID NO: 818057 - RNA, 20 nt, Human
augaaauggaagauaguauc

SEQ ID NO: 818058 - RNA, 22 nt, Human
augcagaucauaauucugaguu

SEQ ID NO: 818059 - RNA, 20 nt, Human
caaaacuaucuagggcccac

SEQ ID NO: 818060 - RNA, 20 nt, Human
caaauaugguuaaacauugg

SEQ ID NO: 818061 - RNA, 20 nt, Human
caaggccccaaacucuugac

SEQ ID NO: 818062 - RNA, 18 nt, Human
caaggcccuggcuccauu

SEQ ID NO: 818063 - RNA, 22 nt, Human
caaucacugccuuucacagaau

SEQ ID NO: 818064 - RNA, 19 nt, Human
cacaaaacagagcaacauc

SEQ ID NO: 818065 - RNA, 18 nt, Human
cacaaaguugagacaaga

SEQ ID NO: 818066 - RNA, 20 nt, Human
cacacacacacacacacaca

SEQ ID NO: 818067 - RNA, 20 nt, Human
cacacacacacacacacaca

SEQ ID NO: 818068 - RNA, 20 nt, Human
cacacacacacacacacaca

SEQ ID NO: 818069 - RNA, 20 nt, Human
cacacacacacacacacaca

SEQ ID NO: 818070 - RNA, 20 nt, Human
cacacacacacacacacaca

SEQ ID NO: 818071 - RNA, 20 nt, Human
cacacacacacacacacaca

SEQ ID NO: 818072 - RNA, 20 nt, Human
cacacacacacacacacaca

SEQ ID NO: 818073 - RNA, 20 nt, Human
cacacacacacacacacaca

SEQ ID NO: 818074 - RNA, 20 nt, Human
cacacacacacacacacaca

SEQ ID NO: 818075 - RNA, 22 nt, Human
cacacacacacacacacacaca

SEQ ID NO: 818076 - RNA, 22 nt, Human
cacacacacacacacacacaca

SEQ ID NO: 818077 - RNA, 22 nt, Human
cacacacacacacacacacaca

SEQ ID NO: 818078 - RNA, 22 nt, Human
cacacacacacacacacacaca

SEQ ID NO: 818079 - RNA, 21 nt, Human
cacagaaucacgcaacuucgg

SEQ ID NO: 818080 - RNA, 18 nt, Human
caccgugguggacccugg

SEQ ID NO: 818081 - RNA, 20 nt, Human
cagaaaauacuaaguauuau

SEQ ID NO: 818082 - RNA, 19 nt, Human
cagaacauuccaaaauuca

SEQ ID NO: 818083 - RNA, 25 nt, Human
cagaacauuccaaaauucaaacuaa

SEQ ID NO: 818084 - RNA, 22 nt, Human
cagcaauguggguaccuguggu

SEQ ID NO: 818085 - RNA, 23 nt, Human
caggccuagcuuucaacaaauaa

SEQ ID NO: 818086 - RNA, 19 nt, Human
cauccugacuauugguucc

SEQ ID NO: 818087 - RNA, 20 nt, Human
caugaugguguccaugccuu

SEQ ID NO: 818088 - RNA, 19 nt, Human
caugggguccagguuaugu

SEQ ID NO: 818089 - RNA, 18 nt, Human
ccaaaagacauaauccuu

SEQ ID NO: 818090 - RNA, 21 nt, Human
ccaaaucccaagcugaacaca

SEQ ID NO: 818091 - RNA, 23 nt, Human
ccauuauccucgguaguagccca

SEQ ID NO: 818092 - RNA, 25 nt, Human
cccuucagaauacaggcaaugccaa

SEQ ID NO: 818093 - RNA, 18 nt, Human
ccugaaaggcauguaaga

SEQ ID NO: 818094 - RNA, 19 nt, Human
ccugaaaggcauguaagag

SEQ ID NO: 818095 - RNA, 21 nt, Human
ccuuaaacaugauggugucca

SEQ ID NO: 818096 - RNA, 19 nt, Human
ccuugggucugagugaggg

SEQ ID NO: 818097 - RNA, 19 nt, Human
ccuugggucugagugaggg

SEQ ID NO: 818098 - RNA, 20 nt, Human
ccuuugagacucugccuccu

SEQ ID NO: 818099 - RNA, 23 nt, Human
cggccaaauuuagccagcccuug

SEQ ID NO: 818100 - RNA, 20 nt, Human
cguccacuuuacugaguaac

SEQ ID NO: 818101 - RNA, 19 nt, Human
cuaaaccauauuaauuauc

SEQ ID NO: 818102 - RNA, 18 nt, Human
cuagacuuccucugugcu

SEQ ID NO: 818103 - RNA, 22 nt, Human
cucaaggaauuaaaaauaaaac

SEQ ID NO: 818104 - RNA, 25 nt, Human
cucaggaugaugggagccccaaaag

SEQ ID NO: 818105 - RNA, 20 nt, Human
cuccccaaaucacaaaguug

SEQ ID NO: 818106 - RNA, 19 nt, Human
cucccuuagacuggauaca

SEQ ID NO: 818107 - RNA, 22 nt, Human
cuccugaacuuccuguaucaua

SEQ ID NO: 818108 - RNA, 21 nt, Human
cugaccuccauuauagauuca

SEQ ID NO: 818109 - RNA, 20 nt, Human
cugacuugcgacuggauggc

SEQ ID NO: 818110 - RNA, 19 nt, Human
cugcugacuugcgacugga

SEQ ID NO: 818111 - RNA, 24 nt, Human
cuugaacuggaaacugaagauaau

SEQ ID NO: 818112 - RNA, 24 nt, Human
cuuuaaguccuuuaguccuuucuc

SEQ ID NO: 818113 - RNA, 21 nt, Human
gaagacuaaaacaaaccacug

SEQ ID NO: 818114 - RNA, 22 nt, Human
gaaguuuuccuaaauaccauau

SEQ ID NO: 818115 - RNA, 18 nt, Human
gacuuagagacauagucc

SEQ ID NO: 818116 - RNA, 23 nt, Human
gacuugcgacuggauggcuucaa

SEQ ID NO: 818117 - RNA, 20 nt, Human
gagaaagcagaauuuggggg

SEQ ID NO: 818118 - RNA, 26 nt, Human
gagaaagcagaauuugggggaauagc

SEQ ID NO: 818119 - RNA, 22 nt, Human
gagucugagcuuacugauccug

SEQ ID NO: 818120 - RNA, 20 nt, Human
gauauuuuuauuuuuuccug

SEQ ID NO: 818121 - RNA, 21 nt, Human
gaugaugggagccccaaaaga

SEQ ID NO: 818122 - RNA, 21 nt, Human
gcaaaacuaucuagggcccac

SEQ ID NO: 818123 - RNA, 18 nt, Human
gcaaaggcuucuccaagg

SEQ ID NO: 818124 - RNA, 21 nt, Human
ggaagagaaaugggaggaagg

SEQ ID NO: 818125 - RNA, 23 nt, Human
gggagccccaaaagacauaaucc

SEQ ID NO: 818126 - RNA, 18 nt, Human
gggaggaagguaaugcag

SEQ ID NO: 818127 - RNA, 22 nt, Human
gugaaauagagaaaaaauacca

SEQ ID NO: 818128 - RNA, 21 nt, Human
gugaugaugaaggaaaggguu

SEQ ID NO: 818129 - RNA, 20 nt, Human
gugauuuucuggaaauauug

SEQ ID NO: 818130 - RNA, 25 nt, Human
uaaaaauaaaacugaugaagcucac

SEQ ID NO: 818131 - RNA, 21 nt, Human
uaaaacaaaccacugccuccu

SEQ ID NO: 818132 - RNA, 20 nt, Human
uaaaacacacacacacacac

SEQ ID NO: 818133 - RNA, 21 nt, Human
uaaaauauacuuuacaagaca

SEQ ID NO: 818134 - RNA, 27 nt, Human
uaaaaugcagguauuuacaacauuuuu

SEQ ID NO: 818135 - RNA, 27 nt, Human
uaaacaaaucucagcagaauauaugga

SEQ ID NO: 818136 - RNA, 19 nt, Human
uaaacauuauuaaaggcag

SEQ ID NO: 818137 - RNA, 20 nt, Human
uaaauacagacauauacaac

SEQ ID NO: 818138 - RNA, 26 nt, Human
uaacacuaaaagacaucaaaggaagu

SEQ ID NO: 818139 - RNA, 21 nt, Human
uaacuugaacuggaaacugaa

SEQ ID NO: 818140 - RNA, 23 nt, Human
uaagaaguuaaguuagacuucag

SEQ ID NO: 818141 - RNA, 26 nt, Human
uaagauggcaaaacuaucuagggccc

SEQ ID NO: 818142 - RNA, 27 nt, Human
uaagauggcaaaacuaucuagggccca

SEQ ID NO: 818143 - RNA, 20 nt, Human
uaaguggacucacaauugaa

SEQ ID NO: 818144 - RNA, 21 nt, Human
uacaaacaaagcaaaauauag

SEQ ID NO: 818145 - RNA, 25 nt, Human
uacagauuagggacugaccaaaaca

SEQ ID NO: 818146 - RNA, 22 nt, Human
uacauuaaaaaaguucacugac

SEQ ID NO: 818147 - RNA, 23 nt, Human
uaccugugguugcaaaauuguuu

SEQ ID NO: 818148 - RNA, 23 nt, Human
uacuucacuguuuauccuaagug

SEQ ID NO: 818149 - RNA, 23 nt, Human
uagaaaagaagucaaaaacuaca

SEQ ID NO: 818150 - RNA, 20 nt, Human
uagagcucuuggcauaauca

SEQ ID NO: 818151 - RNA, 23 nt, Human
uagaucuauaaccguggaaacug

SEQ ID NO: 818152 - RNA, 22 nt, Human
uagcugagaaaauggcauaucu

SEQ ID NO: 818153 - RNA, 23 nt, Human
uaggagauaccacaauggaacau

SEQ ID NO: 818154 - RNA, 20 nt, Human
uagggacugaccaaaacaaa

SEQ ID NO: 818155 - RNA, 19 nt, Human
uaguagcccaaggcuggua

SEQ ID NO: 818156 - RNA, 22 nt, Human
uaguaggcaguagaaaaaaagu

SEQ ID NO: 818157 - RNA, 18 nt, Human
uaguaguaggcaguagaa

SEQ ID NO: 818158 - RNA, 20 nt, Human
uauacugucaaaaaaauggg

SEQ ID NO: 818159 - RNA, 25 nt, Human
uaugaaacaggaauauaaacuauga

SEQ ID NO: 818160 - RNA, 22 nt, Human
uaugaauaccuucauaaacacc

SEQ ID NO: 818161 - RNA, 26 nt, Human
uauggaaagaauggaagugcuuuuaa

SEQ ID NO: 818162 - RNA, 22 nt, Human
uauuaucauuugccucuuucuc

SEQ ID NO: 818163 - RNA, 20 nt, Human
uauucuucauuggcuauuga

SEQ ID NO: 818164 - RNA, 21 nt, Human
ucaaaggaagucaaugugaua

SEQ ID NO: 818165 - RNA, 24 nt, Human
ucacagaacauuccaaaauucaaa

SEQ ID NO: 818166 - RNA, 20 nt, Human
ucagaauacaggcaaugcca

SEQ ID NO: 818167 - RNA, 22 nt, Human
ucaggaugaugggagccccaaa

SEQ ID NO: 818168 - RNA, 19 nt, Human
ucaucugugaugucuacuu

SEQ ID NO: 818169 - RNA, 22 nt, Human
uccagggcauccugacuauugg

SEQ ID NO: 818170 - RNA, 25 nt, Human
uccaucacccaaauucaucaguauu

SEQ ID NO: 818171 - RNA, 18 nt, Human
ucccaaauccugaaaggc

SEQ ID NO: 818172 - RNA, 23 nt, Human
uccccaaaucacaaaguugagac

SEQ ID NO: 818173 - RNA, 25 nt, Human
uccccaaaucacaaaguugagacaa

SEQ ID NO: 818174 - RNA, 25 nt, Human
uccucgguaguagcccaaggcuggu

SEQ ID NO: 818175 - RNA, 22 nt, Human
uccuggauggaguggcaaaggc

SEQ ID NO: 818176 - RNA, 18 nt, Human
uccuugagauccucgcaa

SEQ ID NO: 818177 - RNA, 20 nt, Human
uccuugggucugagugaggg

SEQ ID NO: 818178 - RNA, 18 nt, Human
ucucaaggccccaaacuc

SEQ ID NO: 818179 - RNA, 18 nt, Human
ucugggguguuugagaag

SEQ ID NO: 818180 - RNA, 18 nt, Human
ucuugucaugccucuccu

SEQ ID NO: 818181 - RNA, 22 nt, Human
ugaaaaaaaaaauaaaauuugg

SEQ ID NO: 818182 - RNA, 19 nt, Human
ugaaacaggaauauaaacu

SEQ ID NO: 818183 - RNA, 19 nt, Human
ugaaaggcauguaagaguu

SEQ ID NO: 818184 - RNA, 19 nt, Human
ugaaauaggagauaccaca

SEQ ID NO: 818185 - RNA, 20 nt, Human
ugaauaccuucauaaacacc

SEQ ID NO: 818186 - RNA, 18 nt, Human
ugagaaaauggcauaucu

SEQ ID NO: 818187 - RNA, 23 nt, Human
ugaggaaacaggucaaaaggaag

SEQ ID NO: 818188 - RNA, 27 nt, Human
ugaggagcaugggguccagguuaugug

SEQ ID NO: 818189 - RNA, 21 nt, Human
ugauuugguguuucuuuaucc

SEQ ID NO: 818190 - RNA, 25 nt, Human
ugcaugucacagaccucaaccccac

SEQ ID NO: 818191 - RNA, 21 nt, Human
ugccuuugucccuuuaucuuc

SEQ ID NO: 818192 - RNA, 20 nt, Human
uggaaagaauggaagugcuu

SEQ ID NO: 818193 - RNA, 24 nt, Human
uggaaauauugcaaaauacauuaa

SEQ ID NO: 818194 - RNA, 20 nt, Human
uggaggaagagagaaagaag

SEQ ID NO: 818195 - RNA, 18 nt, Human
uggcauaucuuaugauac

SEQ ID NO: 818196 - RNA, 21 nt, Human
ugggaaauggagaggaaagaa

SEQ ID NO: 818197 - RNA, 26 nt, Human
ugggaggaagguaaugcagaggagaa

SEQ ID NO: 818198 - RNA, 18 nt, Human
ugggaucagcacgucccc

SEQ ID NO: 818199 - RNA, 21 nt, Human
uggguugagagcugcagaggu

SEQ ID NO: 818200 - RNA, 18 nt, Human
uggucccaaguaauccuu

SEQ ID NO: 818201 - RNA, 20 nt, Human
uguaaaacacacacacacac

SEQ ID NO: 818202 - RNA, 22 nt, Human
uguaaaacagugcggcuuccaa

SEQ ID NO: 818203 - RNA, 18 nt, Human
ugucucauagacaucaua

SEQ ID NO: 818204 - RNA, 23 nt, Human
ugucucuagcucaggaugauggg

SEQ ID NO: 818205 - RNA, 23 nt, Human
ugugcaauaacaaagacagaauc

SEQ ID NO: 818206 - RNA, 20 nt, Human
uguuuuaagaauaugacaaa

SEQ ID NO: 818207 - RNA, 24 nt, Human
uguuuugugagcacaaaacagagc

SEQ ID NO: 818208 - RNA, 21 nt, Human
uuccaauacuccuuauucuuc

SEQ ID NO: 818209 - RNA, 18 nt, Human
uuccucugugcuucuaca

SEQ ID NO: 818210 - RNA, 18 nt, Human
uucuucugggguguuuga

SEQ ID NO: 818211 - RNA, 24 nt, Human
uugaagauuauggccggucuucug

SEQ ID NO: 818212 - RNA, 19 nt, Human
uugaagccacagucuccuc

SEQ ID NO: 818213 - RNA, 22 nt, Human
uugaagccacagucuccucugu

SEQ ID NO: 818214 - RNA, 20 nt, Human
uugaagcuaauuauuuuaug

SEQ ID NO: 818215 - RNA, 23 nt, Human
uuguuuuauaagcuauacuucac

SEQ ID NO: 818216 - RNA, 20 nt, Human
uuuacaggccuagcuuucaa

SEQ ID NO: 818217 - RNA, 22 nt, Human
uuucacagaaucacgcaacuuc

SEQ ID NO: 818218 - RNA, 22 nt, Human
uuuguaggagaguguaccccug

SEQ ID NO: 818219 - RNA, 21 nt, Human
uuugucccuuuaucuucauuu

SEQ ID NO: 818220 - RNA, 21 nt, Human
aaaacuuacuagcaaaaaucu

SEQ ID NO: 818221 - RNA, 27 nt, Human
aaacagaaauagaggagucaaaagcaa

SEQ ID NO: 818222 - RNA, 20 nt, Human
aaacagaaauagaggagucc

SEQ ID NO: 818223 - RNA, 21 nt, Human
aaagagcaaaccugaaaugcu

SEQ ID NO: 818224 - RNA, 22 nt, Human
aaaggaccuugaaggccaccgg

SEQ ID NO: 818225 - RNA, 23 nt, Human
aagaggcagaauaaugagagaua

SEQ ID NO: 818226 - RNA, 22 nt, Human
aagauugugagcagggaaguga

SEQ ID NO: 818227 - RNA, 21 nt, Human
aagcuucauuaugaaacacaa

SEQ ID NO: 818228 - RNA, 24 nt, Human
aaguaagaggcagaauaaugagag

SEQ ID NO: 818229 - RNA, 20 nt, Human
aauauauggcaaacaauaua

SEQ ID NO: 818230 - RNA, 18 nt, Human
aaucaugguuuuaacuuu

SEQ ID NO: 818231 - RNA, 26 nt, Human
accaugacaaccaaaaauaaaauaac

SEQ ID NO: 818232 - RNA, 21 nt, Human
accugcaauucuguacagcau

SEQ ID NO: 818233 - RNA, 25 nt, Human
acgaauuagaaacaauuguguuuua

SEQ ID NO: 818234 - RNA, 23 nt, Human
acgggcacguauuaacccagagc

SEQ ID NO: 818235 - RNA, 20 nt, Human
agaaaucaaacauguuucca

SEQ ID NO: 818236 - RNA, 25 nt, Human
agaauauauaugccagaaauaccaa

SEQ ID NO: 818237 - RNA, 25 nt, Human
agaugaauucaccauucagaaguaa

SEQ ID NO: 818238 - RNA, 22 nt, Human
agcaucaaggggauuugcuguu

SEQ ID NO: 818239 - RNA, 25 nt, Human
aggaagaaaauuaaaauuugaagac

SEQ ID NO: 818240 - RNA, 19 nt, Human
aggaaggaauaccaguggc

SEQ ID NO: 818241 - RNA, 18 nt, Human
aggagucaaaagcaacuu

SEQ ID NO: 818242 - RNA, 20 nt, Human
aggauccauaaaaagaguga

SEQ ID NO: 818243 - RNA, 20 nt, Human
agggaugguagaguuugugg

SEQ ID NO: 818244 - RNA, 24 nt, Human
aggggagcucucuggggcagaggg

SEQ ID NO: 818245 - RNA, 23 nt, Human
agguugaaguugcauuaacugag

SEQ ID NO: 818246 - RNA, 23 nt, Human
agguuguagauucuucccuacag

SEQ ID NO: 818247 - RNA, 20 nt, Human
aguuuaaugaauguguauug

SEQ ID NO: 818248 - RNA, 24 nt, Human
auaauaggguaaguaagaggcaga

SEQ ID NO: 818249 - RNA, 18 nt, Human
auaaugcugugcaggguc

SEQ ID NO: 818250 - RNA, 24 nt, Human
auagcaguuuaauuacaacaaaag

SEQ ID NO: 818251 - RNA, 19 nt, Human
augaaacacaaugacuaca

SEQ ID NO: 818252 - RNA, 20 nt, Human
auggaaaaacaaaagcguag

SEQ ID NO: 818253 - RNA, 20 nt, Human
augugugugugugugcaugu

SEQ ID NO: 818254 - RNA, 22 nt, Human
caaaacacuaaagcaggaacuu

SEQ ID NO: 818255 - RNA, 22 nt, Human
cagaaaaaaaaaugcccugaua

SEQ ID NO: 818256 - RNA, 25 nt, Human
cagaaauaccaaaugaacaaaacug

SEQ ID NO: 818257 - RNA, 23 nt, Human
cagggucuuuuuaccuuaguaag

SEQ ID NO: 818258 - RNA, 20 nt, Human
cagucaaaaugauuaauccu

SEQ ID NO: 818259 - RNA, 21 nt, Human
cauaaaggaccuugaaggcca

SEQ ID NO: 818260 - RNA, 19 nt, Human
cauagaaaaugaaaaugac

SEQ ID NO: 818261 - RNA, 19 nt, Human
caucaagaaaaguuaugac

SEQ ID NO: 818262 - RNA, 18 nt, Human
cauggcuuggaggacaug

SEQ ID NO: 818263 - RNA, 19 nt, Human
caugugugugugugugcau

SEQ ID NO: 818264 - RNA, 24 nt, Human
caugugugugugugugcaugugua

SEQ ID NO: 818265 - RNA, 18 nt, Human
ccaaguuugcugugagug

SEQ ID NO: 818266 - RNA, 26 nt, Human
ccaauuaacccuaugacaugagugca

SEQ ID NO: 818267 - RNA, 25 nt, Human
ccacuuuuccucucaaauuucucuu

SEQ ID NO: 818268 - RNA, 23 nt, Human
ccagaaauaccaaaugaacaaaa

SEQ ID NO: 818269 - RNA, 19 nt, Human
ccaucugaagauuguuuaa

SEQ ID NO: 818270 - RNA, 20 nt, Human
ccucagaaaaaaaaaugccc

SEQ ID NO: 818271 - RNA, 30 nt, Human
ccuucuagggcaugugaugggcauguuugg

SEQ ID NO: 818272 - RNA, 22 nt, Human
ccuucucuuuuuugaauucaca

SEQ ID NO: 818273 - RNA, 26 nt, Human
ccuucuuuccaaguuugcugugagug

SEQ ID NO: 818274 - RNA, 23 nt, Human
cuauagagugaagagaaaaggga

SEQ ID NO: 818275 - RNA, 20 nt, Human
cuccuggcccuucuugguuu

SEQ ID NO: 818276 - RNA, 19 nt, Human
cugauaauauuucauaaug

SEQ ID NO: 818277 - RNA, 22 nt, Human
cuuaaagcaaacacaauuuguu

SEQ ID NO: 818278 - RNA, 29 nt, Human
cuucuagggcaugugaugggcauguuugg

SEQ ID NO: 818279 - RNA, 21 nt, Human
cuuugaguucucucacaguga

SEQ ID NO: 818280 - RNA, 20 nt, Human
cuuuugucuuacauccuucu

SEQ ID NO: 818281 - RNA, 23 nt, Human
gaaauaccaaaugaacaaaacug

SEQ ID NO: 818282 - RNA, 18 nt, Human
gaacaaaacugacaaagc

SEQ ID NO: 818283 - RNA, 22 nt, Human
gaagaaaauuaaaauuugaaga

SEQ ID NO: 818284 - RNA, 19 nt, Human
gaaggcagaugggagaagg

SEQ ID NO: 818285 - RNA, 23 nt, Human
gaaggcagaugggagaaggguuu

SEQ ID NO: 818286 - RNA, 18 nt, Human
gcaaucaaaucacuggcc

SEQ ID NO: 818287 - RNA, 21 nt, Human
ggaaaaacaaaagcguagagg

SEQ ID NO: 818288 - RNA, 18 nt, Human
ggaacaaaacacuaaagc

SEQ ID NO: 818289 - RNA, 23 nt, Human
ggaagguugaaguugcauuaacu

SEQ ID NO: 818290 - RNA, 18 nt, Human
ggaccuugaaggccaccg

SEQ ID NO: 818291 - RNA, 20 nt, Human
ggauagggaaggcagauggg

SEQ ID NO: 818292 - RNA, 20 nt, Human
guaaacaaauuaaauguuag

SEQ ID NO: 818293 - RNA, 22 nt, Human
guaaagaugaggaccaaagaag

SEQ ID NO: 818294 - RNA, 23 nt, Human
uaaaauuuuuagauacuggagca

SEQ ID NO: 818295 - RNA, 18 nt, Human
uaacaaagcaauaagugg

SEQ ID NO: 818296 - RNA, 18 nt, Human
uaaccuccaauuaacccu

SEQ ID NO: 818297 - RNA, 21 nt, Human
uaacugagauggagaagacca

SEQ ID NO: 818298 - RNA, 18 nt, Human
uagaaaaagguagaauug

SEQ ID NO: 818299 - RNA, 25 nt, Human
uaggaagaaaauuaaaauuugaaga

SEQ ID NO: 818300 - RNA, 24 nt, Human
uaguaaggagaagaggaaaugagg

SEQ ID NO: 818301 - RNA, 24 nt, Human
uaugccagaaauaccaaaugaaca

SEQ ID NO: 818302 - RNA, 24 nt, Human
ucaaaagcaacuuucaguuuuuga

SEQ ID NO: 818303 - RNA, 19 nt, Human
ucaauggacuugagaggcu

SEQ ID NO: 818304 - RNA, 18 nt, Human
ucacacuguaaacaguuc

SEQ ID NO: 818305 - RNA, 21 nt, Human
ucacggauucacagagagcuc

SEQ ID NO: 818306 - RNA, 20 nt, Human
ucagcuuugaugggguagcu

SEQ ID NO: 818307 - RNA, 20 nt, Human
uccagaaaauuagaguccau

SEQ ID NO: 818308 - RNA, 22 nt, Human
ucgaagugcugcggauuagacu

SEQ ID NO: 818309 - RNA, 22 nt, Human
ucuguaaaggcuccaugaauuc

SEQ ID NO: 818310 - RNA, 21 nt, Human
ucuuccauccuaauaauuuuu

SEQ ID NO: 818311 - RNA, 20 nt, Human
ucuugggagccauaauaggg

SEQ ID NO: 818312 - RNA, 25 nt, Human
ucuuuggggaacaggauaccagcgg

SEQ ID NO: 818313 - RNA, 21 nt, Human
ugaaacagaaauagaggaguc

SEQ ID NO: 818314 - RNA, 20 nt, Human
ugaaaugcuccagguuguag

SEQ ID NO: 818315 - RNA, 24 nt, Human
ugaacaaaacugacaaagccccug

SEQ ID NO: 818316 - RNA, 23 nt, Human
ugacacaaucaaauucaugguua

SEQ ID NO: 818317 - RNA, 25 nt, Human
ugacauacucccaccucagaaaaaa

SEQ ID NO: 818318 - RNA, 25 nt, Human
ugacauacucccaccucagaaaaaa

SEQ ID NO: 818319 - RNA, 20 nt, Human
ugaccugcccuuuugaagca

SEQ ID NO: 818320 - RNA, 24 nt, Human
ugagaaaagauuguucaagacaag

SEQ ID NO: 818321 - RNA, 24 nt, Human
ugagaaaaucucuuucacuggcau

SEQ ID NO: 818322 - RNA, 19 nt, Human
ugagauggagaagaccaac

SEQ ID NO: 818323 - RNA, 21 nt, Human
ugagauggagaagaccacaga

SEQ ID NO: 818324 - RNA, 23 nt, Human
ugauaagauaauauuugaacuga

SEQ ID NO: 818325 - RNA, 18 nt, Human
ugcaugugugugugugug

SEQ ID NO: 818326 - RNA, 24 nt, Human
uggaagguugaaguugcauuaacu

SEQ ID NO: 818327 - RNA, 18 nt, Human
uggagcacagcacugaaa

SEQ ID NO: 818328 - RNA, 21 nt, Human
uggcccuucuugguuucuuga

SEQ ID NO: 818329 - RNA, 21 nt, Human
uggggaacaggauaccagcgg

SEQ ID NO: 818330 - RNA, 22 nt, Human
ugguguggacguguagaggggu

SEQ ID NO: 818331 - RNA, 20 nt, Human
ugguuaacagaaucacuaug

SEQ ID NO: 818332 - RNA, 19 nt, Human
ugugcauguguauguaugu

SEQ ID NO: 818333 - RNA, 19 nt, Human
ugugcauguguauguaugu

SEQ ID NO: 818334 - RNA, 19 nt, Human
ugugugcauguguauguau

SEQ ID NO: 818335 - RNA, 23 nt, Human
ugugugugcauguguauguaugu

SEQ ID NO: 818336 - RNA, 21 nt, Human
ugugugugugcauguguaugu

SEQ ID NO: 818337 - RNA, 22 nt, Human
ugugugugugcauguguaugua

SEQ ID NO: 818338 - RNA, 20 nt, Human
ugugugugugugugcaugug

SEQ ID NO: 818339 - RNA, 25 nt, Human
uguucugucuccuuuccuccugucc

SEQ ID NO: 818340 - RNA, 21 nt, Human
uuaaaacuuucaauucagcaa

SEQ ID NO: 818341 - RNA, 23 nt, Human
uuaacugagauggagaagaccac

SEQ ID NO: 818342 - RNA, 26 nt, Human
uucacuggcaucaucuaccaagauga

SEQ ID NO: 818343 - RNA, 24 nt, Human
uucaguuuccaguuaaaaccccca

SEQ ID NO: 818344 - RNA, 24 nt, Human
uucaugguuaacagaaucacuaug

SEQ ID NO: 818345 - RNA, 19 nt, Human
uucccauuucuccuggccc

SEQ ID NO: 818346 - RNA, 18 nt, Human
uucuguuguuuaauagua

SEQ ID NO: 818347 - RNA, 22 nt, Human
uugaguucucucacagugaucg

SEQ ID NO: 818348 - RNA, 21 nt, Human
uuuaagauuuuacugaccauc

SEQ ID NO: 818349 - RNA, 22 nt, Human
uuucaaguucagcuuugauggg

SEQ ID NO: 818350 - RNA, 20 nt, Human
uuucccauuucuccuggccc

SEQ ID NO: 818351 - RNA, 22 nt, Human
uuucuaguguuggauguuuugu

SEQ ID NO: 818352 - RNA, 22 nt, Human
uuugaagacaaaguuuuuggaa

SEQ ID NO: 818353 - RNA, 22 nt, Human
uuugaccugagcaucuggaagg

SEQ ID NO: 818354 - RNA, 23 nt, Human
uuugaccugagcaucuggaaggu

SEQ ID NO: 818355 - RNA, 24 nt, Human
uuuuacugaccaucagaaaguguc

SEQ ID NO: 818356 - RNA, 22 nt, Human
aaaaaaaaaaaaaaaggcacag

SEQ ID NO: 818357 - RNA, 22 nt, Human
aaaaaaaaaggcacagucccua

SEQ ID NO: 818358 - RNA, 18 nt, Human
aaaaaggcacagucccua

SEQ ID NO: 818359 - RNA, 22 nt, Human
aacagaacccugcacccaacag

SEQ ID NO: 818360 - RNA, 20 nt, Human
aacuauggucuucaagacag

SEQ ID NO: 818361 - RNA, 27 nt, Human
aagacagaggcucaguccuuccugaga

SEQ ID NO: 818362 - RNA, 23 nt, Human
aagagcgaaacuuugucucaaaa

SEQ ID NO: 818363 - RNA, 18 nt, Human
aagcaggagaggcaacaa

SEQ ID NO: 818364 - RNA, 25 nt, Human
aaggagacuagaccaggccaggcgc

SEQ ID NO: 818365 - RNA, 21 nt, Human
aaggucccaggcgauuuuuuu

SEQ ID NO: 818366 - RNA, 21 nt, Human
aaggugacuggucacaccaag

SEQ ID NO: 818367 - RNA, 20 nt, Human
aagguggaguggaucagggc

SEQ ID NO: 818368 - RNA, 20 nt, Human
aauauggcgaaaccccaucu

SEQ ID NO: 818369 - RNA, 21 nt, Human
aauauggcgaaaccccaucuc

SEQ ID NO: 818370 - RNA, 21 nt, Human
aaucugaugccuguucucccu

SEQ ID NO: 818371 - RNA, 20 nt, Human
acaagagcgaaacuuugucu

SEQ ID NO: 818372 - RNA, 21 nt, Human
acaagagcgaaacuuugucuc

SEQ ID NO: 818373 - RNA, 25 nt, Human
acagugaccucuuugaaagcuuucu

SEQ ID NO: 818374 - RNA, 18 nt, Human
accagccuauucgagucu

SEQ ID NO: 818375 - RNA, 19 nt, Human
accaggacagcccugccaa

SEQ ID NO: 818376 - RNA, 24 nt, Human
accugaggucaggaguucgagacc

SEQ ID NO: 818377 - RNA, 24 nt, Human
accuugucccgcagcugcuccucc

SEQ ID NO: 818378 - RNA, 26 nt, Human
acuggaagacagaggcucaguccuuc

SEQ ID NO: 818379 - RNA, 28 nt, Human
acuuugucucaaaaaaaaaaaaaaaaaa

SEQ ID NO: 818380 - RNA, 22 nt, Human
agacaggccacagugaccucuu

SEQ ID NO: 818381 - RNA, 23 nt, Human
agacccagaggucacccacaacc

SEQ ID NO: 818382 - RNA, 21 nt, Human
agagacuggaagacagaggcu

SEQ ID NO: 818383 - RNA, 23 nt, Human
agagccauggaguuauauaccag

SEQ ID NO: 818384 - RNA, 20 nt, Human
agagggcagggggcagggca

SEQ ID NO: 818385 - RNA, 22 nt, Human
agcauuuugggaggccaaggca

SEQ ID NO: 818386 - RNA, 21 nt, Human
agccacaggcccgugcucagu

SEQ ID NO: 818387 - RNA, 23 nt, Human
agccacaggcccgugcucagucc

SEQ ID NO: 818388 - RNA, 23 nt, Human
agccgggugugguggcacaugcc

SEQ ID NO: 818389 - RNA, 24 nt, Human
agccugaucaauauggcgaaaccc

SEQ ID NO: 818390 - RNA, 18 nt, Human
agcugcagcagguccucc

SEQ ID NO: 818391 - RNA, 18 nt, Human
aggagcgccgcggugggg

SEQ ID NO: 818392 - RNA, 23 nt, Human
aggaguucgagaccagccugauc

SEQ ID NO: 818393 - RNA, 21 nt, Human
aggcaggacaugaugccacau

SEQ ID NO: 818394 - RNA, 22 nt, Human
aggcaggagaaucaauugaacc

SEQ ID NO: 818395 - RNA, 22 nt, Human
aggcaggagaaucaauugaacc

SEQ ID NO: 818396 - RNA, 22 nt, Human
aggcaggagaaucaauugaacc

SEQ ID NO: 818397 - RNA, 24 nt, Human
aggcaggagaaucaauugaaccug

SEQ ID NO: 818398 - RNA, 18 nt, Human
aggcaggcggaucaccug

SEQ ID NO: 818399 - RNA, 26 nt, Human
aggcaggcggaucaccugaggucagg

SEQ ID NO: 818400 - RNA, 18 nt, Human
aggcaggggagagggcag

SEQ ID NO: 818401 - RNA, 22 nt, Human
aggcaggggagagggcaggggg

SEQ ID NO: 818402 - RNA, 23 nt, Human
aggcaggggagagggcagggggc

SEQ ID NO: 818403 - RNA, 19 nt, Human
aggcaugggcacucacacc

SEQ ID NO: 818404 - RNA, 21 nt, Human
aggcaugggcacucacaccug

SEQ ID NO: 818405 - RNA, 23 nt, Human
aggccaggcgcaguggcucaagc

SEQ ID NO: 818406 - RNA, 19 nt, Human
aggcccgccuccuggacag

SEQ ID NO: 818407 - RNA, 24 nt, Human
aggcgcaguggcucaagccuguaa

SEQ ID NO: 818408 - RNA, 20 nt, Human
aggcggagguugcagugagc

SEQ ID NO: 818409 - RNA, 24 nt, Human
aggcggagguugcagugagcugag

SEQ ID NO: 818410 - RNA, 24 nt, Human
aggcugaggcaggagaaucaauug

SEQ ID NO: 818411 - RNA, 20 nt, Human
aggggagagggcagggggca

SEQ ID NO: 818412 - RNA, 24 nt, Human
aggggagagggcagggggcagggc

SEQ ID NO: 818413 - RNA, 19 nt, Human
aguggcucaagccuguaau

SEQ ID NO: 818414 - RNA, 24 nt, Human
auaaccagcacaugacacggugcc

SEQ ID NO: 818415 - RNA, 18 nt, Human
aucagggcgagcguggag

SEQ ID NO: 818416 - RNA, 19 nt, Human
aucaggucugagguugcau

SEQ ID NO: 818417 - RNA, 24 nt, Human
aucaugccauugcacuccagccug

SEQ ID NO: 818418 - RNA, 18 nt, Human
augaaacagaauaucgug

SEQ ID NO: 818419 - RNA, 22 nt, Human
auuauccucacuuuaaaugaaa

SEQ ID NO: 818420 - RNA, 24 nt, Human
auugcacuccagccugggcaacaa

SEQ ID NO: 818421 - RNA, 23 nt, Human
caacaagagcgaaacuuugucuc

SEQ ID NO: 818422 - RNA, 21 nt, Human
caacagaacccugcacccaac

SEQ ID NO: 818423 - RNA, 22 nt, Human
caagaaauacucauuuccuuca

SEQ ID NO: 818424 - RNA, 18 nt, Human
caagacaguucaugaccu

SEQ ID NO: 818425 - RNA, 24 nt, Human
caaggcaggcggaucaccugaggu

SEQ ID NO: 818426 - RNA, 26 nt, Human
caaggcaggcggaucaccugagguca

SEQ ID NO: 818427 - RNA, 21 nt, Human
caagucucaggcucauaaaca

SEQ ID NO: 818428 - RNA, 21 nt, Human
cacaacaaacuuucuacacau

SEQ ID NO: 818429 - RNA, 23 nt, Human
cacaacaaacuuucuacacauug

SEQ ID NO: 818430 - RNA, 23 nt, Human
cacaccaagugucaccaccagcc

SEQ ID NO: 818431 - RNA, 24 nt, Human
cacaccuguaaucucagcauuuug

SEQ ID NO: 818432 - RNA, 27 nt, Human
cacacggucaacacucaagaaauacuc

SEQ ID NO: 818433 - RNA, 21 nt, Human
cacagcaauaucauacacacu

SEQ ID NO: 818434 - RNA, 23 nt, Human
caccugaggucaggaguucgaga

SEQ ID NO: 818435 - RNA, 24 nt, Human
caccuguaaucucagcauuuuggg

SEQ ID NO: 818436 - RNA, 24 nt, Human
cacuccagccugggcaacaagagc

SEQ ID NO: 818437 - RNA, 25 nt, Human
cacuccagccugggcaacaagagcg

SEQ ID NO: 818438 - RNA, 24 nt, Human
cagcauuuugggaggccaaggcag

SEQ ID NO: 818439 - RNA, 25 nt, Human
cagcauuuugggaggccaaggcagg

SEQ ID NO: 818440 - RNA, 24 nt, Human
cagcuacuugggaggcugaggcag

SEQ ID NO: 818441 - RNA, 21 nt, Human
caggacagcugugucugccag

SEQ ID NO: 818442 - RNA, 21 nt, Human
caggcaggacaugaugccaca

SEQ ID NO: 818443 - RNA, 24 nt, Human
caggcggaucaccugaggucagga

SEQ ID NO: 818444 - RNA, 18 nt, Human
cagggggcagggcacaag

SEQ ID NO: 818445 - RNA, 18 nt, Human
caggucuuggcugugcuc

SEQ ID NO: 818446 - RNA, 20 nt, Human
cagucccaggcccgccuccu

SEQ ID NO: 818447 - RNA, 19 nt, Human
cagucguuuugugcugagu

SEQ ID NO: 818448 - RNA, 25 nt, Human
cauaaccagcacaugacacggugcc

SEQ ID NO: 818449 - RNA, 24 nt, Human
caugccuguaaucccagcuacuug

SEQ ID NO: 818450 - RNA, 21 nt, Human
cauggucucaugcuacuagaa

SEQ ID NO: 818451 - RNA, 19 nt, Human
cauugcacuccagccuggg

SEQ ID NO: 818452 - RNA, 21 nt, Human
cauugcacuccagccugggca

SEQ ID NO: 818453 - RNA, 22 nt, Human
cauugcacuccagccugggcaa

SEQ ID NO: 818454 - RNA, 23 nt, Human
cauugcacuccagccugggcaac

SEQ ID NO: 818455 - RNA, 24 nt, Human
cauugcacuccagccugggcaaca

SEQ ID NO: 818456 - RNA, 18 nt, Human
ccacuaccaugacucuag

SEQ ID NO: 818457 - RNA, 20 nt, Human
ccagcacaugacacggugcc

SEQ ID NO: 818458 - RNA, 19 nt, Human
ccagccacaggcccgugcu

SEQ ID NO: 818459 - RNA, 26 nt, Human
ccaggccaggcgcaguggcucaagcc

SEQ ID NO: 818460 - RNA, 25 nt, Human
ccaggcccgccuccugguccccugg

SEQ ID NO: 818461 - RNA, 18 nt, Human
ccagggcugccuuggccc

SEQ ID NO: 818462 - RNA, 19 nt, Human
ccaugccgccucccgcugc

SEQ ID NO: 818463 - RNA, 20 nt, Human
ccauugcacuccagccuggg

SEQ ID NO: 818464 - RNA, 21 nt, Human
ccauugcacuccagccugggc

SEQ ID NO: 818465 - RNA, 23 nt, Human
ccauugcacuccagccugggcaa

SEQ ID NO: 818466 - RNA, 24 nt, Human
ccauugcacuccagccugggcaac

SEQ ID NO: 818467 - RNA, 24 nt, Human
cccauuccauugucaggauuuuac

SEQ ID NO: 818468 - RNA, 18 nt, Human
ccccucccucuccugcca

SEQ ID NO: 818469 - RNA, 21 nt, Human
cccgcagcugcuccuccagcu

SEQ ID NO: 818470 - RNA, 21 nt, Human
cccuauaucccagggcccuga

SEQ ID NO: 818471 - RNA, 19 nt, Human
cccuccagguaggccugca

SEQ ID NO: 818472 - RNA, 22 nt, Human
cccugagacccagaggucaccc

SEQ ID NO: 818473 - RNA, 20 nt, Human
cccugagccucaguuuucuc

SEQ ID NO: 818474 - RNA, 26 nt, Human
ccgccuccuggacagcucgugauguc

SEQ ID NO: 818475 - RNA, 23 nt, Human
ccgcugcacacaagcugggccug

SEQ ID NO: 818476 - RNA, 19 nt, Human
ccuccaugccgccucccgc

SEQ ID NO: 818477 - RNA, 24 nt, Human
ccuccaugccgccucccgcugcuc

SEQ ID NO: 818478 - RNA, 21 nt, Human
ccucccagcugcagcaggucc

SEQ ID NO: 818479 - RNA, 25 nt, Human
ccucccagcugcagcagguccuccu

SEQ ID NO: 818480 - RNA, 24 nt, Human
ccucccgcugcuccagcuccuugc

SEQ ID NO: 818481 - RNA, 22 nt, Human
ccuccuccagccggaugagggc

SEQ ID NO: 818482 - RNA, 24 nt, Human
ccucugcaacuccaggcucugggg

SEQ ID NO: 818483 - RNA, 22 nt, Human
ccugaggucaggaguucgagac

SEQ ID NO: 818484 - RNA, 24 nt, Human
ccugaucaauauggcgaaacccca

SEQ ID NO: 818485 - RNA, 27 nt, Human
ccugcuucuccagggcugccuuggccc

SEQ ID NO: 818486 - RNA, 19 nt, Human
ccugggaggcggagguugc

SEQ ID NO: 818487 - RNA, 21 nt, Human
ccugggucgggggugcccaga

SEQ ID NO: 818488 - RNA, 21 nt, Human
ccuguaaucccagcuacuugg

SEQ ID NO: 818489 - RNA, 22 nt, Human
ccuguaaucccagcuacuuggg

SEQ ID NO: 818490 - RNA, 25 nt, Human
ccuguagccgcagggauuccagggc

SEQ ID NO: 818491 - RNA, 22 nt, Human
ccuuaggcucugcuguagcccc

SEQ ID NO: 818492 - RNA, 20 nt, Human
ccuucuauacaaugguaaau

SEQ ID NO: 818493 - RNA, 22 nt, Human
ccuugucccgcagcugcuccuc

SEQ ID NO: 818494 - RNA, 20 nt, Human
ccuugugcagaccuggaccc

SEQ ID NO: 818495 - RNA, 27 nt, Human
cgauuuuuuuuccucuuuccucuuuuc

SEQ ID NO: 818496 - RNA, 24 nt, Human
cggaucaccugaggucaggaguuc

SEQ ID NO: 818497 - RNA, 23 nt, Human
cggaucucuccagcagcugcugc

SEQ ID NO: 818498 - RNA, 19 nt, Human
cgggccagcuccccuccca

SEQ ID NO: 818499 - RNA, 21 nt, Human
cuaaaaacaaucauucacacu

SEQ ID NO: 818500 - RNA, 21 nt, Human
cuaaccucccacagagacugg

SEQ ID NO: 818501 - RNA, 18 nt, Human
cucaaaaaaaaaaaaaaa

SEQ ID NO: 818502 - RNA, 18 nt, Human
cucaaaaaaaaaaaaaaa

SEQ ID NO: 818503 - RNA, 21 nt, Human
cucacaccuguaaucucagca

SEQ ID NO: 818504 - RNA, 21 nt, Human
cucacaccuguaaucucagca

SEQ ID NO: 818505 - RNA, 19 nt, Human
cucacuuucucucucccca

SEQ ID NO: 818506 - RNA, 22 nt, Human
cucagucccaggcccgccuccu

SEQ ID NO: 818507 - RNA, 22 nt, Human
cuccagcagcugcugcuccagc

SEQ ID NO: 818508 - RNA, 25 nt, Human
cuccagcagcugcugcuccagcucc

SEQ ID NO: 818509 - RNA, 19 nt, Human
cuccagggccaccugcucc

SEQ ID NO: 818510 - RNA, 22 nt, Human
cuccaugccgccucccgcugcu

SEQ ID NO: 818511 - RNA, 22 nt, Human
cuccucugcggcuccuccucca

SEQ ID NO: 818512 - RNA, 19 nt, Human
cuccugccaugucugugcc

SEQ ID NO: 818513 - RNA, 19 nt, Human
cuccuguagccgcagggau

SEQ ID NO: 818514 - RNA, 21 nt, Human
cucgcgccuccaugccgccuc

SEQ ID NO: 818515 - RNA, 21 nt, Human
cucggccgggcgaggagcgcc

SEQ ID NO: 818516 - RNA, 24 nt, Human
cucuguuagauggacaaggccaug

SEQ ID NO: 818517 - RNA, 22 nt, Human
cugcagagccauggaguuauau

SEQ ID NO: 818518 - RNA, 23 nt, Human
cugcagcagggccugcuucuccc

SEQ ID NO: 818519 - RNA, 23 nt, Human
cugcagccgcugcacacaagcug

SEQ ID NO: 818520 - RNA, 18 nt, Human
cugcaggucuuggcugug

SEQ ID NO: 818521 - RNA, 22 nt, Human
cugccagcuggcaauauuagaa

SEQ ID NO: 818522 - RNA, 21 nt, Human
cugcuucuccagggcugccuu

SEQ ID NO: 818523 - RNA, 23 nt, Human
cuggagccaacagaacccugcac

SEQ ID NO: 818524 - RNA, 25 nt, Human
cuggagccaacagaacccugcaccc

SEQ ID NO: 818525 - RNA, 24 nt, Human
cugggccaggcuggcacuccucug

SEQ ID NO: 818526 - RNA, 19 nt, Human
cuggggugggggcucacag

SEQ ID NO: 818527 - RNA, 20 nt, Human
cugggucgggggugcccaga

SEQ ID NO: 818528 - RNA, 21 nt, Human
cugguuuugaugguauggagu

SEQ ID NO: 818529 - RNA, 22 nt, Human
cuguagccccucuccguccucu

SEQ ID NO: 818530 - RNA, 22 nt, Human
cuuggcccggcucucugccagc

SEQ ID NO: 818531 - RNA, 21 nt, Human
gacagcccugccaagucucag

SEQ ID NO: 818532 - RNA, 18 nt, Human
gacgcuucacugccaggc

SEQ ID NO: 818533 - RNA, 23 nt, Human
gagaaucaauugaaccugggagg

SEQ ID NO: 818534 - RNA, 24 nt, Human
gagaggcaggggagagggcagggg

SEQ ID NO: 818535 - RNA, 18 nt, Human
gagguccguguugaccug

SEQ ID NO: 818536 - RNA, 22 nt, Human
gagguugcagugagcugagauc

SEQ ID NO: 818537 - RNA, 24 nt, Human
gaucaccugaggucaggaguucga

SEQ ID NO: 818538 - RNA, 23 nt, Human
gaugccuaugaaaugagaagggu

SEQ ID NO: 818539 - RNA, 22 nt, Human
gccauugcacuccagccugggc

SEQ ID NO: 818540 - RNA, 24 nt, Human
gccauugcacuccagccugggcaa

SEQ ID NO: 818541 - RNA, 19 nt, Human
gccucucuuugcagcugcc

SEQ ID NO: 818542 - RNA, 28 nt, Human
gccucugcaacuccaggcucuggggugg

SEQ ID NO: 818543 - RNA, 20 nt, Human
gccuguaaucccagcuacuu

SEQ ID NO: 818544 - RNA, 23 nt, Human
gcgaaaccccaucuccaccaaaa

SEQ ID NO: 818545 - RNA, 20 nt, Human
gcucaguccuuccugagaac

SEQ ID NO: 818546 - RNA, 29 nt, Human
gcuugcgcugguaggaggccugcuccucc

SEQ ID NO: 818547 - RNA, 23 nt, Human
ggagagagaggcaggggagaggg

SEQ ID NO: 818548 - RNA, 20 nt, Human
ggaggccugcuccuccugua

SEQ ID NO: 818549 - RNA, 18 nt, Human
ggagguugcagugagcug

SEQ ID NO: 818550 - RNA, 22 nt, Human
ggagguugcagugagcugagau

SEQ ID NO: 818551 - RNA, 23 nt, Human
ggagguugcagugagcugagauc

SEQ ID NO: 818552 - RNA, 24 nt, Human
ggagguugcagugagcugagauca

SEQ ID NO: 818553 - RNA, 22 nt, Human
ggaucaccugaggucaggaguu

SEQ ID NO: 818554 - RNA, 23 nt, Human
ggaucaccugaggucaggaguuc

SEQ ID NO: 818555 - RNA, 25 nt, Human
ggaucaccugaggucaggaguucga

SEQ ID NO: 818556 - RNA, 21 nt, Human
ggcacaugccuguaaucccag

SEQ ID NO: 818557 - RNA, 21 nt, Human
ggcagggggcagggcacaagu

SEQ ID NO: 818558 - RNA, 19 nt, Human
ggccugccgcugcuggccc

SEQ ID NO: 818559 - RNA, 18 nt, Human
ggcgauuuuuuuuccucu

SEQ ID NO: 818560 - RNA, 24 nt, Human
gggcacucacaccuguaaucucag

SEQ ID NO: 818561 - RNA, 25 nt, Human
gggcgaggagcgccgcgguggggaa

SEQ ID NO: 818562 - RNA, 20 nt, Human
ggggacggggucugcuggga

SEQ ID NO: 818563 - RNA, 21 nt, Human
ggggaugaaacagaauaucgu

SEQ ID NO: 818564 - RNA, 22 nt, Human
gggugggggcucacagagcugu

SEQ ID NO: 818565 - RNA, 20 nt, Human
gguaaucaauaaauguaagc

SEQ ID NO: 818566 - RNA, 24 nt, Human
gguggcacaugccuguaaucccag

SEQ ID NO: 818567 - RNA, 23 nt, Human
ggugugguggcacaugccuguaa

SEQ ID NO: 818568 - RNA, 21 nt, Human
guucaugaccuugaacagguu

SEQ ID NO: 818569 - RNA, 24 nt, Human
guugcagugagcugagaucaugcc

SEQ ID NO: 818570 - RNA, 24 nt, Human
uaaaagaaagucauggcaaaauga

SEQ ID NO: 818571 - RNA, 21 nt, Human
uaaauuaaaauaaaaccauga

SEQ ID NO: 818572 - RNA, 21 nt, Human
uaaauuacagcauuuauuuaa

SEQ ID NO: 818573 - RNA, 19 nt, Human
uaagggaacggaagccaau

SEQ ID NO: 818574 - RNA, 24 nt, Human
uaauaagaacauuuuugcuagaag

SEQ ID NO: 818575 - RNA, 21 nt, Human
uaccacagaaggacauggugg

SEQ ID NO: 818576 - RNA, 23 nt, Human
uaccacagaaggacaugguggac

SEQ ID NO: 818577 - RNA, 25 nt, Human
uaccaggacagcccugccaagucuc

SEQ ID NO: 818578 - RNA, 18 nt, Human
uaccaugacucuaguaca

SEQ ID NO: 818579 - RNA, 19 nt, Human
uacuauaagggaacggaag

SEQ ID NO: 818580 - RNA, 24 nt, Human
uagaugccuaugaaaugagaaggg

SEQ ID NO: 818581 - RNA, 23 nt, Human
uagcaugcaaguagcuaucccuu

SEQ ID NO: 818582 - RNA, 22 nt, Human
uagccgggugugguggcacaug

SEQ ID NO: 818583 - RNA, 22 nt, Human
uagucaaaucgaugaaaaccaa

SEQ ID NO: 818584 - RNA, 18 nt, Human
uaucagacauuagucaaa

SEQ ID NO: 818585 - RNA, 21 nt, Human
uaucccagggcccugagaccc

SEQ ID NO: 818586 - RNA, 21 nt, Human
uauggcgaaaccccaucucca

SEQ ID NO: 818587 - RNA, 22 nt, Human
ucaaaaaaaaaaaaaaaaaaaa

SEQ ID NO: 818588 - RNA, 24 nt, Human
ucaauugaaccugggaggcggagg

SEQ ID NO: 818589 - RNA, 20 nt, Human
ucaccugaggucaggaguuc

SEQ ID NO: 818590 - RNA, 19 nt, Human
ucaccugggccaggcuggc

SEQ ID NO: 818591 - RNA, 19 nt, Human
ucacuggagccaacagaac

SEQ ID NO: 818592 - RNA, 21 nt, Human
ucagacauuagucaaaucgau

SEQ ID NO: 818593 - RNA, 19 nt, Human
ucagagccugguuggccga

SEQ ID NO: 818594 - RNA, 19 nt, Human
ucaguaucaggucugaggu

SEQ ID NO: 818595 - RNA, 23 nt, Human
ucaugccauugcacuccagccug

SEQ ID NO: 818596 - RNA, 19 nt, Human
uccagggccucaagcuucu

SEQ ID NO: 818597 - RNA, 19 nt, Human
uccagggcugccuuggccc

SEQ ID NO: 818598 - RNA, 18 nt, Human
ucccagcugcagcagguc

SEQ ID NO: 818599 - RNA, 21 nt, Human
ucccagggcccugagacccag

SEQ ID NO: 818600 - RNA, 26 nt, Human
ucccauuguucuuucccuggggcagu

SEQ ID NO: 818601 - RNA, 18 nt, Human
ucccgcugcuccagcucc

SEQ ID NO: 818602 - RNA, 20 nt, Human
ucccuauaucccagggcccu

SEQ ID NO: 818603 - RNA, 19 nt, Human
uccuccuguagcugccucu

SEQ ID NO: 818604 - RNA, 22 nt, Human
uccucgcgccuccaugccgccu

SEQ ID NO: 818605 - RNA, 21 nt, Human
uccucugcggcuccuccucca

SEQ ID NO: 818606 - RNA, 20 nt, Human
ucggcggggugaacggccuc

SEQ ID NO: 818607 - RNA, 19 nt, Human
ucucaaaaaaaaaaaaaaa

SEQ ID NO: 818608 - RNA, 23 nt, Human
ucucagugagguccguguugacc

SEQ ID NO: 818609 - RNA, 24 nt, Human
ucucaucucuaaaaggagacuaga

SEQ ID NO: 818610 - RNA, 21 nt, Human
ucuccagggcugccuuggccc

SEQ ID NO: 818611 - RNA, 18 nt, Human
ucugaugccuguucuccc

SEQ ID NO: 818612 - RNA, 21 nt, Human
ucugcaggucuuggcugugcu

SEQ ID NO: 818613 - RNA, 23 nt, Human
ucuguaauuguuuuccgugguga

SEQ ID NO: 818614 - RNA, 19 nt, Human
ugaaacugccaucaucaag

SEQ ID NO: 818615 - RNA, 24 nt, Human
ugaaccugggaggcggagguugca

SEQ ID NO: 818616 - RNA, 23 nt, Human
ugaagucccuaggagauacacac

SEQ ID NO: 818617 - RNA, 20 nt, Human
ugaccccucccucuccugcc

SEQ ID NO: 818618 - RNA, 19 nt, Human
ugaccugauccuucuccgg

SEQ ID NO: 818619 - RNA, 24 nt, Human
ugagaucaugccauugcacuccag

SEQ ID NO: 818620 - RNA, 19 nt, Human
ugaggcaggagaaucaauu

SEQ ID NO: 818621 - RNA, 20 nt, Human
ugaggcaggagaaucaauug

SEQ ID NO: 818622 - RNA, 24 nt, Human
ugaggcaggagaaucaauugaacc

SEQ ID NO: 818623 - RNA, 25 nt, Human
ugaggcaggagaaucaauugaaccu

SEQ ID NO: 818624 - RNA, 19 nt, Human
ugaggcauaucuauugaga

SEQ ID NO: 818625 - RNA, 23 nt, Human
ugagggcacucugcaggucuugg

SEQ ID NO: 818626 - RNA, 20 nt, Human
ugaguauauucugcaaauuu

SEQ ID NO: 818627 - RNA, 22 nt, Human
ugauguccgggccagcuccccu

SEQ ID NO: 818628 - RNA, 19 nt, Human
ugcacuccagccugggcaa

SEQ ID NO: 818629 - RNA, 22 nt, Human
ugcacuccagccugggcaacaa

SEQ ID NO: 818630 - RNA, 20 nt, Human
ugcauaaccagcacaugaca

SEQ ID NO: 818631 - RNA, 25 nt, Human
ugcaucugagacccagcucugucac

SEQ ID NO: 818632 - RNA, 21 nt, Human
ugccagcacaacaaacuuucu

SEQ ID NO: 818633 - RNA, 24 nt, Human
ugccauugcacuccagccugggca

SEQ ID NO: 818634 - RNA, 19 nt, Human
ugccgugucucuaaaaaca

SEQ ID NO: 818635 - RNA, 21 nt, Human
ugccucucuuugcagcugccg

SEQ ID NO: 818636 - RNA, 23 nt, Human
ugccuguaaucccagcuacuugg

SEQ ID NO: 818637 - RNA, 24 nt, Human
ugccuguaaucccagcuacuuggg

SEQ ID NO: 818638 - RNA, 21 nt, Human
ugcuccagcuccgaguaccuc

SEQ ID NO: 818639 - RNA, 21 nt, Human
uggagcaccuugucccgcagc

SEQ ID NO: 818640 - RNA, 22 nt, Human
uggcaaaaugacaauccacaag

SEQ ID NO: 818641 - RNA, 22 nt, Human
uggcaaugguagauagggguag

SEQ ID NO: 818642 - RNA, 21 nt, Human
uggcacaugccuguaauccca

SEQ ID NO: 818643 - RNA, 20 nt, Human
uggcauaggaugaacugcua

SEQ ID NO: 818644 - RNA, 19 nt, Human
uggcucaagccuguaauuc

SEQ ID NO: 818645 - RNA, 24 nt, Human
ugggaggccaaggcaggcggauca

SEQ ID NO: 818646 - RNA, 29 nt, Human
ugggaggcggagguugcagugacaacggu

SEQ ID NO: 818647 - RNA, 24 nt, Human
ugggaggcggagguugcagugagc

SEQ ID NO: 818648 - RNA, 19 nt, Human
ugggaggcugaggcaggag

SEQ ID NO: 818649 - RNA, 24 nt, Human
ugggaggcugaggcaggagaauca

SEQ ID NO: 818650 - RNA, 18 nt, Human
ugggauaaacaggcagga

SEQ ID NO: 818651 - RNA, 23 nt, Human
uggggugggggcucacagagcug

SEQ ID NO: 818652 - RNA, 18 nt, Human
ugguagauagggguaggg

SEQ ID NO: 818653 - RNA, 18 nt, Human
ugguauggagugaacuuc

SEQ ID NO: 818654 - RNA, 24 nt, Human
ugguggcacaugccuguaauccca

SEQ ID NO: 818655 - RNA, 23 nt, Human
ugucaaaauggaaagugacuuau

SEQ ID NO: 818656 - RNA, 20 nt, Human
uguccgggccagcuccccuc

SEQ ID NO: 818657 - RNA, 21 nt, Human
ugugugcauaaccagcacaug

SEQ ID NO: 818658 - RNA, 23 nt, Human
uuaaaauaaaaccaugagauuga

SEQ ID NO: 818659 - RNA, 18 nt, Human
uuaaaugaaacuccuaca

SEQ ID NO: 818660 - RNA, 18 nt, Human
uuagccgggugugguggc

SEQ ID NO: 818661 - RNA, 20 nt, Human
uuagccgggugugguggcac

SEQ ID NO: 818662 - RNA, 24 nt, Human
uuagccgggugugguggcacaugc

SEQ ID NO: 818663 - RNA, 22 nt, Human
uucaaacuuacauuacugaagu

SEQ ID NO: 818664 - RNA, 22 nt, Human
uuccagggccucaagcuucuca

SEQ ID NO: 818665 - RNA, 23 nt, Human
uucuccggauucugcuucugaag

SEQ ID NO: 818666 - RNA, 20 nt, Human
uugaaccugggaggcggagg

SEQ ID NO: 818667 - RNA, 24 nt, Human
uugaaccugggaggcggagguugc

SEQ ID NO: 818668 - RNA, 20 nt, Human
uugcagugagcugagaucau

SEQ ID NO: 818669 - RNA, 21 nt, Human
uugcagugagcugagaucaug

SEQ ID NO: 818670 - RNA, 25 nt, Human
uugggaggcugaggcaggagaauca

SEQ ID NO: 818671 - RNA, 19 nt, Human
uuuaaaguccuccaacauc

SEQ ID NO: 818672 - RNA, 21 nt, Human
uuuuaaaugucugccucauca

SEQ ID NO: 818673 - RNA, 23 nt, Human
uuuuuuuuccucuuuccucuuuu

SEQ ID NO: 818674 - RNA, 20 nt, Human
aaaaaaacaaaacgugagag

SEQ ID NO: 818675 - RNA, 23 nt, Human
aaaccagccccuccaucuucuca

SEQ ID NO: 818676 - RNA, 22 nt, Human
aacaccagagugcagggagccc

SEQ ID NO: 818677 - RNA, 24 nt, Human
aaccgacgacagccuucagacgca

SEQ ID NO: 818678 - RNA, 22 nt, Human
aagaagccguccucagagccca

SEQ ID NO: 818679 - RNA, 19 nt, Human
aagaagccuguguccggcc

SEQ ID NO: 818680 - RNA, 26 nt, Human
aagaagccuguguccggccuccagac

SEQ ID NO: 818681 - RNA, 19 nt, Human
aagcugaggcaggaggaug

SEQ ID NO: 818682 - RNA, 18 nt, Human
aaggugcccccaccaaga

SEQ ID NO: 818683 - RNA, 24 nt, Human
aagugcccuuggcagagugggggc

SEQ ID NO: 818684 - RNA, 18 nt, Human
acaaacccccccgcaagc

SEQ ID NO: 818685 - RNA, 24 nt, Human
acaaacccccccgcaagccggaag

SEQ ID NO: 818686 - RNA, 24 nt, Human
acagaacaaggcucucucucaaaa

SEQ ID NO: 818687 - RNA, 24 nt, Human
acagagcaagaugccaucucaaaa

SEQ ID NO: 818688 - RNA, 21 nt, Human
acagcacacauggccggggag

SEQ ID NO: 818689 - RNA, 23 nt, Human
accacagggaggacacagagcag

SEQ ID NO: 818690 - RNA, 22 nt, Human
accaccucgccaccgaggccca

SEQ ID NO: 818691 - RNA, 24 nt, Human
accagagugcagggagccccacca

SEQ ID NO: 818692 - RNA, 19 nt, Human
accagcagguggcccagag

SEQ ID NO: 818693 - RNA, 21 nt, Human
acccuuccagcugucugcgug

SEQ ID NO: 818694 - RNA, 21 nt, Human
accucagcggccuccaggcug

SEQ ID NO: 818695 - RNA, 22 nt, Human
accugcugcuggucaggagaga

SEQ ID NO: 818696 - RNA, 18 nt, Human
acugcacuccauccuggg

SEQ ID NO: 818697 - RNA, 24 nt, Human
acugcacuccauccugggcgacag

SEQ ID NO: 818698 - RNA, 18 nt, Human
acugcauuccagccuagg

SEQ ID NO: 818699 - RNA, 24 nt, Human
acugcauuccagccuaggugacag

SEQ ID NO: 818700 - RNA, 23 nt, Human
agaaguacaaacccccccgcaag

SEQ ID NO: 818701 - RNA, 28 nt, Human
agagacccgcaaugcugagcacugcaac

SEQ ID NO: 818702 - RNA, 22 nt, Human
agaguacgccccgcgacgccag

SEQ ID NO: 818703 - RNA, 21 nt, Human
agagugcagggagccccacca

SEQ ID NO: 818704 - RNA, 24 nt, Human
agcacuuugggaggcugagguggg

SEQ ID NO: 818705 - RNA, 23 nt, Human
agcagguggcccagagcugcagg

SEQ ID NO: 818706 - RNA, 21 nt, Human
agccaggagccagggcggcug

SEQ ID NO: 818707 - RNA, 23 nt, Human
agccaggugugguggcacacgcc

SEQ ID NO: 818708 - RNA, 24 nt, Human
agccuaggugacagaacaaggcuc

SEQ ID NO: 818709 - RNA, 21 nt, Human
agccuucagacgcagccaccc

SEQ ID NO: 818710 - RNA, 20 nt, Human
agcugcugcaggguggccag

SEQ ID NO: 818711 - RNA, 22 nt, Human
aggagcaccgaggagaagucca

SEQ ID NO: 818712 - RNA, 19 nt, Human
aggaggggcagggcucagg

SEQ ID NO: 818713 - RNA, 18 nt, Human
aggcaacggcugccuggc

SEQ ID NO: 818714 - RNA, 20 nt, Human
aggcaacggcugccuggccg

SEQ ID NO: 818715 - RNA, 18 nt, Human
aggcaggagaauggugug

SEQ ID NO: 818716 - RNA, 21 nt, Human
aggcaggagaauggugugaac

SEQ ID NO: 818717 - RNA, 22 nt, Human
aggcaggagaauggugugaacc

SEQ ID NO: 818718 - RNA, 24 nt, Human
aggcaggagaauggugugaaccug

SEQ ID NO: 818719 - RNA, 19 nt, Human
aggcaggaggauggcugga

SEQ ID NO: 818720 - RNA, 24 nt, Human
aggcauguuggcaggcgccuguag

SEQ ID NO: 818721 - RNA, 24 nt, Human
aggcggagcuugcagugagcuaag

SEQ ID NO: 818722 - RNA, 19 nt, Human
aggcugagcccgcacggca

SEQ ID NO: 818723 - RNA, 19 nt, Human
aggcugaggcaggagaaug

SEQ ID NO: 818724 - RNA, 24 nt, Human
aggcugaggugggaggacugcuug

SEQ ID NO: 818725 - RNA, 25 nt, Human
agggagggggucaaggcugcagugg

SEQ ID NO: 818726 - RNA, 21 nt, Human
agggccaccccggggugagcc

SEQ ID NO: 818727 - RNA, 22 nt, Human
agggcgcuggggcucgcggggg

SEQ ID NO: 818728 - RNA, 20 nt, Human
agggcggcugacagcagagc

SEQ ID NO: 818729 - RNA, 19 nt, Human
agguggauaaaaagcagcu

SEQ ID NO: 818730 - RNA, 24 nt, Human
aggugugguggcacacgccugugg

SEQ ID NO: 818731 - RNA, 23 nt, Human
aguggcucaugccugugauccca

SEQ ID NO: 818732 - RNA, 24 nt, Human
aguggcucaugccugugaucccag

SEQ ID NO: 818733 - RNA, 28 nt, Human
auaaaaagcagcucguggcugggcacaa

SEQ ID NO: 818734 - RNA, 24 nt, Human
aucgcgccacugcacuccauccug

SEQ ID NO: 818735 - RNA, 22 nt, Human
aucucuacaaaaaguuaaaaaa

SEQ ID NO: 818736 - RNA, 22 nt, Human
auggccggggagacgcugaggc

SEQ ID NO: 818737 - RNA, 23 nt, Human
auugcaccacugcauuccagccu

SEQ ID NO: 818738 - RNA, 24 nt, Human
caaccgcaucaccagcagagagaa

SEQ ID NO: 818739 - RNA, 24 nt, Human
caagaagccguccucagagcccac

SEQ ID NO: 818740 - RNA, 22 nt, Human
cacacacuacccacgucccacc

SEQ ID NO: 818741 - RNA, 21 nt, Human
cacacagccauggcugagucc

SEQ ID NO: 818742 - RNA, 21 nt, Human
cacagcacacauggccgggga

SEQ ID NO: 818743 - RNA, 20 nt, Human
cacagcaucaccugccucca

SEQ ID NO: 818744 - RNA, 23 nt, Human
caccaggaccucagcggccucca

SEQ ID NO: 818745 - RNA, 19 nt, Human
caccgaggagaaguccagg

SEQ ID NO: 818746 - RNA, 22 nt, Human
caccuggccggugccccaggcc

SEQ ID NO: 818747 - RNA, 23 nt, Human
cacuccauccugggcgacagagc

SEQ ID NO: 818748 - RNA, 23 nt, Human
cacugcacuccauccugggcgac

SEQ ID NO: 818749 - RNA, 24 nt, Human
cacugcacuccauccugggcgaca

SEQ ID NO: 818750 - RNA, 19 nt, Human
cacugcauuccagccuagg

SEQ ID NO: 818751 - RNA, 19 nt, Human
cacugcauuccagccuagg

SEQ ID NO: 818752 - RNA, 23 nt, Human
cacugcauuccagccuaggugac

SEQ ID NO: 818753 - RNA, 24 nt, Human
cacugcauuccagccuaggugaca

SEQ ID NO: 818754 - RNA, 25 nt, Human
cacugcauuccagccuaggugacag

SEQ ID NO: 818755 - RNA, 19 nt, Human
cacugcuaaagccacagaa

SEQ ID NO: 818756 - RNA, 19 nt, Human
cacugcuaaagccacagaa

SEQ ID NO: 818757 - RNA, 19 nt, Human
cacugugcaccuggagggu

SEQ ID NO: 818758 - RNA, 18 nt, Human
cagaacgaccaccucgcc

SEQ ID NO: 818759 - RNA, 23 nt, Human
cagagccccggggacugggccuu

SEQ ID NO: 818760 - RNA, 18 nt, Human
cagcacacggaggccauc

SEQ ID NO: 818761 - RNA, 24 nt, Human
cagcacuuugggaggcugaggugg

SEQ ID NO: 818762 - RNA, 21 nt, Human
cagcagagccccggggacugg

SEQ ID NO: 818763 - RNA, 23 nt, Human
cagcagagccccggggacugggc

SEQ ID NO: 818764 - RNA, 24 nt, Human
cagcagcucaucaagggaggccga

SEQ ID NO: 818765 - RNA, 24 nt, Human
cagccgagccccacccggaggugg

SEQ ID NO: 818766 - RNA, 18 nt, Human
cagccgagggcuccgggc

SEQ ID NO: 818767 - RNA, 23 nt, Human
caggccaccaccaucugcaacaa

SEQ ID NO: 818768 - RNA, 18 nt, Human
cagggguggcggucaggc

SEQ ID NO: 818769 - RNA, 23 nt, Human
caggguggccaggucccagaugc

SEQ ID NO: 818770 - RNA, 20 nt, Human
caguaggggccaggacaucc

SEQ ID NO: 818771 - RNA, 24 nt, Human
caugccugugaucccagcacuuug

SEQ ID NO: 818772 - RNA, 19 nt, Human
cauguccgcugccacucgg

SEQ ID NO: 818773 - RNA, 22 nt, Human
cauguuggcaggcgccuguagu

SEQ ID NO: 818774 - RNA, 21 nt, Human
ccacagcaucaccugccucca

SEQ ID NO: 818775 - RNA, 22 nt, Human
ccacagccugcacggguuccga

SEQ ID NO: 818776 - RNA, 21 nt, Human
ccacugcacuccauccugggc

SEQ ID NO: 818777 - RNA, 21 nt, Human
ccacugcacuccauccugggc

SEQ ID NO: 818778 - RNA, 24 nt, Human
ccacugcacuccauccugggcgac

SEQ ID NO: 818779 - RNA, 19 nt, Human
ccacugcauuccagccuag

SEQ ID NO: 818780 - RNA, 20 nt, Human
ccacugcauuccagccuagg

SEQ ID NO: 818781 - RNA, 20 nt, Human
ccacugcauuccagccuagg

SEQ ID NO: 818782 - RNA, 20 nt, Human
ccacugcauuccagccuagg

SEQ ID NO: 818783 - RNA, 21 nt, Human
ccacugcauuccagccuaggu

SEQ ID NO: 818784 - RNA, 24 nt, Human
ccacugcauuccagccuaggugac

SEQ ID NO: 818785 - RNA, 22 nt, Human
ccagcagguggcccagagcugc

SEQ ID NO: 818786 - RNA, 20 nt, Human
ccaggaagcccagguggccc

SEQ ID NO: 818787 - RNA, 25 nt, Human
ccaucucaaaaaaaaaaaaaaaaaa

SEQ ID NO: 818788 - RNA, 18 nt, Human
ccauucgcagagaaguac

SEQ ID NO: 818789 - RNA, 19 nt, Human
cccacaaaggccagcaggc

SEQ ID NO: 818790 - RNA, 26 nt, Human
cccacaaaggccagcaggcggccauc

SEQ ID NO: 818791 - RNA, 22 nt, Human
cccacagcaucaccugccucca

SEQ ID NO: 818792 - RNA, 22 nt, Human
cccacugcuaaagccacagaaa

SEQ ID NO: 818793 - RNA, 20 nt, Human
cccaggccaccaccaucugc

SEQ ID NO: 818794 - RNA, 20 nt, Human
ccccacugcuaaagccacag

SEQ ID NO: 818795 - RNA, 23 nt, Human
ccccagcauccaggcgaggcucu

SEQ ID NO: 818796 - RNA, 19 nt, Human
ccccccgcaagccggaagg

SEQ ID NO: 818797 - RNA, 18 nt, Human
ccccgacaccccagcaaa

SEQ ID NO: 818798 - RNA, 21 nt, Human
ccccggggugagccgcaugcu

SEQ ID NO: 818799 - RNA, 21 nt, Human
cccgacacagcauccagcacc

SEQ ID NO: 818800 - RNA, 22 nt, Human
cccgggccugucuugcaggcug

SEQ ID NO: 818801 - RNA, 21 nt, Human
cccguggcacccugugcagcc

SEQ ID NO: 818802 - RNA, 22 nt, Human
cccguggcacccugugcagcca

SEQ ID NO: 818803 - RNA, 24 nt, Human
cccugugcagccaggagccagggc

SEQ ID NO: 818804 - RNA, 19 nt, Human
ccgaauuccuggugucccu

SEQ ID NO: 818805 - RNA, 18 nt, Human
ccgcaagaagccguccuc

SEQ ID NO: 818806 - RNA, 22 nt, Human
ccgccuaggccuccgcgcgccc

SEQ ID NO: 818807 - RNA, 18 nt, Human
ccgggacagcguguccag

SEQ ID NO: 818808 - RNA, 19 nt, Human
ccguccucagagcccacag

SEQ ID NO: 818809 - RNA, 23 nt, Human
ccguccucagagcccacagcacc

SEQ ID NO: 818810 - RNA, 18 nt, Human
ccugaagcuuugggacuu

SEQ ID NO: 818811 - RNA, 22 nt, Human
ccuguagucccagcuacugggg

SEQ ID NO: 818812 - RNA, 22 nt, Human
ccugugaucccagcacuuuggg

SEQ ID NO: 818813 - RNA, 21 nt, Human
ccugugcagccaggagccagg

SEQ ID NO: 818814 - RNA, 20 nt, Human
ccuguggcccagcuaucugg

SEQ ID NO: 818815 - RNA, 18 nt, Human
ccuguguggcguaguccc

SEQ ID NO: 818816 - RNA, 22 nt, Human
ccuuugccagaacgaccaccuc

SEQ ID NO: 818817 - RNA, 22 nt, Human
cgcacacugcccugcccgcacg

SEQ ID NO: 818818 - RNA, 23 nt, Human
cgcagccgccagagccgcacacu

SEQ ID NO: 818819 - RNA, 22 nt, Human
cgccuguagucccagcuacugg

SEQ ID NO: 818820 - RNA, 23 nt, Human
cgccuguagucccagcuacuggg

SEQ ID NO: 818821 - RNA, 22 nt, Human
cgccuguggcccagcuaucugg

SEQ ID NO: 818822 - RNA, 23 nt, Human
cgccuguggcccagcuaucuggg

SEQ ID NO: 818823 - RNA, 18 nt, Human
cgcuggggcucgcggggg

SEQ ID NO: 818824 - RNA, 20 nt, Human
cggcccgacacagcauccag

SEQ ID NO: 818825 - RNA, 23 nt, Human
cgggaggccuggcacagacgccc

SEQ ID NO: 818826 - RNA, 27 nt, Human
cgggcagcucccggaugaugcggcccg

SEQ ID NO: 818827 - RNA, 19 nt, Human
cgucaaggaggggcagggc

SEQ ID NO: 818828 - RNA, 22 nt, Human
cgucccgggccugcuugaaggc

SEQ ID NO: 818829 - RNA, 18 nt, Human
cguccuccagcgguccug

SEQ ID NO: 818830 - RNA, 28 nt, Human
cguguaggcaaagaagccuguguccggc

SEQ ID NO: 818831 - RNA, 23 nt, Human
cucaaaaaaaaaaaaaaaaaaaa

SEQ ID NO: 818832 - RNA, 24 nt, Human
cucaugccugugaucccagcacuu

SEQ ID NO: 818833 - RNA, 22 nt, Human
cuccacacggcugcaagaugca

SEQ ID NO: 818834 - RNA, 18 nt, Human
cuccagggccaccccggg

SEQ ID NO: 818835 - RNA, 19 nt, Human
cucccucgaggccaccacu

SEQ ID NO: 818836 - RNA, 18 nt, Human
cucucucaaaaaaaaaau

SEQ ID NO: 818837 - RNA, 22 nt, Human
cucuggauaugccacuuggccc

SEQ ID NO: 818838 - RNA, 22 nt, Human
cugcagugagcuaugauugcac

SEQ ID NO: 818839 - RNA, 19 nt, Human
cugcugguggugguuuuug

SEQ ID NO: 818840 - RNA, 18 nt, Human
cuggauaugccacuuggc

SEQ ID NO: 818841 - RNA, 20 nt, Human
cuggcaacggugccacuucc

SEQ ID NO: 818842 - RNA, 19 nt, Human
cuggcacagacgcccagcc

SEQ ID NO: 818843 - RNA, 18 nt, Human
cuuccccgccccagcauc

SEQ ID NO: 818844 - RNA, 21 nt, Human
cuugcagugagcuaagaucgc

SEQ ID NO: 818845 - RNA, 24 nt, Human
cuuggccccguggcacccugugca

SEQ ID NO: 818846 - RNA, 21 nt, Human
gaaguacaaacccccccgcaa

SEQ ID NO: 818847 - RNA, 20 nt, Human
gacccagggucacaugaagc

SEQ ID NO: 818848 - RNA, 22 nt, Human
gacccuuccagcugucugcgug

SEQ ID NO: 818849 - RNA, 20 nt, Human
gacgagguggacaccagcag

SEQ ID NO: 818850 - RNA, 24 nt, Human
gacgccaggcaacggcugccuggc

SEQ ID NO: 818851 - RNA, 24 nt, Human
gacugcuugagcccuggaguuuga

SEQ ID NO: 818852 - RNA, 20 nt, Human
gagagaaggccacagccugc

SEQ ID NO: 818853 - RNA, 21 nt, Human
gagcaggagcugaagagcagg

SEQ ID NO: 818854 - RNA, 18 nt, Human
gagcccgcacggcagggc

SEQ ID NO: 818855 - RNA, 23 nt, Human
gagcuugcagugagcuaagaucg

SEQ ID NO: 818856 - RNA, 19 nt, Human
gaggagaaguccaggggcc

SEQ ID NO: 818857 - RNA, 20 nt, Human
gaggugccauugaugcccaa

SEQ ID NO: 818858 - RNA, 24 nt, Human
gagguggacaccagcagguggccc

SEQ ID NO: 818859 - RNA, 24 nt, Human
gcaacaagcccaggcugagcccgc

SEQ ID NO: 818860 - RNA, 22 nt, Human
gcaagaagccguccucagagcc

SEQ ID NO: 818861 - RNA, 20 nt, Human
gcagcaccccgccacgcagc

SEQ ID NO: 818862 - RNA, 26 nt, Human
gccacgcagccgccagagccgcacac

SEQ ID NO: 818863 - RNA, 20 nt, Human
gccacugcacuccauccugg

SEQ ID NO: 818864 - RNA, 24 nt, Human
gccacugcacuccauccugggcga

SEQ ID NO: 818865 - RNA, 21 nt, Human
gccagagccgcaagaagccgg

SEQ ID NO: 818866 - RNA, 21 nt, Human
gccccgcgacgccaggcaacg

SEQ ID NO: 818867 - RNA, 18 nt, Human
gccccggggacugggccc

SEQ ID NO: 818868 - RNA, 18 nt, Human
gccuggcaacggugccac

SEQ ID NO: 818869 - RNA, 19 nt, Human
gcgggcaugccgcacgacc

SEQ ID NO: 818870 - RNA, 20 nt, Human
gcuaagaucgcgccacugca

SEQ ID NO: 818871 - RNA, 18 nt, Human
gcucuguggguggggugg

SEQ ID NO: 818872 - RNA, 19 nt, Human
gcugacggggcccucgugc

SEQ ID NO: 818873 - RNA, 21 nt, Human
gcugaggcugcugauggcaau

SEQ ID NO: 818874 - RNA, 19 nt, Human
gcugcagugagcuaugauu

SEQ ID NO: 818875 - RNA, 18 nt, Human
ggagcgcacggccccacu

SEQ ID NO: 818876 - RNA, 20 nt, Human
ggagcuugcagugagcuaag

SEQ ID NO: 818877 - RNA, 24 nt, Human
ggagcuugcagugagcuaagaucg

SEQ ID NO: 818878 - RNA, 18 nt, Human
ggaggccaucggggcuga

SEQ ID NO: 818879 - RNA, 19 nt, Human
ggaggcgggcaagugcccu

SEQ ID NO: 818880 - RNA, 22 nt, Human
ggaguuugagaccagccugagc

SEQ ID NO: 818881 - RNA, 21 nt, Human
ggcacaguggcucaugccugu

SEQ ID NO: 818882 - RNA, 19 nt, Human
ggccuccaggcugaaggag

SEQ ID NO: 818883 - RNA, 21 nt, Human
ggcugggcacaguggcucaug

SEQ ID NO: 818884 - RNA, 19 nt, Human
ggcuuggggaccugcugcc

SEQ ID NO: 818885 - RNA, 18 nt, Human
gggcacaguggcucaugc

SEQ ID NO: 818886 - RNA, 25 nt, Human
gggcagcucccggaugaugcggccc

SEQ ID NO: 818887 - RNA, 22 nt, Human
gggcgcuggggcucgcgggggc

SEQ ID NO: 818888 - RNA, 21 nt, Human
gggcggcaugaacaccagagu

SEQ ID NO: 818889 - RNA, 18 nt, Human
ggggaggucagggagggg

SEQ ID NO: 818890 - RNA, 20 nt, Human
gggggccugggcuggccugu

SEQ ID NO: 818891 - RNA, 21 nt, Human
ggggucaggggccuccagggc

SEQ ID NO: 818892 - RNA, 19 nt, Human
gggucccacaaaggccagc

SEQ ID NO: 818893 - RNA, 20 nt, Human
gggugggguggggucagggg

SEQ ID NO: 818894 - RNA, 21 nt, Human
gggugggguggggucaggggc

SEQ ID NO: 818895 - RNA, 21 nt, Human
gguggcuuuucucucaugcgg

SEQ ID NO: 818896 - RNA, 20 nt, Human
ggugguuuuugugcagggca

SEQ ID NO: 818897 - RNA, 18 nt, Human
gguuccgaguggccgaug

SEQ ID NO: 818898 - RNA, 24 nt, Human
guacacccgggacagcguguccag

SEQ ID NO: 818899 - RNA, 22 nt, Human
guggcccagagcugcagggcca

SEQ ID NO: 818900 - RNA, 20 nt, Human
guggcccgaggagguggcag

SEQ ID NO: 818901 - RNA, 20 nt, Human
gugguuuuugugcagggcac

SEQ ID NO: 818902 - RNA, 22 nt, Human
guguccaggaagcccagguggc

SEQ ID NO: 818903 - RNA, 24 nt, Human
guuggcaggcgccuguagucccag

SEQ ID NO: 818904 - RNA, 22 nt, Human
uaaaaaggugcccccaccaaga

SEQ ID NO: 818905 - RNA, 19 nt, Human
uacaaccgcaucaccagca

SEQ ID NO: 818906 - RNA, 26 nt, Human
uacacccgggacagcguguccaggaa

SEQ ID NO: 818907 - RNA, 21 nt, Human
uaccauguccgcugccacucg

SEQ ID NO: 818908 - RNA, 19 nt, Human
uacgccccgcgacgccagg

SEQ ID NO: 818909 - RNA, 25 nt, Human
uacugggccagggagcccugggagc

SEQ ID NO: 818910 - RNA, 19 nt, Human
uaggccuccgcgcgcccag

SEQ ID NO: 818911 - RNA, 20 nt, Human
uaggggccaggacaucccag

SEQ ID NO: 818912 - RNA, 18 nt, Human
ucacugagcgucaaggag

SEQ ID NO: 818913 - RNA, 19 nt, Human
ucacugagcgucaaggagg

SEQ ID NO: 818914 - RNA, 24 nt, Human
ucaggagagaaggccacagccugc

SEQ ID NO: 818915 - RNA, 21 nt, Human
ucaggccggugacagcuccuc

SEQ ID NO: 818916 - RNA, 19 nt, Human
ucagggguggcggucaggc

SEQ ID NO: 818917 - RNA, 20 nt, Human
ucaggguggacaccgggcag

SEQ ID NO: 818918 - RNA, 22 nt, Human
ucaugccugugaucccagcacu

SEQ ID NO: 818919 - RNA, 25 nt, Human
uccaccaggaccucagcggccucca

SEQ ID NO: 818920 - RNA, 26 nt, Human
uccauggcgagggccaacaccggggc

SEQ ID NO: 818921 - RNA, 19 nt, Human
ucccugcugacugccaggg

SEQ ID NO: 818922 - RNA, 22 nt, Human
uccgcacagcuguacugggcca

SEQ ID NO: 818923 - RNA, 23 nt, Human
ucgcgccacugcacuccauccug

SEQ ID NO: 818924 - RNA, 23 nt, Human
ucgugcucugugggugggguggg

SEQ ID NO: 818925 - RNA, 23 nt, Human
ucuacagagacccgcaaugcuga

SEQ ID NO: 818926 - RNA, 18 nt, Human
ucucaaaaaaaaaaaaaa

SEQ ID NO: 818927 - RNA, 23 nt, Human
ucucuacuaaaaauacaaaaaaa

SEQ ID NO: 818928 - RNA, 21 nt, Human
ucugcaacaagcccaggcuga

SEQ ID NO: 818929 - RNA, 21 nt, Human
ucugcaaggcccagccgagcc

SEQ ID NO: 818930 - RNA, 20 nt, Human
ucuugcaggcugggggggcc

SEQ ID NO: 818931 - RNA, 24 nt, Human
ugacagaacaaggcucucucucaa

SEQ ID NO: 818932 - RNA, 24 nt, Human
ugagaccauccuggcuaacaaggu

SEQ ID NO: 818933 - RNA, 21 nt, Human
ugagcaauguaaugaaacccu

SEQ ID NO: 818934 - RNA, 22 nt, Human
ugagcccgcacggcagggccag

SEQ ID NO: 818935 - RNA, 23 nt, Human
ugagcccuggaguuugagaccag

SEQ ID NO: 818936 - RNA, 22 nt, Human
ugagcuaagaucgcgccacugc

SEQ ID NO: 818937 - RNA, 24 nt, Human
ugaggcaggagaauggugugaacc

SEQ ID NO: 818938 - RNA, 25 nt, Human
ugaggcaggagaauggugugaaccu

SEQ ID NO: 818939 - RNA, 18 nt, Human
ugaggcaggaggauggcu

SEQ ID NO: 818940 - RNA, 25 nt, Human
ugaggcaggaggauggcuggagucc

SEQ ID NO: 818941 - RNA, 22 nt, Human
ugaggugggaggacugcuugag

SEQ ID NO: 818942 - RNA, 24 nt, Human
ugaggugggaggacugcuugagcc

SEQ ID NO: 818943 - RNA, 22 nt, Human
ugcaacaagcccaggcugagcc

SEQ ID NO: 818944 - RNA, 19 nt, Human
ugcacacgaagagcauggc

SEQ ID NO: 818945 - RNA, 21 nt, Human
ugcaccacugcauuccagccu

SEQ ID NO: 818946 - RNA, 25 nt, Human
ugcacuccauccugggcgacagagc

SEQ ID NO: 818947 - RNA, 21 nt, Human
ugcagggccaaagcacacagc

SEQ ID NO: 818948 - RNA, 19 nt, Human
ugccagggcgcuggggcuc

SEQ ID NO: 818949 - RNA, 22 nt, Human
ugccagggcgcuggggcucgcg

SEQ ID NO: 818950 - RNA, 23 nt, Human
ugccagggcgcuggggcucgcgg

SEQ ID NO: 818951 - RNA, 19 nt, Human
ugcccugcccgcacgacgc

SEQ ID NO: 818952 - RNA, 23 nt, Human
ugccgcacgaccaugcgcugaca

SEQ ID NO: 818953 - RNA, 21 nt, Human
ugccugacauggcuuggggac

SEQ ID NO: 818954 - RNA, 23 nt, Human
ugccugugaucccagcacuuugg

SEQ ID NO: 818955 - RNA, 23 nt, Human
ugcuaaagccacagaaaaagguu

SEQ ID NO: 818956 - RNA, 21 nt, Human
ugcucuguggguggggugggg

SEQ ID NO: 818957 - RNA, 19 nt, Human
ugcugcaggguggccaggu

SEQ ID NO: 818958 - RNA, 19 nt, Human
uggaggugccauugaugcc

SEQ ID NO: 818959 - RNA, 19 nt, Human
uggauaaaaagcagcucgu

SEQ ID NO: 818960 - RNA, 20 nt, Human
uggcacacgccuguggccca

SEQ ID NO: 818961 - RNA, 20 nt, Human
uggcacagacgcccagccgu

SEQ ID NO: 818962 - RNA, 21 nt, Human
uggcacccugugcagccagga

SEQ ID NO: 818963 - RNA, 23 nt, Human
uggccgaaaagccgagacgugaa

SEQ ID NO: 818964 - RNA, 24 nt, Human
uggcucaugccugugaucccagca

SEQ ID NO: 818965 - RNA, 18 nt, Human
uggcuggaguccagcugg

SEQ ID NO: 818966 - RNA, 24 nt, Human
uggcugggcacaguggcucaugcc

SEQ ID NO: 818967 - RNA, 24 nt, Human
ugggaagcugaggcaggaggaugg

SEQ ID NO: 818968 - RNA, 23 nt, Human
ugggagcaggagcugaagagcag

SEQ ID NO: 818969 - RNA, 21 nt, Human
ugggagcgagccagcaugugg

SEQ ID NO: 818970 - RNA, 29 nt, Human
ugggaggcggagcuugcagugacaacggu

SEQ ID NO: 818971 - RNA, 24 nt, Human
ugggaggcggagcuugcagugagc

SEQ ID NO: 818972 - RNA, 19 nt, Human
ugggaggcugaggugggag

SEQ ID NO: 818973 - RNA, 20 nt, Human
ugggcacaguggcucaugcc

SEQ ID NO: 818974 - RNA, 19 nt, Human
uggggcccccgaauuccug

SEQ ID NO: 818975 - RNA, 19 nt, Human
ugggggccugggcuggccu

SEQ ID NO: 818976 - RNA, 21 nt, Human
ugggggccugggcuggccugu

SEQ ID NO: 818977 - RNA, 18 nt, Human
ugggguggggucaggggc

SEQ ID NO: 818978 - RNA, 20 nt, Human
ugggguggggucaggggccu

SEQ ID NO: 818979 - RNA, 19 nt, Human
ugggugggguggggucagg

SEQ ID NO: 818980 - RNA, 18 nt, Human
ugguacacccgggacagc

SEQ ID NO: 818981 - RNA, 18 nt, Human
ugguggagaugccugaca

SEQ ID NO: 818982 - RNA, 19 nt, Human
uguaaugaaacccuaucuc

SEQ ID NO: 818983 - RNA, 26 nt, Human
uguaggcaaagaagccuguguccggc

SEQ ID NO: 818984 - RNA, 27 nt, Human
ugugcagggcacgggggcggggaacgc

SEQ ID NO: 818985 - RNA, 19 nt, Human
ugugcgccuuugccagaac

SEQ ID NO: 818986 - RNA, 23 nt, Human
ugugguggcacacgccuguggcc

SEQ ID NO: 818987 - RNA, 25 nt, Human
ugugguggcacacgccuguggccca

SEQ ID NO: 818988 - RNA, 24 nt, Human
uguuggcaggcgccuguaguccca

SEQ ID NO: 818989 - RNA, 23 nt, Human
uuaaaaaggugcccccaccaaga

SEQ ID NO: 818990 - RNA, 21 nt, Human
uucacacacuacccacguccc

SEQ ID NO: 818991 - RNA, 24 nt, Human
uucacacacuacccacgucccacc

SEQ ID NO: 818992 - RNA, 22 nt, Human
uucccgcuguaaccgacgacag

SEQ ID NO: 818993 - RNA, 23 nt, Human
uucgcagagaaguacaaaccccc

SEQ ID NO: 818994 - RNA, 19 nt, Human
uugcagugagcuaagaucg

SEQ ID NO: 818995 - RNA, 22 nt, Human
uugcagugagcuaagaucgcgc

SEQ ID NO: 818996 - RNA, 20 nt, Human
aaauuccucacacucaaugc

SEQ ID NO: 818997 - RNA, 22 nt, Human
aagaaaacacucaacacaggac

SEQ ID NO: 818998 - RNA, 26 nt, Human
agaaaacacucaacacaggacaacua

SEQ ID NO: 818999 - RNA, 24 nt, Human
agaaauagugagcacagagcgacc

SEQ ID NO: 819000 - RNA, 26 nt, Human
agacagaaaguuuaaagugaaauagc

SEQ ID NO: 819001 - RNA, 22 nt, Human
agcucagacccuguggaaccca

SEQ ID NO: 819002 - RNA, 22 nt, Human
agguucucuccaguuggggucu

SEQ ID NO: 819003 - RNA, 22 nt, Human
cagacucaguuuaaaaggacuu

SEQ ID NO: 819004 - RNA, 20 nt, Human
cgcgcacaugcacccuuccc

SEQ ID NO: 819005 - RNA, 22 nt, Human
cucaacacaggacaacuacaga

SEQ ID NO: 819006 - RNA, 24 nt, Human
cucaacacaggacaacuacagacu

SEQ ID NO: 819007 - RNA, 19 nt, Human
cucacaagcugccugggga

SEQ ID NO: 819008 - RNA, 22 nt, Human
cucagacccuguggaacccaga

SEQ ID NO: 819009 - RNA, 21 nt, Human
cugaaaagaccagaaauagug

SEQ ID NO: 819010 - RNA, 22 nt, Human
cuuuuuuguucuuggucaggaa

SEQ ID NO: 819011 - RNA, 24 nt, Human
gaaaagaccagaaauagugagcac

SEQ ID NO: 819012 - RNA, 19 nt, Human
gccgcgcacaugcacccuu

SEQ ID NO: 819013 - RNA, 19 nt, Human
ggcccuaaauaaagccugg

SEQ ID NO: 819014 - RNA, 20 nt, Human
gggcggagagggagaggggc

SEQ ID NO: 819015 - RNA, 22 nt, Human
uaagaaaacacucaacacagga

SEQ ID NO: 819016 - RNA, 21 nt, Human
uacgacaaauaugaggaaaaa

SEQ ID NO: 819017 - RNA, 18 nt, Human
uacuugagcuccuuuuuu

SEQ ID NO: 819018 - RNA, 23 nt, Human
uacuuuggcccuaaauaaagccu

SEQ ID NO: 819019 - RNA, 19 nt, Human
uagaauuauaaaaacugua

SEQ ID NO: 819020 - RNA, 19 nt, Human
uaugacggauacuuuggcc

SEQ ID NO: 819021 - RNA, 18 nt, Human
ucagacccuguggaaccc

SEQ ID NO: 819022 - RNA, 18 nt, Human
ugauauaagaaaacacuc

SEQ ID NO: 819023 - RNA, 24 nt, Human
ugggcgagggcggagagggagagg

SEQ ID NO: 819024 - RNA, 18 nt, Human
ugggucgagggaaacacu

SEQ ID NO: 819025 - RNA, 18 nt, Human
uggguguaugagccuagg

SEQ ID NO: 819026 - RNA, 19 nt, Human
uguucuuggucaggaaagu

SEQ ID NO: 819027 - RNA, 24 nt, Human
uuaaaaggacuuguuuacgugaca

SEQ ID NO: 819028 - RNA, 19 nt, Human
uuagaaucaacagauuuaa

SEQ ID NO: 819029 - RNA, 22 nt, Human
uugaaagugaagccauccucuu

SEQ ID NO: 819030 - RNA, 24 nt, Human
aacacggccacgacaccgcugugc

SEQ ID NO: 819031 - RNA, 22 nt, Human
aagcugaggcuucugccuggga

SEQ ID NO: 819032 - RNA, 22 nt, Human
acagcaaagggucgcuucugga

SEQ ID NO: 819033 - RNA, 22 nt, Human
acccacagcaagccaggcgcaa

SEQ ID NO: 819034 - RNA, 23 nt, Human
accgcgcccaguguggccucaac

SEQ ID NO: 819035 - RNA, 22 nt, Human
acuccggguucucgugcaucgg

SEQ ID NO: 819036 - RNA, 21 nt, Human
agcugucccaggcugagggcc

SEQ ID NO: 819037 - RNA, 23 nt, Human
auaggccuggcccguggcgggcc

SEQ ID NO: 819038 - RNA, 20 nt, Human
aucccuggccuccacucacu

SEQ ID NO: 819039 - RNA, 22 nt, Human
aucuggaccuugggguauaagg

SEQ ID NO: 819040 - RNA, 18 nt, Human
auggagggccaccuggcc

SEQ ID NO: 819041 - RNA, 18 nt, Human
caaaaccacugugcuggc

SEQ ID NO: 819042 - RNA, 18 nt, Human
caaaaccacugugcuggc

SEQ ID NO: 819043 - RNA, 23 nt, Human
caaaccuccaggcugacaguccc

SEQ ID NO: 819044 - RNA, 26 nt, Human
caacaaccacccaggcgaucagcaac

SEQ ID NO: 819045 - RNA, 24 nt, Human
caacacggccacgacaccgcugug

SEQ ID NO: 819046 - RNA, 19 nt, Human
caaucaccagacagaacca

SEQ ID NO: 819047 - RNA, 18 nt, Human
caaucugugcuacguuga

SEQ ID NO: 819048 - RNA, 25 nt, Human
cacaaccucacauggagggccaccu

SEQ ID NO: 819049 - RNA, 21 nt, Human
cacccaggcgaucagcaacac

SEQ ID NO: 819050 - RNA, 19 nt, Human
caccucaaucaccagacag

SEQ ID NO: 819051 - RNA, 22 nt, Human
caccuggccaggcacucaaggc

SEQ ID NO: 819052 - RNA, 25 nt, Human
caccuuggcaagacugagcucugag

SEQ ID NO: 819053 - RNA, 21 nt, Human
cagggacacgccaacaaccac

SEQ ID NO: 819054 - RNA, 19 nt, Human
cagggcagcaucccuggcc

SEQ ID NO: 819055 - RNA, 18 nt, Human
caggggcauggccugacc

SEQ ID NO: 819056 - RNA, 21 nt, Human
cauaguuguacugcugguacc

SEQ ID NO: 819057 - RNA, 22 nt, Human
cauccaugccggggacuggggg

SEQ ID NO: 819058 - RNA, 23 nt, Human
caucgggcuucccagacagguuc

SEQ ID NO: 819059 - RNA, 28 nt, Human
caugcgucuaaacaugagucaagcaacu

SEQ ID NO: 819060 - RNA, 24 nt, Human
caugcucucauccaugccggggac

SEQ ID NO: 819061 - RNA, 25 nt, Human
ccaaaaccucucuugacauugccca

SEQ ID NO: 819062 - RNA, 23 nt, Human
ccacagcaagccaggcgcaaugu

SEQ ID NO: 819063 - RNA, 24 nt, Human
ccaggcacucaaggcccccaugcu

SEQ ID NO: 819064 - RNA, 18 nt, Human
ccccaugcugugaccaca

SEQ ID NO: 819065 - RNA, 23 nt, Human
ccccaugcugugaccacaaccuc

SEQ ID NO: 819066 - RNA, 23 nt, Human
ccccaugcugugaccaugaccuc

SEQ ID NO: 819067 - RNA, 18 nt, Human
ccccgccuggcugugcug

SEQ ID NO: 819068 - RNA, 19 nt, Human
ccccgccuggcugugcugu

SEQ ID NO: 819069 - RNA, 27 nt, Human
ccgcgcccaguguggccucaacaacau

SEQ ID NO: 819070 - RNA, 22 nt, Human
ccucaacacaggugucucccua

SEQ ID NO: 819071 - RNA, 18 nt, Human
ccuccaggcugacagucc

SEQ ID NO: 819072 - RNA, 23 nt, Human
ccucuggcaccgcgcccagugug

SEQ ID NO: 819073 - RNA, 23 nt, Human
ccucuggcaccgcgcccagugug

SEQ ID NO: 819074 - RNA, 19 nt, Human
cgaaggacacugcaggggc

SEQ ID NO: 819075 - RNA, 23 nt, Human
cgccaacaaccacccaggcgauc

SEQ ID NO: 819076 - RNA, 21 nt, Human
cuccaggcugacagucccucc

SEQ ID NO: 819077 - RNA, 23 nt, Human
cuccaugcugugaccaugaccuc

SEQ ID NO: 819078 - RNA, 23 nt, Human
cuccaugcugugaccaugaccuc

SEQ ID NO: 819079 - RNA, 23 nt, Human
cuccaugcugugacuaugaccuc

SEQ ID NO: 819080 - RNA, 21 nt, Human
cugagcucugaggcccaaugg

SEQ ID NO: 819081 - RNA, 25 nt, Human
cugcagggacacgccaacaaccacc

SEQ ID NO: 819082 - RNA, 24 nt, Human
cugcugcugcugcaaagcugaggc

SEQ ID NO: 819083 - RNA, 28 nt, Human
cuggcccguggcgggccccgccuggcug

SEQ ID NO: 819084 - RNA, 26 nt, Human
cugggacacguacugugcacuggcca

SEQ ID NO: 819085 - RNA, 21 nt, Human
cuucuugggcuuggcagguuc

SEQ ID NO: 819086 - RNA, 21 nt, Human
cuugagaccuccagucccagg

SEQ ID NO: 819087 - RNA, 19 nt, Human
gacgggccuucucccacuc

SEQ ID NO: 819088 - RNA, 21 nt, Human
gcaagccaggcgcaaugucua

SEQ ID NO: 819089 - RNA, 18 nt, Human
gccaacaaccacccaggc

SEQ ID NO: 819090 - RNA, 19 nt, Human
gccaggcacucaaggcccc

SEQ ID NO: 819091 - RNA, 21 nt, Human
gcuggccagggccugacgggc

SEQ ID NO: 819092 - RNA, 22 nt, Human
ggacugggggcaugggauagua

SEQ ID NO: 819093 - RNA, 22 nt, Human
ggcagggcagcaucccuggccu

SEQ ID NO: 819094 - RNA, 22 nt, Human
ggccaccuggccaggcacucaa

SEQ ID NO: 819095 - RNA, 18 nt, Human
ggcugugcuguguggcug

SEQ ID NO: 819096 - RNA, 24 nt, Human
gggcagaggacccgcugugguucu

SEQ ID NO: 819097 - RNA, 18 nt, Human
gggccucuggcaccgcgc

SEQ ID NO: 819098 - RNA, 22 nt, Human
gggccucuggcaccgcgcccag

SEQ ID NO: 819099 - RNA, 19 nt, Human
ggggacugggggcauggga

SEQ ID NO: 819100 - RNA, 22 nt, Human
ggguucucgugcaucggcgucu

SEQ ID NO: 819101 - RNA, 19 nt, Human
gugaacgaaggacacugca

SEQ ID NO: 819102 - RNA, 18 nt, Human
guggagggccaccuggcc

SEQ ID NO: 819103 - RNA, 18 nt, Human
guggagggccaccuggcc

SEQ ID NO: 819104 - RNA, 18 nt, Human
guggagggccaccuggcc

SEQ ID NO: 819105 - RNA, 20 nt, Human
uagaugccaagagcaucccc

SEQ ID NO: 819106 - RNA, 19 nt, Human
ucaaggccuccaugcugug

SEQ ID NO: 819107 - RNA, 19 nt, Human
ucaaggccuccaugcugug

SEQ ID NO: 819108 - RNA, 19 nt, Human
ucaaggccuccaugcugug

SEQ ID NO: 819109 - RNA, 23 nt, Human
ucaaucaccagacagaaccaugc

SEQ ID NO: 819110 - RNA, 23 nt, Human
ucacguggagggccaccuggcca

SEQ ID NO: 819111 - RNA, 23 nt, Human
ucacguggagggccaccuggcca

SEQ ID NO: 819112 - RNA, 23 nt, Human
ucacguggagggccaccuggcca

SEQ ID NO: 819113 - RNA, 21 nt, Human
ucgaccagaauuucuccaccu

SEQ ID NO: 819114 - RNA, 21 nt, Human
ucucaaggcccccaugcugug

SEQ ID NO: 819115 - RNA, 18 nt, Human
ucugcguuggagccaaag

SEQ ID NO: 819116 - RNA, 23 nt, Human
ugaccucacguggacagccaccu

SEQ ID NO: 819117 - RNA, 19 nt, Human
ugacuugcugaugcuggcc

SEQ ID NO: 819118 - RNA, 23 nt, Human
ugagaccuccagucccaggggcg

SEQ ID NO: 819119 - RNA, 22 nt, Human
ugagggggcugagccgacggca

SEQ ID NO: 819120 - RNA, 18 nt, Human
ugaugcuggccagggccu

SEQ ID NO: 819121 - RNA, 23 nt, Human
ugccauucucucggccugcccca

SEQ ID NO: 819122 - RNA, 18 nt, Human
ugcugagggggagccugg

SEQ ID NO: 819123 - RNA, 23 nt, Human
ugcugcugcugcaaagcugaggc

SEQ ID NO: 819124 - RNA, 19 nt, Human
ugcuguguggcuggagcug

SEQ ID NO: 819125 - RNA, 22 nt, Human
uggcagggcagcaucccuggcc

SEQ ID NO: 819126 - RNA, 21 nt, Human
uggccagggccugacgggccu

SEQ ID NO: 819127 - RNA, 18 nt, Human
uggcgggccccgccuggc

SEQ ID NO: 819128 - RNA, 20 nt, Human
uggcugugcuguguggcugg

SEQ ID NO: 819129 - RNA, 20 nt, Human
ugggacacguacugugcacu

SEQ ID NO: 819130 - RNA, 23 nt, Human
ugucccaggcugagggccacugu

SEQ ID NO: 819131 - RNA, 20 nt, Human
ugugguucugaacuuucuca

SEQ ID NO: 819132 - RNA, 19 nt, Human
uucgaccagaauuucucca

SEQ ID NO: 819133 - RNA, 22 nt, Human
uugaucacccacguuggccgcc

SEQ ID NO: 819134 - RNA, 18 nt, Human
uugcugcuggacuuggca

SEQ ID NO: 819135 - RNA, 26 nt, Human
aaguaaccuuuagaaagucuuuuuag

SEQ ID NO: 819136 - RNA, 18 nt, Human
aguccuuucccaccaagu

SEQ ID NO: 819137 - RNA, 25 nt, Human
cugcagcuccuguguaaucuuucuc

SEQ ID NO: 819138 - RNA, 25 nt, Human
cuguguaaucuuucuccugaaauuu

SEQ ID NO: 819139 - RNA, 24 nt, Human
gcgacagaaccuccucagcuuucu

SEQ ID NO: 819140 - RNA, 22 nt, Human
uagaaaagaggagcguccgagu

SEQ ID NO: 819141 - RNA, 19 nt, Human
uagaguacagcacugcagc

SEQ ID NO: 819142 - RNA, 18 nt, Human
ucucuguagaaaagagga

SEQ ID NO: 819143 - RNA, 20 nt, Human
aaaaaagccuucugcgcucu

SEQ ID NO: 819144 - RNA, 21 nt, Human
aaaggacaucucaggacucug

SEQ ID NO: 819145 - RNA, 18 nt, Human
aacugcaaagcagacagg

SEQ ID NO: 819146 - RNA, 22 nt, Human
aagcacccucaccauccaaaag

SEQ ID NO: 819147 - RNA, 22 nt, Human
aagcagacaggaaagccccucu

SEQ ID NO: 819148 - RNA, 20 nt, Human
aaggacaucucaggacucug

SEQ ID NO: 819149 - RNA, 21 nt, Human
aaggggauaugugaugguggg

SEQ ID NO: 819150 - RNA, 26 nt, Human
aauguacacacacacgagaaugcaca

SEQ ID NO: 819151 - RNA, 22 nt, Human
acaagcacccucaccauccaaa

SEQ ID NO: 819152 - RNA, 19 nt, Human
acaaggaggggacucacgg

SEQ ID NO: 819153 - RNA, 21 nt, Human
acacacaaacacacacacaua

SEQ ID NO: 819154 - RNA, 20 nt, Human
acacacacacauagugucac

SEQ ID NO: 819155 - RNA, 25 nt, Human
acacacacacauagugucacacaca

SEQ ID NO: 819156 - RNA, 30 nt, Human
acacacacacaugagaauguacacacacaa

SEQ ID NO: 819157 - RNA, 23 nt, Human
acacacacauaaaagcugacaau

SEQ ID NO: 819158 - RNA, 20 nt, Human
acacagccaaacccucaugc

SEQ ID NO: 819159 - RNA, 24 nt, Human
acacagccaaacccucaugcacau

SEQ ID NO: 819160 - RNA, 18 nt, Human
acacaugugcacacacac

SEQ ID NO: 819161 - RNA, 24 nt, Human
agagagcacaaaagacaucaugag

SEQ ID NO: 819162 - RNA, 27 nt, Human
agccuguggucugcaagguuuguggga

SEQ ID NO: 819163 - RNA, 25 nt, Human
agcgaacucuccuguggguacauca

SEQ ID NO: 819164 - RNA, 20 nt, Human
aggacucugcugcugcccag

SEQ ID NO: 819165 - RNA, 25 nt, Human
aggcaagagugaaggaaaggggacc

SEQ ID NO: 819166 - RNA, 24 nt, Human
aggcaguguccgccggcuggugcc

SEQ ID NO: 819167 - RNA, 28 nt, Human
agggagccuguggucugcaagguuugug

SEQ ID NO: 819168 - RNA, 19 nt, Human
aggucugaauuuucaugcc

SEQ ID NO: 819169 - RNA, 27 nt, Human
auguacacacacacgagaaugcacaca

SEQ ID NO: 819170 - RNA, 19 nt, Human
caaaaaagccuucugcgcc

SEQ ID NO: 819171 - RNA, 22 nt, Human
caacccugcagacagcaggaga

SEQ ID NO: 819172 - RNA, 26 nt, Human
cacaaacacacacacauagugucaca

SEQ ID NO: 819173 - RNA, 22 nt, Human
cacacaaacacacacacauagu

SEQ ID NO: 819174 - RNA, 28 nt, Human
cacacaaacacacacacauagugucaca

SEQ ID NO: 819175 - RNA, 21 nt, Human
cacacacaaacacacacacau

SEQ ID NO: 819176 - RNA, 22 nt, Human
cacacacaaacacacacacaua

SEQ ID NO: 819177 - RNA, 24 nt, Human
cacacacacacacaugagaaugua

SEQ ID NO: 819178 - RNA, 25 nt, Human
cacacacacgagaaugcacacacac

SEQ ID NO: 819179 - RNA, 19 nt, Human
cacacacauaaaagcugac

SEQ ID NO: 819180 - RNA, 23 nt, Human
cacacauaaaagcugacaguuac

SEQ ID NO: 819181 - RNA, 23 nt, Human
cacauagugucacacacagccaa

SEQ ID NO: 819182 - RNA, 24 nt, Human
caccauccaaaagcacuuggcucc

SEQ ID NO: 819183 - RNA, 20 nt, Human
caccaucugucugcgaggca

SEQ ID NO: 819184 - RNA, 22 nt, Human
caccugcaugggucacgggcag

SEQ ID NO: 819185 - RNA, 24 nt, Human
cacggccaacccugcagacagcag

SEQ ID NO: 819186 - RNA, 20 nt, Human
cagcagagagcacaaaagaa

SEQ ID NO: 819187 - RNA, 19 nt, Human
caucaugaguuucccugag

SEQ ID NO: 819188 - RNA, 21 nt, Human
ccaaaagcacuuggcuccuga

SEQ ID NO: 819189 - RNA, 18 nt, Human
ccagcucgggaggcgucg

SEQ ID NO: 819190 - RNA, 19 nt, Human
ccaguguguagacccuacc

SEQ ID NO: 819191 - RNA, 19 nt, Human
ccauccaaaagcacuuggc

SEQ ID NO: 819192 - RNA, 19 nt, Human
cccacgcuccgaccuccgc

SEQ ID NO: 819193 - RNA, 23 nt, Human
cccagcuguccuuaccagccgcu

SEQ ID NO: 819194 - RNA, 18 nt, Human
cccuaccgggucugaggc

SEQ ID NO: 819195 - RNA, 21 nt, Human
ccgccgagagcccugccagcu

SEQ ID NO: 819196 - RNA, 20 nt, Human
ccuaaccccagccuugggau

SEQ ID NO: 819197 - RNA, 24 nt, Human
ccuaaccccagccuugggaucugc

SEQ ID NO: 819198 - RNA, 24 nt, Human
ccucugcccgaggcagccccacga

SEQ ID NO: 819199 - RNA, 21 nt, Human
ccugacuugccuaaccccagc

SEQ ID NO: 819200 - RNA, 19 nt, Human
ccugagguaugacgacagc

SEQ ID NO: 819201 - RNA, 18 nt, Human
ccugggggacacugccuc

SEQ ID NO: 819202 - RNA, 22 nt, Human
cggcuggugccaggcccugggc

SEQ ID NO: 819203 - RNA, 22 nt, Human
cgggaaggagcgaacucuccug

SEQ ID NO: 819204 - RNA, 24 nt, Human
cuaucacggcugcaaagcucaggu

SEQ ID NO: 819205 - RNA, 27 nt, Human
cucaugcacaugguacacaugugcaca

SEQ ID NO: 819206 - RNA, 22 nt, Human
cuccgccgagagcccugccagc

SEQ ID NO: 819207 - RNA, 20 nt, Human
cucugcccgaggcagcccca

SEQ ID NO: 819208 - RNA, 18 nt, Human
cugccagcucgggaggcg

SEQ ID NO: 819209 - RNA, 20 nt, Human
cugcgaggcaggggcuggaa

SEQ ID NO: 819210 - RNA, 18 nt, Human
gaaagccccucugccagc

SEQ ID NO: 819211 - RNA, 22 nt, Human
gaaggccaggccucugcaagga

SEQ ID NO: 819212 - RNA, 24 nt, Human
gaauguacacacacacgagaaugc

SEQ ID NO: 819213 - RNA, 24 nt, Human
gacagcgagaguggacagcagaua

SEQ ID NO: 819214 - RNA, 31 nt, Human
gcacacacacacacacaugagaauguacaca

SEQ ID NO: 819215 - RNA, 23 nt, Human
gcagccccacgacaugugcagau

SEQ ID NO: 819216 - RNA, 20 nt, Human
gcaggcaacacacacaaaca

SEQ ID NO: 819217 - RNA, 19 nt, Human
gcccgaggcagccccacga

SEQ ID NO: 819218 - RNA, 18 nt, Human
gcccuggccauggugcug

SEQ ID NO: 819219 - RNA, 18 nt, Human
gccuaaccccagccuugg

SEQ ID NO: 819220 - RNA, 21 nt, Human
gcucucucugagcucaggcag

SEQ ID NO: 819221 - RNA, 21 nt, Human
gcugccuucauuuuugggggc

SEQ ID NO: 819222 - RNA, 22 nt, Human
ggacaagcacccucaccaucca

SEQ ID NO: 819223 - RNA, 20 nt, Human
ggagcucaccugguuggugg

SEQ ID NO: 819224 - RNA, 21 nt, Human
ggccagcuccggggcgaagcc

SEQ ID NO: 819225 - RNA, 21 nt, Human
ggcccuggccauggugcuggg

SEQ ID NO: 819226 - RNA, 25 nt, Human
gggucugaggcaggacucacccagg

SEQ ID NO: 819227 - RNA, 31 nt, Human
gguacacaugugcacacacacacacacaugg

SEQ ID NO: 819228 - RNA, 19 nt, Human
gucugggaaaggccuggga

SEQ ID NO: 819229 - RNA, 20 nt, Human
gugacuugcuuuggggaaac

SEQ ID NO: 819230 - RNA, 27 nt, Human
gugcacacacacacacacaugagaaug

SEQ ID NO: 819231 - RNA, 21 nt, Human
uaacucucugaggcgcaguuu

SEQ ID NO: 819232 - RNA, 21 nt, Human
uacaaggaggggacucacggc

SEQ ID NO: 819233 - RNA, 18 nt, Human
uaggacaaaaaagccuuc

SEQ ID NO: 819234 - RNA, 26 nt, Human
uccaguguguagacccuucccaaggg

SEQ ID NO: 819235 - RNA, 18 nt, Human
ucccugacuugccuaacc

SEQ ID NO: 819236 - RNA, 19 nt, Human
uccgccgagagcccugcca

SEQ ID NO: 819237 - RNA, 20 nt, Human
ucgggaggcgucgggccagc

SEQ ID NO: 819238 - RNA, 25 nt, Human
ucuccuguggguacaucaaaggacu

SEQ ID NO: 819239 - RNA, 24 nt, Human
ucugaggcaggacucacccaggag

SEQ ID NO: 819240 - RNA, 22 nt, Human
ucugggaaaggccugggaccag

SEQ ID NO: 819241 - RNA, 20 nt, Human
ucugugguuuggugucucug

SEQ ID NO: 819242 - RNA, 21 nt, Human
ugaagaaacagugacuguggu

SEQ ID NO: 819243 - RNA, 21 nt, Human
ugaaggaaagggagagucugg

SEQ ID NO: 819244 - RNA, 19 nt, Human
ugacugugguucuuucccu

SEQ ID NO: 819245 - RNA, 21 nt, Human
ugacuugcuuuggggaaacuu

SEQ ID NO: 819246 - RNA, 19 nt, Human
ugaugaauaugucaacugc

SEQ ID NO: 819247 - RNA, 18 nt, Human
ugauggugggggggccug

SEQ ID NO: 819248 - RNA, 19 nt, Human
ugauggugggggggccugg

SEQ ID NO: 819249 - RNA, 21 nt, Human
ugauggugggggggccugguu

SEQ ID NO: 819250 - RNA, 21 nt, Human
ugcaaggagcucaccugguug

SEQ ID NO: 819251 - RNA, 20 nt, Human
ugcacacacacauaaaagcu

SEQ ID NO: 819252 - RNA, 20 nt, Human
ugcauggugguugucgaugu

SEQ ID NO: 819253 - RNA, 21 nt, Human
ugccguugcgggaauugaagu

SEQ ID NO: 819254 - RNA, 24 nt, Human
ugccuaaccccagccuugggaucu

SEQ ID NO: 819255 - RNA, 21 nt, Human
ugccuuguggacugcaggagu

SEQ ID NO: 819256 - RNA, 19 nt, Human
uggaaggggauaugugaug

SEQ ID NO: 819257 - RNA, 25 nt, Human
uggcauggcacagcguaaaaggaaa

SEQ ID NO: 819258 - RNA, 18 nt, Human
uggugagugcuggaaagg

SEQ ID NO: 819259 - RNA, 22 nt, Human
uguacacacacacgagaaugca

SEQ ID NO: 819260 - RNA, 22 nt, Human
ugugauggugggggggccuggu

SEQ ID NO: 819261 - RNA, 26 nt, Human
ugugcacacacacacacacaugagaa

SEQ ID NO: 819262 - RNA, 18 nt, Human
ugugggaggccggcagga

SEQ ID NO: 819263 - RNA, 18 nt, Human
ugugggaugaaggccagg

SEQ ID NO: 819264 - RNA, 19 nt, Human
uguggucugcaagguuugu

SEQ ID NO: 819265 - RNA, 18 nt, Human
ugugugcacuugggcgcc

SEQ ID NO: 819266 - RNA, 21 nt, Human
uucccugacuugccuaacccc

SEQ ID NO: 819267 - RNA, 21 nt, Human
aacacacugggggaggggggg

SEQ ID NO: 819268 - RNA, 23 nt, Human
aacacagguccccccacccuggg

SEQ ID NO: 819269 - RNA, 25 nt, Human
aagaagagagaaggaagguugggga

SEQ ID NO: 819270 - RNA, 22 nt, Human
aagcugccucuccugagcgucc

SEQ ID NO: 819271 - RNA, 20 nt, Human
aaggaaggggcagaggggac

SEQ ID NO: 819272 - RNA, 19 nt, Human
aaggcugggaguggggugg

SEQ ID NO: 819273 - RNA, 23 nt, Human
aagggggcaaggcuggguagggg

SEQ ID NO: 819274 - RNA, 27 nt, Human
acaaaccccagauaauuacaacagcca

SEQ ID NO: 819275 - RNA, 21 nt, Human
acacuccagaaaaaaaggaaa

SEQ ID NO: 819276 - RNA, 23 nt, Human
acagccgggcaaccuccuuugcc

SEQ ID NO: 819277 - RNA, 19 nt, Human
accagccgagagcagauca

SEQ ID NO: 819278 - RNA, 18 nt, Human
acccgggguccccucccc

SEQ ID NO: 819279 - RNA, 22 nt, Human
acccgggguccccuccccauaa

SEQ ID NO: 819280 - RNA, 23 nt, Human
acccgggguccccuccccauaac

SEQ ID NO: 819281 - RNA, 23 nt, Human
acccugaccccucacccuaaccu

SEQ ID NO: 819282 - RNA, 26 nt, Human
agaaaaaaaggaaauggggcugggag

SEQ ID NO: 819283 - RNA, 25 nt, Human
agaagagagaaggaagguuggggag

SEQ ID NO: 819284 - RNA, 23 nt, Human
agacaacucccauuccccccuug

SEQ ID NO: 819285 - RNA, 19 nt, Human
agagaaggaagguugggga

SEQ ID NO: 819286 - RNA, 23 nt, Human
agagagaaggaaggggcagaggg

SEQ ID NO: 819287 - RNA, 20 nt, Human
agagagaaggaagguugggg

SEQ ID NO: 819288 - RNA, 19 nt, Human
agagcaacucccuacccuu

SEQ ID NO: 819289 - RNA, 19 nt, Human
agaggggcggggggggagg

SEQ ID NO: 819290 - RNA, 23 nt, Human
agaggggcggggggggagggggc

SEQ ID NO: 819291 - RNA, 23 nt, Human
agagggggugccaaggaggggcu

SEQ ID NO: 819292 - RNA, 20 nt, Human
agaucagguguggggagaag

SEQ ID NO: 819293 - RNA, 19 nt, Human
agccgcacagccgggcaac

SEQ ID NO: 819294 - RNA, 22 nt, Human
agccgcacagccgggcaaccuc

SEQ ID NO: 819295 - RNA, 23 nt, Human
agccgggcaaccuccuuugcccu

SEQ ID NO: 819296 - RNA, 18 nt, Human
agccgggguggggguggu

SEQ ID NO: 819297 - RNA, 19 nt, Human
agcucuguacagaaggguu

SEQ ID NO: 819298 - RNA, 22 nt, Human
agcuggcgggagggagggaggu

SEQ ID NO: 819299 - RNA, 21 nt, Human
aggaagguuggggagggucca

SEQ ID NO: 819300 - RNA, 27 nt, Human
aggaugaagggggcaaggcuggguagg

SEQ ID NO: 819301 - RNA, 20 nt, Human
aggcagaggauggggauagc

SEQ ID NO: 819302 - RNA, 22 nt, Human
aggcgguguccuggggcaaggg

SEQ ID NO: 819303 - RNA, 18 nt, Human
aggcugggaguggggugg

SEQ ID NO: 819304 - RNA, 19 nt, Human
agggggaugggacugaagg

SEQ ID NO: 819305 - RNA, 22 nt, Human
agggggugccaaggaggggcuu

SEQ ID NO: 819306 - RNA, 20 nt, Human
aggguggggugcacaggaaa

SEQ ID NO: 819307 - RNA, 18 nt, Human
aggugguggguggggagg

SEQ ID NO: 819308 - RNA, 22 nt, Human
agguuggggaggguccaggggu

SEQ ID NO: 819309 - RNA, 25 nt, Human
aguggugggggugggcaaucagugu

SEQ ID NO: 819310 - RNA, 19 nt, Human
auccauccuaccuccccua

SEQ ID NO: 819311 - RNA, 23 nt, Human
auccauccuaccuccccuauccc

SEQ ID NO: 819312 - RNA, 23 nt, Human
auugggagggggaggaugagagg

SEQ ID NO: 819313 - RNA, 25 nt, Human
caaaauaaaacagguaggaagagca

SEQ ID NO: 819314 - RNA, 20 nt, Human
caacacagguccccccaccc

SEQ ID NO: 819315 - RNA, 22 nt, Human
caaccuccuuugcccuugcccc

SEQ ID NO: 819316 - RNA, 24 nt, Human
caauaccaaacgcaaaaggaugaa

SEQ ID NO: 819317 - RNA, 19 nt, Human
caccccuccuccaacacag

SEQ ID NO: 819318 - RNA, 19 nt, Human
cacccuaaccucaauucca

SEQ ID NO: 819319 - RNA, 18 nt, Human
cacccuccuaaacccuga

SEQ ID NO: 819320 - RNA, 24 nt, Human
cacuccagaaaaaaaggaaauggg

SEQ ID NO: 819321 - RNA, 20 nt, Human
cagaguaggacagaucaacu

SEQ ID NO: 819322 - RNA, 22 nt, Human
cagcaccccaaugggaaggaaa

SEQ ID NO: 819323 - RNA, 20 nt, Human
cagccgagagcagaucaggu

SEQ ID NO: 819324 - RNA, 26 nt, Human
ccaacauacacacccuccuaaacccu

SEQ ID NO: 819325 - RNA, 25 nt, Human
ccaccccacccaacacacuggggga

SEQ ID NO: 819326 - RNA, 21 nt, Human
ccacgguggggccagcgucac

SEQ ID NO: 819327 - RNA, 25 nt, Human
ccagcccacacacacacaccccgga

SEQ ID NO: 819328 - RNA, 18 nt, Human
ccagggugggggugaggg

SEQ ID NO: 819329 - RNA, 18 nt, Human
cccaacaccccuccucca

SEQ ID NO: 819330 - RNA, 21 nt, Human
cccacacacacacaccccgga

SEQ ID NO: 819331 - RNA, 29 nt, Human
cccacacacacacaccccggauauguaca

SEQ ID NO: 819332 - RNA, 21 nt, Human
cccacccaacacacuggggga

SEQ ID NO: 819333 - RNA, 22 nt, Human
cccagcccuguccuaccucccc

SEQ ID NO: 819334 - RNA, 24 nt, Human
cccagcccuguccuaccuccccca

SEQ ID NO: 819335 - RNA, 22 nt, Human
cccauccauccuaccuccccua

SEQ ID NO: 819336 - RNA, 19 nt, Human
cccauggccuacccacccc

SEQ ID NO: 819337 - RNA, 22 nt, Human
cccauggccuacccaccccaaa

SEQ ID NO: 819338 - RNA, 21 nt, Human
ccccaaaccccauccauccua

SEQ ID NO: 819339 - RNA, 25 nt, Human
ccccaaaccccauccauccuaccuc

SEQ ID NO: 819340 - RNA, 18 nt, Human
ccccaacaccccuccucc

SEQ ID NO: 819341 - RNA, 21 nt, Human
ccccauccauccuaccucccc

SEQ ID NO: 819342 - RNA, 23 nt, Human
ccccauccauccuaccuccccua

SEQ ID NO: 819343 - RNA, 26 nt, Human
cccccagggugggggugagggucugu

SEQ ID NO: 819344 - RNA, 18 nt, Human
cccccuccaccccaucug

SEQ ID NO: 819345 - RNA, 19 nt, Human
cccccuugccgcccccucc

SEQ ID NO: 819346 - RNA, 19 nt, Human
ccccgguggcccccucccc

SEQ ID NO: 819347 - RNA, 26 nt, Human
ccccucacccgggguccccuccccau

SEQ ID NO: 819348 - RNA, 24 nt, Human
ccccuccuccaacacagguccccc

SEQ ID NO: 819349 - RNA, 26 nt, Human
cccuaaccucaauuccaccccaccca

SEQ ID NO: 819350 - RNA, 21 nt, Human
cccucccauggccuacccacc

SEQ ID NO: 819351 - RNA, 25 nt, Human
cccuccuaaacccugaccccucacc

SEQ ID NO: 819352 - RNA, 20 nt, Human
cccuccuccaacacaggucc

SEQ ID NO: 819353 - RNA, 21 nt, Human
cccugccccgguggcccccuc

SEQ ID NO: 819354 - RNA, 20 nt, Human
ccuaaacccugaccccucac

SEQ ID NO: 819355 - RNA, 23 nt, Human
ccucacccuaaccucaauuccac

SEQ ID NO: 819356 - RNA, 24 nt, Human
ccuccaacacagguccccccaccc

SEQ ID NO: 819357 - RNA, 27 nt, Human
ccucccaacauacacacccuccuaaac

SEQ ID NO: 819358 - RNA, 18 nt, Human
ccuccccuaucccgccag

SEQ ID NO: 819359 - RNA, 22 nt, Human
ccuguccuaccucccccagggg

SEQ ID NO: 819360 - RNA, 20 nt, Human
ccuugccgcccccucccugc

SEQ ID NO: 819361 - RNA, 23 nt, Human
cgagcagccucuucuuggguucu

SEQ ID NO: 819362 - RNA, 24 nt, Human
cgagcagccucuucuuggguucug

SEQ ID NO: 819363 - RNA, 18 nt, Human
cggggggggagggggcca

SEQ ID NO: 819364 - RNA, 21 nt, Human
cgggguaggcgguguccuggg

SEQ ID NO: 819365 - RNA, 23 nt, Human
cgggguccccuccccauaacaag

SEQ ID NO: 819366 - RNA, 21 nt, Human
cuaaaaaaaucacccugaagu

SEQ ID NO: 819367 - RNA, 25 nt, Human
cuaaacccugaccccucacccuaac

SEQ ID NO: 819368 - RNA, 22 nt, Human
cucacccgggguccccucccca

SEQ ID NO: 819369 - RNA, 20 nt, Human
cuccuccaacacaggucccc

SEQ ID NO: 819370 - RNA, 22 nt, Human
cucugggaccagccgagagcag

SEQ ID NO: 819371 - RNA, 23 nt, Human
cucuguacagaaggguugccccc

SEQ ID NO: 819372 - RNA, 22 nt, Human
cugagguggggaaagggcacag

SEQ ID NO: 819373 - RNA, 21 nt, Human
gaaggggcagaggggacugug

SEQ ID NO: 819374 - RNA, 19 nt, Human
gaagguuggggagggucca

SEQ ID NO: 819375 - RNA, 20 nt, Human
gagagaaggaagguugggga

SEQ ID NO: 819376 - RNA, 20 nt, Human
gagauugggagggggaggau

SEQ ID NO: 819377 - RNA, 23 nt, Human
gagcuggcgggagggagggaggu

SEQ ID NO: 819378 - RNA, 23 nt, Human
gauagcaccccggagugaagggg

SEQ ID NO: 819379 - RNA, 26 nt, Human
gcccccagcccacacacacacacccc

SEQ ID NO: 819380 - RNA, 19 nt, Human
gcccccuccaccccaucug

SEQ ID NO: 819381 - RNA, 21 nt, Human
gccccgguggcccccuccacc

SEQ ID NO: 819382 - RNA, 19 nt, Human
gcccuguccuaccuccccc

SEQ ID NO: 819383 - RNA, 25 nt, Human
gccuacccaccccaaaccccaucca

SEQ ID NO: 819384 - RNA, 19 nt, Human
gccugagguggggaaaggg

SEQ ID NO: 819385 - RNA, 22 nt, Human
gcugggugggcuaguggucugc

SEQ ID NO: 819386 - RNA, 19 nt, Human
ggacugaaggggaacuguc

SEQ ID NO: 819387 - RNA, 20 nt, Human
ggacugaaggggaacugucc

SEQ ID NO: 819388 - RNA, 18 nt, Human
ggagaaggggagacaacu

SEQ ID NO: 819389 - RNA, 24 nt, Human
ggagggagguggaaggagauuggg

SEQ ID NO: 819390 - RNA, 19 nt, Human
ggagggggaggaugagagg

SEQ ID NO: 819391 - RNA, 20 nt, Human
ggaggggggggcauaagccc

SEQ ID NO: 819392 - RNA, 18 nt, Human
ggaggugccacaccccca

SEQ ID NO: 819393 - RNA, 19 nt, Human
ggaugaagggggcaaggcu

SEQ ID NO: 819394 - RNA, 19 nt, Human
ggccugagguggggaaagg

SEQ ID NO: 819395 - RNA, 20 nt, Human
gggaagcagaggggcggggg

SEQ ID NO: 819396 - RNA, 22 nt, Human
gggagggaagcagaggggcggg

SEQ ID NO: 819397 - RNA, 20 nt, Human
gggagggggaggaugagagg

SEQ ID NO: 819398 - RNA, 23 nt, Human
gggagguggaaggagauugggag

SEQ ID NO: 819399 - RNA, 20 nt, Human
gggaguggagaaaaggggac

SEQ ID NO: 819400 - RNA, 18 nt, Human
gggagugggguggggagg

SEQ ID NO: 819401 - RNA, 19 nt, Human
gggcaagggucccuggggg

SEQ ID NO: 819402 - RNA, 18 nt, Human
gggcaggggaggccaaaa

SEQ ID NO: 819403 - RNA, 18 nt, Human
gggcccccucacccgggg

SEQ ID NO: 819404 - RNA, 18 nt, Human
ggggauagcaccccggag

SEQ ID NO: 819405 - RNA, 20 nt, Human
ggggcggggggggagggggc

SEQ ID NO: 819406 - RNA, 19 nt, Human
ggggggagggggccaggaa

SEQ ID NO: 819407 - RNA, 22 nt, Human
gggguaggcgguguccuggggc

SEQ ID NO: 819408 - RNA, 20 nt, Human
ggggugccaaggaggggcuu

SEQ ID NO: 819409 - RNA, 21 nt, Human
ggggugggggugguggggcug

SEQ ID NO: 819410 - RNA, 22 nt, Human
ggggugguggggcugggggggc

SEQ ID NO: 819411 - RNA, 20 nt, Human
ggguggggagggagaacgag

SEQ ID NO: 819412 - RNA, 18 nt, Human
gggugggggugguggggc

SEQ ID NO: 819413 - RNA, 21 nt, Human
ggugcacaggaaaggaagaga

SEQ ID NO: 819414 - RNA, 21 nt, Human
gguggguggggagggaagcag

SEQ ID NO: 819415 - RNA, 24 nt, Human
gguggguggggagggaagcagagg

SEQ ID NO: 819416 - RNA, 18 nt, Human
ggugguggggcugggggg

SEQ ID NO: 819417 - RNA, 20 nt, Human
ggugguggggcugggggggc

SEQ ID NO: 819418 - RNA, 18 nt, Human
ggugguggguggggaggg

SEQ ID NO: 819419 - RNA, 19 nt, Human
gguguggggagaaggggag

SEQ ID NO: 819420 - RNA, 21 nt, Human
guagggggaugggacugaagg

SEQ ID NO: 819421 - RNA, 22 nt, Human
gucugucccccagugcucaggg

SEQ ID NO: 819422 - RNA, 21 nt, Human
gugcugagcccccccagacgc

SEQ ID NO: 819423 - RNA, 26 nt, Human
gugguuggugcuguuacagggugggg

SEQ ID NO: 819424 - RNA, 27 nt, Human
gugguuggugcuguuacaggguggggu

SEQ ID NO: 819425 - RNA, 21 nt, Human
uaaacauguuuuuuucuguuu

SEQ ID NO: 819426 - RNA, 20 nt, Human
uacaacagccaaagaagaga

SEQ ID NO: 819427 - RNA, 22 nt, Human
uagauugucagcucugguuacu

SEQ ID NO: 819428 - RNA, 21 nt, Human
ucaauaccaaacgcaaaagga

SEQ ID NO: 819429 - RNA, 24 nt, Human
ucaauuccaccccacccaacacac

SEQ ID NO: 819430 - RNA, 21 nt, Human
ucaccacacacuccagaaaaa

SEQ ID NO: 819431 - RNA, 22 nt, Human
ucccaacauacacacccuccua

SEQ ID NO: 819432 - RNA, 19 nt, Human
uccccacucucccuccugg

SEQ ID NO: 819433 - RNA, 20 nt, Human
uccccccucccccugggagu

SEQ ID NO: 819434 - RNA, 19 nt, Human
uccccccuugccgcccccu

SEQ ID NO: 819435 - RNA, 19 nt, Human
ucccugggggucaaagaga

SEQ ID NO: 819436 - RNA, 18 nt, Human
uccguaaucugcagccgg

SEQ ID NO: 819437 - RNA, 20 nt, Human
uccuaaacccugaccccuca

SEQ ID NO: 819438 - RNA, 23 nt, Human
uccuagaguaaguuccccccucc

SEQ ID NO: 819439 - RNA, 24 nt, Human
uccucccaacauacacacccuccu

SEQ ID NO: 819440 - RNA, 26 nt, Human
uccucggugauguccaauccuggugg

SEQ ID NO: 819441 - RNA, 20 nt, Human
uccuggggcaagggucccug

SEQ ID NO: 819442 - RNA, 20 nt, Human
ucuggguucuggguggggag

SEQ ID NO: 819443 - RNA, 18 nt, Human
ugaagggggcaaggcugg

SEQ ID NO: 819444 - RNA, 19 nt, Human
ugaaggggucuguacgggg

SEQ ID NO: 819445 - RNA, 20 nt, Human
ugaccccucacccuaaccuc

SEQ ID NO: 819446 - RNA, 18 nt, Human
ugaggcagaggaugggga

SEQ ID NO: 819447 - RNA, 23 nt, Human
ugaggggggauagauaaggcugg

SEQ ID NO: 819448 - RNA, 23 nt, Human
ugagguggggaaagggcacaggg

SEQ ID NO: 819449 - RNA, 26 nt, Human
ugcacaggaaaggaagagaaggucuc

SEQ ID NO: 819450 - RNA, 21 nt, Human
ugccccgguggcccccuccac

SEQ ID NO: 819451 - RNA, 25 nt, Human
ugccucccagggaggcauucgggga

SEQ ID NO: 819452 - RNA, 18 nt, Human
uggaaggagauugggagg

SEQ ID NO: 819453 - RNA, 21 nt, Human
uggaaggagauugggaggggg

SEQ ID NO: 819454 - RNA, 24 nt, Human
uggaaggagauugggagggggagg

SEQ ID NO: 819455 - RNA, 26 nt, Human
uggaaggagauugggagggggaggau

SEQ ID NO: 819456 - RNA, 19 nt, Human
ugggaaggaaaagggggcg

SEQ ID NO: 819457 - RNA, 21 nt, Human
ugggaaggaaaagggggcggc

SEQ ID NO: 819458 - RNA, 18 nt, Human
ugggaguggagaaaaggg

SEQ ID NO: 819459 - RNA, 19 nt, Human
ugggagugggguggggagg

SEQ ID NO: 819460 - RNA, 22 nt, Human
ugggagugggguggggagggag

SEQ ID NO: 819461 - RNA, 18 nt, Human
uggggagggaagcagagg

SEQ ID NO: 819462 - RNA, 24 nt, Human
uggggaggguccagggguagggcc

SEQ ID NO: 819463 - RNA, 18 nt, Human
uggggcgguggaggggag

SEQ ID NO: 819464 - RNA, 19 nt, Human
ugggggugguggggcuggg

SEQ ID NO: 819465 - RNA, 22 nt, Human
ugggguggggagggagaacgag

SEQ ID NO: 819466 - RNA, 22 nt, Human
uggguaggggacagcagucagg

SEQ ID NO: 819467 - RNA, 21 nt, Human
uggugcagugguggggguggg

SEQ ID NO: 819468 - RNA, 21 nt, Human
uggugcuguuacagggugggg

SEQ ID NO: 819469 - RNA, 19 nt, Human
ugguggggcugggggggcc

SEQ ID NO: 819470 - RNA, 20 nt, Human
uggugggggugggcaaucag

SEQ ID NO: 819471 - RNA, 20 nt, Human
uguagggggaugggacugaa

SEQ ID NO: 819472 - RNA, 22 nt, Human
uguccaauccuggugguuggug

SEQ ID NO: 819473 - RNA, 22 nt, Human
uguggggagaaggggagaccag

SEQ ID NO: 819474 - RNA, 24 nt, Human
uguuacaggguggggugcacagga

SEQ ID NO: 819475 - RNA, 22 nt, Human
uucuccguaaucugcagccggg

SEQ ID NO: 819476 - RNA, 25 nt, Human
uugcccccugagccaccccccgagc

SEQ ID NO: 819477 - RNA, 18 nt, Human
uugggagggggaggauga

SEQ ID NO: 819478 - RNA, 24 nt, Human
uugugcgugcugagcccccccaga

SEQ ID NO: 819479 - RNA, 23 nt, Human
uuuucuguuucaccacacacucc

SEQ ID NO: 819480 - RNA, 22 nt, Human
aaaaaaacaaccuuaccuacau

SEQ ID NO: 819481 - RNA, 22 nt, Human
aaaaguauaccuugggaaaggc

SEQ ID NO: 819482 - RNA, 22 nt, Human
aaauguugaaaauauuugccuc

SEQ ID NO: 819483 - RNA, 27 nt, Human
aacuacgugguuuaaauucauauugac

SEQ ID NO: 819484 - RNA, 20 nt, Human
aacucuggagccagcagaau

SEQ ID NO: 819485 - RNA, 24 nt, Human
aagccauugaaaaguauuuagaau

SEQ ID NO: 819486 - RNA, 21 nt, Human
aagcuuuaaaaauuggaaaug

SEQ ID NO: 819487 - RNA, 22 nt, Human
acaagcacacuuuuguauucuu

SEQ ID NO: 819488 - RNA, 28 nt, Human
acaaguuuuucuccauaaauaagauucu

SEQ ID NO: 819489 - RNA, 26 nt, Human
acagugacccucuggccugguuuucc

SEQ ID NO: 819490 - RNA, 22 nt, Human
acgcuguucuggucacucacau

SEQ ID NO: 819491 - RNA, 20 nt, Human
agaaaaggacuaaugaggug

SEQ ID NO: 819492 - RNA, 18 nt, Human
agacagguagauaucaag

SEQ ID NO: 819493 - RNA, 23 nt, Human
aggcaaucugccugccccaccuc

SEQ ID NO: 819494 - RNA, 18 nt, Human
aucuucuccagccacguu

SEQ ID NO: 819495 - RNA, 22 nt, Human
caaaaaaacaaccuuaccuaca

SEQ ID NO: 819496 - RNA, 18 nt, Human
caaaccagacagugaccc

SEQ ID NO: 819497 - RNA, 22 nt, Human
caaguuuauagagguaagaagu

SEQ ID NO: 819498 - RNA, 19 nt, Human
cacacuuuuguauucuuca

SEQ ID NO: 819499 - RNA, 19 nt, Human
cacaguacacgcuuuaaau

SEQ ID NO: 819500 - RNA, 19 nt, Human
cacauccuggucaaaaauc

SEQ ID NO: 819501 - RNA, 21 nt, Human
caccaaaucacaaaccagaca

SEQ ID NO: 819502 - RNA, 22 nt, Human
caccaaaucacaaaccagacag

SEQ ID NO: 819503 - RNA, 19 nt, Human
caccugaagugaaaagaua

SEQ ID NO: 819504 - RNA, 22 nt, Human
cacuggcaguugucugccgcag

SEQ ID NO: 819505 - RNA, 22 nt, Human
cagccacguuguaaaaggcccc

SEQ ID NO: 819506 - RNA, 22 nt, Human
cagccuauccugcugcaaagau

SEQ ID NO: 819507 - RNA, 27 nt, Human
cagcuccaccugaagugaaaagauaac

SEQ ID NO: 819508 - RNA, 20 nt, Human
caggcuuggaagccauuugu

SEQ ID NO: 819509 - RNA, 21 nt, Human
caugacacagacugagagcuu

SEQ ID NO: 819510 - RNA, 23 nt, Human
ccauaaauaagauucuaaaguuc

SEQ ID NO: 819511 - RNA, 26 nt, Human
cccauggcuaaaacaggccggggucc

SEQ ID NO: 819512 - RNA, 22 nt, Human
cguccaaguuuauagagguaag

SEQ ID NO: 819513 - RNA, 18 nt, Human
cuaaaacaggcagugaug

SEQ ID NO: 819514 - RNA, 21 nt, Human
cucaaacucuggagccagcag

SEQ ID NO: 819515 - RNA, 19 nt, Human
cuccaccugaagugaaaag

SEQ ID NO: 819516 - RNA, 19 nt, Human
cugaucuuacagauacaug

SEQ ID NO: 819517 - RNA, 20 nt, Human
cugaucuuacagauacaugg

SEQ ID NO: 819518 - RNA, 23 nt, Human
gaaauuugagcugcaacaucucc

SEQ ID NO: 819519 - RNA, 23 nt, Human
gacaugcaacucagucugaaagc

SEQ ID NO: 819520 - RNA, 25 nt, Human
gacuaaagagugacaugcaacucag

SEQ ID NO: 819521 - RNA, 20 nt, Human
ggcacuggcaguugucugcc

SEQ ID NO: 819522 - RNA, 19 nt, Human
gggcacuggcaguugucug

SEQ ID NO: 819523 - RNA, 23 nt, Human
uaaaaugcacccuuuuauccgcc

SEQ ID NO: 819524 - RNA, 24 nt, Human
uagguugauuuaaaaaaaaaaaaa

SEQ ID NO: 819525 - RNA, 23 nt, Human
uaucaaaagcaacuaauuuuaaa

SEQ ID NO: 819526 - RNA, 25 nt, Human
uaucaaaagcaacuaauuuuaaaca

SEQ ID NO: 819527 - RNA, 23 nt, Human
uaucguccaaguuuauagaggua

SEQ ID NO: 819528 - RNA, 20 nt, Human
uauguugcccaucuucucca

SEQ ID NO: 819529 - RNA, 27 nt, Human
ucaggcuuggaagccauuugguaaaga

SEQ ID NO: 819530 - RNA, 20 nt, Human
ucauauguggacugaaauuu

SEQ ID NO: 819531 - RNA, 23 nt, Human
uccaccaaaucacaaaccagaca

SEQ ID NO: 819532 - RNA, 24 nt, Human
uccaccaaaucacaaaccagacag

SEQ ID NO: 819533 - RNA, 19 nt, Human
uccauagcgcacacuccug

SEQ ID NO: 819534 - RNA, 26 nt, Human
ucuccaaaaaaacaaccuuaccuaca

SEQ ID NO: 819535 - RNA, 23 nt, Human
ucuccagccacguuguaaaaggc

SEQ ID NO: 819536 - RNA, 21 nt, Human
ucugccugccccaccucuugc

SEQ ID NO: 819537 - RNA, 23 nt, Human
ugaaaauauuugcccauagacua

SEQ ID NO: 819538 - RNA, 23 nt, Human
ugagaaacacaagcacacuuuug

SEQ ID NO: 819539 - RNA, 22 nt, Human
ugauguguaaacaauguuaaaa

SEQ ID NO: 819540 - RNA, 21 nt, Human
ugcccgaaucacuuuauggaa

SEQ ID NO: 819541 - RNA, 21 nt, Human
ugcugcaaagauguucagucu

SEQ ID NO: 819542 - RNA, 23 nt, Human
uggcugaacagacagguagauau

SEQ ID NO: 819543 - RNA, 18 nt, Human
ugggaaaggcugaucuua

SEQ ID NO: 819544 - RNA, 18 nt, Human
uguugcccaucuucucca

SEQ ID NO: 819545 - RNA, 22 nt, Human
uguuuaucugucaauaggcaug

SEQ ID NO: 819546 - RNA, 26 nt, Human
uguuugaugggcacuggcaguugucu

SEQ ID NO: 819547 - RNA, 21 nt, Human
uucacacaaauaugcccgaau

SEQ ID NO: 819548 - RNA, 23 nt, Human
uucauauguggacugaaauuuga

SEQ ID NO: 819549 - RNA, 21 nt, Human
uugaauuauaaacaugacagc

SEQ ID NO: 819550 - RNA, 20 nt, Human
uugauuuaaaaaaaaaaaaa

SEQ ID NO: 819551 - RNA, 23 nt, Human
uugcccaucuucuccagccacgu

SEQ ID NO: 819552 - RNA, 21 nt, Human
uuguccuggcugaacagacag

SEQ ID NO: 819553 - RNA, 22 nt, Human
uuguccuggcugaacagacagg

SEQ ID NO: 819554 - RNA, 22 nt, Human
uuuaaaaaaaaaaaaaaucugu

SEQ ID NO: 819555 - RNA, 21 nt, Human
uuuuuuuuuuuuuuuuucauu

SEQ ID NO: 819556 - RNA, 21 nt, Human
aaaagcucccuacucagcagc

SEQ ID NO: 819557 - RNA, 19 nt, Human
aaacaccaaguggccaccc

SEQ ID NO: 819558 - RNA, 20 nt, Human
aaacccacccccacuacccc

SEQ ID NO: 819559 - RNA, 22 nt, Human
aaacccuaagauagaucuaguu

SEQ ID NO: 819560 - RNA, 23 nt, Human
aaagauggaugaagugcuucuag

SEQ ID NO: 819561 - RNA, 21 nt, Human
aaccaagaaaacaggagcugc

SEQ ID NO: 819562 - RNA, 22 nt, Human
aacuagcaucuguccuuucagc

SEQ ID NO: 819563 - RNA, 19 nt, Human
aacuggggagaccucagcc

SEQ ID NO: 819564 - RNA, 25 nt, Human
aagaaauccaaggcagccaggcccu

SEQ ID NO: 819565 - RNA, 25 nt, Human
aagcaaaagcucccuacucagcagc

SEQ ID NO: 819566 - RNA, 25 nt, Human
aagcaaagcaagccacccuccuccu

SEQ ID NO: 819567 - RNA, 20 nt, Human
aagcagggcaucccuuugug

SEQ ID NO: 819568 - RNA, 19 nt, Human
aagcggaggcaggcccggg

SEQ ID NO: 819569 - RNA, 23 nt, Human
aagcggaggcaggcccggggcaa

SEQ ID NO: 819570 - RNA, 22 nt, Human
acagaaccaagaaaacaggagc

SEQ ID NO: 819571 - RNA, 21 nt, Human
acagggcaggcuagcgggcac

SEQ ID NO: 819572 - RNA, 23 nt, Human
accccaucccccgccaggaccag

SEQ ID NO: 819573 - RNA, 23 nt, Human
acccuccuccuggcuuccuccac

SEQ ID NO: 819574 - RNA, 24 nt, Human
accuccucgcucagccgcuccagc

SEQ ID NO: 819575 - RNA, 18 nt, Human
acggccagcagggcggcg

SEQ ID NO: 819576 - RNA, 22 nt, Human
acucuuuacaagguaaccuggg

SEQ ID NO: 819577 - RNA, 23 nt, Human
acugcugcccccagcuuuuggcu

SEQ ID NO: 819578 - RNA, 20 nt, Human
agaaccaagaaaacaggagc

SEQ ID NO: 819579 - RNA, 19 nt, Human
agaagaccccaaugcagcc

SEQ ID NO: 819580 - RNA, 22 nt, Human
agacgcgcgcuccuccagcucc

SEQ ID NO: 819581 - RNA, 22 nt, Human
agagcucagacgcgcgcuccuc

SEQ ID NO: 819582 - RNA, 22 nt, Human
agcaagcaaaagcucccuacuc

SEQ ID NO: 819583 - RNA, 22 nt, Human
agcacagagggcggcccugugc

SEQ ID NO: 819584 - RNA, 18 nt, Human
agcagcagagcucauccc

SEQ ID NO: 819585 - RNA, 19 nt, Human
agcaugacacccuugguau

SEQ ID NO: 819586 - RNA, 23 nt, Human
agccaggcccuuacuggaccucc

SEQ ID NO: 819587 - RNA, 19 nt, Human
agcgcauagcgcgcugcug

SEQ ID NO: 819588 - RNA, 21 nt, Human
agcugggugugcugcugcgcc

SEQ ID NO: 819589 - RNA, 22 nt, Human
aggaacuggggagaccucagcc

SEQ ID NO: 819590 - RNA, 18 nt, Human
aggaaguugggucccugg

SEQ ID NO: 819591 - RNA, 19 nt, Human
aggagagaacaaaagaaga

SEQ ID NO: 819592 - RNA, 25 nt, Human
aggagagaacaaaagaagagcguca

SEQ ID NO: 819593 - RNA, 21 nt, Human
aggagcugccuugauccuuag

SEQ ID NO: 819594 - RNA, 19 nt, Human
aggcaggaccaagaaaucc

SEQ ID NO: 819595 - RNA, 21 nt, Human
aggcaggaccaagaaauccaa

SEQ ID NO: 819596 - RNA, 25 nt, Human
aggcaggaccaagaaauccaaggca

SEQ ID NO: 819597 - RNA, 22 nt, Human
aggcagugcccugggucaggcc

SEQ ID NO: 819598 - RNA, 20 nt, Human
aggcccggggcaagggccgg

SEQ ID NO: 819599 - RNA, 18 nt, Human
aggcuggcgcugggcgug

SEQ ID NO: 819600 - RNA, 24 nt, Human
agggaaggcagcaccucugguucu

SEQ ID NO: 819601 - RNA, 19 nt, Human
aggggcugguggggcaggg

SEQ ID NO: 819602 - RNA, 20 nt, Human
aggggcugguggggcagggg

SEQ ID NO: 819603 - RNA, 24 nt, Human
aggggcugguggggcaggggcugc

SEQ ID NO: 819604 - RNA, 22 nt, Human
aguuggcaggacccccggccuc

SEQ ID NO: 819605 - RNA, 24 nt, Human
auccuucacacacagccagaacag

SEQ ID NO: 819606 - RNA, 21 nt, Human
auggagccagcugcucugggg

SEQ ID NO: 819607 - RNA, 21 nt, Human
caaaagcucccuacucagcag

SEQ ID NO: 819608 - RNA, 19 nt, Human
caaggaagcaaagcaagcc

SEQ ID NO: 819609 - RNA, 27 nt, Human
caaggcaggaccaagaaauccaaggca

SEQ ID NO: 819610 - RNA, 21 nt, Human
cacacacagccagaacagggu

SEQ ID NO: 819611 - RNA, 23 nt, Human
cacagaaccaagaaaacaggagc

SEQ ID NO: 819612 - RNA, 22 nt, Human
cacagggcaggcuagcgggcac

SEQ ID NO: 819613 - RNA, 24 nt, Human
cacauccuucacacacagccagaa

SEQ ID NO: 819614 - RNA, 23 nt, Human
caccaaaaaaauccaugcauaga

SEQ ID NO: 819615 - RNA, 26 nt, Human
caccccaaccuccuuucuagggcuaa

SEQ ID NO: 819616 - RNA, 19 nt, Human
cacccccacuaccccacug

SEQ ID NO: 819617 - RNA, 23 nt, Human
cacccccacuaccccacuguacu

SEQ ID NO: 819618 - RNA, 22 nt, Human
cagcaagcaaaagcucccuucu

SEQ ID NO: 819619 - RNA, 22 nt, Human
cagcaaugauagcaaaagcugg

SEQ ID NO: 819620 - RNA, 20 nt, Human
cagcacagagggcggcccug

SEQ ID NO: 819621 - RNA, 21 nt, Human
cagccgggguagggugggggu

SEQ ID NO: 819622 - RNA, 21 nt, Human
cagcuccuccuucucgcgccc

SEQ ID NO: 819623 - RNA, 22 nt, Human
cagcuccuguuccuugugcacc

SEQ ID NO: 819624 - RNA, 24 nt, Human
caggaccagcagccuaauggcuag

SEQ ID NO: 819625 - RNA, 23 nt, Human
caggagacuugacagucccccuc

SEQ ID NO: 819626 - RNA, 23 nt, Human
caggccccuaggucuggcugugg

SEQ ID NO: 819627 - RNA, 22 nt, Human
caggcccucuucguaggccaca

SEQ ID NO: 819628 - RNA, 19 nt, Human
caggcuagcgggcaccagg

SEQ ID NO: 819629 - RNA, 24 nt, Human
cagucccccuccagaagccaggga

SEQ ID NO: 819630 - RNA, 24 nt, Human
caguugggcaggcucaagccaagc

SEQ ID NO: 819631 - RNA, 22 nt, Human
cauucuaguguguaccacccag

SEQ ID NO: 819632 - RNA, 21 nt, Human
ccaaacccacccccacuaccc

SEQ ID NO: 819633 - RNA, 21 nt, Human
ccaaguacaccaaccucccag

SEQ ID NO: 819634 - RNA, 21 nt, Human
ccaaguggcuccagcucaggu

SEQ ID NO: 819635 - RNA, 18 nt, Human
ccaccgcccccaccucca

SEQ ID NO: 819636 - RNA, 20 nt, Human
ccaccucccuuccaggccuc

SEQ ID NO: 819637 - RNA, 21 nt, Human
ccagaagccagggauaacacu

SEQ ID NO: 819638 - RNA, 21 nt, Human
ccagaggcuacuccagccggg

SEQ ID NO: 819639 - RNA, 20 nt, Human
ccagggauaacacucggccu

SEQ ID NO: 819640 - RNA, 19 nt, Human
cccaccuccacggcccagg

SEQ ID NO: 819641 - RNA, 21 nt, Human
cccagacagccuuggugaccc

SEQ ID NO: 819642 - RNA, 25 nt, Human
cccgcgaucuucugcuccaccuccu

SEQ ID NO: 819643 - RNA, 19 nt, Human
cccuacucagcagcagagc

SEQ ID NO: 819644 - RNA, 19 nt, Human
cccucaguccacggggccc

SEQ ID NO: 819645 - RNA, 20 nt, Human
cccugccgcccccuacccgg

SEQ ID NO: 819646 - RNA, 26 nt, Human
cccuuacuggaccuccaccucccuuc

SEQ ID NO: 819647 - RNA, 19 nt, Human
ccgcagcuuggcgcuggcc

SEQ ID NO: 819648 - RNA, 21 nt, Human
ccgcagcuuggcgcuggccuc

SEQ ID NO: 819649 - RNA, 21 nt, Human
ccgccaggaccagcagccuaa

SEQ ID NO: 819650 - RNA, 22 nt, Human
ccuaauggcuagggcugggagc

SEQ ID NO: 819651 - RNA, 24 nt, Human
ccuagcucacuacccauacacccc

SEQ ID NO: 819652 - RNA, 21 nt, Human
ccucaaugaacugcugcagcc

SEQ ID NO: 819653 - RNA, 24 nt, Human
ccucaaugaacugcugcagccgca

SEQ ID NO: 819654 - RNA, 18 nt, Human
ccucagccuuuggagccu

SEQ ID NO: 819655 - RNA, 28 nt, Human
ccuccagcuccuccuucucggggccgcc

SEQ ID NO: 819656 - RNA, 20 nt, Human
ccucuggaggagaggaaaga

SEQ ID NO: 819657 - RNA, 21 nt, Human
ccucuggaggagaggaaagaa

SEQ ID NO: 819658 - RNA, 21 nt, Human
ccugcagccggcccaccuggc

SEQ ID NO: 819659 - RNA, 19 nt, Human
ccugcagcugccgcucggc

SEQ ID NO: 819660 - RNA, 19 nt, Human
ccuggcccgcgaucuucug

SEQ ID NO: 819661 - RNA, 19 nt, Human
ccugggccccgggcauugg

SEQ ID NO: 819662 - RNA, 20 nt, Human
ccuggggagaaguucugggu

SEQ ID NO: 819663 - RNA, 19 nt, Human
ccuuagguggucucuccug

SEQ ID NO: 819664 - RNA, 23 nt, Human
ccuuguauucagggauggaaggu

SEQ ID NO: 819665 - RNA, 24 nt, Human
ccuuguauucagggauggaagguc

SEQ ID NO: 819666 - RNA, 20 nt, Human
ccuugugcaccagguccugc

SEQ ID NO: 819667 - RNA, 21 nt, Human
cgagcacgccgaggacgccac

SEQ ID NO: 819668 - RNA, 22 nt, Human
cgaggggagcguggugauggug

SEQ ID NO: 819669 - RNA, 19 nt, Human
cgccaggaccagcagccua

SEQ ID NO: 819670 - RNA, 19 nt, Human
cgcccccaccuccacggcc

SEQ ID NO: 819671 - RNA, 21 nt, Human
cgcccccaccuccacggccca

SEQ ID NO: 819672 - RNA, 30 nt, Human
cgccgguccaccuccagcuucuccagcgcc

SEQ ID NO: 819673 - RNA, 20 nt, Human
cgcgcgcuccuccagcuccu

SEQ ID NO: 819674 - RNA, 20 nt, Human
cggagggcagcuucugucca

SEQ ID NO: 819675 - RNA, 22 nt, Human
cuacuucucacugugacagggc

SEQ ID NO: 819676 - RNA, 22 nt, Human
cuagcucacuacccauacaccc

SEQ ID NO: 819677 - RNA, 24 nt, Human
cucacuacccauacaccccaaccu

SEQ ID NO: 819678 - RNA, 21 nt, Human
cucgaagaccucucgccgggc

SEQ ID NO: 819679 - RNA, 26 nt, Human
cucggccugcagccggcccaccuggc

SEQ ID NO: 819680 - RNA, 20 nt, Human
cucuagugcagguggugcuc

SEQ ID NO: 819681 - RNA, 18 nt, Human
cugagaggaggaacuggg

SEQ ID NO: 819682 - RNA, 22 nt, Human
cugagcugccuuguggagcccc

SEQ ID NO: 819683 - RNA, 19 nt, Human
cugccgcccccuacccggg

SEQ ID NO: 819684 - RNA, 20 nt, Human
cugcgcccaugggaucccag

SEQ ID NO: 819685 - RNA, 21 nt, Human
cugcugcagccgcagcuuggc

SEQ ID NO: 819686 - RNA, 21 nt, Human
cuggggaaaggcuguggugcu

SEQ ID NO: 819687 - RNA, 20 nt, Human
cuuguggagcccccauuggc

SEQ ID NO: 819688 - RNA, 22 nt, Human
gaaccaagaaaacaggagcugc

SEQ ID NO: 819689 - RNA, 19 nt, Human
gaagagcgucaaggggcug

SEQ ID NO: 819690 - RNA, 21 nt, Human
gaauacucugaccucucauuc

SEQ ID NO: 819691 - RNA, 20 nt, Human
gaccaagaaauccaaggcag

SEQ ID NO: 819692 - RNA, 21 nt, Human
gaccccaucccccgccaggac

SEQ ID NO: 819693 - RNA, 19 nt, Human
gaccugcagcugccgcucg

SEQ ID NO: 819694 - RNA, 22 nt, Human
gaggagagaacaaaagaagagc

SEQ ID NO: 819695 - RNA, 21 nt, Human
gaggcagcggcggcggcggcc

SEQ ID NO: 819696 - RNA, 22 nt, Human
gaucuugaggcgcgccaggccc

SEQ ID NO: 819697 - RNA, 22 nt, Human
gcaaagcaagccacccuccucc

SEQ ID NO: 819698 - RNA, 20 nt, Human
gcaaaggccagugaaaagug

SEQ ID NO: 819699 - RNA, 18 nt, Human
gcagggagaagccaaugg

SEQ ID NO: 819700 - RNA, 23 nt, Human
gccacaggaggaaaagucagcaa

SEQ ID NO: 819701 - RNA, 18 nt, Human
gccccgggcauugggucc

SEQ ID NO: 819702 - RNA, 18 nt, Human
gcccugugccucccuccc

SEQ ID NO: 819703 - RNA, 21 nt, Human
gccgccuugcgcuccagcucg

SEQ ID NO: 819704 - RNA, 22 nt, Human
gcgaagcggaggcaggcccggg

SEQ ID NO: 819705 - RNA, 22 nt, Human
gcgcauagcgcgcugcugcggc

SEQ ID NO: 819706 - RNA, 21 nt, Human
gcgugcugccacagcugcugc

SEQ ID NO: 819707 - RNA, 21 nt, Human
gcuccagcucggccugcagcc

SEQ ID NO: 819708 - RNA, 24 nt, Human
gcucugggguaggaggcaaggggu

SEQ ID NO: 819709 - RNA, 18 nt, Human
gcugaugaccugcagcug

SEQ ID NO: 819710 - RNA, 20 nt, Human
gcugccuggggcugggaccu

SEQ ID NO: 819711 - RNA, 21 nt, Human
gcugggcugggcaggccaccc

SEQ ID NO: 819712 - RNA, 18 nt, Human
ggaaggacuggguaacga

SEQ ID NO: 819713 - RNA, 22 nt, Human
ggaaggcagcaccucugguucu

SEQ ID NO: 819714 - RNA, 19 nt, Human
ggaaggucccuggggcaga

SEQ ID NO: 819715 - RNA, 18 nt, Human
ggaccuccaccucccuuc

SEQ ID NO: 819716 - RNA, 21 nt, Human
ggacugggcagggaguugcca

SEQ ID NO: 819717 - RNA, 23 nt, Human
ggacugggcagggaguugccagc

SEQ ID NO: 819718 - RNA, 21 nt, Human
ggacuugcgggcgaacagcuc

SEQ ID NO: 819719 - RNA, 21 nt, Human
ggagcugggugugcugcugcg

SEQ ID NO: 819720 - RNA, 18 nt, Human
ggaguugccagcaugaca

SEQ ID NO: 819721 - RNA, 18 nt, Human
ggaucucgaucucgcgca

SEQ ID NO: 819722 - RNA, 22 nt, Human
ggcagcuucuguccaagccccu

SEQ ID NO: 819723 - RNA, 23 nt, Human
ggcugcaaagcugccagugcuug

SEQ ID NO: 819724 - RNA, 22 nt, Human
ggcugguggggcaggggcugca

SEQ ID NO: 819725 - RNA, 19 nt, Human
gggaccccaucccccgccg

SEQ ID NO: 819726 - RNA, 23 nt, Human
gggcaggcuagcgggcaccaggu

SEQ ID NO: 819727 - RNA, 20 nt, Human
gggcaugcaugaaggcuagg

SEQ ID NO: 819728 - RNA, 21 nt, Human
gggcccugccgcccccuaccc

SEQ ID NO: 819729 - RNA, 18 nt, Human
gggcucgggagccagcgg

SEQ ID NO: 819730 - RNA, 19 nt, Human
gggcuggugcagggagaag

SEQ ID NO: 819731 - RNA, 27 nt, Human
ggggccggggccaggcggcggcgucga

SEQ ID NO: 819732 - RNA, 20 nt, Human
ggggcuggcaggggcccugc

SEQ ID NO: 819733 - RNA, 21 nt, Human
ggguaaagauggaugaagugc

SEQ ID NO: 819734 - RNA, 19 nt, Human
ggucggagggcagcuucug

SEQ ID NO: 819735 - RNA, 20 nt, Human
guaggccacaucagcgggug

SEQ ID NO: 819736 - RNA, 21 nt, Human
guaucuuguucaccccucugc

SEQ ID NO: 819737 - RNA, 18 nt, Human
gugacgccaugggagcug

SEQ ID NO: 819738 - RNA, 22 nt, Human
uaacgaggggaccccauccccc

SEQ ID NO: 819739 - RNA, 21 nt, Human
uacaacuagcaucuguccuuu

SEQ ID NO: 819740 - RNA, 20 nt, Human
uacaccaaccucccagguag

SEQ ID NO: 819741 - RNA, 21 nt, Human
uacccauacaccccaaccucc

SEQ ID NO: 819742 - RNA, 24 nt, Human
uaccccacuguacugcugccccca

SEQ ID NO: 819743 - RNA, 26 nt, Human
uaccccacuguacugcugcccccagc

SEQ ID NO: 819744 - RNA, 19 nt, Human
uaccuggggccccuggagc

SEQ ID NO: 819745 - RNA, 25 nt, Human
uaccuggggccccuggagcagggcu

SEQ ID NO: 819746 - RNA, 21 nt, Human
uacuccagccgggguagggug

SEQ ID NO: 819747 - RNA, 20 nt, Human
uagaaacaccaaguggccac

SEQ ID NO: 819748 - RNA, 19 nt, Human
uaggaggcaaggggugcca

SEQ ID NO: 819749 - RNA, 19 nt, Human
uaggcagaagaccccaaug

SEQ ID NO: 819750 - RNA, 22 nt, Human
uagggugggggucggagggcag

SEQ ID NO: 819751 - RNA, 27 nt, Human
uaucuuguucaccccucugccucuagu

SEQ ID NO: 819752 - RNA, 18 nt, Human
uauuccugcagggaugca

SEQ ID NO: 819753 - RNA, 20 nt, Human
ucaaugaacugcugcagccg

SEQ ID NO: 819754 - RNA, 22 nt, Human
ucaaugaacugcugcagccgca

SEQ ID NO: 819755 - RNA, 23 nt, Human
ucacacacagccagaacagggug

SEQ ID NO: 819756 - RNA, 23 nt, Human
ucacugugacagggcugccuggg

SEQ ID NO: 819757 - RNA, 23 nt, Human
ucagcaccaccuuucucccaccc

SEQ ID NO: 819758 - RNA, 23 nt, Human
uccaaaccagggucccucugagg

SEQ ID NO: 819759 - RNA, 23 nt, Human
uccacagccugggcaggcugucu

SEQ ID NO: 819760 - RNA, 22 nt, Human
uccaccuccucgcucagccgcu

SEQ ID NO: 819761 - RNA, 23 nt, Human
uccagcaccaccgcccccaccuc

SEQ ID NO: 819762 - RNA, 19 nt, Human
uccagcacuuccccuaggc

SEQ ID NO: 819763 - RNA, 20 nt, Human
uccagcucggccugcagccg

SEQ ID NO: 819764 - RNA, 22 nt, Human
ucccagacagccuuggugaccc

SEQ ID NO: 819765 - RNA, 19 nt, Human
ucccagcucuggaggacuc

SEQ ID NO: 819766 - RNA, 22 nt, Human
ucccccagcgggaucucgaucu

SEQ ID NO: 819767 - RNA, 18 nt, Human
uccuucacacacagccag

SEQ ID NO: 819768 - RNA, 20 nt, Human
uccuucucgcgcccgagccu

SEQ ID NO: 819769 - RNA, 19 nt, Human
ucgaaagaacuuuccaaau

SEQ ID NO: 819770 - RNA, 25 nt, Human
ucgaagaccucucgccgggcgccgg

SEQ ID NO: 819771 - RNA, 22 nt, Human
ucgccgggcgccgggcacggcc

SEQ ID NO: 819772 - RNA, 22 nt, Human
ucguaggccacaucagcgggug

SEQ ID NO: 819773 - RNA, 27 nt, Human
ucucacugugacagggcugccuggggc

SEQ ID NO: 819774 - RNA, 24 nt, Human
ucuccagcgcgcggaucuugaggc

SEQ ID NO: 819775 - RNA, 20 nt, Human
ucucccacccuagcucacua

SEQ ID NO: 819776 - RNA, 24 nt, Human
ucucccccuggcaaucccccaccu

SEQ ID NO: 819777 - RNA, 21 nt, Human
ucuucauguccaagccagguu

SEQ ID NO: 819778 - RNA, 20 nt, Human
ucuuccuuggccccaugggu

SEQ ID NO: 819779 - RNA, 18 nt, Human
ucuugcaucuuacugggu

SEQ ID NO: 819780 - RNA, 19 nt, Human
ugaaacuacaacuagcauc

SEQ ID NO: 819781 - RNA, 22 nt, Human
ugacagcuccucacuggcugug

SEQ ID NO: 819782 - RNA, 23 nt, Human
ugaccaggaggcugggccucagg

SEQ ID NO: 819783 - RNA, 24 nt, Human
ugaccugcagcugccgcucggcac

SEQ ID NO: 819784 - RNA, 19 nt, Human
ugagaggaggaacugggga

SEQ ID NO: 819785 - RNA, 18 nt, Human
ugaggacagggcuggugc

SEQ ID NO: 819786 - RNA, 22 nt, Human
ugaggacagggcuggugcaggg

SEQ ID NO: 819787 - RNA, 18 nt, Human
ugagucuauugaggaugc

SEQ ID NO: 819788 - RNA, 23 nt, Human
ugagugaggccagcagcucuacg

SEQ ID NO: 819789 - RNA, 18 nt, Human
ugccaaggccacaucuuc

SEQ ID NO: 819790 - RNA, 24 nt, Human
ugccaaggccacaucuucaagcaa

SEQ ID NO: 819791 - RNA, 18 nt, Human
ugccacagcugcugcuga

SEQ ID NO: 819792 - RNA, 25 nt, Human
ugccacagcugcugcugaugaccug

SEQ ID NO: 819793 - RNA, 19 nt, Human
ugcccugggucaggccugu

SEQ ID NO: 819794 - RNA, 23 nt, Human
ugcccugggucaggccuguugcu

SEQ ID NO: 819795 - RNA, 26 nt, Human
ugccugggccccgggcauugggucca

SEQ ID NO: 819796 - RNA, 18 nt, Human
ugcuccaccuccucgcuc

SEQ ID NO: 819797 - RNA, 19 nt, Human
ugcugaugaccugcagcug

SEQ ID NO: 819798 - RNA, 19 nt, Human
ugcugcggcgggcacaagg

SEQ ID NO: 819799 - RNA, 21 nt, Human
ugcugcugcgcccaugggauc

SEQ ID NO: 819800 - RNA, 20 nt, Human
ugcuguggggaagcagccug

SEQ ID NO: 819801 - RNA, 21 nt, Human
ugcuguggggaagcagccuga

SEQ ID NO: 819802 - RNA, 21 nt, Human
ugcuugagugaggccagcagc

SEQ ID NO: 819803 - RNA, 25 nt, Human
ugcuugagugaggccagcagcucua

SEQ ID NO: 819804 - RNA, 22 nt, Human
uggaaggguggucucauccugg

SEQ ID NO: 819805 - RNA, 18 nt, Human
uggcagggggugguagaa

SEQ ID NO: 819806 - RNA, 29 nt, Human
uggcagggggugguagaaacaccaagugg

SEQ ID NO: 819807 - RNA, 23 nt, Human
uggcuccagcucagguccagcac

SEQ ID NO: 819808 - RNA, 22 nt, Human
uggcugugguacccccaggaaa

SEQ ID NO: 819809 - RNA, 25 nt, Human
uggcuucuaagccaaguggcuccuu

SEQ ID NO: 819810 - RNA, 23 nt, Human
ugggaaggacuggguaacgaggg

SEQ ID NO: 819811 - RNA, 21 nt, Human
ugggaaguggacguccccccu

SEQ ID NO: 819812 - RNA, 26 nt, Human
ugggacagagcuagggagugacgcca

SEQ ID NO: 819813 - RNA, 22 nt, Human
ugggaccuugacccucuggagg

SEQ ID NO: 819814 - RNA, 18 nt, Human
ugggcgaggggagcgugg

SEQ ID NO: 819815 - RNA, 20 nt, Human
uggggccccuggagcagggc

SEQ ID NO: 819816 - RNA, 21 nt, Human
uggggccccuggagcagggcu

SEQ ID NO: 819817 - RNA, 22 nt, Human
uggggcugggaccuugacccuc

SEQ ID NO: 819818 - RNA, 19 nt, Human
ugggguaggaggcaagggg

SEQ ID NO: 819819 - RNA, 20 nt, Human
ugggucaggccuguugcucu

SEQ ID NO: 819820 - RNA, 24 nt, Human
uggugauggugguggugcagcagg

SEQ ID NO: 819821 - RNA, 20 nt, Human
ugguguggggcuggcagggg

SEQ ID NO: 819822 - RNA, 26 nt, Human
ugugcaggacugggcagggggaacgc

SEQ ID NO: 819823 - RNA, 21 nt, Human
uguuaggaaguugggucccug

SEQ ID NO: 819824 - RNA, 24 nt, Human
uguucccauccucagcccuagcug

SEQ ID NO: 819825 - RNA, 18 nt, Human
uuacuggaccuccaccuc

SEQ ID NO: 819826 - RNA, 25 nt, Human
uuacuggaccuccaccucccuucca

SEQ ID NO: 819827 - RNA, 23 nt, Human
uucaagcaagcuaauuagacaag

SEQ ID NO: 819828 - RNA, 18 nt, Human
uucagggauggaaggucc

SEQ ID NO: 819829 - RNA, 19 nt, Human
uucagggauggaagguccc

SEQ ID NO: 819830 - RNA, 21 nt, Human
uucccauccucagcccuagcu

SEQ ID NO: 819831 - RNA, 21 nt, Human
uuccccuaggcagaagacccc

SEQ ID NO: 819832 - RNA, 21 nt, Human
uuccugaccccugaggacagg

SEQ ID NO: 819833 - RNA, 18 nt, Human
uuccuggaaauagccaaa

SEQ ID NO: 819834 - RNA, 18 nt, Human
uuccuuaaggacaggaac

SEQ ID NO: 819835 - RNA, 19 nt, Human
uuggcaaggcaggaccaag

SEQ ID NO: 819836 - RNA, 22 nt, Human
aaacaaagauggcuccuccucc

SEQ ID NO: 819837 - RNA, 24 nt, Human
aaagugcugggauuacagguguga

SEQ ID NO: 819838 - RNA, 22 nt, Human
aagauggcuccuccuccaccaa

SEQ ID NO: 819839 - RNA, 21 nt, Human
aagcagcugaaggcaagggcc

SEQ ID NO: 819840 - RNA, 19 nt, Human
aagccagggcagggaagag

SEQ ID NO: 819841 - RNA, 26 nt, Human
aaguaagcagaggagcggggcagggg

SEQ ID NO: 819842 - RNA, 19 nt, Human
aaguagcugggauuacagg

SEQ ID NO: 819843 - RNA, 25 nt, Human
aaguagcugggauuacaggcacccg

SEQ ID NO: 819844 - RNA, 18 nt, Human
aagugcugggauuacagg

SEQ ID NO: 819845 - RNA, 19 nt, Human
aagugcugggauuacaggu

SEQ ID NO: 819846 - RNA, 26 nt, Human
aagugcugggauuacaggugugagcc

SEQ ID NO: 819847 - RNA, 20 nt, Human
acagccagagaagccagggc

SEQ ID NO: 819848 - RNA, 18 nt, Human
accauguuggccaggcug

SEQ ID NO: 819849 - RNA, 21 nt, Human
accccaucugcccagaaguaa

SEQ ID NO: 819850 - RNA, 22 nt, Human
accccaucugcccagaaguaaa

SEQ ID NO: 819851 - RNA, 23 nt, Human
accuuagccucccaaagugcugg

SEQ ID NO: 819852 - RNA, 24 nt, Human
accuugugauccgcccaccuuagc

SEQ ID NO: 819853 - RNA, 23 nt, Human
acucccuccaccccaucugccca

SEQ ID NO: 819854 - RNA, 24 nt, Human
acugucgcccgggcuggagugcag

SEQ ID NO: 819855 - RNA, 21 nt, Human
agaagaggagaccauuccggg

SEQ ID NO: 819856 - RNA, 25 nt, Human
agaggagacguguuuggcugcccag

SEQ ID NO: 819857 - RNA, 20 nt, Human
agcugaaggcaagggccuca

SEQ ID NO: 819858 - RNA, 22 nt, Human
aggaacgccagacuugggcaau

SEQ ID NO: 819859 - RNA, 24 nt, Human
aggcagggccauguccaggcugcc

SEQ ID NO: 819860 - RNA, 21 nt, Human
aggcgucaggaccaggguggc

SEQ ID NO: 819861 - RNA, 21 nt, Human
agguucaagugauucuccugc

SEQ ID NO: 819862 - RNA, 22 nt, Human
agguucaagugauucuccugcc

SEQ ID NO: 819863 - RNA, 23 nt, Human
agguucaagugauucuccugccu

SEQ ID NO: 819864 - RNA, 20 nt, Human
agucccuucuccaagccagu

SEQ ID NO: 819865 - RNA, 24 nt, Human
agugauucuccugccucagccucc

SEQ ID NO: 819866 - RNA, 18 nt, Human
agugcaguggcgugaucu

SEQ ID NO: 819867 - RNA, 19 nt, Human
agugcaguggcgugaucuc

SEQ ID NO: 819868 - RNA, 24 nt, Human
agugcaguggcgugaucucaacuc

SEQ ID NO: 819869 - RNA, 18 nt, Human
augggguuucaccauguu

SEQ ID NO: 819870 - RNA, 22 nt, Human
augggguuucaccauguuggcc

SEQ ID NO: 819871 - RNA, 23 nt, Human
augggguuucaccauguuggcca

SEQ ID NO: 819872 - RNA, 24 nt, Human
augggguuucaccauguuggccag

SEQ ID NO: 819873 - RNA, 18 nt, Human
auucuccugccucagccu

SEQ ID NO: 819874 - RNA, 24 nt, Human
auuuuuguauuuuuaguagagaug

SEQ ID NO: 819875 - RNA, 19 nt, Human
caaacagcucugaguccag

SEQ ID NO: 819876 - RNA, 24 nt, Human
caaagugcugggauuacaggugug

SEQ ID NO: 819877 - RNA, 23 nt, Human
caaccuccaccucccagguucaa

SEQ ID NO: 819878 - RNA, 22 nt, Human
caagugauucuccugccucagc

SEQ ID NO: 819879 - RNA, 27 nt, Human
caagugauucuccugccucagccuccc

SEQ ID NO: 819880 - RNA, 22 nt, Human
caagugccguucacuagguucc

SEQ ID NO: 819881 - RNA, 24 nt, Human
caaucuucagccauguccagaaca

SEQ ID NO: 819882 - RNA, 24 nt, Human
caccacacccagcuaauuuuugua

SEQ ID NO: 819883 - RNA, 19 nt, Human
caccagagccagcgcaaug

SEQ ID NO: 819884 - RNA, 21 nt, Human
caccauguuggccaggcuggu

SEQ ID NO: 819885 - RNA, 24 nt, Human
caccauguuggccaggcuggucuc

SEQ ID NO: 819886 - RNA, 18 nt, Human
cacccgccaccacaccca

SEQ ID NO: 819887 - RNA, 19 nt, Human
caccguguacagauccagc

SEQ ID NO: 819888 - RNA, 21 nt, Human
cacugcaaccuccaccuccca

SEQ ID NO: 819889 - RNA, 21 nt, Human
cagaacaucgccaaaggcccc

SEQ ID NO: 819890 - RNA, 23 nt, Human
cagaaugaccagcaguggagcca

SEQ ID NO: 819891 - RNA, 22 nt, Human
cagcagcucuggagaguaggga

SEQ ID NO: 819892 - RNA, 20 nt, Human
cauccacagacucaaacacc

SEQ ID NO: 819893 - RNA, 24 nt, Human
cauguuggccaggcuggucucaaa

SEQ ID NO: 819894 - RNA, 20 nt, Human
ccaaagugcugggauuacag

SEQ ID NO: 819895 - RNA, 21 nt, Human
ccaaagugcugggauuacagg

SEQ ID NO: 819896 - RNA, 21 nt, Human
ccaaagugcugggauuacagg

SEQ ID NO: 819897 - RNA, 24 nt, Human
ccaaagugcugggauuacaggugu

SEQ ID NO: 819898 - RNA, 22 nt, Human
ccaacaaccuccaccuccugca

SEQ ID NO: 819899 - RNA, 23 nt, Human
ccaaguagcugggauuacaggca

SEQ ID NO: 819900 - RNA, 27 nt, Human
ccaccaacaaccuccaccuccugcaag

SEQ ID NO: 819901 - RNA, 24 nt, Human
ccaccagagccagcgcaaugaaca

SEQ ID NO: 819902 - RNA, 24 nt, Human
ccaccucccagguucaagugauuc

SEQ ID NO: 819903 - RNA, 25 nt, Human
ccagaacaucgccaaaggccccuug

SEQ ID NO: 819904 - RNA, 23 nt, Human
ccagaccaagaagacgucaucau

SEQ ID NO: 819905 - RNA, 25 nt, Human
ccagcaaacaaagauggcuccuccu

SEQ ID NO: 819906 - RNA, 20 nt, Human
ccaggaccccgcucccgggg

SEQ ID NO: 819907 - RNA, 23 nt, Human
ccauuccgggcaccagcaaacaa

SEQ ID NO: 819908 - RNA, 23 nt, Human
cccaaguagcugggauuacaggc

SEQ ID NO: 819909 - RNA, 24 nt, Human
cccaaguagcugggauuacaggca

SEQ ID NO: 819910 - RNA, 23 nt, Human
cccagguucaagugauucuccuc

SEQ ID NO: 819911 - RNA, 23 nt, Human
cccagguucaagugauucuccug

SEQ ID NO: 819912 - RNA, 22 nt, Human
cccaucugcccagaaguaaaag

SEQ ID NO: 819913 - RNA, 22 nt, Human
ccccacacaccucuucuacacc

SEQ ID NO: 819914 - RNA, 24 nt, Human
ccccacacaccucuucuacaccaa

SEQ ID NO: 819915 - RNA, 21 nt, Human
ccccaggucucaucuuacaag

SEQ ID NO: 819916 - RNA, 21 nt, Human
cccgccaccacacccagcuaa

SEQ ID NO: 819917 - RNA, 22 nt, Human
cccgggcuggagugcaguggcg

SEQ ID NO: 819918 - RNA, 26 nt, Human
ccgcccaccuuagccucccaaagugc

SEQ ID NO: 819919 - RNA, 19 nt, Human
ccgcuggaagacacagggg

SEQ ID NO: 819920 - RNA, 21 nt, Human
ccuacaaugcaggggacaguc

SEQ ID NO: 819921 - RNA, 24 nt, Human
ccucccagguucaagugauucucc

SEQ ID NO: 819922 - RNA, 21 nt, Human
ccuccgugggggaaguucugg

SEQ ID NO: 819923 - RNA, 23 nt, Human
ccugccucagccucccaaguagc

SEQ ID NO: 819924 - RNA, 24 nt, Human
ccugccucagccucccaaguagcu

SEQ ID NO: 819925 - RNA, 24 nt, Human
ccuucagccuccaccugcuccacc

SEQ ID NO: 819926 - RNA, 23 nt, Human
cuaauuuuuguauuuuuaguaga

SEQ ID NO: 819927 - RNA, 25 nt, Human
cucaaaacuccugaccuugugaucc

SEQ ID NO: 819928 - RNA, 24 nt, Human
cucacugcaaccuccaccucccag

SEQ ID NO: 819929 - RNA, 24 nt, Human
cucagccucccaaguagcugggau

SEQ ID NO: 819930 - RNA, 22 nt, Human
cuccaggcuguccugcacggcc

SEQ ID NO: 819931 - RNA, 18 nt, Human
cucccagguucaagugau

SEQ ID NO: 819932 - RNA, 19 nt, Human
cucccuccaccccaucugc

SEQ ID NO: 819933 - RNA, 28 nt, Human
cucccuccaccccaucugcccagaagua

SEQ ID NO: 819934 - RNA, 22 nt, Human
cuccuccaccaacaaccuccac

SEQ ID NO: 819935 - RNA, 22 nt, Human
cuccugaccuugugauccgccc

SEQ ID NO: 819936 - RNA, 25 nt, Human
cuccugccucagccucccaaguagc

SEQ ID NO: 819937 - RNA, 19 nt, Human
cucgcugcuccuccagccc

SEQ ID NO: 819938 - RNA, 19 nt, Human
cucugucucgcugcuccuc

SEQ ID NO: 819939 - RNA, 23 nt, Human
cugcaaccuccaccucccagguu

SEQ ID NO: 819940 - RNA, 24 nt, Human
cugcaaccuccaccucccagguuc

SEQ ID NO: 819941 - RNA, 18 nt, Human
cugcccagaaguaaaagu

SEQ ID NO: 819942 - RNA, 24 nt, Human
cuggagugcaguggcgugaucuca

SEQ ID NO: 819943 - RNA, 22 nt, Human
cuucagccuccaccugcuccac

SEQ ID NO: 819944 - RNA, 19 nt, Human
cuugaacugucgcccgggc

SEQ ID NO: 819945 - RNA, 19 nt, Human
gaacagacaccaggacccc

SEQ ID NO: 819946 - RNA, 25 nt, Human
gaacagacaccaggaccccgcuccc

SEQ ID NO: 819947 - RNA, 23 nt, Human
gaagcagcugaaggcaagggccu

SEQ ID NO: 819948 - RNA, 18 nt, Human
gaccaggguggcuuagcg

SEQ ID NO: 819949 - RNA, 21 nt, Human
gaccuugugauccgcccaccu

SEQ ID NO: 819950 - RNA, 24 nt, Human
gaccuugugauccgcccaccuuag

SEQ ID NO: 819951 - RNA, 24 nt, Human
gacgaguucucgcuugaaauccag

SEQ ID NO: 819952 - RNA, 18 nt, Human
gagaugggguuucaccau

SEQ ID NO: 819953 - RNA, 24 nt, Human
gagaugggguuucaccauguuggc

SEQ ID NO: 819954 - RNA, 19 nt, Human
gaggagaaguuaugggagg

SEQ ID NO: 819955 - RNA, 21 nt, Human
gaggagcauagagguagcccc

SEQ ID NO: 819956 - RNA, 18 nt, Human
gagugcucugagaggccc

SEQ ID NO: 819957 - RNA, 19 nt, Human
gauguucuggcggcccgaa

SEQ ID NO: 819958 - RNA, 18 nt, Human
gauuacaggugugagcca

SEQ ID NO: 819959 - RNA, 21 nt, Human
gauuacaggugugagccacca

SEQ ID NO: 819960 - RNA, 24 nt, Human
gauuacaggugugagccaccaugc

SEQ ID NO: 819961 - RNA, 24 nt, Human
gcagcucuggagaguaggugacgc

SEQ ID NO: 819962 - RNA, 20 nt, Human
gccaccaugcccggccuccu

SEQ ID NO: 819963 - RNA, 23 nt, Human
gcccagauggucucccagaccaa

SEQ ID NO: 819964 - RNA, 19 nt, Human
gcccgaggagaaguuaugg

SEQ ID NO: 819965 - RNA, 20 nt, Human
gcccgggcuggagugcagug

SEQ ID NO: 819966 - RNA, 24 nt, Human
gcccgggcuggagugcaguggcgu

SEQ ID NO: 819967 - RNA, 24 nt, Human
gccuucagccuccaccugcuccac

SEQ ID NO: 819968 - RNA, 21 nt, Human
gcuccuccagcccuccaucac

SEQ ID NO: 819969 - RNA, 23 nt, Human
gcugaaggcaagggccucaucau

SEQ ID NO: 819970 - RNA, 19 nt, Human
gcuggagugcaguggcgug

SEQ ID NO: 819971 - RNA, 19 nt, Human
ggaaguucugguucauccu

SEQ ID NO: 819972 - RNA, 20 nt, Human
ggaccaggguggcuuagcgu

SEQ ID NO: 819973 - RNA, 24 nt, Human
ggauuacaggugugagccaccaug

SEQ ID NO: 819974 - RNA, 22 nt, Human
ggcuggagugcaguggcgugau

SEQ ID NO: 819975 - RNA, 24 nt, Human
ggcuggagugcaguggcgugaucu

SEQ ID NO: 819976 - RNA, 20 nt, Human
gggcaauuuugcccugcagg

SEQ ID NO: 819977 - RNA, 18 nt, Human
gggcaccagcaaacaaag

SEQ ID NO: 819978 - RNA, 18 nt, Human
gggcugucacaaccaggg

SEQ ID NO: 819979 - RNA, 21 nt, Human
gggguguuccgcugggcgucc

SEQ ID NO: 819980 - RNA, 22 nt, Human
gggguuucaccauguuggccag

SEQ ID NO: 819981 - RNA, 22 nt, Human
ggguuucaccauguuggccagg

SEQ ID NO: 819982 - RNA, 23 nt, Human
guagagaugggguuucaccaugu

SEQ ID NO: 819983 - RNA, 18 nt, Human
guagcugggauuacaggc

SEQ ID NO: 819984 - RNA, 20 nt, Human
gucgcaccucugcacauccu

SEQ ID NO: 819985 - RNA, 23 nt, Human
gugaacagacaccaggaccccgc

SEQ ID NO: 819986 - RNA, 20 nt, Human
gugaagcagcugaaggcaag

SEQ ID NO: 819987 - RNA, 24 nt, Human
gugauccgcccaccuuagccuccc

SEQ ID NO: 819988 - RNA, 24 nt, Human
gugauucuccugccucagccuccc

SEQ ID NO: 819989 - RNA, 18 nt, Human
guggagggucaaucucua

SEQ ID NO: 819990 - RNA, 24 nt, Human
uaauuuuuguauuuuuaguagaga

SEQ ID NO: 819991 - RNA, 24 nt, Human
uacaggcacccgccaccacaccca

SEQ ID NO: 819992 - RNA, 23 nt, Human
uacaggugugagccaccaugccc

SEQ ID NO: 819993 - RNA, 22 nt, Human
uagagaugggguuucaccaugu

SEQ ID NO: 819994 - RNA, 24 nt, Human
uaguagagaugggguuucaccaug

SEQ ID NO: 819995 - RNA, 25 nt, Human
uaguagagaugggguuucaccaugu

SEQ ID NO: 819996 - RNA, 19 nt, Human
ucaagugauucuccugccu

SEQ ID NO: 819997 - RNA, 23 nt, Human
ucaaucuucagccauguccagaa

SEQ ID NO: 819998 - RNA, 24 nt, Human
ucacugcaaccuccaccucccagg

SEQ ID NO: 819999 - RNA, 25 nt, Human
ucacugcaaccuccaccucccaggu

SEQ ID NO: 820000 - RNA, 26 nt, Human
ucacugcaaccuccaccucccagguu

SEQ ID NO: 820001 - RNA, 18 nt, Human
ucagccucccaaguagcu

SEQ ID NO: 820002 - RNA, 20 nt, Human
ucagccucccaaguagcugg

SEQ ID NO: 820003 - RNA, 20 nt, Human
ucauccacagacucaaacac

SEQ ID NO: 820004 - RNA, 18 nt, Human
uccacagacucaaacacc

SEQ ID NO: 820005 - RNA, 18 nt, Human
uccacagacucaaacacc

SEQ ID NO: 820006 - RNA, 20 nt, Human
uccaccaacaaccuccaccu

SEQ ID NO: 820007 - RNA, 27 nt, Human
uccaccaacaaccuccaccuccugcaa

SEQ ID NO: 820008 - RNA, 22 nt, Human
uccaccagagccagcgcaauga

SEQ ID NO: 820009 - RNA, 21 nt, Human
uccaccccaucugcccagaag

SEQ ID NO: 820010 - RNA, 21 nt, Human
uccaucucaggcuccuccgag

SEQ ID NO: 820011 - RNA, 23 nt, Human
ucccaaagugcugggauuacagg

SEQ ID NO: 820012 - RNA, 24 nt, Human
ucccaaguagcugggauuacaggc

SEQ ID NO: 820013 - RNA, 21 nt, Human
ucccagguucaagugauucuc

SEQ ID NO: 820014 - RNA, 24 nt, Human
ucccagguucaagugauucuccug

SEQ ID NO: 820015 - RNA, 24 nt, Human
ucgcccgggcuggagugcaguggc

SEQ ID NO: 820016 - RNA, 21 nt, Human
ucucaaaacuccugaccuugu

SEQ ID NO: 820017 - RNA, 21 nt, Human
ucuccaaaaugaugucacggu

SEQ ID NO: 820018 - RNA, 26 nt, Human
ucuccaaguuggcgggcgugaaguac

SEQ ID NO: 820019 - RNA, 25 nt, Human
ucucuaagucaaucuucagccaugu

SEQ ID NO: 820020 - RNA, 24 nt, Human
ucuugaacugucgcccgggcugga

SEQ ID NO: 820021 - RNA, 22 nt, Human
ugaacagacaccaggaccccgc

SEQ ID NO: 820022 - RNA, 24 nt, Human
ugaacugucgcccgggcuggagug

SEQ ID NO: 820023 - RNA, 22 nt, Human
ugaagcagcugaaggcaagggc

SEQ ID NO: 820024 - RNA, 19 nt, Human
ugaccagcaguggagccag

SEQ ID NO: 820025 - RNA, 22 nt, Human
ugaccagcaguggagccagaag

SEQ ID NO: 820026 - RNA, 22 nt, Human
ugacccgagucuggggaacaag

SEQ ID NO: 820027 - RNA, 24 nt, Human
ugauccgcccaccuuagccuccca

SEQ ID NO: 820028 - RNA, 23 nt, Human
ugcaggcggauguucuggcggcc

SEQ ID NO: 820029 - RNA, 20 nt, Human
ugcccagaaguaaaagucag

SEQ ID NO: 820030 - RNA, 24 nt, Human
ugccucagccucccaaguagcugg

SEQ ID NO: 820031 - RNA, 21 nt, Human
ugcugcugcuggagucgcugu

SEQ ID NO: 820032 - RNA, 24 nt, Human
ugcugggauuacaggugugagcca

SEQ ID NO: 820033 - RNA, 19 nt, Human
uggagugcaguggcgugau

SEQ ID NO: 820034 - RNA, 23 nt, Human
uggagugcaguggcgugaucuca

SEQ ID NO: 820035 - RNA, 20 nt, Human
uggcagaaguagucacagcc

SEQ ID NO: 820036 - RNA, 25 nt, Human
uggccaggcuggucucaaaacuccu

SEQ ID NO: 820037 - RNA, 21 nt, Human
uggcgugaucucaacucacug

SEQ ID NO: 820038 - RNA, 24 nt, Human
uggcgugaucucaacucacugcaa

SEQ ID NO: 820039 - RNA, 21 nt, Human
ugggauuacaggcacccgcca

SEQ ID NO: 820040 - RNA, 22 nt, Human
ugggauuacaggcacccgccac

SEQ ID NO: 820041 - RNA, 24 nt, Human
ugggauuacaggcacccgccacca

SEQ ID NO: 820042 - RNA, 18 nt, Human
ugggauuacaggugugag

SEQ ID NO: 820043 - RNA, 22 nt, Human
ugggauuacaggugugagccac

SEQ ID NO: 820044 - RNA, 23 nt, Human
ugggauuacaggugugagccacc

SEQ ID NO: 820045 - RNA, 24 nt, Human
ugggauuacaggugugagccacca

SEQ ID NO: 820046 - RNA, 25 nt, Human
ugggauuacaggugugagccaccau

SEQ ID NO: 820047 - RNA, 19 nt, Human
uggggguguuccgcugggc

SEQ ID NO: 820048 - RNA, 24 nt, Human
ugggguuucaccauguuggccagg

SEQ ID NO: 820049 - RNA, 21 nt, Human
uguauuuuuaguagagauggg

SEQ ID NO: 820050 - RNA, 21 nt, Human
ugucuagagacauuuuugggg

SEQ ID NO: 820051 - RNA, 26 nt, Human
ugucuagagacauuuuugggggcugu

SEQ ID NO: 820052 - RNA, 21 nt, Human
ugugaacagacaccaggaccc

SEQ ID NO: 820053 - RNA, 18 nt, Human
ugugagccaccaugcccg

SEQ ID NO: 820054 - RNA, 18 nt, Human
uuagccucccaaagugcu

SEQ ID NO: 820055 - RNA, 18 nt, Human
uuaguagagaugggguuu

SEQ ID NO: 820056 - RNA, 22 nt, Human
uuaguagagaugggguuucacc

SEQ ID NO: 820057 - RNA, 24 nt, Human
uuaguagagaugggguuucaccau

SEQ ID NO: 820058 - RNA, 21 nt, Human
uucaagugauucuccugccuc

SEQ ID NO: 820059 - RNA, 23 nt, Human
uucaagugauucuccugccucag

SEQ ID NO: 820060 - RNA, 24 nt, Human
uucaagugauucuccugccucagc

SEQ ID NO: 820061 - RNA, 23 nt, Human
uucagccauguccagaacaucgc

SEQ ID NO: 820062 - RNA, 23 nt, Human
uucgcaaugucuagagacauuuu

SEQ ID NO: 820063 - RNA, 24 nt, Human
uugaacugucgcccgggcuggagu

SEQ ID NO: 820064 - RNA, 21 nt, Human
uuggagggauagggaaagaag

SEQ ID NO: 820065 - RNA, 23 nt, Human
uuguauuuuuaguagagaugggg

SEQ ID NO: 820066 - RNA, 24 nt, Human
uuucaccauguuggccaggcuggu

SEQ ID NO: 820067 - RNA, 24 nt, Human
uuuccaucucaggcuccuccgagg

SEQ ID NO: 820068 - RNA, 24 nt, Human
uuuuuaguagagaugggguuucac

SEQ ID NO: 820069 - RNA, 20 nt, Human
uuuuuguauuuuuaguagag

SEQ ID NO: 820070 - RNA, 23 nt, Human
aaaccucagucucaagagcacca

SEQ ID NO: 820071 - RNA, 23 nt, Human
aaagacacacacucaaaauuaca

SEQ ID NO: 820072 - RNA, 23 nt, Human
aaagacccaucccaaguggcccu

SEQ ID NO: 820073 - RNA, 21 nt, Human
aaaggugagugagaaccaaug

SEQ ID NO: 820074 - RNA, 20 nt, Human
aaccucuuaagcaagacacu

SEQ ID NO: 820075 - RNA, 23 nt, Human
aacgcuaggcaccacugccauuc

SEQ ID NO: 820076 - RNA, 22 nt, Human
aacugcccucucccucccccac

SEQ ID NO: 820077 - RNA, 19 nt, Human
aagcagggagaagauaggu

SEQ ID NO: 820078 - RNA, 18 nt, Human
aaggagcuggcugugcug

SEQ ID NO: 820079 - RNA, 18 nt, Human
aaggagcuggcugugcug

SEQ ID NO: 820080 - RNA, 21 nt, Human
aaggagggacccaugcacagc

SEQ ID NO: 820081 - RNA, 24 nt, Human
aaggauucucauugaaaaggggug

SEQ ID NO: 820082 - RNA, 23 nt, Human
aaguacccugaagggcucagagg

SEQ ID NO: 820083 - RNA, 19 nt, Human
aauaaagaaguacccugaa

SEQ ID NO: 820084 - RNA, 20 nt, Human
accacaugcacugaugcccc

SEQ ID NO: 820085 - RNA, 21 nt, Human
acccagaacccccccaacucc

SEQ ID NO: 820086 - RNA, 25 nt, Human
acccagaacccccccaacuccacac

SEQ ID NO: 820087 - RNA, 18 nt, Human
acugcccucucccucccc

SEQ ID NO: 820088 - RNA, 26 nt, Human
agaaaaaagacccagcaaauacuaca

SEQ ID NO: 820089 - RNA, 23 nt, Human
agaacaaccacaacgcuaggcac

SEQ ID NO: 820090 - RNA, 19 nt, Human
agaaggaguaaagacacac

SEQ ID NO: 820091 - RNA, 19 nt, Human
agacaaugacucacaauca

SEQ ID NO: 820092 - RNA, 23 nt, Human
agagagaaaaugaccagagggaa

SEQ ID NO: 820093 - RNA, 19 nt, Human
agagaugagauggagagga

SEQ ID NO: 820094 - RNA, 21 nt, Human
agcagggagaagauagguuca

SEQ ID NO: 820095 - RNA, 23 nt, Human
aggaagaaggaguaaagacacac

SEQ ID NO: 820096 - RNA, 18 nt, Human
aggagagagauacagaga

SEQ ID NO: 820097 - RNA, 23 nt, Human
aggaggaaagggaagugcccugg

SEQ ID NO: 820098 - RNA, 21 nt, Human
agggagaagauagguucaaag

SEQ ID NO: 820099 - RNA, 23 nt, Human
agggagaagauagguucaaagga

SEQ ID NO: 820100 - RNA, 29 nt, Human
agggagaagauagguucaaaggggacccc

SEQ ID NO: 820101 - RNA, 20 nt, Human
agggauauccagagucaugg

SEQ ID NO: 820102 - RNA, 20 nt, Human
agggcuaagguugggagggu

SEQ ID NO: 820103 - RNA, 22 nt, Human
agggcuccuccaugccagcgcu

SEQ ID NO: 820104 - RNA, 26 nt, Human
aggggcucgacgaggcacaggggugg

SEQ ID NO: 820105 - RNA, 19 nt, Human
agguccugguauggagcag

SEQ ID NO: 820106 - RNA, 20 nt, Human
aguacccugaagggcucaga

SEQ ID NO: 820107 - RNA, 25 nt, Human
agugcuugcaaaccugcaucuucac

SEQ ID NO: 820108 - RNA, 19 nt, Human
auguggauuuuacaauauc

SEQ ID NO: 820109 - RNA, 19 nt, Human
caaaauuacagagaugaga

SEQ ID NO: 820110 - RNA, 20 nt, Human
caagagggcuccuccaugcc

SEQ ID NO: 820111 - RNA, 18 nt, Human
caagaugugcugcuccag

SEQ ID NO: 820112 - RNA, 19 nt, Human
cacacaggcaccccgauuu

SEQ ID NO: 820113 - RNA, 22 nt, Human
cacagcucauucuuaagagcuc

SEQ ID NO: 820114 - RNA, 19 nt, Human
cacaguugcaggggagagg

SEQ ID NO: 820115 - RNA, 20 nt, Human
caccacccgcugcccccgac

SEQ ID NO: 820116 - RNA, 22 nt, Human
cacccagaacccccccaacucc

SEQ ID NO: 820117 - RNA, 22 nt, Human
caccccgauuugucucaacagc

SEQ ID NO: 820118 - RNA, 24 nt, Human
caccuccugcugguuuuccaaaau

SEQ ID NO: 820119 - RNA, 24 nt, Human
caccugaguuguacuuuucuucca

SEQ ID NO: 820120 - RNA, 21 nt, Human
cacucccucauucugccucca

SEQ ID NO: 820121 - RNA, 23 nt, Human
cacuggacugccugugaucgcgc

SEQ ID NO: 820122 - RNA, 22 nt, Human
cagagcucaggcugccaacuuc

SEQ ID NO: 820123 - RNA, 20 nt, Human
cagccacuuccuuggccugu

SEQ ID NO: 820124 - RNA, 24 nt, Human
cagcggcugcaguauucaacagaa

SEQ ID NO: 820125 - RNA, 19 nt, Human
caggaagggcagagccagg

SEQ ID NO: 820126 - RNA, 22 nt, Human
caggaccaagugcuugcaaacc

SEQ ID NO: 820127 - RNA, 18 nt, Human
caggagcaggugacuuac

SEQ ID NO: 820128 - RNA, 22 nt, Human
ccaacuccacacgcccugcacg

SEQ ID NO: 820129 - RNA, 22 nt, Human
cccaacacaccauucucuaccu

SEQ ID NO: 820130 - RNA, 22 nt, Human
cccaacuccacacgcccugcac

SEQ ID NO: 820131 - RNA, 21 nt, Human
cccacaggugaccaacggcuu

SEQ ID NO: 820132 - RNA, 21 nt, Human
cccacauuccagaugaggaag

SEQ ID NO: 820133 - RNA, 26 nt, Human
cccaccacccgcugcccccgaccauc

SEQ ID NO: 820134 - RNA, 20 nt, Human
cccagaacccccccaacucu

SEQ ID NO: 820135 - RNA, 24 nt, Human
ccccaaauaaagcaccuguucuca

SEQ ID NO: 820136 - RNA, 26 nt, Human
ccccaacuccacacgcccugcacguu

SEQ ID NO: 820137 - RNA, 21 nt, Human
cccccccaacuccacacgccc

SEQ ID NO: 820138 - RNA, 22 nt, Human
cccccccaacuccacacgcccu

SEQ ID NO: 820139 - RNA, 22 nt, Human
cccucuucuuccccuucuacug

SEQ ID NO: 820140 - RNA, 24 nt, Human
cccucuucuuccccuucuacuguc

SEQ ID NO: 820141 - RNA, 26 nt, Human
cccucuucuuccccuucuacugucuu

SEQ ID NO: 820142 - RNA, 23 nt, Human
ccucagaacaaccacaacgcuuu

SEQ ID NO: 820143 - RNA, 19 nt, Human
ccucagaguuacccgggag

SEQ ID NO: 820144 - RNA, 19 nt, Human
ccugcuggauccaccacuu

SEQ ID NO: 820145 - RNA, 20 nt, Human
cgcgcucacagcaagaugug

SEQ ID NO: 820146 - RNA, 23 nt, Human
cgcucacagcaagaugugcugcu

SEQ ID NO: 820147 - RNA, 23 nt, Human
cggggucauuggcugaggcugua

SEQ ID NO: 820148 - RNA, 24 nt, Human
cgucacaggcuccgcuuuucaggg

SEQ ID NO: 820149 - RNA, 23 nt, Human
cuagcucaaugaugcaccucccc

SEQ ID NO: 820150 - RNA, 24 nt, Human
cucacaaucaugccucccacagcu

SEQ ID NO: 820151 - RNA, 23 nt, Human
cucccccacccacaggugaccaa

SEQ ID NO: 820152 - RNA, 18 nt, Human
cugcaccuggaccugacc

SEQ ID NO: 820153 - RNA, 18 nt, Human
cugcaccuggaccugacc

SEQ ID NO: 820154 - RNA, 18 nt, Human
cugcccagugacuaccug

SEQ ID NO: 820155 - RNA, 21 nt, Human
cugcugcuuuguuucucuucc

SEQ ID NO: 820156 - RNA, 24 nt, Human
cugcuggauccaccacuuucacac

SEQ ID NO: 820157 - RNA, 18 nt, Human
cugcugguuuuccaaaau

SEQ ID NO: 820158 - RNA, 18 nt, Human
cuggucuuaagcaaugcu

SEQ ID NO: 820159 - RNA, 24 nt, Human
cuugcaaaccugcaucuucaccac

SEQ ID NO: 820160 - RNA, 19 nt, Human
cuuucggggcugacugcag

SEQ ID NO: 820161 - RNA, 24 nt, Human
gaaaaaagacccagcaaauacuac

SEQ ID NO: 820162 - RNA, 19 nt, Human
gaaagguauccacauccuc

SEQ ID NO: 820163 - RNA, 23 nt, Human
gacaacugaagagcagagagaga

SEQ ID NO: 820164 - RNA, 18 nt, Human
gagugagaaccaaugucu

SEQ ID NO: 820165 - RNA, 26 nt, Human
gauacagagacagacacacagagaga

SEQ ID NO: 820166 - RNA, 20 nt, Human
gauccauggaugcuccaccu

SEQ ID NO: 820167 - RNA, 21 nt, Human
gaugcggacuccaggccucgc

SEQ ID NO: 820168 - RNA, 24 nt, Human
gaugggaagaagcaaguucaaugu

SEQ ID NO: 820169 - RNA, 22 nt, Human
gcaaaccugcaucuucaccaca

SEQ ID NO: 820170 - RNA, 18 nt, Human
gcagagagagagagaaaa

SEQ ID NO: 820171 - RNA, 19 nt, Human
gcccacauguucccuuuca

SEQ ID NO: 820172 - RNA, 20 nt, Human
gcggguguauccugagaacg

SEQ ID NO: 820173 - RNA, 26 nt, Human
gcuuuucagggaauccaaacaugcgg

SEQ ID NO: 820174 - RNA, 25 nt, Human
ggaauucucugauguauccuugccc

SEQ ID NO: 820175 - RNA, 18 nt, Human
ggacaugucuucgggaga

SEQ ID NO: 820176 - RNA, 18 nt, Human
ggaggagguccugguaug

SEQ ID NO: 820177 - RNA, 18 nt, Human
ggagguccugguauggag

SEQ ID NO: 820178 - RNA, 21 nt, Human
ggcaaucacccaacacaccau

SEQ ID NO: 820179 - RNA, 20 nt, Human
ggcaggagugggggagccug

SEQ ID NO: 820180 - RNA, 21 nt, Human
ggcccaaggaggaggaaaggg

SEQ ID NO: 820181 - RNA, 20 nt, Human
gggaauguauauccccuggu

SEQ ID NO: 820182 - RNA, 22 nt, Human
ggggagaaaaaagacccagcaa

SEQ ID NO: 820183 - RNA, 21 nt, Human
gugauucagaacucguuuuug

SEQ ID NO: 820184 - RNA, 18 nt, Human
uaaagaaguacccugaag

SEQ ID NO: 820185 - RNA, 21 nt, Human
uaauaauagcagacgcuguua

SEQ ID NO: 820186 - RNA, 24 nt, Human
uacacacacaugaucuaaagagaa

SEQ ID NO: 820187 - RNA, 18 nt, Human
uaccaggaagggcagagc

SEQ ID NO: 820188 - RNA, 18 nt, Human
uacccgggaguuaugucc

SEQ ID NO: 820189 - RNA, 19 nt, Human
uacccugaagggcucagag

SEQ ID NO: 820190 - RNA, 20 nt, Human
uaccuggugcaagagggcuc

SEQ ID NO: 820191 - RNA, 21 nt, Human
uaccuuggagugagcgugaga

SEQ ID NO: 820192 - RNA, 21 nt, Human
uagcagacgcuguuaugaaag

SEQ ID NO: 820193 - RNA, 18 nt, Human
uagcucaaugaugcaccu

SEQ ID NO: 820194 - RNA, 23 nt, Human
uagcuuuccugggggaaggcaau

SEQ ID NO: 820195 - RNA, 22 nt, Human
uauggagcagacauuggguguu

SEQ ID NO: 820196 - RNA, 20 nt, Human
uauguccugcucaccccgcu

SEQ ID NO: 820197 - RNA, 22 nt, Human
ucacacccagaacccccccaac

SEQ ID NO: 820198 - RNA, 22 nt, Human
ucacuugggaguugacacaaaa

SEQ ID NO: 820199 - RNA, 21 nt, Human
ucagacgcucagugauucaga

SEQ ID NO: 820200 - RNA, 22 nt, Human
uccacacgcccugcacguucca

SEQ ID NO: 820201 - RNA, 24 nt, Human
uccacacgcccugcacguuccaca

SEQ ID NO: 820202 - RNA, 24 nt, Human
uccaugaucugagacagcucuggc

SEQ ID NO: 820203 - RNA, 22 nt, Human
ucccacagcugacggcggcacu

SEQ ID NO: 820204 - RNA, 33 nt, Human
uccccugcaggcacgggguggauucugaggcug

SEQ ID NO: 820205 - RNA, 19 nt, Human
ucccucagaguuacccggg

SEQ ID NO: 820206 - RNA, 25 nt, Human
uccuugucagccacuuccuuggccu

SEQ ID NO: 820207 - RNA, 23 nt, Human
ucgaggccacaucuuuggacagg

SEQ ID NO: 820208 - RNA, 20 nt, Human
ucucuacagaaugucacuug

SEQ ID NO: 820209 - RNA, 19 nt, Human
ucucugaguacccaggcuu

SEQ ID NO: 820210 - RNA, 24 nt, Human
ucugcccaccacccgcugcccccg

SEQ ID NO: 820211 - RNA, 24 nt, Human
ucuucugcccaccacccgcugccc

SEQ ID NO: 820212 - RNA, 19 nt, Human
ugaaaggugagugagaacc

SEQ ID NO: 820213 - RNA, 21 nt, Human
ugacacaaaacccagggggag

SEQ ID NO: 820214 - RNA, 21 nt, Human
ugaccagagggaaaaauagaa

SEQ ID NO: 820215 - RNA, 21 nt, Human
ugaccuugcuuagccccucuu

SEQ ID NO: 820216 - RNA, 22 nt, Human
ugagagacaaugacucacaauc

SEQ ID NO: 820217 - RNA, 26 nt, Human
ugagauggagaggaagcagggagaag

SEQ ID NO: 820218 - RNA, 23 nt, Human
ugaguaauaauagcagacgcugu

SEQ ID NO: 820219 - RNA, 22 nt, Human
ugcagaccacuuuccccugcag

SEQ ID NO: 820220 - RNA, 18 nt, Human
ugcaguauucaacagaac

SEQ ID NO: 820221 - RNA, 19 nt, Human
ugcccaccacccgcugccc

SEQ ID NO: 820222 - RNA, 21 nt, Human
ugcccagguugcggggggagc

SEQ ID NO: 820223 - RNA, 19 nt, Human
ugccgacagcuccugccac

SEQ ID NO: 820224 - RNA, 18 nt, Human
ugcguguguugccgacag

SEQ ID NO: 820225 - RNA, 24 nt, Human
uggaaaacagacaacugaagagca

SEQ ID NO: 820226 - RNA, 19 nt, Human
uggaggugcuucccuuucc

SEQ ID NO: 820227 - RNA, 22 nt, Human
uggcugcagaaaccucagucuc

SEQ ID NO: 820228 - RNA, 22 nt, Human
ugggaagaagcaaguucaaugu

SEQ ID NO: 820229 - RNA, 21 nt, Human
uggugcaagagggcuccucca

SEQ ID NO: 820230 - RNA, 18 nt, Human
uguccggugugugugagg

SEQ ID NO: 820231 - RNA, 28 nt, Human
uguccugcucaccccgcuucucugccca

SEQ ID NO: 820232 - RNA, 25 nt, Human
ugucuugucuccuagcuuuccuggg

SEQ ID NO: 820233 - RNA, 24 nt, Human
uguugccgacagcuccugccacau

SEQ ID NO: 820234 - RNA, 25 nt, Human
uuacacacacaugaucuaaagagaa

SEQ ID NO: 820235 - RNA, 22 nt, Human
uuacuggcugcagaaaccucag

SEQ ID NO: 820236 - RNA, 24 nt, Human
uucaauguaaggauuuuguucucu

SEQ ID NO: 820237 - RNA, 24 nt, Human
uucacacccagaacccccccaacu

SEQ ID NO: 820238 - RNA, 21 nt, Human
uucacagaaguugcccaccau

SEQ ID NO: 820239 - RNA, 22 nt, Human
uucauaggcuucauaagugaag

SEQ ID NO: 820240 - RNA, 22 nt, Human
uuccacacaggcaccccgauuu

SEQ ID NO: 820241 - RNA, 24 nt, Human
uuccagaugaggaagccggcagga

SEQ ID NO: 820242 - RNA, 25 nt, Human
uucccuagaggggcucgacgaggca

SEQ ID NO: 820243 - RNA, 20 nt, Human
uucccuuuccuccccuuacu

SEQ ID NO: 820244 - RNA, 18 nt, Human
uucucugcccagugacua

SEQ ID NO: 820245 - RNA, 19 nt, Human
uugacacaaaacccagggg

SEQ ID NO: 820246 - RNA, 21 nt, Human
uugcaggauccuaucuggcug

SEQ ID NO: 820247 - RNA, 19 nt, Human
uuguacuuuucuuccauag

SEQ ID NO: 820248 - RNA, 18 nt, Human
uuguccugcugcuuuguu

SEQ ID NO: 820249 - RNA, 21 nt, Human
uuguccugcugcuuuguuucu

SEQ ID NO: 820250 - RNA, 18 nt, Human
uuuugaguaauaauagca

SEQ ID NO: 820251 - RNA, 20 nt, Human
uuuuguccugcugcuuuguu

SEQ ID NO: 820252 - RNA, 23 nt, Human
aaaaaauagaaacaccuggaaac

SEQ ID NO: 820253 - RNA, 18 nt, Human
aaaaacaaccaaagagcu

SEQ ID NO: 820254 - RNA, 18 nt, Human
aaaagggcauaaucccua

SEQ ID NO: 820255 - RNA, 30 nt, Human
aaagcaaacaaguaguucuagaaaagcccc

SEQ ID NO: 820256 - RNA, 21 nt, Human
aaaguuauauccaaaaacaac

SEQ ID NO: 820257 - RNA, 21 nt, Human
aaauacaccgaaauaugagau

SEQ ID NO: 820258 - RNA, 22 nt, Human
aaccaaagagcuggugucuccc

SEQ ID NO: 820259 - RNA, 23 nt, Human
aacuggauauacaacuauccuga

SEQ ID NO: 820260 - RNA, 22 nt, Human
aacuugaggaguauauauuuca

SEQ ID NO: 820261 - RNA, 19 nt, Human
aagcauuccuugguaucuu

SEQ ID NO: 820262 - RNA, 21 nt, Human
aagucauaaaaauugauuuau

SEQ ID NO: 820263 - RNA, 22 nt, Human
aaucaucuagguuuauauuuga

SEQ ID NO: 820264 - RNA, 22 nt, Human
acaaaaaauagaaacaccugga

SEQ ID NO: 820265 - RNA, 19 nt, Human
acaaaacugaaaaaagaag

SEQ ID NO: 820266 - RNA, 20 nt, Human
acagcagacacacaaucccc

SEQ ID NO: 820267 - RNA, 18 nt, Human
accuggaaacaagaaggc

SEQ ID NO: 820268 - RNA, 18 nt, Human
acucugcuugagacaugu

SEQ ID NO: 820269 - RNA, 18 nt, Human
agaaacaccuggaaacaa

SEQ ID NO: 820270 - RNA, 18 nt, Human
aggcagaagaagacguaa

SEQ ID NO: 820271 - RNA, 19 nt, Human
auagaaacaccuggaaaca

SEQ ID NO: 820272 - RNA, 24 nt, Human
augcaagucuauaucaaaggcacu

SEQ ID NO: 820273 - RNA, 18 nt, Human
auugcacaucuagcuaua

SEQ ID NO: 820274 - RNA, 25 nt, Human
caaaaaauagaaacaccuggaaaca

SEQ ID NO: 820275 - RNA, 25 nt, Human
caaccaaagagcuggugucucccuc

SEQ ID NO: 820276 - RNA, 21 nt, Human
caaguaguucuagaaaagccc

SEQ ID NO: 820277 - RNA, 21 nt, Human
cagaggauucaaacacauagu

SEQ ID NO: 820278 - RNA, 19 nt, Human
cagcuuuuuaacaggaaau

SEQ ID NO: 820279 - RNA, 23 nt, Human
cagcuuuuuaacaggaaauuugu

SEQ ID NO: 820280 - RNA, 21 nt, Human
caucacccaaaaauaaaugaa

SEQ ID NO: 820281 - RNA, 23 nt, Human
ccaacauaaacaauuuaucaaua

SEQ ID NO: 820282 - RNA, 22 nt, Human
ccaugguagaggcaacauuuuu

SEQ ID NO: 820283 - RNA, 20 nt, Human
ccauuuacucugcuugagac

SEQ ID NO: 820284 - RNA, 19 nt, Human
cccacagaucucuaaaacc

SEQ ID NO: 820285 - RNA, 19 nt, Human
ccuuuaauauauauccaaa

SEQ ID NO: 820286 - RNA, 19 nt, Human
cgagacagcagacacacaa

SEQ ID NO: 820287 - RNA, 21 nt, Human
cucacaaaugagaagucacac

SEQ ID NO: 820288 - RNA, 23 nt, Human
cucaucaacauuuaagaaaaaca

SEQ ID NO: 820289 - RNA, 20 nt, Human
cuuugugauaacuccagagu

SEQ ID NO: 820290 - RNA, 24 nt, Human
gaaacaccuggaaacaagaaggca

SEQ ID NO: 820291 - RNA, 19 nt, Human
gacagcuaagcuugcuuca

SEQ ID NO: 820292 - RNA, 21 nt, Human
gauuuguaaaaaguuucccuu

SEQ ID NO: 820293 - RNA, 20 nt, Human
ggaaacaagaaggcaaaaug

SEQ ID NO: 820294 - RNA, 21 nt, Human
ggaaacaagaaggcaaaaugu

SEQ ID NO: 820295 - RNA, 28 nt, Human
gggaaaaauaaacacuuaaaauauaaug

SEQ ID NO: 820296 - RNA, 21 nt, Human
gucucauuuucuuaaguucgu

SEQ ID NO: 820297 - RNA, 20 nt, Human
uaaaauaaguggcauaccug

SEQ ID NO: 820298 - RNA, 24 nt, Human
uaaaauaaguggcauaccugaaug

SEQ ID NO: 820299 - RNA, 24 nt, Human
uaaaugaauaggccagaaaaagca

SEQ ID NO: 820300 - RNA, 26 nt, Human
uaaaugaauccaucaguuagucaaga

SEQ ID NO: 820301 - RNA, 23 nt, Human
uaacagcaauaaauacaccgaaa

SEQ ID NO: 820302 - RNA, 25 nt, Human
uaacagcaauaaauacaccgaaaua

SEQ ID NO: 820303 - RNA, 22 nt, Human
uaacaggaaauuugugaacuac

SEQ ID NO: 820304 - RNA, 24 nt, Human
uaacgagcuuuuauuuuuaggaug

SEQ ID NO: 820305 - RNA, 18 nt, Human
uaagaaaaaugggaucag

SEQ ID NO: 820306 - RNA, 21 nt, Human
uaagaagccuucucuaauuaa

SEQ ID NO: 820307 - RNA, 21 nt, Human
uaagaccaauaagaagccuuc

SEQ ID NO: 820308 - RNA, 23 nt, Human
uaagaccaauaagaagccuucuc

SEQ ID NO: 820309 - RNA, 18 nt, Human
uaccaagcugagaugaaa

SEQ ID NO: 820310 - RNA, 25 nt, Human
uagaaacaccuggaaacaagaaggc

SEQ ID NO: 820311 - RNA, 21 nt, Human
uagaggcaacauuuuuggagg

SEQ ID NO: 820312 - RNA, 22 nt, Human
uagccuuuaagugacugaguuc

SEQ ID NO: 820313 - RNA, 21 nt, Human
uaguaaaugaauccaucaguu

SEQ ID NO: 820314 - RNA, 22 nt, Human
uaguaacagcaauaaauacacc

SEQ ID NO: 820315 - RNA, 23 nt, Human
uauauauccaaaguauauacaaa

SEQ ID NO: 820316 - RNA, 24 nt, Human
uaucagugagccuuaaaccaaagu

SEQ ID NO: 820317 - RNA, 23 nt, Human
uauccaaaaacaaccaaagagcu

SEQ ID NO: 820318 - RNA, 18 nt, Human
ucaaaagaaacuuucaca

SEQ ID NO: 820319 - RNA, 22 nt, Human
ucaaaagaaacuuucacaucga

SEQ ID NO: 820320 - RNA, 18 nt, Human
ucacugaacuuguuuaca

SEQ ID NO: 820321 - RNA, 18 nt, Human
ucagcagagcacuaacuu

SEQ ID NO: 820322 - RNA, 22 nt, Human
ucagggaaauuuuaagaaaaau

SEQ ID NO: 820323 - RNA, 19 nt, Human
ucaugcugcuuuugaugua

SEQ ID NO: 820324 - RNA, 21 nt, Human
ucauuuugagucaugcugcuu

SEQ ID NO: 820325 - RNA, 19 nt, Human
uccaugggguagucaccau

SEQ ID NO: 820326 - RNA, 21 nt, Human
ucucuaaugaccaaguagcuu

SEQ ID NO: 820327 - RNA, 23 nt, Human
ucugcuugagacauguccaagaa

SEQ ID NO: 820328 - RNA, 24 nt, Human
ugaaaaaagaaguugcaaaggcuu

SEQ ID NO: 820329 - RNA, 23 nt, Human
ugaaagaauacaaaaaauagaaa

SEQ ID NO: 820330 - RNA, 25 nt, Human
ugaaagaauacaaaaaauagaaaca

SEQ ID NO: 820331 - RNA, 22 nt, Human
ugaaauagaaauuaauacagcu

SEQ ID NO: 820332 - RNA, 21 nt, Human
ugaauaggccagaaaaagcau

SEQ ID NO: 820333 - RNA, 26 nt, Human
ugaccaaaaucaucuagguuuauauu

SEQ ID NO: 820334 - RNA, 22 nt, Human
ugacccacagaucucuaaaacc

SEQ ID NO: 820335 - RNA, 20 nt, Human
ugagaagucacacucuuuug

SEQ ID NO: 820336 - RNA, 21 nt, Human
ugagggacaucauuugaccca

SEQ ID NO: 820337 - RNA, 20 nt, Human
ugauacaauacacaugcucu

SEQ ID NO: 820338 - RNA, 23 nt, Human
ugaugccugaagucaguuuuguu

SEQ ID NO: 820339 - RNA, 22 nt, Human
ugcuucagacauuugccuucag

SEQ ID NO: 820340 - RNA, 19 nt, Human
uggaggcaacuugaggagu

SEQ ID NO: 820341 - RNA, 20 nt, Human
ugguagaggcaacauuuuug

SEQ ID NO: 820342 - RNA, 18 nt, Human
uguaaauucaucacccaa

SEQ ID NO: 820343 - RNA, 25 nt, Human
uuaaaauaauaugaugccugaaguc

SEQ ID NO: 820344 - RNA, 19 nt, Human
uuacacaaaaaugaauaaa

SEQ ID NO: 820345 - RNA, 21 nt, Human
uucagcuuuuuaacaggaaau

SEQ ID NO: 820346 - RNA, 24 nt, Human
uucagggaaauuuuaagaaaaaug

SEQ ID NO: 820347 - RNA, 22 nt, Human
uucauuaccaagcugagaugaa

SEQ ID NO: 820348 - RNA, 20 nt, Human
uuccccugaaauugaaacug

SEQ ID NO: 820349 - RNA, 25 nt, Human
uucguacugcaauuuacaacaagaa

SEQ ID NO: 820350 - RNA, 18 nt, Human
uugaaugcuugcuauaau

SEQ ID NO: 820351 - RNA, 24 nt, Human
uuuaagaaaaaugggaucaguuga

SEQ ID NO: 820352 - RNA, 22 nt, Human
uuuaagugacugaguucagguu

SEQ ID NO: 820353 - RNA, 20 nt, Human
uuugugaacuacucacaaau

SEQ ID NO: 820354 - RNA, 20 nt, Human
uuuuuuaaauuucauagccu

SEQ ID NO: 820355 - RNA, 19 nt, Human
aaaaaaaaaagcucaaagg

SEQ ID NO: 820356 - RNA, 23 nt, Human
aaaaagccaaagggaacaguggg

SEQ ID NO: 820357 - RNA, 21 nt, Human
aaacauuuuaagucagugguu

SEQ ID NO: 820358 - RNA, 22 nt, Human
aaacauuuuaagucagugguuc

SEQ ID NO: 820359 - RNA, 20 nt, Human
aaagaaaaaaaaagccaaag

SEQ ID NO: 820360 - RNA, 23 nt, Human
aaagugcuggauuuacaggcaug

SEQ ID NO: 820361 - RNA, 24 nt, Human
aaagugcuggauuuacaggcaugg

SEQ ID NO: 820362 - RNA, 24 nt, Human
aaagugcugggauuacaggcuuga

SEQ ID NO: 820363 - RNA, 19 nt, Human
aaaguuuaguggcuuaaaa

SEQ ID NO: 820364 - RNA, 20 nt, Human
aaauuaaaaaauuauagcac

SEQ ID NO: 820365 - RNA, 23 nt, Human
aacaaaaguaauccuuaaccaaa

SEQ ID NO: 820366 - RNA, 18 nt, Human
aaccaccuggaucagacu

SEQ ID NO: 820367 - RNA, 27 nt, Human
aagaaaccagcacagcaguagugggca

SEQ ID NO: 820368 - RNA, 19 nt, Human
aagaagacaggguucagca

SEQ ID NO: 820369 - RNA, 24 nt, Human
aagaagacaggguucagcaggugc

SEQ ID NO: 820370 - RNA, 18 nt, Human
aagaauggaaauaggugg

SEQ ID NO: 820371 - RNA, 25 nt, Human
aagcaaucguccuuacuuggccucc

SEQ ID NO: 820372 - RNA, 23 nt, Human
aagcgauucuccugccucagcca

SEQ ID NO: 820373 - RNA, 20 nt, Human
aaguaacccuaccaguaaag

SEQ ID NO: 820374 - RNA, 19 nt, Human
aagugcugggauuacaggc

SEQ ID NO: 820375 - RNA, 19 nt, Human
aagugcugggauuacaggc

SEQ ID NO: 820376 - RNA, 26 nt, Human
aagugcugggauuacaggcuugagcc

SEQ ID NO: 820377 - RNA, 20 nt, Human
aaugguauaaaaccucuaau

SEQ ID NO: 820378 - RNA, 23 nt, Human
aauuuuuuguauuuuuaguagag

SEQ ID NO: 820379 - RNA, 22 nt, Human
acaauacauugucacacucuuu

SEQ ID NO: 820380 - RNA, 21 nt, Human
acacaaguaaaaucuaccuga

SEQ ID NO: 820381 - RNA, 22 nt, Human
acagaaacaaucccuaguuaac

SEQ ID NO: 820382 - RNA, 19 nt, Human
acaggcgccugccaccacg

SEQ ID NO: 820383 - RNA, 21 nt, Human
acauagcuuguuacuaacacu

SEQ ID NO: 820384 - RNA, 24 nt, Human
accauguugcccaggcuggucucg

SEQ ID NO: 820385 - RNA, 25 nt, Human
accauguugcccaggcuggucucga

SEQ ID NO: 820386 - RNA, 19 nt, Human
acccaggcuggagugcagu

SEQ ID NO: 820387 - RNA, 23 nt, Human
acccaggcuggagugcaguggug

SEQ ID NO: 820388 - RNA, 21 nt, Human
accucagccucgaguagcuag

SEQ ID NO: 820389 - RNA, 20 nt, Human
accuccucaaggacagaaac

SEQ ID NO: 820390 - RNA, 24 nt, Human
accugaguagcugggauuauaggc

SEQ ID NO: 820391 - RNA, 21 nt, Human
acuacaauacauugucacacu

SEQ ID NO: 820392 - RNA, 25 nt, Human
acucugucacccaggcuggagugca

SEQ ID NO: 820393 - RNA, 18 nt, Human
acugcaagcuccgccucc

SEQ ID NO: 820394 - RNA, 21 nt, Human
agaaaguuuaguggcuuaaaa

SEQ ID NO: 820395 - RNA, 22 nt, Human
agaaggccucugcuuaccuaca

SEQ ID NO: 820396 - RNA, 22 nt, Human
agacaacaaaaguaauccuuaa

SEQ ID NO: 820397 - RNA, 23 nt, Human
agacagggucucaccauguugcc

SEQ ID NO: 820398 - RNA, 19 nt, Human
agacagggucuugcaguca

SEQ ID NO: 820399 - RNA, 23 nt, Human
agacaggguucagcaggugccuc

SEQ ID NO: 820400 - RNA, 19 nt, Human
agagaugggguuucaccgu

SEQ ID NO: 820401 - RNA, 23 nt, Human
agcaaaguagccagacuuuguaa

SEQ ID NO: 820402 - RNA, 18 nt, Human
agccaaagggaacaucag

SEQ ID NO: 820403 - RNA, 19 nt, Human
agccagaggaaaaucuaca

SEQ ID NO: 820404 - RNA, 24 nt, Human
agcuauggguaacuuuuucuuugu

SEQ ID NO: 820405 - RNA, 21 nt, Human
aggaaaaaaaaaagcucaaag

SEQ ID NO: 820406 - RNA, 19 nt, Human
aggcaugugccaccacgcc

SEQ ID NO: 820407 - RNA, 25 nt, Human
aggcuggagugcaguggcgcgaucu

SEQ ID NO: 820408 - RNA, 20 nt, Human
aguagagaugggguuucacc

SEQ ID NO: 820409 - RNA, 20 nt, Human
aguagcuaggacuacaggca

SEQ ID NO: 820410 - RNA, 18 nt, Human
aguagcugggacuacagg

SEQ ID NO: 820411 - RNA, 19 nt, Human
aguagcugggacuacaggc

SEQ ID NO: 820412 - RNA, 25 nt, Human
aguagcugggacuacaggcgccugc

SEQ ID NO: 820413 - RNA, 23 nt, Human
aguagcugggauuauaggcaugu

SEQ ID NO: 820414 - RNA, 20 nt, Human
agugcaguggcgcgaucucg

SEQ ID NO: 820415 - RNA, 23 nt, Human
agugcaguggcgcgaucucggcu

SEQ ID NO: 820416 - RNA, 24 nt, Human
agugcaguggcgcgaucucggcuc

SEQ ID NO: 820417 - RNA, 21 nt, Human
agugcagugguacaaucacag

SEQ ID NO: 820418 - RNA, 19 nt, Human
agugcaguggugugaccuc

SEQ ID NO: 820419 - RNA, 21 nt, Human
agugcaguggugugaccucag

SEQ ID NO: 820420 - RNA, 23 nt, Human
agugcaguggugugaccucagcu

SEQ ID NO: 820421 - RNA, 24 nt, Human
agugcugggauuacaggcuugagc

SEQ ID NO: 820422 - RNA, 24 nt, Human
aguggugugaccucagcucacugc

SEQ ID NO: 820423 - RNA, 20 nt, Human
auaaaagacaacaaaaguaa

SEQ ID NO: 820424 - RNA, 20 nt, Human
auacaagaauggaaauaggu

SEQ ID NO: 820425 - RNA, 19 nt, Human
aucacagcucacugaagcc

SEQ ID NO: 820426 - RNA, 18 nt, Human
augauaauaaaagaaagu

SEQ ID NO: 820427 - RNA, 26 nt, Human
augcagugcacugcccauuugccccc

SEQ ID NO: 820428 - RNA, 18 nt, Human
augggguuucaccguguu

SEQ ID NO: 820429 - RNA, 20 nt, Human
augggguuucaccguguuag

SEQ ID NO: 820430 - RNA, 24 nt, Human
augggguuucaccguguuagccag

SEQ ID NO: 820431 - RNA, 18 nt, Human
caaaaugcuaaauugaca

SEQ ID NO: 820432 - RNA, 26 nt, Human
caaaccaccuggaucagacucugcag

SEQ ID NO: 820433 - RNA, 24 nt, Human
caaagugcuggauuuacaggcaug

SEQ ID NO: 820434 - RNA, 24 nt, Human
caaagugcugggauuacaggcuug

SEQ ID NO: 820435 - RNA, 19 nt, Human
caacaggaacagccagagg

SEQ ID NO: 820436 - RNA, 18 nt, Human
caagaaaccagcacagca

SEQ ID NO: 820437 - RNA, 22 nt, Human
caagaaaccagcacagcaguac

SEQ ID NO: 820438 - RNA, 22 nt, Human
caagccauucuccugccucagc

SEQ ID NO: 820439 - RNA, 22 nt, Human
caagcgauucuccugccucagc

SEQ ID NO: 820440 - RNA, 24 nt, Human
caccauguugcccaggcuggucuc

SEQ ID NO: 820441 - RNA, 21 nt, Human
cacccaggcuggagugcagug

SEQ ID NO: 820442 - RNA, 24 nt, Human
cacccaggcuggagugcaguggcg

SEQ ID NO: 820443 - RNA, 18 nt, Human
caccguguuagccaggau

SEQ ID NO: 820444 - RNA, 23 nt, Human
caccguguuagccaggauggucu

SEQ ID NO: 820445 - RNA, 24 nt, Human
caccguguuagccaggauggucuu

SEQ ID NO: 820446 - RNA, 18 nt, Human
caccucagccucgaguag

SEQ ID NO: 820447 - RNA, 19 nt, Human
caccucagccucgaguagc

SEQ ID NO: 820448 - RNA, 23 nt, Human
caccugccucggccucccaaagu

SEQ ID NO: 820449 - RNA, 23 nt, Human
cacucugucacccaggcuggagu

SEQ ID NO: 820450 - RNA, 24 nt, Human
cacucugucacccaggcuggagug

SEQ ID NO: 820451 - RNA, 23 nt, Human
cacugcagccucugccuccuggg

SEQ ID NO: 820452 - RNA, 18 nt, Human
cacugcuuaugccuuuac

SEQ ID NO: 820453 - RNA, 22 nt, Human
cagaauuucccaaauugugcau

SEQ ID NO: 820454 - RNA, 21 nt, Human
cagcaacaggaacagccagag

SEQ ID NO: 820455 - RNA, 18 nt, Human
cagcaggugccucucccu

SEQ ID NO: 820456 - RNA, 20 nt, Human
cagccuccugaguagcuggg

SEQ ID NO: 820457 - RNA, 23 nt, Human
cagcucacugcagccucugccuc

SEQ ID NO: 820458 - RNA, 21 nt, Human
caggaaaaaugagaguucaua

SEQ ID NO: 820459 - RNA, 25 nt, Human
caggaaaaaugagaguucauacaaa

SEQ ID NO: 820460 - RNA, 21 nt, Human
caggcgccugccaccacgccc

SEQ ID NO: 820461 - RNA, 23 nt, Human
caggcgccugccaccacgcccgg

SEQ ID NO: 820462 - RNA, 24 nt, Human
cagggucucaccauguugcccagg

SEQ ID NO: 820463 - RNA, 22 nt, Human
caggguucagcaggugccucuc

SEQ ID NO: 820464 - RNA, 20 nt, Human
cagguuugagugaugaugga

SEQ ID NO: 820465 - RNA, 18 nt, Human
cauggcacaaaaagacag

SEQ ID NO: 820466 - RNA, 21 nt, Human
cauguugcccaggcuggucuc

SEQ ID NO: 820467 - RNA, 23 nt, Human
cauguugcccaggcuggucucga

SEQ ID NO: 820468 - RNA, 24 nt, Human
cauguugcccaggcuggucucgaa

SEQ ID NO: 820469 - RNA, 19 nt, Human
cauuccuguuuuuuuagga

SEQ ID NO: 820470 - RNA, 23 nt, Human
cauugcuaucaccacgaaaaucc

SEQ ID NO: 820471 - RNA, 21 nt, Human
ccaaagggaacaucaggaaaa

SEQ ID NO: 820472 - RNA, 24 nt, Human
ccaaagugcuggauuuacaggcau

SEQ ID NO: 820473 - RNA, 19 nt, Human
ccaaagugcugggauuaca

SEQ ID NO: 820474 - RNA, 22 nt, Human
ccaaagugcugggauuacaggc

SEQ ID NO: 820475 - RNA, 23 nt, Human
ccaaagugcugggauuacaggcu

SEQ ID NO: 820476 - RNA, 20 nt, Human
ccaccacgcccggcgaauuu

SEQ ID NO: 820477 - RNA, 18 nt, Human
ccaccgcgccuggccucc

SEQ ID NO: 820478 - RNA, 21 nt, Human
ccagcaacaggaacagccaga

SEQ ID NO: 820479 - RNA, 20 nt, Human
ccaggggcucagcuggucaa

SEQ ID NO: 820480 - RNA, 23 nt, Human
ccagucaagcucacugugguuaa

SEQ ID NO: 820481 - RNA, 24 nt, Human
ccaguguccccuuuacugcucccu

SEQ ID NO: 820482 - RNA, 18 nt, Human
ccauagcuacauacuugu

SEQ ID NO: 820483 - RNA, 22 nt, Human
ccaucucuuaggacucuucaca

SEQ ID NO: 820484 - RNA, 24 nt, Human
cccaaagugcugggauuacaggcu

SEQ ID NO: 820485 - RNA, 20 nt, Human
cccaggcuggagugcagugg

SEQ ID NO: 820486 - RNA, 23 nt, Human
cccggguucaagccauucuccug

SEQ ID NO: 820487 - RNA, 18 nt, Human
cccuuuacugcucccugg

SEQ ID NO: 820488 - RNA, 24 nt, Human
ccucccaccucagccucgaguagc

SEQ ID NO: 820489 - RNA, 24 nt, Human
ccucccggguucaagccauucucc

SEQ ID NO: 820490 - RNA, 24 nt, Human
ccuccuggguucaagcgauucucc

SEQ ID NO: 820491 - RNA, 23 nt, Human
ccucgaguagcuaggacuacagg

SEQ ID NO: 820492 - RNA, 24 nt, Human
ccucgaguagcuaggacuacaggc

SEQ ID NO: 820493 - RNA, 19 nt, Human
ccucugccuccuggguuca

SEQ ID NO: 820494 - RNA, 19 nt, Human
ccugaccucacgauccacc

SEQ ID NO: 820495 - RNA, 23 nt, Human
ccugaguagcugggacuacaggc

SEQ ID NO: 820496 - RNA, 24 nt, Human
ccugaguagcugggacuacaggcg

SEQ ID NO: 820497 - RNA, 23 nt, Human
ccugaguagcugggauuauaggc

SEQ ID NO: 820498 - RNA, 24 nt, Human
ccugaguagcugggauuauaggca

SEQ ID NO: 820499 - RNA, 23 nt, Human
ccuggguucaagcgauucuccug

SEQ ID NO: 820500 - RNA, 23 nt, Human
cgauccaccugccucggccuccc

SEQ ID NO: 820501 - RNA, 25 nt, Human
cgcccggcgaauuuuuuguauuuuu

SEQ ID NO: 820502 - RNA, 19 nt, Human
cgccucccggguucaagcc

SEQ ID NO: 820503 - RNA, 22 nt, Human
cuacaagcugaaugaguugugu

SEQ ID NO: 820504 - RNA, 22 nt, Human
cucaaaaugcuaaauugacaau

SEQ ID NO: 820505 - RNA, 20 nt, Human
cucaaggacagaaacaaucc

SEQ ID NO: 820506 - RNA, 20 nt, Human
cucacauguccuaacuuacu

SEQ ID NO: 820507 - RNA, 24 nt, Human
cucacucugucacccaggcuggag

SEQ ID NO: 820508 - RNA, 24 nt, Human
cucacugcagccucugccuccugg

SEQ ID NO: 820509 - RNA, 23 nt, Human
cucagccaccugaguagcuggga

SEQ ID NO: 820510 - RNA, 24 nt, Human
cucagccuccugaguagcugggac

SEQ ID NO: 820511 - RNA, 21 nt, Human
cuccuggguucaagcgauucu

SEQ ID NO: 820512 - RNA, 24 nt, Human
cugaguagcugggauuauaggcau

SEQ ID NO: 820513 - RNA, 23 nt, Human
cugcagccucugccuccuggguu

SEQ ID NO: 820514 - RNA, 24 nt, Human
cugcagccucugccuccuggguuc

SEQ ID NO: 820515 - RNA, 23 nt, Human
cugccucagccaccugaguagcu

SEQ ID NO: 820516 - RNA, 23 nt, Human
cugccucagccuccugaguagcu

SEQ ID NO: 820517 - RNA, 23 nt, Human
cugccucggccucccaaagugcu

SEQ ID NO: 820518 - RNA, 23 nt, Human
cuggccucaagcaaucguccuua

SEQ ID NO: 820519 - RNA, 21 nt, Human
cuucuggccucaagcaaucuu

SEQ ID NO: 820520 - RNA, 22 nt, Human
cuuggguucaaaugauccuccc

SEQ ID NO: 820521 - RNA, 19 nt, Human
gacagaaacaaucccuagu

SEQ ID NO: 820522 - RNA, 22 nt, Human
gaccucacgauccaccugccuc

SEQ ID NO: 820523 - RNA, 22 nt, Human
gaccucacgauccaccugccuc

SEQ ID NO: 820524 - RNA, 24 nt, Human
gaccucacgauccaccugccucgg

SEQ ID NO: 820525 - RNA, 19 nt, Human
gaccucagcucacugcagc

SEQ ID NO: 820526 - RNA, 21 nt, Human
gacuacaggcaugcaccauua

SEQ ID NO: 820527 - RNA, 21 nt, Human
gagagaaacaggaugagguuu

SEQ ID NO: 820528 - RNA, 24 nt, Human
gagaugggguuucaccguguuagc

SEQ ID NO: 820529 - RNA, 24 nt, Human
gaguagcuaggacuacaggcaugc

SEQ ID NO: 820530 - RNA, 22 nt, Human
gaguagcugggauuauaggcau

SEQ ID NO: 820531 - RNA, 24 nt, Human
gagugcagugguacaaucacagcu

SEQ ID NO: 820532 - RNA, 20 nt, Human
gaucagacucugcaguccug

SEQ ID NO: 820533 - RNA, 18 nt, Human
gauuacaggcuugagcca

SEQ ID NO: 820534 - RNA, 22 nt, Human
gauuacaggcuugagccaccgc

SEQ ID NO: 820535 - RNA, 18 nt, Human
gauuauaggcaugugcca

SEQ ID NO: 820536 - RNA, 21 nt, Human
gccaaagggaacaucaggaaa

SEQ ID NO: 820537 - RNA, 23 nt, Human
gcccggcgaauuuuuuguauuuu

SEQ ID NO: 820538 - RNA, 20 nt, Human
gccucagccuccugaguagc

SEQ ID NO: 820539 - RNA, 22 nt, Human
gccucgaguagcuaggacuaca

SEQ ID NO: 820540 - RNA, 19 nt, Human
gcuggagugcaguggcgcg

SEQ ID NO: 820541 - RNA, 19 nt, Human
ggacuacaggcaugcacca

SEQ ID NO: 820542 - RNA, 24 nt, Human
ggacuacaggcaugcaccauuaug

SEQ ID NO: 820543 - RNA, 22 nt, Human
ggauccaaaauuucacucaaau

SEQ ID NO: 820544 - RNA, 24 nt, Human
ggauggucuugaucuccugaccuc

SEQ ID NO: 820545 - RNA, 19 nt, Human
ggauuauaggcaugugcca

SEQ ID NO: 820546 - RNA, 18 nt, Human
ggccaggggcucagcugg

SEQ ID NO: 820547 - RNA, 22 nt, Human
gggguuucaccguguuagccag

SEQ ID NO: 820548 - RNA, 22 nt, Human
ggguuucaccguguuagccagg

SEQ ID NO: 820549 - RNA, 19 nt, Human
gguucaaaugauccuccca

SEQ ID NO: 820550 - RNA, 19 nt, Human
gguucucauauugaggugu

SEQ ID NO: 820551 - RNA, 22 nt, Human
guagagacagggucucaccaug

SEQ ID NO: 820552 - RNA, 18 nt, Human
guagcugggauuauaggc

SEQ ID NO: 820553 - RNA, 20 nt, Human
guagcugggauuauaggcau

SEQ ID NO: 820554 - RNA, 18 nt, Human
guaugauaauaaaagaaa

SEQ ID NO: 820555 - RNA, 21 nt, Human
gugaaggacuugcuaacagaa

SEQ ID NO: 820556 - RNA, 18 nt, Human
guggaaggcauuucuaua

SEQ ID NO: 820557 - RNA, 22 nt, Human
guucaaaugauccucccaccuc

SEQ ID NO: 820558 - RNA, 19 nt, Human
uaaaagaaaguuuaguggc

SEQ ID NO: 820559 - RNA, 19 nt, Human
uaacacugagguuuagaca

SEQ ID NO: 820560 - RNA, 21 nt, Human
uaaccaaaacucuaaaauauu

SEQ ID NO: 820561 - RNA, 20 nt, Human
uaauauagauuaguguccuu

SEQ ID NO: 820562 - RNA, 26 nt, Human
uaauuuuuaaaguuuuuugguagaga

SEQ ID NO: 820563 - RNA, 28 nt, Human
uaauuuuuaaaguuuuuugguagagaca

SEQ ID NO: 820564 - RNA, 21 nt, Human
uacaaucacagcucacugaag

SEQ ID NO: 820565 - RNA, 24 nt, Human
uacaggcaugcaccauuaugccca

SEQ ID NO: 820566 - RNA, 20 nt, Human
uacaggcaugggccaccuca

SEQ ID NO: 820567 - RNA, 23 nt, Human
uacaggcgccugccaccacgccc

SEQ ID NO: 820568 - RNA, 22 nt, Human
uacaggcuugagccaccgcgcc

SEQ ID NO: 820569 - RNA, 21 nt, Human
uacagugauuaaauauucucu

SEQ ID NO: 820570 - RNA, 24 nt, Human
uacagugauuaaauauucucuuuu

SEQ ID NO: 820571 - RNA, 22 nt, Human
uaccuaugcagugcacugccca

SEQ ID NO: 820572 - RNA, 18 nt, Human
uagaauguucuauaacac

SEQ ID NO: 820573 - RNA, 22 nt, Human
uagagacagggucucaccaugu

SEQ ID NO: 820574 - RNA, 22 nt, Human
uagcugguggcuggucuggugg

SEQ ID NO: 820575 - RNA, 21 nt, Human
uaggacuacaggcaugcacca

SEQ ID NO: 820576 - RNA, 26 nt, Human
uaggacuacaggcaugcaccauuaug

SEQ ID NO: 820577 - RNA, 18 nt, Human
uaggacucuucacagucu

SEQ ID NO: 820578 - RNA, 18 nt, Human
uagguggcuguauauucc

SEQ ID NO: 820579 - RNA, 21 nt, Human
uaguagagaugggguuucacc

SEQ ID NO: 820580 - RNA, 24 nt, Human
uaguagagaugggguuucaccgug

SEQ ID NO: 820581 - RNA, 26 nt, Human
uaguagagaugggguuucaccguguu

SEQ ID NO: 820582 - RNA, 22 nt, Human
uaguuucagggccucuucaugu

SEQ ID NO: 820583 - RNA, 23 nt, Human
uauaaaccuccucaaggacagaa

SEQ ID NO: 820584 - RNA, 22 nt, Human
uauaacaggauuaguuuuuaga

SEQ ID NO: 820585 - RNA, 19 nt, Human
uaucuugguggaugucaag

SEQ ID NO: 820586 - RNA, 18 nt, Human
uaugccuguaacucagaa

SEQ ID NO: 820587 - RNA, 25 nt, Human
ucaagccauucuccugccucagccu

SEQ ID NO: 820588 - RNA, 19 nt, Human
ucaagcgauucuccugccu

SEQ ID NO: 820589 - RNA, 22 nt, Human
ucacccaggcuggagugcagug

SEQ ID NO: 820590 - RNA, 24 nt, Human
ucacccaggcuggagugcaguggc

SEQ ID NO: 820591 - RNA, 24 nt, Human
ucaccguguuagccaggauggucu

SEQ ID NO: 820592 - RNA, 24 nt, Human
ucacucugucacccaggcuggagu

SEQ ID NO: 820593 - RNA, 18 nt, Human
ucacugaagccucaacuc

SEQ ID NO: 820594 - RNA, 23 nt, Human
ucacugaagccucaacucuuggg

SEQ ID NO: 820595 - RNA, 24 nt, Human
ucacugaagccucaacucuugggu

SEQ ID NO: 820596 - RNA, 18 nt, Human
ucacugcaagcuccgccu

SEQ ID NO: 820597 - RNA, 19 nt, Human
ucacugcaagcuccgccuc

SEQ ID NO: 820598 - RNA, 24 nt, Human
ucacugcaagcuccgccucccggg

SEQ ID NO: 820599 - RNA, 24 nt, Human
ucacugcagccucugccuccuggg

SEQ ID NO: 820600 - RNA, 25 nt, Human
ucacugcagccucugccuccugggu

SEQ ID NO: 820601 - RNA, 23 nt, Human
ucagccuccugaguagcugggac

SEQ ID NO: 820602 - RNA, 22 nt, Human
ucaggaaaaaaaaaagcucaaa

SEQ ID NO: 820603 - RNA, 24 nt, Human
ucagggccucuucauguggucucu

SEQ ID NO: 820604 - RNA, 25 nt, Human
uccauugcuaucaccacgaaaaucc

SEQ ID NO: 820605 - RNA, 24 nt, Human
ucccaaagugcuggauuuacaggc

SEQ ID NO: 820606 - RNA, 24 nt, Human
ucccaaagugcugggauuacaggc

SEQ ID NO: 820607 - RNA, 23 nt, Human
ucccauagcuacauacuuguucu

SEQ ID NO: 820608 - RNA, 21 nt, Human
ucccggguucaagccauucuc

SEQ ID NO: 820609 - RNA, 24 nt, Human
ucccggguucaagccauucuccug

SEQ ID NO: 820610 - RNA, 24 nt, Human
uccugaguagcugggacuacaggc

SEQ ID NO: 820611 - RNA, 21 nt, Human
uccuggguucaagcgauucuc

SEQ ID NO: 820612 - RNA, 24 nt, Human
uccuggguucaagcgauucuccug

SEQ ID NO: 820613 - RNA, 22 nt, Human
ucgcucacuggcauuuagcugg

SEQ ID NO: 820614 - RNA, 18 nt, Human
ucggccucccaaagugcu

SEQ ID NO: 820615 - RNA, 24 nt, Human
ucggucugucacccaggcuggagu

SEQ ID NO: 820616 - RNA, 23 nt, Human
ucucaccauguugcccaggcugg

SEQ ID NO: 820617 - RNA, 26 nt, Human
ucucaccauguugcccaggcuggucu

SEQ ID NO: 820618 - RNA, 27 nt, Human
ucucaccauguugcccaggcuggucuc

SEQ ID NO: 820619 - RNA, 23 nt, Human
ucucacucugucacccaggcugg

SEQ ID NO: 820620 - RNA, 24 nt, Human
ucucacucugucacccaggcugga

SEQ ID NO: 820621 - RNA, 26 nt, Human
ucucacucugucacccaggcuggagu

SEQ ID NO: 820622 - RNA, 27 nt, Human
ucucacucugucacccaggcuggagug

SEQ ID NO: 820623 - RNA, 23 nt, Human
ucucagaauccagucaagcucac

SEQ ID NO: 820624 - RNA, 24 nt, Human
ucuccugccucagccuccugagua

SEQ ID NO: 820625 - RNA, 21 nt, Human
ucucgaacuucuggccucaag

SEQ ID NO: 820626 - RNA, 23 nt, Human
ucucggucugucacccaggcugg

SEQ ID NO: 820627 - RNA, 24 nt, Human
ucucggucugucacccaggcugga

SEQ ID NO: 820628 - RNA, 19 nt, Human
ucugucacccaggcuggag

SEQ ID NO: 820629 - RNA, 24 nt, Human
ucugucacccaggcuggagugcag

SEQ ID NO: 820630 - RNA, 24 nt, Human
ucugucacccaggcuggagugcag

SEQ ID NO: 820631 - RNA, 23 nt, Human
ucuuaccuauaaaccuccucaag

SEQ ID NO: 820632 - RNA, 24 nt, Human
ucuugcagucacucaagcuggagu

SEQ ID NO: 820633 - RNA, 18 nt, Human
ugagacagagucucacuc

SEQ ID NO: 820634 - RNA, 22 nt, Human
ugagacagagucucacucuguc

SEQ ID NO: 820635 - RNA, 22 nt, Human
ugagacagagucucggucuguc

SEQ ID NO: 820636 - RNA, 21 nt, Human
ugaguuguguaugagagagaa

SEQ ID NO: 820637 - RNA, 23 nt, Human
ugcacugcccauuugccccuuca

SEQ ID NO: 820638 - RNA, 22 nt, Human
ugcaguggcgcgaucucggcuc

SEQ ID NO: 820639 - RNA, 20 nt, Human
ugcaguggugugaccucagc

SEQ ID NO: 820640 - RNA, 22 nt, Human
ugcaguggugugaccucagcuc

SEQ ID NO: 820641 - RNA, 24 nt, Human
ugcccaggcuggucucgaacuucu

SEQ ID NO: 820642 - RNA, 21 nt, Human
ugccucagccaccugaguagc

SEQ ID NO: 820643 - RNA, 24 nt, Human
ugccucagccaccugaguagcugg

SEQ ID NO: 820644 - RNA, 24 nt, Human
ugccucagccuccugaguagcugg

SEQ ID NO: 820645 - RNA, 21 nt, Human
ugccucggccucccaaagugc

SEQ ID NO: 820646 - RNA, 24 nt, Human
ugccucggccucccaaagugcugg

SEQ ID NO: 820647 - RNA, 23 nt, Human
ugcuccauaacuaaucaaugcau

SEQ ID NO: 820648 - RNA, 21 nt, Human
uggaaagaaaaaaaaagccaa

SEQ ID NO: 820649 - RNA, 23 nt, Human
uggagugcaguggcgcgaucucg

SEQ ID NO: 820650 - RNA, 24 nt, Human
uggagugcaguggcgcgaucucgg

SEQ ID NO: 820651 - RNA, 18 nt, Human
uggagugcagugguacaa

SEQ ID NO: 820652 - RNA, 19 nt, Human
uggagugcagugguacaau

SEQ ID NO: 820653 - RNA, 21 nt, Human
uggagugcagugguacaauca

SEQ ID NO: 820654 - RNA, 19 nt, Human
uggagugcaguggugugac

SEQ ID NO: 820655 - RNA, 22 nt, Human
uggagugcaguggugugaccuc

SEQ ID NO: 820656 - RNA, 23 nt, Human
uggagugcaguggugugaccuca

SEQ ID NO: 820657 - RNA, 28 nt, Human
uggagugcaguggugugacggcucuagc

SEQ ID NO: 820658 - RNA, 21 nt, Human
uggauuuacaggcaugggcca

SEQ ID NO: 820659 - RNA, 20 nt, Human
uggccucaagcaaucguccu

SEQ ID NO: 820660 - RNA, 21 nt, Human
uggccucaagcaaucguccuu

SEQ ID NO: 820661 - RNA, 18 nt, Human
uggcuggcuccuuucauc

SEQ ID NO: 820662 - RNA, 19 nt, Human
uggcuggucugguggaucc

SEQ ID NO: 820663 - RNA, 23 nt, Human
uggcuguauauuccuaugcaucu

SEQ ID NO: 820664 - RNA, 21 nt, Human
ugggacuacaggcgccugcca

SEQ ID NO: 820665 - RNA, 22 nt, Human
ugggacuacaggcgccugccac

SEQ ID NO: 820666 - RNA, 24 nt, Human
ugggacuacaggcgccugccacca

SEQ ID NO: 820667 - RNA, 18 nt, Human
ugggauuacaggcuugag

SEQ ID NO: 820668 - RNA, 19 nt, Human
ugggauuacaggcuugagc

SEQ ID NO: 820669 - RNA, 21 nt, Human
ugggauuacaggcuugagcca

SEQ ID NO: 820670 - RNA, 22 nt, Human
ugggauuacaggcuugagccac

SEQ ID NO: 820671 - RNA, 23 nt, Human
ugggauuacaggcuugagccacc

SEQ ID NO: 820672 - RNA, 24 nt, Human
ugggauuacaggcuugagccaccg

SEQ ID NO: 820673 - RNA, 18 nt, Human
ugggauuauaggcaugug

SEQ ID NO: 820674 - RNA, 21 nt, Human
ugggauuauaggcaugugcca

SEQ ID NO: 820675 - RNA, 22 nt, Human
ugggauuauaggcaugugccac

SEQ ID NO: 820676 - RNA, 24 nt, Human
ugggauuauaggcaugugccacca

SEQ ID NO: 820677 - RNA, 20 nt, Human
ugggccaggggcucagcugg

SEQ ID NO: 820678 - RNA, 20 nt, Human
uggggccagagaauacugau

SEQ ID NO: 820679 - RNA, 24 nt, Human
ugggguuucaccguguuagccagg

SEQ ID NO: 820680 - RNA, 19 nt, Human
uggguaacuuuuucuuugu

SEQ ID NO: 820681 - RNA, 23 nt, Human
uggguucaagcgauucuccugcc

SEQ ID NO: 820682 - RNA, 24 nt, Human
uggguucaagcgauucuccugccu

SEQ ID NO: 820683 - RNA, 22 nt, Human
ugguacaaucacagcucacuga

SEQ ID NO: 820684 - RNA, 24 nt, Human
ugguagagacagggucucaccaug

SEQ ID NO: 820685 - RNA, 24 nt, Human
uggugugaccucagcucacugcag

SEQ ID NO: 820686 - RNA, 21 nt, Human
ugguucaggaaaaaaaaaagc

SEQ ID NO: 820687 - RNA, 21 nt, Human
uguauuuuuaguagagauggg

SEQ ID NO: 820688 - RNA, 18 nt, Human
uguucuaucucccacaaa

SEQ ID NO: 820689 - RNA, 18 nt, Human
uguuguuaauuuguucuu

SEQ ID NO: 820690 - RNA, 24 nt, Human
uguuuguuuuuugagacagagucu

SEQ ID NO: 820691 - RNA, 19 nt, Human
uguuuuguuuuguuuuuug

SEQ ID NO: 820692 - RNA, 20 nt, Human
uguuuuguuuuguuuuuugu

SEQ ID NO: 820693 - RNA, 21 nt, Human
uguuuuguuuuuuguuuuuug

SEQ ID NO: 820694 - RNA, 24 nt, Human
uguuuuguuuuuuguuuuuuguuu

SEQ ID NO: 820695 - RNA, 23 nt, Human
uuaaugaacaaacuggaaaggaa

SEQ ID NO: 820696 - RNA, 22 nt, Human
uuaccaagucgcucacuggcau

SEQ ID NO: 820697 - RNA, 23 nt, Human
uuacuuggccucccaaagugcug

SEQ ID NO: 820698 - RNA, 21 nt, Human
uuagaacaaauaugcugaagu

SEQ ID NO: 820699 - RNA, 22 nt, Human
uuagacaccacccaaaccaccu

SEQ ID NO: 820700 - RNA, 18 nt, Human
uuaguagagaugggguuu

SEQ ID NO: 820701 - RNA, 22 nt, Human
uuaguagagaugggguuucacc

SEQ ID NO: 820702 - RNA, 24 nt, Human
uuaguagagaugggguuucaccgu

SEQ ID NO: 820703 - RNA, 24 nt, Human
uucaaaugauccucccaccucagc

SEQ ID NO: 820704 - RNA, 18 nt, Human
uucaagccauucuccugc

SEQ ID NO: 820705 - RNA, 21 nt, Human
uucaagccauucuccugccuc

SEQ ID NO: 820706 - RNA, 21 nt, Human
uucaagcgauucuccugccuc

SEQ ID NO: 820707 - RNA, 23 nt, Human
uucaagcgauucuccugccucag

SEQ ID NO: 820708 - RNA, 25 nt, Human
uucaagcgauucuccugccucagcc

SEQ ID NO: 820709 - RNA, 19 nt, Human
uucacagucuguucuaucu

SEQ ID NO: 820710 - RNA, 19 nt, Human
uucaugagaugaaguaacc

SEQ ID NO: 820711 - RNA, 19 nt, Human
uuccuguauacaacagagg

SEQ ID NO: 820712 - RNA, 23 nt, Human
uuccuuacuuucaauauuuuaac

SEQ ID NO: 820713 - RNA, 21 nt, Human
uugcuuguuuguuuguuuuuu

SEQ ID NO: 820714 - RNA, 22 nt, Human
uuggaaagaaaaaaaaagccaa

SEQ ID NO: 820715 - RNA, 24 nt, Human
uugguagagacagggucucaccau

SEQ ID NO: 820716 - RNA, 19 nt, Human
uugguucaggaaaaaaaaa

SEQ ID NO: 820717 - RNA, 24 nt, Human
uuuaauauugacuggggccagaga

SEQ ID NO: 820718 - RNA, 19 nt, Human
uuucaccguguuagccagg

SEQ ID NO: 820719 - RNA, 19 nt, Human
uuuccuuuaagguugaccc

SEQ ID NO: 820720 - RNA, 22 nt, Human
uuugacaaauguucaacugguu

SEQ ID NO: 820721 - RNA, 21 nt, Human
uuuguuuuguuuuguuuuuug

SEQ ID NO: 820722 - RNA, 18 nt, Human
uuuugcuuguuuguuugu

SEQ ID NO: 820723 - RNA, 21 nt, Human
uuuuuaggaaauguguaucag

SEQ ID NO: 820724 - RNA, 24 nt, Human
uuuuuaguagagaugggguuucac

SEQ ID NO: 820725 - RNA, 23 nt, Human
uuuuucuuugucucuacaccaua

SEQ ID NO: 820726 - RNA, 21 nt, Human
uuuuuguauuuuuaguagaga

SEQ ID NO: 820727 - RNA, 18 nt, Human
uuuuuugguagagacagg

SEQ ID NO: 820728 - RNA, 24 nt, Human
uuuuuuguauuuuuaguagagaug

SEQ ID NO: 820729 - RNA, 20 nt, Human
uuuuuuuugagacagggucu

SEQ ID NO: 820730 - RNA, 20 nt, Human
uuuuuuuuuuugagacaggg

SEQ ID NO: 820731 - RNA, 23 nt, Human
uuuuuuuuuuuugagacaggguc

SEQ ID NO: 820732 - RNA, 24 nt, Human
uuuuuuuuuuuuuuugagacaggg

SEQ ID NO: 820733 - RNA, 22 nt, Human
aaaacaaaacaggcaauugaua

SEQ ID NO: 820734 - RNA, 18 nt, Human
aaaacaaacaaaacaaaa

SEQ ID NO: 820735 - RNA, 23 nt, Human
aaaacaaacaaaacaaaacaggc

SEQ ID NO: 820736 - RNA, 20 nt, Human
aaacaaaacaaaacaggcaa

SEQ ID NO: 820737 - RNA, 24 nt, Human
aaagcaaguuacaagauguugguu

SEQ ID NO: 820738 - RNA, 19 nt, Human
aaauacccacccccgagac

SEQ ID NO: 820739 - RNA, 22 nt, Human
aaauagccacccccgagacuuu

SEQ ID NO: 820740 - RNA, 20 nt, Human
aacaaaacaaaacaggcaag

SEQ ID NO: 820741 - RNA, 24 nt, Human
aacaaaggggcagugaccuaggaa

SEQ ID NO: 820742 - RNA, 21 nt, Human
aacaggaaggagaggcuccag

SEQ ID NO: 820743 - RNA, 23 nt, Human
aacuaaggcaaaguaauacugag

SEQ ID NO: 820744 - RNA, 19 nt, Human
aagacggaaggcagagaac

SEQ ID NO: 820745 - RNA, 18 nt, Human
aagagaaguugugagccc

SEQ ID NO: 820746 - RNA, 21 nt, Human
aagaggcagcaaaggaggagg

SEQ ID NO: 820747 - RNA, 22 nt, Human
aagaggcagcaaaggaggaggg

SEQ ID NO: 820748 - RNA, 23 nt, Human
aaggaugaggacagagggaaaga

SEQ ID NO: 820749 - RNA, 21 nt, Human
aaggcaaaguaauacugagaa

SEQ ID NO: 820750 - RNA, 22 nt, Human
acaaagaggagacagccaaggu

SEQ ID NO: 820751 - RNA, 22 nt, Human
acacagcaaguaagcguggcuu

SEQ ID NO: 820752 - RNA, 21 nt, Human
acaggaaggagaggcuccaga

SEQ ID NO: 820753 - RNA, 19 nt, Human
accaccgccugccuccccc

SEQ ID NO: 820754 - RNA, 23 nt, Human
accagggaagaggggaaaggagg

SEQ ID NO: 820755 - RNA, 22 nt, Human
accagggggccgggcgggggcg

SEQ ID NO: 820756 - RNA, 21 nt, Human
acccacuccccaagucugagc

SEQ ID NO: 820757 - RNA, 21 nt, Human
accccagagugccaagggccg

SEQ ID NO: 820758 - RNA, 24 nt, Human
accgacugccccacgcgaccccag

SEQ ID NO: 820759 - RNA, 23 nt, Human
acgcgaccccagagugccaaggg

SEQ ID NO: 820760 - RNA, 19 nt, Human
acgggagcaaggacagggg

SEQ ID NO: 820761 - RNA, 24 nt, Human
agaaaaaguggaggaagccgguac

SEQ ID NO: 820762 - RNA, 25 nt, Human
agaaaaaguggaggaagccgguacc

SEQ ID NO: 820763 - RNA, 26 nt, Human
agaaagagagagaagggcgaaaagga

SEQ ID NO: 820764 - RNA, 23 nt, Human
agaacaggaaggagaggcuccag

SEQ ID NO: 820765 - RNA, 20 nt, Human
agaacuggggaaauggaaaa

SEQ ID NO: 820766 - RNA, 24 nt, Human
agacugacaaucucggcacaaaga

SEQ ID NO: 820767 - RNA, 20 nt, Human
agagaaauguggcaggggug

SEQ ID NO: 820768 - RNA, 19 nt, Human
agagaacuggggaaaugga

SEQ ID NO: 820769 - RNA, 19 nt, Human
agagagaggaagaggagga

SEQ ID NO: 820770 - RNA, 21 nt, Human
agaggagacagccaagguccg

SEQ ID NO: 820771 - RNA, 22 nt, Human
agaggaggagagagggaccgag

SEQ ID NO: 820772 - RNA, 25 nt, Human
agaggaggagagagggaccgaggga

SEQ ID NO: 820773 - RNA, 27 nt, Human
agcacuggggacagagaacaggaagga

SEQ ID NO: 820774 - RNA, 18 nt, Human
aggagacacccacucccc

SEQ ID NO: 820775 - RNA, 20 nt, Human
aggaggagagagggaccgag

SEQ ID NO: 820776 - RNA, 22 nt, Human
aggagggaaagaggcagcaaag

SEQ ID NO: 820777 - RNA, 25 nt, Human
aggagggaaagaggcagcaaaggag

SEQ ID NO: 820778 - RNA, 18 nt, Human
aggagggagggagaggag

SEQ ID NO: 820779 - RNA, 19 nt, Human
aggagggagggagaggagg

SEQ ID NO: 820780 - RNA, 27 nt, Human
aggagggagguauaucccuauguugga

SEQ ID NO: 820781 - RNA, 22 nt, Human
aggaugaggacagagggaaaga

SEQ ID NO: 820782 - RNA, 18 nt, Human
aggcaaaguaauacugag

SEQ ID NO: 820783 - RNA, 21 nt, Human
aggcaaggaggggcggagagc

SEQ ID NO: 820784 - RNA, 20 nt, Human
aggcaauugauaaaggcggc

SEQ ID NO: 820785 - RNA, 23 nt, Human
aggcagcaaaggaggagggacgg

SEQ ID NO: 820786 - RNA, 23 nt, Human
aggcugccucagcgauaccccag

SEQ ID NO: 820787 - RNA, 23 nt, Human
agggagaagagagaaauguggca

SEQ ID NO: 820788 - RNA, 20 nt, Human
agggagaggaggagggaaag

SEQ ID NO: 820789 - RNA, 21 nt, Human
agggaguucugugccccuucu

SEQ ID NO: 820790 - RNA, 19 nt, Human
aggggcagugaccuaggaa

SEQ ID NO: 820791 - RNA, 21 nt, Human
aggggugaggggaaccugggu

SEQ ID NO: 820792 - RNA, 19 nt, Human
aggugucuccuuagccacc

SEQ ID NO: 820793 - RNA, 21 nt, Human
agugugggaaggaaggaccag

SEQ ID NO: 820794 - RNA, 28 nt, Human
auccggagacuggagggaggggaggagg

SEQ ID NO: 820795 - RNA, 18 nt, Human
auggaaaaagugaagaga

SEQ ID NO: 820796 - RNA, 22 nt, Human
auugauaaaggcggcacaaugg

SEQ ID NO: 820797 - RNA, 19 nt, Human
caagguccgggccagggac

SEQ ID NO: 820798 - RNA, 18 nt, Human
caccaccgccugccuccc

SEQ ID NO: 820799 - RNA, 24 nt, Human
caccccucugccccgcacuccgcc

SEQ ID NO: 820800 - RNA, 19 nt, Human
cacccuguccugucaccac

SEQ ID NO: 820801 - RNA, 19 nt, Human
caccgccugccucccccac

SEQ ID NO: 820802 - RNA, 25 nt, Human
cagacugacaaucucggcacaaaga

SEQ ID NO: 820803 - RNA, 19 nt, Human
cagccaagguccgggccag

SEQ ID NO: 820804 - RNA, 22 nt, Human
cagcgauaccccagggaggcua

SEQ ID NO: 820805 - RNA, 18 nt, Human
caggagccagauguggca

SEQ ID NO: 820806 - RNA, 21 nt, Human
caggagccagauguggcagca

SEQ ID NO: 820807 - RNA, 23 nt, Human
caggagcuguaaacaaaggggca

SEQ ID NO: 820808 - RNA, 18 nt, Human
caggcaauugauaaaggc

SEQ ID NO: 820809 - RNA, 20 nt, Human
cagggcagaggggcuaagga

SEQ ID NO: 820810 - RNA, 20 nt, Human
cagggggccgggcgggggcg

SEQ ID NO: 820811 - RNA, 19 nt, Human
ccaccgccugccuccccca

SEQ ID NO: 820812 - RNA, 21 nt, Human
ccaccgccugccucccccacc

SEQ ID NO: 820813 - RNA, 23 nt, Human
ccacgcgaccccagagugccaag

SEQ ID NO: 820814 - RNA, 20 nt, Human
ccagggaagaggggaaagga

SEQ ID NO: 820815 - RNA, 20 nt, Human
ccagggggccgggcgggggc

SEQ ID NO: 820816 - RNA, 23 nt, Human
ccaucucaauucaguucaauugu

SEQ ID NO: 820817 - RNA, 21 nt, Human
cccacccccgagacuuucgga

SEQ ID NO: 820818 - RNA, 22 nt, Human
cccacccccgagacuuucggaa

SEQ ID NO: 820819 - RNA, 23 nt, Human
cccagaacccuggcguccacccc

SEQ ID NO: 820820 - RNA, 19 nt, Human
cccagcccccaccccucug

SEQ ID NO: 820821 - RNA, 19 nt, Human
ccccagcccccaccccucu

SEQ ID NO: 820822 - RNA, 22 nt, Human
ccccagcccccaccccucugcc

SEQ ID NO: 820823 - RNA, 18 nt, Human
cccccagaaacagggugg

SEQ ID NO: 820824 - RNA, 18 nt, Human
cccccgagacuuucggag

SEQ ID NO: 820825 - RNA, 19 nt, Human
ccccggcgccugcaagucc

SEQ ID NO: 820826 - RNA, 19 nt, Human
cccugaaucuuccgggcuc

SEQ ID NO: 820827 - RNA, 18 nt, Human
cccuggcguccaccccca

SEQ ID NO: 820828 - RNA, 21 nt, Human
ccgacugccccacgcgacccc

SEQ ID NO: 820829 - RNA, 23 nt, Human
ccgggggagggggugcggaggag

SEQ ID NO: 820830 - RNA, 25 nt, Human
ccucagucaacucacaggccgcggg

SEQ ID NO: 820831 - RNA, 24 nt, Human
cgaccccagagugccaagggccgg

SEQ ID NO: 820832 - RNA, 23 nt, Human
cgcagacacagcaaguaagcgug

SEQ ID NO: 820833 - RNA, 18 nt, Human
cgggagcaaggacagggg

SEQ ID NO: 820834 - RNA, 18 nt, Human
cgucucuaggaugugaga

SEQ ID NO: 820835 - RNA, 18 nt, Human
cguggcuuguaaaccugg

SEQ ID NO: 820836 - RNA, 20 nt, Human
cuagaggagaagggaaacca

SEQ ID NO: 820837 - RNA, 23 nt, Human
cuagugugggaaggaaggaccag

SEQ ID NO: 820838 - RNA, 24 nt, Human
cuccccagcccccaccccucugcc

SEQ ID NO: 820839 - RNA, 19 nt, Human
cucuccccagcccccaccc

SEQ ID NO: 820840 - RNA, 22 nt, Human
cucuccccagcccccaccccuc

SEQ ID NO: 820841 - RNA, 21 nt, Human
cugagggugggaggagaggaa

SEQ ID NO: 820842 - RNA, 19 nt, Human
cugccccgcacuccgcccc

SEQ ID NO: 820843 - RNA, 20 nt, Human
cugggacuuuggcagguggg

SEQ ID NO: 820844 - RNA, 20 nt, Human
cuguggucaagggaggaggc

SEQ ID NO: 820845 - RNA, 21 nt, Human
gaaaggaccaggaggcaacgg

SEQ ID NO: 820846 - RNA, 24 nt, Human
gaaaguuaaaaaacaaacaaaaca

SEQ ID NO: 820847 - RNA, 18 nt, Human
gaaauacccacccccgag

SEQ ID NO: 820848 - RNA, 22 nt, Human
gaaggcagagaacuggggaaau

SEQ ID NO: 820849 - RNA, 21 nt, Human
gaaguggagggggagaggugg

SEQ ID NO: 820850 - RNA, 19 nt, Human
gaccugaggggguguuggg

SEQ ID NO: 820851 - RNA, 24 nt, Human
gaccugaggggguguuggggaggc

SEQ ID NO: 820852 - RNA, 19 nt, Human
gagaacaggaaggagaggc

SEQ ID NO: 820853 - RNA, 21 nt, Human
gagaacaggaaggagaggccg

SEQ ID NO: 820854 - RNA, 21 nt, Human
gagaggaggagggaaagaggc

SEQ ID NO: 820855 - RNA, 24 nt, Human
gaggagggaaagaggcagcaaagg

SEQ ID NO: 820856 - RNA, 18 nt, Human
gaggcaaugagggcagga

SEQ ID NO: 820857 - RNA, 20 nt, Human
gagggaaagaggcagcaaag

SEQ ID NO: 820858 - RNA, 19 nt, Human
gaggggaggagggagggag

SEQ ID NO: 820859 - RNA, 19 nt, Human
gagggugggaggagaggaa

SEQ ID NO: 820860 - RNA, 24 nt, Human
gagggugggaggagaggaagugga

SEQ ID NO: 820861 - RNA, 21 nt, Human
gaguuaagaguuccagccuuc

SEQ ID NO: 820862 - RNA, 26 nt, Human
gaugguggggaggaaggcugugggga

SEQ ID NO: 820863 - RNA, 18 nt, Human
gaugugagaaagagagag

SEQ ID NO: 820864 - RNA, 24 nt, Human
gcaggagcuguaaacaaaggggca

SEQ ID NO: 820865 - RNA, 21 nt, Human
gccacgccucuccccagcccc

SEQ ID NO: 820866 - RNA, 23 nt, Human
gccugccucccccaccgacugcc

SEQ ID NO: 820867 - RNA, 20 nt, Human
gcguggcuuguaaaccuggg

SEQ ID NO: 820868 - RNA, 24 nt, Human
ggaaagcaaguuacaagauguugg

SEQ ID NO: 820869 - RNA, 22 nt, Human
ggaaauggaaaaagugaagaga

SEQ ID NO: 820870 - RNA, 24 nt, Human
ggaaguggagggggagaggugggg

SEQ ID NO: 820871 - RNA, 18 nt, Human
ggaauuuguaaaccaggc

SEQ ID NO: 820872 - RNA, 19 nt, Human
ggagacagagaccaggggg

SEQ ID NO: 820873 - RNA, 20 nt, Human
ggaggaaggcuguggggaga

SEQ ID NO: 820874 - RNA, 21 nt, Human
ggaggagagagggaccgaggg

SEQ ID NO: 820875 - RNA, 20 nt, Human
ggaggagaggaaguggaggg

SEQ ID NO: 820876 - RNA, 22 nt, Human
ggaggagggagggagaggagga

SEQ ID NO: 820877 - RNA, 18 nt, Human
ggaggggaggagggaggg

SEQ ID NO: 820878 - RNA, 20 nt, Human
ggauuggaggcaaugagggc

SEQ ID NO: 820879 - RNA, 18 nt, Human
ggcacaauggggaaggag

SEQ ID NO: 820880 - RNA, 20 nt, Human
ggcaggagccagauguggca

SEQ ID NO: 820881 - RNA, 22 nt, Human
ggccacgccucuccccagcccc

SEQ ID NO: 820882 - RNA, 21 nt, Human
gggaaaccagggaagagggga

SEQ ID NO: 820883 - RNA, 18 nt, Human
gggacagagaacaggaag

SEQ ID NO: 820884 - RNA, 22 nt, Human
gggagaagagagaaauguggca

SEQ ID NO: 820885 - RNA, 20 nt, Human
gggagaggugggacacaaag

SEQ ID NO: 820886 - RNA, 22 nt, Human
gggccagggacgggagcaagga

SEQ ID NO: 820887 - RNA, 21 nt, Human
gggggugaugugagaggaaga

SEQ ID NO: 820888 - RNA, 23 nt, Human
gggguggugggggugaugugaga

SEQ ID NO: 820889 - RNA, 22 nt, Human
ggguggugggggugaugugaga

SEQ ID NO: 820890 - RNA, 23 nt, Human
gguggugggggugaugugagagg

SEQ ID NO: 820891 - RNA, 23 nt, Human
gguguuggggaggcaaggagggg

SEQ ID NO: 820892 - RNA, 22 nt, Human
gucuagaggagaagggaaacca

SEQ ID NO: 820893 - RNA, 23 nt, Human
gugaccuaggaaaugaaggagau

SEQ ID NO: 820894 - RNA, 25 nt, Human
gugccccuucucaggacuuggcgcu

SEQ ID NO: 820895 - RNA, 18 nt, Human
guguuggggaggcaagga

SEQ ID NO: 820896 - RNA, 25 nt, Human
uaaaaaacaaacaaaacaaaacagg

SEQ ID NO: 820897 - RNA, 19 nt, Human
uaaacaaaggggcagugac

SEQ ID NO: 820898 - RNA, 20 nt, Human
uaaggcaaaguaauacugag

SEQ ID NO: 820899 - RNA, 25 nt, Human
uaggaugcaccagcacguuuaaccc

SEQ ID NO: 820900 - RNA, 23 nt, Human
uauggaaaguuaaaaaacaaaca

SEQ ID NO: 820901 - RNA, 18 nt, Human
ucacaggccgcgggaccc

SEQ ID NO: 820902 - RNA, 19 nt, Human
ucaccaccgccugccuccc

SEQ ID NO: 820903 - RNA, 20 nt, Human
ucaguuauaagaaggaggga

SEQ ID NO: 820904 - RNA, 19 nt, Human
ucaugaagccgugacagag

SEQ ID NO: 820905 - RNA, 22 nt, Human
uccagagagaggaagaggagga

SEQ ID NO: 820906 - RNA, 20 nt, Human
uccaugucucuucuccccgg

SEQ ID NO: 820907 - RNA, 24 nt, Human
ucccagaacccuggcguccacccc

SEQ ID NO: 820908 - RNA, 19 nt, Human
uccccaagucugagccccu

SEQ ID NO: 820909 - RNA, 18 nt, Human
uccccagcccccaccccu

SEQ ID NO: 820910 - RNA, 22 nt, Human
uccccagcccccaccccucugc

SEQ ID NO: 820911 - RNA, 24 nt, Human
uccccagcccccaccccucugccc

SEQ ID NO: 820912 - RNA, 25 nt, Human
uccggagacuggagggaggggagga

SEQ ID NO: 820913 - RNA, 19 nt, Human
uccgggccagggacgggag

SEQ ID NO: 820914 - RNA, 19 nt, Human
ucggcacaaagaggagaca

SEQ ID NO: 820915 - RNA, 21 nt, Human
ucucaugaagccgugacagag

SEQ ID NO: 820916 - RNA, 18 nt, Human
ucuccccagcccccaccc

SEQ ID NO: 820917 - RNA, 19 nt, Human
ucuccccagcccccacccu

SEQ ID NO: 820918 - RNA, 19 nt, Human
ucuucaguuauaagaagga

SEQ ID NO: 820919 - RNA, 19 nt, Human
ucuuggaugaccuaggaug

SEQ ID NO: 820920 - RNA, 24 nt, Human
ugagaaagagagagaagggcgaaa

SEQ ID NO: 820921 - RNA, 21 nt, Human
ugagccccucagucaacucac

SEQ ID NO: 820922 - RNA, 19 nt, Human
ugaggggguguuggggagg

SEQ ID NO: 820923 - RNA, 22 nt, Human
ugaggguagggagcacugggga

SEQ ID NO: 820924 - RNA, 21 nt, Human
ugauaaaggcggcacaauggg

SEQ ID NO: 820925 - RNA, 18 nt, Human
ugccaagggccggcucca

SEQ ID NO: 820926 - RNA, 19 nt, Human
ugccaagggccggcuccau

SEQ ID NO: 820927 - RNA, 21 nt, Human
ugccagcgcguucccagaacc

SEQ ID NO: 820928 - RNA, 18 nt, Human
ugccauggggggcaggug

SEQ ID NO: 820929 - RNA, 19 nt, Human
ugcccugaaucuuccgggc

SEQ ID NO: 820930 - RNA, 20 nt, Human
uggaaaaagugaagagaagu

SEQ ID NO: 820931 - RNA, 18 nt, Human
uggaggcaaugagggcag

SEQ ID NO: 820932 - RNA, 18 nt, Human
uggaggcaaugagggcag

SEQ ID NO: 820933 - RNA, 19 nt, Human
uggcuuguaaaccugggac

SEQ ID NO: 820934 - RNA, 25 nt, Human
ugggaggagaggaaguggaggggga

SEQ ID NO: 820935 - RNA, 25 nt, Human
uggggaaaacuaaggcaaaguaaua

SEQ ID NO: 820936 - RNA, 20 nt, Human
uggggagaguguacccugcc

SEQ ID NO: 820937 - RNA, 20 nt, Human
uggggagaguguacccugcc

SEQ ID NO: 820938 - RNA, 18 nt, Human
uggggaggaaggcugugg

SEQ ID NO: 820939 - RNA, 23 nt, Human
ugggggugaugugagaggaagag

SEQ ID NO: 820940 - RNA, 24 nt, Human
uguuggggaggcaaggaggggcgg

SEQ ID NO: 820941 - RNA, 26 nt, Human
uuaaaaaacaaacaaaacaaaacagg

SEQ ID NO: 820942 - RNA, 23 nt, Human
uuaaccccacccacaccagggac

SEQ ID NO: 820943 - RNA, 19 nt, Human
uuagccacccgacaccauc

SEQ ID NO: 820944 - RNA, 23 nt, Human
uucaguuauaagaaggagggagg

SEQ ID NO: 820945 - RNA, 21 nt, Human
aaccgugugagccacccaccc

SEQ ID NO: 820946 - RNA, 25 nt, Human
aagcaauccucccaccucagccucc

SEQ ID NO: 820947 - RNA, 19 nt, Human
aagcugcccuguucuugcc

SEQ ID NO: 820948 - RNA, 22 nt, Human
acacaggcaugaaccacuucau

SEQ ID NO: 820949 - RNA, 22 nt, Human
acagaacgugacagugugugug

SEQ ID NO: 820950 - RNA, 18 nt, Human
acaggcaugaaccacuuc

SEQ ID NO: 820951 - RNA, 19 nt, Human
acccuccaccacaggcuga

SEQ ID NO: 820952 - RNA, 23 nt, Human
accucagccuccugaauagcugg

SEQ ID NO: 820953 - RNA, 19 nt, Human
acugcagccucgaccuccu

SEQ ID NO: 820954 - RNA, 19 nt, Human
agaagcacccaggaucagg

SEQ ID NO: 820955 - RNA, 20 nt, Human
agaagccaugcaaaagagaa

SEQ ID NO: 820956 - RNA, 24 nt, Human
agacaaaaccccgucacuuccccg

SEQ ID NO: 820957 - RNA, 23 nt, Human
agacccuccaccacaggcugagg

SEQ ID NO: 820958 - RNA, 19 nt, Human
agaugauagagacaaaacc

SEQ ID NO: 820959 - RNA, 20 nt, Human
agccauggcaauaauacccc

SEQ ID NO: 820960 - RNA, 18 nt, Human
agccuccugaauagcugg

SEQ ID NO: 820961 - RNA, 19 nt, Human
aggaagacacaacaaucaa

SEQ ID NO: 820962 - RNA, 23 nt, Human
aggcagagucucaccauguugcc

SEQ ID NO: 820963 - RNA, 23 nt, Human
aggcggcugugcugccgcagguc

SEQ ID NO: 820964 - RNA, 19 nt, Human
aggcugaggggguacgugu

SEQ ID NO: 820965 - RNA, 25 nt, Human
agucuggucucaaacuccuggccuc

SEQ ID NO: 820966 - RNA, 19 nt, Human
aguggcuaccgggggcucc

SEQ ID NO: 820967 - RNA, 21 nt, Human
augauagagacaaaaccccgu

SEQ ID NO: 820968 - RNA, 22 nt, Human
auguccaccuuaggagggcaac

SEQ ID NO: 820969 - RNA, 21 nt, Human
caacagccaccaggcuccggc

SEQ ID NO: 820970 - RNA, 22 nt, Human
caacugacagaacuagaccgaa

SEQ ID NO: 820971 - RNA, 27 nt, Human
caagcaauccucccaccucagccuccu

SEQ ID NO: 820972 - RNA, 19 nt, Human
caagggcccuuaaggccca

SEQ ID NO: 820973 - RNA, 24 nt, Human
caauaauaccccucucucagcaac

SEQ ID NO: 820974 - RNA, 19 nt, Human
cacagugaacgccgagugg

SEQ ID NO: 820975 - RNA, 24 nt, Human
caccauguugcccagucuggucuc

SEQ ID NO: 820976 - RNA, 27 nt, Human
caccauguugcccagucuggucucaaa

SEQ ID NO: 820977 - RNA, 21 nt, Human
caccucgcaggugcaccagcc

SEQ ID NO: 820978 - RNA, 19 nt, Human
cacugcagccucgaccucc

SEQ ID NO: 820979 - RNA, 21 nt, Human
cacugcagccucgaccuccua

SEQ ID NO: 820980 - RNA, 24 nt, Human
cagaaccggaagucucucucccag

SEQ ID NO: 820981 - RNA, 21 nt, Human
cagcaacagccaccaggcucc

SEQ ID NO: 820982 - RNA, 20 nt, Human
cagcacaguccggcuuguac

SEQ ID NO: 820983 - RNA, 18 nt, Human
cagcaccuagugcaaagu

SEQ ID NO: 820984 - RNA, 23 nt, Human
cagccucgaccuccuaggcucaa

SEQ ID NO: 820985 - RNA, 25 nt, Human
cagccucgaccuccuaggcucaagc

SEQ ID NO: 820986 - RNA, 19 nt, Human
caggagccugcugucuggc

SEQ ID NO: 820987 - RNA, 19 nt, Human
caggucaggccaccucgca

SEQ ID NO: 820988 - RNA, 24 nt, Human
cauguugcccagucuggucucaaa

SEQ ID NO: 820989 - RNA, 22 nt, Human
ccaagcugcccuguucuugccu

SEQ ID NO: 820990 - RNA, 18 nt, Human
ccaccucugccgguccug

SEQ ID NO: 820991 - RNA, 18 nt, Human
ccacgagaagcacccagg

SEQ ID NO: 820992 - RNA, 24 nt, Human
ccacugcagccucgaccuccuagg

SEQ ID NO: 820993 - RNA, 21 nt, Human
ccagucgagccacaggggcaa

SEQ ID NO: 820994 - RNA, 19 nt, Human
ccaugugugcaggccccug

SEQ ID NO: 820995 - RNA, 26 nt, Human
cccaaaaacaucaccacaguugaucu

SEQ ID NO: 820996 - RNA, 22 nt, Human
cccaaccucagcacaguccggc

SEQ ID NO: 820997 - RNA, 20 nt, Human
cccagacugcaguacagugg

SEQ ID NO: 820998 - RNA, 22 nt, Human
ccccgcccucgucacuccgaaa

SEQ ID NO: 820999 - RNA, 23 nt, Human
cccucgucacuccgaagggauuc

SEQ ID NO: 821000 - RNA, 21 nt, Human
ccgaaaaaaaaaggaaagaca

SEQ ID NO: 821001 - RNA, 24 nt, Human
ccgaaaaaaaaaggaaagacagau

SEQ ID NO: 821002 - RNA, 18 nt, Human
ccuaagaagaugccccuc

SEQ ID NO: 821003 - RNA, 24 nt, Human
ccuccauaaccgugugagccaccc

SEQ ID NO: 821004 - RNA, 24 nt, Human
ccucccaggucacugucaugcccu

SEQ ID NO: 821005 - RNA, 18 nt, Human
ccucgaccuccuaggcuc

SEQ ID NO: 821006 - RNA, 19 nt, Human
ccugagccaccacccaggc

SEQ ID NO: 821007 - RNA, 21 nt, Human
ccugucagcaccuagugcaaa

SEQ ID NO: 821008 - RNA, 25 nt, Human
cgaccuccuaggcucaagcaauccu

SEQ ID NO: 821009 - RNA, 26 nt, Human
cgcaaaagagaacgggacgaagaucc

SEQ ID NO: 821010 - RNA, 23 nt, Human
cgccguggagugcaggaaaggug

SEQ ID NO: 821011 - RNA, 18 nt, Human
cgccugagaugauagaga

SEQ ID NO: 821012 - RNA, 23 nt, Human
cgcuucugggcccacagcacccu

SEQ ID NO: 821013 - RNA, 22 nt, Human
cggagugggaccaggaccggga

SEQ ID NO: 821014 - RNA, 21 nt, Human
cgucagacacccucaccuccu

SEQ ID NO: 821015 - RNA, 18 nt, Human
cuacaucugagcuucucu

SEQ ID NO: 821016 - RNA, 21 nt, Human
cuacuggacagugcuggcccc

SEQ ID NO: 821017 - RNA, 19 nt, Human
cuacuucugagcugcaucu

SEQ ID NO: 821018 - RNA, 23 nt, Human
cuagcucuucaucuccccuccca

SEQ ID NO: 821019 - RNA, 21 nt, Human
cucaagcaauccucccaccuc

SEQ ID NO: 821020 - RNA, 24 nt, Human
cucaagcaauccucccaccucagc

SEQ ID NO: 821021 - RNA, 19 nt, Human
cucaccugcauagcccuuc

SEQ ID NO: 821022 - RNA, 23 nt, Human
cuccaccaaugucagauucacaa

SEQ ID NO: 821023 - RNA, 19 nt, Human
cucccagagacccuccacc

SEQ ID NO: 821024 - RNA, 25 nt, Human
cuccuaggcucaagcaauccuccca

SEQ ID NO: 821025 - RNA, 24 nt, Human
cuccugaauagcugggaacacagg

SEQ ID NO: 821026 - RNA, 22 nt, Human
cucugcaggggagggggcucug

SEQ ID NO: 821027 - RNA, 22 nt, Human
cugcagccucgaccuccuaggc

SEQ ID NO: 821028 - RNA, 23 nt, Human
cugcagccucgaccuccuaggcu

SEQ ID NO: 821029 - RNA, 18 nt, Human
cugccugguccuggacgc

SEQ ID NO: 821030 - RNA, 20 nt, Human
cugcuuccuucugccucugc

SEQ ID NO: 821031 - RNA, 22 nt, Human
cugggagcggcuggcugggacu

SEQ ID NO: 821032 - RNA, 19 nt, Human
cuucugggcccacagcacc

SEQ ID NO: 821033 - RNA, 21 nt, Human
cuugguacugacagcgcggcc

SEQ ID NO: 821034 - RNA, 19 nt, Human
gaaaaaaaaaggaaagaca

SEQ ID NO: 821035 - RNA, 24 nt, Human
gaaaaaaaaaggaaagacagauca

SEQ ID NO: 821036 - RNA, 19 nt, Human
gaaaucggaaaacagguca

SEQ ID NO: 821037 - RNA, 20 nt, Human
gaagucaacacggaguggga

SEQ ID NO: 821038 - RNA, 24 nt, Human
gagacagucuuucuguguggccca

SEQ ID NO: 821039 - RNA, 19 nt, Human
gagcuuccaucugacccuc

SEQ ID NO: 821040 - RNA, 22 nt, Human
gcagacagacacugguccaagg

SEQ ID NO: 821041 - RNA, 22 nt, Human
gccaaauccccacagugaacgc

SEQ ID NO: 821042 - RNA, 20 nt, Human
gccacagagcuuccaucuga

SEQ ID NO: 821043 - RNA, 18 nt, Human
gccaccacccaggcagac

SEQ ID NO: 821044 - RNA, 19 nt, Human
gccaccacccaggcagacc

SEQ ID NO: 821045 - RNA, 21 nt, Human
gcccacagccuggaaggagac

SEQ ID NO: 821046 - RNA, 24 nt, Human
gcccagacugcaguacagugguau

SEQ ID NO: 821047 - RNA, 27 nt, Human
gccugagccaccacccaggcagacccu

SEQ ID NO: 821048 - RNA, 22 nt, Human
ggaccaggaccgggagccuuca

SEQ ID NO: 821049 - RNA, 21 nt, Human
ggacgagggcaguggccaccu

SEQ ID NO: 821050 - RNA, 23 nt, Human
ggagagucucacgugggcaggaa

SEQ ID NO: 821051 - RNA, 18 nt, Human
ggagugcaggcuggggac

SEQ ID NO: 821052 - RNA, 18 nt, Human
ggccacagagcuuccauc

SEQ ID NO: 821053 - RNA, 20 nt, Human
ggcccagcucugccuggucc

SEQ ID NO: 821054 - RNA, 23 nt, Human
ggccccugggagcggcuggcugg

SEQ ID NO: 821055 - RNA, 22 nt, Human
gggcaggaaccaaggccugaga

SEQ ID NO: 821056 - RNA, 21 nt, Human
gggcagggccuggccacuccu

SEQ ID NO: 821057 - RNA, 22 nt, Human
ggggucacuccucaucugagcc

SEQ ID NO: 821058 - RNA, 31 nt, Human
gggugggguccuugucacugccgccguggaa

SEQ ID NO: 821059 - RNA, 19 nt, Human
ggucaggccaccucgcagg

SEQ ID NO: 821060 - RNA, 21 nt, Human
gucacugucaugcccuuuaga

SEQ ID NO: 821061 - RNA, 20 nt, Human
guccagaaucuucccucggg

SEQ ID NO: 821062 - RNA, 19 nt, Human
gucccuuugcauuuuccgg

SEQ ID NO: 821063 - RNA, 21 nt, Human
gugcgcgagcugugaccccgc

SEQ ID NO: 821064 - RNA, 18 nt, Human
guggagccugugugcccc

SEQ ID NO: 821065 - RNA, 20 nt, Human
gugugagccacccacccaca

SEQ ID NO: 821066 - RNA, 19 nt, Human
uaaaagggucaauuccuca

SEQ ID NO: 821067 - RNA, 20 nt, Human
uaagaagaugccccuccucc

SEQ ID NO: 821068 - RNA, 21 nt, Human
uaaggcccagcucugccuggu

SEQ ID NO: 821069 - RNA, 19 nt, Human
uaagggggccucugcccuc

SEQ ID NO: 821070 - RNA, 22 nt, Human
uagaggcagagucucaccaugu

SEQ ID NO: 821071 - RNA, 20 nt, Human
uagcucuucaucuccccucc

SEQ ID NO: 821072 - RNA, 21 nt, Human
uagugcaaaguccagcccacc

SEQ ID NO: 821073 - RNA, 18 nt, Human
uaguggccucagcuacug

SEQ ID NO: 821074 - RNA, 27 nt, Human
uauuuuguuuuucuuagaagcccucca

SEQ ID NO: 821075 - RNA, 19 nt, Human
ucaacacauacuugucccu

SEQ ID NO: 821076 - RNA, 26 nt, Human
ucaccaccuccagcuacuugguacug

SEQ ID NO: 821077 - RNA, 19 nt, Human
ucaccauguugcccagucu

SEQ ID NO: 821078 - RNA, 22 nt, Human
ucacugccgccguggagugcag

SEQ ID NO: 821079 - RNA, 19 nt, Human
ucagaagagaugccuggag

SEQ ID NO: 821080 - RNA, 26 nt, Human
ucagcaacugacagaacuagaccgaa

SEQ ID NO: 821081 - RNA, 26 nt, Human
uccaaagaacuuuuuuuuuucuggag

SEQ ID NO: 821082 - RNA, 27 nt, Human
uccauaaccgugugagccacccaccca

SEQ ID NO: 821083 - RNA, 26 nt, Human
ucccaggucacuguuacgccuuuuug

SEQ ID NO: 821084 - RNA, 20 nt, Human
ucccugcagacagacacugg

SEQ ID NO: 821085 - RNA, 25 nt, Human
uccggcaaaacuaaagggagacaga

SEQ ID NO: 821086 - RNA, 21 nt, Human
uccgggacugggaccaggagc

SEQ ID NO: 821087 - RNA, 20 nt, Human
uccuaaugcuacuucugagc

SEQ ID NO: 821088 - RNA, 18 nt, Human
uccuaggcucaagcaauc

SEQ ID NO: 821089 - RNA, 26 nt, Human
uccucccaccucagccuccugaauag

SEQ ID NO: 821090 - RNA, 23 nt, Human
uccuuagggaaggagacguaggg

SEQ ID NO: 821091 - RNA, 18 nt, Human
ucucacauucccugccac

SEQ ID NO: 821092 - RNA, 23 nt, Human
ucucacauucccugccacguccc

SEQ ID NO: 821093 - RNA, 18 nt, Human
ucucaccauguugcccag

SEQ ID NO: 821094 - RNA, 19 nt, Human
ucucaccauguugcccagu

SEQ ID NO: 821095 - RNA, 24 nt, Human
ucucucagcaacugacagaacuag

SEQ ID NO: 821096 - RNA, 23 nt, Human
ucugccggcaccuuccauugguc

SEQ ID NO: 821097 - RNA, 20 nt, Human
ucugccucugcaggggaggg

SEQ ID NO: 821098 - RNA, 23 nt, Human
ucuggcacaguuaccucccaggu

SEQ ID NO: 821099 - RNA, 23 nt, Human
ugaagggcaggcccacagccugg

SEQ ID NO: 821100 - RNA, 23 nt, Human
ugacagaacuagaccgaaaaaaa

SEQ ID NO: 821101 - RNA, 21 nt, Human
ugacaggccugagccaccacc

SEQ ID NO: 821102 - RNA, 18 nt, Human
ugaggaagcccagguccc

SEQ ID NO: 821103 - RNA, 23 nt, Human
ugauccgaguggcuaccgggggc

SEQ ID NO: 821104 - RNA, 22 nt, Human
ugcaaaguccagcccaccgugg

SEQ ID NO: 821105 - RNA, 23 nt, Human
ugccaagaaacugucccaaaaac

SEQ ID NO: 821106 - RNA, 19 nt, Human
ugcccccggggucacuccu

SEQ ID NO: 821107 - RNA, 19 nt, Human
ugccugguccuggacgcuc

SEQ ID NO: 821108 - RNA, 20 nt, Human
ugcuacaucugagcuucucu

SEQ ID NO: 821109 - RNA, 24 nt, Human
ugcugcuguccaugggccacccgg

SEQ ID NO: 821110 - RNA, 20 nt, Human
uggagccugugugcccccgg

SEQ ID NO: 821111 - RNA, 27 nt, Human
uggcaauaauaccccucucucagcaac

SEQ ID NO: 821112 - RNA, 20 nt, Human
uggcagccgugugaacgaac

SEQ ID NO: 821113 - RNA, 26 nt, Human
ugggaacacaggcaugaaccacuuca

SEQ ID NO: 821114 - RNA, 23 nt, Human
ugggaccaggagccugcugucug

SEQ ID NO: 821115 - RNA, 21 nt, Human
ugggagcggcuggcugggacu

SEQ ID NO: 821116 - RNA, 24 nt, Human
ugggaugacaggccugagccacca

SEQ ID NO: 821117 - RNA, 20 nt, Human
uggggugggguccuugucac

SEQ ID NO: 821118 - RNA, 21 nt, Human
uggguggcaguguggagccug

SEQ ID NO: 821119 - RNA, 21 nt, Human
ugucccaaaaacaucaccaca

SEQ ID NO: 821120 - RNA, 25 nt, Human
ugugaccccgcccucgucacuccga

SEQ ID NO: 821121 - RNA, 19 nt, Human
ugugcagggacguaaagga

SEQ ID NO: 821122 - RNA, 22 nt, Human
ugugugcaggccccugggagcg

SEQ ID NO: 821123 - RNA, 20 nt, Human
uuagggaggagacucagccu

SEQ ID NO: 821124 - RNA, 23 nt, Human
uuccucaggaagacacaacaauc

SEQ ID NO: 821125 - RNA, 18 nt, Human
uugcuucucugaagucaa

SEQ ID NO: 821126 - RNA, 24 nt, Human
uuguagaggcagagucucaccaug

SEQ ID NO: 821127 - RNA, 18 nt, Human
uuugcagaagaugaagga

SEQ ID NO: 821128 - RNA, 24 nt, Human
aaagugcugggauuacaggcguga

SEQ ID NO: 821129 - RNA, 19 nt, Human
aaauacaccaagagcucac

SEQ ID NO: 821130 - RNA, 24 nt, Human
aagaggccaggguggauccuggca

SEQ ID NO: 821131 - RNA, 18 nt, Human
aagcacucggauuacagg

SEQ ID NO: 821132 - RNA, 26 nt, Human
aagcacugggauugcaagcgugagcc

SEQ ID NO: 821133 - RNA, 19 nt, Human
aagcuuggugcucagugaa

SEQ ID NO: 821134 - RNA, 22 nt, Human
aaguacccuccaccaggcagag

SEQ ID NO: 821135 - RNA, 20 nt, Human
aagugauccuccugccucag

SEQ ID NO: 821136 - RNA, 19 nt, Human
aagugcugggauuacaggc

SEQ ID NO: 821137 - RNA, 19 nt, Human
aagugcugggauuacaggc

SEQ ID NO: 821138 - RNA, 26 nt, Human
aagugcugggauuacaggcgugagcc

SEQ ID NO: 821139 - RNA, 18 nt, Human
acagcucacugcagccuc

SEQ ID NO: 821140 - RNA, 18 nt, Human
acgggguuucaccguguu

SEQ ID NO: 821141 - RNA, 19 nt, Human
acgggguuucaccguguua

SEQ ID NO: 821142 - RNA, 20 nt, Human
acgggguuucaccguguuag

SEQ ID NO: 821143 - RNA, 24 nt, Human
acgggguuucaccguguuagccag

SEQ ID NO: 821144 - RNA, 25 nt, Human
acucugucgcccaggcuggagugca

SEQ ID NO: 821145 - RNA, 18 nt, Human
acugcaagcuccgccucc

SEQ ID NO: 821146 - RNA, 23 nt, Human
acuggagugcaguggugugaaca

SEQ ID NO: 821147 - RNA, 23 nt, Human
acugggauugcaagcgugagcca

SEQ ID NO: 821148 - RNA, 19 nt, Human
acuguuucugcuucagucu

SEQ ID NO: 821149 - RNA, 21 nt, Human
agaagccuggaaggguuguuc

SEQ ID NO: 821150 - RNA, 21 nt, Human
agaccuggcauaagcuuggug

SEQ ID NO: 821151 - RNA, 21 nt, Human
agagaagccuggaaggguugu

SEQ ID NO: 821152 - RNA, 19 nt, Human
agagacgggguuucaccgu

SEQ ID NO: 821153 - RNA, 23 nt, Human
agagguacccacacuggcuguug

SEQ ID NO: 821154 - RNA, 23 nt, Human
agcaaaguccugggugcccaaaa

SEQ ID NO: 821155 - RNA, 21 nt, Human
agccaccaguuuuaaaaaucu

SEQ ID NO: 821156 - RNA, 22 nt, Human
agcccguuucucuuaucuccug

SEQ ID NO: 821157 - RNA, 18 nt, Human
agccuccagaguagcugg

SEQ ID NO: 821158 - RNA, 25 nt, Human
aggcuggagugcaguggcgcgaucu

SEQ ID NO: 821159 - RNA, 20 nt, Human
aguagagacgggguuucacc

SEQ ID NO: 821160 - RNA, 21 nt, Human
aguagagacgggguuucaccg

SEQ ID NO: 821161 - RNA, 18 nt, Human
aguagcugggaauacugg

SEQ ID NO: 821162 - RNA, 20 nt, Human
agugauccuccugccucagc

SEQ ID NO: 821163 - RNA, 20 nt, Human
agugcaguggcgcgaucucg

SEQ ID NO: 821164 - RNA, 23 nt, Human
agugcaguggcgcgaucucggcu

SEQ ID NO: 821165 - RNA, 24 nt, Human
agugcaguggcgcgaucucggcuc

SEQ ID NO: 821166 - RNA, 23 nt, Human
agugcaguggugugaacacagcu

SEQ ID NO: 821167 - RNA, 24 nt, Human
agugcaguggugugaacacagcuc

SEQ ID NO: 821168 - RNA, 18 nt, Human
agugcugggauuacaggc

SEQ ID NO: 821169 - RNA, 19 nt, Human
aucaaguacccuccaccag

SEQ ID NO: 821170 - RNA, 19 nt, Human
aucccacugucccugcaca

SEQ ID NO: 821171 - RNA, 21 nt, Human
aucucugcccccagcaucacc

SEQ ID NO: 821172 - RNA, 21 nt, Human
augguggguaccagaccaguu

SEQ ID NO: 821173 - RNA, 24 nt, Human
caaagcacucggauuacaggcaug

SEQ ID NO: 821174 - RNA, 24 nt, Human
caaagcacugggauugcaagcgug

SEQ ID NO: 821175 - RNA, 24 nt, Human
caaagugcugggauuacaggcgug

SEQ ID NO: 821176 - RNA, 23 nt, Human
caagagcucacccucuugcagug

SEQ ID NO: 821177 - RNA, 20 nt, Human
caagcgugagccaccgcacc

SEQ ID NO: 821178 - RNA, 20 nt, Human
caauccugccuccgccucag

SEQ ID NO: 821179 - RNA, 20 nt, Human
cacacaccccacggcagccc

SEQ ID NO: 821180 - RNA, 23 nt, Human
cacacucagagagcaagcuaucu

SEQ ID NO: 821181 - RNA, 22 nt, Human
caccacaggcgcccgccaccac

SEQ ID NO: 821182 - RNA, 26 nt, Human
caccacaggcgcccgccaccacuccu

SEQ ID NO: 821183 - RNA, 19 nt, Human
caccacgcccagccaccag

SEQ ID NO: 821184 - RNA, 22 nt, Human
cacccagucuggagcugaggac

SEQ ID NO: 821185 - RNA, 18 nt, Human
caccguguuagccaggau

SEQ ID NO: 821186 - RNA, 24 nt, Human
caccguguuagccaggauggucuc

SEQ ID NO: 821187 - RNA, 22 nt, Human
cacgccauucuccugccucagc

SEQ ID NO: 821188 - RNA, 24 nt, Human
cacucugucgcccaggcuggagug

SEQ ID NO: 821189 - RNA, 19 nt, Human
cacuguugcccagacugga

SEQ ID NO: 821190 - RNA, 21 nt, Human
cagagaaaucaaguacccucc

SEQ ID NO: 821191 - RNA, 21 nt, Human
cagcauagcugggugaccugg

SEQ ID NO: 821192 - RNA, 19 nt, Human
cagccuccugaguagcugg

SEQ ID NO: 821193 - RNA, 18 nt, Human
caggcgcccgccaccacu

SEQ ID NO: 821194 - RNA, 20 nt, Human
caggcugaaugaaucaauga

SEQ ID NO: 821195 - RNA, 21 nt, Human
cauaucaagcaauccugccuc

SEQ ID NO: 821196 - RNA, 24 nt, Human
ccaaagcacucggauuacaggcau

SEQ ID NO: 821197 - RNA, 22 nt, Human
ccaaagugcugggauuacaggc

SEQ ID NO: 821198 - RNA, 22 nt, Human
ccaaagugcugggauuacaggc

SEQ ID NO: 821199 - RNA, 24 nt, Human
ccaaagugcugggauuacaggcgu

SEQ ID NO: 821200 - RNA, 22 nt, Human
ccagaguagcugggaauacugg

SEQ ID NO: 821201 - RNA, 25 nt, Human
ccagaguagcugggaauacuggugu

SEQ ID NO: 821202 - RNA, 19 nt, Human
ccagggaaggcaagggcug

SEQ ID NO: 821203 - RNA, 23 nt, Human
ccauggaggucuguuuccuggga

SEQ ID NO: 821204 - RNA, 23 nt, Human
cccacugucccugcacaucccca

SEQ ID NO: 821205 - RNA, 19 nt, Human
cccagacuggagugcagug

SEQ ID NO: 821206 - RNA, 18 nt, Human
ccccagagguacccacac

SEQ ID NO: 821207 - RNA, 18 nt, Human
ccccagagguacccacac

SEQ ID NO: 821208 - RNA, 21 nt, Human
cccgccaccacuccuggcuaa

SEQ ID NO: 821209 - RNA, 23 nt, Human
ccuccgccucagccuccagagua

SEQ ID NO: 821210 - RNA, 24 nt, Human
ccuccugccucagucucccaaagc

SEQ ID NO: 821211 - RNA, 23 nt, Human
ccugccucagccuccugaguagc

SEQ ID NO: 821212 - RNA, 24 nt, Human
ccugccucagccuccugaguagcu

SEQ ID NO: 821213 - RNA, 21 nt, Human
ccuggccuuaagugauccucc

SEQ ID NO: 821214 - RNA, 22 nt, Human
ccuggccuuaagugauccuccu

SEQ ID NO: 821215 - RNA, 27 nt, Human
ccugggugcccaaaauccagggaaggc

SEQ ID NO: 821216 - RNA, 27 nt, Human
cgagugauccuccugccucagccuccc

SEQ ID NO: 821217 - RNA, 27 nt, Human
cgagugauccuccugccucagccuccc

SEQ ID NO: 821218 - RNA, 24 nt, Human
cgcccaggcuggagugcaguggcg

SEQ ID NO: 821219 - RNA, 24 nt, Human
cgccucagccuccagaguagcugg

SEQ ID NO: 821220 - RNA, 19 nt, Human
cgccucccggguucacgcc

SEQ ID NO: 821221 - RNA, 24 nt, Human
cgccucggccucccaaagugcugg

SEQ ID NO: 821222 - RNA, 19 nt, Human
cggauuacaggcaugugcc

SEQ ID NO: 821223 - RNA, 24 nt, Human
cgggguuucaccguguuagccagg

SEQ ID NO: 821224 - RNA, 22 nt, Human
cgugugggaccccucacuaucc

SEQ ID NO: 821225 - RNA, 19 nt, Human
cucacuauccacaccuccc

SEQ ID NO: 821226 - RNA, 24 nt, Human
cucacucugucgcccaggcuggag

SEQ ID NO: 821227 - RNA, 21 nt, Human
cucccggguucacgccauucu

SEQ ID NO: 821228 - RNA, 24 nt, Human
cuccgccucagccuccagaguagc

SEQ ID NO: 821229 - RNA, 24 nt, Human
cuccugaccucgugaucugcccgc

SEQ ID NO: 821230 - RNA, 18 nt, Human
cucgagugauccuccugc

SEQ ID NO: 821231 - RNA, 20 nt, Human
cucggauuacaggcaugugc

SEQ ID NO: 821232 - RNA, 19 nt, Human
cugaagccuacacacaccc

SEQ ID NO: 821233 - RNA, 23 nt, Human
cugauguugcugggcaccagggu

SEQ ID NO: 821234 - RNA, 24 nt, Human
cuggggagucaguggguaaaaaga

SEQ ID NO: 821235 - RNA, 19 nt, Human
cugucgcccaggcuggagu

SEQ ID NO: 821236 - RNA, 20 nt, Human
cuucagggacuaccuucucu

SEQ ID NO: 821237 - RNA, 20 nt, Human
gaccccucacuauccacacc

SEQ ID NO: 821238 - RNA, 22 nt, Human
gaccucgugaucugcccgccuc

SEQ ID NO: 821239 - RNA, 24 nt, Human
gaccucgugaucugcccgccucgg

SEQ ID NO: 821240 - RNA, 19 nt, Human
gacucaucucugcccccag

SEQ ID NO: 821241 - RNA, 24 nt, Human
gagacgggguuucaccguguuagc

SEQ ID NO: 821242 - RNA, 24 nt, Human
gagagggagucucacucugucgcc

SEQ ID NO: 821243 - RNA, 23 nt, Human
gagcaaaguccugggugcccaaa

SEQ ID NO: 821244 - RNA, 22 nt, Human
gagcucgagugauccuccugcc

SEQ ID NO: 821245 - RNA, 20 nt, Human
gaggaccuggguaccuacag

SEQ ID NO: 821246 - RNA, 18 nt, Human
gaggaucugaagagguau

SEQ ID NO: 821247 - RNA, 21 nt, Human
gaugaaggaagcccagagaaa

SEQ ID NO: 821248 - RNA, 20 nt, Human
gaugacaagagaagccugga

SEQ ID NO: 821249 - RNA, 21 nt, Human
gaugacaagagaagccuggaa

SEQ ID NO: 821250 - RNA, 18 nt, Human
gauuacaggcaugugcca

SEQ ID NO: 821251 - RNA, 18 nt, Human
gauuacaggcgugagcca

SEQ ID NO: 821252 - RNA, 21 nt, Human
gauuacaggcgugagccacca

SEQ ID NO: 821253 - RNA, 22 nt, Human
gauuacaggcgugagccaccac

SEQ ID NO: 821254 - RNA, 18 nt, Human
gauugcaagcgugagcca

SEQ ID NO: 821255 - RNA, 24 nt, Human
gauugugcaugccuccugugggca

SEQ ID NO: 821256 - RNA, 22 nt, Human
gcaaaguccugggugcccaaaa

SEQ ID NO: 821257 - RNA, 24 nt, Human
gcccagacuggagugcaguggugu

SEQ ID NO: 821258 - RNA, 19 nt, Human
gcccaggcuggagugcagu

SEQ ID NO: 821259 - RNA, 20 nt, Human
gcccaggcuggagugcagug

SEQ ID NO: 821260 - RNA, 24 nt, Human
gccucagucucccaaagcacuggg

SEQ ID NO: 821261 - RNA, 25 nt, Human
gccucccggguucacgccauucucc

SEQ ID NO: 821262 - RNA, 19 nt, Human
gcuggagugcaguggcgcg

SEQ ID NO: 821263 - RNA, 18 nt, Human
gcuguugcccaggcuggu

SEQ ID NO: 821264 - RNA, 21 nt, Human
ggaagcccagagaaaucaagu

SEQ ID NO: 821265 - RNA, 19 nt, Human
ggaggcuuuaggacacaca

SEQ ID NO: 821266 - RNA, 24 nt, Human
ggauggucucgaucuccugaccuc

SEQ ID NO: 821267 - RNA, 19 nt, Human
ggauuacaggcaugugcca

SEQ ID NO: 821268 - RNA, 22 nt, Human
ggauuacaggcaugugccacca

SEQ ID NO: 821269 - RNA, 19 nt, Human
ggauuacaggcgugagcca

SEQ ID NO: 821270 - RNA, 22 nt, Human
ggccuuaagugauccuccugcc

SEQ ID NO: 821271 - RNA, 24 nt, Human
ggccuuaagugauccuccugccuc

SEQ ID NO: 821272 - RNA, 23 nt, Human
ggcuggucucgaacuccuggccu

SEQ ID NO: 821273 - RNA, 23 nt, Human
gggguuucaccguguuagccagg

SEQ ID NO: 821274 - RNA, 23 nt, Human
guagagacgggguuucaccgugu

SEQ ID NO: 821275 - RNA, 22 nt, Human
gucuugcuguugcccaggcugg

SEQ ID NO: 821276 - RNA, 24 nt, Human
gugaacacagcucacugcagccuc

SEQ ID NO: 821277 - RNA, 24 nt, Human
gugauccuccugccucagccuccc

SEQ ID NO: 821278 - RNA, 24 nt, Human
gugaucugcccgccucggccuccc

SEQ ID NO: 821279 - RNA, 21 nt, Human
gugcaugccuccugugggcag

SEQ ID NO: 821280 - RNA, 18 nt, Human
guggauccuggcacaugg

SEQ ID NO: 821281 - RNA, 20 nt, Human
guucuuuuccucuuucacug

SEQ ID NO: 821282 - RNA, 18 nt, Human
uaaaaagaggccagggug

SEQ ID NO: 821283 - RNA, 22 nt, Human
uaacuggauggucuccaaauac

SEQ ID NO: 821284 - RNA, 20 nt, Human
uaagugauccuccugccuca

SEQ ID NO: 821285 - RNA, 28 nt, Human
uaagugauccuccugccucagucuccca

SEQ ID NO: 821286 - RNA, 25 nt, Human
uaauagagacaaagucucucucucu

SEQ ID NO: 821287 - RNA, 24 nt, Human
uaauuuuuuguauuuuuaguagag

SEQ ID NO: 821288 - RNA, 25 nt, Human
uaauuuuuuguauuuuuaguagaga

SEQ ID NO: 821289 - RNA, 19 nt, Human
uacagauuuccuuccacac

SEQ ID NO: 821290 - RNA, 24 nt, Human
uacaggcgugagccaccacgccca

SEQ ID NO: 821291 - RNA, 21 nt, Human
uaguagagacgggguuucacc

SEQ ID NO: 821292 - RNA, 24 nt, Human
uaguagagacgggguuucaccgug

SEQ ID NO: 821293 - RNA, 26 nt, Human
uaguagagacgggguuucaccguguu

SEQ ID NO: 821294 - RNA, 22 nt, Human
uaucaagcaauccugccuccgc

SEQ ID NO: 821295 - RNA, 21 nt, Human
uaugggagaagggaggcuuua

SEQ ID NO: 821296 - RNA, 22 nt, Human
uauuuuuauuuucuuuugagag

SEQ ID NO: 821297 - RNA, 24 nt, Human
ucaccguguuagccaggauggucu

SEQ ID NO: 821298 - RNA, 18 nt, Human
ucacugcaagcuccgccu

SEQ ID NO: 821299 - RNA, 19 nt, Human
ucacugcaagcuccgccuc

SEQ ID NO: 821300 - RNA, 24 nt, Human
ucacugcaagcuccgccucccggg

SEQ ID NO: 821301 - RNA, 19 nt, Human
ucacugcagccucaaucuc

SEQ ID NO: 821302 - RNA, 20 nt, Human
ucagccuccugaguagcugg

SEQ ID NO: 821303 - RNA, 23 nt, Human
uccagggaaggcaagggcugggg

SEQ ID NO: 821304 - RNA, 24 nt, Human
ucccaaagcacucggauuacaggc

SEQ ID NO: 821305 - RNA, 24 nt, Human
ucccaaagugcugggauuacaggc

SEQ ID NO: 821306 - RNA, 21 nt, Human
ucccggguucacgccauucuc

SEQ ID NO: 821307 - RNA, 24 nt, Human
ucccggguucacgccauucuccug

SEQ ID NO: 821308 - RNA, 25 nt, Human
uccuccugccucagccucccaaagc

SEQ ID NO: 821309 - RNA, 24 nt, Human
uccugaguagcuggccaccacagg

SEQ ID NO: 821310 - RNA, 25 nt, Human
uccugaguagcuggccaccacaggc

SEQ ID NO: 821311 - RNA, 22 nt, Human
uccugggucuccagcaucaccc

SEQ ID NO: 821312 - RNA, 22 nt, Human
ucgcccaggcuggagugcagug

SEQ ID NO: 821313 - RNA, 22 nt, Human
ucggauuacaggcaugugccac

SEQ ID NO: 821314 - RNA, 24 nt, Human
ucggauuacaggcaugugccacca

SEQ ID NO: 821315 - RNA, 18 nt, Human
ucggccucccaaagugcu

SEQ ID NO: 821316 - RNA, 23 nt, Human
ucucacucugucgcccaggcugg

SEQ ID NO: 821317 - RNA, 24 nt, Human
ucucacucugucgcccaggcugga

SEQ ID NO: 821318 - RNA, 26 nt, Human
ucucacucugucgcccaggcuggagu

SEQ ID NO: 821319 - RNA, 24 nt, Human
ucuccaaauacaccaagagcucac

SEQ ID NO: 821320 - RNA, 23 nt, Human
ucuccaaauacaccaagagcucu

SEQ ID NO: 821321 - RNA, 19 nt, Human
ucuccagcaucacccaguc

SEQ ID NO: 821322 - RNA, 21 nt, Human
ucucccaaagcacugggauug

SEQ ID NO: 821323 - RNA, 22 nt, Human
ucuccugcagccccugccgcuc

SEQ ID NO: 821324 - RNA, 27 nt, Human
ucuccugcagccccugccgcucuugac

SEQ ID NO: 821325 - RNA, 24 nt, Human
ucuccugccucagccuccugagua

SEQ ID NO: 821326 - RNA, 21 nt, Human
ucucgaacuccuggccuuaag

SEQ ID NO: 821327 - RNA, 21 nt, Human
ucucuaggaaguccuuaacuc

SEQ ID NO: 821328 - RNA, 19 nt, Human
ucucuugcccaggucuuga

SEQ ID NO: 821329 - RNA, 19 nt, Human
ucugaagccuacacacacc

SEQ ID NO: 821330 - RNA, 24 nt, Human
ucugucgcccaggcuggagugcag

SEQ ID NO: 821331 - RNA, 24 nt, Human
ucuugcacuguugcccagacugga

SEQ ID NO: 821332 - RNA, 20 nt, Human
ucuugcuguugcccaggcug

SEQ ID NO: 821333 - RNA, 21 nt, Human
ucuugcuguugcccaggcugg

SEQ ID NO: 821334 - RNA, 22 nt, Human
ucuugcuguugcccaggcuggu

SEQ ID NO: 821335 - RNA, 19 nt, Human
ugaagccuacacacacccc

SEQ ID NO: 821336 - RNA, 21 nt, Human
ugaaggaagcccagagaaauc

SEQ ID NO: 821337 - RNA, 19 nt, Human
ugacaagagaagccuggaa

SEQ ID NO: 821338 - RNA, 24 nt, Human
ugagcucgagugauccuccugccu

SEQ ID NO: 821339 - RNA, 22 nt, Human
ugaggucuugcuguugcccagg

SEQ ID NO: 821340 - RNA, 23 nt, Human
ugaggucuugcuguugcccaggc

SEQ ID NO: 821341 - RNA, 21 nt, Human
ugaugcagugcaaagggccuu

SEQ ID NO: 821342 - RNA, 24 nt, Human
ugcacuguugcccagacuggagug

SEQ ID NO: 821343 - RNA, 23 nt, Human
ugcaugccuccugugggcagagc

SEQ ID NO: 821344 - RNA, 21 nt, Human
ugcccagacuggagugcagug

SEQ ID NO: 821345 - RNA, 24 nt, Human
ugcccagacuggagugcaguggug

SEQ ID NO: 821346 - RNA, 24 nt, Human
ugcccaggcuggucucgaacuccu

SEQ ID NO: 821347 - RNA, 25 nt, Human
ugccucagccucccaaagcacucgg

SEQ ID NO: 821348 - RNA, 24 nt, Human
ugccucagccuccugaguagcugg

SEQ ID NO: 821349 - RNA, 18 nt, Human
ugccucagguaggcaguc

SEQ ID NO: 821350 - RNA, 24 nt, Human
ugccucagucucccaaagcacugg

SEQ ID NO: 821351 - RNA, 21 nt, Human
ugccuggaauguucuuuuccu

SEQ ID NO: 821352 - RNA, 24 nt, Human
ugcugggauuacaggcgugagcca

SEQ ID NO: 821353 - RNA, 23 nt, Human
ugcuguugcccaggcuggucucg

SEQ ID NO: 821354 - RNA, 18 nt, Human
uggaauguucuuuuccuc

SEQ ID NO: 821355 - RNA, 22 nt, Human
uggaauguucuuuuccucuuuc

SEQ ID NO: 821356 - RNA, 22 nt, Human
uggaggucuguuuccugggauc

SEQ ID NO: 821357 - RNA, 23 nt, Human
uggagugcaguggcgcgaucucg

SEQ ID NO: 821358 - RNA, 24 nt, Human
uggagugcaguggcgcgaucucgg

SEQ ID NO: 821359 - RNA, 19 nt, Human
uggagugcaguggugugaa

SEQ ID NO: 821360 - RNA, 20 nt, Human
uggagugcaguggugugaac

SEQ ID NO: 821361 - RNA, 28 nt, Human
uggagugcaguggugugaaggcucuagc

SEQ ID NO: 821362 - RNA, 19 nt, Human
uggccagcacagaccuggc

SEQ ID NO: 821363 - RNA, 20 nt, Human
uggccuuaagugauccuccu

SEQ ID NO: 821364 - RNA, 24 nt, Human
uggccuuaagugauccuccugccu

SEQ ID NO: 821365 - RNA, 24 nt, Human
ugggaauacuggugugcaccacca

SEQ ID NO: 821366 - RNA, 18 nt, Human
ugggauuacaggcgugag

SEQ ID NO: 821367 - RNA, 19 nt, Human
ugggauuacaggcgugagc

SEQ ID NO: 821368 - RNA, 22 nt, Human
ugggauuacaggcgugagccac

SEQ ID NO: 821369 - RNA, 23 nt, Human
ugggauuacaggcgugagccacc

SEQ ID NO: 821370 - RNA, 24 nt, Human
ugggauuacaggcgugagccacca

SEQ ID NO: 821371 - RNA, 18 nt, Human
ugggauugcaagcgugag

SEQ ID NO: 821372 - RNA, 19 nt, Human
ugggauugcaagcgugagc

SEQ ID NO: 821373 - RNA, 21 nt, Human
ugggauugcaagcgugagcca

SEQ ID NO: 821374 - RNA, 23 nt, Human
ugggauugcaagcgugagccacc

SEQ ID NO: 821375 - RNA, 24 nt, Human
ugggauugcaagcgugagccaccg

SEQ ID NO: 821376 - RNA, 24 nt, Human
uggucuccaaauacaccaagagcu

SEQ ID NO: 821377 - RNA, 19 nt, Human
uguagagaugaggucuugc

SEQ ID NO: 821378 - RNA, 21 nt, Human
uguauuuuuaguagagacggg

SEQ ID NO: 821379 - RNA, 19 nt, Human
ugugaacacagcucacugc

SEQ ID NO: 821380 - RNA, 23 nt, Human
ugugaacacagcucacugcagcc

SEQ ID NO: 821381 - RNA, 26 nt, Human
ugugcaugccuccuguggggagcccu

SEQ ID NO: 821382 - RNA, 19 nt, Human
ugugcguuucuccuaccag

SEQ ID NO: 821383 - RNA, 18 nt, Human
uguggggaaggcagugcc

SEQ ID NO: 821384 - RNA, 22 nt, Human
uguugcccaggcuggucucgaa

SEQ ID NO: 821385 - RNA, 20 nt, Human
uuaaguuuuguagagaugag

SEQ ID NO: 821386 - RNA, 18 nt, Human
uuaguagagacgggguuu

SEQ ID NO: 821387 - RNA, 22 nt, Human
uuaguagagacgggguuucacc

SEQ ID NO: 821388 - RNA, 24 nt, Human
uuaguagagacgggguuucaccgu

SEQ ID NO: 821389 - RNA, 20 nt, Human
uucacugccagauuccuacu

SEQ ID NO: 821390 - RNA, 24 nt, Human
uugcacuguugcccagacuggagu

SEQ ID NO: 821391 - RNA, 24 nt, Human
uugcccagacuggagugcaguggu

SEQ ID NO: 821392 - RNA, 23 nt, Human
uugcuguugcccaggcuggucuc

SEQ ID NO: 821393 - RNA, 19 nt, Human
uuguagagaugaggucuug

SEQ ID NO: 821394 - RNA, 23 nt, Human
uuguauuuuuaguagagacgggg

SEQ ID NO: 821395 - RNA, 19 nt, Human
uuucaccguguuagccagg

SEQ ID NO: 821396 - RNA, 21 nt, Human
uuucucuuaucuccugcagcc

SEQ ID NO: 821397 - RNA, 20 nt, Human
uuuguagagaugaggucuug

SEQ ID NO: 821398 - RNA, 18 nt, Human
uuugucagaggagguccu

SEQ ID NO: 821399 - RNA, 24 nt, Human
uuuuuaguagagacgggguuucac

SEQ ID NO: 821400 - RNA, 21 nt, Human
uuuuuguauuuuuaguagaga

SEQ ID NO: 821401 - RNA, 24 nt, Human
uuuuuuguauuuuuaguagagacg

SEQ ID NO: 821402 - RNA, 20 nt, Human
aacuggaacuggaucccaca

SEQ ID NO: 821403 - RNA, 19 nt, Human
acccaggcccccugccucc

SEQ ID NO: 821404 - RNA, 22 nt, Human
agaaaguccaggagucuggaac

SEQ ID NO: 821405 - RNA, 22 nt, Human
agaaccgggggcuggcucucca

SEQ ID NO: 821406 - RNA, 19 nt, Human
aggaaggcuggcuuggaag

SEQ ID NO: 821407 - RNA, 21 nt, Human
agugcaucuucuagaauguug

SEQ ID NO: 821408 - RNA, 22 nt, Human
cacagagaacaaggauucucac

SEQ ID NO: 821409 - RNA, 24 nt, Human
cacauuccaggguugggacugucu

SEQ ID NO: 821410 - RNA, 19 nt, Human
cagagaaaguccaggaguc

SEQ ID NO: 821411 - RNA, 20 nt, Human
cagagccagagaaaguccag

SEQ ID NO: 821412 - RNA, 26 nt, Human
cagguuguuguagaacuggaacugga

SEQ ID NO: 821413 - RNA, 19 nt, Human
caguaccugagagggucac

SEQ ID NO: 821414 - RNA, 21 nt, Human
caucugaauugguuaacccag

SEQ ID NO: 821415 - RNA, 22 nt, Human
ccacacuuccacacuucaaccu

SEQ ID NO: 821416 - RNA, 18 nt, Human
ccacaggcgccgcaggug

SEQ ID NO: 821417 - RNA, 18 nt, Human
ccagcaguuuccaccucu

SEQ ID NO: 821418 - RNA, 23 nt, Human
ccagcccacuguguaggucaccc

SEQ ID NO: 821419 - RNA, 24 nt, Human
ccagccggcagagugaguggccuc

SEQ ID NO: 821420 - RNA, 23 nt, Human
cccccugccucccucaccugaaa

SEQ ID NO: 821421 - RNA, 19 nt, Human
ccccugccucccucaccug

SEQ ID NO: 821422 - RNA, 19 nt, Human
cccucccagccggcagagu

SEQ ID NO: 821423 - RNA, 23 nt, Human
ccgguggcucccacccgggggca

SEQ ID NO: 821424 - RNA, 21 nt, Human
ccugccucccucaccugaaaa

SEQ ID NO: 821425 - RNA, 19 nt, Human
cggggcugggggugaggca

SEQ ID NO: 821426 - RNA, 24 nt, Human
cucagagccagagaaaguccagga

SEQ ID NO: 821427 - RNA, 19 nt, Human
cuggagucacugagaaccg

SEQ ID NO: 821428 - RNA, 23 nt, Human
cuggaucauccgguggcucccac

SEQ ID NO: 821429 - RNA, 21 nt, Human
cugggggugaggcagaggggc

SEQ ID NO: 821430 - RNA, 21 nt, Human
gaaccuggccacacuuccacc

SEQ ID NO: 821431 - RNA, 19 nt, Human
gaaccuucugucagcucac

SEQ ID NO: 821432 - RNA, 27 nt, Human
gauucucacuuaacucagagccagaga

SEQ ID NO: 821433 - RNA, 22 nt, Human
gcaguaccugagagggucacgc

SEQ ID NO: 821434 - RNA, 18 nt, Human
gccagccccugaaccugg

SEQ ID NO: 821435 - RNA, 26 nt, Human
ggacaccugacgcuuuaauugaaaua

SEQ ID NO: 821436 - RNA, 21 nt, Human
ggagagcaucaguuggccucc

SEQ ID NO: 821437 - RNA, 24 nt, Human
ggaugcugucuggggaacccugca

SEQ ID NO: 821438 - RNA, 25 nt, Human
ggccagccccugaaccuggccacac

SEQ ID NO: 821439 - RNA, 21 nt, Human
gggcaaggggcucuguggugc

SEQ ID NO: 821440 - RNA, 23 nt, Human
gggccaccagccccacauuccag

SEQ ID NO: 821441 - RNA, 20 nt, Human
gggggugaggcagaggggcc

SEQ ID NO: 821442 - RNA, 20 nt, Human
ggggugcgguguaagagggu

SEQ ID NO: 821443 - RNA, 19 nt, Human
guguaggucacccauaacc

SEQ ID NO: 821444 - RNA, 19 nt, Human
uagucccuccaagguuuua

SEQ ID NO: 821445 - RNA, 23 nt, Human
uaucuggaggccaccaaccagcc

SEQ ID NO: 821446 - RNA, 22 nt, Human
ucagagccagagaaaguccagg

SEQ ID NO: 821447 - RNA, 23 nt, Human
ucaguuggccuccuucacccucc

SEQ ID NO: 821448 - RNA, 18 nt, Human
ucccacaggcgccgcagg

SEQ ID NO: 821449 - RNA, 22 nt, Human
uccccgacugguucgucugggu

SEQ ID NO: 821450 - RNA, 23 nt, Human
uccccgacugguucgucuggguc

SEQ ID NO: 821451 - RNA, 21 nt, Human
uccguagaagcuggagucacu

SEQ ID NO: 821452 - RNA, 28 nt, Human
ucgcuggaguucugcgaacugcuguucg

SEQ ID NO: 821453 - RNA, 25 nt, Human
ucucuggacugacuggcucuuaggg

SEQ ID NO: 821454 - RNA, 27 nt, Human
ugaacccuuagcagugguggccagccc

SEQ ID NO: 821455 - RNA, 22 nt, Human
ugcaucaccauuacccaggccc

SEQ ID NO: 821456 - RNA, 23 nt, Human
ugccacgaagcguggagaugggg

SEQ ID NO: 821457 - RNA, 22 nt, Human
ugccggggcugggggugaggca

SEQ ID NO: 821458 - RNA, 20 nt, Human
ugccuugcucgccggagauc

SEQ ID NO: 821459 - RNA, 25 nt, Human
ugccuugugggcacugacugggaac

SEQ ID NO: 821460 - RNA, 25 nt, Human
uggagugcggaacgucuggguuugg

SEQ ID NO: 821461 - RNA, 21 nt, Human
uggaugugaacacucagagcc

SEQ ID NO: 821462 - RNA, 23 nt, Human
uggccucucgggccaccagcccc

SEQ ID NO: 821463 - RNA, 18 nt, Human
ugguuucuaagcuccuuu

SEQ ID NO: 821464 - RNA, 22 nt, Human
ugguuucuaagcuccuuuuccu

SEQ ID NO: 821465 - RNA, 21 nt, Human
ugucuggaucauccgguggcu

SEQ ID NO: 821466 - RNA, 23 nt, Human
ugucuggaucauccgguggcucc

SEQ ID NO: 821467 - RNA, 20 nt, Human
uuaacccaggcccaagugca

SEQ ID NO: 821468 - RNA, 22 nt, Human
uuaguuaucuggaggccaccaa

SEQ ID NO: 821469 - RNA, 18 nt, Human
uugcucucaugggacacc

SEQ ID NO: 821470 - RNA, 24 nt, Human
uuggagugcggaacgucuggguuu

SEQ ID NO: 821471 - RNA, 24 nt, Human
aaagugcugggauuacagguguga

SEQ ID NO: 821472 - RNA, 19 nt, Human
aagcaaaguccaacauaca

SEQ ID NO: 821473 - RNA, 18 nt, Human
aagugcugggauuacagg

SEQ ID NO: 821474 - RNA, 19 nt, Human
aagugcugggauuacaggu

SEQ ID NO: 821475 - RNA, 19 nt, Human
aaguguccaacccauaggu

SEQ ID NO: 821476 - RNA, 24 nt, Human
aaugcaguagugugaucucagcuc

SEQ ID NO: 821477 - RNA, 23 nt, Human
acaagggaagaacaucgacuaaa

SEQ ID NO: 821478 - RNA, 22 nt, Human
acaagggaggagcugcgcugga

SEQ ID NO: 821479 - RNA, 24 nt, Human
accauguuguccaggcuggucuug

SEQ ID NO: 821480 - RNA, 20 nt, Human
acuggaagggcuucucucca

SEQ ID NO: 821481 - RNA, 23 nt, Human
acuggcauauguuagcugaaagu

SEQ ID NO: 821482 - RNA, 19 nt, Human
acugugugugaccucgugu

SEQ ID NO: 821483 - RNA, 20 nt, Human
agaaaagcauuauacaacua

SEQ ID NO: 821484 - RNA, 20 nt, Human
agagaugggguuucaccaug

SEQ ID NO: 821485 - RNA, 19 nt, Human
agauaauagaagcacagcc

SEQ ID NO: 821486 - RNA, 19 nt, Human
aggagcugcgcuggaaggc

SEQ ID NO: 821487 - RNA, 18 nt, Human
aggcaaugaauccugcua

SEQ ID NO: 821488 - RNA, 22 nt, Human
aggccauggggccccaaaucca

SEQ ID NO: 821489 - RNA, 22 nt, Human
agggaagaacaucgacuaaagg

SEQ ID NO: 821490 - RNA, 23 nt, Human
agggaugugccaugccuaaagga

SEQ ID NO: 821491 - RNA, 24 nt, Human
aguagugugaucucagcucacugc

SEQ ID NO: 821492 - RNA, 19 nt, Human
auacaggcauaucaucccc

SEQ ID NO: 821493 - RNA, 23 nt, Human
auauuuagggcugggaaaauuua

SEQ ID NO: 821494 - RNA, 19 nt, Human
augggguuucaccauguug

SEQ ID NO: 821495 - RNA, 20 nt, Human
augggguuucaccauguugu

SEQ ID NO: 821496 - RNA, 22 nt, Human
augugugugugucuugcucugu

SEQ ID NO: 821497 - RNA, 24 nt, Human
augugugugugucuugcucuguug

SEQ ID NO: 821498 - RNA, 24 nt, Human
auuuuuuuuuuuuuuuaaagagau

SEQ ID NO: 821499 - RNA, 19 nt, Human
caaaagguuucucuccagu

SEQ ID NO: 821500 - RNA, 27 nt, Human
caaaagguuucucuccaguaugagucc

SEQ ID NO: 821501 - RNA, 24 nt, Human
caaagugcugggauuacaggugug

SEQ ID NO: 821502 - RNA, 19 nt, Human
caacaaagguucuggaagu

SEQ ID NO: 821503 - RNA, 21 nt, Human
caacacaccaacaaagguucu

SEQ ID NO: 821504 - RNA, 20 nt, Human
caaugucaacacaccaacaa

SEQ ID NO: 821505 - RNA, 18 nt, Human
cacaauuuuuucccugca

SEQ ID NO: 821506 - RNA, 20 nt, Human
cacacaacguauaaacacac

SEQ ID NO: 821507 - RNA, 20 nt, Human
cacacacaacguauaaacac

SEQ ID NO: 821508 - RNA, 24 nt, Human
caccauguuguccaggcuggucuu

SEQ ID NO: 821509 - RNA, 27 nt, Human
caccauguuguccaggcuggucuugaa

SEQ ID NO: 821510 - RNA, 24 nt, Human
caccucagccuccugaguagcugg

SEQ ID NO: 821511 - RNA, 22 nt, Human
cacugcagucucugcucccggg

SEQ ID NO: 821512 - RNA, 19 nt, Human
cagcccccaugcacaauuu

SEQ ID NO: 821513 - RNA, 20 nt, Human
cagccuccugaguagcuggg

SEQ ID NO: 821514 - RNA, 23 nt, Human
caggauaaauuccuugaucuguu

SEQ ID NO: 821515 - RNA, 22 nt, Human
caggccacugaagcuuagcuga

SEQ ID NO: 821516 - RNA, 26 nt, Human
cagugauccucccaccucagccuccu

SEQ ID NO: 821517 - RNA, 19 nt, Human
cagugugaauucucugaug

SEQ ID NO: 821518 - RNA, 23 nt, Human
caguuuucuccacacacaacgua

SEQ ID NO: 821519 - RNA, 21 nt, Human
cauggucaaugucaacacacc

SEQ ID NO: 821520 - RNA, 20 nt, Human
caugguguuucuuuccagga

SEQ ID NO: 821521 - RNA, 20 nt, Human
cauguuguccaggcuggucu

SEQ ID NO: 821522 - RNA, 24 nt, Human
cauguuguccaggcuggucuugaa

SEQ ID NO: 821523 - RNA, 23 nt, Human
ccaaaaauaaccuuuucacuggc

SEQ ID NO: 821524 - RNA, 21 nt, Human
ccaaagugcugggauuacagg

SEQ ID NO: 821525 - RNA, 21 nt, Human
ccaaagugcugggauuacagg

SEQ ID NO: 821526 - RNA, 24 nt, Human
ccaaagugcugggauuacaggugu

SEQ ID NO: 821527 - RNA, 23 nt, Human
ccaccucagccuccugaguagcu

SEQ ID NO: 821528 - RNA, 24 nt, Human
ccacugcaugccaccaugcccagc

SEQ ID NO: 821529 - RNA, 24 nt, Human
ccaggcuggucuugaacuccuggg

SEQ ID NO: 821530 - RNA, 19 nt, Human
ccagugugaauucucugau

SEQ ID NO: 821531 - RNA, 22 nt, Human
cccaaagugcugggauuacagg

SEQ ID NO: 821532 - RNA, 23 nt, Human
cccaccucagccuccugaguagc

SEQ ID NO: 821533 - RNA, 22 nt, Human
cccauaggugcccauuaaaugu

SEQ ID NO: 821534 - RNA, 22 nt, Human
cccggguuccagugauccuccc

SEQ ID NO: 821535 - RNA, 23 nt, Human
cccggguuccagugauccuccca

SEQ ID NO: 821536 - RNA, 24 nt, Human
ccucccaccucagccuccugagua

SEQ ID NO: 821537 - RNA, 24 nt, Human
ccucugauccugaaucagaacauu

SEQ ID NO: 821538 - RNA, 27 nt, Human
ccugaaucagaacauuuuagcuaaagc

SEQ ID NO: 821539 - RNA, 23 nt, Human
ccugaguagcugggacuaccacu

SEQ ID NO: 821540 - RNA, 23 nt, Human
ccuggguucaagcagucuaucug

SEQ ID NO: 821541 - RNA, 25 nt, Human
ccuuacacuggaagggcuucucucc

SEQ ID NO: 821542 - RNA, 21 nt, Human
ccuuauaggcuguaucauacu

SEQ ID NO: 821543 - RNA, 20 nt, Human
cgcuggaaggcuuucccaca

SEQ ID NO: 821544 - RNA, 26 nt, Human
cguauaaacacacacguaauucauua

SEQ ID NO: 821545 - RNA, 23 nt, Human
cucacugcagucucugcucccgg

SEQ ID NO: 821546 - RNA, 24 nt, Human
cucacugcagucucugcucccggg

SEQ ID NO: 821547 - RNA, 24 nt, Human
cucagccuccugaguagcugggac

SEQ ID NO: 821548 - RNA, 19 nt, Human
cuccuggguucaagcaguc

SEQ ID NO: 821549 - RNA, 23 nt, Human
cugaagcuuagcugaugcuuuac

SEQ ID NO: 821550 - RNA, 21 nt, Human
cugcuauguggcaugcaaaga

SEQ ID NO: 821551 - RNA, 28 nt, Human
cugcucccggguuccagugauccucccu

SEQ ID NO: 821552 - RNA, 19 nt, Human
cuggucuugaacuccuggg

SEQ ID NO: 821553 - RNA, 21 nt, Human
cuguacaaugaagugguuggg

SEQ ID NO: 821554 - RNA, 22 nt, Human
gaaggcuuucccacagagacua

SEQ ID NO: 821555 - RNA, 18 nt, Human
gagaugggguuucaccau

SEQ ID NO: 821556 - RNA, 23 nt, Human
gagaugggguuucaccauguugu

SEQ ID NO: 821557 - RNA, 26 nt, Human
gaguagcugggacuaccacugcaugc

SEQ ID NO: 821558 - RNA, 22 nt, Human
gaugggguuucaccauguuguc

SEQ ID NO: 821559 - RNA, 18 nt, Human
gauuacaggugugagaca

SEQ ID NO: 821560 - RNA, 24 nt, Human
gauuacaggugugagacaccauac

SEQ ID NO: 821561 - RNA, 20 nt, Human
gcucaggcuggaaugcagua

SEQ ID NO: 821562 - RNA, 21 nt, Human
gcuucucuccacuguguguga

SEQ ID NO: 821563 - RNA, 18 nt, Human
ggcuggucuugaacuccu

SEQ ID NO: 821564 - RNA, 22 nt, Human
gggguuucaccauguuguccag

SEQ ID NO: 821565 - RNA, 23 nt, Human
gggguuucaccauguuguccagg

SEQ ID NO: 821566 - RNA, 22 nt, Human
ggguuucaccauguuguccagg

SEQ ID NO: 821567 - RNA, 22 nt, Human
gucagcaucucagaagggcaga

SEQ ID NO: 821568 - RNA, 21 nt, Human
guccaguugugcccaaauugg

SEQ ID NO: 821569 - RNA, 23 nt, Human
gucucacauucacuaggccuuau

SEQ ID NO: 821570 - RNA, 23 nt, Human
gugauccucccaccucagccucc

SEQ ID NO: 821571 - RNA, 23 nt, Human
guuucaccauguuguccaggcug

SEQ ID NO: 821572 - RNA, 24 nt, Human
guuucaccauguuguccaggcugg

SEQ ID NO: 821573 - RNA, 25 nt, Human
uaaaaaguacaauaaggggacuuaa

SEQ ID NO: 821574 - RNA, 26 nt, Human
uaagaauucucaaaguguccaaccca

SEQ ID NO: 821575 - RNA, 22 nt, Human
uacaaggcaaaauuuauggcaa

SEQ ID NO: 821576 - RNA, 19 nt, Human
uacauguagcuguuuuuac

SEQ ID NO: 821577 - RNA, 19 nt, Human
uagcugggacuaccacugc

SEQ ID NO: 821578 - RNA, 24 nt, Human
uagugugaucucagcucacugcag

SEQ ID NO: 821579 - RNA, 24 nt, Human
uaucacacuuauaggguuucuuuu

SEQ ID NO: 821580 - RNA, 23 nt, Human
uauccugcauacauauauucaaa

SEQ ID NO: 821581 - RNA, 21 nt, Human
uauggcaaugggcaauuagac

SEQ ID NO: 821582 - RNA, 26 nt, Human
ucaaaagcaaaguccaacauacaggc

SEQ ID NO: 821583 - RNA, 19 nt, Human
ucaaacuauguaucagaua

SEQ ID NO: 821584 - RNA, 23 nt, Human
ucacugcagucucugcucccggg

SEQ ID NO: 821585 - RNA, 21 nt, Human
ucacuggcaaggccauggggc

SEQ ID NO: 821586 - RNA, 23 nt, Human
ucagccuccugaguagcugggac

SEQ ID NO: 821587 - RNA, 21 nt, Human
ucagucuucaucuguacaaug

SEQ ID NO: 821588 - RNA, 21 nt, Human
ucagucuucaucuguacaaug

SEQ ID NO: 821589 - RNA, 28 nt, Human
uccaacauacaggcauaucauccccaac

SEQ ID NO: 821590 - RNA, 21 nt, Human
uccagagaaagguuuucccac

SEQ ID NO: 821591 - RNA, 18 nt, Human
uccaugaugagagaaagg

SEQ ID NO: 821592 - RNA, 19 nt, Human
ucccacagagacuacacug

SEQ ID NO: 821593 - RNA, 21 nt, Human
ucccggguuccagugauccuc

SEQ ID NO: 821594 - RNA, 18 nt, Human
ucccugcaaagaaugaag

SEQ ID NO: 821595 - RNA, 18 nt, Human
uccugaguagcugggacu

SEQ ID NO: 821596 - RNA, 22 nt, Human
uccugaguagcugggacuacca

SEQ ID NO: 821597 - RNA, 20 nt, Human
uccuggaguuggaacugguu

SEQ ID NO: 821598 - RNA, 24 nt, Human
uccuggguucaagcagucuaucug

SEQ ID NO: 821599 - RNA, 21 nt, Human
ucuaagaauccucugauccuu

SEQ ID NO: 821600 - RNA, 21 nt, Human
ucucuaagaauccucugaucc

SEQ ID NO: 821601 - RNA, 19 nt, Human
ucugaguccaaaaauaacc

SEQ ID NO: 821602 - RNA, 22 nt, Human
ucugauacuguaggcuuaagaa

SEQ ID NO: 821603 - RNA, 23 nt, Human
ucugcauuaugucccaaauugcu

SEQ ID NO: 821604 - RNA, 24 nt, Human
ucuguugcucaggcuggaaugcag

SEQ ID NO: 821605 - RNA, 24 nt, Human
ucuugaacuccuggguucaagcag

SEQ ID NO: 821606 - RNA, 19 nt, Human
ucuugcucuguugcucagg

SEQ ID NO: 821607 - RNA, 20 nt, Human
ucuugcucuguugcucaggc

SEQ ID NO: 821608 - RNA, 23 nt, Human
ucuugcucuguugcucaggcugg

SEQ ID NO: 821609 - RNA, 24 nt, Human
ucuugcucuguugcucaggcugga

SEQ ID NO: 821610 - RNA, 22 nt, Human
ucuuuggcuuucagucuucauc

SEQ ID NO: 821611 - RNA, 18 nt, Human
ugaagcuuagcugaugcu

SEQ ID NO: 821612 - RNA, 24 nt, Human
ugaauaaaggcuuuucuacauuua

SEQ ID NO: 821613 - RNA, 26 nt, Human
ugaccaaaagcccucccacauaugcu

SEQ ID NO: 821614 - RNA, 20 nt, Human
ugagacaccauaccuagccc

SEQ ID NO: 821615 - RNA, 21 nt, Human
ugagcauucucaugcugacca

SEQ ID NO: 821616 - RNA, 22 nt, Human
ugaguacaaggcaaaauuuaug

SEQ ID NO: 821617 - RNA, 23 nt, Human
ugaguacaaggcaaaauuuaugg

SEQ ID NO: 821618 - RNA, 21 nt, Human
ugagugcaguugucaagcaau

SEQ ID NO: 821619 - RNA, 20 nt, Human
ugauauccugcauacauaua

SEQ ID NO: 821620 - RNA, 21 nt, Human
ugaugagagaaaggcaaugaa

SEQ ID NO: 821621 - RNA, 24 nt, Human
ugcauucaaaggguuucuccccag

SEQ ID NO: 821622 - RNA, 23 nt, Human
ugccaugccuaaaggaccuccca

SEQ ID NO: 821623 - RNA, 23 nt, Human
ugcgcuggaaggcuuucccacag

SEQ ID NO: 821624 - RNA, 22 nt, Human
ugcugggauuacaggugugaga

SEQ ID NO: 821625 - RNA, 24 nt, Human
ugcugggauuacaggugugagaca

SEQ ID NO: 821626 - RNA, 18 nt, Human
uggaaaccacuucacauc

SEQ ID NO: 821627 - RNA, 19 nt, Human
uggaaugcaguagugugau

SEQ ID NO: 821628 - RNA, 23 nt, Human
uggaaugcaguagugugaucuca

SEQ ID NO: 821629 - RNA, 24 nt, Human
uggaaugcaguagugugaucucag

SEQ ID NO: 821630 - RNA, 24 nt, Human
ugggacuaccacugcaugccacca

SEQ ID NO: 821631 - RNA, 18 nt, Human
ugggauuacaggugugag

SEQ ID NO: 821632 - RNA, 22 nt, Human
ugggauuacaggugugagacac

SEQ ID NO: 821633 - RNA, 23 nt, Human
ugggauuacaggugugagacacc

SEQ ID NO: 821634 - RNA, 24 nt, Human
ugggauuacaggugugagacacca

SEQ ID NO: 821635 - RNA, 25 nt, Human
ugggauuacaggugugagacaccau

SEQ ID NO: 821636 - RNA, 24 nt, Human
ugggguuucaccauguuguccagg

SEQ ID NO: 821637 - RNA, 20 nt, Human
ugguguugaacaagggagga

SEQ ID NO: 821638 - RNA, 18 nt, Human
ugguugggcuaguugauc

SEQ ID NO: 821639 - RNA, 20 nt, Human
uguaaaaggaaucaaugucc

SEQ ID NO: 821640 - RNA, 24 nt, Human
uguccaggcuggucuugaacuccu

SEQ ID NO: 821641 - RNA, 22 nt, Human
ugucuugcucuguugcucaggc

SEQ ID NO: 821642 - RNA, 25 nt, Human
ugucuugcucuguugcucaggcugg

SEQ ID NO: 821643 - RNA, 18 nt, Human
ugugcccaaauuggucug

SEQ ID NO: 821644 - RNA, 22 nt, Human
ugugucuugcucuguugcucag

SEQ ID NO: 821645 - RNA, 23 nt, Human
uuaaagagaugggguuucaccau

SEQ ID NO: 821646 - RNA, 24 nt, Human
uuaaagagaugggguuucaccaug

SEQ ID NO: 821647 - RNA, 21 nt, Human
uuaacccagcuuuacccuuau

SEQ ID NO: 821648 - RNA, 20 nt, Human
uuacaggugugagacaccau

SEQ ID NO: 821649 - RNA, 23 nt, Human
uuauaggcuguaucauacugugg

SEQ ID NO: 821650 - RNA, 21 nt, Human
uuccacauacauugcauucaa

SEQ ID NO: 821651 - RNA, 24 nt, Human
uuccagugauccucccaccucagc

SEQ ID NO: 821652 - RNA, 19 nt, Human
uuccugacaggcauccuag

SEQ ID NO: 821653 - RNA, 22 nt, Human
uuccuggaguuggaacugguuu

SEQ ID NO: 821654 - RNA, 24 nt, Human
uucuacauuuaucacacuuauagg

SEQ ID NO: 821655 - RNA, 20 nt, Human
uucuggaaguuccuuuagga

SEQ ID NO: 821656 - RNA, 19 nt, Human
uucugugaaacuggcauau

SEQ ID NO: 821657 - RNA, 24 nt, Human
uuuaaagagaugggguuucaccau

SEQ ID NO: 821658 - RNA, 23 nt, Human
uuucaccauguuguccaggcugg

SEQ ID NO: 821659 - RNA, 24 nt, Human
uuucaccauguuguccaggcuggu

SEQ ID NO: 821660 - RNA, 21 nt, Human
uuucccacagagacuacacug

SEQ ID NO: 821661 - RNA, 23 nt, Human
uuuguaagccuccaagaaguugc

SEQ ID NO: 821662 - RNA, 23 nt, Human
uuuuuaaagagaugggguuucac

SEQ ID NO: 821663 - RNA, 30 nt, Human
uuuuuuuuuuuuaaagagaugggguuucaa

SEQ ID NO: 821664 - RNA, 23 nt, Human
aaaccuccagguuggccacuccu

SEQ ID NO: 821665 - RNA, 26 nt, Human
aaaugggacugugguaacaucaccuc

SEQ ID NO: 821666 - RNA, 24 nt, Human
aaucgcuugaacccuggaggugga

SEQ ID NO: 821667 - RNA, 23 nt, Human
acaggccagggguucagaaaccu

SEQ ID NO: 821668 - RNA, 22 nt, Human
acccuccgccuagcucaaaaca

SEQ ID NO: 821669 - RNA, 19 nt, Human
acccucugaucaagaagau

SEQ ID NO: 821670 - RNA, 22 nt, Human
acuccagccugggcagacagac

SEQ ID NO: 821671 - RNA, 20 nt, Human
acucugauccuccuuccucc

SEQ ID NO: 821672 - RNA, 23 nt, Human
agacagacggacauucaauuccu

SEQ ID NO: 821673 - RNA, 24 nt, Human
agagagaacaugcagaucauaauc

SEQ ID NO: 821674 - RNA, 18 nt, Human
aggagcggcaggcuggac

SEQ ID NO: 821675 - RNA, 18 nt, Human
aggaguuuaaacucugau

SEQ ID NO: 821676 - RNA, 23 nt, Human
aggcaggagaaucgcuugaaccc

SEQ ID NO: 821677 - RNA, 20 nt, Human
aggcugaggcaggagaaucg

SEQ ID NO: 821678 - RNA, 24 nt, Human
aggcugaggcaggagaaucgcuug

SEQ ID NO: 821679 - RNA, 20 nt, Human
agguggaggcugcagugagc

SEQ ID NO: 821680 - RNA, 24 nt, Human
agguggaggcugcagugagcugag

SEQ ID NO: 821681 - RNA, 24 nt, Human
agucccuguacaugacgagauggg

SEQ ID NO: 821682 - RNA, 21 nt, Human
auaaaacaagacuucugcaua

SEQ ID NO: 821683 - RNA, 24 nt, Human
augcauacaguuuaccaaauauga

SEQ ID NO: 821684 - RNA, 19 nt, Human
auggcuccgucauaaggca

SEQ ID NO: 821685 - RNA, 24 nt, Human
caaaacacuggaauuaaaggcaug

SEQ ID NO: 821686 - RNA, 25 nt, Human
caagaaauucuccaagagggaguua

SEQ ID NO: 821687 - RNA, 23 nt, Human
caauuccucuggccaacgaaaga

SEQ ID NO: 821688 - RNA, 25 nt, Human
cacagugaacaccugccucguggcc

SEQ ID NO: 821689 - RNA, 20 nt, Human
cacccuccgccuagcucaaa

SEQ ID NO: 821690 - RNA, 20 nt, Human
cacccuccgccuagcucaaa

SEQ ID NO: 821691 - RNA, 22 nt, Human
caguaagaacccucugaucaag

SEQ ID NO: 821692 - RNA, 24 nt, Human
caguucauauuuauaaucuugggc

SEQ ID NO: 821693 - RNA, 19 nt, Human
cauauuuauaaucuugggc

SEQ ID NO: 821694 - RNA, 19 nt, Human
cauucaauuccucuggcca

SEQ ID NO: 821695 - RNA, 18 nt, Human
ccagauaaccgacaucau

SEQ ID NO: 821696 - RNA, 19 nt, Human
ccaugacuuccacgguggc

SEQ ID NO: 821697 - RNA, 22 nt, Human
cccaaagagagaacaugcagau

SEQ ID NO: 821698 - RNA, 18 nt, Human
cccucuugccuccccacc

SEQ ID NO: 821699 - RNA, 20 nt, Human
cccucuugccuccccaccga

SEQ ID NO: 821700 - RNA, 26 nt, Human
ccuccagguuggccacuccuggauuu

SEQ ID NO: 821701 - RNA, 19 nt, Human
ccuccuuccuccucccuca

SEQ ID NO: 821702 - RNA, 21 nt, Human
ccuccuuccuccucccucaaa

SEQ ID NO: 821703 - RNA, 21 nt, Human
ccucgccgcccucuugccucc

SEQ ID NO: 821704 - RNA, 18 nt, Human
ccuguacguguacagugu

SEQ ID NO: 821705 - RNA, 18 nt, Human
cuccagguuggccacucc

SEQ ID NO: 821706 - RNA, 21 nt, Human
cuccgucauaaggcaucuccu

SEQ ID NO: 821707 - RNA, 21 nt, Human
cugcagugagcugagaucgug

SEQ ID NO: 821708 - RNA, 22 nt, Human
cugcagugagcugagaucgugc

SEQ ID NO: 821709 - RNA, 19 nt, Human
cugcagugggagcucuucu

SEQ ID NO: 821710 - RNA, 20 nt, Human
cuucuuagaccacaggguca

SEQ ID NO: 821711 - RNA, 23 nt, Human
gaggcugcagugagcugagaucg

SEQ ID NO: 821712 - RNA, 25 nt, Human
gaguuaccaauucaacacauauuua

SEQ ID NO: 821713 - RNA, 19 nt, Human
gauacagggcaguccagga

SEQ ID NO: 821714 - RNA, 22 nt, Human
gcaaagggaaaugcccuugaga

SEQ ID NO: 821715 - RNA, 23 nt, Human
gcuuuuauuaaccucuuuguuag

SEQ ID NO: 821716 - RNA, 18 nt, Human
ggacuuagauacagggca

SEQ ID NO: 821717 - RNA, 18 nt, Human
ggaggcugcagugagcug

SEQ ID NO: 821718 - RNA, 24 nt, Human
ggaggcugcagugagcugagaucg

SEQ ID NO: 821719 - RNA, 24 nt, Human
gggaacccggcagggugaaaaaug

SEQ ID NO: 821720 - RNA, 18 nt, Human
uaaggcaucuccuccagu

SEQ ID NO: 821721 - RNA, 19 nt, Human
uacugcugucagauauauc

SEQ ID NO: 821722 - RNA, 21 nt, Human
uagcucaaaacaaagggccuc

SEQ ID NO: 821723 - RNA, 21 nt, Human
uagcucaaaacaaagggccuc

SEQ ID NO: 821724 - RNA, 21 nt, Human
ucaacacauauuuacccauga

SEQ ID NO: 821725 - RNA, 18 nt, Human
ucaccuccucgccgcccu

SEQ ID NO: 821726 - RNA, 19 nt, Human
ucacuuaucacccuccgcc

SEQ ID NO: 821727 - RNA, 20 nt, Human
uccuccuuccuccucccuca

SEQ ID NO: 821728 - RNA, 25 nt, Human
uccucuggccaacgaaagacaacca

SEQ ID NO: 821729 - RNA, 20 nt, Human
uccugauccaguaagaaccc

SEQ ID NO: 821730 - RNA, 19 nt, Human
ucgagaagagaggggaggg

SEQ ID NO: 821731 - RNA, 22 nt, Human
ucgcuugaacccuggaggugga

SEQ ID NO: 821732 - RNA, 24 nt, Human
ucgcuugaacccuggagguggagg

SEQ ID NO: 821733 - RNA, 22 nt, Human
ucgugccacuccagccugggca

SEQ ID NO: 821734 - RNA, 20 nt, Human
ucuccaagagggaguuacca

SEQ ID NO: 821735 - RNA, 22 nt, Human
ucugauccuccuuccuccuccc

SEQ ID NO: 821736 - RNA, 22 nt, Human
ucugcagugggagcucuucucc

SEQ ID NO: 821737 - RNA, 18 nt, Human
ucuugggcuggaggcaaa

SEQ ID NO: 821738 - RNA, 23 nt, Human
ucuugggcuggaggcaaaugcau

SEQ ID NO: 821739 - RNA, 20 nt, Human
ugaggcaggagaaucgcuug

SEQ ID NO: 821740 - RNA, 24 nt, Human
ugaggcaggagaaucgcuugaacc

SEQ ID NO: 821741 - RNA, 25 nt, Human
ugaggcaggagaaucgcuugaaccc

SEQ ID NO: 821742 - RNA, 18 nt, Human
ugccacuccagccugggc

SEQ ID NO: 821743 - RNA, 18 nt, Human
uggaauuaaaggcaugag

SEQ ID NO: 821744 - RNA, 24 nt, Human
uggaauuaaaggcaugagucccug

SEQ ID NO: 821745 - RNA, 20 nt, Human
uggacaaaaaaaccacuauc

SEQ ID NO: 821746 - RNA, 18 nt, Human
uggaggcugcagugagcu

SEQ ID NO: 821747 - RNA, 23 nt, Human
uggagguggaggcugcagugagc

SEQ ID NO: 821748 - RNA, 19 nt, Human
uggauuucuucguuuggaa

SEQ ID NO: 821749 - RNA, 20 nt, Human
uggccaacgaaagacaacca

SEQ ID NO: 821750 - RNA, 21 nt, Human
ugucacacucauaagguccug

SEQ ID NO: 821751 - RNA, 24 nt, Human
uuaaacucugauccuccuuccucc

SEQ ID NO: 821752 - RNA, 20 nt, Human
uucugcauaaagaauauccc

SEQ ID NO: 821753 - RNA, 22 nt, Human
uugaacccaaagagagaacaug

SEQ ID NO: 821754 - RNA, 23 nt, Human
uugccagauaaccgacaucaugu

SEQ ID NO: 821755 - RNA, 24 nt, Human
aaccuccuucuagaacucugcgug

SEQ ID NO: 821756 - RNA, 19 nt, Human
aagaggcccggacaggggc

SEQ ID NO: 821757 - RNA, 19 nt, Human
aagcagcuccuccacccuc

SEQ ID NO: 821758 - RNA, 19 nt, Human
aagcagcuccuccacccuc

SEQ ID NO: 821759 - RNA, 23 nt, Human
accccugagaaccuccuucuaga

SEQ ID NO: 821760 - RNA, 25 nt, Human
agauaucaaagagugcaggggggcu

SEQ ID NO: 821761 - RNA, 24 nt, Human
agcagaaauggccagacgggccug

SEQ ID NO: 821762 - RNA, 20 nt, Human
agcagcuccuccacccuccc

SEQ ID NO: 821763 - RNA, 19 nt, Human
agcccaagccagcggaccc

SEQ ID NO: 821764 - RNA, 18 nt, Human
agcuccuccacccucccc

SEQ ID NO: 821765 - RNA, 18 nt, Human
aggacggaugggccauag

SEQ ID NO: 821766 - RNA, 23 nt, Human
auagccagguccccccagcugcc

SEQ ID NO: 821767 - RNA, 22 nt, Human
caaaaagccagcggcgacagug

SEQ ID NO: 821768 - RNA, 19 nt, Human
caaaagggcgacggggugg

SEQ ID NO: 821769 - RNA, 21 nt, Human
caaaagggcgacgggguggca

SEQ ID NO: 821770 - RNA, 21 nt, Human
caagaggaacaauguguggca

SEQ ID NO: 821771 - RNA, 24 nt, Human
caccggacgugcagcaggggccca

SEQ ID NO: 821772 - RNA, 27 nt, Human
caccguagccacagccuaaccccuugg

SEQ ID NO: 821773 - RNA, 18 nt, Human
caccucccuguccacggc

SEQ ID NO: 821774 - RNA, 21 nt, Human
cagacacgcaggggucucggc

SEQ ID NO: 821775 - RNA, 18 nt, Human
cagcagaaauggccagac

SEQ ID NO: 821776 - RNA, 19 nt, Human
cagcagccgggagaggcga

SEQ ID NO: 821777 - RNA, 22 nt, Human
cagcaggaaaggccauagccag

SEQ ID NO: 821778 - RNA, 18 nt, Human
cagcggacccgcccgcca

SEQ ID NO: 821779 - RNA, 19 nt, Human
cagcugccuccugggcucc

SEQ ID NO: 821780 - RNA, 18 nt, Human
cagcugcuccuccagucc

SEQ ID NO: 821781 - RNA, 18 nt, Human
caggaaaggccauagcca

SEQ ID NO: 821782 - RNA, 24 nt, Human
cauagccagguccccccagcugcc

SEQ ID NO: 821783 - RNA, 25 nt, Human
caugaaaaauaauacuccagucagc

SEQ ID NO: 821784 - RNA, 27 nt, Human
cauuucugcaucauucugagcuggaaa

SEQ ID NO: 821785 - RNA, 23 nt, Human
ccaccggagccugggaagcuggg

SEQ ID NO: 821786 - RNA, 21 nt, Human
ccagcccagccugagugugag

SEQ ID NO: 821787 - RNA, 24 nt, Human
ccagcggacccgcccgccagcacc

SEQ ID NO: 821788 - RNA, 20 nt, Human
cccagcccaagccagcggac

SEQ ID NO: 821789 - RNA, 21 nt, Human
cccccagcugccuccugggcu

SEQ ID NO: 821790 - RNA, 18 nt, Human
cccccgaggccccucucc

SEQ ID NO: 821791 - RNA, 24 nt, Human
ccccgcccuggccacaugcacgga

SEQ ID NO: 821792 - RNA, 21 nt, Human
ccccuccccggccagccccag

SEQ ID NO: 821793 - RNA, 18 nt, Human
ccccucuccuccuccucc

SEQ ID NO: 821794 - RNA, 19 nt, Human
ccccucuccuccuccuccu

SEQ ID NO: 821795 - RNA, 20 nt, Human
ccccugagaaccuccuucua

SEQ ID NO: 821796 - RNA, 21 nt, Human
cccgccagcacccggugugga

SEQ ID NO: 821797 - RNA, 19 nt, Human
cccggggcuggcgcggggg

SEQ ID NO: 821798 - RNA, 22 nt, Human
cccugggagggggcgucccggg

SEQ ID NO: 821799 - RNA, 20 nt, Human
ccgcgcccacccucgucagg

SEQ ID NO: 821800 - RNA, 20 nt, Human
ccggagccugggaagcuggg

SEQ ID NO: 821801 - RNA, 23 nt, Human
ccggccagccccagcccaagcca

SEQ ID NO: 821802 - RNA, 19 nt, Human
ccucagacacuaagauauc

SEQ ID NO: 821803 - RNA, 18 nt, Human
ccuccacccuccccugga

SEQ ID NO: 821804 - RNA, 21 nt, Human
ccuccccggccagccccagcc

SEQ ID NO: 821805 - RNA, 21 nt, Human
ccuccccuggacaagaggaac

SEQ ID NO: 821806 - RNA, 21 nt, Human
ccucccuguccacggccccgc

SEQ ID NO: 821807 - RNA, 24 nt, Human
ccuccggcgccacagcagaaauug

SEQ ID NO: 821808 - RNA, 21 nt, Human
ccucgccuggccccacucccc

SEQ ID NO: 821809 - RNA, 19 nt, Human
ccucuccuccuccuccucc

SEQ ID NO: 821810 - RNA, 21 nt, Human
ccugggcuccgacccacccac

SEQ ID NO: 821811 - RNA, 22 nt, Human
cgagcggacagcgagcaggucc

SEQ ID NO: 821812 - RNA, 20 nt, Human
cgcagacacgcaggggucuc

SEQ ID NO: 821813 - RNA, 21 nt, Human
cggcgcgcaggcucccggggc

SEQ ID NO: 821814 - RNA, 21 nt, Human
cggcggcggcggcggcagcgc

SEQ ID NO: 821815 - RNA, 22 nt, Human
cgggcagagccugggccuggug

SEQ ID NO: 821816 - RNA, 22 nt, Human
cuccaagacuugucaccucccu

SEQ ID NO: 821817 - RNA, 26 nt, Human
cuccccaaaaucauucaaggacccac

SEQ ID NO: 821818 - RNA, 23 nt, Human
cuccuccccgcggaccucugcca

SEQ ID NO: 821819 - RNA, 20 nt, Human
cuccuccuccuccuccuccu

SEQ ID NO: 821820 - RNA, 21 nt, Human
cugccuccugggcuccgaccc

SEQ ID NO: 821821 - RNA, 22 nt, Human
cugcucccuccgcgcccacccu

SEQ ID NO: 821822 - RNA, 18 nt, Human
cuggggucucccagagcc

SEQ ID NO: 821823 - RNA, 19 nt, Human
gaaacaccuuuauugcacu

SEQ ID NO: 821824 - RNA, 18 nt, Human
gaccucugccaagaccuc

SEQ ID NO: 821825 - RNA, 18 nt, Human
gacgcuggacaaaagggc

SEQ ID NO: 821826 - RNA, 21 nt, Human
gacuugucaccucccugucca

SEQ ID NO: 821827 - RNA, 21 nt, Human
gaggagagaccggggucugcc

SEQ ID NO: 821828 - RNA, 22 nt, Human
gcagccaccuaacagcaggaaa

SEQ ID NO: 821829 - RNA, 20 nt, Human
gcagcggcugcucccuccgc

SEQ ID NO: 821830 - RNA, 18 nt, Human
gcaucucugagcaagacc

SEQ ID NO: 821831 - RNA, 19 nt, Human
gccacagcagaaauggcca

SEQ ID NO: 821832 - RNA, 22 nt, Human
gccagccccagcccaagccagc

SEQ ID NO: 821833 - RNA, 20 nt, Human
gccagccccagcccaagccg

SEQ ID NO: 821834 - RNA, 20 nt, Human
gccgucuccuccccgcggac

SEQ ID NO: 821835 - RNA, 20 nt, Human
gcggcggcggcggcggcagc

SEQ ID NO: 821836 - RNA, 24 nt, Human
gcgggcggcggcggcggcggcagc

SEQ ID NO: 821837 - RNA, 24 nt, Human
gcuacagcaucagcgcccagccca

SEQ ID NO: 821838 - RNA, 19 nt, Human
gcuggcgcgggggacgcgg

SEQ ID NO: 821839 - RNA, 23 nt, Human
ggcccagcugcuccuccaguccu

SEQ ID NO: 821840 - RNA, 21 nt, Human
ggcuggcgcgggggacgcggc

SEQ ID NO: 821841 - RNA, 18 nt, Human
gggcggcggcggcggcgg

SEQ ID NO: 821842 - RNA, 19 nt, Human
gggcggcggcggcggcggc

SEQ ID NO: 821843 - RNA, 21 nt, Human
gggcuggcgcgggggacgcgg

SEQ ID NO: 821844 - RNA, 21 nt, Human
ggggugagcaucagagaaggc

SEQ ID NO: 821845 - RNA, 21 nt, Human
ggugacccaggaaacccugcg

SEQ ID NO: 821846 - RNA, 21 nt, Human
uacccaaaaagccagcggcga

SEQ ID NO: 821847 - RNA, 22 nt, Human
uacccaaaaagccagcggcgac

SEQ ID NO: 821848 - RNA, 23 nt, Human
uacccacagucaaccucagacac

SEQ ID NO: 821849 - RNA, 24 nt, Human
uacccacagucaaccucagacacu

SEQ ID NO: 821850 - RNA, 24 nt, Human
uauaaacaaacacagcuggggagu

SEQ ID NO: 821851 - RNA, 18 nt, Human
uccacccuccccuggaca

SEQ ID NO: 821852 - RNA, 19 nt, Human
ucccagagccaagccugac

SEQ ID NO: 821853 - RNA, 20 nt, Human
ucccagagccaagccugacc

SEQ ID NO: 821854 - RNA, 23 nt, Human
ucccagcugcagacgcuggacaa

SEQ ID NO: 821855 - RNA, 25 nt, Human
uccccaaaaucauucaaggacccac

SEQ ID NO: 821856 - RNA, 20 nt, Human
uccccggccagccccagccc

SEQ ID NO: 821857 - RNA, 18 nt, Human
ucccggggcuggcgcggg

SEQ ID NO: 821858 - RNA, 24 nt, Human
ucccuggguaccacagaugugccc

SEQ ID NO: 821859 - RNA, 22 nt, Human
uccgugcccaccagcagccggg

SEQ ID NO: 821860 - RNA, 22 nt, Human
uccuccacccuccccuggacaa

SEQ ID NO: 821861 - RNA, 22 nt, Human
uccuccuccuccuccuccucca

SEQ ID NO: 821862 - RNA, 24 nt, Human
uccuccuccuccuccuccuccaaa

SEQ ID NO: 821863 - RNA, 20 nt, Human
uccugaaccccugagaaccu

SEQ ID NO: 821864 - RNA, 21 nt, Human
uccugaaccccugagaaccuc

SEQ ID NO: 821865 - RNA, 20 nt, Human
uccugggcuccgacccaccc

SEQ ID NO: 821866 - RNA, 18 nt, Human
ucgccuggccccacuccc

SEQ ID NO: 821867 - RNA, 19 nt, Human
ucucccagagccaagccug

SEQ ID NO: 821868 - RNA, 20 nt, Human
ucucugagcaagacccuccg

SEQ ID NO: 821869 - RNA, 21 nt, Human
ucucugagcaagacccuccgg

SEQ ID NO: 821870 - RNA, 23 nt, Human
ucugagcuggaaaccuccccaaa

SEQ ID NO: 821871 - RNA, 25 nt, Human
ucugccaagaccuccucugcuccga

SEQ ID NO: 821872 - RNA, 20 nt, Human
ugaaccccugagaaccuccu

SEQ ID NO: 821873 - RNA, 24 nt, Human
ugagcuggaaaccuccccaaaauc

SEQ ID NO: 821874 - RNA, 19 nt, Human
ugccaagaccuccucugcu

SEQ ID NO: 821875 - RNA, 20 nt, Human
ugccuccugggcuccgaccc

SEQ ID NO: 821876 - RNA, 18 nt, Human
ugcgugaaaggcgcgagg

SEQ ID NO: 821877 - RNA, 21 nt, Human
uggccccuucucuuccccccc

SEQ ID NO: 821878 - RNA, 19 nt, Human
uggccuggccuggccccug

SEQ ID NO: 821879 - RNA, 23 nt, Human
uggccuggccuggccccugcuuu

SEQ ID NO: 821880 - RNA, 18 nt, Human
ugggagggggcgucccgg

SEQ ID NO: 821881 - RNA, 19 nt, Human
ugggagggggcgucccggg

SEQ ID NO: 821882 - RNA, 20 nt, Human
ugggagggggcgucccgggc

SEQ ID NO: 821883 - RNA, 21 nt, Human
ugggagggggcgucccgggca

SEQ ID NO: 821884 - RNA, 18 nt, Human
ugggaggggugagcauca

SEQ ID NO: 821885 - RNA, 19 nt, Human
uguggaggggcaaaggggg

SEQ ID NO: 821886 - RNA, 22 nt, Human
uguggaggggcaaagggggacc

SEQ ID NO: 821887 - RNA, 24 nt, Human
uuuacccacagucaaccucagaca

SEQ ID NO: 821888 - RNA, 22 nt, Human
aaaaagcaaaccccaagucaaa

SEQ ID NO: 821889 - RNA, 23 nt, Human
aaacaaaagcauucaaaaauaua

SEQ ID NO: 821890 - RNA, 24 nt, Human
aaagugcugggauuauaggcguga

SEQ ID NO: 821891 - RNA, 19 nt, Human
aaaguuauaacuaagcugg

SEQ ID NO: 821892 - RNA, 20 nt, Human
aaauucacuccaaaaacaaa

SEQ ID NO: 821893 - RNA, 22 nt, Human
aacaccuacaguaccaccagcc

SEQ ID NO: 821894 - RNA, 18 nt, Human
aaccaugucaaacagggu

SEQ ID NO: 821895 - RNA, 22 nt, Human
aagauuuuccucaaaugcaaag

SEQ ID NO: 821896 - RNA, 26 nt, Human
aagcaaaccccaagucaaagggaggg

SEQ ID NO: 821897 - RNA, 25 nt, Human
aagcacuuuaauugagcgcaacaau

SEQ ID NO: 821898 - RNA, 23 nt, Human
aagcgcaaucugucuccuggaaa

SEQ ID NO: 821899 - RNA, 20 nt, Human
aaggugcuguggacaacagc

SEQ ID NO: 821900 - RNA, 22 nt, Human
aaguagcugggauuacaggcac

SEQ ID NO: 821901 - RNA, 24 nt, Human
aagugaucugcccaccuuggccuc

SEQ ID NO: 821902 - RNA, 19 nt, Human
aagugcugggauuauaggc

SEQ ID NO: 821903 - RNA, 19 nt, Human
aagugcugggauuauaggc

SEQ ID NO: 821904 - RNA, 22 nt, Human
aaucaaaguaacaaaauuucac

SEQ ID NO: 821905 - RNA, 24 nt, Human
aaucacacccuuuaaggugacauc

SEQ ID NO: 821906 - RNA, 25 nt, Human
acaaaagcauucaaaaauauauaca

SEQ ID NO: 821907 - RNA, 21 nt, Human
acaaacuuauaaaugcacagu

SEQ ID NO: 821908 - RNA, 24 nt, Human
acaagauuuuccucaaaugcaaag

SEQ ID NO: 821909 - RNA, 19 nt, Human
acaggcaccugccaccacg

SEQ ID NO: 821910 - RNA, 19 nt, Human
acaguaggagaagucacaa

SEQ ID NO: 821911 - RNA, 19 nt, Human
acauuucuucaaacaccau

SEQ ID NO: 821912 - RNA, 21 nt, Human
accacaccagaacguuaugug

SEQ ID NO: 821913 - RNA, 23 nt, Human
accgggaggucacaccuggucag

SEQ ID NO: 821914 - RNA, 27 nt, Human
agaaaccucaaaaaauguuccaaucaa

SEQ ID NO: 821915 - RNA, 24 nt, Human
agaagccuuguucucacagacacc

SEQ ID NO: 821916 - RNA, 18 nt, Human
agaauucaugggcgaaaa

SEQ ID NO: 821917 - RNA, 26 nt, Human
agacagaaaccucaaaaaauguucca

SEQ ID NO: 821918 - RNA, 24 nt, Human
agacucacaaaccaugucaaacag

SEQ ID NO: 821919 - RNA, 21 nt, Human
agagaugauuauuuagcugau

SEQ ID NO: 821920 - RNA, 19 nt, Human
agagcagaaaauccuggag

SEQ ID NO: 821921 - RNA, 21 nt, Human
agcuuguuugguuagcuuuuc

SEQ ID NO: 821922 - RNA, 23 nt, Human
aggagcuccagcugcuccaaccc

SEQ ID NO: 821923 - RNA, 19 nt, Human
aggcuggagugcaguggca

SEQ ID NO: 821924 - RNA, 18 nt, Human
agucaaccugugaauucu

SEQ ID NO: 821925 - RNA, 25 nt, Human
agucacuauccucaucuguaacaga

SEQ ID NO: 821926 - RNA, 24 nt, Human
agucauacacugaugauuaaauau

SEQ ID NO: 821927 - RNA, 20 nt, Human
agugcaguggcauggucucg

SEQ ID NO: 821928 - RNA, 23 nt, Human
agugcaguggcauggucucggcu

SEQ ID NO: 821929 - RNA, 24 nt, Human
agugcaguggcauggucucggcuc

SEQ ID NO: 821930 - RNA, 24 nt, Human
aguggcauggucucggcucacugc

SEQ ID NO: 821931 - RNA, 20 nt, Human
auaaaauucucuccauugac

SEQ ID NO: 821932 - RNA, 22 nt, Human
auaaaauucucuccauugacag

SEQ ID NO: 821933 - RNA, 24 nt, Human
auaguaauggaacuaaaauauauc

SEQ ID NO: 821934 - RNA, 21 nt, Human
aucagagcuuggcuguguugg

SEQ ID NO: 821935 - RNA, 23 nt, Human
augaaaagccacuaccaacagaa

SEQ ID NO: 821936 - RNA, 20 nt, Human
augggguuucaccauguugg

SEQ ID NO: 821937 - RNA, 24 nt, Human
augggguuucaccauguugguccu

SEQ ID NO: 821938 - RNA, 24 nt, Human
auuuuuguauuuuuaguagagaug

SEQ ID NO: 821939 - RNA, 20 nt, Human
caaaaacaaaagcauucaaa

SEQ ID NO: 821940 - RNA, 20 nt, Human
caaacaggguguucucaucu

SEQ ID NO: 821941 - RNA, 21 nt, Human
caaaucaguucuauugaccac

SEQ ID NO: 821942 - RNA, 23 nt, Human
caaaugcaaagucaaggucccua

SEQ ID NO: 821943 - RNA, 22 nt, Human
caacagaaaaaaaaggcgcauc

SEQ ID NO: 821944 - RNA, 30 nt, Human
caacagaaaaaaaaggcgcaucaagcgcaa

SEQ ID NO: 821945 - RNA, 21 nt, Human
caacuaggugacaggcaacac

SEQ ID NO: 821946 - RNA, 19 nt, Human
caagucaaagggagggcag

SEQ ID NO: 821947 - RNA, 22 nt, Human
caccaaguaucuaggagcccau

SEQ ID NO: 821948 - RNA, 24 nt, Human
caccacgcccggcuaauuuuugua

SEQ ID NO: 821949 - RNA, 19 nt, Human
caccuacaguaccaccagc

SEQ ID NO: 821950 - RNA, 21 nt, Human
cacugaagauucgcccuccug

SEQ ID NO: 821951 - RNA, 21 nt, Human
cacugcaaccuccgccuccca

SEQ ID NO: 821952 - RNA, 19 nt, Human
cagcauugguugagucuuc

SEQ ID NO: 821953 - RNA, 22 nt, Human
caguagauguaacaauaaccac

SEQ ID NO: 821954 - RNA, 18 nt, Human
cauaauaaaguaccuagu

SEQ ID NO: 821955 - RNA, 23 nt, Human
cauauaaugcuugaugcuuuuaa

SEQ ID NO: 821956 - RNA, 21 nt, Human
cauucauugaugcuuaaaggu

SEQ ID NO: 821957 - RNA, 20 nt, Human
ccaaagugcugggauuauag

SEQ ID NO: 821958 - RNA, 22 nt, Human
ccaaagugcugggauuauaggc

SEQ ID NO: 821959 - RNA, 24 nt, Human
ccaaagugcugggauuauaggcgu

SEQ ID NO: 821960 - RNA, 20 nt, Human
ccaccacgcccggcuaauuu

SEQ ID NO: 821961 - RNA, 24 nt, Human
ccagaaccaccuuauccaccaaca

SEQ ID NO: 821962 - RNA, 19 nt, Human
cccaggcuggagugcagug

SEQ ID NO: 821963 - RNA, 23 nt, Human
cccagguucaagcaauucuccug

SEQ ID NO: 821964 - RNA, 18 nt, Human
ccccauggccuccucuuc

SEQ ID NO: 821965 - RNA, 26 nt, Human
cccuccagaaccaccuuauccaccaa

SEQ ID NO: 821966 - RNA, 19 nt, Human
cccucccuccuccuguuuu

SEQ ID NO: 821967 - RNA, 23 nt, Human
cccugccuccaaggagcuccagc

SEQ ID NO: 821968 - RNA, 19 nt, Human
ccuagcucugccacuuccu

SEQ ID NO: 821969 - RNA, 22 nt, Human
ccuccagaaccaccuuauccac

SEQ ID NO: 821970 - RNA, 23 nt, Human
ccuccagaaccaccuuauccacc

SEQ ID NO: 821971 - RNA, 24 nt, Human
ccucccagguucaagcaauucucc

SEQ ID NO: 821972 - RNA, 18 nt, Human
ccucggaggacggcuuug

SEQ ID NO: 821973 - RNA, 25 nt, Human
ccucucauaacaccuacaguaccac

SEQ ID NO: 821974 - RNA, 19 nt, Human
ccugaccucaagugaucug

SEQ ID NO: 821975 - RNA, 24 nt, Human
ccugaccucaagugaucugcccac

SEQ ID NO: 821976 - RNA, 18 nt, Human
ccuugucagaugaccaag

SEQ ID NO: 821977 - RNA, 23 nt, Human
cgggggccggcggugggggggau

SEQ ID NO: 821978 - RNA, 23 nt, Human
cuaaacaauggaaaaaccuucuc

SEQ ID NO: 821979 - RNA, 23 nt, Human
cucaaguagcugggauuacaggc

SEQ ID NO: 821980 - RNA, 24 nt, Human
cucaaguagcugggauuacaggca

SEQ ID NO: 821981 - RNA, 24 nt, Human
cucaagugaucugcccaccuuggc

SEQ ID NO: 821982 - RNA, 24 nt, Human
cucacugcaaccuccgccucccag

SEQ ID NO: 821983 - RNA, 23 nt, Human
cugcaaccuccgccucccagguu

SEQ ID NO: 821984 - RNA, 24 nt, Human
cugcaaccuccgccucccagguuc

SEQ ID NO: 821985 - RNA, 19 nt, Human
cuggagugcaguggcaugg

SEQ ID NO: 821986 - RNA, 24 nt, Human
cugguaccgcacuaaacuauauuc

SEQ ID NO: 821987 - RNA, 18 nt, Human
cugguccaucuacuccuc

SEQ ID NO: 821988 - RNA, 21 nt, Human
cuuauuccuaaagaaggcauc

SEQ ID NO: 821989 - RNA, 20 nt, Human
cuuuguugcccaggcuggag

SEQ ID NO: 821990 - RNA, 19 nt, Human
gaaaaugagguaacucuuc

SEQ ID NO: 821991 - RNA, 18 nt, Human
gaacuuccagagauguuc

SEQ ID NO: 821992 - RNA, 24 nt, Human
gaagaaauaagugguauaaugcaa

SEQ ID NO: 821993 - RNA, 23 nt, Human
gaccucaagugaucugcccaccu

SEQ ID NO: 821994 - RNA, 27 nt, Human
gacuguguuuucuuccucacucuuguu

SEQ ID NO: 821995 - RNA, 20 nt, Human
gagaaaaccugugcuagaaa

SEQ ID NO: 821996 - RNA, 19 nt, Human
gagauagcaaaauaauuuu

SEQ ID NO: 821997 - RNA, 24 nt, Human
gagaugggguuucaccauguuggu

SEQ ID NO: 821998 - RNA, 24 nt, Human
gagcaaugcuuugaggccuuuggg

SEQ ID NO: 821999 - RNA, 20 nt, Human
gaggagugaaguagcucuga

SEQ ID NO: 822000 - RNA, 21 nt, Human
gaggagugaaguagcucugag

SEQ ID NO: 822001 - RNA, 21 nt, Human
gaggagugaaguagcucugag

SEQ ID NO: 822002 - RNA, 18 nt, Human
gagucuucucugguaaag

SEQ ID NO: 822003 - RNA, 18 nt, Human
gauuauaggcgugagcca

SEQ ID NO: 822004 - RNA, 21 nt, Human
gauuauaggcgugagccacgc

SEQ ID NO: 822005 - RNA, 22 nt, Human
gcaaccuccgccucccagguuc

SEQ ID NO: 822006 - RNA, 24 nt, Human
gcccaggcuggagugcaguggcau

SEQ ID NO: 822007 - RNA, 22 nt, Human
gcccggcuaauuuuuguauuuu

SEQ ID NO: 822008 - RNA, 19 nt, Human
gccugcccuccagaaccac

SEQ ID NO: 822009 - RNA, 19 nt, Human
gcuggagugcaguggcaug

SEQ ID NO: 822010 - RNA, 23 nt, Human
ggagucuagcuuuguugcccagg

SEQ ID NO: 822011 - RNA, 23 nt, Human
ggauuagaaagcauauuaggagc

SEQ ID NO: 822012 - RNA, 19 nt, Human
ggcaguggccgggccccag

SEQ ID NO: 822013 - RNA, 18 nt, Human
ggcuguguuggagguaga

SEQ ID NO: 822014 - RNA, 24 nt, Human
gggagccgugggagcagcccaagu

SEQ ID NO: 822015 - RNA, 21 nt, Human
gggaggucacaccuggucagc

SEQ ID NO: 822016 - RNA, 18 nt, Human
ggggauucuccuuucucu

SEQ ID NO: 822017 - RNA, 21 nt, Human
gggguuucaccauguuggucc

SEQ ID NO: 822018 - RNA, 20 nt, Human
ggguuucaccauguuggucc

SEQ ID NO: 822019 - RNA, 19 nt, Human
gguuuagagcugacuggaa

SEQ ID NO: 822020 - RNA, 23 nt, Human
guagagaugggguuucaccaugu

SEQ ID NO: 822021 - RNA, 18 nt, Human
guagcugggauuacaggc

SEQ ID NO: 822022 - RNA, 18 nt, Human
gucaaagggagggcaggc

SEQ ID NO: 822023 - RNA, 22 nt, Human
guccuagcucugccacuuccua

SEQ ID NO: 822024 - RNA, 24 nt, Human
gucuagcuuuguugcccaggcugg

SEQ ID NO: 822025 - RNA, 24 nt, Human
guuagauucuaaaagcuaacgaag

SEQ ID NO: 822026 - RNA, 20 nt, Human
guucacuagaagccuuguuc

SEQ ID NO: 822027 - RNA, 21 nt, Human
guugagucuucucugguaaag

SEQ ID NO: 822028 - RNA, 21 nt, Human
guuuucacauuuugaucacag

SEQ ID NO: 822029 - RNA, 25 nt, Human
uaaaauaaauacuaaaauaauguuu

SEQ ID NO: 822030 - RNA, 21 nt, Human
uaaacugagaaaaaugaucaa

SEQ ID NO: 822031 - RNA, 18 nt, Human
uaacacagaguauuaaaa

SEQ ID NO: 822032 - RNA, 18 nt, Human
uaagcuggcuaacauuua

SEQ ID NO: 822033 - RNA, 24 nt, Human
uaauuuuuguauuuuuaguagaga

SEQ ID NO: 822034 - RNA, 21 nt, Human
uacaaccucuggaguaguuau

SEQ ID NO: 822035 - RNA, 22 nt, Human
uacagauggagaaaugccgaaa

SEQ ID NO: 822036 - RNA, 23 nt, Human
uacaggcaccugccaccacgccc

SEQ ID NO: 822037 - RNA, 19 nt, Human
uagaaguuguggaacuuga

SEQ ID NO: 822038 - RNA, 18 nt, Human
uagacucaucuaguuuca

SEQ ID NO: 822039 - RNA, 22 nt, Human
uagagaugggguuucaccaugu

SEQ ID NO: 822040 - RNA, 25 nt, Human
uagcaaacuaaaggaaauuguaccu

SEQ ID NO: 822041 - RNA, 18 nt, Human
uagcuaagcaaagugaua

SEQ ID NO: 822042 - RNA, 19 nt, Human
uagcuucugugccagagua

SEQ ID NO: 822043 - RNA, 24 nt, Human
uagcuuuguugcccaggcuggagu

SEQ ID NO: 822044 - RNA, 24 nt, Human
uaggagaagucacaagagucucug

SEQ ID NO: 822045 - RNA, 24 nt, Human
uaguagagaugggguuucaccaug

SEQ ID NO: 822046 - RNA, 24 nt, Human
uauacacagacacacacacauaua

SEQ ID NO: 822047 - RNA, 22 nt, Human
uauacagauggagaaaugccga

SEQ ID NO: 822048 - RNA, 25 nt, Human
uauuagaaaauucugcugauuuuua

SEQ ID NO: 822049 - RNA, 19 nt, Human
ucaaagucacuauccucau

SEQ ID NO: 822050 - RNA, 19 nt, Human
ucaaguacagcaagaugcu

SEQ ID NO: 822051 - RNA, 23 nt, Human
ucaaguagcugggauuacaggca

SEQ ID NO: 822052 - RNA, 19 nt, Human
ucacagauuggcuuuucca

SEQ ID NO: 822053 - RNA, 22 nt, Human
ucacagcuuugguuagguacuu

SEQ ID NO: 822054 - RNA, 19 nt, Human
ucaccacaaaucccucccu

SEQ ID NO: 822055 - RNA, 21 nt, Human
ucaccucaauggggggaggga

SEQ ID NO: 822056 - RNA, 19 nt, Human
ucacugcaaccuccgccuc

SEQ ID NO: 822057 - RNA, 23 nt, Human
ucacugcaaccuccgccucccag

SEQ ID NO: 822058 - RNA, 24 nt, Human
ucacugcaaccuccgccucccagg

SEQ ID NO: 822059 - RNA, 27 nt, Human
ucacugcaaccuccgccucccagguuc

SEQ ID NO: 822060 - RNA, 20 nt, Human
ucagucaaccugugaauucu

SEQ ID NO: 822061 - RNA, 23 nt, Human
uccaagccauuuuccuucacuac

SEQ ID NO: 822062 - RNA, 18 nt, Human
uccaucccacugauggca

SEQ ID NO: 822063 - RNA, 24 nt, Human
ucccaaagugcugggauuauaggc

SEQ ID NO: 822064 - RNA, 21 nt, Human
ucccagguucaagcaauucuc

SEQ ID NO: 822065 - RNA, 24 nt, Human
ucccagguucaagcaauucuccug

SEQ ID NO: 822066 - RNA, 22 nt, Human
uccgggggccggcggugggggg

SEQ ID NO: 822067 - RNA, 24 nt, Human
uccucaaaugcaaagucaaggucc

SEQ ID NO: 822068 - RNA, 23 nt, Human
ucuagcuuuguugcccaggcugg

SEQ ID NO: 822069 - RNA, 24 nt, Human
ucuagcuuuguugcccaggcugga

SEQ ID NO: 822070 - RNA, 24 nt, Human
ucucaaguagcugggauuacaggc

SEQ ID NO: 822071 - RNA, 20 nt, Human
ucugccucucucuaguuucu

SEQ ID NO: 822072 - RNA, 20 nt, Human
ucuucaacaguuucauccag

SEQ ID NO: 822073 - RNA, 21 nt, Human
ucuugaacuccugaccucaag

SEQ ID NO: 822074 - RNA, 19 nt, Human
ugaaaaaaucaguagaugu

SEQ ID NO: 822075 - RNA, 19 nt, Human
ugaaaaggucaaaauccga

SEQ ID NO: 822076 - RNA, 22 nt, Human
ugaaggacacccuauggguccu

SEQ ID NO: 822077 - RNA, 26 nt, Human
ugaccaaggagacccuucugucacag

SEQ ID NO: 822078 - RNA, 20 nt, Human
ugaccaccaaguaucuagga

SEQ ID NO: 822079 - RNA, 22 nt, Human
ugaccgaauaaugggaugacac

SEQ ID NO: 822080 - RNA, 21 nt, Human
ugaccgaauaaugggaugacc

SEQ ID NO: 822081 - RNA, 18 nt, Human
ugaccucaagugaucugc

SEQ ID NO: 822082 - RNA, 19 nt, Human
ugacuguguuuucuuccuc

SEQ ID NO: 822083 - RNA, 22 nt, Human
ugagugaaaugguuucaaacug

SEQ ID NO: 822084 - RNA, 18 nt, Human
ugaguuugcuuaccuggu

SEQ ID NO: 822085 - RNA, 24 nt, Human
ugaucugcccaccuuggccuccca

SEQ ID NO: 822086 - RNA, 18 nt, Human
ugcagauuuucuggacug

SEQ ID NO: 822087 - RNA, 22 nt, Human
ugcaguggcauggucucggcuc

SEQ ID NO: 822088 - RNA, 18 nt, Human
ugcccaggcuggagugca

SEQ ID NO: 822089 - RNA, 22 nt, Human
ugcccaggcuggagugcagugg

SEQ ID NO: 822090 - RNA, 24 nt, Human
ugcccaggcuggagugcaguggca

SEQ ID NO: 822091 - RNA, 18 nt, Human
ugccugaagcguggacag

SEQ ID NO: 822092 - RNA, 19 nt, Human
ugcgagcaaugcuuugagg

SEQ ID NO: 822093 - RNA, 23 nt, Human
uggaaaaaccuucucauaaagcc

SEQ ID NO: 822094 - RNA, 19 nt, Human
uggaagccagaacaacugc

SEQ ID NO: 822095 - RNA, 18 nt, Human
uggagguagaauucaugg

SEQ ID NO: 822096 - RNA, 19 nt, Human
uggagguagaauucauggg

SEQ ID NO: 822097 - RNA, 24 nt, Human
uggagucuagcuuuguugcccagg

SEQ ID NO: 822098 - RNA, 20 nt, Human
uggagugcaguggcaugguc

SEQ ID NO: 822099 - RNA, 23 nt, Human
uggagugcaguggcauggucucg

SEQ ID NO: 822100 - RNA, 24 nt, Human
uggagugcaguggcauggucucgg

SEQ ID NO: 822101 - RNA, 19 nt, Human
uggcauggucucggcucac

SEQ ID NO: 822102 - RNA, 19 nt, Human
uggcccgagcaggugacag

SEQ ID NO: 822103 - RNA, 18 nt, Human
ugggaaauucuguuaugu

SEQ ID NO: 822104 - RNA, 22 nt, Human
ugggauuacaggcaccugccac

SEQ ID NO: 822105 - RNA, 24 nt, Human
ugggauuacaggcaccugccacca

SEQ ID NO: 822106 - RNA, 18 nt, Human
ugggauuauaggcgugag

SEQ ID NO: 822107 - RNA, 19 nt, Human
ugggauuauaggcgugagc

SEQ ID NO: 822108 - RNA, 21 nt, Human
ugggauuauaggcgugagcca

SEQ ID NO: 822109 - RNA, 22 nt, Human
ugggauuauaggcgugagccac

SEQ ID NO: 822110 - RNA, 22 nt, Human
ugggauuauaggcgugagccac

SEQ ID NO: 822111 - RNA, 23 nt, Human
ugggauuauaggcgugagccacg

SEQ ID NO: 822112 - RNA, 22 nt, Human
ugggguuucaccauguuggucc

SEQ ID NO: 822113 - RNA, 22 nt, Human
uguaacagaagacucacaaacc

SEQ ID NO: 822114 - RNA, 22 nt, Human
uguauauguguuuguguguaua

SEQ ID NO: 822115 - RNA, 21 nt, Human
uguauuuuuaguagagauggg

SEQ ID NO: 822116 - RNA, 20 nt, Human
ugucacagcuuugguuaggu

SEQ ID NO: 822117 - RNA, 19 nt, Human
ugucugccucucucuaguu

SEQ ID NO: 822118 - RNA, 21 nt, Human
ugugcuagaaaggcacuagag

SEQ ID NO: 822119 - RNA, 18 nt, Human
uguguaaacacuuaugua

SEQ ID NO: 822120 - RNA, 21 nt, Human
uguguguguaaacacuuaugu

SEQ ID NO: 822121 - RNA, 21 nt, Human
uuaaaucaaaacccuaagauc

SEQ ID NO: 822122 - RNA, 21 nt, Human
uuaagugcagaaccaacaaaa

SEQ ID NO: 822123 - RNA, 18 nt, Human
uuaguagagaugggguuu

SEQ ID NO: 822124 - RNA, 22 nt, Human
uuaguagagaugggguuucacc

SEQ ID NO: 822125 - RNA, 24 nt, Human
uuaguagagaugggguuucaccau

SEQ ID NO: 822126 - RNA, 22 nt, Human
uucacuguuugcauucauugau

SEQ ID NO: 822127 - RNA, 25 nt, Human
uucugcugauuuuuaaauaaugugg

SEQ ID NO: 822128 - RNA, 18 nt, Human
uugaauggagggaagaug

SEQ ID NO: 822129 - RNA, 23 nt, Human
uugcauucauugaugcuuaaagg

SEQ ID NO: 822130 - RNA, 24 nt, Human
uugcccaggcuggagugcaguggc

SEQ ID NO: 822131 - RNA, 18 nt, Human
uuggccucccaaagugcu

SEQ ID NO: 822132 - RNA, 24 nt, Human
uugggagcauaaaaaacccaaagg

SEQ ID NO: 822133 - RNA, 20 nt, Human
uuggggaucuguguuuuuug

SEQ ID NO: 822134 - RNA, 23 nt, Human
uugguccugaucuugaacuccug

SEQ ID NO: 822135 - RNA, 24 nt, Human
uuggucuuauuauguauuuccuga

SEQ ID NO: 822136 - RNA, 22 nt, Human
uugguuagguacuuccauaaaa

SEQ ID NO: 822137 - RNA, 21 nt, Human
uuucacauuucuucaaacacc

SEQ ID NO: 822138 - RNA, 22 nt, Human
uuucuuccucacucuuguuucc

SEQ ID NO: 822139 - RNA, 22 nt, Human
uuugaggucuucacuguuugca

SEQ ID NO: 822140 - RNA, 18 nt, Human
uuuguugcccaggcugga

SEQ ID NO: 822141 - RNA, 24 nt, Human
uuuguugcccaggcuggagugcag

SEQ ID NO: 822142 - RNA, 24 nt, Human
uuuuuaguagagaugggguuucac

SEQ ID NO: 822143 - RNA, 20 nt, Human
uuuuuguauuuuuaguagag

SEQ ID NO: 822144 - RNA, 27 nt, Human
uuuuuuauuuuuuuugagauggagucu

SEQ ID NO: 822145 - RNA, 22 nt, Human
aaaaaaaaaagaaaaaaaaaag

SEQ ID NO: 822146 - RNA, 22 nt, Human
aaaaaaaagaaaaaaaaaagaa

SEQ ID NO: 822147 - RNA, 20 nt, Human
aaaaaaccaaaaaaggcagu

SEQ ID NO: 822148 - RNA, 20 nt, Human
aaaaaucauuaaucccaucc

SEQ ID NO: 822149 - RNA, 23 nt, Human
aaaagaaaaaaaaaagaaaagaa

SEQ ID NO: 822150 - RNA, 24 nt, Human
aaaagaaaagaaguccagcauccu

SEQ ID NO: 822151 - RNA, 20 nt, Human
aacauagugagacuccaucc

SEQ ID NO: 822152 - RNA, 23 nt, Human
aauugaaaaaaaaaaaagaaaaa

SEQ ID NO: 822153 - RNA, 23 nt, Human
acacacacacacacacacacaca

SEQ ID NO: 822154 - RNA, 23 nt, Human
acacacacacacacacacaugca

SEQ ID NO: 822155 - RNA, 23 nt, Human
acacacacacacacaugcacaca

SEQ ID NO: 822156 - RNA, 25 nt, Human
acacacacacaugcacacacaccca

SEQ ID NO: 822157 - RNA, 23 nt, Human
acacacacccaagcaaauuguua

SEQ ID NO: 822158 - RNA, 24 nt, Human
acauagugagacuccaucccaaaa

SEQ ID NO: 822159 - RNA, 24 nt, Human
acugccaauuuacgaaagcugcag

SEQ ID NO: 822160 - RNA, 21 nt, Human
agaauuuuugcaaaccaaaau

SEQ ID NO: 822161 - RNA, 20 nt, Human
agagaaacuugaaaguaaug

SEQ ID NO: 822162 - RNA, 19 nt, Human
agcccaggaguucaagacc

SEQ ID NO: 822163 - RNA, 21 nt, Human
agcucucuggcuucucagucc

SEQ ID NO: 822164 - RNA, 21 nt, Human
aggaaagugagauggaagggg

SEQ ID NO: 822165 - RNA, 20 nt, Human
aggauaccaauaaaaaacua

SEQ ID NO: 822166 - RNA, 24 nt, Human
aggaucacuugagcccaggaguuc

SEQ ID NO: 822167 - RNA, 20 nt, Human
agggaugaaugggcaaaagg

SEQ ID NO: 822168 - RNA, 19 nt, Human
agucugggcaacauaguga

SEQ ID NO: 822169 - RNA, 23 nt, Human
agucugggcaacauagugagacu

SEQ ID NO: 822170 - RNA, 24 nt, Human
agucugggcaacauagugagacuc

SEQ ID NO: 822171 - RNA, 25 nt, Human
auaccaauaaaaaacuaaaaaacca

SEQ ID NO: 822172 - RNA, 24 nt, Human
aucacuugagcccaggaguucaag

SEQ ID NO: 822173 - RNA, 21 nt, Human
auggaguguacccguaauguc

SEQ ID NO: 822174 - RNA, 19 nt, Human
caacaggcacuauacacag

SEQ ID NO: 822175 - RNA, 22 nt, Human
caacuaauuacuguuuaccagu

SEQ ID NO: 822176 - RNA, 27 nt, Human
caauaaaaaacuaaaaaaccaaaaaag

SEQ ID NO: 822177 - RNA, 24 nt, Human
caaugcccaaaagaaaaagaguuc

SEQ ID NO: 822178 - RNA, 18 nt, Human
cacacacacacacacaca

SEQ ID NO: 822179 - RNA, 20 nt, Human
cacacacacacacacacaca

SEQ ID NO: 822180 - RNA, 20 nt, Human
cacacacacacacacacaca

SEQ ID NO: 822181 - RNA, 20 nt, Human
cacacacacacacacacaca

SEQ ID NO: 822182 - RNA, 22 nt, Human
cacacacacacacacacacaca

SEQ ID NO: 822183 - RNA, 26 nt, Human
cacacacacacacacacacacacaug

SEQ ID NO: 822184 - RNA, 26 nt, Human
cacacacacacacacacacaugcaca

SEQ ID NO: 822185 - RNA, 26 nt, Human
cacacacacacacacacaugcacaca

SEQ ID NO: 822186 - RNA, 30 nt, Human
cacacacacacacacaugcacacacacccu

SEQ ID NO: 822187 - RNA, 18 nt, Human
cacacaugcacacacacc

SEQ ID NO: 822188 - RNA, 19 nt, Human
cacagaauguuuacacucc

SEQ ID NO: 822189 - RNA, 24 nt, Human
caccaacaggcacuauacacagcc

SEQ ID NO: 822190 - RNA, 18 nt, Human
cacuauacacagccagga

SEQ ID NO: 822191 - RNA, 23 nt, Human
cacugacccauuccuaguuacag

SEQ ID NO: 822192 - RNA, 20 nt, Human
cagcauccugaauaguggua

SEQ ID NO: 822193 - RNA, 22 nt, Human
cagcauccugaauagugguauu

SEQ ID NO: 822194 - RNA, 18 nt, Human
cagccaggaauaucaaag

SEQ ID NO: 822195 - RNA, 21 nt, Human
cagcuuuuaacuguugccaca

SEQ ID NO: 822196 - RNA, 20 nt, Human
caucccaggguuucaguaac

SEQ ID NO: 822197 - RNA, 20 nt, Human
cauucucacuaagcuagaag

SEQ ID NO: 822198 - RNA, 18 nt, Human
ccaccaacaggcacuaua

SEQ ID NO: 822199 - RNA, 19 nt, Human
ccagaauagcucugucuuc

SEQ ID NO: 822200 - RNA, 20 nt, Human
cccccagcccccaucuauuu

SEQ ID NO: 822201 - RNA, 22 nt, Human
ccuugaaaagaagagggaugaa

SEQ ID NO: 822202 - RNA, 24 nt, Human
cgaaaauaaaauucugaaagguca

SEQ ID NO: 822203 - RNA, 19 nt, Human
cucucuggcuucucagucc

SEQ ID NO: 822204 - RNA, 18 nt, Human
cugcaucagcauccgcaa

SEQ ID NO: 822205 - RNA, 23 nt, Human
cugggcaacauagugagacucca

SEQ ID NO: 822206 - RNA, 18 nt, Human
cuguaaguuuacauccca

SEQ ID NO: 822207 - RNA, 20 nt, Human
gaaaaaaaaaaaagaaaaaa

SEQ ID NO: 822208 - RNA, 20 nt, Human
gaaagcugcagcuacugauc

SEQ ID NO: 822209 - RNA, 24 nt, Human
gaucacuugagcccaggaguucaa

SEQ ID NO: 822210 - RNA, 20 nt, Human
gcccaggaguucaagaccag

SEQ ID NO: 822211 - RNA, 22 nt, Human
ggaauccaguuuacaguccugc

SEQ ID NO: 822212 - RNA, 21 nt, Human
ggacagaauccaaguuaugug

SEQ ID NO: 822213 - RNA, 23 nt, Human
ggaucacuugagcccaggaguuc

SEQ ID NO: 822214 - RNA, 24 nt, Human
gggcaaaaggauauuuuuccuaac

SEQ ID NO: 822215 - RNA, 18 nt, Human
gucaaguucucuccauca

SEQ ID NO: 822216 - RNA, 20 nt, Human
uaaaauacucccucaaggaa

SEQ ID NO: 822217 - RNA, 25 nt, Human
uaacugacaauuugaauuaaauucc

SEQ ID NO: 822218 - RNA, 22 nt, Human
uaaguuuacaucccaggguuuc

SEQ ID NO: 822219 - RNA, 25 nt, Human
uacacacacacacacacacacacac

SEQ ID NO: 822220 - RNA, 20 nt, Human
uacaguccugcagaaacugc

SEQ ID NO: 822221 - RNA, 21 nt, Human
uaggaaccaggcuugauggag

SEQ ID NO: 822222 - RNA, 25 nt, Human
uauacacacacacacacacacacac

SEQ ID NO: 822223 - RNA, 21 nt, Human
uaucaguacaguccaccaaca

SEQ ID NO: 822224 - RNA, 21 nt, Human
ucacugacccauuccuaguua

SEQ ID NO: 822225 - RNA, 24 nt, Human
ucagagagaaauccccugaagaaa

SEQ ID NO: 822226 - RNA, 19 nt, Human
uccugcagaaacugcauca

SEQ ID NO: 822227 - RNA, 18 nt, Human
uccuguuggccaaugccc

SEQ ID NO: 822228 - RNA, 18 nt, Human
uccuugaaaagaagaggg

SEQ ID NO: 822229 - RNA, 19 nt, Human
ucugaaaggucaaaugacu

SEQ ID NO: 822230 - RNA, 18 nt, Human
ucuggcuucucaguccug

SEQ ID NO: 822231 - RNA, 21 nt, Human
ucuggcuucucaguccuguug

SEQ ID NO: 822232 - RNA, 23 nt, Human
ugaaaaaaaaaaaagaaaaaaaa

SEQ ID NO: 822233 - RNA, 22 nt, Human
ugacuuguccaagguguauaca

SEQ ID NO: 822234 - RNA, 23 nt, Human
ugagcccaggaguucaagaccag

SEQ ID NO: 822235 - RNA, 21 nt, Human
ugaucaauacuguaaguuuac

SEQ ID NO: 822236 - RNA, 20 nt, Human
ugcacgaaguuuucaaaaag

SEQ ID NO: 822237 - RNA, 20 nt, Human
ugcauucuucccuuuccagu

SEQ ID NO: 822238 - RNA, 22 nt, Human
ugcccaaaagaaaaagaguucc

SEQ ID NO: 822239 - RNA, 24 nt, Human
uggccaaugcccaaaagaaaaaga

SEQ ID NO: 822240 - RNA, 21 nt, Human
uggcucaggugcaagcucucu

SEQ ID NO: 822241 - RNA, 23 nt, Human
uggcucaggugcaagcucucugg

SEQ ID NO: 822242 - RNA, 22 nt, Human
ugggacagaauccaaguuaugu

SEQ ID NO: 822243 - RNA, 24 nt, Human
uguauacacacacacacacacaca

SEQ ID NO: 822244 - RNA, 25 nt, Human
uguauacacacacacacacacacag

SEQ ID NO: 822245 - RNA, 30 nt, Human
uuaaaguagaauuuuugcaaaccaaaaucc

SEQ ID NO: 822246 - RNA, 22 nt, Human
uugcauucuucccuuuccagug

SEQ ID NO: 822247 - RNA, 21 nt, Human
uuuccuuacccccagccccca

SEQ ID NO: 822248 - RNA, 23 nt, Human
uuugaauuaaauuccccccacuu

SEQ ID NO: 822249 - RNA, 18 nt, Human
aaaaagaggcaaugggga

SEQ ID NO: 822250 - RNA, 22 nt, Human
aaaaggaaaaaaacaaacaaaa

SEQ ID NO: 822251 - RNA, 22 nt, Human
aaacaaacaaaaaaauaacucu

SEQ ID NO: 822252 - RNA, 20 nt, Human
aaacaagaggcugcuacaac

SEQ ID NO: 822253 - RNA, 24 nt, Human
aaacaauagcaucaaccacgcuac

SEQ ID NO: 822254 - RNA, 22 nt, Human
aaauaaauuuacuacuuguaaa

SEQ ID NO: 822255 - RNA, 23 nt, Human
aaggaaaaaaacaaacaaaaaaa

SEQ ID NO: 822256 - RNA, 21 nt, Human
aaguucuccaucuuucuccuc

SEQ ID NO: 822257 - RNA, 23 nt, Human
acaaucagugcuuccaaaagccc

SEQ ID NO: 822258 - RNA, 26 nt, Human
acuauaagaacauuuauggagaaaga

SEQ ID NO: 822259 - RNA, 25 nt, Human
acuuuauaaguuuuuuaaaaaaaga

SEQ ID NO: 822260 - RNA, 22 nt, Human
aggaaaaaaacaaacaaaaaaa

SEQ ID NO: 822261 - RNA, 23 nt, Human
aggaaaaaaacaaacaaaaaaau

SEQ ID NO: 822262 - RNA, 24 nt, Human
aggaaaaaaacaaacaaaaaaaua

SEQ ID NO: 822263 - RNA, 27 nt, Human
aggaaaaauaaaaagugaccgguaccc

SEQ ID NO: 822264 - RNA, 21 nt, Human
auccaaaaaggaaaaaaacaa

SEQ ID NO: 822265 - RNA, 21 nt, Human
auguagaaacacaucaaagca

SEQ ID NO: 822266 - RNA, 21 nt, Human
caaaacaguagcaauguagaa

SEQ ID NO: 822267 - RNA, 23 nt, Human
caagauccaaaaaggaaaaaaac

SEQ ID NO: 822268 - RNA, 19 nt, Human
cacgcuacugaacauagga

SEQ ID NO: 822269 - RNA, 19 nt, Human
caucuuguucugguacuuc

SEQ ID NO: 822270 - RNA, 18 nt, Human
ccaaaaaggaaaaaaaca

SEQ ID NO: 822271 - RNA, 19 nt, Human
cccgcuuuuucccuuucuc

SEQ ID NO: 822272 - RNA, 19 nt, Human
ccgcagccgcggcagaagc

SEQ ID NO: 822273 - RNA, 23 nt, Human
ccgccgcugccaccgccgccgcc

SEQ ID NO: 822274 - RNA, 24 nt, Human
ccgccgcugccaccgccgccgccg

SEQ ID NO: 822275 - RNA, 26 nt, Human
ccgccgcugccaccgccgccgccgcu

SEQ ID NO: 822276 - RNA, 18 nt, Human
ccgcggcagaagcacggg

SEQ ID NO: 822277 - RNA, 22 nt, Human
ccgcugccaccgccgccgccgc

SEQ ID NO: 822278 - RNA, 24 nt, Human
cgcgacucgcgcgggcgccgcagc

SEQ ID NO: 822279 - RNA, 19 nt, Human
cgcgcgggcgccgcagccg

SEQ ID NO: 822280 - RNA, 20 nt, Human
cgcgcgggcgccgcagccgc

SEQ ID NO: 822281 - RNA, 21 nt, Human
cgcgcgggcgccgcagccgcg

SEQ ID NO: 822282 - RNA, 18 nt, Human
cgggcuagguauggggga

SEQ ID NO: 822283 - RNA, 20 nt, Human
cuccucccgacugucagccg

SEQ ID NO: 822284 - RNA, 24 nt, Human
cugucagccgccauggcuccccuu

SEQ ID NO: 822285 - RNA, 24 nt, Human
cuucccgcuuuuucccuuucuccc

SEQ ID NO: 822286 - RNA, 18 nt, Human
gagaaagaaucaguaucu

SEQ ID NO: 822287 - RNA, 24 nt, Human
gagggaagggaaacagauggcgac

SEQ ID NO: 822288 - RNA, 21 nt, Human
gccgcagccgcggcagaagca

SEQ ID NO: 822289 - RNA, 23 nt, Human
gcgcgaaacaaucccgcucccga

SEQ ID NO: 822290 - RNA, 22 nt, Human
gggggagggaagggaaacagau

SEQ ID NO: 822291 - RNA, 20 nt, Human
guuuccgccgcugccaccgc

SEQ ID NO: 822292 - RNA, 18 nt, Human
uaaaauaucauccagaac

SEQ ID NO: 822293 - RNA, 22 nt, Human
uaaacacacacaaaaaaaaaaa

SEQ ID NO: 822294 - RNA, 25 nt, Human
uaaacacacacaaaaaaaaaaauac

SEQ ID NO: 822295 - RNA, 25 nt, Human
uaaguuuuuuaaaaaaagaggcaau

SEQ ID NO: 822296 - RNA, 21 nt, Human
ucaaccacgcuacugaacaua

SEQ ID NO: 822297 - RNA, 20 nt, Human
ucaagauccaaaaaggaaaa

SEQ ID NO: 822298 - RNA, 22 nt, Human
uccaaaaaggaaaaaaacaaac

SEQ ID NO: 822299 - RNA, 24 nt, Human
uccaaaaaggaaaaaaacaaacaa

SEQ ID NO: 822300 - RNA, 25 nt, Human
uccaaaaaggaaaaaaacaaacaaa

SEQ ID NO: 822301 - RNA, 19 nt, Human
uccaagccaauguauacaa

SEQ ID NO: 822302 - RNA, 20 nt, Human
ucucccuuccuuucacucca

SEQ ID NO: 822303 - RNA, 22 nt, Human
ucucgacucuucccgcuuuuuc

SEQ ID NO: 822304 - RNA, 18 nt, Human
ucucuggauuauacaguu

SEQ ID NO: 822305 - RNA, 23 nt, Human
ugaggaaaaauaaaaagugacuu

SEQ ID NO: 822306 - RNA, 22 nt, Human
ugcaugcuuggaacaaaggggg

SEQ ID NO: 822307 - RNA, 21 nt, Human
uggccucuuaacacucagccu

SEQ ID NO: 822308 - RNA, 21 nt, Human
uuccgccgcugccaccgccgc

SEQ ID NO: 822309 - RNA, 24 nt, Human
uuggccucuuaacacucagccuuc

SEQ ID NO: 822310 - RNA, 18 nt, Human
uugugaacauuccaagcc

SEQ ID NO: 822311 - RNA, 21 nt, Human
aagcaggaacucucuguguug

SEQ ID NO: 822312 - RNA, 19 nt, Human
aaguaaaggcacuacaacc

SEQ ID NO: 822313 - RNA, 18 nt, Human
acaggguuucaccauguu

SEQ ID NO: 822314 - RNA, 23 nt, Human
acaggguuucaccauguuggcca

SEQ ID NO: 822315 - RNA, 24 nt, Human
acaggguuucaccauguuggccag

SEQ ID NO: 822316 - RNA, 23 nt, Human
accacacccagauaauuuuugua

SEQ ID NO: 822317 - RNA, 24 nt, Human
accauguuggccaggauggucucg

SEQ ID NO: 822318 - RNA, 24 nt, Human
accuugugauccacccaccucagc

SEQ ID NO: 822319 - RNA, 24 nt, Human
acucuguugccaaacuggagugca

SEQ ID NO: 822320 - RNA, 18 nt, Human
agaagaaaaugucuacaa

SEQ ID NO: 822321 - RNA, 22 nt, Human
agaagaaaaugucuacaaaaag

SEQ ID NO: 822322 - RNA, 21 nt, Human
agguucaagugauuauccugc

SEQ ID NO: 822323 - RNA, 22 nt, Human
aguagagacaggguuucaccau

SEQ ID NO: 822324 - RNA, 20 nt, Human
agugcagugguacaaucuug

SEQ ID NO: 822325 - RNA, 24 nt, Human
agugcagugguacaaucuuggcuc

SEQ ID NO: 822326 - RNA, 25 nt, Human
auaaauucccugauguugaacaaag

SEQ ID NO: 822327 - RNA, 23 nt, Human
auaauuuuuguauuuuuaguaga

SEQ ID NO: 822328 - RNA, 24 nt, Human
auuuuuguauuuuuaguagagaca

SEQ ID NO: 822329 - RNA, 23 nt, Human
caaaaugcugggagccauuuugc

SEQ ID NO: 822330 - RNA, 23 nt, Human
caacuuccaccucccagguucaa

SEQ ID NO: 822331 - RNA, 18 nt, Human
caccauguuggccaggau

SEQ ID NO: 822332 - RNA, 22 nt, Human
caccauguuggccaggaugguc

SEQ ID NO: 822333 - RNA, 24 nt, Human
caccauguuggccaggauggucuc

SEQ ID NO: 822334 - RNA, 22 nt, Human
cacccaccucagccucccaaaa

SEQ ID NO: 822335 - RNA, 23 nt, Human
cacccaccucagccucccaaaau

SEQ ID NO: 822336 - RNA, 24 nt, Human
caccucagccucccaaaaugcugg

SEQ ID NO: 822337 - RNA, 23 nt, Human
cacucuguugccaaacuggagug

SEQ ID NO: 822338 - RNA, 21 nt, Human
cacugcaacuuccaccuccca

SEQ ID NO: 822339 - RNA, 21 nt, Human
cagauuucuaggauuucucac

SEQ ID NO: 822340 - RNA, 24 nt, Human
caggguuucaccauguuggccagg

SEQ ID NO: 822341 - RNA, 21 nt, Human
ccaauaccugcaggucacagg

SEQ ID NO: 822342 - RNA, 20 nt, Human
ccaccacacccagauaauuu

SEQ ID NO: 822343 - RNA, 26 nt, Human
ccacccaccucagccucccaaaaugc

SEQ ID NO: 822344 - RNA, 21 nt, Human
cccagguucaagugauuaucc

SEQ ID NO: 822345 - RNA, 23 nt, Human
cccagguucaagugauuauccug

SEQ ID NO: 822346 - RNA, 23 nt, Human
cccggccaauauuuaaugcuuag

SEQ ID NO: 822347 - RNA, 20 nt, Human
ccucccagguucaagugauu

SEQ ID NO: 822348 - RNA, 19 nt, Human
ccucccgaguagaugggaa

SEQ ID NO: 822349 - RNA, 19 nt, Human
cuaggcuuucagggggucc

SEQ ID NO: 822350 - RNA, 18 nt, Human
cucacucuguugccaaac

SEQ ID NO: 822351 - RNA, 23 nt, Human
cucacucuguugccaaacuggag

SEQ ID NO: 822352 - RNA, 24 nt, Human
cucacugcaacuuccaccucccag

SEQ ID NO: 822353 - RNA, 21 nt, Human
cuccaguaugaauuaucuuac

SEQ ID NO: 822354 - RNA, 23 nt, Human
cucuucagauuucuaggauuucu

SEQ ID NO: 822355 - RNA, 18 nt, Human
cucuugaccuugugaucc

SEQ ID NO: 822356 - RNA, 25 nt, Human
cucuugaccuugugauccacccacc

SEQ ID NO: 822357 - RNA, 23 nt, Human
cugcaacuuccaccucccagguu

SEQ ID NO: 822358 - RNA, 24 nt, Human
cugcaacuuccaccucccagguuc

SEQ ID NO: 822359 - RNA, 21 nt, Human
cugcaggucacagggccacag

SEQ ID NO: 822360 - RNA, 22 nt, Human
gaccuugugauccacccaccuc

SEQ ID NO: 822361 - RNA, 24 nt, Human
gaccuugugauccacccaccucag

SEQ ID NO: 822362 - RNA, 19 nt, Human
gagugcagugguacaaucu

SEQ ID NO: 822363 - RNA, 21 nt, Human
gcacgugccaccacacccaga

SEQ ID NO: 822364 - RNA, 18 nt, Human
gcauaagccaccgcaccc

SEQ ID NO: 822365 - RNA, 22 nt, Human
ggguuucaccauguuggccagg

SEQ ID NO: 822366 - RNA, 24 nt, Human
gguuucaccauguuggccaggaug

SEQ ID NO: 822367 - RNA, 23 nt, Human
guagaguuucucuccaguauaaa

SEQ ID NO: 822368 - RNA, 24 nt, Human
gucucacucuguugccaaacugga

SEQ ID NO: 822369 - RNA, 24 nt, Human
gugauccacccaccucagccuccc

SEQ ID NO: 822370 - RNA, 21 nt, Human
guucaagugauuauccugccu

SEQ ID NO: 822371 - RNA, 24 nt, Human
uaauuuuuguauuuuuaguagaga

SEQ ID NO: 822372 - RNA, 22 nt, Human
uacaaauaacuuuucuaccaac

SEQ ID NO: 822373 - RNA, 24 nt, Human
uacaggcacgugccaccacaccca

SEQ ID NO: 822374 - RNA, 20 nt, Human
uaccugcaggucacagggcc

SEQ ID NO: 822375 - RNA, 18 nt, Human
uagaagaaaaugucuaca

SEQ ID NO: 822376 - RNA, 22 nt, Human
uagagacaggguuucaccaugu

SEQ ID NO: 822377 - RNA, 18 nt, Human
uagaugggaauacaggca

SEQ ID NO: 822378 - RNA, 24 nt, Human
uaguagagacaggguuucaccaug

SEQ ID NO: 822379 - RNA, 26 nt, Human
uaguagagacaggguuucaccauguu

SEQ ID NO: 822380 - RNA, 22 nt, Human
uaugguuagaaaaguuugaggc

SEQ ID NO: 822381 - RNA, 21 nt, Human
uauuaagcaggaacucucugu

SEQ ID NO: 822382 - RNA, 24 nt, Human
ucaccauguuggccaggauggucu

SEQ ID NO: 822383 - RNA, 24 nt, Human
ucacugcaacuuccaccucccagg

SEQ ID NO: 822384 - RNA, 25 nt, Human
ucacugcaacuuccaccucccaggu

SEQ ID NO: 822385 - RNA, 18 nt, Human
ucagccucccaaaaugcu

SEQ ID NO: 822386 - RNA, 18 nt, Human
ucagggggucccgguguc

SEQ ID NO: 822387 - RNA, 21 nt, Human
uccacccaccucagccuccca

SEQ ID NO: 822388 - RNA, 24 nt, Human
uccacccaccucagccucccaaaa

SEQ ID NO: 822389 - RNA, 18 nt, Human
ucccaauaccugcagguc

SEQ ID NO: 822390 - RNA, 21 nt, Human
ucccagguucaagugauuauc

SEQ ID NO: 822391 - RNA, 24 nt, Human
ucccagguucaagugauuauccug

SEQ ID NO: 822392 - RNA, 27 nt, Human
ucccggugucuuagcugugggucuccc

SEQ ID NO: 822393 - RNA, 23 nt, Human
ucuaggauuucucaccaguauaa

SEQ ID NO: 822394 - RNA, 23 nt, Human
ucucacucuguugccaaacugga

SEQ ID NO: 822395 - RNA, 22 nt, Human
ucugcaaaaaaccuucugaucc

SEQ ID NO: 822396 - RNA, 23 nt, Human
ucuguugccaaacuggagugcag

SEQ ID NO: 822397 - RNA, 18 nt, Human
ucuuaaaggcuuugccau

SEQ ID NO: 822398 - RNA, 21 nt, Human
ugacaaccauuuaaaggcuuu

SEQ ID NO: 822399 - RNA, 20 nt, Human
ugaccuugugauccacccac

SEQ ID NO: 822400 - RNA, 22 nt, Human
ugagacggagucucacucuguu

SEQ ID NO: 822401 - RNA, 24 nt, Human
ugauccacccaccucagccuccca

SEQ ID NO: 822402 - RNA, 20 nt, Human
ugauuuguagaguuucucuc

SEQ ID NO: 822403 - RNA, 22 nt, Human
ugcagugguacaaucuuggcuc

SEQ ID NO: 822404 - RNA, 18 nt, Human
ugcauaagccaccgcacc

SEQ ID NO: 822405 - RNA, 19 nt, Human
ugcauagacuuaauuaugg

SEQ ID NO: 822406 - RNA, 22 nt, Human
ugcauagacuuaauuauggauu

SEQ ID NO: 822407 - RNA, 18 nt, Human
ugccauauuguucacaca

SEQ ID NO: 822408 - RNA, 20 nt, Human
ugccuaagccucccgaguag

SEQ ID NO: 822409 - RNA, 18 nt, Human
ugcuuaguaagaguugag

SEQ ID NO: 822410 - RNA, 23 nt, Human
ugcuucagaguuuuccucuagaa

SEQ ID NO: 822411 - RNA, 24 nt, Human
uggagugcagugguacaaucuugg

SEQ ID NO: 822412 - RNA, 24 nt, Human
uggccaggauggucucgaucucuu

SEQ ID NO: 822413 - RNA, 22 nt, Human
ugggaauacaggcacgugccac

SEQ ID NO: 822414 - RNA, 24 nt, Human
ugggaauacaggcacgugccacca

SEQ ID NO: 822415 - RNA, 24 nt, Human
ugugauacaaguaaaggcacuaca

SEQ ID NO: 822416 - RNA, 24 nt, Human
ugugauccacccaccucagccucc

SEQ ID NO: 822417 - RNA, 24 nt, Human
uuaguagagacaggguuucaccau

SEQ ID NO: 822418 - RNA, 18 nt, Human
uucaagugauuauccugc

SEQ ID NO: 822419 - RNA, 21 nt, Human
uucacagucuuuauauuugua

SEQ ID NO: 822420 - RNA, 19 nt, Human
uuucaccauguuggccagg

SEQ ID NO: 822421 - RNA, 20 nt, Human
uuucaccauguuggccagga

SEQ ID NO: 822422 - RNA, 21 nt, Human
uuuccuagcaauaaaguguga

SEQ ID NO: 822423 - RNA, 19 nt, Human
uuuguagaguuucucucca

SEQ ID NO: 822424 - RNA, 24 nt, Human
uuuuuaguagagacaggguuucac

SEQ ID NO: 822425 - RNA, 20 nt, Human
uuuuuguauuuuuaguagag

SEQ ID NO: 822426 - RNA, 20 nt, Human
aaacaagacagaagccacga

SEQ ID NO: 822427 - RNA, 24 nt, Human
aaagaaaacaagacagaagccacg

SEQ ID NO: 822428 - RNA, 24 nt, Human
aacaaaagaggccucuaggaaaaa

SEQ ID NO: 822429 - RNA, 21 nt, Human
aaccaggccugcugacaccuu

SEQ ID NO: 822430 - RNA, 21 nt, Human
aaccccaaagaaagucuggug

SEQ ID NO: 822431 - RNA, 21 nt, Human
aaccgcacucgcaccgcaacc

SEQ ID NO: 822432 - RNA, 20 nt, Human
aacuaacuccaaaccucugc

SEQ ID NO: 822433 - RNA, 18 nt, Human
aacucucauuucuucaau

SEQ ID NO: 822434 - RNA, 24 nt, Human
aagaaaacaagacagaagccacgg

SEQ ID NO: 822435 - RNA, 28 nt, Human
aagcgaucaaagaaaacaagacagaagc

SEQ ID NO: 822436 - RNA, 23 nt, Human
aauucugucccccuaaauucuua

SEQ ID NO: 822437 - RNA, 23 nt, Human
acaaccccaaagaaagucuggug

SEQ ID NO: 822438 - RNA, 24 nt, Human
accgcacucgcaccgcaaccccgg

SEQ ID NO: 822439 - RNA, 21 nt, Human
acucgcaccgcaaccccggca

SEQ ID NO: 822440 - RNA, 21 nt, Human
agaaaacaagacagaagccac

SEQ ID NO: 822441 - RNA, 19 nt, Human
agaaagccacaaaauagga

SEQ ID NO: 822442 - RNA, 19 nt, Human
agacagaagccacgaugua

SEQ ID NO: 822443 - RNA, 21 nt, Human
agcaaagauguaguuguacaa

SEQ ID NO: 822444 - RNA, 18 nt, Human
agcauuuaaagaggugau

SEQ ID NO: 822445 - RNA, 19 nt, Human
agccuguggggcugggagc

SEQ ID NO: 822446 - RNA, 21 nt, Human
aggaaaaaccaggccugcuga

SEQ ID NO: 822447 - RNA, 22 nt, Human
aggcacaacgcgagucugaucu

SEQ ID NO: 822448 - RNA, 19 nt, Human
aggccgccgaaggccucuc

SEQ ID NO: 822449 - RNA, 24 nt, Human
aggccucucgcgcugcagcagucu

SEQ ID NO: 822450 - RNA, 22 nt, Human
aguaagcgaucaaagaaaacaa

SEQ ID NO: 822451 - RNA, 22 nt, Human
auauucuccgcugccccaggca

SEQ ID NO: 822452 - RNA, 22 nt, Human
auccuccuuucacuugcuauuc

SEQ ID NO: 822453 - RNA, 18 nt, Human
caaagaaagucugguguc

SEQ ID NO: 822454 - RNA, 21 nt, Human
caacaaaagaggccucuagga

SEQ ID NO: 822455 - RNA, 18 nt, Human
caaggcagugcggaggcc

SEQ ID NO: 822456 - RNA, 21 nt, Human
cacaaggacacagugagaaga

SEQ ID NO: 822457 - RNA, 22 nt, Human
caccugguucuguggcauuuug

SEQ ID NO: 822458 - RNA, 25 nt, Human
caccuugaucuugaacuucuagccu

SEQ ID NO: 822459 - RNA, 21 nt, Human
cagacccggagaaugccuuuc

SEQ ID NO: 822460 - RNA, 21 nt, Human
caugugaaugcuuggcuggaa

SEQ ID NO: 822461 - RNA, 24 nt, Human
cauuuaaagaggugauuaacuuaa

SEQ ID NO: 822462 - RNA, 22 nt, Human
ccacccaggugcaagaagccug

SEQ ID NO: 822463 - RNA, 18 nt, Human
ccaccugguucuguggca

SEQ ID NO: 822464 - RNA, 26 nt, Human
ccccaaaguaagcgaucaaagaaaaa

SEQ ID NO: 822465 - RNA, 18 nt, Human
ccccaggccuccuucugg

SEQ ID NO: 822466 - RNA, 27 nt, Human
ccccugguacuucuuagcaaagauugg

SEQ ID NO: 822467 - RNA, 20 nt, Human
ccuagcaaacugaaacccaa

SEQ ID NO: 822468 - RNA, 18 nt, Human
ccucagaagucaaacucu

SEQ ID NO: 822469 - RNA, 21 nt, Human
ccucuaggaaaaaccaggccu

SEQ ID NO: 822470 - RNA, 18 nt, Human
ccugccaccauccuccuu

SEQ ID NO: 822471 - RNA, 18 nt, Human
ccuguggggcugggagcg

SEQ ID NO: 822472 - RNA, 20 nt, Human
cgaaggccucucgcgcugca

SEQ ID NO: 822473 - RNA, 23 nt, Human
cgcacucgcaccgcaaccccggc

SEQ ID NO: 822474 - RNA, 21 nt, Human
cugaaacccaagccuucugcc

SEQ ID NO: 822475 - RNA, 20 nt, Human
cugacaccuugaucuugaac

SEQ ID NO: 822476 - RNA, 19 nt, Human
cugcucugaguccuugggg

SEQ ID NO: 822477 - RNA, 21 nt, Human
cugucugcaagccaacaaaag

SEQ ID NO: 822478 - RNA, 24 nt, Human
cugucugcaagccaacaaaagagg

SEQ ID NO: 822479 - RNA, 25 nt, Human
cugugaacuaacuccaaaccucugc

SEQ ID NO: 822480 - RNA, 22 nt, Human
cuuacguugagaaaccccugga

SEQ ID NO: 822481 - RNA, 24 nt, Human
cuuagcaaagauguaguuguacaa

SEQ ID NO: 822482 - RNA, 18 nt, Human
gagaagacagcugucugc

SEQ ID NO: 822483 - RNA, 21 nt, Human
gagaagacagcugucugcaag

SEQ ID NO: 822484 - RNA, 20 nt, Human
gaucaaagaaaacaagacag

SEQ ID NO: 822485 - RNA, 21 nt, Human
gcaaagauguaguuguacaag

SEQ ID NO: 822486 - RNA, 23 nt, Human
gccccaggccuccuucuggucuc

SEQ ID NO: 822487 - RNA, 21 nt, Human
gccucaggaugaagcuccccu

SEQ ID NO: 822488 - RNA, 19 nt, Human
gccuguggggcugggagcg

SEQ ID NO: 822489 - RNA, 20 nt, Human
gcugcucugaguccuugggg

SEQ ID NO: 822490 - RNA, 25 nt, Human
gcuuccccagccaauugacaaaaac

SEQ ID NO: 822491 - RNA, 23 nt, Human
ggaaggacgagguggauuugaag

SEQ ID NO: 822492 - RNA, 20 nt, Human
ggccagaggccgccgaaggc

SEQ ID NO: 822493 - RNA, 23 nt, Human
ggccagaggccgccgaaggccuc

SEQ ID NO: 822494 - RNA, 23 nt, Human
guccugcugcccagcugcuacgg

SEQ ID NO: 822495 - RNA, 20 nt, Human
gugaaggucuccaguccaag

SEQ ID NO: 822496 - RNA, 23 nt, Human
uaaaguuaaaauccaguccaacu

SEQ ID NO: 822497 - RNA, 24 nt, Human
uacaaggcagugcggaggccaccc

SEQ ID NO: 822498 - RNA, 19 nt, Human
uacccugccaccauccucc

SEQ ID NO: 822499 - RNA, 22 nt, Human
uacuuggagauugagcauuuaa

SEQ ID NO: 822500 - RNA, 18 nt, Human
uaggaaaaaccaggccug

SEQ ID NO: 822501 - RNA, 18 nt, Human
uaggaaaaaccaggccug

SEQ ID NO: 822502 - RNA, 22 nt, Human
uaggaagggugaaggucuccag

SEQ ID NO: 822503 - RNA, 30 nt, Human
ucaauaguguagugguuacacaagucgaau

SEQ ID NO: 822504 - RNA, 25 nt, Human
ucacacuucuccuuuuacaacccca

SEQ ID NO: 822505 - RNA, 21 nt, Human
ucacagguucuuagggcgauc

SEQ ID NO: 822506 - RNA, 19 nt, Human
uccaaggaccaggucugga

SEQ ID NO: 822507 - RNA, 20 nt, Human
ucccauggcuauugguggga

SEQ ID NO: 822508 - RNA, 20 nt, Human
uccccugguacuucuuagca

SEQ ID NO: 822509 - RNA, 23 nt, Human
ucccuugucauguggagcacucc

SEQ ID NO: 822510 - RNA, 18 nt, Human
uccuccuuucacuugcua

SEQ ID NO: 822511 - RNA, 22 nt, Human
uccucuagccucaggaugaagc

SEQ ID NO: 822512 - RNA, 20 nt, Human
uccuucagcaaacuucccga

SEQ ID NO: 822513 - RNA, 21 nt, Human
ucuaggaaaaaccaggccugc

SEQ ID NO: 822514 - RNA, 19 nt, Human
ucucugagugguucuggcu

SEQ ID NO: 822515 - RNA, 19 nt, Human
ucugaucuguguccucuag

SEQ ID NO: 822516 - RNA, 20 nt, Human
ucugaucuguguccucuagc

SEQ ID NO: 822517 - RNA, 18 nt, Human
ucugcuguguaaugugug

SEQ ID NO: 822518 - RNA, 20 nt, Human
ucugcuguguaaugugugaa

SEQ ID NO: 822519 - RNA, 24 nt, Human
ucuggcuuagggucucccauagag

SEQ ID NO: 822520 - RNA, 23 nt, Human
ucugugaacuaacuccaaaccuc

SEQ ID NO: 822521 - RNA, 19 nt, Human
ugaaggaccagcuuucaag

SEQ ID NO: 822522 - RNA, 24 nt, Human
ugaauagaagaaggcagggauggu

SEQ ID NO: 822523 - RNA, 21 nt, Human
ugagaaaccccuggaaccuca

SEQ ID NO: 822524 - RNA, 19 nt, Human
ugcaagccaacaaaagagg

SEQ ID NO: 822525 - RNA, 22 nt, Human
uggaagaccuuggcaguggagu

SEQ ID NO: 822526 - RNA, 19 nt, Human
uggcuggaauugaaggacc

SEQ ID NO: 822527 - RNA, 19 nt, Human
ugggaaggaaccacacaag

SEQ ID NO: 822528 - RNA, 25 nt, Human
ugguugggggccaacuuagaggcug

SEQ ID NO: 822529 - RNA, 24 nt, Human
uguaaugugugagaaaccagaccc

SEQ ID NO: 822530 - RNA, 19 nt, Human
ugucauguggagcacucca

SEQ ID NO: 822531 - RNA, 22 nt, Human
ugucauguggagcacuccauaa

SEQ ID NO: 822532 - RNA, 22 nt, Human
ugugcagucagagauuguuucc

SEQ ID NO: 822533 - RNA, 21 nt, Human
uucacugaagaccccaagaag

SEQ ID NO: 822534 - RNA, 22 nt, Human
aaaaaaaaaaaaaaugcugcaa

SEQ ID NO: 822535 - RNA, 21 nt, Human
aaaaaaaggcugggcguggug

SEQ ID NO: 822536 - RNA, 24 nt, Human
aaaaaagaaaaaaaaaaaaaaugc

SEQ ID NO: 822537 - RNA, 22 nt, Human
aaaaaaugcugcagcagccuac

SEQ ID NO: 822538 - RNA, 24 nt, Human
aaaaaggcugggcgugguggcuca

SEQ ID NO: 822539 - RNA, 20 nt, Human
aacacggugaaaccucgucu

SEQ ID NO: 822540 - RNA, 21 nt, Human
aacacggugaaaccucgucuc

SEQ ID NO: 822541 - RNA, 22 nt, Human
aacacuuuggguggccaaggca

SEQ ID NO: 822542 - RNA, 20 nt, Human
aacauagcgaaaccuugucu

SEQ ID NO: 822543 - RNA, 21 nt, Human
aacauagcgaaaccuugucuc

SEQ ID NO: 822544 - RNA, 24 nt, Human
aaccuugucucuacuuaaauauac

SEQ ID NO: 822545 - RNA, 24 nt, Human
aagcggagcuugcggugagccgag

SEQ ID NO: 822546 - RNA, 24 nt, Human
aauugcuugaaccugggaggugga

SEQ ID NO: 822547 - RNA, 19 nt, Human
acacggugaaaccucgucu

SEQ ID NO: 822548 - RNA, 22 nt, Human
acagagagauucugucucaaaa

SEQ ID NO: 822549 - RNA, 24 nt, Human
acagagugagacuccaucucaaaa

SEQ ID NO: 822550 - RNA, 27 nt, Human
accaugucacauaaaagcuccagcauc

SEQ ID NO: 822551 - RNA, 25 nt, Human
accucgucucuacuaaaaaauacaa

SEQ ID NO: 822552 - RNA, 25 nt, Human
accuugucucuacuuaaauauacaa

SEQ ID NO: 822553 - RNA, 28 nt, Human
acuccaucucaaaaaagaaaaaaaaaaa

SEQ ID NO: 822554 - RNA, 18 nt, Human
acugcaccccagccuggg

SEQ ID NO: 822555 - RNA, 18 nt, Human
acugcaccccagccuggg

SEQ ID NO: 822556 - RNA, 24 nt, Human
acugcaccccagccugggaagcgg

SEQ ID NO: 822557 - RNA, 24 nt, Human
acugcaccccagccugggcgacag

SEQ ID NO: 822558 - RNA, 24 nt, Human
acugcacucuagccuggaugacag

SEQ ID NO: 822559 - RNA, 26 nt, Human
acugcacucuagccuggaugacagag

SEQ ID NO: 822560 - RNA, 25 nt, Human
agaaaaaaaaaaaaaaugcugcagg

SEQ ID NO: 822561 - RNA, 22 nt, Human
agaauugcuugaaccugggagg

SEQ ID NO: 822562 - RNA, 21 nt, Human
agacagagaauugcuugaacc

SEQ ID NO: 822563 - RNA, 23 nt, Human
agacagagaauugcuugaaccug

SEQ ID NO: 822564 - RNA, 24 nt, Human
agcacuuugggagucugaggcagg

SEQ ID NO: 822565 - RNA, 22 nt, Human
agcagcggcccuagggcucggc

SEQ ID NO: 822566 - RNA, 23 nt, Human
agccaggcacgguggcucaugcc

SEQ ID NO: 822567 - RNA, 23 nt, Human
agccaggcgugguggugcaugcc

SEQ ID NO: 822568 - RNA, 22 nt, Human
agccuggaugacagagagauuc

SEQ ID NO: 822569 - RNA, 23 nt, Human
agccuggccaacauagcgaaacc

SEQ ID NO: 822570 - RNA, 24 nt, Human
agccugggcgacagagugagacuc

SEQ ID NO: 822571 - RNA, 24 nt, Human
aggcacgguggcucaugccuauaa

SEQ ID NO: 822572 - RNA, 21 nt, Human
aggcaggagaauggcgugaac

SEQ ID NO: 822573 - RNA, 24 nt, Human
aggcaggagaauggcgugaaccca

SEQ ID NO: 822574 - RNA, 27 nt, Human
aggcaggagaauggcgugaacccagga

SEQ ID NO: 822575 - RNA, 20 nt, Human
aggcaggcggaucacgaggu

SEQ ID NO: 822576 - RNA, 24 nt, Human
aggcaggcggaucacgaggucaga

SEQ ID NO: 822577 - RNA, 24 nt, Human
aggcagguggaucacgaggucagg

SEQ ID NO: 822578 - RNA, 24 nt, Human
aggcggagcuugcagugagccaag

SEQ ID NO: 822579 - RNA, 19 nt, Human
aggcggaucacgaggucag

SEQ ID NO: 822580 - RNA, 24 nt, Human
aggcgugguggugcaugccuguaa

SEQ ID NO: 822581 - RNA, 23 nt, Human
aggcugagacagagaauugcuug

SEQ ID NO: 822582 - RNA, 19 nt, Human
aggcugaggcaggagaaug

SEQ ID NO: 822583 - RNA, 19 nt, Human
agguggagguugcaguaag

SEQ ID NO: 822584 - RNA, 24 nt, Human
agguggagguugcaguaagccaag

SEQ ID NO: 822585 - RNA, 24 nt, Human
agguggaucacgaggucaggaguu

SEQ ID NO: 822586 - RNA, 24 nt, Human
aggugguggcgccuguagucccag

SEQ ID NO: 822587 - RNA, 20 nt, Human
aguacugcuuaccaguguag

SEQ ID NO: 822588 - RNA, 18 nt, Human
agucugaggcaggcggau

SEQ ID NO: 822589 - RNA, 22 nt, Human
aucacgaggucaggaguucaag

SEQ ID NO: 822590 - RNA, 24 nt, Human
aucgcaccacugcaccccagccug

SEQ ID NO: 822591 - RNA, 24 nt, Human
aucgugccacugcacucuagccug

SEQ ID NO: 822592 - RNA, 24 nt, Human
augacagagagauucugucucaaa

SEQ ID NO: 822593 - RNA, 18 nt, Human
auggcgccacugcacccc

SEQ ID NO: 822594 - RNA, 24 nt, Human
caacauagcgaaaccuugucucua

SEQ ID NO: 822595 - RNA, 24 nt, Human
caagaucgugccacugcacucuag

SEQ ID NO: 822596 - RNA, 22 nt, Human
caaggcagguggaucacgaggu

SEQ ID NO: 822597 - RNA, 24 nt, Human
caaggcagguggaucacgagguca

SEQ ID NO: 822598 - RNA, 24 nt, Human
cacaccuguaaucccagcacuuug

SEQ ID NO: 822599 - RNA, 22 nt, Human
cacauaaaagcuccagcaucag

SEQ ID NO: 822600 - RNA, 21 nt, Human
cacauucaagccuacaaaucu

SEQ ID NO: 822601 - RNA, 24 nt, Human
caccacugcaccccagccgggugc

SEQ ID NO: 822602 - RNA, 27 nt, Human
caccacugcaccccagccugggaagcg

SEQ ID NO: 822603 - RNA, 22 nt, Human
caccaugucacauaaaagcucc

SEQ ID NO: 822604 - RNA, 23 nt, Human
caccccagccugggaagcggagc

SEQ ID NO: 822605 - RNA, 23 nt, Human
caccccagccugggcgacagagu

SEQ ID NO: 822606 - RNA, 23 nt, Human
caccuguaaucccagcacuuugg

SEQ ID NO: 822607 - RNA, 24 nt, Human
caccuguaaucccagcacuuuggg

SEQ ID NO: 822608 - RNA, 26 nt, Human
cacugcaccccagccugggaagcgga

SEQ ID NO: 822609 - RNA, 23 nt, Human
cacugcaccccagccugggcgac

SEQ ID NO: 822610 - RNA, 24 nt, Human
cacugcaccccagccugggcgaca

SEQ ID NO: 822611 - RNA, 18 nt, Human
cacugcacucuagccugg

SEQ ID NO: 822612 - RNA, 19 nt, Human
cacugcacucuagccugga

SEQ ID NO: 822613 - RNA, 19 nt, Human
cacugcacucuagccugga

SEQ ID NO: 822614 - RNA, 22 nt, Human
cacugcacucuagccuggauga

SEQ ID NO: 822615 - RNA, 24 nt, Human
cacugcacucuagccuggaugaca

SEQ ID NO: 822616 - RNA, 18 nt, Human
cagcacuuugggagucug

SEQ ID NO: 822617 - RNA, 24 nt, Human
cagcacuuugggagucugaggcag

SEQ ID NO: 822618 - RNA, 25 nt, Human
cagcgacacuuccgaugggucuuga

SEQ ID NO: 822619 - RNA, 24 nt, Human
cagcuacucgggaggcugaggcag

SEQ ID NO: 822620 - RNA, 20 nt, Human
caggugccuuugucaaacuu

SEQ ID NO: 822621 - RNA, 24 nt, Human
caugccuauaaucccaacacuuug

SEQ ID NO: 822622 - RNA, 21 nt, Human
ccaacacuuuggguggccaag

SEQ ID NO: 822623 - RNA, 19 nt, Human
ccacugcaccccagccugg

SEQ ID NO: 822624 - RNA, 21 nt, Human
ccacugcaccccagccuggga

SEQ ID NO: 822625 - RNA, 23 nt, Human
ccacugcaccccagccugggaag

SEQ ID NO: 822626 - RNA, 21 nt, Human
ccacugcaccccagccugggc

SEQ ID NO: 822627 - RNA, 21 nt, Human
ccacugcaccccagccugggc

SEQ ID NO: 822628 - RNA, 23 nt, Human
ccacugcaccccagccugggcga

SEQ ID NO: 822629 - RNA, 24 nt, Human
ccacugcaccccagccugggcgac

SEQ ID NO: 822630 - RNA, 19 nt, Human
ccacugcacucuagccugg

SEQ ID NO: 822631 - RNA, 19 nt, Human
ccacugcacucuagccugg

SEQ ID NO: 822632 - RNA, 20 nt, Human
ccacugcacucuagccugga

SEQ ID NO: 822633 - RNA, 21 nt, Human
ccacugcacucuagccuggau

SEQ ID NO: 822634 - RNA, 24 nt, Human
ccacugcacucuagccuggaugac

SEQ ID NO: 822635 - RNA, 20 nt, Human
cccagccugggaagcggagc

SEQ ID NO: 822636 - RNA, 24 nt, Human
cccagccugggcgacagagugaga

SEQ ID NO: 822637 - RNA, 21 nt, Human
cccuccccaguuuuaagaguc

SEQ ID NO: 822638 - RNA, 19 nt, Human
ccuauaaucccaacacuuu

SEQ ID NO: 822639 - RNA, 22 nt, Human
ccuauaaucccaacacuuuggg

SEQ ID NO: 822640 - RNA, 24 nt, Human
ccuauaaucccaacacuuugggug

SEQ ID NO: 822641 - RNA, 22 nt, Human
ccuccucgcaccgccugucacg

SEQ ID NO: 822642 - RNA, 21 nt, Human
ccuggccaacauagcgaaacc

SEQ ID NO: 822643 - RNA, 24 nt, Human
ccuggccaacauagcgaaaccuug

SEQ ID NO: 822644 - RNA, 21 nt, Human
ccuggcuaacacggugaaacc

SEQ ID NO: 822645 - RNA, 24 nt, Human
ccuggcuaacacggugaaaccucg

SEQ ID NO: 822646 - RNA, 21 nt, Human
ccugggagguggagguugcag

SEQ ID NO: 822647 - RNA, 22 nt, Human
ccugggcgacagagugagacuc

SEQ ID NO: 822648 - RNA, 21 nt, Human
ccuguaaucccagcuacucgg

SEQ ID NO: 822649 - RNA, 19 nt, Human
ccuguagucccagcuacuc

SEQ ID NO: 822650 - RNA, 21 nt, Human
ccuguagucccagcuacucgg

SEQ ID NO: 822651 - RNA, 22 nt, Human
ccuguagucccagcuacucggg

SEQ ID NO: 822652 - RNA, 24 nt, Human
cgagaccauccuggcuaacacggu

SEQ ID NO: 822653 - RNA, 21 nt, Human
cgcaccacugcaccccagccu

SEQ ID NO: 822654 - RNA, 20 nt, Human
cgccacugcaccccagccug

SEQ ID NO: 822655 - RNA, 23 nt, Human
cgccacugcaccccagccugggc

SEQ ID NO: 822656 - RNA, 26 nt, Human
cgccacugcaccccagccugggcgac

SEQ ID NO: 822657 - RNA, 24 nt, Human
cgccuguagucccagcuacucggg

SEQ ID NO: 822658 - RNA, 20 nt, Human
cgccugucacgggacagucc

SEQ ID NO: 822659 - RNA, 23 nt, Human
cggcgggcgcgggccuggccucc

SEQ ID NO: 822660 - RNA, 18 nt, Human
cgggacaguccgagccaa

SEQ ID NO: 822661 - RNA, 18 nt, Human
cgggaggcugagacagag

SEQ ID NO: 822662 - RNA, 19 nt, Human
cgggaggcugagacagaga

SEQ ID NO: 822663 - RNA, 21 nt, Human
cuaaaaaauacaaaaaauuag

SEQ ID NO: 822664 - RNA, 19 nt, Human
cuacuaaaaaauacaaaaa

SEQ ID NO: 822665 - RNA, 18 nt, Human
cucaaaaaagaaaaaaaa

SEQ ID NO: 822666 - RNA, 19 nt, Human
cucaaaagaaagaaaaaaa

SEQ ID NO: 822667 - RNA, 21 nt, Human
cucaaaagaaagaaaaaaaaa

SEQ ID NO: 822668 - RNA, 22 nt, Human
cucacaccuguaaucccagcac

SEQ ID NO: 822669 - RNA, 24 nt, Human
cucacaccuguaaucccagcacuu

SEQ ID NO: 822670 - RNA, 24 nt, Human
cucaugccuauaaucccaacacuu

SEQ ID NO: 822671 - RNA, 19 nt, Human
cuccagcaucagccaggca

SEQ ID NO: 822672 - RNA, 22 nt, Human
cucuacuaaaaaauacaaaaaa

SEQ ID NO: 822673 - RNA, 18 nt, Human
cuggcuaacacggugaaa

SEQ ID NO: 822674 - RNA, 31 nt, Human
cugucggcagcagcggcccuagggcucuuuu

SEQ ID NO: 822675 - RNA, 24 nt, Human
cuugcggugagccgagauggcgcc

SEQ ID NO: 822676 - RNA, 19 nt, Human
gaaaccucgucucuacuaa

SEQ ID NO: 822677 - RNA, 23 nt, Human
gaacaauucuagaucagccaugg

SEQ ID NO: 822678 - RNA, 24 nt, Human
gacagagugagacuccaucucaaa

SEQ ID NO: 822679 - RNA, 24 nt, Human
gagacagagaauugcuugaaccug

SEQ ID NO: 822680 - RNA, 18 nt, Human
gagcuugcagugagccaa

SEQ ID NO: 822681 - RNA, 23 nt, Human
gagcuugcagugagccaagaucg

SEQ ID NO: 822682 - RNA, 18 nt, Human
gagcuugcggugagccga

SEQ ID NO: 822683 - RNA, 21 nt, Human
gaggcugagacagagaauugc

SEQ ID NO: 822684 - RNA, 18 nt, Human
gagguugcaguaagccaa

SEQ ID NO: 822685 - RNA, 23 nt, Human
gagguugcaguaagccaagaucg

SEQ ID NO: 822686 - RNA, 24 nt, Human
gaucacgaggucagaagaucgaga

SEQ ID NO: 822687 - RNA, 22 nt, Human
gaucacgaggucaggaguucaa

SEQ ID NO: 822688 - RNA, 24 nt, Human
gaucacgaggucaggaguucaaga

SEQ ID NO: 822689 - RNA, 20 nt, Human
gcaccacugcaccccagccu

SEQ ID NO: 822690 - RNA, 22 nt, Human
gcaggagaauggcgugaaccca

SEQ ID NO: 822691 - RNA, 24 nt, Human
gccaacauagcgaaaccuugucuc

SEQ ID NO: 822692 - RNA, 20 nt, Human
gccaagaucgcaccacugca

SEQ ID NO: 822693 - RNA, 20 nt, Human
gccaagaucgugccacugca

SEQ ID NO: 822694 - RNA, 24 nt, Human
gccacugcaccccagccugggcga

SEQ ID NO: 822695 - RNA, 20 nt, Human
gccacugcacucuagccugg

SEQ ID NO: 822696 - RNA, 21 nt, Human
gccuggccuccucgcaccgcc

SEQ ID NO: 822697 - RNA, 23 nt, Human
gcggcccuagggcucggcgggcg

SEQ ID NO: 822698 - RNA, 19 nt, Human
gcuaacacggugaaaccuc

SEQ ID NO: 822699 - RNA, 22 nt, Human
gcugaggcaggagaauggcgug

SEQ ID NO: 822700 - RNA, 19 nt, Human
gcugggcgugguggcucac

SEQ ID NO: 822701 - RNA, 24 nt, Human
ggagcuugcagugagccaagaucg

SEQ ID NO: 822702 - RNA, 18 nt, Human
ggagcuugcggugagccg

SEQ ID NO: 822703 - RNA, 24 nt, Human
ggagcuugcggugagccgagaugg

SEQ ID NO: 822704 - RNA, 23 nt, Human
ggagguugcaguaagccaagauc

SEQ ID NO: 822705 - RNA, 24 nt, Human
ggagguugcaguaagccaagaucg

SEQ ID NO: 822706 - RNA, 20 nt, Human
ggcgggcgcgggccuggccu

SEQ ID NO: 822707 - RNA, 21 nt, Human
ggcucacaccuguaaucccag

SEQ ID NO: 822708 - RNA, 23 nt, Human
gggcaaggugguggcgccuguag

SEQ ID NO: 822709 - RNA, 24 nt, Human
gggcgugguggcucacaccuguaa

SEQ ID NO: 822710 - RNA, 24 nt, Human
gguggcucacaccuguaaucccag

SEQ ID NO: 822711 - RNA, 19 nt, Human
gguggcucaugccuauaau

SEQ ID NO: 822712 - RNA, 23 nt, Human
gguggcucaugccuauaauccca

SEQ ID NO: 822713 - RNA, 24 nt, Human
gguggugcaugccuguaaucccag

SEQ ID NO: 822714 - RNA, 22 nt, Human
ggugguggcgccuguaguccca

SEQ ID NO: 822715 - RNA, 23 nt, Human
guggaucacgaggucaggaguuc

SEQ ID NO: 822716 - RNA, 19 nt, Human
guggcgccuguagucccag

SEQ ID NO: 822717 - RNA, 24 nt, Human
uaacacggugaaaccucgucucua

SEQ ID NO: 822718 - RNA, 22 nt, Human
uaccaguguaguguaaacuucu

SEQ ID NO: 822719 - RNA, 24 nt, Human
ucacgaggucagaagaucgagacc

SEQ ID NO: 822720 - RNA, 24 nt, Human
ucacgaggucaggaguucaagacc

SEQ ID NO: 822721 - RNA, 18 nt, Human
ucagaagaucgagaccau

SEQ ID NO: 822722 - RNA, 23 nt, Human
ucagccaggcacgguggcucaug

SEQ ID NO: 822723 - RNA, 23 nt, Human
uccaucucaaaaaagaaaaaaaa

SEQ ID NO: 822724 - RNA, 23 nt, Human
ucgcaccacugcaccccagccug

SEQ ID NO: 822725 - RNA, 22 nt, Human
ucggcgggcgcgggccuggccu

SEQ ID NO: 822726 - RNA, 22 nt, Human
ucgggaggcugagacagagaau

SEQ ID NO: 822727 - RNA, 20 nt, Human
ucuagccuggaugacagaga

SEQ ID NO: 822728 - RNA, 23 nt, Human
ucucuacuaaaaaauacaaaaaa

SEQ ID NO: 822729 - RNA, 24 nt, Human
ugaaccugggagguggagguugca

SEQ ID NO: 822730 - RNA, 23 nt, Human
ugagacagagaauugcuugaacc

SEQ ID NO: 822731 - RNA, 24 nt, Human
ugagacagagaauugcuugaaccu

SEQ ID NO: 822732 - RNA, 22 nt, Human
ugagccgagauggcgccacugc

SEQ ID NO: 822733 - RNA, 24 nt, Human
ugaggcaggagaauggcgugaacc

SEQ ID NO: 822734 - RNA, 25 nt, Human
ugaggcaggagaauggcgugaaccc

SEQ ID NO: 822735 - RNA, 24 nt, Human
ugaggcaggcggaucacgagguca

SEQ ID NO: 822736 - RNA, 23 nt, Human
ugccuguaaucccagcuacucgg

SEQ ID NO: 822737 - RNA, 24 nt, Human
ugccuguaaucccagcuacucggg

SEQ ID NO: 822738 - RNA, 18 nt, Human
ugcugaucuuccggggug

SEQ ID NO: 822739 - RNA, 21 nt, Human
ugcuugaaccugggaggugga

SEQ ID NO: 822740 - RNA, 22 nt, Human
uggaucacgaggucaggaguuc

SEQ ID NO: 822741 - RNA, 24 nt, Human
uggccaacauagcgaaaccuuguc

SEQ ID NO: 822742 - RNA, 21 nt, Human
uggcucacaccuguaauccca

SEQ ID NO: 822743 - RNA, 24 nt, Human
uggcucacaccuguaaucccagca

SEQ ID NO: 822744 - RNA, 21 nt, Human
uggcucaugccuauaauccca

SEQ ID NO: 822745 - RNA, 18 nt, Human
ugggagguggagguugca

SEQ ID NO: 822746 - RNA, 29 nt, Human
ugggagguggagguugcaguaacaacggu

SEQ ID NO: 822747 - RNA, 24 nt, Human
ugggagguggagguugcaguaagc

SEQ ID NO: 822748 - RNA, 24 nt, Human
ugggagucugaggcaggcggauca

SEQ ID NO: 822749 - RNA, 23 nt, Human
ugggcaaggugguggcgccugua

SEQ ID NO: 822750 - RNA, 18 nt, Human
ugggucuugacaucccac

SEQ ID NO: 822751 - RNA, 19 nt, Human
ugggucuugacaucccacc

SEQ ID NO: 822752 - RNA, 24 nt, Human
uggguggccaaggcagguggauca

SEQ ID NO: 822753 - RNA, 21 nt, Human
uggugcaugccuguaauccca

SEQ ID NO: 822754 - RNA, 22 nt, Human
uggugcaugccuguaaucccag

SEQ ID NO: 822755 - RNA, 20 nt, Human
ugguggcgccuguaguccca

SEQ ID NO: 822756 - RNA, 24 nt, Human
ugguggcucacaccuguaauccca

SEQ ID NO: 822757 - RNA, 24 nt, Human
ugguggugcaugccuguaauccca

SEQ ID NO: 822758 - RNA, 24 nt, Human
uggugugugaaacucucaucucua

SEQ ID NO: 822759 - RNA, 21 nt, Human
ugugugaaacucucaucucua

SEQ ID NO: 822760 - RNA, 24 nt, Human
uuagccaggcgugguggugcaugc

SEQ ID NO: 822761 - RNA, 18 nt, Human
uucaagccuacuguggca

SEQ ID NO: 822762 - RNA, 24 nt, Human
uugaaccugggagguggagguugc

SEQ ID NO: 822763 - RNA, 22 nt, Human
uugcaguaagccaagaucgugc

SEQ ID NO: 822764 - RNA, 22 nt, Human
uugcagugagccaagaucgcac

SEQ ID NO: 822765 - RNA, 22 nt, Human
uugcggugagccgagauggcgc

SEQ ID NO: 822766 - RNA, 24 nt, Human
uugcuugaaccugggagguggagg

SEQ ID NO: 822767 - RNA, 24 nt, Human
aaaaaaaaaaacccaaaaaacaaa

SEQ ID NO: 822768 - RNA, 24 nt, Human
aaaaaaaaaacccaaaaaacaaaa

SEQ ID NO: 822769 - RNA, 23 nt, Human
aaaaaaacaaacaaaaaaccuag

SEQ ID NO: 822770 - RNA, 24 nt, Human
aaaaaacaaaaaaacaaacaaaaa

SEQ ID NO: 822771 - RNA, 24 nt, Human
aaaaaacccaaaaaacaaaaaaac

SEQ ID NO: 822772 - RNA, 28 nt, Human
aaaaaacccaaaaaacaaaaaaacaaac

SEQ ID NO: 822773 - RNA, 21 nt, Human
aaaaaaguccacgaugccucu

SEQ ID NO: 822774 - RNA, 18 nt, Human
aaaaacccaaaaaacaaa

SEQ ID NO: 822775 - RNA, 26 nt, Human
aaaaacuucagaaugacacaacacau

SEQ ID NO: 822776 - RNA, 22 nt, Human
aaaacaaaaaaacaaacaaaaa

SEQ ID NO: 822777 - RNA, 20 nt, Human
aaagacuucugccccaaaua

SEQ ID NO: 822778 - RNA, 26 nt, Human
aacaaaaaaacaaacaaaaaaccuag

SEQ ID NO: 822779 - RNA, 21 nt, Human
aacaaaaaaacagaaaucuga

SEQ ID NO: 822780 - RNA, 20 nt, Human
aacaaucaaaugaacccaac

SEQ ID NO: 822781 - RNA, 19 nt, Human
aacauuggcuggaauugag

SEQ ID NO: 822782 - RNA, 23 nt, Human
aacauuggcuggaauugagucga

SEQ ID NO: 822783 - RNA, 19 nt, Human
aacccaaaaaacaaaaaaa

SEQ ID NO: 822784 - RNA, 24 nt, Human
aagaagaaaaaaaaaugugcauug

SEQ ID NO: 822785 - RNA, 22 nt, Human
aaguacuguuuucauaaccugg

SEQ ID NO: 822786 - RNA, 24 nt, Human
acacggaaaaaaauccagcacccc

SEQ ID NO: 822787 - RNA, 25 nt, Human
agaagaaaaaaaaaugugcauugag

SEQ ID NO: 822788 - RNA, 18 nt, Human
agacacggaaaaaaaucc

SEQ ID NO: 822789 - RNA, 22 nt, Human
aggaaggaaaucaguucuguaa

SEQ ID NO: 822790 - RNA, 22 nt, Human
agggagggggcggcggcggcgg

SEQ ID NO: 822791 - RNA, 19 nt, Human
agggggauuccagugugau

SEQ ID NO: 822792 - RNA, 18 nt, Human
agucuugcaaugcaauau

SEQ ID NO: 822793 - RNA, 21 nt, Human
agugugauuucaguacuuggg

SEQ ID NO: 822794 - RNA, 21 nt, Human
auauuuuuugugugugugugu

SEQ ID NO: 822795 - RNA, 28 nt, Human
auauuuuuugugugugugugugugugug

SEQ ID NO: 822796 - RNA, 20 nt, Human
augaaugugaaaauaccacc

SEQ ID NO: 822797 - RNA, 23 nt, Human
caaaaaacaaaaaaacaaacaaa

SEQ ID NO: 822798 - RNA, 24 nt, Human
caacacauccuguguuaaacaauc

SEQ ID NO: 822799 - RNA, 22 nt, Human
caacauguacagccaggaagga

SEQ ID NO: 822800 - RNA, 26 nt, Human
caagaagggguggaaaaagaagaaaa

SEQ ID NO: 822801 - RNA, 21 nt, Human
caagcuaaagaagagaacaac

SEQ ID NO: 822802 - RNA, 19 nt, Human
caaugcaauauccaugcuu

SEQ ID NO: 822803 - RNA, 24 nt, Human
cacaacacauccuguguuaaacaa

SEQ ID NO: 822804 - RNA, 21 nt, Human
caccccaacauguacagccag

SEQ ID NO: 822805 - RNA, 20 nt, Human
caccuucuuucagguucucu

SEQ ID NO: 822806 - RNA, 24 nt, Human
cagguauaaugaacuacaaacaag

SEQ ID NO: 822807 - RNA, 21 nt, Human
cauggcuauaaguuucaaugu

SEQ ID NO: 822808 - RNA, 23 nt, Human
ccaaaaaacaaaaaaacaaacaa

SEQ ID NO: 822809 - RNA, 23 nt, Human
ccaaagaaaguugcagagcuuau

SEQ ID NO: 822810 - RNA, 22 nt, Human
ccaaguacuguuuucauaaccu

SEQ ID NO: 822811 - RNA, 27 nt, Human
ccaauuuucugcaguaaaaaaaaaaaa

SEQ ID NO: 822812 - RNA, 19 nt, Human
ccacaagcuaaagaagaga

SEQ ID NO: 822813 - RNA, 26 nt, Human
ccagcaccccaacauguacagccagg

SEQ ID NO: 822814 - RNA, 22 nt, Human
cccaaaaaacaaaaaaacaaac

SEQ ID NO: 822815 - RNA, 25 nt, Human
cccaaaaaacaaaaaaacaaacaaa

SEQ ID NO: 822816 - RNA, 21 nt, Human
cccuaaauaccaaauuuucuc

SEQ ID NO: 822817 - RNA, 20 nt, Human
ccuacauauauauuuauaua

SEQ ID NO: 822818 - RNA, 20 nt, Human
ccugggagaaaaaaccaaac

SEQ ID NO: 822819 - RNA, 18 nt, Human
ccuuggccuuaaaaggga

SEQ ID NO: 822820 - RNA, 18 nt, Human
cgaggccacggcgcugcc

SEQ ID NO: 822821 - RNA, 19 nt, Human
cggaaaaaaauccagcacc

SEQ ID NO: 822822 - RNA, 18 nt, Human
cuaaagaagagaacaugu

SEQ ID NO: 822823 - RNA, 22 nt, Human
cugaaugccaaagaaaguugca

SEQ ID NO: 822824 - RNA, 19 nt, Human
cuuuucaacauuggcugga

SEQ ID NO: 822825 - RNA, 19 nt, Human
gaaaaaaccaaacucuuga

SEQ ID NO: 822826 - RNA, 20 nt, Human
gagaauuuugucuuugacaa

SEQ ID NO: 822827 - RNA, 26 nt, Human
gagggagggggcggcggcggcggcga

SEQ ID NO: 822828 - RNA, 20 nt, Human
gaguuuuuuuuuucuuuuuc

SEQ ID NO: 822829 - RNA, 23 nt, Human
gcaguaaaaaaaaaaaacccaaa

SEQ ID NO: 822830 - RNA, 25 nt, Human
gcggcggcggcggcgcgacuccuuu

SEQ ID NO: 822831 - RNA, 21 nt, Human
ggagaaaaaaccaaacucuug

SEQ ID NO: 822832 - RNA, 20 nt, Human
ggcggcggcggcggcgcgac

SEQ ID NO: 822833 - RNA, 21 nt, Human
gggcggcggcggcggcgcgac

SEQ ID NO: 822834 - RNA, 23 nt, Human
gggcuggcaaguuggauuagauu

SEQ ID NO: 822835 - RNA, 25 nt, Human
guauccuacauauauauuuauauau

SEQ ID NO: 822836 - RNA, 21 nt, Human
guggaaaaagaagaaaaaaaa

SEQ ID NO: 822837 - RNA, 20 nt, Human
guguguguguguguguggau

SEQ ID NO: 822838 - RNA, 18 nt, Human
uaaaaacaauacugauua

SEQ ID NO: 822839 - RNA, 21 nt, Human
uaacaaaaaaacagaaaucug

SEQ ID NO: 822840 - RNA, 23 nt, Human
uaacccagaaacgcugucauuua

SEQ ID NO: 822841 - RNA, 20 nt, Human
uaaccuggaguugaggaauu

SEQ ID NO: 822842 - RNA, 24 nt, Human
uacaaacaagaagggguggaaaaa

SEQ ID NO: 822843 - RNA, 18 nt, Human
uacaccauuauaaaagaa

SEQ ID NO: 822844 - RNA, 25 nt, Human
uaccaaauuuucuccaaccuaacau

SEQ ID NO: 822845 - RNA, 19 nt, Human
uacguguucucagacuguc

SEQ ID NO: 822846 - RNA, 21 nt, Human
uagaaaaaaguccacgaugcc

SEQ ID NO: 822847 - RNA, 18 nt, Human
uauaaacucuguaaggac

SEQ ID NO: 822848 - RNA, 24 nt, Human
uauauauauuuuuugugugugugu

SEQ ID NO: 822849 - RNA, 24 nt, Human
uauauauauuuuuugugugugugu

SEQ ID NO: 822850 - RNA, 20 nt, Human
uauauauuuauauauauaua

SEQ ID NO: 822851 - RNA, 19 nt, Human
uaugaaugugaaaauacca

SEQ ID NO: 822852 - RNA, 21 nt, Human
ucacaaacuuggguuuuuucu

SEQ ID NO: 822853 - RNA, 23 nt, Human
ucagaagacauauuuacuauuca

SEQ ID NO: 822854 - RNA, 19 nt, Human
ucaguuuuccaaguacugu

SEQ ID NO: 822855 - RNA, 20 nt, Human
uccauaaagacuucugcccc

SEQ ID NO: 822856 - RNA, 23 nt, Human
uccauaaagacuucugccccaaa

SEQ ID NO: 822857 - RNA, 20 nt, Human
ucugcaguaaaaaaaaaaaa

SEQ ID NO: 822858 - RNA, 19 nt, Human
ucugcuaugguuucucaug

SEQ ID NO: 822859 - RNA, 24 nt, Human
ucugcuaugguuucucauggaagu

SEQ ID NO: 822860 - RNA, 20 nt, Human
ucuuuuucuuuucaacauug

SEQ ID NO: 822861 - RNA, 23 nt, Human
ugaaaauaccaccaauuuucugc

SEQ ID NO: 822862 - RNA, 24 nt, Human
ugaaauaucacaaacuuggguuuu

SEQ ID NO: 822863 - RNA, 19 nt, Human
ugacacaccggugucucug

SEQ ID NO: 822864 - RNA, 24 nt, Human
ugagagggauuaacacuuuugaug

SEQ ID NO: 822865 - RNA, 23 nt, Human
ugagguacaccauuauaaaagaa

SEQ ID NO: 822866 - RNA, 18 nt, Human
uggaaaaagaagaaaaaa

SEQ ID NO: 822867 - RNA, 24 nt, Human
uggaaaaagaagaaaaaaaaaugu

SEQ ID NO: 822868 - RNA, 20 nt, Human
uggaagacuaaagacacgga

SEQ ID NO: 822869 - RNA, 23 nt, Human
uggaagacuaaagacacggaaaa

SEQ ID NO: 822870 - RNA, 20 nt, Human
uggaaucacugaaauaucac

SEQ ID NO: 822871 - RNA, 19 nt, Human
uggacauccaauggcaguu

SEQ ID NO: 822872 - RNA, 18 nt, Human
uggacgcgaggccacggc

SEQ ID NO: 822873 - RNA, 22 nt, Human
uguguguguggauuuauggaag

SEQ ID NO: 822874 - RNA, 18 nt, Human
ugugugugugugugugug

SEQ ID NO: 822875 - RNA, 22 nt, Human
ugugugugugugugugugugag

SEQ ID NO: 822876 - RNA, 24 nt, Human
uguuuuauucuucaaugcaaauua

SEQ ID NO: 822877 - RNA, 24 nt, Human
uucaccacaagcuaaagaagagaa

SEQ ID NO: 822878 - RNA, 18 nt, Human
uucagaaugacacaacac

SEQ ID NO: 822879 - RNA, 18 nt, Human
uucuuuggaaucacugaa

SEQ ID NO: 822880 - RNA, 18 nt, Human
uugcauccuauuuguuuu

SEQ ID NO: 822881 - RNA, 23 nt, Human
uugcuuguaguacugacugugug

SEQ ID NO: 822882 - RNA, 24 nt, Human
uugguaaaacauuuuuuccucauu

SEQ ID NO: 822883 - RNA, 22 nt, Human
uuuaacaacugaaugccaaaga

SEQ ID NO: 822884 - RNA, 19 nt, Human
uuucuuuucaacauuggcu

SEQ ID NO: 822885 - RNA, 21 nt, Human
uuuuucuuuucaacauuggcu

SEQ ID NO: 822886 - RNA, 24 nt, Human
aaaaaaaagaaagaaacauccaaa

SEQ ID NO: 822887 - RNA, 24 nt, Human
aaaaaaacgaugcacaguccaagg

SEQ ID NO: 822888 - RNA, 23 nt, Human
aaaaaaagaaaaguuuaaaauaa

SEQ ID NO: 822889 - RNA, 23 nt, Human
aaaaaaagaaagaaacauccaaa

SEQ ID NO: 822890 - RNA, 21 nt, Human
aaacaaaaaaaaaacgaugca

SEQ ID NO: 822891 - RNA, 19 nt, Human
aaacaggagaaugggguga

SEQ ID NO: 822892 - RNA, 24 nt, Human
aaacaggagaauggggugaaccca

SEQ ID NO: 822893 - RNA, 27 nt, Human
aaacaggagaauggggugaacccagga

SEQ ID NO: 822894 - RNA, 18 nt, Human
aaaguuccuauacguccu

SEQ ID NO: 822895 - RNA, 21 nt, Human
aacaaaacaaaaaaaaaacga

SEQ ID NO: 822896 - RNA, 19 nt, Human
aacauggugaaaccccauc

SEQ ID NO: 822897 - RNA, 20 nt, Human
aacauggugaaaccccaucu

SEQ ID NO: 822898 - RNA, 20 nt, Human
aacauggugaaaccccaucu

SEQ ID NO: 822899 - RNA, 21 nt, Human
aacauggugaaaccccaucuc

SEQ ID NO: 822900 - RNA, 19 nt, Human
aaccugcacauugugcaca

SEQ ID NO: 822901 - RNA, 20 nt, Human
aacuguaauaaaauggccca

SEQ ID NO: 822902 - RNA, 20 nt, Human
aacuucugcugggugaaguu

SEQ ID NO: 822903 - RNA, 25 nt, Human
aagaaagaaacauccaaaugcaugc

SEQ ID NO: 822904 - RNA, 21 nt, Human
aagacaccagacagggagaug

SEQ ID NO: 822905 - RNA, 21 nt, Human
aaggaagcaccauucaccacc

SEQ ID NO: 822906 - RNA, 18 nt, Human
aagggcuuaacccaugac

SEQ ID NO: 822907 - RNA, 20 nt, Human
aaguagacauuuuccaucaa

SEQ ID NO: 822908 - RNA, 22 nt, Human
aaguagacauuuuccaucaacu

SEQ ID NO: 822909 - RNA, 24 nt, Human
acaaaacaaaaaaaaaacgaugca

SEQ ID NO: 822910 - RNA, 18 nt, Human
acaaaggaaggaaacuga

SEQ ID NO: 822911 - RNA, 21 nt, Human
acaaagugagacucugucuca

SEQ ID NO: 822912 - RNA, 24 nt, Human
acaaagugagacucugucucaaaa

SEQ ID NO: 822913 - RNA, 23 nt, Human
acacccaccucggcaaaaggaca

SEQ ID NO: 822914 - RNA, 21 nt, Human
acagcacaaagaagagcacaa

SEQ ID NO: 822915 - RNA, 23 nt, Human
accacagcacaaagaagagcaca

SEQ ID NO: 822916 - RNA, 25 nt, Human
accacccaccagaggaaaaggggca

SEQ ID NO: 822917 - RNA, 24 nt, Human
accccaucucuacuaaaaauacaa

SEQ ID NO: 822918 - RNA, 20 nt, Human
accuggcaugugaauuuggc

SEQ ID NO: 822919 - RNA, 19 nt, Human
acuacacuucuacccccac

SEQ ID NO: 822920 - RNA, 18 nt, Human
acucgggaggcugaaaca

SEQ ID NO: 822921 - RNA, 28 nt, Human
acucugucucaaaaaaaaaaaaaaaaaa

SEQ ID NO: 822922 - RNA, 20 nt, Human
acugaauugcaaaagcuuug

SEQ ID NO: 822923 - RNA, 18 nt, Human
acugcacuccaggccggg

SEQ ID NO: 822924 - RNA, 19 nt, Human
agaaaauacagaaauaagg

SEQ ID NO: 822925 - RNA, 26 nt, Human
agacaaaaggucagagaagagggacc

SEQ ID NO: 822926 - RNA, 18 nt, Human
agcacccgggcacgaagg

SEQ ID NO: 822927 - RNA, 21 nt, Human
agccgggcgugguagcaggcc

SEQ ID NO: 822928 - RNA, 21 nt, Human
aggcggagcuugcagugagcc

SEQ ID NO: 822929 - RNA, 24 nt, Human
aggcggagcuugcagugagccgag

SEQ ID NO: 822930 - RNA, 24 nt, Human
aggcgggcggaucacgaggucagg

SEQ ID NO: 822931 - RNA, 21 nt, Human
agguggaggcgggcggaucac

SEQ ID NO: 822932 - RNA, 28 nt, Human
agucaccaauaacaaaacaaaaaaaaaa

SEQ ID NO: 822933 - RNA, 21 nt, Human
agugugcuccucuuaaauaac

SEQ ID NO: 822934 - RNA, 20 nt, Human
auaaauccuaucacuguucu

SEQ ID NO: 822935 - RNA, 22 nt, Human
auaacaccuuuacaggccuaca

SEQ ID NO: 822936 - RNA, 18 nt, Human
auaagacaaaaggucaga

SEQ ID NO: 822937 - RNA, 22 nt, Human
auaagauaaugcuggcuggcug

SEQ ID NO: 822938 - RNA, 21 nt, Human
augaugcuuuuuugucuucaa

SEQ ID NO: 822939 - RNA, 19 nt, Human
caaaaaaaaaacgaugcac

SEQ ID NO: 822940 - RNA, 21 nt, Human
caaaaaaaaaacgaugcacag

SEQ ID NO: 822941 - RNA, 23 nt, Human
caaaacaaaaaaaaaacgaugca

SEQ ID NO: 822942 - RNA, 25 nt, Human
caaaacaaaaaaaaaacgaugcaca

SEQ ID NO: 822943 - RNA, 19 nt, Human
caaagcacuaagauauguc

SEQ ID NO: 822944 - RNA, 25 nt, Human
caaauaggcacaaaauaaauccuau

SEQ ID NO: 822945 - RNA, 21 nt, Human
caaauauauuuucacacaucu

SEQ ID NO: 822946 - RNA, 21 nt, Human
caacugugucucuaggcugaa

SEQ ID NO: 822947 - RNA, 24 nt, Human
cacaccaacacggcacauguauac

SEQ ID NO: 822948 - RNA, 24 nt, Human
cacaccuguaauccuagcacuuug

SEQ ID NO: 822949 - RNA, 18 nt, Human
cacauguauacauaugua

SEQ ID NO: 822950 - RNA, 26 nt, Human
caccaaggagacugcagucaaauaaa

SEQ ID NO: 822951 - RNA, 23 nt, Human
caccaauaacaaaacaaaaaaaa

SEQ ID NO: 822952 - RNA, 23 nt, Human
caccaauaacaaaacaaaaaaaa

SEQ ID NO: 822953 - RNA, 19 nt, Human
caccacccaccagaggaaa

SEQ ID NO: 822954 - RNA, 19 nt, Human
caccagacagggagaugac

SEQ ID NO: 822955 - RNA, 23 nt, Human
caccuguaauccuagcacuuugg

SEQ ID NO: 822956 - RNA, 24 nt, Human
caccuguaauccuagcacuuuggg

SEQ ID NO: 822957 - RNA, 22 nt, Human
cacgaaggcagcaucacugaaa

SEQ ID NO: 822958 - RNA, 18 nt, Human
cacuaucacuauuggugg

SEQ ID NO: 822959 - RNA, 19 nt, Human
cacuaucacuauugguggc

SEQ ID NO: 822960 - RNA, 19 nt, Human
cacugcacuccaggccggg

SEQ ID NO: 822961 - RNA, 24 nt, Human
cacugcacuccaggccgggagaca

SEQ ID NO: 822962 - RNA, 18 nt, Human
cagggccucugaucucgg

SEQ ID NO: 822963 - RNA, 21 nt, Human
cauaaaggacucaagcacccg

SEQ ID NO: 822964 - RNA, 18 nt, Human
cauuauaucaaagugcuc

SEQ ID NO: 822965 - RNA, 18 nt, Human
ccaccaaagccaucuucc

SEQ ID NO: 822966 - RNA, 20 nt, Human
ccacugcacuccaggccggg

SEQ ID NO: 822967 - RNA, 22 nt, Human
ccacugcacuccaggccgggag

SEQ ID NO: 822968 - RNA, 23 nt, Human
ccacugcacuccaggccgggaga

SEQ ID NO: 822969 - RNA, 24 nt, Human
ccacugcacuccaggccgggagac

SEQ ID NO: 822970 - RNA, 19 nt, Human
ccauccccacagcagacug

SEQ ID NO: 822971 - RNA, 25 nt, Human
cccacagcagacugaauugcaaaag

SEQ ID NO: 822972 - RNA, 24 nt, Human
ccccuguagucccaguuacucggg

SEQ ID NO: 822973 - RNA, 20 nt, Human
cccuguagucccaguuacuc

SEQ ID NO: 822974 - RNA, 22 nt, Human
ccuccaccaaagccaucuuccc

SEQ ID NO: 822975 - RNA, 22 nt, Human
ccugguuaacauggugaaaccc

SEQ ID NO: 822976 - RNA, 23 nt, Human
ccugguuaacauggugaaacccc

SEQ ID NO: 822977 - RNA, 24 nt, Human
ccugguuaacauggugaaacccca

SEQ ID NO: 822978 - RNA, 21 nt, Human
ccuguagucccaguuacucgg

SEQ ID NO: 822979 - RNA, 22 nt, Human
cgaaaaguacugaaaaugcuau

SEQ ID NO: 822980 - RNA, 24 nt, Human
cgagaccauccugguuaacauggu

SEQ ID NO: 822981 - RNA, 19 nt, Human
cggcacauguauacauaug

SEQ ID NO: 822982 - RNA, 19 nt, Human
cggucaacuucugcugggu

SEQ ID NO: 822983 - RNA, 23 nt, Human
cuaacacacccaccucggcaaaa

SEQ ID NO: 822984 - RNA, 18 nt, Human
cucaaaaaaaaaaaaaaa

SEQ ID NO: 822985 - RNA, 24 nt, Human
cucacaccuguaauccuagcacuu

SEQ ID NO: 822986 - RNA, 23 nt, Human
cucauaauuaauuuacucccaaa

SEQ ID NO: 822987 - RNA, 19 nt, Human
cucugucucaaaaaaaaaa

SEQ ID NO: 822988 - RNA, 18 nt, Human
cugagugugguaucaugu

SEQ ID NO: 822989 - RNA, 23 nt, Human
cugguuaacauggugaaacccca

SEQ ID NO: 822990 - RNA, 19 nt, Human
cuguagcuuuaaaugcuuc

SEQ ID NO: 822991 - RNA, 23 nt, Human
cuuacaaucacuuuuuaccuguc

SEQ ID NO: 822992 - RNA, 24 nt, Human
cuucgccgggcgugguggcucaca

SEQ ID NO: 822993 - RNA, 18 nt, Human
cuugcagugagccgaguu

SEQ ID NO: 822994 - RNA, 26 nt, Human
gaaaagaagccaucccaagaauccua

SEQ ID NO: 822995 - RNA, 20 nt, Human
gaaagaaacauccaaaugca

SEQ ID NO: 822996 - RNA, 24 nt, Human
gacaaagugagacucugucucaaa

SEQ ID NO: 822997 - RNA, 20 nt, Human
gacuugggcaauguggccag

SEQ ID NO: 822998 - RNA, 24 nt, Human
gagacaaagugagacucugucuca

SEQ ID NO: 822999 - RNA, 18 nt, Human
gagcuugcagugagccga

SEQ ID NO: 823000 - RNA, 22 nt, Human
gagcuugcagugagccgaguuc

SEQ ID NO: 823001 - RNA, 23 nt, Human
gaguucgcgccacugcacuccag

SEQ ID NO: 823002 - RNA, 21 nt, Human
gcugagaaaaccacagcacaa

SEQ ID NO: 823003 - RNA, 20 nt, Human
gcuuugggauuucucuucca

SEQ ID NO: 823004 - RNA, 25 nt, Human
ggaaaaggggcaggcacacaacugu

SEQ ID NO: 823005 - RNA, 18 nt, Human
ggaagcaccauucaccac

SEQ ID NO: 823006 - RNA, 21 nt, Human
ggagaauggggugaacccagg

SEQ ID NO: 823007 - RNA, 18 nt, Human
ggagcuugcagugagccg

SEQ ID NO: 823008 - RNA, 24 nt, Human
ggagcuugcagugagccgaguucg

SEQ ID NO: 823009 - RNA, 23 nt, Human
ggaugagacgucugccaugugag

SEQ ID NO: 823010 - RNA, 22 nt, Human
ggcaggcacacaacugugucuc

SEQ ID NO: 823011 - RNA, 19 nt, Human
ggcccagauuguggauuuc

SEQ ID NO: 823012 - RNA, 18 nt, Human
ggcucacaccuguaaucc

SEQ ID NO: 823013 - RNA, 18 nt, Human
gggagggauagcacuggg

SEQ ID NO: 823014 - RNA, 18 nt, Human
gggaguggggagggauag

SEQ ID NO: 823015 - RNA, 21 nt, Human
gggcaauguggccaggagggc

SEQ ID NO: 823016 - RNA, 23 nt, Human
gggcaggcacacaacugugucuc

SEQ ID NO: 823017 - RNA, 20 nt, Human
gggccucugaucucggucaa

SEQ ID NO: 823018 - RNA, 24 nt, Human
gggcggaucacgaggucaggagau

SEQ ID NO: 823019 - RNA, 24 nt, Human
gggcgugguggcucacaccuguaa

SEQ ID NO: 823020 - RNA, 19 nt, Human
ggggaguggggagggauag

SEQ ID NO: 823021 - RNA, 22 nt, Human
ggggugggggaguggggaggga

SEQ ID NO: 823022 - RNA, 21 nt, Human
gggugggggaguggggaggga

SEQ ID NO: 823023 - RNA, 20 nt, Human
ggucagaaaaaucaacauuu

SEQ ID NO: 823024 - RNA, 24 nt, Human
gguggcucacaccuguaauccuag

SEQ ID NO: 823025 - RNA, 18 nt, Human
ggugggggaguggggagg

SEQ ID NO: 823026 - RNA, 20 nt, Human
gucagagaagaggggauuca

SEQ ID NO: 823027 - RNA, 19 nt, Human
gucauuuuucaguuuuccu

SEQ ID NO: 823028 - RNA, 19 nt, Human
gugcagcacaccaacacgg

SEQ ID NO: 823029 - RNA, 21 nt, Human
gugccacacuggaacagugcu

SEQ ID NO: 823030 - RNA, 25 nt, Human
uaaaaaaaagaaagaaacauccaaa

SEQ ID NO: 823031 - RNA, 27 nt, Human
uaaauacauaauacagaagccugugug

SEQ ID NO: 823032 - RNA, 22 nt, Human
uaaaugcuuccaaguccuccca

SEQ ID NO: 823033 - RNA, 19 nt, Human
uaacaaaacaaaaaaaaaa

SEQ ID NO: 823034 - RNA, 22 nt, Human
uaacaaaacaaaaaaaaaacga

SEQ ID NO: 823035 - RNA, 26 nt, Human
uaacaaaacaaaaaaaaaacgaugca

SEQ ID NO: 823036 - RNA, 22 nt, Human
uaacauggugaaaccccaucuc

SEQ ID NO: 823037 - RNA, 24 nt, Human
uaacauggugaaaccccaucucua

SEQ ID NO: 823038 - RNA, 22 nt, Human
uaaggaagcaccauucaccacc

SEQ ID NO: 823039 - RNA, 24 nt, Human
uaauaaaaaaaagaaagaaacauc

SEQ ID NO: 823040 - RNA, 21 nt, Human
uaauaaaauggcccagauugu

SEQ ID NO: 823041 - RNA, 21 nt, Human
uaccguuaaaaauaaugggaa

SEQ ID NO: 823042 - RNA, 21 nt, Human
uaccugaaggggaagggaagu

SEQ ID NO: 823043 - RNA, 22 nt, Human
uacuuuuaaaaccuccaccaaa

SEQ ID NO: 823044 - RNA, 24 nt, Human
uagcacuuugggagguggaggcgg

SEQ ID NO: 823045 - RNA, 23 nt, Human
uagcuauaagacaaaaggucaga

SEQ ID NO: 823046 - RNA, 19 nt, Human
uaggcugaaagugacauuc

SEQ ID NO: 823047 - RNA, 19 nt, Human
uaugucuuauggucagaaa

SEQ ID NO: 823048 - RNA, 18 nt, Human
uauuagcugaauuuguga

SEQ ID NO: 823049 - RNA, 18 nt, Human
uauugguggcggcucuag

SEQ ID NO: 823050 - RNA, 19 nt, Human
uauuuuucccauuuuguuu

SEQ ID NO: 823051 - RNA, 24 nt, Human
ucaaaaaaaaaaaaaaaaaaagaa

SEQ ID NO: 823052 - RNA, 18 nt, Human
ucacgaggucaggagauc

SEQ ID NO: 823053 - RNA, 24 nt, Human
ucacgaggucaggagaucgagacc

SEQ ID NO: 823054 - RNA, 21 nt, Human
ucauuuuucaguuuuccugag

SEQ ID NO: 823055 - RNA, 18 nt, Human
uccaugcaccauuccaga

SEQ ID NO: 823056 - RNA, 23 nt, Human
ucccuuguuuggucauuuuucag

SEQ ID NO: 823057 - RNA, 19 nt, Human
ucgcgccacugcacuccag

SEQ ID NO: 823058 - RNA, 19 nt, Human
ucguggggugggggagugg

SEQ ID NO: 823059 - RNA, 21 nt, Human
ucuacccccacuauucaaaua

SEQ ID NO: 823060 - RNA, 22 nt, Human
ucucuacuaaaaauacaaaaaa

SEQ ID NO: 823061 - RNA, 23 nt, Human
ucugucucaaaaaaaaaaaaaaa

SEQ ID NO: 823062 - RNA, 20 nt, Human
ugaaacaggagaauggggug

SEQ ID NO: 823063 - RNA, 24 nt, Human
ugaaacaggagaauggggugaacc

SEQ ID NO: 823064 - RNA, 19 nt, Human
ugaaaccccaucucuacua

SEQ ID NO: 823065 - RNA, 20 nt, Human
ugaaacgcucaguagauacc

SEQ ID NO: 823066 - RNA, 23 nt, Human
ugaaggggaagggaaguguaagu

SEQ ID NO: 823067 - RNA, 23 nt, Human
ugacugaaacgcucaguagauac

SEQ ID NO: 823068 - RNA, 24 nt, Human
ugacugaaacgcucaguagauacc

SEQ ID NO: 823069 - RNA, 22 nt, Human
ugagaaaaccacagcacaaaga

SEQ ID NO: 823070 - RNA, 22 nt, Human
ugagccgaguucgcgccacugc

SEQ ID NO: 823071 - RNA, 22 nt, Human
ugaguuauccuuauuuuuccca

SEQ ID NO: 823072 - RNA, 24 nt, Human
ugaguuauccuuauuuuucccauu

SEQ ID NO: 823073 - RNA, 20 nt, Human
ugccaggauauaaggaugag

SEQ ID NO: 823074 - RNA, 25 nt, Human
uggaggcgggcggaucacgagguca

SEQ ID NO: 823075 - RNA, 19 nt, Human
uggauuucuuggucuugau

SEQ ID NO: 823076 - RNA, 21 nt, Human
uggcaugugaauuuggcuuuu

SEQ ID NO: 823077 - RNA, 19 nt, Human
uggcucacaccuguaaucc

SEQ ID NO: 823078 - RNA, 19 nt, Human
uggcucacaccuguaaucc

SEQ ID NO: 823079 - RNA, 24 nt, Human
uggcucacaccuguaauccuagca

SEQ ID NO: 823080 - RNA, 24 nt, Human
ugggauuucucuuccagacaucuu

SEQ ID NO: 823081 - RNA, 20 nt, Human
uggggugaacccaggaggcg

SEQ ID NO: 823082 - RNA, 23 nt, Human
uggggugggggaguggggaggga

SEQ ID NO: 823083 - RNA, 23 nt, Human
ugguagcaggccccuguaguccc

SEQ ID NO: 823084 - RNA, 22 nt, Human
ugguggcucacaccuguaaucc

SEQ ID NO: 823085 - RNA, 27 nt, Human
uguauacauauguaacaaaccugcaca

SEQ ID NO: 823086 - RNA, 23 nt, Human
ugucaaaugacaaagcacuaaga

SEQ ID NO: 823087 - RNA, 18 nt, Human
ugucgaacacgagcugua

SEQ ID NO: 823088 - RNA, 19 nt, Human
ugucugccaggauauaagg

SEQ ID NO: 823089 - RNA, 22 nt, Human
ugugaaaggaucaagccauccc

SEQ ID NO: 823090 - RNA, 22 nt, Human
ugugucucuaggcugaaaguga

SEQ ID NO: 823091 - RNA, 23 nt, Human
uuaagauauggguuauaaaaugc

SEQ ID NO: 823092 - RNA, 23 nt, Human
uuaaugucacacccacauucaau

SEQ ID NO: 823093 - RNA, 24 nt, Human
uuagcugaauuugugauuuccuuu

SEQ ID NO: 823094 - RNA, 24 nt, Human
uuauggucagaaaaaucaacauuu

SEQ ID NO: 823095 - RNA, 19 nt, Human
uucuccaugcaccauucca

SEQ ID NO: 823096 - RNA, 23 nt, Human
uucuuggucuugauauucuccau

SEQ ID NO: 823097 - RNA, 19 nt, Human
uugcagugagccgaguucc

SEQ ID NO: 823098 - RNA, 22 nt, Human
uugcagugagccgaguucgcgc

SEQ ID NO: 823099 - RNA, 27 nt, Human
uugugccacacuggaacagugcuccgc

SEQ ID NO: 823100 - RNA, 22 nt, Human
uuuaaaaccuccaccaaagcca

SEQ ID NO: 823101 - RNA, 22 nt, Human
uuuaccugacacgaucaucaca

SEQ ID NO: 823102 - RNA, 23 nt, Human
uuuagaaaacuagaaaauacaga

SEQ ID NO: 823103 - RNA, 22 nt, Human
aaaaacccugaccaccacaggc

SEQ ID NO: 823104 - RNA, 18 nt, Human
aaaacccugaccaccaca

SEQ ID NO: 823105 - RNA, 24 nt, Human
aaacaaacgcaagauaugcuagac

SEQ ID NO: 823106 - RNA, 23 nt, Human
aaaugcugacaguugcucguaca

SEQ ID NO: 823107 - RNA, 23 nt, Human
aaauggcauuuuccaggugcccc

SEQ ID NO: 823108 - RNA, 21 nt, Human
aagcugguggcgaggcuaggc

SEQ ID NO: 823109 - RNA, 20 nt, Human
aaggcauuuuugguucucac

SEQ ID NO: 823110 - RNA, 22 nt, Human
acacagccacaguugaaaaacc

SEQ ID NO: 823111 - RNA, 26 nt, Human
acacagcuucaggguggagggaacgc

SEQ ID NO: 823112 - RNA, 25 nt, Human
acagcaaagaaugauccagccugga

SEQ ID NO: 823113 - RNA, 21 nt, Human
acagccacaguugaaaaaccc

SEQ ID NO: 823114 - RNA, 24 nt, Human
acaggccuucuuucccuuccccag

SEQ ID NO: 823115 - RNA, 18 nt, Human
accaaucacccaacguca

SEQ ID NO: 823116 - RNA, 20 nt, Human
accugcucacuguccuccuc

SEQ ID NO: 823117 - RNA, 19 nt, Human
agacauggccagccgccuc

SEQ ID NO: 823118 - RNA, 19 nt, Human
agcagugaggaaagaaggg

SEQ ID NO: 823119 - RNA, 19 nt, Human
agccacaguugaaaaaccc

SEQ ID NO: 823120 - RNA, 18 nt, Human
aggaaagaagggacucca

SEQ ID NO: 823121 - RNA, 24 nt, Human
aggagcagugaggaaagaagggac

SEQ ID NO: 823122 - RNA, 22 nt, Human
aggcagauggcacucaaccagg

SEQ ID NO: 823123 - RNA, 26 nt, Human
aggcaggcaggcagaaaaagggaccc

SEQ ID NO: 823124 - RNA, 18 nt, Human
aguugacaggaagcagaa

SEQ ID NO: 823125 - RNA, 19 nt, Human
aucccaucuuucucacugg

SEQ ID NO: 823126 - RNA, 24 nt, Human
augcauuuucccaugggaaaaaac

SEQ ID NO: 823127 - RNA, 21 nt, Human
caaagaaucccaucuuucuca

SEQ ID NO: 823128 - RNA, 22 nt, Human
caaagaaugauccagccuggau

SEQ ID NO: 823129 - RNA, 23 nt, Human
cacacagcuucaggguggaccaa

SEQ ID NO: 823130 - RNA, 24 nt, Human
cacagcuucaggguggaccaauca

SEQ ID NO: 823131 - RNA, 24 nt, Human
cacccaacgucagauucggcccgc

SEQ ID NO: 823132 - RNA, 18 nt, Human
caccuuaaagaaacauuc

SEQ ID NO: 823133 - RNA, 21 nt, Human
caccuuaaagaaacauucuug

SEQ ID NO: 823134 - RNA, 24 nt, Human
cacugauugcuguuaaaauucugg

SEQ ID NO: 823135 - RNA, 20 nt, Human
cacugggccugggcugcaca

SEQ ID NO: 823136 - RNA, 21 nt, Human
cacuguccuccucacucccug

SEQ ID NO: 823137 - RNA, 24 nt, Human
cagaaaaaugcugacaguugcucg

SEQ ID NO: 823138 - RNA, 25 nt, Human
cagauaggcagauggcacucaacca

SEQ ID NO: 823139 - RNA, 21 nt, Human
cagccaccaccauucuucuua

SEQ ID NO: 823140 - RNA, 23 nt, Human
cagcccccacagcaaagaaugau

SEQ ID NO: 823141 - RNA, 19 nt, Human
cagccuggauugucaacac

SEQ ID NO: 823142 - RNA, 21 nt, Human
cagccuggauugucaacacag

SEQ ID NO: 823143 - RNA, 20 nt, Human
caggacagcccccacagcaa

SEQ ID NO: 823144 - RNA, 22 nt, Human
caggacagcccccacagcaaag

SEQ ID NO: 823145 - RNA, 19 nt, Human
cagggcagcccaugaacuc

SEQ ID NO: 823146 - RNA, 19 nt, Human
ccacugggccugggcugca

SEQ ID NO: 823147 - RNA, 18 nt, Human
cccaacgucagauucggc

SEQ ID NO: 823148 - RNA, 21 nt, Human
cccacaguguccaggacagcc

SEQ ID NO: 823149 - RNA, 19 nt, Human
ccuggauugucaacacagc

SEQ ID NO: 823150 - RNA, 22 nt, Human
ccugguaugggccagggcagcc

SEQ ID NO: 823151 - RNA, 23 nt, Human
cgcaagauaugcuagacauggcc

SEQ ID NO: 823152 - RNA, 22 nt, Human
cgcuaaacaucccacagugucc

SEQ ID NO: 823153 - RNA, 26 nt, Human
cgucccgccucagugcuggcccgagc

SEQ ID NO: 823154 - RNA, 23 nt, Human
cucaccuuaaagaaacauucuug

SEQ ID NO: 823155 - RNA, 27 nt, Human
cuccucacucccuggcacacagcuuca

SEQ ID NO: 823156 - RNA, 23 nt, Human
cugaaccccaggaucugucccuu

SEQ ID NO: 823157 - RNA, 23 nt, Human
cugggugaggcccucgucccgcc

SEQ ID NO: 823158 - RNA, 20 nt, Human
cuuccuagcugcgacucugg

SEQ ID NO: 823159 - RNA, 24 nt, Human
gaaaaacccugaccaccacaggcc

SEQ ID NO: 823160 - RNA, 22 nt, Human
gacucugggguugggacaaggg

SEQ ID NO: 823161 - RNA, 19 nt, Human
gagccagggccgcagcccc

SEQ ID NO: 823162 - RNA, 21 nt, Human
gagcugccgagccagggccgc

SEQ ID NO: 823163 - RNA, 18 nt, Human
gagguucugggugaggcc

SEQ ID NO: 823164 - RNA, 19 nt, Human
gauuggaggcaggcaggca

SEQ ID NO: 823165 - RNA, 18 nt, Human
gcagggaagggcugcugg

SEQ ID NO: 823166 - RNA, 22 nt, Human
gccacaguugaaaaacccugac

SEQ ID NO: 823167 - RNA, 20 nt, Human
gcccccacugggccugggcu

SEQ ID NO: 823168 - RNA, 18 nt, Human
gcccugagccuucgucuc

SEQ ID NO: 823169 - RNA, 18 nt, Human
gccggcugcucccggggc

SEQ ID NO: 823170 - RNA, 20 nt, Human
ggccugauccucuggccccc

SEQ ID NO: 823171 - RNA, 18 nt, Human
gggaagggcugcuggagc

SEQ ID NO: 823172 - RNA, 21 nt, Human
gguggagaggagcagugagga

SEQ ID NO: 823173 - RNA, 22 nt, Human
gucuccuugcucugauuucgca

SEQ ID NO: 823174 - RNA, 23 nt, Human
guggaccaaucacccaacgucag

SEQ ID NO: 823175 - RNA, 28 nt, Human
uaaagaaacauucuugaaaaaucuguga

SEQ ID NO: 823176 - RNA, 23 nt, Human
uaacaacuggugacugaacccca

SEQ ID NO: 823177 - RNA, 18 nt, Human
uaccugcucacuguccuc

SEQ ID NO: 823178 - RNA, 22 nt, Human
uaggcagauggcacucaaccag

SEQ ID NO: 823179 - RNA, 18 nt, Human
uauggauacacuuucccc

SEQ ID NO: 823180 - RNA, 18 nt, Human
uauguggcaaugugugaa

SEQ ID NO: 823181 - RNA, 23 nt, Human
uauguggcaaugugugaaggcau

SEQ ID NO: 823182 - RNA, 25 nt, Human
ucccgccucagugcuggcccgagcu

SEQ ID NO: 823183 - RNA, 24 nt, Human
ucccggggccugauccucuggccc

SEQ ID NO: 823184 - RNA, 21 nt, Human
uccucauuccuaaggucccac

SEQ ID NO: 823185 - RNA, 23 nt, Human
ucgcauccuccuagcccaaggcc

SEQ ID NO: 823186 - RNA, 23 nt, Human
ucucuccuaaacaaacgcaagau

SEQ ID NO: 823187 - RNA, 21 nt, Human
ucugccggcugcucccggggc

SEQ ID NO: 823188 - RNA, 20 nt, Human
ugacaggaagcagaaguuau

SEQ ID NO: 823189 - RNA, 24 nt, Human
ugacugaaccccaggaucuguccc

SEQ ID NO: 823190 - RNA, 18 nt, Human
ugaggcccugagccuucg

SEQ ID NO: 823191 - RNA, 18 nt, Human
ugaguugacaggaagcag

SEQ ID NO: 823192 - RNA, 20 nt, Human
ugaguugacaggaagcagaa

SEQ ID NO: 823193 - RNA, 20 nt, Human
ugauugcuguuaaaauucug

SEQ ID NO: 823194 - RNA, 21 nt, Human
ugccugguaugggccagggca

SEQ ID NO: 823195 - RNA, 18 nt, Human
ugcuggaggccaaggcug

SEQ ID NO: 823196 - RNA, 20 nt, Human
ugcuggaggccaaggcugcc

SEQ ID NO: 823197 - RNA, 21 nt, Human
uggcaccugugcguguauaug

SEQ ID NO: 823198 - RNA, 24 nt, Human
ugggaaaaaacugugggcuuccua

SEQ ID NO: 823199 - RNA, 22 nt, Human
ugggccucaccacgagguucug

SEQ ID NO: 823200 - RNA, 21 nt, Human
ugggccugggcugcacauggc

SEQ ID NO: 823201 - RNA, 22 nt, Human
ugggguucaccaaagcuggugg

SEQ ID NO: 823202 - RNA, 18 nt, Human
ugguucucacaacugggc

SEQ ID NO: 823203 - RNA, 19 nt, Human
uguccaggacagcccccac

SEQ ID NO: 823204 - RNA, 21 nt, Human
ugugaggcccugagccuucgu

SEQ ID NO: 823205 - RNA, 18 nt, Human
uguuuuuuugagacagag

SEQ ID NO: 823206 - RNA, 20 nt, Human
uuccaggugccccaguccuc

SEQ ID NO: 823207 - RNA, 19 nt, Human
uugccugcagaggggauaa

SEQ ID NO: 823208 - RNA, 19 nt, Human
uugggacaagggagucaca

SEQ ID NO: 823209 - RNA, 19 nt, Human
uuguuuuuuugagacagag

SEQ ID NO: 823210 - RNA, 24 nt, Human
uuucucacugauugcuguuaaaau

SEQ ID NO: 823211 - RNA, 22 nt, Human
aaggcaucagaaggggaggggg

SEQ ID NO: 823212 - RNA, 20 nt, Human
agccaugccugcagcaaaug

SEQ ID NO: 823213 - RNA, 24 nt, Human
agcugggggcuguccggggugguu

SEQ ID NO: 823214 - RNA, 18 nt, Human
aggagggggugguggggc

SEQ ID NO: 823215 - RNA, 23 nt, Human
cagcagggccuggggcccagcuu

SEQ ID NO: 823216 - RNA, 23 nt, Human
cccggacaggccgggccuugaag

SEQ ID NO: 823217 - RNA, 22 nt, Human
ccuggguaggguggcccaaucc

SEQ ID NO: 823218 - RNA, 20 nt, Human
cucuggccagcagggccugg

SEQ ID NO: 823219 - RNA, 18 nt, Human
cuuggcaucuguggcucu

SEQ ID NO: 823220 - RNA, 19 nt, Human
gaaucagagcugggggcug

SEQ ID NO: 823221 - RNA, 19 nt, Human
gccugcagcaaauguggga

SEQ ID NO: 823222 - RNA, 20 nt, Human
ggagauccuggguagggugg

SEQ ID NO: 823223 - RNA, 19 nt, Human
ggcagagaaagcccaucuc

SEQ ID NO: 823224 - RNA, 21 nt, Human
ggcaggagacagccaugccug

SEQ ID NO: 823225 - RNA, 21 nt, Human
gggcugcggcagggaccccgg

SEQ ID NO: 823226 - RNA, 18 nt, Human
ggggagggggcugcggca

SEQ ID NO: 823227 - RNA, 22 nt, Human
ggguaggagggggugguggggc

SEQ ID NO: 823228 - RNA, 20 nt, Human
gguaggguggcccaaucccu

SEQ ID NO: 823229 - RNA, 22 nt, Human
guccauagucaagcucccagga

SEQ ID NO: 823230 - RNA, 25 nt, Human
uaaaaaaaaaggagacagucucugu

SEQ ID NO: 823231 - RNA, 22 nt, Human
uagaaaaggaaacagaagucag

SEQ ID NO: 823232 - RNA, 24 nt, Human
ucaaaguuaaaaaaaaaggagacc

SEQ ID NO: 823233 - RNA, 22 nt, Human
uccauagucaagcucccagagc

SEQ ID NO: 823234 - RNA, 18 nt, Human
uccccuucuacugucccc

SEQ ID NO: 823235 - RNA, 23 nt, Human
ucuacuguccccaggguggagau

SEQ ID NO: 823236 - RNA, 20 nt, Human
uggaaugguggcccggacag

SEQ ID NO: 823237 - RNA, 20 nt, Human
uggcucuggccagcagggcc

SEQ ID NO: 823238 - RNA, 22 nt, Human
ugucaaaguuaaaaaaaaagga

SEQ ID NO: 823239 - RNA, 19 nt, Human
uguggaaugguggcccgga

SEQ ID NO: 823240 - RNA, 20 nt, Human
aaaaaacauauucccaauaa

SEQ ID NO: 823241 - RNA, 19 nt, Human
aaaaaccuugccacauuca

SEQ ID NO: 823242 - RNA, 20 nt, Human
aaaagaaaucaaacucaucc

SEQ ID NO: 823243 - RNA, 24 nt, Human
aaaaugcugggauuacaggccuga

SEQ ID NO: 823244 - RNA, 18 nt, Human
aaacucaagucaaugcug

SEQ ID NO: 823245 - RNA, 24 nt, Human
aaagugcugggauuacaggcguga

SEQ ID NO: 823246 - RNA, 21 nt, Human
aaccaagcagggaaaauggaa

SEQ ID NO: 823247 - RNA, 24 nt, Human
aaccuuuuuauaaagcaucaauga

SEQ ID NO: 823248 - RNA, 23 nt, Human
aagaaaauuuuaacacacuucca

SEQ ID NO: 823249 - RNA, 18 nt, Human
aagaaacaaaaaacaggc

SEQ ID NO: 823250 - RNA, 24 nt, Human
aagaucccuuguccuagaaaacug

SEQ ID NO: 823251 - RNA, 21 nt, Human
aagcacacaccacgauggcaa

SEQ ID NO: 823252 - RNA, 19 nt, Human
aagcagggaaaauggaaug

SEQ ID NO: 823253 - RNA, 24 nt, Human
aaggucucucuuuauuauggauuc

SEQ ID NO: 823254 - RNA, 19 nt, Human
aagugcugggauuacaggc

SEQ ID NO: 823255 - RNA, 19 nt, Human
aagugcugggauuacaggc

SEQ ID NO: 823256 - RNA, 20 nt, Human
aaucaaacucauccaaauca

SEQ ID NO: 823257 - RNA, 24 nt, Human
aaugcugggauuacaggccugagc

SEQ ID NO: 823258 - RNA, 23 nt, Human
acaauacaguaucagcaccaaaa

SEQ ID NO: 823259 - RNA, 19 nt, Human
acaaugguuguagcauuac

SEQ ID NO: 823260 - RNA, 24 nt, Human
acccaugcuggagugcaguggcau

SEQ ID NO: 823261 - RNA, 20 nt, Human
acguuucccaggcuggucuu

SEQ ID NO: 823262 - RNA, 19 nt, Human
acuuguaagguuucucccc

SEQ ID NO: 823263 - RNA, 24 nt, Human
agaaugugaaguaaaggcuuugcc

SEQ ID NO: 823264 - RNA, 22 nt, Human
agacagcauaaauaugugugcc

SEQ ID NO: 823265 - RNA, 23 nt, Human
agacguggugacaaucauuacau

SEQ ID NO: 823266 - RNA, 24 nt, Human
agagauuccccugccucagccucc

SEQ ID NO: 823267 - RNA, 23 nt, Human
aggcugggaaaaguggcucaggu

SEQ ID NO: 823268 - RNA, 19 nt, Human
aguagcugggauuacaggc

SEQ ID NO: 823269 - RNA, 21 nt, Human
agugcaguggcaugaucauag

SEQ ID NO: 823270 - RNA, 23 nt, Human
agugcaguggcaugaucauagcu

SEQ ID NO: 823271 - RNA, 24 nt, Human
agugcaguggcaugaucauagcuc

SEQ ID NO: 823272 - RNA, 18 nt, Human
agugcugggauuacaggc

SEQ ID NO: 823273 - RNA, 24 nt, Human
auagcucacugcaaucuugaccuc

SEQ ID NO: 823274 - RNA, 21 nt, Human
aucacugucaacauugucuug

SEQ ID NO: 823275 - RNA, 21 nt, Human
auggagaaaaagcguuccaca

SEQ ID NO: 823276 - RNA, 24 nt, Human
augguguuucaccauguuaaccag

SEQ ID NO: 823277 - RNA, 21 nt, Human
auuacaggcgcaugccaccau

SEQ ID NO: 823278 - RNA, 22 nt, Human
caaaagaaaucaaacucaucca

SEQ ID NO: 823279 - RNA, 24 nt, Human
caagaaugcucucaccccuucuau

SEQ ID NO: 823280 - RNA, 23 nt, Human
caaucaauacugccuguccuagc

SEQ ID NO: 823281 - RNA, 22 nt, Human
cacaccacgauggcaaagaaug

SEQ ID NO: 823282 - RNA, 23 nt, Human
caccaaaaauuaguugaauuucc

SEQ ID NO: 823283 - RNA, 24 nt, Human
caccaugcccagcuaauuuuugua

SEQ ID NO: 823284 - RNA, 24 nt, Human
caccaugcugagcuaauuuuugua

SEQ ID NO: 823285 - RNA, 24 nt, Human
caccauguuaaccaggcuguucuc

SEQ ID NO: 823286 - RNA, 24 nt, Human
cacguuuauuacugaacacagcca

SEQ ID NO: 823287 - RNA, 20 nt, Human
cacguuucccaggcuggucu

SEQ ID NO: 823288 - RNA, 24 nt, Human
cacguuucccaggcuggucuugaa

SEQ ID NO: 823289 - RNA, 21 nt, Human
cacuaaaggcuuugacacacu

SEQ ID NO: 823290 - RNA, 21 nt, Human
cacugcaaucuugaccuccca

SEQ ID NO: 823291 - RNA, 22 nt, Human
cacugcaaucuugaccucccag

SEQ ID NO: 823292 - RNA, 18 nt, Human
cagagaaaaaacauauuc

SEQ ID NO: 823293 - RNA, 20 nt, Human
cagcaugaacaagauuaauu

SEQ ID NO: 823294 - RNA, 20 nt, Human
cagccuccugaguagcuggg

SEQ ID NO: 823295 - RNA, 20 nt, Human
cagcuugguucuucuccaau

SEQ ID NO: 823296 - RNA, 22 nt, Human
caggcaugugccaccaugccca

SEQ ID NO: 823297 - RNA, 21 nt, Human
caggcugaucucaaacuccug

SEQ ID NO: 823298 - RNA, 24 nt, Human
cagugugaacucugggauguugug

SEQ ID NO: 823299 - RNA, 19 nt, Human
caugcaagcuuugcuuugc

SEQ ID NO: 823300 - RNA, 19 nt, Human
caugccacacagcccaguc

SEQ ID NO: 823301 - RNA, 25 nt, Human
cauguuaaccaggcuguucucuaaa

SEQ ID NO: 823302 - RNA, 18 nt, Human
cauuacugaagacguggu

SEQ ID NO: 823303 - RNA, 20 nt, Human
ccaaagugcugggauuacag

SEQ ID NO: 823304 - RNA, 22 nt, Human
ccaaagugcugggauuacaggc

SEQ ID NO: 823305 - RNA, 22 nt, Human
ccaaagugcugggauuacaggc

SEQ ID NO: 823306 - RNA, 22 nt, Human
ccaaagugcugggauuacaggc

SEQ ID NO: 823307 - RNA, 24 nt, Human
ccaaagugcugggauuacaggcgu

SEQ ID NO: 823308 - RNA, 18 nt, Human
ccacgaucaucacacuug

SEQ ID NO: 823309 - RNA, 20 nt, Human
ccaugcuggagugcaguggc

SEQ ID NO: 823310 - RNA, 20 nt, Human
cccagguucaugccauccuc

SEQ ID NO: 823311 - RNA, 20 nt, Human
cccaugcuggagugcagugg

SEQ ID NO: 823312 - RNA, 23 nt, Human
ccuacacuacggauugccugaug

SEQ ID NO: 823313 - RNA, 19 nt, Human
ccuccaccuccuggguuca

SEQ ID NO: 823314 - RNA, 22 nt, Human
ccuccuggguucaagagauucc

SEQ ID NO: 823315 - RNA, 18 nt, Human
ccucuuaacauaaacacc

SEQ ID NO: 823316 - RNA, 24 nt, Human
ccugaccucaagugauuuacccac

SEQ ID NO: 823317 - RNA, 23 nt, Human
ccugaguagcugggauuacaggc

SEQ ID NO: 823318 - RNA, 23 nt, Human
ccugaguagcugggauuacaggc

SEQ ID NO: 823319 - RNA, 24 nt, Human
ccugccucagccuccugaguagcu

SEQ ID NO: 823320 - RNA, 23 nt, Human
ccuggguucaagagauuccccug

SEQ ID NO: 823321 - RNA, 20 nt, Human
cucaagugauuuacccaccu

SEQ ID NO: 823322 - RNA, 24 nt, Human
cucaagugauuuacccaccuuggc

SEQ ID NO: 823323 - RNA, 25 nt, Human
cucaagugauuuacccaccuuggcc

SEQ ID NO: 823324 - RNA, 27 nt, Human
cucaccccuucuauucaaucaauacug

SEQ ID NO: 823325 - RNA, 24 nt, Human
cucacugcaaucuugaccucccag

SEQ ID NO: 823326 - RNA, 23 nt, Human
cucagccuccugaguagcuggga

SEQ ID NO: 823327 - RNA, 21 nt, Human
cucagccucugaaaaugcugg

SEQ ID NO: 823328 - RNA, 24 nt, Human
cucccugcacagacuucacaauaa

SEQ ID NO: 823329 - RNA, 18 nt, Human
cuccugaccucaagugau

SEQ ID NO: 823330 - RNA, 20 nt, Human
cugaagacguugugagaauc

SEQ ID NO: 823331 - RNA, 21 nt, Human
cugaauugugauggaagguuu

SEQ ID NO: 823332 - RNA, 22 nt, Human
cugaguagcugggauuacaggc

SEQ ID NO: 823333 - RNA, 24 nt, Human
cugcaaucuugaccucccagguuc

SEQ ID NO: 823334 - RNA, 20 nt, Human
cuugacugaagaccuugcca

SEQ ID NO: 823335 - RNA, 19 nt, Human
cuugcaagcguucucucca

SEQ ID NO: 823336 - RNA, 19 nt, Human
cuuguaagguuucucccca

SEQ ID NO: 823337 - RNA, 19 nt, Human
cuuguaagguuucucucca

SEQ ID NO: 823338 - RNA, 19 nt, Human
cuuguaagguuucucucca

SEQ ID NO: 823339 - RNA, 19 nt, Human
cuuguaugguuucucucca

SEQ ID NO: 823340 - RNA, 19 nt, Human
cuuuugggcauugucccca

SEQ ID NO: 823341 - RNA, 21 nt, Human
gaaaaaacauauucccaauaa

SEQ ID NO: 823342 - RNA, 20 nt, Human
gaaaucaacaaaaauugauc

SEQ ID NO: 823343 - RNA, 24 nt, Human
gaccucaagugauuuacccaccuu

SEQ ID NO: 823344 - RNA, 24 nt, Human
gagauuccccugccucagccuccu

SEQ ID NO: 823345 - RNA, 26 nt, Human
gaguagcugggauuacaggcgcaugc

SEQ ID NO: 823346 - RNA, 23 nt, Human
gauggcaaagaauggaagagaag

SEQ ID NO: 823347 - RNA, 18 nt, Human
gauuacaggccugagcca

SEQ ID NO: 823348 - RNA, 19 nt, Human
gauuacaggccugagccac

SEQ ID NO: 823349 - RNA, 23 nt, Human
gauuacaggccugagccacugca

SEQ ID NO: 823350 - RNA, 18 nt, Human
gauuacaggcgcaugcca

SEQ ID NO: 823351 - RNA, 24 nt, Human
gauuacaggcgcaugccaccaugc

SEQ ID NO: 823352 - RNA, 18 nt, Human
gauuacaggcgugagcca

SEQ ID NO: 823353 - RNA, 21 nt, Human
gauuacaggcgugagccaugc

SEQ ID NO: 823354 - RNA, 21 nt, Human
gauuacaggcgugagccaugc

SEQ ID NO: 823355 - RNA, 18 nt, Human
gauuuccccacguuuccc

SEQ ID NO: 823356 - RNA, 22 nt, Human
gcauccuccaccuccuggguuc

SEQ ID NO: 823357 - RNA, 22 nt, Human
gcccagcuaauuuuuguauuuu

SEQ ID NO: 823358 - RNA, 22 nt, Human
gcgcugacugccuaugaaaggu

SEQ ID NO: 823359 - RNA, 22 nt, Human
gcucauguggcccaccugucuc

SEQ ID NO: 823360 - RNA, 24 nt, Human
gcucuuguugcucaggcuagagug

SEQ ID NO: 823361 - RNA, 23 nt, Human
gcugaucucaaacuccugaccuc

SEQ ID NO: 823362 - RNA, 19 nt, Human
gcuggagugcaguggcaug

SEQ ID NO: 823363 - RNA, 18 nt, Human
ggucuugaauaccugggc

SEQ ID NO: 823364 - RNA, 22 nt, Human
gguguuucaccauguuaaccag

SEQ ID NO: 823365 - RNA, 18 nt, Human
guagcugggauuacaggc

SEQ ID NO: 823366 - RNA, 24 nt, Human
gugauuuacccaccuuggccuacc

SEQ ID NO: 823367 - RNA, 22 nt, Human
guggcccaccugucucagccuc

SEQ ID NO: 823368 - RNA, 18 nt, Human
uaaauaagcgcugacugc

SEQ ID NO: 823369 - RNA, 22 nt, Human
uaaccaggcuguucucuaaauu

SEQ ID NO: 823370 - RNA, 18 nt, Human
uaacugagacggcaggca

SEQ ID NO: 823371 - RNA, 18 nt, Human
uaagaaauacuuaggaau

SEQ ID NO: 823372 - RNA, 24 nt, Human
uaagucaacucaaacucaagucaa

SEQ ID NO: 823373 - RNA, 24 nt, Human
uaauuuuuguauuuuuacuagaga

SEQ ID NO: 823374 - RNA, 22 nt, Human
uaauuuuuguauuuuuuguaga

SEQ ID NO: 823375 - RNA, 21 nt, Human
uacacuacggauugccugaug

SEQ ID NO: 823376 - RNA, 20 nt, Human
uacaggccugagccacugca

SEQ ID NO: 823377 - RNA, 21 nt, Human
uaccucaacaauagaaagaac

SEQ ID NO: 823378 - RNA, 18 nt, Human
uaccugggcucauguggc

SEQ ID NO: 823379 - RNA, 24 nt, Human
uacuagagaugguguuucaccaug

SEQ ID NO: 823380 - RNA, 24 nt, Human
uacuggaacuaacaaacauauuca

SEQ ID NO: 823381 - RNA, 20 nt, Human
uagaaaaucacagacucaac

SEQ ID NO: 823382 - RNA, 22 nt, Human
uagagaugguguuucaccaugu

SEQ ID NO: 823383 - RNA, 23 nt, Human
uagccagagcaauuaaauagcaa

SEQ ID NO: 823384 - RNA, 24 nt, Human
uagcucacugcaaucuugaccucc

SEQ ID NO: 823385 - RNA, 21 nt, Human
uauaacaaauuuacagagaaa

SEQ ID NO: 823386 - RNA, 21 nt, Human
uauauaccacuagaacagaau

SEQ ID NO: 823387 - RNA, 23 nt, Human
uauauaccacuagaacagaauga

SEQ ID NO: 823388 - RNA, 21 nt, Human
uaugaugacgugcaacgugug

SEQ ID NO: 823389 - RNA, 23 nt, Human
uauucccaauaaaacauguccaa

SEQ ID NO: 823390 - RNA, 24 nt, Human
uauuuuggugcaaaaauugugaaa

SEQ ID NO: 823391 - RNA, 19 nt, Human
ucaacucaaacucaaguca

SEQ ID NO: 823392 - RNA, 22 nt, Human
ucaaugcugaacugacucuaau

SEQ ID NO: 823393 - RNA, 21 nt, Human
ucacaugaugcaagaaugcuc

SEQ ID NO: 823394 - RNA, 18 nt, Human
ucacauucuucacauuuc

SEQ ID NO: 823395 - RNA, 19 nt, Human
ucacugcaaucuugaccuc

SEQ ID NO: 823396 - RNA, 23 nt, Human
ucacugcaaucuugaccucccag

SEQ ID NO: 823397 - RNA, 24 nt, Human
ucacugcaaucuugaccucccagg

SEQ ID NO: 823398 - RNA, 24 nt, Human
ucacugcauccuccaccuccuggg

SEQ ID NO: 823399 - RNA, 27 nt, Human
ucacugcauccuccaccuccuggguuc

SEQ ID NO: 823400 - RNA, 20 nt, Human
ucagccuccugaguagcugg

SEQ ID NO: 823401 - RNA, 21 nt, Human
ucaucauagaaauccuaaaca

SEQ ID NO: 823402 - RNA, 20 nt, Human
uccacaggggagugggaugg

SEQ ID NO: 823403 - RNA, 24 nt, Human
uccaucacccaugcuggagugcag

SEQ ID NO: 823404 - RNA, 18 nt, Human
ucccagguucaugccauc

SEQ ID NO: 823405 - RNA, 20 nt, Human
ucccagguucaugccauccu

SEQ ID NO: 823406 - RNA, 24 nt, Human
uccccugccucagccuccugagua

SEQ ID NO: 823407 - RNA, 24 nt, Human
uccgaaagccuugucaaaaacucu

SEQ ID NO: 823408 - RNA, 24 nt, Human
uccugaguagcugggauuacaggc

SEQ ID NO: 823409 - RNA, 19 nt, Human
uccuggguucaagagauuc

SEQ ID NO: 823410 - RNA, 24 nt, Human
uccuggguucaagagauuccccug

SEQ ID NO: 823411 - RNA, 21 nt, Human
ucucuccaguaugaguuaucc

SEQ ID NO: 823412 - RNA, 24 nt, Human
ucucucuccaucacccaugcugga

SEQ ID NO: 823413 - RNA, 22 nt, Human
ucucuuuuuauacucaugucuu

SEQ ID NO: 823414 - RNA, 24 nt, Human
ucugaaaaugcugggauuacaggc

SEQ ID NO: 823415 - RNA, 19 nt, Human
ucugauauucugcaaggag

SEQ ID NO: 823416 - RNA, 20 nt, Human
ucugauauucugcaaggagu

SEQ ID NO: 823417 - RNA, 21 nt, Human
ucugggaugcaaggaugguuc

SEQ ID NO: 823418 - RNA, 23 nt, Human
ucuguuguccaggcugaucucaa

SEQ ID NO: 823419 - RNA, 24 nt, Human
ucuguuguccaggcugaucucaaa

SEQ ID NO: 823420 - RNA, 23 nt, Human
ugacauuguaagauuucucucca

SEQ ID NO: 823421 - RNA, 20 nt, Human
ugaccucaagugauuuaccc

SEQ ID NO: 823422 - RNA, 20 nt, Human
ugacuaaaggucuugccaca

SEQ ID NO: 823423 - RNA, 23 nt, Human
ugacugaacaucuuaccacacuc

SEQ ID NO: 823424 - RNA, 21 nt, Human
ugagaagauguggcaagaagc

SEQ ID NO: 823425 - RNA, 21 nt, Human
ugagacggcaggcaugugcca

SEQ ID NO: 823426 - RNA, 23 nt, Human
ugaugcaagaaugcucucacccc

SEQ ID NO: 823427 - RNA, 22 nt, Human
ugauguggaaggucugccugcu

SEQ ID NO: 823428 - RNA, 19 nt, Human
ugccacacagcccaguccu

SEQ ID NO: 823429 - RNA, 22 nt, Human
ugccaucucaguucacugcauc

SEQ ID NO: 823430 - RNA, 24 nt, Human
ugccucagccuccugaguagcugg

SEQ ID NO: 823431 - RNA, 22 nt, Human
ugccugauggugaauaaguguu

SEQ ID NO: 823432 - RNA, 21 nt, Human
ugcgacuguaaacuuugucac

SEQ ID NO: 823433 - RNA, 24 nt, Human
ugcugggauuacaggcgugagcca

SEQ ID NO: 823434 - RNA, 19 nt, Human
uggagugcaguggcaugau

SEQ ID NO: 823435 - RNA, 19 nt, Human
uggagugcaguggcaugau

SEQ ID NO: 823436 - RNA, 21 nt, Human
uggagugcaguggcaugauca

SEQ ID NO: 823437 - RNA, 23 nt, Human
uggcaagaagcagagucaagcac

SEQ ID NO: 823438 - RNA, 18 nt, Human
uggcaugaucauagcuca

SEQ ID NO: 823439 - RNA, 24 nt, Human
uggcaugaucauagcucacugcaa

SEQ ID NO: 823440 - RNA, 23 nt, Human
uggcccaccugucucagccucug

SEQ ID NO: 823441 - RNA, 19 nt, Human
ugggauuacaggccugagc

SEQ ID NO: 823442 - RNA, 21 nt, Human
ugggauuacaggccugagcca

SEQ ID NO: 823443 - RNA, 22 nt, Human
ugggauuacaggccugagccac

SEQ ID NO: 823444 - RNA, 22 nt, Human
ugggauuacaggccugagccac

SEQ ID NO: 823445 - RNA, 24 nt, Human
ugggauuacaggccugagccacug

SEQ ID NO: 823446 - RNA, 24 nt, Human
ugggauuacaggccugagccacug

SEQ ID NO: 823447 - RNA, 21 nt, Human
ugggauuacaggcgcaugcca

SEQ ID NO: 823448 - RNA, 22 nt, Human
ugggauuacaggcgcaugccac

SEQ ID NO: 823449 - RNA, 24 nt, Human
ugggauuacaggcgcaugccacca

SEQ ID NO: 823450 - RNA, 25 nt, Human
ugggauuacaggcgcaugccaccau

SEQ ID NO: 823451 - RNA, 18 nt, Human
ugggauuacaggcgugag

SEQ ID NO: 823452 - RNA, 19 nt, Human
ugggauuacaggcgugagc

SEQ ID NO: 823453 - RNA, 21 nt, Human
ugggauuacaggcgugagcca

SEQ ID NO: 823454 - RNA, 21 nt, Human
ugggauuacaggcgugagcca

SEQ ID NO: 823455 - RNA, 22 nt, Human
ugggauuacaggcgugagccau

SEQ ID NO: 823456 - RNA, 23 nt, Human
ugggauuacaggcgugagccaug

SEQ ID NO: 823457 - RNA, 25 nt, Human
ugggauuacaggcgugagccaugcc

SEQ ID NO: 823458 - RNA, 26 nt, Human
ugggauuacaggcgugagccaugcca

SEQ ID NO: 823459 - RNA, 20 nt, Human
ugggcauuguccccauaacc

SEQ ID NO: 823460 - RNA, 21 nt, Human
ugggcauuguccccauaaccu

SEQ ID NO: 823461 - RNA, 24 nt, Human
ugggcucauguggcccaccugucu

SEQ ID NO: 823462 - RNA, 21 nt, Human
ugguaaauaagcgcugacugc

SEQ ID NO: 823463 - RNA, 21 nt, Human
uggugaauaaguguugacugc

SEQ ID NO: 823464 - RNA, 24 nt, Human
ugguguuucaccauguuaaccagg

SEQ ID NO: 823465 - RNA, 19 nt, Human
uguaagguuucuccccagu

SEQ ID NO: 823466 - RNA, 22 nt, Human
ugucaaaaacucuuacauuuuu

SEQ ID NO: 823467 - RNA, 22 nt, Human
ugucacauucuucacauucgua

SEQ ID NO: 823468 - RNA, 25 nt, Human
uguccuagaaaacuguauucaagag

SEQ ID NO: 823469 - RNA, 21 nt, Human
ugugagguuucucuccuguau

SEQ ID NO: 823470 - RNA, 20 nt, Human
uguggcaagaagcagaguca

SEQ ID NO: 823471 - RNA, 24 nt, Human
uguggcccaccugucucagccucu

SEQ ID NO: 823472 - RNA, 19 nt, Human
uguugcucaggcuagagug

SEQ ID NO: 823473 - RNA, 22 nt, Human
uguuuguagacgacaugaccuu

SEQ ID NO: 823474 - RNA, 22 nt, Human
uuaaaaacauauauagagacac

SEQ ID NO: 823475 - RNA, 18 nt, Human
uuaagucaacucaaacuc

SEQ ID NO: 823476 - RNA, 24 nt, Human
uuacuagagaugguguuucaccau

SEQ ID NO: 823477 - RNA, 24 nt, Human
uuauagacccagcuugguucuucu

SEQ ID NO: 823478 - RNA, 22 nt, Human
uuauauaccacuagaacagaau

SEQ ID NO: 823479 - RNA, 23 nt, Human
uucaagagauuccccugccucag

SEQ ID NO: 823480 - RNA, 23 nt, Human
uucacaauaacugagacggcagg

SEQ ID NO: 823481 - RNA, 19 nt, Human
uuccccugccucagccucc

SEQ ID NO: 823482 - RNA, 18 nt, Human
uugcucaggcuagagugu

SEQ ID NO: 823483 - RNA, 24 nt, Human
uugcucaggcuagaguguaauguu

SEQ ID NO: 823484 - RNA, 21 nt, Human
uuguagcauuacugaagacgu

SEQ ID NO: 823485 - RNA, 23 nt, Human
uuuacaaacuguuuauuucuuuu

SEQ ID NO: 823486 - RNA, 19 nt, Human
uuucauuauuccucuaccc

SEQ ID NO: 823487 - RNA, 19 nt, Human
uuucccaggcuggucuuga

SEQ ID NO: 823488 - RNA, 24 nt, Human
uuugcacaauacaguaucagcacc

SEQ ID NO: 823489 - RNA, 19 nt, Human
uuuguaagaucucucuuca

SEQ ID NO: 823490 - RNA, 19 nt, Human
uuuguaagguuucucucca

SEQ ID NO: 823491 - RNA, 20 nt, Human
uuuugcucuuguugcucagg

SEQ ID NO: 823492 - RNA, 23 nt, Human
uuuugcucuuguugcucaggcua

SEQ ID NO: 823493 - RNA, 20 nt, Human
uuuuguauuuuuacuagaga

SEQ ID NO: 823494 - RNA, 24 nt, Human
uuuuuacuagagaugguguuucac

SEQ ID NO: 823495 - RNA, 20 nt, Human
uuuuuguauuuuuacuagag

SEQ ID NO: 823496 - RNA, 18 nt, Human
uuuuuguauuuuuuguag

SEQ ID NO: 823497 - RNA, 23 nt, Human
uuuuuuaagacaguaucucucuc

SEQ ID NO: 823498 - RNA, 21 nt, Human
aagaggaggcggcggccagag

SEQ ID NO: 823499 - RNA, 21 nt, Human
accaggauguaggauggggcc

SEQ ID NO: 823500 - RNA, 21 nt, Human
acggacugaguugucuggaca

SEQ ID NO: 823501 - RNA, 19 nt, Human
agagccuccuccaagccac

SEQ ID NO: 823502 - RNA, 19 nt, Human
agccggccugccucggccu

SEQ ID NO: 823503 - RNA, 24 nt, Human
aggaugugcagggagcuggccucc

SEQ ID NO: 823504 - RNA, 20 nt, Human
aggccccggaucuucugcag

SEQ ID NO: 823505 - RNA, 18 nt, Human
agggagcuggccuccggg

SEQ ID NO: 823506 - RNA, 20 nt, Human
agggagcuggccuccgggga

SEQ ID NO: 823507 - RNA, 19 nt, Human
augcuggcgggagguggag

SEQ ID NO: 823508 - RNA, 24 nt, Human
cacaggccagcaucagggccgucc

SEQ ID NO: 823509 - RNA, 21 nt, Human
cacccacuccguaggccugca

SEQ ID NO: 823510 - RNA, 18 nt, Human
caccgccaccgcccccgc

SEQ ID NO: 823511 - RNA, 21 nt, Human
caccgcccccgcuggccccgc

SEQ ID NO: 823512 - RNA, 21 nt, Human
caccucggccccuggaagguc

SEQ ID NO: 823513 - RNA, 19 nt, Human
cacgcucucgcagccggcc

SEQ ID NO: 823514 - RNA, 26 nt, Human
cacuccguaggccugcauuucugcuu

SEQ ID NO: 823515 - RNA, 18 nt, Human
cagcagggacagccggcu

SEQ ID NO: 823516 - RNA, 22 nt, Human
cagcaucagggccguccugccu

SEQ ID NO: 823517 - RNA, 18 nt, Human
cagcgcaucggugaugcc

SEQ ID NO: 823518 - RNA, 20 nt, Human
cagcucacccuccucauccu

SEQ ID NO: 823519 - RNA, 21 nt, Human
cagcucacccuccucauccug

SEQ ID NO: 823520 - RNA, 23 nt, Human
cagcucccguggccucggcuccc

SEQ ID NO: 823521 - RNA, 20 nt, Human
cagcuccgcagcugccuccc

SEQ ID NO: 823522 - RNA, 21 nt, Human
cagcugccucccgcucccgcu

SEQ ID NO: 823523 - RNA, 18 nt, Human
caggaccuccacuguuuc

SEQ ID NO: 823524 - RNA, 24 nt, Human
caggaugaguuugucccccgccag

SEQ ID NO: 823525 - RNA, 24 nt, Human
caggccccggaucuucugcaggag

SEQ ID NO: 823526 - RNA, 21 nt, Human
caggccgaggccgccuccagc

SEQ ID NO: 823527 - RNA, 23 nt, Human
ccacccccauggccuccacuccc

SEQ ID NO: 823528 - RNA, 24 nt, Human
ccagcaaccucacucuccccacag

SEQ ID NO: 823529 - RNA, 20 nt, Human
ccagccgcgccuccucccgc

SEQ ID NO: 823530 - RNA, 20 nt, Human
ccaggcaggccgaggccgcc

SEQ ID NO: 823531 - RNA, 21 nt, Human
ccagggccgccuccagcuccg

SEQ ID NO: 823532 - RNA, 21 nt, Human
cccacaggcugcccccucuuc

SEQ ID NO: 823533 - RNA, 18 nt, Human
ccccacaggcugcccccu

SEQ ID NO: 823534 - RNA, 19 nt, Human
ccccgcugcccucggccuc

SEQ ID NO: 823535 - RNA, 21 nt, Human
cccgcagaaccuccagcuccc

SEQ ID NO: 823536 - RNA, 23 nt, Human
cccgcagaaccuccagcucccgg

SEQ ID NO: 823537 - RNA, 27 nt, Human
cccgcagcuguguggugucaccgccac

SEQ ID NO: 823538 - RNA, 20 nt, Human
ccgcagcugccucccgcucc

SEQ ID NO: 823539 - RNA, 21 nt, Human
ccgccaccgcccccgcuggcc

SEQ ID NO: 823540 - RNA, 23 nt, Human
ccgccaccgcccccgcuggcccc

SEQ ID NO: 823541 - RNA, 19 nt, Human
ccgcgccuccucccgcugg

SEQ ID NO: 823542 - RNA, 20 nt, Human
ccgcgccuccucccgcuggg

SEQ ID NO: 823543 - RNA, 24 nt, Human
ccgcucccgcugccggagagccuc

SEQ ID NO: 823544 - RNA, 21 nt, Human
ccgcugcccucggccucgcgg

SEQ ID NO: 823545 - RNA, 20 nt, Human
ccgcugggccagcucggccc

SEQ ID NO: 823546 - RNA, 28 nt, Human
ccguggccucggcucccguggccucagc

SEQ ID NO: 823547 - RNA, 20 nt, Human
ccguggcuccagcaaccuca

SEQ ID NO: 823548 - RNA, 21 nt, Human
ccuccaagccacggauccugg

SEQ ID NO: 823549 - RNA, 24 nt, Human
ccuccaagccacggauccuggucu

SEQ ID NO: 823550 - RNA, 19 nt, Human
ccucccgcugggccagcuc

SEQ ID NO: 823551 - RNA, 23 nt, Human
ccucccgggccugcuccagggcc

SEQ ID NO: 823552 - RNA, 19 nt, Human
ccucccgucccaggcucuc

SEQ ID NO: 823553 - RNA, 22 nt, Human
ccuccggggacuccugcugccu

SEQ ID NO: 823554 - RNA, 21 nt, Human
ccuccuccaagccacggaucc

SEQ ID NO: 823555 - RNA, 22 nt, Human
ccucucgugucuccugcugccu

SEQ ID NO: 823556 - RNA, 19 nt, Human
ccugcagggugguuacguc

SEQ ID NO: 823557 - RNA, 20 nt, Human
ccugcauuucugcuuccucu

SEQ ID NO: 823558 - RNA, 19 nt, Human
ccugccucggccuccgcgg

SEQ ID NO: 823559 - RNA, 21 nt, Human
ccuugugcuguuccaggcccc

SEQ ID NO: 823560 - RNA, 21 nt, Human
cgcagaaccuccagcucccgg

SEQ ID NO: 823561 - RNA, 25 nt, Human
cgccagcagccggcuggcccgagcc

SEQ ID NO: 823562 - RNA, 21 nt, Human
cgcucccgcugccggagagcc

SEQ ID NO: 823563 - RNA, 23 nt, Human
cgcuggguggggaggggcgcugg

SEQ ID NO: 823564 - RNA, 24 nt, Human
cggcccgcaggccccgcgccuccu

SEQ ID NO: 823565 - RNA, 22 nt, Human
cggccucgcggacacgcucucg

SEQ ID NO: 823566 - RNA, 19 nt, Human
cggcggccagagggucugg

SEQ ID NO: 823567 - RNA, 21 nt, Human
cgggagguggaggcgccuucc

SEQ ID NO: 823568 - RNA, 24 nt, Human
cguccggggcgcggggcgcggggg

SEQ ID NO: 823569 - RNA, 24 nt, Human
cgugcgcugcugcucccccguggc

SEQ ID NO: 823570 - RNA, 23 nt, Human
cuaccccuggguucuccacaccu

SEQ ID NO: 823571 - RNA, 24 nt, Human
cuaguauucucccgcucguucucc

SEQ ID NO: 823572 - RNA, 22 nt, Human
cucaaaguucuccaggaucugg

SEQ ID NO: 823573 - RNA, 24 nt, Human
cucacaggccagcaucagggccgu

SEQ ID NO: 823574 - RNA, 21 nt, Human
cuccaccucccgucccaggcu

SEQ ID NO: 823575 - RNA, 24 nt, Human
cuccagcaaccucacucuccccac

SEQ ID NO: 823576 - RNA, 20 nt, Human
cuccagccgcgccuccuccc

SEQ ID NO: 823577 - RNA, 18 nt, Human
cucccgucccaggcucuc

SEQ ID NO: 823578 - RNA, 19 nt, Human
cucccguggccucggcucc

SEQ ID NO: 823579 - RNA, 23 nt, Human
cuccgcagcugccucccgcuccc

SEQ ID NO: 823580 - RNA, 20 nt, Human
cuccugcugccucagggccu

SEQ ID NO: 823581 - RNA, 24 nt, Human
cucgcacuuccccagggccgccuc

SEQ ID NO: 823582 - RNA, 20 nt, Human
cucggcucccguggccucag

SEQ ID NO: 823583 - RNA, 27 nt, Human
cugcaaacucuccaccucccgucccag

SEQ ID NO: 823584 - RNA, 21 nt, Human
cugcagccuccucaucuaugg

SEQ ID NO: 823585 - RNA, 23 nt, Human
cugcaggaggcggccccucuccu

SEQ ID NO: 823586 - RNA, 21 nt, Human
cuggguggggaggggcgcugg

SEQ ID NO: 823587 - RNA, 19 nt, Human
cugucuggugagcacagcc

SEQ ID NO: 823588 - RNA, 28 nt, Human
cugugaccuuggcuccuguggccucagc

SEQ ID NO: 823589 - RNA, 28 nt, Human
cuguggccucagcucccguggccucggc

SEQ ID NO: 823590 - RNA, 18 nt, Human
cuugcaccugucucucca

SEQ ID NO: 823591 - RNA, 20 nt, Human
gagcacagccaccuguuccu

SEQ ID NO: 823592 - RNA, 19 nt, Human
gagccuccuccaagccacg

SEQ ID NO: 823593 - RNA, 18 nt, Human
gagcuggccuccggggac

SEQ ID NO: 823594 - RNA, 21 nt, Human
gcaaacucuccaccucccguc

SEQ ID NO: 823595 - RNA, 20 nt, Human
gcaggaggcggccccucucc

SEQ ID NO: 823596 - RNA, 19 nt, Human
gcccuagagcccguggccu

SEQ ID NO: 823597 - RNA, 21 nt, Human
gccgcagccucacgaucuccu

SEQ ID NO: 823598 - RNA, 23 nt, Human
gccuccacccccauggccuccac

SEQ ID NO: 823599 - RNA, 23 nt, Human
gccucuaccccuggguucuccac

SEQ ID NO: 823600 - RNA, 22 nt, Human
gccugaaucauccucugugagg

SEQ ID NO: 823601 - RNA, 18 nt, Human
gcgccuccuccuccgcca

SEQ ID NO: 823602 - RNA, 20 nt, Human
ggagagccuccuccaagcca

SEQ ID NO: 823603 - RNA, 22 nt, Human
ggagguccucccgggccugcuc

SEQ ID NO: 823604 - RNA, 23 nt, Human
ggcucugcuugcccagcacccac

SEQ ID NO: 823605 - RNA, 20 nt, Human
gggcgcggggcgcggggggc

SEQ ID NO: 823606 - RNA, 21 nt, Human
ggguggggaggggcgcugggc

SEQ ID NO: 823607 - RNA, 22 nt, Human
guccggggcgcggggcgcgggg

SEQ ID NO: 823608 - RNA, 21 nt, Human
guggucucugugucuguggcc

SEQ ID NO: 823609 - RNA, 23 nt, Human
uaggagacggcacaggucugugu

SEQ ID NO: 823610 - RNA, 19 nt, Human
ucaccgccaccgcccccgc

SEQ ID NO: 823611 - RNA, 21 nt, Human
uccacaccuguggcacugacu

SEQ ID NO: 823612 - RNA, 21 nt, Human
uccauguuugcuucuucuucu

SEQ ID NO: 823613 - RNA, 23 nt, Human
uccauguuugcuucuucuucugu

SEQ ID NO: 823614 - RNA, 18 nt, Human
ucccaggcucuccuucuc

SEQ ID NO: 823615 - RNA, 18 nt, Human
ucccccguggcccuggcc

SEQ ID NO: 823616 - RNA, 21 nt, Human
uccccgggaccguggccucua

SEQ ID NO: 823617 - RNA, 24 nt, Human
ucccgcaggcgggagucccggucu

SEQ ID NO: 823618 - RNA, 23 nt, Human
ucccggcucugcuccagccgcgc

SEQ ID NO: 823619 - RNA, 19 nt, Human
uccgccagcagccggcugg

SEQ ID NO: 823620 - RNA, 23 nt, Human
uccguaggccugcauuucugcuu

SEQ ID NO: 823621 - RNA, 18 nt, Human
uccugccgcagccucacg

SEQ ID NO: 823622 - RNA, 22 nt, Human
ucuccaggaucuggaccuucuc

SEQ ID NO: 823623 - RNA, 22 nt, Human
ucuccuucuccucuugucucuc

SEQ ID NO: 823624 - RNA, 24 nt, Human
ucugcuuccucugcuuuuguuuuu

SEQ ID NO: 823625 - RNA, 23 nt, Human
ucuggacagcagcaccucggccc

SEQ ID NO: 823626 - RNA, 18 nt, Human
ucuucucuggggaccucu

SEQ ID NO: 823627 - RNA, 18 nt, Human
ucuucuguggucuccauu

SEQ ID NO: 823628 - RNA, 23 nt, Human
ugcaaacucuccaccucccgucc

SEQ ID NO: 823629 - RNA, 21 nt, Human
ugcaguaggagacggcacagg

SEQ ID NO: 823630 - RNA, 21 nt, Human
ugccucggccuccgcggccuc

SEQ ID NO: 823631 - RNA, 20 nt, Human
ugcuguagcucuugcaccug

SEQ ID NO: 823632 - RNA, 20 nt, Human
uggcccuggccguggccagc

SEQ ID NO: 823633 - RNA, 19 nt, Human
uggccucagcucccguggc

SEQ ID NO: 823634 - RNA, 26 nt, Human
uggccuccauguuuguggucccuccu

SEQ ID NO: 823635 - RNA, 26 nt, Human
uggccuccauguuuguggucccugug

SEQ ID NO: 823636 - RNA, 18 nt, Human
uggccuccggggacuccu

SEQ ID NO: 823637 - RNA, 22 nt, Human
uggccucuaccccuggguucuc

SEQ ID NO: 823638 - RNA, 19 nt, Human
uggccugagcuccuguggg

SEQ ID NO: 823639 - RNA, 18 nt, Human
uggcgggagguggaggcg

SEQ ID NO: 823640 - RNA, 23 nt, Human
uggcuccuguggccucagcuccc

SEQ ID NO: 823641 - RNA, 23 nt, Human
uggcuuccaugguuucaucuccu

SEQ ID NO: 823642 - RNA, 18 nt, Human
uggggaggggcgcugggc

SEQ ID NO: 823643 - RNA, 23 nt, Human
ugggggcccccugcuuuccaugg

SEQ ID NO: 823644 - RNA, 26 nt, Human
ugucucguccuucucaaaguucucca

SEQ ID NO: 823645 - RNA, 22 nt, Human
ugucuggacagcagcaccucgg

SEQ ID NO: 823646 - RNA, 21 nt, Human
ugugcagggagcuggccuccg

SEQ ID NO: 823647 - RNA, 20 nt, Human
uguggccuccacccccaugg

SEQ ID NO: 823648 - RNA, 24 nt, Human
uuccauggcuggacauagaguucu

SEQ ID NO: 823649 - RNA, 23 nt, Human
uuccucugcuuuuguuuuugugg

SEQ ID NO: 823650 - RNA, 25 nt, Human
uucuccaggaucuggaccuucucca

SEQ ID NO: 823651 - RNA, 20 nt, Human
uucugugaccuuggcuccug

SEQ ID NO: 823652 - RNA, 21 nt, Human
uuguggccuccacccccaugg

SEQ ID NO: 823653 - RNA, 23 nt, Human
uuucuggagccacugagccauuu

SEQ ID NO: 823654 - RNA, 24 nt, Human
uuucugugaccuuggcuccugugg

SEQ ID NO: 823655 - RNA, 20 nt, Human
aaacaaauguaacauuacac

SEQ ID NO: 823656 - RNA, 22 nt, Human
aaacaaauguaacauuacacau

SEQ ID NO: 823657 - RNA, 22 nt, Human
aaaccaugcuuuagaaugcugg

SEQ ID NO: 823658 - RNA, 26 nt, Human
aagaaagaaauggaaaaaagggaccc

SEQ ID NO: 823659 - RNA, 23 nt, Human
aagaucccucaucuucuccagaa

SEQ ID NO: 823660 - RNA, 21 nt, Human
aaugcaggauucugagaaaga

SEQ ID NO: 823661 - RNA, 19 nt, Human
acuguaaugcaggauucug

SEQ ID NO: 823662 - RNA, 19 nt, Human
acuuugguucugaagaaag

SEQ ID NO: 823663 - RNA, 21 nt, Human
agaaugcugguuucuaacggg

SEQ ID NO: 823664 - RNA, 23 nt, Human
agaggcuguuuguguggaaggca

SEQ ID NO: 823665 - RNA, 18 nt, Human
agauaagcuacaaacacc

SEQ ID NO: 823666 - RNA, 19 nt, Human
agaugcaaagccuggaacc

SEQ ID NO: 823667 - RNA, 18 nt, Human
agaugucagggacugugc

SEQ ID NO: 823668 - RNA, 21 nt, Human
agccuuauggcaggaggaaga

SEQ ID NO: 823669 - RNA, 19 nt, Human
aggaagauggugaauccaa

SEQ ID NO: 823670 - RNA, 19 nt, Human
auaagcuacaaacaccugu

SEQ ID NO: 823671 - RNA, 20 nt, Human
auauacacuauuuacaugua

SEQ ID NO: 823672 - RNA, 19 nt, Human
aucacucuguauaauaaau

SEQ ID NO: 823673 - RNA, 20 nt, Human
caaacaccuguucacacuua

SEQ ID NO: 823674 - RNA, 22 nt, Human
caaagccuggaaccaggaauuc

SEQ ID NO: 823675 - RNA, 21 nt, Human
caggauucugagaaagaauuc

SEQ ID NO: 823676 - RNA, 24 nt, Human
caucaaaucuuucuguggccugca

SEQ ID NO: 823677 - RNA, 26 nt, Human
ccuacugucagucucagaagguuuuc

SEQ ID NO: 823678 - RNA, 21 nt, Human
ccucacacaaaagucucucuc

SEQ ID NO: 823679 - RNA, 24 nt, Human
ccucccaaugaguauuuaagagcc

SEQ ID NO: 823680 - RNA, 23 nt, Human
cucucuucagagaauuaucuugg

SEQ ID NO: 823681 - RNA, 18 nt, Human
cuggaaccaggaauucuc

SEQ ID NO: 823682 - RNA, 21 nt, Human
cuggacuucauucuucuucuu

SEQ ID NO: 823683 - RNA, 18 nt, Human
cuggagcuucugggaggu

SEQ ID NO: 823684 - RNA, 23 nt, Human
cuuugcucuuggaaagcuucccu

SEQ ID NO: 823685 - RNA, 23 nt, Human
gaagauggugaauccaagucagg

SEQ ID NO: 823686 - RNA, 22 nt, Human
gaggaagauggugaauccaagu

SEQ ID NO: 823687 - RNA, 27 nt, Human
gcaaugagcccuucuccuccuggacuu

SEQ ID NO: 823688 - RNA, 21 nt, Human
gccaugccaaauguccagaga

SEQ ID NO: 823689 - RNA, 18 nt, Human
ggaaagcuucccuggagc

SEQ ID NO: 823690 - RNA, 22 nt, Human
ggcuccagaugcaaagccugga

SEQ ID NO: 823691 - RNA, 22 nt, Human
guaaaacuuuuugaaggucuac

SEQ ID NO: 823692 - RNA, 27 nt, Human
uaaaugucuuccucacacaaaagucuc

SEQ ID NO: 823693 - RNA, 19 nt, Human
uaagagccuagggcagugg

SEQ ID NO: 823694 - RNA, 20 nt, Human
uaagagugacuaaguagagg

SEQ ID NO: 823695 - RNA, 19 nt, Human
uagcagucucuccuuggcc

SEQ ID NO: 823696 - RNA, 22 nt, Human
uagcagucucuccuuggccccu

SEQ ID NO: 823697 - RNA, 20 nt, Human
uauaagagugacuaaguaga

SEQ ID NO: 823698 - RNA, 20 nt, Human
uaucuuggguaccaccaugu

SEQ ID NO: 823699 - RNA, 20 nt, Human
uauggagaaagugcuuuuca

SEQ ID NO: 823700 - RNA, 23 nt, Human
uauggcaggaggaagauggugaa

SEQ ID NO: 823701 - RNA, 19 nt, Human
ucacacuuaaaccaugcuu

SEQ ID NO: 823702 - RNA, 18 nt, Human
ucccagaagaaaauuuuc

SEQ ID NO: 823703 - RNA, 22 nt, Human
ucccucaucuucuccagaauua

SEQ ID NO: 823704 - RNA, 20 nt, Human
ucccugugagcaugaggagu

SEQ ID NO: 823705 - RNA, 18 nt, Human
ucuaugacuuguuguuug

SEQ ID NO: 823706 - RNA, 21 nt, Human
ucuccugucaaucccugugag

SEQ ID NO: 823707 - RNA, 23 nt, Human
ucuggccaugccaaauguccaga

SEQ ID NO: 823708 - RNA, 21 nt, Human
ucuuuuacagggaacaaaggc

SEQ ID NO: 823709 - RNA, 21 nt, Human
ucuuuugagcuaagauccugg

SEQ ID NO: 823710 - RNA, 21 nt, Human
ugaaaugagggggcuaggcca

SEQ ID NO: 823711 - RNA, 21 nt, Human
ugacuuguuguuugguggauu

SEQ ID NO: 823712 - RNA, 23 nt, Human
ugagaaagaauucuucuuaaacc

SEQ ID NO: 823713 - RNA, 24 nt, Human
ugagcccuucuccuccuggacuuc

SEQ ID NO: 823714 - RNA, 19 nt, Human
ugcuacaaaagaaaaugca

SEQ ID NO: 823715 - RNA, 21 nt, Human
ugcuuuucagaggcuguuugu

SEQ ID NO: 823716 - RNA, 25 nt, Human
uggaaaaaacuacagguuccucugc

SEQ ID NO: 823717 - RNA, 25 nt, Human
uggaaagcuucccuggagcuucugg

SEQ ID NO: 823718 - RNA, 18 nt, Human
uggagaaagugcuuuuca

SEQ ID NO: 823719 - RNA, 19 nt, Human
uggcaaggggaaggggucu

SEQ ID NO: 823720 - RNA, 23 nt, Human
uggguaccaccauguagcagucu

SEQ ID NO: 823721 - RNA, 24 nt, Human
uggugaauucucuccugucaaucc

SEQ ID NO: 823722 - RNA, 24 nt, Human
uuaaaccaugcuuuagaaugcugg

SEQ ID NO: 823723 - RNA, 19 nt, Human
uuaucuuggguaccaccau

SEQ ID NO: 823724 - RNA, 21 nt, Human
uucccagaagaaaauuuucuc

SEQ ID NO: 823725 - RNA, 21 nt, Human
uuccuggagugauucccagaa

SEQ ID NO: 823726 - RNA, 21 nt, Human
uucuccagaauuauguaugga

SEQ ID NO: 823727 - RNA, 24 nt, Human
uuucuguggccugcaaugagcccu

SEQ ID NO: 823728 - RNA, 20 nt, Human
aaacaaauacaugaaaccca

SEQ ID NO: 823729 - RNA, 21 nt, Human
aaacagucaauacaggagaac

SEQ ID NO: 823730 - RNA, 18 nt, Human
aaagaaggcagacacaaa

SEQ ID NO: 823731 - RNA, 22 nt, Human
aaagcaaguuccccaaagccaa

SEQ ID NO: 823732 - RNA, 28 nt, Human
aacaacaaugggggggauaccgguaccc

SEQ ID NO: 823733 - RNA, 22 nt, Human
aagaaagcaaggaaagauuaaa

SEQ ID NO: 823734 - RNA, 25 nt, Human
aagaaggcagacacaaaaggacaag

SEQ ID NO: 823735 - RNA, 23 nt, Human
aagagcaaaacucugucucaaaa

SEQ ID NO: 823736 - RNA, 21 nt, Human
aagcaaguuccccaaagccaa

SEQ ID NO: 823737 - RNA, 18 nt, Human
aagcaccugaaggaaaac

SEQ ID NO: 823738 - RNA, 22 nt, Human
aagcaccugaaggaaaacaguc

SEQ ID NO: 823739 - RNA, 21 nt, Human
aaggucuuagugucuuuucag

SEQ ID NO: 823740 - RNA, 20 nt, Human
aaguuccccaaagccaaucc

SEQ ID NO: 823741 - RNA, 18 nt, Human
aaucgcuugaaccuggga

SEQ ID NO: 823742 - RNA, 24 nt, Human
aaucgcuugaaccugggaggcgga

SEQ ID NO: 823743 - RNA, 20 nt, Human
acacagccuggcuccgucuc

SEQ ID NO: 823744 - RNA, 21 nt, Human
acaggagaaccacccucccca

SEQ ID NO: 823745 - RNA, 18 nt, Human
acccugcagucccuuccg

SEQ ID NO: 823746 - RNA, 18 nt, Human
acugcacucuaaccuggg

SEQ ID NO: 823747 - RNA, 21 nt, Human
acugcacucuaaccugggcaa

SEQ ID NO: 823748 - RNA, 18 nt, Human
agagcaaaacucugucuc

SEQ ID NO: 823749 - RNA, 20 nt, Human
agcaaaguuggcuaaagaaa

SEQ ID NO: 823750 - RNA, 21 nt, Human
agcagaugccuguaaucccag

SEQ ID NO: 823751 - RNA, 23 nt, Human
agccaggcccccacugccgggcc

SEQ ID NO: 823752 - RNA, 24 nt, Human
agccgcacagccugaagcaggagc

SEQ ID NO: 823753 - RNA, 23 nt, Human
agccuggccaauauggugaaacc

SEQ ID NO: 823754 - RNA, 23 nt, Human
agccuggccaauauggugaaacc

SEQ ID NO: 823755 - RNA, 24 nt, Human
agccuggccaauauggugaaaccu

SEQ ID NO: 823756 - RNA, 20 nt, Human
agccuggccguguagaaguc

SEQ ID NO: 823757 - RNA, 22 nt, Human
aggcaagagaaucgcuugaacc

SEQ ID NO: 823758 - RNA, 24 nt, Human
aggcaagagaaucgcuugaaccug

SEQ ID NO: 823759 - RNA, 21 nt, Human
aggcggagauugcagugagcc

SEQ ID NO: 823760 - RNA, 24 nt, Human
aggcggagauugcagugagccgag

SEQ ID NO: 823761 - RNA, 24 nt, Human
aggcgugguagcagaugccuguaa

SEQ ID NO: 823762 - RNA, 19 nt, Human
agggaucugaggcacagaa

SEQ ID NO: 823763 - RNA, 23 nt, Human
agguugacaacaaagcugaggug

SEQ ID NO: 823764 - RNA, 18 nt, Human
aguagagaccccaaagaa

SEQ ID NO: 823765 - RNA, 22 nt, Human
agugucuuuucagcuucaucca

SEQ ID NO: 823766 - RNA, 25 nt, Human
auaaauaaauaaaguucacaacuga

SEQ ID NO: 823767 - RNA, 21 nt, Human
aucccagcuacucgggaggca

SEQ ID NO: 823768 - RNA, 24 nt, Human
aucgugccacugcacucuaaccug

SEQ ID NO: 823769 - RNA, 24 nt, Human
auugcagugagccgagaucgugcc

SEQ ID NO: 823770 - RNA, 24 nt, Human
caaaaacaacauauuaagucaaag

SEQ ID NO: 823771 - RNA, 19 nt, Human
caaacccagucagaggaag

SEQ ID NO: 823772 - RNA, 23 nt, Human
caaagcaaguuccccaaagccaa

SEQ ID NO: 823773 - RNA, 21 nt, Human
caaagccaauccccucuacac

SEQ ID NO: 823774 - RNA, 18 nt, Human
caacauggaugaaccuca

SEQ ID NO: 823775 - RNA, 22 nt, Human
caauacaggagaaccacccucc

SEQ ID NO: 823776 - RNA, 23 nt, Human
caauauggugaaaccucguuuca

SEQ ID NO: 823777 - RNA, 22 nt, Human
caaugagauacugcucagccau

SEQ ID NO: 823778 - RNA, 20 nt, Human
cacaauugaacaaaaaguac

SEQ ID NO: 823779 - RNA, 25 nt, Human
cacacuuguaaucccagcucuuuug

SEQ ID NO: 823780 - RNA, 21 nt, Human
caccacguccaacccugcagu

SEQ ID NO: 823781 - RNA, 18 nt, Human
caccagaggcggcacggg

SEQ ID NO: 823782 - RNA, 23 nt, Human
cacgggcuggcgcucagucccuc

SEQ ID NO: 823783 - RNA, 18 nt, Human
cacucagggaucugaggc

SEQ ID NO: 823784 - RNA, 20 nt, Human
cacuccagcccugggguggu

SEQ ID NO: 823785 - RNA, 23 nt, Human
cacugcacucuaaccugggcaac

SEQ ID NO: 823786 - RNA, 24 nt, Human
cacugcacucuaaccugggcaaca

SEQ ID NO: 823787 - RNA, 23 nt, Human
cacuuguaaucccagcucuuuug

SEQ ID NO: 823788 - RNA, 24 nt, Human
cacuuguaaucccagcucuuuugg

SEQ ID NO: 823789 - RNA, 25 nt, Human
cagaggcaagagaaucgcuugaacc

SEQ ID NO: 823790 - RNA, 19 nt, Human
cagcacacugcuucaagug

SEQ ID NO: 823791 - RNA, 18 nt, Human
cagccuggcuccgucucc

SEQ ID NO: 823792 - RNA, 23 nt, Human
caggcccccacugccgggccacg

SEQ ID NO: 823793 - RNA, 22 nt, Human
cagucccucccucgccaggucc

SEQ ID NO: 823794 - RNA, 21 nt, Human
cauccagacagaauguugauu

SEQ ID NO: 823795 - RNA, 24 nt, Human
ccaaacaaauacaugaaacccaug

SEQ ID NO: 823796 - RNA, 23 nt, Human
ccaaagaacugaaagcagguacc

SEQ ID NO: 823797 - RNA, 20 nt, Human
ccaaagccaauccccucuac

SEQ ID NO: 823798 - RNA, 21 nt, Human
ccacuccuaaguagagacccc

SEQ ID NO: 823799 - RNA, 23 nt, Human
ccacuccuaaguagagaccccuu

SEQ ID NO: 823800 - RNA, 20 nt, Human
ccacugcacucuaaccuggg

SEQ ID NO: 823801 - RNA, 23 nt, Human
ccacugcacucuaaccugggcaa

SEQ ID NO: 823802 - RNA, 24 nt, Human
ccacugcacucuaaccugggcaac

SEQ ID NO: 823803 - RNA, 21 nt, Human
ccacugccgggccacgggcug

SEQ ID NO: 823804 - RNA, 24 nt, Human
cccaaagaacugaaagcagguacc

SEQ ID NO: 823805 - RNA, 21 nt, Human
cccaaaggguagaaaugcucc

SEQ ID NO: 823806 - RNA, 20 nt, Human
cccaacugugugaauauccc

SEQ ID NO: 823807 - RNA, 25 nt, Human
ccccaaagaacugaaagcagguacc

SEQ ID NO: 823808 - RNA, 19 nt, Human
ccccaaagccaauccccuc

SEQ ID NO: 823809 - RNA, 20 nt, Human
ccccaaagccaauccccucu

SEQ ID NO: 823810 - RNA, 21 nt, Human
ccccaaagccaauccccucua

SEQ ID NO: 823811 - RNA, 23 nt, Human
ccccaaagccaauccccucuaca

SEQ ID NO: 823812 - RNA, 24 nt, Human
ccccagucagugcgcugcccuccc

SEQ ID NO: 823813 - RNA, 24 nt, Human
cccgcucuuucccacccuuccuuu

SEQ ID NO: 823814 - RNA, 20 nt, Human
cccucccacagaaagcucug

SEQ ID NO: 823815 - RNA, 23 nt, Human
ccgccgggcaccacguccaaccc

SEQ ID NO: 823816 - RNA, 18 nt, Human
ccucuacacagccuggcu

SEQ ID NO: 823817 - RNA, 19 nt, Human
ccucuuccguggcuccuuc

SEQ ID NO: 823818 - RNA, 22 nt, Human
ccugaggucagaaguucgagac

SEQ ID NO: 823819 - RNA, 21 nt, Human
ccuggccaauauggugaaacc

SEQ ID NO: 823820 - RNA, 24 nt, Human
ccuggccaauauggugaaaccucg

SEQ ID NO: 823821 - RNA, 19 nt, Human
ccuguaaucccagcuacuc

SEQ ID NO: 823822 - RNA, 21 nt, Human
ccuguaaucccagcuacucgg

SEQ ID NO: 823823 - RNA, 22 nt, Human
ccuguaaucccagcuacucggg

SEQ ID NO: 823824 - RNA, 24 nt, Human
ccugugguuaaacauguuuaaagc

SEQ ID NO: 823825 - RNA, 21 nt, Human
ccuuccgagccagccaggccc

SEQ ID NO: 823826 - RNA, 21 nt, Human
cgaaaggauaaaccaugguca

SEQ ID NO: 823827 - RNA, 22 nt, Human
cgaaaggauaaaccauggucau

SEQ ID NO: 823828 - RNA, 24 nt, Human
cgagaccagccuggccaauauggu

SEQ ID NO: 823829 - RNA, 21 nt, Human
cgggacagagccauggccacc

SEQ ID NO: 823830 - RNA, 18 nt, Human
cuagccauacaaugagau

SEQ ID NO: 823831 - RNA, 20 nt, Human
cucacacuuguaaucccagc

SEQ ID NO: 823832 - RNA, 24 nt, Human
cucacacuuguaaucccagcucuu

SEQ ID NO: 823833 - RNA, 18 nt, Human
cucuuucccacccuuccu

SEQ ID NO: 823834 - RNA, 18 nt, Human
cugaagcaggagcugggg

SEQ ID NO: 823835 - RNA, 23 nt, Human
cugcuugcguucagguggaggag

SEQ ID NO: 823836 - RNA, 24 nt, Human
cugggccgggcgcgguggcucaca

SEQ ID NO: 823837 - RNA, 27 nt, Human
cuguggucaaagcaaguuccccaaagc

SEQ ID NO: 823838 - RNA, 18 nt, Human
cuucaagugacugguucu

SEQ ID NO: 823839 - RNA, 19 nt, Human
cuugaaccugggaggcgga

SEQ ID NO: 823840 - RNA, 22 nt, Human
cuuuuggaggacgaggcggggg

SEQ ID NO: 823841 - RNA, 19 nt, Human
gaaggcagacacaaaagga

SEQ ID NO: 823842 - RNA, 23 nt, Human
gagaaucgcuugaaccugggagg

SEQ ID NO: 823843 - RNA, 18 nt, Human
gagaucgugccacugcac

SEQ ID NO: 823844 - RNA, 23 nt, Human
gagauugcagugagccgagaucg

SEQ ID NO: 823845 - RNA, 26 nt, Human
gaggcgggggguggaucaccugaggu

SEQ ID NO: 823846 - RNA, 24 nt, Human
gaucaccugaggucagaaguucga

SEQ ID NO: 823847 - RNA, 20 nt, Human
gauuguggugacaguugccc

SEQ ID NO: 823848 - RNA, 18 nt, Human
gcaccagaggcggcacgg

SEQ ID NO: 823849 - RNA, 18 nt, Human
gcacuuuccagccugagc

SEQ ID NO: 823850 - RNA, 18 nt, Human
gcagggccuggugcuccc

SEQ ID NO: 823851 - RNA, 21 nt, Human
gcagucccuuccgagccagcc

SEQ ID NO: 823852 - RNA, 21 nt, Human
gccaauauggugaaaccucgu

SEQ ID NO: 823853 - RNA, 24 nt, Human
gccacugcacucuaaccugggcaa

SEQ ID NO: 823854 - RNA, 22 nt, Human
gccaggcgugguagcagaugcc

SEQ ID NO: 823855 - RNA, 19 nt, Human
gcccuggggugcuugggga

SEQ ID NO: 823856 - RNA, 20 nt, Human
gccgagaucgugccacugca

SEQ ID NO: 823857 - RNA, 23 nt, Human
gccugugguuucagaguccugga

SEQ ID NO: 823858 - RNA, 24 nt, Human
ggagauugcagugagccgagaucg

SEQ ID NO: 823859 - RNA, 22 nt, Human
ggcaccagaggcggcacgggcu

SEQ ID NO: 823860 - RNA, 23 nt, Human
ggcgcgguggcucacacuuguaa

SEQ ID NO: 823861 - RNA, 19 nt, Human
gggaggcagaggcaagaga

SEQ ID NO: 823862 - RNA, 19 nt, Human
gggcaauagggaguggcug

SEQ ID NO: 823863 - RNA, 21 nt, Human
gggcgcgguggcucacacuug

SEQ ID NO: 823864 - RNA, 21 nt, Human
ggggcaauagggaguggcugc

SEQ ID NO: 823865 - RNA, 21 nt, Human
gggggguggaucaccugaggu

SEQ ID NO: 823866 - RNA, 24 nt, Human
gggguggaucaccugaggucagaa

SEQ ID NO: 823867 - RNA, 19 nt, Human
ggguguggggauucuuuug

SEQ ID NO: 823868 - RNA, 24 nt, Human
gguagcagaugccuguaaucccag

SEQ ID NO: 823869 - RNA, 21 nt, Human
ggugaugaaaauaauccagaa

SEQ ID NO: 823870 - RNA, 23 nt, Human
gguggcucacacuuguaauccca

SEQ ID NO: 823871 - RNA, 24 nt, Human
gguggcucacacuuguaaucccag

SEQ ID NO: 823872 - RNA, 23 nt, Human
guagcagaugccuguaaucccag

SEQ ID NO: 823873 - RNA, 23 nt, Human
guggcucacacuuguaaucccag

SEQ ID NO: 823874 - RNA, 23 nt, Human
guguagaaguccuccauggccca

SEQ ID NO: 823875 - RNA, 20 nt, Human
guuauuuuuaaaaaggggua

SEQ ID NO: 823876 - RNA, 21 nt, Human
uaaagcuucccucuguuaaag

SEQ ID NO: 823877 - RNA, 18 nt, Human
uaacaacaauggggggga

SEQ ID NO: 823878 - RNA, 18 nt, Human
uaaccugggcaacaagag

SEQ ID NO: 823879 - RNA, 24 nt, Human
uaauucuccaagaucuccaugaug

SEQ ID NO: 823880 - RNA, 23 nt, Human
uacacagccuggcuccgucuccc

SEQ ID NO: 823881 - RNA, 19 nt, Human
uacugcucagccauaaaaa

SEQ ID NO: 823882 - RNA, 22 nt, Human
uacugcucagccauaaaaagga

SEQ ID NO: 823883 - RNA, 20 nt, Human
uagaaguccuccauggccca

SEQ ID NO: 823884 - RNA, 21 nt, Human
uagacacuacacuuagguauc

SEQ ID NO: 823885 - RNA, 23 nt, Human
uagauacuuggagaguuugcaca

SEQ ID NO: 823886 - RNA, 21 nt, Human
uaggguucuucucuacuucuc

SEQ ID NO: 823887 - RNA, 22 nt, Human
uagugucuuuucagcuucaucc

SEQ ID NO: 823888 - RNA, 25 nt, Human
ucaaaaacaacauauuaagucaaag

SEQ ID NO: 823889 - RNA, 22 nt, Human
ucaaagcaaguuccccaaagcc

SEQ ID NO: 823890 - RNA, 23 nt, Human
ucaaagcaaguuccccaaagcca

SEQ ID NO: 823891 - RNA, 24 nt, Human
ucacugaagcugaacauggguggg

SEQ ID NO: 823892 - RNA, 22 nt, Human
ucagccccuagacacuacacuu

SEQ ID NO: 823893 - RNA, 25 nt, Human
ucagccccuagacacuacacuuagg

SEQ ID NO: 823894 - RNA, 18 nt, Human
ucccucuggcuggccgaa

SEQ ID NO: 823895 - RNA, 22 nt, Human
uccgagccagccaggcccccac

SEQ ID NO: 823896 - RNA, 24 nt, Human
uccgccaauggacgaaaggauaaa

SEQ ID NO: 823897 - RNA, 21 nt, Human
uccgccucuuccguggcuccu

SEQ ID NO: 823898 - RNA, 19 nt, Human
uccgggugcuuguccugcg

SEQ ID NO: 823899 - RNA, 18 nt, Human
uccuccauggcccaggcc

SEQ ID NO: 823900 - RNA, 18 nt, Human
ucgcuugaaccugggagg

SEQ ID NO: 823901 - RNA, 23 nt, Human
ucuaagaaugggaaaaacacagu

SEQ ID NO: 823902 - RNA, 19 nt, Human
ucuauccacaaucccaaag

SEQ ID NO: 823903 - RNA, 22 nt, Human
ucucccggcagucagccccuag

SEQ ID NO: 823904 - RNA, 24 nt, Human
ucuccguuucagaccucuacugug

SEQ ID NO: 823905 - RNA, 23 nt, Human
ucugcagccgcacagccugaagc

SEQ ID NO: 823906 - RNA, 25 nt, Human
ugaaaauacaaaaaauuggccaguc

SEQ ID NO: 823907 - RNA, 19 nt, Human
ugaaguaucuuuguucaaa

SEQ ID NO: 823908 - RNA, 24 nt, Human
ugaaguaucuuuguucaaauuggu

SEQ ID NO: 823909 - RNA, 21 nt, Human
ugacuuagaaauuccacuccu

SEQ ID NO: 823910 - RNA, 19 nt, Human
ugagauacugcucagccau

SEQ ID NO: 823911 - RNA, 21 nt, Human
ugagauacugcucagccauaa

SEQ ID NO: 823912 - RNA, 22 nt, Human
ugagccgagaucgugccacugc

SEQ ID NO: 823913 - RNA, 20 nt, Human
ugcagggccuggugcucccu

SEQ ID NO: 823914 - RNA, 22 nt, Human
ugcccaacugugugaauauccc

SEQ ID NO: 823915 - RNA, 20 nt, Human
ugccguggagagcgggugac

SEQ ID NO: 823916 - RNA, 23 nt, Human
ugccucguccaccuuccgccucu

SEQ ID NO: 823917 - RNA, 24 nt, Human
ugccuguaaucccagcuacucggg

SEQ ID NO: 823918 - RNA, 18 nt, Human
ugcgauggcaccacaaac

SEQ ID NO: 823919 - RNA, 21 nt, Human
ugcuagacaauuccacuuccu

SEQ ID NO: 823920 - RNA, 24 nt, Human
ugcuagacaauuccacuuccucag

SEQ ID NO: 823921 - RNA, 24 nt, Human
ugcucagguggcaccagaggcggc

SEQ ID NO: 823922 - RNA, 22 nt, Human
ugcuucaagugacugguucugc

SEQ ID NO: 823923 - RNA, 24 nt, Human
uggaucaccugaggucagaaguuc

SEQ ID NO: 823924 - RNA, 27 nt, Human
uggaucaccugaggucagaaguucgag

SEQ ID NO: 823925 - RNA, 24 nt, Human
uggccaauauggugaaaccucguu

SEQ ID NO: 823926 - RNA, 20 nt, Human
uggcccaggccccagucagu

SEQ ID NO: 823927 - RNA, 21 nt, Human
uggcucacacuuguaauccca

SEQ ID NO: 823928 - RNA, 19 nt, Human
ugggaggcggagauugcag

SEQ ID NO: 823929 - RNA, 29 nt, Human
ugggaggcggagauugcagugacaacggu

SEQ ID NO: 823930 - RNA, 24 nt, Human
ugggaggcggagauugcagugagc

SEQ ID NO: 823931 - RNA, 24 nt, Human
ugguagcagaugccuguaauccca

SEQ ID NO: 823932 - RNA, 19 nt, Human
ugucugcagccgcacagcc

SEQ ID NO: 823933 - RNA, 18 nt, Human
ugugaauuguaucucaac

SEQ ID NO: 823934 - RNA, 20 nt, Human
ugugaauuguaucucaacga

SEQ ID NO: 823935 - RNA, 22 nt, Human
uuaaagcuucccucuguuaaag

SEQ ID NO: 823936 - RNA, 24 nt, Human
uugaaccugggaggcggagauugc

SEQ ID NO: 823937 - RNA, 18 nt, Human
uugcagugagccgagauc

SEQ ID NO: 823938 - RNA, 22 nt, Human
uugcagugagccgagaucgugc

SEQ ID NO: 823939 - RNA, 21 nt, Human
uuggaggacgaggcggggggu

SEQ ID NO: 823940 - RNA, 21 nt, Human
uugucaggggagagaggggca

SEQ ID NO: 823941 - RNA, 24 nt, Human
uuucaacugaaaauacaaaaaauu

SEQ ID NO: 823942 - RNA, 21 nt, Human
uuucagcuucauccaagcacc

SEQ ID NO: 823943 - RNA, 24 nt, Human
uuuucagcuucauccaagcaccug

SEQ ID NO: 823944 - RNA, 21 nt, Human
aaaaggcucaacaaaggagag

SEQ ID NO: 823945 - RNA, 21 nt, Human
aaaaugaaagaaaauagaaaa

SEQ ID NO: 823946 - RNA, 24 nt, Human
aacugugguaaugaaucaugaacc

SEQ ID NO: 823947 - RNA, 22 nt, Human
acugaaacucuuaaaacugugg

SEQ ID NO: 823948 - RNA, 20 nt, Human
agucguauuuucugaggcuu

SEQ ID NO: 823949 - RNA, 27 nt, Human
augaaccccucaaaaggcucaacaaag

SEQ ID NO: 823950 - RNA, 19 nt, Human
caguuccaacuguucaugu

SEQ ID NO: 823951 - RNA, 23 nt, Human
ccucaaaaggcucaacaaaggag

SEQ ID NO: 823952 - RNA, 21 nt, Human
cucaaaaggcucaacaaagga

SEQ ID NO: 823953 - RNA, 22 nt, Human
gaaacucuuaaaacugugguaa

SEQ ID NO: 823954 - RNA, 24 nt, Human
gaacaguguacagaagauacuccu

SEQ ID NO: 823955 - RNA, 20 nt, Human
uauguaucuauauccaucaa

SEQ ID NO: 823956 - RNA, 22 nt, Human
ucaugaaccccucaaaaggcuc

SEQ ID NO: 823957 - RNA, 20 nt, Human
ugaaacucuuaaaacugugg

SEQ ID NO: 823958 - RNA, 24 nt, Human
ugaaagaaaauagaaaaccuaugu

SEQ ID NO: 823959 - RNA, 24 nt, Human
ugguguaucaucuggaauuguuuu

SEQ ID NO: 823960 - RNA, 18 nt, Human
uuaaaacugugguaauga

SEQ ID NO: 823961 - RNA, 22 nt, Human
uuucugaggcuuuuaggaaauc

SEQ ID NO: 823962 - RNA, 18 nt, Human
aaaaagcacgacacacac

SEQ ID NO: 823963 - RNA, 24 nt, Human
aaaaagcacgacacacacgucccc

SEQ ID NO: 823964 - RNA, 24 nt, Human
aaaaagcacgacacacacgucccc

SEQ ID NO: 823965 - RNA, 25 nt, Human
aaaaagcacgacacacacguccccc

SEQ ID NO: 823966 - RNA, 25 nt, Human
aaaaagcacgacacacacguccccc

SEQ ID NO: 823967 - RNA, 20 nt, Human
aaaacauccacagagaaacc

SEQ ID NO: 823968 - RNA, 20 nt, Human
aaacugggaccaggguggga

SEQ ID NO: 823969 - RNA, 20 nt, Human
aaagcuuccagaggcccagg

SEQ ID NO: 823970 - RNA, 23 nt, Human
aaauccaccugcucaagucagga

SEQ ID NO: 823971 - RNA, 23 nt, Human
aaauccaccugcucaagucagga

SEQ ID NO: 823972 - RNA, 19 nt, Human
aaccagagccuuccgcagc

SEQ ID NO: 823973 - RNA, 24 nt, Human
aaccagagccuuccgcagcgcuuu

SEQ ID NO: 823974 - RNA, 19 nt, Human
aaccgaugguaaaaagcac

SEQ ID NO: 823975 - RNA, 19 nt, Human
aaccgaugguaaaaagcac

SEQ ID NO: 823976 - RNA, 24 nt, Human
aaccgcuaagaaacccuggcagag

SEQ ID NO: 823977 - RNA, 20 nt, Human
aaccugggaccaggguggga

SEQ ID NO: 823978 - RNA, 22 nt, Human
aagaaacccuggcagaggaggg

SEQ ID NO: 823979 - RNA, 22 nt, Human
aagaaacccuggcagaggaggg

SEQ ID NO: 823980 - RNA, 21 nt, Human
aagaagauagaagacggagga

SEQ ID NO: 823981 - RNA, 21 nt, Human
aagaagauagaagacggagga

SEQ ID NO: 823982 - RNA, 22 nt, Human
aagaucaccaggcgcugcacca

SEQ ID NO: 823983 - RNA, 24 nt, Human
aagcaagagugaaucaggccuggg

SEQ ID NO: 823984 - RNA, 21 nt, Human
aagcacgacacacacgucccc

SEQ ID NO: 823985 - RNA, 21 nt, Human
aagcacgacacacacgucccc

SEQ ID NO: 823986 - RNA, 22 nt, Human
aagcaucccccacccccaucuc

SEQ ID NO: 823987 - RNA, 21 nt, Human
aaggcucugggagcauaagug

SEQ ID NO: 823988 - RNA, 21 nt, Human
aaggcucugggagcauaagug

SEQ ID NO: 823989 - RNA, 19 nt, Human
aagugccccagccaggagg

SEQ ID NO: 823990 - RNA, 19 nt, Human
aagugccccagccaggagg

SEQ ID NO: 823991 - RNA, 23 nt, Human
aaucacagaaucaaagucacuuc

SEQ ID NO: 823992 - RNA, 18 nt, Human
aaugacccaaagaccuuc

SEQ ID NO: 823993 - RNA, 18 nt, Human
aaugacccaaagaccuuc

SEQ ID NO: 823994 - RNA, 23 nt, Human
acaccugcccccuguccccucug

SEQ ID NO: 823995 - RNA, 23 nt, Human
acaccugcccccuguccccucug

SEQ ID NO: 823996 - RNA, 20 nt, Human
accaggaaggcaccacggac

SEQ ID NO: 823997 - RNA, 20 nt, Human
accaggaaggcaccacggac

SEQ ID NO: 823998 - RNA, 18 nt, Human
accauucccagagcgucc

SEQ ID NO: 823999 - RNA, 18 nt, Human
accauucccagagcgucc

SEQ ID NO: 824000 - RNA, 19 nt, Human
acccaggccauagugacac

SEQ ID NO: 824001 - RNA, 19 nt, Human
acccaggccauagugacac

SEQ ID NO: 824002 - RNA, 23 nt, Human
acccccagaggcacuuugcggga

SEQ ID NO: 824003 - RNA, 24 nt, Human
accccggaagcuuccggcuguccc

SEQ ID NO: 824004 - RNA, 18 nt, Human
agaaacccuggcagagga

SEQ ID NO: 824005 - RNA, 18 nt, Human
agaaacccuggcagagga

SEQ ID NO: 824006 - RNA, 24 nt, Human
agaacuccuccaccucucaggcuc

SEQ ID NO: 824007 - RNA, 24 nt, Human
agaacuccuccaccucucaggcuc

SEQ ID NO: 824008 - RNA, 19 nt, Human
agaagcaucccccaccccc

SEQ ID NO: 824009 - RNA, 19 nt, Human
agaagcaucccccaccccc

SEQ ID NO: 824010 - RNA, 23 nt, Human
agagcccuggaggagugccuccc

SEQ ID NO: 824011 - RNA, 23 nt, Human
agagcccuggaggagugccuccc

SEQ ID NO: 824012 - RNA, 19 nt, Human
agagugaaucaggccuggg

SEQ ID NO: 824013 - RNA, 22 nt, Human
agcaacauaaggccccaggcac

SEQ ID NO: 824014 - RNA, 22 nt, Human
agcauaagugccccagccagga

SEQ ID NO: 824015 - RNA, 22 nt, Human
agcauaagugccccagccagga

SEQ ID NO: 824016 - RNA, 28 nt, Human
agcaucccccacccccaucucugacagc

SEQ ID NO: 824017 - RNA, 28 nt, Human
agcaucccccacccccaucucugacagc

SEQ ID NO: 824018 - RNA, 19 nt, Human
agccaggagguggaggcca

SEQ ID NO: 824019 - RNA, 19 nt, Human
agccaggagguggaggcca

SEQ ID NO: 824020 - RNA, 19 nt, Human
agccgccaggccccagccc

SEQ ID NO: 824021 - RNA, 19 nt, Human
agccgccaggccccagccc

SEQ ID NO: 824022 - RNA, 20 nt, Human
agccgccaggccccagcccc

SEQ ID NO: 824023 - RNA, 18 nt, Human
agcggacccaaaaacaaa

SEQ ID NO: 824024 - RNA, 18 nt, Human
agcggacccaaaaacaaa

SEQ ID NO: 824025 - RNA, 25 nt, Human
aggaacccagucacacaccugcccc

SEQ ID NO: 824026 - RNA, 25 nt, Human
aggaacccagucacacaccugcccc

SEQ ID NO: 824027 - RNA, 19 nt, Human
aggaagcacagggugacuc

SEQ ID NO: 824028 - RNA, 19 nt, Human
aggaagcacagggugacuc

SEQ ID NO: 824029 - RNA, 22 nt, Human
aggaaguaacgggggaucagaa

SEQ ID NO: 824030 - RNA, 23 nt, Human
aggaaguaacgggggaucagaac

SEQ ID NO: 824031 - RNA, 23 nt, Human
aggaaguaacgggggaucagaac

SEQ ID NO: 824032 - RNA, 22 nt, Human
aggacccuccaccugggcagga

SEQ ID NO: 824033 - RNA, 21 nt, Human
aggacuccugucccuagauug

SEQ ID NO: 824034 - RNA, 21 nt, Human
aggacuccugucccuagauug

SEQ ID NO: 824035 - RNA, 20 nt, Human
aggagggaugggggggcuca

SEQ ID NO: 824036 - RNA, 20 nt, Human
aggagggaugggggggcuca

SEQ ID NO: 824037 - RNA, 23 nt, Human
aggagggaugggggggcucaggc

SEQ ID NO: 824038 - RNA, 23 nt, Human
aggagggaugggggggcucaggc

SEQ ID NO: 824039 - RNA, 26 nt, Human
aggcaagaaaagaagauagaagacgg

SEQ ID NO: 824040 - RNA, 29 nt, Human
aggcaagaaaagaagauagaagggacccc

SEQ ID NO: 824041 - RNA, 29 nt, Human
aggcaagaaaagaagauagaagggacccc

SEQ ID NO: 824042 - RNA, 22 nt, Human
aggcaagaggagaaaaugcuag

SEQ ID NO: 824043 - RNA, 24 nt, Human
aggcaagaggagaaaaugcuagga

SEQ ID NO: 824044 - RNA, 24 nt, Human
aggcaagaggagaaaaugcuagga

SEQ ID NO: 824045 - RNA, 19 nt, Human
aggcacuuguggaaccugg

SEQ ID NO: 824046 - RNA, 19 nt, Human
aggcacuuguggaaccugg

SEQ ID NO: 824047 - RNA, 22 nt, Human
aggcccagaaacaucuuccccc

SEQ ID NO: 824048 - RNA, 22 nt, Human
aggcccagaaacaucuuccccc

SEQ ID NO: 824049 - RNA, 21 nt, Human
aggcguuuccccucagggcag

SEQ ID NO: 824050 - RNA, 22 nt, Human
aggcguuuccccucagggcagc

SEQ ID NO: 824051 - RNA, 20 nt, Human
aggcguuucccucagggcag

SEQ ID NO: 824052 - RNA, 22 nt, Human
agggaaguggcgggguggggcc

SEQ ID NO: 824053 - RNA, 22 nt, Human
agggaaguggcgggguggggcc

SEQ ID NO: 824054 - RNA, 18 nt, Human
agucacacaccugccccc

SEQ ID NO: 824055 - RNA, 18 nt, Human
agucacacaccugccccc

SEQ ID NO: 824056 - RNA, 21 nt, Human
agucacauucccagcuccguu

SEQ ID NO: 824057 - RNA, 21 nt, Human
agucacauucccagcuccguu

SEQ ID NO: 824058 - RNA, 22 nt, Human
aucacagaaucaaagucacuuc

SEQ ID NO: 824059 - RNA, 21 nt, Human
caaaacauccacagagaaacc

SEQ ID NO: 824060 - RNA, 19 nt, Human
caaaccgaugguaaaaagc

SEQ ID NO: 824061 - RNA, 19 nt, Human
caaaccgaugguaaaaagc

SEQ ID NO: 824062 - RNA, 25 nt, Human
caaauaaaguagcaaugccucuucc

SEQ ID NO: 824063 - RNA, 25 nt, Human
caaauaaaguagcaaugccucuucc

SEQ ID NO: 824064 - RNA, 22 nt, Human
caagaucaccaggcgcugcacc

SEQ ID NO: 824065 - RNA, 24 nt, Human
caagucauuagagucuuuggauuu

SEQ ID NO: 824066 - RNA, 24 nt, Human
caagucauuagagucuuuggauuu

SEQ ID NO: 824067 - RNA, 19 nt, Human
cacaauggggaggcagggc

SEQ ID NO: 824068 - RNA, 19 nt, Human
cacaauggggaggcagggc

SEQ ID NO: 824069 - RNA, 24 nt, Human
cacaauggggaggcagggccccca

SEQ ID NO: 824070 - RNA, 23 nt, Human
cacacaccugcccccuguccccu

SEQ ID NO: 824071 - RNA, 21 nt, Human
cacaccugcccccuguccccu

SEQ ID NO: 824072 - RNA, 20 nt, Human
cacacucccugcaccagccc

SEQ ID NO: 824073 - RNA, 20 nt, Human
cacacucccugcaccagccc

SEQ ID NO: 824074 - RNA, 19 nt, Human
cacacucucaggacuuccc

SEQ ID NO: 824075 - RNA, 19 nt, Human
cacacucucaggacuuccc

SEQ ID NO: 824076 - RNA, 19 nt, Human
caccaggaccaucugccag

SEQ ID NO: 824077 - RNA, 19 nt, Human
caccaggaccaucugccag

SEQ ID NO: 824078 - RNA, 20 nt, Human
cacccagaaccuuccaucca

SEQ ID NO: 824079 - RNA, 20 nt, Human
cacccaggccauagugacac

SEQ ID NO: 824080 - RNA, 20 nt, Human
cacccaggccauagugacac

SEQ ID NO: 824081 - RNA, 19 nt, Human
cacccccaucucugacagc

SEQ ID NO: 824082 - RNA, 19 nt, Human
cacccccaucucugacagc

SEQ ID NO: 824083 - RNA, 18 nt, Human
caccucugcccucccgcu

SEQ ID NO: 824084 - RNA, 18 nt, Human
caccucugcccucccgcu

SEQ ID NO: 824085 - RNA, 21 nt, Human
cacggugggccugggggcgug

SEQ ID NO: 824086 - RNA, 21 nt, Human
cacggugggccugggggcgug

SEQ ID NO: 824087 - RNA, 22 nt, Human
cacugcacaucccucuuuccca

SEQ ID NO: 824088 - RNA, 22 nt, Human
cacugcacaucccucuuuccca

SEQ ID NO: 824089 - RNA, 18 nt, Human
cacuguggauccgcaaua

SEQ ID NO: 824090 - RNA, 23 nt, Human
cacuuguggaaccugggaccagg

SEQ ID NO: 824091 - RNA, 23 nt, Human
cacuuguggaaccugggaccagg

SEQ ID NO: 824092 - RNA, 20 nt, Human
cagaaacaucuucccccucc

SEQ ID NO: 824093 - RNA, 19 nt, Human
cagaagaaacaaagcuucc

SEQ ID NO: 824094 - RNA, 22 nt, Human
cagaagaaacaaagcuuccaga

SEQ ID NO: 824095 - RNA, 23 nt, Human
cagagccuuccgcagcgcuuucu

SEQ ID NO: 824096 - RNA, 24 nt, Human
cagcagugcuggccucucacccag

SEQ ID NO: 824097 - RNA, 22 nt, Human
cagccaccaacacacacucuca

SEQ ID NO: 824098 - RNA, 22 nt, Human
cagccaccaacacacacucuca

SEQ ID NO: 824099 - RNA, 20 nt, Human
cagccagggcugggacaggc

SEQ ID NO: 824100 - RNA, 20 nt, Human
cagccagggcugggacaggc

SEQ ID NO: 824101 - RNA, 22 nt, Human
cagccagggcugggacaggccc

SEQ ID NO: 824102 - RNA, 22 nt, Human
cagccagggcugggacaggccc

SEQ ID NO: 824103 - RNA, 21 nt, Human
cagcccaccaggaaggcacca

SEQ ID NO: 824104 - RNA, 21 nt, Human
cagcccaccaggaaggcacca

SEQ ID NO: 824105 - RNA, 21 nt, Human
cagccgccaggccccagcccc

SEQ ID NO: 824106 - RNA, 19 nt, Human
cagcggacccaaaaacaaa

SEQ ID NO: 824107 - RNA, 19 nt, Human
cagcggacccaaaaacaaa

SEQ ID NO: 824108 - RNA, 18 nt, Human
caggcagacgacgauugc

SEQ ID NO: 824109 - RNA, 19 nt, Human
caggccccagccccacacu

SEQ ID NO: 824110 - RNA, 18 nt, Human
cagggcagcagcagugcu

SEQ ID NO: 824111 - RNA, 23 nt, Human
cagggcagcagcagugcuggccc

SEQ ID NO: 824112 - RNA, 21 nt, Human
cagggugacucccgucuugug

SEQ ID NO: 824113 - RNA, 21 nt, Human
cagggugacucccgucuugug

SEQ ID NO: 824114 - RNA, 30 nt, Human
ccaaaaacaaacuucucagugaaacagguu

SEQ ID NO: 824115 - RNA, 30 nt, Human; identical to SEQ ID NO: 824114

SEQ ID NO: 824116 - RNA, 18 nt, Human
ccaaaacauccacagaga

SEQ ID NO: 824117 - RNA, 18 nt, Human
ccaaaacauccacagaga

SEQ ID NO: 824118 - RNA, 28 nt, Human
ccaaaacauccacagagaaaccgcuaaa

SEQ ID NO: 824119 - RNA, 28 nt, Human
ccaaaacauccacagagaaaccgcuaaa

SEQ ID NO: 824120 - RNA, 24 nt, Human
ccacaagcugacauuaguccgcac

SEQ ID NO: 824121 - RNA, 24 nt, Human
ccacaagcugacauuaguccgcac

SEQ ID NO: 824122 - RNA, 23 nt, Human
ccaccccggaagcuuccggcugu

SEQ ID NO: 824123 - RNA, 24 nt, Human
ccagagccuuccgcagcgcuuucu

SEQ ID NO: 824124 - RNA, 23 nt, Human
ccagcagcucugcaauggccaga

SEQ ID NO: 824125 - RNA, 21 nt, Human
ccagcccagccgccaggcccc

SEQ ID NO: 824126 - RNA, 21 nt, Human
ccagcccagccgccaggcccc

SEQ ID NO: 824127 - RNA, 26 nt, Human
ccaggccccagccccacaccgguucc

SEQ ID NO: 824128 - RNA, 26 nt, Human
ccaggccccagccccacaccgguucc

SEQ ID NO: 824129 - RNA, 20 nt, Human
ccaggccccagccccacacu

SEQ ID NO: 824130 - RNA, 21 nt, Human
ccaggccccagccccacacuc

SEQ ID NO: 824131 - RNA, 21 nt, Human
ccaggccccagccccacacuc

SEQ ID NO: 824132 - RNA, 23 nt, Human
cccaaauccaccugcucaaguca

SEQ ID NO: 824133 - RNA, 18 nt, Human
cccaccacucuggagacc

SEQ ID NO: 824134 - RNA, 18 nt, Human
cccaccacucuggagacc

SEQ ID NO: 824135 - RNA, 21 nt, Human
cccacccacgcugcccguccg

SEQ ID NO: 824136 - RNA, 21 nt, Human
cccacccacgcugcccguccg

SEQ ID NO: 824137 - RNA, 21 nt, Human
cccagccccacacucugagag

SEQ ID NO: 824138 - RNA, 21 nt, Human
cccagccccacacucugagag

SEQ ID NO: 824139 - RNA, 24 nt, Human
cccagccccugcgggcacccagaa

SEQ ID NO: 824140 - RNA, 21 nt, Human
cccagggcccuccagaggcac

SEQ ID NO: 824141 - RNA, 21 nt, Human
cccagggcccuccagaggcac

SEQ ID NO: 824142 - RNA, 21 nt, Human
cccaucccacaaaccuggcac

SEQ ID NO: 824143 - RNA, 21 nt, Human
cccaucccacaaaccuggcac

SEQ ID NO: 824144 - RNA, 19 nt, Human
ccccaacaccauuaguguc

SEQ ID NO: 824145 - RNA, 19 nt, Human
ccccaacaccauuaguguc

SEQ ID NO: 824146 - RNA, 20 nt, Human
ccccagaagcaucccccacc

SEQ ID NO: 824147 - RNA, 20 nt, Human
ccccagaagcaucccccacc

SEQ ID NO: 824148 - RNA, 21 nt, Human
ccccagccaggagguggaggc

SEQ ID NO: 824149 - RNA, 21 nt, Human
ccccagccaggagguggaggc

SEQ ID NO: 824150 - RNA, 20 nt, Human
ccccaggggccgggcccucu

SEQ ID NO: 824151 - RNA, 23 nt, Human
ccccaggggccgggcccucugcc

SEQ ID NO: 824152 - RNA, 21 nt, Human
ccccaucccacaaaccuggca

SEQ ID NO: 824153 - RNA, 21 nt, Human
ccccaucccacaaaccuggca

SEQ ID NO: 824154 - RNA, 22 nt, Human
ccccaucccacaaaccuggcac

SEQ ID NO: 824155 - RNA, 22 nt, Human
ccccaucccacaaaccuggcac

SEQ ID NO: 824156 - RNA, 23 nt, Human
cccccaacaccauuagugucugc

SEQ ID NO: 824157 - RNA, 18 nt, Human
cccccagaagcauccccc

SEQ ID NO: 824158 - RNA, 18 nt, Human
cccccagaagcauccccc

SEQ ID NO: 824159 - RNA, 19 nt, Human
cccccagaagcauccccca

SEQ ID NO: 824160 - RNA, 19 nt, Human
cccccagaagcauccccca

SEQ ID NO: 824161 - RNA, 22 nt, Human
cccccagaagcaucccccaccc

SEQ ID NO: 824162 - RNA, 22 nt, Human
cccccagaagcaucccccaccc

SEQ ID NO: 824163 - RNA, 22 nt, Human
ccccccaggggccgggcccucu

SEQ ID NO: 824164 - RNA, 18 nt, Human
ccccugcgggcacccaga

SEQ ID NO: 824165 - RNA, 21 nt, Human
ccccuggggaaggggccaccg

SEQ ID NO: 824166 - RNA, 22 nt, Human
ccccuggggaaggggccaccgg

SEQ ID NO: 824167 - RNA, 24 nt, Human
cccgcccuggcccaccacucugga

SEQ ID NO: 824168 - RNA, 24 nt, Human
cccgcccuggcccaccacucugga

SEQ ID NO: 824169 - RNA, 23 nt, Human
cccggccgcagccuucguguccc

SEQ ID NO: 824170 - RNA, 23 nt, Human
cccggccgcagccuucguguccc

SEQ ID NO: 824171 - RNA, 19 nt, Human
cccguccgccaccauuccc

SEQ ID NO: 824172 - RNA, 19 nt, Human
cccguccgccaccauuccc

SEQ ID NO: 824173 - RNA, 20 nt, Human
cccguccgccaccauuccca

SEQ ID NO: 824174 - RNA, 23 nt, Human
cccucaaaaucggcuaaggacag

SEQ ID NO: 824175 - RNA, 23 nt, Human
cccucaaaaucggcuaaggacag

SEQ ID NO: 824176 - RNA, 22 nt, Human
cccuggaggagugccucccgcc

SEQ ID NO: 824177 - RNA, 19 nt, Human
ccgaugguaaaaagcacga

SEQ ID NO: 824178 - RNA, 19 nt, Human
ccgaugguaaaaagcacga

SEQ ID NO: 824179 - RNA, 21 nt, Human
ccgcaccuccugccugccaag

SEQ ID NO: 824180 - RNA, 21 nt, Human
ccgcaccuccugccugccaag

SEQ ID NO: 824181 - RNA, 19 nt, Human
ccgcagcgcuuucuagaug

SEQ ID NO: 824182 - RNA, 19 nt, Human
ccgcagcgcuuucuagaug

SEQ ID NO: 824183 - RNA, 18 nt, Human
ccgccaggccccagcccc

SEQ ID NO: 824184 - RNA, 18 nt, Human
ccgccaggccccagcccc

SEQ ID NO: 824185 - RNA, 19 nt, Human
ccguccgccaccauuccca

SEQ ID NO: 824186 - RNA, 24 nt, Human
ccucaccucugcccucccgcuccc

SEQ ID NO: 824187 - RNA, 24 nt, Human
ccucaccucugcccucccgcuccc

SEQ ID NO: 824188 - RNA, 19 nt, Human
ccucccgcccaggggcggg

SEQ ID NO: 824189 - RNA, 18 nt, Human
ccucgcagccagggcugg

SEQ ID NO: 824190 - RNA, 18 nt, Human
ccucgcagccagggcugg

SEQ ID NO: 824191 - RNA, 21 nt, Human
ccucucaggcuccagcaguca

SEQ ID NO: 824192 - RNA, 21 nt, Human
ccucucaggcuccagcaguca

SEQ ID NO: 824193 - RNA, 18 nt, Human
ccugggcccaaauccacc

SEQ ID NO: 824194 - RNA, 18 nt, Human
ccugggcccaaauccacc

SEQ ID NO: 824195 - RNA, 18 nt, Human
ccuugggugccaucugcg

SEQ ID NO: 824196 - RNA, 18 nt, Human
ccuugggugccaucugcg

SEQ ID NO: 824197 - RNA, 21 nt, Human
cgacacacacgucccccagga

SEQ ID NO: 824198 - RNA, 19 nt, Human
cgagaagcaagagugaauc

SEQ ID NO: 824199 - RNA, 21 nt, Human
cgcacagccaccaacacacac

SEQ ID NO: 824200 - RNA, 22 nt, Human
cgcuaacccccaucccacaaac

SEQ ID NO: 824201 - RNA, 22 nt, Human
cgcuaacccccaucccacaaac

SEQ ID NO: 824202 - RNA, 19 nt, Human
cgcuaagaaacccuggcag

SEQ ID NO: 824203 - RNA, 19 nt, Human
cgcuaagaaacccuggcag

SEQ ID NO: 824204 - RNA, 21 nt, Human
cggcaaacauaagagacuuuc

SEQ ID NO: 824205 - RNA, 23 nt, Human
cggcaaacauaagagacuuucca

SEQ ID NO: 824206 - RNA, 23 nt, Human
cguccgccaccauucccagagcu

SEQ ID NO: 824207 - RNA, 23 nt, Human
cguccgccaccauucccagagcu

SEQ ID NO: 824208 - RNA, 25 nt, Human
cgugcgcacagccaccaacacacag

SEQ ID NO: 824209 - RNA, 20 nt, Human
cucagggcagcagcagugcu

SEQ ID NO: 824210 - RNA, 23 nt, Human
cucccugcaccagcccagccgcc

SEQ ID NO: 824211 - RNA, 23 nt, Human
cucccugcaccagcccagccgcc

SEQ ID NO: 824212 - RNA, 19 nt, Human
cuccucaccucugcccucc

SEQ ID NO: 824213 - RNA, 19 nt, Human
cuccucaccucugcccucc

SEQ ID NO: 824214 - RNA, 21 nt, Human
cuccuccaccucucaggcucc

SEQ ID NO: 824215 - RNA, 21 nt, Human
cuccuccaccucucaggcucc

SEQ ID NO: 824216 - RNA, 23 nt, Human
cuccuccaccucucaggcuccag

SEQ ID NO: 824217 - RNA, 23 nt, Human
cuccuccaccucucaggcuccag

SEQ ID NO: 824218 - RNA, 23 nt, Human
cugcagcccaccaggaaggcacc

SEQ ID NO: 824219 - RNA, 18 nt, Human
cugcgggcacccagaacc

SEQ ID NO: 824220 - RNA, 22 nt, Human
cugggcccaaauccaccugcuc

SEQ ID NO: 824221 - RNA, 22 nt, Human
cugggcccaaauccaccugcuc

SEQ ID NO: 824222 - RNA, 19 nt, Human
cugggcccccccacacagg

SEQ ID NO: 824223 - RNA, 23 nt, Human
cuggggagagaaagacaaccugu

SEQ ID NO: 824224 - RNA, 23 nt, Human
cuggggagagaaagacaaccugu

SEQ ID NO: 824225 - RNA, 20 nt, Human
cuuuggggguucaauggguc

SEQ ID NO: 824226 - RNA, 20 nt, Human
cuuuggggguucaauggguc

SEQ ID NO: 824227 - RNA, 20 nt, Human
gaacuccuccaccucucagg

SEQ ID NO: 824228 - RNA, 20 nt, Human
gaacuccuccaccucucagg

SEQ ID NO: 824229 - RNA, 23 nt, Human
gaagcaucccccacccccaucuc

SEQ ID NO: 824230 - RNA, 22 nt, Human
gaagcuuccggcugucccgccc

SEQ ID NO: 824231 - RNA, 20 nt, Human
gacacacacgucccccagga

SEQ ID NO: 824232 - RNA, 18 nt, Human
gacuuuguggagagaaag

SEQ ID NO: 824233 - RNA, 18 nt, Human
gacuuuguggagagaaag

SEQ ID NO: 824234 - RNA, 23 nt, Human
gagagcccuggaggagugccucc

SEQ ID NO: 824235 - RNA, 23 nt, Human
gagagcccuggaggagugccucc

SEQ ID NO: 824236 - RNA, 20 nt, Human
gagucugcuggucagggagg

SEQ ID NO: 824237 - RNA, 20 nt, Human
gagucugcuggucagggagg

SEQ ID NO: 824238 - RNA, 23 nt, Human
gaugccaaaacauccacagagaa

SEQ ID NO: 824239 - RNA, 20 nt, Human
gcacagccaccaacacacac

SEQ ID NO: 824240 - RNA, 23 nt, Human
gcacccagaaccuuccauccacc

SEQ ID NO: 824241 - RNA, 18 nt, Human
gcagccuucgugucccuc

SEQ ID NO: 824242 - RNA, 18 nt, Human
gcagccuucgugucccuc

SEQ ID NO: 824243 - RNA, 19 nt, Human
gccacaggguucccucaaa

SEQ ID NO: 824244 - RNA, 18 nt, Human
gccacagguucccucaaa

SEQ ID NO: 824245 - RNA, 19 nt, Human
gcccagccgccaggcccca

SEQ ID NO: 824246 - RNA, 19 nt, Human
gcccagccgccaggcccca

SEQ ID NO: 824247 - RNA, 21 nt, Human
gccugccaagugcuggcccgg

SEQ ID NO: 824248 - RNA, 21 nt, Human
gccuuccaggagcgcaucggg

SEQ ID NO: 824249 - RNA, 21 nt, Human
gccuuccaggagcgcaucggg

SEQ ID NO: 824250 - RNA, 19 nt, Human
gcuacaggaggccgcugcu

SEQ ID NO: 824251 - RNA, 19 nt, Human
gcuacaggaggccgcugcu

SEQ ID NO: 824252 - RNA, 24 nt, Human
ggaaacugggaccagggugggagg

SEQ ID NO: 824253 - RNA, 24 nt, Human
ggaaacugggaccagggugggagg

SEQ ID NO: 824254 - RNA, 22 nt, Human
ggacaggugccacaggguuccc

SEQ ID NO: 824255 - RNA, 23 nt, Human
ggaggccagcccgcccuggcccc

SEQ ID NO: 824256 - RNA, 23 nt, Human
ggaggccagcccgcccuggcccc

SEQ ID NO: 824257 - RNA, 22 nt, Human
ggcagaggagggaugggggggc

SEQ ID NO: 824258 - RNA, 22 nt, Human
ggcagaggagggaugggggggc

SEQ ID NO: 824259 - RNA, 18 nt, Human
ggccugggggcguggcug

SEQ ID NO: 824260 - RNA, 18 nt, Human
ggccugggggcguggcug

SEQ ID NO: 824261 - RNA, 23 nt, Human
ggcgggguggggccagggauguu

SEQ ID NO: 824262 - RNA, 23 nt, Human
ggcgggguggggccagggauguu

SEQ ID NO: 824263 - RNA, 20 nt, Human
ggcguuucccucagggcagc

SEQ ID NO: 824264 - RNA, 24 nt, Human
gggaaacugggaccagggugggag

SEQ ID NO: 824265 - RNA, 24 nt, Human
gggaaacugggaccagggugggag

SEQ ID NO: 824266 - RNA, 23 nt, Human
gggaagcggguugaguuaaaagg

SEQ ID NO: 824267 - RNA, 18 nt, Human
gggaggugagucugcugg

SEQ ID NO: 824268 - RNA, 18 nt, Human
gggaggugagucugcugg

SEQ ID NO: 824269 - RNA, 22 nt, Human
gggaggugagucugcuggucag

SEQ ID NO: 824270 - RNA, 22 nt, Human
gggaggugagucugcuggucag

SEQ ID NO: 824271 - RNA, 21 nt, Human
gggcaaggcagaggugacagc

SEQ ID NO: 824272 - RNA, 21 nt, Human
gggcaaggcagaggugacagc

SEQ ID NO: 824273 - RNA, 19 nt, Human
gggcagcagcagugcuggc

SEQ ID NO: 824274 - RNA, 18 nt, Human
gggcaggaggccagcagc

SEQ ID NO: 824275 - RNA, 28 nt, Human
gggcccccagaagcaucccccacccccu

SEQ ID NO: 824276 - RNA, 28 nt, Human
gggcccccagaagcaucccccacccccu

SEQ ID NO: 824277 - RNA, 21 nt, Human
gggcccucugccagucccggc

SEQ ID NO: 824278 - RNA, 18 nt, Human
gggcguggcugcugugag

SEQ ID NO: 824279 - RNA, 18 nt, Human
gggcguggcugcugugag

SEQ ID NO: 824280 - RNA, 21 nt, Human
gggggcguggcugcugugagg

SEQ ID NO: 824281 - RNA, 21 nt, Human
gggggcguggcugcugugagg

SEQ ID NO: 824282 - RNA, 21 nt, Human
gggggggcucaggccucggcu

SEQ ID NO: 824283 - RNA, 20 nt, Human
gucacugcacaucccucuuu

SEQ ID NO: 824284 - RNA, 21 nt, Human
guccgccaccauucccagagc

SEQ ID NO: 824285 - RNA, 21 nt, Human
guccgccaccauucccagagc

SEQ ID NO: 824286 - RNA, 23 nt, Human
gugccccagccaggagguggagg

SEQ ID NO: 824287 - RNA, 23 nt, Human
gugccccagccaggagguggagg

SEQ ID NO: 824288 - RNA, 19 nt, Human
guggaaccugggaccaggg

SEQ ID NO: 824289 - RNA, 19 nt, Human
guggaaccugggaccaggg

SEQ ID NO: 824290 - RNA, 24 nt, Human
guuccaagaccccccaacaccauu

SEQ ID NO: 824291 - RNA, 23 nt, Human
guucugggcacacaauggggagg

SEQ ID NO: 824292 - RNA, 23 nt, Human
guucugggcacacaauggggagg

SEQ ID NO: 824293 - RNA, 21 nt, Human
uaaaguagcaaugccucuucc

SEQ ID NO: 824294 - RNA, 21 nt, Human
uaaaguagcaaugccucuucc

SEQ ID NO: 824295 - RNA, 28 nt, Human
uaagaguaaggccacugugggguauaac

SEQ ID NO: 824296 - RNA, 21 nt, Human
uaaggcaagaggagaaaaugc

SEQ ID NO: 824297 - RNA, 21 nt, Human
uaaggcaagaggagaaaaugc

SEQ ID NO: 824298 - RNA, 22 nt, Human
uacccggguacagaagaaacaa

SEQ ID NO: 824299 - RNA, 19 nt, Human
uagaaagagcaacauaagg

SEQ ID NO: 824300 - RNA, 19 nt, Human
uagagucuuuacaagucau

SEQ ID NO: 824301 - RNA, 19 nt, Human
uagagucuuuacaagucau

SEQ ID NO: 824302 - RNA, 20 nt, Human
uagcaaugccucuuccuuug

SEQ ID NO: 824303 - RNA, 20 nt, Human
uagcaaugccucuuccuuug

SEQ ID NO: 824304 - RNA, 24 nt, Human
uagugacaccagcggacccaaaaa

SEQ ID NO: 824305 - RNA, 24 nt, Human
uagugacaccagcggacccaaaaa

SEQ ID NO: 824306 - RNA, 22 nt, Human
ucacacaccugcccccuguccc

SEQ ID NO: 824307 - RNA, 24 nt, Human
ucagugaaacagguuuuaaaaaga

SEQ ID NO: 824308 - RNA, 24 nt, Human
ucagugaaacagguuuuaaaaaga

SEQ ID NO: 824309 - RNA, 21 nt, Human
uccaagaccccccaacaccau

SEQ ID NO: 824310 - RNA, 21 nt, Human
uccaagaccccccaacaccau

SEQ ID NO: 824311 - RNA, 27 nt, Human
uccaagaccccccaacaccauuagugu

SEQ ID NO: 824312 - RNA, 28 nt, Human
uccaagaccccccaacaccauuaguguc

SEQ ID NO: 824313 - RNA, 23 nt, Human
uccacagagaaaccgcuaagaaa

SEQ ID NO: 824314 - RNA, 20 nt, Human
uccaggugucuaaagaugcc

SEQ ID NO: 824315 - RNA, 18 nt, Human
ucccagguuuuugcucuc

SEQ ID NO: 824316 - RNA, 27 nt, Human
ucccccaggacuuucccaagauggugc

SEQ ID NO: 824317 - RNA, 27 nt, Human
ucccccaggacuuucccaauauggugc

SEQ ID NO: 824318 - RNA, 21 nt, Human
ucccgcccacaccaugcacgg

SEQ ID NO: 824319 - RNA, 21 nt, Human
ucccgcccacaccaugcacgg

SEQ ID NO: 824320 - RNA, 18 nt, Human
ucccggccuugggugcca

SEQ ID NO: 824321 - RNA, 18 nt, Human
ucccggccuugggugcca

SEQ ID NO: 824322 - RNA, 20 nt, Human
ucccuagagaaccagagccu

SEQ ID NO: 824323 - RNA, 20 nt, Human
ucccuagagaaccagagccu

SEQ ID NO: 824324 - RNA, 20 nt, Human
ucccucagggcagcagcagu

SEQ ID NO: 824325 - RNA, 21 nt, Human
ucccugcaccagcccagccgc

SEQ ID NO: 824326 - RNA, 22 nt, Human
ucccugcaccagcccagccgcc

SEQ ID NO: 824327 - RNA, 22 nt, Human
ucccugcaccagcccagccgcc

SEQ ID NO: 824328 - RNA, 21 nt, Human
uccugggugggugggggggcu

SEQ ID NO: 824329 - RNA, 21 nt, Human
uccugggugggugggggggcu

SEQ ID NO: 824330 - RNA, 20 nt, Human
ucgcagccagggcugggaca

SEQ ID NO: 824331 - RNA, 24 nt, Human
ucugcagcccaccaggaaggcacc

SEQ ID NO: 824332 - RNA, 24 nt, Human
ucugccagagcccagggcccucca

SEQ ID NO: 824333 - RNA, 24 nt, Human
ucugccagagcccagggcccucca

SEQ ID NO: 824334 - RNA, 22 nt, Human
ugaccacgucacugcacauccc

SEQ ID NO: 824335 - RNA, 22 nt, Human
ugaccacgucacugcacauccc

SEQ ID NO: 824336 - RNA, 23 nt, Human
ugacccaaagaccuuccuagaaa

SEQ ID NO: 824337 - RNA, 23 nt, Human
ugacccaaagaccuuccuagaaa

SEQ ID NO: 824338 - RNA, 24 nt, Human
ugacccaaagaccuuccuagaaac

SEQ ID NO: 824339 - RNA, 24 nt, Human
ugacccaaagaccuuccuagaaac

SEQ ID NO: 824340 - RNA, 19 nt, Human
ugacccaggacuccugucc

SEQ ID NO: 824341 - RNA, 19 nt, Human
ugacccaggacuccugucc

SEQ ID NO: 824342 - RNA, 18 nt, Human
ugcaaaaagcauucaucg

SEQ ID NO: 824343 - RNA, 18 nt, Human
ugcaguuacugcccuucc

SEQ ID NO: 824344 - RNA, 18 nt, Human
ugcaguuacugcccuucc

SEQ ID NO: 824345 - RNA, 22 nt, Human
ugccugccaagugcuggcccgg

SEQ ID NO: 824346 - RNA, 18 nt, Human
ugccuuggugaccacguc

SEQ ID NO: 824347 - RNA, 18 nt, Human
ugccuuggugaccacguc

SEQ ID NO: 824348 - RNA, 18 nt, Human
ugcuggguggauggcuca

SEQ ID NO: 824349 - RNA, 18 nt, Human
ugcuggguggauggcuca

SEQ ID NO: 824350 - RNA, 21 nt, Human
ugcuuuggggguucaaugggu

SEQ ID NO: 824351 - RNA, 21 nt, Human
ugcuuuggggguucaaugggu

SEQ ID NO: 824352 - RNA, 24 nt, Human
uggaaccugggaccagggugggag

SEQ ID NO: 824353 - RNA, 18 nt, Human
uggagagaaagaugcuuu

SEQ ID NO: 824354 - RNA, 22 nt, Human
uggaggagugccuccccccaau

SEQ ID NO: 824355 - RNA, 18 nt, Human
uggcagaggagggauggg

SEQ ID NO: 824356 - RNA, 18 nt, Human
uggcagaggagggauggg

SEQ ID NO: 824357 - RNA, 23 nt, Human
uggcagggcucaaaaggggccgg

SEQ ID NO: 824358 - RNA, 19 nt, Human
uggcgggguggggccaggg

SEQ ID NO: 824359 - RNA, 22 nt, Human
ugggaccagggugggaggcugg

SEQ ID NO: 824360 - RNA, 22 nt, Human
ugggaccagggugggaggcugg

SEQ ID NO: 824361 - RNA, 22 nt, Human
ugggaccagggugggaggcugg

SEQ ID NO: 824362 - RNA, 22 nt, Human
ugggaccagggugggaggcugg

SEQ ID NO: 824363 - RNA, 23 nt, Human
ugggaccagggugggaggcuggg

SEQ ID NO: 824364 - RNA, 23 nt, Human
ugggaccagggugggaggcuggg

SEQ ID NO: 824365 - RNA, 23 nt, Human
ugggaccagggugggaggcuggg

SEQ ID NO: 824366 - RNA, 23 nt, Human
ugggaccagggugggaggcuggg

SEQ ID NO: 824367 - RNA, 18 nt, Human
ugggaggcuggggggcuu

SEQ ID NO: 824368 - RNA, 18 nt, Human
ugggaggcuggggggcuu

SEQ ID NO: 824369 - RNA, 21 nt, Human
ugggaggcuggggggcuugcg

SEQ ID NO: 824370 - RNA, 28 nt, Human
ugggcccaaauccaccugcucaagucag

SEQ ID NO: 824371 - RNA, 23 nt, Human
ugggccugggggcguggcugcug

SEQ ID NO: 824372 - RNA, 23 nt, Human
ugggccugggggcguggcugcug

SEQ ID NO: 824373 - RNA, 20 nt, Human
uggggaaggggccaccgggc

SEQ ID NO: 824374 - RNA, 21 nt, Human
uggggagagaaagacaaccug

SEQ ID NO: 824375 - RNA, 21 nt, Human
uggggagagaaagacaaccug

SEQ ID NO: 824376 - RNA, 19 nt, Human
uggggcaccaggaccaucu

SEQ ID NO: 824377 - RNA, 19 nt, Human
uggggcaccaggaccaucu

SEQ ID NO: 824378 - RNA, 18 nt, Human
uggggccagggauguucu

SEQ ID NO: 824379 - RNA, 18 nt, Human
uggggccagggauguucu

SEQ ID NO: 824380 - RNA, 20 nt, Human
uggggccagggauguucugg

SEQ ID NO: 824381 - RNA, 20 nt, Human
uggggccagggauguucugg

SEQ ID NO: 824382 - RNA, 21 nt, Human
uggggccagggauguucuggg

SEQ ID NO: 824383 - RNA, 21 nt, Human
uggggccagggauguucuggg

SEQ ID NO: 824384 - RNA, 21 nt, Human
ugggggggcucaggccucggc

SEQ ID NO: 824385 - RNA, 24 nt, Human
ugggugggggggcuugcccuccag

SEQ ID NO: 824386 - RNA, 27 nt, Human
ugggugggggggcuugcccuccagugg

SEQ ID NO: 824387 - RNA, 19 nt, Human
ugucaccgacuacagaagc

SEQ ID NO: 824388 - RNA, 19 nt, Human
ugucaccgacuacagaagc

SEQ ID NO: 824389 - RNA, 20 nt, Human
ugugcugggaagcggguuga

SEQ ID NO: 824390 - RNA, 20 nt, Human
ugugcugggaagcggguuga

SEQ ID NO: 824391 - RNA, 20 nt, Human
uguggaaccugggaccaggg

SEQ ID NO: 824392 - RNA, 20 nt, Human
uguggaaccugggaccaggg

SEQ ID NO: 824393 - RNA, 21 nt, Human
uguggagagaaagaugcuuug

SEQ ID NO: 824394 - RNA, 23 nt, Human
uuccaagaccccccaacaccauu

SEQ ID NO: 824395 - RNA, 21 nt, Human
uuccaggugucuaaagaugcc

SEQ ID NO: 824396 - RNA, 21 nt, Human
uuccaggugucuaaagaugcc

SEQ ID NO: 824397 - RNA, 20 nt, Human
uucccagcuccguucucuug

SEQ ID NO: 824398 - RNA, 20 nt, Human
uucccagcuccguucucuug

SEQ ID NO: 824399 - RNA, 23 nt, Human
uucccggccuugggugccaucug

SEQ ID NO: 824400 - RNA, 23 nt, Human
uucccggccuugggugccaucug

SEQ ID NO: 824401 - RNA, 22 nt, Human
uuccggcugucccgcccacacc

SEQ ID NO: 824402 - RNA, 22 nt, Human
uuccggcugucccgcccacacc

SEQ ID NO: 824403 - RNA, 23 nt, Human
uugccgagaaguuaaaaugaccc

SEQ ID NO: 824404 - RNA, 23 nt, Human
uugccgagaaguuaaaaugaccc

SEQ ID NO: 824405 - RNA, 19 nt, Human
uuggggguucaauggguca

SEQ ID NO: 824406 - RNA, 19 nt, Human
uuggggguucaauggguca

SEQ ID NO: 824407 - RNA, 20 nt, Human
uuugcgggaaacugggacca

SEQ ID NO: 824408 - RNA, 20 nt, Human
uuugcgggaaacugggacca

SEQ ID NO: 824409 - RNA, 18 nt, Human
aaacagaaaccaccacag

SEQ ID NO: 824410 - RNA, 27 nt, Human
aacuugccucacucucaguccucuccc

SEQ ID NO: 824411 - RNA, 18 nt, Human
aagaaacagaaaccacca

SEQ ID NO: 824412 - RNA, 24 nt, Human
aagaaacagaaaccaccacagaca

SEQ ID NO: 824413 - RNA, 19 nt, Human
acagaaaccaccacagaca

SEQ ID NO: 824414 - RNA, 27 nt, Human
acagacagacagacggacaggggcugg

SEQ ID NO: 824415 - RNA, 25 nt, Human
acgcagcaccccagccccccacccc

SEQ ID NO: 824416 - RNA, 20 nt, Human
agacagacagacagacggaa

SEQ ID NO: 824417 - RNA, 24 nt, Human
agacagacagacagacggacaggg

SEQ ID NO: 824418 - RNA, 18 nt, Human
agccuccggcucggucuc

SEQ ID NO: 824419 - RNA, 23 nt, Human
aggcagcuuccuaucucucucuu

SEQ ID NO: 824420 - RNA, 22 nt, Human
augauccuaccaugccucccaa

SEQ ID NO: 824421 - RNA, 19 nt, Human
caaaccagucagguccccc

SEQ ID NO: 824422 - RNA, 19 nt, Human
caaggggccccaccaggcc

SEQ ID NO: 824423 - RNA, 22 nt, Human
caccacagacagacagacagac

SEQ ID NO: 824424 - RNA, 21 nt, Human
cacuggcuacgcagcacccca

SEQ ID NO: 824425 - RNA, 21 nt, Human
cagacacuccugcccuccuca

SEQ ID NO: 824426 - RNA, 21 nt, Human
cagcaccccagccccccaccc

SEQ ID NO: 824427 - RNA, 25 nt, Human
cagccaaaccagucaggucccccaa

SEQ ID NO: 824428 - RNA, 21 nt, Human
cagccuccggcucggucuccc

SEQ ID NO: 824429 - RNA, 19 nt, Human
caggucccccaaauauagc

SEQ ID NO: 824430 - RNA, 23 nt, Human
caugccucccaagaaacagaaac

SEQ ID NO: 824431 - RNA, 21 nt, Human
ccacagacagacagacagacg

SEQ ID NO: 824432 - RNA, 24 nt, Human
ccacagacagacagacagacggac

SEQ ID NO: 824433 - RNA, 18 nt, Human
ccaccaggcccucugccc

SEQ ID NO: 824434 - RNA, 19 nt, Human
cccaagaaacagaaaccac

SEQ ID NO: 824435 - RNA, 19 nt, Human
cccaagaaacagaaaccac

SEQ ID NO: 824436 - RNA, 31 nt, Human
cccaagaaacagaaaccaccacagacagacu

SEQ ID NO: 824437 - RNA, 21 nt, Human
cccaccccacccauagcagcg

SEQ ID NO: 824438 - RNA, 20 nt, Human
ccccagccccccaccccacc

SEQ ID NO: 824439 - RNA, 22 nt, Human
cccccaccccacccauagcagc

SEQ ID NO: 824440 - RNA, 22 nt, Human
cccccuugucuucuaucaccua

SEQ ID NO: 824441 - RNA, 19 nt, Human
ccccuuugcaagggguggc

SEQ ID NO: 824442 - RNA, 19 nt, Human
ccuaccaugccucccaaga

SEQ ID NO: 824443 - RNA, 22 nt, Human
ccuacucggaccuucucucuca

SEQ ID NO: 824444 - RNA, 22 nt, Human
ccucacucucaguccucuccca

SEQ ID NO: 824445 - RNA, 19 nt, Human
ccucccaagaaacagaaac

SEQ ID NO: 824446 - RNA, 22 nt, Human
ccucccaagaaacagaaaccac

SEQ ID NO: 824447 - RNA, 26 nt, Human
ccucccugccccagcacuucugggga

SEQ ID NO: 824448 - RNA, 23 nt, Human
cgaggcagcuuccuaucucucuc

SEQ ID NO: 824449 - RNA, 21 nt, Human
cguuugugggacacacccccu

SEQ ID NO: 824450 - RNA, 24 nt, Human
cucaugggacuccagccaaaccag

SEQ ID NO: 824451 - RNA, 21 nt, Human
cuccagacacuccugcccucc

SEQ ID NO: 824452 - RNA, 21 nt, Human
cuccucagcuggcguccuggc

SEQ ID NO: 824453 - RNA, 22 nt, Human
cuggggaagcagcgucucgggc

SEQ ID NO: 824454 - RNA, 23 nt, Human
cuuaugauccuaccaugccuccc

SEQ ID NO: 824455 - RNA, 21 nt, Human
cuuaugauccuaccaugccuu

SEQ ID NO: 824456 - RNA, 22 nt, Human
gaacuugccucacucucagucc

SEQ ID NO: 824457 - RNA, 21 nt, Human
ggacacacccccuuugcaagg

SEQ ID NO: 824458 - RNA, 21 nt, Human
ggaggggaaugacuuaugauc

SEQ ID NO: 824459 - RNA, 22 nt, Human
ggcuacgcagcaccccagcccc

SEQ ID NO: 824460 - RNA, 22 nt, Human
gggccccaccaggcccucugcc

SEQ ID NO: 824461 - RNA, 26 nt, Human
gucuucccuucuccuagcaaggggcc

SEQ ID NO: 824462 - RNA, 23 nt, Human
uaccaugccucccaagaaacaga

SEQ ID NO: 824463 - RNA, 19 nt, Human
ucaaacacuggcuacgcag

SEQ ID NO: 824464 - RNA, 22 nt, Human
ucaguccucucccacuuucccc

SEQ ID NO: 824465 - RNA, 18 nt, Human
uccugggccucccugccc

SEQ ID NO: 824466 - RNA, 18 nt, Human
ugcaagggguggccccga

SEQ ID NO: 824467 - RNA, 23 nt, Human
ugcaagggguggccccgaggcag

SEQ ID NO: 824468 - RNA, 24 nt, Human
ugccucacucucaguccucuccca

SEQ ID NO: 824469 - RNA, 23 nt, Human
uggaaggggaggggaaugacuua

SEQ ID NO: 824470 - RNA, 23 nt, Human
uugaaaagaaagucaaacacugg

SEQ ID NO: 824471 - RNA, 19 nt, Human
uuugugggacacacccccu

SEQ ID NO: 824472 - RNA, 23 nt, Human
aaaaaaaaaaagacgggcuaagg

SEQ ID NO: 824473 - RNA, 21 nt, Human
aaaaaaaaaagacgggcuaag

SEQ ID NO: 824474 - RNA, 23 nt, Human
aaaaaaagacgggcuaagguuua

SEQ ID NO: 824475 - RNA, 18 nt, Human
aaagccuuggccucaucc

SEQ ID NO: 824476 - RNA, 20 nt, Human
aagcaucucccaagccagac

SEQ ID NO: 824477 - RNA, 21 nt, Human
acaaccaaaagauaagaaagc

SEQ ID NO: 824478 - RNA, 23 nt, Human
acaaccaaaagauaagaaagccu

SEQ ID NO: 824479 - RNA, 20 nt, Human
accucauuccugagguggaa

SEQ ID NO: 824480 - RNA, 19 nt, Human
agaaagccuuggccucauc

SEQ ID NO: 824481 - RNA, 25 nt, Human
agacaaucaagaguacuauugaaac

SEQ ID NO: 824482 - RNA, 25 nt, Human
agcagagacaaccaaaagauaagaa

SEQ ID NO: 824483 - RNA, 20 nt, Human
aggccuccauccuaggccag

SEQ ID NO: 824484 - RNA, 22 nt, Human
aguugguucucucuucaguagg

SEQ ID NO: 824485 - RNA, 20 nt, Human
caaacuaaaugucccuuccc

SEQ ID NO: 824486 - RNA, 21 nt, Human
caaacuaaaugucccuucccc

SEQ ID NO: 824487 - RNA, 22 nt, Human
caacagcaagaaaccugaaauc

SEQ ID NO: 824488 - RNA, 23 nt, Human
caacagcaagaaaccugaaaucc

SEQ ID NO: 824489 - RNA, 24 nt, Human
caacagcaagaaaccugaaaucca

SEQ ID NO: 824490 - RNA, 23 nt, Human
cacaaccucauuccugaggugga

SEQ ID NO: 824491 - RNA, 19 nt, Human
cagcaagaaaccugaaauc

SEQ ID NO: 824492 - RNA, 21 nt, Human
caggaaagaucacaaccucau

SEQ ID NO: 824493 - RNA, 22 nt, Human
cauccccaucaggagauagccu

SEQ ID NO: 824494 - RNA, 20 nt, Human
cauuuaaaaaaccccuucug

SEQ ID NO: 824495 - RNA, 20 nt, Human
ccaacaaagguuaccuucuu

SEQ ID NO: 824496 - RNA, 18 nt, Human
ccaggcuccuccauuaag

SEQ ID NO: 824497 - RNA, 22 nt, Human
ccccguucucccugggccuccc

SEQ ID NO: 824498 - RNA, 19 nt, Human
ccuuccccguucucccugg

SEQ ID NO: 824499 - RNA, 25 nt, Human
cucacaaauaagaaacaacuugacc

SEQ ID NO: 824500 - RNA, 23 nt, Human
cuccauccuaggccaggcuccuc

SEQ ID NO: 824501 - RNA, 23 nt, Human
cugaggacugguuccugaugagu

SEQ ID NO: 824502 - RNA, 26 nt, Human
gacuuagcacccuucuggagaacaua

SEQ ID NO: 824503 - RNA, 21 nt, Human
gcuccuccauuaagcagagac

SEQ ID NO: 824504 - RNA, 21 nt, Human
gucaggacaggaaagaucaca

SEQ ID NO: 824505 - RNA, 20 nt, Human
gucccuuccccguucucccu

SEQ ID NO: 824506 - RNA, 21 nt, Human
guugguucucucuucaguagg

SEQ ID NO: 824507 - RNA, 20 nt, Human
uaaaaaaccccuucuggcug

SEQ ID NO: 824508 - RNA, 23 nt, Human
uaagcagagacaaccaaaagaua

SEQ ID NO: 824509 - RNA, 26 nt, Human
ucauuuaaaaaaccccuucuggcugc

SEQ ID NO: 824510 - RNA, 22 nt, Human
uccccguucucccugggccucc

SEQ ID NO: 824511 - RNA, 19 nt, Human
ugacuuagcacccuucugg

SEQ ID NO: 824512 - RNA, 24 nt, Human
ugcaaccugaaagcaucucccaag

SEQ ID NO: 824513 - RNA, 19 nt, Human
uggggguagagaugaugac

SEQ ID NO: 824514 - RNA, 24 nt, Human
uuccccguucucccugggccuccc

SEQ ID NO: 824515 - RNA, 18 nt, Human
accccgcccuccuauagc

SEQ ID NO: 824516 - RNA, 24 nt, Human
agaaaccagaguccacagcgggug

SEQ ID NO: 824517 - RNA, 22 nt, Human
caccccgcccuccuauagcucg

SEQ ID NO: 824518 - RNA, 18 nt, Human
cuccuauagcucggcucc

SEQ ID NO: 824519 - RNA, 18 nt, Human
agaacugugggcuaagca

SEQ ID NO: 824520 - RNA, 23 nt, Human
agaagacaacuuuggaucugggc

SEQ ID NO: 824521 - RNA, 18 nt, Human
caagugaaauggagaacu

SEQ ID NO: 824522 - RNA, 19 nt, Human
cccuaagaugaagacugau

SEQ ID NO: 824523 - RNA, 23 nt, Human
cgagugauuuuucucugugugaa

SEQ ID NO: 824524 - RNA, 20 nt, Human
gagaggcacauucagauuug

SEQ ID NO: 824525 - RNA, 26 nt, Human
gagcgaugcccuaagaugaagacuga

SEQ ID NO: 824526 - RNA, 21 nt, Human
gaguguguuuuuucuccagca

SEQ ID NO: 824527 - RNA, 20 nt, Human
gggcuaagcaaaggagugug

SEQ ID NO: 824528 - RNA, 20 nt, Human
uauguacaugcugguaucug

SEQ ID NO: 824529 - RNA, 21 nt, Human
ucagauuccagcugcugguac

SEQ ID NO: 824530 - RNA, 19 nt, Human
ucagcauuuggaaguucua

SEQ ID NO: 824531 - RNA, 21 nt, Human
ucagugugauugcagccucaa

SEQ ID NO: 824532 - RNA, 19 nt, Human
ucuccagcaggcagugggg

SEQ ID NO: 824533 - RNA, 18 nt, Human
ucuguugggggugucuug

SEQ ID NO: 824534 - RNA, 18 nt, Human
ugaaauggagaacugugg

SEQ ID NO: 824535 - RNA, 22 nt, Human
uggaacagcacgugucuaagug

SEQ ID NO: 824536 - RNA, 23 nt, Human
ugugaguuccucagugugauugc

SEQ ID NO: 824537 - RNA, 18 nt, Human
uguggugugaggaagagc

SEQ ID NO: 824538 - RNA, 23 nt, Human
uguuccaauuaugcguaugucac

SEQ ID NO: 824539 - RNA, 20 nt, Human
uuaugcguaugucaccuccu

SEQ ID NO: 824540 - RNA, 24 nt, Human
uuggaaguucuauguacaugcugg

SEQ ID NO: 824541 - RNA, 28 nt, Human
aacaguccuuagguuacugaccuucugg

SEQ ID NO: 824542 - RNA, 24 nt, Human
accugcagccgccucaccgacucc

SEQ ID NO: 824543 - RNA, 19 nt, Human
agccggaccagcggcuccg

SEQ ID NO: 824544 - RNA, 23 nt, Human
cacucagcggguagaauguagcc

SEQ ID NO: 824545 - RNA, 18 nt, Human
gagcugacgcgacgccug

SEQ ID NO: 824546 - RNA, 20 nt, Human
gguguggguuaagggcacgg

SEQ ID NO: 824547 - RNA, 24 nt, Human
uagaauguagccacaacaaacuuc

SEQ ID NO: 824548 - RNA, 22 nt, Human
ucacaucuccgccagccggacc

SEQ ID NO: 824549 - RNA, 20 nt, Human
ugcgcagcuuuggaaucacc

SEQ ID NO: 824550 - RNA, 20 nt, Human
uggaaucaccagcauuugca

SEQ ID NO: 824551 - RNA, 20 nt, Human
uuuuuuuuuuuuaacagucc

SEQ ID NO: 824552 - RNA, 23 nt, Human
uuuuuuuuuuuuuuuuuuaacag

SEQ ID NO: 824553 - RNA, 20 nt, Human
aaaauccugaacagaaaacc

SEQ ID NO: 824554 - RNA, 18 nt, Human
aaaauguacaagcuacaa

SEQ ID NO: 824555 - RNA, 24 nt, Human
aaacaaaacaaaaacaaucaacga

SEQ ID NO: 824556 - RNA, 22 nt, Human
aaacaaaugaaagauucaaugu

SEQ ID NO: 824557 - RNA, 22 nt, Human
aaacaagaaaaggggagcauaa

SEQ ID NO: 824558 - RNA, 28 nt, Human
aaacagaaucgaaacaaaacaaaaacaa

SEQ ID NO: 824559 - RNA, 21 nt, Human
aaacagacauuauaaugaaac

SEQ ID NO: 824560 - RNA, 23 nt, Human
aaacuagaagcucucuuucccaa

SEQ ID NO: 824561 - RNA, 22 nt, Human
aaagaaaaaguacugaggcgac

SEQ ID NO: 824562 - RNA, 24 nt, Human
aaagaugcaguauccuucuauuuc

SEQ ID NO: 824563 - RNA, 21 nt, Human
aaagcaaaucagaugcagccc

SEQ ID NO: 824564 - RNA, 23 nt, Human
aaaguccuuuuauucauuauugc

SEQ ID NO: 824565 - RNA, 22 nt, Human
aaaucugaaccauaaugaaaac

SEQ ID NO: 824566 - RNA, 18 nt, Human
aaauuagcagaaagggaa

SEQ ID NO: 824567 - RNA, 21 nt, Human
aacaaaacagaaucgaaacaa

SEQ ID NO: 824568 - RNA, 23 nt, Human
aacaacuuaagaucagaccauga

SEQ ID NO: 824569 - RNA, 23 nt, Human
aacacugcuuaauuucugucaau

SEQ ID NO: 824570 - RNA, 20 nt, Human
aacagaaaaccaaaugaaga

SEQ ID NO: 824571 - RNA, 22 nt, Human
aacagcuucaaauuuaaaauca

SEQ ID NO: 824572 - RNA, 19 nt, Human
aaccacuuucuccuuucca

SEQ ID NO: 824573 - RNA, 24 nt, Human
aaccagcacuggcaugcaucaaca

SEQ ID NO: 824574 - RNA, 18 nt, Human
aaccauaaugaaaacggc

SEQ ID NO: 824575 - RNA, 20 nt, Human
aaccccuuucuaaacuaaag

SEQ ID NO: 824576 - RNA, 21 nt, Human
aacucagccacacuucccaug

SEQ ID NO: 824577 - RNA, 25 nt, Human
aagaagcccagucagaagacuugac

SEQ ID NO: 824578 - RNA, 21 nt, Human
aagaugcuauuuaucacuagu

SEQ ID NO: 824579 - RNA, 19 nt, Human
aagcaaaauccugugcagc

SEQ ID NO: 824580 - RNA, 21 nt, Human
aagcaggcuucucagagucca

SEQ ID NO: 824581 - RNA, 21 nt, Human
aagcucucuuucccaacauac

SEQ ID NO: 824582 - RNA, 20 nt, Human
aaguaacucacauuucuaga

SEQ ID NO: 824583 - RNA, 18 nt, Human
aaguaggaguugcauaua

SEQ ID NO: 824584 - RNA, 20 nt, Human
aaucucauuaggagggucuc

SEQ ID NO: 824585 - RNA, 21 nt, Human
aauguguaggaccuccucugg

SEQ ID NO: 824586 - RNA, 22 nt, Human
aauuuuauggggcugauggaac

SEQ ID NO: 824587 - RNA, 20 nt, Human
acaacaaaucguggacagac

SEQ ID NO: 824588 - RNA, 22 nt, Human
acaacaacaauaacaacaaaaa

SEQ ID NO: 824589 - RNA, 21 nt, Human
acaauacagucacuaccccac

SEQ ID NO: 824590 - RNA, 22 nt, Human
acaauacauacacuauacauaa

SEQ ID NO: 824591 - RNA, 25 nt, Human
acacacacacacacacucgcacaca

SEQ ID NO: 824592 - RNA, 25 nt, Human
acacacacacacacucgcacacaca

SEQ ID NO: 824593 - RNA, 23 nt, Human
acacacacggcgucacccgcgca

SEQ ID NO: 824594 - RNA, 19 nt, Human
acagaaagcuggaaaaaaa

SEQ ID NO: 824595 - RNA, 18 nt, Human
acagacacguugauagga

SEQ ID NO: 824596 - RNA, 20 nt, Human
acagcacggaaaacaaugcc

SEQ ID NO: 824597 - RNA, 18 nt, Human
acccacuacuugccaacu

SEQ ID NO: 824598 - RNA, 23 nt, Human
acccgaugugugacucuccauga

SEQ ID NO: 824599 - RNA, 21 nt, Human
acccgcgcacacgcacacgca

SEQ ID NO: 824600 - RNA, 20 nt, Human
acuauacauaaauacaagaa

SEQ ID NO: 824601 - RNA, 28 nt, Human
acugguugcuauuguuuguuacuagggu

SEQ ID NO: 824602 - RNA, 22 nt, Human
agaaaagagaacaauuguaaga

SEQ ID NO: 824603 - RNA, 25 nt, Human
agaaaagagaacaauuguaagaugc

SEQ ID NO: 824604 - RNA, 24 nt, Human
agaaaaugaaaucgguauagaaga

SEQ ID NO: 824605 - RNA, 18 nt, Human
agaagggccccagucugc

SEQ ID NO: 824606 - RNA, 23 nt, Human
agaauagacuggaauaaucaucc

SEQ ID NO: 824607 - RNA, 21 nt, Human
agaauguccagacauuuaaaa

SEQ ID NO: 824608 - RNA, 22 nt, Human
agaauugacccccacacaccaa

SEQ ID NO: 824609 - RNA, 24 nt, Human
agacaacacaugguaagaagccca

SEQ ID NO: 824610 - RNA, 23 nt, Human
agacaagccccaaagaaguuuca

SEQ ID NO: 824611 - RNA, 21 nt, Human
agaccuccaggucaggacccu

SEQ ID NO: 824612 - RNA, 20 nt, Human
agagucaggaaucugggaag

SEQ ID NO: 824613 - RNA, 18 nt, Human
agaucagaccaugaaaag

SEQ ID NO: 824614 - RNA, 21 nt, Human
agcaacaacaacaauaacaac

SEQ ID NO: 824615 - RNA, 21 nt, Human
agcaagcaggacuaaauacaa

SEQ ID NO: 824616 - RNA, 26 nt, Human
agccacagaaagcuggaaaaaaaccc

SEQ ID NO: 824617 - RNA, 18 nt, Human
aggaaauauuaggggaaa

SEQ ID NO: 824618 - RNA, 21 nt, Human
aggaaauauuaggggaaaggg

SEQ ID NO: 824619 - RNA, 20 nt, Human
aggaagagaugaugccuagg

SEQ ID NO: 824620 - RNA, 20 nt, Human
aggacuaaauacaaaucuac

SEQ ID NO: 824621 - RNA, 19 nt, Human
agggaugggaugaugggag

SEQ ID NO: 824622 - RNA, 27 nt, Human
agggauucuuaaaaccucaaaggaaac

SEQ ID NO: 824623 - RNA, 21 nt, Human
aggguuggagaauuuccaggg

SEQ ID NO: 824624 - RNA, 23 nt, Human
aggugcuaaaaaaaacccacugg

SEQ ID NO: 824625 - RNA, 21 nt, Human
auaaaacaagaauaaacaccu

SEQ ID NO: 824626 - RNA, 24 nt, Human
auaaaaugaacaagcaaacaaaua

SEQ ID NO: 824627 - RNA, 24 nt, Human
auacaggcagaccuccaggucaga

SEQ ID NO: 824628 - RNA, 21 nt, Human
auagggcaaaaaaaucaccau

SEQ ID NO: 824629 - RNA, 25 nt, Human
aucaaucucuauacugcaaacagaa

SEQ ID NO: 824630 - RNA, 21 nt, Human
aucacaguccuacuuuuaaaa

SEQ ID NO: 824631 - RNA, 24 nt, Human
augaaucaauacugucagagaccu

SEQ ID NO: 824632 - RNA, 19 nt, Human
augaauucuaaaaaccaag

SEQ ID NO: 824633 - RNA, 22 nt, Human
augaauuuuugagaccuggcag

SEQ ID NO: 824634 - RNA, 23 nt, Human
augaauuuuugagaccuggcaga

SEQ ID NO: 824635 - RNA, 18 nt, Human
augacauaauacauaaga

SEQ ID NO: 824636 - RNA, 23 nt, Human
augcaggcagagucauauauagu

SEQ ID NO: 824637 - RNA, 23 nt, Human
auggacaugagaugaaauggagg

SEQ ID NO: 824638 - RNA, 18 nt, Human
auugcuuggcacacagug

SEQ ID NO: 824639 - RNA, 21 nt, Human
auuuaaaacauuccacaacag

SEQ ID NO: 824640 - RNA, 20 nt, Human
auuuuaaaccauccuggcua

SEQ ID NO: 824641 - RNA, 27 nt, Human
caaaaacaaucaacgacaaacaaauga

SEQ ID NO: 824642 - RNA, 22 nt, Human
caaaacaauacagucacuaccc

SEQ ID NO: 824643 - RNA, 22 nt, Human
caaaaucugagacuggauuaug

SEQ ID NO: 824644 - RNA, 20 nt, Human
caaaaugauucuuaagauga

SEQ ID NO: 824645 - RNA, 21 nt, Human
caaacaacuuaagaucagacc

SEQ ID NO: 824646 - RNA, 18 nt, Human
caaacaagaaaaggggag

SEQ ID NO: 824647 - RNA, 23 nt, Human
caaaucagaugcagcccaucuau

SEQ ID NO: 824648 - RNA, 23 nt, Human
caaauuauuuauaagacuauuua

SEQ ID NO: 824649 - RNA, 22 nt, Human
caacaacaauaacaacaaaaaa

SEQ ID NO: 824650 - RNA, 21 nt, Human
caacacauuugcuugccagca

SEQ ID NO: 824651 - RNA, 28 nt, Human
caaccaagcaggacaacaaacagcagaa

SEQ ID NO: 824652 - RNA, 21 nt, Human
caacuuaagaucagaccauga

SEQ ID NO: 824653 - RNA, 23 nt, Human
caagacaagccccaaagaaguuu

SEQ ID NO: 824654 - RNA, 22 nt, Human
caagcaggacaacaaacagcag

SEQ ID NO: 824655 - RNA, 22 nt, Human
caauacagucacuaccccacag

SEQ ID NO: 824656 - RNA, 26 nt, Human
caauacauacacuauacauaaauaca

SEQ ID NO: 824657 - RNA, 22 nt, Human
cacaacaaaucguggacagaca

SEQ ID NO: 824658 - RNA, 23 nt, Human
cacaacaaaucguggacagacac

SEQ ID NO: 824659 - RNA, 27 nt, Human
cacacacacacacacacucgcacacac

SEQ ID NO: 824660 - RNA, 24 nt, Human
cacacacucgcacacacacggcgg

SEQ ID NO: 824661 - RNA, 18 nt, Human
cacagagucccccucucu

SEQ ID NO: 824662 - RNA, 24 nt, Human
cacgcacacgcagagccucucagc

SEQ ID NO: 824663 - RNA, 18 nt, Human
cacuccauucucugcccu

SEQ ID NO: 824664 - RNA, 23 nt, Human
cagaaucgaaacaaaacaaaaac

SEQ ID NO: 824665 - RNA, 21 nt, Human
cagaaugacaaguugagagug

SEQ ID NO: 824666 - RNA, 24 nt, Human
cagagauaggcgguuucacuuucc

SEQ ID NO: 824667 - RNA, 22 nt, Human
cagagucccccucucucucucc

SEQ ID NO: 824668 - RNA, 18 nt, Human
cagaguucaggagaaggg

SEQ ID NO: 824669 - RNA, 21 nt, Human
cagcacggaaaacaaugccug

SEQ ID NO: 824670 - RNA, 27 nt, Human
cagcacggaaaacaaugccugucucuu

SEQ ID NO: 824671 - RNA, 20 nt, Human
cagccccaccucuuaccuug

SEQ ID NO: 824672 - RNA, 22 nt, Human
cagcucagaaaauguacaagcu

SEQ ID NO: 824673 - RNA, 21 nt, Human
cagcuggacagguagcauucc

SEQ ID NO: 824674 - RNA, 22 nt, Human
caggagaugcugcaguuuccau

SEQ ID NO: 824675 - RNA, 22 nt, Human
caggcuaaaaugcuacuaagua

SEQ ID NO: 824676 - RNA, 24 nt, Human
cagguaacguaucuaaaaauugcc

SEQ ID NO: 824677 - RNA, 20 nt, Human
caguaauuacaggaaaaaac

SEQ ID NO: 824678 - RNA, 24 nt, Human
cagucaacuuuuuaucuggaaauu

SEQ ID NO: 824679 - RNA, 19 nt, Human
caguuuagaaaaugaaauc

SEQ ID NO: 824680 - RNA, 23 nt, Human
caucucagucugguuuccacuuu

SEQ ID NO: 824681 - RNA, 27 nt, Human
caucucagucugguuuccacuuuuuug

SEQ ID NO: 824682 - RNA, 19 nt, Human
caugcacauauccccagcu

SEQ ID NO: 824683 - RNA, 20 nt, Human
cauuagaaaucucagucuaa

SEQ ID NO: 824684 - RNA, 21 nt, Human
ccaaaccacuuucuccuuucc

SEQ ID NO: 824685 - RNA, 18 nt, Human
ccaagcaggacaacaaac

SEQ ID NO: 824686 - RNA, 22 nt, Human
ccaaucaccacguauaaugagc

SEQ ID NO: 824687 - RNA, 22 nt, Human
ccacagaaagcuggaaaaaaac

SEQ ID NO: 824688 - RNA, 19 nt, Human
ccacagagaguugguuugc

SEQ ID NO: 824689 - RNA, 20 nt, Human
ccaugcacauauccccagcu

SEQ ID NO: 824690 - RNA, 23 nt, Human
ccauuaaccgaagaguuaauucc

SEQ ID NO: 824691 - RNA, 21 nt, Human
cccaagaguguuuuguaaaau

SEQ ID NO: 824692 - RNA, 24 nt, Human
cccacauagacaugaacaaaacaa

SEQ ID NO: 824693 - RNA, 21 nt, Human
cccacgugcagugugguggag

SEQ ID NO: 824694 - RNA, 23 nt, Human
ccccacacaccaagaacaacguc

SEQ ID NO: 824695 - RNA, 26 nt, Human
ccccagcugcaaacugaacagcuuca

SEQ ID NO: 824696 - RNA, 23 nt, Human
ccccuuucuaaacuaaagccaaa

SEQ ID NO: 824697 - RNA, 18 nt, Human
cccgcgcacacgcacacg

SEQ ID NO: 824698 - RNA, 19 nt, Human
cccgcgcacacgcacacgc

SEQ ID NO: 824699 - RNA, 20 nt, Human
ccgcgcacacgcacacgcag

SEQ ID NO: 824700 - RNA, 18 nt, Human
ccuaaacacuacagagua

SEQ ID NO: 824701 - RNA, 24 nt, Human
ccucaaaggcugaaagucauaacu

SEQ ID NO: 824702 - RNA, 20 nt, Human
ccucacacagagucccccuc

SEQ ID NO: 824703 - RNA, 20 nt, Human
ccucugagagaaucucauua

SEQ ID NO: 824704 - RNA, 22 nt, Human
ccugcgguccagguaaaaggac

SEQ ID NO: 824705 - RNA, 22 nt, Human
ccuggggucagagacccaagag

SEQ ID NO: 824706 - RNA, 20 nt, Human
ccuuuaggauucuacugcuu

SEQ ID NO: 824707 - RNA, 18 nt, Human
ccuuuucaggaaaagaca

SEQ ID NO: 824708 - RNA, 24 nt, Human
cgaacagaugaacaaaaggaguuc

SEQ ID NO: 824709 - RNA, 23 nt, Human
cgacaaacaaaugaaagauucaa

SEQ ID NO: 824710 - RNA, 27 nt, Human
cgcacacacacacacacacucgcacac

SEQ ID NO: 824711 - RNA, 26 nt, Human
cgcacacacacggcgucacccgcgca

SEQ ID NO: 824712 - RNA, 18 nt, Human
cgcagagccucucagcgg

SEQ ID NO: 824713 - RNA, 25 nt, Human
cgcgcacacacacacacacacucgc

SEQ ID NO: 824714 - RNA, 28 nt, Human
cgcgcacacacacacacacacucgcaca

SEQ ID NO: 824715 - RNA, 18 nt, Human
cgcgcacacgcacacgca

SEQ ID NO: 824716 - RNA, 27 nt, Human
cgcgcacacgcacacgcagagccucuc

SEQ ID NO: 824717 - RNA, 27 nt, Human
cgcgcgcacacacacacacacacucgc

SEQ ID NO: 824718 - RNA, 20 nt, Human
cgugcagugugguggagugg

SEQ ID NO: 824719 - RNA, 24 nt, Human
cuaacauugggaggagaaaacagu

SEQ ID NO: 824720 - RNA, 22 nt, Human
cuaaucaccuggaacuggcauu

SEQ ID NO: 824721 - RNA, 19 nt, Human
cuagcaacaacaacaauaa

SEQ ID NO: 824722 - RNA, 26 nt, Human
cuagcaacaacaacaauaacaacaaa

SEQ ID NO: 824723 - RNA, 23 nt, Human
cucaacacauuugcuugccagca

SEQ ID NO: 824724 - RNA, 23 nt, Human
cucaguaauuagcauauuuaaag

SEQ ID NO: 824725 - RNA, 20 nt, Human
cucccuuucucucucucaca

SEQ ID NO: 824726 - RNA, 24 nt, Human
cuccucugggcacucuuaacuccc

SEQ ID NO: 824727 - RNA, 20 nt, Human
cucgcacacacacggcguca

SEQ ID NO: 824728 - RNA, 22 nt, Human
cucugagaauagacuggaauaa

SEQ ID NO: 824729 - RNA, 19 nt, Human
cucugugccaguccaugcc

SEQ ID NO: 824730 - RNA, 21 nt, Human
cugagaaaagagaacaauugu

SEQ ID NO: 824731 - RNA, 24 nt, Human
cugcagagcaggagaaauuguuuu

SEQ ID NO: 824732 - RNA, 21 nt, Human
cugcugcauauacaguugugu

SEQ ID NO: 824733 - RNA, 18 nt, Human
cuggcuaaaccaugacaa

SEQ ID NO: 824734 - RNA, 27 nt, Human
cuggcucuuuuuaugagagcaagcagg

SEQ ID NO: 824735 - RNA, 20 nt, Human
cugugagcuucugaaugugc

SEQ ID NO: 824736 - RNA, 19 nt, Human
cuguuacucaacugcuuuu

SEQ ID NO: 824737 - RNA, 18 nt, Human
cuuccaaaaagcuauucu

SEQ ID NO: 824738 - RNA, 22 nt, Human
gaaaagcaaugcaccaacagaa

SEQ ID NO: 824739 - RNA, 20 nt, Human
gaaauuaggucuuuagauaa

SEQ ID NO: 824740 - RNA, 24 nt, Human
gaacaacgucuagacuacuacuaa

SEQ ID NO: 824741 - RNA, 18 nt, Human
gaacaacuguuauguccu

SEQ ID NO: 824742 - RNA, 22 nt, Human
gaacaagcaaacaaauauccuu

SEQ ID NO: 824743 - RNA, 19 nt, Human
gaacuaacaccuuccucuc

SEQ ID NO: 824744 - RNA, 24 nt, Human
gaauagcuauuaucuucaugguuu

SEQ ID NO: 824745 - RNA, 19 nt, Human
gaauugacccccacacacc

SEQ ID NO: 824746 - RNA, 21 nt, Human
gaauuugcugguuucucuuuu

SEQ ID NO: 824747 - RNA, 21 nt, Human
gacaaguggccacucuauuuu

SEQ ID NO: 824748 - RNA, 20 nt, Human
gacagugauuuuucaaaaug

SEQ ID NO: 824749 - RNA, 19 nt, Human
gagaagggccccagucugc

SEQ ID NO: 824750 - RNA, 18 nt, Human
gagcauguuaugauacac

SEQ ID NO: 824751 - RNA, 23 nt, Human
gaguacauucuucuauggacaaa

SEQ ID NO: 824752 - RNA, 22 nt, Human
gauacgucaaaaggggaaaaug

SEQ ID NO: 824753 - RNA, 18 nt, Human
gcaaagaugguuaaaggc

SEQ ID NO: 824754 - RNA, 21 nt, Human
gcaaagggcugccugagugcc

SEQ ID NO: 824755 - RNA, 21 nt, Human
gcaacaacaacaauaacaaca

SEQ ID NO: 824756 - RNA, 25 nt, Human
gcacacacacacacacacucgcaca

SEQ ID NO: 824757 - RNA, 24 nt, Human
gcacuaccucagaaaaacuaaagg

SEQ ID NO: 824758 - RNA, 18 nt, Human
gcagaggacacagcacgg

SEQ ID NO: 824759 - RNA, 18 nt, Human
gcagagguggaugcagaa

SEQ ID NO: 824760 - RNA, 18 nt, Human
gcaguuuccauuauccau

SEQ ID NO: 824761 - RNA, 20 nt, Human
gccacacuucccaugucucc

SEQ ID NO: 824762 - RNA, 27 nt, Human
gcgcacacacacacacacacucgcaca

SEQ ID NO: 824763 - RNA, 21 nt, Human
gcgcgcacacacacacacaca

SEQ ID NO: 824764 - RNA, 25 nt, Human
gcgcgcacacacacacacacacucg

SEQ ID NO: 824765 - RNA, 28 nt, Human
gcgcgcgcacacacacacacacacucgc

SEQ ID NO: 824766 - RNA, 25 nt, Human
gcgcgcgcgcacacacacacacaca

SEQ ID NO: 824767 - RNA, 25 nt, Human
ggaaagagccuugaauauaggcacc

SEQ ID NO: 824768 - RNA, 18 nt, Human
ggaaccaagacaccuaaa

SEQ ID NO: 824769 - RNA, 19 nt, Human
ggaacuaacaccuuccucu

SEQ ID NO: 824770 - RNA, 21 nt, Human
ggaagauguugguaugucccu

SEQ ID NO: 824771 - RNA, 22 nt, Human
ggcaggaagagaugaugccuag

SEQ ID NO: 824772 - RNA, 24 nt, Human
ggcaggaagagaugaugccuaggu

SEQ ID NO: 824773 - RNA, 23 nt, Human
gggaaaggggaaugaagaaaugu

SEQ ID NO: 824774 - RNA, 21 nt, Human
gggaaugaagaaauguaaaga

SEQ ID NO: 824775 - RNA, 18 nt, Human
gggagcauaaucuuuaau

SEQ ID NO: 824776 - RNA, 20 nt, Human
gggggacaggagaugcugca

SEQ ID NO: 824777 - RNA, 24 nt, Human
ggugauguauugcuuguuuacugu

SEQ ID NO: 824778 - RNA, 23 nt, Human
ggugcaggagguauuagaaaaga

SEQ ID NO: 824779 - RNA, 23 nt, Human
gguggagugggaaagauacaggc

SEQ ID NO: 824780 - RNA, 20 nt, Human
guguauaaguucccaaccau

SEQ ID NO: 824781 - RNA, 23 nt, Human
guuaaagguuuaaacucuauuuc

SEQ ID NO: 824782 - RNA, 20 nt, Human
guugaggaacugagaaagug

SEQ ID NO: 824783 - RNA, 22 nt, Human
uaaaacaagaauaaacaccugu

SEQ ID NO: 824784 - RNA, 18 nt, Human
uaaaacacagauggcaau

SEQ ID NO: 824785 - RNA, 22 nt, Human
uaaaacacuccauucucugccc

SEQ ID NO: 824786 - RNA, 19 nt, Human
uaaaaugcaggcagaguca

SEQ ID NO: 824787 - RNA, 22 nt, Human
uaacaacauaacaaaggcguau

SEQ ID NO: 824788 - RNA, 23 nt, Human
uaacucacauuucuagacagcac

SEQ ID NO: 824789 - RNA, 19 nt, Human
uaacugagaaaagagaaca

SEQ ID NO: 824790 - RNA, 19 nt, Human
uaacuuaccaucucagucu

SEQ ID NO: 824791 - RNA, 23 nt, Human
uaagaaauguuaauguaaacaag

SEQ ID NO: 824792 - RNA, 18 nt, Human
uaagacaaguuaucaagc

SEQ ID NO: 824793 - RNA, 23 nt, Human
uaagguaaguaacucacauuucu

SEQ ID NO: 824794 - RNA, 19 nt, Human
uaagguaucaauaacaaaa

SEQ ID NO: 824795 - RNA, 23 nt, Human
uaagucauuuuaaguggcaggug

SEQ ID NO: 824796 - RNA, 18 nt, Human
uaagugucagugguacuu

SEQ ID NO: 824797 - RNA, 22 nt, Human
uaauaacuaugauuuccaaagu

SEQ ID NO: 824798 - RNA, 18 nt, Human
uacaagcuacaaacaucu

SEQ ID NO: 824799 - RNA, 22 nt, Human
uacaauacauacacuauacaua

SEQ ID NO: 824800 - RNA, 25 nt, Human
uacagaacaccucugugccagucca

SEQ ID NO: 824801 - RNA, 21 nt, Human
uacagaguauauaaaugcaga

SEQ ID NO: 824802 - RNA, 24 nt, Human
uacaggaaaaaaccugugagcuuc

SEQ ID NO: 824803 - RNA, 21 nt, Human
uacagguuaaguggaaggcag

SEQ ID NO: 824804 - RNA, 19 nt, Human
uacaguaauuacaggaaaa

SEQ ID NO: 824805 - RNA, 21 nt, Human
uacaguuuagaaaaugaaauc

SEQ ID NO: 824806 - RNA, 21 nt, Human
uaccuguaauacucucaagac

SEQ ID NO: 824807 - RNA, 18 nt, Human
uaccuuggugccagugug

SEQ ID NO: 824808 - RNA, 25 nt, Human
uacuauaaacaaauuauuuauaaga

SEQ ID NO: 824809 - RNA, 21 nt, Human
uagaacaacaucauggcuaca

SEQ ID NO: 824810 - RNA, 21 nt, Human
uagaacacaaguagggcaaaa

SEQ ID NO: 824811 - RNA, 21 nt, Human
uagaagaugauccuaaaaagg

SEQ ID NO: 824812 - RNA, 19 nt, Human
uagacaggcucuuccuauu

SEQ ID NO: 824813 - RNA, 20 nt, Human
uagagaugaaauccagaaag

SEQ ID NO: 824814 - RNA, 22 nt, Human
uagcaacaacaacaauaacaac

SEQ ID NO: 824815 - RNA, 26 nt, Human
uagcaacaacaacaauaacaacaaaa

SEQ ID NO: 824816 - RNA, 19 nt, Human
uaggagggucucccuuuac

SEQ ID NO: 824817 - RNA, 18 nt, Human
uagggaguuuuguuuuuu

SEQ ID NO: 824818 - RNA, 25 nt, Human
uagggcaaaaaaaucaccauuuuac

SEQ ID NO: 824819 - RNA, 21 nt, Human
uaguaaccagcacuggcaugc

SEQ ID NO: 824820 - RNA, 20 nt, Human
uauacaaaugcauacaguua

SEQ ID NO: 824821 - RNA, 23 nt, Human
uaucaagcaggcuucucagaguc

SEQ ID NO: 824822 - RNA, 21 nt, Human
uaucugaauuagaagaugauc

SEQ ID NO: 824823 - RNA, 23 nt, Human
uauucuggauguaauuacaaaau

SEQ ID NO: 824824 - RNA, 21 nt, Human
ucaaacaagaaaaggggagca

SEQ ID NO: 824825 - RNA, 20 nt, Human
ucacaugugcaggaaaaaac

SEQ ID NO: 824826 - RNA, 23 nt, Human
ucaccaaauaacuguuuucaaac

SEQ ID NO: 824827 - RNA, 20 nt, Human
ucaccaaggagaauuugcca

SEQ ID NO: 824828 - RNA, 21 nt, Human
ucaccagauuuauucaguugc

SEQ ID NO: 824829 - RNA, 21 nt, Human
ucacugacuuugccugggcag

SEQ ID NO: 824830 - RNA, 18 nt, Human
ucacuuuccuacucugcc

SEQ ID NO: 824831 - RNA, 18 nt, Human
ucagaccaaaagaagugu

SEQ ID NO: 824832 - RNA, 21 nt, Human
ucagaccaugaaaagggauuc

SEQ ID NO: 824833 - RNA, 22 nt, Human
ucagaguccacacacaauugac

SEQ ID NO: 824834 - RNA, 20 nt, Human
ucaguuaacuuaccaucuca

SEQ ID NO: 824835 - RNA, 20 nt, Human
ucaguuccugaggcuagacc

SEQ ID NO: 824836 - RNA, 19 nt, Human
ucauaagaguuaccucaca

SEQ ID NO: 824837 - RNA, 22 nt, Human
uccaagagaggaaacuagcacc

SEQ ID NO: 824838 - RNA, 21 nt, Human
uccacagcacuuaaucuuguc

SEQ ID NO: 824839 - RNA, 22 nt, Human
uccagguaaaaggacagagaaa

SEQ ID NO: 824840 - RNA, 18 nt, Human
uccaugaacaacucagcc

SEQ ID NO: 824841 - RNA, 20 nt, Human
uccaugaacaacucagccac

SEQ ID NO: 824842 - RNA, 25 nt, Human
uccaugccagggcagagaccaggac

SEQ ID NO: 824843 - RNA, 18 nt, Human
uccaugggggugaaaauu

SEQ ID NO: 824844 - RNA, 22 nt, Human
uccauuauccauugaacaccuu

SEQ ID NO: 824845 - RNA, 20 nt, Human
uccauuucuuucugucccaa

SEQ ID NO: 824846 - RNA, 19 nt, Human
ucccaaagagcauucagcu

SEQ ID NO: 824847 - RNA, 18 nt, Human
ucccacauagacaugaac

SEQ ID NO: 824848 - RNA, 22 nt, Human
uccccagcugcaaacugaacag

SEQ ID NO: 824849 - RNA, 19 nt, Human
uccccugacaaucaucuuc

SEQ ID NO: 824850 - RNA, 21 nt, Human
uccccugacaaucaucuuccu

SEQ ID NO: 824851 - RNA, 23 nt, Human
uccccugacaaucaucuuccuuu

SEQ ID NO: 824852 - RNA, 23 nt, Human
ucccucucuguguucucugucac

SEQ ID NO: 824853 - RNA, 23 nt, Human
ucccuggaauaaaacaagaauaa

SEQ ID NO: 824854 - RNA, 24 nt, Human
ucccuugccuuucuagucaccaaa

SEQ ID NO: 824855 - RNA, 19 nt, Human
uccgucucccuuuucuucu

SEQ ID NO: 824856 - RNA, 23 nt, Human
uccugguacauuuccgucucccu

SEQ ID NO: 824857 - RNA, 25 nt, Human
uccugugcagcuguuuugcccuuuu

SEQ ID NO: 824858 - RNA, 23 nt, Human
ucgaaacaaaacaaaaacaauca

SEQ ID NO: 824859 - RNA, 19 nt, Human
ucuaaaaauugccuagucu

SEQ ID NO: 824860 - RNA, 24 nt, Human
ucuaacugccuuaauagaacuuaa

SEQ ID NO: 824861 - RNA, 19 nt, Human
ucucgucuagucaugaugg

SEQ ID NO: 824862 - RNA, 25 nt, Human
ucucuauacugcaaacagaaaauca

SEQ ID NO: 824863 - RNA, 18 nt, Human
ucucucucucccuuucuc

SEQ ID NO: 824864 - RNA, 22 nt, Human
ucucucucucccuuucucucuc

SEQ ID NO: 824865 - RNA, 18 nt, Human
ucuguguguaugugugug

SEQ ID NO: 824866 - RNA, 21 nt, Human
ucuguugaggagggagauaac

SEQ ID NO: 824867 - RNA, 24 nt, Human
ugaaaacggccuuucuaaucaccu

SEQ ID NO: 824868 - RNA, 21 nt, Human
ugaaaauacuuuuuccacuau

SEQ ID NO: 824869 - RNA, 25 nt, Human
ugaaaucgguauagaagaaccuauu

SEQ ID NO: 824870 - RNA, 21 nt, Human
ugaacagaacacgaagagcau

SEQ ID NO: 824871 - RNA, 18 nt, Human
ugaacagaagcugcagag

SEQ ID NO: 824872 - RNA, 19 nt, Human
ugaacugauuccaaagugc

SEQ ID NO: 824873 - RNA, 20 nt, Human
ugaagcuuuaaacacaacaa

SEQ ID NO: 824874 - RNA, 23 nt, Human
ugaaguggggcaguaguuuuuua

SEQ ID NO: 824875 - RNA, 21 nt, Human
ugaauaccauccaacacaaau

SEQ ID NO: 824876 - RNA, 21 nt, Human
ugaaugaaaagcugcugacau

SEQ ID NO: 824877 - RNA, 19 nt, Human
ugacaggcacuuucagcau

SEQ ID NO: 824878 - RNA, 22 nt, Human
ugacauucucuuaauguuuucu

SEQ ID NO: 824879 - RNA, 23 nt, Human
ugacuaguaaccagcacuggcau

SEQ ID NO: 824880 - RNA, 20 nt, Human
ugagaaaagugacaaguucg

SEQ ID NO: 824881 - RNA, 19 nt, Human
ugagacaccauuaaaaaca

SEQ ID NO: 824882 - RNA, 23 nt, Human
ugagagcaagcaggacuaaauac

SEQ ID NO: 824883 - RNA, 20 nt, Human
ugagcauggaagagaauuug

SEQ ID NO: 824884 - RNA, 18 nt, Human
ugaggaacugagaaagug

SEQ ID NO: 824885 - RNA, 24 nt, Human
ugagggaaaauguucccuucccca

SEQ ID NO: 824886 - RNA, 21 nt, Human
ugaguagaaaugucauaugga

SEQ ID NO: 824887 - RNA, 23 nt, Human
ugauagccucaguagcuuguuug

SEQ ID NO: 824888 - RNA, 18 nt, Human
ugauguuggacagcuucu

SEQ ID NO: 824889 - RNA, 18 nt, Human
ugcacaaaggguggacuc

SEQ ID NO: 824890 - RNA, 21 nt, Human
ugcacuaccucagaaaaacua

SEQ ID NO: 824891 - RNA, 21 nt, Human
ugcacuaccucagaaaaacua

SEQ ID NO: 824892 - RNA, 19 nt, Human
ugcagaggaaacuauuggg

SEQ ID NO: 824893 - RNA, 23 nt, Human
ugcagaggaaacuauugggaaau

SEQ ID NO: 824894 - RNA, 21 nt, Human
ugcagcagguugugcacaugg

SEQ ID NO: 824895 - RNA, 24 nt, Human
ugcaucuuuauccauauaaauguu

SEQ ID NO: 824896 - RNA, 24 nt, Human
ugccaugggaaaacuagaacacaa

SEQ ID NO: 824897 - RNA, 23 nt, Human
ugccuuaauagaacuuaagacaa

SEQ ID NO: 824898 - RNA, 21 nt, Human
ugcucaguaauuagcauauuu

SEQ ID NO: 824899 - RNA, 26 nt, Human
ugcuuuauuuaaccuucaugccuuca

SEQ ID NO: 824900 - RNA, 18 nt, Human
uggaaaaaaacccagcuu

SEQ ID NO: 824901 - RNA, 19 nt, Human
uggaaaaaaacccagcuug

SEQ ID NO: 824902 - RNA, 19 nt, Human
uggaaccaagacaccuaaa

SEQ ID NO: 824903 - RNA, 19 nt, Human
uggagugggaaagauacag

SEQ ID NO: 824904 - RNA, 22 nt, Human
uggaugauuuuggagcuccagg

SEQ ID NO: 824905 - RNA, 22 nt, Human
uggcagaaugacaaguugagag

SEQ ID NO: 824906 - RNA, 21 nt, Human
ugggaugcacuaccucagaaa

SEQ ID NO: 824907 - RNA, 23 nt, Human
ugguggggacaaaaauaugguaa

SEQ ID NO: 824908 - RNA, 19 nt, Human
uguaaagaugaauuugugc

SEQ ID NO: 824909 - RNA, 24 nt, Human
uguaaauggaaccaagacaccuaa

SEQ ID NO: 824910 - RNA, 25 nt, Human
uguauguguguguguguucacaugu

SEQ ID NO: 824911 - RNA, 21 nt, Human
uguccuuuaggauucuacugc

SEQ ID NO: 824912 - RNA, 19 nt, Human
ugugcauguguuggggcug

SEQ ID NO: 824913 - RNA, 21 nt, Human
ugugguaggugaccuuuaagg

SEQ ID NO: 824914 - RNA, 22 nt, Human
uguguacacacaugugcaugug

SEQ ID NO: 824915 - RNA, 25 nt, Human
uguguacacacaugugcauguguug

SEQ ID NO: 824916 - RNA, 19 nt, Human
uguguguaugugugugugu

SEQ ID NO: 824917 - RNA, 20 nt, Human
uguguguaugugugugugug

SEQ ID NO: 824918 - RNA, 21 nt, Human
uguguguguguucacaugugc

SEQ ID NO: 824919 - RNA, 19 nt, Human
uguuauguccuuuaggauu

SEQ ID NO: 824920 - RNA, 20 nt, Human
uguucacacucuguugagga

SEQ ID NO: 824921 - RNA, 20 nt, Human
uguugcuguuacucaacugc

SEQ ID NO: 824922 - RNA, 19 nt, Human
uguuggagggaaauugcuu

SEQ ID NO: 824923 - RNA, 22 nt, Human
uguuguggagaaauuauugcuu

SEQ ID NO: 824924 - RNA, 21 nt, Human
uguuucauaaguuuggggcaa

SEQ ID NO: 824925 - RNA, 23 nt, Human
uguuuguuuauaaugauccuuca

SEQ ID NO: 824926 - RNA, 23 nt, Human
uuaacacguggccauauccacag

SEQ ID NO: 824927 - RNA, 24 nt, Human
uuaacacugugaaggggauucagc

SEQ ID NO: 824928 - RNA, 22 nt, Human
uuaccaaaccccuuucuaaacu

SEQ ID NO: 824929 - RNA, 25 nt, Human
uuacuaguuuggaaucaguugucgu

SEQ ID NO: 824930 - RNA, 22 nt, Human
uuacucucucuguguguaugug

SEQ ID NO: 824931 - RNA, 19 nt, Human
uuagaaaagugcaacucau

SEQ ID NO: 824932 - RNA, 24 nt, Human
uucaaacaagaaaaggggagcaua

SEQ ID NO: 824933 - RNA, 19 nt, Human
uucaaaggaugaacauauu

SEQ ID NO: 824934 - RNA, 18 nt, Human
uucaacagacuuuuuggg

SEQ ID NO: 824935 - RNA, 23 nt, Human
uucaagccuagaauaacuguuuu

SEQ ID NO: 824936 - RNA, 18 nt, Human
uucagcagagaaaagaac

SEQ ID NO: 824937 - RNA, 22 nt, Human
uucauauagucucauuguauau

SEQ ID NO: 824938 - RNA, 20 nt, Human
uuccaaaaagcuauucugua

SEQ ID NO: 824939 - RNA, 21 nt, Human
uucccaugucuccguuuccca

SEQ ID NO: 824940 - RNA, 20 nt, Human
uucucagaguccacacacaa

SEQ ID NO: 824941 - RNA, 19 nt, Human
uucuuucccucacacagag

SEQ ID NO: 824942 - RNA, 21 nt, Human
uugaaguggggcaguaguuuu

SEQ ID NO: 824943 - RNA, 23 nt, Human
uugaauacagaaaagcaaugcac

SEQ ID NO: 824944 - RNA, 28 nt, Human
uugaauacagaaaagcaaugcaccaaca

SEQ ID NO: 824945 - RNA, 23 nt, Human
uugaaucauacauacuguuucau

SEQ ID NO: 824946 - RNA, 21 nt, Human
uugagaccuggcagacaauau

SEQ ID NO: 824947 - RNA, 23 nt, Human
uugaggaacaaaauauacacuau

SEQ ID NO: 824948 - RNA, 18 nt, Human
uugguuugccaugugaug

SEQ ID NO: 824949 - RNA, 23 nt, Human
uuguaacuaaaauuucuguaaaa

SEQ ID NO: 824950 - RNA, 21 nt, Human
uuuaugagaaaagugacaagu

SEQ ID NO: 824951 - RNA, 22 nt, Human
uuuauguugcuguuacucaacu

SEQ ID NO: 824952 - RNA, 23 nt, Human
uuuauguugcuguuacucaacug

SEQ ID NO: 824953 - RNA, 22 nt, Human
uuuauucaaaagaacaugacgu

SEQ ID NO: 824954 - RNA, 18 nt, Human
uuugaaaacaaauguccu

SEQ ID NO: 824955 - RNA, 23 nt, Human
uuugcccuuuucaggaaaagaca

SEQ ID NO: 824956 - RNA, 21 nt, Human
uuugcgccaaauaaauuggug

SEQ ID NO: 824957 - RNA, 19 nt, Human
uuugucccucucuguguuc

SEQ ID NO: 824958 - RNA, 24 nt, Human
uuugugcucugagauggcaggguu

SEQ ID NO: 824959 - RNA, 21 nt, Human
uuuucagaaacagaaacacua

SEQ ID NO: 824960 - RNA, 19 nt, Human
uuuugaaaacaaauguccu

SEQ ID NO: 824961 - RNA, 21 nt, Human
uuuuuuuucaaauaugacuga

SEQ ID NO: 824962 - RNA, 25 nt, Human
aaggggcccaggcuccccguggguc

SEQ ID NO: 824963 - RNA, 29 nt, Human
aaggggcccaggcuccccgugggucccgg

SEQ ID NO: 824964 - RNA, 22 nt, Human
acccagguccagucucaggccc

SEQ ID NO: 824965 - RNA, 20 nt, Human
aggcagggcgggggaggggc

SEQ ID NO: 824966 - RNA, 19 nt, Human
aggccaggcagggcggggg

SEQ ID NO: 824967 - RNA, 23 nt, Human
aggucucuccaagccccuggaca

SEQ ID NO: 824968 - RNA, 21 nt, Human
cacgccucucggagccgccuc

SEQ ID NO: 824969 - RNA, 26 nt, Human
caggcccccuccucacucucuggagg

SEQ ID NO: 824970 - RNA, 20 nt, Human
caggcuccccguggguccuc

SEQ ID NO: 824971 - RNA, 23 nt, Human
ccacccacggaaagcacacgccu

SEQ ID NO: 824972 - RNA, 20 nt, Human
ccccugcaaacggcuggaac

SEQ ID NO: 824973 - RNA, 23 nt, Human
ccucacuacaccccuggauggca

SEQ ID NO: 824974 - RNA, 20 nt, Human
cuacaccccuggauggcaga

SEQ ID NO: 824975 - RNA, 23 nt, Human
cucuccaagccccuggacacucu

SEQ ID NO: 824976 - RNA, 21 nt, Human
cucucuggaggggggcagggg

SEQ ID NO: 824977 - RNA, 21 nt, Human
gagaguggaggggugggcgca

SEQ ID NO: 824978 - RNA, 23 nt, Human
gcuggaaccaggucccagugauc

SEQ ID NO: 824979 - RNA, 18 nt, Human
ggaggggggcaggggugu

SEQ ID NO: 824980 - RNA, 22 nt, Human
ggcccaggcuccccgugggucc

SEQ ID NO: 824981 - RNA, 23 nt, Human
gggcaggggugucuucaggguuu

SEQ ID NO: 824982 - RNA, 19 nt, Human
ggggcgccacccacggaaa

SEQ ID NO: 824983 - RNA, 18 nt, Human
ucaggcccccuccucacu

SEQ ID NO: 824984 - RNA, 19 nt, Human
ucccagugaucagcgacuc

SEQ ID NO: 824985 - RNA, 20 nt, Human
uccccugcaaacggcuggaa

SEQ ID NO: 824986 - RNA, 23 nt, Human
uccuggcggucagggugggcugc

SEQ ID NO: 824987 - RNA, 19 nt, Human
ucuccaagccccuggacac

SEQ ID NO: 824988 - RNA, 23 nt, Human
ucucggagccgccuccccugcaa

SEQ ID NO: 824989 - RNA, 21 nt, Human
ucucuggaggggggcaggggu

SEQ ID NO: 824990 - RNA, 19 nt, Human
ugaggccaggcagggcggg

SEQ ID NO: 824991 - RNA, 24 nt, Human
ugaggccaggcagggcgggggagg

SEQ ID NO: 824992 - RNA, 23 nt, Human
ugaggucaggcagacccaggucc

SEQ ID NO: 824993 - RNA, 21 nt, Human
aagaggugauugcacuagcuu

SEQ ID NO: 824994 - RNA, 22 nt, Human
aaucaaauuaaaauguacaugu

SEQ ID NO: 824995 - RNA, 19 nt, Human
acccgugguaaggagaggg

SEQ ID NO: 824996 - RNA, 19 nt, Human
agagaacaucuacuacuga

SEQ ID NO: 824997 - RNA, 20 nt, Human
agcugcaggcgcgaaggagg

SEQ ID NO: 824998 - RNA, 18 nt, Human
aggacagagagagagcca

SEQ ID NO: 824999 - RNA, 18 nt, Human
aggcaggacacagaggca

SEQ ID NO: 825000 - RNA, 19 nt, Human
aggcaggacacagaggcaa

SEQ ID NO: 825001 - RNA, 23 nt, Human
aggcaggacagagagagagccaa

SEQ ID NO: 825002 - RNA, 21 nt, Human
agggcaaagaacugaauucag

SEQ ID NO: 825003 - RNA, 20 nt, Human
agggcgccgccgacgagaaa

SEQ ID NO: 825004 - RNA, 19 nt, Human
agggugcucugguguuugg

SEQ ID NO: 825005 - RNA, 18 nt, Human
aguggggagucacgcuga

SEQ ID NO: 825006 - RNA, 23 nt, Human
augucagggcuccaguccgggcg

SEQ ID NO: 825007 - RNA, 27 nt, Human
caaauuaaaauguacauguaaaaaaug

SEQ ID NO: 825008 - RNA, 26 nt, Human
cagaccagcugaaucaaauuaaaaug

SEQ ID NO: 825009 - RNA, 23 nt, Human
cauccccagaaaaaaaaaaaaaa

SEQ ID NO: 825010 - RNA, 24 nt, Human
ccagaaaaaaaaaaaaaaaguguu

SEQ ID NO: 825011 - RNA, 19 nt, Human
gagucacgcugaggcagga

SEQ ID NO: 825012 - RNA, 27 nt, Human
gauaaugggaggcaggacagagagaga

SEQ ID NO: 825013 - RNA, 21 nt, Human
gaucacagggcagagguaaga

SEQ ID NO: 825014 - RNA, 18 nt, Human
gauugcacuagcuugaaa

SEQ ID NO: 825015 - RNA, 21 nt, Human
gccuggagccccccgagcgca

SEQ ID NO: 825016 - RNA, 20 nt, Human
ggcggaagaggugauugcac

SEQ ID NO: 825017 - RNA, 18 nt, Human
gggcggcguuggcggccg

SEQ ID NO: 825018 - RNA, 18 nt, Human
gucucuggcaaggacuag

SEQ ID NO: 825019 - RNA, 21 nt, Human
uaaaaaauguguuagauaaug

SEQ ID NO: 825020 - RNA, 20 nt, Human
uaaaaaauuggcggaagagg

SEQ ID NO: 825021 - RNA, 21 nt, Human
ucacagggcagagguaagaau

SEQ ID NO: 825022 - RNA, 22 nt, Human
uccagguugacaagauuuguaa

SEQ ID NO: 825023 - RNA, 20 nt, Human
uccccagaaaaaaaaaaaaa

SEQ ID NO: 825024 - RNA, 22 nt, Human
uccccagaaaaaaaaaaaaaaa

SEQ ID NO: 825025 - RNA, 22 nt, Human
ugagcugcaggcgcgaaggagg

SEQ ID NO: 825026 - RNA, 24 nt, Human
ugccuggagccccccgagcgcagc

SEQ ID NO: 825027 - RNA, 20 nt, Human
ugucagggcuccaguccggg

SEQ ID NO: 825028 - RNA, 21 nt, Human
ugucagggcuccaguccgggc

SEQ ID NO: 825029 - RNA, 26 nt, Human
uuagagaacaucuacuacugaccaua

SEQ ID NO: 825030 - RNA, 18 nt, Human
uuccauaugagcugcagg

SEQ ID NO: 825031 - RNA, 22 nt, Human
uucccuuguucuuauuacauuc

SEQ ID NO: 825032 - RNA, 20 nt, Human
uucuagggugcucugguguu

SEQ ID NO: 825033 - RNA, 20 nt, Human
uuugaggaauacauggagaa

SEQ ID NO: 825034 - RNA, 18 nt, Human
aagaagcaaaacagcaac

SEQ ID NO: 825035 - RNA, 19 nt, Human
aagaagcaaaacagcaacc

SEQ ID NO: 825036 - RNA, 19 nt, Human
aagcaaaacagcaaccgau

SEQ ID NO: 825037 - RNA, 25 nt, Human
acaauccauucuucuucuggugccu

SEQ ID NO: 825038 - RNA, 19 nt, Human
acaggaauaguuaggucug

SEQ ID NO: 825039 - RNA, 19 nt, Human
acaguacugcacgagcgaa

SEQ ID NO: 825040 - RNA, 20 nt, Human
accacaaauccuaacuguaa

SEQ ID NO: 825041 - RNA, 23 nt, Human
accacaauacaaaaauaagaggg

SEQ ID NO: 825042 - RNA, 20 nt, Human
accgugcucucaggcucucc

SEQ ID NO: 825043 - RNA, 18 nt, Human
acgcugcacacacucccc

SEQ ID NO: 825044 - RNA, 22 nt, Human
agcaaccgauuucugcuuuuca

SEQ ID NO: 825045 - RNA, 23 nt, Human
agggagcccaggggaccuggaac

SEQ ID NO: 825046 - RNA, 20 nt, Human
agguuucggguggacuccuc

SEQ ID NO: 825047 - RNA, 22 nt, Human
caaaacagcaaccgauuucugc

SEQ ID NO: 825048 - RNA, 22 nt, Human
caaaagaauccuaaaaaacuug

SEQ ID NO: 825049 - RNA, 24 nt, Human
caaauauacaaaauauacauuucc

SEQ ID NO: 825050 - RNA, 24 nt, Human
cacaaaauaaauaaagauaaacaa

SEQ ID NO: 825051 - RNA, 18 nt, Human
caccucgcccacgcuggc

SEQ ID NO: 825052 - RNA, 22 nt, Human
cacuguguauuacaugcaaaau

SEQ ID NO: 825053 - RNA, 21 nt, Human
cauuacagcaagcauuccaga

SEQ ID NO: 825054 - RNA, 21 nt, Human
ccacacguaaacgccaacguc

SEQ ID NO: 825055 - RNA, 22 nt, Human
ccagauucuuaaaaugaccaaa

SEQ ID NO: 825056 - RNA, 24 nt, Human
cccaccccuuacccauguugagac

SEQ ID NO: 825057 - RNA, 22 nt, Human
ccccaccccuuacccauguuga

SEQ ID NO: 825058 - RNA, 23 nt, Human
ccccaccccuuacccauguugag

SEQ ID NO: 825059 - RNA, 25 nt, Human
ccccuucacccccaccccuuaccca

SEQ ID NO: 825060 - RNA, 25 nt, Human
cccgccccgccccaccgugcucuca

SEQ ID NO: 825061 - RNA, 19 nt, Human
ccgccccgccccaccgugc

SEQ ID NO: 825062 - RNA, 20 nt, Human
ccgccccgccccaccgugcu

SEQ ID NO: 825063 - RNA, 22 nt, Human
ccgccccgccccaccgugcucu

SEQ ID NO: 825064 - RNA, 21 nt, Human
ccgcucccgccaccgccgacc

SEQ ID NO: 825065 - RNA, 25 nt, Human
ccgcucccgccaccgccgaccuccg

SEQ ID NO: 825066 - RNA, 22 nt, Human
cgccccgccccaccgugcucuc

SEQ ID NO: 825067 - RNA, 18 nt, Human
cggcggaggaggggaggu

SEQ ID NO: 825068 - RNA, 18 nt, Human
cggggcugccggcggagg

SEQ ID NO: 825069 - RNA, 19 nt, Human
cuccccuucacccccaccc

SEQ ID NO: 825070 - RNA, 23 nt, Human
cucuuccccaaaagaauccuaaa

SEQ ID NO: 825071 - RNA, 19 nt, Human
cugcacacacuccccuuca

SEQ ID NO: 825072 - RNA, 23 nt, Human
cugcacacacuccccuucacccc

SEQ ID NO: 825073 - RNA, 19 nt, Human
cugcaucauaaaugcaaca

SEQ ID NO: 825074 - RNA, 22 nt, Human
cuggugccugccaacugauuug

SEQ ID NO: 825075 - RNA, 21 nt, Human
cuucacccccaccccuuaccc

SEQ ID NO: 825076 - RNA, 19 nt, Human
cuuuuaggcacuuuuuauu

SEQ ID NO: 825077 - RNA, 18 nt, Human
gagagaaccgcgagcgca

SEQ ID NO: 825078 - RNA, 23 nt, Human
gcaagcauuccagauucuuaaaa

SEQ ID NO: 825079 - RNA, 19 nt, Human
gcauaggaaaugaccacaa

SEQ ID NO: 825080 - RNA, 18 nt, Human
gcccgcucccgccaccgc

SEQ ID NO: 825081 - RNA, 20 nt, Human
gggcugccggcggaggaggg

SEQ ID NO: 825082 - RNA, 18 nt, Human
uaaaaacgcugcacacac

SEQ ID NO: 825083 - RNA, 20 nt, Human
uaauagauuaacuaaacugc

SEQ ID NO: 825084 - RNA, 27 nt, Human
uaccacaaaauaaauaaagauaaacaa

SEQ ID NO: 825085 - RNA, 24 nt, Human
uaggaaaugaccacaauacaaaaa

SEQ ID NO: 825086 - RNA, 23 nt, Human
uauaaacaucucauucucucaaa

SEQ ID NO: 825087 - RNA, 21 nt, Human
uauaaacauuuugaagccucu

SEQ ID NO: 825088 - RNA, 23 nt, Human
uauuaccacaaaauaaauaaaga

SEQ ID NO: 825089 - RNA, 21 nt, Human
ucaaugccaaguaaaaucuug

SEQ ID NO: 825090 - RNA, 23 nt, Human
ucagacagcggcaggcaguuuuc

SEQ ID NO: 825091 - RNA, 19 nt, Human
ucagugcaugaaauuugcu

SEQ ID NO: 825092 - RNA, 18 nt, Human
ucauuugaaugauuauuc

SEQ ID NO: 825093 - RNA, 19 nt, Human
uccacacguaaacgccaac

SEQ ID NO: 825094 - RNA, 19 nt, Human
ucccuguuuucucaaauau

SEQ ID NO: 825095 - RNA, 21 nt, Human
ucucaggcucuccggagcccg

SEQ ID NO: 825096 - RNA, 22 nt, Human
ucucccgccccgccccaccgug

SEQ ID NO: 825097 - RNA, 24 nt, Human
ugaauagcaaauauaggcaacuca

SEQ ID NO: 825098 - RNA, 20 nt, Human
ugaccaaacacuuugguauu

SEQ ID NO: 825099 - RNA, 21 nt, Human
ugagagguaccuuaccacaaa

SEQ ID NO: 825100 - RNA, 21 nt, Human
ugagaugagaugagaucugcu

SEQ ID NO: 825101 - RNA, 22 nt, Human
ugauuuugguaauguugagagg

SEQ ID NO: 825102 - RNA, 23 nt, Human
ugcacgagcgaacaucucgauau

SEQ ID NO: 825103 - RNA, 22 nt, Human
ugccggcggaggaggggagguu

SEQ ID NO: 825104 - RNA, 18 nt, Human
ugguaauguugagaggua

SEQ ID NO: 825105 - RNA, 22 nt, Human
uguaacuaucuuuaagcucuuc

SEQ ID NO: 825106 - RNA, 24 nt, Human
uguauuacaugcaaaauccacaua

SEQ ID NO: 825107 - RNA, 22 nt, Human
uuacaugcaaaauccacauaaa

SEQ ID NO: 825108 - RNA, 18 nt, Human
uuaggucugucauuugag

SEQ ID NO: 825109 - RNA, 22 nt, Human
uucaacauaucauuuauauuua

SEQ ID NO: 825110 - RNA, 21 nt, Human
uucacccccaccccuuaccca

SEQ ID NO: 825111 - RNA, 23 nt, Human
uuccaguuuuaguugugguuuuc

SEQ ID NO: 825112 - RNA, 19 nt, Human
uuccuuaaguuuucaacau

SEQ ID NO: 825113 - RNA, 25 nt, Human
uucuacaacuauacagcuguuugcu

SEQ ID NO: 825114 - RNA, 19 nt, Human
uugagacuggcugccuguc

SEQ ID NO: 825115 - RNA, 23 nt, Human
uugugguuuucuuguuuuuuuuu

SEQ ID NO: 825116 - RNA, 22 nt, Human
uuugcauaggaaaugaccacaa

SEQ ID NO: 825117 - RNA, 26 nt, Human
uuuuauauugcauauauguagcauuu

SEQ ID NO: 825118 - RNA, 21 nt, Human
uuuuuuuuuuuuuuucuuuua

SEQ ID NO: 825119 - RNA, 24 nt, Human
uuuuuuuuuuuuuuuucuuuuagg

SEQ ID NO: 825120 - RNA, 24 nt, Human
aaaaaaaacugaaaauguuuuuaa

SEQ ID NO: 825121 - RNA, 25 nt, Human
aaaaauauucaaaccacagcagcca

SEQ ID NO: 825122 - RNA, 21 nt, Human
aaagucaccagucccccacuc

SEQ ID NO: 825123 - RNA, 20 nt, Human
aacacaguaaaagcuuuccu

SEQ ID NO: 825124 - RNA, 21 nt, Human
aagaagcaacauugucuuuca

SEQ ID NO: 825125 - RNA, 22 nt, Human
aagcacaguuauguuugagugc

SEQ ID NO: 825126 - RNA, 19 nt, Human
aaucaaaaaguccauucag

SEQ ID NO: 825127 - RNA, 24 nt, Human
aaugaugacaguugaggacauuug

SEQ ID NO: 825128 - RNA, 22 nt, Human
aauggauuaauccaucguuaua

SEQ ID NO: 825129 - RNA, 18 nt, Human
acagaaaggaaacggagc

SEQ ID NO: 825130 - RNA, 21 nt, Human
acagaaccuggguaauuuaua

SEQ ID NO: 825131 - RNA, 18 nt, Human
acagcagccauaguggcc

SEQ ID NO: 825132 - RNA, 23 nt, Human
accuagacuaagaucucaaggua

SEQ ID NO: 825133 - RNA, 20 nt, Human
aggaaauaaaguuuauuuaa

SEQ ID NO: 825134 - RNA, 19 nt, Human
agggcacagaccucauggc

SEQ ID NO: 825135 - RNA, 22 nt, Human
agguaagucccaagguaacaca

SEQ ID NO: 825136 - RNA, 22 nt, Human
aguuauguuugagugcccuggg

SEQ ID NO: 825137 - RNA, 19 nt, Human
auggcagguguaagaagaa

SEQ ID NO: 825138 - RNA, 21 nt, Human
caaaaaggggcaacagccaca

SEQ ID NO: 825139 - RNA, 21 nt, Human
caaaaaggggcaacagccaca

SEQ ID NO: 825140 - RNA, 19 nt, Human
caaaccacagcagccauag

SEQ ID NO: 825141 - RNA, 22 nt, Human
caaaguacaaauaucuuuguac

SEQ ID NO: 825142 - RNA, 19 nt, Human
caaucaccucuuaagggcc

SEQ ID NO: 825143 - RNA, 20 nt, Human
cacaauccacaauaaaaaga

SEQ ID NO: 825144 - RNA, 20 nt, Human
cacagaaaggaaacggagcc

SEQ ID NO: 825145 - RNA, 21 nt, Human
cacagcagccauaguggccug

SEQ ID NO: 825146 - RNA, 23 nt, Human
cagaaggaaacugucuuucagug

SEQ ID NO: 825147 - RNA, 22 nt, Human
cagguaagucccaagguaacac

SEQ ID NO: 825148 - RNA, 18 nt, Human
caggugaugugauuggga

SEQ ID NO: 825149 - RNA, 24 nt, Human
cagugugggaugauuaaaucaagc

SEQ ID NO: 825150 - RNA, 21 nt, Human
cauaauaauccauuaauccau

SEQ ID NO: 825151 - RNA, 24 nt, Human
cauauguauacagugugggaugau

SEQ ID NO: 825152 - RNA, 21 nt, Human
cauugucuuaguucauuuucu

SEQ ID NO: 825153 - RNA, 24 nt, Human
ccuagacuaagaucuccgacagcg

SEQ ID NO: 825154 - RNA, 24 nt, Human
ccuagacuaagaucuccgacagcg

SEQ ID NO: 825155 - RNA, 23 nt, Human
cgagggaaaaaaauauucaaacc

SEQ ID NO: 825156 - RNA, 22 nt, Human
cguagcaggaggaaagacaaaa

SEQ ID NO: 825157 - RNA, 18 nt, Human
cuaacauuuucuacugga

SEQ ID NO: 825158 - RNA, 18 nt, Human
cuccauaucaaaaagggg

SEQ ID NO: 825159 - RNA, 20 nt, Human
cuugaaaauuagguaguuca

SEQ ID NO: 825160 - RNA, 21 nt, Human
cuuuuccacugguugacaccc

SEQ ID NO: 825161 - RNA, 23 nt, Human
gaacacggucauagugauuauag

SEQ ID NO: 825162 - RNA, 22 nt, Human
gaccucauggcccaaucaccuc

SEQ ID NO: 825163 - RNA, 19 nt, Human
gacuuaguaucuccagcag

SEQ ID NO: 825164 - RNA, 22 nt, Human
gagggaaaaaaauauucaaacc

SEQ ID NO: 825165 - RNA, 20 nt, Human
gaucaacauaacaaguuuug

SEQ ID NO: 825166 - RNA, 22 nt, Human
gaucaacauaacaaguuuuguc

SEQ ID NO: 825167 - RNA, 21 nt, Human
ggcccugacacucugaagcug

SEQ ID NO: 825168 - RNA, 22 nt, Human
gggaaaaaaauauucaaaccac

SEQ ID NO: 825169 - RNA, 18 nt, Human
uaaaauccagagucacag

SEQ ID NO: 825170 - RNA, 18 nt, Human
uaaaauccagagucacag

SEQ ID NO: 825171 - RNA, 19 nt, Human
uaacagggcuguaugugug

SEQ ID NO: 825172 - RNA, 23 nt, Human
uaagaagaaauaaaggaguggaa

SEQ ID NO: 825173 - RNA, 21 nt, Human
uaagaauauauaaauaacauc

SEQ ID NO: 825174 - RNA, 22 nt, Human
uaagucccaagguaacacauag

SEQ ID NO: 825175 - RNA, 18 nt, Human
uacaggaaggugacagac

SEQ ID NO: 825176 - RNA, 25 nt, Human
uaccuagacuaagaucucaagguag

SEQ ID NO: 825177 - RNA, 19 nt, Human
uaccucaggugaugugauu

SEQ ID NO: 825178 - RNA, 22 nt, Human
uagaaauucuaaaguugugcau

SEQ ID NO: 825179 - RNA, 21 nt, Human
uagacuguguauaugaaauua

SEQ ID NO: 825180 - RNA, 25 nt, Human
uaggaaauguaaaaucaaaaagucc

SEQ ID NO: 825181 - RNA, 22 nt, Human
uaggcugcaaaagguccuuuga

SEQ ID NO: 825182 - RNA, 23 nt, Human
uauaaagaaaaagaauuaauuuc

SEQ ID NO: 825183 - RNA, 19 nt, Human
uaucaaaaaggggcaacag

SEQ ID NO: 825184 - RNA, 21 nt, Human
uaucaaaaaggggcaacagcc

SEQ ID NO: 825185 - RNA, 18 nt, Human
uaucaaaaaggggcaacu

SEQ ID NO: 825186 - RNA, 18 nt, Human
uaucaaaaaggggcaacu

SEQ ID NO: 825187 - RNA, 18 nt, Human
uaucuagacugugggauu

SEQ ID NO: 825188 - RNA, 18 nt, Human
uauguuaagaaauaccaa

SEQ ID NO: 825189 - RNA, 24 nt, Human
uauuauggcauacaaaaugauauu

SEQ ID NO: 825190 - RNA, 20 nt, Human
uauuugaaguuuuaaaaaca

SEQ ID NO: 825191 - RNA, 25 nt, Human
uauuugaaguuuuaaaaacauuuua

SEQ ID NO: 825192 - RNA, 18 nt, Human
ucauuaaauauuuuagca

SEQ ID NO: 825193 - RNA, 23 nt, Human
ucccaauuaaguuugacugagac

SEQ ID NO: 825194 - RNA, 18 nt, Human
ucuaugagucaauacuua

SEQ ID NO: 825195 - RNA, 22 nt, Human
ucucacagaaaggaaacggagc

SEQ ID NO: 825196 - RNA, 24 nt, Human
ucucucacagaaaggaaacggagc

SEQ ID NO: 825197 - RNA, 18 nt, Human
ucugccucuuccuuuaga

SEQ ID NO: 825198 - RNA, 20 nt, Human
ucuguggaaauacaggaagg

SEQ ID NO: 825199 - RNA, 19 nt, Human
ugaagggguagccccggga

SEQ ID NO: 825200 - RNA, 18 nt, Human
ugacacucugaagcugag

SEQ ID NO: 825201 - RNA, 21 nt, Human
ugaccaggggacauacggugc

SEQ ID NO: 825202 - RNA, 21 nt, Human
ugagaagucugagguugagag

SEQ ID NO: 825203 - RNA, 25 nt, Human
ugagaagucugagguugagaggcca

SEQ ID NO: 825204 - RNA, 22 nt, Human
ugagguugagaggccauaucug

SEQ ID NO: 825205 - RNA, 23 nt, Human
ugagugcccugggccucugcagg

SEQ ID NO: 825206 - RNA, 25 nt, Human
ugauauauucuaaagccacacuaua

SEQ ID NO: 825207 - RNA, 24 nt, Human
ugaugacaguugaggacauuugug

SEQ ID NO: 825208 - RNA, 24 nt, Human
ugcaggaaaaagaacauguauuuc

SEQ ID NO: 825209 - RNA, 22 nt, Human
ugcauuuggaacuccagaagga

SEQ ID NO: 825210 - RNA, 22 nt, Human
ugcauuuggaacuccagaagga

SEQ ID NO: 825211 - RNA, 21 nt, Human
ugcucuguggaaauacaggaa

SEQ ID NO: 825212 - RNA, 20 nt, Human
uggaagaauuacacauaaaa

SEQ ID NO: 825213 - RNA, 19 nt, Human
uggagauccaugcuugaaa

SEQ ID NO: 825214 - RNA, 19 nt, Human
uggcagcucaucuagggca

SEQ ID NO: 825215 - RNA, 26 nt, Human
ugggaugauuaaaucaagcuaauuaa

SEQ ID NO: 825216 - RNA, 18 nt, Human
ugggauggccuucuuguu

SEQ ID NO: 825217 - RNA, 28 nt, Human
ugggccucugcaggucucuauucugaug

SEQ ID NO: 825218 - RNA, 24 nt, Human
uguaaaaauuuugacauaccgcga

SEQ ID NO: 825219 - RNA, 22 nt, Human
uguaagaagaaauaaaggagug

SEQ ID NO: 825220 - RNA, 18 nt, Human
uguauagacuguguauau

SEQ ID NO: 825221 - RNA, 18 nt, Human
ugucucuaucuucaccuc

SEQ ID NO: 825222 - RNA, 24 nt, Human
uguguggagaaaggaucugaauuu

SEQ ID NO: 825223 - RNA, 21 nt, Human
uguuuaaaaacguuucggcuu

SEQ ID NO: 825224 - RNA, 20 nt, Human
uuaaaauaaaauccagaguc

SEQ ID NO: 825225 - RNA, 20 nt, Human
uuaaaauaaaauccagaguc

SEQ ID NO: 825226 - RNA, 24 nt, Human
uuaacacugaguaacauccucaau

SEQ ID NO: 825227 - RNA, 19 nt, Human
uuaggucacucuuccuucc

SEQ ID NO: 825228 - RNA, 23 nt, Human
uuaguucauuuucugaggcuuaa

SEQ ID NO: 825229 - RNA, 25 nt, Human
uucacaauccacaauaaaaagacug

SEQ ID NO: 825230 - RNA, 18 nt, Human
uuccagauaauaagagua

SEQ ID NO: 825231 - RNA, 21 nt, Human
uugaaaauuagguaguucaug

SEQ ID NO: 825232 - RNA, 23 nt, Human
uugcaggaaaaagaacauguauu

SEQ ID NO: 825233 - RNA, 24 nt, Human
uugcauuuggaacuccagaaggaa

SEQ ID NO: 825234 - RNA, 24 nt, Human
uugcauuuggaacuccagaaggaa

SEQ ID NO: 825235 - RNA, 18 nt, Human
uuuucugccucuuccuuu

SEQ ID NO: 825236 - RNA, 27 nt, Human
uuuuuuuuuauauagcacacauauccu

SEQ ID NO: 825237 - RNA, 21 nt, Human
acaaaagcuggcccuccaccg

SEQ ID NO: 825238 - RNA, 18 nt, Human
aggccgaggcggccgaca

SEQ ID NO: 825239 - RNA, 20 nt, Human
auguuuuuuuuuuuuuugua

SEQ ID NO: 825240 - RNA, 20 nt, Human
caaaagcuggcccuccaccg

SEQ ID NO: 825241 - RNA, 21 nt, Human
gaacaaaagcuggcccuccac

SEQ ID NO: 825242 - RNA, 19 nt, Human
uccaccgcgguggcggccg

SEQ ID NO: 825243 - RNA, 21 nt, Human
uccaccgcgguggcggccgca

SEQ ID NO: 825244 - RNA, 22 nt, Human
uggaacaaaagcuggcccucca

SEQ ID NO: 825245 - RNA, 24 nt, Human
uuggaacaaaagcuggcccuccac

SEQ ID NO: 825246 - RNA, 18 nt, Human
aaaaaccaaguagaagug

SEQ ID NO: 825247 - RNA, 20 nt, Human
aacuccagggccuccgauau

SEQ ID NO: 825248 - RNA, 18 nt, Human
aacucgagccugcugccu

SEQ ID NO: 825249 - RNA, 18 nt, Human
aacuucccaaacugcuga

SEQ ID NO: 825250 - RNA, 18 nt, Human
aagaacuccaugaaugcu

SEQ ID NO: 825251 - RNA, 20 nt, Human
aagagcuacagacuggcagc

SEQ ID NO: 825252 - RNA, 20 nt, Human
aagcucacaaacuccagggc

SEQ ID NO: 825253 - RNA, 26 nt, Human
aagcucacaaacuccagggccuccga

SEQ ID NO: 825254 - RNA, 22 nt, Human
aagguuaacuugucaaauuaug

SEQ ID NO: 825255 - RNA, 20 nt, Human
aagugaccccaaacugugac

SEQ ID NO: 825256 - RNA, 21 nt, Human
aagugaccccaaacugugacu

SEQ ID NO: 825257 - RNA, 21 nt, Human
aaguuccucccugcaauaguc

SEQ ID NO: 825258 - RNA, 20 nt, Human
acagacaugaagaacuccau

SEQ ID NO: 825259 - RNA, 24 nt, Human
acaugacauuuuccacaauucacc

SEQ ID NO: 825260 - RNA, 25 nt, Human
accccaucuucuucuucccagccag

SEQ ID NO: 825261 - RNA, 23 nt, Human
acucuuccucgccuccccuccug

SEQ ID NO: 825262 - RNA, 18 nt, Human
acuuucccagcauagggu

SEQ ID NO: 825263 - RNA, 21 nt, Human
agaggccagggcaccagaaug

SEQ ID NO: 825264 - RNA, 22 nt, Human
agauuacacuguuacauugcuu

SEQ ID NO: 825265 - RNA, 18 nt, Human
agccgccacgcccagcac

SEQ ID NO: 825266 - RNA, 23 nt, Human
aggaacguggaccuaaaucacug

SEQ ID NO: 825267 - RNA, 21 nt, Human
aggaagugccuggcacagaag

SEQ ID NO: 825268 - RNA, 24 nt, Human
aggcgggcagaucacaaggucagg

SEQ ID NO: 825269 - RNA, 18 nt, Human
aggcggguacgcugaggg

SEQ ID NO: 825270 - RNA, 18 nt, Human
agggcugggauuacaggc

SEQ ID NO: 825271 - RNA, 24 nt, Human
agggcugggauuacaggcgugagc

SEQ ID NO: 825272 - RNA, 20 nt, Human
agugagcucauuugaaagcu

SEQ ID NO: 825273 - RNA, 21 nt, Human
aguggagauuugccauucgug

SEQ ID NO: 825274 - RNA, 24 nt, Human
aguggcucacaccuguaaucccag

SEQ ID NO: 825275 - RNA, 24 nt, Human
auagggcugggauuacaggcguga

SEQ ID NO: 825276 - RNA, 18 nt, Human
auccuuaugguguugcca

SEQ ID NO: 825277 - RNA, 20 nt, Human
caagaccagccucccauagg

SEQ ID NO: 825278 - RNA, 22 nt, Human
caaggucaggcguucaagacca

SEQ ID NO: 825279 - RNA, 24 nt, Human
cacaccuguaaucccagcacuucg

SEQ ID NO: 825280 - RNA, 22 nt, Human
caccuguaaucccagcacuucg

SEQ ID NO: 825281 - RNA, 24 nt, Human
caccuguaaucccagcacuucggg

SEQ ID NO: 825282 - RNA, 22 nt, Human
cacuguguaaaaacuagaaagu

SEQ ID NO: 825283 - RNA, 24 nt, Human
cagaucacaaggucaggcguucaa

SEQ ID NO: 825284 - RNA, 22 nt, Human
cagauuccgcuccaccaaagac

SEQ ID NO: 825285 - RNA, 19 nt, Human
cagauuugagauauaugug

SEQ ID NO: 825286 - RNA, 24 nt, Human
cagcacuucgggagaccgaggcgg

SEQ ID NO: 825287 - RNA, 23 nt, Human
cagcugagcagcucagaggcccc

SEQ ID NO: 825288 - RNA, 24 nt, Human
caggauaagcaaauaacucacaac

SEQ ID NO: 825289 - RNA, 24 nt, Human
cagggcaccagaaugugcuaaagg

SEQ ID NO: 825290 - RNA, 24 nt, Human
cagucuccagucugcugugccaga

SEQ ID NO: 825291 - RNA, 22 nt, Human
cauacauuuauauuuaucuuca

SEQ ID NO: 825292 - RNA, 23 nt, Human
caugauucauuuagguauucuga

SEQ ID NO: 825293 - RNA, 22 nt, Human
ccacugguugacuucacugcac

SEQ ID NO: 825294 - RNA, 21 nt, Human
ccagaacauccugccaugucc

SEQ ID NO: 825295 - RNA, 18 nt, Human
ccagcuccccauccugcc

SEQ ID NO: 825296 - RNA, 23 nt, Human
ccauagggcugggauuacaggcg

SEQ ID NO: 825297 - RNA, 24 nt, Human
ccauagggcugggauuacaggcgu

SEQ ID NO: 825298 - RNA, 22 nt, Human
ccaucaaggagaaucugucgcu

SEQ ID NO: 825299 - RNA, 24 nt, Human
cccaaauccucacuuucccagcau

SEQ ID NO: 825300 - RNA, 22 nt, Human
ccccacaguaaguuggcccaaa

SEQ ID NO: 825301 - RNA, 21 nt, Human
ccccaucuucuucuucccagc

SEQ ID NO: 825302 - RNA, 26 nt, Human
cccuagaccuucuaaccagguguauc

SEQ ID NO: 825303 - RNA, 23 nt, Human
cccuuauucucccucacccuucu

SEQ ID NO: 825304 - RNA, 27 nt, Human
cccuuauucucccucacccuucucccu

SEQ ID NO: 825305 - RNA, 18 nt, Human
ccgggcccaguggcucac

SEQ ID NO: 825306 - RNA, 19 nt, Human
ccucaaggcuugacagaca

SEQ ID NO: 825307 - RNA, 21 nt, Human
ccucaaggcuugacagacaug

SEQ ID NO: 825308 - RNA, 22 nt, Human
ccucacccuucuugggacuaga

SEQ ID NO: 825309 - RNA, 21 nt, Human
ccucuaggacaggagacccag

SEQ ID NO: 825310 - RNA, 19 nt, Human
ccugcaaauguguucgucu

SEQ ID NO: 825311 - RNA, 21 nt, Human
ccuuauucucccucacccuuc

SEQ ID NO: 825312 - RNA, 18 nt, Human
cgagccagguuuuguugu

SEQ ID NO: 825313 - RNA, 24 nt, Human
cgaggcgggcagaucacaagguca

SEQ ID NO: 825314 - RNA, 18 nt, Human
cuagagccaagcucacaa

SEQ ID NO: 825315 - RNA, 19 nt, Human
cucacaacaguaccucaua

SEQ ID NO: 825316 - RNA, 24 nt, Human
cucacaccuguaaucccagcacuu

SEQ ID NO: 825317 - RNA, 25 nt, Human
cucacaccuguaaucccagcacuuc

SEQ ID NO: 825318 - RNA, 21 nt, Human
cucacaggcccugccucaguc

SEQ ID NO: 825319 - RNA, 21 nt, Human
cuccuccuaccccaucuucuu

SEQ ID NO: 825320 - RNA, 18 nt, Human
cuccuguguaggccagcu

SEQ ID NO: 825321 - RNA, 22 nt, Human
cucuaauaacuaacuucccaaa

SEQ ID NO: 825322 - RNA, 18 nt, Human
cugaaugcuaaauauuac

SEQ ID NO: 825323 - RNA, 20 nt, Human
cugggauuacaggcgugagg

SEQ ID NO: 825324 - RNA, 20 nt, Human
cugggauuacaggcgugagu

SEQ ID NO: 825325 - RNA, 21 nt, Human
cuuucccccugcugauggugu

SEQ ID NO: 825326 - RNA, 20 nt, Human
gacaggagacccagcugagc

SEQ ID NO: 825327 - RNA, 24 nt, Human
gaccuggauuuuagacuccugggg

SEQ ID NO: 825328 - RNA, 19 nt, Human
gagcagcucagaggcccca

SEQ ID NO: 825329 - RNA, 24 nt, Human
gaucacaaggucaggcguucaaga

SEQ ID NO: 825330 - RNA, 19 nt, Human
gaucacuuaaaacauacaa

SEQ ID NO: 825331 - RNA, 21 nt, Human
gaucucaaagagacaaacaug

SEQ ID NO: 825332 - RNA, 18 nt, Human
gauuacaggcgugagccg

SEQ ID NO: 825333 - RNA, 21 nt, Human
gauuacaggcgugagccgcca

SEQ ID NO: 825334 - RNA, 22 nt, Human
gauuacaggcgugagccgccac

SEQ ID NO: 825335 - RNA, 23 nt, Human
gcgaucucaaagagacaaacaug

SEQ ID NO: 825336 - RNA, 22 nt, Human
gcucuaacuugugccucugcuc

SEQ ID NO: 825337 - RNA, 23 nt, Human
ggaaccugaccuccuccuacccc

SEQ ID NO: 825338 - RNA, 23 nt, Human
ggcagaucacaaggucaggcguu

SEQ ID NO: 825339 - RNA, 23 nt, Human
ggcccaguggcucacaccuguaa

SEQ ID NO: 825340 - RNA, 23 nt, Human
gggagaccgaggcgggcagauca

SEQ ID NO: 825341 - RNA, 21 nt, Human
ggguguccucaaggcuugaca

SEQ ID NO: 825342 - RNA, 18 nt, Human
gucauuggauuuccucuc

SEQ ID NO: 825343 - RNA, 23 nt, Human
gucauuggauuuccucucuggaa

SEQ ID NO: 825344 - RNA, 22 nt, Human
gugggacuggaggagggugaga

SEQ ID NO: 825345 - RNA, 20 nt, Human
guguauguguauaugugugu

SEQ ID NO: 825346 - RNA, 19 nt, Human
uaaaaaaaaaagaccgggc

SEQ ID NO: 825347 - RNA, 20 nt, Human
uaaaacaggauaagcaaaua

SEQ ID NO: 825348 - RNA, 28 nt, Human
uaaaaccuauaaacaauauucuuaguuu

SEQ ID NO: 825349 - RNA, 22 nt, Human
uaaaauuccacaaauauguuuc

SEQ ID NO: 825350 - RNA, 24 nt, Human
uaaacuagaagugauaagagccag

SEQ ID NO: 825351 - RNA, 24 nt, Human
uaagaaauccuuaugguguugcca

SEQ ID NO: 825352 - RNA, 24 nt, Human
uaagcaaauaacucacaacaguac

SEQ ID NO: 825353 - RNA, 22 nt, Human
uacaacacccagguauuaaggg

SEQ ID NO: 825354 - RNA, 18 nt, Human
uacagcauaugaaacaag

SEQ ID NO: 825355 - RNA, 19 nt, Human
uacagcauaugaaacaagu

SEQ ID NO: 825356 - RNA, 21 nt, Human
uacgcugagggucgggggggc

SEQ ID NO: 825357 - RNA, 21 nt, Human
uacuuuacagcuauaagaacg

SEQ ID NO: 825358 - RNA, 23 nt, Human
uagaaguucucauccuuggcugg

SEQ ID NO: 825359 - RNA, 20 nt, Human
uagacuccugggguagcuac

SEQ ID NO: 825360 - RNA, 22 nt, Human
uagagccaagcucacaaacucc

SEQ ID NO: 825361 - RNA, 22 nt, Human
uaugaaacaagugaucucuuaa

SEQ ID NO: 825362 - RNA, 23 nt, Human
uauguguauauguguguuucccg

SEQ ID NO: 825363 - RNA, 21 nt, Human
ucaaagagacaaacauguaag

SEQ ID NO: 825364 - RNA, 21 nt, Human
ucaagggcaugguguaugugu

SEQ ID NO: 825365 - RNA, 23 nt, Human
ucaauucacuaucaacucuaaua

SEQ ID NO: 825366 - RNA, 24 nt, Human
ucacaaggucaggcguucaagacc

SEQ ID NO: 825367 - RNA, 21 nt, Human
ucagaggccccacaguaaguu

SEQ ID NO: 825368 - RNA, 26 nt, Human
ucagucuccagucugcugugccagaa

SEQ ID NO: 825369 - RNA, 20 nt, Human
ucauaugaugaaaauaaagu

SEQ ID NO: 825370 - RNA, 23 nt, Human
uccacaauucaccugcauaucug

SEQ ID NO: 825371 - RNA, 24 nt, Human
ucccauagggcugggauuacaggc

SEQ ID NO: 825372 - RNA, 23 nt, Human
uccuuggaaccugaccuccuccu

SEQ ID NO: 825373 - RNA, 20 nt, Human
ucgaagagcuacagacuggc

SEQ ID NO: 825374 - RNA, 20 nt, Human
ucuauauugcaguacaacug

SEQ ID NO: 825375 - RNA, 22 nt, Human
ucuauauugcaguacaacuggu

SEQ ID NO: 825376 - RNA, 19 nt, Human
ucugugaaacuugguuccc

SEQ ID NO: 825377 - RNA, 18 nt, Human
ucuuacagugaaggacag

SEQ ID NO: 825378 - RNA, 22 nt, Human
ugaaaagaacaagccacaccgg

SEQ ID NO: 825379 - RNA, 25 nt, Human
ugaaaagaacaagccacaccggaua

SEQ ID NO: 825380 - RNA, 24 nt, Human
ugaaaaucugaccugucaaaacug

SEQ ID NO: 825381 - RNA, 20 nt, Human
ugaaauaaaacucuauaaag

SEQ ID NO: 825382 - RNA, 20 nt, Human
ugaacuagauuacacuguua

SEQ ID NO: 825383 - RNA, 21 nt, Human
ugaauugaacuagauuacacu

SEQ ID NO: 825384 - RNA, 20 nt, Human
ugacuuccaagguuccccca

SEQ ID NO: 825385 - RNA, 22 nt, Human
ugagaccagaauagaugaaagc

SEQ ID NO: 825386 - RNA, 20 nt, Human
ugagcagcucagaggcccca

SEQ ID NO: 825387 - RNA, 18 nt, Human
ugagcuuagcucccugcc

SEQ ID NO: 825388 - RNA, 20 nt, Human
ugccucagucuccagucugc

SEQ ID NO: 825389 - RNA, 21 nt, Human
ugccucugcucuaagaagggg

SEQ ID NO: 825390 - RNA, 20 nt, Human
uggaaguuccucccugcaau

SEQ ID NO: 825391 - RNA, 22 nt, Human
uggcccaaaugcugggccugcu

SEQ ID NO: 825392 - RNA, 21 nt, Human
uggcucacaccuguaauccca

SEQ ID NO: 825393 - RNA, 22 nt, Human
uggcucacaccuguaaucccag

SEQ ID NO: 825394 - RNA, 24 nt, Human
uggcucacaccuguaaucccagca

SEQ ID NO: 825395 - RNA, 18 nt, Human
ugggauuacaggcgugag

SEQ ID NO: 825396 - RNA, 19 nt, Human
ugggauuacaggcgugagc

SEQ ID NO: 825397 - RNA, 21 nt, Human
ugggauuacaggcgugagccg

SEQ ID NO: 825398 - RNA, 22 nt, Human
ugggauuacaggcgugagccgc

SEQ ID NO: 825399 - RNA, 23 nt, Human
ugggauuacaggcgugagccgcc

SEQ ID NO: 825400 - RNA, 24 nt, Human
ugggauuacaggcgugagccgcca

SEQ ID NO: 825401 - RNA, 22 nt, Human
ugguguauguguauaugugugu

SEQ ID NO: 825402 - RNA, 18 nt, Human
uguauguguauaugugug

SEQ ID NO: 825403 - RNA, 19 nt, Human
ugugcucagguguuuacuu

SEQ ID NO: 825404 - RNA, 21 nt, Human
uguguaggccagcugugcuca

SEQ ID NO: 825405 - RNA, 18 nt, Human
uguguguuucccgaagcc

SEQ ID NO: 825406 - RNA, 19 nt, Human
uuaaaagucuugaaaacga

SEQ ID NO: 825407 - RNA, 23 nt, Human
uuagcuaacuugaagaaaauaaa

SEQ ID NO: 825408 - RNA, 23 nt, Human
uuauagcacagaaaucccaaauc

SEQ ID NO: 825409 - RNA, 18 nt, Human
uucaagaccagccuccca

SEQ ID NO: 825410 - RNA, 21 nt, Human
uucacugcacagcuuaccacc

SEQ ID NO: 825411 - RNA, 19 nt, Human
uucccucaccuguaaacua

SEQ ID NO: 825412 - RNA, 24 nt, Human
uugcugaauugaacuagauuacac

SEQ ID NO: 825413 - RNA, 18 nt, Human
uuggaaccugaccuccuc

SEQ ID NO: 825414 - RNA, 20 nt, Human
uuggcccaaaugcugggccu

SEQ ID NO: 825415 - RNA, 24 nt, Human
uuuaaauacagcauaugaaacaag

SEQ ID NO: 825416 - RNA, 19 nt, Human
uuuccagaccugcauccuu

SEQ ID NO: 825417 - RNA, 21 nt, Human
uuuccagaccugcauccuugg

SEQ ID NO: 825418 - RNA, 21 nt, Human
uuugccauucguggguguccu

SEQ ID NO: 825419 - RNA, 19 nt, Human
uuuuguucacugaguguug

SEQ ID NO: 825420 - RNA, 21 nt, Human
aaaaacuuaggaaggccugga

SEQ ID NO: 825421 - RNA, 23 nt, Human
aaacaaacacuguaauauaagaa

SEQ ID NO: 825422 - RNA, 19 nt, Human
aaacugcacugcaaauaca

SEQ ID NO: 825423 - RNA, 24 nt, Human
aaagugcugggaucacaggcguga

SEQ ID NO: 825424 - RNA, 18 nt, Human
aacaagauccucuccccg

SEQ ID NO: 825425 - RNA, 24 nt, Human
aacaauaacaagauccucuccccc

SEQ ID NO: 825426 - RNA, 23 nt, Human
aacacuguaauauaagaacucca

SEQ ID NO: 825427 - RNA, 23 nt, Human
aagaaaaggcaaaacucaacaaa

SEQ ID NO: 825428 - RNA, 24 nt, Human
aagaaagacagaaauacaucaaag

SEQ ID NO: 825429 - RNA, 23 nt, Human
aagaaauagacauugaagccagg

SEQ ID NO: 825430 - RNA, 24 nt, Human
aagacagaaauacaucaaagaaaa

SEQ ID NO: 825431 - RNA, 26 nt, Human
aagugcugggaucacaggcgugagcc

SEQ ID NO: 825432 - RNA, 18 nt, Human
aaguggcauucaaaaaga

SEQ ID NO: 825433 - RNA, 19 nt, Human
aaguguugaaaggugguca

SEQ ID NO: 825434 - RNA, 27 nt, Human
acaacuaacaaaaacuuaggaaggccu

SEQ ID NO: 825435 - RNA, 21 nt, Human
acaggguuucaccauguuggu

SEQ ID NO: 825436 - RNA, 23 nt, Human
acaggguuucaccauguugguca

SEQ ID NO: 825437 - RNA, 24 nt, Human
acaggguuucaccauguuggucag

SEQ ID NO: 825438 - RNA, 21 nt, Human
accauagcuaaacaaacacug

SEQ ID NO: 825439 - RNA, 24 nt, Human
accauguuggucaggcuggucuug

SEQ ID NO: 825440 - RNA, 21 nt, Human
acuacagucuacaaaaagguu

SEQ ID NO: 825441 - RNA, 19 nt, Human
acucuuguuucaccgcugg

SEQ ID NO: 825442 - RNA, 26 nt, Human
acugcacugcaaauacaaaauaaaau

SEQ ID NO: 825443 - RNA, 18 nt, Human
agaaaaaaaaagcuaggc

SEQ ID NO: 825444 - RNA, 23 nt, Human
agaaaaaaaaagcuaggcauaaa

SEQ ID NO: 825445 - RNA, 22 nt, Human
agaaagacagaaauacaucaaa

SEQ ID NO: 825446 - RNA, 25 nt, Human
agaaaugaaaauauaauaacccuua

SEQ ID NO: 825447 - RNA, 26 nt, Human
agcuaaacaaacacuguaauauaaga

SEQ ID NO: 825448 - RNA, 27 nt, Human
aggcaaaagaaaaggcaaaagggaccc

SEQ ID NO: 825449 - RNA, 20 nt, Human
aggcaaaagaaaaggcaaag

SEQ ID NO: 825450 - RNA, 22 nt, Human
aggcagaagguagagggacccc

SEQ ID NO: 825451 - RNA, 26 nt, Human
aggcagaagguagauguagagggacc

SEQ ID NO: 825452 - RNA, 21 nt, Human
aggccuggaagagaggugcca

SEQ ID NO: 825453 - RNA, 19 nt, Human
agggcuggauggaucaacg

SEQ ID NO: 825454 - RNA, 19 nt, Human
aggguaccaacuuaguaug

SEQ ID NO: 825455 - RNA, 24 nt, Human
aggugguccacccaccucggccuc

SEQ ID NO: 825456 - RNA, 22 nt, Human
aguagagacaggguuucaccau

SEQ ID NO: 825457 - RNA, 18 nt, Human
aguagcuggaauuacagg

SEQ ID NO: 825458 - RNA, 24 nt, Human
agugcgauggcucaaccucggcuc

SEQ ID NO: 825459 - RNA, 24 nt, Human
auuuuuguacuuuuaguagagaca

SEQ ID NO: 825460 - RNA, 24 nt, Human
caaagugcugggaucacaggcgug

SEQ ID NO: 825461 - RNA, 23 nt, Human
caaccuccaccuccuggguucaa

SEQ ID NO: 825462 - RNA, 22 nt, Human
caagcaauucuccugccucagc

SEQ ID NO: 825463 - RNA, 22 nt, Human
cacaggcgugagccaccaugcc

SEQ ID NO: 825464 - RNA, 24 nt, Human
caccacgccuggcuaauuuuugua

SEQ ID NO: 825465 - RNA, 19 nt, Human
caccagucuaguaagugcu

SEQ ID NO: 825466 - RNA, 19 nt, Human
caccaugccuggccuauuu

SEQ ID NO: 825467 - RNA, 21 nt, Human
caccauguuggucaggcuggu

SEQ ID NO: 825468 - RNA, 24 nt, Human
caccauguuggucaggcuggucuu

SEQ ID NO: 825469 - RNA, 22 nt, Human
cacccaccucggccucccaaag

SEQ ID NO: 825470 - RNA, 23 nt, Human
cacccaccucggccucccaaagu

SEQ ID NO: 825471 - RNA, 20 nt, Human
caccuagaaaaaaaaagcuu

SEQ ID NO: 825472 - RNA, 24 nt, Human
caccucggccucccaaagugcugg

SEQ ID NO: 825473 - RNA, 19 nt, Human
cagaagguagauguagaca

SEQ ID NO: 825474 - RNA, 19 nt, Human
cagccuccugaguagcugg

SEQ ID NO: 825475 - RNA, 19 nt, Human
cagcuuccuuaugaaccag

SEQ ID NO: 825476 - RNA, 24 nt, Human
caggguuucaccauguuggucagg

SEQ ID NO: 825477 - RNA, 22 nt, Human
caucaaagaaaaaacauuuuaa

SEQ ID NO: 825478 - RNA, 22 nt, Human
caucaaagaaaaaacauuuuaa

SEQ ID NO: 825479 - RNA, 24 nt, Human
cauguuggucaggcuggucuugaa

SEQ ID NO: 825480 - RNA, 21 nt, Human
cauugcaaccuccaccuccug

SEQ ID NO: 825481 - RNA, 22 nt, Human
ccaaagugcugggaucacaggc

SEQ ID NO: 825482 - RNA, 24 nt, Human
ccaaagugcugggaucacaggcgu

SEQ ID NO: 825483 - RNA, 20 nt, Human
ccaccacgccuggcuaauuu

SEQ ID NO: 825484 - RNA, 26 nt, Human
ccaccuccuggguucaagcaauucuu

SEQ ID NO: 825485 - RNA, 21 nt, Human
cccauagguagaaaaaaauag

SEQ ID NO: 825486 - RNA, 19 nt, Human
ccuccaccuccuggguuca

SEQ ID NO: 825487 - RNA, 24 nt, Human
ccuccuggguucaagcaauucucc

SEQ ID NO: 825488 - RNA, 23 nt, Human
ccucuaggaaaaacccacugccu

SEQ ID NO: 825489 - RNA, 23 nt, Human
ccucuggacugacugaaauaugg

SEQ ID NO: 825490 - RNA, 23 nt, Human
ccugaguagcuggaauuacaggu

SEQ ID NO: 825491 - RNA, 24 nt, Human
ccugaucucaggugguccacccac

SEQ ID NO: 825492 - RNA, 23 nt, Human
ccugccucagccuccugaguagc

SEQ ID NO: 825493 - RNA, 24 nt, Human
ccugccucagccuccugaguagcu

SEQ ID NO: 825494 - RNA, 23 nt, Human
ccuggguucaagcaauucuccug

SEQ ID NO: 825495 - RNA, 20 nt, Human
cuauaagcuucugaaaaugc

SEQ ID NO: 825496 - RNA, 24 nt, Human
cucauugcaaccuccaccuccugg

SEQ ID NO: 825497 - RNA, 21 nt, Human
cuccuggguucaagcaauucu

SEQ ID NO: 825498 - RNA, 21 nt, Human
cucuaggaaaaacccacugcc

SEQ ID NO: 825499 - RNA, 19 nt, Human
cugaaaaugcagcuaagug

SEQ ID NO: 825500 - RNA, 21 nt, Human
cugaccagcggugaacuacaa

SEQ ID NO: 825501 - RNA, 24 nt, Human
cugaguagcuggaauuacagguau

SEQ ID NO: 825502 - RNA, 19 nt, Human
cuguacagucagaaaaacc

SEQ ID NO: 825503 - RNA, 18 nt, Human
cuucaaaaggggcaaguc

SEQ ID NO: 825504 - RNA, 24 nt, Human
cuuuuaguagagacaggguuucac

SEQ ID NO: 825505 - RNA, 24 nt, Human
gaaaaaccaggaugguggcaaaua

SEQ ID NO: 825506 - RNA, 20 nt, Human
gaagacacaacuaacaaaac

SEQ ID NO: 825507 - RNA, 22 nt, Human
gaagagcuguuaaaucuguagg

SEQ ID NO: 825508 - RNA, 18 nt, Human
gagccaccaugccuggcc

SEQ ID NO: 825509 - RNA, 24 nt, Human
gaguagcuggaauuacagguaugc

SEQ ID NO: 825510 - RNA, 18 nt, Human
gaucacaggcgugagcca

SEQ ID NO: 825511 - RNA, 24 nt, Human
gaucacaggcgugagccaccaugc

SEQ ID NO: 825512 - RNA, 24 nt, Human
gaucucaggugguccacccaccuc

SEQ ID NO: 825513 - RNA, 21 nt, Human
gcaaaagaaaaggcaaaacuc

SEQ ID NO: 825514 - RNA, 20 nt, Human
gcagaagguagauguagaca

SEQ ID NO: 825515 - RNA, 21 nt, Human
gcuacaggguuaacugccucu

SEQ ID NO: 825516 - RNA, 24 nt, Human
ggaucacaggcgugagccaccaug

SEQ ID NO: 825517 - RNA, 22 nt, Human
ggguuucaccauguuggucagg

SEQ ID NO: 825518 - RNA, 18 nt, Human
gguagagagaaggcagaa

SEQ ID NO: 825519 - RNA, 24 nt, Human
gguccuucaaggcuaugcuucuga

SEQ ID NO: 825520 - RNA, 22 nt, Human
guaaaaaccagaaaugaaaaua

SEQ ID NO: 825521 - RNA, 21 nt, Human
guaccaacuuaguauguuaga

SEQ ID NO: 825522 - RNA, 24 nt, Human
gugguccacccaccucggccuccc

SEQ ID NO: 825523 - RNA, 22 nt, Human
uaacaaacauauuaguaaccau

SEQ ID NO: 825524 - RNA, 21 nt, Human
uaaccauagcuaaacaaacac

SEQ ID NO: 825525 - RNA, 23 nt, Human
uaagaaagacagaaauacaucaa

SEQ ID NO: 825526 - RNA, 24 nt, Human
uaagaaagacagaaauacaucaaa

SEQ ID NO: 825527 - RNA, 18 nt, Human
uaagaacuccauuagaca

SEQ ID NO: 825528 - RNA, 19 nt, Human
uaagugcuacaggguuaac

SEQ ID NO: 825529 - RNA, 24 nt, Human
uaauaacccuuauaacuccuuaca

SEQ ID NO: 825530 - RNA, 18 nt, Human
uaauagagcucucuucuc

SEQ ID NO: 825531 - RNA, 24 nt, Human
uaauuuuuguacuuuuaguagaga

SEQ ID NO: 825532 - RNA, 27 nt, Human
uacacaaaagaacacugguucagaucc

SEQ ID NO: 825533 - RNA, 22 nt, Human
uacagguaugcgccaccacgcc

SEQ ID NO: 825534 - RNA, 20 nt, Human
uacagucuacaaaaagguuu

SEQ ID NO: 825535 - RNA, 21 nt, Human
uacugcugucagguccuucaa

SEQ ID NO: 825536 - RNA, 19 nt, Human
uagaaguccagaaucccau

SEQ ID NO: 825537 - RNA, 22 nt, Human
uagagacaggguuucaccaugu

SEQ ID NO: 825538 - RNA, 21 nt, Human
uagauguagacacuacaauuc

SEQ ID NO: 825539 - RNA, 24 nt, Human
uaggcaaaagaaaaggcaaaacuc

SEQ ID NO: 825540 - RNA, 19 nt, Human
uaggcacuggcuuuuuuuu

SEQ ID NO: 825541 - RNA, 24 nt, Human
uaguagagacaggguuucaccaug

SEQ ID NO: 825542 - RNA, 26 nt, Human
uaguagagacaggguuucaccauguu

SEQ ID NO: 825543 - RNA, 20 nt, Human
uaguugcaguaaaaaguguu

SEQ ID NO: 825544 - RNA, 23 nt, Human
uauaguaaaaaccagaaaugaaa

SEQ ID NO: 825545 - RNA, 18 nt, Human
uaucuuuucauacugcug

SEQ ID NO: 825546 - RNA, 19 nt, Human
ucaaaacccacucaacugc

SEQ ID NO: 825547 - RNA, 19 nt, Human
ucaagcaauucuccugccu

SEQ ID NO: 825548 - RNA, 22 nt, Human
ucacugccccagcuuccuuaug

SEQ ID NO: 825549 - RNA, 22 nt, Human
ucagccuccugaguagcuggaa

SEQ ID NO: 825550 - RNA, 24 nt, Human
ucauugcaaccuccaccuccuggg

SEQ ID NO: 825551 - RNA, 25 nt, Human
ucauugcaaccuccaccuccugggu

SEQ ID NO: 825552 - RNA, 27 nt, Human
ucauugcaaccuccaccuccuggguuc

SEQ ID NO: 825553 - RNA, 20 nt, Human
uccagcaaugacuuaugaac

SEQ ID NO: 825554 - RNA, 24 nt, Human
ucccaaagugcugggaucacaggc

SEQ ID NO: 825555 - RNA, 24 nt, Human
uccucugguucaccuuuugauuau

SEQ ID NO: 825556 - RNA, 24 nt, Human
uccugaguagcuggaauuacaggu

SEQ ID NO: 825557 - RNA, 21 nt, Human
uccuggguucaagcaauucuc

SEQ ID NO: 825558 - RNA, 24 nt, Human
uccuggguucaagcaauucuccug

SEQ ID NO: 825559 - RNA, 21 nt, Human
ucgaagacacaacuaacaaaa

SEQ ID NO: 825560 - RNA, 18 nt, Human
ucggccucccaaagugcu

SEQ ID NO: 825561 - RNA, 19 nt, Human
ucuaggaaaaacccacugc

SEQ ID NO: 825562 - RNA, 24 nt, Human
ucuccugccucagccuccugagua

SEQ ID NO: 825563 - RNA, 24 nt, Human
ugaaaaaucaccaccuagaaaaaa

SEQ ID NO: 825564 - RNA, 24 nt, Human
ugaacuaaucaauaaacuacaguc

SEQ ID NO: 825565 - RNA, 22 nt, Human
ugaauaggccauuuuauaaugc

SEQ ID NO: 825566 - RNA, 18 nt, Human
ugacuuaugaacuugccc

SEQ ID NO: 825567 - RNA, 24 nt, Human
ugaucucaggugguccacccaccu

SEQ ID NO: 825568 - RNA, 20 nt, Human
ugcaaccuccaccuccuggg

SEQ ID NO: 825569 - RNA, 24 nt, Human
ugccccagcuuccuuaugaaccag

SEQ ID NO: 825570 - RNA, 24 nt, Human
ugccucagccuccugaguagcugg

SEQ ID NO: 825571 - RNA, 19 nt, Human
ugccugacguuaacaucuu

SEQ ID NO: 825572 - RNA, 23 nt, Human
ugcgauggcucaaccucggcuca

SEQ ID NO: 825573 - RNA, 24 nt, Human
ugcugggaucacaggcgugagcca

SEQ ID NO: 825574 - RNA, 23 nt, Human
uggaagagaggugccaaacugca

SEQ ID NO: 825575 - RNA, 21 nt, Human
uggaauuacagguaugcgcca

SEQ ID NO: 825576 - RNA, 22 nt, Human
uggaauuacagguaugcgccac

SEQ ID NO: 825577 - RNA, 24 nt, Human
uggaauuacagguaugcgccacca

SEQ ID NO: 825578 - RNA, 24 nt, Human
uggagugcgauggcucaaccucgg

SEQ ID NO: 825579 - RNA, 18 nt, Human
ugggaucacaggcgugag

SEQ ID NO: 825580 - RNA, 22 nt, Human
ugggaucacaggcgugagccac

SEQ ID NO: 825581 - RNA, 23 nt, Human
ugggaucacaggcgugagccacc

SEQ ID NO: 825582 - RNA, 24 nt, Human
ugggaucacaggcgugagccacca

SEQ ID NO: 825583 - RNA, 25 nt, Human
ugggaucacaggcgugagccaccau

SEQ ID NO: 825584 - RNA, 21 nt, Human
uggguucaagcaauucuccug

SEQ ID NO: 825585 - RNA, 23 nt, Human
uggguucaagcaauucuccugcc

SEQ ID NO: 825586 - RNA, 24 nt, Human
uggguucaagcaauucuccugccu

SEQ ID NO: 825587 - RNA, 24 nt, Human
uggucaggcuggucuugaacaccu

SEQ ID NO: 825588 - RNA, 24 nt, Human
ugguccacccaccucggccuccca

SEQ ID NO: 825589 - RNA, 20 nt, Human
uguaaaaucauuuggaugga

SEQ ID NO: 825590 - RNA, 19 nt, Human
uguacagucagaaaaacca

SEQ ID NO: 825591 - RNA, 22 nt, Human
uuaaagauauuuucagacugcc

SEQ ID NO: 825592 - RNA, 21 nt, Human
uuaggaaggccuggaagagag

SEQ ID NO: 825593 - RNA, 24 nt, Human
uuaguagagacaggguuucaccau

SEQ ID NO: 825594 - RNA, 21 nt, Human
uucaaaacccacucaacugcc

SEQ ID NO: 825595 - RNA, 21 nt, Human
uucaagcaauucuccugccuc

SEQ ID NO: 825596 - RNA, 24 nt, Human
uucaagcaauucuccugccucagc

SEQ ID NO: 825597 - RNA, 20 nt, Human
uuccucuuuuaauagagcuc

SEQ ID NO: 825598 - RNA, 21 nt, Human
uucuguacagucagaaaaacc

SEQ ID NO: 825599 - RNA, 21 nt, Human
uugaagccagguuuugacacu

SEQ ID NO: 825600 - RNA, 25 nt, Human
uugacacuuauucuccacauccagc

SEQ ID NO: 825601 - RNA, 18 nt, Human
uugcaaccuccaccuccu

SEQ ID NO: 825602 - RNA, 23 nt, Human
uugcaaccuccaccuccuggguu

SEQ ID NO: 825603 - RNA, 24 nt, Human
uugcaaccuccaccuccuggguuc

SEQ ID NO: 825604 - RNA, 24 nt, Human
uuucaccauguuggucaggcuggu

SEQ ID NO: 825605 - RNA, 20 nt, Human
uuugacacuuauucuccaca

SEQ ID NO: 825606 - RNA, 18 nt, Human
uuugugauguggcuuucc

SEQ ID NO: 825607 - RNA, 20 nt, Human
uuuuuguacuuuuaguagag

SEQ ID NO: 825608 - RNA, 18 nt, Human
uuuuuuuuuucuuuuuug

SEQ ID NO: 825609 - RNA, 25 nt, Human
aaguggaaauggagggugaugggcu

SEQ ID NO: 825610 - RNA, 22 nt, Human
acagagugaacaggaaccaaac

SEQ ID NO: 825611 - RNA, 18 nt, Human
aggucccuucccuuggcu

SEQ ID NO: 825612 - RNA, 18 nt, Human
caccaaguggaaauggag

SEQ ID NO: 825613 - RNA, 22 nt, Human
cagagugaacaggaaccaaaca

SEQ ID NO: 825614 - RNA, 24 nt, Human
caguuaggucccuucccuuggcuu

SEQ ID NO: 825615 - RNA, 24 nt, Human
cccagguugauuauuaagugacag

SEQ ID NO: 825616 - RNA, 27 nt, Human
gaacaggaaccaaacaccaaguggaaa

SEQ ID NO: 825617 - RNA, 28 nt, Human
ggauacaacagagaacaaaccgguaccc

SEQ ID NO: 825618 - RNA, 22 nt, Human
gggcuggggauacaacagagaa

SEQ ID NO: 825619 - RNA, 25 nt, Human
ggugaugggcugugguggguggguc

SEQ ID NO: 825620 - RNA, 19 nt, Human
uacaacagagaacaaacca

SEQ ID NO: 825621 - RNA, 21 nt, Human
ucccuuggcuuuccuccccuc

SEQ ID NO: 825622 - RNA, 22 nt, Human
ucccuuggcuuuccuccccucu

SEQ ID NO: 825623 - RNA, 20 nt, Human
uccuguaguccaggaggccc

SEQ ID NO: 825624 - RNA, 24 nt, Human
ucucccagcuuguuuguuuucagu

SEQ ID NO: 825625 - RNA, 21 nt, Human
ucuccuguaguccaggaggcu

SEQ ID NO: 825626 - RNA, 18 nt, Human
ugaacaggaaccaaacac

SEQ ID NO: 825627 - RNA, 18 nt, Human
ugacagcaucuccuguag

SEQ ID NO: 825628 - RNA, 21 nt, Human
uggccaggagcugucuuuggg

SEQ ID NO: 825629 - RNA, 27 nt, Human
uggccaggagcugucuuuggggcuggg

SEQ ID NO: 825630 - RNA, 18 nt, Human
uggcuuaggguuucuuau

SEQ ID NO: 825631 - RNA, 21 nt, Human
uggcuuuccuccccucucucc

SEQ ID NO: 825632 - RNA, 23 nt, Human
uucccagagucacaauauuucaa

SEQ ID NO: 825633 - RNA, 21 nt, Human
uuccuccccucucuccccuga

SEQ ID NO: 825634 - RNA, 21 nt, Human
uuggggcuggggauacaacag

SEQ ID NO: 825635 - RNA, 26 nt, Human
uuuagcaaauauuuauugaaaccuug

SEQ ID NO: 825636 - RNA, 24 nt, Human
uuuuuuuuuuuuuuuucacucauu

SEQ ID NO: 825637 - RNA, 27 nt, Human
uuuuuuuuuuuuuuuucacucauuuag

SEQ ID NO: 825638 - RNA, 23 nt, Human
cagacuauugcacacuucucuca

SEQ ID NO: 825639 - RNA, 20 nt, Human
uccaaagucuccuucucacc

SEQ ID NO: 825640 - RNA, 21 nt, Human
uccaaagucuccuucucaccu

SEQ ID NO: 825641 - RNA, 19 nt, Human
ugcacacuucucucacccc

SEQ ID NO: 825642 - RNA, 22 nt, Human
ugccagauccucuacguggcuu

SEQ ID NO: 825643 - RNA, 22 nt, Human
uggccuguccucgucgcugcua

SEQ ID NO: 825644 - RNA, 28 nt, Human
uguccucgucgcugcuaucucuccgucc

SEQ ID NO: 825645 - RNA, 21 nt, Human
uuuauauuuauuccagacuau

SEQ ID NO: 825646 - RNA, 18 nt, Human
aauuuaggaugauuccau

SEQ ID NO: 825647 - RNA, 18 nt, Human
acccucagggacaugaag

SEQ ID NO: 825648 - RNA, 18 nt, Human
agagagguagggaccaga

SEQ ID NO: 825649 - RNA, 21 nt, Human
agaucagagccggaguaaaga

SEQ ID NO: 825650 - RNA, 19 nt, Human
agaucaggaugcuggggac

SEQ ID NO: 825651 - RNA, 19 nt, Human
agggaggaggggcuggggc

SEQ ID NO: 825652 - RNA, 18 nt, Human
aguaaagaucaggaugcu

SEQ ID NO: 825653 - RNA, 23 nt, Human
aguagugauggugacacagcaag

SEQ ID NO: 825654 - RNA, 22 nt, Human
cagagcccaagacccucaggga

SEQ ID NO: 825655 - RNA, 22 nt, Human
cauuuuuauugucauuauuuau

SEQ ID NO: 825656 - RNA, 20 nt, Human
ccugaguagagagaggaggg

SEQ ID NO: 825657 - RNA, 23 nt, Human
ccuggacuccugggucugaggga

SEQ ID NO: 825658 - RNA, 22 nt, Human
cugggcagcugacgagguccau

SEQ ID NO: 825659 - RNA, 22 nt, Human
cuggggacuggggcuccugggu

SEQ ID NO: 825660 - RNA, 21 nt, Human
gacaugaagacacagcagaga

SEQ ID NO: 825661 - RNA, 19 nt, Human
gagggccugggcagcugac

SEQ ID NO: 825662 - RNA, 22 nt, Human
gccugaagcaacugcucuggga

SEQ ID NO: 825663 - RNA, 20 nt, Human
gcuggggccuggacuccugg

SEQ ID NO: 825664 - RNA, 22 nt, Human
ggaggaggggcuggggccugga

SEQ ID NO: 825665 - RNA, 22 nt, Human
gggaccagagacgaggggggcg

SEQ ID NO: 825666 - RNA, 18 nt, Human
gggaggaggggcuggggg

SEQ ID NO: 825667 - RNA, 18 nt, Human
gggaggaggggcuggggg

SEQ ID NO: 825668 - RNA, 20 nt, Human
ggggacuggggcuccuggga

SEQ ID NO: 825669 - RNA, 23 nt, Human
ggguccugaguagagagaggagg

SEQ ID NO: 825670 - RNA, 19 nt, Human
gggucugagggaggagggg

SEQ ID NO: 825671 - RNA, 19 nt, Human
gggucugagggaggagggg

SEQ ID NO: 825672 - RNA, 18 nt, Human
gggugggggcuugguggg

SEQ ID NO: 825673 - RNA, 19 nt, Human
gucugagggaggaggggcu

SEQ ID NO: 825674 - RNA, 19 nt, Human
gucugagggaggaggggcu

SEQ ID NO: 825675 - RNA, 19 nt, Human
gucugagggaggaggggcu

SEQ ID NO: 825676 - RNA, 21 nt, Human
uagagagaggagggccugggc

SEQ ID NO: 825677 - RNA, 23 nt, Human
ucccagagcccaagacccucagg

SEQ ID NO: 825678 - RNA, 20 nt, Human
uccugggucugagggaggag

SEQ ID NO: 825679 - RNA, 20 nt, Human
uccugggucugagggaggag

SEQ ID NO: 825680 - RNA, 23 nt, Human
ucugagggaggaggggcuggggc

SEQ ID NO: 825681 - RNA, 23 nt, Human
ugagggaggaggggcuggggccu

SEQ ID NO: 825682 - RNA, 18 nt, Human
ugaguagagagaggaggg

SEQ ID NO: 825683 - RNA, 19 nt, Human
ugcuggggacuggggcucc

SEQ ID NO: 825684 - RNA, 21 nt, Human
ugcuggggacuggggcuccug

SEQ ID NO: 825685 - RNA, 24 nt, Human
ugcuggggacuggggcuccugggu

SEQ ID NO: 825686 - RNA, 20 nt, Human
ugggggccuggacuccuggg

SEQ ID NO: 825687 - RNA, 20 nt, Human
uugaguagugauggugacac

SEQ ID NO: 825688 - RNA, 19 nt, Human
aaggaacaguguacagugu

SEQ ID NO: 825689 - RNA, 21 nt, Human
aaggaacaguguacagugucu

SEQ ID NO: 825690 - RNA, 21 nt, Human
aaggaacaguguacagugucu

SEQ ID NO: 825691 - RNA, 19 nt, Human
aagucacagaaauuccuac

SEQ ID NO: 825692 - RNA, 19 nt, Human
aagucacagaaauuccuac

SEQ ID NO: 825693 - RNA, 22 nt, Human
aucaguucagacgaaucaucuu

SEQ ID NO: 825694 - RNA, 22 nt, Human
aucaguucagacgaaucaucuu

SEQ ID NO: 825695 - RNA, 22 nt, Human
aucaguucagacgaaucaucuu

SEQ ID NO: 825696 - RNA, 20 nt, Human
augguguuugucaggcgccc

SEQ ID NO: 825697 - RNA, 22 nt, Human
caaggcgaagugagauugggcc

SEQ ID NO: 825698 - RNA, 22 nt, Human
caaggcgaagugagauugggcc

SEQ ID NO: 825699 - RNA, 22 nt, Human
caaggcgaagugagauugggcc

SEQ ID NO: 825700 - RNA, 23 nt, Human
caaggcgaagugagauugggccu

SEQ ID NO: 825701 - RNA, 23 nt, Human
caaggcgaagugagauugggccu

SEQ ID NO: 825702 - RNA, 23 nt, Human
caaggcgaagugagauugggccu

SEQ ID NO: 825703 - RNA, 26 nt, Human
cacaaugcccugcaggaugccccucc

SEQ ID NO: 825704 - RNA, 26 nt, Human
cacaaugcccugcaggaugccccucc

SEQ ID NO: 825705 - RNA, 19 nt, Human
cacagaccagggguccccc

SEQ ID NO: 825706 - RNA, 19 nt, Human
cacagaccagggguccccc

SEQ ID NO: 825707 - RNA, 22 nt, Human
caggggucccccagagucaccc

SEQ ID NO: 825708 - RNA, 18 nt, Human
ccacuccaaguaguggca

SEQ ID NO: 825709 - RNA, 18 nt, Human
ccacuccaaguaguggca

SEQ ID NO: 825710 - RNA, 23 nt, Human
cccagaaaaaagucacagaaauu

SEQ ID NO: 825711 - RNA, 25 nt, Human
ccccagaaaaaagucacagaaauuc

SEQ ID NO: 825712 - RNA, 25 nt, Human
ccccagaaaaaagucacagaaauuc

SEQ ID NO: 825713 - RNA, 25 nt, Human
ccccagaaaaaagucacagaaauuc

SEQ ID NO: 825714 - RNA, 18 nt, Human
cccccacagaccaggggu

SEQ ID NO: 825715 - RNA, 18 nt, Human
cccccacagaccaggggu

SEQ ID NO: 825716 - RNA, 23 nt, Human
cccccacagaccagggguccccc

SEQ ID NO: 825717 - RNA, 23 nt, Human
cccccacagaccagggguccccc

SEQ ID NO: 825718 - RNA, 24 nt, Human
cccugcuucaagccgcuucuccuc

SEQ ID NO: 825719 - RNA, 25 nt, Human
ccugcaggaugcccccacagaccag

SEQ ID NO: 825720 - RNA, 25 nt, Human
ccugcaggaugcccccacagaccag

SEQ ID NO: 825721 - RNA, 21 nt, Human
cgcuuuguuaucuuggcauua

SEQ ID NO: 825722 - RNA, 21 nt, Human
cgcuuuguuaucuuggcauua

SEQ ID NO: 825723 - RNA, 23 nt, Human
cggggcugcuggccagcuguggg

SEQ ID NO: 825724 - RNA, 23 nt, Human
cggggcugcuggccagcuguggg

SEQ ID NO: 825725 - RNA, 23 nt, Human
cggggcugcuggccagcuguggg

SEQ ID NO: 825726 - RNA, 23 nt, Human
cucgggguuucucuuuccuaagg

SEQ ID NO: 825727 - RNA, 23 nt, Human
cucgggguuucucuuuccuaagg

SEQ ID NO: 825728 - RNA, 23 nt, Human
cucgggguuucucuuuccuaagg

SEQ ID NO: 825729 - RNA, 22 nt, Human
cugcgccucugcccuccgcgcc

SEQ ID NO: 825730 - RNA, 18 nt, Human
cuuugaccccagaaaaaa

SEQ ID NO: 825731 - RNA, 18 nt, Human
cuuugaccccagaaaaaa

SEQ ID NO: 825732 - RNA, 18 nt, Human
cuuugaccccagaaaaaa

SEQ ID NO: 825733 - RNA, 18 nt, Human
gaacaguguacagugucu

SEQ ID NO: 825734 - RNA, 18 nt, Human
gaacaguguacagugucu

SEQ ID NO: 825735 - RNA, 18 nt, Human
gaacaguguacagugucu

SEQ ID NO: 825736 - RNA, 21 nt, Human
gacagggucuugggggauggc

SEQ ID NO: 825737 - RNA, 21 nt, Human
gacagggucuugggggauggc

SEQ ID NO: 825738 - RNA, 21 nt, Human
gacagggucuugggggauggc

SEQ ID NO: 825739 - RNA, 19 nt, Human
gaccaggggucccccagag

SEQ ID NO: 825740 - RNA, 18 nt, Human
gcugcuggccagcugugg

SEQ ID NO: 825741 - RNA, 18 nt, Human
gcugcuggccagcugugg

SEQ ID NO: 825742 - RNA, 18 nt, Human
gcugcuggccagcugugg

SEQ ID NO: 825743 - RNA, 19 nt, Human
ggacacaaugcccugcagg

SEQ ID NO: 825744 - RNA, 19 nt, Human
ggacacaaugcccugcagg

SEQ ID NO: 825745 - RNA, 19 nt, Human
ggccuuggacagggucuug

SEQ ID NO: 825746 - RNA, 19 nt, Human
ggccuuggacagggucuug

SEQ ID NO: 825747 - RNA, 19 nt, Human
ggccuuggacagggucuug

SEQ ID NO: 825748 - RNA, 20 nt, Human
gggguuucucuuugacccca

SEQ ID NO: 825749 - RNA, 20 nt, Human
gggguuucucuuugacccca

SEQ ID NO: 825750 - RNA, 20 nt, Human
gggguuucucuuugacccca

SEQ ID NO: 825751 - RNA, 21 nt, Human
gguagcucuugucacaagaug

SEQ ID NO: 825752 - RNA, 19 nt, Human
uaaggaaaccaaggcgaag

SEQ ID NO: 825753 - RNA, 19 nt, Human
uaaggaaaccaaggcgaag

SEQ ID NO: 825754 - RNA, 19 nt, Human
uaaggaaaccaaggcgaag

SEQ ID NO: 825755 - RNA, 24 nt, Human
uacagauaaggaaaccaaggcgaa

SEQ ID NO: 825756 - RNA, 24 nt, Human
uacagauaaggaaaccaaggcgaa

SEQ ID NO: 825757 - RNA, 24 nt, Human
uacagauaaggaaaccaaggcgaa

SEQ ID NO: 825758 - RNA, 23 nt, Human
uagucaguuccucuucaugguuu

SEQ ID NO: 825759 - RNA, 23 nt, Human
uagucaguuccucuucaugguuu

SEQ ID NO: 825760 - RNA, 18 nt, Human
ucacagaaauuccuacag

SEQ ID NO: 825761 - RNA, 18 nt, Human
ucacagaaauuccuacag

SEQ ID NO: 825762 - RNA, 18 nt, Human
ucacagaaauuccuacag

SEQ ID NO: 825763 - RNA, 23 nt, Human
ucagcaauaagauggucucauuu

SEQ ID NO: 825764 - RNA, 19 nt, Human
ucaggugggacaaguccuu

SEQ ID NO: 825765 - RNA, 19 nt, Human
ucaggugggacaaguccuu

SEQ ID NO: 825766 - RNA, 19 nt, Human
ucaggugggacaaguccuu

SEQ ID NO: 825767 - RNA, 19 nt, Human
uccuacagagcaacuugga

SEQ ID NO: 825768 - RNA, 19 nt, Human
uccuacagagcaacuugga

SEQ ID NO: 825769 - RNA, 19 nt, Human
uccuacagagcaacuugga

SEQ ID NO: 825770 - RNA, 19 nt, Human
ucuugggggauggcuccgu

SEQ ID NO: 825771 - RNA, 19 nt, Human
ucuugggggauggcuccgu

SEQ ID NO: 825772 - RNA, 19 nt, Human
ucuugggggauggcuccgu

SEQ ID NO: 825773 - RNA, 19 nt, Human
ugaaaaggaacaguguaca

SEQ ID NO: 825774 - RNA, 19 nt, Human
ugaaaaggaacaguguaca

SEQ ID NO: 825775 - RNA, 19 nt, Human
ugaaaaggaacaguguaca

SEQ ID NO: 825776 - RNA, 22 nt, Human
ugcuucaagccgcuucuccuca

SEQ ID NO: 825777 - RNA, 22 nt, Human
ugcuucaagccgcuucuccuca

SEQ ID NO: 825778 - RNA, 22 nt, Human
ugcuucaagccgcuucuccuca

SEQ ID NO: 825779 - RNA, 18 nt, Human
uggcagacuuugguauag

SEQ ID NO: 825780 - RNA, 18 nt, Human
uggcagacuuugguauag

SEQ ID NO: 825781 - RNA, 23 nt, Human
ugucaggcgcccuggguagcucu

SEQ ID NO: 825782 - RNA, 18 nt, Human
ugucaggcggggcugcug

SEQ ID NO: 825783 - RNA, 18 nt, Human
ugucaggcggggcugcug

SEQ ID NO: 825784 - RNA, 24 nt, Human
uguccgagauaaugcugauguugg

SEQ ID NO: 825785 - RNA, 22 nt, Human
uguugaaugaauggagcccugc

SEQ ID NO: 825786 - RNA, 22 nt, Human
uguugaaugaauggagcccugc

SEQ ID NO: 825787 - RNA, 22 nt, Human
uguugaaugaauggagcccugc

SEQ ID NO: 825788 - RNA, 19 nt, Human
uucugcgccucugcccucc

SEQ ID NO: 825789 - RNA, 18 nt, Human
uuugaagucagcaauaag

SEQ ID NO: 825790 - RNA, 18 nt, Human
uuugaagucagcaauaag

SEQ ID NO: 825791 - RNA, 18 nt, Human
uuugaagucagcaauaag

SEQ ID NO: 825792 - RNA, 24 nt, Human
aagcagcggagcugggauuccaga

SEQ ID NO: 825793 - RNA, 19 nt, Human
acaguaagcagcggagcug

SEQ ID NO: 825794 - RNA, 21 nt, Human
accuuaaaucuuuccaacagc

SEQ ID NO: 825795 - RNA, 18 nt, Human
acucaucacguccucccc

SEQ ID NO: 825796 - RNA, 21 nt, Human
acucaucacguccuccccagu

SEQ ID NO: 825797 - RNA, 18 nt, Human
agaggaggggaggcaagg

SEQ ID NO: 825798 - RNA, 24 nt, Human
aggaagaaaucaaacguguggaag

SEQ ID NO: 825799 - RNA, 22 nt, Human
aucuucaucuuacaggugagaa

SEQ ID NO: 825800 - RNA, 18 nt, Human
auuccagacacguggcug

SEQ ID NO: 825801 - RNA, 19 nt, Human
caccacacuggcccccgcc

SEQ ID NO: 825802 - RNA, 19 nt, Human
cacuggcccccgccccugc

SEQ ID NO: 825803 - RNA, 23 nt, Human
cagcugcccguaggucccucugu

SEQ ID NO: 825804 - RNA, 24 nt, Human
cagugaagaaagguacaucccaag

SEQ ID NO: 825805 - RNA, 23 nt, Human
cagugaugcaaggauggagcugg

SEQ ID NO: 825806 - RNA, 19 nt, Human
caucagggucagagcuggg

SEQ ID NO: 825807 - RNA, 21 nt, Human
ccagccagccggggagacagc

SEQ ID NO: 825808 - RNA, 18 nt, Human
ccaguggggugguagguc

SEQ ID NO: 825809 - RNA, 24 nt, Human
cccaaggggacaccgacaguaagc

SEQ ID NO: 825810 - RNA, 20 nt, Human
ccccgccccugccccgggcu

SEQ ID NO: 825811 - RNA, 23 nt, Human
cccucugugugcugccugccgac

SEQ ID NO: 825812 - RNA, 22 nt, Human
ccucacucaucacguccucccc

SEQ ID NO: 825813 - RNA, 19 nt, Human
cuuaaaucuuuccaacagc

SEQ ID NO: 825814 - RNA, 21 nt, Human
gacaccgacaguaagcagcgg

SEQ ID NO: 825815 - RNA, 20 nt, Human
gagacagcuacagcgugugu

SEQ ID NO: 825816 - RNA, 18 nt, Human
gagaggaggggaggcaag

SEQ ID NO: 825817 - RNA, 20 nt, Human
gagcugggauuccagacacg

SEQ ID NO: 825818 - RNA, 21 nt, Human
gcaugguggcccaggugcuau

SEQ ID NO: 825819 - RNA, 21 nt, Human
gcccccgccccugccccgggc

SEQ ID NO: 825820 - RNA, 18 nt, Human
gcgugugucaccacacug

SEQ ID NO: 825821 - RNA, 21 nt, Human
gggucagagcugggcaggaga

SEQ ID NO: 825822 - RNA, 25 nt, Human
gugaaaccuuaaaucuuuccaacag

SEQ ID NO: 825823 - RNA, 20 nt, Human
gugcaugguggcccaggugc

SEQ ID NO: 825824 - RNA, 23 nt, Human
uaugucauaggugugaaaccuua

SEQ ID NO: 825825 - RNA, 28 nt, Human
ucaccacacuggcccccgccccugcccc

SEQ ID NO: 825826 - RNA, 20 nt, Human
uccccagugaugcaaggauu

SEQ ID NO: 825827 - RNA, 18 nt, Human
ucccucugugugcugccu

SEQ ID NO: 825828 - RNA, 18 nt, Human
uccucacucaucacgucc

SEQ ID NO: 825829 - RNA, 21 nt, Human
ugaugcaaggauggagcuggg

SEQ ID NO: 825830 - RNA, 19 nt, Human
ugcaggaagaaaucaaacg

SEQ ID NO: 825831 - RNA, 20 nt, Human
ugcguuuauuaagcaucagg

SEQ ID NO: 825832 - RNA, 23 nt, Human
ugcugcaggccuccgggccuccg

SEQ ID NO: 825833 - RNA, 21 nt, Human
uggaaccagccaguggggugg

SEQ ID NO: 825834 - RNA, 24 nt, Human
uggcugggccucugcaggaagaaa

SEQ ID NO: 825835 - RNA, 24 nt, Human
ugggauuccagacacguggcuggg

SEQ ID NO: 825836 - RNA, 22 nt, Human
ugggguaaaaccagggagaauc

SEQ ID NO: 825837 - RNA, 19 nt, Human
ugucaccacacuggccccc

SEQ ID NO: 825838 - RNA, 20 nt, Human
uuagugguggggguaagacc

SEQ ID NO: 825839 - RNA, 22 nt, Human
uuuccuguauucucuuaguggu

SEQ ID NO: 825840 - RNA, 20 nt, Human
aacauggugaaacccugucu

SEQ ID NO: 825841 - RNA, 21 nt, Human
aacauggugaaacccugucuc

SEQ ID NO: 825842 - RNA, 24 nt, Human
aagcacgagaaucacuugaaccca

SEQ ID NO: 825843 - RNA, 21 nt, Human
aagccaucugguacuuuugga

SEQ ID NO: 825844 - RNA, 19 nt, Human
aaggaaggagacaccucau

SEQ ID NO: 825845 - RNA, 24 nt, Human
aaucacuugaacccaggaggcgga

SEQ ID NO: 825846 - RNA, 21 nt, Human
acacaguuaauuaacucagug

SEQ ID NO: 825847 - RNA, 19 nt, Human
acagagacucugucucaaa

SEQ ID NO: 825848 - RNA, 24 nt, Human
acccaggaggcggagguugcagug

SEQ ID NO: 825849 - RNA, 24 nt, Human
acgcuggccaacauggugaaaccc

SEQ ID NO: 825850 - RNA, 24 nt, Human
acugcauugcagcccaagcaacag

SEQ ID NO: 825851 - RNA, 23 nt, Human
agaaggaaggagacaccucauga

SEQ ID NO: 825852 - RNA, 21 nt, Human
agacuguacgaacguccaguu

SEQ ID NO: 825853 - RNA, 18 nt, Human
agacuuuuuuccccaccu

SEQ ID NO: 825854 - RNA, 22 nt, Human
agagugcuggucucacugacuc

SEQ ID NO: 825855 - RNA, 19 nt, Human
agaguuacugggucaaagg

SEQ ID NO: 825856 - RNA, 23 nt, Human
agcaacagagacucugucucaaa

SEQ ID NO: 825857 - RNA, 24 nt, Human
agcaacagagacucugucucaaag

SEQ ID NO: 825858 - RNA, 24 nt, Human
agcacuuugggaggccaagguggg

SEQ ID NO: 825859 - RNA, 20 nt, Human
aggaagggccucuccugcuc

SEQ ID NO: 825860 - RNA, 20 nt, Human
aggccaagguggguggauca

SEQ ID NO: 825861 - RNA, 24 nt, Human
aggcggagguugcagugagccaag

SEQ ID NO: 825862 - RNA, 19 nt, Human
aggcguucaagaccacgcu

SEQ ID NO: 825863 - RNA, 24 nt, Human
agguggugaauaagggucucggug

SEQ ID NO: 825864 - RNA, 26 nt, Human
agguggugaauaagggucucggugua

SEQ ID NO: 825865 - RNA, 22 nt, Human
aucccagcacuuugggaggcca

SEQ ID NO: 825866 - RNA, 19 nt, Human
augccuguaaucccagcac

SEQ ID NO: 825867 - RNA, 24 nt, Human
caacauggugaaacccugucucua

SEQ ID NO: 825868 - RNA, 24 nt, Human
caagaccacgcuggccaacauggu

SEQ ID NO: 825869 - RNA, 24 nt, Human
caaggaaaaguacacagaaggaag

SEQ ID NO: 825870 - RNA, 24 nt, Human
caagguggguggaucaucugaggu

SEQ ID NO: 825871 - RNA, 26 nt, Human
caagguggguggaucaucugagguca

SEQ ID NO: 825872 - RNA, 22 nt, Human
caaguuccgacuugggcuggca

SEQ ID NO: 825873 - RNA, 24 nt, Human
cacaccuguagucccagguacuug

SEQ ID NO: 825874 - RNA, 23 nt, Human
caccuguagucccagguacuugg

SEQ ID NO: 825875 - RNA, 24 nt, Human
caccuguagucccagguacuuggg

SEQ ID NO: 825876 - RNA, 20 nt, Human
cacugcauugcagcccaagc

SEQ ID NO: 825877 - RNA, 21 nt, Human
cacugcauugcagcccaagca

SEQ ID NO: 825878 - RNA, 24 nt, Human
cacugcauugcagcccaagcaaca

SEQ ID NO: 825879 - RNA, 18 nt, Human
cagaaggaaggagacacc

SEQ ID NO: 825880 - RNA, 22 nt, Human
cagaaggaaggagacaccucau

SEQ ID NO: 825881 - RNA, 24 nt, Human
cagcacuuugggaggccaaggugg

SEQ ID NO: 825882 - RNA, 18 nt, Human
caucugaggucaggcguu

SEQ ID NO: 825883 - RNA, 20 nt, Human
caugccuguaaucccagcac

SEQ ID NO: 825884 - RNA, 24 nt, Human
caugccuguaaucccagcacuuug

SEQ ID NO: 825885 - RNA, 22 nt, Human
ccaggaggcggagguugcagug

SEQ ID NO: 825886 - RNA, 23 nt, Human
ccucuccugcuggagcucgagag

SEQ ID NO: 825887 - RNA, 22 nt, Human
ccuguaaucccagcacuuuggg

SEQ ID NO: 825888 - RNA, 21 nt, Human
ccuguagucccagguacuugg

SEQ ID NO: 825889 - RNA, 21 nt, Human
cgaggaagggccucuccugcu

SEQ ID NO: 825890 - RNA, 24 nt, Human
cucaugccuguaaucccagcacuu

SEQ ID NO: 825891 - RNA, 21 nt, Human
cuggccaacauggugaaaccc

SEQ ID NO: 825892 - RNA, 24 nt, Human
cuggccaacauggugaaacccugu

SEQ ID NO: 825893 - RNA, 23 nt, Human
gagaaucacuugaacccaggagg

SEQ ID NO: 825894 - RNA, 23 nt, Human
gagagugcuggucucacugacuc

SEQ ID NO: 825895 - RNA, 21 nt, Human
gaggcggagguugcagugagc

SEQ ID NO: 825896 - RNA, 18 nt, Human
gagguugcagugagccaa

SEQ ID NO: 825897 - RNA, 23 nt, Human
gagguugcagugagccaagauug

SEQ ID NO: 825898 - RNA, 19 nt, Human
gaucaucugaggucaggcg

SEQ ID NO: 825899 - RNA, 25 nt, Human
gaucaucugaggucaggcguucaag

SEQ ID NO: 825900 - RNA, 18 nt, Human
gauccaaguuccgacuug

SEQ ID NO: 825901 - RNA, 24 nt, Human
gccaacauggugaaacccugucuc

SEQ ID NO: 825902 - RNA, 24 nt, Human
gcuggccaacauggugaaacccug

SEQ ID NO: 825903 - RNA, 19 nt, Human
gcuuggagccagcaucacc

SEQ ID NO: 825904 - RNA, 22 nt, Human
ggacauguguuuucagaucuga

SEQ ID NO: 825905 - RNA, 22 nt, Human
ggaggcggagguugcagugagc

SEQ ID NO: 825906 - RNA, 22 nt, Human
ggagguugcagugagccaagau

SEQ ID NO: 825907 - RNA, 24 nt, Human
ggagguugcagugagccaagauug

SEQ ID NO: 825908 - RNA, 24 nt, Human
ggccgugguggcucaugccuguaa

SEQ ID NO: 825909 - RNA, 24 nt, Human
gguggcucaugccuguaaucccag

SEQ ID NO: 825910 - RNA, 24 nt, Human
gguggugcacaccuguagucccag

SEQ ID NO: 825911 - RNA, 22 nt, Human
ggugugguggugcacaccugua

SEQ ID NO: 825912 - RNA, 24 nt, Human
uaaaaauacacaaaaaauuagccu

SEQ ID NO: 825913 - RNA, 24 nt, Human
uaguaaaaauacacaaaaaauuag

SEQ ID NO: 825914 - RNA, 18 nt, Human
uaucaacagggcaugagg

SEQ ID NO: 825915 - RNA, 18 nt, Human
ucaaagguggugaauaag

SEQ ID NO: 825916 - RNA, 21 nt, Human
ucacugcauugcagcccaagc

SEQ ID NO: 825917 - RNA, 22 nt, Human
ucaugccuguaaucccagcacu

SEQ ID NO: 825918 - RNA, 24 nt, Human
ucauugugggcuggccgugguggc

SEQ ID NO: 825919 - RNA, 24 nt, Human
uccaaguuccgacuugggcuggca

SEQ ID NO: 825920 - RNA, 18 nt, Human
uccccaccuuuauuuuuc

SEQ ID NO: 825921 - RNA, 21 nt, Human
uccccaccuuuauuuuucaug

SEQ ID NO: 825922 - RNA, 24 nt, Human
ucuccugcuggagcucucgagagc

SEQ ID NO: 825923 - RNA, 23 nt, Human
ucugaggucaggcguucaagacc

SEQ ID NO: 825924 - RNA, 24 nt, Human
ugaagcacgagaaucacuugaacc

SEQ ID NO: 825925 - RNA, 19 nt, Human
ugaggguuuuguguuucuu

SEQ ID NO: 825926 - RNA, 22 nt, Human
ugaggucaggcguucaagacca

SEQ ID NO: 825927 - RNA, 19 nt, Human
ugccaggcgaggaagggcc

SEQ ID NO: 825928 - RNA, 23 nt, Human
ugccuguaaucccagcacuuugg

SEQ ID NO: 825929 - RNA, 23 nt, Human
ugccuguaaucccagcacuuugg

SEQ ID NO: 825930 - RNA, 24 nt, Human
ugccuguaaucccagcacuuuggg

SEQ ID NO: 825931 - RNA, 18 nt, Human
ugcugagccgcucagggg

SEQ ID NO: 825932 - RNA, 18 nt, Human
ugcuggagcucucgagag

SEQ ID NO: 825933 - RNA, 24 nt, Human
uggaucaucugaggucaggcguuc

SEQ ID NO: 825934 - RNA, 24 nt, Human
uggccaacauggugaaacccuguc

SEQ ID NO: 825935 - RNA, 19 nt, Human
uggccgugguggcucaugc

SEQ ID NO: 825936 - RNA, 22 nt, Human
uggcucaugccuguaaucccag

SEQ ID NO: 825937 - RNA, 24 nt, Human
uggcucaugccuguaaucccagca

SEQ ID NO: 825938 - RNA, 23 nt, Human
ugggaggccaagguggguggauc

SEQ ID NO: 825939 - RNA, 24 nt, Human
ugggaggccaagguggguggauca

SEQ ID NO: 825940 - RNA, 24 nt, Human
ugggaggcugaagcacgagaauca

SEQ ID NO: 825941 - RNA, 27 nt, Human
uggguggaucaucugaggucaggcguu

SEQ ID NO: 825942 - RNA, 18 nt, Human
uggugcacaccuguaguc

SEQ ID NO: 825943 - RNA, 22 nt, Human
uggugcacaccuguagucccag

SEQ ID NO: 825944 - RNA, 24 nt, Human
ugguggcucaugccuguaauccca

SEQ ID NO: 825945 - RNA, 24 nt, Human
ugguggugcacaccuguaguccca

SEQ ID NO: 825946 - RNA, 24 nt, Human
uggugugguggugcacaccuguag

SEQ ID NO: 825947 - RNA, 23 nt, Human
ugugggcuggccgugguggcuca

SEQ ID NO: 825948 - RNA, 24 nt, Human
uugaacccaggaggcggagguugc

SEQ ID NO: 825949 - RNA, 19 nt, Human
uugcagcccaagcaacaga

SEQ ID NO: 825950 - RNA, 21 nt, Human
uugcagugagccaagauugca

SEQ ID NO: 825951 - RNA, 25 nt, Human
uugggaggcugaagcacgagaauca

SEQ ID NO: 825952 - RNA, 24 nt, Human
uuucuguuggaagcacacaguuaa

SEQ ID NO: 825953 - RNA, 19 nt, Human
uuugaugguuucacuucau

SEQ ID NO: 825954 - RNA, 24 nt, Human
aaaaaacauuauaaaaaauucaua

SEQ ID NO: 825955 - RNA, 20 nt, Human
aaaaaaucagacaugaucua

SEQ ID NO: 825956 - RNA, 21 nt, Human
aaaaaaucagacaugaucuag

SEQ ID NO: 825957 - RNA, 26 nt, Human
aaaaaaucagacaugaucuagauaua

SEQ ID NO: 825958 - RNA, 20 nt, Human
aaaaaucagacaugaucuag

SEQ ID NO: 825959 - RNA, 25 nt, Human
aaauguucuuucaguacugggacug

SEQ ID NO: 825960 - RNA, 24 nt, Human
aaucaucuaagacaaacacuugug

SEQ ID NO: 825961 - RNA, 25 nt, Human
aaucaucuaagacaaacacuugugu

SEQ ID NO: 825962 - RNA, 21 nt, Human
acaagaugaccuggaagacug

SEQ ID NO: 825963 - RNA, 19 nt, Human
acagaauucaaaacaccuu

SEQ ID NO: 825964 - RNA, 18 nt, Human
accauagggaaagcuuug

SEQ ID NO: 825965 - RNA, 23 nt, Human
accuuaagaaauucagaccaggg

SEQ ID NO: 825966 - RNA, 19 nt, Human
agaccagggcuggagaagu

SEQ ID NO: 825967 - RNA, 18 nt, Human
aggcuccacgccgcccaa

SEQ ID NO: 825968 - RNA, 18 nt, Human
aucaucuaagacaaacac

SEQ ID NO: 825969 - RNA, 23 nt, Human
cacgccgcccaaacgcgcaugcg

SEQ ID NO: 825970 - RNA, 20 nt, Human
cagaauucaaaacaccuucc

SEQ ID NO: 825971 - RNA, 22 nt, Human
cauacagaauucaaaacaccuu

SEQ ID NO: 825972 - RNA, 21 nt, Human
cauacagugaugaaaaaagga

SEQ ID NO: 825973 - RNA, 23 nt, Human
caucuuuauuuugaaagucugaa

SEQ ID NO: 825974 - RNA, 20 nt, Human
cgagaaaucauccacacaaa

SEQ ID NO: 825975 - RNA, 21 nt, Human
cgcccaaacgcgcaugcggga

SEQ ID NO: 825976 - RNA, 21 nt, Human
cgccgcccaaacgcgcaugcg

SEQ ID NO: 825977 - RNA, 19 nt, Human
cgcggcuaaggcgcggugc

SEQ ID NO: 825978 - RNA, 21 nt, Human
cgcggcuaaggcgcggugcuc

SEQ ID NO: 825979 - RNA, 18 nt, Human
cggcagcaagaacuagaa

SEQ ID NO: 825980 - RNA, 22 nt, Human
cggcuaaggcgcggugcucugc

SEQ ID NO: 825981 - RNA, 26 nt, Human
cuaauaaauagcagcauuuguuuaua

SEQ ID NO: 825982 - RNA, 19 nt, Human
cuacaagaugaccuggaag

SEQ ID NO: 825983 - RNA, 19 nt, Human
cuccacgccgcccaaacgc

SEQ ID NO: 825984 - RNA, 20 nt, Human
gcuaaggcgcggugcucugc

SEQ ID NO: 825985 - RNA, 21 nt, Human
gcuaaggcgcggugcucugcc

SEQ ID NO: 825986 - RNA, 21 nt, Human
uaagacaaacacuugugugaa

SEQ ID NO: 825987 - RNA, 24 nt, Human
uacaagguuuguugaauacuaguu

SEQ ID NO: 825988 - RNA, 26 nt, Human
uacagaauucaaaacaccuuccuaaa

SEQ ID NO: 825989 - RNA, 19 nt, Human
uacagugaugaaaaaagga

SEQ ID NO: 825990 - RNA, 24 nt, Human
uacagugaugaaaaaaggagucuu

SEQ ID NO: 825991 - RNA, 21 nt, Human
uacauacagaauucaaaacac

SEQ ID NO: 825992 - RNA, 23 nt, Human
uacauacagaauucaaaacaccu

SEQ ID NO: 825993 - RNA, 22 nt, Human
uauauacauacagaauucaaaa

SEQ ID NO: 825994 - RNA, 19 nt, Human
ucuaaagugcauucuugca

SEQ ID NO: 825995 - RNA, 24 nt, Human
ucuaaagugcauucuugcagcuaa

SEQ ID NO: 825996 - RNA, 23 nt, Human
ucuaagacaaacacuugugugaa

SEQ ID NO: 825997 - RNA, 19 nt, Human
uggaaccauagggaaagcu

SEQ ID NO: 825998 - RNA, 20 nt, Human
uuaaucaucuaagacaaaca

SEQ ID NO: 825999 - RNA, 22 nt, Human
uuaaucaucuaagacaaacacu

SEQ ID NO: 826000 - RNA, 18 nt, Human
uuaauucuuuuggcauac

SEQ ID NO: 826001 - RNA, 22 nt, Human
uuggcauaucuaaaugucagaa

SEQ ID NO: 826002 - RNA, 25 nt, Human
uuuuuuauuucuuagugcuuuugau

SEQ ID NO: 826003 - RNA, 28 nt, Human
uuuuuuuuuauuucuuagugcuuuugau

SEQ ID NO: 826004 - RNA, 21 nt, Human
uuuuuuuuuuuuuuuuuauuu

SEQ ID NO: 826005 - RNA, 21 nt, Human
aaacagaaaacaguagggauc

SEQ ID NO: 826006 - RNA, 24 nt, Human
aaaguagaaagaggucucagaaac

SEQ ID NO: 826007 - RNA, 19 nt, Human
aaggaagagaaacgcgcaa

SEQ ID NO: 826008 - RNA, 18 nt, Human
accagguacccaaaguuc

SEQ ID NO: 826009 - RNA, 18 nt, Human
agccaggacaaccccagg

SEQ ID NO: 826010 - RNA, 21 nt, Human
aggcguagaagguuuagagcc

SEQ ID NO: 826011 - RNA, 18 nt, Human
agggagacaguaaaguag

SEQ ID NO: 826012 - RNA, 24 nt, Human
agggccagggaagaggcugggugu

SEQ ID NO: 826013 - RNA, 24 nt, Human
cagcaaggaagagaaacgcgcaau

SEQ ID NO: 826014 - RNA, 24 nt, Human
cagcaaggaagagaaacgcgcaau

SEQ ID NO: 826015 - RNA, 19 nt, Human
cagccaguccacgcaggca

SEQ ID NO: 826016 - RNA, 24 nt, Human
ccacgcaggcaggaugcugcggag

SEQ ID NO: 826017 - RNA, 24 nt, Human
ccagcagauagcuguacuaaaggc

SEQ ID NO: 826018 - RNA, 27 nt, Human
cccagagccaggacaaccccagggagc

SEQ ID NO: 826019 - RNA, 23 nt, Human
ccccagggagcucuccauuagca

SEQ ID NO: 826020 - RNA, 23 nt, Human
cccccuccccagcugcccugggc

SEQ ID NO: 826021 - RNA, 18 nt, Human
cccugccuagacccacca

SEQ ID NO: 826022 - RNA, 18 nt, Human
cccugggcccagaugccc

SEQ ID NO: 826023 - RNA, 24 nt, Human
ccucuaggacucuagggagacagu

SEQ ID NO: 826024 - RNA, 23 nt, Human
cgcgcaauaccaagaaaccucaa

SEQ ID NO: 826025 - RNA, 22 nt, Human
cucuaugcugagaacauucccc

SEQ ID NO: 826026 - RNA, 18 nt, Human
cugggcccagaugccccc

SEQ ID NO: 826027 - RNA, 23 nt, Human
gacaacugaggaacagaaaagga

SEQ ID NO: 826028 - RNA, 21 nt, Human
gagccaggacaaccccaggga

SEQ ID NO: 826029 - RNA, 22 nt, Human
gaggucucagaaacauuuuuuu

SEQ ID NO: 826030 - RNA, 21 nt, Human
gcaauaccaagaaaccucaau

SEQ ID NO: 826031 - RNA, 21 nt, Human
gcagauagcuguacuaaaggc

SEQ ID NO: 826032 - RNA, 24 nt, Human
gccuagacccaccagguacccaaa

SEQ ID NO: 826033 - RNA, 21 nt, Human
gcggagaaagcucuaugcuga

SEQ ID NO: 826034 - RNA, 23 nt, Human
uaacuaagagcuccuuccucucg

SEQ ID NO: 826035 - RNA, 21 nt, Human
ucacucugacccccuccccag

SEQ ID NO: 826036 - RNA, 25 nt, Human
ucacucugacccccuccccagcugc

SEQ ID NO: 826037 - RNA, 18 nt, Human
uccccuugauggaaagaa

SEQ ID NO: 826038 - RNA, 20 nt, Human
ucucuggggagggccaggga

SEQ ID NO: 826039 - RNA, 19 nt, Human
uggggagggccagggaaga

SEQ ID NO: 826040 - RNA, 24 nt, Human
uguauaaacacauaaaacagaaaa

SEQ ID NO: 826041 - RNA, 22 nt, Human
ugucacucugacccccucccca

SEQ ID NO: 826042 - RNA, 19 nt, Human
ugucccagcucagacccug

SEQ ID NO: 826043 - RNA, 24 nt, Human
uguuacauacaauguauaaacaca

SEQ ID NO: 826044 - RNA, 23 nt, Human
uuuaaaguacaagacauucagug

SEQ ID NO: 826045 - RNA, 24 nt, Human
uuuaccagaaccugucccagcuca

SEQ ID NO: 826046 - RNA, 25 nt, Human
uuuuuuuuuuuuuuuuuuuauuuuu

SEQ ID NO: 826047 - RNA, 23 nt, Human
aaaagagaagaaacaucuucaaa

SEQ ID NO: 826048 - RNA, 19 nt, Human
aacaucuucaaacaaggug

SEQ ID NO: 826049 - RNA, 21 nt, Human
aacuuccauaagaaucaaagg

SEQ ID NO: 826050 - RNA, 19 nt, Human
aagacaaaagguuuucccu

SEQ ID NO: 826051 - RNA, 20 nt, Human
aagacaaaagguuuucccuu

SEQ ID NO: 826052 - RNA, 23 nt, Human
aaggagauuauggcauaaucuaa

SEQ ID NO: 826053 - RNA, 23 nt, Human
aagucagucauuaaacucacugc

SEQ ID NO: 826054 - RNA, 18 nt, Human
aguugauucaaagccuug

SEQ ID NO: 826055 - RNA, 19 nt, Human
aucuaagaagaaaaugauc

SEQ ID NO: 826056 - RNA, 22 nt, Human
cagaauguucaucagaaacuug

SEQ ID NO: 826057 - RNA, 21 nt, Human
cagccggugccuccaccuccc

SEQ ID NO: 826058 - RNA, 22 nt, Human
ccuaaaguaagaauacaaaaau

SEQ ID NO: 826059 - RNA, 22 nt, Human
cuccuaaguggccaggaguagg

SEQ ID NO: 826060 - RNA, 23 nt, Human
gaaaaugcucaaguaaaauaccu

SEQ ID NO: 826061 - RNA, 19 nt, Human
gaggugguuaccaccaccu

SEQ ID NO: 826062 - RNA, 21 nt, Human
uauggcauaaucuaagaagaa

SEQ ID NO: 826063 - RNA, 22 nt, Human
ucagcucuccuaaguggccagg

SEQ ID NO: 826064 - RNA, 18 nt, Human
uccacuguaaaccuuagc

SEQ ID NO: 826065 - RNA, 23 nt, Human
uccacuguaaaccuuagcuacag

SEQ ID NO: 826066 - RNA, 21 nt, Human
uccuaaguggccaggaguagg

SEQ ID NO: 826067 - RNA, 20 nt, Human
ucgaucccgaaaacaaugca

SEQ ID NO: 826068 - RNA, 20 nt, Human
ugcagaauguucaucagaaa

SEQ ID NO: 826069 - RNA, 20 nt, Human
uggaaaaugcucaaguaaaa

SEQ ID NO: 826070 - RNA, 25 nt, Human
uggcauaaucuaagaagaaaaugau

SEQ ID NO: 826071 - RNA, 22 nt, Human
ugguuaccaccaccuuauaaac

SEQ ID NO: 826072 - RNA, 26 nt, Human
uucaucagaaacuugaggugguuacc

SEQ ID NO: 826073 - RNA, 22 nt, Human
uuuuuuuuuuuuuuuuuaucuu

SEQ ID NO: 826074 - RNA, 25 nt, Human
aaacuaaagaggaacacucagauau

SEQ ID NO: 826075 - RNA, 22 nt, Human
aaccacugucuuuccugaacaa

SEQ ID NO: 826076 - RNA, 20 nt, Human
agauuguacaauuuaaaaac

SEQ ID NO: 826077 - RNA, 21 nt, Human
gaacacucagauaucuggccc

SEQ ID NO: 826078 - RNA, 26 nt, Human
ucagauaucuggccccucuuccugac

SEQ ID NO: 826079 - RNA, 22 nt, Human
ucugcaauugaagaaacuaaag

SEQ ID NO: 826080 - RNA, 28 nt, Human
ucugcaauugaagaaacuaaagaggaac

SEQ ID NO: 826081 - RNA, 21 nt, Human
uuccugaacaacauaaaauua

SEQ ID NO: 826082 - RNA, 30 nt, Human
uugaagaaacuaaagaggaacacucagauu

SEQ ID NO: 826083 - RNA, 24 nt, Human
aaaaaaaaauaacgagaaaaaacg

SEQ ID NO: 826084 - RNA, 20 nt, Human
aaaaaaucaauucagagagc

SEQ ID NO: 826085 - RNA, 23 nt, Human
aaaaaaucaauucagagagcagc

SEQ ID NO: 826086 - RNA, 18 nt, Human
aaaaagccuagcuacaac

SEQ ID NO: 826087 - RNA, 24 nt, Human
aaaaagccuagcuacaacccaaac

SEQ ID NO: 826088 - RNA, 20 nt, Human
aaaagcucuggccuuaaaca

SEQ ID NO: 826089 - RNA, 22 nt, Human
aacugugucaaaagccucaaaa

SEQ ID NO: 826090 - RNA, 21 nt, Human
aagaaaaagccuagcuacaac

SEQ ID NO: 826091 - RNA, 23 nt, Human
aagccuagcuacaacccaaacgc

SEQ ID NO: 826092 - RNA, 22 nt, Human
aauaacgagaaaaaacgaaaaa

SEQ ID NO: 826093 - RNA, 20 nt, Human
acaaacacaguaagaaccaa

SEQ ID NO: 826094 - RNA, 20 nt, Human
accugaaauccaaccagaaa

SEQ ID NO: 826095 - RNA, 22 nt, Human
accugaaauccaaccagaaagc

SEQ ID NO: 826096 - RNA, 24 nt, Human
accugaaauccaaccagaaagcca

SEQ ID NO: 826097 - RNA, 18 nt, Human
acuugugcaugugauucu

SEQ ID NO: 826098 - RNA, 30 nt, Human
agaaaagaaaaagccuagcuacaacccaag

SEQ ID NO: 826099 - RNA, 22 nt, Human
agagagcagcguggccuuggag

SEQ ID NO: 826100 - RNA, 20 nt, Human
agagcagcguggccuuggag

SEQ ID NO: 826101 - RNA, 20 nt, Human
agccagaaguaaaaaucuua

SEQ ID NO: 826102 - RNA, 21 nt, Human
aggagugaaaaaucagauccg

SEQ ID NO: 826103 - RNA, 25 nt, Human
aggcuagaagugaaauaugacagaa

SEQ ID NO: 826104 - RNA, 22 nt, Human
agucagaagcacaaagcauuua

SEQ ID NO: 826105 - RNA, 21 nt, Human
aguugccugguccucagaaac

SEQ ID NO: 826106 - RNA, 21 nt, Human
auuuucaaaaaaaaggaacaa

SEQ ID NO: 826107 - RNA, 19 nt, Human
caaaagccucaaaaaaccc

SEQ ID NO: 826108 - RNA, 19 nt, Human
caaaauagcuuagugaggc

SEQ ID NO: 826109 - RNA, 25 nt, Human
caaacacaguaagaaccaagcacaa

SEQ ID NO: 826110 - RNA, 24 nt, Human
cacaaagcauuuauuaugcauuca

SEQ ID NO: 826111 - RNA, 23 nt, Human
cacaguaagaaccaagcacaaga

SEQ ID NO: 826112 - RNA, 19 nt, Human
caccaucuaugacuguccc

SEQ ID NO: 826113 - RNA, 19 nt, Human
cagauccgaggcuuguuuu

SEQ ID NO: 826114 - RNA, 26 nt, Human
cauuuaaguuccugugauaauuauuc

SEQ ID NO: 826115 - RNA, 20 nt, Human
ccagcagauauaaaugcagc

SEQ ID NO: 826116 - RNA, 23 nt, Human
ccccucgucuucucgccuuuaaa

SEQ ID NO: 826117 - RNA, 20 nt, Human
cccucccucccccacccuuu

SEQ ID NO: 826118 - RNA, 22 nt, Human
cgagaaaaaacgaaaaauuaaa

SEQ ID NO: 826119 - RNA, 22 nt, Human
cuacaacccaaacgcauccacc

SEQ ID NO: 826120 - RNA, 24 nt, Human
cuggccuuaaacacaucuuaccug

SEQ ID NO: 826121 - RNA, 25 nt, Human
cuggccuuaaacacaucuuaccuga

SEQ ID NO: 826122 - RNA, 23 nt, Human
cuuaaacacaucuuaccugaaau

SEQ ID NO: 826123 - RNA, 21 nt, Human
cuuggagaccacccacaccca

SEQ ID NO: 826124 - RNA, 21 nt, Human
cuuuucauuguauuacugaau

SEQ ID NO: 826125 - RNA, 20 nt, Human
gaaaaagccuagcuacaacc

SEQ ID NO: 826126 - RNA, 24 nt, Human
gaaaaagccuagcuacaacccaaa

SEQ ID NO: 826127 - RNA, 21 nt, Human
gaaauccaaccagaaagccag

SEQ ID NO: 826128 - RNA, 21 nt, Human
gacagaauuuaaaccagcaga

SEQ ID NO: 826129 - RNA, 21 nt, Human
gagagcagcguggccuuggag

SEQ ID NO: 826130 - RNA, 19 nt, Human
gagcucuucucuuucccuc

SEQ ID NO: 826131 - RNA, 23 nt, Human
gcuacaacccaaacgcauccacc

SEQ ID NO: 826132 - RNA, 21 nt, Human
gugagacuacaacaaagggaa

SEQ ID NO: 826133 - RNA, 20 nt, Human
gugcagagcucuucucuuuc

SEQ ID NO: 826134 - RNA, 22 nt, Human
guuccaaaaucuccugcgacca

SEQ ID NO: 826135 - RNA, 28 nt, Human
uaaaauacacaaacacaguaagaaccag

SEQ ID NO: 826136 - RNA, 22 nt, Human
uacaaacaaaacucaaaaaauc

SEQ ID NO: 826137 - RNA, 25 nt, Human
uacacaaacacaguaagaaccaagc

SEQ ID NO: 826138 - RNA, 23 nt, Human
ucaaaagccucaaaaaacccuga

SEQ ID NO: 826139 - RNA, 27 nt, Human
ucaaucauguagcuaaacaaaaaacug

SEQ ID NO: 826140 - RNA, 23 nt, Human
uccaaaaucuccugcgaccacuu

SEQ ID NO: 826141 - RNA, 23 nt, Human
ucccaacuauaaaugaaagaaua

SEQ ID NO: 826142 - RNA, 23 nt, Human
ugaaaaaucagauccgaggcuug

SEQ ID NO: 826143 - RNA, 20 nt, Human
ugaaauccaaccagaaagcc

SEQ ID NO: 826144 - RNA, 20 nt, Human
ugacaaaaagggcacuuuuu

SEQ ID NO: 826145 - RNA, 21 nt, Human
ugacugugaucaucuuacaaa

SEQ ID NO: 826146 - RNA, 21 nt, Human
ugaggaaugauccauauaugg

SEQ ID NO: 826147 - RNA, 18 nt, Human
ugcagcaccuauguguau

SEQ ID NO: 826148 - RNA, 23 nt, Human
ugcagcaccuauguguauauuuu

SEQ ID NO: 826149 - RNA, 19 nt, Human
ugccugguccucagaaaca

SEQ ID NO: 826150 - RNA, 27 nt, Human
ugccugguccucagaaaccggggguuc

SEQ ID NO: 826151 - RNA, 22 nt, Human
ugcuaggagaauccagugacaa

SEQ ID NO: 826152 - RNA, 19 nt, Human
uggagaccacccacaccca

SEQ ID NO: 826153 - RNA, 21 nt, Human
uggagaccacccacacccaac

SEQ ID NO: 826154 - RNA, 20 nt, Human
uggccuuggagaccacccac

SEQ ID NO: 826155 - RNA, 21 nt, Human
ugggcuuugcugucaaggagu

SEQ ID NO: 826156 - RNA, 23 nt, Human
ugucaccagccagaaguaaaaau

SEQ ID NO: 826157 - RNA, 24 nt, Human
ugugucaaaagccucaaaaaaccc

SEQ ID NO: 826158 - RNA, 22 nt, Human
uuaauaccccugccaacaccau

SEQ ID NO: 826159 - RNA, 23 nt, Human
uuacugaauaccugagguaguug

SEQ ID NO: 826160 - RNA, 25 nt, Human
uuauacaugaggaaugauccauaua

SEQ ID NO: 826161 - RNA, 24 nt, Human
uucaaaaugucuaauugaucuuca

SEQ ID NO: 826162 - RNA, 19 nt, Human
uucagagagcagcguggcc

SEQ ID NO: 826163 - RNA, 22 nt, Human
uucucuuucccucccuccccca

SEQ ID NO: 826164 - RNA, 26 nt, Human
uugaaagucuugcaucucuucacuga

SEQ ID NO: 826165 - RNA, 20 nt, Human
uugcacaguauacagaaauc

SEQ ID NO: 826166 - RNA, 21 nt, Human
uuggagaccacccacacccaa

SEQ ID NO: 826167 - RNA, 23 nt, Human
uuuaaaaaaaaauaacgagaaaa

SEQ ID NO: 826168 - RNA, 19 nt, Human
uuuaaacacugucacacca

SEQ ID NO: 826169 - RNA, 19 nt, Human
uuuaauaccccugccaaca

SEQ ID NO: 826170 - RNA, 21 nt, Human
uuugccagucaguugaaaguc

SEQ ID NO: 826171 - RNA, 22 nt, Human
uuugccagucaguugaaagucu

SEQ ID NO: 826172 - RNA, 18 nt, Human
uuuguuuguuuguuuuaa

SEQ ID NO: 826173 - RNA, 19 nt, Human
caacaaagaggaguuaccu

SEQ ID NO: 826174 - RNA, 19 nt, Human
caacaaagaggaguuaccu

SEQ ID NO: 826175 - RNA, 23 nt, Human
gcaacaaagaggaguuaccugaa

SEQ ID NO: 826176 - RNA, 27 nt, Human
uuaccugaagcuacccuuuuuagccau

SEQ ID NO: 826177 - RNA, 20 nt, Human
uuggcaacaaagaggaguua

SEQ ID NO: 826178 - RNA, 20 nt, Human
aaaaaaaagcaggcuacuaa

SEQ ID NO: 826179 - RNA, 19 nt, Human
aaaaaagauaaagggaagg

SEQ ID NO: 826180 - RNA, 18 nt, Human
aaaacccaaaggugagcc

SEQ ID NO: 826181 - RNA, 22 nt, Human
aaacccaaaccagguacaagga

SEQ ID NO: 826182 - RNA, 24 nt, Human
aaagauucugcccccugccuucuu

SEQ ID NO: 826183 - RNA, 23 nt, Human
aagaagaagaaaggccaaaggca

SEQ ID NO: 826184 - RNA, 23 nt, Human
aagaagaagaagaaaggccaaag

SEQ ID NO: 826185 - RNA, 20 nt, Human
aagaagaagaagaagaaagg

SEQ ID NO: 826186 - RNA, 20 nt, Human
aagagcacagucuccagggc

SEQ ID NO: 826187 - RNA, 19 nt, Human
aaggacuuucuccucagga

SEQ ID NO: 826188 - RNA, 21 nt, Human
aagugaaaaaaagauucugcc

SEQ ID NO: 826189 - RNA, 20 nt, Human
aaucaggccacgcugaccug

SEQ ID NO: 826190 - RNA, 24 nt, Human
aaugaaaaaagauaaagggaagga

SEQ ID NO: 826191 - RNA, 25 nt, Human
aaugaaaaaagauaaagggaaggaa

SEQ ID NO: 826192 - RNA, 18 nt, Human
acaaaacccaaaggugag

SEQ ID NO: 826193 - RNA, 21 nt, Human
acaggcaagccacuaaggcaa

SEQ ID NO: 826194 - RNA, 20 nt, Human
acaggucaccagagcaagga

SEQ ID NO: 826195 - RNA, 22 nt, Human
acaugacacucucacuccaccc

SEQ ID NO: 826196 - RNA, 25 nt, Human
acaugacacucucacuccacccucc

SEQ ID NO: 826197 - RNA, 19 nt, Human
accagguacaaggauccca

SEQ ID NO: 826198 - RNA, 24 nt, Human
agaaaaaaaauaaaaauaaaaaaa

SEQ ID NO: 826199 - RNA, 22 nt, Human
agaagaagaagaaaggccaaag

SEQ ID NO: 826200 - RNA, 19 nt, Human
agaggaaggaaaagcagag

SEQ ID NO: 826201 - RNA, 19 nt, Human
agaggaaggaaaagcagag

SEQ ID NO: 826202 - RNA, 18 nt, Human
agaguagcagacuucacc

SEQ ID NO: 826203 - RNA, 22 nt, Human
agccaccucagagguucucuca

SEQ ID NO: 826204 - RNA, 23 nt, Human
agccacuaaggcaaugcacuacc

SEQ ID NO: 826205 - RNA, 24 nt, Human
agcucuaaaaaaaaaaaaaagcag

SEQ ID NO: 826206 - RNA, 18 nt, Human
aggaagaagaagaagaag

SEQ ID NO: 826207 - RNA, 22 nt, Human
aggaagaagaagaagaagaaag

SEQ ID NO: 826208 - RNA, 25 nt, Human
aggaagcauccauaucucuuuuugg

SEQ ID NO: 826209 - RNA, 18 nt, Human
aggaaggaaaagcagagc

SEQ ID NO: 826210 - RNA, 24 nt, Human
aggaagggaaaacccaaaccaggu

SEQ ID NO: 826211 - RNA, 19 nt, Human
aggacagaguagcagacuu

SEQ ID NO: 826212 - RNA, 24 nt, Human
aggagaaaauacagccaccucaga

SEQ ID NO: 826213 - RNA, 19 nt, Human
agggaagggggcggagcag

SEQ ID NO: 826214 - RNA, 21 nt, Human
aucauauguaauccacccaga

SEQ ID NO: 826215 - RNA, 24 nt, Human
caaaauauaguguaaggaagaaaa

SEQ ID NO: 826216 - RNA, 19 nt, Human
caaggcaaacugcuucuga

SEQ ID NO: 826217 - RNA, 24 nt, Human
caaggcaaacugcuucugaguuuc

SEQ ID NO: 826218 - RNA, 19 nt, Human
caaguaaacaaaugaaguu

SEQ ID NO: 826219 - RNA, 23 nt, Human
caccagagcaaggacuuucuccu

SEQ ID NO: 826220 - RNA, 21 nt, Human
cacccuccucugcaacuuaca

SEQ ID NO: 826221 - RNA, 18 nt, Human
cacuccacccuccucugc

SEQ ID NO: 826222 - RNA, 19 nt, Human
cacugguauacuugagaca

SEQ ID NO: 826223 - RNA, 23 nt, Human
cagcaguaaggacagaguagcag

SEQ ID NO: 826224 - RNA, 18 nt, Human
caggaugccucugacuaa

SEQ ID NO: 826225 - RNA, 19 nt, Human
caguauccuacuuaccgaa

SEQ ID NO: 826226 - RNA, 26 nt, Human
ccaaaccagguacaaggaucccaaac

SEQ ID NO: 826227 - RNA, 23 nt, Human
ccaagcagagaggaaaaggacca

SEQ ID NO: 826228 - RNA, 23 nt, Human
ccacccagaggcacaggcaagcc

SEQ ID NO: 826229 - RNA, 19 nt, Human
cccaagcugaugaguggca

SEQ ID NO: 826230 - RNA, 23 nt, Human
ccccugcacucccacugguauac

SEQ ID NO: 826231 - RNA, 24 nt, Human
ccccuucuugucacaaaacccaaa

SEQ ID NO: 826232 - RNA, 20 nt, Human
cccuuccccucccaccuccc

SEQ ID NO: 826233 - RNA, 18 nt, Human
ccuccugagcgaggaagc

SEQ ID NO: 826234 - RNA, 19 nt, Human
ccugaggccauccuugcuc

SEQ ID NO: 826235 - RNA, 21 nt, Human
cggcagcuucagcggcagcuu

SEQ ID NO: 826236 - RNA, 19 nt, Human
cuaaaaaaaaaaaaaagca

SEQ ID NO: 826237 - RNA, 18 nt, Human
cuagucccaggcaaugca

SEQ ID NO: 826238 - RNA, 19 nt, Human
cucacaguauccuacuuac

SEQ ID NO: 826239 - RNA, 20 nt, Human
cuccacagcuggucuacacc

SEQ ID NO: 826240 - RNA, 18 nt, Human
cucuaaaaaaaaaaaaaa

SEQ ID NO: 826241 - RNA, 20 nt, Human
cugcccccugccuuccuggg

SEQ ID NO: 826242 - RNA, 20 nt, Human
gaacuuguggcucuugggaa

SEQ ID NO: 826243 - RNA, 25 nt, Human
gaagaagaagaagaaaggccaaagg

SEQ ID NO: 826244 - RNA, 19 nt, Human
gaagaagaagaagaagaaa

SEQ ID NO: 826245 - RNA, 23 nt, Human
gaagaagaagaagaagaaaggag

SEQ ID NO: 826246 - RNA, 18 nt, Human
gaccacagcccccuaucu

SEQ ID NO: 826247 - RNA, 19 nt, Human
gaccuaaaccauccuccuc

SEQ ID NO: 826248 - RNA, 19 nt, Human
gagggugcucccuccaggg

SEQ ID NO: 826249 - RNA, 20 nt, Human
gagucagagggagggaggga

SEQ ID NO: 826250 - RNA, 27 nt, Human
gcaauagcucuaaaaaaaaaaaaaagc

SEQ ID NO: 826251 - RNA, 23 nt, Human
gcacagucuccagggcagcagag

SEQ ID NO: 826252 - RNA, 21 nt, Human
gcagagcuuggagcaggaugc

SEQ ID NO: 826253 - RNA, 21 nt, Human
gccauugagauugaauuugac

SEQ ID NO: 826254 - RNA, 25 nt, Human
ggaaaacccaaaccagguacaagga

SEQ ID NO: 826255 - RNA, 18 nt, Human
ggaggcaacggcggcagc

SEQ ID NO: 826256 - RNA, 22 nt, Human
ggagguggggguggggcagacu

SEQ ID NO: 826257 - RNA, 22 nt, Human
ggccauugagauugaauuugac

SEQ ID NO: 826258 - RNA, 19 nt, Human
ggcggaggcaacggcggca

SEQ ID NO: 826259 - RNA, 20 nt, Human
gggaaggaagucaccacuga

SEQ ID NO: 826260 - RNA, 19 nt, Human
gggagguggggguggggca

SEQ ID NO: 826261 - RNA, 23 nt, Human
gggcagcagaggugugugguggc

SEQ ID NO: 826262 - RNA, 22 nt, Human
gguggcugaugguggggacacu

SEQ ID NO: 826263 - RNA, 21 nt, Human
gugagccucagaugguucugu

SEQ ID NO: 826264 - RNA, 22 nt, Human
guggugcuucccauccccuccc

SEQ ID NO: 826265 - RNA, 23 nt, Human
uaaagaggucugggcaaagaguc

SEQ ID NO: 826266 - RNA, 23 nt, Human
uaaccacaguggggagguggggg

SEQ ID NO: 826267 - RNA, 20 nt, Human
uaauaggagaggcagccaug

SEQ ID NO: 826268 - RNA, 20 nt, Human
uagcuacacgugggaagccc

SEQ ID NO: 826269 - RNA, 21 nt, Human
uaucccaauacaugacacucu

SEQ ID NO: 826270 - RNA, 19 nt, Human
uaugaagguuccagagcug

SEQ ID NO: 826271 - RNA, 20 nt, Human
ucacaaggaagggaaaaccc

SEQ ID NO: 826272 - RNA, 23 nt, Human
ucacaaggaagggaaaacccaaa

SEQ ID NO: 826273 - RNA, 22 nt, Human
ucaggagaaaggaaggaccaca

SEQ ID NO: 826274 - RNA, 23 nt, Human
ucagugauaauagauaauaggag

SEQ ID NO: 826275 - RNA, 18 nt, Human
uccacccagaggcacagg

SEQ ID NO: 826276 - RNA, 29 nt, Human
uccauaucucuuuuuggucuuccucacaa

SEQ ID NO: 826277 - RNA, 25 nt, Human
ucccauccccuccccucccuggagg

SEQ ID NO: 826278 - RNA, 21 nt, Human
uccccugcacucccacuggua

SEQ ID NO: 826279 - RNA, 22 nt, Human
ucccuuccccucccaccuccca

SEQ ID NO: 826280 - RNA, 23 nt, Human
uccucugcaacuuacaggucacc

SEQ ID NO: 826281 - RNA, 18 nt, Human
uccuggguuaaagacaug

SEQ ID NO: 826282 - RNA, 24 nt, Human
ucuaaaaaaaaaaaaaagcaggcu

SEQ ID NO: 826283 - RNA, 19 nt, Human
ucucacuccacccuccucu

SEQ ID NO: 826284 - RNA, 23 nt, Human
ucucacuccacccuccucugcaa

SEQ ID NO: 826285 - RNA, 20 nt, Human
ucuccagggcagcagaggug

SEQ ID NO: 826286 - RNA, 19 nt, Human
ugaaaaaagauaaagggaa

SEQ ID NO: 826287 - RNA, 23 nt, Human
uggaaggugaguaggaaauaugg

SEQ ID NO: 826288 - RNA, 25 nt, Human
uggcagccaucauucccaagcugaa

SEQ ID NO: 826289 - RNA, 19 nt, Human
uggcugaugguggggacac

SEQ ID NO: 826290 - RNA, 24 nt, Human
ugggcaaagagucagagggaggga

SEQ ID NO: 826291 - RNA, 19 nt, Human
uggggaggugggggugggg

SEQ ID NO: 826292 - RNA, 19 nt, Human
uggggaggugggggugggg

SEQ ID NO: 826293 - RNA, 23 nt, Human
uggggagguggggguggggcaga

SEQ ID NO: 826294 - RNA, 24 nt, Human
uggguuuacuaaaaccaggaacuu

SEQ ID NO: 826295 - RNA, 24 nt, Human
ugugcaaaagaaaaaaaaauuaaa

SEQ ID NO: 826296 - RNA, 21 nt, Human
ugugcuccuccccugcacucc

SEQ ID NO: 826297 - RNA, 20 nt, Human
ugugugcagccaaaauauag

SEQ ID NO: 826298 - RNA, 20 nt, Human
uguuucaugguagccucccc

SEQ ID NO: 826299 - RNA, 22 nt, Human
uuaagauugaccuaccuaauau

SEQ ID NO: 826300 - RNA, 27 nt, Human
uuagaaguaaaauauacaugauccaac

SEQ ID NO: 826301 - RNA, 18 nt, Human
uuccagagcugaagguug

SEQ ID NO: 826302 - RNA, 22 nt, Human
uuguggcucuugggaagagcaa

SEQ ID NO: 826303 - RNA, 23 nt, Human
uuuacuaucauauguaauccacc

SEQ ID NO: 826304 - RNA, 19 nt, Human
aaaacaaagaaaccuaaag

SEQ ID NO: 826305 - RNA, 21 nt, Human
aaaacaaagaaaccuaaagga

SEQ ID NO: 826306 - RNA, 22 nt, Human
aaacaaaacaaagaaaccuaaa

SEQ ID NO: 826307 - RNA, 20 nt, Human
aaacacucagcuauuacuga

SEQ ID NO: 826308 - RNA, 18 nt, Human
aaaccuuaaaaagaacac

SEQ ID NO: 826309 - RNA, 21 nt, Human
aaagaaccaaagugacaucaa

SEQ ID NO: 826310 - RNA, 24 nt, Human
aaagaaccaaagugacaucaaaua

SEQ ID NO: 826311 - RNA, 19 nt, Human
aacaaagaaaccuaaagga

SEQ ID NO: 826312 - RNA, 22 nt, Human
aacaccaauugugaauggaaua

SEQ ID NO: 826313 - RNA, 22 nt, Human
aacaccuuggaaagguuuuucc

SEQ ID NO: 826314 - RNA, 18 nt, Human
aagcuggaaagcuucccg

SEQ ID NO: 826315 - RNA, 22 nt, Human
aagucugaauugcacaaggaaa

SEQ ID NO: 826316 - RNA, 23 nt, Human
aaguucaaaaguuguguguggcu

SEQ ID NO: 826317 - RNA, 19 nt, Human
acaaaacaaagaaaccuaa

SEQ ID NO: 826318 - RNA, 19 nt, Human
acacaacacuaccgaucuc

SEQ ID NO: 826319 - RNA, 20 nt, Human
acuguucuuaaagcuguuuu

SEQ ID NO: 826320 - RNA, 25 nt, Human
acuucacauucaagggcugaagcug

SEQ ID NO: 826321 - RNA, 18 nt, Human
agcuacaaaauuggcuga

SEQ ID NO: 826322 - RNA, 24 nt, Human
auuucuuuccucuguugagugccg

SEQ ID NO: 826323 - RNA, 21 nt, Human
caccuuggaaagguuuuucca

SEQ ID NO: 826324 - RNA, 23 nt, Human
caccuuggaaagguuuuuccaag

SEQ ID NO: 826325 - RNA, 18 nt, Human
caguuuuuuucaacuuuu

SEQ ID NO: 826326 - RNA, 19 nt, Human
cauggaaacuccauucugc

SEQ ID NO: 826327 - RNA, 18 nt, Human
cauggguccuggaaggcu

SEQ ID NO: 826328 - RNA, 18 nt, Human
cauucugcaacacagcgc

SEQ ID NO: 826329 - RNA, 19 nt, Human
ccaagccagacaguacuga

SEQ ID NO: 826330 - RNA, 18 nt, Human
ccagaagaauggccuaca

SEQ ID NO: 826331 - RNA, 21 nt, Human
ccuucaguggucugguagaaa

SEQ ID NO: 826332 - RNA, 23 nt, Human
cucaaaaacaaaacaaagaaacc

SEQ ID NO: 826333 - RNA, 20 nt, Human
cuccauucugcaacacagcg

SEQ ID NO: 826334 - RNA, 20 nt, Human
cuccccggaaccacuguggu

SEQ ID NO: 826335 - RNA, 23 nt, Human
cugagucacuguauaagccuucu

SEQ ID NO: 826336 - RNA, 20 nt, Human
cuuccugcuuguggcucucc

SEQ ID NO: 826337 - RNA, 20 nt, Human
gaaaaagaaccaaagugaca

SEQ ID NO: 826338 - RNA, 21 nt, Human
gagcugaucagaacaaucuua

SEQ ID NO: 826339 - RNA, 24 nt, Human
gcaaugaaaacacuaagccaaaag

SEQ ID NO: 826340 - RNA, 18 nt, Human
gcucuccagaagaauggc

SEQ ID NO: 826341 - RNA, 20 nt, Human
ggaaaacaguugugccuaca

SEQ ID NO: 826342 - RNA, 21 nt, Human
ggaaagguuuuuccaagagaa

SEQ ID NO: 826343 - RNA, 22 nt, Human
gguagaaauccauggaaacucc

SEQ ID NO: 826344 - RNA, 20 nt, Human
gugggugacauuaaggcccu

SEQ ID NO: 826345 - RNA, 27 nt, Human
guuuucuguugcuucuaguuuuccaac

SEQ ID NO: 826346 - RNA, 22 nt, Human
uaaaaagaacaccaauugugaa

SEQ ID NO: 826347 - RNA, 20 nt, Human
uaagaugccuuagaaaaauu

SEQ ID NO: 826348 - RNA, 20 nt, Human
uacagaaagacucacacucc

SEQ ID NO: 826349 - RNA, 23 nt, Human
uacagaaagacucacacucccaa

SEQ ID NO: 826350 - RNA, 25 nt, Human
uacccuacagaaagacucacacucc

SEQ ID NO: 826351 - RNA, 21 nt, Human
uaccgaucucuuuugcucaaa

SEQ ID NO: 826352 - RNA, 18 nt, Human
uaggaauuucuuuccucu

SEQ ID NO: 826353 - RNA, 19 nt, Human
uauuaggggaaaaaacacu

SEQ ID NO: 826354 - RNA, 23 nt, Human
ucaacuuuugggucuacugguuu

SEQ ID NO: 826355 - RNA, 19 nt, Human
uccaggaacuccuucagug

SEQ ID NO: 826356 - RNA, 18 nt, Human
ucgaugcuuaagucugaa

SEQ ID NO: 826357 - RNA, 18 nt, Human
ucugcaacacagcgcugc

SEQ ID NO: 826358 - RNA, 20 nt, Human
ucugcaacacagcgcugcuc

SEQ ID NO: 826359 - RNA, 18 nt, Human
ugaaaacacuaagccaaa

SEQ ID NO: 826360 - RNA, 19 nt, Human
ugagcaguguucccuuagg

SEQ ID NO: 826361 - RNA, 19 nt, Human
ugagcugaucagaacaauc

SEQ ID NO: 826362 - RNA, 24 nt, Human
ugccagacaugccaaugacacuuc

SEQ ID NO: 826363 - RNA, 23 nt, Human
ugcuacguacgcagggcuuccag

SEQ ID NO: 826364 - RNA, 23 nt, Human
ugcuaugagguuaauacauaaag

SEQ ID NO: 826365 - RNA, 18 nt, Human
ugugaacacacaucuacg

SEQ ID NO: 826366 - RNA, 21 nt, Human
uguggucagaccugcccgggc

SEQ ID NO: 826367 - RNA, 20 nt, Human
ugugugaacacacaucuacg

SEQ ID NO: 826368 - RNA, 22 nt, Human
uuaaaaagaacaccaauuguga

SEQ ID NO: 826369 - RNA, 24 nt, Human
uuaaauuuaguacaaacuauaaaa

SEQ ID NO: 826370 - RNA, 20 nt, Human
uuauaccaauagaaaaauag

SEQ ID NO: 826371 - RNA, 22 nt, Human
uuccuuaaauuuccuuaugucu

SEQ ID NO: 826372 - RNA, 23 nt, Human
uuuuuuuuuuaaagaaaaaaccu

SEQ ID NO: 826373 - RNA, 19 nt, Human
uuuuuuuuuuuuuuuuuaa

SEQ ID NO: 826374 - RNA, 25 nt, Human
agcacccucuccgcagcccccgccc

SEQ ID NO: 826375 - RNA, 19 nt, Human
agcggcuggaggugagcac

SEQ ID NO: 826376 - RNA, 22 nt, Human
cacccucuccgcagcccccgcc

SEQ ID NO: 826377 - RNA, 20 nt, Human
cacuacccaaccuacgacuc

SEQ ID NO: 826378 - RNA, 21 nt, Human
cacuacccaaccuacgacucu

SEQ ID NO: 826379 - RNA, 18 nt, Human
cauccagaguggacaggg

SEQ ID NO: 826380 - RNA, 22 nt, Human
caucccugcuuucaaauaggga

SEQ ID NO: 826381 - RNA, 22 nt, Human
cccaccagcggcuggaggugag

SEQ ID NO: 826382 - RNA, 22 nt, Human
ccccccaccagcggcuggaggu

SEQ ID NO: 826383 - RNA, 26 nt, Human
ccccgccccaacccgcacuacccaac

SEQ ID NO: 826384 - RNA, 23 nt, Human
ccccucaguuaagcacccucucc

SEQ ID NO: 826385 - RNA, 21 nt, Human
ccgccccaacccgcacuaccc

SEQ ID NO: 826386 - RNA, 22 nt, Human
ccucaguuaagcacccucuccg

SEQ ID NO: 826387 - RNA, 22 nt, Human
cucuccgcagcccccgccccaa

SEQ ID NO: 826388 - RNA, 20 nt, Human
gagcauccuguccuucagga

SEQ ID NO: 826389 - RNA, 19 nt, Human
gcacagcuucaccacccug

SEQ ID NO: 826390 - RNA, 22 nt, Human
gccccaacccgcacuacccaac

SEQ ID NO: 826391 - RNA, 18 nt, Human
gcccccgccccaacccgc

SEQ ID NO: 826392 - RNA, 24 nt, Human
ggacaccccccaccagcggcugga

SEQ ID NO: 826393 - RNA, 21 nt, Human
ggguuagcuggggccccaggg

SEQ ID NO: 826394 - RNA, 22 nt, Human
guggaaugggaucaucccugcu

SEQ ID NO: 826395 - RNA, 19 nt, Human
uaaauaaccaucagguggc

SEQ ID NO: 826396 - RNA, 20 nt, Human
ucccugcuuucaaauaggga

SEQ ID NO: 826397 - RNA, 19 nt, Human
ucucuaagcgaccugaacc

SEQ ID NO: 826398 - RNA, 19 nt, Human
ucuggacguauaaauaacc

SEQ ID NO: 826399 - RNA, 18 nt, Human
ugagucgccccaggucug

SEQ ID NO: 826400 - RNA, 20 nt, Human
ugggaagagugggugcaugg

SEQ ID NO: 826401 - RNA, 22 nt, Human
ugggaagagugggugcaugggu

SEQ ID NO: 826402 - RNA, 21 nt, Human
uggggaggucuggggagagca

SEQ ID NO: 826403 - RNA, 21 nt, Human
uugacguacagagagaggagu

SEQ ID NO: 826404 - RNA, 20 nt, Human
aaaaaccucaaauaacucag

SEQ ID NO: 826405 - RNA, 24 nt, Human
aaaguacugggauuacagguguga

SEQ ID NO: 826406 - RNA, 24 nt, Human
aaagugcugggaucacagguguga

SEQ ID NO: 826407 - RNA, 24 nt, Human
aaaugugcuucaagcagauaaugu

SEQ ID NO: 826408 - RNA, 21 nt, Human
aacagguauugcucuuugaug

SEQ ID NO: 826409 - RNA, 19 nt, Human
aaccagagacuguuauucc

SEQ ID NO: 826410 - RNA, 18 nt, Human
aaguacugggauuacagg

SEQ ID NO: 826411 - RNA, 26 nt, Human
aaguacugggauuacaggugugagcc

SEQ ID NO: 826412 - RNA, 21 nt, Human
aaguagcugagaccacaggca

SEQ ID NO: 826413 - RNA, 24 nt, Human
aaguagcugagaccacaggcaugc

SEQ ID NO: 826414 - RNA, 22 nt, Human
aaguagcugggauuacaggcac

SEQ ID NO: 826415 - RNA, 25 nt, Human
aaguagcugggauuacaggcaccug

SEQ ID NO: 826416 - RNA, 26 nt, Human
aagugcugggaucacaggugugagcc

SEQ ID NO: 826417 - RNA, 24 nt, Human
aaguuuguauuuuuaguagagaug

SEQ ID NO: 826418 - RNA, 26 nt, Human
aauaauccuucaccuaaucaaugauc

SEQ ID NO: 826419 - RNA, 21 nt, Human
aauaucaaaggcaaacaggga

SEQ ID NO: 826420 - RNA, 18 nt, Human
aauuuuguauuuuuagua

SEQ ID NO: 826421 - RNA, 19 nt, Human
acaggcaccugccaccacg

SEQ ID NO: 826422 - RNA, 21 nt, Human
acugccuacaaauauccugca

SEQ ID NO: 826423 - RNA, 25 nt, Human
agaaacugauguggaaauauaauaa

SEQ ID NO: 826424 - RNA, 19 nt, Human
agagaugggguuucacuau

SEQ ID NO: 826425 - RNA, 25 nt, Human
agcccagccaaguuuguauuuuuag

SEQ ID NO: 826426 - RNA, 18 nt, Human
aggaauccucacuuacca

SEQ ID NO: 826427 - RNA, 20 nt, Human
aggcaaacagggaaaccaga

SEQ ID NO: 826428 - RNA, 20 nt, Human
aggcaugcaccacuaagccc

SEQ ID NO: 826429 - RNA, 22 nt, Human
aggcugaagccacucagugggc

SEQ ID NO: 826430 - RNA, 25 nt, Human
aggcuggagugcaguggcaugaucu

SEQ ID NO: 826431 - RNA, 21 nt, Human
aggcuggucucuccugacuuc

SEQ ID NO: 826432 - RNA, 20 nt, Human
aggcuuuccaaaaaaccuca

SEQ ID NO: 826433 - RNA, 24 nt, Human
aggugauccaccugccucagccuc

SEQ ID NO: 826434 - RNA, 24 nt, Human
aggugaucugcuugccuuggccuc

SEQ ID NO: 826435 - RNA, 23 nt, Human
aggugugagccaccgugccuggc

SEQ ID NO: 826436 - RNA, 19 nt, Human
aguagagaugggguuucac

SEQ ID NO: 826437 - RNA, 20 nt, Human
agugcaguggcaugaucuug

SEQ ID NO: 826438 - RNA, 23 nt, Human
agugcaguggcaugaucuuggcu

SEQ ID NO: 826439 - RNA, 24 nt, Human
agugcaguggcaugaucuuggcuc

SEQ ID NO: 826440 - RNA, 22 nt, Human
aguugauagaccauuucuuucc

SEQ ID NO: 826441 - RNA, 22 nt, Human
augaaaaaaauuguucuugauc

SEQ ID NO: 826442 - RNA, 20 nt, Human
augggguuucacuaugcugg

SEQ ID NO: 826443 - RNA, 24 nt, Human
augggguuucacuaugcuggccag

SEQ ID NO: 826444 - RNA, 23 nt, Human
auuucaccaugaaaaaaauuguu

SEQ ID NO: 826445 - RNA, 24 nt, Human
caaaguacugggauuacaggugug

SEQ ID NO: 826446 - RNA, 24 nt, Human
caaagugcugggaucacaggugug

SEQ ID NO: 826447 - RNA, 22 nt, Human
caagcaauucuccugccucagc

SEQ ID NO: 826448 - RNA, 27 nt, Human
caagcaauucuccugccucagccuccc

SEQ ID NO: 826449 - RNA, 21 nt, Human
caagcacucuccugccucagc

SEQ ID NO: 826450 - RNA, 21 nt, Human
cacaaucagugucuaauuacc

SEQ ID NO: 826451 - RNA, 22 nt, Human
cacaaucagugucuaauuaccu

SEQ ID NO: 826452 - RNA, 22 nt, Human
cacaggugugagccaccgcgcc

SEQ ID NO: 826453 - RNA, 21 nt, Human
caccacaaccuccgccuccug

SEQ ID NO: 826454 - RNA, 23 nt, Human
caccugccucagccucccaaagu

SEQ ID NO: 826455 - RNA, 23 nt, Human
cacuaagcccagccaaguuugua

SEQ ID NO: 826456 - RNA, 21 nt, Human
cacuaugcuggccaggcuggu

SEQ ID NO: 826457 - RNA, 24 nt, Human
cacuaugcuggccaggcuggucuc

SEQ ID NO: 826458 - RNA, 20 nt, Human
cacucuuugcuaaacaacag

SEQ ID NO: 826459 - RNA, 21 nt, Human
caggcaccugccaccacgccc

SEQ ID NO: 826460 - RNA, 22 nt, Human
caggugauccaccugccucagc

SEQ ID NO: 826461 - RNA, 29 nt, Human
cagguugagucuacacagaggaacacuuc

SEQ ID NO: 826462 - RNA, 24 nt, Human
cagugucuaauuaccuauuacucu

SEQ ID NO: 826463 - RNA, 22 nt, Human
caucacucuuugcuaaacaaca

SEQ ID NO: 826464 - RNA, 22 nt, Human
cauggaaaccaagaugcauagc

SEQ ID NO: 826465 - RNA, 20 nt, Human
ccaaaguacugggauuacag

SEQ ID NO: 826466 - RNA, 21 nt, Human
ccaaaguacugggauuacagg

SEQ ID NO: 826467 - RNA, 24 nt, Human
ccaaaguacugggauuacaggugu

SEQ ID NO: 826468 - RNA, 20 nt, Human
ccaaagugcugggaucacag

SEQ ID NO: 826469 - RNA, 21 nt, Human
ccaaagugcugggaucacagg

SEQ ID NO: 826470 - RNA, 24 nt, Human
ccaaagugcugggaucacaggugu

SEQ ID NO: 826471 - RNA, 23 nt, Human
ccaaguagcugggauuacaggca

SEQ ID NO: 826472 - RNA, 24 nt, Human
ccaaguuuguauuuuuaguagaga

SEQ ID NO: 826473 - RNA, 25 nt, Human
ccaaugaucuuuccaagaaagcacc

SEQ ID NO: 826474 - RNA, 18 nt, Human
ccacaaccuccgccuccu

SEQ ID NO: 826475 - RNA, 23 nt, Human
ccacaaccuccgccuccuggguu

SEQ ID NO: 826476 - RNA, 24 nt, Human
ccacaaccuccgccuccuggguuc

SEQ ID NO: 826477 - RNA, 20 nt, Human
ccaccacgcccggcuaauuu

SEQ ID NO: 826478 - RNA, 26 nt, Human
ccaccugccucagccucccaaagugc

SEQ ID NO: 826479 - RNA, 23 nt, Human
ccauggugugaugcucugccgca

SEQ ID NO: 826480 - RNA, 19 nt, Human
ccauguuggucaggcuggu

SEQ ID NO: 826481 - RNA, 23 nt, Human
ccauguuggucaggcuggucucg

SEQ ID NO: 826482 - RNA, 23 nt, Human
cccaaguagcugggauuacaggc

SEQ ID NO: 826483 - RNA, 24 nt, Human
cccaaguagcugggauuacaggca

SEQ ID NO: 826484 - RNA, 23 nt, Human
cccaggcuggagugcaguggcau

SEQ ID NO: 826485 - RNA, 21 nt, Human
cccgaccucaggugauccacc

SEQ ID NO: 826486 - RNA, 23 nt, Human
cccgaccucaggugauccaccug

SEQ ID NO: 826487 - RNA, 23 nt, Human
cccgaccucaggugauccaccug

SEQ ID NO: 826488 - RNA, 19 nt, Human
ccuccgccuccuggguuca

SEQ ID NO: 826489 - RNA, 24 nt, Human
ccugccucagccucccaaagugcu

SEQ ID NO: 826490 - RNA, 23 nt, Human
ccugccucagccucccaaguagc

SEQ ID NO: 826491 - RNA, 22 nt, Human
ccuggguucaagcacucuccug

SEQ ID NO: 826492 - RNA, 24 nt, Human
cgaccucaggugauccaccugccu

SEQ ID NO: 826493 - RNA, 21 nt, Human
cgccuccuggguucaagcacu

SEQ ID NO: 826494 - RNA, 18 nt, Human
cgggaucucucuaggucg

SEQ ID NO: 826495 - RNA, 25 nt, Human
cuacugagacaggauaaaacuaugu

SEQ ID NO: 826496 - RNA, 24 nt, Human
cuauguuggcagaaagaaugugau

SEQ ID NO: 826497 - RNA, 24 nt, Human
cucaagcaauucuccugccucagc

SEQ ID NO: 826498 - RNA, 23 nt, Human
cucagccucccaaguagcuggga

SEQ ID NO: 826499 - RNA, 23 nt, Human
cucaggugauccaccugccucag

SEQ ID NO: 826500 - RNA, 24 nt, Human
cuccauguuggucaggcuggucuc

SEQ ID NO: 826501 - RNA, 21 nt, Human
cucccaaguagcugagaccac

SEQ ID NO: 826502 - RNA, 20 nt, Human
cucccacaaaaaucccaaug

SEQ ID NO: 826503 - RNA, 26 nt, Human
cuccugacuucaggugaucugcuugc

SEQ ID NO: 826504 - RNA, 27 nt, Human
cucuccugccucagccucccaaguagc

SEQ ID NO: 826505 - RNA, 19 nt, Human
cucucucuucaauuucaaa

SEQ ID NO: 826506 - RNA, 24 nt, Human
cugccucagccucccaaagugcug

SEQ ID NO: 826507 - RNA, 23 nt, Human
cugccucagccucccaaguagcu

SEQ ID NO: 826508 - RNA, 23 nt, Human
cugccucagccucccaaguagcu

SEQ ID NO: 826509 - RNA, 24 nt, Human
cuggagugcaguggcaugaucuug

SEQ ID NO: 826510 - RNA, 21 nt, Human
cuguaccuaaugaccucacca

SEQ ID NO: 826511 - RNA, 22 nt, Human
cuuauggccucucauaucuauu

SEQ ID NO: 826512 - RNA, 24 nt, Human
cuuguugcccaggcuggagugcag

SEQ ID NO: 826513 - RNA, 21 nt, Human
gaacuguaccuaaugaccuca

SEQ ID NO: 826514 - RNA, 23 nt, Human
gaccucaggugauccaccugccu

SEQ ID NO: 826515 - RNA, 24 nt, Human
gaccucaggugauccaccugccuc

SEQ ID NO: 826516 - RNA, 24 nt, Human
gacuucaggugaucugcuugccuu

SEQ ID NO: 826517 - RNA, 24 nt, Human
gagaugggguuucacuaugcuggc

SEQ ID NO: 826518 - RNA, 18 nt, Human
gaucacaggugugagcca

SEQ ID NO: 826519 - RNA, 21 nt, Human
gauccaccugccucagccucc

SEQ ID NO: 826520 - RNA, 18 nt, Human
gauuacaggugugagcca

SEQ ID NO: 826521 - RNA, 21 nt, Human
gauuacaggugugagccaccg

SEQ ID NO: 826522 - RNA, 24 nt, Human
gauuacaggugugagccaccgugc

SEQ ID NO: 826523 - RNA, 18 nt, Human
gcacguaauucaagcaca

SEQ ID NO: 826524 - RNA, 19 nt, Human
gccacaguacucuccuggu

SEQ ID NO: 826525 - RNA, 20 nt, Human
gcccaggcuggagugcagug

SEQ ID NO: 826526 - RNA, 20 nt, Human
gccucagccucccaaguagc

SEQ ID NO: 826527 - RNA, 19 nt, Human
gcuggagugcaguggcaug

SEQ ID NO: 826528 - RNA, 18 nt, Human
gcugggagccgggaucuc

SEQ ID NO: 826529 - RNA, 23 nt, Human
gcuggucucgaacucccgaccuc

SEQ ID NO: 826530 - RNA, 23 nt, Human
ggggcaguguucggauccaggaa

SEQ ID NO: 826531 - RNA, 22 nt, Human
gggguuucacuaugcuggccag

SEQ ID NO: 826532 - RNA, 22 nt, Human
gggguuucuccauguuggucag

SEQ ID NO: 826533 - RNA, 22 nt, Human
ggguuucacuaugcuggccagg

SEQ ID NO: 826534 - RNA, 21 nt, Human
gucacuggguaauggccucag

SEQ ID NO: 826535 - RNA, 18 nt, Human
gugauccaccugccucag

SEQ ID NO: 826536 - RNA, 24 nt, Human
gugauccaccugccucagccuccc

SEQ ID NO: 826537 - RNA, 18 nt, Human
gugcccaggcuggagugu

SEQ ID NO: 826538 - RNA, 21 nt, Human
guuauagguuuccaaaacugc

SEQ ID NO: 826539 - RNA, 23 nt, Human
guuccuggugcccaggcuggagu

SEQ ID NO: 826540 - RNA, 24 nt, Human
guuccuggugcccaggcuggagug

SEQ ID NO: 826541 - RNA, 24 nt, Human
guucuuguugcccaggcuggagug

SEQ ID NO: 826542 - RNA, 22 nt, Human
uaaaacauuagcaaaaugugcu

SEQ ID NO: 826543 - RNA, 23 nt, Human
uaaaagcaaaguccuccuucuuc

SEQ ID NO: 826544 - RNA, 20 nt, Human
uaaggucuuggccugcucca

SEQ ID NO: 826545 - RNA, 23 nt, Human
uacaggcaccugccaccacgccc

SEQ ID NO: 826546 - RNA, 22 nt, Human
uacaggugugagccaccgugcc

SEQ ID NO: 826547 - RNA, 23 nt, Human
uacaggugugagccaccgugccu

SEQ ID NO: 826548 - RNA, 24 nt, Human
uacugggauuacaggugugagcca

SEQ ID NO: 826549 - RNA, 21 nt, Human
uagacccucugccacauaugu

SEQ ID NO: 826550 - RNA, 20 nt, Human
uagauggaguuuuguucuug

SEQ ID NO: 826551 - RNA, 22 nt, Human
uaggcuuuccaaaaaaccucaa

SEQ ID NO: 826552 - RNA, 24 nt, Human
uaguagagaugggguuucacuaug

SEQ ID NO: 826553 - RNA, 19 nt, Human
uaucagaauggugagugac

SEQ ID NO: 826554 - RNA, 19 nt, Human
uaugcuggccaggcugguc

SEQ ID NO: 826555 - RNA, 19 nt, Human
ucaaaggcaaacagggaaa

SEQ ID NO: 826556 - RNA, 18 nt, Human
ucaauggcaaugcagauu

SEQ ID NO: 826557 - RNA, 24 nt, Human
ucaccacaaccuccgccuccuggg

SEQ ID NO: 826558 - RNA, 25 nt, Human
ucaccacaaccuccgccuccugggu

SEQ ID NO: 826559 - RNA, 27 nt, Human
ucaccacaaccuccgccuccuggguuc

SEQ ID NO: 826560 - RNA, 18 nt, Human
ucagccucccaaguagcu

SEQ ID NO: 826561 - RNA, 21 nt, Human
ucagccucccaaguagcugag

SEQ ID NO: 826562 - RNA, 20 nt, Human
ucagccucccaaguagcugg

SEQ ID NO: 826563 - RNA, 22 nt, Human
ucaggugauccaccugccucag

SEQ ID NO: 826564 - RNA, 19 nt, Human
ucagugggcugggagccgg

SEQ ID NO: 826565 - RNA, 18 nt, Human
ucaguuuuucuuuuucuu

SEQ ID NO: 826566 - RNA, 20 nt, Human
ucauaaggugaagguaacug

SEQ ID NO: 826567 - RNA, 18 nt, Human
uccaagaaagcaccaugg

SEQ ID NO: 826568 - RNA, 23 nt, Human
ucccaaaguacugggauuacagg

SEQ ID NO: 826569 - RNA, 23 nt, Human
ucccaaagugcugggaucacagg

SEQ ID NO: 826570 - RNA, 24 nt, Human
ucccaaguagcugagaccacaggc

SEQ ID NO: 826571 - RNA, 24 nt, Human
ucccaaguagcugggauuacaggc

SEQ ID NO: 826572 - RNA, 25 nt, Human
ucccaaugaucuuuccaagaaagca

SEQ ID NO: 826573 - RNA, 19 nt, Human
uccucuuccucuucuucca

SEQ ID NO: 826574 - RNA, 24 nt, Human
uccuggacucaagcaauucuccug

SEQ ID NO: 826575 - RNA, 18 nt, Human
uccuggguucaagcacuc

SEQ ID NO: 826576 - RNA, 20 nt, Human
uccuggguucaagcacucuc

SEQ ID NO: 826577 - RNA, 21 nt, Human
uccuggguucaagcacucucc

SEQ ID NO: 826578 - RNA, 23 nt, Human
uccuggguucaagcacucuccug

SEQ ID NO: 826579 - RNA, 18 nt, Human
uccuggugcccaggcugg

SEQ ID NO: 826580 - RNA, 23 nt, Human
ucguuccuggugcccaggcugga

SEQ ID NO: 826581 - RNA, 26 nt, Human
ucuccugccucagccucccaaguagc

SEQ ID NO: 826582 - RNA, 20 nt, Human
ucucgcauucuuacuaugua

SEQ ID NO: 826583 - RNA, 22 nt, Human
ucucuaggucgucagggggcag

SEQ ID NO: 826584 - RNA, 23 nt, Human
ucucuaggucgucagggggcagu

SEQ ID NO: 826585 - RNA, 24 nt, Human
ucucuucaauuucaaaacaagauc

SEQ ID NO: 826586 - RNA, 24 nt, Human
ucugccuccuggacucaagcaauu

SEQ ID NO: 826587 - RNA, 20 nt, Human
ucugucaagaaugaaauuaa

SEQ ID NO: 826588 - RNA, 21 nt, Human
ucuucaguuuuucuuuuucuu

SEQ ID NO: 826589 - RNA, 18 nt, Human
ucuugcuuauggccucuc

SEQ ID NO: 826590 - RNA, 18 nt, Human
ucuuguugcccaggcugg

SEQ ID NO: 826591 - RNA, 19 nt, Human
ucuuguugcccaggcugga

SEQ ID NO: 826592 - RNA, 20 nt, Human
ucuuguugcccaggcuggag

SEQ ID NO: 826593 - RNA, 21 nt, Human
ucuuguugcccaggcuggagu

SEQ ID NO: 826594 - RNA, 22 nt, Human
ucuuguugcccaggcuggagug

SEQ ID NO: 826595 - RNA, 20 nt, Human
ugaaacgcaauaguaggcuu

SEQ ID NO: 826596 - RNA, 19 nt, Human
ugacugccuacaaauaucc

SEQ ID NO: 826597 - RNA, 24 nt, Human
ugacuucaggugaucugcuugccu

SEQ ID NO: 826598 - RNA, 21 nt, Human
ugagacaggauaaaacuaugu

SEQ ID NO: 826599 - RNA, 21 nt, Human
ugagaccacaggcaugcacca

SEQ ID NO: 826600 - RNA, 24 nt, Human
ugagaccacaggcaugcaccacua

SEQ ID NO: 826601 - RNA, 26 nt, Human
ugagaccacaggcaugcaccacuaag

SEQ ID NO: 826602 - RNA, 19 nt, Human
ugagggauuggccacuguc

SEQ ID NO: 826603 - RNA, 18 nt, Human
ugcccaggcuggagugca

SEQ ID NO: 826604 - RNA, 21 nt, Human
ugcccaggcuggagugcagug

SEQ ID NO: 826605 - RNA, 22 nt, Human
ugcccaggcuggagugcagugg

SEQ ID NO: 826606 - RNA, 24 nt, Human
ugcccaggcuggagugcaguggca

SEQ ID NO: 826607 - RNA, 21 nt, Human
ugcccaggcuggaguguaaug

SEQ ID NO: 826608 - RNA, 23 nt, Human
ugccuaguaaccugcgaggccug

SEQ ID NO: 826609 - RNA, 24 nt, Human
ugccucagccucccaaagugcugg

SEQ ID NO: 826610 - RNA, 24 nt, Human
ugccucagccucccaaguagcuga

SEQ ID NO: 826611 - RNA, 24 nt, Human
ugccucagccucccaaguagcugg

SEQ ID NO: 826612 - RNA, 18 nt, Human
ugcuggccaggcuggucu

SEQ ID NO: 826613 - RNA, 24 nt, Human
ugcugggaucacaggugugagcca

SEQ ID NO: 826614 - RNA, 18 nt, Human
ugcuugccuuggccuccc

SEQ ID NO: 826615 - RNA, 24 nt, Human
uggacucaagcaauucuccugccu

SEQ ID NO: 826616 - RNA, 19 nt, Human
uggaguauccuacugagac

SEQ ID NO: 826617 - RNA, 19 nt, Human
uggagugcaguggcaugau

SEQ ID NO: 826618 - RNA, 24 nt, Human
uggagugcaguggcaugaucuugg

SEQ ID NO: 826619 - RNA, 24 nt, Human
uggcaugaucuuggcucaccacaa

SEQ ID NO: 826620 - RNA, 19 nt, Human
ugggaucacaggugugagc

SEQ ID NO: 826621 - RNA, 21 nt, Human
ugggaucacaggugugagcca

SEQ ID NO: 826622 - RNA, 22 nt, Human
ugggaucacaggugugagccac

SEQ ID NO: 826623 - RNA, 23 nt, Human
ugggaucacaggugugagccacc

SEQ ID NO: 826624 - RNA, 24 nt, Human
ugggaucacaggugugagccaccg

SEQ ID NO: 826625 - RNA, 21 nt, Human
ugggauuacaggcaccugcca

SEQ ID NO: 826626 - RNA, 22 nt, Human
ugggauuacaggcaccugccac

SEQ ID NO: 826627 - RNA, 24 nt, Human
ugggauuacaggcaccugccacca

SEQ ID NO: 826628 - RNA, 18 nt, Human
ugggauuacaggugugag

SEQ ID NO: 826629 - RNA, 21 nt, Human
ugggauuacaggugugagcca

SEQ ID NO: 826630 - RNA, 22 nt, Human
ugggauuacaggugugagccac

SEQ ID NO: 826631 - RNA, 23 nt, Human
ugggauuacaggugugagccacc

SEQ ID NO: 826632 - RNA, 23 nt, Human
ugggauuacaggugugagccacc

SEQ ID NO: 826633 - RNA, 24 nt, Human
ugggauuacaggugugagccaccg

SEQ ID NO: 826634 - RNA, 24 nt, Human
ugggguuucacuaugcuggccagg

SEQ ID NO: 826635 - RNA, 24 nt, Human
ugggguuucuccauguuggucagg

SEQ ID NO: 826636 - RNA, 23 nt, Human
uggucaggcuggucucgaacucc

SEQ ID NO: 826637 - RNA, 19 nt, Human
uggucucgaacucccgacc

SEQ ID NO: 826638 - RNA, 21 nt, Human
uguauuuuuaguagagauggg

SEQ ID NO: 826639 - RNA, 21 nt, Human
uguggaaauauaauaaugugg

SEQ ID NO: 826640 - RNA, 23 nt, Human
uguuauggaguauccuacugaga

SEQ ID NO: 826641 - RNA, 18 nt, Human
uuaguagagaugggguuu

SEQ ID NO: 826642 - RNA, 21 nt, Human
uuaguagagaugggguuucac

SEQ ID NO: 826643 - RNA, 21 nt, Human
uuaguagagaugggguuucac

SEQ ID NO: 826644 - RNA, 24 nt, Human
uuaguagagaugggguuucacuau

SEQ ID NO: 826645 - RNA, 20 nt, Human
uuccaagaaagcaccaugga

SEQ ID NO: 826646 - RNA, 24 nt, Human
uucguuccuggugcccaggcugga

SEQ ID NO: 826647 - RNA, 20 nt, Human
uucuugaucguuuaagagcc

SEQ ID NO: 826648 - RNA, 23 nt, Human
uuguauuuuuaguagagaugggg

SEQ ID NO: 826649 - RNA, 22 nt, Human
uuguucuuguugcccaggcugg

SEQ ID NO: 826650 - RNA, 23 nt, Human
uuguucuuguugcccaggcugga

SEQ ID NO: 826651 - RNA, 21 nt, Human
uuucacuaugcuggccaggcu

SEQ ID NO: 826652 - RNA, 22 nt, Human
uuucaucaaagauauaaaucuu

SEQ ID NO: 826653 - RNA, 21 nt, Human
uuuccaagaaagcaccaugga

SEQ ID NO: 826654 - RNA, 24 nt, Human
uuucguuccuggugcccaggcugg

SEQ ID NO: 826655 - RNA, 21 nt, Human
uuucuccauguuggucaggcu

SEQ ID NO: 826656 - RNA, 21 nt, Human
uuucuuuccucuuccucuucu

SEQ ID NO: 826657 - RNA, 18 nt, Human
uuuguauuuuuaguagag

SEQ ID NO: 826658 - RNA, 19 nt, Human
uuuguauuuuuaguagaga

SEQ ID NO: 826659 - RNA, 24 nt, Human
uuuguucuuguugcccaggcugga

SEQ ID NO: 826660 - RNA, 24 nt, Human
uuuuguucuuguugcccaggcugg

SEQ ID NO: 826661 - RNA, 24 nt, Human
uuuuuaguagagaugggguuucac

SEQ ID NO: 826662 - RNA, 24 nt, Human
uuuuucuuuuucuucuuuagaugg

SEQ ID NO: 826663 - RNA, 20 nt, Human
aacugguuaaaggcuuggcc

SEQ ID NO: 826664 - RNA, 21 nt, Human
acagcaauacccagggagacc

SEQ ID NO: 826665 - RNA, 18 nt, Human
agacaggugaucaagucu

SEQ ID NO: 826666 - RNA, 24 nt, Human
agucccauuucccggcuuccaggg

SEQ ID NO: 826667 - RNA, 21 nt, Human
cagcaauacccagggagacca

SEQ ID NO: 826668 - RNA, 22 nt, Human
cagcaauacccagggagaccaa

SEQ ID NO: 826669 - RNA, 20 nt, Human
cauaaaucugcagauaccuu

SEQ ID NO: 826670 - RNA, 22 nt, Human
ccgcugagcacaauccaggcau

SEQ ID NO: 826671 - RNA, 22 nt, Human
cguaacugggcguuuggcuacc

SEQ ID NO: 826672 - RNA, 19 nt, Human
guaacugggcguuuggcua

SEQ ID NO: 826673 - RNA, 22 nt, Human
gucccauuucccggcuuccagg

SEQ ID NO: 826674 - RNA, 21 nt, Human
gucucugaaugucaacagucc

SEQ ID NO: 826675 - RNA, 19 nt, Human
uaaccucuuugggcaccuc

SEQ ID NO: 826676 - RNA, 19 nt, Human
uaacugggcguuuggcuac

SEQ ID NO: 826677 - RNA, 23 nt, Human
uacccagggagaccaaguuucug

SEQ ID NO: 826678 - RNA, 18 nt, Human
uauuuugcuccagacagg

SEQ ID NO: 826679 - RNA, 25 nt, Human
ucaacagucccauuucccggcuucc

SEQ ID NO: 826680 - RNA, 18 nt, Human
ucacuauaaccucuuugg

SEQ ID NO: 826681 - RNA, 18 nt, Human
uccauauguucuugguau

SEQ ID NO: 826682 - RNA, 19 nt, Human
uccuccagagagaauucua

SEQ ID NO: 826683 - RNA, 24 nt, Human
ucuauuggaauuugaaaauuuacc

SEQ ID NO: 826684 - RNA, 24 nt, Human
ucucuuagguuuauuaagguuuga

SEQ ID NO: 826685 - RNA, 24 nt, Human
ucugaaugucaacagucccauuuc

SEQ ID NO: 826686 - RNA, 20 nt, Human
ucuuuuagccauaaaucugc

SEQ ID NO: 826687 - RNA, 20 nt, Human
ugaaauauuuuguuuugggu

SEQ ID NO: 826688 - RNA, 21 nt, Human
ugaaugucaacagucccauuu

SEQ ID NO: 826689 - RNA, 23 nt, Human
ugggaacgcguaacugggcguuu

SEQ ID NO: 826690 - RNA, 19 nt, Human
uguccaauaugaauucucu

SEQ ID NO: 826691 - RNA, 20 nt, Human
uguuucuuuccaguauaucu

SEQ ID NO: 826692 - RNA, 26 nt, Human
uucuauagcuaugucucugaauguca

SEQ ID NO: 826693 - RNA, 18 nt, Human
uuggcuaccaucucauuu

SEQ ID NO: 826694 - RNA, 18 nt, Human
uugguauuacuuuuugga

SEQ ID NO: 826695 - RNA, 24 nt, Human
aaagugcugggauuacaggcauga

SEQ ID NO: 826696 - RNA, 25 nt, Human
aagcaauccucccaucucagccucc

SEQ ID NO: 826697 - RNA, 19 nt, Human
aagugcugggauuacaggc

SEQ ID NO: 826698 - RNA, 21 nt, Human
aagugcugggauuacaggcau

SEQ ID NO: 826699 - RNA, 26 nt, Human
aagugcugggauuacaggcaugaacc

SEQ ID NO: 826700 - RNA, 21 nt, Human
aauucuugugccucagccucc

SEQ ID NO: 826701 - RNA, 22 nt, Human
accauggugacugcugauccug

SEQ ID NO: 826702 - RNA, 19 nt, Human
acugcagccucgaccuccu

SEQ ID NO: 826703 - RNA, 20 nt, Human
acuggagugcaguggcguua

SEQ ID NO: 826704 - RNA, 19 nt, Human
agaccauggugacugcuga

SEQ ID NO: 826705 - RNA, 22 nt, Human
agagacgaggucccgcucugcu

SEQ ID NO: 826706 - RNA, 23 nt, Human
agcugggauuacaggugugugcc

SEQ ID NO: 826707 - RNA, 19 nt, Human
aggcaugaaccacuaugcc

SEQ ID NO: 826708 - RNA, 23 nt, Human
aguagcugggauuacaggugugu

SEQ ID NO: 826709 - RNA, 19 nt, Human
agugcaguggcguuaucuc

SEQ ID NO: 826710 - RNA, 21 nt, Human
agugcaguggcguuaucucag

SEQ ID NO: 826711 - RNA, 23 nt, Human
agugcaguggcguuaucucagcu

SEQ ID NO: 826712 - RNA, 18 nt, Human
agugcugggauuacaggc

SEQ ID NO: 826713 - RNA, 24 nt, Human
auagcucacugcagccucgaccuc

SEQ ID NO: 826714 - RNA, 19 nt, Human
augaaccaccacgcugggc

SEQ ID NO: 826715 - RNA, 20 nt, Human
auggguuuucgccauguugg

SEQ ID NO: 826716 - RNA, 24 nt, Human
auggguuuucgccauguuggccag

SEQ ID NO: 826717 - RNA, 21 nt, Human
auuacaggugugugccaccau

SEQ ID NO: 826718 - RNA, 24 nt, Human
auuuuuguauuuuuaguagagaug

SEQ ID NO: 826719 - RNA, 24 nt, Human
caaaacgcugguauuacaggcaug

SEQ ID NO: 826720 - RNA, 21 nt, Human
caaagacacagacgcacagga

SEQ ID NO: 826721 - RNA, 24 nt, Human
caaagugcugggauuacaggcaug

SEQ ID NO: 826722 - RNA, 27 nt, Human
caagcaauccucccaucucagccuccc

SEQ ID NO: 826723 - RNA, 27 nt, Human
caagcaauucuugugccucagccuccg

SEQ ID NO: 826724 - RNA, 23 nt, Human
cacacaaagcuucacaaccguuc

SEQ ID NO: 826725 - RNA, 23 nt, Human
caccagguacacauccaucuagc

SEQ ID NO: 826726 - RNA, 22 nt, Human
cacccgucauccucaucuucug

SEQ ID NO: 826727 - RNA, 18 nt, Human
cacccuccucagccuccc

SEQ ID NO: 826728 - RNA, 24 nt, Human
cacucuguugccuacacuggagug

SEQ ID NO: 826729 - RNA, 21 nt, Human
cacugcaaacuccgccuccca

SEQ ID NO: 826730 - RNA, 19 nt, Human
cacugcagccucgaccucc

SEQ ID NO: 826731 - RNA, 21 nt, Human
cagccucgaccuccugggcuc

SEQ ID NO: 826732 - RNA, 23 nt, Human
cagccucgaccuccugggcucaa

SEQ ID NO: 826733 - RNA, 25 nt, Human
cagccucgaccuccugggcucaagc

SEQ ID NO: 826734 - RNA, 24 nt, Human
caucucagccucccaaaacgcugg

SEQ ID NO: 826735 - RNA, 24 nt, Human
cauguuggccaggcuggucucgaa

SEQ ID NO: 826736 - RNA, 23 nt, Human
ccaaagugcugggauuacaggca

SEQ ID NO: 826737 - RNA, 24 nt, Human
ccaaagugcugggauuacaggcau

SEQ ID NO: 826738 - RNA, 24 nt, Human
ccaccagguacacauccaucuagc

SEQ ID NO: 826739 - RNA, 18 nt, Human
ccacuaugcccaguugug

SEQ ID NO: 826740 - RNA, 20 nt, Human
ccagcgagauacaggcacaa

SEQ ID NO: 826741 - RNA, 19 nt, Human
ccauguuggccaggcuggu

SEQ ID NO: 826742 - RNA, 22 nt, Human
ccauguuggccaggcuggucuc

SEQ ID NO: 826743 - RNA, 23 nt, Human
ccauguuggccaggcuggucucg

SEQ ID NO: 826744 - RNA, 24 nt, Human
cccaaagugcugggauuacaggca

SEQ ID NO: 826745 - RNA, 21 nt, Human
cccacggagccuaguuguguc

SEQ ID NO: 826746 - RNA, 19 nt, Human
cccagguucaagcaauucu

SEQ ID NO: 826747 - RNA, 21 nt, Human
ccgaguagcugggauuacagg

SEQ ID NO: 826748 - RNA, 24 nt, Human
ccgaguagcugggauuacaggugu

SEQ ID NO: 826749 - RNA, 27 nt, Human
ccgccucccagguucaagcaauucuuu

SEQ ID NO: 826750 - RNA, 20 nt, Human
ccuacacuggagugcagugg

SEQ ID NO: 826751 - RNA, 22 nt, Human
ccuacacuggagugcaguggcg

SEQ ID NO: 826752 - RNA, 23 nt, Human
ccucaagugauccacccuccuca

SEQ ID NO: 826753 - RNA, 22 nt, Human
ccucagccucccaaagugcugg

SEQ ID NO: 826754 - RNA, 22 nt, Human
ccucccagguucaagcaauucu

SEQ ID NO: 826755 - RNA, 19 nt, Human
ccucgaccuccugggcuca

SEQ ID NO: 826756 - RNA, 23 nt, Human
ccucugaaauugccacccagagg

SEQ ID NO: 826757 - RNA, 20 nt, Human
ccuggccucaagugauccac

SEQ ID NO: 826758 - RNA, 23 nt, Human
ccuggccucaagugauccacccu

SEQ ID NO: 826759 - RNA, 24 nt, Human
ccuggccucaagugauccacccuc

SEQ ID NO: 826760 - RNA, 20 nt, Human
ccugggcucaagcaauccuc

SEQ ID NO: 826761 - RNA, 18 nt, Human
ccugugaagucccccagc

SEQ ID NO: 826762 - RNA, 25 nt, Human
cgaccuccugggcucaagcaauccu

SEQ ID NO: 826763 - RNA, 24 nt, Human
cgccauguuggccaggcuggucuc

SEQ ID NO: 826764 - RNA, 20 nt, Human
cgcugggccagagagagccc

SEQ ID NO: 826765 - RNA, 24 nt, Human
cucaagcaauccucccaucucagc

SEQ ID NO: 826766 - RNA, 21 nt, Human
cucacccccaaaggucccaaa

SEQ ID NO: 826767 - RNA, 23 nt, Human
cucacugcaaacuccgccuccca

SEQ ID NO: 826768 - RNA, 21 nt, Human
cucacugcagccucgaccucc

SEQ ID NO: 826769 - RNA, 24 nt, Human
cucacugcagccucgaccuccugg

SEQ ID NO: 826770 - RNA, 23 nt, Human
cucagccuccgaguagcugggau

SEQ ID NO: 826771 - RNA, 22 nt, Human
cucccaucucagccucccaaaa

SEQ ID NO: 826772 - RNA, 24 nt, Human
cuccgaguagcugggauuacaggu

SEQ ID NO: 826773 - RNA, 22 nt, Human
cugcagccucgaccuccugggc

SEQ ID NO: 826774 - RNA, 23 nt, Human
cugcagccucgaccuccugggcu

SEQ ID NO: 826775 - RNA, 24 nt, Human
cugcucaggcuggagugugguggu

SEQ ID NO: 826776 - RNA, 26 nt, Human
cuggggccuuuugaggucucugggug

SEQ ID NO: 826777 - RNA, 24 nt, Human
cuuccugugaagucccccagcgag

SEQ ID NO: 826778 - RNA, 24 nt, Human
cuugugccucagccuccgaguagc

SEQ ID NO: 826779 - RNA, 23 nt, Human
gaaaaaaccacaguaggccuggg

SEQ ID NO: 826780 - RNA, 18 nt, Human
gaagucccuccuuccgcu

SEQ ID NO: 826781 - RNA, 23 nt, Human
gaccuccugggcucaagcaaucc

SEQ ID NO: 826782 - RNA, 26 nt, Human
gaguagcugggauuacaggugugugc

SEQ ID NO: 826783 - RNA, 19 nt, Human
gaucauagcucacugcagc

SEQ ID NO: 826784 - RNA, 21 nt, Human
gauccacccuccucagccucc

SEQ ID NO: 826785 - RNA, 21 nt, Human
gauuacaggcaugaaccacua

SEQ ID NO: 826786 - RNA, 24 nt, Human
gauuacaggcaugaaccacuaugc

SEQ ID NO: 826787 - RNA, 18 nt, Human
gauuacaggugugugcca

SEQ ID NO: 826788 - RNA, 24 nt, Human
gauuacaggugugugccaccaugc

SEQ ID NO: 826789 - RNA, 22 nt, Human
gcaaacuccgccucccagguuc

SEQ ID NO: 826790 - RNA, 20 nt, Human
gcacaggaaaccaacgugcc

SEQ ID NO: 826791 - RNA, 24 nt, Human
gccuacacuggagugcaguggcgu

SEQ ID NO: 826792 - RNA, 22 nt, Human
gcgaagucaaaggccugugguu

SEQ ID NO: 826793 - RNA, 22 nt, Human
gcucugcugcucaggcuggagu

SEQ ID NO: 826794 - RNA, 18 nt, Human
ggauguggcgcucaggag

SEQ ID NO: 826795 - RNA, 24 nt, Human
ggauuacaggcaugaaccacuaug

SEQ ID NO: 826796 - RNA, 24 nt, Human
ggauuacaggugugugccaccaug

SEQ ID NO: 826797 - RNA, 19 nt, Human
ggcaaugaagguguccccu

SEQ ID NO: 826798 - RNA, 24 nt, Human
ggccucaagugauccacccuccuc

SEQ ID NO: 826799 - RNA, 22 nt, Human
ggcuggagugugguggugugau

SEQ ID NO: 826800 - RNA, 20 nt, Human
gggccggaugccggugggaa

SEQ ID NO: 826801 - RNA, 24 nt, Human
ggggccuuuugaggucucugggug

SEQ ID NO: 826802 - RNA, 22 nt, Human
ggguuuucgccauguuggccag

SEQ ID NO: 826803 - RNA, 18 nt, Human
guagcugggauuacaggu

SEQ ID NO: 826804 - RNA, 19 nt, Human
gucccuccuuccgcucugg

SEQ ID NO: 826805 - RNA, 24 nt, Human
gugauccacccuccucagccuccc

SEQ ID NO: 826806 - RNA, 24 nt, Human
uaauuuuuguauuuuuaguagaga

SEQ ID NO: 826807 - RNA, 24 nt, Human
uacaggcaugaaccacuaugccca

SEQ ID NO: 826808 - RNA, 22 nt, Human
uagagauggguuuucgccaugu

SEQ ID NO: 826809 - RNA, 24 nt, Human
uagcucacugcagccucgaccucc

SEQ ID NO: 826810 - RNA, 24 nt, Human
uaguagagauggguuuucgccaug

SEQ ID NO: 826811 - RNA, 22 nt, Human
ucacacaguucugaccggcuuc

SEQ ID NO: 826812 - RNA, 18 nt, Human
ucacugcaaacuccgccu

SEQ ID NO: 826813 - RNA, 19 nt, Human
ucacugcaaacuccgccuc

SEQ ID NO: 826814 - RNA, 24 nt, Human
ucacugcaaacuccgccucccagg

SEQ ID NO: 826815 - RNA, 23 nt, Human
ucacugcagccucgaccuccugg

SEQ ID NO: 826816 - RNA, 24 nt, Human
ucacugcagccucgaccuccuggg

SEQ ID NO: 826817 - RNA, 22 nt, Human
ucagaaaaaaccacaguaggcc

SEQ ID NO: 826818 - RNA, 27 nt, Human
ucagcucacugcaaacuccgccuccca

SEQ ID NO: 826819 - RNA, 20 nt, Human
ucaggagugguguccagcug

SEQ ID NO: 826820 - RNA, 21 nt, Human
uccacccuccucagccuccca

SEQ ID NO: 826821 - RNA, 20 nt, Human
uccacgagaggacaaagggg

SEQ ID NO: 826822 - RNA, 24 nt, Human
ucccaaagugcugggauuacaggc

SEQ ID NO: 826823 - RNA, 20 nt, Human
ucccagguucaagcaauucu

SEQ ID NO: 826824 - RNA, 20 nt, Human
ucccagguucaagcaauucu

SEQ ID NO: 826825 - RNA, 23 nt, Human
ucccgcucugcugcucaggcugg

SEQ ID NO: 826826 - RNA, 24 nt, Human
ucccgcucugcugcucaggcugga

SEQ ID NO: 826827 - RNA, 19 nt, Human
ucccucuugggauuagacc

SEQ ID NO: 826828 - RNA, 22 nt, Human
uccgaguagcugggauuacagg

SEQ ID NO: 826829 - RNA, 23 nt, Human
uccgaguagcugggauuacaggu

SEQ ID NO: 826830 - RNA, 24 nt, Human
uccgaguagcugggauuacaggug

SEQ ID NO: 826831 - RNA, 21 nt, Human
uccucagccucccaaagugcu

SEQ ID NO: 826832 - RNA, 25 nt, Human
uccucccaucucagccucccaaaac

SEQ ID NO: 826833 - RNA, 23 nt, Human
uccugagggucuugagucuucgu

SEQ ID NO: 826834 - RNA, 18 nt, Human
uccugggcucaagcaauc

SEQ ID NO: 826835 - RNA, 22 nt, Human
uccugggcucaagcaauccucc

SEQ ID NO: 826836 - RNA, 24 nt, Human
uccugggcucaagcaauccuccca

SEQ ID NO: 826837 - RNA, 22 nt, Human
ucgccauguuggccaggcuggu

SEQ ID NO: 826838 - RNA, 24 nt, Human
ucgccauguuggccaggcuggucu

SEQ ID NO: 826839 - RNA, 23 nt, Human
ucucacucuguugccuacacugg

SEQ ID NO: 826840 - RNA, 24 nt, Human
ucucacucuguugccuacacugga

SEQ ID NO: 826841 - RNA, 18 nt, Human
ucucugggugacgagucc

SEQ ID NO: 826842 - RNA, 24 nt, Human
ucugcugcucaggcuggagugugg

SEQ ID NO: 826843 - RNA, 24 nt, Human
ucuguugccuacacuggagugcag

SEQ ID NO: 826844 - RNA, 22 nt, Human
ugcaguggcguuaucucagcuc

SEQ ID NO: 826845 - RNA, 20 nt, Human
ugcccaaauccugcuuccug

SEQ ID NO: 826846 - RNA, 21 nt, Human
ugcccaguugugugggcugcu

SEQ ID NO: 826847 - RNA, 22 nt, Human
ugccggugggaagucccuccuu

SEQ ID NO: 826848 - RNA, 23 nt, Human
ugccucagccuccgaguagcugg

SEQ ID NO: 826849 - RNA, 20 nt, Human
ugcucaggcuggaguguggu

SEQ ID NO: 826850 - RNA, 24 nt, Human
ugcucaggcuggagugugguggug

SEQ ID NO: 826851 - RNA, 23 nt, Human
ugcugauccugagcaagucacac

SEQ ID NO: 826852 - RNA, 23 nt, Human
ugcugggauuacaggcaugaacc

SEQ ID NO: 826853 - RNA, 23 nt, Human
uggagugcaguggcguuaucuca

SEQ ID NO: 826854 - RNA, 28 nt, Human
uggagugcaguggcguuauggcucuagc

SEQ ID NO: 826855 - RNA, 21 nt, Human
uggcacuggggccggaugccg

SEQ ID NO: 826856 - RNA, 24 nt, Human
uggccaggcuggucucgaauuccu

SEQ ID NO: 826857 - RNA, 21 nt, Human
uggccucaagugauccacccu

SEQ ID NO: 826858 - RNA, 22 nt, Human
uggccucaagugauccacccuc

SEQ ID NO: 826859 - RNA, 24 nt, Human
uggcguuaucucagcucacugcaa

SEQ ID NO: 826860 - RNA, 23 nt, Human
ugggauguggcgcucaggagugg

SEQ ID NO: 826861 - RNA, 21 nt, Human
ugggauuacaggcaugaacca

SEQ ID NO: 826862 - RNA, 22 nt, Human
ugggauuacaggcaugaaccac

SEQ ID NO: 826863 - RNA, 22 nt, Human
ugggauuacaggcaugaaccac

SEQ ID NO: 826864 - RNA, 23 nt, Human
ugggauuacaggcaugaaccacu

SEQ ID NO: 826865 - RNA, 24 nt, Human
ugggauuacaggcaugaaccacua

SEQ ID NO: 826866 - RNA, 26 nt, Human
ugggauuacaggcaugaaccacuaug

SEQ ID NO: 826867 - RNA, 18 nt, Human
ugggauuacaggugugug

SEQ ID NO: 826868 - RNA, 21 nt, Human
ugggauuacaggugugugcca

SEQ ID NO: 826869 - RNA, 22 nt, Human
ugggauuacaggugugugccac

SEQ ID NO: 826870 - RNA, 24 nt, Human
ugggauuacaggugugugccacca

SEQ ID NO: 826871 - RNA, 25 nt, Human
ugggauuacaggugugugccaccau

SEQ ID NO: 826872 - RNA, 20 nt, Human
uggguuuucgccauguuggc

SEQ ID NO: 826873 - RNA, 24 nt, Human
uggguuuucgccauguuggccagg

SEQ ID NO: 826874 - RNA, 24 nt, Human
ugguauuacaggcaugaaccacca

SEQ ID NO: 826875 - RNA, 18 nt, Human
uggugugaucauagcuca

SEQ ID NO: 826876 - RNA, 24 nt, Human
uggugugaucauagcucacugcag

SEQ ID NO: 826877 - RNA, 18 nt, Human
uguccagcugggagcuuc

SEQ ID NO: 826878 - RNA, 22 nt, Human
ugugcgaggagaggcaaugaag

SEQ ID NO: 826879 - RNA, 21 nt, Human
uuagaccauggugacugcuga

SEQ ID NO: 826880 - RNA, 24 nt, Human
uuaguagagauggguuuucgccau

SEQ ID NO: 826881 - RNA, 23 nt, Human
uucaagcaauucuugugccucag

SEQ ID NO: 826882 - RNA, 23 nt, Human
uuccuggccucaagugauccacc

SEQ ID NO: 826883 - RNA, 23 nt, Human
uucuuagagacgaggucccgcuc

SEQ ID NO: 826884 - RNA, 23 nt, Human
uugccauguggcgaagucaaagg

SEQ ID NO: 826885 - RNA, 22 nt, Human
uugguucugggagccucucaga

SEQ ID NO: 826886 - RNA, 24 nt, Human
uuucgccauguuggccaggcuggu

SEQ ID NO: 826887 - RNA, 23 nt, Human
uuuucgccauguuggccaggcug

SEQ ID NO: 826888 - RNA, 24 nt, Human
uuuuuaguagagauggguuuucgc

SEQ ID NO: 826889 - RNA, 20 nt, Human
uuuuuguauuuuuaguagag

SEQ ID NO: 826890 - RNA, 22 nt, Human
aaguagauccuuuauucaaaau

SEQ ID NO: 826891 - RNA, 24 nt, Human
agagaccacccccacauacagguc

SEQ ID NO: 826892 - RNA, 18 nt, Human
agcggacccucggggccc

SEQ ID NO: 826893 - RNA, 22 nt, Human
aggccgaggcagggcgcagcac

SEQ ID NO: 826894 - RNA, 23 nt, Human
aguagauccuuuauucaaaaucu

SEQ ID NO: 826895 - RNA, 23 nt, Human
cacaggcgcaaggccgaggcagg

SEQ ID NO: 826896 - RNA, 22 nt, Human
cacccucgcccggacacggccc

SEQ ID NO: 826897 - RNA, 20 nt, Human
ccacauacagguccauggag

SEQ ID NO: 826898 - RNA, 21 nt, Human
ccagauguuuccuguccgacu

SEQ ID NO: 826899 - RNA, 24 nt, Human
ccagauguuuccuguccgacuuuu

SEQ ID NO: 826900 - RNA, 18 nt, Human
cccaggagaccuaggggg

SEQ ID NO: 826901 - RNA, 21 nt, Human
ccccagagggguucaaagacc

SEQ ID NO: 826902 - RNA, 18 nt, Human
cccccacauacaggucca

SEQ ID NO: 826903 - RNA, 19 nt, Human
cccccacggucaggccaag

SEQ ID NO: 826904 - RNA, 18 nt, Human
cccccggggucgcuucgg

SEQ ID NO: 826905 - RNA, 19 nt, Human
ccgaaaccagagaccaccc

SEQ ID NO: 826906 - RNA, 23 nt, Human
cgagcugccccuacacaggcgca

SEQ ID NO: 826907 - RNA, 21 nt, Human
cucaaccaaggauaggucacc

SEQ ID NO: 826908 - RNA, 18 nt, Human
cucucaaccaaggauagg

SEQ ID NO: 826909 - RNA, 18 nt, Human
gaaaccagagaccacccc

SEQ ID NO: 826910 - RNA, 18 nt, Human
gagcucuggcuggaggca

SEQ ID NO: 826911 - RNA, 19 nt, Human
gccuggaccaucuggaccc

SEQ ID NO: 826912 - RNA, 19 nt, Human
gccuggaccaucuggaccc

SEQ ID NO: 826913 - RNA, 23 nt, Human
ggacacggcccgggcugcccccg

SEQ ID NO: 826914 - RNA, 23 nt, Human
gggccuggaccaucuggaccccc

SEQ ID NO: 826915 - RNA, 18 nt, Human
gggcguuguccucugaca

SEQ ID NO: 826916 - RNA, 24 nt, Human
gguucaaagaccuccgaaaccaga

SEQ ID NO: 826917 - RNA, 18 nt, Human
gucagagagcggagauga

SEQ ID NO: 826918 - RNA, 24 nt, Human
uacacaggcgcaaggccgaggcag

SEQ ID NO: 826919 - RNA, 18 nt, Human
ucccagauaauagcacca

SEQ ID NO: 826920 - RNA, 18 nt, Human
uccccaaggcgaccagag

SEQ ID NO: 826921 - RNA, 21 nt, Human
ucgcuucggggucucccagga

SEQ ID NO: 826922 - RNA, 23 nt, Human
uggacccccacggucaggacccu

SEQ ID NO: 826923 - RNA, 19 nt, Human
uguggggguuuuuugacug

SEQ ID NO: 826924 - RNA, 19 nt, Human
uuugcugaccugugaccuc

SEQ ID NO: 826925 - RNA, 20 nt, Human
aaaaccucagcagcaucucc

SEQ ID NO: 826926 - RNA, 24 nt, Human
aauuacagagucugauaaauagga

SEQ ID NO: 826927 - RNA, 18 nt, Human
gaacauuaccuacaaauu

SEQ ID NO: 826928 - RNA, 20 nt, Human
gauucccgccaccccacccc

SEQ ID NO: 826929 - RNA, 23 nt, Human
gcucacuggauuucauuuuugca

SEQ ID NO: 826930 - RNA, 30 nt, Human
uacauggauuccucuacuuugugagguuuu

SEQ ID NO: 826931 - RNA, 22 nt, Human
uagccaaauuucuuucaaaacc

SEQ ID NO: 826932 - RNA, 21 nt, Human
ucagcagcaucuccuucuggu

SEQ ID NO: 826933 - RNA, 22 nt, Human
ugguuuauuugcaauuuacaug

SEQ ID NO: 826934 - RNA, 23 nt, Human
uucuagugcucacuggauuucau

SEQ ID NO: 826935 - RNA, 21 nt, Human
uuucuugcagggagcaaagau

SEQ ID NO: 826936 - RNA, 22 nt, Human
aaaggcaugggggcagaggggc

SEQ ID NO: 826937 - RNA, 22 nt, Human
aaaggcaugggggcagaggggc

SEQ ID NO: 826938 - RNA, 18 nt, Human
accggugcuggccgcgcg

SEQ ID NO: 826939 - RNA, 25 nt, Human
accuugaggacaacagggagaggaa

SEQ ID NO: 826940 - RNA, 22 nt, Human
agaaaggcaugggggcagaggg

SEQ ID NO: 826941 - RNA, 24 nt, Human
agaaaggcaugggggcagaggggc

SEQ ID NO: 826942 - RNA, 18 nt, Human
agaggaaaugggguuggg

SEQ ID NO: 826943 - RNA, 21 nt, Human
agagggaggagacgggugagu

SEQ ID NO: 826944 - RNA, 20 nt, Human
aggaaaugggguugggacug

SEQ ID NO: 826945 - RNA, 22 nt, Human
agggaaggagagggaggagacg

SEQ ID NO: 826946 - RNA, 18 nt, Human
auugcagaagaagcagag

SEQ ID NO: 826947 - RNA, 23 nt, Human
caaucccaaucagaagaugaaga

SEQ ID NO: 826948 - RNA, 19 nt, Human
caccuugaggacaacaggg

SEQ ID NO: 826949 - RNA, 21 nt, Human
cacugagagagcuccugacug

SEQ ID NO: 826950 - RNA, 21 nt, Human
caucacaccuugaggacaaca

SEQ ID NO: 826951 - RNA, 20 nt, Human
ccagggaaggagagggagga

SEQ ID NO: 826952 - RNA, 23 nt, Human
cccagggaaggagagggaggaag

SEQ ID NO: 826953 - RNA, 19 nt, Human
cccuugguagugaaggccc

SEQ ID NO: 826954 - RNA, 24 nt, Human
cgggaccaagaaggaggccacuga

SEQ ID NO: 826955 - RNA, 19 nt, Human
cucgcaaguaccggugcug

SEQ ID NO: 826956 - RNA, 25 nt, Human
gaaaggcaugggggcagaggggcuu

SEQ ID NO: 826957 - RNA, 19 nt, Human
gaagaagcagaggacugga

SEQ ID NO: 826958 - RNA, 28 nt, Human
gaccaagaaggaggccacugagagagcu

SEQ ID NO: 826959 - RNA, 20 nt, Human
gagcuccugacuggacuccu

SEQ ID NO: 826960 - RNA, 19 nt, Human
gaggcagaaggggcgcaaa

SEQ ID NO: 826961 - RNA, 19 nt, Human
gcccaagaaaggcaugggg

SEQ ID NO: 826962 - RNA, 21 nt, Human
ggcagaggggcuuguagcugg

SEQ ID NO: 826963 - RNA, 21 nt, Human
gggagaggaaaugggguuggg

SEQ ID NO: 826964 - RNA, 23 nt, Human
uccuggguaaguguugucuuugc

SEQ ID NO: 826965 - RNA, 19 nt, Human
ugaaggcccaagaaaggca

SEQ ID NO: 826966 - RNA, 21 nt, Human
ugcagaagaagcagaggacug

SEQ ID NO: 826967 - RNA, 23 nt, Human
uguagugacagacaaagcauuuc

SEQ ID NO: 826968 - RNA, 20 nt, Human
uuuaaucauuuauugcagaa

SEQ ID NO: 826969 - RNA, 23 nt, Human
uuugcauuucaggcaaugaccca

SEQ ID NO: 826970 - RNA, 18 nt, Human
aaggaaaagugaacagug

SEQ ID NO: 826971 - RNA, 21 nt, Human
aaguacagugugggauccaga

SEQ ID NO: 826972 - RNA, 21 nt, Human
agaaguggguggccaaggcca

SEQ ID NO: 826973 - RNA, 19 nt, Human
agaauaaaggaaaagugaa

SEQ ID NO: 826974 - RNA, 20 nt, Human
agacccagggagcccagcag

SEQ ID NO: 826975 - RNA, 21 nt, Human
agcugggggaccacagccaag

SEQ ID NO: 826976 - RNA, 21 nt, Human
aggaaaagugaacagugccug

SEQ ID NO: 826977 - RNA, 18 nt, Human
aggaccagcaggguggag

SEQ ID NO: 826978 - RNA, 20 nt, Human
aggcaggaacuaugcuaggu

SEQ ID NO: 826979 - RNA, 22 nt, Human
aguacagugugggauccagagc

SEQ ID NO: 826980 - RNA, 18 nt, Human
agugugugcggggccuug

SEQ ID NO: 826981 - RNA, 18 nt, Human
cagaugcaggagggagga

SEQ ID NO: 826982 - RNA, 20 nt, Human
cagcaggguggagauggagc

SEQ ID NO: 826983 - RNA, 20 nt, Human
cagugugugcggggccuugg

SEQ ID NO: 826984 - RNA, 20 nt, Human
cccugaauugcacuuggucc

SEQ ID NO: 826985 - RNA, 20 nt, Human
ccuugggcagagacccaggg

SEQ ID NO: 826986 - RNA, 19 nt, Human
cucagaugcaggagggagg

SEQ ID NO: 826987 - RNA, 19 nt, Human
cucugcuucugggugcagg

SEQ ID NO: 826988 - RNA, 24 nt, Human
cuuggucauccaggccuucccagg

SEQ ID NO: 826989 - RNA, 22 nt, Human
gauccagagccgggucauggaa

SEQ ID NO: 826990 - RNA, 18 nt, Human
gcagccaggaccugggcu

SEQ ID NO: 826991 - RNA, 24 nt, Human
gcaggugaguggagaaaaaggccc

SEQ ID NO: 826992 - RNA, 23 nt, Human
ggaauuucaccaagcuuggucau

SEQ ID NO: 826993 - RNA, 21 nt, Human
ggccacucuugguuguuuguc

SEQ ID NO: 826994 - RNA, 20 nt, Human
gggaaguacagugugggauc

SEQ ID NO: 826995 - RNA, 22 nt, Human
gggagcaggaccagcagggugg

SEQ ID NO: 826996 - RNA, 24 nt, Human
gggagcaggaccagcaggguggag

SEQ ID NO: 826997 - RNA, 20 nt, Human
gggcagaggaggaaagcugg

SEQ ID NO: 826998 - RNA, 18 nt, Human
gguggccaaggccagugc

SEQ ID NO: 826999 - RNA, 18 nt, Human
uacagugugggauccaga

SEQ ID NO: 827000 - RNA, 22 nt, Human
ugagagugggcugugggaagua

SEQ ID NO: 827001 - RNA, 22 nt, Human
ugaggcggggcccggggcaguc

SEQ ID NO: 827002 - RNA, 19 nt, Human
ugcuaggucccagugugug

SEQ ID NO: 827003 - RNA, 19 nt, Human
uggcagccaggaccugggg

SEQ ID NO: 827004 - RNA, 24 nt, Human
uggcauaggcaggaacuaugcuag

SEQ ID NO: 827005 - RNA, 20 nt, Human
ugggagaaguggguggccaa

SEQ ID NO: 827006 - RNA, 21 nt, Human
ugggagaaguggguggccaag

SEQ ID NO: 827007 - RNA, 18 nt, Human
ugggagcaggaccagcag

SEQ ID NO: 827008 - RNA, 19 nt, Human
ugggggaccacagccaagg

SEQ ID NO: 827009 - RNA, 19 nt, Human
ugguuguuuguccuucagu

SEQ ID NO: 827010 - RNA, 21 nt, Human
uguacagggaggaauuucacc

SEQ ID NO: 827011 - RNA, 20 nt, Human
uguaugggagcaggaccagc

SEQ ID NO: 827012 - RNA, 21 nt, Human
uguaugggagcaggaccagca

SEQ ID NO: 827013 - RNA, 19 nt, Human
uguggggguggggacuggg

SEQ ID NO: 827014 - RNA, 20 nt, Human
uuagcgacugcgcuagaggc

SEQ ID NO: 827015 - RNA, 18 nt, Human
uuuuuuuuuuuuuuuuug

SEQ ID NO: 827016 - RNA, 20 nt, Human
uaguuuuaaggugccaucuu

SEQ ID NO: 827017 - RNA, 18 nt, Human
uaucuaacucuuuucaca

SEQ ID NO: 827018 - RNA, 21 nt, Human
ugaugagagguugcaagccca

SEQ ID NO: 827019 - RNA, 24 nt, Human
ugaugagagguugcaagcccaguu

SEQ ID NO: 827020 - RNA, 21 nt, Human
uuggguugcuuggaggaguuu

SEQ ID NO: 827021 - RNA, 25 nt, Human
uuuucacauuguaggacuuuggcug

SEQ ID NO: 827022 - RNA, 24 nt, Human
aagaaagacaaagaaagguugaag

SEQ ID NO: 827023 - RNA, 21 nt, Human
aagaaauaauucguucaugaa

SEQ ID NO: 827024 - RNA, 23 nt, Human
aaucagauaauucugaggccaaa

SEQ ID NO: 827025 - RNA, 20 nt, Human
acccccauaagaaagacaaa

SEQ ID NO: 827026 - RNA, 21 nt, Human
cagauaauucugaggccaaaa

SEQ ID NO: 827027 - RNA, 23 nt, Human
cccccauaagaaagacaaagaaa

SEQ ID NO: 827028 - RNA, 19 nt, Human
ccucagagagaagaguaag

SEQ ID NO: 827029 - RNA, 19 nt, Human
cuuucuggaauugaaaggg

SEQ ID NO: 827030 - RNA, 19 nt, Human
gccaaaauauuugguaacc

SEQ ID NO: 827031 - RNA, 24 nt, Human
uaagaaagacaaagaaagguugaa

SEQ ID NO: 827032 - RNA, 20 nt, Human
uacaggaagugaguguccug

SEQ ID NO: 827033 - RNA, 19 nt, Human
uauauuauuccucuuucau

SEQ ID NO: 827034 - RNA, 19 nt, Human
uccucuuucauagggggug

SEQ ID NO: 827035 - RNA, 18 nt, Human
ugaauggaacugaaagug

SEQ ID NO: 827036 - RNA, 19 nt, Human
ugagaaggacagauggcuc

SEQ ID NO: 827037 - RNA, 21 nt, Human
ugagaaggacagauggcucuu

SEQ ID NO: 827038 - RNA, 21 nt, Human
uuccauggucucgucggcgcu

SEQ ID NO: 827039 - RNA, 18 nt, Human
uugaagaauuuguucguu

SEQ ID NO: 827040 - RNA, 18 nt, Human
uuuuuuuuuuuuuuuuug

SEQ ID NO: 827041 - RNA, 20 nt, Human
uuuuuuuuuuuuuuuuuguu

SEQ ID NO: 827042 - RNA, 18 nt, Human
aagguauucauuguagaa

SEQ ID NO: 827043 - RNA, 20 nt, Human
agauagaauugugagcucau

SEQ ID NO: 827044 - RNA, 22 nt, Human
aggcaagaucauuaugauccaa

SEQ ID NO: 827045 - RNA, 23 nt, Human
aggcaauugaaaauaagcaaacu

SEQ ID NO: 827046 - RNA, 19 nt, Human
auucauuguagaauggaau

SEQ ID NO: 827047 - RNA, 19 nt, Human
cauuagacuuguggauagu

SEQ ID NO: 827048 - RNA, 22 nt, Human
ccaaaaaccaagggauggauca

SEQ ID NO: 827049 - RNA, 21 nt, Human
cucucuggugacuugaggaau

SEQ ID NO: 827050 - RNA, 19 nt, Human
cuugaggaaugucacuugg

SEQ ID NO: 827051 - RNA, 18 nt, Human
ggaucagauguuaaaaug

SEQ ID NO: 827052 - RNA, 21 nt, Human
guaucacagauauaacugaaa

SEQ ID NO: 827053 - RNA, 22 nt, Human
uagaauggaaucagauagaauu

SEQ ID NO: 827054 - RNA, 20 nt, Human
uagaauggaaucagauagug

SEQ ID NO: 827055 - RNA, 24 nt, Human
ucauuaugauccaaaaaccaaggg

SEQ ID NO: 827056 - RNA, 22 nt, Human
uccaucacaagcaaugcaaagu

SEQ ID NO: 827057 - RNA, 22 nt, Human
uuaagaguuagguugcuuggag

SEQ ID NO: 827058 - RNA, 23 nt, Human
uuaauccugcagaaauaucagaa

SEQ ID NO: 827059 - RNA, 19 nt, Human
uucucauggauaaauucca

SEQ ID NO: 827060 - RNA, 24 nt, Human
uuuguagcauuucuguguccccag

SEQ ID NO: 827061 - RNA, 21 nt, Human
uuuuuuuuuuuuucuuugccu

SEQ ID NO: 827062 - RNA, 27 nt, Human
uuuuuuuuuuuuuuuuuuucuuugggg

SEQ ID NO: 827063 - RNA, 26 nt, Human
aaguauuggggauucacccuugagcu

SEQ ID NO: 827064 - RNA, 21 nt, Human
agaagaggaugucuuauagua

SEQ ID NO: 827065 - RNA, 22 nt, Human
agaagguguuggagaacaagcc

SEQ ID NO: 827066 - RNA, 21 nt, Human
agacauugaacuucaugugaa

SEQ ID NO: 827067 - RNA, 20 nt, Human
caaaucacagaaagacaaga

SEQ ID NO: 827068 - RNA, 28 nt, Human
caaaucacagaaagacaagacacugucu

SEQ ID NO: 827069 - RNA, 23 nt, Human
cacccuugagcuugggaucacuu

SEQ ID NO: 827070 - RNA, 20 nt, Human
caugugaauaaguaaaguau

SEQ ID NO: 827071 - RNA, 26 nt, Human
ccagggcggaggaucagucccaaaga

SEQ ID NO: 827072 - RNA, 19 nt, Human
ccuugagcuugggaucacu

SEQ ID NO: 827073 - RNA, 22 nt, Human
cuccucuacaaaucacagaaag

SEQ ID NO: 827074 - RNA, 18 nt, Human
cuggacacgaggggcugu

SEQ ID NO: 827075 - RNA, 23 nt, Human
cuuggggguauggaagguucugg

SEQ ID NO: 827076 - RNA, 24 nt, Human
ggagaacaagcccuccucuacaaa

SEQ ID NO: 827077 - RNA, 21 nt, Human
ggagcagauggaggcuuucgg

SEQ ID NO: 827078 - RNA, 21 nt, Human
ggaggaucagucccaaagaca

SEQ ID NO: 827079 - RNA, 19 nt, Human
guaaaguauuggggauuca

SEQ ID NO: 827080 - RNA, 19 nt, Human
gucuuggggguauggaagg

SEQ ID NO: 827081 - RNA, 21 nt, Human
uacaaaucacagaaagacaag

SEQ ID NO: 827082 - RNA, 22 nt, Human
ucagucccaaagacaccuugaa

SEQ ID NO: 827083 - RNA, 19 nt, Human
ucccaaagacaccuugaag

SEQ ID NO: 827084 - RNA, 22 nt, Human
uccucuacaaaucacagaaaga

SEQ ID NO: 827085 - RNA, 22 nt, Human
uggaagguucuggacacgaggg

SEQ ID NO: 827086 - RNA, 18 nt, Human
ugucuuggggguauggaa

SEQ ID NO: 827087 - RNA, 24 nt, Human
uugagcuugggaucacuuaguugu

SEQ ID NO: 827088 - RNA, 21 nt, Human
aggcuucaguguauugcucug

SEQ ID NO: 827089 - RNA, 26 nt, Human
auaaugacuaaggcugauguagacac

SEQ ID NO: 827090 - RNA, 20 nt, Human
caccugaaaaugugggugag

SEQ ID NO: 827091 - RNA, 20 nt, Human
ccaggaauucuuaaaggucg

SEQ ID NO: 827092 - RNA, 28 nt, Human
gcaaaguccaccccaggaauucuuaaag

SEQ ID NO: 827093 - RNA, 25 nt, Human
uaaaaacaccagauagauuggagac

SEQ ID NO: 827094 - RNA, 23 nt, Human
uacaccaggcuguauccagaugg

SEQ ID NO: 827095 - RNA, 24 nt, Human
uccauaaugacuaaggccgggguc

SEQ ID NO: 827096 - RNA, 18 nt, Human
ugaaaaugugggugaggg

SEQ ID NO: 827097 - RNA, 19 nt, Human
ugacaacagugagcaacac

SEQ ID NO: 827098 - RNA, 28 nt, Human
ugacaacagugagcaacacauugcaaaa

SEQ ID NO: 827099 - RNA, 21 nt, Human
ugcucugugggggcauugggg

SEQ ID NO: 827100 - RNA, 19 nt, Human
uguagaauguguuugcaaa

SEQ ID NO: 827101 - RNA, 23 nt, Human
uuaaaggucgauuuacuauccau

SEQ ID NO: 827102 - RNA, 23 nt, Human
uuauugacaacagugagcaacac

SEQ ID NO: 827103 - RNA, 22 nt, Human
uucaguguauugcucugugggg

SEQ ID NO: 827104 - RNA, 19 nt, Human
uuuuuuuuuuuuuugccag

SEQ ID NO: 827105 - RNA, 22 nt, Human
uuuuuuuuuuuuuuuugccagg

SEQ ID NO: 827106 - RNA, 18 nt, Human
uuuuuuuuuuuuuuuuug

SEQ ID NO: 827107 - RNA, 22 nt, Human
uuuuuuuuuuuuuuuuugccag

SEQ ID NO: 827108 - RNA, 21 nt, Human
agacagaagggaggucuccaa

SEQ ID NO: 827109 - RNA, 22 nt, Human
agacagaagggaggucuccaau

SEQ ID NO: 827110 - RNA, 24 nt, Human
agguggguuuuuguugaguugaga

SEQ ID NO: 827111 - RNA, 20 nt, Human
cagccaccucacggaaccug

SEQ ID NO: 827112 - RNA, 18 nt, Human
gacauugggcagccaccu

SEQ ID NO: 827113 - RNA, 24 nt, Human
gggauggccuuagccuugauguag

SEQ ID NO: 827114 - RNA, 18 nt, Human
uccaaugguacccaaaug

SEQ ID NO: 827115 - RNA, 18 nt, Human
ugcuaagccagaauaaag

SEQ ID NO: 827116 - RNA, 21 nt, Human
ugggagguggguuuuuguuga

SEQ ID NO: 827117 - RNA, 24 nt, Human
ugggagguggguuuuuguugaguu

SEQ ID NO: 827118 - RNA, 20 nt, Human
uuuuuuuuuuuuuuuuugcu

SEQ ID NO: 827119 - RNA, 27 nt, Human
uuuuuuuuuuuuuuuuuuuuuuugggg

SEQ ID NO: 827120 - RNA, 22 nt, Human
aaauacccaguacaagaaacaa

SEQ ID NO: 827121 - RNA, 22 nt, Human
aggaagcaauaugaucaagaac

SEQ ID NO: 827122 - RNA, 19 nt, Human
aggcaagugaauacugaag

SEQ ID NO: 827123 - RNA, 22 nt, Human
auacccaguacaagaaacaaga

SEQ ID NO: 827124 - RNA, 27 nt, Human
auacuuuucuuuuuuucccccauuaaa

SEQ ID NO: 827125 - RNA, 23 nt, Human
auuggaaaacccaccaagaaauu

SEQ ID NO: 827126 - RNA, 24 nt, Human
caccaagaaauuuucuucuaugaa

SEQ ID NO: 827127 - RNA, 18 nt, Human
cuggcaaacuacugaggc

SEQ ID NO: 827128 - RNA, 21 nt, Human
gaaacaagagccaggaagcaa

SEQ ID NO: 827129 - RNA, 24 nt, Human
gcuaauaaaacucauucaccugcc

SEQ ID NO: 827130 - RNA, 18 nt, Human
ggaaaacccaccaagaaa

SEQ ID NO: 827131 - RNA, 22 nt, Human
ggaagcaauaugaucaagaaca

SEQ ID NO: 827132 - RNA, 19 nt, Human
uaugaaaauacccaguaca

SEQ ID NO: 827133 - RNA, 18 nt, Human
ucaccugcccacaggaac

SEQ ID NO: 827134 - RNA, 23 nt, Human
ucccccauuaaaaccaaagguug

SEQ ID NO: 827135 - RNA, 23 nt, Human
ugcccacaggaaccaaaugguuu

SEQ ID NO: 827136 - RNA, 21 nt, Human
uuuucuuuuuuucccccauuc

SEQ ID NO: 827137 - RNA, 22 nt, Human
uuuuuuuuuuuuuuuuugccag

SEQ ID NO: 827138 - RNA, 27 nt, Human
uuuuuuuuuuuuuuuuuuuuuuugggg

SEQ ID NO: 827139 - RNA, 24 nt, Human
aacagcuucaggaagcuauaggca

SEQ ID NO: 827140 - RNA, 23 nt, Human
aagauaccacccaagacugaaaa

SEQ ID NO: 827141 - RNA, 24 nt, Human
aagcuauaggcauccacugauuca

SEQ ID NO: 827142 - RNA, 19 nt, Human
acagaauucccaaaccacc

SEQ ID NO: 827143 - RNA, 20 nt, Human
agaaagagacacuuuaauau

SEQ ID NO: 827144 - RNA, 20 nt, Human
agaaagauaccacccaagac

SEQ ID NO: 827145 - RNA, 24 nt, Human
auaccacccaagacugaaaacaga

SEQ ID NO: 827146 - RNA, 22 nt, Human
cagaaagauaccacccaagacu

SEQ ID NO: 827147 - RNA, 19 nt, Human
cagaauucccaaaccaccc

SEQ ID NO: 827148 - RNA, 21 nt, Human
cagaauucccaaaccacccac

SEQ ID NO: 827149 - RNA, 21 nt, Human
ccaaaccacccacagaaagag

SEQ ID NO: 827150 - RNA, 19 nt, Human
ccaauuucuaaagcagagu

SEQ ID NO: 827151 - RNA, 20 nt, Human
ccacccaagacugaaaacag

SEQ ID NO: 827152 - RNA, 24 nt, Human
cccaaaccacccacagaaagagac

SEQ ID NO: 827153 - RNA, 19 nt, Human
cuaaagcuucuauguugac

SEQ ID NO: 827154 - RNA, 22 nt, Human
ucaggcacugagcaaaguagcc

SEQ ID NO: 827155 - RNA, 22 nt, Human
ucuaaagcagaguacauuaguu

SEQ ID NO: 827156 - RNA, 22 nt, Human
ucuuuuuuuuugcaggggguga

SEQ ID NO: 827157 - RNA, 21 nt, Human
ugaaaacagaauucccaaacc

SEQ ID NO: 827158 - RNA, 25 nt, Human
ugaaaacagaauucccaaaccaccc

SEQ ID NO: 827159 - RNA, 21 nt, Human
ugagauaggugaaugcuaaag

SEQ ID NO: 827160 - RNA, 25 nt, Human
ugagauaggugaaugcuaaagcuuc

SEQ ID NO: 827161 - RNA, 21 nt, Human
ugauugugguaguaccauccu

SEQ ID NO: 827162 - RNA, 23 nt, Human
uugaaaguuucuuggucucuuuu

SEQ ID NO: 827163 - RNA, 20 nt, Human
uugcagggggugauuguggu

SEQ ID NO: 827164 - RNA, 18 nt, Human
uuuuuuuuuuuuuuuuug

SEQ ID NO: 827165 - RNA, 19 nt, Human
uuuuuuuuuuuuuuuuugu

SEQ ID NO: 827166 - RNA, 19 nt, Human
aggauaauaaagcugaugg

SEQ ID NO: 827167 - RNA, 21 nt, Human
aggucugaaugcugggaagag

SEQ ID NO: 827168 - RNA, 23 nt, Human
cacauggacaaauugauauaaau

SEQ ID NO: 827169 - RNA, 21 nt, Human
cauaacagucagagacuuaga

SEQ ID NO: 827170 - RNA, 22 nt, Human
cugaaugcugggaagagaucca

SEQ ID NO: 827171 - RNA, 22 nt, Human
gaugcccuuucaccaguuacuu

SEQ ID NO: 827172 - RNA, 22 nt, Human
uagucuaacugcaucaugcauc

SEQ ID NO: 827173 - RNA, 21 nt, Human
ucaaaucaagcauaacaguca

SEQ ID NO: 827174 - RNA, 18 nt, Human
ucugaggucugaaugcug

SEQ ID NO: 827175 - RNA, 18 nt, Human
ugacuggcucaugguuga

SEQ ID NO: 827176 - RNA, 21 nt, Human
uggaauaacaggauaauaaag

SEQ ID NO: 827177 - RNA, 21 nt, Human
uggaugcccuuucaccaguua

SEQ ID NO: 827178 - RNA, 21 nt, Human
ugggaagagauccaugggaaa

SEQ ID NO: 827179 - RNA, 18 nt, Human
ugggauggugacuggcuc

SEQ ID NO: 827180 - RNA, 21 nt, Human
ugggauggugacuggcucaug

SEQ ID NO: 827181 - RNA, 23 nt, Human
uuuuuuuuuuuuuuuuuuacuga

SEQ ID NO: 827182 - RNA, 20 nt, Human
agggaguuuggacaaaaggu

SEQ ID NO: 827183 - RNA, 21 nt, Human
cagaauuucuaaggaugaggu

SEQ ID NO: 827184 - RNA, 26 nt, Human
caugaugaauaaauguccugaaguca

SEQ ID NO: 827185 - RNA, 21 nt, Human
cuguggcccuacaaaugaugg

SEQ ID NO: 827186 - RNA, 23 nt, Human
gaaggaagggaguuuggacaaaa

SEQ ID NO: 827187 - RNA, 19 nt, Human
gaggugggaggauguugga

SEQ ID NO: 827188 - RNA, 19 nt, Human
gauguuggaggacaauuug

SEQ ID NO: 827189 - RNA, 29 nt, Human
ggacaaaagguagaaugcaaagggacccc

SEQ ID NO: 827190 - RNA, 19 nt, Human
ucagaggguggagguucuc

SEQ ID NO: 827191 - RNA, 21 nt, Human
ucagugccaauagaauagagg

SEQ ID NO: 827192 - RNA, 25 nt, Human
ugagagccuucaucuguaggaaagg

SEQ ID NO: 827193 - RNA, 26 nt, Human
uggaggacaauuugucaauuuauuag

SEQ ID NO: 827194 - RNA, 18 nt, Human
ugggaggauguuggagga

SEQ ID NO: 827195 - RNA, 21 nt, Human
ugucaaugaauuccuuuggaa

SEQ ID NO: 827196 - RNA, 27 nt, Human
uguuggaggacaauuugucgucucugg

SEQ ID NO: 827197 - RNA, 20 nt, Human
uuccuuaggcaugaugaaua

SEQ ID NO: 827198 - RNA, 24 nt, Human
uucucgguggguuuccaggagagu

SEQ ID NO: 827199 - RNA, 20 nt, Human
agcaggaggagcuacugcuc

SEQ ID NO: 827200 - RNA, 19 nt, Human
agcaggugguccuguagca

SEQ ID NO: 827201 - RNA, 18 nt, Human
agcugggguggcagcagg

SEQ ID NO: 827202 - RNA, 19 nt, Human
aggaaggcuggcagcagcu

SEQ ID NO: 827203 - RNA, 21 nt, Human
caagaaugcugguugaugaga

SEQ ID NO: 827204 - RNA, 24 nt, Human
cagcagcaagaagcacuagagcag

SEQ ID NO: 827205 - RNA, 19 nt, Human
cagcagcugaagccacagc

SEQ ID NO: 827206 - RNA, 18 nt, Human
cggcagcacauggucugg

SEQ ID NO: 827207 - RNA, 24 nt, Human
cucauagaugagcuacaucaagaa

SEQ ID NO: 827208 - RNA, 24 nt, Human
cugaagccacagcaggaggagcua

SEQ ID NO: 827209 - RNA, 24 nt, Human
cugggguggcagcaggugguccuu

SEQ ID NO: 827210 - RNA, 22 nt, Human
gagcagguugggcggcagcaca

SEQ ID NO: 827211 - RNA, 21 nt, Human
gaggguggagguucugggugg

SEQ ID NO: 827212 - RNA, 21 nt, Human
gaugagaaucuggugagucca

SEQ ID NO: 827213 - RNA, 24 nt, Human
gcagcagcuggaaaugcaauagcu

SEQ ID NO: 827214 - RNA, 21 nt, Human
ggcggcagcacauggucuggc

SEQ ID NO: 827215 - RNA, 22 nt, Human
gggcggcagcacauggucuggc

SEQ ID NO: 827216 - RNA, 18 nt, Human
ggucuggcagcaguuggg

SEQ ID NO: 827217 - RNA, 19 nt, Human
uaacucagcucauagauga

SEQ ID NO: 827218 - RNA, 21 nt, Human
uagcuccauaugagaaauuau

SEQ ID NO: 827219 - RNA, 25 nt, Human
ucauuugguagagagguaaaaugug

SEQ ID NO: 827220 - RNA, 25 nt, Human
ugacagccucagcagcaagaagcac

SEQ ID NO: 827221 - RNA, 19 nt, Human
uggaauagcuccauaugag

SEQ ID NO: 827222 - RNA, 19 nt, Human
uggguggguuuccaggaag

SEQ ID NO: 827223 - RNA, 19 nt, Human
ugguugaugagaaucuggu

SEQ ID NO: 827224 - RNA, 18 nt, Human
uuggaacugaaguuuucc

SEQ ID NO: 827225 - RNA, 23 nt, Human
uuugguagagagguaaaaugugg

SEQ ID NO: 827226 - RNA, 21 nt, Human
uuuuuuuuuuuuuuuuuauuu

SEQ ID NO: 827227 - RNA, 23 nt, Human
aaaaauucuggcaaacuugaaca

SEQ ID NO: 827228 - RNA, 22 nt, Human
aaacagagacaaagagagaaca

SEQ ID NO: 827229 - RNA, 22 nt, Human
aaacuugaacaaacagagacaa

SEQ ID NO: 827230 - RNA, 19 nt, Human
agaggauuggaauaauuuc

SEQ ID NO: 827231 - RNA, 20 nt, Human
agcaggagagcaugggaggg

SEQ ID NO: 827232 - RNA, 18 nt, Human
agggagaaagcaggagag

SEQ ID NO: 827233 - RNA, 20 nt, Human
agggagagaugagccagggc

SEQ ID NO: 827234 - RNA, 22 nt, Human
augggcucauuggaaacaugaa

SEQ ID NO: 827235 - RNA, 22 nt, Human
caaacagagacaaagagagaac

SEQ ID NO: 827236 - RNA, 18 nt, Human
caaauaauauguuugaaa

SEQ ID NO: 827237 - RNA, 23 nt, Human
cacccugcugaaugacaucaauc

SEQ ID NO: 827238 - RNA, 20 nt, Human
cagaauguucucacagaguc

SEQ ID NO: 827239 - RNA, 20 nt, Human
cagcacagaagaauggucua

SEQ ID NO: 827240 - RNA, 20 nt, Human
caugacuggaagagaaagaa

SEQ ID NO: 827241 - RNA, 26 nt, Human
cuaccuuuccaagagaaaagaaugac

SEQ ID NO: 827242 - RNA, 21 nt, Human
gaaaggcugacagacaaauaa

SEQ ID NO: 827243 - RNA, 21 nt, Human
gaacagggagaaagcaggaga

SEQ ID NO: 827244 - RNA, 23 nt, Human
gacaaagagagaacagggagaaa

SEQ ID NO: 827245 - RNA, 20 nt, Human
ggcugacagacaaauaauau

SEQ ID NO: 827246 - RNA, 19 nt, Human
guccacccugcugaaugac

SEQ ID NO: 827247 - RNA, 20 nt, Human
uaccucacugggaaggauau

SEQ ID NO: 827248 - RNA, 18 nt, Human
ucaaucccacuccaugug

SEQ ID NO: 827249 - RNA, 21 nt, Human
ucaaucccacuccaugugucc

SEQ ID NO: 827250 - RNA, 20 nt, Human
ucauuggaaacaugaagucc

SEQ ID NO: 827251 - RNA, 20 nt, Human
uccaagagaaaagaaugacu

SEQ ID NO: 827252 - RNA, 21 nt, Human
ucuggcaaacuugaacaaaca

SEQ ID NO: 827253 - RNA, 24 nt, Human
ugaacaaacagagacaaagagaga

SEQ ID NO: 827254 - RNA, 21 nt, Human
ugacuggaagagaaagaaagc

SEQ ID NO: 827255 - RNA, 19 nt, Human
ugggauggugaugggcuca

SEQ ID NO: 827256 - RNA, 23 nt, Human
ugugaacacaauaaagauaaaga

SEQ ID NO: 827257 - RNA, 25 nt, Human
uuucauauuuggugccaugacugga

SEQ ID NO: 827258 - RNA, 23 nt, Human
uuuuuuuuuuuuuuuucuaaaug

SEQ ID NO: 827259 - RNA, 19 nt, Human
cauaguguuuggugagcau

SEQ ID NO: 827260 - RNA, 21 nt, Human
gaggguggagguucugggugg

SEQ ID NO: 827261 - RNA, 23 nt, Human
uaaaggcaggugaguauagguga

SEQ ID NO: 827262 - RNA, 20 nt, Human
uagaggguagcaacauagug

SEQ ID NO: 827263 - RNA, 18 nt, Human
ugcugguuaauaaaggca

SEQ ID NO: 827264 - RNA, 19 nt, Human
uggguggauuuccaggaag

SEQ ID NO: 827265 - RNA, 18 nt, Human
ugugauaaauuaugguag

SEQ ID NO: 827266 - RNA, 24 nt, Human
uucacagguggaucauaucaagaa

SEQ ID NO: 827267 - RNA, 21 nt, Human
uuuaagauagaggaauagcuc

SEQ ID NO: 827268 - RNA, 21 nt, Human
uuuuuuuuuuuuuuuuuauuu

SEQ ID NO: 827269 - RNA, 20 nt, Human
agcaggaggagcuacugcuc

SEQ ID NO: 827270 - RNA, 19 nt, Human
agcaggugguccuguagca

SEQ ID NO: 827271 - RNA, 18 nt, Human
agcugggguggcagcagg

SEQ ID NO: 827272 - RNA, 19 nt, Human
aggaaggcuggcagcagcu

SEQ ID NO: 827273 - RNA, 20 nt, Human
aggguggagguucugggugg

SEQ ID NO: 827274 - RNA, 21 nt, Human
caagaaugcugguugaugaga

SEQ ID NO: 827275 - RNA, 24 nt, Human
cagcagcaagaagcacuagagcag

SEQ ID NO: 827276 - RNA, 19 nt, Human
cagcagcugaagccacagc

SEQ ID NO: 827277 - RNA, 18 nt, Human
cggcagcacauggucugg

SEQ ID NO: 827278 - RNA, 24 nt, Human
cucauagaugagcuacaucaagaa

SEQ ID NO: 827279 - RNA, 24 nt, Human
cugaagccacagcaggaggagcua

SEQ ID NO: 827280 - RNA, 24 nt, Human
cugggguggcagcaggugguccuu

SEQ ID NO: 827281 - RNA, 25 nt, Human
gagcagguugggcggcagcacaugg

SEQ ID NO: 827282 - RNA, 21 nt, Human
gaugagaaucuggugagucca

SEQ ID NO: 827283 - RNA, 24 nt, Human
gcagcagcuggaaaugcaauagcu

SEQ ID NO: 827284 - RNA, 21 nt, Human
ggcggcagcacauggucuggc

SEQ ID NO: 827285 - RNA, 22 nt, Human
gggcggcagcacauggucuggc

SEQ ID NO: 827286 - RNA, 18 nt, Human
ggucuggcagcaguuggg

SEQ ID NO: 827287 - RNA, 19 nt, Human
uaacucagcucauagauga

SEQ ID NO: 827288 - RNA, 19 nt, Human
uacaacuuauguucauuug

SEQ ID NO: 827289 - RNA, 21 nt, Human
uagcuccauaugagaaauuau

SEQ ID NO: 827290 - RNA, 20 nt, Human
ucagagcaaauuacaacuua

SEQ ID NO: 827291 - RNA, 25 nt, Human
ucauuugguagagagguaaaaugug

SEQ ID NO: 827292 - RNA, 25 nt, Human
ugacagccucagcagcaagaagcac

SEQ ID NO: 827293 - RNA, 19 nt, Human
uggaauagcuccauaugag

SEQ ID NO: 827294 - RNA, 19 nt, Human
ugguugaugagaaucuggu

SEQ ID NO: 827295 - RNA, 18 nt, Human
uuggaacugaaguuuucc

SEQ ID NO: 827296 - RNA, 19 nt, Human
uugggcggcagcacauggu

SEQ ID NO: 827297 - RNA, 23 nt, Human
uuugguagagagguaaaaugugg

SEQ ID NO: 827298 - RNA, 20 nt, Human
aaaaauaacugcauuggggc

SEQ ID NO: 827299 - RNA, 21 nt, Human
agggaaguguucauuuuucca

SEQ ID NO: 827300 - RNA, 20 nt, Human
cuagaagagcugaaugucca

SEQ ID NO: 827301 - RNA, 25 nt, Human
cugucauuuccuagaagagcugaau

SEQ ID NO: 827302 - RNA, 21 nt, Human
gaggguggagguucugggugg

SEQ ID NO: 827303 - RNA, 24 nt, Human
guggcuguuuauuaauacaugaaa

SEQ ID NO: 827304 - RNA, 21 nt, Human
ugaagacauucauaguaugac

SEQ ID NO: 827305 - RNA, 19 nt, Human
uuuuuuuuuuagggaagug

SEQ ID NO: 827306 - RNA, 30 nt, Human; identical to SEQ ID NO: 494705

SEQ ID NO: 827307 - RNA, 20 nt, Human
aacggggaggaucugggugg

SEQ ID NO: 827308 - RNA, 22 nt, Human
acaaagcauaagaaauucaccc

SEQ ID NO: 827309 - RNA, 18 nt, Human
accucacugagaaggaga

SEQ ID NO: 827310 - RNA, 20 nt, Human
accuuaaagugauaaagaaa

SEQ ID NO: 827311 - RNA, 19 nt, Human
agaaaaagaaagcaaggga

SEQ ID NO: 827312 - RNA, 22 nt, Human
agaaaaagaaagcaagggaggg

SEQ ID NO: 827313 - RNA, 18 nt, Human
agaagaaaaagaaagcaa

SEQ ID NO: 827314 - RNA, 21 nt, Human
agaagaaaaagaaagcaaggg

SEQ ID NO: 827315 - RNA, 23 nt, Human
agaagaaaaagaaagcaagggag

SEQ ID NO: 827316 - RNA, 19 nt, Human
agaauacaauuggguggcu

SEQ ID NO: 827317 - RNA, 19 nt, Human
agaauguucucacagaguc

SEQ ID NO: 827318 - RNA, 22 nt, Human
agggucuacaucugugggccag

SEQ ID NO: 827319 - RNA, 21 nt, Human
agguccauccuauugaaugac

SEQ ID NO: 827320 - RNA, 21 nt, Human
agugauaaagaaaauaaggaa

SEQ ID NO: 827321 - RNA, 22 nt, Human
agugauaaagaaaauaaggaaa

SEQ ID NO: 827322 - RNA, 21 nt, Human
cacagagucagugaaauggug

SEQ ID NO: 827323 - RNA, 21 nt, Human
cagagucagugaaaugguggu

SEQ ID NO: 827324 - RNA, 22 nt, Human
cagauaauaucuaccucacuga

SEQ ID NO: 827325 - RNA, 22 nt, Human
cccuaggagaaacacagaauac

SEQ ID NO: 827326 - RNA, 21 nt, Human
uaagaaauucacccuaggaga

SEQ ID NO: 827327 - RNA, 25 nt, Human
ucagugaaaugguggugggcucuuu

SEQ ID NO: 827328 - RNA, 19 nt, Human
ugagaaggagaaucuguac

SEQ ID NO: 827329 - RNA, 22 nt, Human
ugccaccaccagaagaaaaaga

SEQ ID NO: 827330 - RNA, 20 nt, Human
ugugggccaguggugaaggg

SEQ ID NO: 827331 - RNA, 22 nt, Human
uugaaugacaucaaccccacuu

SEQ ID NO: 827332 - RNA, 25 nt, Human
uuuuuuuuuuuuuuuuuucuuaagg

SEQ ID NO: 827333 - RNA, 19 nt, Human
aaaaaaaagauugcaaaga

SEQ ID NO: 827334 - RNA, 23 nt, Human
aaacauguagagaauucauaaaa

SEQ ID NO: 827335 - RNA, 19 nt, Human
aaccuaaauuccuuagaag

SEQ ID NO: 827336 - RNA, 18 nt, Human
aagaaagaaggauacaag

SEQ ID NO: 827337 - RNA, 20 nt, Human
aagaagaaagaaggauacaa

SEQ ID NO: 827338 - RNA, 25 nt, Human
aagauuuuaaacauguagagaauuc

SEQ ID NO: 827339 - RNA, 21 nt, Human
acaaaaaaaagauugcaaaga

SEQ ID NO: 827340 - RNA, 19 nt, Human
agaaagaaggauacaagaa

SEQ ID NO: 827341 - RNA, 27 nt, Human
agaugaagcuggcacaugauccacaag

SEQ ID NO: 827342 - RNA, 22 nt, Human
agcagcaaauuaaauuaguccc

SEQ ID NO: 827343 - RNA, 20 nt, Human
aucaugaaaagaagaaagaa

SEQ ID NO: 827344 - RNA, 24 nt, Human
augaaaagaagaaagaaggauaca

SEQ ID NO: 827345 - RNA, 25 nt, Human
ccucccucaagcagauuuccaagau

SEQ ID NO: 827346 - RNA, 22 nt, Human
gauauugaaaacaaaaaaaaga

SEQ ID NO: 827347 - RNA, 18 nt, Human
guugugugaggauggugg

SEQ ID NO: 827348 - RNA, 20 nt, Human
uaccagggacacaacacaaa

SEQ ID NO: 827349 - RNA, 18 nt, Human
ucccucaagcagauuucc

SEQ ID NO: 827350 - RNA, 18 nt, Human
ugaaaagaagaaagaagg

SEQ ID NO: 827351 - RNA, 20 nt, Human
ugacucaaacuugagaacag

SEQ ID NO: 827352 - RNA, 19 nt, Human
uggcacaugauccacaagg

SEQ ID NO: 827353 - RNA, 24 nt, Human
uuagucccccaaaagaugagucag

SEQ ID NO: 827354 - RNA, 27 nt, Human
uuuuuuuuuuuuuuuuuuuuuuugggg

SEQ ID NO: 827355 - RNA, 24 nt, Human
aaaaugaaaauauaauugcaaaga

SEQ ID NO: 827356 - RNA, 23 nt, Human
aaacauguagagaauucauaaaa

SEQ ID NO: 827357 - RNA, 19 nt, Human
aaccuaaauuccuuagaag

SEQ ID NO: 827358 - RNA, 18 nt, Human
aagaaagaaggauacaag

SEQ ID NO: 827359 - RNA, 22 nt, Human
aagaagaaagaaggauacaaga

SEQ ID NO: 827360 - RNA, 25 nt, Human
aagauuuuaaacauguagagaauuc

SEQ ID NO: 827361 - RNA, 18 nt, Human
aaucucugcuaccagaga

SEQ ID NO: 827362 - RNA, 24 nt, Human
acccaaaguuaucgugaaaagaag

SEQ ID NO: 827363 - RNA, 19 nt, Human
agaaagaaggauacaagaa

SEQ ID NO: 827364 - RNA, 18 nt, Human
agaagcaaagaaugaagc

SEQ ID NO: 827365 - RNA, 27 nt, Human
agacgaagcuggcacaugauccacaag

SEQ ID NO: 827366 - RNA, 19 nt, Human
agggauggagggugggcuu

SEQ ID NO: 827367 - RNA, 20 nt, Human
agguuguugugugaggaugg

SEQ ID NO: 827368 - RNA, 21 nt, Human
cagcagcaaaguaaauuaguc

SEQ ID NO: 827369 - RNA, 23 nt, Human
caugacuccaaauuaagaacaga

SEQ ID NO: 827370 - RNA, 27 nt, Human
cccaaaguuaucgugaaaagaagaaag

SEQ ID NO: 827371 - RNA, 25 nt, Human
ccucccucaagcagauucccaagau

SEQ ID NO: 827372 - RNA, 19 nt, Human
cuaaauuccuuagaagcaa

SEQ ID NO: 827373 - RNA, 19 nt, Human
gaaaauauaauugcaaaga

SEQ ID NO: 827374 - RNA, 22 nt, Human
gauacaagaaccaugagaagga

SEQ ID NO: 827375 - RNA, 18 nt, Human
gggaaugaggaugaagua

SEQ ID NO: 827376 - RNA, 24 nt, Human
gugaaaagaagaaagaaggauaca

SEQ ID NO: 827377 - RNA, 23 nt, Human
uaaaaugaaaauauaauugcaaa

SEQ ID NO: 827378 - RNA, 19 nt, Human
uaaggaaagagggaaugag

SEQ ID NO: 827379 - RNA, 20 nt, Human
uaccagagacauaacccaaa

SEQ ID NO: 827380 - RNA, 26 nt, Human
ucagcagcaaaguaaauuagucccuc

SEQ ID NO: 827381 - RNA, 23 nt, Human
uccaaauuaagaacagacgaagc

SEQ ID NO: 827382 - RNA, 18 nt, Human
ucccucaaaagacaaguc

SEQ ID NO: 827383 - RNA, 18 nt, Human
ucccucaagcagauuccc

SEQ ID NO: 827384 - RNA, 18 nt, Human
ugaaaagaagaaagaagg

SEQ ID NO: 827385 - RNA, 24 nt, Human
uggagggugggcuucuguuaagag

SEQ ID NO: 827386 - RNA, 19 nt, Human
uggcacaugauccacaagg

SEQ ID NO: 827387 - RNA, 21 nt, Human
uguaaggaaagagggaaugag

SEQ ID NO: 827388 - RNA, 18 nt, Human
uuuuuuuuuuuuuuuuug

SEQ ID NO: 827389 - RNA, 19 nt, Human
aaccuaaauuccuuagaag

SEQ ID NO: 827390 - RNA, 18 nt, Human
aagaaagaaggauacaag

SEQ ID NO: 827391 - RNA, 20 nt, Human
aagaagaaagaaggauacaa

SEQ ID NO: 827392 - RNA, 25 nt, Human
aagauuuuaaacagguagagaauuc

SEQ ID NO: 827393 - RNA, 21 nt, Human
acccaaaguuaugaaaagaag

SEQ ID NO: 827394 - RNA, 19 nt, Human
agaaagaaggauacaagaa

SEQ ID NO: 827395 - RNA, 20 nt, Human
agaaaguuguugugugagga

SEQ ID NO: 827396 - RNA, 22 nt, Human
agucccccaaaagauaagucag

SEQ ID NO: 827397 - RNA, 23 nt, Human
augauugcaaagauuauugauca

SEQ ID NO: 827398 - RNA, 26 nt, Human
cagagaaugaagcucuugacuuuuga

SEQ ID NO: 827399 - RNA, 23 nt, Human
cagcagcaaauuaaauuaguccc

SEQ ID NO: 827400 - RNA, 24 nt, Human
cccaaaguuaugaaaagaagaaag

SEQ ID NO: 827401 - RNA, 18 nt, Human
cccucccucaaguagauu

SEQ ID NO: 827402 - RNA, 18 nt, Human
gaaaacaaaaauaugauu

SEQ ID NO: 827403 - RNA, 23 nt, Human
gaagcuggcacaugauccacaaa

SEQ ID NO: 827404 - RNA, 25 nt, Human
gaccaugacucaaaauugagaacac

SEQ ID NO: 827405 - RNA, 20 nt, Human
guguaaggaaaaagagaauc

SEQ ID NO: 827406 - RNA, 22 nt, Human
uaacccaaaguuaugaaaagaa

SEQ ID NO: 827407 - RNA, 20 nt, Human
uagcagaaacauaacccaaa

SEQ ID NO: 827408 - RNA, 22 nt, Human
uagcagaaacauaacccaaagu

SEQ ID NO: 827409 - RNA, 25 nt, Human
uaugaaaagaagaaagaaggauaca

SEQ ID NO: 827410 - RNA, 22 nt, Human
ucagggguagagggugggcuuc

SEQ ID NO: 827411 - RNA, 25 nt, Human
ucagggguagagggugggcuucugu

SEQ ID NO: 827412 - RNA, 18 nt, Human
ugaaaagaagaaagaagg

SEQ ID NO: 827413 - RNA, 18 nt, Human
ugagaccaugacucaaaa

SEQ ID NO: 827414 - RNA, 19 nt, Human
uggcacaugauccacaaag

SEQ ID NO: 827415 - RNA, 19 nt, Human
ugguagcagaaacauaacc

SEQ ID NO: 827416 - RNA, 21 nt, Human
uggugguucucuugggacuug

SEQ ID NO: 827417 - RNA, 24 nt, Human
uuagucccccaaaagauaagucag

SEQ ID NO: 827418 - RNA, 25 nt, Human
uuuuuuuuuuuuugaggaugguuca

SEQ ID NO: 827419 - RNA, 19 nt, Human
uuuuuuuuuuuuuugagga

SEQ ID NO: 827420 - RNA, 18 nt, Human
uuuuuuuuuuuuuuuuug

SEQ ID NO: 827421 - RNA, 21 nt, Human
uuuuuuuuuuuuuuuuugagg

SEQ ID NO: 827422 - RNA, 23 nt, Human
aaacaugcagagaauucauaaaa

SEQ ID NO: 827423 - RNA, 25 nt, Human
aagauuuuaaacaugcagagaauuc

SEQ ID NO: 827424 - RNA, 23 nt, Human
agaaaccuauauuccuuagaagc

SEQ ID NO: 827425 - RNA, 27 nt, Human
agacgaagcuggcacaugauccacaag

SEQ ID NO: 827426 - RNA, 22 nt, Human
agcagcaaauuaaauuaguccc

SEQ ID NO: 827427 - RNA, 22 nt, Human
cacaagauuuuaaacaugcaga

SEQ ID NO: 827428 - RNA, 18 nt, Human
gaucaugauuccaaauug

SEQ ID NO: 827429 - RNA, 22 nt, Human
ggacauaacucaaaguuaucau

SEQ ID NO: 827430 - RNA, 20 nt, Human
uaccaaggacauaacucaaa

SEQ ID NO: 827431 - RNA, 25 nt, Human
ucagggguagaggguggaguucugu

SEQ ID NO: 827432 - RNA, 23 nt, Human
uccaaauugagaacagacgaagc

SEQ ID NO: 827433 - RNA, 23 nt, Human
ugaaagcaugguggcugucagca

SEQ ID NO: 827434 - RNA, 21 nt, Human
ugaggaugguuaagaguuuau

SEQ ID NO: 827435 - RNA, 19 nt, Human
uggcacaugauccacaagg

SEQ ID NO: 827436 - RNA, 21 nt, Human
uggugguucucuugggacuug

SEQ ID NO: 827437 - RNA, 24 nt, Human
uuagucccccaaaagaugagucag

SEQ ID NO: 827438 - RNA, 18 nt, Human
uuuuuuuuuuuuuuuuug

SEQ ID NO: 827439 - RNA, 23 nt, Human
aaaagaaaacauaguugugaaga

SEQ ID NO: 827440 - RNA, 24 nt, Human
aagugaucauuaaaagaaggaagc

SEQ ID NO: 827441 - RNA, 20 nt, Human
acuuaaguuucuuaagugaa

SEQ ID NO: 827442 - RNA, 21 nt, Human
agaaaacauaguugugaagau

SEQ ID NO: 827443 - RNA, 20 nt, Human
agaaggaagcaggauacaag

SEQ ID NO: 827444 - RNA, 20 nt, Human
agaagguuguugugugaaga

SEQ ID NO: 827445 - RNA, 26 nt, Human
agauucuuaaucauuugcagcaacuu

SEQ ID NO: 827446 - RNA, 21 nt, Human
auuugggugagaacaugguug

SEQ ID NO: 827447 - RNA, 23 nt, Human
cagcaacuuaaguuucuuaagug

SEQ ID NO: 827448 - RNA, 21 nt, Human
cagcaguaagguaaauuaguc

SEQ ID NO: 827449 - RNA, 23 nt, Human
caguugagcagaagguuguugug

SEQ ID NO: 827450 - RNA, 19 nt, Human
ccuccaaaagauaagucag

SEQ ID NO: 827451 - RNA, 23 nt, Human
gaaaagaaaacauaguugugaag

SEQ ID NO: 827452 - RNA, 24 nt, Human
gaaaagaaaacauaguugugaaga

SEQ ID NO: 827453 - RNA, 19 nt, Human
gaacagaugaagcuggcac

SEQ ID NO: 827454 - RNA, 19 nt, Human
guuguucucuugggacuug

SEQ ID NO: 827455 - RNA, 21 nt, Human
ucacaagguauaagaaaaaga

SEQ ID NO: 827456 - RNA, 26 nt, Human
ucagcaguaagguaaauuaguccucc

SEQ ID NO: 827457 - RNA, 20 nt, Human
ugacucaaaauugagaacag

SEQ ID NO: 827458 - RNA, 18 nt, Human
ugagaccaugacucaaaa

SEQ ID NO: 827459 - RNA, 23 nt, Human
ugagcagaagguuguugugugaa

SEQ ID NO: 827460 - RNA, 23 nt, Human
aaaguuuauuaggcgauuugggg

SEQ ID NO: 827461 - RNA, 20 nt, Human
aaguagcccuaggcucagag

SEQ ID NO: 827462 - RNA, 22 nt, Human
agaagcagcagagagaacaaaa

SEQ ID NO: 827463 - RNA, 21 nt, Human
agagaacaaaacaccucguau

SEQ ID NO: 827464 - RNA, 18 nt, Human
agaggcagaacuggccca

SEQ ID NO: 827465 - RNA, 20 nt, Human
agggaccuggggugaggagg

SEQ ID NO: 827466 - RNA, 26 nt, Human
agguagaagcagcagagagaacaaaa

SEQ ID NO: 827467 - RNA, 20 nt, Human
cacagcuccaaccucugacc

SEQ ID NO: 827468 - RNA, 21 nt, Human
cagcuccaaccucugaccauc

SEQ ID NO: 827469 - RNA, 23 nt, Human
ccaccgaugguaguucugucuuc

SEQ ID NO: 827470 - RNA, 21 nt, Human
ccacugucacagcuccaaccu

SEQ ID NO: 827471 - RNA, 19 nt, Human
cggggugggguccgguggc

SEQ ID NO: 827472 - RNA, 23 nt, Human
gaugguaguucugucuucaugcu

SEQ ID NO: 827473 - RNA, 18 nt, Human
gcagggaggcaguggagc

SEQ ID NO: 827474 - RNA, 19 nt, Human
ggaccuggggugaggagga

SEQ ID NO: 827475 - RNA, 18 nt, Human
ggagagggaccuggggug

SEQ ID NO: 827476 - RNA, 19 nt, Human
uagaagcagcagagagaac

SEQ ID NO: 827477 - RNA, 23 nt, Human
uagaagcagcagagagaacaaaa

SEQ ID NO: 827478 - RNA, 19 nt, Human
uaggcucagagucagaccc

SEQ ID NO: 827479 - RNA, 20 nt, Human
ucacagcuccaaccucugac

SEQ ID NO: 827480 - RNA, 20 nt, Human
ucagaacucagacugacuac

SEQ ID NO: 827481 - RNA, 22 nt, Human
ugacuacaggagagggaccugg

SEQ ID NO: 827482 - RNA, 22 nt, Human
ugaggaggaucaaguagcccua

SEQ ID NO: 827483 - RNA, 24 nt, Human
ugcaauaaagguagaagcagcaga

SEQ ID NO: 827484 - RNA, 19 nt, Human
ugccacugucacagcucca

SEQ ID NO: 827485 - RNA, 21 nt, Human
ugucagagaggcagaacuggc

SEQ ID NO: 827486 - RNA, 20 nt, Human
uucaugcuauacuucugcug

SEQ ID NO: 827487 - RNA, 23 nt, Human
uuuuuuuuuuuuuuuugucugcu

SEQ ID NO: 827488 - RNA, 18 nt, Human
uuuuuuuuuuuuuuuuug

SEQ ID NO: 827489 - RNA, 19 nt, Human
uuuuuuuuuuuuuuuuugu

SEQ ID NO: 827490 - RNA, 21 nt, Human
aaugugagcucaggagaaaga

SEQ ID NO: 827491 - RNA, 24 nt, Human
aggcaaaggagggguccuaggggc

SEQ ID NO: 827492 - RNA, 25 nt, Human
agggaacacuggaggggaaugugga

SEQ ID NO: 827493 - RNA, 18 nt, Human
aggggauggguggagggg

SEQ ID NO: 827494 - RNA, 19 nt, Human
agggucugcacacagguga

SEQ ID NO: 827495 - RNA, 19 nt, Human
caaaaggagcuaaaggguu

SEQ ID NO: 827496 - RNA, 21 nt, Human
caaaggagggguccuaggggc

SEQ ID NO: 827497 - RNA, 19 nt, Human
cagcccacaccuccuccau

SEQ ID NO: 827498 - RNA, 23 nt, Human
cagcgugcauguuucaggcggug

SEQ ID NO: 827499 - RNA, 19 nt, Human
cagcuggggcagccccaca

SEQ ID NO: 827500 - RNA, 18 nt, Human
caggagagagaggcagag

SEQ ID NO: 827501 - RNA, 27 nt, Human
cauccuugucuucagcccuggugggag

SEQ ID NO: 827502 - RNA, 25 nt, Human
ccacaccuccuccaucuaugagcuc

SEQ ID NO: 827503 - RNA, 26 nt, Human
ccacagagcagaacuguggugugccc

SEQ ID NO: 827504 - RNA, 19 nt, Human
ccagggccuccaagucagc

SEQ ID NO: 827505 - RNA, 18 nt, Human
cccuggagccccaguggg

SEQ ID NO: 827506 - RNA, 21 nt, Human
cccuggaggaaagaaccgggg

SEQ ID NO: 827507 - RNA, 19 nt, Human
cccuggugggagugugaca

SEQ ID NO: 827508 - RNA, 23 nt, Human
ccuccaucuaugagcuccugagc

SEQ ID NO: 827509 - RNA, 21 nt, Human
ccugccaaugugagcucagga

SEQ ID NO: 827510 - RNA, 18 nt, Human
ccuguggugggagaggag

SEQ ID NO: 827511 - RNA, 25 nt, Human
cuaaaguaagggcagugugagcccu

SEQ ID NO: 827512 - RNA, 20 nt, Human
cuccuccaucuaugagcucc

SEQ ID NO: 827513 - RNA, 18 nt, Human
cuccugagccagggccuc

SEQ ID NO: 827514 - RNA, 20 nt, Human
cuccugagccagggccucca

SEQ ID NO: 827515 - RNA, 21 nt, Human
cuccuggaugucucggaucau

SEQ ID NO: 827516 - RNA, 23 nt, Human
cugccgucuguccccaccaucug

SEQ ID NO: 827517 - RNA, 19 nt, Human
cuggagccccagugggaca

SEQ ID NO: 827518 - RNA, 21 nt, Human
gaacauccuugucuucagccc

SEQ ID NO: 827519 - RNA, 22 nt, Human
gaauuuagagugggauuugggg

SEQ ID NO: 827520 - RNA, 19 nt, Human
gacaggcuuggcaugaggg

SEQ ID NO: 827521 - RNA, 19 nt, Human
gagaggagcugacuuugug

SEQ ID NO: 827522 - RNA, 24 nt, Human
gaggugggguuuuggaacauccuu

SEQ ID NO: 827523 - RNA, 19 nt, Human
gccagggccuccaagucag

SEQ ID NO: 827524 - RNA, 18 nt, Human
gccauggggcaggggcuc

SEQ ID NO: 827525 - RNA, 20 nt, Human
gcccuggaggaaagaaccgg

SEQ ID NO: 827526 - RNA, 20 nt, Human
gcugagggucugcacacagg

SEQ ID NO: 827527 - RNA, 21 nt, Human
gcuggggcagccccacaucac

SEQ ID NO: 827528 - RNA, 20 nt, Human
ggagcuaaaggguuggggaa

SEQ ID NO: 827529 - RNA, 23 nt, Human
ggaugauccacagagcagaacug

SEQ ID NO: 827530 - RNA, 24 nt, Human
ggcaggggcucugucuccuggaug

SEQ ID NO: 827531 - RNA, 23 nt, Human
ggcuuggcaugaggggcuucugg

SEQ ID NO: 827532 - RNA, 21 nt, Human
gugacucaugaggcaaaggag

SEQ ID NO: 827533 - RNA, 25 nt, Human
uaaaggaaauucacuuuucuuaggg

SEQ ID NO: 827534 - RNA, 22 nt, Human
uagcugagggucugcacacagg

SEQ ID NO: 827535 - RNA, 20 nt, Human
ucaggcgguguuaaaggaaa

SEQ ID NO: 827536 - RNA, 24 nt, Human
ucagggcagaggcccuggagcccc

SEQ ID NO: 827537 - RNA, 22 nt, Human
uccaagucagcuggggcagccc

SEQ ID NO: 827538 - RNA, 21 nt, Human
uccuccaucuaugagcuccug

SEQ ID NO: 827539 - RNA, 20 nt, Human
ucuacugcccaaaggccacc

SEQ ID NO: 827540 - RNA, 22 nt, Human
ucuaugagcuccugagccaggg

SEQ ID NO: 827541 - RNA, 21 nt, Human
ucucugccgucuguccccacc

SEQ ID NO: 827542 - RNA, 28 nt, Human
ucugcgguuaagagcaaugccggggucc

SEQ ID NO: 827543 - RNA, 23 nt, Human
ucugugcugagaggacauuggca

SEQ ID NO: 827544 - RNA, 24 nt, Human
ugacugauccugaaaucguggcac

SEQ ID NO: 827545 - RNA, 21 nt, Human
ugagcuccugagccagggccu

SEQ ID NO: 827546 - RNA, 25 nt, Human
ugaggaaacuuccaugggaugaucc

SEQ ID NO: 827547 - RNA, 22 nt, Human
ugcccauuugaccuuuuggggg

SEQ ID NO: 827548 - RNA, 21 nt, Human
uggaacauccuugucuucagc

SEQ ID NO: 827549 - RNA, 21 nt, Human
uggagggggaacugauuccau

SEQ ID NO: 827550 - RNA, 21 nt, Human
uggugggagugugacauccag

SEQ ID NO: 827551 - RNA, 18 nt, Human
uguacagaaggggauggg

SEQ ID NO: 827552 - RNA, 18 nt, Human
ugugcugagaggacauug

SEQ ID NO: 827553 - RNA, 18 nt, Human
uguggugggagaggagcu

SEQ ID NO: 827554 - RNA, 20 nt, Human
uucagggcagaggcccugga

SEQ ID NO: 827555 - RNA, 19 nt, Human
uugcccuuuguucuaggca

SEQ ID NO: 827556 - RNA, 23 nt, Human
uuggaauuuagagugggauuugg

SEQ ID NO: 827557 - RNA, 24 nt, Human
aagaggccagagaggcagggggaa

SEQ ID NO: 827558 - RNA, 24 nt, Human
agacaagaggccagagaggcaggg

SEQ ID NO: 827559 - RNA, 20 nt, Human
agacaggggaaggaaugggu

SEQ ID NO: 827560 - RNA, 19 nt, Human
agaggccagagaggcaggg

SEQ ID NO: 827561 - RNA, 21 nt, Human
aggcagaaggggcuccccugg

SEQ ID NO: 827562 - RNA, 21 nt, Human
aggggaaaagccagcgaugug

SEQ ID NO: 827563 - RNA, 24 nt, Human
caaguuuauuggaaaaggggagac

SEQ ID NO: 827564 - RNA, 20 nt, Human
cacaaggggaaaagccagcg

SEQ ID NO: 827565 - RNA, 20 nt, Human
cagaacacaaggggaaaagc

SEQ ID NO: 827566 - RNA, 23 nt, Human
ccagggaagcaaggcccuucucc

SEQ ID NO: 827567 - RNA, 22 nt, Human
ccccagccacagaccccuuucc

SEQ ID NO: 827568 - RNA, 20 nt, Human
cucagaacacaaggggaaaa

SEQ ID NO: 827569 - RNA, 18 nt, Human
gggaggggcugaaggcug

SEQ ID NO: 827570 - RNA, 18 nt, Human
ggggaggagccacuggug

SEQ ID NO: 827571 - RNA, 23 nt, Human
gugcuucuuccagggaagcaagg

SEQ ID NO: 827572 - RNA, 23 nt, Human
ucagaacacaaggggaaaagcca

SEQ ID NO: 827573 - RNA, 20 nt, Human
uccccagccacagaccccuu

SEQ ID NO: 827574 - RNA, 23 nt, Human
uccccuggcucucuuuugggcca

SEQ ID NO: 827575 - RNA, 20 nt, Human
ucuggcaggcagaaggggcu

SEQ ID NO: 827576 - RNA, 23 nt, Human
ugagacaggggaaggaauggguc

SEQ ID NO: 827577 - RNA, 18 nt, Human
uggcacgucuggcaggca

SEQ ID NO: 827578 - RNA, 20 nt, Human
uggcaggcagaaggggcucc

SEQ ID NO: 827579 - RNA, 22 nt, Human
uggcaggcagaaggggcucccc

SEQ ID NO: 827580 - RNA, 23 nt, Human
uggcaggcagaaggggcuccccu

SEQ ID NO: 827581 - RNA, 18 nt, Human
ugggaugaaaggugggga

SEQ ID NO: 827582 - RNA, 19 nt, Human
ugggaugaaagguggggag

SEQ ID NO: 827583 - RNA, 21 nt, Human
ugguggggcaguggcacgucu

SEQ ID NO: 827584 - RNA, 18 nt, Human
uguuuucagcugguggug

SEQ ID NO: 827585 - RNA, 19 nt, Human
uuuuuuuuuugcagguccc

SEQ ID NO: 827586 - RNA, 22 nt, Human
uuuuuuuuuuuugcagguccca

SEQ ID NO: 827587 - RNA, 18 nt, Human
uuuuuuuuuuuuuuuuug

SEQ ID NO: 827588 - RNA, 21 nt, Human
uuuuuuuuuuuuuuuuugcag

SEQ ID NO: 827589 - RNA, 22 nt, Human
uuuuuuuuuuuuuuuuugcagg

SEQ ID NO: 827590 - RNA, 23 nt, Human
uuuuuuuuuuuuuuuuugcaggu

SEQ ID NO: 827591 - RNA, 19 nt, Human
aagccaucucgggguuuag

SEQ ID NO: 827592 - RNA, 25 nt, Human
acacaggcagcccaccccacccaac

SEQ ID NO: 827593 - RNA, 23 nt, Human
acccaacccccaggccuccuugg

SEQ ID NO: 827594 - RNA, 23 nt, Human
acccugggggcagaagcaggagc

SEQ ID NO: 827595 - RNA, 28 nt, Human
agaaacagccggagagaagccgguaccc

SEQ ID NO: 827596 - RNA, 22 nt, Human
agaccgucaagcccagagccca

SEQ ID NO: 827597 - RNA, 19 nt, Human
agcccacgaacccuggggg

SEQ ID NO: 827598 - RNA, 19 nt, Human
agccguggagcugguucuu

SEQ ID NO: 827599 - RNA, 23 nt, Human
aggaacacaaagaguagugcaca

SEQ ID NO: 827600 - RNA, 19 nt, Human
aggaagagaaacagccgga

SEQ ID NO: 827601 - RNA, 24 nt, Human
aggaagagaaacagccggagagaa

SEQ ID NO: 827602 - RNA, 20 nt, Human
caacaacccaggaagagaaa

SEQ ID NO: 827603 - RNA, 20 nt, Human
caacccaggaagagaaacag

SEQ ID NO: 827604 - RNA, 24 nt, Human
caacccaggaagagaaacagccgg

SEQ ID NO: 827605 - RNA, 21 nt, Human
cacaacccugcaguggacagg

SEQ ID NO: 827606 - RNA, 23 nt, Human
cacaggcagcccaccccacccaa

SEQ ID NO: 827607 - RNA, 22 nt, Human
caggaagagaaacagccggaga

SEQ ID NO: 827608 - RNA, 22 nt, Human
cagggagaagccagcuuagcug

SEQ ID NO: 827609 - RNA, 21 nt, Human
caugcuggaguuacaccaaca

SEQ ID NO: 827610 - RNA, 18 nt, Human
ccacccaacccccaggcc

SEQ ID NO: 827611 - RNA, 22 nt, Human
ccaccccacccaacccccaggc

SEQ ID NO: 827612 - RNA, 23 nt, Human
ccaggaacacaaagaguagugca

SEQ ID NO: 827613 - RNA, 21 nt, Human
ccaggaagagaaacagccgga

SEQ ID NO: 827614 - RNA, 23 nt, Human
cccaacccccaggccuccuugga

SEQ ID NO: 827615 - RNA, 23 nt, Human
cccacccaacccccaggccuccc

SEQ ID NO: 827616 - RNA, 19 nt, Human
cccaccccacccaaccccc

SEQ ID NO: 827617 - RNA, 24 nt, Human
cccaccccacccaacccccaggcc

SEQ ID NO: 827618 - RNA, 21 nt, Human
cccacgaacccugggggcaga

SEQ ID NO: 827619 - RNA, 19 nt, Human
ccccacccaacccccaggc

SEQ ID NO: 827620 - RNA, 20 nt, Human
cccccaggccuccuuggagc

SEQ ID NO: 827621 - RNA, 22 nt, Human
ccucacaccacgagcaggggca

SEQ ID NO: 827622 - RNA, 27 nt, Human
ccucacaccacgagcaggggcaggagu

SEQ ID NO: 827623 - RNA, 20 nt, Human
cgggguuuagggagaggagu

SEQ ID NO: 827624 - RNA, 20 nt, Human
cgggguuuagggagaggagu

SEQ ID NO: 827625 - RNA, 22 nt, Human
cugguucuucucugggcagcag

SEQ ID NO: 827626 - RNA, 18 nt, Human
cuucucugggcagcagcu

SEQ ID NO: 827627 - RNA, 20 nt, Human
gaagagaaacagccggagag

SEQ ID NO: 827628 - RNA, 19 nt, Human
gacagaaauugggaggcag

SEQ ID NO: 827629 - RNA, 18 nt, Human
gagcaaaagagcaagugu

SEQ ID NO: 827630 - RNA, 20 nt, Human
gagcugguucuucucugggc

SEQ ID NO: 827631 - RNA, 19 nt, Human
gcagaaaggggagcuggag

SEQ ID NO: 827632 - RNA, 22 nt, Human
gcagcccaccccacccaacccc

SEQ ID NO: 827633 - RNA, 20 nt, Human
gcaggaguacggggaucauu

SEQ ID NO: 827634 - RNA, 25 nt, Human
gcagggagaagccagcuuagcugga

SEQ ID NO: 827635 - RNA, 21 nt, Human
gcccgccuguccgccugcacc

SEQ ID NO: 827636 - RNA, 20 nt, Human
gccguggagcugguucuucu

SEQ ID NO: 827637 - RNA, 25 nt, Human
gcuggaguuacaccaacaacccagu

SEQ ID NO: 827638 - RNA, 25 nt, Human
gcuuagcuggaacugcuaauggagc

SEQ ID NO: 827639 - RNA, 21 nt, Human
ggagaagccagcuuagcugga

SEQ ID NO: 827640 - RNA, 18 nt, Human
ggagaccgucaagcccag

SEQ ID NO: 827641 - RNA, 21 nt, Human
ggagccguggagcugguucuu

SEQ ID NO: 827642 - RNA, 20 nt, Human
ggcagaaaggggagcuggag

SEQ ID NO: 827643 - RNA, 20 nt, Human
gggggcagaagcaggagccg

SEQ ID NO: 827644 - RNA, 24 nt, Human
gugcacacaggcagcccaccccac

SEQ ID NO: 827645 - RNA, 23 nt, Human
uacauggcagaaaaauccuccaa

SEQ ID NO: 827646 - RNA, 25 nt, Human
ucaagcccagagcccacgaaccggg

SEQ ID NO: 827647 - RNA, 23 nt, Human
uccaaaggacagaaauugggagg

SEQ ID NO: 827648 - RNA, 18 nt, Human
uccaagaggacauggggc

SEQ ID NO: 827649 - RNA, 22 nt, Human
uccugguugggagcaaaagagc

SEQ ID NO: 827650 - RNA, 19 nt, Human
ucucugggcagcagcuguc

SEQ ID NO: 827651 - RNA, 24 nt, Human
ucucugggcagcagcugucugggg

SEQ ID NO: 827652 - RNA, 20 nt, Human
ucugggcagcagcugucugg

SEQ ID NO: 827653 - RNA, 28 nt, Human
ucugggcagcagcugucuggggcugggc

SEQ ID NO: 827654 - RNA, 22 nt, Human
ugaaaacccaggaacacaaaga

SEQ ID NO: 827655 - RNA, 19 nt, Human
ugcacacaggcagcccacc

SEQ ID NO: 827656 - RNA, 22 nt, Human
uggagcuugcagacacaacccu

SEQ ID NO: 827657 - RNA, 22 nt, Human
uggcaaguuuauugaaaaccca

SEQ ID NO: 827658 - RNA, 24 nt, Human
uggcagaaaaauccuccaagagga

SEQ ID NO: 827659 - RNA, 18 nt, Human
uggcagaaaggggagcug

SEQ ID NO: 827660 - RNA, 19 nt, Human
uggcagaaaggggagcugg

SEQ ID NO: 827661 - RNA, 21 nt, Human
uggcagaaaggggagcuggag

SEQ ID NO: 827662 - RNA, 21 nt, Human
ugggaggcagggagaagccag

SEQ ID NO: 827663 - RNA, 22 nt, Human
ugguugggagcaaaagagcaaa

SEQ ID NO: 827664 - RNA, 24 nt, Human
uugcaugcuggaguuacaccaaca

SEQ ID NO: 827665 - RNA, 21 nt, Human
aaacacagaucgagacaaccc

SEQ ID NO: 827666 - RNA, 19 nt, Human
aaagugcccuaaccagggg

SEQ ID NO: 827667 - RNA, 21 nt, Human
aacccagaaggcaaugcaccc

SEQ ID NO: 827668 - RNA, 22 nt, Human
aacccagaaggcaaugcaccca

SEQ ID NO: 827669 - RNA, 18 nt, Human
aagaaggagacccaggaa

SEQ ID NO: 827670 - RNA, 19 nt, Human
aagcaagcacacauuuucc

SEQ ID NO: 827671 - RNA, 21 nt, Human
aagcaagcacacauuuuccau

SEQ ID NO: 827672 - RNA, 19 nt, Human
aagcaggaaggcagucuga

SEQ ID NO: 827673 - RNA, 20 nt, Human
acacagaucgagacaaccca

SEQ ID NO: 827674 - RNA, 19 nt, Human
agaagguggagcuuccgug

SEQ ID NO: 827675 - RNA, 21 nt, Human
agacagucauaagaaggagac

SEQ ID NO: 827676 - RNA, 22 nt, Human
agccauggagucuucuuugaaa

SEQ ID NO: 827677 - RNA, 21 nt, Human
aggaaggcagucugagagaga

SEQ ID NO: 827678 - RNA, 19 nt, Human
aggcaaaaggaugccccac

SEQ ID NO: 827679 - RNA, 25 nt, Human
aggcaaugcacccauagacagucau

SEQ ID NO: 827680 - RNA, 20 nt, Human
agguggugcgggcggcagag

SEQ ID NO: 827681 - RNA, 22 nt, Human
agguggugcgggcggcagagug

SEQ ID NO: 827682 - RNA, 23 nt, Human
auaauacaaauuggauacaggua

SEQ ID NO: 827683 - RNA, 29 nt, Human
auccagaagauucuggaagcaagcacacu

SEQ ID NO: 827684 - RNA, 19 nt, Human
aucuggagcagccauggag

SEQ ID NO: 827685 - RNA, 21 nt, Human
augaacgggaaugaacaggca

SEQ ID NO: 827686 - RNA, 26 nt, Human
auugaaacacagaucgagacaaccca

SEQ ID NO: 827687 - RNA, 21 nt, Human
caaagugcccuaaccaggggc

SEQ ID NO: 827688 - RNA, 18 nt, Human
caacuaggaugcaucucc

SEQ ID NO: 827689 - RNA, 23 nt, Human
caagggggcaucuggagcagcca

SEQ ID NO: 827690 - RNA, 22 nt, Human
cagcugccaggaggacaacuag

SEQ ID NO: 827691 - RNA, 21 nt, Human
cagucugagagagaagcaaaa

SEQ ID NO: 827692 - RNA, 24 nt, Human
cagugcagugaugcaggcaggcag

SEQ ID NO: 827693 - RNA, 18 nt, Human
cauucuucccagccagga

SEQ ID NO: 827694 - RNA, 23 nt, Human
ccacccagaagguggagcuuccg

SEQ ID NO: 827695 - RNA, 21 nt, Human
ccagaagauucuggaagcaag

SEQ ID NO: 827696 - RNA, 24 nt, Human
ccagaagauucuggaagcaagcac

SEQ ID NO: 827697 - RNA, 23 nt, Human
cccaccugcacccagcaaggggg

SEQ ID NO: 827698 - RNA, 23 nt, Human
cccucuguaggaacauccagaag

SEQ ID NO: 827699 - RNA, 21 nt, Human
ccuaaccaggggcuguaggca

SEQ ID NO: 827700 - RNA, 21 nt, Human
ccucccugguccuuuuauugg

SEQ ID NO: 827701 - RNA, 24 nt, Human
cugccaggaggacaacuaggaugc

SEQ ID NO: 827702 - RNA, 20 nt, Human
cuuggcaggaagcccuggcu

SEQ ID NO: 827703 - RNA, 21 nt, Human
gaacauccagaagauucugga

SEQ ID NO: 827704 - RNA, 20 nt, Human
gaccaccacgcugggggacu

SEQ ID NO: 827705 - RNA, 20 nt, Human
gacuggucuugucccugaga

SEQ ID NO: 827706 - RNA, 19 nt, Human
gagaggcagcggaaggugg

SEQ ID NO: 827707 - RNA, 19 nt, Human
gccaggaggagggggcugc

SEQ ID NO: 827708 - RNA, 19 nt, Human
gccuggcuggaugguuagg

SEQ ID NO: 827709 - RNA, 19 nt, Human
gcucaggauccuucugcuc

SEQ ID NO: 827710 - RNA, 20 nt, Human
gcuuaacucucugucccgcc

SEQ ID NO: 827711 - RNA, 21 nt, Human
ggaacagguuagcccagaagc

SEQ ID NO: 827712 - RNA, 20 nt, Human
ggagacccaggaaguggcuu

SEQ ID NO: 827713 - RNA, 24 nt, Human
ggaggagggggcugcuggggaggg

SEQ ID NO: 827714 - RNA, 25 nt, Human
ggaggagggggcugcuggggaggga

SEQ ID NO: 827715 - RNA, 22 nt, Human
ggcggcagagugcgaggcucag

SEQ ID NO: 827716 - RNA, 19 nt, Human
gggaaugaacaggcaagug

SEQ ID NO: 827717 - RNA, 20 nt, Human
gggcaucuggagcagccaug

SEQ ID NO: 827718 - RNA, 20 nt, Human
gguggagcuuccgugcugac

SEQ ID NO: 827719 - RNA, 19 nt, Human
guaggucuuucccucugua

SEQ ID NO: 827720 - RNA, 22 nt, Human
guuguggguggccuggcuggau

SEQ ID NO: 827721 - RNA, 20 nt, Human
uaagugaagggcugggaaug

SEQ ID NO: 827722 - RNA, 19 nt, Human
uaaugggcuucucaacugc

SEQ ID NO: 827723 - RNA, 22 nt, Human
uagcccagaagcaggaaggcag

SEQ ID NO: 827724 - RNA, 19 nt, Human
uaggauggcgccuccaccc

SEQ ID NO: 827725 - RNA, 21 nt, Human
ucagugcagugaugcaggcag

SEQ ID NO: 827726 - RNA, 21 nt, Human
uccaaagugcccuaaccaggg

SEQ ID NO: 827727 - RNA, 18 nt, Human
ucccugagagcuggggga

SEQ ID NO: 827728 - RNA, 19 nt, Human
ucccugagagcugggggaa

SEQ ID NO: 827729 - RNA, 26 nt, Human
uccgugcugaccaccacgcuggggga

SEQ ID NO: 827730 - RNA, 21 nt, Human
ugaaaacagcugccaggagga

SEQ ID NO: 827731 - RNA, 20 nt, Human
ugaaacacagaucgagacaa

SEQ ID NO: 827732 - RNA, 20 nt, Human
ugagagagaagcaaaacaug

SEQ ID NO: 827733 - RNA, 20 nt, Human
ugagaggcagcggaaggugg

SEQ ID NO: 827734 - RNA, 20 nt, Human
ugaugcaggcaggcaggugc

SEQ ID NO: 827735 - RNA, 23 nt, Human
uggacaguccccaccugcaccca

SEQ ID NO: 827736 - RNA, 19 nt, Human
uggagucuucuuugaaaug

SEQ ID NO: 827737 - RNA, 20 nt, Human
uggcaggaagcccuggcucc

SEQ ID NO: 827738 - RNA, 23 nt, Human
uggcuggaacagguuagcccaga

SEQ ID NO: 827739 - RNA, 19 nt, Human
uggcuggaugguuaggaug

SEQ ID NO: 827740 - RNA, 23 nt, Human
uggcuggaugguuaggauggcgc

SEQ ID NO: 827741 - RNA, 22 nt, Human
uggcuuaacucucugucccgcc

SEQ ID NO: 827742 - RNA, 20 nt, Human
ugucccgccagcucugcauu

SEQ ID NO: 827743 - RNA, 18 nt, Human
uucacugaauagcaagac

SEQ ID NO: 827744 - RNA, 19 nt, Human
uucuggaagcaagcacaca

SEQ ID NO: 827745 - RNA, 20 nt, Human
uucuuugaaauguacaaagg

SEQ ID NO: 827746 - RNA, 22 nt, Human
uugaaacacagaucgagacaac

SEQ ID NO: 827747 - RNA, 21 nt, Human
uugaaauguacaaagguucac

SEQ ID NO: 827748 - RNA, 19 nt, Human
uuuuuuuuuuuuuuuugca

SEQ ID NO: 827749 - RNA, 19 nt, Human
uuuuuuuuuuuuuuuuugc

SEQ ID NO: 827750 - RNA, 21 nt, Human
uuuuuuuuuuuuuuuuuuugg

SEQ ID NO: 827751 - RNA, 21 nt, Human
aacucugcaaacuccagaaag

SEQ ID NO: 827752 - RNA, 22 nt, Human
acucucuucuuccagugugaga

SEQ ID NO: 827753 - RNA, 23 nt, Human
acucugcaaacuccagaaaggaa

SEQ ID NO: 827754 - RNA, 21 nt, Human
auaaacuugcuugcaacucug

SEQ ID NO: 827755 - RNA, 22 nt, Human
caaaacuucuacagauaauaag

SEQ ID NO: 827756 - RNA, 19 nt, Human
cagggagaggucagaucug

SEQ ID NO: 827757 - RNA, 21 nt, Human
cuuccagugugagaacguugg

SEQ ID NO: 827758 - RNA, 22 nt, Human
gaacucugcaaacuccagaaag

SEQ ID NO: 827759 - RNA, 19 nt, Human
guaugcuugucacucuugg

SEQ ID NO: 827760 - RNA, 18 nt, Human
ucagaucaacaaagcaaa

SEQ ID NO: 827761 - RNA, 23 nt, Human
ucagaucaacaaagcaaaacuuc

SEQ ID NO: 827762 - RNA, 20 nt, Human
uccagugugagaacguugga

SEQ ID NO: 827763 - RNA, 19 nt, Human
ugcaucugauuagaaacuc

SEQ ID NO: 827764 - RNA, 22 nt, Human
uguaugcuugucacucuugggc

SEQ ID NO: 827765 - RNA, 18 nt, Human
uuacugaacacuggaaau

SEQ ID NO: 827766 - RNA, 18 nt, Human
uuagaaacucucuucuuc

SEQ ID NO: 827767 - RNA, 24 nt, Human
uucagagaagcugcagaucaagaa

SEQ ID NO: 827768 - RNA, 25 nt, Human
aaacaaagcaaaagaaguagccucg

SEQ ID NO: 827769 - RNA, 18 nt, Human
aaguagccucgagagaga

SEQ ID NO: 827770 - RNA, 18 nt, Human
acaaagcaaaagaaguag

SEQ ID NO: 827771 - RNA, 22 nt, Human
acaaagcaaaagaaguagccuc

SEQ ID NO: 827772 - RNA, 28 nt, Human
acaaagcaaaagaaguagccucgagaga

SEQ ID NO: 827773 - RNA, 26 nt, Human
agcaaaagaaguagccucgagagaga

SEQ ID NO: 827774 - RNA, 19 nt, Human
aggaggaagaaagccccug

SEQ ID NO: 827775 - RNA, 21 nt, Human
caaagcaaaagaaguagccuc

SEQ ID NO: 827776 - RNA, 18 nt, Human
caugcaaggcagccaggc

SEQ ID NO: 827777 - RNA, 20 nt, Human
ccccuggguuagugcccgca

SEQ ID NO: 827778 - RNA, 26 nt, Human
gagcagcagagguggcauccccuggg

SEQ ID NO: 827779 - RNA, 21 nt, Human
gcagcagcuggaagaccuugc

SEQ ID NO: 827780 - RNA, 22 nt, Human
gggggcguccgugguggcuuca

SEQ ID NO: 827781 - RNA, 23 nt, Human
uccccagcugagacucaugggac

SEQ ID NO: 827782 - RNA, 20 nt, Human
ugcggcuggguggggggggc

SEQ ID NO: 827783 - RNA, 20 nt, Human
uggcuucagcuuggugugcc

SEQ ID NO: 827784 - RNA, 22 nt, Human
uggugggcggggugaugaagcc

SEQ ID NO: 827785 - RNA, 21 nt, Human
uguggggaagcugggcagcag

SEQ ID NO: 827786 - RNA, 22 nt, Human
aaucacagucuucucuguuuua

SEQ ID NO: 827787 - RNA, 19 nt, Human
acuaaaauacaaaaaugua

SEQ ID NO: 827788 - RNA, 21 nt, Human
agguaaccucccucccgccaa

SEQ ID NO: 827789 - RNA, 18 nt, Human
cacagguuucauaaucaa

SEQ ID NO: 827790 - RNA, 19 nt, Human
cacauguaauaaaaacaaa

SEQ ID NO: 827791 - RNA, 24 nt, Human
caccuaucaacaucauggaagagc

SEQ ID NO: 827792 - RNA, 21 nt, Human
caggcccucccuccgcaggga

SEQ ID NO: 827793 - RNA, 18 nt, Human
caugaugauggaagcucu

SEQ ID NO: 827794 - RNA, 22 nt, Human
cccuccgcagggaagaagggca

SEQ ID NO: 827795 - RNA, 19 nt, Human
ccgcccaggcccucccucc

SEQ ID NO: 827796 - RNA, 22 nt, Human
cgccaacgcgaccgcccaggcc

SEQ ID NO: 827797 - RNA, 20 nt, Human
cuccgcagggaagaagggca

SEQ ID NO: 827798 - RNA, 21 nt, Human
cugggaaagguaaccucccuc

SEQ ID NO: 827799 - RNA, 18 nt, Human
gagaaccaaauuuuuuuu

SEQ ID NO: 827800 - RNA, 25 nt, Human
gagcgagacugggaaagguaaccuc

SEQ ID NO: 827801 - RNA, 22 nt, Human
gcacacuucacagguuucauaa

SEQ ID NO: 827802 - RNA, 20 nt, Human
gguuagcuauaaagauacaa

SEQ ID NO: 827803 - RNA, 23 nt, Human
uaucuggauuguagggauuguuu

SEQ ID NO: 827804 - RNA, 22 nt, Human
ucuguaauauaaaaaugucauu

SEQ ID NO: 827805 - RNA, 24 nt, Human
ugagaaccaaauuuuuuuuucuuc

SEQ ID NO: 827806 - RNA, 19 nt, Human
ugccuuggaguuuaaagca

SEQ ID NO: 827807 - RNA, 19 nt, Human
ugcuuccuccuggcucagg

SEQ ID NO: 827808 - RNA, 22 nt, Human
uggaagcucuguaauauaaaaa

SEQ ID NO: 827809 - RNA, 21 nt, Human
uggcucaggcggccagagcga

SEQ ID NO: 827810 - RNA, 21 nt, Human
uggucaccuaucaacaucaug

SEQ ID NO: 827811 - RNA, 27 nt, Human
uuuuuugccauaguuacuuuuucugau

SEQ ID NO: 827812 - RNA, 19 nt, Human
ucuaccagccacauguccu

SEQ ID NO: 827813 - RNA, 26 nt, Human
aaaauaaauggcccaugcuguaauga

SEQ ID NO: 827814 - RNA, 19 nt, Human
aagaccaccagguaggaag

SEQ ID NO: 827815 - RNA, 21 nt, Human
aagcgcuggguuuaccagucu

SEQ ID NO: 827816 - RNA, 22 nt, Human
aauggcccaugccucaguuucc

SEQ ID NO: 827817 - RNA, 21 nt, Human
acacugugucuguguggccca

SEQ ID NO: 827818 - RNA, 19 nt, Human
aggagccaaauagagcaag

SEQ ID NO: 827819 - RNA, 19 nt, Human
aggcucuuaaaucucaugu

SEQ ID NO: 827820 - RNA, 24 nt, Human
agggugucucggggucuccuguaa

SEQ ID NO: 827821 - RNA, 18 nt, Human
agugggagacaggcucag

SEQ ID NO: 827822 - RNA, 18 nt, Human
aucuccgcccaggcaccc

SEQ ID NO: 827823 - RNA, 18 nt, Human
caaauagagcaagcacca

SEQ ID NO: 827824 - RNA, 21 nt, Human
cacugagcacugcagggaaac

SEQ ID NO: 827825 - RNA, 20 nt, Human
cacugggugaguaaaccuuc

SEQ ID NO: 827826 - RNA, 24 nt, Human
cagaccaucuggcucccgagugga

SEQ ID NO: 827827 - RNA, 22 nt, Human
cagagugguguucaguaaacac

SEQ ID NO: 827828 - RNA, 18 nt, Human
caggcucagagaggaggu

SEQ ID NO: 827829 - RNA, 21 nt, Human
caguuuccucaucugaaaaug

SEQ ID NO: 827830 - RNA, 21 nt, Human
cauuaagaugaugggcagccc

SEQ ID NO: 827831 - RNA, 26 nt, Human
ccaauaaaaaaaaaaaaagauggaaa

SEQ ID NO: 827832 - RNA, 22 nt, Human
cccaugccucaguuuccucauc

SEQ ID NO: 827833 - RNA, 18 nt, Human
ccccuaaaagacaucucc

SEQ ID NO: 827834 - RNA, 23 nt, Human
ccggggaccuuugcaucauuggc

SEQ ID NO: 827835 - RNA, 19 nt, Human
ccuccuggggcagagugac

SEQ ID NO: 827836 - RNA, 21 nt, Human
ccuguagucacagacucggga

SEQ ID NO: 827837 - RNA, 21 nt, Human
cgcuggguuuaccagucuucu

SEQ ID NO: 827838 - RNA, 21 nt, Human
cuaaaagacaucuccgcccag

SEQ ID NO: 827839 - RNA, 19 nt, Human
cuggcccagacacugagca

SEQ ID NO: 827840 - RNA, 21 nt, Human
cuggguuuaccagucuucuug

SEQ ID NO: 827841 - RNA, 20 nt, Human
cugguucuccauuuaagucu

SEQ ID NO: 827842 - RNA, 19 nt, Human
gaacuuaggugggcuggca

SEQ ID NO: 827843 - RNA, 20 nt, Human
gcaaggggagcccaucucuu

SEQ ID NO: 827844 - RNA, 24 nt, Human
ggacauaucuuuaagcgaagagaa

SEQ ID NO: 827845 - RNA, 19 nt, Human
ggcaaggggagcccaucuc

SEQ ID NO: 827846 - RNA, 27 nt, Human
gggcaagcagcacuuuuuacucuggcc

SEQ ID NO: 827847 - RNA, 18 nt, Human
gggcagcccugggggagc

SEQ ID NO: 827848 - RNA, 21 nt, Human
ggggaccuuugcaucauuggc

SEQ ID NO: 827849 - RNA, 19 nt, Human
gugcccagggaagggaccc

SEQ ID NO: 827850 - RNA, 19 nt, Human
uaaaucaggaaacaaucua

SEQ ID NO: 827851 - RNA, 23 nt, Human
uacguauguguuuaguuucucuc

SEQ ID NO: 827852 - RNA, 18 nt, Human
uacuguggagcuccgagg

SEQ ID NO: 827853 - RNA, 21 nt, Human
uagguucuuauuucacuucuc

SEQ ID NO: 827854 - RNA, 22 nt, Human
ucaacccauauuuacugggauc

SEQ ID NO: 827855 - RNA, 18 nt, Human
ucaguaaacacauguuga

SEQ ID NO: 827856 - RNA, 22 nt, Human
ucauuggcauccuuacugugga

SEQ ID NO: 827857 - RNA, 20 nt, Human
ucauuuuuuucuucuuauuu

SEQ ID NO: 827858 - RNA, 22 nt, Human
ucccugcaaaggggacgaaggu

SEQ ID NO: 827859 - RNA, 20 nt, Human
uccucaucugaaaauggagu

SEQ ID NO: 827860 - RNA, 24 nt, Human
ucuagggcuuagcacagaguggug

SEQ ID NO: 827861 - RNA, 20 nt, Human
ucuaucuggcaaguucucug

SEQ ID NO: 827862 - RNA, 22 nt, Human
ucuccgcccaggcacccugcgg

SEQ ID NO: 827863 - RNA, 22 nt, Human
ucuccuguaacucccugcaaag

SEQ ID NO: 827864 - RNA, 22 nt, Human
ucuggccuccuggggcagagug

SEQ ID NO: 827865 - RNA, 20 nt, Human
ugagccuuaggcacuuuugc

SEQ ID NO: 827866 - RNA, 23 nt, Human
ugagggccacguaaugauuuuca

SEQ ID NO: 827867 - RNA, 19 nt, Human
ugcccagggaagggacccu

SEQ ID NO: 827868 - RNA, 21 nt, Human
ugccucaguuuccucaucuga

SEQ ID NO: 827869 - RNA, 22 nt, Human
ugccuguagucacagacucggg

SEQ ID NO: 827870 - RNA, 20 nt, Human
uggaguggggaugcccagga

SEQ ID NO: 827871 - RNA, 22 nt, Human
uggaguggggaugcccaggaga

SEQ ID NO: 827872 - RNA, 18 nt, Human
ugggagacaggcucagag

SEQ ID NO: 827873 - RNA, 19 nt, Human
ugggagaggugacacugug

SEQ ID NO: 827874 - RNA, 20 nt, Human
uguguggcccacugagucca

SEQ ID NO: 827875 - RNA, 18 nt, Human
uuaccagucuucuugucu

SEQ ID NO: 827876 - RNA, 24 nt, Human
uuaguuucucucucuguugauuac

SEQ ID NO: 827877 - RNA, 25 nt, Human
uucaggcucuuaaaucucauguuuu

SEQ ID NO: 827878 - RNA, 21 nt, Human
uucucuguuugaagcuuucca

SEQ ID NO: 827879 - RNA, 22 nt, Human
uucuuauuuuaagaucugaaga

SEQ ID NO: 827880 - RNA, 27 nt, Human
uugcaggacuccaauaaaaaaaaaaaa

SEQ ID NO: 827881 - RNA, 24 nt, Human
uuggcauugucaucuucuccaugg

SEQ ID NO: 827882 - RNA, 18 nt, Human
uuuacugggauccuacug

SEQ ID NO: 827883 - RNA, 24 nt, Human
uuuauucaacccauauuuacuggg

SEQ ID NO: 827884 - RNA, 20 nt, Human
uuucuugggccccuaaaaga

SEQ ID NO: 827885 - RNA, 22 nt, Human
uuuuacucuggccuccuggggc

SEQ ID NO: 827886 - RNA, 19 nt, Human
uuuuugaccugcucuaggg

SEQ ID NO: 827887 - RNA, 19 nt, Human
uuuuuuuuuuucaggcucu

SEQ ID NO: 827888 - RNA, 23 nt, Human
uuuuuuuuuuuuuuuuuuucagg

SEQ ID NO: 827889 - RNA, 22 nt, Human
aaaaaucgaauaauacugaaau

SEQ ID NO: 827890 - RNA, 22 nt, Human
cucccagaaucucuccaagaac

SEQ ID NO: 827891 - RNA, 19 nt, Human
gaguguuuggcucccagaa

SEQ ID NO: 827892 - RNA, 21 nt, Human
gaguguuuggcucccagaauc

SEQ ID NO: 827893 - RNA, 24 nt, Human
ggaguguuuggcucccagaaucuc

SEQ ID NO: 827894 - RNA, 22 nt, Human
uaaccacagcagcuuucaguau

SEQ ID NO: 827895 - RNA, 22 nt, Human
ugaaauaaccacagcagcuuuc

SEQ ID NO: 827896 - RNA, 22 nt, Human
uuugcuuaaguuguucuagaaa

SEQ ID NO: 827897 - RNA, 19 nt, Human
aaauaucaguggcugugac

SEQ ID NO: 827898 - RNA, 22 nt, Human
aagagcccaaaggagauccugu

SEQ ID NO: 827899 - RNA, 21 nt, Human
aagcaacaagccucuccuuca

SEQ ID NO: 827900 - RNA, 20 nt, Human
aagccagcccacacaggcca

SEQ ID NO: 827901 - RNA, 20 nt, Human
aagcccagggccagcaacaa

SEQ ID NO: 827902 - RNA, 22 nt, Human
acaagcccagggccagcaacaa

SEQ ID NO: 827903 - RNA, 23 nt, Human
acaaggggaaaagcugaugucaa

SEQ ID NO: 827904 - RNA, 18 nt, Human
acaucauucaucucaacc

SEQ ID NO: 827905 - RNA, 19 nt, Human
agaacaaagacagccccuu

SEQ ID NO: 827906 - RNA, 21 nt, Human
agacaacaugcacucaagcca

SEQ ID NO: 827907 - RNA, 22 nt, Human
aggacguacgggcccagccuuc

SEQ ID NO: 827908 - RNA, 21 nt, Human
aggcaggcacuccacugggga

SEQ ID NO: 827909 - RNA, 18 nt, Human
aggccucugugugaccag

SEQ ID NO: 827910 - RNA, 24 nt, Human
auccuaaugcuucuccccaaccuc

SEQ ID NO: 827911 - RNA, 22 nt, Human
aucuugucucuccgcugcucca

SEQ ID NO: 827912 - RNA, 25 nt, Human
augcaaaaaaaaauaugugaaauuc

SEQ ID NO: 827913 - RNA, 26 nt, Human
auugcaauuauuugaaauucccaauc

SEQ ID NO: 827914 - RNA, 19 nt, Human
caacaugcacucaagccag

SEQ ID NO: 827915 - RNA, 18 nt, Human
cacacaagcccagggcca

SEQ ID NO: 827916 - RNA, 25 nt, Human
cacacaggccaaggagaacaaagac

SEQ ID NO: 827917 - RNA, 25 nt, Human
cacaggccaaggagaacaaagacag

SEQ ID NO: 827918 - RNA, 20 nt, Human
cacaucauucaucucaaccc

SEQ ID NO: 827919 - RNA, 23 nt, Human
cacuccacuggggaagauggcuc

SEQ ID NO: 827920 - RNA, 20 nt, Human
cagaaacccagagcuccugg

SEQ ID NO: 827921 - RNA, 21 nt, Human
cagaagggaaauccccucauu

SEQ ID NO: 827922 - RNA, 22 nt, Human
cagcagagcugagguuaagaca

SEQ ID NO: 827923 - RNA, 19 nt, Human
caggguuccuucuaagucc

SEQ ID NO: 827924 - RNA, 23 nt, Human
caucuugucucuccgcugcucca

SEQ ID NO: 827925 - RNA, 26 nt, Human
caucuugucucuccgcugcuccaggg

SEQ ID NO: 827926 - RNA, 26 nt, Human
caugcaaaaaaaaauaugugaaauuc

SEQ ID NO: 827927 - RNA, 24 nt, Human
caugcacucaagccagcccacaca

SEQ ID NO: 827928 - RNA, 18 nt, Human
caugcaggccucugugug

SEQ ID NO: 827929 - RNA, 24 nt, Human
ccaggcacacagacuacaugugcu

SEQ ID NO: 827930 - RNA, 23 nt, Human
ccaguagcuccucuguguaaucc

SEQ ID NO: 827931 - RNA, 21 nt, Human
cccacaagugaucagccacca

SEQ ID NO: 827932 - RNA, 19 nt, Human
cccacggccaguacggcca

SEQ ID NO: 827933 - RNA, 22 nt, Human
ccccuuaagggagaggccucca

SEQ ID NO: 827934 - RNA, 21 nt, Human
ccucaggagccacacaagccc

SEQ ID NO: 827935 - RNA, 18 nt, Human
ccuccagcagagcugagg

SEQ ID NO: 827936 - RNA, 22 nt, Human
ccuguuaucagaaacccagagc

SEQ ID NO: 827937 - RNA, 21 nt, Human
cuccccaaccucaagagccca

SEQ ID NO: 827938 - RNA, 21 nt, Human
cuccuggacugccaguugcac

SEQ ID NO: 827939 - RNA, 22 nt, Human
cuguggacugggccugggcaag

SEQ ID NO: 827940 - RNA, 20 nt, Human
cuuaagagccacacaccucu

SEQ ID NO: 827941 - RNA, 26 nt, Human
gagaacaaagacagccccuuaaggga

SEQ ID NO: 827942 - RNA, 24 nt, Human
gagcagcaucugaggcuugaggcc

SEQ ID NO: 827943 - RNA, 23 nt, Human
gaggugaagccucgccagggggc

SEQ ID NO: 827944 - RNA, 18 nt, Human
gcacacagacuacaugug

SEQ ID NO: 827945 - RNA, 24 nt, Human
gccacaguucaggcagccaggguu

SEQ ID NO: 827946 - RNA, 24 nt, Human
gcccagggccagcaacaacacuuu

SEQ ID NO: 827947 - RNA, 22 nt, Human
gcucuguggacugggccugggc

SEQ ID NO: 827948 - RNA, 24 nt, Human
gcucuguggacugggccugggcaa

SEQ ID NO: 827949 - RNA, 18 nt, Human
gcugcuccucccaggacu

SEQ ID NO: 827950 - RNA, 20 nt, Human
gcuggagacugaccccacaa

SEQ ID NO: 827951 - RNA, 18 nt, Human
ggacugggccugggcaag

SEQ ID NO: 827952 - RNA, 22 nt, Human
ggagcagcaucugaggcuugag

SEQ ID NO: 827953 - RNA, 19 nt, Human
gggcaggccccaucugcuc

SEQ ID NO: 827954 - RNA, 20 nt, Human
guccaucuccaagguggaca

SEQ ID NO: 827955 - RNA, 21 nt, Human
gugaccaggcacacagacuac

SEQ ID NO: 827956 - RNA, 18 nt, Human
guggagcagcaucugagg

SEQ ID NO: 827957 - RNA, 18 nt, Human
uaaagaaccacccacaag

SEQ ID NO: 827958 - RNA, 19 nt, Human
uaagacuaaccagcugcag

SEQ ID NO: 827959 - RNA, 23 nt, Human
uaagagacaucaccuaaauauca

SEQ ID NO: 827960 - RNA, 19 nt, Human
uacaguucaggcagcugag

SEQ ID NO: 827961 - RNA, 23 nt, Human
uacaguucaggcagcugaggcac

SEQ ID NO: 827962 - RNA, 23 nt, Human
uagaaggaauucuaacucaggua

SEQ ID NO: 827963 - RNA, 24 nt, Human
uauugcaauuauuugaaauuccca

SEQ ID NO: 827964 - RNA, 22 nt, Human
ucaccuaaauaucaguggcugu

SEQ ID NO: 827965 - RNA, 21 nt, Human
ucagggaaacgggccuagcag

SEQ ID NO: 827966 - RNA, 24 nt, Human
ucauuugugaacacaucauucauc

SEQ ID NO: 827967 - RNA, 18 nt, Human
uccacagugaggugaagc

SEQ ID NO: 827968 - RNA, 21 nt, Human
uccacuggggaagauggcucu

SEQ ID NO: 827969 - RNA, 19 nt, Human
uccccaaccucaagagccc

SEQ ID NO: 827970 - RNA, 18 nt, Human
uccccugucccccacacc

SEQ ID NO: 827971 - RNA, 22 nt, Human
uccuaaggcaugcaaaaaaaaa

SEQ ID NO: 827972 - RNA, 24 nt, Human
uccuucaguuuaguccagaaggga

SEQ ID NO: 827973 - RNA, 19 nt, Human
uccuuggcaaggcuugugg

SEQ ID NO: 827974 - RNA, 18 nt, Human
ugaaguuuguggcugaaa

SEQ ID NO: 827975 - RNA, 21 nt, Human
ugacaagcccuugagagcugc

SEQ ID NO: 827976 - RNA, 19 nt, Human
ugacaggagagcuaaagaa

SEQ ID NO: 827977 - RNA, 23 nt, Human
ugacaggagagcuaaagaaccac

SEQ ID NO: 827978 - RNA, 18 nt, Human
ugaccaggcacacagacu

SEQ ID NO: 827979 - RNA, 26 nt, Human
ugaccaggcacacagacuacaugugc

SEQ ID NO: 827980 - RNA, 21 nt, Human
ugaccccacaagugaucagcc

SEQ ID NO: 827981 - RNA, 22 nt, Human
ugaccccacaagugaucagcca

SEQ ID NO: 827982 - RNA, 18 nt, Human
ugaguauucccccgaccc

SEQ ID NO: 827983 - RNA, 20 nt, Human
ugcaugcaggccucuguggc

SEQ ID NO: 827984 - RNA, 18 nt, Human
uggcucuguggacugggc

SEQ ID NO: 827985 - RNA, 22 nt, Human
uggcucuguggacugggccugg

SEQ ID NO: 827986 - RNA, 20 nt, Human
uggcugaaaagcaggccuuc

SEQ ID NO: 827987 - RNA, 20 nt, Human
uggggagcggggggaugagu

SEQ ID NO: 827988 - RNA, 20 nt, Human
uuaccuaugugcuucuuccu

SEQ ID NO: 827989 - RNA, 18 nt, Human
uuccacagugaggugaag

SEQ ID NO: 827990 - RNA, 20 nt, Human
uuccuuggcaaggcuugugg

SEQ ID NO: 827991 - RNA, 19 nt, Human
uucuaagucccaguagcuc

SEQ ID NO: 827992 - RNA, 24 nt, Human
uugcaugcaggccucugugugacc

SEQ ID NO: 827993 - RNA, 22 nt, Human
uugucucuccgcugcuccaggg

SEQ ID NO: 827994 - RNA, 26 nt, Human
aaaaggccaaaagaacauagugggca

SEQ ID NO: 827995 - RNA, 19 nt, Human
aaccucuuggucuuggaga

SEQ ID NO: 827996 - RNA, 22 nt, Human
aacuaucauagccaccaaacag

SEQ ID NO: 827997 - RNA, 22 nt, Human
aagcaacaggcgggucccagga

SEQ ID NO: 827998 - RNA, 23 nt, Human
aaggccaaaagaacauacaagcc

SEQ ID NO: 827999 - RNA, 18 nt, Human
aauacuccggggcuucuc

SEQ ID NO: 828000 - RNA, 18 nt, Human
acaagcccagcucucuag

SEQ ID NO: 828001 - RNA, 25 nt, Human
acagaaagcagcucaaggccaccac

SEQ ID NO: 828002 - RNA, 24 nt, Human
acagcaccgggcagaauuuacaca

SEQ ID NO: 828003 - RNA, 25 nt, Human
accuccaccuucaucccuuucauca

SEQ ID NO: 828004 - RNA, 23 nt, Human
acgauaccacacaucucacagac

SEQ ID NO: 828005 - RNA, 18 nt, Human
acucaggccaucuuccuc

SEQ ID NO: 828006 - RNA, 25 nt, Human
acugucuuguauuccacagugugac

SEQ ID NO: 828007 - RNA, 23 nt, Human
agaaagcagcucaaggccaccac

SEQ ID NO: 828008 - RNA, 24 nt, Human
agaacuggacccuuuaacuacaaa

SEQ ID NO: 828009 - RNA, 19 nt, Human
agaagccaggcuggaggca

SEQ ID NO: 828010 - RNA, 22 nt, Human
agaguggaggaaggcuccaauu

SEQ ID NO: 828011 - RNA, 18 nt, Human
agcagaggaccaacacau

SEQ ID NO: 828012 - RNA, 19 nt, Human
agcagccuuguaacuguga

SEQ ID NO: 828013 - RNA, 19 nt, Human
agccaagauacuggcuuuc

SEQ ID NO: 828014 - RNA, 18 nt, Human
agcucaaggccaccacac

SEQ ID NO: 828015 - RNA, 21 nt, Human
agcuggcucagaaccacugcc

SEQ ID NO: 828016 - RNA, 18 nt, Human
aggagaccccagcagguc

SEQ ID NO: 828017 - RNA, 21 nt, Human
aggcauggugguggugguaga

SEQ ID NO: 828018 - RNA, 21 nt, Human
agguccuccaccguccagccu

SEQ ID NO: 828019 - RNA, 21 nt, Human
aguucuggggccucaggcggc

SEQ ID NO: 828020 - RNA, 23 nt, Human
aucccuuucaucacauccuccca

SEQ ID NO: 828021 - RNA, 20 nt, Human
aucuuccucuuccuccauug

SEQ ID NO: 828022 - RNA, 19 nt, Human
auugguucugaagaugggg

SEQ ID NO: 828023 - RNA, 23 nt, Human
caaaaggccaaaagaacauacaa

SEQ ID NO: 828024 - RNA, 19 nt, Human
cacaaacacagaaagcagc

SEQ ID NO: 828025 - RNA, 21 nt, Human
cacagagaggaucagucucca

SEQ ID NO: 828026 - RNA, 18 nt, Human
cacagcaccgggcagaau

SEQ ID NO: 828027 - RNA, 24 nt, Human
cacaggggagggcagaagcaacag

SEQ ID NO: 828028 - RNA, 21 nt, Human
caccacacaggucgccaaaau

SEQ ID NO: 828029 - RNA, 19 nt, Human
cacccgauacccugcuguc

SEQ ID NO: 828030 - RNA, 23 nt, Human
caccguccagccuucacagcacc

SEQ ID NO: 828031 - RNA, 19 nt, Human
cagaaagcagcucaaggcc

SEQ ID NO: 828032 - RNA, 22 nt, Human
cagacagcuggcucagaaccac

SEQ ID NO: 828033 - RNA, 19 nt, Human
cagaguucacugucuugua

SEQ ID NO: 828034 - RNA, 20 nt, Human
cagcacccgauacccugcug

SEQ ID NO: 828035 - RNA, 25 nt, Human
cagcagguccuccaccguccagccu

SEQ ID NO: 828036 - RNA, 25 nt, Human
caggaacuucccccagucgaagccc

SEQ ID NO: 828037 - RNA, 22 nt, Human
caggagacgcugcagaaccucu

SEQ ID NO: 828038 - RNA, 21 nt, Human
cagggcugagcaaaugcagcg

SEQ ID NO: 828039 - RNA, 23 nt, Human
caguacacccggcuggggagcac

SEQ ID NO: 828040 - RNA, 20 nt, Human
caucccuggggagcuaggag

SEQ ID NO: 828041 - RNA, 18 nt, Human
ccaaagugcacacucagg

SEQ ID NO: 828042 - RNA, 19 nt, Human
ccaccaaacagcuccaagu

SEQ ID NO: 828043 - RNA, 19 nt, Human
ccaggcuggaggcaggaag

SEQ ID NO: 828044 - RNA, 19 nt, Human
ccagucgaagcccaagacc

SEQ ID NO: 828045 - RNA, 19 nt, Human
cccaccacacaacucacug

SEQ ID NO: 828046 - RNA, 21 nt, Human
cccccagucgaagcccaagac

SEQ ID NO: 828047 - RNA, 22 nt, Human
ccucaauacuccggggcuucuc

SEQ ID NO: 828048 - RNA, 27 nt, Human
ccucaggcggcccgucauauagaccuu

SEQ ID NO: 828049 - RNA, 24 nt, Human
ccuucaucccuuucaucacauccu

SEQ ID NO: 828050 - RNA, 18 nt, Human
cgaagcagcacccgauac

SEQ ID NO: 828051 - RNA, 20 nt, Human
cgauccaguacacccggcug

SEQ ID NO: 828052 - RNA, 19 nt, Human
cggggaggucggcaguucc

SEQ ID NO: 828053 - RNA, 23 nt, Human
cgucuuguccuguugguguccca

SEQ ID NO: 828054 - RNA, 24 nt, Human
cuagaacuuaauuuacauggcucg

SEQ ID NO: 828055 - RNA, 21 nt, Human
cucacugcccacacugcuguu

SEQ ID NO: 828056 - RNA, 22 nt, Human
cuccauugguucugaagauggg

SEQ ID NO: 828057 - RNA, 22 nt, Human
cuggcgucauuuucaaagccuu

SEQ ID NO: 828058 - RNA, 23 nt, Human
cugugauccuucaggaacuuccc

SEQ ID NO: 828059 - RNA, 21 nt, Human
cuucauaccgaagcagcaccc

SEQ ID NO: 828060 - RNA, 20 nt, Human
cuuuuuuggucggugguuuu

SEQ ID NO: 828061 - RNA, 19 nt, Human
gaaacagcugacgggagca

SEQ ID NO: 828062 - RNA, 19 nt, Human
gagcagaggaccaacacau

SEQ ID NO: 828063 - RNA, 21 nt, Human
gagcaggcagcuagcguucca

SEQ ID NO: 828064 - RNA, 18 nt, Human
gagguugcaauggcagcu

SEQ ID NO: 828065 - RNA, 22 nt, Human
gcagaccaggcagccuugugca

SEQ ID NO: 828066 - RNA, 22 nt, Human
gcaugguuucuucauuuaggua

SEQ ID NO: 828067 - RNA, 21 nt, Human
gcucugucauccuugucuuga

SEQ ID NO: 828068 - RNA, 22 nt, Human
gcuuccagcuagaagccaggcu

SEQ ID NO: 828069 - RNA, 25 nt, Human
gcuuuuuuggucggugguuuucccu

SEQ ID NO: 828070 - RNA, 21 nt, Human
ggagcugcucucacugcccuu

SEQ ID NO: 828071 - RNA, 23 nt, Human
ggaguuggaggaguagcuccugg

SEQ ID NO: 828072 - RNA, 20 nt, Human
ggccaucuuccucccaaugu

SEQ ID NO: 828073 - RNA, 23 nt, Human
gggagcacagcaucacuguugag

SEQ ID NO: 828074 - RNA, 18 nt, Human
gggccguggcgggucggg

SEQ ID NO: 828075 - RNA, 18 nt, Human
gguaggaacaaaaggcca

SEQ ID NO: 828076 - RNA, 22 nt, Human
guccccaacaucccuggggagc

SEQ ID NO: 828077 - RNA, 24 nt, Human
guuucuucauuuagguaggaacaa

SEQ ID NO: 828078 - RNA, 21 nt, Human
uagagugggacgugcuugaaa

SEQ ID NO: 828079 - RNA, 20 nt, Human
uagcagagccaaagugcaca

SEQ ID NO: 828080 - RNA, 19 nt, Human
uagcugccgagacaagcug

SEQ ID NO: 828081 - RNA, 24 nt, Human
uaggaacaaaaggccaaaagaaca

SEQ ID NO: 828082 - RNA, 25 nt, Human
uauagaccuuuccacaggggagggc

SEQ ID NO: 828083 - RNA, 18 nt, Human
ucaaggccaccacacagg

SEQ ID NO: 828084 - RNA, 18 nt, Human
ucacagacgaguucuggg

SEQ ID NO: 828085 - RNA, 24 nt, Human
ucacugcuucuuagcugccgagac

SEQ ID NO: 828086 - RNA, 20 nt, Human
ucaggccaucuuccucccaa

SEQ ID NO: 828087 - RNA, 28 nt, Human
ucaggccaucuuccucccaauguccucc

SEQ ID NO: 828088 - RNA, 23 nt, Human
ucagguggaggcauggugguggu

SEQ ID NO: 828089 - RNA, 18 nt, Human
ucauagagugggacgugc

SEQ ID NO: 828090 - RNA, 20 nt, Human
uccacauccuggucacugcu

SEQ ID NO: 828091 - RNA, 19 nt, Human
uccaccuucaucccuuuca

SEQ ID NO: 828092 - RNA, 24 nt, Human
uccccaacaucccuggggagcuag

SEQ ID NO: 828093 - RNA, 22 nt, Human
ucccuuucaucacauccuccca

SEQ ID NO: 828094 - RNA, 21 nt, Human
ucuggaugacagaggcgaucc

SEQ ID NO: 828095 - RNA, 23 nt, Human
ucuugaggguucuguguucacgg

SEQ ID NO: 828096 - RNA, 19 nt, Human
ugaaacagcugacgggagc

SEQ ID NO: 828097 - RNA, 21 nt, Human
ugacgggagcagccuuguaac

SEQ ID NO: 828098 - RNA, 22 nt, Human
ugagcaccuccaccuucauccc

SEQ ID NO: 828099 - RNA, 18 nt, Human
ugaggcagaggcugcccc

SEQ ID NO: 828100 - RNA, 21 nt, Human
ugcucagagagcugcucuaga

SEQ ID NO: 828101 - RNA, 20 nt, Human
ugcuucacuugacuccucca

SEQ ID NO: 828102 - RNA, 24 nt, Human
uggagcaggagacgcugcagaacc

SEQ ID NO: 828103 - RNA, 22 nt, Human
uggaggcaugguggugguggua

SEQ ID NO: 828104 - RNA, 18 nt, Human
uggcgucauuuucaaagc

SEQ ID NO: 828105 - RNA, 22 nt, Human
ugggguggacauccacuguucc

SEQ ID NO: 828106 - RNA, 22 nt, Human
ugguagagaaacgcugggcugg

SEQ ID NO: 828107 - RNA, 20 nt, Human
uguacccacgauaccacaca

SEQ ID NO: 828108 - RNA, 23 nt, Human
uguacccacgauaccacacaucu

SEQ ID NO: 828109 - RNA, 21 nt, Human
ugucuggaugacagaggcgau

SEQ ID NO: 828110 - RNA, 19 nt, Human
uuacauggcucguucaggc

SEQ ID NO: 828111 - RNA, 22 nt, Human
uucaaagccuucauaccgaagc

SEQ ID NO: 828112 - RNA, 19 nt, Human
uucacugucuuguauucca

SEQ ID NO: 828113 - RNA, 19 nt, Human
uucaggcagacagaguuca

SEQ ID NO: 828114 - RNA, 18 nt, Human
uuccucuuccuccauugg

SEQ ID NO: 828115 - RNA, 23 nt, Human
uuucuucauuuagguaggaacaa

SEQ ID NO: 828116 - RNA, 18 nt, Human
uuucuuggaguuggagga

SEQ ID NO: 828117 - RNA, 22 nt, Human
aaaaaaaaccacauauaagccc

SEQ ID NO: 828118 - RNA, 19 nt, Human
aaaaaggccuucugccucu

SEQ ID NO: 828119 - RNA, 18 nt, Human
aaacauacaggccccuug

SEQ ID NO: 828120 - RNA, 20 nt, Human
aaccaaaaaaaaaaaccaca

SEQ ID NO: 828121 - RNA, 26 nt, Human
aagaaaaagcagaccuaaaaaauguu

SEQ ID NO: 828122 - RNA, 18 nt, Human
acaggccccuuggagguu

SEQ ID NO: 828123 - RNA, 21 nt, Human
acugucuuuguuuugaauuga

SEQ ID NO: 828124 - RNA, 24 nt, Human
agaaaaagcagaccuaaaaaaugu

SEQ ID NO: 828125 - RNA, 24 nt, Human
caaaaaaaaaaaccacauauaagc

SEQ ID NO: 828126 - RNA, 19 nt, Human
caagucccacaauaaggag

SEQ ID NO: 828127 - RNA, 26 nt, Human
caccaugcagccaaagcuugaagguu

SEQ ID NO: 828128 - RNA, 27 nt, Human
ccaaaaaaaaaaaccacauauaagccc

SEQ ID NO: 828129 - RNA, 18 nt, Human
ccagaggacaaagugcau

SEQ ID NO: 828130 - RNA, 20 nt, Human
ccaugcagccaaagcuugaa

SEQ ID NO: 828131 - RNA, 25 nt, Human
ccuugaaaaaagcuuugaaaaaagg

SEQ ID NO: 828132 - RNA, 20 nt, Human
cuccauaaacauacaggccc

SEQ ID NO: 828133 - RNA, 24 nt, Human
gagcaauuuuagauuaaaaugguc

SEQ ID NO: 828134 - RNA, 24 nt, Human
uaaaagauguauuucuaacaugcc

SEQ ID NO: 828135 - RNA, 20 nt, Human
uaacaugccaccaccaugca

SEQ ID NO: 828136 - RNA, 18 nt, Human
uaaccaaaaaaaaaaacc

SEQ ID NO: 828137 - RNA, 23 nt, Human
uaaccaaaaaaaaaaaccacaua

SEQ ID NO: 828138 - RNA, 18 nt, Human
uaagaaaaagcagaccua

SEQ ID NO: 828139 - RNA, 26 nt, Human
uaauccacuagauccuugagagcaau

SEQ ID NO: 828140 - RNA, 20 nt, Human
uagauccuugagagcaauuu

SEQ ID NO: 828141 - RNA, 24 nt, Human
ucuccauaaacauacaggccccuu

SEQ ID NO: 828142 - RNA, 24 nt, Human
ugaaacauagggcauucuuccccc

SEQ ID NO: 828143 - RNA, 19 nt, Human
ugaaggccugggagauuua

SEQ ID NO: 828144 - RNA, 24 nt, Human
ugaccacuugagaucaaguccugc

SEQ ID NO: 828145 - RNA, 23 nt, Human
ugccaccaccaugcagccaaagc

SEQ ID NO: 828146 - RNA, 23 nt, Human
uggugcagaaauaaggccaaaua

SEQ ID NO: 828147 - RNA, 20 nt, Human
uguauuucuaacaugccacc

SEQ ID NO: 828148 - RNA, 25 nt, Human
uuaaugaugagaaaaugauuccuuc

SEQ ID NO: 828149 - RNA, 22 nt, Human
uucauaaccaaaaaaaaaaacc

SEQ ID NO: 828150 - RNA, 22 nt, Human
uucugccugcguuaaccauuug

SEQ ID NO: 828151 - RNA, 23 nt, Human
uuuuaauuucauggugcagaaau

SEQ ID NO: 828152 - RNA, 18 nt, Human
aaggguauuuaaggcuuu

SEQ ID NO: 828153 - RNA, 22 nt, Human
agaaggucagggcccacgagga

SEQ ID NO: 828154 - RNA, 21 nt, Human
agagaaggucagggcccacga

SEQ ID NO: 828155 - RNA, 23 nt, Human
agagagaaggucagggcccacga

SEQ ID NO: 828156 - RNA, 25 nt, Human
cagcgacaaacaaucaggcccccac

SEQ ID NO: 828157 - RNA, 19 nt, Human
caggcccccacaaugaacu

SEQ ID NO: 828158 - RNA, 22 nt, Human
ccacucgugcugggaccauucc

SEQ ID NO: 828159 - RNA, 18 nt, Human
ccagcgacaaacaaucag

SEQ ID NO: 828160 - RNA, 22 nt, Human
cccacaaugaacuggccacucg

SEQ ID NO: 828161 - RNA, 23 nt, Human
ccuccagcgacaaacaaucaggc

SEQ ID NO: 828162 - RNA, 21 nt, Human
cgacaaacaaucaggccccca

SEQ ID NO: 828163 - RNA, 22 nt, Human
cuccggagccucugcccggcuc

SEQ ID NO: 828164 - RNA, 22 nt, Human
gaccauucccuaggggaggagg

SEQ ID NO: 828165 - RNA, 24 nt, Human
ucaggcccccacaaugaacuggcc

SEQ ID NO: 828166 - RNA, 21 nt, Human
ucguagcucaguuuuauuuuc

SEQ ID NO: 828167 - RNA, 25 nt, Human
aaaaagcaguucacuuuauuuagca

SEQ ID NO: 828168 - RNA, 22 nt, Human
aacacuaugcugaaaaaccaca

SEQ ID NO: 828169 - RNA, 19 nt, Human
agacaaaaagcaguucacu

SEQ ID NO: 828170 - RNA, 23 nt, Human
aggaaagugacuuagggaaguaa

SEQ ID NO: 828171 - RNA, 21 nt, Human
augacucaaagggaaaugcua

SEQ ID NO: 828172 - RNA, 23 nt, Human
auuccaaggaaguguuuuaugaa

SEQ ID NO: 828173 - RNA, 26 nt, Human
caaaaagcaguucacuuuauuuagca

SEQ ID NO: 828174 - RNA, 23 nt, Human
caacaaaaaguuaagguuuuauu

SEQ ID NO: 828175 - RNA, 23 nt, Human
caacacuaugcugaaaaaccaca

SEQ ID NO: 828176 - RNA, 21 nt, Human
caacaggcuucuuuccaaguu

SEQ ID NO: 828177 - RNA, 19 nt, Human
caagaacuuuggugguuuu

SEQ ID NO: 828178 - RNA, 21 nt, Human
cacuguguuaaacagcaggac

SEQ ID NO: 828179 - RNA, 23 nt, Human
cagaagauacacauagcuuccua

SEQ ID NO: 828180 - RNA, 24 nt, Human
cagaagauacacauagcuuccuau

SEQ ID NO: 828181 - RNA, 18 nt, Human
ccacccgggccucccucc

SEQ ID NO: 828182 - RNA, 18 nt, Human
ccaucugucaucaugacu

SEQ ID NO: 828183 - RNA, 19 nt, Human
ccaucugucaucaugacuc

SEQ ID NO: 828184 - RNA, 18 nt, Human
ccccagccccaggccgcc

SEQ ID NO: 828185 - RNA, 19 nt, Human
ccccagccccaggccgccc

SEQ ID NO: 828186 - RNA, 23 nt, Human
ccccagccccaggccgcccccuc

SEQ ID NO: 828187 - RNA, 24 nt, Human
ccccagccccaggccgcccccucc

SEQ ID NO: 828188 - RNA, 18 nt, Human
ccccaggccgcccccucc

SEQ ID NO: 828189 - RNA, 23 nt, Human
cccccacccgggccucccucccu

SEQ ID NO: 828190 - RNA, 24 nt, Human
ccccccgggaccccuugcaggaac

SEQ ID NO: 828191 - RNA, 20 nt, Human
cccccgggaccccuugcagg

SEQ ID NO: 828192 - RNA, 19 nt, Human
cccccuccagcggugccac

SEQ ID NO: 828193 - RNA, 19 nt, Human
ccccgggaccccuugcagg

SEQ ID NO: 828194 - RNA, 19 nt, Human
cccgcgccccccgggaccc

SEQ ID NO: 828195 - RNA, 21 nt, Human
ccgccgggcagccccagcccu

SEQ ID NO: 828196 - RNA, 20 nt, Human
ccgggcagccccagccccag

SEQ ID NO: 828197 - RNA, 22 nt, Human
cgcaaguccccgguggcugcac

SEQ ID NO: 828198 - RNA, 23 nt, Human
cggcugccccccacccgggccuc

SEQ ID NO: 828199 - RNA, 22 nt, Human
cgguggcugcacgcugagcggg

SEQ ID NO: 828200 - RNA, 19 nt, Human
cugaauacucaaacacccc

SEQ ID NO: 828201 - RNA, 25 nt, Human
cuuccuauuguuauuuucuuuucua

SEQ ID NO: 828202 - RNA, 18 nt, Human
cuugguuaagcggaggag

SEQ ID NO: 828203 - RNA, 19 nt, Human
gaagcggcggcggugagcg

SEQ ID NO: 828204 - RNA, 19 nt, Human
gagacaaaaagcaguucac

SEQ ID NO: 828205 - RNA, 19 nt, Human
gcgccgccgggcagcccca

SEQ ID NO: 828206 - RNA, 18 nt, Human
gcgcuguugcgggcugac

SEQ ID NO: 828207 - RNA, 27 nt, Human
gcggggcagggagaagcggcggcgguu

SEQ ID NO: 828208 - RNA, 19 nt, Human
gcucuaaggaaggagugaa

SEQ ID NO: 828209 - RNA, 20 nt, Human
gcugcggggcagggagaagc

SEQ ID NO: 828210 - RNA, 23 nt, Human
gcuugcuuuuuugccaguuggag

SEQ ID NO: 828211 - RNA, 23 nt, Human
ggaaauguguucccuucucccuc

SEQ ID NO: 828212 - RNA, 18 nt, Human
ggcagccccagccccagg

SEQ ID NO: 828213 - RNA, 22 nt, Human
ggcagggagaagcggcggcggu

SEQ ID NO: 828214 - RNA, 19 nt, Human
gggcagccccagccccagg

SEQ ID NO: 828215 - RNA, 22 nt, Human
gggcaggacgcagcgaaggaag

SEQ ID NO: 828216 - RNA, 23 nt, Human
gggcagggagaagcggcggcggu

SEQ ID NO: 828217 - RNA, 22 nt, Human
gugaagcugucaaugccugcca

SEQ ID NO: 828218 - RNA, 23 nt, Human
gugaagcugucaaugccugccau

SEQ ID NO: 828219 - RNA, 19 nt, Human
uacaacacuguguuaaaca

SEQ ID NO: 828220 - RNA, 19 nt, Human
uagaaaaaaaauacaacac

SEQ ID NO: 828221 - RNA, 19 nt, Human
uagaugguuuucacaccau

SEQ ID NO: 828222 - RNA, 24 nt, Human
uauauuccaaggaaguguuuuaug

SEQ ID NO: 828223 - RNA, 19 nt, Human
uccagcggugccacggccg

SEQ ID NO: 828224 - RNA, 21 nt, Human
uccagcggugccacggccgcg

SEQ ID NO: 828225 - RNA, 27 nt, Human
ucccugcgcgguggaagaggcaaaggc

SEQ ID NO: 828226 - RNA, 22 nt, Human
uccugcgccucccgcgcccccc

SEQ ID NO: 828227 - RNA, 20 nt, Human
ucuggcccaacaggcuucuu

SEQ ID NO: 828228 - RNA, 20 nt, Human
ucuguauuuucacucaacca

SEQ ID NO: 828229 - RNA, 24 nt, Human
ugaaaucugaauacucaaacaccc

SEQ ID NO: 828230 - RNA, 22 nt, Human
ugaauacucaaacaccccuucu

SEQ ID NO: 828231 - RNA, 21 nt, Human
ugacucaaagggaaaugcuag

SEQ ID NO: 828232 - RNA, 19 nt, Human
ugcgcgcugcggggcaggg

SEQ ID NO: 828233 - RNA, 24 nt, Human
ugcuugcuuuuuugccaguuggag

SEQ ID NO: 828234 - RNA, 26 nt, Human
uggaagaggcaaaggcaagcgcaagc

SEQ ID NO: 828235 - RNA, 22 nt, Human
ugggaggugauggucaaaagca

SEQ ID NO: 828236 - RNA, 19 nt, Human
uggggcgggcaggacgcag

SEQ ID NO: 828237 - RNA, 21 nt, Human
ugucuucuggcccaacaggcu

SEQ ID NO: 828238 - RNA, 21 nt, Human
uguugcgggcugacggcagag

SEQ ID NO: 828239 - RNA, 25 nt, Human
uuagagacaaaaagcaguucacuuu

SEQ ID NO: 828240 - RNA, 22 nt, Human
uuccaaggaaguguuuuaugaa

SEQ ID NO: 828241 - RNA, 19 nt, Human
uuccagugaagccacugcu

SEQ ID NO: 828242 - RNA, 20 nt, Human
uuccagugaagccacugcuu

SEQ ID NO: 828243 - RNA, 23 nt, Human
uuccuauuguuauuuucuuuucu

SEQ ID NO: 828244 - RNA, 21 nt, Human
uuuagaaaaaaaauacaacac

SEQ ID NO: 828245 - RNA, 22 nt, Human
uuucacaccaucugucaucaug

SEQ ID NO: 828246 - RNA, 23 nt, Human
uuuccaaguuaaugcagcuauau

SEQ ID NO: 828247 - RNA, 24 nt, Human
cuuuuuuuuuuuuuuuuugcgaau

SEQ ID NO: 828248 - RNA, 20 nt, Human
cuuuuuuuuuuuuuuuuugg

SEQ ID NO: 828249 - RNA, 22 nt, Human
uauauguauguauaggcaucug

SEQ ID NO: 828250 - RNA, 23 nt, Human
uauuuguauauguauguauaggc

SEQ ID NO: 828251 - RNA, 20 nt, Human
uguauauguauguauaggca

SEQ ID NO: 828252 - RNA, 18 nt, Human
uucacaagacgggaggcc

SEQ ID NO: 828253 - RNA, 20 nt, Human
uucacaagacgggaggccau

SEQ ID NO: 828254 - RNA, 24 nt, Human
uugaaguucacaagacgggaggcc

SEQ ID NO: 828255 - RNA, 21 nt, Human
uuuuuuuuuuuuuuuuugcga

SEQ ID NO: 828256 - RNA, 22 nt, Human
agaauaaauagagucccaggca

SEQ ID NO: 828257 - RNA, 23 nt, Human
aggcagggcagaguucauugggg

SEQ ID NO: 828258 - RNA, 21 nt, Human
auaaagaagcucacgcccaca

SEQ ID NO: 828259 - RNA, 22 nt, Human
cagggugcugggcgggcccgug

SEQ ID NO: 828260 - RNA, 18 nt, Human
cccacccuuccagcucca

SEQ ID NO: 828261 - RNA, 20 nt, Human
cccacccuuccagcuccagc

SEQ ID NO: 828262 - RNA, 19 nt, Human
ccuggugucccagcagggu

SEQ ID NO: 828263 - RNA, 21 nt, Human
ggcuuucgagaggcgaaacug

SEQ ID NO: 828264 - RNA, 21 nt, Human
ggugaagcaacccgcgccugu

SEQ ID NO: 828265 - RNA, 20 nt, Human
ggugcugggcgggcccguga

SEQ ID NO: 828266 - RNA, 23 nt, Human
guaguacaugacgguguggguga

SEQ ID NO: 828267 - RNA, 23 nt, Human
uaaagaagcucacgcccacagug

SEQ ID NO: 828268 - RNA, 22 nt, Human
ucacgcccacaguggagaggua

SEQ ID NO: 828269 - RNA, 21 nt, Human
ugccacacggcugguucagcg

SEQ ID NO: 828270 - RNA, 21 nt, Human
uggcugccauccagggggcug

SEQ ID NO: 828271 - RNA, 24 nt, Human
uuaaucagaauaaauagaguccca

SEQ ID NO: 828272 - RNA, 23 nt, Human
uucacccacccuuccagcuccag

SEQ ID NO: 828273 - RNA, 26 nt, Human
uucacccacccuuccagcuccagccu

SEQ ID NO: 828274 - RNA, 20 nt, Human
uuuuuuuuuugcaaaacccc

SEQ ID NO: 828275 - RNA, 21 nt, Human
uuuuuuuuuuuuuuuuugcaa

SEQ ID NO: 828276 - RNA, 27 nt, Human
uuuuuuuuuuuuuuuuuuuuuuugggg

SEQ ID NO: 828277 - RNA, 23 nt, Human
aaacaacccaaauacauucccca

SEQ ID NO: 828278 - RNA, 26 nt, Human
aaacagccugugaggcacauaaaaau

SEQ ID NO: 828279 - RNA, 21 nt, Human
aaagcaaaauuaaugcccaaa

SEQ ID NO: 828280 - RNA, 21 nt, Human
aaaugauaucucuguuacaga

SEQ ID NO: 828281 - RNA, 24 nt, Human
acaacccaaauacauuccccauac

SEQ ID NO: 828282 - RNA, 24 nt, Human
acuaaaaucuuccacagaccauuc

SEQ ID NO: 828283 - RNA, 18 nt, Human
agagaaagaaggggcugc

SEQ ID NO: 828284 - RNA, 20 nt, Human
aggaauuaucacagcaucug

SEQ ID NO: 828285 - RNA, 19 nt, Human
agggaacagugaccuaaaa

SEQ ID NO: 828286 - RNA, 19 nt, Human
agguucccagucccccauc

SEQ ID NO: 828287 - RNA, 23 nt, Human
auacuaaaaucuuccacagacca

SEQ ID NO: 828288 - RNA, 19 nt, Human
aucuuccacagaccauuca

SEQ ID NO: 828289 - RNA, 25 nt, Human
caaaugccaaacuucaugcuuuagc

SEQ ID NO: 828290 - RNA, 23 nt, Human
cacaccagaccucucagaaggag

SEQ ID NO: 828291 - RNA, 23 nt, Human
cacagcaucugaggcuauauaag

SEQ ID NO: 828292 - RNA, 22 nt, Human
caccagaccucucagaaggagu

SEQ ID NO: 828293 - RNA, 21 nt, Human
caccuucuuuuucuuuugccc

SEQ ID NO: 828294 - RNA, 20 nt, Human
caggcaucagauaagauacu

SEQ ID NO: 828295 - RNA, 23 nt, Human
caugcuuuagcaagggaagaaaa

SEQ ID NO: 828296 - RNA, 18 nt, Human
cauucauuuagaaggggu

SEQ ID NO: 828297 - RNA, 20 nt, Human
ccugucaccuucuuuuucuu

SEQ ID NO: 828298 - RNA, 19 nt, Human
ccuucuuuuucuuuugccc

SEQ ID NO: 828299 - RNA, 20 nt, Human
ccuucuuuuucuuuugcccu

SEQ ID NO: 828300 - RNA, 21 nt, Human
cgggaucaagcggcccgccgg

SEQ ID NO: 828301 - RNA, 26 nt, Human
cuuugucaaggaagcaaggaaguuau

SEQ ID NO: 828302 - RNA, 20 nt, Human
gcagggaaaugaaagaacuc

SEQ ID NO: 828303 - RNA, 18 nt, Human
gggcucacaaaaacaggc

SEQ ID NO: 828304 - RNA, 26 nt, Human
uaaaaacaacccaaauacauucccca

SEQ ID NO: 828305 - RNA, 25 nt, Human
uacuaacacacuuaaggcucaaaaa

SEQ ID NO: 828306 - RNA, 19 nt, Human
uagcaagggaagaaaaggu

SEQ ID NO: 828307 - RNA, 19 nt, Human
uagcagggaaaugaaagaa

SEQ ID NO: 828308 - RNA, 24 nt, Human
ucaaaaagcaaaauuaaugcccaa

SEQ ID NO: 828309 - RNA, 18 nt, Human
ucaaggaagcaaggaagu

SEQ ID NO: 828310 - RNA, 27 nt, Human
ucaccuucuuuuucuuuugcccugaga

SEQ ID NO: 828311 - RNA, 24 nt, Human
ucauguacuaacaucaucaacacu

SEQ ID NO: 828312 - RNA, 21 nt, Human
uccccauacuacauacugauu

SEQ ID NO: 828313 - RNA, 18 nt, Human
ucccccguauuagcacca

SEQ ID NO: 828314 - RNA, 24 nt, Human
uccccuuuucuuuaaaaacaaccc

SEQ ID NO: 828315 - RNA, 18 nt, Human
ucgaagccugcuucacuu

SEQ ID NO: 828316 - RNA, 28 nt, Human
ucuccacauaaaugauaucucuguuaca

SEQ ID NO: 828317 - RNA, 20 nt, Human
ugagaagguggccuccuugu

SEQ ID NO: 828318 - RNA, 21 nt, Human
ugcaaagaucuuggaucccug

SEQ ID NO: 828319 - RNA, 25 nt, Human
ugcaaagaucuuggaucccuguucc

SEQ ID NO: 828320 - RNA, 20 nt, Human
ugcccaaacagccugugagg

SEQ ID NO: 828321 - RNA, 24 nt, Human
uucuccauccuacuaacacacuua

SEQ ID NO: 828322 - RNA, 24 nt, Human
uuuagcagggaaaugaaagaacuc

SEQ ID NO: 828323 - RNA, 26 nt, Human
uuuuuuuuguuuuuuuuuuuuuuuuu

SEQ ID NO: 828324 - RNA, 18 nt, Human
aacaguacauaaaagaaa

SEQ ID NO: 828325 - RNA, 21 nt, Human
acaacggucacaggccaggcc

SEQ ID NO: 828326 - RNA, 19 nt, Human
acuuugagagguccuaggg

SEQ ID NO: 828327 - RNA, 23 nt, Human
agaugcucauucucuuuuuuugg

SEQ ID NO: 828328 - RNA, 21 nt, Human
caacggucacaggccaggccu

SEQ ID NO: 828329 - RNA, 19 nt, Human
cagacaaggacaugcacca

SEQ ID NO: 828330 - RNA, 22 nt, Human
cagacaaggacaugcaccagug

SEQ ID NO: 828331 - RNA, 23 nt, Human
ccagauuccaguauccaucagca

SEQ ID NO: 828332 - RNA, 23 nt, Human
cccuaugguuacauguaugaaau

SEQ ID NO: 828333 - RNA, 18 nt, Human
cuacuuugagagguccua

SEQ ID NO: 828334 - RNA, 18 nt, Human
cucacuaucaugcucacu

SEQ ID NO: 828335 - RNA, 23 nt, Human
cuguguaugaauucugacuuccu

SEQ ID NO: 828336 - RNA, 18 nt, Human
cuguguuucacuguguau

SEQ ID NO: 828337 - RNA, 20 nt, Human
cuugaagacaauugcagauu

SEQ ID NO: 828338 - RNA, 19 nt, Human
uacaucugagcuccacaga

SEQ ID NO: 828339 - RNA, 21 nt, Human
uacccguauaaccuugaagac

SEQ ID NO: 828340 - RNA, 24 nt, Human
uaggcgaagcugaacuuugagaug

SEQ ID NO: 828341 - RNA, 24 nt, Human
ucacagagagaaaacugaaguagg

SEQ ID NO: 828342 - RNA, 22 nt, Human
ucacaggccaggccugugacau

SEQ ID NO: 828343 - RNA, 23 nt, Human
ucacagucacaugacugacaucc

SEQ ID NO: 828344 - RNA, 22 nt, Human
ucagucacagagagaaaacuga

SEQ ID NO: 828345 - RNA, 21 nt, Human
ucugccagggaccagauucca

SEQ ID NO: 828346 - RNA, 19 nt, Human
ugaaaggugaggcugaugu

SEQ ID NO: 828347 - RNA, 21 nt, Human
ugaaauagugaaaggugaggc

SEQ ID NO: 828348 - RNA, 21 nt, Human
ugaagacaauugcagauuaca

SEQ ID NO: 828349 - RNA, 19 nt, Human
ugaaguaggcgaagcugaa

SEQ ID NO: 828350 - RNA, 20 nt, Human
ugagagguccuagggucaca

SEQ ID NO: 828351 - RNA, 18 nt, Human
ugcacuaguaagcuuuaa

SEQ ID NO: 828352 - RNA, 20 nt, Human
ugccagggaccagauuccag

SEQ ID NO: 828353 - RNA, 21 nt, Human
uucacuguguaugaauucuga

SEQ ID NO: 828354 - RNA, 19 nt, Human
uuuaaaguaucuugccugg

SEQ ID NO: 828355 - RNA, 21 nt, Human
aaaaaacagcagaaauaaaau

SEQ ID NO: 828356 - RNA, 24 nt, Human
aaaacagcagaaauaaaagggagc

SEQ ID NO: 828357 - RNA, 24 nt, Human
aaaguccauuugauaacaaagcaa

SEQ ID NO: 828358 - RNA, 19 nt, Human
aacauggugaaaccccguc

SEQ ID NO: 828359 - RNA, 20 nt, Human
aacauggugaaaccccgucu

SEQ ID NO: 828360 - RNA, 23 nt, Human
aagaguucaagaccagucuggcc

SEQ ID NO: 828361 - RNA, 18 nt, Human
aagcaggagaaucacuug

SEQ ID NO: 828362 - RNA, 24 nt, Human
aagcaggagaaucacuugaacccg

SEQ ID NO: 828363 - RNA, 25 nt, Human
aagcaggagaaucacuugaacccgg

SEQ ID NO: 828364 - RNA, 22 nt, Human
aaggugagcguaugcugguaug

SEQ ID NO: 828365 - RNA, 22 nt, Human
aagugcuacaccaggaauaugu

SEQ ID NO: 828366 - RNA, 24 nt, Human
aaucacuugaacccgggaggcgga

SEQ ID NO: 828367 - RNA, 23 nt, Human
aauggcucaugccuguaauccca

SEQ ID NO: 828368 - RNA, 24 nt, Human
aauggcucaugccuguaaucccag

SEQ ID NO: 828369 - RNA, 20 nt, Human
acaagagugaaacuccgucu

SEQ ID NO: 828370 - RNA, 21 nt, Human
acaagagugaaacuccgucuc

SEQ ID NO: 828371 - RNA, 23 nt, Human
acaagauggggcuauacacucaa

SEQ ID NO: 828372 - RNA, 21 nt, Human
acagcagaaauaaaauucuug

SEQ ID NO: 828373 - RNA, 22 nt, Human
acuccagccugggugacaagag

SEQ ID NO: 828374 - RNA, 25 nt, Human
acuccagccugggugacaagaguga

SEQ ID NO: 828375 - RNA, 25 nt, Human
acuguacuccagccugggugacaag

SEQ ID NO: 828376 - RNA, 24 nt, Human
agcacuuugggaggcugagguggg

SEQ ID NO: 828377 - RNA, 23 nt, Human
agccaggcgugguagugugugcc

SEQ ID NO: 828378 - RNA, 24 nt, Human
aggcggagguugccauaagccgag

SEQ ID NO: 828379 - RNA, 24 nt, Human
aggcgugguagugugugccuguaa

SEQ ID NO: 828380 - RNA, 24 nt, Human
aggcugagguggguggaucaccug

SEQ ID NO: 828381 - RNA, 22 nt, Human
agguggguggaucaccugaggu

SEQ ID NO: 828382 - RNA, 22 nt, Human
agucuggccaacauggugaaac

SEQ ID NO: 828383 - RNA, 24 nt, Human
agucuggccaacauggugaaaccc

SEQ ID NO: 828384 - RNA, 22 nt, Human
auaaaacacagauaguaaaagc

SEQ ID NO: 828385 - RNA, 24 nt, Human
aucgugccacuguacuccagccug

SEQ ID NO: 828386 - RNA, 18 nt, Human
aucugcaaagcucuccuu

SEQ ID NO: 828387 - RNA, 19 nt, Human
augccuguaaucccagcac

SEQ ID NO: 828388 - RNA, 22 nt, Human
caaagccccucagucuccuucc

SEQ ID NO: 828389 - RNA, 23 nt, Human
caaagccccucagucuccuucca

SEQ ID NO: 828390 - RNA, 25 nt, Human
caacaugaauucaagcucuggcucu

SEQ ID NO: 828391 - RNA, 20 nt, Human
caacauggucucuaggcuga

SEQ ID NO: 828392 - RNA, 21 nt, Human
caacauggugaaaccccgucu

SEQ ID NO: 828393 - RNA, 24 nt, Human
caagaccagucuggccaacauggu

SEQ ID NO: 828394 - RNA, 23 nt, Human
cacagauaguaaaagcacugaaa

SEQ ID NO: 828395 - RNA, 25 nt, Human
cacuauaucuuucauaaaauaaaca

SEQ ID NO: 828396 - RNA, 19 nt, Human
cacuguacuccagccuggg

SEQ ID NO: 828397 - RNA, 19 nt, Human
cacuguacuccagccuggg

SEQ ID NO: 828398 - RNA, 19 nt, Human
cacuguacuccagccuggg

SEQ ID NO: 828399 - RNA, 22 nt, Human
cacuguacuccagccuggguga

SEQ ID NO: 828400 - RNA, 23 nt, Human
cacuguacuccagccugggugac

SEQ ID NO: 828401 - RNA, 24 nt, Human
cacuguacuccagccugggugaca

SEQ ID NO: 828402 - RNA, 25 nt, Human
cacuguacuccagccugggugacaa

SEQ ID NO: 828403 - RNA, 21 nt, Human
cacuuuguuaauaauuaaggg

SEQ ID NO: 828404 - RNA, 24 nt, Human
cagcacuuugggaggcugaggugg

SEQ ID NO: 828405 - RNA, 20 nt, Human
caugccuguaaucccagcac

SEQ ID NO: 828406 - RNA, 24 nt, Human
caugccuguaaucccagcacuuug

SEQ ID NO: 828407 - RNA, 20 nt, Human
ccacuguacuccagccuggg

SEQ ID NO: 828408 - RNA, 20 nt, Human
ccacuguacuccagccuggg

SEQ ID NO: 828409 - RNA, 20 nt, Human
ccacuguacuccagccuggg

SEQ ID NO: 828410 - RNA, 21 nt, Human
ccacuguacuccagccugggu

SEQ ID NO: 828411 - RNA, 21 nt, Human
ccacuguacuccagccugggu

SEQ ID NO: 828412 - RNA, 24 nt, Human
ccacuguacuccagccugggugac

SEQ ID NO: 828413 - RNA, 20 nt, Human
cccagcuaagcaaucccaua

SEQ ID NO: 828414 - RNA, 22 nt, Human
ccuguaaucccagcacuuuggg

SEQ ID NO: 828415 - RNA, 19 nt, Human
ccuguaaucccagcuacuc

SEQ ID NO: 828416 - RNA, 21 nt, Human
ccuguaaucccagcuacucgg

SEQ ID NO: 828417 - RNA, 24 nt, Human
cgggaagcugaagcaggagaauca

SEQ ID NO: 828418 - RNA, 23 nt, Human
cuaagcaaucccauaaaaaugag

SEQ ID NO: 828419 - RNA, 24 nt, Human
cucaugccuguaaucccagcacuu

SEQ ID NO: 828420 - RNA, 21 nt, Human
cugcagcgugcggcgaagucc

SEQ ID NO: 828421 - RNA, 22 nt, Human
cuggccaacauggugaaacccc

SEQ ID NO: 828422 - RNA, 23 nt, Human
gacuuaguuccuuucuuuagcag

SEQ ID NO: 828423 - RNA, 23 nt, Human
gagaaucacuugaacccgggagg

SEQ ID NO: 828424 - RNA, 23 nt, Human
gagguggguggaucaccugaggu

SEQ ID NO: 828425 - RNA, 23 nt, Human
gaucaccugaggucaagaguuca

SEQ ID NO: 828426 - RNA, 24 nt, Human
gaucaccugaggucaagaguucaa

SEQ ID NO: 828427 - RNA, 21 nt, Human
gcagaaauaaaauucuuggca

SEQ ID NO: 828428 - RNA, 18 nt, Human
gcagcaaaaaaaacagca

SEQ ID NO: 828429 - RNA, 22 nt, Human
gccaacauggugaaaccccguc

SEQ ID NO: 828430 - RNA, 19 nt, Human
gccacuguacuccagccug

SEQ ID NO: 828431 - RNA, 24 nt, Human
gccacuguacuccagccuggguga

SEQ ID NO: 828432 - RNA, 23 nt, Human
gcgaaguccgggcaggccccgaa

SEQ ID NO: 828433 - RNA, 23 nt, Human
ggaaacacaugaggaaagucaac

SEQ ID NO: 828434 - RNA, 22 nt, Human
ggaagggaugaaagaguucucu

SEQ ID NO: 828435 - RNA, 24 nt, Human
ggagguugccauaagccgagaucg

SEQ ID NO: 828436 - RNA, 19 nt, Human
ggccauuauuauugucucu

SEQ ID NO: 828437 - RNA, 23 nt, Human
ggccgggcgcaauggcucaugcc

SEQ ID NO: 828438 - RNA, 21 nt, Human
ggcucaugccuguaaucccag

SEQ ID NO: 828439 - RNA, 24 nt, Human
gggcgcaauggcucaugccuguaa

SEQ ID NO: 828440 - RNA, 24 nt, Human
gguagugugugccuguaaucccag

SEQ ID NO: 828441 - RNA, 22 nt, Human
ggugugagccuucaggcagagu

SEQ ID NO: 828442 - RNA, 25 nt, Human
guacuccagccugggugacaagagu

SEQ ID NO: 828443 - RNA, 21 nt, Human
gugugagccuucaggcagagu

SEQ ID NO: 828444 - RNA, 21 nt, Human
uaaaaauacaaaaauuagcca

SEQ ID NO: 828445 - RNA, 22 nt, Human
uaaagucaggaccuugccaacu

SEQ ID NO: 828446 - RNA, 22 nt, Human
uaagccgagaucgugccacugu

SEQ ID NO: 828447 - RNA, 24 nt, Human
uaaggccgggcgcaauggcucaug

SEQ ID NO: 828448 - RNA, 23 nt, Human
uacuccagccugggugacaagag

SEQ ID NO: 828449 - RNA, 25 nt, Human
uacuccagccugggugacaagagug

SEQ ID NO: 828450 - RNA, 24 nt, Human
uagacaaccugagauauguuguuc

SEQ ID NO: 828451 - RNA, 21 nt, Human
uagauaaagugcuuagccuag

SEQ ID NO: 828452 - RNA, 19 nt, Human
uagcagcaaaaaaaacagc

SEQ ID NO: 828453 - RNA, 21 nt, Human
uagucuagcgauucuggagca

SEQ ID NO: 828454 - RNA, 24 nt, Human
uagugugugccuguaaucccagcu

SEQ ID NO: 828455 - RNA, 24 nt, Human
ucacuugaacccgggaggcggagg

SEQ ID NO: 828456 - RNA, 25 nt, Human
ucagaccaacaugaauucaagcucu

SEQ ID NO: 828457 - RNA, 19 nt, Human
ucagucuccuuccagagag

SEQ ID NO: 828458 - RNA, 22 nt, Human
ucaugccuguaaucccagcacu

SEQ ID NO: 828459 - RNA, 19 nt, Human
uccagccugggugacaaga

SEQ ID NO: 828460 - RNA, 23 nt, Human
ucgugccacuguacuccagccug

SEQ ID NO: 828461 - RNA, 20 nt, Human
ucucaaaaaacaaaaacaaa

SEQ ID NO: 828462 - RNA, 20 nt, Human
ucucuugcuuauuguuuagu

SEQ ID NO: 828463 - RNA, 24 nt, Human
ucuggccaacauggugaaaccccg

SEQ ID NO: 828464 - RNA, 26 nt, Human
ucuuucauaaaauaaacaaaaaguau

SEQ ID NO: 828465 - RNA, 20 nt, Human
ugaagcaggagaaucacuug

SEQ ID NO: 828466 - RNA, 24 nt, Human
ugaagcaggagaaucacuugaacc

SEQ ID NO: 828467 - RNA, 21 nt, Human
ugacucacuucauuugaauag

SEQ ID NO: 828468 - RNA, 24 nt, Human
ugagccuucaggcagaguguggug

SEQ ID NO: 828469 - RNA, 18 nt, Human
ugaggaaagucaacaugg

SEQ ID NO: 828470 - RNA, 20 nt, Human
ugagguggguggaucaccug

SEQ ID NO: 828471 - RNA, 24 nt, Human
ugagguggguggaucaccugaggu

SEQ ID NO: 828472 - RNA, 26 nt, Human
ugagguggguggaucaccugagguca

SEQ ID NO: 828473 - RNA, 18 nt, Human
ugaguuuauuugaugccu

SEQ ID NO: 828474 - RNA, 23 nt, Human
ugccauaagccgagaucgugcca

SEQ ID NO: 828475 - RNA, 18 nt, Human
ugccugaacuuaaaucac

SEQ ID NO: 828476 - RNA, 23 nt, Human
ugccuguaaucccagcacuuugg

SEQ ID NO: 828477 - RNA, 24 nt, Human
ugccuguaaucccagcuacucggg

SEQ ID NO: 828478 - RNA, 22 nt, Human
ugcuacaccaggaauauguaug

SEQ ID NO: 828479 - RNA, 24 nt, Human
uggaucaccugaggucaagaguuc

SEQ ID NO: 828480 - RNA, 27 nt, Human
uggaucaccugaggucaagaguucaag

SEQ ID NO: 828481 - RNA, 24 nt, Human
uggccaacauggugaaaccccguc

SEQ ID NO: 828482 - RNA, 24 nt, Human
uggcucaugccuguaaucccagca

SEQ ID NO: 828483 - RNA, 20 nt, Human
ugggaggcugaggugggugg

SEQ ID NO: 828484 - RNA, 23 nt, Human
ugggaggcugagguggguggauc

SEQ ID NO: 828485 - RNA, 24 nt, Human
ugggaggcugagguggguggauca

SEQ ID NO: 828486 - RNA, 24 nt, Human
uggguggaucaccugaggucaaga

SEQ ID NO: 828487 - RNA, 24 nt, Human
ugguagugugugccuguaauccca

SEQ ID NO: 828488 - RNA, 19 nt, Human
ugguaugaggugugagccu

SEQ ID NO: 828489 - RNA, 19 nt, Human
ugugagccuucaggcagag

SEQ ID NO: 828490 - RNA, 18 nt, Human
uguggugucauuguucuu

SEQ ID NO: 828491 - RNA, 21 nt, Human
uguuugaaggacccacacucu

SEQ ID NO: 828492 - RNA, 30 nt, Human
uuaaggauaggcuauuuuguuaucugcaaa

SEQ ID NO: 828493 - RNA, 24 nt, Human
uuagcagcaaaaaaaacagcagaa

SEQ ID NO: 828494 - RNA, 23 nt, Human
uucaggcagaguguggugucauu

SEQ ID NO: 828495 - RNA, 23 nt, Human
uucccuuaagucucaguuuacuc

SEQ ID NO: 828496 - RNA, 21 nt, Human
uuccuugacuaagaauucuag

SEQ ID NO: 828497 - RNA, 24 nt, Human
uugaacccgggaggcggagguugc

SEQ ID NO: 828498 - RNA, 28 nt, Human
uugaauagaagaugguggucggacuucc

SEQ ID NO: 828499 - RNA, 22 nt, Human
uuggcaggcugcucuacagaau

SEQ ID NO: 828500 - RNA, 25 nt, Human
uugggaggcugagguggguggauca

SEQ ID NO: 828501 - RNA, 19 nt, Human
uugguuagcgaaguuucuc

SEQ ID NO: 828502 - RNA, 20 nt, Human
uuuaaaguggaaaaggaguu

SEQ ID NO: 828503 - RNA, 22 nt, Human
uuuacaaagccccucagucucc

SEQ ID NO: 828504 - RNA, 20 nt, Human
uuucccaacauccauccugg

SEQ ID NO: 828505 - RNA, 19 nt, Human
uuugaaggacccacacucu

SEQ ID NO: 828506 - RNA, 23 nt, Human
aaacaugcaaacacuacagagaa

SEQ ID NO: 828507 - RNA, 21 nt, Human
aaaccaaagaaccucaaacac

SEQ ID NO: 828508 - RNA, 18 nt, Human
aacaaagcuccagcugcc

SEQ ID NO: 828509 - RNA, 22 nt, Human
aaguaggaaggugucaacccag

SEQ ID NO: 828510 - RNA, 22 nt, Human
aaucuguaaauaaaaucuccuc

SEQ ID NO: 828511 - RNA, 24 nt, Human
acaaaaccaaagaaccucaaacac

SEQ ID NO: 828512 - RNA, 20 nt, Human
acaccaagaaacaugcaaac

SEQ ID NO: 828513 - RNA, 19 nt, Human
acccgcugccuccucgucu

SEQ ID NO: 828514 - RNA, 23 nt, Human
acucugaggcuucuuuaaaacac

SEQ ID NO: 828515 - RNA, 22 nt, Human
agacaacaaacaccaagaaaca

SEQ ID NO: 828516 - RNA, 23 nt, Human
agacaacaaacaccaagaaacau

SEQ ID NO: 828517 - RNA, 18 nt, Human
agacacccgcaucauagg

SEQ ID NO: 828518 - RNA, 22 nt, Human
agacgagaaguaccuaguccca

SEQ ID NO: 828519 - RNA, 24 nt, Human
agcccaucaacaggcccuggaggc

SEQ ID NO: 828520 - RNA, 21 nt, Human
aggcaggaccucuacugagug

SEQ ID NO: 828521 - RNA, 23 nt, Human
aggccagguaaaauaggaucagg

SEQ ID NO: 828522 - RNA, 23 nt, Human
aggccucccccugcagacaagga

SEQ ID NO: 828523 - RNA, 20 nt, Human
aucacccaaaaguagacaaa

SEQ ID NO: 828524 - RNA, 24 nt, Human
auggaagaaaccccacuuuauaca

SEQ ID NO: 828525 - RNA, 23 nt, Human
caaaaccaaagaaccucaaacac

SEQ ID NO: 828526 - RNA, 24 nt, Human
caaacacuacagagaaucuguaug

SEQ ID NO: 828527 - RNA, 19 nt, Human
caaagcagcuacccucagc

SEQ ID NO: 828528 - RNA, 20 nt, Human
caaagcccaucaacaggccc

SEQ ID NO: 828529 - RNA, 20 nt, Human
caagaaacaugcaaacacua

SEQ ID NO: 828530 - RNA, 21 nt, Human
caagaaacaugcaaacacuac

SEQ ID NO: 828531 - RNA, 22 nt, Human
caagacgagaaguaccuagucc

SEQ ID NO: 828532 - RNA, 19 nt, Human
caagauagacaccaccugu

SEQ ID NO: 828533 - RNA, 22 nt, Human
caagauagacaccaccuguucc

SEQ ID NO: 828534 - RNA, 23 nt, Human
caauauggaagaaaccccacuuu

SEQ ID NO: 828535 - RNA, 19 nt, Human
cacucugaggcuucuuuaa

SEQ ID NO: 828536 - RNA, 24 nt, Human
cagaagucuccccaacaaagcucc

SEQ ID NO: 828537 - RNA, 19 nt, Human
cagauuuuaaaaugacauu

SEQ ID NO: 828538 - RNA, 24 nt, Human
cagcaaagcagcuacccucagcuc

SEQ ID NO: 828539 - RNA, 18 nt, Human
cagcacgccccugcagaa

SEQ ID NO: 828540 - RNA, 18 nt, Human
cauauuuuauauugauga

SEQ ID NO: 828541 - RNA, 19 nt, Human
caugaaagaaaauaaugac

SEQ ID NO: 828542 - RNA, 19 nt, Human
caugacacaagccuuagcu

SEQ ID NO: 828543 - RNA, 21 nt, Human
caugacacaagccuuagcuca

SEQ ID NO: 828544 - RNA, 22 nt, Human
cauuauguuucucauaucuaua

SEQ ID NO: 828545 - RNA, 19 nt, Human
cauucauuccaaauuuaga

SEQ ID NO: 828546 - RNA, 24 nt, Human
ccaaaccaccccagcacgccccug

SEQ ID NO: 828547 - RNA, 21 nt, Human
ccacacauaaccacacaagua

SEQ ID NO: 828548 - RNA, 24 nt, Human
ccacagaacuggcuuuuacuaaca

SEQ ID NO: 828549 - RNA, 19 nt, Human
ccacggaacagcaccucug

SEQ ID NO: 828550 - RNA, 25 nt, Human
ccagaagucuccccaacaaagcucc

SEQ ID NO: 828551 - RNA, 22 nt, Human
ccagccccacacauaaccacac

SEQ ID NO: 828552 - RNA, 19 nt, Human
cccaaaaguagacaaaaaa

SEQ ID NO: 828553 - RNA, 18 nt, Human
cccaucaacaggcccugg

SEQ ID NO: 828554 - RNA, 22 nt, Human
ccccaacaaagcuccagcugcc

SEQ ID NO: 828555 - RNA, 19 nt, Human
cccgcugccuccucgucug

SEQ ID NO: 828556 - RNA, 22 nt, Human
ccgccgccuccuccgagggccc

SEQ ID NO: 828557 - RNA, 24 nt, Human
ccgccgccuccuccgagggcccgc

SEQ ID NO: 828558 - RNA, 23 nt, Human
ccugcaaagcccaucaacaggcc

SEQ ID NO: 828559 - RNA, 18 nt, Human
cgccccgccgccgccucc

SEQ ID NO: 828560 - RNA, 18 nt, Human
cgccccgccgccgccucc

SEQ ID NO: 828561 - RNA, 25 nt, Human
cgcugcagcucgccccgccgccgcc

SEQ ID NO: 828562 - RNA, 19 nt, Human
cucacaagacgagaaguac

SEQ ID NO: 828563 - RNA, 18 nt, Human
cucaggaauagaagggcc

SEQ ID NO: 828564 - RNA, 18 nt, Human
cuccccaacaaagcucca

SEQ ID NO: 828565 - RNA, 25 nt, Human
cugcagcaaacagacucuccaggca

SEQ ID NO: 828566 - RNA, 23 nt, Human
cuggaacuguauuuacuuuucuu

SEQ ID NO: 828567 - RNA, 22 nt, Human
cuuagcucacaagacgagaagu

SEQ ID NO: 828568 - RNA, 18 nt, Human
gacacugccauacauuca

SEQ ID NO: 828569 - RNA, 21 nt, Human
gacacuggggcugggaaaugc

SEQ ID NO: 828570 - RNA, 27 nt, Human
gacacuggggcugggaaaugcucaggc

SEQ ID NO: 828571 - RNA, 18 nt, Human
gagaggggcugcccugga

SEQ ID NO: 828572 - RNA, 21 nt, Human
gagcaccgugcuggcuguguu

SEQ ID NO: 828573 - RNA, 20 nt, Human
gaggcaggaccucuacugag

SEQ ID NO: 828574 - RNA, 19 nt, Human
gcugccuccucgucugaga

SEQ ID NO: 828575 - RNA, 20 nt, Human
ggaaaugcucaggccucccc

SEQ ID NO: 828576 - RNA, 21 nt, Human
ggaacagcaccucugaugaca

SEQ ID NO: 828577 - RNA, 18 nt, Human
ggaguggucgcucccuca

SEQ ID NO: 828578 - RNA, 24 nt, Human
ggcuucuuuaaaacacgaagguga

SEQ ID NO: 828579 - RNA, 19 nt, Human
ggcuuuuacuaacaaaacc

SEQ ID NO: 828580 - RNA, 24 nt, Human
gggaacaauguuauuuggaugaga

SEQ ID NO: 828581 - RNA, 24 nt, Human
gggcugcuggacugccugcaaagc

SEQ ID NO: 828582 - RNA, 20 nt, Human
gguaaauguucuggaacugc

SEQ ID NO: 828583 - RNA, 20 nt, Human
gguccuguccguccuuggag

SEQ ID NO: 828584 - RNA, 19 nt, Human
guacggcgcgcgggcgggg

SEQ ID NO: 828585 - RNA, 22 nt, Human
gucugcagcaaacagacucucc

SEQ ID NO: 828586 - RNA, 23 nt, Human
uaaaacagcuuacaccuggagac

SEQ ID NO: 828587 - RNA, 27 nt, Human
uaaaauaggaucaggaugauuucuauu

SEQ ID NO: 828588 - RNA, 21 nt, Human
uaaccacacaaguaaaaagga

SEQ ID NO: 828589 - RNA, 23 nt, Human
uaauguugauaaacugaggugga

SEQ ID NO: 828590 - RNA, 18 nt, Human
uacaguguggccaucaaa

SEQ ID NO: 828591 - RNA, 19 nt, Human
uaggaggagcgaggccgcg

SEQ ID NO: 828592 - RNA, 21 nt, Human
ucaggagcaagggugucugca

SEQ ID NO: 828593 - RNA, 24 nt, Human
ucaggcacuaagcaaucuggcggc

SEQ ID NO: 828594 - RNA, 22 nt, Human
ucaggccucccccugcagacaa

SEQ ID NO: 828595 - RNA, 18 nt, Human
uccaaaagguugaaguaa

SEQ ID NO: 828596 - RNA, 19 nt, Human
uccugucccggcgcugcag

SEQ ID NO: 828597 - RNA, 26 nt, Human
ucuaacaugaaagaaaauaaugacuc

SEQ ID NO: 828598 - RNA, 21 nt, Human
ucugagaggggcugcccugga

SEQ ID NO: 828599 - RNA, 19 nt, Human
ucugcaauaacccaucugg

SEQ ID NO: 828600 - RNA, 20 nt, Human
ucugcagacaccuggcugca

SEQ ID NO: 828601 - RNA, 23 nt, Human
ucugucaauccucuguccuguga

SEQ ID NO: 828602 - RNA, 20 nt, Human
ucuuuaaaacacgaagguga

SEQ ID NO: 828603 - RNA, 19 nt, Human
ugacauuaugcauguacau

SEQ ID NO: 828604 - RNA, 19 nt, Human
ugacucaggagcaagggug

SEQ ID NO: 828605 - RNA, 24 nt, Human
ugagauguucugaaaucugauuca

SEQ ID NO: 828606 - RNA, 24 nt, Human
ugaggcagggguuaaugcagaacc

SEQ ID NO: 828607 - RNA, 18 nt, Human
ugcaauaacccaucugga

SEQ ID NO: 828608 - RNA, 18 nt, Human
ugcagacaccuggcugca

SEQ ID NO: 828609 - RNA, 20 nt, Human
ugcaggugugggcugcugga

SEQ ID NO: 828610 - RNA, 20 nt, Human
uggagagcaccgugcuggcu

SEQ ID NO: 828611 - RNA, 18 nt, Human
uggcugcacccgcugccu

SEQ ID NO: 828612 - RNA, 24 nt, Human
uggcugcucugcagacaccuggcu

SEQ ID NO: 828613 - RNA, 18 nt, Human
ugggaaagcucccuuugg

SEQ ID NO: 828614 - RNA, 20 nt, Human
ugggaaaugcucaggccucc

SEQ ID NO: 828615 - RNA, 23 nt, Human
ugggaaaugcucaggccuccccc

SEQ ID NO: 828616 - RNA, 22 nt, Human
ugucaauauggaagaaacccca

SEQ ID NO: 828617 - RNA, 22 nt, Human
ugugacggugucugcuucucuu

SEQ ID NO: 828618 - RNA, 19 nt, Human
ugugguggguggggaggau

SEQ ID NO: 828619 - RNA, 21 nt, Human
uguucccucauuugucaauau

SEQ ID NO: 828620 - RNA, 22 nt, Human
uuagacacauuuuagagaacac

SEQ ID NO: 828621 - RNA, 22 nt, Human
uucaaauucuuuccuucagauu

SEQ ID NO: 828622 - RNA, 21 nt, Human
uuucaggauucccaguuguuu

SEQ ID NO: 828623 - RNA, 21 nt, Human
uuuuguggacuucaaauucuu

SEQ ID NO: 828624 - RNA, 26 nt, Human
aaaaaaaaaaaaaaucacaccgggag

SEQ ID NO: 828625 - RNA, 22 nt, Human
aaaaaaaaaaaucacaccggga

SEQ ID NO: 828626 - RNA, 25 nt, Human
aaaaaaaaaaaucacaccgggagac

SEQ ID NO: 828627 - RNA, 20 nt, Human
aaaaaagaucaaccgauaua

SEQ ID NO: 828628 - RNA, 23 nt, Human
aaaaacaaauacuuuaggacuug

SEQ ID NO: 828629 - RNA, 20 nt, Human
aaaaaguauccauuuuuccc

SEQ ID NO: 828630 - RNA, 24 nt, Human
aaaaugcaacacugcuuuaaaaca

SEQ ID NO: 828631 - RNA, 22 nt, Human
aaaauuccccuuccugcuuucc

SEQ ID NO: 828632 - RNA, 19 nt, Human
aaauucuccacugucuuuu

SEQ ID NO: 828633 - RNA, 23 nt, Human
aaccuguucccugccacauccag

SEQ ID NO: 828634 - RNA, 19 nt, Human
aacuaucucucaucaguag

SEQ ID NO: 828635 - RNA, 18 nt, Human
aagauaaaauaacaaaaa

SEQ ID NO: 828636 - RNA, 20 nt, Human
aagaugaggcggaguagagg

SEQ ID NO: 828637 - RNA, 22 nt, Human
aagaugccauuguuuacaacug

SEQ ID NO: 828638 - RNA, 19 nt, Human
aagcagacaggaacgucuc

SEQ ID NO: 828639 - RNA, 25 nt, Human
aagcauuugacauuuuugaucccuu

SEQ ID NO: 828640 - RNA, 19 nt, Human
aaguggacgguacaaauaa

SEQ ID NO: 828641 - RNA, 18 nt, Human
acaaauggcacauaccau

SEQ ID NO: 828642 - RNA, 21 nt, Human
acacaggagguaaaacuugga

SEQ ID NO: 828643 - RNA, 23 nt, Human
acagaacacagugaggcugcagc

SEQ ID NO: 828644 - RNA, 24 nt, Human
acaggaacgucucgacagcagagg

SEQ ID NO: 828645 - RNA, 19 nt, Human
acaggcgcccgccaccacg

SEQ ID NO: 828646 - RNA, 24 nt, Human
acccgggcuggagugcaguggcgu

SEQ ID NO: 828647 - RNA, 18 nt, Human
acccucgcugcugcuuuc

SEQ ID NO: 828648 - RNA, 24 nt, Human
agacaaaaacaaaggucguauguu

SEQ ID NO: 828649 - RNA, 20 nt, Human
agagacaucuaaacacagca

SEQ ID NO: 828650 - RNA, 28 nt, Human
agagccuucaacuucaaggcagucaggg

SEQ ID NO: 828651 - RNA, 19 nt, Human
agccacagagccuucaacu

SEQ ID NO: 828652 - RNA, 25 nt, Human
agccacagagccuucaacuucaagg

SEQ ID NO: 828653 - RNA, 19 nt, Human
agggcguuucccggcccga

SEQ ID NO: 828654 - RNA, 18 nt, Human
aguagcugggacuacagg

SEQ ID NO: 828655 - RNA, 19 nt, Human
aguagcugggacuacaggc

SEQ ID NO: 828656 - RNA, 18 nt, Human
aguauccauuuuucccca

SEQ ID NO: 828657 - RNA, 24 nt, Human
agucaggccacugauuucuucagg

SEQ ID NO: 828658 - RNA, 19 nt, Human
agugcaguggcguggucuc

SEQ ID NO: 828659 - RNA, 20 nt, Human
agugcaguggcguggucucg

SEQ ID NO: 828660 - RNA, 23 nt, Human
agugcaguggcguggucucggcu

SEQ ID NO: 828661 - RNA, 24 nt, Human
agugcaguggcguggucucggcuc

SEQ ID NO: 828662 - RNA, 22 nt, Human
aguuaugagguguuugcaccac

SEQ ID NO: 828663 - RNA, 25 nt, Human
auccaagacaugagcauggcccaau

SEQ ID NO: 828664 - RNA, 24 nt, Human
augcaacacugcuuuaaaacacca

SEQ ID NO: 828665 - RNA, 21 nt, Human
caaccuuagccucccggguuc

SEQ ID NO: 828666 - RNA, 18 nt, Human
cacacuguucaaagaugc

SEQ ID NO: 828667 - RNA, 24 nt, Human
cacccgggcuggagugcaguggcg

SEQ ID NO: 828668 - RNA, 19 nt, Human
cacuccacgggaagauggc

SEQ ID NO: 828669 - RNA, 20 nt, Human
cacugcaaccuuagccuccc

SEQ ID NO: 828670 - RNA, 21 nt, Human
cacugcaaccuuagccucccg

SEQ ID NO: 828671 - RNA, 23 nt, Human
cacugcaaccuuagccucccggg

SEQ ID NO: 828672 - RNA, 22 nt, Human
cagaacacagugaggcugcagc

SEQ ID NO: 828673 - RNA, 19 nt, Human
cagaauuuaaaugccucuc

SEQ ID NO: 828674 - RNA, 21 nt, Human
cagcacuuuacggaagggagg

SEQ ID NO: 828675 - RNA, 21 nt, Human
cagcauuuccaccucccuugc

SEQ ID NO: 828676 - RNA, 20 nt, Human
cagccggugccuccacuccc

SEQ ID NO: 828677 - RNA, 19 nt, Human
cagcgaggcagauucucuu

SEQ ID NO: 828678 - RNA, 23 nt, Human
caggauacaguaaggcacaagug

SEQ ID NO: 828679 - RNA, 22 nt, Human
caggcaauucucuugccucagc

SEQ ID NO: 828680 - RNA, 21 nt, Human
caggcgcccgccaccacgccu

SEQ ID NO: 828681 - RNA, 18 nt, Human
caucagagacaucauuua

SEQ ID NO: 828682 - RNA, 23 nt, Human
caugugcuuuaacuccccugggu

SEQ ID NO: 828683 - RNA, 21 nt, Human
cauuuaaaauccuauaaauuc

SEQ ID NO: 828684 - RNA, 21 nt, Human
ccacacuccacgggaagaugg

SEQ ID NO: 828685 - RNA, 19 nt, Human
ccagcagcagcuccuccag

SEQ ID NO: 828686 - RNA, 26 nt, Human
ccaguguucucuuuuuguguuuuucu

SEQ ID NO: 828687 - RNA, 20 nt, Human
ccccaacauaagacaaaaac

SEQ ID NO: 828688 - RNA, 23 nt, Human
cccgaguagcugggacuacaggc

SEQ ID NO: 828689 - RNA, 24 nt, Human
cccgaguagcugggacuacaggcg

SEQ ID NO: 828690 - RNA, 22 nt, Human
cccggcgaccugcauccagaga

SEQ ID NO: 828691 - RNA, 20 nt, Human
cccggguucaggcaauucuc

SEQ ID NO: 828692 - RNA, 22 nt, Human
ccgccagucgccgucgccgccc

SEQ ID NO: 828693 - RNA, 19 nt, Human
ccgcucuggccggcggcuc

SEQ ID NO: 828694 - RNA, 20 nt, Human
ccgcucuggccggcggcucc

SEQ ID NO: 828695 - RNA, 22 nt, Human
ccgggcauagcgguagaucucc

SEQ ID NO: 828696 - RNA, 20 nt, Human
ccgucgccgcccccgccgcc

SEQ ID NO: 828697 - RNA, 22 nt, Human
ccgucgccgcccccgccgccgc

SEQ ID NO: 828698 - RNA, 23 nt, Human
ccucccggguucaggcaauucuc

SEQ ID NO: 828699 - RNA, 18 nt, Human
ccucggggacguagacca

SEQ ID NO: 828700 - RNA, 18 nt, Human
ccuguacccccgcccgcc

SEQ ID NO: 828701 - RNA, 18 nt, Human
ccugugguguagucugug

SEQ ID NO: 828702 - RNA, 19 nt, Human
cgccgcccccgccgccgcc

SEQ ID NO: 828703 - RNA, 20 nt, Human
cgcgcggacugagcaugcgc

SEQ ID NO: 828704 - RNA, 24 nt, Human
cgcucugucacccgggcuggagug

SEQ ID NO: 828705 - RNA, 21 nt, Human
cgcugcugcuuucguggcugc

SEQ ID NO: 828706 - RNA, 20 nt, Human
cggcucacugcaaccuuagc

SEQ ID NO: 828707 - RNA, 27 nt, Human
cgggaagauggcgcgcgggggcugguu

SEQ ID NO: 828708 - RNA, 19 nt, Human
cgggccguuugaggaaggc

SEQ ID NO: 828709 - RNA, 24 nt, Human
cucacugcaaccuuagccucccgg

SEQ ID NO: 828710 - RNA, 24 nt, Human
cucagccucccgaguagcugggac

SEQ ID NO: 828711 - RNA, 19 nt, Human
cucauugucagcauuucca

SEQ ID NO: 828712 - RNA, 19 nt, Human
cuccacaugacgguugcac

SEQ ID NO: 828713 - RNA, 20 nt, Human
cuccacaugacgguugcacc

SEQ ID NO: 828714 - RNA, 20 nt, Human
cucccauuuaaaauccuaua

SEQ ID NO: 828715 - RNA, 18 nt, Human
cuccuccaggcuccgggc

SEQ ID NO: 828716 - RNA, 21 nt, Human
cucgcucugucacccgggcug

SEQ ID NO: 828717 - RNA, 24 nt, Human
cucgcucugucacccgggcuggag

SEQ ID NO: 828718 - RNA, 22 nt, Human
cucggcucacugcaaccuuagc

SEQ ID NO: 828719 - RNA, 22 nt, Human
cugaaauuaaaaaaaaaaaaaa

SEQ ID NO: 828720 - RNA, 24 nt, Human
cugaaccaguguucucuuuuugug

SEQ ID NO: 828721 - RNA, 23 nt, Human
cugcaaccuuagccucccggguu

SEQ ID NO: 828722 - RNA, 20 nt, Human
cugcagcacccgccgaucuc

SEQ ID NO: 828723 - RNA, 24 nt, Human
cugcagcacccgccgaucucuuuu

SEQ ID NO: 828724 - RNA, 23 nt, Human
cugcugcuuucguggcugcccgu

SEQ ID NO: 828725 - RNA, 22 nt, Human
cuggcuuuagcuucccauucac

SEQ ID NO: 828726 - RNA, 23 nt, Human
cuugccucagccucccgaguagc

SEQ ID NO: 828727 - RNA, 24 nt, Human
cuugccucagccucccgaguagcu

SEQ ID NO: 828728 - RNA, 21 nt, Human
cuuuagcagcauucaugucau

SEQ ID NO: 828729 - RNA, 20 nt, Human
gacagcagcuuccccacacu

SEQ ID NO: 828730 - RNA, 21 nt, Human
gacccgggcuccgagcccgcu

SEQ ID NO: 828731 - RNA, 24 nt, Human
gacgguacaaauaaaaacaaauac

SEQ ID NO: 828732 - RNA, 25 nt, Human
gaguagcugggacuacaggcgcccg

SEQ ID NO: 828733 - RNA, 20 nt, Human
gcacagucugacacugcacu

SEQ ID NO: 828734 - RNA, 21 nt, Human
gccguuugaggaaggcaggcu

SEQ ID NO: 828735 - RNA, 21 nt, Human
gcgccaggcgcuacuggauuc

SEQ ID NO: 828736 - RNA, 25 nt, Human
gcugcagcacccgccgaucucuuuu

SEQ ID NO: 828737 - RNA, 23 nt, Human
gcugccaaaaaagguuuaaaaag

SEQ ID NO: 828738 - RNA, 19 nt, Human
gcuggagugcaguggcgug

SEQ ID NO: 828739 - RNA, 18 nt, Human
gcugugaaaggacuuggg

SEQ ID NO: 828740 - RNA, 19 nt, Human
ggacugagcaugcgcgcca

SEQ ID NO: 828741 - RNA, 20 nt, Human
ggacugagcaugcgcgccag

SEQ ID NO: 828742 - RNA, 23 nt, Human
ggcugcccgugugcccgcugcuc

SEQ ID NO: 828743 - RNA, 20 nt, Human
ggcuggagugcaguggcgug

SEQ ID NO: 828744 - RNA, 23 nt, Human
gggaagauggcgcgcgggggcug

SEQ ID NO: 828745 - RNA, 20 nt, Human
gggagccccugccccguccc

SEQ ID NO: 828746 - RNA, 26 nt, Human
ggggauucaaaauaucccagcacuuu

SEQ ID NO: 828747 - RNA, 23 nt, Human
ggguguggaguggcucgccuuag

SEQ ID NO: 828748 - RNA, 20 nt, Human
gugcaguggcguggucucgg

SEQ ID NO: 828749 - RNA, 19 nt, Human
gugcgcugacugguugcgg

SEQ ID NO: 828750 - RNA, 18 nt, Human
uaaaaaacaacacaugcg

SEQ ID NO: 828751 - RNA, 25 nt, Human
uaaaugccucucaguccauacagcu

SEQ ID NO: 828752 - RNA, 20 nt, Human
uaacucagugagacuuucac

SEQ ID NO: 828753 - RNA, 20 nt, Human
uaacucagugagacuuucac

SEQ ID NO: 828754 - RNA, 20 nt, Human
uaagaacuaacucagugaga

SEQ ID NO: 828755 - RNA, 20 nt, Human
uaagaacuaacucagugaga

SEQ ID NO: 828756 - RNA, 23 nt, Human
uaauuuauuucugucugcauuca

SEQ ID NO: 828757 - RNA, 23 nt, Human
uaauuuauuucugucugcauuca

SEQ ID NO: 828758 - RNA, 22 nt, Human
uacaggcgcccgccaccacgcc

SEQ ID NO: 828759 - RNA, 22 nt, Human
uaccaucagaguaggcacaguc

SEQ ID NO: 828760 - RNA, 18 nt, Human
uacuuuaggacuuguuuu

SEQ ID NO: 828761 - RNA, 22 nt, Human
uagcagucaaauccuuugguuc

SEQ ID NO: 828762 - RNA, 23 nt, Human
uagccgggucccgagcggcggag

SEQ ID NO: 828763 - RNA, 22 nt, Human
uagccucccggguucaggcaau

SEQ ID NO: 828764 - RNA, 23 nt, Human
uagucugugucugucuggaaugu

SEQ ID NO: 828765 - RNA, 23 nt, Human
ucaaaaaucaaacccaaaggcau

SEQ ID NO: 828766 - RNA, 24 nt, Human
ucaaaauaucccagcacuuuacgg

SEQ ID NO: 828767 - RNA, 24 nt, Human
ucacauuccccaacugcuucaggc

SEQ ID NO: 828768 - RNA, 24 nt, Human
ucacauuccccaacugcuucaggc

SEQ ID NO: 828769 - RNA, 22 nt, Human
ucacccgggcuggagugcagug

SEQ ID NO: 828770 - RNA, 18 nt, Human
ucacugcaaccuuagccu

SEQ ID NO: 828771 - RNA, 23 nt, Human
ucacugcaaccuuagccucccgg

SEQ ID NO: 828772 - RNA, 24 nt, Human
ucacugcaaccuuagccucccggg

SEQ ID NO: 828773 - RNA, 21 nt, Human
ucagagacaucauuuaccaag

SEQ ID NO: 828774 - RNA, 19 nt, Human
ucagagacaucuaaacaca

SEQ ID NO: 828775 - RNA, 23 nt, Human
ucagccucccgaguagcugggac

SEQ ID NO: 828776 - RNA, 23 nt, Human
ucaggccacugauuucuucagga

SEQ ID NO: 828777 - RNA, 18 nt, Human
ucauugucagcauuucca

SEQ ID NO: 828778 - RNA, 21 nt, Human
uccaagacaugagcauggccc

SEQ ID NO: 828779 - RNA, 18 nt, Human
uccauacagcuacucucc

SEQ ID NO: 828780 - RNA, 19 nt, Human
uccauacagcuacucucca

SEQ ID NO: 828781 - RNA, 20 nt, Human
uccauacagcuacucuccac

SEQ ID NO: 828782 - RNA, 18 nt, Human
ucccauucaccuuccucu

SEQ ID NO: 828783 - RNA, 24 nt, Human
ucccgaguagcugggacuacaggc

SEQ ID NO: 828784 - RNA, 21 nt, Human
ucccggguucaggcaauucuc

SEQ ID NO: 828785 - RNA, 21 nt, Human
ucccggguucaggcaauucuc

SEQ ID NO: 828786 - RNA, 24 nt, Human
uccuccacaaaucggaucgcacug

SEQ ID NO: 828787 - RNA, 25 nt, Human
uccuccucauugucagcauuuccac

SEQ ID NO: 828788 - RNA, 23 nt, Human
ucgccgcccccgccgccgcgcgg

SEQ ID NO: 828789 - RNA, 24 nt, Human
ucgccgucgccgcccccgccgccg

SEQ ID NO: 828790 - RNA, 19 nt, Human
ucgcggagcugguuggcgu

SEQ ID NO: 828791 - RNA, 24 nt, Human
ucgcucugucacccgggcuggagu

SEQ ID NO: 828792 - RNA, 22 nt, Human
ucgcugcugcuuucguggcugc

SEQ ID NO: 828793 - RNA, 22 nt, Human
ucuccugugguguagucugugu

SEQ ID NO: 828794 - RNA, 19 nt, Human
ucucgcucugucacccggg

SEQ ID NO: 828795 - RNA, 23 nt, Human
ucucgcucugucacccgggcugg

SEQ ID NO: 828796 - RNA, 24 nt, Human
ucucgcucugucacccgggcugga

SEQ ID NO: 828797 - RNA, 27 nt, Human
ucugcuuacuccggcaaagacgggggc

SEQ ID NO: 828798 - RNA, 24 nt, Human
ucugucacccgggcuggagugcag

SEQ ID NO: 828799 - RNA, 22 nt, Human
ucuguugccugugacaccucug

SEQ ID NO: 828800 - RNA, 24 nt, Human
ucuucaucuuucucauccuccaca

SEQ ID NO: 828801 - RNA, 19 nt, Human
ugaaaggacuugggacaaa

SEQ ID NO: 828802 - RNA, 22 nt, Human
ugaaauaccuauacaaaauuuu

SEQ ID NO: 828803 - RNA, 18 nt, Human
ugacauaauuccuccagu

SEQ ID NO: 828804 - RNA, 19 nt, Human
ugacuaaauccguuaauga

SEQ ID NO: 828805 - RNA, 18 nt, Human
ugagauagagucucgcuc

SEQ ID NO: 828806 - RNA, 22 nt, Human
ugagauagagucucgcucuguc

SEQ ID NO: 828807 - RNA, 22 nt, Human
ugcacaaauacuaaaauaugua

SEQ ID NO: 828808 - RNA, 21 nt, Human
ugcaccacccucgcugcugcu

SEQ ID NO: 828809 - RNA, 22 nt, Human
ugcaguggcguggucucggcuc

SEQ ID NO: 828810 - RNA, 26 nt, Human
ugccccgucccuguacccccgcccgc

SEQ ID NO: 828811 - RNA, 24 nt, Human
ugccucagccucccgaguagcugg

SEQ ID NO: 828812 - RNA, 21 nt, Human
ugcucgggcagcucgcggagc

SEQ ID NO: 828813 - RNA, 18 nt, Human
uggaaaaauugcucgggc

SEQ ID NO: 828814 - RNA, 24 nt, Human
uggagcgggagccccugccccguc

SEQ ID NO: 828815 - RNA, 20 nt, Human
uggagugcaguggcgugguc

SEQ ID NO: 828816 - RNA, 23 nt, Human
uggagugcaguggcguggucucg

SEQ ID NO: 828817 - RNA, 24 nt, Human
uggagugcaguggcguggucucgg

SEQ ID NO: 828818 - RNA, 24 nt, Human
uggcugcccgugugcccgcugcuc

SEQ ID NO: 828819 - RNA, 21 nt, Human
ugggacuacaggcgcccgcca

SEQ ID NO: 828820 - RNA, 22 nt, Human
ugggacuacaggcgcccgccac

SEQ ID NO: 828821 - RNA, 24 nt, Human
ugggacuacaggcgcccgccacca

SEQ ID NO: 828822 - RNA, 22 nt, Human
uguagucugugucugucuggaa

SEQ ID NO: 828823 - RNA, 26 nt, Human
ugucaaucucuuucuuucucccauuu

SEQ ID NO: 828824 - RNA, 25 nt, Human
ugucuucuucaucuuucucauccuc

SEQ ID NO: 828825 - RNA, 26 nt, Human
uuaaaaugcaacacugcuuuaaaaca

SEQ ID NO: 828826 - RNA, 18 nt, Human
uucacauuccccaacugc

SEQ ID NO: 828827 - RNA, 18 nt, Human
uucacauuccccaacugc

SEQ ID NO: 828828 - RNA, 23 nt, Human
uuccaaccuguuuucagagacau

SEQ ID NO: 828829 - RNA, 19 nt, Human
uuccccuuccugcuuuccu

SEQ ID NO: 828830 - RNA, 21 nt, Human
uucucgcgccgggcuucgcgg

SEQ ID NO: 828831 - RNA, 28 nt, Human
uugcaccacccucgcugcugcuuucgug

SEQ ID NO: 828832 - RNA, 18 nt, Human
uuggcucuuggguuagcu

SEQ ID NO: 828833 - RNA, 19 nt, Human
uuuaaagcuuucuugaaua

SEQ ID NO: 828834 - RNA, 24 nt, Human
uuuaccaaguucuccagugcacca

SEQ ID NO: 828835 - RNA, 18 nt, Human
uuuagaguucacaccuuu

SEQ ID NO: 828836 - RNA, 24 nt, Human
uuucuuucucccauuuaaaauccu

SEQ ID NO: 828837 - RNA, 25 nt, Human
uuuuuuuuuuuugagauagagucuc

SEQ ID NO: 828838 - RNA, 18 nt, Human
uuuuuuuuuuuuuuuuug

SEQ ID NO: 828839 - RNA, 20 nt, Human
aaacaaagaugugaucacuc

SEQ ID NO: 828840 - RNA, 20 nt, Human
acuaccaccaccagauaggu

SEQ ID NO: 828841 - RNA, 19 nt, Human
agaaagaagagaauagcaa

SEQ ID NO: 828842 - RNA, 24 nt, Human
agauaggugugggggagaaagaag

SEQ ID NO: 828843 - RNA, 18 nt, Human
aggaacgcaaauauaaac

SEQ ID NO: 828844 - RNA, 23 nt, Human
auagcaaauggaguccaagaguu

SEQ ID NO: 828845 - RNA, 22 nt, Human
aucacucuauugcacacccaga

SEQ ID NO: 828846 - RNA, 20 nt, Human
auuagagaaucuggucuuag

SEQ ID NO: 828847 - RNA, 21 nt, Human
caaauauaaacgcccacuacc

SEQ ID NO: 828848 - RNA, 23 nt, Human
caaauauaaacgcccacuaccac

SEQ ID NO: 828849 - RNA, 19 nt, Human
caaauggaguccaagaguu

SEQ ID NO: 828850 - RNA, 18 nt, Human
caugaagaaacaaagaug

SEQ ID NO: 828851 - RNA, 23 nt, Human
caugaagaaacaaagaugugauc

SEQ ID NO: 828852 - RNA, 21 nt, Human
cccaacccaaaauuuuuaaga

SEQ ID NO: 828853 - RNA, 26 nt, Human
cuacuacucuccuuuucccuuuccug

SEQ ID NO: 828854 - RNA, 19 nt, Human
cuacucuccuuuucccuuu

SEQ ID NO: 828855 - RNA, 23 nt, Human
cuaucguacaugaagaaacaaag

SEQ ID NO: 828856 - RNA, 23 nt, Human
cucuccuuuucccuuuccugccu

SEQ ID NO: 828857 - RNA, 23 nt, Human
cuuuccugccuuccccaauaccc

SEQ ID NO: 828858 - RNA, 21 nt, Human
gagaaagaagagaauagcaaa

SEQ ID NO: 828859 - RNA, 23 nt, Human
gcacacccagaaacauuagagaa

SEQ ID NO: 828860 - RNA, 22 nt, Human
uaaauaaauugcuagggaauuc

SEQ ID NO: 828861 - RNA, 20 nt, Human
uaagagauuuagaaaugaau

SEQ ID NO: 828862 - RNA, 21 nt, Human
uaaggcaaaaauaguaaaacc

SEQ ID NO: 828863 - RNA, 21 nt, Human
uacaauaugaucauuaacaga

SEQ ID NO: 828864 - RNA, 19 nt, Human
uacccccaacccaaaauuu

SEQ ID NO: 828865 - RNA, 19 nt, Human
uacucuccuuuucccuuuc

SEQ ID NO: 828866 - RNA, 23 nt, Human
uccacaaugggagucaaugaaaa

SEQ ID NO: 828867 - RNA, 23 nt, Human
ugcuagggaauuccacaauggga

SEQ ID NO: 828868 - RNA, 24 nt, Human
uuaacagacuaguucuuauuugga

SEQ ID NO: 828869 - RNA, 22 nt, Human
uuagaaaugaaugaaaaggaac

SEQ ID NO: 828870 - RNA, 22 nt, Human
uuuuuuuuuuuuaaaagugauc

SEQ ID NO: 828871 - RNA, 23 nt, Human
uuuuuuuuuuuuuuuuuuaaaag

SEQ ID NO: 828872 - RNA, 20 nt, Human
aaaaaaacaagguggauaga

SEQ ID NO: 828873 - RNA, 24 nt, Human
aaaaaaauuccaaacacacaccua

SEQ ID NO: 828874 - RNA, 25 nt, Human
aaaaaacaaaagaaaaaaauuccaa

SEQ ID NO: 828875 - RNA, 23 nt, Human
aaaaacucugguuuucauaaucc

SEQ ID NO: 828876 - RNA, 24 nt, Human
aaaaagaaacuaguucuuucaaaa

SEQ ID NO: 828877 - RNA, 23 nt, Human
aaacaaaagaaaaaaauuccaaa

SEQ ID NO: 828878 - RNA, 19 nt, Human
aaacaagguggauagaucu

SEQ ID NO: 828879 - RNA, 18 nt, Human
aagaaaggacacaaaucc

SEQ ID NO: 828880 - RNA, 22 nt, Human
aaggacacaaaucccucucacu

SEQ ID NO: 828881 - RNA, 20 nt, Human
aaggaggggugggggcgaua

SEQ ID NO: 828882 - RNA, 22 nt, Human
aaguagcugggauuucaggcau

SEQ ID NO: 828883 - RNA, 21 nt, Human
acaauaaaaaaacaaggugga

SEQ ID NO: 828884 - RNA, 24 nt, Human
accauguuggccaggcuggucuug

SEQ ID NO: 828885 - RNA, 18 nt, Human
acgggguuucaccauguu

SEQ ID NO: 828886 - RNA, 23 nt, Human
acgggguuucaccauguuggcca

SEQ ID NO: 828887 - RNA, 24 nt, Human
acgggguuucaccauguuggccag

SEQ ID NO: 828888 - RNA, 21 nt, Human
acugcaaccuccgccucccgg

SEQ ID NO: 828889 - RNA, 21 nt, Human
acugcaaccuccgccucccgg

SEQ ID NO: 828890 - RNA, 22 nt, Human
acugcaaccuccgccucccggg

SEQ ID NO: 828891 - RNA, 22 nt, Human
agaaauacauuucacacccuuc

SEQ ID NO: 828892 - RNA, 19 nt, Human
agaggaaagacguuaaacc

SEQ ID NO: 828893 - RNA, 20 nt, Human
agaggaggagaagggggagg

SEQ ID NO: 828894 - RNA, 21 nt, Human
agaggaggagaagggggagga

SEQ ID NO: 828895 - RNA, 23 nt, Human
agaugcaaaguuauaacuaaacu

SEQ ID NO: 828896 - RNA, 19 nt, Human
aggaaaaaggagauguaaa

SEQ ID NO: 828897 - RNA, 19 nt, Human
aggaggagaagggggagga

SEQ ID NO: 828898 - RNA, 20 nt, Human
aggcaugcaccaccacgccc

SEQ ID NO: 828899 - RNA, 22 nt, Human
aggugauccaccugccuuggcc

SEQ ID NO: 828900 - RNA, 22 nt, Human
aguagagacgggguuucaccau

SEQ ID NO: 828901 - RNA, 23 nt, Human
aguagcugggauuucaggcaugc

SEQ ID NO: 828902 - RNA, 21 nt, Human
auucuccugccucagccuccc

SEQ ID NO: 828903 - RNA, 24 nt, Human
auuuuuguauuuuuaguagagacg

SEQ ID NO: 828904 - RNA, 25 nt, Human
caaaggguaaaugacaaagccaaug

SEQ ID NO: 828905 - RNA, 22 nt, Human
caagcaauucuccugccucagc

SEQ ID NO: 828906 - RNA, 27 nt, Human
caagcaauucuccugccucagccuccc

SEQ ID NO: 828907 - RNA, 21 nt, Human
caauucucagaacuugggaca

SEQ ID NO: 828908 - RNA, 22 nt, Human
caccaccacgcccagcuaauuu

SEQ ID NO: 828909 - RNA, 24 nt, Human
caccacgcccagcuaauuuuugua

SEQ ID NO: 828910 - RNA, 21 nt, Human
caccauguuggccaggcuggu

SEQ ID NO: 828911 - RNA, 22 nt, Human
caccauguuggccaggcugguc

SEQ ID NO: 828912 - RNA, 23 nt, Human
caccauguuggccaggcuggucu

SEQ ID NO: 828913 - RNA, 24 nt, Human
caccauguuggccaggcuggucuu

SEQ ID NO: 828914 - RNA, 20 nt, Human
caccccauccuucccgcacc

SEQ ID NO: 828915 - RNA, 25 nt, Human
caccuagaugaccuuucauuacuua

SEQ ID NO: 828916 - RNA, 22 nt, Human
cauaaaauguaucacgugcaua

SEQ ID NO: 828917 - RNA, 24 nt, Human
cauguuggccaggcuggucuugaa

SEQ ID NO: 828918 - RNA, 23 nt, Human
cauuuuuguugcccagacuggag

SEQ ID NO: 828919 - RNA, 24 nt, Human
cauuuuuguugcccagacuggagg

SEQ ID NO: 828920 - RNA, 18 nt, Human
cccaaguagcugggauuu

SEQ ID NO: 828921 - RNA, 24 nt, Human
cccauccuucccgcaccgccucug

SEQ ID NO: 828922 - RNA, 23 nt, Human
cccggguucaagcaauucuccug

SEQ ID NO: 828923 - RNA, 21 nt, Human
cccguccuaucucccaguacc

SEQ ID NO: 828924 - RNA, 18 nt, Human
ccgccgcccgucgcccgc

SEQ ID NO: 828925 - RNA, 20 nt, Human
ccgccgcccgucgcccgcca

SEQ ID NO: 828926 - RNA, 22 nt, Human
ccgccgccugcgucgucgcugc

SEQ ID NO: 828927 - RNA, 25 nt, Human
ccgccgccugcgucgucgcugcugu

SEQ ID NO: 828928 - RNA, 26 nt, Human
ccgccucccggguucaagcaauucuu

SEQ ID NO: 828929 - RNA, 24 nt, Human
ccucccggguucaagcaauucucc

SEQ ID NO: 828930 - RNA, 23 nt, Human
ccucugcccgccgcccgucgccc

SEQ ID NO: 828931 - RNA, 18 nt, Human
ccugagcugggucagcug

SEQ ID NO: 828932 - RNA, 23 nt, Human
ccugccucagccucccaaguagc

SEQ ID NO: 828933 - RNA, 22 nt, Human
ccuggcuggaggcaccaaagag

SEQ ID NO: 828934 - RNA, 22 nt, Human
ccuuaaguaaaggagggguggg

SEQ ID NO: 828935 - RNA, 23 nt, Human
cgcucccgccuccuggcuggagg

SEQ ID NO: 828936 - RNA, 24 nt, Human
cgggguuucaccauguuggccagg

SEQ ID NO: 828937 - RNA, 21 nt, Human
cguacacaccccauccuuccu

SEQ ID NO: 828938 - RNA, 23 nt, Human
cucagccucccaaguagcuggga

SEQ ID NO: 828939 - RNA, 24 nt, Human
cucaggugauccaccugccuuggc

SEQ ID NO: 828940 - RNA, 25 nt, Human
cuccugccucagccucccaaguagc

SEQ ID NO: 828941 - RNA, 18 nt, Human
cucgguuuccuggggucg

SEQ ID NO: 828942 - RNA, 20 nt, Human
cugaccucaggugauccacc

SEQ ID NO: 828943 - RNA, 23 nt, Human
cugcaaccuccgccucccggguu

SEQ ID NO: 828944 - RNA, 24 nt, Human
cugcaaccuccgccucccggguuc

SEQ ID NO: 828945 - RNA, 20 nt, Human
cugcccgccgcccgucgccc

SEQ ID NO: 828946 - RNA, 23 nt, Human
cugccucagccucccaaguagcu

SEQ ID NO: 828947 - RNA, 18 nt, Human
cugcugccgccauuuuga

SEQ ID NO: 828948 - RNA, 20 nt, Human
cuggaggcaccaaagaggag

SEQ ID NO: 828949 - RNA, 22 nt, Human
cuguggaucgcucccgccuccu

SEQ ID NO: 828950 - RNA, 20 nt, Human
cuucaaggaaggaaaaagga

SEQ ID NO: 828951 - RNA, 23 nt, Human
cuucagcuuccccauuaauuuuc

SEQ ID NO: 828952 - RNA, 20 nt, Human
cuugaacuucugaccucagg

SEQ ID NO: 828953 - RNA, 23 nt, Human
gaaaaaggagauguaaaaaacaa

SEQ ID NO: 828954 - RNA, 23 nt, Human
gaacaaauuacaguaagggguau

SEQ ID NO: 828955 - RNA, 19 nt, Human
gacaauaaaaaaacaaggu

SEQ ID NO: 828956 - RNA, 23 nt, Human
gaccucaggugauccaccugccu

SEQ ID NO: 828957 - RNA, 24 nt, Human
gagacgggguuucaccauguuggc

SEQ ID NO: 828958 - RNA, 18 nt, Human
gaggagaagggggaggag

SEQ ID NO: 828959 - RNA, 22 nt, Human
gagggcugugagagaggcagug

SEQ ID NO: 828960 - RNA, 20 nt, Human
gcaccaccacgcccagcuaa

SEQ ID NO: 828961 - RNA, 19 nt, Human
gcagggcaacuugccuguc

SEQ ID NO: 828962 - RNA, 22 nt, Human
gcccagcuaauuuuuguauuuu

SEQ ID NO: 828963 - RNA, 21 nt, Human
gcccauggugugucuugaggg

SEQ ID NO: 828964 - RNA, 22 nt, Human
gccuccgcugccuagaccgaag

SEQ ID NO: 828965 - RNA, 22 nt, Human
gcugcugccgccauuuugaggg

SEQ ID NO: 828966 - RNA, 20 nt, Human
gcugggauuucaggcaugca

SEQ ID NO: 828967 - RNA, 21 nt, Human
ggaggagaagggggaggagga

SEQ ID NO: 828968 - RNA, 19 nt, Human
ggaggaggacgucucugcc

SEQ ID NO: 828969 - RNA, 19 nt, Human
ggaugggggcccugggggu

SEQ ID NO: 828970 - RNA, 20 nt, Human
ggcacuccauaaaauguauc

SEQ ID NO: 828971 - RNA, 24 nt, Human
ggcuggucuugaacuucugaccuc

SEQ ID NO: 828972 - RNA, 22 nt, Human
gggcccauggugugucuugagg

SEQ ID NO: 828973 - RNA, 21 nt, Human
ggggguguugggcgguggccg

SEQ ID NO: 828974 - RNA, 23 nt, Human
gggguuucaccauguuggccagg

SEQ ID NO: 828975 - RNA, 19 nt, Human
ggucuugaacuucugaccu

SEQ ID NO: 828976 - RNA, 23 nt, Human
guaaaaaacaaaucccaacggaa

SEQ ID NO: 828977 - RNA, 21 nt, Human
guaacauuuuaagaaaaccau

SEQ ID NO: 828978 - RNA, 18 nt, Human
guagacaauaaaaaaaca

SEQ ID NO: 828979 - RNA, 23 nt, Human
guagagacgggguuucaccaugu

SEQ ID NO: 828980 - RNA, 26 nt, Human
gugauccaccugccuuggccugaccu

SEQ ID NO: 828981 - RNA, 20 nt, Human
uaaaaagaaacuaguucuuu

SEQ ID NO: 828982 - RNA, 23 nt, Human
uaacagagcucucaauggaaacu

SEQ ID NO: 828983 - RNA, 22 nt, Human
uaagaaaaccauagcauuugac

SEQ ID NO: 828984 - RNA, 20 nt, Human
uaaguuaaaaaaucaggaag

SEQ ID NO: 828985 - RNA, 24 nt, Human
uaauuuuuguauuuuuaguagaga

SEQ ID NO: 828986 - RNA, 21 nt, Human
uacugcaaccuccgccucccg

SEQ ID NO: 828987 - RNA, 23 nt, Human
uacugcaaccuccgccucccggg

SEQ ID NO: 828988 - RNA, 22 nt, Human
uagagacgggguuucaccaugu

SEQ ID NO: 828989 - RNA, 22 nt, Human
uagcaaaccugccucugggccc

SEQ ID NO: 828990 - RNA, 22 nt, Human
uagcccaggacagcugguuaac

SEQ ID NO: 828991 - RNA, 18 nt, Human
uagcugggauuucaggca

SEQ ID NO: 828992 - RNA, 21 nt, Human
uagcuuuuaaagucauuuaca

SEQ ID NO: 828993 - RNA, 18 nt, Human
uagguucuccugccggug

SEQ ID NO: 828994 - RNA, 25 nt, Human
uaguacgcgcuuucucucacuuccu

SEQ ID NO: 828995 - RNA, 24 nt, Human
uaguagagacgggguuucaccaug

SEQ ID NO: 828996 - RNA, 26 nt, Human
uaguagagacgggguuucaccauguu

SEQ ID NO: 828997 - RNA, 19 nt, Human
ucaaaacagauucucuaag

SEQ ID NO: 828998 - RNA, 20 nt, Human
ucagcccagaaucaaaacag

SEQ ID NO: 828999 - RNA, 20 nt, Human
ucagccucccaaguagcugg

SEQ ID NO: 829000 - RNA, 21 nt, Human
ucaggcaugcaccaccacgcc

SEQ ID NO: 829001 - RNA, 21 nt, Human
ucaggugauccaccugccuug

SEQ ID NO: 829002 - RNA, 23 nt, Human
ucauuuuuguugcccagacugga

SEQ ID NO: 829003 - RNA, 22 nt, Human
uccaaaaaacaaaagaaaaaaa

SEQ ID NO: 829004 - RNA, 24 nt, Human
ucccaaguagcugggauuucaggc

SEQ ID NO: 829005 - RNA, 21 nt, Human
ucccggguucaagcaauucuc

SEQ ID NO: 829006 - RNA, 24 nt, Human
ucccggguucaagcaauucuccug

SEQ ID NO: 829007 - RNA, 20 nt, Human
ucccugguuacauuuaggga

SEQ ID NO: 829008 - RNA, 24 nt, Human
uccgccucccggguucaagcaauu

SEQ ID NO: 829009 - RNA, 22 nt, Human
uccucccuucagcuuccccauu

SEQ ID NO: 829010 - RNA, 21 nt, Human
uccuugggacagccaagaauu

SEQ ID NO: 829011 - RNA, 23 nt, Human
ucgcugcuguguagcaaaccugc

SEQ ID NO: 829012 - RNA, 20 nt, Human
ucgcuggggccgccgccugc

SEQ ID NO: 829013 - RNA, 19 nt, Human
ucggaugggggcccugggg

SEQ ID NO: 829014 - RNA, 23 nt, Human
ucugaccucaggugauccaccug

SEQ ID NO: 829015 - RNA, 24 nt, Human
ugaccucaggugauccaccugccu

SEQ ID NO: 829016 - RNA, 22 nt, Human
ugacugacucuaaaaacaauau

SEQ ID NO: 829017 - RNA, 24 nt, Human
ugagaaaucuaaguuaaaaaauca

SEQ ID NO: 829018 - RNA, 24 nt, Human
ugccucagccucccaaguagcugg

SEQ ID NO: 829019 - RNA, 21 nt, Human
ugcuauggcguugcacuagag

SEQ ID NO: 829020 - RNA, 21 nt, Human
uggaggcaccaaagaggagga

SEQ ID NO: 829021 - RNA, 24 nt, Human
uggccaggcuggucuugaacuucu

SEQ ID NO: 829022 - RNA, 23 nt, Human
ugggacagccaagaauuuuucuu

SEQ ID NO: 829023 - RNA, 24 nt, Human
ugggauuucaggcaugcaccacca

SEQ ID NO: 829024 - RNA, 22 nt, Human
ugggucagcugcuguggaucgc

SEQ ID NO: 829025 - RNA, 24 nt, Human
uggucuugaacuucugaccucagg

SEQ ID NO: 829026 - RNA, 21 nt, Human
uguauuuuuaguagagacggg

SEQ ID NO: 829027 - RNA, 22 nt, Human
uguccaaaauaaacuguuacga

SEQ ID NO: 829028 - RNA, 19 nt, Human
ugugucuugagggcuguga

SEQ ID NO: 829029 - RNA, 24 nt, Human
uuacugcaaccuccgccucccggg

SEQ ID NO: 829030 - RNA, 25 nt, Human
uuacugcaaccuccgccucccgggu

SEQ ID NO: 829031 - RNA, 18 nt, Human
uuaguagagacgggguuu

SEQ ID NO: 829032 - RNA, 22 nt, Human
uuaguagagacgggguuucacc

SEQ ID NO: 829033 - RNA, 24 nt, Human
uuaguagagacgggguuucaccau

SEQ ID NO: 829034 - RNA, 21 nt, Human
uucaagcaauucuccugccuc

SEQ ID NO: 829035 - RNA, 24 nt, Human
uucaagcaauucuccugccucagc

SEQ ID NO: 829036 - RNA, 24 nt, Human
uucauuuuuguugcccagacugga

SEQ ID NO: 829037 - RNA, 23 nt, Human
uuccaaaaaacaaaagaaaaaaa

SEQ ID NO: 829038 - RNA, 21 nt, Human
uuccauguuuauguaagcacu

SEQ ID NO: 829039 - RNA, 20 nt, Human
uuccuuccuugccuuguucu

SEQ ID NO: 829040 - RNA, 19 nt, Human
uucgcagaaucggaccggg

SEQ ID NO: 829041 - RNA, 23 nt, Human
uuguauuuuuaguagagacgggg

SEQ ID NO: 829042 - RNA, 18 nt, Human
uuuacauuuaaugguuug

SEQ ID NO: 829043 - RNA, 24 nt, Human
uuucaccauguuggccaggcuggu

SEQ ID NO: 829044 - RNA, 24 nt, Human
uuuccuuccuugccuuguucuuuc

SEQ ID NO: 829045 - RNA, 18 nt, Human
uuucuucucucucacuuc

SEQ ID NO: 829046 - RNA, 20 nt, Human
uuuguugcccagacuggagg

SEQ ID NO: 829047 - RNA, 24 nt, Human
uuuuuaguagagacgggguuucac

SEQ ID NO: 829048 - RNA, 20 nt, Human
uuuuuguauuuuuaguagag

SEQ ID NO: 829049 - RNA, 26 nt, Human
uuuuuuuuuuuugagacggaguuuca

SEQ ID NO: 829050 - RNA, 21 nt, Human
aaacauauacucugaaaagug

SEQ ID NO: 829051 - RNA, 21 nt, Human
acucugaaaagugauuaggaa

SEQ ID NO: 829052 - RNA, 22 nt, Human
acucugaaaagugauuaggaag

SEQ ID NO: 829053 - RNA, 23 nt, Human
agacgagcacgucggagaccagg

SEQ ID NO: 829054 - RNA, 18 nt, Human
caauacacgacgccuggg

SEQ ID NO: 829055 - RNA, 21 nt, Human
cggccccucgcaccgcccucc

SEQ ID NO: 829056 - RNA, 18 nt, Human
guuccuagcaucacaaau

SEQ ID NO: 829057 - RNA, 23 nt, Human
uagcaucacaaaucugaguuaca

SEQ ID NO: 829058 - RNA, 20 nt, Human
ucaauacacgacgccugggg

SEQ ID NO: 829059 - RNA, 18 nt, Human
ucgcaccgcccuccagac

SEQ ID NO: 829060 - RNA, 21 nt, Human
ugaaaaaaaaaucaaggcaua

SEQ ID NO: 829061 - RNA, 24 nt, Human
ugaaaaaaaaaucaaggcauacaa

SEQ ID NO: 829062 - RNA, 24 nt, Human
ugaaaaaaaaaucaaggcauacaa

SEQ ID NO: 829063 - RNA, 19 nt, Human
ugaaaaacauauacucuga

SEQ ID NO: 829064 - RNA, 23 nt, Human
ugaaaaacauauacucugaaaag

SEQ ID NO: 829065 - RNA, 22 nt, Human
ugaaaagugauuaggaaguucu

SEQ ID NO: 829066 - RNA, 18 nt, Human
uggcucgggcgccggcga

SEQ ID NO: 829067 - RNA, 19 nt, Human
uugcauuuauuguuucuga

SEQ ID NO: 829068 - RNA, 20 nt, Human
aaaacccaacgacgcgucuu

SEQ ID NO: 829069 - RNA, 21 nt, Human
aacaaaaagacguuuaacaga

SEQ ID NO: 829070 - RNA, 24 nt, Human
aacaugcaaccaucaucuuccaca

SEQ ID NO: 829071 - RNA, 22 nt, Human
aagaaagugcaguuaaaaagga

SEQ ID NO: 829072 - RNA, 18 nt, Human
aagcugguauaggauuua

SEQ ID NO: 829073 - RNA, 19 nt, Human
agcaaguaacaaaaugcaa

SEQ ID NO: 829074 - RNA, 22 nt, Human
caaaacccaacgacgcgucuuc

SEQ ID NO: 829075 - RNA, 23 nt, Human
caaacccgcccccggcucgugcc

SEQ ID NO: 829076 - RNA, 19 nt, Human
caaacuagaaacaugcaac

SEQ ID NO: 829077 - RNA, 21 nt, Human
cagccaaacucaaacggcugu

SEQ ID NO: 829078 - RNA, 22 nt, Human
caguuaaaaaggaaacuaugug

SEQ ID NO: 829079 - RNA, 21 nt, Human
ccacccgcagccaaacucaaa

SEQ ID NO: 829080 - RNA, 19 nt, Human
ccccaauuaaaggcaaaca

SEQ ID NO: 829081 - RNA, 20 nt, Human
cccccggcucgugccccugc

SEQ ID NO: 829082 - RNA, 20 nt, Human
ccccugacaaacguucucca

SEQ ID NO: 829083 - RNA, 23 nt, Human
ccuccaaaacccaacgacgcguc

SEQ ID NO: 829084 - RNA, 21 nt, Human
ccugacaaacguucuccaccc

SEQ ID NO: 829085 - RNA, 21 nt, Human
cguucuccacccgcagccaaa

SEQ ID NO: 829086 - RNA, 24 nt, Human
cuacuuacucaccccgaauauuua

SEQ ID NO: 829087 - RNA, 22 nt, Human
cuauguggcaaguacccucuuu

SEQ ID NO: 829088 - RNA, 18 nt, Human
cugaaaguacucagggua

SEQ ID NO: 829089 - RNA, 20 nt, Human
cuucuuggccgggccccuga

SEQ ID NO: 829090 - RNA, 21 nt, Human
gcucgugccccugccagcuuc

SEQ ID NO: 829091 - RNA, 20 nt, Human
ggcucgugccccugccagcu

SEQ ID NO: 829092 - RNA, 21 nt, Human
uaaaaaggaaacuauguggca

SEQ ID NO: 829093 - RNA, 22 nt, Human
uaaaaaggaaacuauguggcaa

SEQ ID NO: 829094 - RNA, 24 nt, Human
uaacauaaacaaacaaaaagcugg

SEQ ID NO: 829095 - RNA, 26 nt, Human
uacccucuuucccuucccacccccca

SEQ ID NO: 829096 - RNA, 19 nt, Human
uagcaaguaacaaaaugca

SEQ ID NO: 829097 - RNA, 23 nt, Human
uauacaaacuagaaacaugcaac

SEQ ID NO: 829098 - RNA, 24 nt, Human
uauacccaacuacuuacucacccc

SEQ ID NO: 829099 - RNA, 22 nt, Human
ucaaauauuuuucuugccucug

SEQ ID NO: 829100 - RNA, 24 nt, Human
ucaucuuaucacaaagauggaaac

SEQ ID NO: 829101 - RNA, 25 nt, Human
ugaauugcagcauucuguaacauaa

SEQ ID NO: 829102 - RNA, 19 nt, Human
uuucacggccuccaaaacc

SEQ ID NO: 829103 - RNA, 22 nt, Human
aaaaaacagagacacugaagaa

SEQ ID NO: 829104 - RNA, 25 nt, Human
aaaaaaggcccaaaagugcaugugg

SEQ ID NO: 829105 - RNA, 23 nt, Human
aaaaucacagugugcgaaggaac

SEQ ID NO: 829106 - RNA, 24 nt, Human
aaaaucacagugugcgaaggaacg

SEQ ID NO: 829107 - RNA, 19 nt, Human
aaacaggaggcagugcugg

SEQ ID NO: 829108 - RNA, 21 nt, Human
aacccagauccugggggcuga

SEQ ID NO: 829109 - RNA, 27 nt, Human
aagaaccugacccaagcugugcuuccu

SEQ ID NO: 829110 - RNA, 24 nt, Human
aaguccacuuggcauugggcuggg

SEQ ID NO: 829111 - RNA, 22 nt, Human
acacacaggcccagagacaccu

SEQ ID NO: 829112 - RNA, 22 nt, Human
acagaaugcaccagcgccaccc

SEQ ID NO: 829113 - RNA, 24 nt, Human
acagaggggcaggugaggcccaca

SEQ ID NO: 829114 - RNA, 20 nt, Human
accccaggugggcagagccc

SEQ ID NO: 829115 - RNA, 19 nt, Human
accuuccacccugacacac

SEQ ID NO: 829116 - RNA, 21 nt, Human
acucacacacauacacauaca

SEQ ID NO: 829117 - RNA, 21 nt, Human
acuugccuccaccuaggcugg

SEQ ID NO: 829118 - RNA, 22 nt, Human
agaacagaggggcaggugaggc

SEQ ID NO: 829119 - RNA, 18 nt, Human
agaagcuggaagaggggu

SEQ ID NO: 829120 - RNA, 27 nt, Human
agacacccacagggugaagugguccca

SEQ ID NO: 829121 - RNA, 21 nt, Human
agacaccuacagacacacccc

SEQ ID NO: 829122 - RNA, 22 nt, Human
agacaccuacagacacaccccc

SEQ ID NO: 829123 - RNA, 22 nt, Human
agacacugaagaauggacggcu

SEQ ID NO: 829124 - RNA, 24 nt, Human
agacagagauggggaaacauaugg

SEQ ID NO: 829125 - RNA, 21 nt, Human
agaccaaaaugagacaacaac

SEQ ID NO: 829126 - RNA, 24 nt, Human
agagacaccuacagacacaccccc

SEQ ID NO: 829127 - RNA, 21 nt, Human
agagggagaaaacaggaggca

SEQ ID NO: 829128 - RNA, 19 nt, Human
aggaagaguagagggaggg

SEQ ID NO: 829129 - RNA, 19 nt, Human
aggacaggaagaguagagg

SEQ ID NO: 829130 - RNA, 23 nt, Human
aggacaggaagaguagagggagg

SEQ ID NO: 829131 - RNA, 20 nt, Human
aggagcccuccccucucacu

SEQ ID NO: 829132 - RNA, 21 nt, Human
aggcaagaaccugacccaagc

SEQ ID NO: 829133 - RNA, 19 nt, Human
aggcaggcaagggucccug

SEQ ID NO: 829134 - RNA, 21 nt, Human
aggcagugcugggagaacgca

SEQ ID NO: 829135 - RNA, 20 nt, Human
agggagaaaacaggaggcag

SEQ ID NO: 829136 - RNA, 23 nt, Human
agggagaaaacaggaggcagugc

SEQ ID NO: 829137 - RNA, 24 nt, Human
agggccuccccacccacagucuuu

SEQ ID NO: 829138 - RNA, 21 nt, Human
agguagggagagagaccccag

SEQ ID NO: 829139 - RNA, 20 nt, Human
agucccuccucucucugggg

SEQ ID NO: 829140 - RNA, 22 nt, Human
agucgaucacgggggaagccug

SEQ ID NO: 829141 - RNA, 19 nt, Human
auagcaccgucuuucccuc

SEQ ID NO: 829142 - RNA, 21 nt, Human
auaugccuggagugacagagc

SEQ ID NO: 829143 - RNA, 20 nt, Human
auuaagaaaggcaagaaccu

SEQ ID NO: 829144 - RNA, 22 nt, Human
caaaagguccugaggcacccuu

SEQ ID NO: 829145 - RNA, 22 nt, Human
caaccccauauaaaaagaugaa

SEQ ID NO: 829146 - RNA, 21 nt, Human
caagaggaaacagaaugcacc

SEQ ID NO: 829147 - RNA, 24 nt, Human
caagcccacgagggaggggaccaa

SEQ ID NO: 829148 - RNA, 23 nt, Human
cacacacaggcccagagacaccu

SEQ ID NO: 829149 - RNA, 28 nt, Human
cacacacauacacauacacacggauggu

SEQ ID NO: 829150 - RNA, 20 nt, Human
cacacacucacacacauaca

SEQ ID NO: 829151 - RNA, 23 nt, Human
cacacaggcccagagacaccuac

SEQ ID NO: 829152 - RNA, 23 nt, Human
cacacucacacacuugcguguca

SEQ ID NO: 829153 - RNA, 18 nt, Human
cacagcaggaaccccauu

SEQ ID NO: 829154 - RNA, 22 nt, Human
cacccaugaugacugauuguug

SEQ ID NO: 829155 - RNA, 24 nt, Human
cacccccgccccaucucucacacu

SEQ ID NO: 829156 - RNA, 25 nt, Human
cacccugacacacugcaaagggcag

SEQ ID NO: 829157 - RNA, 24 nt, Human
caccuacagacacacccccgcccc

SEQ ID NO: 829158 - RNA, 24 nt, Human
cacucaccacucucccaaacucag

SEQ ID NO: 829159 - RNA, 22 nt, Human
cacugggcuucuuguuauucuu

SEQ ID NO: 829160 - RNA, 24 nt, Human
cacuguggguucugaggaaacucu

SEQ ID NO: 829161 - RNA, 21 nt, Human
cagaaugcaccagcgccaccc

SEQ ID NO: 829162 - RNA, 19 nt, Human
cagacacacccccgcccca

SEQ ID NO: 829163 - RNA, 22 nt, Human
cagacagagauggggaaacaua

SEQ ID NO: 829164 - RNA, 19 nt, Human
cagcccagcccagccccuc

SEQ ID NO: 829165 - RNA, 23 nt, Human
cagcccugggacccucuuucuug

SEQ ID NO: 829166 - RNA, 24 nt, Human
cagggccugguugggcucaggaug

SEQ ID NO: 829167 - RNA, 19 nt, Human
cauaaccccacccacacac

SEQ ID NO: 829168 - RNA, 25 nt, Human
cauacacauacacacggaugaaaug

SEQ ID NO: 829169 - RNA, 22 nt, Human
cauaugccuggagugacagagc

SEQ ID NO: 829170 - RNA, 23 nt, Human
ccacagcaggaaccccauucucc

SEQ ID NO: 829171 - RNA, 23 nt, Human
ccacaggccaacaggucucccau

SEQ ID NO: 829172 - RNA, 24 nt, Human
ccaccuaacccagauccugggggc

SEQ ID NO: 829173 - RNA, 20 nt, Human
ccagccccucagggcucugu

SEQ ID NO: 829174 - RNA, 20 nt, Human
ccaggacggaugcgaugccg

SEQ ID NO: 829175 - RNA, 19 nt, Human
cccaaauccacauugugcu

SEQ ID NO: 829176 - RNA, 21 nt, Human
cccaagacucccaagagauuc

SEQ ID NO: 829177 - RNA, 18 nt, Human
cccacacacaggcccaga

SEQ ID NO: 829178 - RNA, 25 nt, Human
cccacacacaggcccagagacaccu

SEQ ID NO: 829179 - RNA, 18 nt, Human
cccacaggccaacagguc

SEQ ID NO: 829180 - RNA, 19 nt, Human
cccagcccagcccagcccc

SEQ ID NO: 829181 - RNA, 21 nt, Human
cccagcccagccccucagggc

SEQ ID NO: 829182 - RNA, 22 nt, Human
cccaggagcccuccccucucac

SEQ ID NO: 829183 - RNA, 22 nt, Human
cccaugagcagagagcaggaac

SEQ ID NO: 829184 - RNA, 20 nt, Human
ccccaaaucaauuaacaagc

SEQ ID NO: 829185 - RNA, 24 nt, Human
ccccaaaucaauuaacaagcaguu

SEQ ID NO: 829186 - RNA, 20 nt, Human
ccccacccacacacaggccc

SEQ ID NO: 829187 - RNA, 22 nt, Human
ccccacccacagucuuuuccuc

SEQ ID NO: 829188 - RNA, 19 nt, Human
ccccaggagcccuccccuc

SEQ ID NO: 829189 - RNA, 20 nt, Human
ccccaggagcccuccccucu

SEQ ID NO: 829190 - RNA, 20 nt, Human
ccccaucucucacacucaca

SEQ ID NO: 829191 - RNA, 21 nt, Human
ccccgagcccccaaaucgccc

SEQ ID NO: 829192 - RNA, 23 nt, Human
ccccuccuuccgguagcuguccc

SEQ ID NO: 829193 - RNA, 20 nt, Human
ccccugaggagggagguagg

SEQ ID NO: 829194 - RNA, 21 nt, Human
ccccugaggagggagguaggg

SEQ ID NO: 829195 - RNA, 21 nt, Human
cccgagcccccaaaucgccca

SEQ ID NO: 829196 - RNA, 19 nt, Human
cccuacacagcggcagagu

SEQ ID NO: 829197 - RNA, 19 nt, Human
ccguuccauccagagagaa

SEQ ID NO: 829198 - RNA, 21 nt, Human
ccuacagacacacccccgccc

SEQ ID NO: 829199 - RNA, 21 nt, Human
ccucgggagcucuuugcccgc

SEQ ID NO: 829200 - RNA, 20 nt, Human
ccucuuaccuuccacccuga

SEQ ID NO: 829201 - RNA, 20 nt, Human
ccuuccacucaccacucucc

SEQ ID NO: 829202 - RNA, 21 nt, Human
cucacacacauacacauacac

SEQ ID NO: 829203 - RNA, 26 nt, Human
cucacacacauacacauacacacgga

SEQ ID NO: 829204 - RNA, 23 nt, Human
cucacauaaccccacccacacac

SEQ ID NO: 829205 - RNA, 21 nt, Human
cucaccacucucccaaacuca

SEQ ID NO: 829206 - RNA, 23 nt, Human
cuccacaccaaccucuuaccuuc

SEQ ID NO: 829207 - RNA, 19 nt, Human
cuccaccgcuuagccccag

SEQ ID NO: 829208 - RNA, 20 nt, Human
cuccaccuaggcuggggcca

SEQ ID NO: 829209 - RNA, 18 nt, Human
cucccaagagauucucug

SEQ ID NO: 829210 - RNA, 22 nt, Human
cucccagaggguggcaagaaaa

SEQ ID NO: 829211 - RNA, 23 nt, Human
cucccuuccacucaccacucucc

SEQ ID NO: 829212 - RNA, 19 nt, Human
cuccucccuuccacucacc

SEQ ID NO: 829213 - RNA, 19 nt, Human
cugggagaacgcacuuucc

SEQ ID NO: 829214 - RNA, 18 nt, Human
cugugcuuccaguuuugc

SEQ ID NO: 829215 - RNA, 20 nt, Human
cuucacacacucacacacau

SEQ ID NO: 829216 - RNA, 18 nt, Human
cuucagguccugccccuc

SEQ ID NO: 829217 - RNA, 21 nt, Human
cuuuauguaagugagggggag

SEQ ID NO: 829218 - RNA, 22 nt, Human
gaacagacgcccagcagccccc

SEQ ID NO: 829219 - RNA, 23 nt, Human
gaacagacgcccagcagcccccg

SEQ ID NO: 829220 - RNA, 18 nt, Human
gaagcuggaagaggggua

SEQ ID NO: 829221 - RNA, 19 nt, Human
gaccauggcuuccagccua

SEQ ID NO: 829222 - RNA, 26 nt, Human
gacccaagcugugcuuccucgggagc

SEQ ID NO: 829223 - RNA, 21 nt, Human
gacccucuuucuugcuucaag

SEQ ID NO: 829224 - RNA, 26 nt, Human
gacucccaagagauucucugccuccu

SEQ ID NO: 829225 - RNA, 22 nt, Human
gacugggggugggcguggggaa

SEQ ID NO: 829226 - RNA, 22 nt, Human
gagaacuccuuguuccccuccu

SEQ ID NO: 829227 - RNA, 19 nt, Human
gagcccccaaaucgcccaa

SEQ ID NO: 829228 - RNA, 23 nt, Human
gaggaugugaggggagagaacag

SEQ ID NO: 829229 - RNA, 23 nt, Human
gagggcaaaaucacagugugcga

SEQ ID NO: 829230 - RNA, 22 nt, Human
gaggggaggucauggaaggcuc

SEQ ID NO: 829231 - RNA, 20 nt, Human
gagguagagcccaucccacu

SEQ ID NO: 829232 - RNA, 22 nt, Human
gaugguuuugguaaagaacaga

SEQ ID NO: 829233 - RNA, 20 nt, Human
gcagagagcaggaacuggau

SEQ ID NO: 829234 - RNA, 20 nt, Human
gcagggccuccccacccaca

SEQ ID NO: 829235 - RNA, 24 nt, Human
gcccauacccguuccauccagaga

SEQ ID NO: 829236 - RNA, 22 nt, Human
gccccaggagcccuccccucuc

SEQ ID NO: 829237 - RNA, 20 nt, Human
gcccugggacccucuuucuu

SEQ ID NO: 829238 - RNA, 20 nt, Human
gccugguugggcucaggaug

SEQ ID NO: 829239 - RNA, 22 nt, Human
gcgugggcaggagggcaaaauc

SEQ ID NO: 829240 - RNA, 20 nt, Human
gcuauaaaaaaaggcccaaa

SEQ ID NO: 829241 - RNA, 20 nt, Human
gcucaggaugaaaaugggau

SEQ ID NO: 829242 - RNA, 19 nt, Human
gcucuuugcccgcugcagg

SEQ ID NO: 829243 - RNA, 19 nt, Human
gcugcuucuugcugcuccu

SEQ ID NO: 829244 - RNA, 22 nt, Human
ggacaggaagaguagagggagg

SEQ ID NO: 829245 - RNA, 24 nt, Human
ggaggggaggucauggaaggcucu

SEQ ID NO: 829246 - RNA, 22 nt, Human
ggcaaaagaagcuggaagaggg

SEQ ID NO: 829247 - RNA, 22 nt, Human
ggcauugggcuggggaggggag

SEQ ID NO: 829248 - RNA, 21 nt, Human
gggaagccugccagaggaggg

SEQ ID NO: 829249 - RNA, 23 nt, Human
gggaagccugccagaggagggag

SEQ ID NO: 829250 - RNA, 22 nt, Human
gggagccccugaccuggggucc

SEQ ID NO: 829251 - RNA, 18 nt, Human
gggauggggacucccaga

SEQ ID NO: 829252 - RNA, 21 nt, Human
gggaugugucccugaccuuug

SEQ ID NO: 829253 - RNA, 21 nt, Human
gggcagauuggugggcuuccu

SEQ ID NO: 829254 - RNA, 21 nt, Human
gggcaggugaggcccacaggc

SEQ ID NO: 829255 - RNA, 22 nt, Human
ggggaccaaaacagaccaaaau

SEQ ID NO: 829256 - RNA, 30 nt, Human
gguaaagaacagacgcccagcagcccccgg

SEQ ID NO: 829257 - RNA, 25 nt, Human
gucccuggagacugggggugggcga

SEQ ID NO: 829258 - RNA, 24 nt, Human
gugcaugugugaggggggaaaggc

SEQ ID NO: 829259 - RNA, 22 nt, Human
guggucccugcugacuuugugc

SEQ ID NO: 829260 - RNA, 19 nt, Human
uaaaaaaaggcccaaaagu

SEQ ID NO: 829261 - RNA, 20 nt, Human
uaaagucauuuucccuggag

SEQ ID NO: 829262 - RNA, 20 nt, Human
uaaagucauuuucccuggag

SEQ ID NO: 829263 - RNA, 19 nt, Human
uaagaaaacggccccuauu

SEQ ID NO: 829264 - RNA, 24 nt, Human
uauaaaaagaugaacuggcggcuu

SEQ ID NO: 829265 - RNA, 30 nt, Human
ucacacacucacacacauacacauacacag

SEQ ID NO: 829266 - RNA, 25 nt, Human
ucagacaccugcagacauacaugcu

SEQ ID NO: 829267 - RNA, 26 nt, Human
ucagcccagcccagcccagccccuca

SEQ ID NO: 829268 - RNA, 21 nt, Human
ucaggggaagacagcucuuca

SEQ ID NO: 829269 - RNA, 24 nt, Human
ucaguuggcaaaagaagcuggaag

SEQ ID NO: 829270 - RNA, 25 nt, Human
ucaguuggcaaaagaagcuggaaga

SEQ ID NO: 829271 - RNA, 26 nt, Human
ucaguuggcaaaagaagcuggaagag

SEQ ID NO: 829272 - RNA, 18 nt, Human
uccacucaccacucuccc

SEQ ID NO: 829273 - RNA, 24 nt, Human
ucccagaggguggcaagaaaaccc

SEQ ID NO: 829274 - RNA, 18 nt, Human
uccccgagcccccaaauc

SEQ ID NO: 829275 - RNA, 21 nt, Human
uccccgaggcugugcuuccag

SEQ ID NO: 829276 - RNA, 22 nt, Human
uccccgaggcugugcuuccagu

SEQ ID NO: 829277 - RNA, 27 nt, Human
uccccgaggcugugcuuccuccgcggg

SEQ ID NO: 829278 - RNA, 18 nt, Human
ucccuacacagcggcaga

SEQ ID NO: 829279 - RNA, 18 nt, Human
ucccugaccuuugguccc

SEQ ID NO: 829280 - RNA, 20 nt, Human
ucccugcugacuuugugcag

SEQ ID NO: 829281 - RNA, 26 nt, Human
ucccuuccacucaccacucucccaaa

SEQ ID NO: 829282 - RNA, 25 nt, Human
uccgagaaaagcuggggcggggacg

SEQ ID NO: 829283 - RNA, 19 nt, Human
uccucccuuccacucacca

SEQ ID NO: 829284 - RNA, 22 nt, Human
uccugggggcugagggaggcug

SEQ ID NO: 829285 - RNA, 28 nt, Human
ucuccuguuguugccccugaggagggag

SEQ ID NO: 829286 - RNA, 23 nt, Human
ucugugaacuguagagaagacca

SEQ ID NO: 829287 - RNA, 21 nt, Human
ucuugcuucaagggagcuuua

SEQ ID NO: 829288 - RNA, 22 nt, Human
ucuuugagaaagagagguagag

SEQ ID NO: 829289 - RNA, 20 nt, Human
ugacaaaaacacccaugaug

SEQ ID NO: 829290 - RNA, 19 nt, Human
ugacagagccuuccuccac

SEQ ID NO: 829291 - RNA, 19 nt, Human
ugagaaagagagguagagc

SEQ ID NO: 829292 - RNA, 18 nt, Human
ugagacaacaaccccaua

SEQ ID NO: 829293 - RNA, 24 nt, Human
ugagagggagaaaacaggaggcag

SEQ ID NO: 829294 - RNA, 25 nt, Human
ugagagggagaaaacaggaggcagu

SEQ ID NO: 829295 - RNA, 18 nt, Human
ugaggagcagggaggagc

SEQ ID NO: 829296 - RNA, 22 nt, Human
ugaggcacccuugcccuacacu

SEQ ID NO: 829297 - RNA, 23 nt, Human
ugaggcccacaggccaacagguc

SEQ ID NO: 829298 - RNA, 22 nt, Human
ugagggaggcugaagaccaaaa

SEQ ID NO: 829299 - RNA, 19 nt, Human
ugaggggggaaaggcagaa

SEQ ID NO: 829300 - RNA, 20 nt, Human
ugccacccuauucuguagcc

SEQ ID NO: 829301 - RNA, 24 nt, Human
ugccuggagugacagagccuuccu

SEQ ID NO: 829302 - RNA, 18 nt, Human
ugcgugucagacaccugc

SEQ ID NO: 829303 - RNA, 22 nt, Human
ugcgugucagacaccugcagac

SEQ ID NO: 829304 - RNA, 21 nt, Human
ugcugggagaacgcacuuucc

SEQ ID NO: 829305 - RNA, 24 nt, Human
uggcaaaagaagcuggaagagggg

SEQ ID NO: 829306 - RNA, 19 nt, Human
uggcaagaaaaccagagau

SEQ ID NO: 829307 - RNA, 19 nt, Human
uggcagaagaaggcuucag

SEQ ID NO: 829308 - RNA, 25 nt, Human
uggcagaagaaggcuucaguuggca

SEQ ID NO: 829309 - RNA, 19 nt, Human
uggcagccccaacuccaca

SEQ ID NO: 829310 - RNA, 21 nt, Human
ugggagaacgcacuuuccuca

SEQ ID NO: 829311 - RNA, 21 nt, Human
ugggauggggacucccagagg

SEQ ID NO: 829312 - RNA, 18 nt, Human
ugggcaggaggaugugag

SEQ ID NO: 829313 - RNA, 19 nt, Human
ugggcuggggaggggaggu

SEQ ID NO: 829314 - RNA, 22 nt, Human
ugggcuuccuccacucagagau

SEQ ID NO: 829315 - RNA, 24 nt, Human
uggggaggggaggucauggaaggc

SEQ ID NO: 829316 - RNA, 22 nt, Human
uggggccagaaaggaaaaggga

SEQ ID NO: 829317 - RNA, 21 nt, Human
uggggggaaggaggaauuuca

SEQ ID NO: 829318 - RNA, 19 nt, Human
ugggggugggcguggggaa

SEQ ID NO: 829319 - RNA, 21 nt, Human
ugggguccuggcagucaggcu

SEQ ID NO: 829320 - RNA, 24 nt, Human
ugugcgaaggaacgcgcggggagg

SEQ ID NO: 829321 - RNA, 23 nt, Human
uuaaaaaacagagacacugaaga

SEQ ID NO: 829322 - RNA, 28 nt, Human
uuaacaagcaguugacaaaaacacccau

SEQ ID NO: 829323 - RNA, 22 nt, Human
uucaagucaaauguucagaauc

SEQ ID NO: 829324 - RNA, 26 nt, Human
uucacacacucacacacauacacaua

SEQ ID NO: 829325 - RNA, 19 nt, Human
uuccacucaccacucuccc

SEQ ID NO: 829326 - RNA, 19 nt, Human
uuccccuccuuccgguagc

SEQ ID NO: 829327 - RNA, 25 nt, Human
uuccccuccuuccgguagcuguccc

SEQ ID NO: 829328 - RNA, 20 nt, Human
uuccuccaccgcuuagcccc

SEQ ID NO: 829329 - RNA, 22 nt, Human
uuccuccaccgcuuagccccag

SEQ ID NO: 829330 - RNA, 23 nt, Human
uugaacaggccaauaccuucagg

SEQ ID NO: 829331 - RNA, 19 nt, Human
uugcagcccugggacccuc

SEQ ID NO: 829332 - RNA, 26 nt, Human
uuugcagcccugggacccucuuucuu

SEQ ID NO: 829333 - RNA, 23 nt, Human
aaaaaacaccuggucugcagccg

SEQ ID NO: 829334 - RNA, 22 nt, Human
aagaagauaugacagucgagac

SEQ ID NO: 829335 - RNA, 23 nt, Human
aagaucuucucagccucauagcu

SEQ ID NO: 829336 - RNA, 23 nt, Human
aagaucuucucagccucauagcu

SEQ ID NO: 829337 - RNA, 20 nt, Human
acaaagaaggccgagacagc

SEQ ID NO: 829338 - RNA, 23 nt, Human
acacacaaccaucccccucaccc

SEQ ID NO: 829339 - RNA, 28 nt, Human
acacagccucagaaaaaaagggaacgcc

SEQ ID NO: 829340 - RNA, 28 nt, Human
acacauuugcaaagcaauucccguaccg

SEQ ID NO: 829341 - RNA, 28 nt, Human
acacauuugcaaagcaauucccguaccg

SEQ ID NO: 829342 - RNA, 18 nt, Human
acagaugaaaaggcuuuc

SEQ ID NO: 829343 - RNA, 18 nt, Human
acagaugaaaaggcuuuc

SEQ ID NO: 829344 - RNA, 25 nt, Human
acagcaacaaccucuuuuucuuuau

SEQ ID NO: 829345 - RNA, 23 nt, Human
acaggaauauucuucaagcugag

SEQ ID NO: 829346 - RNA, 19 nt, Human
accaacacacucauuagca

SEQ ID NO: 829347 - RNA, 18 nt, Human
agccaccaaaagaaugca

SEQ ID NO: 829348 - RNA, 18 nt, Human
agccaccaaaagaaugca

SEQ ID NO: 829349 - RNA, 21 nt, Human
agcuuuggugaugacacugau

SEQ ID NO: 829350 - RNA, 21 nt, Human
aucacuguuuuccaucugauu

SEQ ID NO: 829351 - RNA, 23 nt, Human
caaaacaccaacacacucauuag

SEQ ID NO: 829352 - RNA, 23 nt, Human
caaaacaggaauauucuucaagc

SEQ ID NO: 829353 - RNA, 22 nt, Human
caaaauggcuccaaacucugca

SEQ ID NO: 829354 - RNA, 23 nt, Human
caaaauggcuccaaacucugcaa

SEQ ID NO: 829355 - RNA, 20 nt, Human
caaacucugcaaccacccag

SEQ ID NO: 829356 - RNA, 20 nt, Human
caaacucugcaaccacccag

SEQ ID NO: 829357 - RNA, 20 nt, Human
caaagaaggccgagacagca

SEQ ID NO: 829358 - RNA, 21 nt, Human
caacacagccucagaaaaaaa

SEQ ID NO: 829359 - RNA, 22 nt, Human
caacacagccucagaaaaaaac

SEQ ID NO: 829360 - RNA, 23 nt, Human
caacacagccucagaaaaaaaca

SEQ ID NO: 829361 - RNA, 24 nt, Human
caacacagccucagaaaaaaacac

SEQ ID NO: 829362 - RNA, 21 nt, Human
caaccaucccccucaccccag

SEQ ID NO: 829363 - RNA, 26 nt, Human
caacuccugaagcaauuugcuacuuu

SEQ ID NO: 829364 - RNA, 24 nt, Human
caauuguuuaacuaguaccagcuu

SEQ ID NO: 829365 - RNA, 24 nt, Human
caauuguuuaacuaguaccagcuu

SEQ ID NO: 829366 - RNA, 18 nt, Human
cacacacaaccauccccc

SEQ ID NO: 829367 - RNA, 21 nt, Human
caccacaguacuaaauacccg

SEQ ID NO: 829368 - RNA, 18 nt, Human
cacccgggagccgcagcc

SEQ ID NO: 829369 - RNA, 22 nt, Human
caccucuaucucuggaugaaga

SEQ ID NO: 829370 - RNA, 22 nt, Human
caccucuaucucuggaugaaga

SEQ ID NO: 829371 - RNA, 21 nt, Human
cacugauggaggagggacguc

SEQ ID NO: 829372 - RNA, 21 nt, Human
cacugauggaggagggacguc

SEQ ID NO: 829373 - RNA, 20 nt, Human
cagacauguugacauaacag

SEQ ID NO: 829374 - RNA, 18 nt, Human
cagaugaaaaggcuuucu

SEQ ID NO: 829375 - RNA, 22 nt, Human
cagcgugaguaaauucaagacu

SEQ ID NO: 829376 - RNA, 21 nt, Human
caguccguaagaggaagaacc

SEQ ID NO: 829377 - RNA, 19 nt, Human
ccccagaggccacauggcu

SEQ ID NO: 829378 - RNA, 19 nt, Human
ccccagaggccacauggcu

SEQ ID NO: 829379 - RNA, 21 nt, Human
ccccaugaucugaacagcgga

SEQ ID NO: 829380 - RNA, 25 nt, Human
ccuacagucucuagugcuuuguagg

SEQ ID NO: 829381 - RNA, 25 nt, Human
ccuacagucucuagugcuuuguagg

SEQ ID NO: 829382 - RNA, 24 nt, Human
ccucacacacacaaccaucccccu

SEQ ID NO: 829383 - RNA, 23 nt, Human
ccucagaaaaaaacaccuggucu

SEQ ID NO: 829384 - RNA, 20 nt, Human
ccucaguaauuggaggaccc

SEQ ID NO: 829385 - RNA, 20 nt, Human
ccucaguaauuggagggccc

SEQ ID NO: 829386 - RNA, 23 nt, Human
ccuccugucucaacuccugaagc

SEQ ID NO: 829387 - RNA, 23 nt, Human
ccuccugucucaacuccugaagc

SEQ ID NO: 829388 - RNA, 19 nt, Human
ccugcugcgugagcgaagg

SEQ ID NO: 829389 - RNA, 19 nt, Human
ccugcugcgugagcgaagg

SEQ ID NO: 829390 - RNA, 19 nt, Human
cgagcaaaacaccaacaca

SEQ ID NO: 829391 - RNA, 19 nt, Human
cgccgcucgccgcccgccg

SEQ ID NO: 829392 - RNA, 24 nt, Human
cguagaaaaugcaagaucagcuag

SEQ ID NO: 829393 - RNA, 24 nt, Human
cuacagcaacaaccucuuuuucuu

SEQ ID NO: 829394 - RNA, 21 nt, Human
cucaucacaauaagacaucga

SEQ ID NO: 829395 - RNA, 21 nt, Human
cucaucacaauaagacauuga

SEQ ID NO: 829396 - RNA, 25 nt, Human
cucuaugccauccaacuaauauacc

SEQ ID NO: 829397 - RNA, 25 nt, Human
cucuaugccauccaacuaauauauc

SEQ ID NO: 829398 - RNA, 20 nt, Human
cuggucugcagccgucacac

SEQ ID NO: 829399 - RNA, 21 nt, Human
cuuaacacauuugcaaagcaa

SEQ ID NO: 829400 - RNA, 21 nt, Human
cuuaacacauuugcaaagcaa

SEQ ID NO: 829401 - RNA, 22 nt, Human
cuucggucucggucguuuuccc

SEQ ID NO: 829402 - RNA, 20 nt, Human
cuugaagaucuucucagccu

SEQ ID NO: 829403 - RNA, 24 nt, Human
cuuucaacugcuuuacaguagcca

SEQ ID NO: 829404 - RNA, 24 nt, Human
cuuucaacugcuuuacagugacca

SEQ ID NO: 829405 - RNA, 21 nt, Human
gaagguugcaguccguaagag

SEQ ID NO: 829406 - RNA, 21 nt, Human
gaagguugcaguccguaagag

SEQ ID NO: 829407 - RNA, 23 nt, Human
gaauugggcugaggcuuuccccc

SEQ ID NO: 829408 - RNA, 18 nt, Human
gcaaccacccagauaccc

SEQ ID NO: 829409 - RNA, 18 nt, Human
gcaaccacccagauaccc

SEQ ID NO: 829410 - RNA, 18 nt, Human
gcaagaucagcuacccaa

SEQ ID NO: 829411 - RNA, 18 nt, Human
gcaagaucagcuacccaa

SEQ ID NO: 829412 - RNA, 21 nt, Human
gcacaaagaaggccaagacag

SEQ ID NO: 829413 - RNA, 22 nt, Human
gcaguccguaagaggaagaacc

SEQ ID NO: 829414 - RNA, 23 nt, Human
gccgggccugggacacccgggag

SEQ ID NO: 829415 - RNA, 18 nt, Human
gcgcgccgcucgccgccc

SEQ ID NO: 829416 - RNA, 21 nt, Human
gcuacagcaacaaccucuuuu

SEQ ID NO: 829417 - RNA, 19 nt, Human
gcugcauuacagaugaaaa

SEQ ID NO: 829418 - RNA, 19 nt, Human
gcugcauuacagaugaaaa

SEQ ID NO: 829419 - RNA, 23 nt, Human
ggccugggacacccgggagccgc

SEQ ID NO: 829420 - RNA, 22 nt, Human
guacagcagccaagauauccaa

SEQ ID NO: 829421 - RNA, 22 nt, Human
gucagcguggacucugguauca

SEQ ID NO: 829422 - RNA, 22 nt, Human
gucagcguggacucugguauca

SEQ ID NO: 829423 - RNA, 18 nt, Human
uaaauucuuucaacugcu

SEQ ID NO: 829424 - RNA, 23 nt, Human
uaaauucuuucaacugcuuuaca

SEQ ID NO: 829425 - RNA, 23 nt, Human
uaaauucuuucaacugcuuuaca

SEQ ID NO: 829426 - RNA, 18 nt, Human
uaagacaucgaucucucc

SEQ ID NO: 829427 - RNA, 18 nt, Human
uacagcagccaagauauc

SEQ ID NO: 829428 - RNA, 20 nt, Human
uacccaaaauggcuccaaac

SEQ ID NO: 829429 - RNA, 20 nt, Human
uacccaaaauggcuccaaac

SEQ ID NO: 829430 - RNA, 18 nt, Human
uagcucagagaagcacaa

SEQ ID NO: 829431 - RNA, 18 nt, Human
uagcucagagaagcacaa

SEQ ID NO: 829432 - RNA, 19 nt, Human
uagugcuuuguagguggca

SEQ ID NO: 829433 - RNA, 19 nt, Human
uagugcuuuguagguggca

SEQ ID NO: 829434 - RNA, 24 nt, Human
uauggcuguuuguuacauacagug

SEQ ID NO: 829435 - RNA, 20 nt, Human
uaugucagcguggacucugg

SEQ ID NO: 829436 - RNA, 20 nt, Human
uaugucagcguggacucugg

SEQ ID NO: 829437 - RNA, 23 nt, Human
ucaacacagccucagaaaaaaac

SEQ ID NO: 829438 - RNA, 19 nt, Human
ucagccucauagcucagag

SEQ ID NO: 829439 - RNA, 19 nt, Human
ucagccucauagcucagag

SEQ ID NO: 829440 - RNA, 19 nt, Human
uccaaaacaggaauauucu

SEQ ID NO: 829441 - RNA, 20 nt, Human
uccccagugcuccucaccac

SEQ ID NO: 829442 - RNA, 22 nt, Human
ucccuaaaauuagcgcugaaaa

SEQ ID NO: 829443 - RNA, 24 nt, Human
ucuucagucucugucgucuucccg

SEQ ID NO: 829444 - RNA, 21 nt, Human
ugagcgaagguuucugaguau

SEQ ID NO: 829445 - RNA, 21 nt, Human
ugagcgaagguuucugaguau

SEQ ID NO: 829446 - RNA, 21 nt, Human
ugaguaaauucaagacugaga

SEQ ID NO: 829447 - RNA, 20 nt, Human
ugccgagcaaaacaccaaca

SEQ ID NO: 829448 - RNA, 23 nt, Human
ugcgcgccgcucgccgcccgccg

SEQ ID NO: 829449 - RNA, 30 nt, Human
ugcuaggauccaagcugccgagcaaaacaa

SEQ ID NO: 829450 - RNA, 20 nt, Human
ugcuuuacaguagccaaucu

SEQ ID NO: 829451 - RNA, 20 nt, Human
ugcuuuacagugaccaaucu

SEQ ID NO: 829452 - RNA, 20 nt, Human
ugguaaugacacugauggag

SEQ ID NO: 829453 - RNA, 20 nt, Human
uggugaugacacugauggag

SEQ ID NO: 829454 - RNA, 18 nt, Human
ugucuuaaauauggcugu

SEQ ID NO: 829455 - RNA, 21 nt, Human
uuacagaugaaaaggcuuucu

SEQ ID NO: 829456 - RNA, 25 nt, Human
uugcugaauaaauucuuucaacugc

SEQ ID NO: 829457 - RNA, 24 nt, Human
uugguaaugacacugauggaggag

SEQ ID NO: 829458 - RNA, 24 nt, Human
uuggugaugacacugauggaggag

SEQ ID NO: 829459 - RNA, 22 nt, Human
uugugcgcgccgcucgccgccc

SEQ ID NO: 829460 - RNA, 24 nt, Human
uuugcuaaaaauccacuugaagau

SEQ ID NO: 829461 - RNA, 24 nt, Human
uuugcuaaaaauccacuugaagau

SEQ ID NO: 829462 - RNA, 19 nt, Human
aaccuuuccagcucuguuu

SEQ ID NO: 829463 - RNA, 20 nt, Human
agccaggauaucucucucag

SEQ ID NO: 829464 - RNA, 19 nt, Human
agcgcgcagccugcggccu

SEQ ID NO: 829465 - RNA, 19 nt, Human
aggaacagaacuaaugccu

SEQ ID NO: 829466 - RNA, 18 nt, Human
aggacuggguugaacagu

SEQ ID NO: 829467 - RNA, 19 nt, Human
aggauaucucucucagccu

SEQ ID NO: 829468 - RNA, 20 nt, Human
agguggaguuguaccucuug

SEQ ID NO: 829469 - RNA, 23 nt, Human
aguaucuacuuuucuugcuagac

SEQ ID NO: 829470 - RNA, 23 nt, Human
agugccagcagggacaacauuuu

SEQ ID NO: 829471 - RNA, 20 nt, Human
aguggcgggccaugccucug

SEQ ID NO: 829472 - RNA, 21 nt, Human
auaguacuuagaaucgugugu

SEQ ID NO: 829473 - RNA, 22 nt, Human
aucacacaacuguguguauccu

SEQ ID NO: 829474 - RNA, 22 nt, Human
caaaugcugauauaccagaucc

SEQ ID NO: 829475 - RNA, 19 nt, Human
caacaggaacagaacuaau

SEQ ID NO: 829476 - RNA, 26 nt, Human
caacaggaacagaacuaaugccucuc

SEQ ID NO: 829477 - RNA, 21 nt, Human
caacagguggcaucacaguca

SEQ ID NO: 829478 - RNA, 19 nt, Human
caagucuugaagcauuugu

SEQ ID NO: 829479 - RNA, 19 nt, Human
cacaggcuguugaauagga

SEQ ID NO: 829480 - RNA, 22 nt, Human
cagagcuuucuucugagcaaaa

SEQ ID NO: 829481 - RNA, 18 nt, Human
caucacagucacauuuga

SEQ ID NO: 829482 - RNA, 19 nt, Human
ccaaauuuggguggauuuc

SEQ ID NO: 829483 - RNA, 27 nt, Human
ccaccaacauuucaaaaagaauaacac

SEQ ID NO: 829484 - RNA, 23 nt, Human
ccagagcuuucuucugagcaaaa

SEQ ID NO: 829485 - RNA, 18 nt, Human
ccaucugaagccagugca

SEQ ID NO: 829486 - RNA, 24 nt, Human
ccuaguggcgggccaugccucuga

SEQ ID NO: 829487 - RNA, 19 nt, Human
ccucaggaaaaggacuggg

SEQ ID NO: 829488 - RNA, 20 nt, Human
ccugcggccuccgggcuucg

SEQ ID NO: 829489 - RNA, 21 nt, Human
cgcccgcagcucugaucguuc

SEQ ID NO: 829490 - RNA, 20 nt, Human
cguauuccauguuuccagaa

SEQ ID NO: 829491 - RNA, 21 nt, Human
cucagccuuaacaugagcgac

SEQ ID NO: 829492 - RNA, 18 nt, Human
cucggggaugacugggcu

SEQ ID NO: 829493 - RNA, 21 nt, Human
cugaagccagugcagaggcca

SEQ ID NO: 829494 - RNA, 20 nt, Human
cugcggccuccgggcuucgu

SEQ ID NO: 829495 - RNA, 18 nt, Human
gaaaggagguugucccac

SEQ ID NO: 829496 - RNA, 23 nt, Human
gaacuaaugccucucuguccuug

SEQ ID NO: 829497 - RNA, 21 nt, Human
gaauaacaccaacacuccacc

SEQ ID NO: 829498 - RNA, 21 nt, Human
gacuauuucuguuuggcacca

SEQ ID NO: 829499 - RNA, 22 nt, Human
gagcuuguauaaccauauccuc

SEQ ID NO: 829500 - RNA, 18 nt, Human
gauauggaggugguggcu

SEQ ID NO: 829501 - RNA, 19 nt, Human
gcagcuugcaagucuugaa

SEQ ID NO: 829502 - RNA, 20 nt, Human
gcccgcagcucugaucguuc

SEQ ID NO: 829503 - RNA, 22 nt, Human
gcgcagccugcggccuccgggc

SEQ ID NO: 829504 - RNA, 22 nt, Human
gcgggggccgaggacugggggc

SEQ ID NO: 829505 - RNA, 20 nt, Human
gcucucgucgaggaucuugg

SEQ ID NO: 829506 - RNA, 18 nt, Human
ggaacagauggguuuugg

SEQ ID NO: 829507 - RNA, 20 nt, Human
ggcuuuguccauuagcugcu

SEQ ID NO: 829508 - RNA, 21 nt, Human
gggccaugccucugaggaacu

SEQ ID NO: 829509 - RNA, 23 nt, Human
ggguagggugguggugguccuug

SEQ ID NO: 829510 - RNA, 21 nt, Human
gguggugguccuugauaguuu

SEQ ID NO: 829511 - RNA, 19 nt, Human
guccagguacacuaauguu

SEQ ID NO: 829512 - RNA, 19 nt, Human
gugagcuugaacaaaugcu

SEQ ID NO: 829513 - RNA, 22 nt, Human
guggaggauagcccucuugcca

SEQ ID NO: 829514 - RNA, 19 nt, Human
uaaaagaauuugaccucac

SEQ ID NO: 829515 - RNA, 19 nt, Human
uaaauuugcuagaacucug

SEQ ID NO: 829516 - RNA, 24 nt, Human
uaacucuuuucacucucaucuucc

SEQ ID NO: 829517 - RNA, 21 nt, Human
uaauaggcucaucauaucacc

SEQ ID NO: 829518 - RNA, 24 nt, Human
uaauauagacgaacuacccauuca

SEQ ID NO: 829519 - RNA, 21 nt, Human
uaggaggauucaugggggaag

SEQ ID NO: 829520 - RNA, 21 nt, Human
uaggugaaguuguaaucuguu

SEQ ID NO: 829521 - RNA, 19 nt, Human
uaguggcgggccaugccuc

SEQ ID NO: 829522 - RNA, 19 nt, Human
uauaguuacuggcaggaaa

SEQ ID NO: 829523 - RNA, 22 nt, Human
uauccucaucaaauccagcagc

SEQ ID NO: 829524 - RNA, 19 nt, Human
uaucuuggaaugaauaaua

SEQ ID NO: 829525 - RNA, 19 nt, Human
uaugacuauuucuguuugg

SEQ ID NO: 829526 - RNA, 21 nt, Human
ucaaaaagaauaacaccaaca

SEQ ID NO: 829527 - RNA, 20 nt, Human
ucagccuuagcagcaucaga

SEQ ID NO: 829528 - RNA, 24 nt, Human
ucccaugaagggggagguggaguu

SEQ ID NO: 829529 - RNA, 19 nt, Human
ucgcccgcagcucugaucg

SEQ ID NO: 829530 - RNA, 19 nt, Human
ucugaagccagugcagagg

SEQ ID NO: 829531 - RNA, 24 nt, Human
ugaaaacaucuauauauguagccc

SEQ ID NO: 829532 - RNA, 25 nt, Human
ugaaaacaucuauauauguagccca

SEQ ID NO: 829533 - RNA, 19 nt, Human
ugaaaaugauccuucaagg

SEQ ID NO: 829534 - RNA, 21 nt, Human
ugaagccagugcagaggccaa

SEQ ID NO: 829535 - RNA, 19 nt, Human
ugagcuugaacaaaugcug

SEQ ID NO: 829536 - RNA, 22 nt, Human
ugaggaacuaaggauucuuuag

SEQ ID NO: 829537 - RNA, 26 nt, Human
ugaggugguggugggggguucacucu

SEQ ID NO: 829538 - RNA, 21 nt, Human
ugauagauccagagcuuucuu

SEQ ID NO: 829539 - RNA, 24 nt, Human
ugcaagucuugaagcauuugugga

SEQ ID NO: 829540 - RNA, 22 nt, Human
ugcauuccaggucucccugaug

SEQ ID NO: 829541 - RNA, 20 nt, Human
ugccaugccccaggugggac

SEQ ID NO: 829542 - RNA, 21 nt, Human
ugcuccuauuccuagugucuu

SEQ ID NO: 829543 - RNA, 18 nt, Human
uggaaugaauaauauaga

SEQ ID NO: 829544 - RNA, 18 nt, Human
uggagcagaagaugacug

SEQ ID NO: 829545 - RNA, 18 nt, Human
uggagcagaagaugacug

SEQ ID NO: 829546 - RNA, 19 nt, Human
uggaggaacagauggguuu

SEQ ID NO: 829547 - RNA, 18 nt, Human
uggcagcugcugcagcca

SEQ ID NO: 829548 - RNA, 23 nt, Human
uggcaggaaaggucuuaggccuc

SEQ ID NO: 829549 - RNA, 23 nt, Human
uggcugugguauccaagaagggu

SEQ ID NO: 829550 - RNA, 20 nt, Human
uggcuucagucugucuccac

SEQ ID NO: 829551 - RNA, 22 nt, Human
uggguugaacaguuugaauugg

SEQ ID NO: 829552 - RNA, 24 nt, Human
uggguugaacaguuugaauuggcu

SEQ ID NO: 829553 - RNA, 23 nt, Human
uggguuuuggugcagcagauguu

SEQ ID NO: 829554 - RNA, 24 nt, Human
ugguggcugccgauucacagugcc

SEQ ID NO: 829555 - RNA, 23 nt, Human
ugguggugggggguucacucucu

SEQ ID NO: 829556 - RNA, 21 nt, Human
uguaggugcuaaagcagucug

SEQ ID NO: 829557 - RNA, 19 nt, Human
uguguaggugcuaaagcag

SEQ ID NO: 829558 - RNA, 24 nt, Human
uguguuucuaaugguguuugugcc

SEQ ID NO: 829559 - RNA, 19 nt, Human
uguuguagcagaaggcuga

SEQ ID NO: 829560 - RNA, 20 nt, Human
uguuuuggguaggguggugg

SEQ ID NO: 829561 - RNA, 20 nt, Human
uuccuacaucugucugugag

SEQ ID NO: 829562 - RNA, 19 nt, Human
uugcugcacauucccuggu

SEQ ID NO: 829563 - RNA, 21 nt, Human
uuggcaaagcaucuuucucau

SEQ ID NO: 829564 - RNA, 26 nt, Human
uuuaucuucacaaacauagacuuguc

SEQ ID NO: 829565 - RNA, 20 nt, Human
uuugcccgcccggcugcugc

SEQ ID NO: 829566 - RNA, 22 nt, Human
uuuucacuccucuucaugaaaa

SEQ ID NO: 829567 - RNA, 25 nt, Human
aacccauucccucgacauagaccug

SEQ ID NO: 829568 - RNA, 21 nt, Human
acugggguuaccugcaguugc

SEQ ID NO: 829569 - RNA, 26 nt, Human
agaucuagaaacaccugcacugaacu

SEQ ID NO: 829570 - RNA, 19 nt, Human
aggaaauucaaacauaaug

SEQ ID NO: 829571 - RNA, 21 nt, Human
aggcggcggcggcggcugcgg

SEQ ID NO: 829572 - RNA, 21 nt, Human
augcagccccgccuccaaccu

SEQ ID NO: 829573 - RNA, 25 nt, Human
caagccagaugcagccccgccucca

SEQ ID NO: 829574 - RNA, 24 nt, Human
cauaaugguauauggauuucucuu

SEQ ID NO: 829575 - RNA, 18 nt, Human
caucugaaaaacaccaau

SEQ ID NO: 829576 - RNA, 18 nt, Human
ccaagccagaugcagccc

SEQ ID NO: 829577 - RNA, 18 nt, Human
ccgauccggggggaggag

SEQ ID NO: 829578 - RNA, 22 nt, Human
ccuccaaccugcaaggaaccca

SEQ ID NO: 829579 - RNA, 18 nt, Human
cgauccggggggaggagg

SEQ ID NO: 829580 - RNA, 18 nt, Human
cgccgcugccgggccgca

SEQ ID NO: 829581 - RNA, 23 nt, Human
cggcggcugcggguccggagcga

SEQ ID NO: 829582 - RNA, 19 nt, Human
cucgccgcugccgggccgc

SEQ ID NO: 829583 - RNA, 21 nt, Human
cugaaaaacaccaaugcaaua

SEQ ID NO: 829584 - RNA, 26 nt, Human
cugaaaaacaccaaugcaauagauua

SEQ ID NO: 829585 - RNA, 20 nt, Human
gcggcggcggcggcugcggg

SEQ ID NO: 829586 - RNA, 18 nt, Human
ggcggcggcggcggcugc

SEQ ID NO: 829587 - RNA, 20 nt, Human
ggcggcugcggguccggagc

SEQ ID NO: 829588 - RNA, 23 nt, Human
gggggaggaggcggcggcggcgg

SEQ ID NO: 829589 - RNA, 20 nt, Human
uauaucaggaaauucaaaca

SEQ ID NO: 829590 - RNA, 22 nt, Human
uaucaggaaauucaaacauaau

SEQ ID NO: 829591 - RNA, 23 nt, Human
uaucaggaaauucaaacauaaug

SEQ ID NO: 829592 - RNA, 21 nt, Human
ucaucugaaaaacaccaaugc

SEQ ID NO: 829593 - RNA, 19 nt, Human
uccaaccugcaaggaaccc

SEQ ID NO: 829594 - RNA, 18 nt, Human
uccggggggaggaggcgg

SEQ ID NO: 829595 - RNA, 23 nt, Human
uccuggggagcuguggcccgcag

SEQ ID NO: 829596 - RNA, 21 nt, Human
ucuagaaacaccugcacugaa

SEQ ID NO: 829597 - RNA, 21 nt, Human
aaaaagacagauaauagcaag

SEQ ID NO: 829598 - RNA, 23 nt, Human
aaaaagacagauaauagcaagug

SEQ ID NO: 829599 - RNA, 21 nt, Human
aaaacacacaaauguccauca

SEQ ID NO: 829600 - RNA, 19 nt, Human
aaaacugguggaaccaaac

SEQ ID NO: 829601 - RNA, 21 nt, Human
aaaagcacaagugacaauaga

SEQ ID NO: 829602 - RNA, 27 nt, Human
aaaagcacaagugacaauagaaaaaaa

SEQ ID NO: 829603 - RNA, 21 nt, Human
aaaauauccuaaacauagccu

SEQ ID NO: 829604 - RNA, 22 nt, Human
aaacacacaaauguccaucaac

SEQ ID NO: 829605 - RNA, 22 nt, Human
aaaccuggauacauugcuggug

SEQ ID NO: 829606 - RNA, 19 nt, Human
aaacugaaaacaauccaca

SEQ ID NO: 829607 - RNA, 22 nt, Human
aaaggacaccaacaagaaacug

SEQ ID NO: 829608 - RNA, 24 nt, Human
aaauagcucacccaacucaauaau

SEQ ID NO: 829609 - RNA, 23 nt, Human
aacaagaaacugaaaacaaucca

SEQ ID NO: 829610 - RNA, 24 nt, Human
aaccauucaaaaucuggaggccaa

SEQ ID NO: 829611 - RNA, 27 nt, Human
aacuauacaaguucuuagaagaaaacc

SEQ ID NO: 829612 - RNA, 24 nt, Human
aagaaagagguagaaggcacagaa

SEQ ID NO: 829613 - RNA, 19 nt, Human
aagaacaggaaaggcggau

SEQ ID NO: 829614 - RNA, 18 nt, Human
aagaagccagucacaaaa

SEQ ID NO: 829615 - RNA, 19 nt, Human
aagagggccugguauugug

SEQ ID NO: 829616 - RNA, 20 nt, Human
aagcagaggccuuuagcaag

SEQ ID NO: 829617 - RNA, 21 nt, Human
aagcaggagugacagaccaag

SEQ ID NO: 829618 - RNA, 22 nt, Human
aagcaggagugacagaccaagg

SEQ ID NO: 829619 - RNA, 23 nt, Human
aagcaggagugacagaccaaggg

SEQ ID NO: 829620 - RNA, 20 nt, Human
aagcuaugacaucccauuca

SEQ ID NO: 829621 - RNA, 24 nt, Human
aaggacaccaacaagaaacugaaa

SEQ ID NO: 829622 - RNA, 21 nt, Human
acaaagauaaacauguaagug

SEQ ID NO: 829623 - RNA, 20 nt, Human
acaacguagagaagaaagag

SEQ ID NO: 829624 - RNA, 21 nt, Human
accaugucccaggaaagaaga

SEQ ID NO: 829625 - RNA, 19 nt, Human
acggaguuacuguaagacc

SEQ ID NO: 829626 - RNA, 26 nt, Human
agaaaagaacaaggaaccauucaaaa

SEQ ID NO: 829627 - RNA, 18 nt, Human
agaaacaacguagagaag

SEQ ID NO: 829628 - RNA, 18 nt, Human
agaaaggccgugcacaua

SEQ ID NO: 829629 - RNA, 18 nt, Human
agaacuaaaacuauacaa

SEQ ID NO: 829630 - RNA, 23 nt, Human
agaagaaaacacaggcauuaauc

SEQ ID NO: 829631 - RNA, 23 nt, Human
agaagaaagagguagaaggcaca

SEQ ID NO: 829632 - RNA, 22 nt, Human
agaaggaagaggaaucaggagc

SEQ ID NO: 829633 - RNA, 19 nt, Human
agacaauauuagccuccua

SEQ ID NO: 829634 - RNA, 18 nt, Human
agacagguaugaggucca

SEQ ID NO: 829635 - RNA, 21 nt, Human
agaccuagcaauuccacuccu

SEQ ID NO: 829636 - RNA, 19 nt, Human
agaggaagggagaaaggag

SEQ ID NO: 829637 - RNA, 21 nt, Human
agcagcagauccuuagaaaca

SEQ ID NO: 829638 - RNA, 23 nt, Human
agccaaaaaguaaaaacacacaa

SEQ ID NO: 829639 - RNA, 24 nt, Human
agccaaaaaguaaaaacacacaaa

SEQ ID NO: 829640 - RNA, 20 nt, Human
agcuccauuuagaagcuaug

SEQ ID NO: 829641 - RNA, 19 nt, Human
aggaaaucauuggucucaa

SEQ ID NO: 829642 - RNA, 19 nt, Human
aggaagaggaaucaggagc

SEQ ID NO: 829643 - RNA, 22 nt, Human
aggcagcaccaagauacccaac

SEQ ID NO: 829644 - RNA, 24 nt, Human
aggcagcauaaaacugguggaacc

SEQ ID NO: 829645 - RNA, 19 nt, Human
aggcaggagaguggucaga

SEQ ID NO: 829646 - RNA, 27 nt, Human
aggcaggagaguggucagaagggaccc

SEQ ID NO: 829647 - RNA, 18 nt, Human
aggugacuuugccccucu

SEQ ID NO: 829648 - RNA, 24 nt, Human
aguagccaaaaaguaaaaacacac

SEQ ID NO: 829649 - RNA, 21 nt, Human
aguuaaaacacggaguuacug

SEQ ID NO: 829650 - RNA, 21 nt, Human
auagaccuuucuccaaagaaa

SEQ ID NO: 829651 - RNA, 22 nt, Human
aucuauaaaacaaguucucccc

SEQ ID NO: 829652 - RNA, 21 nt, Human
augccauggcuauuacccaac

SEQ ID NO: 829653 - RNA, 21 nt, Human
caaaaagacagauaauagcaa

SEQ ID NO: 829654 - RNA, 24 nt, Human
caaacacagacuaaguaaaaaaaa

SEQ ID NO: 829655 - RNA, 22 nt, Human
caaagaccauugugagaacuaa

SEQ ID NO: 829656 - RNA, 21 nt, Human
caaauagcucacccaacucaa

SEQ ID NO: 829657 - RNA, 18 nt, Human
caacugaugaaucaauaa

SEQ ID NO: 829658 - RNA, 21 nt, Human
caagaaacugaaaacaaucca

SEQ ID NO: 829659 - RNA, 24 nt, Human
caagaaacugaaaacaauccacag

SEQ ID NO: 829660 - RNA, 21 nt, Human
caagauacccaaucagcuucc

SEQ ID NO: 829661 - RNA, 26 nt, Human
caagauacccaaucagcuuccaacua

SEQ ID NO: 829662 - RNA, 25 nt, Human
caauacaggcagcaccaagauaccc

SEQ ID NO: 829663 - RNA, 18 nt, Human
cacaaagggccucagaac

SEQ ID NO: 829664 - RNA, 21 nt, Human
cacaaagggccucagaacuaa

SEQ ID NO: 829665 - RNA, 18 nt, Human
caccaaggaagacugggg

SEQ ID NO: 829666 - RNA, 23 nt, Human
cagaauagccccacucccaucaa

SEQ ID NO: 829667 - RNA, 23 nt, Human
cagagagagauaggacucaguac

SEQ ID NO: 829668 - RNA, 19 nt, Human
cagaggguuccccaugaac

SEQ ID NO: 829669 - RNA, 18 nt, Human
cagcaccaagauacccaa

SEQ ID NO: 829670 - RNA, 18 nt, Human
cagcagugggacaagugg

SEQ ID NO: 829671 - RNA, 24 nt, Human
cagcagugggacaaguggagaucc

SEQ ID NO: 829672 - RNA, 19 nt, Human
cagcaucaguugccaucag

SEQ ID NO: 829673 - RNA, 22 nt, Human
cagcggcggcuucgcgcuccga

SEQ ID NO: 829674 - RNA, 20 nt, Human
caggcaaaauauccuaaaca

SEQ ID NO: 829675 - RNA, 20 nt, Human
caucccccuaaccuccccac

SEQ ID NO: 829676 - RNA, 19 nt, Human
cauuccuaauccuccuuac

SEQ ID NO: 829677 - RNA, 23 nt, Human
ccaaaaaguaaaaacacacaaau

SEQ ID NO: 829678 - RNA, 20 nt, Human
ccaaacacagacuaaguaaa

SEQ ID NO: 829679 - RNA, 20 nt, Human
ccaaggacuaguguguggag

SEQ ID NO: 829680 - RNA, 25 nt, Human
ccacggggauccacagggcugggag

SEQ ID NO: 829681 - RNA, 21 nt, Human
ccacucccaucaauucaucca

SEQ ID NO: 829682 - RNA, 20 nt, Human
ccacuguuugcccuuuuaga

SEQ ID NO: 829683 - RNA, 22 nt, Human
cccacucccaucaauucaucca

SEQ ID NO: 829684 - RNA, 26 nt, Human
cccacucccaucaauucauccaagaa

SEQ ID NO: 829685 - RNA, 18 nt, Human
ccccaugaaccuaaauua

SEQ ID NO: 829686 - RNA, 19 nt, Human
cccccuaaccuccccacaa

SEQ ID NO: 829687 - RNA, 18 nt, Human
ccccuacaucacaucaua

SEQ ID NO: 829688 - RNA, 20 nt, Human
cccucugagccuugguuucc

SEQ ID NO: 829689 - RNA, 18 nt, Human
cgaaauggaucaaagacc

SEQ ID NO: 829690 - RNA, 19 nt, Human
cguaagcacaggaaaagac

SEQ ID NO: 829691 - RNA, 22 nt, Human
cuaaagaaggaagaggaaucag

SEQ ID NO: 829692 - RNA, 18 nt, Human
cuaauccuccuuacccgu

SEQ ID NO: 829693 - RNA, 21 nt, Human
cucaaaaaguuaaaacacgga

SEQ ID NO: 829694 - RNA, 22 nt, Human
cucaugacucauaacaggaaau

SEQ ID NO: 829695 - RNA, 19 nt, Human
cuccaaagaaauacgcaug

SEQ ID NO: 829696 - RNA, 18 nt, Human
cucugagaaaggccgugc

SEQ ID NO: 829697 - RNA, 19 nt, Human
cugaagcccugggccagua

SEQ ID NO: 829698 - RNA, 24 nt, Human
cuggaggcaggagaguggucagaa

SEQ ID NO: 829699 - RNA, 20 nt, Human
cugguuggugcucuguagcu

SEQ ID NO: 829700 - RNA, 23 nt, Human
cuuucuauaaguccauccaagag

SEQ ID NO: 829701 - RNA, 19 nt, Human
gaaccauucaaaaucugga

SEQ ID NO: 829702 - RNA, 24 nt, Human
gaagaagccagucacaaaagaggg

SEQ ID NO: 829703 - RNA, 20 nt, Human
gaagaggaaucaggagccug

SEQ ID NO: 829704 - RNA, 21 nt, Human
gacugggcagggucccuccug

SEQ ID NO: 829705 - RNA, 25 nt, Human
gacugggcagggucccuccuggccu

SEQ ID NO: 829706 - RNA, 20 nt, Human
gagggccugguauuguggug

SEQ ID NO: 829707 - RNA, 19 nt, Human
gcagcaccaagauacccaa

SEQ ID NO: 829708 - RNA, 24 nt, Human
gcagcaucauucagaguagccaaa

SEQ ID NO: 829709 - RNA, 21 nt, Human
gcaggagaguggucagaaggg

SEQ ID NO: 829710 - RNA, 20 nt, Human
gccaaaaaguaaaaacacac

SEQ ID NO: 829711 - RNA, 23 nt, Human
ggaaagcaggagugacagaccaa

SEQ ID NO: 829712 - RNA, 23 nt, Human
ggaaaucauuggucucaaccuuc

SEQ ID NO: 829713 - RNA, 28 nt, Human
ggaaaucauuggucucaaccuuccucca

SEQ ID NO: 829714 - RNA, 26 nt, Human
ggcaaacugcucccaucaagucggca

SEQ ID NO: 829715 - RNA, 21 nt, Human
ggcccuagaaaacauucagug

SEQ ID NO: 829716 - RNA, 21 nt, Human
ggugaagcagagcuuucucug

SEQ ID NO: 829717 - RNA, 19 nt, Human
guggaagaagccagucaca

SEQ ID NO: 829718 - RNA, 23 nt, Human
uaaaaacacacaaauguccauca

SEQ ID NO: 829719 - RNA, 21 nt, Human
uaaaagcaaaaagacagauaa

SEQ ID NO: 829720 - RNA, 25 nt, Human
uaaaagcaaaaagacagauaauagc

SEQ ID NO: 829721 - RNA, 24 nt, Human
uaaccaagagcugaagcccugggc

SEQ ID NO: 829722 - RNA, 19 nt, Human
uaagugaggggcacucaga

SEQ ID NO: 829723 - RNA, 20 nt, Human
uacaaacaaagauaaacaug

SEQ ID NO: 829724 - RNA, 26 nt, Human
uacacuuuugagaauuaaaauuuagc

SEQ ID NO: 829725 - RNA, 21 nt, Human
uaccaugcaggugacuuugcc

SEQ ID NO: 829726 - RNA, 19 nt, Human
uacccuaucacuaugugcu

SEQ ID NO: 829727 - RNA, 24 nt, Human
uagaaaacauucaguggaagaagc

SEQ ID NO: 829728 - RNA, 22 nt, Human
uagacaaauugaaaccuggaua

SEQ ID NO: 829729 - RNA, 18 nt, Human
uagagaagaaagagguag

SEQ ID NO: 829730 - RNA, 23 nt, Human
uagccaaaaaguaaaaacacaca

SEQ ID NO: 829731 - RNA, 25 nt, Human
uauggugacccugagcacauuauuc

SEQ ID NO: 829732 - RNA, 23 nt, Human
uauuagccuccuacacuuuugag

SEQ ID NO: 829733 - RNA, 21 nt, Human
ucaaccuuccuccaaggacua

SEQ ID NO: 829734 - RNA, 19 nt, Human
ucacuggaucccaggaacc

SEQ ID NO: 829735 - RNA, 20 nt, Human
ucagagagagauaggacuca

SEQ ID NO: 829736 - RNA, 20 nt, Human
ucagcagugggacaagugga

SEQ ID NO: 829737 - RNA, 21 nt, Human
uccaaagaaauacgcauggcc

SEQ ID NO: 829738 - RNA, 21 nt, Human
uccaaggacuaguguguggag

SEQ ID NO: 829739 - RNA, 22 nt, Human
uccacaagcaaaagaaugaagc

SEQ ID NO: 829740 - RNA, 22 nt, Human
uccacacaaaaucuuguagaaa

SEQ ID NO: 829741 - RNA, 23 nt, Human
uccacagaagcuccauuuagaag

SEQ ID NO: 829742 - RNA, 18 nt, Human
uccacaggcuucugcugg

SEQ ID NO: 829743 - RNA, 18 nt, Human
uccacaggcuucugcugg

SEQ ID NO: 829744 - RNA, 18 nt, Human
ucccaggaaagaagaucc

SEQ ID NO: 829745 - RNA, 22 nt, Human
uccccacaaagggccucagaac

SEQ ID NO: 829746 - RNA, 23 nt, Human
ucuaacuuucuauaaguccaucc

SEQ ID NO: 829747 - RNA, 25 nt, Human
ucuagaauauacaaauagcucaccc

SEQ ID NO: 829748 - RNA, 24 nt, Human
ucuagauauggcaccaaaagcaca

SEQ ID NO: 829749 - RNA, 19 nt, Human
ucucuggaggcaggagagu

SEQ ID NO: 829750 - RNA, 18 nt, Human
ugaaacaggagaaugagg

SEQ ID NO: 829751 - RNA, 23 nt, Human
ugaaauguccagaguagguuaau

SEQ ID NO: 829752 - RNA, 25 nt, Human
ugaaccuaaauuaaccaagagcuga

SEQ ID NO: 829753 - RNA, 18 nt, Human
ugacuaacagagccccuu

SEQ ID NO: 829754 - RNA, 22 nt, Human
ugauacauccucaacuuggacg

SEQ ID NO: 829755 - RNA, 21 nt, Human
ugccaagacaauuccguggag

SEQ ID NO: 829756 - RNA, 22 nt, Human
uggaaccaaacacagacuaagu

SEQ ID NO: 829757 - RNA, 23 nt, Human
uggaauacucauuccuaauccuc

SEQ ID NO: 829758 - RNA, 20 nt, Human
uggaggccaagaggaaggga

SEQ ID NO: 829759 - RNA, 23 nt, Human
uggauagaccuuucuccaaagaa

SEQ ID NO: 829760 - RNA, 23 nt, Human
uggcaccaaaagcacaagugaca

SEQ ID NO: 829761 - RNA, 22 nt, Human
ugggcagggucccuccuggccu

SEQ ID NO: 829762 - RNA, 20 nt, Human
uggugacccugagcacauua

SEQ ID NO: 829763 - RNA, 26 nt, Human
uggugaggccacagcuuacagugggg

SEQ ID NO: 829764 - RNA, 20 nt, Human
uguccacacaaaaucuugua

SEQ ID NO: 829765 - RNA, 23 nt, Human
uuggacacuagcaauggguaaac

SEQ ID NO: 829766 - RNA, 22 nt, Human
uuucuauuaccaucccccuaac

SEQ ID NO: 829767 - RNA, 22 nt, Human
aaagaaaacccuuuuccauguu

SEQ ID NO: 829768 - RNA, 22 nt, Human
aacacauacauaaggacuucua

SEQ ID NO: 829769 - RNA, 26 nt, Human
aagagagggaacagagagaaaaaugc

SEQ ID NO: 829770 - RNA, 18 nt, Human
aagcaguaggauguagcu

SEQ ID NO: 829771 - RNA, 18 nt, Human
aagguuuuguucucuaug

SEQ ID NO: 829772 - RNA, 19 nt, Human
acaaaagcagacuucuagg

SEQ ID NO: 829773 - RNA, 20 nt, Human
acaagauccacaagaacagu

SEQ ID NO: 829774 - RNA, 18 nt, Human
acauuccuguuuccauaa

SEQ ID NO: 829775 - RNA, 24 nt, Human
acuacaguuuucaaucuaacaucu

SEQ ID NO: 829776 - RNA, 19 nt, Human
agaaaauccuuuaccacca

SEQ ID NO: 829777 - RNA, 20 nt, Human
agcaaagcauauguugaaaa

SEQ ID NO: 829778 - RNA, 19 nt, Human
agcgggcccugggugggga

SEQ ID NO: 829779 - RNA, 20 nt, Human
aucaaauauaucccaauuca

SEQ ID NO: 829780 - RNA, 27 nt, Human
aucacaguguuccagcaaagcauaugu

SEQ ID NO: 829781 - RNA, 18 nt, Human
auucuuguaacacauaca

SEQ ID NO: 829782 - RNA, 23 nt, Human
caaacaagcucagagaggcucau

SEQ ID NO: 829783 - RNA, 24 nt, Human
caaggaaggcaauccucauuuuuc

SEQ ID NO: 829784 - RNA, 19 nt, Human
cacaguguuccagcaaagc

SEQ ID NO: 829785 - RNA, 23 nt, Human
caccagaucccaugcagcgccaa

SEQ ID NO: 829786 - RNA, 23 nt, Human
cagcagguacaaaagcagacuuc

SEQ ID NO: 829787 - RNA, 18 nt, Human
caggccauggagaaaauc

SEQ ID NO: 829788 - RNA, 24 nt, Human
caugcagcgccaaacacauccauu

SEQ ID NO: 829789 - RNA, 19 nt, Human
cauuccuguuuccauaagg

SEQ ID NO: 829790 - RNA, 21 nt, Human
ccagaucccaugcagcgccaa

SEQ ID NO: 829791 - RNA, 27 nt, Human
ccaugcagcgccaaacacauccauucc

SEQ ID NO: 829792 - RNA, 25 nt, Human
cgcgagcgcgcgcgcaagggucucc

SEQ ID NO: 829793 - RNA, 21 nt, Human
gcagaacacuuaguaaaagcg

SEQ ID NO: 829794 - RNA, 21 nt, Human
gcuugcagggaaaagaaaacc

SEQ ID NO: 829795 - RNA, 25 nt, Human
gggaacagagagaaaaaugcccaac

SEQ ID NO: 829796 - RNA, 18 nt, Human
gguacaaaagcagacuuc

SEQ ID NO: 829797 - RNA, 25 nt, Human
guuuuguucucuaugcuggaauggc

SEQ ID NO: 829798 - RNA, 18 nt, Human
uacaaggaaggcaauccu

SEQ ID NO: 829799 - RNA, 20 nt, Human
uacaggaagaauucuacagu

SEQ ID NO: 829800 - RNA, 25 nt, Human
uagaacaaugauuacacaauugaca

SEQ ID NO: 829801 - RNA, 18 nt, Human
ucaguuggaugaccuccu

SEQ ID NO: 829802 - RNA, 21 nt, Human
uccacaagaacagucagcaga

SEQ ID NO: 829803 - RNA, 24 nt, Human
uccauuccacccucuaacacauac

SEQ ID NO: 829804 - RNA, 19 nt, Human
ucccuggacacaagaucca

SEQ ID NO: 829805 - RNA, 23 nt, Human
ucuaugcuggaauggcugaagaa

SEQ ID NO: 829806 - RNA, 22 nt, Human
ugacuagacauacuuggaaguu

SEQ ID NO: 829807 - RNA, 25 nt, Human
ugcagggaaaagaaaacccuuuucc

SEQ ID NO: 829808 - RNA, 21 nt, Human
uggcaaaagugaaauaacaga

SEQ ID NO: 829809 - RNA, 22 nt, Human
uggcaaaagugaaauaacagaa

SEQ ID NO: 829810 - RNA, 18 nt, Human
uggcgcgagcgcgcgcgc

SEQ ID NO: 829811 - RNA, 22 nt, Human
uucagcaacaaacaagcucaga

SEQ ID NO: 829812 - RNA, 24 nt, Human
uucaggccauggagaaaauccuuu

SEQ ID NO: 829813 - RNA, 20 nt, Human
uucagucauaaaggauguug

SEQ ID NO: 829814 - RNA, 24 nt, Human
uuccuguuuccauaagguuuuguu

SEQ ID NO: 829815 - RNA, 20 nt, Human
aaauaucgaaaauaugcgcu

SEQ ID NO: 829816 - RNA, 18 nt, Human
aagcaagaaagagaaaca

SEQ ID NO: 829817 - RNA, 20 nt, Human
aagcaagaaagagaaacaac

SEQ ID NO: 829818 - RNA, 25 nt, Human
aagcaagaaagagaaacaagggacc

SEQ ID NO: 829819 - RNA, 21 nt, Human
aagcccggggcaacugaacaa

SEQ ID NO: 829820 - RNA, 22 nt, Human
aauugauuuugaguuccagagc

SEQ ID NO: 829821 - RNA, 20 nt, Human
accccacaucugugugucug

SEQ ID NO: 829822 - RNA, 21 nt, Human
agccagaaaauguguuucuau

SEQ ID NO: 829823 - RNA, 23 nt, Human
aucguucuagauauacacccugu

SEQ ID NO: 829824 - RNA, 18 nt, Human
caaagcaagaaagagaaa

SEQ ID NO: 829825 - RNA, 24 nt, Human
cagaaacacaguguucccccaaua

SEQ ID NO: 829826 - RNA, 22 nt, Human
cagcagagggcccuuuaaacac

SEQ ID NO: 829827 - RNA, 23 nt, Human
cagcagugcuuggagauggaggu

SEQ ID NO: 829828 - RNA, 19 nt, Human
cagccucucagcuacaucc

SEQ ID NO: 829829 - RNA, 22 nt, Human
cagcucacagugguccugggcc

SEQ ID NO: 829830 - RNA, 23 nt, Human
caguucaacuaucagaaaugcuc

SEQ ID NO: 829831 - RNA, 18 nt, Human
cauugccugcgccuccgc

SEQ ID NO: 829832 - RNA, 23 nt, Human
ccacacauaaacgagaugcugaa

SEQ ID NO: 829833 - RNA, 23 nt, Human
ccacgugugauuccuugugccuc

SEQ ID NO: 829834 - RNA, 18 nt, Human
ccagaaaauguguuucua

SEQ ID NO: 829835 - RNA, 20 nt, Human
ccagcggucgucucuucucc

SEQ ID NO: 829836 - RNA, 23 nt, Human
cccaccccccuaggucuucccca

SEQ ID NO: 829837 - RNA, 23 nt, Human
ccccacgccgcucggucuccagc

SEQ ID NO: 829838 - RNA, 21 nt, Human
cccccaauauuucgaacagcc

SEQ ID NO: 829839 - RNA, 25 nt, Human
cccccaauauuucgaacagcccugu

SEQ ID NO: 829840 - RNA, 22 nt, Human
cccccacccaccccccuagguc

SEQ ID NO: 829841 - RNA, 26 nt, Human
cccccacccaccccccuaggucuucc

SEQ ID NO: 829842 - RNA, 20 nt, Human
ccugcgccuccgcucccagc

SEQ ID NO: 829843 - RNA, 24 nt, Human
ccuuggguuuuguguuugcucaug

SEQ ID NO: 829844 - RNA, 19 nt, Human
ccuuucucccuuuuccagc

SEQ ID NO: 829845 - RNA, 21 nt, Human
ccuuucucccuuuuccagcuc

SEQ ID NO: 829846 - RNA, 23 nt, Human
ccuuugguuuuggcaaacucacu

SEQ ID NO: 829847 - RNA, 21 nt, Human
cgaaaauaugcgcuauacugu

SEQ ID NO: 829848 - RNA, 19 nt, Human
cgucucuucucccagccuc

SEQ ID NO: 829849 - RNA, 22 nt, Human
cgucucuucucccagccucuca

SEQ ID NO: 829850 - RNA, 18 nt, Human
cucacagugguccugggc

SEQ ID NO: 829851 - RNA, 21 nt, Human
cucccaggaagaaucuugggg

SEQ ID NO: 829852 - RNA, 18 nt, Human
cuccgcucccagcuccuc

SEQ ID NO: 829853 - RNA, 21 nt, Human
cugcuucccccacccaccccc

SEQ ID NO: 829854 - RNA, 26 nt, Human
cuucccccacccaccccccuaggucu

SEQ ID NO: 829855 - RNA, 22 nt, Human
gaaauacuagaaacauugacac

SEQ ID NO: 829856 - RNA, 18 nt, Human
gaauaucuucugauuugg

SEQ ID NO: 829857 - RNA, 18 nt, Human
gcaagaaagagaaacaac

SEQ ID NO: 829858 - RNA, 20 nt, Human
gcucacagugguccugggcc

SEQ ID NO: 829859 - RNA, 19 nt, Human
ggagauggaggugcacuca

SEQ ID NO: 829860 - RNA, 24 nt, Human
gguuuuguguuugcucauguuuug

SEQ ID NO: 829861 - RNA, 18 nt, Human
gucuguguguguaugcgu

SEQ ID NO: 829862 - RNA, 22 nt, Human
gugauuccuugugccauuuucu

SEQ ID NO: 829863 - RNA, 19 nt, Human
gugugugaagucaaacagg

SEQ ID NO: 829864 - RNA, 23 nt, Human
uaaacgagaugcugaaaaagccc

SEQ ID NO: 829865 - RNA, 20 nt, Human
uaaagagggaauggggucuu

SEQ ID NO: 829866 - RNA, 22 nt, Human
uaaauuccacacauaaacgaga

SEQ ID NO: 829867 - RNA, 22 nt, Human
uaggaggaaaugaaugccuugc

SEQ ID NO: 829868 - RNA, 25 nt, Human
uauaaaaauaauucgaaaaaauccc

SEQ ID NO: 829869 - RNA, 21 nt, Human
ucaaaagcccggggcaacuga

SEQ ID NO: 829870 - RNA, 23 nt, Human
ucaaacagggaggggcauacaca

SEQ ID NO: 829871 - RNA, 23 nt, Human
ucauuuggaaaguuaugagugug

SEQ ID NO: 829872 - RNA, 23 nt, Human
ucauuuggaaaguuaugagugug

SEQ ID NO: 829873 - RNA, 19 nt, Human
uccauccucccaggaagaa

SEQ ID NO: 829874 - RNA, 18 nt, Human
uccccacgccgcucgguc

SEQ ID NO: 829875 - RNA, 20 nt, Human
ucccuaagcugccuuggguu

SEQ ID NO: 829876 - RNA, 21 nt, Human
ucccuaagcugccuuggguuu

SEQ ID NO: 829877 - RNA, 23 nt, Human
uccuugugccauuuucuuuuguc

SEQ ID NO: 829878 - RNA, 24 nt, Human
ucugcuucccccacccaccccccu

SEQ ID NO: 829879 - RNA, 24 nt, Human
ucuggcuugcuuuuguucucccuu

SEQ ID NO: 829880 - RNA, 18 nt, Human
ucuguaaagcgcuugauu

SEQ ID NO: 829881 - RNA, 18 nt, Human
ucugugugucugugugug

SEQ ID NO: 829882 - RNA, 23 nt, Human
ucuuuucccacugccuuucuccc

SEQ ID NO: 829883 - RNA, 22 nt, Human
ugaaauacuagaaacauugaca

SEQ ID NO: 829884 - RNA, 20 nt, Human
ugagcuauggcuuccuccuc

SEQ ID NO: 829885 - RNA, 19 nt, Human
ugcacuguuuccauccucc

SEQ ID NO: 829886 - RNA, 18 nt, Human
ugcgugugaucuaugcag

SEQ ID NO: 829887 - RNA, 22 nt, Human
uggcauuucuuaaaaaggcuuu

SEQ ID NO: 829888 - RNA, 22 nt, Human
uggccaaagacaugacaaguau

SEQ ID NO: 829889 - RNA, 21 nt, Human
uggcuugcuuuuguucucccu

SEQ ID NO: 829890 - RNA, 20 nt, Human
uggggucuuccagcagcagu

SEQ ID NO: 829891 - RNA, 18 nt, Human
ugguccugggccgggccu

SEQ ID NO: 829892 - RNA, 23 nt, Human
uguaugggggcccuuuguuguca

SEQ ID NO: 829893 - RNA, 22 nt, Human
ugugaagucaaacagggagggg

SEQ ID NO: 829894 - RNA, 21 nt, Human
ugugucuguguguguaugcgu

SEQ ID NO: 829895 - RNA, 24 nt, Human
ugugugaagucaaacagggagggg

SEQ ID NO: 829896 - RNA, 19 nt, Human
uguguguaugcguggcuau

SEQ ID NO: 829897 - RNA, 26 nt, Human
uguguguaugcguggcuaugugcgug

SEQ ID NO: 829898 - RNA, 21 nt, Human
uguguguguaugcguggcuau

SEQ ID NO: 829899 - RNA, 21 nt, Human
uguuuuguuuuguuuuagcug

SEQ ID NO: 829900 - RNA, 21 nt, Human
uuacaguucaacuaucagaaa

SEQ ID NO: 829901 - RNA, 21 nt, Human
uuagagaaaugugacacuuag

SEQ ID NO: 829902 - RNA, 19 nt, Human
uucaacuaucagaaaugcu

SEQ ID NO: 829903 - RNA, 19 nt, Human
uucccccacccaccccccu

SEQ ID NO: 829904 - RNA, 20 nt, Human
uugauuuugaguuccagagc

SEQ ID NO: 829905 - RNA, 22 nt, Human
uuggggagcaaaugcagaugau

SEQ ID NO: 829906 - RNA, 24 nt, Human
uuguuuuguuuuagcugcaccacg

SEQ ID NO: 829907 - RNA, 25 nt, Human
uuuaaaacauuucugaagcugacuu

SEQ ID NO: 829908 - RNA, 20 nt, Human
uuucaauucuguauuuacuc

SEQ ID NO: 829909 - RNA, 22 nt, Human
uuugaaauucaguguaccccac

SEQ ID NO: 829910 - RNA, 22 nt, Human
uuuuuuuuuuuuucagaaugga

SEQ ID NO: 829911 - RNA, 23 nt, Human
aaaaacauuaacuuaauucacag

SEQ ID NO: 829912 - RNA, 20 nt, Human
aaaaauacccaacuuacucc

SEQ ID NO: 829913 - RNA, 24 nt, Human
aaaaauacccaacuuacuccaaga

SEQ ID NO: 829914 - RNA, 26 nt, Human
aaacaccaagaaucuccaccauucuu

SEQ ID NO: 829915 - RNA, 28 nt, Human
aaacagagagagagcacggcauaccugg

SEQ ID NO: 829916 - RNA, 20 nt, Human
aaaggcugggcaguaucauc

SEQ ID NO: 829917 - RNA, 20 nt, Human
aacaaauguucacauguggc

SEQ ID NO: 829918 - RNA, 18 nt, Human
aacacguaagcugcccuc

SEQ ID NO: 829919 - RNA, 18 nt, Human
aacccaguaucccaaguc

SEQ ID NO: 829920 - RNA, 22 nt, Human
aacccaguaucccaagucaaaa

SEQ ID NO: 829921 - RNA, 22 nt, Human
aacuauggccaaaaaggccuaa

SEQ ID NO: 829922 - RNA, 20 nt, Human
aacuuucuugucuugacuuu

SEQ ID NO: 829923 - RNA, 26 nt, Human
aagaagaggaagguucagacaaagag

SEQ ID NO: 829924 - RNA, 20 nt, Human
aagagagguauauuagugau

SEQ ID NO: 829925 - RNA, 24 nt, Human
aagaggccuaaaaauaagaaugau

SEQ ID NO: 829926 - RNA, 18 nt, Human
aagcaaauucuaaacaca

SEQ ID NO: 829927 - RNA, 21 nt, Human
aagcaaccucuuucauucuga

SEQ ID NO: 829928 - RNA, 21 nt, Human
aagcagaggcucugcacaaga

SEQ ID NO: 829929 - RNA, 19 nt, Human
aagcccagaggaccagcag

SEQ ID NO: 829930 - RNA, 22 nt, Human
aagcugcccuccugcaaaagcc

SEQ ID NO: 829931 - RNA, 20 nt, Human
aaggccccuaugaccugaaa

SEQ ID NO: 829932 - RNA, 21 nt, Human
aaggccccuaugaccugaaac

SEQ ID NO: 829933 - RNA, 23 nt, Human
aauacccaacuuacuccaagagc

SEQ ID NO: 829934 - RNA, 20 nt, Human
aauucagucaacaaguuuug

SEQ ID NO: 829935 - RNA, 22 nt, Human
acaccuggccuacuaugaaaau

SEQ ID NO: 829936 - RNA, 18 nt, Human
acaggacccagccuagag

SEQ ID NO: 829937 - RNA, 21 nt, Human
accaagcccagaggaccagca

SEQ ID NO: 829938 - RNA, 21 nt, Human
accaccuacccccagcuuaaa

SEQ ID NO: 829939 - RNA, 19 nt, Human
accaggcauagggaauggu

SEQ ID NO: 829940 - RNA, 23 nt, Human
accgucuuguuagcaucaugcuc

SEQ ID NO: 829941 - RNA, 21 nt, Human
accugccccuccuccuuuacc

SEQ ID NO: 829942 - RNA, 20 nt, Human
acggggagaagacaggaggg

SEQ ID NO: 829943 - RNA, 24 nt, Human
acucaccauucaaaggaaaaaaca

SEQ ID NO: 829944 - RNA, 19 nt, Human
acucaguucaucacauagu

SEQ ID NO: 829945 - RNA, 20 nt, Human
acugaaaugacagcaaccca

SEQ ID NO: 829946 - RNA, 29 nt, Human
acugccccuaaauucuaguuccaaaaaaa

SEQ ID NO: 829947 - RNA, 22 nt, Human
acuucauagcccaggcaagaca

SEQ ID NO: 829948 - RNA, 18 nt, Human
acuuuaucuuucuuuagu

SEQ ID NO: 829949 - RNA, 19 nt, Human
agaaaaaggaggucuucuu

SEQ ID NO: 829950 - RNA, 19 nt, Human
agaaaauucuuauuccccu

SEQ ID NO: 829951 - RNA, 19 nt, Human
agaaaggaaauugcaaaaa

SEQ ID NO: 829952 - RNA, 25 nt, Human
agaaaggaccccucaacccuugaga

SEQ ID NO: 829953 - RNA, 19 nt, Human
agaaaguggcagauuccaa

SEQ ID NO: 829954 - RNA, 19 nt, Human
agaagacaggagggcuggc

SEQ ID NO: 829955 - RNA, 24 nt, Human
agaagaggaagguucagacaaaga

SEQ ID NO: 829956 - RNA, 24 nt, Human
agaaucuggcauagagcaaggcuu

SEQ ID NO: 829957 - RNA, 27 nt, Human
agagcacggcauaccugggcacaccag

SEQ ID NO: 829958 - RNA, 21 nt, Human
agcacaaucuccuuauucacu

SEQ ID NO: 829959 - RNA, 22 nt, Human
agcaggaggguggacacgugga

SEQ ID NO: 829960 - RNA, 25 nt, Human
agccacaggcuccacuucauagccc

SEQ ID NO: 829961 - RNA, 21 nt, Human
agcucacugauaagcaaccuc

SEQ ID NO: 829962 - RNA, 18 nt, Human
agcuccuuccggcagauu

SEQ ID NO: 829963 - RNA, 20 nt, Human
aggaguuuucacucuaaugu

SEQ ID NO: 829964 - RNA, 20 nt, Human
agggagaaguucugcauugg

SEQ ID NO: 829965 - RNA, 19 nt, Human
agggaugcucagggcuucc

SEQ ID NO: 829966 - RNA, 21 nt, Human
agggaugcucagggcuuccug

SEQ ID NO: 829967 - RNA, 20 nt, Human
aggggaugggacugggguca

SEQ ID NO: 829968 - RNA, 19 nt, Human
agggucuggagaaagcauc

SEQ ID NO: 829969 - RNA, 24 nt, Human
aguauucagggcaaaaucuaugca

SEQ ID NO: 829970 - RNA, 23 nt, Human
aguggcaaagguaacugaagaga

SEQ ID NO: 829971 - RNA, 24 nt, Human
auccagguuggcugcucaaacacc

SEQ ID NO: 829972 - RNA, 21 nt, Human
auccuaacauggcaggacaca

SEQ ID NO: 829973 - RNA, 23 nt, Human
auggaugauggauauggaaggca

SEQ ID NO: 829974 - RNA, 21 nt, Human
auggcaggacacaaaaccaag

SEQ ID NO: 829975 - RNA, 18 nt, Human
auugcuauaacucuuagg

SEQ ID NO: 829976 - RNA, 21 nt, Human
auuuguuuaggcuuauuuucc

SEQ ID NO: 829977 - RNA, 23 nt, Human
caaaacugcccauuucuucuaga

SEQ ID NO: 829978 - RNA, 22 nt, Human
caaaauucucaacuauggccaa

SEQ ID NO: 829979 - RNA, 19 nt, Human
caaauguucacauguggca

SEQ ID NO: 829980 - RNA, 18 nt, Human
caacagggcagcccagcc

SEQ ID NO: 829981 - RNA, 28 nt, Human
caacagggcagcccagccagcaucucuu

SEQ ID NO: 829982 - RNA, 21 nt, Human
caacccaguaucccaagucaa

SEQ ID NO: 829983 - RNA, 19 nt, Human
caaccucucugcacacaac

SEQ ID NO: 829984 - RNA, 21 nt, Human
caaccucucugcacacaacuu

SEQ ID NO: 829985 - RNA, 24 nt, Human
caaccucucugcacacaacuuggu

SEQ ID NO: 829986 - RNA, 21 nt, Human
caacgagccccaaaccugaau

SEQ ID NO: 829987 - RNA, 22 nt, Human
caacuauggccaaaaaggccua

SEQ ID NO: 829988 - RNA, 23 nt, Human
caacucccaugaccaagcccaga

SEQ ID NO: 829989 - RNA, 18 nt, Human
caagacauacucugagga

SEQ ID NO: 829990 - RNA, 20 nt, Human
caagucugccuccuaaagag

SEQ ID NO: 829991 - RNA, 23 nt, Human
caauauccuaacauggcaggaca

SEQ ID NO: 829992 - RNA, 23 nt, Human
caccaaauuacaaaacugcccau

SEQ ID NO: 829993 - RNA, 19 nt, Human
caccaacaacccaguaucc

SEQ ID NO: 829994 - RNA, 22 nt, Human
caccacuggaaacagagagaga

SEQ ID NO: 829995 - RNA, 21 nt, Human
caccagaaggaaaaacaauga

SEQ ID NO: 829996 - RNA, 23 nt, Human
caccagaaggaaaaacaaugauu

SEQ ID NO: 829997 - RNA, 23 nt, Human
cacccugaaccucaggauaccac

SEQ ID NO: 829998 - RNA, 21 nt, Human
caccuggaacuucuucugacu

SEQ ID NO: 829999 - RNA, 20 nt, Human
caccugguccuccuccacgu

SEQ ID NO: 830000 - RNA, 19 nt, Human
cacgucgcccagcuccagg

SEQ ID NO: 830001 - RNA, 22 nt, Human
cacuaccucccacucccaccuc

SEQ ID NO: 830002 - RNA, 26 nt, Human
cacuggaaacagagagagagcacggc

SEQ ID NO: 830003 - RNA, 20 nt, Human
cacuggcacguucuccucug

SEQ ID NO: 830004 - RNA, 20 nt, Human
cagaaacauccuuuuuuccc

SEQ ID NO: 830005 - RNA, 23 nt, Human
cagaaagcuaccgagacaagcac

SEQ ID NO: 830006 - RNA, 20 nt, Human
cagaaaggaccccucaaccc

SEQ ID NO: 830007 - RNA, 21 nt, Human
cagcagcucugggagaaagga

SEQ ID NO: 830008 - RNA, 23 nt, Human
cagccaccaccaaauuacaaaac

SEQ ID NO: 830009 - RNA, 18 nt, Human
cagcgcagcagcggcgcc

SEQ ID NO: 830010 - RNA, 23 nt, Human
cauaaguaauucacaccuggccu

SEQ ID NO: 830011 - RNA, 20 nt, Human
caucagggaugcucagggcu

SEQ ID NO: 830012 - RNA, 23 nt, Human
ccaaaaaggccuaaacucgaccc

SEQ ID NO: 830013 - RNA, 24 nt, Human
ccaccaaauuacaaaacugcccau

SEQ ID NO: 830014 - RNA, 22 nt, Human
ccagccucccgccugcggcugc

SEQ ID NO: 830015 - RNA, 31 nt, Human
ccagcgcagcagcggcgccgcgucucccuuu

SEQ ID NO: 830016 - RNA, 18 nt, Human
ccaggggccaacuggaca

SEQ ID NO: 830017 - RNA, 23 nt, Human
ccaguaucccaagucaaaauucu

SEQ ID NO: 830018 - RNA, 23 nt, Human
cccaggcaagacauacucugagg

SEQ ID NO: 830019 - RNA, 24 nt, Human
cccauaaccgagccaggccggggc

SEQ ID NO: 830020 - RNA, 19 nt, Human
cccauacccuggcccucug

SEQ ID NO: 830021 - RNA, 19 nt, Human
cccaugaccaagcccagag

SEQ ID NO: 830022 - RNA, 19 nt, Human
cccaugaccaagcccagag

SEQ ID NO: 830023 - RNA, 21 nt, Human
ccccagccucccgccugcggc

SEQ ID NO: 830024 - RNA, 24 nt, Human
ccccgccgccgccccggccccagc

SEQ ID NO: 830025 - RNA, 23 nt, Human
ccccuucuaaauuugcaauuuuu

SEQ ID NO: 830026 - RNA, 20 nt, Human
cccgccugcggcugcggggc

SEQ ID NO: 830027 - RNA, 20 nt, Human
cccggccccagccucccgcc

SEQ ID NO: 830028 - RNA, 22 nt, Human
cccgggcugcagcagcaccucc

SEQ ID NO: 830029 - RNA, 20 nt, Human
cccuaaagagcuuacagacc

SEQ ID NO: 830030 - RNA, 19 nt, Human
cccugaaccucaggauacc

SEQ ID NO: 830031 - RNA, 18 nt, Human
cccuggauccaauuauuu

SEQ ID NO: 830032 - RNA, 23 nt, Human
cccuggggugaacuccgggcugg

SEQ ID NO: 830033 - RNA, 21 nt, Human
cccuugagaggcaagaagaga

SEQ ID NO: 830034 - RNA, 21 nt, Human
ccgccgccgccccggccccag

SEQ ID NO: 830035 - RNA, 19 nt, Human
ccggccccagccucccgcc

SEQ ID NO: 830036 - RNA, 18 nt, Human
ccggccgggcgcccccgc

SEQ ID NO: 830037 - RNA, 26 nt, Human
ccggccgggcgcccccgccgccgccc

SEQ ID NO: 830038 - RNA, 28 nt, Human
ccuaugaccugaaacauggccggggucc

SEQ ID NO: 830039 - RNA, 19 nt, Human
ccuccacgucgcccagcuc

SEQ ID NO: 830040 - RNA, 19 nt, Human
ccuccggggcggccggcuc

SEQ ID NO: 830041 - RNA, 28 nt, Human
ccuccucucccccuaccugaaucacaaa

SEQ ID NO: 830042 - RNA, 24 nt, Human
ccucugaguuaaccagcucagauc

SEQ ID NO: 830043 - RNA, 21 nt, Human
ccucuggggccacccauaccc

SEQ ID NO: 830044 - RNA, 24 nt, Human
ccugcggcagggagacggcggggc

SEQ ID NO: 830045 - RNA, 27 nt, Human
ccuuccggcagauucccuaauuccagg

SEQ ID NO: 830046 - RNA, 24 nt, Human
ccuuuuuucccucuuugugguccc

SEQ ID NO: 830047 - RNA, 28 nt, Human
cgagccccaaaccugaauuccacucccu

SEQ ID NO: 830048 - RNA, 27 nt, Human
cgcccgggcugcagcagccggggguuc

SEQ ID NO: 830049 - RNA, 19 nt, Human
cgccgccccggccccagcc

SEQ ID NO: 830050 - RNA, 21 nt, Human
cggcaggagaugguggcagaa

SEQ ID NO: 830051 - RNA, 21 nt, Human
cggcuccucgggcucccgccu

SEQ ID NO: 830052 - RNA, 18 nt, Human
cggcugcggggccugcgg

SEQ ID NO: 830053 - RNA, 25 nt, Human
cuacccccagcuuaaaacacccucc

SEQ ID NO: 830054 - RNA, 18 nt, Human
cuagaacuacuaaaaacc

SEQ ID NO: 830055 - RNA, 24 nt, Human
cuaggacugucaagucugccuccu

SEQ ID NO: 830056 - RNA, 23 nt, Human
cucaaacaccaagaaucuccacc

SEQ ID NO: 830057 - RNA, 22 nt, Human
cucagaaaauauuucaagacug

SEQ ID NO: 830058 - RNA, 18 nt, Human
cuccacgucgcccagcuc

SEQ ID NO: 830059 - RNA, 21 nt, Human
cuccagagaauucguguccag

SEQ ID NO: 830060 - RNA, 19 nt, Human
cuccuagaacuacuaaaaa

SEQ ID NO: 830061 - RNA, 22 nt, Human
cuccuagaacuacuaaaaaccu

SEQ ID NO: 830062 - RNA, 24 nt, Human
cuccuccacgucgcccagcuccag

SEQ ID NO: 830063 - RNA, 20 nt, Human
cuccugccucuaaccaccua

SEQ ID NO: 830064 - RNA, 23 nt, Human
cucggguuucugccuuuucucgg

SEQ ID NO: 830065 - RNA, 20 nt, Human
cucucaagaaagaggccuaa

SEQ ID NO: 830066 - RNA, 23 nt, Human
cucugggagaaaguggcagauuc

SEQ ID NO: 830067 - RNA, 22 nt, Human
cugaaaugacagcaacccacau

SEQ ID NO: 830068 - RNA, 22 nt, Human
cugacuggccuuagaaagcaaa

SEQ ID NO: 830069 - RNA, 19 nt, Human
cugcaagguugaccuauac

SEQ ID NO: 830070 - RNA, 21 nt, Human
cugccccuaaauucuaguucc

SEQ ID NO: 830071 - RNA, 23 nt, Human
cuggggccacccauacccuggcc

SEQ ID NO: 830072 - RNA, 21 nt, Human
cuggguguuggucacagacau

SEQ ID NO: 830073 - RNA, 20 nt, Human
cuuaaaacacccugaaccuu

SEQ ID NO: 830074 - RNA, 20 nt, Human
cuuccugaccacugucccgg

SEQ ID NO: 830075 - RNA, 19 nt, Human
cuucugacuuauucaggaa

SEQ ID NO: 830076 - RNA, 19 nt, Human
cuuuccucugcucuguccc

SEQ ID NO: 830077 - RNA, 24 nt, Human
gaagaggaagguucagacaaagag

SEQ ID NO: 830078 - RNA, 19 nt, Human
gagccaggcgggaaggggg

SEQ ID NO: 830079 - RNA, 21 nt, Human
gauucuaacucagaaagaaau

SEQ ID NO: 830080 - RNA, 18 nt, Human
gcaagcuccaaggccagc

SEQ ID NO: 830081 - RNA, 23 nt, Human
gccaccaccugguccuccuccac

SEQ ID NO: 830082 - RNA, 19 nt, Human
gccaccagaaggaaaaaca

SEQ ID NO: 830083 - RNA, 19 nt, Human
gcccuggggugaacuccgg

SEQ ID NO: 830084 - RNA, 20 nt, Human
gccgccgccccggccccagc

SEQ ID NO: 830085 - RNA, 20 nt, Human
gccuuaaaauuaccaccacu

SEQ ID NO: 830086 - RNA, 22 nt, Human
ggaaaaggaagacauuauuugu

SEQ ID NO: 830087 - RNA, 22 nt, Human
ggaaaguauaaacaauauuccu

SEQ ID NO: 830088 - RNA, 21 nt, Human
ggauaccacgaaaaauaacca

SEQ ID NO: 830089 - RNA, 22 nt, Human
ggaugcucagggcuuccugacc

SEQ ID NO: 830090 - RNA, 20 nt, Human
ggcaagacauacucugagga

SEQ ID NO: 830091 - RNA, 20 nt, Human
ggcaggacacaaaaccaagg

SEQ ID NO: 830092 - RNA, 21 nt, Human
ggcaggagaugguggcagaag

SEQ ID NO: 830093 - RNA, 22 nt, Human
ggccccagccucccgccugcgg

SEQ ID NO: 830094 - RNA, 24 nt, Human
ggccuuaaaauuaccaccacugga

SEQ ID NO: 830095 - RNA, 19 nt, Human
ggccuuagaaagcaaagua

SEQ ID NO: 830096 - RNA, 18 nt, Human
ggcuccuagcuucugcug

SEQ ID NO: 830097 - RNA, 20 nt, Human
gggaaaacaguuuuucuaag

SEQ ID NO: 830098 - RNA, 20 nt, Human
gggcaguaucaucugcugag

SEQ ID NO: 830099 - RNA, 26 nt, Human
gggcggcuccgcggccggccgggcgc

SEQ ID NO: 830100 - RNA, 18 nt, Human
guaccacagaacaaaauc

SEQ ID NO: 830101 - RNA, 21 nt, Human
guguggcaugagaucaggcug

SEQ ID NO: 830102 - RNA, 22 nt, Human
uaaaacacccugaaccucagga

SEQ ID NO: 830103 - RNA, 22 nt, Human
uaaaacauccugccucaucccc

SEQ ID NO: 830104 - RNA, 23 nt, Human
uaaacucgacccacaggaacugg

SEQ ID NO: 830105 - RNA, 19 nt, Human
uaaaguugcccuaaugaac

SEQ ID NO: 830106 - RNA, 21 nt, Human
uaaauggucccucggguuucu

SEQ ID NO: 830107 - RNA, 21 nt, Human
uaacaccaucuuaaaauuuuu

SEQ ID NO: 830108 - RNA, 20 nt, Human
uaacacuaccucccacuccc

SEQ ID NO: 830109 - RNA, 18 nt, Human
uaacauggcaggacacaa

SEQ ID NO: 830110 - RNA, 22 nt, Human
uaacuccuccucucccccuacc

SEQ ID NO: 830111 - RNA, 19 nt, Human
uaacugaagagauaaagca

SEQ ID NO: 830112 - RNA, 19 nt, Human
uaacuuaauucacaguuag

SEQ ID NO: 830113 - RNA, 20 nt, Human
uaagaaaaacauuaacuuaa

SEQ ID NO: 830114 - RNA, 22 nt, Human
uaauaaaaaaugaggcccucug

SEQ ID NO: 830115 - RNA, 25 nt, Human
uaauaucaauaaaaaaauaaacuuc

SEQ ID NO: 830116 - RNA, 24 nt, Human
uacagaauugaaaaugcccucuug

SEQ ID NO: 830117 - RNA, 19 nt, Human
uaccacagaacaaaaucaa

SEQ ID NO: 830118 - RNA, 22 nt, Human
uagcuugggaucuacuagggag

SEQ ID NO: 830119 - RNA, 24 nt, Human
uauaugcauacucaguucaucaca

SEQ ID NO: 830120 - RNA, 21 nt, Human
uauccuauuuuauucauccac

SEQ ID NO: 830121 - RNA, 26 nt, Human
uauucacucuccaaauuauuuacaua

SEQ ID NO: 830122 - RNA, 18 nt, Human
uauuuuauucauccaccu

SEQ ID NO: 830123 - RNA, 22 nt, Human
ucaaacaccaagaaucuccacc

SEQ ID NO: 830124 - RNA, 21 nt, Human
ucaagggacaaagaccacaca

SEQ ID NO: 830125 - RNA, 21 nt, Human
ucaagucugccuccuaaagag

SEQ ID NO: 830126 - RNA, 21 nt, Human
ucacaggagaacuaggccugc

SEQ ID NO: 830127 - RNA, 24 nt, Human
ucaccaacaacccaguaucccaag

SEQ ID NO: 830128 - RNA, 21 nt, Human
ucaccauucaaaggaaaaaac

SEQ ID NO: 830129 - RNA, 19 nt, Human
ucacugauaagcaaccucu

SEQ ID NO: 830130 - RNA, 21 nt, Human
ucagaaaauauuucaagacug

SEQ ID NO: 830131 - RNA, 21 nt, Human
ucagaaagaaaugggaaaaca

SEQ ID NO: 830132 - RNA, 22 nt, Human
ucagacaaagaggaacauuaca

SEQ ID NO: 830133 - RNA, 23 nt, Human
ucagcucacugauaagcaaccuc

SEQ ID NO: 830134 - RNA, 24 nt, Human
ucaggaacaacagggcagcccagc

SEQ ID NO: 830135 - RNA, 20 nt, Human
ucauagcccaggcaagacau

SEQ ID NO: 830136 - RNA, 18 nt, Human
ucaucacacuaaggcaag

SEQ ID NO: 830137 - RNA, 18 nt, Human
ucauguuggggagcagaa

SEQ ID NO: 830138 - RNA, 20 nt, Human
ucauucucacccugcuaugu

SEQ ID NO: 830139 - RNA, 19 nt, Human
ucauuuaaaacauccugcc

SEQ ID NO: 830140 - RNA, 19 nt, Human
uccagagcucagccuacuc

SEQ ID NO: 830141 - RNA, 25 nt, Human
uccaugacuugggaguaaacggagc

SEQ ID NO: 830142 - RNA, 20 nt, Human
ucccacucccaccucucuca

SEQ ID NO: 830143 - RNA, 23 nt, Human
ucccacucccaccucucucaaga

SEQ ID NO: 830144 - RNA, 22 nt, Human
ucccggaccuauacaaaaauuc

SEQ ID NO: 830145 - RNA, 18 nt, Human
ucccgggugaaggcacug

SEQ ID NO: 830146 - RNA, 18 nt, Human
ucccucuuuguggucccu

SEQ ID NO: 830147 - RNA, 18 nt, Human
ucccugaaggccucaguu

SEQ ID NO: 830148 - RNA, 19 nt, Human
ucccuggauccaauuauuu

SEQ ID NO: 830149 - RNA, 18 nt, Human
uccgguaguccaaacuuc

SEQ ID NO: 830150 - RNA, 21 nt, Human
uccuccacgucgcccagcucc

SEQ ID NO: 830151 - RNA, 19 nt, Human
ucgacccacaggaacuggc

SEQ ID NO: 830152 - RNA, 20 nt, Human
ucggcccagcgcagcagcgg

SEQ ID NO: 830153 - RNA, 21 nt, Human
ucguguccagaugaagagacu

SEQ ID NO: 830154 - RNA, 21 nt, Human
ucucugcacacaacuugguuc

SEQ ID NO: 830155 - RNA, 19 nt, Human
ucugccuuuucucggaggg

SEQ ID NO: 830156 - RNA, 18 nt, Human
ucuggagaaagcaucuca

SEQ ID NO: 830157 - RNA, 21 nt, Human
ucuggcauagagcaaggcuuc

SEQ ID NO: 830158 - RNA, 23 nt, Human
ucuucuagaauaauaguuuuaaa

SEQ ID NO: 830159 - RNA, 18 nt, Human
ucuucuuguguccucuag

SEQ ID NO: 830160 - RNA, 19 nt, Human
ugaaaugacagcaacccac

SEQ ID NO: 830161 - RNA, 23 nt, Human
ugaauguuauuucucccugcugu

SEQ ID NO: 830162 - RNA, 19 nt, Human
ugacagaaaggaccccuca

SEQ ID NO: 830163 - RNA, 18 nt, Human
ugagaggcaagaagagag

SEQ ID NO: 830164 - RNA, 24 nt, Human
ugagaugagaugugugaaccacca

SEQ ID NO: 830165 - RNA, 19 nt, Human
ugagaugugugaaccacca

SEQ ID NO: 830166 - RNA, 22 nt, Human
ugagccuacagaauugaaaaug

SEQ ID NO: 830167 - RNA, 23 nt, Human
ugaggcccucuggggcccugggg

SEQ ID NO: 830168 - RNA, 18 nt, Human
ugagguaaagacccgaaa

SEQ ID NO: 830169 - RNA, 21 nt, Human
ugauauuccauaugaaggagc

SEQ ID NO: 830170 - RNA, 19 nt, Human
ugcaguuaaaacugcagug

SEQ ID NO: 830171 - RNA, 18 nt, Human
ugcaucaagacugagagc

SEQ ID NO: 830172 - RNA, 18 nt, Human
ugcaugagcaggagggug

SEQ ID NO: 830173 - RNA, 18 nt, Human
ugccucauccccacauuc

SEQ ID NO: 830174 - RNA, 21 nt, Human
ugcuguguacauuagucuggc

SEQ ID NO: 830175 - RNA, 23 nt, Human
uggagaaagcaucucaauccauu

SEQ ID NO: 830176 - RNA, 20 nt, Human
uggcagaaaagcagguccac

SEQ ID NO: 830177 - RNA, 24 nt, Human
uggcagaaaagcagguccacaugg

SEQ ID NO: 830178 - RNA, 19 nt, Human
uggcagaaggugucacacc

SEQ ID NO: 830179 - RNA, 24 nt, Human
uggcucccaguccuguuggcuccu

SEQ ID NO: 830180 - RNA, 18 nt, Human
ugggacuggggucagcag

SEQ ID NO: 830181 - RNA, 18 nt, Human
ugggaucuacuagggaga

SEQ ID NO: 830182 - RNA, 22 nt, Human
ugggcaguaucaucugcugagc

SEQ ID NO: 830183 - RNA, 23 nt, Human
uggggcccuggggugaacuccgg

SEQ ID NO: 830184 - RNA, 22 nt, Human
uggggucagcugagcccaaggc

SEQ ID NO: 830185 - RNA, 20 nt, Human
uggggucucagccaccacca

SEQ ID NO: 830186 - RNA, 21 nt, Human
uggggugaacuccgggcugcu

SEQ ID NO: 830187 - RNA, 22 nt, Human
uggucccucggguuucugccuu

SEQ ID NO: 830188 - RNA, 18 nt, Human
ugguugucuuauucucaa

SEQ ID NO: 830189 - RNA, 18 nt, Human
ugucaagucugccuccua

SEQ ID NO: 830190 - RNA, 22 nt, Human
ugucuauuugcauuuccacaug

SEQ ID NO: 830191 - RNA, 23 nt, Human
ugucuugacuuuaaaguggaaca

SEQ ID NO: 830192 - RNA, 18 nt, Human
ugugagggguccaaaaug

SEQ ID NO: 830193 - RNA, 19 nt, Human
uguggagaguccuaagcca

SEQ ID NO: 830194 - RNA, 22 nt, Human
uuaaaaauacccaacuuacucc

SEQ ID NO: 830195 - RNA, 22 nt, Human
uuaaaagaucaucuggucuagu

SEQ ID NO: 830196 - RNA, 22 nt, Human
uuaacuuucuugucuugacuuu

SEQ ID NO: 830197 - RNA, 25 nt, Human
uuaggcagaugaacaucuaaggcca

SEQ ID NO: 830198 - RNA, 23 nt, Human
uuauucacucuccaaauuauuua

SEQ ID NO: 830199 - RNA, 25 nt, Human
uucaggaacaacagggcagcccagc

SEQ ID NO: 830200 - RNA, 22 nt, Human
uucaucuuuuacuguguuugaa

SEQ ID NO: 830201 - RNA, 24 nt, Human
uucaucuuuuacuguguuugaagg

SEQ ID NO: 830202 - RNA, 19 nt, Human
uuccagaaaaaggaggucu

SEQ ID NO: 830203 - RNA, 19 nt, Human
uugucuugcccauguuaga

SEQ ID NO: 830204 - RNA, 20 nt, Human
uugugccuguuaaucuguca

SEQ ID NO: 830205 - RNA, 18 nt, Human
uuuacauuucaaugccca

SEQ ID NO: 830206 - RNA, 21 nt, Human
uuucccacaacacucaauacu

SEQ ID NO: 830207 - RNA, 23 nt, Human
uuucugguccuaugaagaagcug

SEQ ID NO: 830208 - RNA, 26 nt, Human
uuugcaaccauccaacucaaagacca

SEQ ID NO: 830209 - RNA, 24 nt, Human
uuugcaauuucauccaacugcccc

SEQ ID NO: 830210 - RNA, 19 nt, Human
uuuguaccacagaacaaaa

SEQ ID NO: 830211 - RNA, 24 nt, Human
uuuugcuuuccucugcucuguccc

SEQ ID NO: 830212 - RNA, 26 nt, Human
aagucaaccucaaaauauuuacuugg

SEQ ID NO: 830213 - RNA, 21 nt, Human
acuugggagaagaucuucauc

SEQ ID NO: 830214 - RNA, 21 nt, Human
aggaacaggaagaggaacaug

SEQ ID NO: 830215 - RNA, 25 nt, Human
aggaacaggaagaggaaccgguacc

SEQ ID NO: 830216 - RNA, 18 nt, Human
caacaggaacaggaagag

SEQ ID NO: 830217 - RNA, 19 nt, Human
gaacaggaagaggaacaug

SEQ ID NO: 830218 - RNA, 18 nt, Human
gaccugcggacgaggccc

SEQ ID NO: 830219 - RNA, 20 nt, Human
gagcuugcaggucuccuccg

SEQ ID NO: 830220 - RNA, 23 nt, Human
gcaggucuccuccaggagggcaa

SEQ ID NO: 830221 - RNA, 23 nt, Human
gucaacaggaacaggaagaggaa

SEQ ID NO: 830222 - RNA, 21 nt, Human
ucaacaggaacaggaagagga

SEQ ID NO: 830223 - RNA, 19 nt, Human
aaaaaaacaaaggaaaagg

SEQ ID NO: 830224 - RNA, 19 nt, Human
aaaacaaaggaaaaggaga

SEQ ID NO: 830225 - RNA, 24 nt, Human
aaaaggagagaaaugcacagcggc

SEQ ID NO: 830226 - RNA, 20 nt, Human
aaggagagaaaugcacagcg

SEQ ID NO: 830227 - RNA, 24 nt, Human
aaggagagaaaugcacagcggcgc

SEQ ID NO: 830228 - RNA, 21 nt, Human
acaugcacauuaaaaccaaca

SEQ ID NO: 830229 - RNA, 19 nt, Human
agacagaggggccgcgagc

SEQ ID NO: 830230 - RNA, 18 nt, Human
aggcgguggcgaaaggga

SEQ ID NO: 830231 - RNA, 21 nt, Human
aggcgguggcgaaagggacgg

SEQ ID NO: 830232 - RNA, 27 nt, Human
caaaaaaacaaaggaaaaggagagaaa

SEQ ID NO: 830233 - RNA, 22 nt, Human
cacaugcacauuaaaaccaaca

SEQ ID NO: 830234 - RNA, 26 nt, Human
ccaacaggugcaaacuacaacaaugc

SEQ ID NO: 830235 - RNA, 23 nt, Human
ccgccgccgccggggcacgccug

SEQ ID NO: 830236 - RNA, 19 nt, Human
ccgcgaggggccaaaaaaa

SEQ ID NO: 830237 - RNA, 19 nt, Human
cgagcggagccgggcggcg

SEQ ID NO: 830238 - RNA, 26 nt, Human
cgaggggccaaaaaaacaaaggaaaa

SEQ ID NO: 830239 - RNA, 23 nt, Human
cggagccgggcggcggcggcgcg

SEQ ID NO: 830240 - RNA, 22 nt, Human
cggcucuccgccgccgccgggg

SEQ ID NO: 830241 - RNA, 25 nt, Human
cugcgcucgcguuucccagccuccu

SEQ ID NO: 830242 - RNA, 20 nt, Human
gagcggagccgggcggcggc

SEQ ID NO: 830243 - RNA, 18 nt, Human
gaggggccgcgagcggag

SEQ ID NO: 830244 - RNA, 19 nt, Human
gcaaggaaaaggcgguggc

SEQ ID NO: 830245 - RNA, 18 nt, Human
gccugcagacagaggggc

SEQ ID NO: 830246 - RNA, 22 nt, Human
gccugcgcucgcguuucccagc

SEQ ID NO: 830247 - RNA, 23 nt, Human
gcucuccgccgccgccggggcac

SEQ ID NO: 830248 - RNA, 18 nt, Human
ggacucggggcacugcag

SEQ ID NO: 830249 - RNA, 22 nt, Human
ggacucggggcacugcagggaa

SEQ ID NO: 830250 - RNA, 21 nt, Human
ggcgcgggcccgggacucggg

SEQ ID NO: 830251 - RNA, 18 nt, Human
ggcggcggcgcgggcccg

SEQ ID NO: 830252 - RNA, 19 nt, Human
ggcggcggcggcgcgggcc

SEQ ID NO: 830253 - RNA, 22 nt, Human
gggcacugcagggaagcggucc

SEQ ID NO: 830254 - RNA, 23 nt, Human
gggcacugcagggaagcgguccg

SEQ ID NO: 830255 - RNA, 19 nt, Human
ggggccaaaaaaacaaagg

SEQ ID NO: 830256 - RNA, 20 nt, Human
uaaaaccaacaggugcaaac

SEQ ID NO: 830257 - RNA, 19 nt, Human
uaggccauucacaugcaca

SEQ ID NO: 830258 - RNA, 19 nt, Human
ugcacagcggcgcgaggca

SEQ ID NO: 830259 - RNA, 20 nt, Human
ugcagggaagcgguccgcgu

SEQ ID NO: 830260 - RNA, 24 nt, Human
ugcccacacccgcgaggggccaaa

SEQ ID NO: 830261 - RNA, 25 nt, Human
uggcgaaagggacggcguugaggcc

SEQ ID NO: 830262 - RNA, 18 nt, Human
uuaaaaccaacaggugca

SEQ ID NO: 830263 - RNA, 20 nt, Human
uuugcuaaccaacaaugccc

SEQ ID NO: 830264 - RNA, 22 nt, Human
aacacaauaaauaccuacaucc

SEQ ID NO: 830265 - RNA, 22 nt, Human
agagagaauggaaaaaagcugc

SEQ ID NO: 830266 - RNA, 24 nt, Human
auauaucuaaugaaaagagucgga

SEQ ID NO: 830267 - RNA, 23 nt, Human
caaaugccaacuacauauauaua

SEQ ID NO: 830268 - RNA, 21 nt, Human
cacaauaaauaccuacauccu

SEQ ID NO: 830269 - RNA, 18 nt, Human
caggaccuucagcacucu

SEQ ID NO: 830270 - RNA, 21 nt, Human
cauuguagaagaagcuacuac

SEQ ID NO: 830271 - RNA, 19 nt, Human
ccagcaagaaugaaagaaa

SEQ ID NO: 830272 - RNA, 19 nt, Human
cggaaugguaguuuuaggc

SEQ ID NO: 830273 - RNA, 24 nt, Human
cggaauuucuagaacacaauaaau

SEQ ID NO: 830274 - RNA, 22 nt, Human
uaauuucggaaugguaguuuua

SEQ ID NO: 830275 - RNA, 22 nt, Human
uagaacacaauaaauaccuaca

SEQ ID NO: 830276 - RNA, 20 nt, Human
uagaagaagcuacuacuuuu

SEQ ID NO: 830277 - RNA, 20 nt, Human
ucuagaacacaauaaauacc

SEQ ID NO: 830278 - RNA, 20 nt, Human
ucuaugaucucuucaauaau

SEQ ID NO: 830279 - RNA, 20 nt, Human
uggaaaaaagcugcugaucc

SEQ ID NO: 830280 - RNA, 23 nt, Human
uuccuguuuccaucuuuuaggaa

SEQ ID NO: 830281 - RNA, 19 nt, Human
aaagcguacaucugccuuu

SEQ ID NO: 830282 - RNA, 22 nt, Human
aaccugcuuguuccuuuacucc

SEQ ID NO: 830283 - RNA, 23 nt, Human
aaccugcuuguuccuuuacucca

SEQ ID NO: 830284 - RNA, 21 nt, Human
aagaaccugcuuguuccuuua

SEQ ID NO: 830285 - RNA, 20 nt, Human
aagggccaccuuucaggcac

SEQ ID NO: 830286 - RNA, 18 nt, Human
aauaauuauagguuucuu

SEQ ID NO: 830287 - RNA, 20 nt, Human
acagagggagcuucuugcca

SEQ ID NO: 830288 - RNA, 20 nt, Human
acugcuguccuuucuuuccc

SEQ ID NO: 830289 - RNA, 19 nt, Human
agcccaaagcauccaucag

SEQ ID NO: 830290 - RNA, 19 nt, Human
aggauguuggagccugaaa

SEQ ID NO: 830291 - RNA, 22 nt, Human
auggguacucgugaaaugacau

SEQ ID NO: 830292 - RNA, 19 nt, Human
cacagguuggguauuugga

SEQ ID NO: 830293 - RNA, 19 nt, Human
cagcaaggccuacaguucc

SEQ ID NO: 830294 - RNA, 18 nt, Human
cagcacugcccuuccuuc

SEQ ID NO: 830295 - RNA, 20 nt, Human
caucuggacuuugagugauu

SEQ ID NO: 830296 - RNA, 18 nt, Human
ccauugagggaggucagg

SEQ ID NO: 830297 - RNA, 24 nt, Human
ccuccaaagcccaaagcauccauc

SEQ ID NO: 830298 - RNA, 21 nt, Human
ccuuccuucccuuugaaagcc

SEQ ID NO: 830299 - RNA, 26 nt, Human
cucuaaauugacaaguuuaguuaugc

SEQ ID NO: 830300 - RNA, 21 nt, Human
gaaaacguggaggagaugcgc

SEQ ID NO: 830301 - RNA, 18 nt, Human
gaagcagaugguuugaug

SEQ ID NO: 830302 - RNA, 21 nt, Human
gagauaccuccaaagcccaaa

SEQ ID NO: 830303 - RNA, 22 nt, Human
gaugguuugauggaccucagaa

SEQ ID NO: 830304 - RNA, 20 nt, Human
gauuguguugcuggcaugga

SEQ ID NO: 830305 - RNA, 22 nt, Human
gcaaggccuacaguuccccaga

SEQ ID NO: 830306 - RNA, 20 nt, Human
gcagcuucagggcaacaggc

SEQ ID NO: 830307 - RNA, 21 nt, Human
gccaagggagaagcagauggu

SEQ ID NO: 830308 - RNA, 18 nt, Human
gccuccugcccucucagg

SEQ ID NO: 830309 - RNA, 18 nt, Human
ggaggauguuggagccug

SEQ ID NO: 830310 - RNA, 23 nt, Human
ggccuuuccuuccggcagcuuca

SEQ ID NO: 830311 - RNA, 24 nt, Human
gggcaggaugugaccacagaucug

SEQ ID NO: 830312 - RNA, 18 nt, Human
gguuggguauuuggauaa

SEQ ID NO: 830313 - RNA, 18 nt, Human
gguuugauggaccucaga

SEQ ID NO: 830314 - RNA, 18 nt, Human
uaccuccaaagcccaaag

SEQ ID NO: 830315 - RNA, 23 nt, Human
ucacccuaaucugcaccucuuua

SEQ ID NO: 830316 - RNA, 19 nt, Human
ucagggcaacaggcauagg

SEQ ID NO: 830317 - RNA, 18 nt, Human
ucaucuggacuuugagug

SEQ ID NO: 830318 - RNA, 20 nt, Human
uccaagggaggacauguauc

SEQ ID NO: 830319 - RNA, 23 nt, Human
uccauagaaaaauaaacucuaaa

SEQ ID NO: 830320 - RNA, 22 nt, Human
ucccaagggccgucucaucuuc

SEQ ID NO: 830321 - RNA, 24 nt, Human
ucggaggugacugcuguccuuucu

SEQ ID NO: 830322 - RNA, 18 nt, Human
ucugcaccucuuuaucuc

SEQ ID NO: 830323 - RNA, 22 nt, Human
ugaaaugacaugggcauuuuaa

SEQ ID NO: 830324 - RNA, 25 nt, Human
ugaguaaggagauugauuggacuuu

SEQ ID NO: 830325 - RNA, 18 nt, Human
ugagugauuguguugcug

SEQ ID NO: 830326 - RNA, 19 nt, Human
ugauggaccucagagcugg

SEQ ID NO: 830327 - RNA, 23 nt, Human
ugcaccucuuuaucucacuaguc

SEQ ID NO: 830328 - RNA, 18 nt, Human
uggaaaguucaaagucug

SEQ ID NO: 830329 - RNA, 24 nt, Human
uggacugucacccuaaucugcacc

SEQ ID NO: 830330 - RNA, 25 nt, Human
uggcuaauaccucuucccaagggcc

SEQ ID NO: 830331 - RNA, 18 nt, Human
uguuggagccugaaagcc

SEQ ID NO: 830332 - RNA, 20 nt, Human
uucagggcaacaggcauagg

SEQ ID NO: 830333 - RNA, 23 nt, Human
uucuaagaagaaauggagaccaa

SEQ ID NO: 830334 - RNA, 19 nt, Human
uuuaagcacauguagauga

SEQ ID NO: 830335 - RNA, 22 nt, Human
uuuuaagcacauguagaugagg

SEQ ID NO: 830336 - RNA, 20 nt, Human
aaaaacacugccaagaccau

SEQ ID NO: 830337 - RNA, 23 nt, Human
aaaaagaaaaugaagaaagagaa

SEQ ID NO: 830338 - RNA, 24 nt, Human
aaaaauccauguuuuuuuccucca

SEQ ID NO: 830339 - RNA, 23 nt, Human
aaacauaaaaguuuguccugcuc

SEQ ID NO: 830340 - RNA, 23 nt, Human
aaacaucuucggcaucaccacau

SEQ ID NO: 830341 - RNA, 25 nt, Human
aaagaaaaaaagaaaaugaagaaag

SEQ ID NO: 830342 - RNA, 24 nt, Human
aacacucucuguggcggccacacc

SEQ ID NO: 830343 - RNA, 21 nt, Human
aacauaaugaagucuccaucu

SEQ ID NO: 830344 - RNA, 23 nt, Human
aacauaauucaacaaggccacaa

SEQ ID NO: 830345 - RNA, 19 nt, Human
aacucagaacagucaacaa

SEQ ID NO: 830346 - RNA, 18 nt, Human
aagaaagagaagaaagga

SEQ ID NO: 830347 - RNA, 23 nt, Human
aagaaaggaaggaaacuuugcuc

SEQ ID NO: 830348 - RNA, 19 nt, Human
aagaagggauauaguuggg

SEQ ID NO: 830349 - RNA, 23 nt, Human
aagaagggauauaguugggagug

SEQ ID NO: 830350 - RNA, 20 nt, Human
aaucauagcuaguguccugg

SEQ ID NO: 830351 - RNA, 19 nt, Human
aaugaagucuccaucugaa

SEQ ID NO: 830352 - RNA, 18 nt, Human
acacaguugcucagguau

SEQ ID NO: 830353 - RNA, 18 nt, Human
acauacaacacggcucgu

SEQ ID NO: 830354 - RNA, 20 nt, Human
accauacaaaauggaucaua

SEQ ID NO: 830355 - RNA, 25 nt, Human
agaaaaaaagaaaaugaagaaagag

SEQ ID NO: 830356 - RNA, 22 nt, Human
agaaaaugaagaaagagaagaa

SEQ ID NO: 830357 - RNA, 18 nt, Human
agaggacagcauaaagau

SEQ ID NO: 830358 - RNA, 18 nt, Human
agcaaguuaacaaaaggg

SEQ ID NO: 830359 - RNA, 19 nt, Human
agcaguuaucuuucucccc

SEQ ID NO: 830360 - RNA, 19 nt, Human
agcugguaguaaguaugca

SEQ ID NO: 830361 - RNA, 20 nt, Human
agcuguggugaauucagguu

SEQ ID NO: 830362 - RNA, 26 nt, Human
aggaaacuuugcucucuuacugguag

SEQ ID NO: 830363 - RNA, 21 nt, Human
aggaauaaaaggcaaaaaaga

SEQ ID NO: 830364 - RNA, 24 nt, Human
aggaguacacacauuauuaccacu

SEQ ID NO: 830365 - RNA, 26 nt, Human
aggcaaaaaagaaaaaaaggggaccc

SEQ ID NO: 830366 - RNA, 19 nt, Human
aggggucccaucuuuguuu

SEQ ID NO: 830367 - RNA, 23 nt, Human
auccagccauugagcccggggca

SEQ ID NO: 830368 - RNA, 20 nt, Human
aucuuuguuuggaggaacua

SEQ ID NO: 830369 - RNA, 25 nt, Human
augaagaaagagaagaaaggaaggg

SEQ ID NO: 830370 - RNA, 25 nt, Human
auuaaaaaaaaaaaagucugagagu

SEQ ID NO: 830371 - RNA, 23 nt, Human
caaaaacacugccaagaccaugc

SEQ ID NO: 830372 - RNA, 22 nt, Human
caaaacagaaacaccaauaucc

SEQ ID NO: 830373 - RNA, 26 nt, Human
caaaacagaaacaccaauaucccaaa

SEQ ID NO: 830374 - RNA, 21 nt, Human
caaaaggggcacagugugaug

SEQ ID NO: 830375 - RNA, 21 nt, Human
caagaccagcacaaaagaaaa

SEQ ID NO: 830376 - RNA, 26 nt, Human
caagaccaugcucagcagaaccacga

SEQ ID NO: 830377 - RNA, 19 nt, Human
caagguguuagcaguuuug

SEQ ID NO: 830378 - RNA, 22 nt, Human
cacaacauaauucaacaaggcu

SEQ ID NO: 830379 - RNA, 22 nt, Human
cacccagacaccggggccucca

SEQ ID NO: 830380 - RNA, 21 nt, Human
caccggggccuccacauacaa

SEQ ID NO: 830381 - RNA, 26 nt, Human
cagaaggaacgagaauuacacccaga

SEQ ID NO: 830382 - RNA, 27 nt, Human
cagaaggaacgagaauuacacccagac

SEQ ID NO: 830383 - RNA, 23 nt, Human
cauaaugaagucuccaucugaag

SEQ ID NO: 830384 - RNA, 22 nt, Human
ccaaaaacacugccaagaccau

SEQ ID NO: 830385 - RNA, 20 nt, Human
ccagcacaaaagaaaaagaa

SEQ ID NO: 830386 - RNA, 21 nt, Human
cccaaaaacacugccaagacc

SEQ ID NO: 830387 - RNA, 20 nt, Human
cccaaaucugaaaccuuaau

SEQ ID NO: 830388 - RNA, 24 nt, Human
cccauuaaaaaaaaaaaagucuga

SEQ ID NO: 830389 - RNA, 20 nt, Human
ccccuccauuucauuauuaa

SEQ ID NO: 830390 - RNA, 19 nt, Human
ccccugggcugaccuaaaa

SEQ ID NO: 830391 - RNA, 20 nt, Human
cccuguaaacauaaaaguuu

SEQ ID NO: 830392 - RNA, 23 nt, Human
ccugggcugaccuaaaaauccca

SEQ ID NO: 830393 - RNA, 19 nt, Human
ccuguaaacauaaaaguuu

SEQ ID NO: 830394 - RNA, 20 nt, Human
ccuuuugaacuucccucggg

SEQ ID NO: 830395 - RNA, 20 nt, Human
cugcuuauaucaacucagaa

SEQ ID NO: 830396 - RNA, 20 nt, Human
cuggccuuuuaaaaagcagg

SEQ ID NO: 830397 - RNA, 18 nt, Human
cuggugguaacacucucu

SEQ ID NO: 830398 - RNA, 21 nt, Human
cuggugguaacacucucugug

SEQ ID NO: 830399 - RNA, 20 nt, Human
cuucaaauuaaaaagaaaaa

SEQ ID NO: 830400 - RNA, 20 nt, Human
gacaccggggccuccacaua

SEQ ID NO: 830401 - RNA, 23 nt, Human
gacaccuuuugacuucuagaauc

SEQ ID NO: 830402 - RNA, 18 nt, Human
gagaauuacacccagaca

SEQ ID NO: 830403 - RNA, 20 nt, Human
gagcccggggcaaaagacag

SEQ ID NO: 830404 - RNA, 19 nt, Human
gauuugcacacaguugcuc

SEQ ID NO: 830405 - RNA, 22 nt, Human
gcaaaaaacacuguuggaaaua

SEQ ID NO: 830406 - RNA, 18 nt, Human
gcaaguuaacaaaagggg

SEQ ID NO: 830407 - RNA, 23 nt, Human
gccucaccucacagaaggaacga

SEQ ID NO: 830408 - RNA, 18 nt, Human
gcucucacuguggucuug

SEQ ID NO: 830409 - RNA, 18 nt, Human
ggacaagaaaggaugggg

SEQ ID NO: 830410 - RNA, 18 nt, Human
ggcuucaucugccucacc

SEQ ID NO: 830411 - RNA, 21 nt, Human
ggguucggucugggugcuggu

SEQ ID NO: 830412 - RNA, 19 nt, Human
gugaaacaaaauacguaua

SEQ ID NO: 830413 - RNA, 22 nt, Human
guuuguguuugucuuuagagga

SEQ ID NO: 830414 - RNA, 19 nt, Human
uaaauccaucacugcugcc

SEQ ID NO: 830415 - RNA, 19 nt, Human
uaauucuagaauuccccuc

SEQ ID NO: 830416 - RNA, 18 nt, Human
uaauuuuguuguuuuauu

SEQ ID NO: 830417 - RNA, 22 nt, Human
uagcaaguuaacaaaaggggca

SEQ ID NO: 830418 - RNA, 25 nt, Human
uagcaaguuaacaaaaggggcacag

SEQ ID NO: 830419 - RNA, 18 nt, Human
uaguaaacaucuucggca

SEQ ID NO: 830420 - RNA, 24 nt, Human
ucaccucacagaaggaacgagaau

SEQ ID NO: 830421 - RNA, 18 nt, Human
ucacuggagcgcucaugg

SEQ ID NO: 830422 - RNA, 18 nt, Human
ucacuggagcgcucaugg

SEQ ID NO: 830423 - RNA, 18 nt, Human
ucaucagauuccuguucu

SEQ ID NO: 830424 - RNA, 19 nt, Human
uccaaucuagaugcagcau

SEQ ID NO: 830425 - RNA, 28 nt, Human
uccacaauccagccauugagcccggggc

SEQ ID NO: 830426 - RNA, 18 nt, Human
ucccaaaaacacugccaa

SEQ ID NO: 830427 - RNA, 22 nt, Human
ucccaaaaacacugccaagacc

SEQ ID NO: 830428 - RNA, 21 nt, Human
uccuuuugaacuucccucggg

SEQ ID NO: 830429 - RNA, 22 nt, Human
ucuaauuugcaaaaaacacugu

SEQ ID NO: 830430 - RNA, 21 nt, Human
ucuagaauuccccuccauuuc

SEQ ID NO: 830431 - RNA, 26 nt, Human
ucuauagacaccuuuugacuucuaga

SEQ ID NO: 830432 - RNA, 21 nt, Human
ucuggccuuuuaaaaagcagg

SEQ ID NO: 830433 - RNA, 23 nt, Human
ugaccaaaaacccuaugugauac

SEQ ID NO: 830434 - RNA, 25 nt, Human
ugaccaaaaacccuaugugauacag

SEQ ID NO: 830435 - RNA, 23 nt, Human
ugaccuaaaaaucccauuaaaaa

SEQ ID NO: 830436 - RNA, 25 nt, Human
ugagaccauacaaaauggaucauaa

SEQ ID NO: 830437 - RNA, 22 nt, Human
ugagcauucagcacuuuaaugc

SEQ ID NO: 830438 - RNA, 21 nt, Human
ugagugccauuuucuucauau

SEQ ID NO: 830439 - RNA, 24 nt, Human
ugaguuccaggcccaaacucuccu

SEQ ID NO: 830440 - RNA, 21 nt, Human
ugcaaaaaacacuguuggaaa

SEQ ID NO: 830441 - RNA, 23 nt, Human
ugcaaaaaacacuguuggaaaua

SEQ ID NO: 830442 - RNA, 21 nt, Human
ugcugccgcgaccuagcuggu

SEQ ID NO: 830443 - RNA, 25 nt, Human
uggagccuagguuuggcaugcuuuu

SEQ ID NO: 830444 - RNA, 19 nt, Human
uggaggaacagaaagcaga

SEQ ID NO: 830445 - RNA, 25 nt, Human
uggaucauaaauuaaaaaaaaauua

SEQ ID NO: 830446 - RNA, 18 nt, Human
uggcaaacaaguuucacu

SEQ ID NO: 830447 - RNA, 27 nt, Human
ugucaaauaaauaaauuuuccuguuaa

SEQ ID NO: 830448 - RNA, 19 nt, Human
ugucuacucagguauggag

SEQ ID NO: 830449 - RNA, 18 nt, Human
ugugagugaccaaaaacc

SEQ ID NO: 830450 - RNA, 23 nt, Human
ugugcaaugcuaguaucuguaca

SEQ ID NO: 830451 - RNA, 19 nt, Human
ugugcagcacuccaaucua

SEQ ID NO: 830452 - RNA, 20 nt, Human
ugugcugcuaauuuaccuuu

SEQ ID NO: 830453 - RNA, 21 nt, Human
uguuggaaauauucugacucc

SEQ ID NO: 830454 - RNA, 22 nt, Human
uuaaaaaaaaucacuucaaaau

SEQ ID NO: 830455 - RNA, 18 nt, Human
uucaaauuaaaaagaaaa

SEQ ID NO: 830456 - RNA, 22 nt, Human
uucaaauuaaaaagaaaaagaa

SEQ ID NO: 830457 - RNA, 18 nt, Human
uucacuuuuacaacaaau

SEQ ID NO: 830458 - RNA, 19 nt, Human
uucacuuuuacaacaaaua

SEQ ID NO: 830459 - RNA, 22 nt, Human
uuccucaagaaugacuguucaa

SEQ ID NO: 830460 - RNA, 19 nt, Human
uuccucaugaaugaguucc

SEQ ID NO: 830461 - RNA, 25 nt, Human
uuccuccaauuuaccaaauuaaaca

SEQ ID NO: 830462 - RNA, 23 nt, Human
uugcucagguauucgccgcuggc

SEQ ID NO: 830463 - RNA, 21 nt, Human
uuuaaaggaauaaaaggcaaa

SEQ ID NO: 830464 - RNA, 24 nt, Human
uuucuaguuucucuucuguauucc

SEQ ID NO: 830465 - RNA, 23 nt, Human
uuuguugguuccaauuucugugu

SEQ ID NO: 830466 - RNA, 21 nt, Human
aaguaaacaaugacacauugg

SEQ ID NO: 830467 - RNA, 18 nt, Human
agcaaauucagggcucac

SEQ ID NO: 830468 - RNA, 27 nt, Human
agcaagaggcagagugggaggucgacc

SEQ ID NO: 830469 - RNA, 18 nt, Human
agucaucgccagcucucc

SEQ ID NO: 830470 - RNA, 18 nt, Human
caaguaaacaaugacaca

SEQ ID NO: 830471 - RNA, 18 nt, Human
cagaguggggcugucccu

SEQ ID NO: 830472 - RNA, 24 nt, Human
cagauccagugacaggacaaguaa

SEQ ID NO: 830473 - RNA, 21 nt, Human
caggacaaguaaacaaugaca

SEQ ID NO: 830474 - RNA, 20 nt, Human
cccuugagaaggcugcagga

SEQ ID NO: 830475 - RNA, 20 nt, Human
cuggaggagcaagaggcaga

SEQ ID NO: 830476 - RNA, 20 nt, Human
gacaggacaaguaaacaauu

SEQ ID NO: 830477 - RNA, 18 nt, Human
gagcaagaggcagagugg

SEQ ID NO: 830478 - RNA, 21 nt, Human
gagcaagggcucuccaguggc

SEQ ID NO: 830479 - RNA, 20 nt, Human
ggcagaguggggcugucccu

SEQ ID NO: 830480 - RNA, 18 nt, Human
ggcugcaggagggucuca

SEQ ID NO: 830481 - RNA, 20 nt, Human
uaagugcuuagaauauagug

SEQ ID NO: 830482 - RNA, 20 nt, Human
uaauaagaauagagaaaacu

SEQ ID NO: 830483 - RNA, 22 nt, Human
uaauaagaauagagaaaacuga

SEQ ID NO: 830484 - RNA, 20 nt, Human
uagcccagauccagugacag

SEQ ID NO: 830485 - RNA, 19 nt, Human
ucuccaguggccaaagauu

SEQ ID NO: 830486 - RNA, 20 nt, Human
ugagcaagggcucuccagug

SEQ ID NO: 830487 - RNA, 18 nt, Human
ugagguaacuugucagag

SEQ ID NO: 830488 - RNA, 26 nt, Human
acacagcucaaagcaggagggaacgc

SEQ ID NO: 830489 - RNA, 22 nt, Human
acugugccaagcuuggaggagu

SEQ ID NO: 830490 - RNA, 22 nt, Human
agccagagcaguccaagcuccu

SEQ ID NO: 830491 - RNA, 21 nt, Human
aggcagggguugggaaugaag

SEQ ID NO: 830492 - RNA, 22 nt, Human
aggcagggguugggaaugaagg

SEQ ID NO: 830493 - RNA, 21 nt, Human
agguuucuuagggggcagucc

SEQ ID NO: 830494 - RNA, 26 nt, Human
caaagcaggauccacacuuuacuguu

SEQ ID NO: 830495 - RNA, 22 nt, Human
caccagaggcagggguugggaa

SEQ ID NO: 830496 - RNA, 24 nt, Human
cccauccuuggucaagcacagcug

SEQ ID NO: 830497 - RNA, 19 nt, Human
cuuacugggguccuagcca

SEQ ID NO: 830498 - RNA, 21 nt, Human
gagcgaugccagccauggugc

SEQ ID NO: 830499 - RNA, 20 nt, Human
gcccaccagagguccaccag

SEQ ID NO: 830500 - RNA, 21 nt, Human
gcugguggggagaggaggcag

SEQ ID NO: 830501 - RNA, 23 nt, Human
gcuucaggagucuugauggcaau

SEQ ID NO: 830502 - RNA, 24 nt, Human
uacugggguccuagccagagcagu

SEQ ID NO: 830503 - RNA, 20 nt, Human
uacuguuuacucauuguuua

SEQ ID NO: 830504 - RNA, 27 nt, Human
uagaugacacagcucaaagcaggaucc

SEQ ID NO: 830505 - RNA, 22 nt, Human
uccuagccagagcaguccaagc

SEQ ID NO: 830506 - RNA, 23 nt, Human
ucucaaacagguuucuuaggggg

SEQ ID NO: 830507 - RNA, 20 nt, Human
ugagcuggugggcucacugu

SEQ ID NO: 830508 - RNA, 22 nt, Human
ugagcuggugggcucacugugc

SEQ ID NO: 830509 - RNA, 19 nt, Human
uggcuucaggagucuugau

SEQ ID NO: 830510 - RNA, 21 nt, Human
ugggguccuagccagagcagu

SEQ ID NO: 830511 - RNA, 23 nt, Human
ugggguccuagccagagcagucc

SEQ ID NO: 830512 - RNA, 18 nt, Human
ugguggggagaggaggca

SEQ ID NO: 830513 - RNA, 19 nt, Human
ugguggggagaggaggcag

SEQ ID NO: 830514 - RNA, 19 nt, Human
aaacagguccacagggcca

SEQ ID NO: 830515 - RNA, 23 nt, Human
aauucuguacgggccucuugcug

SEQ ID NO: 830516 - RNA, 19 nt, Human
acagggccagaaccugggg

SEQ ID NO: 830517 - RNA, 20 nt, Human
aggaugcccagagcuuucuc

SEQ ID NO: 830518 - RNA, 23 nt, Human
agguaugucaggaugcccagagc

SEQ ID NO: 830519 - RNA, 21 nt, Human
cacuccuuucccuuccuccaa

SEQ ID NO: 830520 - RNA, 21 nt, Human
cagagcuuucucuugccucuc

SEQ ID NO: 830521 - RNA, 20 nt, Human
cagcagcacccuccgcucac

SEQ ID NO: 830522 - RNA, 19 nt, Human
cagcggccucuccuguacc

SEQ ID NO: 830523 - RNA, 18 nt, Human
ccagagcuuucucuugcc

SEQ ID NO: 830524 - RNA, 19 nt, Human
ccgcugcacucuggcccag

SEQ ID NO: 830525 - RNA, 20 nt, Human
ccgcugcacucuggcccagg

SEQ ID NO: 830526 - RNA, 21 nt, Human
ccgcugcacucuggcccaggu

SEQ ID NO: 830527 - RNA, 23 nt, Human
ccgcugcacucuggcccagguau

SEQ ID NO: 830528 - RNA, 24 nt, Human
ccgcugcacucuggcccagguaug

SEQ ID NO: 830529 - RNA, 19 nt, Human
ccucugcugcuucaagcuc

SEQ ID NO: 830530 - RNA, 20 nt, Human
ccuggggcucccgccucugc

SEQ ID NO: 830531 - RNA, 22 nt, Human
cggacgugccagcucuucuugg

SEQ ID NO: 830532 - RNA, 23 nt, Human
cguaggaauucuguacgggccuc

SEQ ID NO: 830533 - RNA, 18 nt, Human
cgucacgccgcacgcggg

SEQ ID NO: 830534 - RNA, 28 nt, Human
cucugaucacuccuuucccuuccuccag

SEQ ID NO: 830535 - RNA, 18 nt, Human
cucuugccucucuuucuc

SEQ ID NO: 830536 - RNA, 27 nt, Human
cucuugcugagccagcagcacccuccc

SEQ ID NO: 830537 - RNA, 18 nt, Human
cugaugucuggcuuucuu

SEQ ID NO: 830538 - RNA, 18 nt, Human
cugcugcuucaagcucag

SEQ ID NO: 830539 - RNA, 21 nt, Human
cugggccucgucacgccgcac

SEQ ID NO: 830540 - RNA, 22 nt, Human
gcagcagcggccucuccuguac

SEQ ID NO: 830541 - RNA, 23 nt, Human
gcagcggccucuccuguaccccc

SEQ ID NO: 830542 - RNA, 25 nt, Human
gcccccucgcccuggggguagcugg

SEQ ID NO: 830543 - RNA, 21 nt, Human
gcucacgcuccuucuccuccu

SEQ ID NO: 830544 - RNA, 22 nt, Human
gcuggcagcagcggccucuccu

SEQ ID NO: 830545 - RNA, 20 nt, Human
ggcugggccgggcggggggc

SEQ ID NO: 830546 - RNA, 22 nt, Human
guccuuguuccggacgugccag

SEQ ID NO: 830547 - RNA, 30 nt, Human
uaugacggcuggcagcagcggccucuccuu

SEQ ID NO: 830548 - RNA, 24 nt, Human
uccacagggccagaaccuggggcu

SEQ ID NO: 830549 - RNA, 21 nt, Human
uccgcugcacucuggcccagg

SEQ ID NO: 830550 - RNA, 18 nt, Human
uccuuguuccggacgugc

SEQ ID NO: 830551 - RNA, 24 nt, Human
ucuuucuccugucgcuuuucuucc

SEQ ID NO: 830552 - RNA, 21 nt, Human
uggcagcagcggccucuccug

SEQ ID NO: 830553 - RNA, 18 nt, Human
uguccuuguuccggacgu

SEQ ID NO: 830554 - RNA, 20 nt, Human
ugucuggcuuucuuccguag

SEQ ID NO: 830555 - RNA, 20 nt, Human
uguuccggacgugccagcuc

SEQ ID NO: 830556 - RNA, 18 nt, Human
uucccuuccuccagcagc

SEQ ID NO: 830557 - RNA, 27 nt, Human
uuccucguacucuuuauugccucugau

SEQ ID NO: 830558 - RNA, 22 nt, Human
uucuuccucguacucuuuauug

SEQ ID NO: 830559 - RNA, 19 nt, Human
uuguccuuguuccggacgu

SEQ ID NO: 830560 - RNA, 23 nt, Human
uuucucuugccucucuuucuccu

SEQ ID NO: 830561 - RNA, 22 nt, Human
aaaaagauguaguguucgaaaa

SEQ ID NO: 830562 - RNA, 19 nt, Human
aaaacagaugaaucaaacc

SEQ ID NO: 830563 - RNA, 20 nt, Human
aaaacagaugaaucaaaccc

SEQ ID NO: 830564 - RNA, 23 nt, Human
aaaacagaugaaucaaacccagg

SEQ ID NO: 830565 - RNA, 22 nt, Human
aaaaccuggaaucaaaaacuaa

SEQ ID NO: 830566 - RNA, 24 nt, Human
aaacaaggaagaacauaaaaaaga

SEQ ID NO: 830567 - RNA, 26 nt, Human
acaaggaagaacauaaaaaagaugua

SEQ ID NO: 830568 - RNA, 23 nt, Human
acagccaauaagugcuuugaaac

SEQ ID NO: 830569 - RNA, 18 nt, Human
accaaguuuauugagacc

SEQ ID NO: 830570 - RNA, 18 nt, Human
accaaguuuauugagacc

SEQ ID NO: 830571 - RNA, 22 nt, Human
acucccagagaagagcugggga

SEQ ID NO: 830572 - RNA, 19 nt, Human
aggaagaacauaaaaaaga

SEQ ID NO: 830573 - RNA, 22 nt, Human
caaaaacacagccaauaagugc

SEQ ID NO: 830574 - RNA, 23 nt, Human
cacagccacauccccuaggucuc

SEQ ID NO: 830575 - RNA, 24 nt, Human
cacuguccaccgauagaaccagcg

SEQ ID NO: 830576 - RNA, 24 nt, Human
cagaugaaucaaacccaggcccca

SEQ ID NO: 830577 - RNA, 28 nt, Human
cccuucagaaugucccacuguccaccga

SEQ ID NO: 830578 - RNA, 24 nt, Human
ccuucagaaugucccacuguccac

SEQ ID NO: 830579 - RNA, 23 nt, Human
cuagacucccagagaagagcugg

SEQ ID NO: 830580 - RNA, 22 nt, Human
gaaaacagaugaaucaaaccca

SEQ ID NO: 830581 - RNA, 20 nt, Human
gagaccuccugagacuuaaa

SEQ ID NO: 830582 - RNA, 20 nt, Human
gagaccuccugagacuuaaa

SEQ ID NO: 830583 - RNA, 19 nt, Human
gaugaaucaaacccaggcc

SEQ ID NO: 830584 - RNA, 22 nt, Human
guaacuacaaaaacacagccaa

SEQ ID NO: 830585 - RNA, 20 nt, Human
uaaacaguaauucgcagucg

SEQ ID NO: 830586 - RNA, 19 nt, Human
uaaacccuguagaaaacag

SEQ ID NO: 830587 - RNA, 19 nt, Human
uaaacccuguagaaaacag

SEQ ID NO: 830588 - RNA, 19 nt, Human
uaacuacaaaaacacagcc

SEQ ID NO: 830589 - RNA, 20 nt, Human
uacaaaaacacagccaauaa

SEQ ID NO: 830590 - RNA, 24 nt, Human
uagaaaacagaugaaucaaaccca

SEQ ID NO: 830591 - RNA, 19 nt, Human
uagaaccagcgagucaccu

SEQ ID NO: 830592 - RNA, 21 nt, Human
uauugagaccuccugagacuu

SEQ ID NO: 830593 - RNA, 24 nt, Human
uccccaauugggagcgcucagucc

SEQ ID NO: 830594 - RNA, 19 nt, Human
ugaaaauagguaacuacaa

SEQ ID NO: 830595 - RNA, 18 nt, Human
ugagaccuccugagacuu

SEQ ID NO: 830596 - RNA, 18 nt, Human
uuuauugagaccuccuga

SEQ ID NO: 830597 - RNA, 18 nt, Human
uuuauugagaccuccuga

SEQ ID NO: 830598 - RNA, 18 nt, Human
aaacagcuggacugucag

SEQ ID NO: 830599 - RNA, 24 nt, Human
cagcggcccgcgcuccggccuagc

SEQ ID NO: 830600 - RNA, 21 nt, Human
cagcuggacugucaggcugcu

SEQ ID NO: 830601 - RNA, 21 nt, Human
ccccuccuuuuccuuccuucc

SEQ ID NO: 830602 - RNA, 21 nt, Human
cccucccucccucuucugcca

SEQ ID NO: 830603 - RNA, 19 nt, Human
cccuccucuccccuccuuu

SEQ ID NO: 830604 - RNA, 20 nt, Human
cccuccucuccccuccuuuu

SEQ ID NO: 830605 - RNA, 22 nt, Human
cccuccucuccccuccuuuucc

SEQ ID NO: 830606 - RNA, 23 nt, Human
ccgacaguggcgucagcggcccu

SEQ ID NO: 830607 - RNA, 23 nt, Human
ccgcgugcccucgcgaggacucu

SEQ ID NO: 830608 - RNA, 21 nt, Human
ccuccccuuccccuccucucc

SEQ ID NO: 830609 - RNA, 19 nt, Human
cuccccuccuuuuccuucc

SEQ ID NO: 830610 - RNA, 22 nt, Human
cuccucugccuccccuuccccu

SEQ ID NO: 830611 - RNA, 23 nt, Human
cucuucugccauguaacuggagg

SEQ ID NO: 830612 - RNA, 20 nt, Human
gccuccccuuccccuccucu

SEQ ID NO: 830613 - RNA, 24 nt, Human
gcugcuuuuuuuccagauguuccu

SEQ ID NO: 830614 - RNA, 22 nt, Human
gggaccacgccgcgugcccucg

SEQ ID NO: 830615 - RNA, 21 nt, Human
gugcacgcuccugcuuugucu

SEQ ID NO: 830616 - RNA, 23 nt, Human
gugcacgcuccugcuuugucuuu

SEQ ID NO: 830617 - RNA, 26 nt, Human
uccucuccccuccuuuuccuuccuuc

SEQ ID NO: 830618 - RNA, 21 nt, Human
uccuuuuccuuccuuccuucc

SEQ ID NO: 830619 - RNA, 20 nt, Human
ucuccccuccuuuuccuucc

SEQ ID NO: 830620 - RNA, 21 nt, Human
ucugccuccccuuccccuccu

SEQ ID NO: 830621 - RNA, 24 nt, Human
uguuugcauccauugucuccucca

SEQ ID NO: 830622 - RNA, 30 nt, Human
uugcauccauugucuccuccagaggucugg

SEQ ID NO: 830623 - RNA, 21 nt, Human
aacaugugacauccuggacau

SEQ ID NO: 830624 - RNA, 19 nt, Human
accuuccacaggaaaaccc

SEQ ID NO: 830625 - RNA, 21 nt, Human
agaggaggcaggagaaggcug

SEQ ID NO: 830626 - RNA, 21 nt, Human
aggcacaagcacugccaaucc

SEQ ID NO: 830627 - RNA, 18 nt, Human
aggcaggagaaggcuguu

SEQ ID NO: 830628 - RNA, 21 nt, Human
aggcaggagaaggcuguuccu

SEQ ID NO: 830629 - RNA, 23 nt, Human
aggcaggagaaggcuguuccuga

SEQ ID NO: 830630 - RNA, 21 nt, Human
cacaagcacugccaauccuuc

SEQ ID NO: 830631 - RNA, 19 nt, Human
cagaggaggcaggagaagg

SEQ ID NO: 830632 - RNA, 18 nt, Human
caggcacaagcacugcca

SEQ ID NO: 830633 - RNA, 20 nt, Human
cuuguuuccuccaaaaucgc

SEQ ID NO: 830634 - RNA, 19 nt, Human
gagcucagaccuuccacag

SEQ ID NO: 830635 - RNA, 19 nt, Human
uagcucagccugugaaagc

SEQ ID NO: 830636 - RNA, 18 nt, Human
ucaggcacaagcacugcc

SEQ ID NO: 830637 - RNA, 20 nt, Human
uccugggcccuugggauucu

SEQ ID NO: 830638 - RNA, 19 nt, Human
uccuucacagguacagggg

SEQ ID NO: 830639 - RNA, 22 nt, Human
uggcaggaguugaguuguccag

SEQ ID NO: 830640 - RNA, 23 nt, Human
uggcaggaguugaguuguccagg

SEQ ID NO: 830641 - RNA, 21 nt, Human
uuauuuuuugaugaggucagg

SEQ ID NO: 830642 - RNA, 19 nt, Human
aaauucuucuaacaauuga

SEQ ID NO: 830643 - RNA, 22 nt, Human
aacccacuccugaaaaaagucc

SEQ ID NO: 830644 - RNA, 25 nt, Human
aacuacuauuaccauggucuaaauc

SEQ ID NO: 830645 - RNA, 19 nt, Human
aacugucucaccagcucuc

SEQ ID NO: 830646 - RNA, 21 nt, Human
aagcuaguauacaaggucaaa

SEQ ID NO: 830647 - RNA, 23 nt, Human
aauaauaaacauaaauaaaaacc

SEQ ID NO: 830648 - RNA, 25 nt, Human
aauaauaaacauaaauaaaaaccuu

SEQ ID NO: 830649 - RNA, 21 nt, Human
acagacagcugucaugauuac

SEQ ID NO: 830650 - RNA, 18 nt, Human
acaggaaaaacacauaaa

SEQ ID NO: 830651 - RNA, 24 nt, Human
accagcucucuaacucauguguac

SEQ ID NO: 830652 - RNA, 23 nt, Human
agaaaagauguacuugaccagua

SEQ ID NO: 830653 - RNA, 20 nt, Human
agaacagaaaauagggaagg

SEQ ID NO: 830654 - RNA, 23 nt, Human
agacccaagacgcgcuacggcgg

SEQ ID NO: 830655 - RNA, 24 nt, Human
agagaaaauccuuuuaauccuuca

SEQ ID NO: 830656 - RNA, 25 nt, Human
agaucacaagcacaaagaguuccca

SEQ ID NO: 830657 - RNA, 21 nt, Human
agcaagucucugugaaaauag

SEQ ID NO: 830658 - RNA, 24 nt, Human
agccuagaaaucagagacagcacu

SEQ ID NO: 830659 - RNA, 20 nt, Human
aggaaacagcagaucuauca

SEQ ID NO: 830660 - RNA, 18 nt, Human
aggaaacuuggcuuaaaa

SEQ ID NO: 830661 - RNA, 21 nt, Human
aggaagcagaggaagguuuuc

SEQ ID NO: 830662 - RNA, 21 nt, Human
aggaagguuuucuggcauaua

SEQ ID NO: 830663 - RNA, 18 nt, Human
auaaaacaacagacagcu

SEQ ID NO: 830664 - RNA, 24 nt, Human
auaaauaaaaaccuuaucucaaaa

SEQ ID NO: 830665 - RNA, 21 nt, Human
auaaccuuagagaauaagaac

SEQ ID NO: 830666 - RNA, 20 nt, Human
caaaaacuggaauuucaaug

SEQ ID NO: 830667 - RNA, 21 nt, Human
caaaaagcauacuauagauaa

SEQ ID NO: 830668 - RNA, 19 nt, Human
caaaaauguuuuuacaccc

SEQ ID NO: 830669 - RNA, 23 nt, Human
caaaacaucugucuaccaguaaa

SEQ ID NO: 830670 - RNA, 18 nt, Human
caaaaggaggaagcagag

SEQ ID NO: 830671 - RNA, 18 nt, Human
caaaaggaggaagcagag

SEQ ID NO: 830672 - RNA, 24 nt, Human
caaagacacaaugcugccaaugca

SEQ ID NO: 830673 - RNA, 19 nt, Human
caacugucucaccagcucu

SEQ ID NO: 830674 - RNA, 24 nt, Human
caauccacaaaacaucugucuacc

SEQ ID NO: 830675 - RNA, 21 nt, Human
cacugcacugacauccagaac

SEQ ID NO: 830676 - RNA, 22 nt, Human
cacuuauaaauagaaacaggau

SEQ ID NO: 830677 - RNA, 23 nt, Human
cagcauuaacugccccaucuccu

SEQ ID NO: 830678 - RNA, 20 nt, Human
caggacaccacaaaaagcag

SEQ ID NO: 830679 - RNA, 25 nt, Human
caucaaaaguuuucuuuccauagaa

SEQ ID NO: 830680 - RNA, 19 nt, Human
ccacaaaaagcauacuaua

SEQ ID NO: 830681 - RNA, 21 nt, Human
ccagaacagaaaauagggaag

SEQ ID NO: 830682 - RNA, 18 nt, Human
ccuaaaauacccccaaga

SEQ ID NO: 830683 - RNA, 23 nt, Human
ccuucagcaagucucugugaaaa

SEQ ID NO: 830684 - RNA, 24 nt, Human
ccuugcaggggagggggcacucug

SEQ ID NO: 830685 - RNA, 25 nt, Human
cggcggcagcagcggcagccgggag

SEQ ID NO: 830686 - RNA, 22 nt, Human
cuccugaaaaaaguccugauaa

SEQ ID NO: 830687 - RNA, 23 nt, Human
cugauggcgaaauaauuuuuaug

SEQ ID NO: 830688 - RNA, 26 nt, Human
gaauaaacauacaaacaaauauccuu

SEQ ID NO: 830689 - RNA, 25 nt, Human
gacacaaugcugccaaugcaauuag

SEQ ID NO: 830690 - RNA, 18 nt, Human
gacccgaggcggcggcgg

SEQ ID NO: 830691 - RNA, 20 nt, Human
ggaaggcuccagccacacgc

SEQ ID NO: 830692 - RNA, 21 nt, Human
ggagggcaugggcauuaacac

SEQ ID NO: 830693 - RNA, 22 nt, Human
ggcaaggccuugcaggggaggg

SEQ ID NO: 830694 - RNA, 22 nt, Human
ggcggcggcagcagcggcagcc

SEQ ID NO: 830695 - RNA, 25 nt, Human
guaaaaccaacaacccuuaacggag

SEQ ID NO: 830696 - RNA, 18 nt, Human
guagcagugcacugcacu

SEQ ID NO: 830697 - RNA, 20 nt, Human
gucaaaaggaggaagcagag

SEQ ID NO: 830698 - RNA, 20 nt, Human
guccugcuucccgucaucuc

SEQ ID NO: 830699 - RNA, 18 nt, Human
uaaaaccaacaacccuua

SEQ ID NO: 830700 - RNA, 18 nt, Human
uaaaagucauggcuuaag

SEQ ID NO: 830701 - RNA, 18 nt, Human
uaaaagugagaagggagc

SEQ ID NO: 830702 - RNA, 26 nt, Human
uaaaauaauuuucaauccacaaaaca

SEQ ID NO: 830703 - RNA, 19 nt, Human
uaaauaaaaaccuuaucuc

SEQ ID NO: 830704 - RNA, 20 nt, Human
uaaauaaaaaccuuaucuca

SEQ ID NO: 830705 - RNA, 20 nt, Human
uaaauagaaacaggauucag

SEQ ID NO: 830706 - RNA, 18 nt, Human
uaacguaugccaaccguc

SEQ ID NO: 830707 - RNA, 26 nt, Human
uacaaacaaauauccuuaacaaaaua

SEQ ID NO: 830708 - RNA, 21 nt, Human
uacaauaaaagugagaaggga

SEQ ID NO: 830709 - RNA, 18 nt, Human
uaccacaagccacuuuca

SEQ ID NO: 830710 - RNA, 19 nt, Human
uagaagaaugguaauguug

SEQ ID NO: 830711 - RNA, 26 nt, Human
uagaucacaagcacaaagaguuccca

SEQ ID NO: 830712 - RNA, 24 nt, Human
uauaauaccacaagccacuuucag

SEQ ID NO: 830713 - RNA, 18 nt, Human
uauacaaggucaaagaca

SEQ ID NO: 830714 - RNA, 24 nt, Human
uaugccaaccgucuguaugucugc

SEQ ID NO: 830715 - RNA, 22 nt, Human
uauguaauauauacaacauacc

SEQ ID NO: 830716 - RNA, 23 nt, Human
ucagcaggacaccacaaaaagca

SEQ ID NO: 830717 - RNA, 20 nt, Human
ucauaaaacaacagacagcu

SEQ ID NO: 830718 - RNA, 19 nt, Human
ucccaaauuuauucccauu

SEQ ID NO: 830719 - RNA, 22 nt, Human
ucucugugaaaauaguaugcuu

SEQ ID NO: 830720 - RNA, 18 nt, Human
ugaauguacggcauagca

SEQ ID NO: 830721 - RNA, 24 nt, Human
ugagaaauaaacuucauaaaacaa

SEQ ID NO: 830722 - RNA, 23 nt, Human
ugagaagaaaagcacuccucugu

SEQ ID NO: 830723 - RNA, 22 nt, Human
ugauauuuaaaaucuuuauugu

SEQ ID NO: 830724 - RNA, 19 nt, Human
ugggcauuaacacuuggcc

SEQ ID NO: 830725 - RNA, 21 nt, Human
ugucuaccaguaaaaccaaca

SEQ ID NO: 830726 - RNA, 18 nt, Human
uucaaaaacuggaauuuc

SEQ ID NO: 830727 - RNA, 23 nt, Human
uucagcauuaacugccccaucuc

SEQ ID NO: 830728 - RNA, 23 nt, Human
uuccaaaaaaaaucaaccuaaca

SEQ ID NO: 830729 - RNA, 21 nt, Human
uugagaagaaaagcacuccuc

SEQ ID NO: 830730 - RNA, 20 nt, Human
uugauaggagaucacaaauu

SEQ ID NO: 830731 - RNA, 20 nt, Human
uuuuuuuuuuuuuuuuuugg

SEQ ID NO: 830732 - RNA, 18 nt, Human
uaacaggcaggaagcugg

SEQ ID NO: 830733 - RNA, 22 nt, Human
uaacaggcaggaagcugggcgu

SEQ ID NO: 830734 - RNA, 20 nt, Human
ugggcguguacacauucacc

SEQ ID NO: 830735 - RNA, 18 nt, Human
aaccaggccugaugugcu

SEQ ID NO: 830736 - RNA, 20 nt, Human
aauaaauaauaaagaauaaa

SEQ ID NO: 830737 - RNA, 24 nt, Human
aggcagauggagccauaucccagg

SEQ ID NO: 830738 - RNA, 18 nt, Human
aggggaggagaguggggc

SEQ ID NO: 830739 - RNA, 19 nt, Human
aggggaggagaguggggcc

SEQ ID NO: 830740 - RNA, 23 nt, Human
auaaauaauaaagaauaaaugac

SEQ ID NO: 830741 - RNA, 25 nt, Human
caggcuccacaccagccccacuccc

SEQ ID NO: 830742 - RNA, 19 nt, Human
caguccaggcccugaaggc

SEQ ID NO: 830743 - RNA, 19 nt, Human
ccagaggcuggcucccugu

SEQ ID NO: 830744 - RNA, 25 nt, Human
ccaggcccugaaggcagauggagcc

SEQ ID NO: 830745 - RNA, 23 nt, Human
ccaggcuccacaccagccccacu

SEQ ID NO: 830746 - RNA, 21 nt, Human
ccaggcuccugguggaggaag

SEQ ID NO: 830747 - RNA, 27 nt, Human
cccucaggcccaaagcuccuguagacu

SEQ ID NO: 830748 - RNA, 23 nt, Human
ccggugguauacagcagagcucu

SEQ ID NO: 830749 - RNA, 21 nt, Human
ccugcagcguuuuaaugcugu

SEQ ID NO: 830750 - RNA, 25 nt, Human
ccugcgaccugcagcguucugccac

SEQ ID NO: 830751 - RNA, 20 nt, Human
ccuggagcagcucucccagc

SEQ ID NO: 830752 - RNA, 22 nt, Human
ccugggagugggcugaccuucu

SEQ ID NO: 830753 - RNA, 24 nt, Human
ccugggagugggcugaccuucuug

SEQ ID NO: 830754 - RNA, 22 nt, Human
ccuguggggccaacgaggguuu

SEQ ID NO: 830755 - RNA, 24 nt, Human
cgaccuccaggcuccacaccagcc

SEQ ID NO: 830756 - RNA, 19 nt, Human
cuccacaccagccccacuc

SEQ ID NO: 830757 - RNA, 25 nt, Human
cucgugaccccagaggugaaccagg

SEQ ID NO: 830758 - RNA, 19 nt, Human
cuggagcagcccuaggagg

SEQ ID NO: 830759 - RNA, 19 nt, Human
cuggcgguauuuccccugg

SEQ ID NO: 830760 - RNA, 25 nt, Human
cuugugccuucccucaggcccaaag

SEQ ID NO: 830761 - RNA, 18 nt, Human
gagaguggggcccuggga

SEQ ID NO: 830762 - RNA, 23 nt, Human
gagugcaguccaggcccugaagg

SEQ ID NO: 830763 - RNA, 21 nt, Human
gccauugcagagagaagccag

SEQ ID NO: 830764 - RNA, 20 nt, Human
gccuucccucaggcccaaag

SEQ ID NO: 830765 - RNA, 21 nt, Human
ggaggagaguggggcccuggg

SEQ ID NO: 830766 - RNA, 19 nt, Human
gggcagcgggcgaccuccc

SEQ ID NO: 830767 - RNA, 18 nt, Human
gggggcugucagcagaac

SEQ ID NO: 830768 - RNA, 18 nt, Human
gggucugcagcacauggc

SEQ ID NO: 830769 - RNA, 19 nt, Human
guggggcccugggaguggg

SEQ ID NO: 830770 - RNA, 23 nt, Human
uaauaaagaauaaaugaccacau

SEQ ID NO: 830771 - RNA, 24 nt, Human
uaggagggcagcgggcgaccucca

SEQ ID NO: 830772 - RNA, 19 nt, Human
uccaggcccugaaggcaga

SEQ ID NO: 830773 - RNA, 19 nt, Human
ucccagcuguuagucucac

SEQ ID NO: 830774 - RNA, 22 nt, Human
ucccucaggcccaaagcuccug

SEQ ID NO: 830775 - RNA, 26 nt, Human
ucccucaggcccaaagcuccugucau

SEQ ID NO: 830776 - RNA, 22 nt, Human
ucccuguggggccaacgagggu

SEQ ID NO: 830777 - RNA, 20 nt, Human
ucgugaccccagaggugaac

SEQ ID NO: 830778 - RNA, 21 nt, Human
ucucgugaccccagaggugaa

SEQ ID NO: 830779 - RNA, 21 nt, Human
ugaugugcuggugucaggugg

SEQ ID NO: 830780 - RNA, 25 nt, Human
ugccuggagcagcucucccagcugu

SEQ ID NO: 830781 - RNA, 21 nt, Human
uggcugggcgggggcugucag

SEQ ID NO: 830782 - RNA, 20 nt, Human
ugucuggagcagcccuagga

SEQ ID NO: 830783 - RNA, 23 nt, Human
ugugccuucccucaggcccaaag

SEQ ID NO: 830784 - RNA, 19 nt, Human
cagcuccuggcggcagcuc

SEQ ID NO: 830785 - RNA, 21 nt, Human
cagcuccuggcggcagcuccc

SEQ ID NO: 830786 - RNA, 22 nt, Human
ccuaggggauaauucuguuuuc

SEQ ID NO: 830787 - RNA, 20 nt, Human
ugagaagagcugcaggagug

SEQ ID NO: 830788 - RNA, 23 nt, Human
ugagaagagcugcaggggacguc

SEQ ID NO: 830789 - RNA, 20 nt, Human
aacuaaucccagaggacccc

SEQ ID NO: 830790 - RNA, 19 nt, Human
acaccaccauacuucaugg

SEQ ID NO: 830791 - RNA, 21 nt, Human
acagaagagucgaagcucaag

SEQ ID NO: 830792 - RNA, 18 nt, Human
agacaccaccauacuuca

SEQ ID NO: 830793 - RNA, 19 nt, Human
agcugcuuaacuaauccca

SEQ ID NO: 830794 - RNA, 19 nt, Human
aguaggagagagggcagag

SEQ ID NO: 830795 - RNA, 22 nt, Human
auagagcacagaagagucgaag

SEQ ID NO: 830796 - RNA, 23 nt, Human
auagagcacagaagagucgaagc

SEQ ID NO: 830797 - RNA, 22 nt, Human
auagcugcuuaacuaaucccag

SEQ ID NO: 830798 - RNA, 20 nt, Human
auggcaaggacugagaacac

SEQ ID NO: 830799 - RNA, 21 nt, Human
caacgccaggguuuucucagc

SEQ ID NO: 830800 - RNA, 24 nt, Human
caaggccaguaucacagaagccau

SEQ ID NO: 830801 - RNA, 26 nt, Human
caauauaaacaauagaaugacaguga

SEQ ID NO: 830802 - RNA, 23 nt, Human
cacaguuuuaccaaaaaaaaucu

SEQ ID NO: 830803 - RNA, 26 nt, Human
cagcugccuugggcuuggcaucaagu

SEQ ID NO: 830804 - RNA, 22 nt, Human
cagcuuccucgucugccucgga

SEQ ID NO: 830805 - RNA, 19 nt, Human
caggaucuaauggugcaca

SEQ ID NO: 830806 - RNA, 21 nt, Human
cauucuuuuccagcuucuugu

SEQ ID NO: 830807 - RNA, 22 nt, Human
ccaaaguaggagagagggcaga

SEQ ID NO: 830808 - RNA, 23 nt, Human
cccccaguuuccccauucagugc

SEQ ID NO: 830809 - RNA, 22 nt, Human
ccuggaccaagcgcuggaccuu

SEQ ID NO: 830810 - RNA, 28 nt, Human
ccuggaccaagcgcuggaccuucccggg

SEQ ID NO: 830811 - RNA, 18 nt, Human
ccuggauugaaacugagg

SEQ ID NO: 830812 - RNA, 19 nt, Human
ccuuacuuuguugcccaua

SEQ ID NO: 830813 - RNA, 21 nt, Human
cuaauccugaccuuacuuugu

SEQ ID NO: 830814 - RNA, 19 nt, Human
cugcauuaccucugccugc

SEQ ID NO: 830815 - RNA, 20 nt, Human
cugccugcuuuguggguccc

SEQ ID NO: 830816 - RNA, 23 nt, Human
cugcuuaacuaaucccagaggac

SEQ ID NO: 830817 - RNA, 19 nt, Human
cugguguuucaggcgucca

SEQ ID NO: 830818 - RNA, 26 nt, Human
cuugucgauuggagucucuucugugu

SEQ ID NO: 830819 - RNA, 19 nt, Human
gcagcaauagagcacagaa

SEQ ID NO: 830820 - RNA, 19 nt, Human
gcuguuccaggccuccagg

SEQ ID NO: 830821 - RNA, 21 nt, Human
gcuuuaacuggcuauaagugu

SEQ ID NO: 830822 - RNA, 19 nt, Human
ggcaaggacugagaacacc

SEQ ID NO: 830823 - RNA, 26 nt, Human
gggcgcccagguccacggggucaacg

SEQ ID NO: 830824 - RNA, 22 nt, Human
gugggucccuuaguuggcguac

SEQ ID NO: 830825 - RNA, 28 nt, Human
uacacuuucugauagugccugccuuaug

SEQ ID NO: 830826 - RNA, 21 nt, Human
uagaaaaagcagugcgcagca

SEQ ID NO: 830827 - RNA, 18 nt, Human
uaucacagaagccauucu

SEQ ID NO: 830828 - RNA, 23 nt, Human
uauccuagcuccucacaguuuua

SEQ ID NO: 830829 - RNA, 23 nt, Human
uaugaccuaagauuuuaggcaag

SEQ ID NO: 830830 - RNA, 26 nt, Human
uauuauaguagguacuccauaaauac

SEQ ID NO: 830831 - RNA, 27 nt, Human
uauuuguuuugcuuugguuuuuugccu

SEQ ID NO: 830832 - RNA, 23 nt, Human
ucaaauugaaugcaucuugccuc

SEQ ID NO: 830833 - RNA, 23 nt, Human
ucaccaaguauauauccuagcuc

SEQ ID NO: 830834 - RNA, 23 nt, Human
ucagcaccauguauuuguuuugc

SEQ ID NO: 830835 - RNA, 24 nt, Human
ucuaggagggagggagauucgggg

SEQ ID NO: 830836 - RNA, 23 nt, Human
ucuguauuuugguuuuuguagca

SEQ ID NO: 830837 - RNA, 18 nt, Human
ucuuuagaagaacggagg

SEQ ID NO: 830838 - RNA, 20 nt, Human
ugagaacacccagcaggauu

SEQ ID NO: 830839 - RNA, 23 nt, Human
ugagaugcguuucagcaaggcca

SEQ ID NO: 830840 - RNA, 20 nt, Human
ugcccuaaguucaaauacac

SEQ ID NO: 830841 - RNA, 22 nt, Human
ugccucuuccugaaacuuucug

SEQ ID NO: 830842 - RNA, 21 nt, Human
ugccugcuuugugggucccuu

SEQ ID NO: 830843 - RNA, 20 nt, Human
ugccuggaccaagcgcugga

SEQ ID NO: 830844 - RNA, 21 nt, Human
ugccuggaccaagcgcuggac

SEQ ID NO: 830845 - RNA, 27 nt, Human
ugcugcccccaguuuccccauucagug

SEQ ID NO: 830846 - RNA, 21 nt, Human
uggcaaggacugagaacaccc

SEQ ID NO: 830847 - RNA, 23 nt, Human
uggggaaggaguugugucuucug

SEQ ID NO: 830848 - RNA, 26 nt, Human
uuaaagguuaccuggauugaaacuga

SEQ ID NO: 830849 - RNA, 22 nt, Human
uuaaucacguaaaguggaagag

SEQ ID NO: 830850 - RNA, 19 nt, Human
uuaccaaaaaaaaucugug

SEQ ID NO: 830851 - RNA, 21 nt, Human
uuaccaaaaaaaaucugugcu

SEQ ID NO: 830852 - RNA, 19 nt, Human
uucauggcaaggacugaga

SEQ ID NO: 830853 - RNA, 20 nt, Human
uucauuuaaagguuaccugg

SEQ ID NO: 830854 - RNA, 18 nt, Human
uuuuuuuuuuuuuuuuug

SEQ ID NO: 830855 - RNA, 20 nt, Human
uuuuuuuuuuuuuuuuugcu

SEQ ID NO: 830856 - RNA, 20 nt, Human
aaaggagccaguccucugaa

SEQ ID NO: 830857 - RNA, 19 nt, Human
aaggacacugggaaaggag

SEQ ID NO: 830858 - RNA, 24 nt, Human
acccagacugccccacaccccagc

SEQ ID NO: 830859 - RNA, 18 nt, Human
agacugccccacacccca

SEQ ID NO: 830860 - RNA, 18 nt, Human
agcagacagcugguggcu

SEQ ID NO: 830861 - RNA, 20 nt, Human
agcagcuggagccccaggug

SEQ ID NO: 830862 - RNA, 21 nt, Human
agcccccggccccagggccag

SEQ ID NO: 830863 - RNA, 21 nt, Human
aggaggggugaaggguuggug

SEQ ID NO: 830864 - RNA, 22 nt, Human
aggcaauccccgucagcugccu

SEQ ID NO: 830865 - RNA, 24 nt, Human
aggugguggaggccagugggaagc

SEQ ID NO: 830866 - RNA, 25 nt, Human
aggugguggaggccagugggaagcc

SEQ ID NO: 830867 - RNA, 19 nt, Human
aucaggccugcuuuccagg

SEQ ID NO: 830868 - RNA, 21 nt, Human
cacaccccagcccccggcccc

SEQ ID NO: 830869 - RNA, 18 nt, Human
caccccagcccccggccc

SEQ ID NO: 830870 - RNA, 23 nt, Human
cagaucccaggcaggguuggaaa

SEQ ID NO: 830871 - RNA, 22 nt, Human
cagcagcuggagccccaggugc

SEQ ID NO: 830872 - RNA, 20 nt, Human
cagcccccggccccagggcc

SEQ ID NO: 830873 - RNA, 20 nt, Human
cagcugccuucuccguucca

SEQ ID NO: 830874 - RNA, 23 nt, Human
cagcugccuucuccguuccaggg

SEQ ID NO: 830875 - RNA, 21 nt, Human
cagcugguggcuugggacugg

SEQ ID NO: 830876 - RNA, 22 nt, Human
cagcugguggcuugggacuggg

SEQ ID NO: 830877 - RNA, 22 nt, Human
caggaggggugaaggguuggug

SEQ ID NO: 830878 - RNA, 21 nt, Human
caucaggccugcuuuccagga

SEQ ID NO: 830879 - RNA, 25 nt, Human
cauuuucauuucuuuauuuuaagga

SEQ ID NO: 830880 - RNA, 22 nt, Human
ccaccgcugccuuucacaccca

SEQ ID NO: 830881 - RNA, 21 nt, Human
cccagcccccggccccagggc

SEQ ID NO: 830882 - RNA, 21 nt, Human
ccccacaccccagcccccggc

SEQ ID NO: 830883 - RNA, 23 nt, Human
ccccacaccccagcccccggccc

SEQ ID NO: 830884 - RNA, 20 nt, Human
ccccaggugcugcugcggcu

SEQ ID NO: 830885 - RNA, 26 nt, Human
ccccaggugcugcugcgggggaccgc

SEQ ID NO: 830886 - RNA, 18 nt, Human
ccccgucagcugccuucu

SEQ ID NO: 830887 - RNA, 21 nt, Human
ccucuguggccaccgcugccu

SEQ ID NO: 830888 - RNA, 19 nt, Human
cucccuggcugugccugcc

SEQ ID NO: 830889 - RNA, 23 nt, Human
cucuccgccgccucuguggccac

SEQ ID NO: 830890 - RNA, 19 nt, Human
cugcauuaaagcccagauc

SEQ ID NO: 830891 - RNA, 22 nt, Human
cuggcugugccugccuccuggg

SEQ ID NO: 830892 - RNA, 18 nt, Human
cugugccugccuccuggg

SEQ ID NO: 830893 - RNA, 18 nt, Human
cuucacugcccacuccuc

SEQ ID NO: 830894 - RNA, 21 nt, Human
cuucacugcccacuccucccc

SEQ ID NO: 830895 - RNA, 21 nt, Human
gauuccagcagcuggagcccc

SEQ ID NO: 830896 - RNA, 19 nt, Human
gcacggugcaaggugagag

SEQ ID NO: 830897 - RNA, 19 nt, Human
gcugaggaaggcaaucccc

SEQ ID NO: 830898 - RNA, 19 nt, Human
gcugugccugccuccuggg

SEQ ID NO: 830899 - RNA, 20 nt, Human
ggaggggacugagcaugggg

SEQ ID NO: 830900 - RNA, 19 nt, Human
ggcuugggacuggggugga

SEQ ID NO: 830901 - RNA, 22 nt, Human
gggaaguggggaugaugagagg

SEQ ID NO: 830902 - RNA, 19 nt, Human
ggucaggugguggaggcca

SEQ ID NO: 830903 - RNA, 19 nt, Human
ggucaggugguggaggcca

SEQ ID NO: 830904 - RNA, 22 nt, Human
ggugagagugagguuaaagguc

SEQ ID NO: 830905 - RNA, 26 nt, Human
uaaaggucagagaggaggggcugagg

SEQ ID NO: 830906 - RNA, 23 nt, Human
uaaggacacugggaaaggagcca

SEQ ID NO: 830907 - RNA, 23 nt, Human
uagccagaagcaggaccagacaa

SEQ ID NO: 830908 - RNA, 24 nt, Human
uaggauuccagcagcuggagcccc

SEQ ID NO: 830909 - RNA, 22 nt, Human
ucagcugccuucuccguuccag

SEQ ID NO: 830910 - RNA, 19 nt, Human
uccguuccaggguggcugu

SEQ ID NO: 830911 - RNA, 19 nt, Human
ucuucacugcccacuccuc

SEQ ID NO: 830912 - RNA, 21 nt, Human
ugaagagaacacucuggucag

SEQ ID NO: 830913 - RNA, 18 nt, Human
ugcaaggugagagugagg

SEQ ID NO: 830914 - RNA, 21 nt, Human
uggaaaggcugggccugggaa

SEQ ID NO: 830915 - RNA, 21 nt, Human
uggagcugcgugggggauggg

SEQ ID NO: 830916 - RNA, 20 nt, Human
uggccucugcauuaaagccc

SEQ ID NO: 830917 - RNA, 21 nt, Human
uggcugugccugccuccuggg

SEQ ID NO: 830918 - RNA, 23 nt, Human
ugggaaguggggaugaugagagg

SEQ ID NO: 830919 - RNA, 20 nt, Human
ugggacugggguggagcugc

SEQ ID NO: 830920 - RNA, 19 nt, Human
ugggaggggacugagcaug

SEQ ID NO: 830921 - RNA, 21 nt, Human
ugggccugggaaguggggaug

SEQ ID NO: 830922 - RNA, 24 nt, Human
uucacacccacuaggaaguccuuu

SEQ ID NO: 830923 - RNA, 20 nt, Human
uucacugcccacuccucccc

SEQ ID NO: 830924 - RNA, 21 nt, Human
uugggacugggguggagcugc

SEQ ID NO: 830925 - RNA, 22 nt, Human
uuuuuuuuuuuuuuuuugccaa

SEQ ID NO: 830926 - RNA, 24 nt, Human
uuuuuuuuuuuuuuuuuuuuuggg

SEQ ID NO: 830927 - RNA, 18 nt, Human
aaaaugugaguucuaaaa

SEQ ID NO: 830928 - RNA, 21 nt, Human
aacauauccaugacaagcauu

SEQ ID NO: 830929 - RNA, 25 nt, Human
aacaucuaccuacucaugacauggc

SEQ ID NO: 830930 - RNA, 24 nt, Human
aaccagaccccaggagcuugccua

SEQ ID NO: 830931 - RNA, 21 nt, Human
aagcggggcagaaggcaggug

SEQ ID NO: 830932 - RNA, 25 nt, Human
aaugaaaagcaccagucuuuggccu

SEQ ID NO: 830933 - RNA, 20 nt, Human
acaaaaucaccaagguucug

SEQ ID NO: 830934 - RNA, 18 nt, Human
acagaccuggaguguggg

SEQ ID NO: 830935 - RNA, 23 nt, Human
acucaacggguggguuccgagaa

SEQ ID NO: 830936 - RNA, 22 nt, Human
agacuuuuggcuuuaagaguuc

SEQ ID NO: 830937 - RNA, 18 nt, Human
agcagcaacucaacaaaa

SEQ ID NO: 830938 - RNA, 18 nt, Human
aggcauucacuuuauauu

SEQ ID NO: 830939 - RNA, 19 nt, Human
aguuucacccaccacaccu

SEQ ID NO: 830940 - RNA, 20 nt, Human
auagcagcaacucaacaaaa

SEQ ID NO: 830941 - RNA, 22 nt, Human
auagcagcaacucaacaaaaca

SEQ ID NO: 830942 - RNA, 22 nt, Human
augacaagcauucauaugagcc

SEQ ID NO: 830943 - RNA, 24 nt, Human
augcuacauuucucuuaguuucac

SEQ ID NO: 830944 - RNA, 19 nt, Human
caaaaagagggggggaagc

SEQ ID NO: 830945 - RNA, 21 nt, Human
caacaaaaucaccaagguucu

SEQ ID NO: 830946 - RNA, 22 nt, Human
caaggacacgcacaaaucaaag

SEQ ID NO: 830947 - RNA, 26 nt, Human
caaucuucauugcuuaaagucaggaa

SEQ ID NO: 830948 - RNA, 22 nt, Human
cacauaaccagaccccaggagc

SEQ ID NO: 830949 - RNA, 23 nt, Human
cacuuuauauucucugaagagaa

SEQ ID NO: 830950 - RNA, 24 nt, Human
caggaaacaacaaacacauucaua

SEQ ID NO: 830951 - RNA, 22 nt, Human
cauaaccagaccccaggagcuu

SEQ ID NO: 830952 - RNA, 25 nt, Human
cauauccaugacaagcauucauaug

SEQ ID NO: 830953 - RNA, 20 nt, Human
caugaagagcaucaaacaag

SEQ ID NO: 830954 - RNA, 23 nt, Human
caugacaagcauucauaugagcc

SEQ ID NO: 830955 - RNA, 19 nt, Human
ccaccaccagggucaccuu

SEQ ID NO: 830956 - RNA, 22 nt, Human
ccccuuugacuucauaaaaucu

SEQ ID NO: 830957 - RNA, 26 nt, Human
ccuacagccugugcugggucuagaca

SEQ ID NO: 830958 - RNA, 22 nt, Human
ccucuaaaggaugaaaugaaaa

SEQ ID NO: 830959 - RNA, 22 nt, Human
cgagaagcagaugagccaugaa

SEQ ID NO: 830960 - RNA, 18 nt, Human
cgagaucuguguaaaguc

SEQ ID NO: 830961 - RNA, 20 nt, Human
cgcacaaaucaaagggccac

SEQ ID NO: 830962 - RNA, 20 nt, Human
cggaacauccacuaagaauc

SEQ ID NO: 830963 - RNA, 22 nt, Human
cguaagaaagagggaaaaacuc

SEQ ID NO: 830964 - RNA, 23 nt, Human
cucaucaaaaagagggggggaag

SEQ ID NO: 830965 - RNA, 25 nt, Human
cuccugggccuacagccugugcugg

SEQ ID NO: 830966 - RNA, 23 nt, Human
cucuuaguuucacccaccacacc

SEQ ID NO: 830967 - RNA, 21 nt, Human
cugauuccacugccaacacgu

SEQ ID NO: 830968 - RNA, 20 nt, Human
cugcacaggcugauuccacu

SEQ ID NO: 830969 - RNA, 23 nt, Human
cuggagugugggauucagcuugg

SEQ ID NO: 830970 - RNA, 21 nt, Human
cuggcagugcaauagcagcaa

SEQ ID NO: 830971 - RNA, 18 nt, Human
cuuccucaucaaaaagag

SEQ ID NO: 830972 - RNA, 23 nt, Human
gaagagcaucaaacaagcauuac

SEQ ID NO: 830973 - RNA, 19 nt, Human
gacucaaaauagcacugcu

SEQ ID NO: 830974 - RNA, 23 nt, Human
gcaauagcagcaacucaacaaaa

SEQ ID NO: 830975 - RNA, 22 nt, Human
gccugagauccccagccugcac

SEQ ID NO: 830976 - RNA, 20 nt, Human
gccugugcugggucuagaca

SEQ ID NO: 830977 - RNA, 19 nt, Human
ggaaauacaccaucugguc

SEQ ID NO: 830978 - RNA, 24 nt, Human
guaaaguccccuuugacuucauaa

SEQ ID NO: 830979 - RNA, 21 nt, Human
guaagaaagagggaaaaacuc

SEQ ID NO: 830980 - RNA, 24 nt, Human
guggccccauguggguccugggcg

SEQ ID NO: 830981 - RNA, 19 nt, Human
guuguuggguuucucuuuc

SEQ ID NO: 830982 - RNA, 24 nt, Human
uaaaggaugaaaugaaaagcacca

SEQ ID NO: 830983 - RNA, 18 nt, Human
uaaccagaccccaggagc

SEQ ID NO: 830984 - RNA, 24 nt, Human
uaagaaagagggaaaaacuccuuu

SEQ ID NO: 830985 - RNA, 20 nt, Human
uacaagauuuuuaaacuaau

SEQ ID NO: 830986 - RNA, 18 nt, Human
uacaauaacaauacagua

SEQ ID NO: 830987 - RNA, 19 nt, Human
ucaccaagguucugcuauu

SEQ ID NO: 830988 - RNA, 21 nt, Human
ucacuucaaaaauucuaccga

SEQ ID NO: 830989 - RNA, 19 nt, Human
ucagagcucugagccuggc

SEQ ID NO: 830990 - RNA, 27 nt, Human
uccacuaagaaucuuccacauaaccaa

SEQ ID NO: 830991 - RNA, 18 nt, Human
uccugggcggggggguuc

SEQ ID NO: 830992 - RNA, 21 nt, Human
uccugggcggggggguuccuu

SEQ ID NO: 830993 - RNA, 21 nt, Human
ucgcuccugggccuacagccu

SEQ ID NO: 830994 - RNA, 18 nt, Human
ucucugaagagaaccagc

SEQ ID NO: 830995 - RNA, 21 nt, Human
ucucuuaguuucacccaccuu

SEQ ID NO: 830996 - RNA, 20 nt, Human
ucucuugagcacagaccugg

SEQ ID NO: 830997 - RNA, 18 nt, Human
ucuuaccaaaaagauugc

SEQ ID NO: 830998 - RNA, 21 nt, Human
ucuuccacauaaccagacccc

SEQ ID NO: 830999 - RNA, 23 nt, Human
ucuuccacauaaccagaccccag

SEQ ID NO: 831000 - RNA, 21 nt, Human
ucuucuuccucaucaaaaaga

SEQ ID NO: 831001 - RNA, 19 nt, Human
ucuugagcacagaccugga

SEQ ID NO: 831002 - RNA, 24 nt, Human
ucuuucagagcuaccccuaaaggc

SEQ ID NO: 831003 - RNA, 21 nt, Human
ugaaaacaucuaacuauuuca

SEQ ID NO: 831004 - RNA, 23 nt, Human
ugagaggggcucaaaguuuuuuu

SEQ ID NO: 831005 - RNA, 23 nt, Human
ugagcacagaccuggaguguggg

SEQ ID NO: 831006 - RNA, 18 nt, Human
ugcucuggccaccaccag

SEQ ID NO: 831007 - RNA, 24 nt, Human
uggcaaauaaucauuuuacaauaa

SEQ ID NO: 831008 - RNA, 20 nt, Human
uggcagaggaagcaauguca

SEQ ID NO: 831009 - RNA, 21 nt, Human
uggcagugcaauagcagcaac

SEQ ID NO: 831010 - RNA, 21 nt, Human
uggccccauguggguccuggg

SEQ ID NO: 831011 - RNA, 19 nt, Human
uggcuccaaagcuggcccc

SEQ ID NO: 831012 - RNA, 21 nt, Human
uggguccugggcggggggguu

SEQ ID NO: 831013 - RNA, 25 nt, Human
uggguccugggcggggggguuccuu

SEQ ID NO: 831014 - RNA, 21 nt, Human
ugguagaaugggcaugucaug

SEQ ID NO: 831015 - RNA, 22 nt, Human
uguggcagaggaagcaauguca

SEQ ID NO: 831016 - RNA, 20 nt, Human
uguuggguuucucuuucaga

SEQ ID NO: 831017 - RNA, 21 nt, Human
uuccacauaaccagaccccag

SEQ ID NO: 831018 - RNA, 19 nt, Human
uucugcuauuaaggaggau

SEQ ID NO: 831019 - RNA, 24 nt, Human
uugcuaaaguggaaugagaggggc

SEQ ID NO: 831020 - RNA, 18 nt, Human
uuucagagcucugagccu

SEQ ID NO: 831021 - RNA, 20 nt, Human
uuucagagcucugagccuga

SEQ ID NO: 831022 - RNA, 24 nt, Human
uuucagagcucugagccuggcuuu

SEQ ID NO: 831023 - RNA, 23 nt, Human
uuugaaaacaucuaacuauuuca

SEQ ID NO: 831024 - RNA, 19 nt, Human
uuuggccugccugcugguu

SEQ ID NO: 831025 - RNA, 21 nt, Human
aaacaaugccuggagcaccaa

SEQ ID NO: 831026 - RNA, 21 nt, Human
aagcaugacagauauggcugu

SEQ ID NO: 831027 - RNA, 18 nt, Human
aagcuccacucugggcac

SEQ ID NO: 831028 - RNA, 24 nt, Human
aaggagcccgcccagcucaagggc

SEQ ID NO: 831029 - RNA, 21 nt, Human
acccauccuccaguggccacc

SEQ ID NO: 831030 - RNA, 19 nt, Human
accccuggcagcuccccgg

SEQ ID NO: 831031 - RNA, 23 nt, Human
agaaggagaagcacaaggacagg

SEQ ID NO: 831032 - RNA, 22 nt, Human
agacagggggcagagcauggga

SEQ ID NO: 831033 - RNA, 25 nt, Human
agagacagacaccccuggcagcucc

SEQ ID NO: 831034 - RNA, 18 nt, Human
agagcagguaaacaaugc

SEQ ID NO: 831035 - RNA, 19 nt, Human
agccugguaggcagugcug

SEQ ID NO: 831036 - RNA, 21 nt, Human
agccugguaggcagugcugaa

SEQ ID NO: 831037 - RNA, 19 nt, Human
agcgacagcuacaggaagg

SEQ ID NO: 831038 - RNA, 26 nt, Human
agcggggagcaagagcagguaaacaa

SEQ ID NO: 831039 - RNA, 19 nt, Human
aggcagugcuccugggggc

SEQ ID NO: 831040 - RNA, 19 nt, Human
aggcagugcuccugggggc

SEQ ID NO: 831041 - RNA, 20 nt, Human
aggcagugcuccugggggcc

SEQ ID NO: 831042 - RNA, 19 nt, Human
agggcugcaacacgcccuc

SEQ ID NO: 831043 - RNA, 20 nt, Human
aggggcuuugcccccaggag

SEQ ID NO: 831044 - RNA, 18 nt, Human
agggggcagagcauggga

SEQ ID NO: 831045 - RNA, 25 nt, Human
caacaggaaagaccagaggggcagg

SEQ ID NO: 831046 - RNA, 20 nt, Human
caagggccacaucccaaaga

SEQ ID NO: 831047 - RNA, 22 nt, Human
cacccaaggagcccgcccagcu

SEQ ID NO: 831048 - RNA, 19 nt, Human
cacgcugggggugagcaga

SEQ ID NO: 831049 - RNA, 22 nt, Human
cagacaccccuggcagcucccc

SEQ ID NO: 831050 - RNA, 18 nt, Human
cagcugcuaccgcagcca

SEQ ID NO: 831051 - RNA, 21 nt, Human
caggaggaugcggccccccuc

SEQ ID NO: 831052 - RNA, 22 nt, Human
caggaggccaagcaggcccuca

SEQ ID NO: 831053 - RNA, 23 nt, Human
caguuggggucacgggaacuggg

SEQ ID NO: 831054 - RNA, 22 nt, Human
ccagcucaagggccacauccca

SEQ ID NO: 831055 - RNA, 19 nt, Human
cccaaagacagggugaacc

SEQ ID NO: 831056 - RNA, 23 nt, Human
ccccacccauccuccaguggcca

SEQ ID NO: 831057 - RNA, 18 nt, Human
ccccacccgguccacuga

SEQ ID NO: 831058 - RNA, 19 nt, Human
ccccaggaggccaagcagg

SEQ ID NO: 831059 - RNA, 19 nt, Human
ccccaguacccugguaucc

SEQ ID NO: 831060 - RNA, 18 nt, Human
cccccacccauccuccag

SEQ ID NO: 831061 - RNA, 23 nt, Human
cccccaggaggccaagcaggccc

SEQ ID NO: 831062 - RNA, 23 nt, Human
cccccaguacccugguauccugc

SEQ ID NO: 831063 - RNA, 21 nt, Human
ccccccucgcucccagcaccc

SEQ ID NO: 831064 - RNA, 19 nt, Human
cccccgccccaccgcuccc

SEQ ID NO: 831065 - RNA, 25 nt, Human
cccccuccaagcagagaggcaaggu

SEQ ID NO: 831066 - RNA, 22 nt, Human
ccccgccccaccgcucccgcgg

SEQ ID NO: 831067 - RNA, 21 nt, Human
ccccgcgcgggcuggcaccuc

SEQ ID NO: 831068 - RNA, 22 nt, Human
cccgcccagcucaagggccaca

SEQ ID NO: 831069 - RNA, 20 nt, Human
cccgccugcggacuccuccu

SEQ ID NO: 831070 - RNA, 24 nt, Human
cccuauagugauguauacaaaucc

SEQ ID NO: 831071 - RNA, 23 nt, Human
cccucagaagcuggcaccaccau

SEQ ID NO: 831072 - RNA, 19 nt, Human
cccucaggccaagcuccac

SEQ ID NO: 831073 - RNA, 18 nt, Human
ccgcccagcucaagggcc

SEQ ID NO: 831074 - RNA, 22 nt, Human
ccggcagcugcuaccgcagcca

SEQ ID NO: 831075 - RNA, 18 nt, Human
ccggcggccgcggccccc

SEQ ID NO: 831076 - RNA, 21 nt, Human
ccggggggggcacgcuggggg

SEQ ID NO: 831077 - RNA, 20 nt, Human
ccucagaagcuggcaccacc

SEQ ID NO: 831078 - RNA, 18 nt, Human
ccucgggcgccggcugcg

SEQ ID NO: 831079 - RNA, 22 nt, Human
ccugcaguuggggucacgggaa

SEQ ID NO: 831080 - RNA, 23 nt, Human
ccuguacacacugggcgugugcg

SEQ ID NO: 831081 - RNA, 24 nt, Human
cgccgccaccgcggaugacuccaa

SEQ ID NO: 831082 - RNA, 21 nt, Human
cggcucgggagagaagagcgg

SEQ ID NO: 831083 - RNA, 20 nt, Human
cgggauugcuucugcugcug

SEQ ID NO: 831084 - RNA, 20 nt, Human
cggggcugaccgcgccgggu

SEQ ID NO: 831085 - RNA, 22 nt, Human
cuauacgaaguuaugcgccgcc

SEQ ID NO: 831086 - RNA, 20 nt, Human
cucccagcaccccgcaccac

SEQ ID NO: 831087 - RNA, 20 nt, Human
cucgcucccagcaccccgca

SEQ ID NO: 831088 - RNA, 20 nt, Human
cugcggcgcgggcggcgggg

SEQ ID NO: 831089 - RNA, 21 nt, Human
cuggagccgcagccggggcug

SEQ ID NO: 831090 - RNA, 19 nt, Human
gaacagagacagacacccc

SEQ ID NO: 831091 - RNA, 20 nt, Human
gaacagagacagacaccccu

SEQ ID NO: 831092 - RNA, 21 nt, Human
gagcaagagcagguaaacaaa

SEQ ID NO: 831093 - RNA, 18 nt, Human
gaggcaagguaacaggag

SEQ ID NO: 831094 - RNA, 23 nt, Human
gcagcagaagcucagcuaguggg

SEQ ID NO: 831095 - RNA, 21 nt, Human
gcagccggggcugaccgcgcc

SEQ ID NO: 831096 - RNA, 20 nt, Human
gccccggggaagcaugacag

SEQ ID NO: 831097 - RNA, 18 nt, Human
gcgccggcugcggucccc

SEQ ID NO: 831098 - RNA, 22 nt, Human
gcggggagcaagagcagguaaa

SEQ ID NO: 831099 - RNA, 19 nt, Human
gcugcccgcgaucucuccc

SEQ ID NO: 831100 - RNA, 23 nt, Human
ggagagaagagcggagcgcggag

SEQ ID NO: 831101 - RNA, 23 nt, Human
ggcaggggugaguggccccgggg

SEQ ID NO: 831102 - RNA, 20 nt, Human
ggccaagcaggcccucagaa

SEQ ID NO: 831103 - RNA, 23 nt, Human
ggccagggcugcaacacgcccuc

SEQ ID NO: 831104 - RNA, 18 nt, Human
ggcugcgguccccucccc

SEQ ID NO: 831105 - RNA, 18 nt, Human
gggcaggggugaguggcc

SEQ ID NO: 831106 - RNA, 25 nt, Human
gggccccucccaccagcccccaccc

SEQ ID NO: 831107 - RNA, 18 nt, Human
ggggugagcagagggggc

SEQ ID NO: 831108 - RNA, 21 nt, Human
ggggugagcagagggggcccc

SEQ ID NO: 831109 - RNA, 20 nt, Human
gggugaaccaggggacaguc

SEQ ID NO: 831110 - RNA, 20 nt, Human
gguaggcagugcugaaucug

SEQ ID NO: 831111 - RNA, 24 nt, Human
guggugcucacagaggcccccacc

SEQ ID NO: 831112 - RNA, 23 nt, Human
guuccggggggggcacgcugggg

SEQ ID NO: 831113 - RNA, 18 nt, Human
uaacucaggugcuugcag

SEQ ID NO: 831114 - RNA, 21 nt, Human
uacccugguauccugcuacaa

SEQ ID NO: 831115 - RNA, 18 nt, Human
ucaagggccacaucccaa

SEQ ID NO: 831116 - RNA, 23 nt, Human
uccaagucgcccuauagugaugu

SEQ ID NO: 831117 - RNA, 23 nt, Human
uccaguggccacccugaggagac

SEQ ID NO: 831118 - RNA, 21 nt, Human
uccaugggugagcugggauuc

SEQ ID NO: 831119 - RNA, 18 nt, Human
uccaugugagcaugcaga

SEQ ID NO: 831120 - RNA, 22 nt, Human
ucccaaagacagggugaaccag

SEQ ID NO: 831121 - RNA, 23 nt, Human
uccugggccaguccacggggugc

SEQ ID NO: 831122 - RNA, 18 nt, Human
ugaaaggcagugcuccug

SEQ ID NO: 831123 - RNA, 21 nt, Human
ugacauguuuauagauggaca

SEQ ID NO: 831124 - RNA, 21 nt, Human
ugagcaugcagacgggguggg

SEQ ID NO: 831125 - RNA, 18 nt, Human
ugaggggaggucuucugu

SEQ ID NO: 831126 - RNA, 18 nt, Human
ugccuggagcaccaacag

SEQ ID NO: 831127 - RNA, 21 nt, Human
uggagcaccaacaggaaagac

SEQ ID NO: 831128 - RNA, 23 nt, Human
uggagcaccaacaggaaagacca

SEQ ID NO: 831129 - RNA, 24 nt, Human
uggagcaccaacaggaaagaccag

SEQ ID NO: 831130 - RNA, 21 nt, Human
uggcaucucagcagacagcag

SEQ ID NO: 831131 - RNA, 19 nt, Human
ugggaaaggcugcagagua

SEQ ID NO: 831132 - RNA, 18 nt, Human
ugguggggccagggcugc

SEQ ID NO: 831133 - RNA, 22 nt, Human
uggugugccccuccacuagccc

SEQ ID NO: 831134 - RNA, 22 nt, Human
ugugaguguguaaugagugugu

SEQ ID NO: 831135 - RNA, 21 nt, Human
uucugcugcuguuguuauugc

SEQ ID NO: 831136 - RNA, 22 nt, Human
aagggcagcucgggagguccag

SEQ ID NO: 831137 - RNA, 18 nt, Human
acccccacucugaggcac

SEQ ID NO: 831138 - RNA, 21 nt, Human
acccgcuucucccggcccacc

SEQ ID NO: 831139 - RNA, 21 nt, Human
acuccaugcagugcaccagcc

SEQ ID NO: 831140 - RNA, 23 nt, Human
acuccaugcagugcaccagccug

SEQ ID NO: 831141 - RNA, 19 nt, Human
acucgucuuguccuugccu

SEQ ID NO: 831142 - RNA, 21 nt, Human
aggaaugccaucaaccccucg

SEQ ID NO: 831143 - RNA, 24 nt, Human
aggcuccccgcgacaccucccgcu

SEQ ID NO: 831144 - RNA, 24 nt, Human
agggcagcucgggagguccaguag

SEQ ID NO: 831145 - RNA, 22 nt, Human
aggggccguccaggggccccag

SEQ ID NO: 831146 - RNA, 19 nt, Human
aggggggcuccgggaccuc

SEQ ID NO: 831147 - RNA, 21 nt, Human
aguaggcugggacccucuaug

SEQ ID NO: 831148 - RNA, 25 nt, Human
augcagugcaccagccugcaccccc

SEQ ID NO: 831149 - RNA, 22 nt, Human
auggagcucugcacgugaccuc

SEQ ID NO: 831150 - RNA, 25 nt, Human
caaggggccguccaggggccccagc

SEQ ID NO: 831151 - RNA, 23 nt, Human
caccagccugcaccccccagguu

SEQ ID NO: 831152 - RNA, 24 nt, Human
caccaggcuccccgcgacaccucc

SEQ ID NO: 831153 - RNA, 18 nt, Human
cacccccccuuccagcuc

SEQ ID NO: 831154 - RNA, 20 nt, Human
cacccccccuuccagcucac

SEQ ID NO: 831155 - RNA, 24 nt, Human
cacgcaugcgcacaagcagcagag

SEQ ID NO: 831156 - RNA, 20 nt, Human
cagcccaggccacuacgucu

SEQ ID NO: 831157 - RNA, 22 nt, Human
caggcuccccgcgacaccuccc

SEQ ID NO: 831158 - RNA, 20 nt, Human
caguaggcugggacccucuu

SEQ ID NO: 831159 - RNA, 22 nt, Human
cagucggccuuccucccuguuc

SEQ ID NO: 831160 - RNA, 23 nt, Human
caucuagaagggcaccaggcucc

SEQ ID NO: 831161 - RNA, 18 nt, Human
ccaaguagggccaggagc

SEQ ID NO: 831162 - RNA, 26 nt, Human
ccaugcagugcaccagccugcacccc

SEQ ID NO: 831163 - RNA, 23 nt, Human
cccacggucagcagcucacaggc

SEQ ID NO: 831164 - RNA, 18 nt, Human
cccagugcugaguugucu

SEQ ID NO: 831165 - RNA, 20 nt, Human
cccagugcugaguugucuuc

SEQ ID NO: 831166 - RNA, 22 nt, Human
ccccagccaugcccagaguccc

SEQ ID NO: 831167 - RNA, 18 nt, Human
cccccacccccccuucca

SEQ ID NO: 831168 - RNA, 22 nt, Human
cccccacccccccuuccagcuc

SEQ ID NO: 831169 - RNA, 21 nt, Human
ccccccacccccccuuccagc

SEQ ID NO: 831170 - RNA, 25 nt, Human
ccccccccacccccccuuccagcuc

SEQ ID NO: 831171 - RNA, 22 nt, Human
ccccgaagguuugggaaagggg

SEQ ID NO: 831172 - RNA, 18 nt, Human
ccccgcgacaccucccgc

SEQ ID NO: 831173 - RNA, 19 nt, Human
cccucggugcuuucagagg

SEQ ID NO: 831174 - RNA, 18 nt, Human
ccgcccuccauccgccug

SEQ ID NO: 831175 - RNA, 23 nt, Human
ccguccaggggccccagccaugc

SEQ ID NO: 831176 - RNA, 20 nt, Human
ccuccaccaggccgcccucc

SEQ ID NO: 831177 - RNA, 20 nt, Human
ccucccaccucccuucuccc

SEQ ID NO: 831178 - RNA, 24 nt, Human
ccucccaccucccuucuccccgaa

SEQ ID NO: 831179 - RNA, 19 nt, Human
ccucccgcugucccucccu

SEQ ID NO: 831180 - RNA, 20 nt, Human
ccugccccccccaccccccc

SEQ ID NO: 831181 - RNA, 20 nt, Human
ccugcuggcacgcucggccc

SEQ ID NO: 831182 - RNA, 26 nt, Human
ccugugccccggcgcacgcgcaagag

SEQ ID NO: 831183 - RNA, 19 nt, Human
ccuuccagcucacugccug

SEQ ID NO: 831184 - RNA, 22 nt, Human
ccuuccucccuguucguauguc

SEQ ID NO: 831185 - RNA, 19 nt, Human
cgcacgcaugcgcacaagc

SEQ ID NO: 831186 - RNA, 18 nt, Human
cgcccuccauccgccugc

SEQ ID NO: 831187 - RNA, 24 nt, Human
cggcccuggcuucucucuccucuu

SEQ ID NO: 831188 - RNA, 18 nt, Human
cggcgcacgcgcaagagg

SEQ ID NO: 831189 - RNA, 20 nt, Human
cggguugagaggggggcucc

SEQ ID NO: 831190 - RNA, 24 nt, Human
cguccaggggccccagccaugccc

SEQ ID NO: 831191 - RNA, 20 nt, Human
cgugaccuccaccucgacuc

SEQ ID NO: 831192 - RNA, 20 nt, Human
cuggcuucucucuccucuuc

SEQ ID NO: 831193 - RNA, 18 nt, Human
cuuuagaccugaagggca

SEQ ID NO: 831194 - RNA, 24 nt, Human
gaggcacccgcuucucccggccga

SEQ ID NO: 831195 - RNA, 23 nt, Human
gaggggggcuccgggaccucaug

SEQ ID NO: 831196 - RNA, 21 nt, Human
gagguccaguaggcugggacc

SEQ ID NO: 831197 - RNA, 19 nt, Human
gcagaggggaacccgccca

SEQ ID NO: 831198 - RNA, 19 nt, Human
gcccagagucccguuggug

SEQ ID NO: 831199 - RNA, 24 nt, Human
gcccagugcugaguugucuucgag

SEQ ID NO: 831200 - RNA, 18 nt, Human
gcuccccgcgacaccucc

SEQ ID NO: 831201 - RNA, 21 nt, Human
gcuggcacgcucggcccuggc

SEQ ID NO: 831202 - RNA, 18 nt, Human
ggaccagcgggguaggag

SEQ ID NO: 831203 - RNA, 25 nt, Human
ggagcucugcacgugaccuccaccu

SEQ ID NO: 831204 - RNA, 18 nt, Human
ggccuagacguguggcug

SEQ ID NO: 831205 - RNA, 18 nt, Human
ggcuucucucuccucuuc

SEQ ID NO: 831206 - RNA, 20 nt, Human
gggaacccgcccagugcugg

SEQ ID NO: 831207 - RNA, 21 nt, Human
ggggggcuccgggaccucaug

SEQ ID NO: 831208 - RNA, 19 nt, Human
ggguugagaggggggcucc

SEQ ID NO: 831209 - RNA, 18 nt, Human
ggucagcagcucacaggc

SEQ ID NO: 831210 - RNA, 21 nt, Human
gguugagaggggggcuccggg

SEQ ID NO: 831211 - RNA, 21 nt, Human
gucuguuucuauuucugucuu

SEQ ID NO: 831212 - RNA, 20 nt, Human
guguaugugagugugugugu

SEQ ID NO: 831213 - RNA, 20 nt, Human
uaugugugugaguguaugug

SEQ ID NO: 831214 - RNA, 21 nt, Human
ucaaccccucggugcuuucag

SEQ ID NO: 831215 - RNA, 19 nt, Human
uccauccgccugcuggcac

SEQ ID NO: 831216 - RNA, 23 nt, Human
uccccgaagguuugggaaagggg

SEQ ID NO: 831217 - RNA, 24 nt, Human
uccccgaagguuugggaaaggggu

SEQ ID NO: 831218 - RNA, 19 nt, Human
ucucccggcccacccagcu

SEQ ID NO: 831219 - RNA, 20 nt, Human
ucuccugccccccccacccc

SEQ ID NO: 831220 - RNA, 18 nt, Human
ucucucuccucuucuccg

SEQ ID NO: 831221 - RNA, 21 nt, Human
ucuugucuccugcccccccca

SEQ ID NO: 831222 - RNA, 24 nt, Human
ucuuucugucucuguauuuuugac

SEQ ID NO: 831223 - RNA, 20 nt, Human
ugauggggaaucugccccag

SEQ ID NO: 831224 - RNA, 19 nt, Human
ugccccagccgagaugucc

SEQ ID NO: 831225 - RNA, 23 nt, Human
ugccccccccacccccccuucca

SEQ ID NO: 831226 - RNA, 27 nt, Human
ugcugggcggccgcacgcaugcgcaca

SEQ ID NO: 831227 - RNA, 22 nt, Human
uggcuucucucuccucuucucc

SEQ ID NO: 831228 - RNA, 24 nt, Human
uguccugcugccuggugucuugau

SEQ ID NO: 831229 - RNA, 22 nt, Human
ugucuccugccccccccacccc

SEQ ID NO: 831230 - RNA, 21 nt, Human
ugugaguguguguguguccug

SEQ ID NO: 831231 - RNA, 21 nt, Human
uguguccugcugccugguguc

SEQ ID NO: 831232 - RNA, 24 nt, Human
ugugugaguguaugugagugugug

SEQ ID NO: 831233 - RNA, 27 nt, Human
uguugcugucagucuuucccccgucgg

SEQ ID NO: 831234 - RNA, 19 nt, Human
uuugccuccucccaccucc

SEQ ID NO: 831235 - RNA, 20 nt, Human
uuuucuguguugcugucagu

SEQ ID NO: 831236 - RNA, 18 nt, Human
aaggccucucuaaggccc

SEQ ID NO: 831237 - RNA, 23 nt, Human
acagcuguggccaccagagaacc

SEQ ID NO: 831238 - RNA, 20 nt, Human
agaaccggucagcugggcca

SEQ ID NO: 831239 - RNA, 22 nt, Human
agagacccuggccaaggacucc

SEQ ID NO: 831240 - RNA, 18 nt, Human
agagagggaagggagagc

SEQ ID NO: 831241 - RNA, 18 nt, Human
agcugggcgguggggcag

SEQ ID NO: 831242 - RNA, 19 nt, Human
aggcgggggaguggggaag

SEQ ID NO: 831243 - RNA, 25 nt, Human
aggcgggggaguggggaagagaggg

SEQ ID NO: 831244 - RNA, 20 nt, Human
agucagagacccuggccaag

SEQ ID NO: 831245 - RNA, 21 nt, Human
caagcagcuccugagugcaga

SEQ ID NO: 831246 - RNA, 26 nt, Human
cagcugggccaaggccucucuaaggc

SEQ ID NO: 831247 - RNA, 28 nt, Human
cagcugggccaaggccucucuaaggccc

SEQ ID NO: 831248 - RNA, 20 nt, Human
ccaaggccucucuaaggccc

SEQ ID NO: 831249 - RNA, 23 nt, Human
ccaaggcgggggaguggggaaga

SEQ ID NO: 831250 - RNA, 22 nt, Human
cccagcggcucucaugggcaaa

SEQ ID NO: 831251 - RNA, 18 nt, Human
cccaggaagcccaaggcg

SEQ ID NO: 831252 - RNA, 22 nt, Human
ccccaacacuucuagcuugccc

SEQ ID NO: 831253 - RNA, 21 nt, Human
ccccugggugacucugggucu

SEQ ID NO: 831254 - RNA, 19 nt, Human
ccugcugggcauccucuga

SEQ ID NO: 831255 - RNA, 21 nt, Human
cuccauccugcugggcauccu

SEQ ID NO: 831256 - RNA, 23 nt, Human
cugggcauccucugagaguuuau

SEQ ID NO: 831257 - RNA, 21 nt, Human
gacacgggcaggcacugcugg

SEQ ID NO: 831258 - RNA, 21 nt, Human
gagcucuguuuccugaucugu

SEQ ID NO: 831259 - RNA, 22 nt, Human
gcagcuccugagugcagauccu

SEQ ID NO: 831260 - RNA, 23 nt, Human
gcucucaugggcaaaugucaggu

SEQ ID NO: 831261 - RNA, 26 nt, Human
gcugcacugagcucuguuuccugauc

SEQ ID NO: 831262 - RNA, 21 nt, Human
gggaggggcgagguggccucu

SEQ ID NO: 831263 - RNA, 21 nt, Human
gggggaguggggaagagaggg

SEQ ID NO: 831264 - RNA, 24 nt, Human
ggucagcugggccaaggccucucu

SEQ ID NO: 831265 - RNA, 21 nt, Human
gguggccucuggggggagcug

SEQ ID NO: 831266 - RNA, 18 nt, Human
guagaauacacuucagaa

SEQ ID NO: 831267 - RNA, 20 nt, Human
uagcuguagggcccugagca

SEQ ID NO: 831268 - RNA, 22 nt, Human
ucaggugacacagagucagaga

SEQ ID NO: 831269 - RNA, 26 nt, Human
ucucuaaggcccagcggcucucaugg

SEQ ID NO: 831270 - RNA, 23 nt, Human
ugacucaggguugcugcuccugg

SEQ ID NO: 831271 - RNA, 18 nt, Human
ugacugagcacacagcug

SEQ ID NO: 831272 - RNA, 30 nt, Human
ugcgggcaacugggacuccauccugcuggg

SEQ ID NO: 831273 - RNA, 18 nt, Human
uggccaccagagaaccuc

SEQ ID NO: 831274 - RNA, 21 nt, Human
uggggacacgggcaggcacug

SEQ ID NO: 831275 - RNA, 24 nt, Human
uucagaaccggucagcugggccaa

SEQ ID NO: 831276 - RNA, 21 nt, Human
uuccugaucugucacagcccc

SEQ ID NO: 831277 - RNA, 21 nt, Human
uuuuuuuuuuuuuuucugggu

SEQ ID NO: 831278 - RNA, 24 nt, Human
uuuuuuuuuuuuuuuuuuucuggg

SEQ ID NO: 831279 - RNA, 22 nt, Human
acucucccgcccccuacagccc

SEQ ID NO: 831280 - RNA, 19 nt, Human
aggaaggaggggccuggag

SEQ ID NO: 831281 - RNA, 18 nt, Human
aggaaugucgugauucug

SEQ ID NO: 831282 - RNA, 18 nt, Human
cagaaaucagaaauggaa

SEQ ID NO: 831283 - RNA, 26 nt, Human
cagcccaaaccgggcacugcagcaag

SEQ ID NO: 831284 - RNA, 23 nt, Human
caggacuccuguguggcuggugg

SEQ ID NO: 831285 - RNA, 23 nt, Human
cagggugcccaggacuccugugu

SEQ ID NO: 831286 - RNA, 20 nt, Human
ccagggcagucccacuuaac

SEQ ID NO: 831287 - RNA, 21 nt, Human
cccagggcagucccacuuaac

SEQ ID NO: 831288 - RNA, 19 nt, Human
cccgcccccuacagcccaa

SEQ ID NO: 831289 - RNA, 22 nt, Human
ccuaagccagggugcccaggac

SEQ ID NO: 831290 - RNA, 21 nt, Human
ccucaaaaaauagaaguggcc

SEQ ID NO: 831291 - RNA, 25 nt, Human
cgcccccuacagcccaaaccgggca

SEQ ID NO: 831292 - RNA, 20 nt, Human
cucaaaaaauagaaguggcc

SEQ ID NO: 831293 - RNA, 19 nt, Human
cugaaacugcgccuugccc

SEQ ID NO: 831294 - RNA, 26 nt, Human
cuugcccagccugggucucgccugca

SEQ ID NO: 831295 - RNA, 23 nt, Human
gagagcagaaaucagaaauggaa

SEQ ID NO: 831296 - RNA, 19 nt, Human
gcagagagcagaaaucaga

SEQ ID NO: 831297 - RNA, 19 nt, Human
gcccaaaccgggcacugca

SEQ ID NO: 831298 - RNA, 21 nt, Human
gcugcagacucucccgccccc

SEQ ID NO: 831299 - RNA, 22 nt, Human
ggaaggaaugucgugauucuga

SEQ ID NO: 831300 - RNA, 19 nt, Human
ggccugaugcccacagcug

SEQ ID NO: 831301 - RNA, 21 nt, Human
ucccgcccccuacagcccaaa

SEQ ID NO: 831302 - RNA, 23 nt, Human
ucccgcccccuacagcccaaacc

SEQ ID NO: 831303 - RNA, 21 nt, Human
ucucccgcccccuacagccca

SEQ ID NO: 831304 - RNA, 22 nt, Human
ugaguacaguauggcaaauucu

SEQ ID NO: 831305 - RNA, 23 nt, Human
ugauucaggaaggaggggccugg

SEQ ID NO: 831306 - RNA, 21 nt, Human
ugcccaggacuccuguguggc

SEQ ID NO: 831307 - RNA, 18 nt, Human
ugcccagggcagucccac

SEQ ID NO: 831308 - RNA, 19 nt, Human
ugccucaguuucccuaacu

SEQ ID NO: 831309 - RNA, 20 nt, Human
ugcgccuugcccagccuggg

SEQ ID NO: 831310 - RNA, 19 nt, Human
ugguagggaaggaaugucg

SEQ ID NO: 831311 - RNA, 20 nt, Human
uggugccacucugcucagcc

SEQ ID NO: 831312 - RNA, 22 nt, Human
uuucccuaacuccauccagugc

SEQ ID NO: 831313 - RNA, 20 nt, Human
aaaaaaaaaacuaaaaccca

SEQ ID NO: 831314 - RNA, 24 nt, Human
aaaaaaaaaacuaaaacccaaacc

SEQ ID NO: 831315 - RNA, 21 nt, Human
aaaaagaaaacagaggagaaa

SEQ ID NO: 831316 - RNA, 21 nt, Human
aaacaaaauagcacuuuuaaa

SEQ ID NO: 831317 - RNA, 19 nt, Human
aaacacgauccaaugacug

SEQ ID NO: 831318 - RNA, 21 nt, Human
aaccggaccguccugcccuuc

SEQ ID NO: 831319 - RNA, 18 nt, Human
aaggucugcauaaacacu

SEQ ID NO: 831320 - RNA, 23 nt, Human
acaaaagaaaacacgauccaaug

SEQ ID NO: 831321 - RNA, 23 nt, Human
acacugaaaauauguugaggaac

SEQ ID NO: 831322 - RNA, 22 nt, Human
accccaaguaaguguucaggga

SEQ ID NO: 831323 - RNA, 19 nt, Human
accuucccucccgcguccc

SEQ ID NO: 831324 - RNA, 21 nt, Human
acuacuaucccaccuuuugaa

SEQ ID NO: 831325 - RNA, 22 nt, Human
agaaaugcaccacuaaaccucc

SEQ ID NO: 831326 - RNA, 19 nt, Human
auagaaacacccgaugccc

SEQ ID NO: 831327 - RNA, 23 nt, Human
auagaaacacccgaugcccugca

SEQ ID NO: 831328 - RNA, 19 nt, Human
aucauguuccugauuuuau

SEQ ID NO: 831329 - RNA, 23 nt, Human
caaaagaaaacacgauccaauga

SEQ ID NO: 831330 - RNA, 19 nt, Human
caaaaugaauauagaaaua

SEQ ID NO: 831331 - RNA, 22 nt, Human
caaauacaaacaaaauagcacu

SEQ ID NO: 831332 - RNA, 21 nt, Human
caacuuuccauccucugcacu

SEQ ID NO: 831333 - RNA, 31 nt, Human
caccuuaaaaaaaaaaaacuaaaacccaaag

SEQ ID NO: 831334 - RNA, 21 nt, Human
cagcacaguacaauaauggac

SEQ ID NO: 831335 - RNA, 23 nt, Human
cauagcagaagcuacucagagaa

SEQ ID NO: 831336 - RNA, 24 nt, Human
cauagcagaagcuacucagagaaa

SEQ ID NO: 831337 - RNA, 21 nt, Human
cauuaacaauacucuguggaa

SEQ ID NO: 831338 - RNA, 23 nt, Human
cccccacaaaucuccuacaaucc

SEQ ID NO: 831339 - RNA, 18 nt, Human
ccccggggcccgaccugg

SEQ ID NO: 831340 - RNA, 24 nt, Human
cccuucuuugccucugucccuaac

SEQ ID NO: 831341 - RNA, 20 nt, Human
ccgugaccuacagggaacau

SEQ ID NO: 831342 - RNA, 21 nt, Human
ccuauaucauguuccugauuu

SEQ ID NO: 831343 - RNA, 21 nt, Human
ccucaccuuaaaaaaaaaaaa

SEQ ID NO: 831344 - RNA, 21 nt, Human
ccucuccaagccccuuuggcc

SEQ ID NO: 831345 - RNA, 27 nt, Human
ccuuaaaaaaaaaaaacuaaaacccaa

SEQ ID NO: 831346 - RNA, 19 nt, Human
ccuuuggcccaucuucucc

SEQ ID NO: 831347 - RNA, 21 nt, Human
cuacuagcccuuugauuuucu

SEQ ID NO: 831348 - RNA, 22 nt, Human
cuagcccuuugauuuucugagu

SEQ ID NO: 831349 - RNA, 27 nt, Human
cuccucugucugcucuugguagcucca

SEQ ID NO: 831350 - RNA, 26 nt, Human
cuggaaaaugucucucauuacucuca

SEQ ID NO: 831351 - RNA, 25 nt, Human
cuggcgggcggcggcuaccuucccu

SEQ ID NO: 831352 - RNA, 20 nt, Human
cuguaugugcuugugugcuu

SEQ ID NO: 831353 - RNA, 22 nt, Human
cuuacugggcaucaacuuucca

SEQ ID NO: 831354 - RNA, 22 nt, Human
gacaaaagaaaacacgauccaa

SEQ ID NO: 831355 - RNA, 18 nt, Human
ggacugcaggagugaaug

SEQ ID NO: 831356 - RNA, 21 nt, Human
gggagugccgugaccuacagg

SEQ ID NO: 831357 - RNA, 22 nt, Human
gggcgggaacauccacgggaaa

SEQ ID NO: 831358 - RNA, 20 nt, Human
guaugugcuugugugcuuuu

SEQ ID NO: 831359 - RNA, 21 nt, Human
gugugugugugugugugugug

SEQ ID NO: 831360 - RNA, 21 nt, Human
gugugugugugugugugugug

SEQ ID NO: 831361 - RNA, 21 nt, Human
gugugugugugugugugugug

SEQ ID NO: 831362 - RNA, 21 nt, Human
gugugugugugugugugugug

SEQ ID NO: 831363 - RNA, 21 nt, Human
gugugugugugugugugugug

SEQ ID NO: 831364 - RNA, 27 nt, Human
uaaaaaaaaaaaacuaaaacccaaacc

SEQ ID NO: 831365 - RNA, 21 nt, Human
uaaugcagaauggaucuucag

SEQ ID NO: 831366 - RNA, 19 nt, Human
uacaauaauggacaaaaga

SEQ ID NO: 831367 - RNA, 25 nt, Human
uacaauaauggacaaaagaaaacac

SEQ ID NO: 831368 - RNA, 21 nt, Human
uaccuugcuucccaacauaac

SEQ ID NO: 831369 - RNA, 23 nt, Human
uagaaacacccgaugcccugcaa

SEQ ID NO: 831370 - RNA, 30 nt, Human
uagauuuguugugugugugugugugugugg

SEQ ID NO: 831371 - RNA, 26 nt, Human
uauauguagauuuguugugugugugu

SEQ ID NO: 831372 - RNA, 20 nt, Human
uauuguggaauaacauggaa

SEQ ID NO: 831373 - RNA, 18 nt, Human
ucuuuggggguaccuugc

SEQ ID NO: 831374 - RNA, 18 nt, Human
ugaccuacagggaacauc

SEQ ID NO: 831375 - RNA, 24 nt, Human
ugaggaccccaaguaaguguucag

SEQ ID NO: 831376 - RNA, 21 nt, Human
ugcauaggcguguguggggau

SEQ ID NO: 831377 - RNA, 20 nt, Human
ugcccugcaauauuuuuagc

SEQ ID NO: 831378 - RNA, 20 nt, Human
ugccucugucccuaacagcc

SEQ ID NO: 831379 - RNA, 19 nt, Human
ugcuugugugcuuuuggga

SEQ ID NO: 831380 - RNA, 19 nt, Human
uggaagagcagggguuggc

SEQ ID NO: 831381 - RNA, 27 nt, Human
uggaauaacauggaaauacaaaggcuu

SEQ ID NO: 831382 - RNA, 25 nt, Human
uguagauuuguugugugugugugug

SEQ ID NO: 831383 - RNA, 21 nt, Human
ugucccuaacagccgcagaac

SEQ ID NO: 831384 - RNA, 20 nt, Human
uguggaauagaaacacccga

SEQ ID NO: 831385 - RNA, 18 nt, Human
ugugugugugugugugug

SEQ ID NO: 831386 - RNA, 18 nt, Human
ugugugugugugugugug

SEQ ID NO: 831387 - RNA, 18 nt, Human
ugugugugugugugugug

SEQ ID NO: 831388 - RNA, 18 nt, Human
ugugugugugugugugug

SEQ ID NO: 831389 - RNA, 18 nt, Human
ugugugugugugugugug

SEQ ID NO: 831390 - RNA, 18 nt, Human
ugugugugugugugugug

SEQ ID NO: 831391 - RNA, 18 nt, Human
ugugugugugugugugug

SEQ ID NO: 831392 - RNA, 18 nt, Human
ugugugugugugugugug

SEQ ID NO: 831393 - RNA, 18 nt, Human
ugugugugugugugugug

SEQ ID NO: 831394 - RNA, 18 nt, Human
ugugugugugugugugug

SEQ ID NO: 831395 - RNA, 18 nt, Human
ugugugugugugugugug

SEQ ID NO: 831396 - RNA, 18 nt, Human
ugugugugugugugugug

SEQ ID NO: 831397 - RNA, 21 nt, Human
ugugugugugugugugugugu

SEQ ID NO: 831398 - RNA, 21 nt, Human
ugugugugugugugugugugu

SEQ ID NO: 831399 - RNA, 21 nt, Human
ugugugugugugugugugugu

SEQ ID NO: 831400 - RNA, 21 nt, Human
ugugugugugugugugugugu

SEQ ID NO: 831401 - RNA, 21 nt, Human
ugugugugugugugugugugu

SEQ ID NO: 831402 - RNA, 21 nt, Human
ugugugugugugugugugugu

SEQ ID NO: 831403 - RNA, 21 nt, Human
ugugugugugugugugugugu

SEQ ID NO: 831404 - RNA, 21 nt, Human
ugugugugugugugugugugu

SEQ ID NO: 831405 - RNA, 21 nt, Human
ugugugugugugugugugugu

SEQ ID NO: 831406 - RNA, 21 nt, Human
ugugugugugugugugugugu

SEQ ID NO: 831407 - RNA, 21 nt, Human
ugugugugugugugugugugu

SEQ ID NO: 831408 - RNA, 21 nt, Human
ugugugugugugugugugugu

SEQ ID NO: 831409 - RNA, 21 nt, Human
ugugugugugugugugugugu

SEQ ID NO: 831410 - RNA, 21 nt, Human
ugugugugugugugugugugu

SEQ ID NO: 831411 - RNA, 21 nt, Human
ugugugugugugugugugugu

SEQ ID NO: 831412 - RNA, 21 nt, Human
ugugugugugugugugugugu

SEQ ID NO: 831413 - RNA, 21 nt, Human
ugugugugugugugugugugu

SEQ ID NO: 831414 - RNA, 21 nt, Human
ugugugugugugugugugugu

SEQ ID NO: 831415 - RNA, 21 nt, Human
ugugugugugugugugugugu

SEQ ID NO: 831416 - RNA, 21 nt, Human
ugugugugugugugugugugu

SEQ ID NO: 831417 - RNA, 22 nt, Human
ugugugugugugugugugugug

SEQ ID NO: 831418 - RNA, 22 nt, Human
ugugugugugugugugugugug

SEQ ID NO: 831419 - RNA, 22 nt, Human
ugugugugugugugugugugug

SEQ ID NO: 831420 - RNA, 22 nt, Human
ugugugugugugugugugugug

SEQ ID NO: 831421 - RNA, 22 nt, Human
ugugugugugugugugugugug

SEQ ID NO: 831422 - RNA, 23 nt, Human
ugugugugugugugugugugugu

SEQ ID NO: 831423 - RNA, 23 nt, Human
uguguguguguguguguguguug

SEQ ID NO: 831424 - RNA, 19 nt, Human
uguguguguguguguguug

SEQ ID NO: 831425 - RNA, 23 nt, Human
uuaaaaagaaaacagaggagaaa

SEQ ID NO: 831426 - RNA, 21 nt, Human
uuaaauuuuuuacaaaaugaa

SEQ ID NO: 831427 - RNA, 20 nt, Human
uuugugcauaggcgugugug

SEQ ID NO: 831428 - RNA, 20 nt, Human
aaacaaaguccucaagugag

SEQ ID NO: 831429 - RNA, 19 nt, Human
aaacagaaacaaacauccc

SEQ ID NO: 831430 - RNA, 20 nt, Human
aaacagaaacaaacaucccu

SEQ ID NO: 831431 - RNA, 23 nt, Human
aacaagaacuccaacccaaaacc

SEQ ID NO: 831432 - RNA, 18 nt, Human
aagaacuccaacccaaaa

SEQ ID NO: 831433 - RNA, 21 nt, Human
aagaacuccaacccaaaaccc

SEQ ID NO: 831434 - RNA, 22 nt, Human
aagguacuuuuucaaaacaaag

SEQ ID NO: 831435 - RNA, 22 nt, Human
aauacauaugcacaggaaccaa

SEQ ID NO: 831436 - RNA, 21 nt, Human
acaagaacuccaacccaaaac

SEQ ID NO: 831437 - RNA, 18 nt, Human
acacagagacagaagcuu

SEQ ID NO: 831438 - RNA, 22 nt, Human
acacagguuuaaagaauccaca

SEQ ID NO: 831439 - RNA, 19 nt, Human
acuccaacccaaaacccca

SEQ ID NO: 831440 - RNA, 19 nt, Human
acucccauaacuagcuucu

SEQ ID NO: 831441 - RNA, 18 nt, Human
acuuguaaggacacugag

SEQ ID NO: 831442 - RNA, 23 nt, Human
acuuuuucuccuuccagaaaucu

SEQ ID NO: 831443 - RNA, 19 nt, Human
agacagugucuugcugugc

SEQ ID NO: 831444 - RNA, 19 nt, Human
agagauaugguuaagguuu

SEQ ID NO: 831445 - RNA, 20 nt, Human
agcacaauaccuuguccaca

SEQ ID NO: 831446 - RNA, 22 nt, Human
agcaccuacugacccccucagc

SEQ ID NO: 831447 - RNA, 18 nt, Human
agcagaaacagccugcag

SEQ ID NO: 831448 - RNA, 21 nt, Human
agccucuuucugugugguguu

SEQ ID NO: 831449 - RNA, 22 nt, Human
agguguaggcagugcugugacc

SEQ ID NO: 831450 - RNA, 30 nt, Human
agugguuuuuaaacagcuguguggaagagg

SEQ ID NO: 831451 - RNA, 22 nt, Human
auaccagucuuuucuucacaua

SEQ ID NO: 831452 - RNA, 19 nt, Human
augguccuauuuauuagaa

SEQ ID NO: 831453 - RNA, 24 nt, Human
augguccuuucaucccaagccugg

SEQ ID NO: 831454 - RNA, 23 nt, Human
caaaacaaaguccucaagugagc

SEQ ID NO: 831455 - RNA, 18 nt, Human
caaaugaugaaacugugg

SEQ ID NO: 831456 - RNA, 20 nt, Human
caagaaagaaagaaaaguga

SEQ ID NO: 831457 - RNA, 20 nt, Human
caagaacuccaacccaaaac

SEQ ID NO: 831458 - RNA, 19 nt, Human
cacacaaacuuguguaugu

SEQ ID NO: 831459 - RNA, 26 nt, Human
caccacagucucagaagaaaucccag

SEQ ID NO: 831460 - RNA, 21 nt, Human
cagauuaauaacauaaacacu

SEQ ID NO: 831461 - RNA, 22 nt, Human
cagguugaucuagagguacacu

SEQ ID NO: 831462 - RNA, 20 nt, Human
cauaaaaaaagacuauggca

SEQ ID NO: 831463 - RNA, 22 nt, Human
ccaaaacaaaacaacaaaacau

SEQ ID NO: 831464 - RNA, 21 nt, Human
ccaagugccgagauucuggca

SEQ ID NO: 831465 - RNA, 24 nt, Human
ccacagcaugacuccacgccaucc

SEQ ID NO: 831466 - RNA, 19 nt, Human
ccagccucuuucugugugg

SEQ ID NO: 831467 - RNA, 24 nt, Human
ccaggaaaaaaugauuucauacca

SEQ ID NO: 831468 - RNA, 19 nt, Human
ccaggguggggugguaggg

SEQ ID NO: 831469 - RNA, 20 nt, Human
ccaggguggggugguagggc

SEQ ID NO: 831470 - RNA, 21 nt, Human
ccaggguggggugguagggcu

SEQ ID NO: 831471 - RNA, 24 nt, Human
ccaguuuccaaaacaaaacaacaa

SEQ ID NO: 831472 - RNA, 18 nt, Human
cccaggaaaaaaugauuu

SEQ ID NO: 831473 - RNA, 24 nt, Human
cccaggaaaaaaugauuucauacc

SEQ ID NO: 831474 - RNA, 18 nt, Human
cccccgcccgggcccgcc

SEQ ID NO: 831475 - RNA, 23 nt, Human
ccccgcccgggcccgccggcucc

SEQ ID NO: 831476 - RNA, 19 nt, Human
cccuccagagcaccuacug

SEQ ID NO: 831477 - RNA, 23 nt, Human
ccucagccuuggaaggaguuuca

SEQ ID NO: 831478 - RNA, 23 nt, Human
ccuguccaguuuccaaaacaaaa

SEQ ID NO: 831479 - RNA, 22 nt, Human
cgggcccgccggcuccacgccg

SEQ ID NO: 831480 - RNA, 22 nt, Human
cuccacgccgccgcggcuccuc

SEQ ID NO: 831481 - RNA, 20 nt, Human
cuccacuugacucaaaugau

SEQ ID NO: 831482 - RNA, 25 nt, Human
cucccaccccuuuugcccuuagccc

SEQ ID NO: 831483 - RNA, 24 nt, Human
cugugugguguuagagauaugguu

SEQ ID NO: 831484 - RNA, 18 nt, Human
cuguuuugacuccugucc

SEQ ID NO: 831485 - RNA, 23 nt, Human
cuuggagaccucagucccuggaa

SEQ ID NO: 831486 - RNA, 21 nt, Human
cuuguaaggacacugagauug

SEQ ID NO: 831487 - RNA, 22 nt, Human
cuuguaaggacacugagauugu

SEQ ID NO: 831488 - RNA, 20 nt, Human
cuuugcguagcuggaugugg

SEQ ID NO: 831489 - RNA, 27 nt, Human
gaaaauagcuguggccugccagaagcc

SEQ ID NO: 831490 - RNA, 21 nt, Human
gaaagaacagaggaaaacaag

SEQ ID NO: 831491 - RNA, 18 nt, Human
gaacuccaacccaaaacc

SEQ ID NO: 831492 - RNA, 22 nt, Human
gaacuccaacccaaaaccccau

SEQ ID NO: 831493 - RNA, 18 nt, Human
gacccccucagccuugga

SEQ ID NO: 831494 - RNA, 21 nt, Human
gagaauaaagauucccacagc

SEQ ID NO: 831495 - RNA, 20 nt, Human
gaggaaacagugagguuucc

SEQ ID NO: 831496 - RNA, 23 nt, Human
gaucuccagaagaagaggagacu

SEQ ID NO: 831497 - RNA, 21 nt, Human
gcagcccaucccaucccguca

SEQ ID NO: 831498 - RNA, 22 nt, Human
gcccccgcccgggcccgccggc

SEQ ID NO: 831499 - RNA, 21 nt, Human
gcccgccggcuccacgccgcc

SEQ ID NO: 831500 - RNA, 18 nt, Human
gcccgggcccgccggcuc

SEQ ID NO: 831501 - RNA, 21 nt, Human
gcuccuccagccucuuucugu

SEQ ID NO: 831502 - RNA, 21 nt, Human
gcucuggucauucugagauac

SEQ ID NO: 831503 - RNA, 22 nt, Human
ggaaaacaagaacuccaaccca

SEQ ID NO: 831504 - RNA, 21 nt, Human
ggaguuucaccacagucucag

SEQ ID NO: 831505 - RNA, 19 nt, Human
ggauuggaaauagagcuga

SEQ ID NO: 831506 - RNA, 20 nt, Human
ggcagugcugugaccuugau

SEQ ID NO: 831507 - RNA, 21 nt, Human
ggcaguuccaucucacuuucu

SEQ ID NO: 831508 - RNA, 22 nt, Human
ggguggggugguagggcuccgg

SEQ ID NO: 831509 - RNA, 21 nt, Human
guaacuacaaaaacuuaacuc

SEQ ID NO: 831510 - RNA, 20 nt, Human
gucuguucuaagccagacuc

SEQ ID NO: 831511 - RNA, 20 nt, Human
gugguuugggguucugugug

SEQ ID NO: 831512 - RNA, 21 nt, Human
guguuucuguaucaugauaca

SEQ ID NO: 831513 - RNA, 20 nt, Human
uaaaaucucuggagugacag

SEQ ID NO: 831514 - RNA, 21 nt, Human
uaaacagcuguguggaagagc

SEQ ID NO: 831515 - RNA, 20 nt, Human
uaagagaaaaggcaacaugg

SEQ ID NO: 831516 - RNA, 19 nt, Human
uaagaucuggggaggggag

SEQ ID NO: 831517 - RNA, 22 nt, Human
uaagccagacucuuacagcuaa

SEQ ID NO: 831518 - RNA, 18 nt, Human
uacacugccaccuuagcc

SEQ ID NO: 831519 - RNA, 25 nt, Human
uagccaaagagcaggugauggacau

SEQ ID NO: 831520 - RNA, 22 nt, Human
uagcuguggccugccagaagcc

SEQ ID NO: 831521 - RNA, 24 nt, Human
uagcuuguuucugugcugcucugg

SEQ ID NO: 831522 - RNA, 25 nt, Human
uagcuuguuucugugcugcucuggu

SEQ ID NO: 831523 - RNA, 22 nt, Human
uaguuccacaccucccaccccu

SEQ ID NO: 831524 - RNA, 23 nt, Human
ucaaaacaaaguccucaagugag

SEQ ID NO: 831525 - RNA, 25 nt, Human
ucaaagcacaauccuaaccaccuag

SEQ ID NO: 831526 - RNA, 23 nt, Human
ucaaugcuagacaauguauuagu

SEQ ID NO: 831527 - RNA, 21 nt, Human
ucacucagggcaagguugcaa

SEQ ID NO: 831528 - RNA, 19 nt, Human
ucauucugagauacuaucu

SEQ ID NO: 831529 - RNA, 22 nt, Human
uccaaaacaaaacaacaaaaca

SEQ ID NO: 831530 - RNA, 18 nt, Human
uccacaccucccaccccu

SEQ ID NO: 831531 - RNA, 19 nt, Human
uccacaccucccaccccuu

SEQ ID NO: 831532 - RNA, 24 nt, Human
ucccacagccaggaaaauagcugu

SEQ ID NO: 831533 - RNA, 19 nt, Human
uccucaagugagcagauua

SEQ ID NO: 831534 - RNA, 21 nt, Human
uccuggaauuaaggucuuggc

SEQ ID NO: 831535 - RNA, 19 nt, Human
uccuugccaaaacagaaac

SEQ ID NO: 831536 - RNA, 24 nt, Human
ucgcagucaaagcacaauccuaac

SEQ ID NO: 831537 - RNA, 20 nt, Human
ucucauauaggccaaacacc

SEQ ID NO: 831538 - RNA, 22 nt, Human
ucucauauaggccaaacaccag

SEQ ID NO: 831539 - RNA, 26 nt, Human
ugaaaauacauaugcacaggaaccaa

SEQ ID NO: 831540 - RNA, 18 nt, Human
ugaaagaacagaggaaaa

SEQ ID NO: 831541 - RNA, 18 nt, Human
ugaauaagccaugaaggc

SEQ ID NO: 831542 - RNA, 19 nt, Human
ugacuccacgccaucccug

SEQ ID NO: 831543 - RNA, 18 nt, Human
ugaggcagagaugcucac

SEQ ID NO: 831544 - RNA, 21 nt, Human
ugaggcagagaugcucacaag

SEQ ID NO: 831545 - RNA, 18 nt, Human
ugcagcgggcguagaugc

SEQ ID NO: 831546 - RNA, 19 nt, Human
ugccaaaacagaaacaaac

SEQ ID NO: 831547 - RNA, 24 nt, Human
ugccaaaacagaaacaaacauccc

SEQ ID NO: 831548 - RNA, 25 nt, Human
ugcccaggguggggugguagggcuc

SEQ ID NO: 831549 - RNA, 23 nt, Human
uggaaauagagcugacuacagca

SEQ ID NO: 831550 - RNA, 22 nt, Human
uggaaggaggaaacagugaggu

SEQ ID NO: 831551 - RNA, 22 nt, Human
ugggagucauugcaaccccaau

SEQ ID NO: 831552 - RNA, 24 nt, Human
ugggggagauggagucugacagaa

SEQ ID NO: 831553 - RNA, 24 nt, Human
uggggugguagggcuccggggagc

SEQ ID NO: 831554 - RNA, 19 nt, Human
uggguuacugaauaagcca

SEQ ID NO: 831555 - RNA, 18 nt, Human
ugguccuauuuauuagaa

SEQ ID NO: 831556 - RNA, 18 nt, Human
uggugccgagucccucca

SEQ ID NO: 831557 - RNA, 22 nt, Human
uguaaaccuagugucagaaaau

SEQ ID NO: 831558 - RNA, 20 nt, Human
uguagaaugccauucugcua

SEQ ID NO: 831559 - RNA, 18 nt, Human
ugucccgcuggaagugcu

SEQ ID NO: 831560 - RNA, 26 nt, Human
ugugcaugccugugcuuccggagccc

SEQ ID NO: 831561 - RNA, 21 nt, Human
uguguauguauaauauacaua

SEQ ID NO: 831562 - RNA, 23 nt, Human
uguguauguauaauauacauaua

SEQ ID NO: 831563 - RNA, 25 nt, Human
uguguauguauaauauacauauaua

SEQ ID NO: 831564 - RNA, 20 nt, Human
uguuucuuuacucaaauuuc

SEQ ID NO: 831565 - RNA, 21 nt, Human
uguuuugacuccuguccaguu

SEQ ID NO: 831566 - RNA, 24 nt, Human
uguuuuucaucaagguuugagacu

SEQ ID NO: 831567 - RNA, 22 nt, Human
uuaacuuguaaggacacugaga

SEQ ID NO: 831568 - RNA, 19 nt, Human
uuacaccacagauguuuga

SEQ ID NO: 831569 - RNA, 20 nt, Human
uuagacccaggaaaaaauga

SEQ ID NO: 831570 - RNA, 20 nt, Human
uucacuagcaagauuucaua

SEQ ID NO: 831571 - RNA, 20 nt, Human
uucaggaaugggaaacucau

SEQ ID NO: 831572 - RNA, 19 nt, Human
uucauguuccauuccuuau

SEQ ID NO: 831573 - RNA, 23 nt, Human
uucccagguugaucuagagguac

SEQ ID NO: 831574 - RNA, 22 nt, Human
uucguuggagacaacuugaaag

SEQ ID NO: 831575 - RNA, 19 nt, Human
uugaaaacuauacaaaaac

SEQ ID NO: 831576 - RNA, 21 nt, Human
uugcccuuagcccuuaaucug

SEQ ID NO: 831577 - RNA, 19 nt, Human
uuuaacucuuuuggcccuu

SEQ ID NO: 831578 - RNA, 20 nt, Human
uuuaauuaagaucuggggag

SEQ ID NO: 831579 - RNA, 23 nt, Human
uuuauggaaaaauuuuguguuuu

SEQ ID NO: 831580 - RNA, 22 nt, Human
uuugaaggcucaaauugagucc

SEQ ID NO: 831581 - RNA, 23 nt, Human
uuugcccuuagcccuuaaucugu

SEQ ID NO: 831582 - RNA, 19 nt, Human
aaagugcugggauuacagg

SEQ ID NO: 831583 - RNA, 20 nt, Human
aaagugcugggauuacaggc

SEQ ID NO: 831584 - RNA, 24 nt, Human
aaagugcugggauuacaggcguua

SEQ ID NO: 831585 - RNA, 22 nt, Human
aagucagggcccaggcagggga

SEQ ID NO: 831586 - RNA, 19 nt, Human
aagugcugggauuacaggc

SEQ ID NO: 831587 - RNA, 19 nt, Human
aagugcugggauuacaggc

SEQ ID NO: 831588 - RNA, 20 nt, Human
acugaaaugcaaagagucug

SEQ ID NO: 831589 - RNA, 21 nt, Human
acugcauuuaaaggcccaugg

SEQ ID NO: 831590 - RNA, 22 nt, Human
agaaggcagggcugucagggcc

SEQ ID NO: 831591 - RNA, 20 nt, Human
agaggcagggguggaggagg

SEQ ID NO: 831592 - RNA, 21 nt, Human
agaggcagggguggaggaggc

SEQ ID NO: 831593 - RNA, 25 nt, Human
agaggcagggguggaggggaggcag

SEQ ID NO: 831594 - RNA, 25 nt, Human
aggcagggcugucagggccuugguu

SEQ ID NO: 831595 - RNA, 25 nt, Human
aggcaggggagcaggccacccaggu

SEQ ID NO: 831596 - RNA, 25 nt, Human
aggcagggguggaggagaggcaggg

SEQ ID NO: 831597 - RNA, 25 nt, Human
aggcagggguggaggagaggcaggg

SEQ ID NO: 831598 - RNA, 25 nt, Human
aggcagggguggaggagaggggacc

SEQ ID NO: 831599 - RNA, 26 nt, Human
aggcagggguggaggagaggggaccc

SEQ ID NO: 831600 - RNA, 18 nt, Human
aggcagggguggaggagg

SEQ ID NO: 831601 - RNA, 18 nt, Human
aggcagggguggaggagg

SEQ ID NO: 831602 - RNA, 19 nt, Human
aggcagggguggaggaggc

SEQ ID NO: 831603 - RNA, 22 nt, Human
aggcagggguggaggaggcggg

SEQ ID NO: 831604 - RNA, 26 nt, Human
aggcagggguggaggaggcggggcuc

SEQ ID NO: 831605 - RNA, 19 nt, Human
aggcagggguggaggaggu

SEQ ID NO: 831606 - RNA, 22 nt, Human
aggcagggguggaggagguggg

SEQ ID NO: 831607 - RNA, 23 nt, Human
aggcagggguggaggaggugggg

SEQ ID NO: 831608 - RNA, 26 nt, Human
aggcagggguggaggagguggggcuc

SEQ ID NO: 831609 - RNA, 22 nt, Human
aggcagggguggaggggaggca

SEQ ID NO: 831610 - RNA, 19 nt, Human
aggcagggguggagggggg

SEQ ID NO: 831611 - RNA, 22 nt, Human
aggcagggguggagggggggac

SEQ ID NO: 831612 - RNA, 23 nt, Human
aggcguuagccaccgugcccggc

SEQ ID NO: 831613 - RNA, 19 nt, Human
agggaggcugacuugguuc

SEQ ID NO: 831614 - RNA, 18 nt, Human
agggcugucagggccuug

SEQ ID NO: 831615 - RNA, 18 nt, Human
agggguggaggagaggca

SEQ ID NO: 831616 - RNA, 18 nt, Human
agggguggaggagaggca

SEQ ID NO: 831617 - RNA, 20 nt, Human
agggguggaggagguggggc

SEQ ID NO: 831618 - RNA, 18 nt, Human
agggguggaggggaggca

SEQ ID NO: 831619 - RNA, 20 nt, Human
agguagggaacaaaugccug

SEQ ID NO: 831620 - RNA, 21 nt, Human
caaagugcugggauuacaggc

SEQ ID NO: 831621 - RNA, 23 nt, Human
caaagugcugggauuacaggcgu

SEQ ID NO: 831622 - RNA, 24 nt, Human
caaagugcugggauuacaggcguu

SEQ ID NO: 831623 - RNA, 23 nt, Human
caagaucugugcauaggaggccc

SEQ ID NO: 831624 - RNA, 19 nt, Human
cacuguguggcaugggagc

SEQ ID NO: 831625 - RNA, 18 nt, Human
cagugcccucgggagcug

SEQ ID NO: 831626 - RNA, 22 nt, Human
ccacccuccuggacuucacuac

SEQ ID NO: 831627 - RNA, 18 nt, Human
ccaccgugcccggcccac

SEQ ID NO: 831628 - RNA, 22 nt, Human
ccccugaaucugguuaggugga

SEQ ID NO: 831629 - RNA, 20 nt, Human
cccggcccugcuccucagcc

SEQ ID NO: 831630 - RNA, 22 nt, Human
cccggcccugcuccucagcucc

SEQ ID NO: 831631 - RNA, 22 nt, Human
cccuggguuucuuccaggcucu

SEQ ID NO: 831632 - RNA, 19 nt, Human
ccucgggagcugccccugg

SEQ ID NO: 831633 - RNA, 19 nt, Human
ccugaccucgugauccacc

SEQ ID NO: 831634 - RNA, 21 nt, Human
ccugaccucgugauccaccug

SEQ ID NO: 831635 - RNA, 18 nt, Human
ccuggacuucacuacagg

SEQ ID NO: 831636 - RNA, 23 nt, Human
cgggggugggguggugggcagug

SEQ ID NO: 831637 - RNA, 24 nt, Human
cuccguguuauccaggauggucuc

SEQ ID NO: 831638 - RNA, 24 nt, Human
cuccugaccucgugauccaccugc

SEQ ID NO: 831639 - RNA, 23 nt, Human
cugucccacccuccuggacuuca

SEQ ID NO: 831640 - RNA, 18 nt, Human
cuuccaggcucuucacug

SEQ ID NO: 831641 - RNA, 20 nt, Human
gaagaggaggcagugggcau

SEQ ID NO: 831642 - RNA, 21 nt, Human
gacaggccugucccacccucc

SEQ ID NO: 831643 - RNA, 22 nt, Human
gaccucgugauccaccugccuc

SEQ ID NO: 831644 - RNA, 24 nt, Human
gaccucgugauccaccugccucag

SEQ ID NO: 831645 - RNA, 24 nt, Human
gagaggcagggguggaggaggcgg

SEQ ID NO: 831646 - RNA, 19 nt, Human
gagaggcagggguggaggg

SEQ ID NO: 831647 - RNA, 21 nt, Human
gaggagguggggcucuccugg

SEQ ID NO: 831648 - RNA, 18 nt, Human
gauuacaggcguuagcca

SEQ ID NO: 831649 - RNA, 20 nt, Human
gauuacaggcguuagccacc

SEQ ID NO: 831650 - RNA, 21 nt, Human
gauuacaggcguuagccaccg

SEQ ID NO: 831651 - RNA, 22 nt, Human
gcagguggaggggaggcagggg

SEQ ID NO: 831652 - RNA, 20 nt, Human
ggagccuucacagugcccuc

SEQ ID NO: 831653 - RNA, 24 nt, Human
ggaggcggggcucucccaggaggc

SEQ ID NO: 831654 - RNA, 23 nt, Human
ggagguggggcucuccugggccg

SEQ ID NO: 831655 - RNA, 24 nt, Human
ggcacuggggcagguggaggggag

SEQ ID NO: 831656 - RNA, 21 nt, Human
ggcagagggcagaaggcaggg

SEQ ID NO: 831657 - RNA, 21 nt, Human
gggaggcugacuugguucugg

SEQ ID NO: 831658 - RNA, 24 nt, Human
gggcagaaggcagggcugucaggg

SEQ ID NO: 831659 - RNA, 26 nt, Human
gggcagagggcagaaggcagggcugu

SEQ ID NO: 831660 - RNA, 19 nt, Human
gggcagguggaggggaggc

SEQ ID NO: 831661 - RNA, 25 nt, Human
gggcagguggaggggaggcaggggu

SEQ ID NO: 831662 - RNA, 24 nt, Human
gggcggguggaggagaggcagggg

SEQ ID NO: 831663 - RNA, 19 nt, Human
gggggugggguggugggca

SEQ ID NO: 831664 - RNA, 19 nt, Human
gggguggaggaggcggggc

SEQ ID NO: 831665 - RNA, 21 nt, Human
ggguggaggagaggcaggggu

SEQ ID NO: 831666 - RNA, 21 nt, Human
ggguggaggagaggcaggggu

SEQ ID NO: 831667 - RNA, 21 nt, Human
ggguggaggaggcggggcucu

SEQ ID NO: 831668 - RNA, 21 nt, Human
ggguggaggggaggcaggggu

SEQ ID NO: 831669 - RNA, 26 nt, Human
ggguggugggcagugugccugggcag

SEQ ID NO: 831670 - RNA, 20 nt, Human
ggucucgaucuccugaccuc

SEQ ID NO: 831671 - RNA, 19 nt, Human
gguggaggagaggcagggg

SEQ ID NO: 831672 - RNA, 22 nt, Human
gguuucuccguguuauccagga

SEQ ID NO: 831673 - RNA, 23 nt, Human
gguuucuuccaggcucuucacug

SEQ ID NO: 831674 - RNA, 24 nt, Human
gugauccaccugccucagcaucuc

SEQ ID NO: 831675 - RNA, 24 nt, Human
uagccaccgugcccggcccacacc

SEQ ID NO: 831676 - RNA, 19 nt, Human
uaggugauuuuuaaaguuc

SEQ ID NO: 831677 - RNA, 22 nt, Human
ucaaagugcugggauuacaggc

SEQ ID NO: 831678 - RNA, 24 nt, Human
ucaaagugcugggauuacaggcgu

SEQ ID NO: 831679 - RNA, 20 nt, Human
ucacuacagggagcugaagu

SEQ ID NO: 831680 - RNA, 23 nt, Human
ucccagaggccugacaggccugu

SEQ ID NO: 831681 - RNA, 23 nt, Human
uccucagcuccgccgggguuucu

SEQ ID NO: 831682 - RNA, 19 nt, Human
uccugggcggguggaggag

SEQ ID NO: 831683 - RNA, 24 nt, Human
ucucaaagugcugggauuacaggc

SEQ ID NO: 831684 - RNA, 22 nt, Human
ucucacuguguggcaugggagc

SEQ ID NO: 831685 - RNA, 24 nt, Human
ucuccguguuauccaggauggucu

SEQ ID NO: 831686 - RNA, 22 nt, Human
ugacaggccugucccacccucc

SEQ ID NO: 831687 - RNA, 21 nt, Human
ugacuugguucugggcugcaa

SEQ ID NO: 831688 - RNA, 19 nt, Human
ugcauaggaggccccuggg

SEQ ID NO: 831689 - RNA, 24 nt, Human
ugcuccucagcuccgccgggguuu

SEQ ID NO: 831690 - RNA, 24 nt, Human
ugcugggauuacaggcguuagcca

SEQ ID NO: 831691 - RNA, 21 nt, Human
uggcauuguuucggggguggg

SEQ ID NO: 831692 - RNA, 22 nt, Human
uggcauuguuucgggggugggg

SEQ ID NO: 831693 - RNA, 21 nt, Human
ugggauuacaggcguuagcca

SEQ ID NO: 831694 - RNA, 22 nt, Human
ugggauuacaggcguuagccac

SEQ ID NO: 831695 - RNA, 23 nt, Human
ugggauuacaggcguuagccacc

SEQ ID NO: 831696 - RNA, 23 nt, Human
ugggauuacaggcguuagccacc

SEQ ID NO: 831697 - RNA, 24 nt, Human
ugggauuacaggcguuagccaccg

SEQ ID NO: 831698 - RNA, 18 nt, Human
uggguuucuuccaggcuc

SEQ ID NO: 831699 - RNA, 19 nt, Human
uggugggcagugugccugg

SEQ ID NO: 831700 - RNA, 18 nt, Human
uuggucugggcacugggg

SEQ ID NO: 831701 - RNA, 18 nt, Human
uuguuucggggguggggu

SEQ ID NO: 831702 - RNA, 18 nt, Human
uuuuuuuuuuuuuuuuug

SEQ ID NO: 831703 - RNA, 20 nt, Human
uuuuuuuuuuuuuuuuugcu

SEQ ID NO: 831704 - RNA, 22 nt, Human
uuuuuuuuuuuuuuuuugcugg

SEQ ID NO: 831705 - RNA, 22 nt, Human
aaacacuguagaguuuuccaga

SEQ ID NO: 831706 - RNA, 18 nt, Human
aaacagacauugguuuua

SEQ ID NO: 831707 - RNA, 20 nt, Human
aacauaacagguuaaccaca

SEQ ID NO: 831708 - RNA, 18 nt, Human
aagcaacauaacagguua

SEQ ID NO: 831709 - RNA, 18 nt, Human
aagcagguucccuucuua

SEQ ID NO: 831710 - RNA, 18 nt, Human
aaguaguaaauaaaggcc

SEQ ID NO: 831711 - RNA, 24 nt, Human
aaguggccaacagggguccccaac

SEQ ID NO: 831712 - RNA, 23 nt, Human
acauugguuuuacaaaaaaagug

SEQ ID NO: 831713 - RNA, 22 nt, Human
acccugaggagaggcucaaggc

SEQ ID NO: 831714 - RNA, 20 nt, Human
accugguggugggcaggaug

SEQ ID NO: 831715 - RNA, 21 nt, Human
accuguccaaacauucagaag

SEQ ID NO: 831716 - RNA, 19 nt, Human
accugugccuacccugccu

SEQ ID NO: 831717 - RNA, 24 nt, Human
acuuuauuacacaaauaagacauu

SEQ ID NO: 831718 - RNA, 23 nt, Human
agaagaccuggcccaagcaccac

SEQ ID NO: 831719 - RNA, 26 nt, Human
agcaagaaugaccuauaggcuuucau

SEQ ID NO: 831720 - RNA, 18 nt, Human
aggaagcagguucccuuc

SEQ ID NO: 831721 - RNA, 24 nt, Human
aggcagaguguguugggugacccu

SEQ ID NO: 831722 - RNA, 22 nt, Human
caaaagcaacauaacagguuaa

SEQ ID NO: 831723 - RNA, 20 nt, Human
cacacucaccuaggcaaugg

SEQ ID NO: 831724 - RNA, 25 nt, Human
caccacguucugaguggugccugcu

SEQ ID NO: 831725 - RNA, 22 nt, Human
cacgggcagaugcggaagugcc

SEQ ID NO: 831726 - RNA, 18 nt, Human
caggauggcggacggggg

SEQ ID NO: 831727 - RNA, 19 nt, Human
cagugaaauagagcugcca

SEQ ID NO: 831728 - RNA, 21 nt, Human
caugguugccacuggggccuu

SEQ ID NO: 831729 - RNA, 18 nt, Human
cauucugacugccauuuc

SEQ ID NO: 831730 - RNA, 19 nt, Human
ccaaaagcaacauaacagg

SEQ ID NO: 831731 - RNA, 18 nt, Human
ccacgggcagaugcggaa

SEQ ID NO: 831732 - RNA, 21 nt, Human
ccacuuaccacaugguugcca

SEQ ID NO: 831733 - RNA, 18 nt, Human
ccagaguuuucucuuucc

SEQ ID NO: 831734 - RNA, 19 nt, Human
ccccugaaaacauaaauca

SEQ ID NO: 831735 - RNA, 21 nt, Human
ccccugaaaacauaaaucaug

SEQ ID NO: 831736 - RNA, 18 nt, Human
ccguguguguguuuuccc

SEQ ID NO: 831737 - RNA, 20 nt, Human
ccguguguguguuuuccccu

SEQ ID NO: 831738 - RNA, 20 nt, Human
ccugagcccuuuuguuuggg

SEQ ID NO: 831739 - RNA, 21 nt, Human
ccugccuguagaucccagagc

SEQ ID NO: 831740 - RNA, 21 nt, Human
ccuguaaaugagaaggccguu

SEQ ID NO: 831741 - RNA, 19 nt, Human
ccugugccuacccugccug

SEQ ID NO: 831742 - RNA, 22 nt, Human
ccuuuuguuugggguggaagag

SEQ ID NO: 831743 - RNA, 20 nt, Human
cgacaugaaagguauguaac

SEQ ID NO: 831744 - RNA, 22 nt, Human
cgccuagcacagggcugggcac

SEQ ID NO: 831745 - RNA, 20 nt, Human
cguguguguguuuuccccuu

SEQ ID NO: 831746 - RNA, 23 nt, Human
cucaccuaggcaaugggcacccu

SEQ ID NO: 831747 - RNA, 21 nt, Human
cuccugguggguucugguucu

SEQ ID NO: 831748 - RNA, 18 nt, Human
cucuccccuauaagggau

SEQ ID NO: 831749 - RNA, 19 nt, Human
cugcaccugugccuacccu

SEQ ID NO: 831750 - RNA, 22 nt, Human
gaagggagaggaagcagguucc

SEQ ID NO: 831751 - RNA, 22 nt, Human
gagaggcucaaggcagagugug

SEQ ID NO: 831752 - RNA, 19 nt, Human
gaggggcagcuguggggcg

SEQ ID NO: 831753 - RNA, 21 nt, Human
gcaggaagguggacuugggcu

SEQ ID NO: 831754 - RNA, 18 nt, Human
gcccacgggcagaugcgg

SEQ ID NO: 831755 - RNA, 18 nt, Human
gccuagcacagggcuggg

SEQ ID NO: 831756 - RNA, 25 nt, Human
gcuauguuucuuacauauaugcuga

SEQ ID NO: 831757 - RNA, 23 nt, Human
ggacaaaugggcauccccugaaa

SEQ ID NO: 831758 - RNA, 20 nt, Human
ggauaauuagguggggguag

SEQ ID NO: 831759 - RNA, 23 nt, Human
ggcaggauggcggacgggggugg

SEQ ID NO: 831760 - RNA, 18 nt, Human
ggcaggccuccaucucug

SEQ ID NO: 831761 - RNA, 23 nt, Human
ggccaacagggguccccaacucu

SEQ ID NO: 831762 - RNA, 19 nt, Human
gggacaucccacaaacacu

SEQ ID NO: 831763 - RNA, 19 nt, Human
gguucugguucucagcagg

SEQ ID NO: 831764 - RNA, 20 nt, Human
gguugccacuggggccuuga

SEQ ID NO: 831765 - RNA, 20 nt, Human
guagaguuuuccagacaaaa

SEQ ID NO: 831766 - RNA, 21 nt, Human
gucuauccccgcugccuccua

SEQ ID NO: 831767 - RNA, 23 nt, Human
guggugcuccugguggguucugg

SEQ ID NO: 831768 - RNA, 21 nt, Human
uaaaacaugcugauuagcaac

SEQ ID NO: 831769 - RNA, 25 nt, Human
uaaauaaaggccaauguuguaauga

SEQ ID NO: 831770 - RNA, 24 nt, Human
uaacaaaacagacauugguuuuac

SEQ ID NO: 831771 - RNA, 18 nt, Human
uaaccagacagauggaaa

SEQ ID NO: 831772 - RNA, 18 nt, Human
uaccaucgcugcuauguu

SEQ ID NO: 831773 - RNA, 20 nt, Human
uaccaugaacuugcuuuccc

SEQ ID NO: 831774 - RNA, 18 nt, Human
uagaauuacaggauaagc

SEQ ID NO: 831775 - RNA, 23 nt, Human
uagaauuacaggauaagcuuggg

SEQ ID NO: 831776 - RNA, 26 nt, Human
uccaaaagcaacauaacagguuaacc

SEQ ID NO: 831777 - RNA, 22 nt, Human
uccagacucagugaaauagagc

SEQ ID NO: 831778 - RNA, 19 nt, Human
ucccagagcaagaaugacc

SEQ ID NO: 831779 - RNA, 21 nt, Human
uccccaacucuaaccugucca

SEQ ID NO: 831780 - RNA, 21 nt, Human
uccccgcugccuccuagucug

SEQ ID NO: 831781 - RNA, 27 nt, Human
uccccugaaaacauaaaucauggucgu

SEQ ID NO: 831782 - RNA, 22 nt, Human
ucccugaccccagaguuuucuc

SEQ ID NO: 831783 - RNA, 24 nt, Human
ucccugaccccagaguuuucucuu

SEQ ID NO: 831784 - RNA, 19 nt, Human
ucccuucuuaggcugcacc

SEQ ID NO: 831785 - RNA, 22 nt, Human
uccugagcuuggcacacucacc

SEQ ID NO: 831786 - RNA, 20 nt, Human
ucgguggcggggccgcccuc

SEQ ID NO: 831787 - RNA, 20 nt, Human
ucguguguagccugagcccu

SEQ ID NO: 831788 - RNA, 26 nt, Human
ucugaaaccuuauccagacucaguga

SEQ ID NO: 831789 - RNA, 20 nt, Human
ucuguggugcuccugguggg

SEQ ID NO: 831790 - RNA, 20 nt, Human
ucuguucucaggggugggug

SEQ ID NO: 831791 - RNA, 24 nt, Human
ucuuaggcugcaccugugccuacc

SEQ ID NO: 831792 - RNA, 22 nt, Human
ucuucugguccaauaugucacc

SEQ ID NO: 831793 - RNA, 18 nt, Human
ucuuuggaagggagagga

SEQ ID NO: 831794 - RNA, 19 nt, Human
ugaaaacauaaaucauggu

SEQ ID NO: 831795 - RNA, 21 nt, Human
ugacccuggguagggcuuggu

SEQ ID NO: 831796 - RNA, 22 nt, Human
ugagaagaccuggcccaagcac

SEQ ID NO: 831797 - RNA, 23 nt, Human
ugagaagaccuggcccaagcacc

SEQ ID NO: 831798 - RNA, 18 nt, Human
ugaguggugccugcucuu

SEQ ID NO: 831799 - RNA, 18 nt, Human
ugaguggugccugcucuu

SEQ ID NO: 831800 - RNA, 20 nt, Human
ugaucaggagcaaaaaucaa

SEQ ID NO: 831801 - RNA, 21 nt, Human
ugcuauguuucuuacauauaa

SEQ ID NO: 831802 - RNA, 19 nt, Human
uggaagggagaggaagcag

SEQ ID NO: 831803 - RNA, 22 nt, Human
uggaauccugagcuuggcacac

SEQ ID NO: 831804 - RNA, 23 nt, Human
uggaauccugagcuuggcacacu

SEQ ID NO: 831805 - RNA, 18 nt, Human
uggcacacucaccuaggc

SEQ ID NO: 831806 - RNA, 20 nt, Human
ugggcccugguugcuccugu

SEQ ID NO: 831807 - RNA, 18 nt, Human
ugggugacccuggguagg

SEQ ID NO: 831808 - RNA, 19 nt, Human
ugucuuagagucuccuucc

SEQ ID NO: 831809 - RNA, 23 nt, Human
ugucuuagagucuccuuccaaaa

SEQ ID NO: 831810 - RNA, 18 nt, Human
ugucuuuggaagggagag

SEQ ID NO: 831811 - RNA, 23 nt, Human
ugugucugaccucuguucucagg

SEQ ID NO: 831812 - RNA, 21 nt, Human
uguguguguuuuccccuuuuu

SEQ ID NO: 831813 - RNA, 23 nt, Human
uguguguguuuuccccuuuuuuu

SEQ ID NO: 831814 - RNA, 18 nt, Human
uuccagacaaaagcaaca

SEQ ID NO: 831815 - RNA, 23 nt, Human
uucccugucuuagagucuccuuc

SEQ ID NO: 831816 - RNA, 21 nt, Human
uucccuucuuaggcugcaccu

SEQ ID NO: 831817 - RNA, 21 nt, Human
uucugaguggugccugcucuu

SEQ ID NO: 831818 - RNA, 24 nt, Human
uuggccacuuaccacaugguugcc

SEQ ID NO: 831819 - RNA, 20 nt, Human
uugggcccugguugcuccug

SEQ ID NO: 831820 - RNA, 21 nt, Human
uuuuuuuuccguguguguguu

SEQ ID NO: 831821 - RNA, 25 nt, Human
uuuuuuuuuuuuuuuuuuucugggg

SEQ ID NO: 831822 - RNA, 23 nt, Human
accauaaagaacacaaguuucgu

SEQ ID NO: 831823 - RNA, 18 nt, Human
auuacugccagguugcuc

SEQ ID NO: 831824 - RNA, 22 nt, Human
caccauaaagaacacaaguuuc

SEQ ID NO: 831825 - RNA, 24 nt, Human
cugccagguugcucugguuuugua

SEQ ID NO: 831826 - RNA, 20 nt, Human
gaucaaacuuuuccccuucu

SEQ ID NO: 831827 - RNA, 19 nt, Human
ggcuuaauaaauuuuuuaa

SEQ ID NO: 831828 - RNA, 21 nt, Human
uccgaucaaacuuuuccccuu

SEQ ID NO: 831829 - RNA, 24 nt, Human
ucuucacugcaguggauuuccgau

SEQ ID NO: 831830 - RNA, 19 nt, Human
ugcucugguuuuguacaug

SEQ ID NO: 831831 - RNA, 24 nt, Human
aaaagccaaaugaauuacuguaau

SEQ ID NO: 831832 - RNA, 18 nt, Human
aaagaagauacacuaaaa

SEQ ID NO: 831833 - RNA, 20 nt, Human
aaagugcugggauuacaggc

SEQ ID NO: 831834 - RNA, 22 nt, Human
aaagugcugggauuacaggcgu

SEQ ID NO: 831835 - RNA, 24 nt, Human
aaagugcugggauuacaggcguga

SEQ ID NO: 831836 - RNA, 19 nt, Human
aagugcugggauuacaggc

SEQ ID NO: 831837 - RNA, 19 nt, Human
aagugcugggauuacaggc

SEQ ID NO: 831838 - RNA, 26 nt, Human
aagugcugggauuacaggcgugagcc

SEQ ID NO: 831839 - RNA, 20 nt, Human
aauuucugugaucuugaagg

SEQ ID NO: 831840 - RNA, 20 nt, Human
acaaagaagauacacuaaaa

SEQ ID NO: 831841 - RNA, 24 nt, Human
acaggauuucaccauguuggccag

SEQ ID NO: 831842 - RNA, 24 nt, Human
accauguuggccaggcuggucucg

SEQ ID NO: 831843 - RNA, 25 nt, Human
acccgccuuggccuccuaaagugcu

SEQ ID NO: 831844 - RNA, 18 nt, Human
agccucccgaguagcugg

SEQ ID NO: 831845 - RNA, 23 nt, Human
aggauuucaccauguuggccagg

SEQ ID NO: 831846 - RNA, 18 nt, Human
aggcauucuggcaccacc

SEQ ID NO: 831847 - RNA, 24 nt, Human
aggugauccacccgccuuggccuc

SEQ ID NO: 831848 - RNA, 21 nt, Human
agguucaagugauucuccugc

SEQ ID NO: 831849 - RNA, 22 nt, Human
agguucaagugauucuccugcc

SEQ ID NO: 831850 - RNA, 18 nt, Human
aguagcugggauuacagg

SEQ ID NO: 831851 - RNA, 19 nt, Human
auuacaucacagcaagcaa

SEQ ID NO: 831852 - RNA, 24 nt, Human
auuuuuguguuuuuaguggagaca

SEQ ID NO: 831853 - RNA, 21 nt, Human
caaagaagauacacuaaaagc

SEQ ID NO: 831854 - RNA, 24 nt, Human
caaagaagauacacuaaaagccaa

SEQ ID NO: 831855 - RNA, 22 nt, Human
caagcaacuguuuaauugggac

SEQ ID NO: 831856 - RNA, 20 nt, Human
caagugauucuccugccuua

SEQ ID NO: 831857 - RNA, 22 nt, Human
caagugauucuccugccuuagc

SEQ ID NO: 831858 - RNA, 21 nt, Human
caccauguuggccaggcuggu

SEQ ID NO: 831859 - RNA, 24 nt, Human
caccauguuggccaggcuggucuc

SEQ ID NO: 831860 - RNA, 27 nt, Human
caccauguuggccaggcuggucucgaa

SEQ ID NO: 831861 - RNA, 18 nt, Human
cacccacuaccacgccug

SEQ ID NO: 831862 - RNA, 25 nt, Human
cacccaggcuggagggcaauggagc

SEQ ID NO: 831863 - RNA, 24 nt, Human
cacccgccuuggccuccuaaagug

SEQ ID NO: 831864 - RNA, 24 nt, Human
caggauuucaccauguuggccagg

SEQ ID NO: 831865 - RNA, 24 nt, Human
cauguuggccaggcuggucucgaa

SEQ ID NO: 831866 - RNA, 23 nt, Human
cccagguucaagugauucuccuc

SEQ ID NO: 831867 - RNA, 23 nt, Human
cccagguucaagugauucuccug

SEQ ID NO: 831868 - RNA, 23 nt, Human
cccgaguagcugggauuacaggc

SEQ ID NO: 831869 - RNA, 24 nt, Human
cccgaguagcugggauuacaggca

SEQ ID NO: 831870 - RNA, 23 nt, Human
ccgaguagcugggauuacaggca

SEQ ID NO: 831871 - RNA, 23 nt, Human
ccuaaagugcugggauuacaggc

SEQ ID NO: 831872 - RNA, 24 nt, Human
ccucccagguucaagugauucucc

SEQ ID NO: 831873 - RNA, 22 nt, Human
ccugaccucaggugauccaccc

SEQ ID NO: 831874 - RNA, 23 nt, Human
ccugaccucaggugauccacccg

SEQ ID NO: 831875 - RNA, 23 nt, Human
ccugccuuagccucccgaguagc

SEQ ID NO: 831876 - RNA, 24 nt, Human
ccugccuuagccucccgaguagcu

SEQ ID NO: 831877 - RNA, 22 nt, Human
cuaaagugcugggauuacaggc

SEQ ID NO: 831878 - RNA, 24 nt, Human
cuaaagugcugggauuacaggcgu

SEQ ID NO: 831879 - RNA, 23 nt, Human
cucacugcaaccucccccuccca

SEQ ID NO: 831880 - RNA, 24 nt, Human
cucacugcaaccucccccucccag

SEQ ID NO: 831881 - RNA, 24 nt, Human
cucaggugauccacccgccuuggc

SEQ ID NO: 831882 - RNA, 18 nt, Human
cucccagguucaagugau

SEQ ID NO: 831883 - RNA, 20 nt, Human
cucuugucacccaggcugga

SEQ ID NO: 831884 - RNA, 23 nt, Human
cugcaaccucccccucccagguu

SEQ ID NO: 831885 - RNA, 24 nt, Human
cugcaaccucccccucccagguuc

SEQ ID NO: 831886 - RNA, 24 nt, Human
cuuagccucccgaguagcugggau

SEQ ID NO: 831887 - RNA, 20 nt, Human
cuuuuuuuuccuuuuuauuu

SEQ ID NO: 831888 - RNA, 24 nt, Human
gaccucaggugauccacccgccuu

SEQ ID NO: 831889 - RNA, 25 nt, Human
gaguagcugggauuacaggcaccca

SEQ ID NO: 831890 - RNA, 18 nt, Human
gauuacaggcgugagcca

SEQ ID NO: 831891 - RNA, 21 nt, Human
gauuacaggcgugagccacua

SEQ ID NO: 831892 - RNA, 24 nt, Human
gauuacaggcgugagccacuaugc

SEQ ID NO: 831893 - RNA, 22 nt, Human
gcaaccucccccucccagguuc

SEQ ID NO: 831894 - RNA, 22 nt, Human
gccuuggccuccuaaagugcug

SEQ ID NO: 831895 - RNA, 24 nt, Human
gcucacugcaaccucccccuccca

SEQ ID NO: 831896 - RNA, 20 nt, Human
gcucuugucacccaggcugg

SEQ ID NO: 831897 - RNA, 21 nt, Human
gcucuugucacccaggcugga

SEQ ID NO: 831898 - RNA, 23 nt, Human
gcuggucucgaacuccugaccuc

SEQ ID NO: 831899 - RNA, 23 nt, Human
ggcacauccacugcaguccaggc

SEQ ID NO: 831900 - RNA, 24 nt, Human
ggcuggucucgaacuccugaccuc

SEQ ID NO: 831901 - RNA, 20 nt, Human
gggcaauggagcgaucuugg

SEQ ID NO: 831902 - RNA, 19 nt, Human
ggucucgaacuccugaccu

SEQ ID NO: 831903 - RNA, 24 nt, Human
gugauccacccgccuuggccuccu

SEQ ID NO: 831904 - RNA, 24 nt, Human
gugauucuccugccuuagccuccc

SEQ ID NO: 831905 - RNA, 24 nt, Human
guuuauugacuuuuuuuuccuuuu

SEQ ID NO: 831906 - RNA, 24 nt, Human
uaaagugcugggauuacaggcgug

SEQ ID NO: 831907 - RNA, 24 nt, Human
uaauuuuuguguuuuuaguggaga

SEQ ID NO: 831908 - RNA, 22 nt, Human
uacaggcgugagccacuaugcc

SEQ ID NO: 831909 - RNA, 23 nt, Human
uacaggcgugagccacuaugccu

SEQ ID NO: 831910 - RNA, 24 nt, Human
uaguggagacaggauuucaccaug

SEQ ID NO: 831911 - RNA, 20 nt, Human
uauuuauuugagauggaguu

SEQ ID NO: 831912 - RNA, 19 nt, Human
ucaagugauucuccugccu

SEQ ID NO: 831913 - RNA, 18 nt, Human
ucacugcaaccucccccc

SEQ ID NO: 831914 - RNA, 18 nt, Human
ucacugcaaccucccccu

SEQ ID NO: 831915 - RNA, 24 nt, Human
ucacugcaaccucccccucccagg

SEQ ID NO: 831916 - RNA, 19 nt, Human
ucccagguucaagugauuc

SEQ ID NO: 831917 - RNA, 21 nt, Human
ucccagguucaagugauucuc

SEQ ID NO: 831918 - RNA, 24 nt, Human
ucccagguucaagugauucuccug

SEQ ID NO: 831919 - RNA, 24 nt, Human
ucccgaguagcugggauuacaggc

SEQ ID NO: 831920 - RNA, 24 nt, Human
uccuaaagugcugggauuacaggc

SEQ ID NO: 831921 - RNA, 24 nt, Human
ucuccugccuuagccucccgagua

SEQ ID NO: 831922 - RNA, 23 nt, Human
ucucgaacuccugaccucaggug

SEQ ID NO: 831923 - RNA, 19 nt, Human
ugaaggucuuguugaaguu

SEQ ID NO: 831924 - RNA, 21 nt, Human
ugaccucaggugauccacccg

SEQ ID NO: 831925 - RNA, 24 nt, Human
ugaccucaggugauccacccgccu

SEQ ID NO: 831926 - RNA, 20 nt, Human
ugauucuccugccuuagccu

SEQ ID NO: 831927 - RNA, 20 nt, Human
ugcagggguugagggaucgc

SEQ ID NO: 831928 - RNA, 23 nt, Human
ugcaguccaggcauucuggcacc

SEQ ID NO: 831929 - RNA, 22 nt, Human
ugccuggcuauugacauuuuuu

SEQ ID NO: 831930 - RNA, 24 nt, Human
ugccuuagccucccgaguagcugg

SEQ ID NO: 831931 - RNA, 24 nt, Human
ugcugggauuacaggcgugagcca

SEQ ID NO: 831932 - RNA, 22 nt, Human
uggagacaggauuucaccaugu

SEQ ID NO: 831933 - RNA, 20 nt, Human
uggaguuuugcucuugucac

SEQ ID NO: 831934 - RNA, 24 nt, Human
uggccaggcuggucucgaacuccu

SEQ ID NO: 831935 - RNA, 19 nt, Human
ugggauuacaggcacccac

SEQ ID NO: 831936 - RNA, 19 nt, Human
ugggauuacaggcacccac

SEQ ID NO: 831937 - RNA, 20 nt, Human
ugggauuacaggcacccacu

SEQ ID NO: 831938 - RNA, 21 nt, Human
ugggauuacaggcacccacua

SEQ ID NO: 831939 - RNA, 24 nt, Human
ugggauuacaggcacccacuacca

SEQ ID NO: 831940 - RNA, 18 nt, Human
ugggauuacaggcgugag

SEQ ID NO: 831941 - RNA, 21 nt, Human
ugggauuacaggcgugagcca

SEQ ID NO: 831942 - RNA, 22 nt, Human
ugggauuacaggcgugagccac

SEQ ID NO: 831943 - RNA, 22 nt, Human
ugggauuacaggcgugagccac

SEQ ID NO: 831944 - RNA, 22 nt, Human
ugggauuacaggcgugagccac

SEQ ID NO: 831945 - RNA, 23 nt, Human
ugggauuacaggcgugagccacu

SEQ ID NO: 831946 - RNA, 23 nt, Human
ugggauuacaggcgugagccacu

SEQ ID NO: 831947 - RNA, 24 nt, Human
ugggauuacaggcgugagccacua

SEQ ID NO: 831948 - RNA, 26 nt, Human
uuacaggcacccacuaccacgccuga

SEQ ID NO: 831949 - RNA, 24 nt, Human
uuaguggagacaggauuucaccau

SEQ ID NO: 831950 - RNA, 23 nt, Human
uuauugacuuuuuuuuccuuuuu

SEQ ID NO: 831951 - RNA, 23 nt, Human
uucaagugauucuccugccuuag

SEQ ID NO: 831952 - RNA, 24 nt, Human
uucaagugauucuccugccuuagc

SEQ ID NO: 831953 - RNA, 20 nt, Human
uuccuuuuuauuuauuugag

SEQ ID NO: 831954 - RNA, 18 nt, Human
uugaaggucuuguugaag

SEQ ID NO: 831955 - RNA, 22 nt, Human
uugcucuugucacccaggcugg

SEQ ID NO: 831956 - RNA, 23 nt, Human
uugcucuugucacccaggcugga

SEQ ID NO: 831957 - RNA, 19 nt, Human
uugggacaaagaagauaca

SEQ ID NO: 831958 - RNA, 21 nt, Human
uuguacaguuuauugacuuuu

SEQ ID NO: 831959 - RNA, 19 nt, Human
uuuaaaaauuucugugauc

SEQ ID NO: 831960 - RNA, 24 nt, Human
uuucaccauguuggccaggcuggu

SEQ ID NO: 831961 - RNA, 24 nt, Human
uuugcucuugucacccaggcugga

SEQ ID NO: 831962 - RNA, 20 nt, Human
uuuuaagcaaagaggugggg

SEQ ID NO: 831963 - RNA, 24 nt, Human
uuuugcucuugucacccaggcugg

SEQ ID NO: 831964 - RNA, 20 nt, Human
uuuuuguguuuuuaguggag

SEQ ID NO: 831965 - RNA, 23 nt, Human
aaaaaaaaaaaaagaauacagga

SEQ ID NO: 831966 - RNA, 21 nt, Human
aaaaaaaaaaagaauacagga

SEQ ID NO: 831967 - RNA, 19 nt, Human
aacacagugagaccccccu

SEQ ID NO: 831968 - RNA, 20 nt, Human
aacacagugagaccccccuc

SEQ ID NO: 831969 - RNA, 23 nt, Human
acggagcaagacccugucuaaaa

SEQ ID NO: 831970 - RNA, 18 nt, Human
acugcacuccaaccuggg

SEQ ID NO: 831971 - RNA, 22 nt, Human
acugcacuccaaccugggcaac

SEQ ID NO: 831972 - RNA, 21 nt, Human
agaaaaauaaauaucugaaga

SEQ ID NO: 831973 - RNA, 24 nt, Human
agcacuuugggaggcggaggcagg

SEQ ID NO: 831974 - RNA, 20 nt, Human
agccaggugugguggugcac

SEQ ID NO: 831975 - RNA, 22 nt, Human
agccugggcaacacagugagac

SEQ ID NO: 831976 - RNA, 24 nt, Human
agccugggcaacacagugagaccc

SEQ ID NO: 831977 - RNA, 24 nt, Human
agcuacuugagaggcugagguggg

SEQ ID NO: 831978 - RNA, 24 nt, Human
aggagucggagguuacagugagcc

SEQ ID NO: 831979 - RNA, 20 nt, Human
aggaguggggugggguagug

SEQ ID NO: 831980 - RNA, 21 nt, Human
aggaguggggugggguagugg

SEQ ID NO: 831981 - RNA, 24 nt, Human
aggaguggggugggguaguggggc

SEQ ID NO: 831982 - RNA, 27 nt, Human
aggaguggggugggguaguggggcugg

SEQ ID NO: 831983 - RNA, 23 nt, Human
aggaguucgagaccagccugggc

SEQ ID NO: 831984 - RNA, 24 nt, Human
aggcugaggugggagggucacuug

SEQ ID NO: 831985 - RNA, 22 nt, Human
aggcuggggucaccgccccauu

SEQ ID NO: 831986 - RNA, 23 nt, Human
aggugggagggucacuugaaccc

SEQ ID NO: 831987 - RNA, 24 nt, Human
aguggcucaugccugcaaucccag

SEQ ID NO: 831988 - RNA, 23 nt, Human
aucugaagaauaagaauacaggg

SEQ ID NO: 831989 - RNA, 19 nt, Human
augccugcaaucccagcac

SEQ ID NO: 831990 - RNA, 20 nt, Human
caccuguagucccagcuacu

SEQ ID NO: 831991 - RNA, 22 nt, Human
caccuguagucccagcuacuug

SEQ ID NO: 831992 - RNA, 23 nt, Human
cacuccaaccugggcaacggagc

SEQ ID NO: 831993 - RNA, 23 nt, Human
cacugcacuccaaccugggcaac

SEQ ID NO: 831994 - RNA, 24 nt, Human
cacugcacuccaaccugggcaacg

SEQ ID NO: 831995 - RNA, 26 nt, Human
cacugcacuccaaccugggcaacgga

SEQ ID NO: 831996 - RNA, 18 nt, Human
cagcacuuugggaggcgg

SEQ ID NO: 831997 - RNA, 24 nt, Human
cagcacuuugggaggcggaggcag

SEQ ID NO: 831998 - RNA, 24 nt, Human
cagcuacuugagaggcugaggugg

SEQ ID NO: 831999 - RNA, 23 nt, Human
caggugugguggugcaccuguag

SEQ ID NO: 832000 - RNA, 19 nt, Human
cagugagaccccccucuuu

SEQ ID NO: 832001 - RNA, 20 nt, Human
caugccugcaaucccagcac

SEQ ID NO: 832002 - RNA, 24 nt, Human
caugccugcaaucccagcacuuug

SEQ ID NO: 832003 - RNA, 23 nt, Human
ccacugcacuccaaccugggcaa

SEQ ID NO: 832004 - RNA, 24 nt, Human
ccacugcacuccaaccugggcaac

SEQ ID NO: 832005 - RNA, 25 nt, Human
ccaggaguucgagaccagccugggc

SEQ ID NO: 832006 - RNA, 19 nt, Human
ccgccccauuggggccucu

SEQ ID NO: 832007 - RNA, 23 nt, Human
ccgcuugagcccaggaguucgag

SEQ ID NO: 832008 - RNA, 22 nt, Human
ccugccccguccccacugggag

SEQ ID NO: 832009 - RNA, 22 nt, Human
ccuguagucccagcuacuugag

SEQ ID NO: 832010 - RNA, 26 nt, Human
ccugucuaaaaaaaaaaaaaaaagaa

SEQ ID NO: 832011 - RNA, 18 nt, Human
ccuuagccuggaucccag

SEQ ID NO: 832012 - RNA, 23 nt, Human
cgcugcgucagcggaacccgcgc

SEQ ID NO: 832013 - RNA, 24 nt, Human
cucaugccugcaaucccagcacuu

SEQ ID NO: 832014 - RNA, 18 nt, Human
cugcagcugugcucuucc

SEQ ID NO: 832015 - RNA, 21 nt, Human
cugcgccccgggcucugucgg

SEQ ID NO: 832016 - RNA, 25 nt, Human
cugucuaaaaaaaaaaaaaaaagaa

SEQ ID NO: 832017 - RNA, 20 nt, Human
cuuuacaaaaaauacaaaaa

SEQ ID NO: 832018 - RNA, 20 nt, Human
gagcaagacccugucuaaaa

SEQ ID NO: 832019 - RNA, 28 nt, Human
gagcaagacccugucuaaaaaaaaaaaa

SEQ ID NO: 832020 - RNA, 24 nt, Human
gccacugcacuccaaccugggcaa

SEQ ID NO: 832021 - RNA, 22 nt, Human
gcccaggaguucgagaccagcc

SEQ ID NO: 832022 - RNA, 22 nt, Human
gccuggaucccaggccggaccc

SEQ ID NO: 832023 - RNA, 20 nt, Human
ggagguuacagugagcccug

SEQ ID NO: 832024 - RNA, 24 nt, Human
ggagguuacagugagcccugaugg

SEQ ID NO: 832025 - RNA, 24 nt, Human
ggccacugcacuccaaccugggca

SEQ ID NO: 832026 - RNA, 19 nt, Human
ggcugggugcaguggcuca

SEQ ID NO: 832027 - RNA, 23 nt, Human
ggcugggugcaguggcucaugcc

SEQ ID NO: 832028 - RNA, 18 nt, Human
ggggugggguaguggggc

SEQ ID NO: 832029 - RNA, 20 nt, Human
ggggugggguaguggggcug

SEQ ID NO: 832030 - RNA, 19 nt, Human
ggguaguggggcuggagac

SEQ ID NO: 832031 - RNA, 21 nt, Human
gggugggguaguggggcugga

SEQ ID NO: 832032 - RNA, 22 nt, Human
gggugggguaguggggcuggag

SEQ ID NO: 832033 - RNA, 23 nt, Human
ggugcaguggcucaugccugcaa

SEQ ID NO: 832034 - RNA, 24 nt, Human
gguggaccgcuugagcccaggagu

SEQ ID NO: 832035 - RNA, 22 nt, Human
guggcuccugggcccuggugaa

SEQ ID NO: 832036 - RNA, 24 nt, Human
gugguggugcaccuguagucccag

SEQ ID NO: 832037 - RNA, 20 nt, Human
gugugggcuggggcccaggc

SEQ ID NO: 832038 - RNA, 18 nt, Human
uacaggaguggggugggg

SEQ ID NO: 832039 - RNA, 26 nt, Human
uacagggcugggugcaguggcucaug

SEQ ID NO: 832040 - RNA, 24 nt, Human
uagccuggaucccaggccggaccc

SEQ ID NO: 832041 - RNA, 26 nt, Human
uaucugaagaauaagaauacagggcu

SEQ ID NO: 832042 - RNA, 22 nt, Human
ucaugccugcaaucccagcacu

SEQ ID NO: 832043 - RNA, 23 nt, Human
ucuaaaaaaaaaaaaaaaagaau

SEQ ID NO: 832044 - RNA, 23 nt, Human
ugaaaagaaaaauaaauaucuga

SEQ ID NO: 832045 - RNA, 22 nt, Human
ugaagaauaagaauacagggcu

SEQ ID NO: 832046 - RNA, 20 nt, Human
ugagaccccccucuuuacaa

SEQ ID NO: 832047 - RNA, 19 nt, Human
ugagaggcugaggugggag

SEQ ID NO: 832048 - RNA, 24 nt, Human
ugagaggcugaggugggaggguca

SEQ ID NO: 832049 - RNA, 23 nt, Human
ugagcccaggaguucgagaccag

SEQ ID NO: 832050 - RNA, 18 nt, Human
ugaggugggagggucacu

SEQ ID NO: 832051 - RNA, 24 nt, Human
ugcaccuguagucccagcuacuug

SEQ ID NO: 832052 - RNA, 23 nt, Human
ugccugcaaucccagcacuuugg

SEQ ID NO: 832053 - RNA, 24 nt, Human
ugccugcaaucccagcacuuuggg

SEQ ID NO: 832054 - RNA, 24 nt, Human
uggaccgcuugagcccaggaguuc

SEQ ID NO: 832055 - RNA, 21 nt, Human
uggagacuugagguguccugg

SEQ ID NO: 832056 - RNA, 20 nt, Human
uggaucccaggccggacccc

SEQ ID NO: 832057 - RNA, 19 nt, Human
uggcgcccgccugcgcccc

SEQ ID NO: 832058 - RNA, 22 nt, Human
uggcucaugccugcaaucccag

SEQ ID NO: 832059 - RNA, 24 nt, Human
uggcucaugccugcaaucccagca

SEQ ID NO: 832060 - RNA, 20 nt, Human
ugggaucugcagcugugcuc

SEQ ID NO: 832061 - RNA, 24 nt, Human
ugggcaacggagcaagacccuguc

SEQ ID NO: 832062 - RNA, 20 nt, Human
ugggcuggggcccaggcugg

SEQ ID NO: 832063 - RNA, 18 nt, Human
ugggggcgccagaggccu

SEQ ID NO: 832064 - RNA, 19 nt, Human
ugggguaguggggcuggag

SEQ ID NO: 832065 - RNA, 19 nt, Human
uggggugggguaguggggc

SEQ ID NO: 832066 - RNA, 21 nt, Human
uggggugggguaguggggcug

SEQ ID NO: 832067 - RNA, 22 nt, Human
ugguggugcaccuguaguccca

SEQ ID NO: 832068 - RNA, 23 nt, Human
ugguggugcaccuguagucccag

SEQ ID NO: 832069 - RNA, 21 nt, Human
ugugggcuggggcccaggcug

SEQ ID NO: 832070 - RNA, 21 nt, Human
uuagccaggugugguggugca

SEQ ID NO: 832071 - RNA, 25 nt, Human
uugagaggcugaggugggaggguca

SEQ ID NO: 832072 - RNA, 22 nt, Human
uugagcccaggaguucgagacc

SEQ ID NO: 832073 - RNA, 23 nt, Human
aaaagugcaaauuauacccagaa

SEQ ID NO: 832074 - RNA, 18 nt, Human
aaaauaagaggaggagga

SEQ ID NO: 832075 - RNA, 24 nt, Human
aaacagcaaccugauacgaaaaau

SEQ ID NO: 832076 - RNA, 19 nt, Human
aaaccuaaaaggaaaagcc

SEQ ID NO: 832077 - RNA, 22 nt, Human
aaauaacuuuguacauaaaagu

SEQ ID NO: 832078 - RNA, 19 nt, Human
aaauagccucuguaaaaga

SEQ ID NO: 832079 - RNA, 23 nt, Human
aaaugaaccuuuauuaaagacac

SEQ ID NO: 832080 - RNA, 22 nt, Human
aacuauuuccccacccccucca

SEQ ID NO: 832081 - RNA, 23 nt, Human
aacuuccuccuuucuguccccca

SEQ ID NO: 832082 - RNA, 20 nt, Human
aagcagcaaauucacauauu

SEQ ID NO: 832083 - RNA, 23 nt, Human
aaggccuuccauccuucccaccc

SEQ ID NO: 832084 - RNA, 21 nt, Human
acagguaccaacaccagcagc

SEQ ID NO: 832085 - RNA, 18 nt, Human
acccagaacccaggucaa

SEQ ID NO: 832086 - RNA, 21 nt, Human
accccgcgcccauccgggccg

SEQ ID NO: 832087 - RNA, 21 nt, Human
accugaagcuccuuccggcgc

SEQ ID NO: 832088 - RNA, 21 nt, Human
accuuuugcuugugauggauu

SEQ ID NO: 832089 - RNA, 22 nt, Human
agacagggaagccuguugcagg

SEQ ID NO: 832090 - RNA, 21 nt, Human
agcucggugccggcaggcagc

SEQ ID NO: 832091 - RNA, 21 nt, Human
aggaauggcauggacaggccc

SEQ ID NO: 832092 - RNA, 18 nt, Human
auacuccacaugggaguu

SEQ ID NO: 832093 - RNA, 21 nt, Human
auccacagguaccaacaccag

SEQ ID NO: 832094 - RNA, 23 nt, Human
augcacuaaagauuaaaauagcc

SEQ ID NO: 832095 - RNA, 24 nt, Human
auuaaacagcaaccugauacgaaa

SEQ ID NO: 832096 - RNA, 23 nt, Human
caauguacacuguaccaaaauuu

SEQ ID NO: 832097 - RNA, 22 nt, Human
caccaaaaacuccugugaacaa

SEQ ID NO: 832098 - RNA, 24 nt, Human
caccaaaaacuccugugaacaaag

SEQ ID NO: 832099 - RNA, 24 nt, Human
caccagcagccuuuaccuuaauuu

SEQ ID NO: 832100 - RNA, 24 nt, Human
caccccuggcucuacagacaggga

SEQ ID NO: 832101 - RNA, 27 nt, Human
caccccuggcucuacagacagggaagc

SEQ ID NO: 832102 - RNA, 22 nt, Human
caccgcacagcagccuaggggu

SEQ ID NO: 832103 - RNA, 25 nt, Human
cacgccgagugccgcuaccgacacc

SEQ ID NO: 832104 - RNA, 18 nt, Human
cagaacccaggucaaggg

SEQ ID NO: 832105 - RNA, 22 nt, Human
cagaacccaggucaagggcugu

SEQ ID NO: 832106 - RNA, 24 nt, Human
cagaacccaggucaagggcugucc

SEQ ID NO: 832107 - RNA, 23 nt, Human
cagaacuauuuccccacccccuc

SEQ ID NO: 832108 - RNA, 24 nt, Human
cagcaaauucacauauuuugugga

SEQ ID NO: 832109 - RNA, 19 nt, Human
cagguaccaacaccagcag

SEQ ID NO: 832110 - RNA, 19 nt, Human
cauccuucccaccccgcac

SEQ ID NO: 832111 - RNA, 21 nt, Human
ccaacaccagcagccuuuacc

SEQ ID NO: 832112 - RNA, 22 nt, Human
ccagccugcgcucuucguccgc

SEQ ID NO: 832113 - RNA, 20 nt, Human
cccaccccgcaccaaaaacu

SEQ ID NO: 832114 - RNA, 22 nt, Human
cccaccccgcaccaaaaacucc

SEQ ID NO: 832115 - RNA, 20 nt, Human
ccccacccccuccaaaauua

SEQ ID NO: 832116 - RNA, 22 nt, Human
cccccaaggccaauguaauacu

SEQ ID NO: 832117 - RNA, 26 nt, Human
ccccgcaccaaaaacuccugugaaca

SEQ ID NO: 832118 - RNA, 19 nt, Human
ccccgcgcugggaggcccc

SEQ ID NO: 832119 - RNA, 21 nt, Human
cccgcaccaaaaacuccugug

SEQ ID NO: 832120 - RNA, 22 nt, Human
cccggcgggggccgcaaacccc

SEQ ID NO: 832121 - RNA, 20 nt, Human
cccggggcacgccgagugcc

SEQ ID NO: 832122 - RNA, 19 nt, Human
cccuccaaaauuaaacagc

SEQ ID NO: 832123 - RNA, 18 nt, Human
ccgcccggggcacgccga

SEQ ID NO: 832124 - RNA, 18 nt, Human
ccggagcacccggcgggg

SEQ ID NO: 832125 - RNA, 20 nt, Human
ccggccgagggcagugcugc

SEQ ID NO: 832126 - RNA, 21 nt, Human
ccuccaaaauuaaacagcaac

SEQ ID NO: 832127 - RNA, 25 nt, Human
ccucgcuguccccacgccgcggcca

SEQ ID NO: 832128 - RNA, 22 nt, Human
ccucuauaaauuccagccaugc

SEQ ID NO: 832129 - RNA, 23 nt, Human
ccucucagaagcagcaaauucac

SEQ ID NO: 832130 - RNA, 21 nt, Human
ccucuccuaccucucuuuccc

SEQ ID NO: 832131 - RNA, 19 nt, Human
ccuguugcaggggcaucca

SEQ ID NO: 832132 - RNA, 22 nt, Human
ccuuccggcgcauguggagucc

SEQ ID NO: 832133 - RNA, 18 nt, Human
cgagcucggugccggcag

SEQ ID NO: 832134 - RNA, 19 nt, Human
cggccgcagacgcgggcgg

SEQ ID NO: 832135 - RNA, 23 nt, Human
cuccgcaccggggcauggccccc

SEQ ID NO: 832136 - RNA, 19 nt, Human
cuccugugaacaaaugugg

SEQ ID NO: 832137 - RNA, 22 nt, Human
cucucugcggccgcggcuccga

SEQ ID NO: 832138 - RNA, 22 nt, Human
cucuugcguuuacugugcuuca

SEQ ID NO: 832139 - RNA, 18 nt, Human
cugucaagaacaaaauuc

SEQ ID NO: 832140 - RNA, 27 nt, Human
gaagcagcaaauucacauauuuugugg

SEQ ID NO: 832141 - RNA, 26 nt, Human
gacaggccugcucugggucggacccc

SEQ ID NO: 832142 - RNA, 19 nt, Human
gagggcagugcugccgcug

SEQ ID NO: 832143 - RNA, 20 nt, Human
gcagccuaggggucuaugaa

SEQ ID NO: 832144 - RNA, 18 nt, Human
gcagugcugccgcugcgc

SEQ ID NO: 832145 - RNA, 20 nt, Human
gccccaaguucucucugcgg

SEQ ID NO: 832146 - RNA, 20 nt, Human
gcucuggguccuuaguagaa

SEQ ID NO: 832147 - RNA, 19 nt, Human
gcucuucguccgcccgggg

SEQ ID NO: 832148 - RNA, 19 nt, Human
gcuugaacccaagcuuccu

SEQ ID NO: 832149 - RNA, 27 nt, Human
ggacaggccugcucugggucggacccc

SEQ ID NO: 832150 - RNA, 18 nt, Human
gggcaagguguacccagc

SEQ ID NO: 832151 - RNA, 26 nt, Human
gggcauggcccccgccccaaguucuc

SEQ ID NO: 832152 - RNA, 21 nt, Human
ggucaagggcuguccuuucca

SEQ ID NO: 832153 - RNA, 24 nt, Human
guccugugagcgacugauacucca

SEQ ID NO: 832154 - RNA, 24 nt, Human
gugaacaaaugugguuguagccuc

SEQ ID NO: 832155 - RNA, 20 nt, Human
uaaaaggaaaagccauucac

SEQ ID NO: 832156 - RNA, 18 nt, Human
uaaaagucucaaauagca

SEQ ID NO: 832157 - RNA, 21 nt, Human
uacucccucuuucacauugcc

SEQ ID NO: 832158 - RNA, 21 nt, Human
uaguagaaauaagguagcccu

SEQ ID NO: 832159 - RNA, 23 nt, Human
uaugaaaucucugaaaacucuua

SEQ ID NO: 832160 - RNA, 20 nt, Human
uaugacaagaacugagguag

SEQ ID NO: 832161 - RNA, 24 nt, Human
uccgcaccggggcauggccggggc

SEQ ID NO: 832162 - RNA, 19 nt, Human
uccuuaguagaaauaaggu

SEQ ID NO: 832163 - RNA, 21 nt, Human
ucgcagccucuccuaccucuc

SEQ ID NO: 832164 - RNA, 24 nt, Human
ucggugccggcaggcaucuuccuc

SEQ ID NO: 832165 - RNA, 18 nt, Human
ucucugcggccgcggcuc

SEQ ID NO: 832166 - RNA, 19 nt, Human
ugagugacgcuugaaccca

SEQ ID NO: 832167 - RNA, 19 nt, Human
ugcaaauuauacccagaac

SEQ ID NO: 832168 - RNA, 22 nt, Human
ugccggcaggcaucuuccucug

SEQ ID NO: 832169 - RNA, 19 nt, Human
ugccucucagaagcagcaa

SEQ ID NO: 832170 - RNA, 19 nt, Human
ugcuuaccuuuugaacagu

SEQ ID NO: 832171 - RNA, 24 nt, Human
uggagucccaccgcacagcagccu

SEQ ID NO: 832172 - RNA, 23 nt, Human
uggcacuugcaccccuggcucua

SEQ ID NO: 832173 - RNA, 18 nt, Human
uggcauggacaggccugc

SEQ ID NO: 832174 - RNA, 25 nt, Human
ugggaggccccagugcgccucgcug

SEQ ID NO: 832175 - RNA, 21 nt, Human
ugucuggagcgcgcugcgaac

SEQ ID NO: 832176 - RNA, 21 nt, Human
uucagccccgcagcccgagcu

SEQ ID NO: 832177 - RNA, 23 nt, Human
uucccaccccgcaccaaaaacuc

SEQ ID NO: 832178 - RNA, 23 nt, Human
uuccggcgcauguggagucccac

SEQ ID NO: 832179 - RNA, 22 nt, Human
uuccucugggcucggagcgcaa

SEQ ID NO: 832180 - RNA, 26 nt, Human
uuggccaaaggaacauuugaaggacc

SEQ ID NO: 832181 - RNA, 25 nt, Human
uuuccagucccagcucaguuucauc

SEQ ID NO: 832182 - RNA, 24 nt, Human
aaagugcugggaucacaggcguga

SEQ ID NO: 832183 - RNA, 24 nt, Human
aaagugcugggauuacaggcguga

SEQ ID NO: 832184 - RNA, 24 nt, Human
aagaauuuuccugccucagccucc

SEQ ID NO: 832185 - RNA, 23 nt, Human
aagcauacacaaugaacagaaac

SEQ ID NO: 832186 - RNA, 24 nt, Human
aaguacaugggacuacaggcacgc

SEQ ID NO: 832187 - RNA, 26 nt, Human
aagugauucucgugccucagccucuu

SEQ ID NO: 832188 - RNA, 26 nt, Human
aagugcugggaucacaggcgugagcc

SEQ ID NO: 832189 - RNA, 19 nt, Human
aagugcugggauuacaggc

SEQ ID NO: 832190 - RNA, 19 nt, Human
aagugcugggauuacaggc

SEQ ID NO: 832191 - RNA, 26 nt, Human
aagugcugggauuacaggcgugagcc

SEQ ID NO: 832192 - RNA, 24 nt, Human
aaucacauuuuaguaaaaggcaaa

SEQ ID NO: 832193 - RNA, 21 nt, Human
acaaugaacagaaacaaucac

SEQ ID NO: 832194 - RNA, 20 nt, Human
acacaaugaacagaaacaaa

SEQ ID NO: 832195 - RNA, 18 nt, Human
acaggguuucaccauguu

SEQ ID NO: 832196 - RNA, 21 nt, Human
acaggguuucaccauguuggc

SEQ ID NO: 832197 - RNA, 24 nt, Human
acaggguuucaccauguuggccag

SEQ ID NO: 832198 - RNA, 22 nt, Human
accaggcuggagugcaguggug

SEQ ID NO: 832199 - RNA, 24 nt, Human
accauguuggccaggaugaucuug

SEQ ID NO: 832200 - RNA, 18 nt, Human
accauguuggccaggcug

SEQ ID NO: 832201 - RNA, 19 nt, Human
acccaggcuggagugcagu

SEQ ID NO: 832202 - RNA, 24 nt, Human
accucaugauccgcccgucuuggc

SEQ ID NO: 832203 - RNA, 18 nt, Human
acucugucacccaggcug

SEQ ID NO: 832204 - RNA, 25 nt, Human
acucugucacccaggcuggagugca

SEQ ID NO: 832205 - RNA, 22 nt, Human
aggaaaaaguaauaauaaaugc

SEQ ID NO: 832206 - RNA, 25 nt, Human
aggcuggagugcagugguacgaucu

SEQ ID NO: 832207 - RNA, 25 nt, Human
aggcuggagugcaguggugugaucu

SEQ ID NO: 832208 - RNA, 19 nt, Human
aguagcugggauuacaggc

SEQ ID NO: 832209 - RNA, 19 nt, Human
aguagcugggauuacaggc

SEQ ID NO: 832210 - RNA, 23 nt, Human
aguagcugggauuacaggcgcgu

SEQ ID NO: 832211 - RNA, 24 nt, Human
agugauucucgugccucagccucu

SEQ ID NO: 832212 - RNA, 20 nt, Human
agugcagugguacgaucuug

SEQ ID NO: 832213 - RNA, 23 nt, Human
agugcagugguacgaucuuggcu

SEQ ID NO: 832214 - RNA, 24 nt, Human
agugcagugguacgaucuuggcuc

SEQ ID NO: 832215 - RNA, 19 nt, Human
agugcaguggugugaucuc

SEQ ID NO: 832216 - RNA, 21 nt, Human
agugcaguggugugaucucag

SEQ ID NO: 832217 - RNA, 23 nt, Human
agugcaguggugugaucucagcu

SEQ ID NO: 832218 - RNA, 24 nt, Human
agugcaguggugugaucucagcuc

SEQ ID NO: 832219 - RNA, 18 nt, Human
agugcugggauuacaggc

SEQ ID NO: 832220 - RNA, 24 nt, Human
agugguacgaucuuggcucacugc

SEQ ID NO: 832221 - RNA, 24 nt, Human
aguggugugaucucagcucacugc

SEQ ID NO: 832222 - RNA, 19 nt, Human
auccgcccgucuuggccuc

SEQ ID NO: 832223 - RNA, 21 nt, Human
aucuuuaccuuagcgcaaggg

SEQ ID NO: 832224 - RNA, 22 nt, Human
augggguuucaccauguuggcc

SEQ ID NO: 832225 - RNA, 23 nt, Human
augggguuucaccauguuggcca

SEQ ID NO: 832226 - RNA, 24 nt, Human
augggguuucaccauguuggccag

SEQ ID NO: 832227 - RNA, 19 nt, Human
auuacaggcgcgugccacu

SEQ ID NO: 832228 - RNA, 22 nt, Human
auuuuuguauuuuuaguagaga

SEQ ID NO: 832229 - RNA, 24 nt, Human
auuuuuguauuuuuaguagagaca

SEQ ID NO: 832230 - RNA, 24 nt, Human
auuuuuguauuuuuaguagagaug

SEQ ID NO: 832231 - RNA, 26 nt, Human
caaaccgucucuuuacuuuaugaagc

SEQ ID NO: 832232 - RNA, 26 nt, Human
caaacuccugaccucaugugguccaa

SEQ ID NO: 832233 - RNA, 24 nt, Human
caaagugcugggaucacaggcgug

SEQ ID NO: 832234 - RNA, 24 nt, Human
caaagugcugggauuacaggcgug

SEQ ID NO: 832235 - RNA, 21 nt, Human
caagaauuuuccugccucagc

SEQ ID NO: 832236 - RNA, 26 nt, Human
caagcaauuuuuuaaaaacugacacc

SEQ ID NO: 832237 - RNA, 19 nt, Human
caaggaaagaagguauaau

SEQ ID NO: 832238 - RNA, 22 nt, Human
caagugauucucgugccucagc

SEQ ID NO: 832239 - RNA, 22 nt, Human
cacaaugaacagaaacaaucac

SEQ ID NO: 832240 - RNA, 22 nt, Human
cacaggcgugagccaccacacc

SEQ ID NO: 832241 - RNA, 20 nt, Human
caccaggcuggagugcagug

SEQ ID NO: 832242 - RNA, 24 nt, Human
caccaggcuggagugcaguggugu

SEQ ID NO: 832243 - RNA, 18 nt, Human
caccauguuggccaggau

SEQ ID NO: 832244 - RNA, 22 nt, Human
caccauguuggccaggaugauc

SEQ ID NO: 832245 - RNA, 23 nt, Human
caccauguuggccaggaugaucu

SEQ ID NO: 832246 - RNA, 24 nt, Human
caccauguuggccaggaugaucuu

SEQ ID NO: 832247 - RNA, 21 nt, Human
caccauguuggccaggcugau

SEQ ID NO: 832248 - RNA, 24 nt, Human
caccauguuggccaggcugaucuc

SEQ ID NO: 832249 - RNA, 27 nt, Human
caccauguuggccaggcugaucucaaa

SEQ ID NO: 832250 - RNA, 22 nt, Human
cacccaccuuggccucccaaag

SEQ ID NO: 832251 - RNA, 23 nt, Human
cacccaccuuggccucccaaagu

SEQ ID NO: 832252 - RNA, 23 nt, Human
cacucugucacccaggcuggagu

SEQ ID NO: 832253 - RNA, 24 nt, Human
cacucugucacccaggcuggagug

SEQ ID NO: 832254 - RNA, 21 nt, Human
cacugcaaccucucccucccg

SEQ ID NO: 832255 - RNA, 23 nt, Human
cacugcaaccucucccucccggg

SEQ ID NO: 832256 - RNA, 23 nt, Human
cacugcaacuuccgucuccuggg

SEQ ID NO: 832257 - RNA, 24 nt, Human
cacugcguccggcuaauuuuugua

SEQ ID NO: 832258 - RNA, 24 nt, Human
caggguuucaccauguuggccagg

SEQ ID NO: 832259 - RNA, 19 nt, Human
cagugguacgaucuuggcu

SEQ ID NO: 832260 - RNA, 24 nt, Human
cauguuggccaggcugaucucaaa

SEQ ID NO: 832261 - RNA, 22 nt, Human
ccaaagugcugggaucacaggc

SEQ ID NO: 832262 - RNA, 24 nt, Human
ccaaagugcugggaucacaggcgu

SEQ ID NO: 832263 - RNA, 22 nt, Human
ccaaagugcugggauuacaggc

SEQ ID NO: 832264 - RNA, 22 nt, Human
ccaaagugcugggauuacaggc

SEQ ID NO: 832265 - RNA, 24 nt, Human
ccaaagugcugggauuacaggcgu

SEQ ID NO: 832266 - RNA, 19 nt, Human
ccaccgcgcucagccuaca

SEQ ID NO: 832267 - RNA, 24 nt, Human
cccaaguacaugggacuacaggca

SEQ ID NO: 832268 - RNA, 20 nt, Human
cccggguucaagugauucuc

SEQ ID NO: 832269 - RNA, 20 nt, Human
cccggguucaagugauucuc

SEQ ID NO: 832270 - RNA, 22 nt, Human
cccgucuuggccucccaaagug

SEQ ID NO: 832271 - RNA, 21 nt, Human
ccucccggguucaagugauuc

SEQ ID NO: 832272 - RNA, 24 nt, Human
ccugaccucaugugguccacccac

SEQ ID NO: 832273 - RNA, 22 nt, Human
ccuggguucaagaauuuuccug

SEQ ID NO: 832274 - RNA, 22 nt, Human
cgccccaccaugcccagcucau

SEQ ID NO: 832275 - RNA, 22 nt, Human
cuaacaaggaaagaagguauaa

SEQ ID NO: 832276 - RNA, 20 nt, Human
cuacuagaaugauccacugu

SEQ ID NO: 832277 - RNA, 24 nt, Human
cucacucugucacccaggcuggag

SEQ ID NO: 832278 - RNA, 22 nt, Human
cucacugcaaccucucccuccc

SEQ ID NO: 832279 - RNA, 24 nt, Human
cucacugcaaccucucccucccgg

SEQ ID NO: 832280 - RNA, 24 nt, Human
cucacugcaacuuccgucuccugg

SEQ ID NO: 832281 - RNA, 24 nt, Human
cucagccucuugaguagcugggau

SEQ ID NO: 832282 - RNA, 18 nt, Human
cucccucccggguucaag

SEQ ID NO: 832283 - RNA, 18 nt, Human
cuccuggguucaagaauu

SEQ ID NO: 832284 - RNA, 25 nt, Human
cucgugccucagccucuugaguagc

SEQ ID NO: 832285 - RNA, 24 nt, Human
cucuugaccucaugauccgcccgu

SEQ ID NO: 832286 - RNA, 23 nt, Human
cugcaaccucucccucccggguu

SEQ ID NO: 832287 - RNA, 24 nt, Human
cugcaaccucucccucccggguuc

SEQ ID NO: 832288 - RNA, 24 nt, Human
cuggagugcaguggugugaucuca

SEQ ID NO: 832289 - RNA, 23 nt, Human
cuugaguagcugggauuacaggc

SEQ ID NO: 832290 - RNA, 24 nt, Human
cuugaguagcugggauuacaggcg

SEQ ID NO: 832291 - RNA, 20 nt, Human
gaccucaugauccgcccguc

SEQ ID NO: 832292 - RNA, 24 nt, Human
gaccucaugugguccacccaccuu

SEQ ID NO: 832293 - RNA, 24 nt, Human
gacuacaggcacgccccaccaugc

SEQ ID NO: 832294 - RNA, 20 nt, Human
gagaugggguuucaccaugu

SEQ ID NO: 832295 - RNA, 24 nt, Human
gagaugggguuucaccauguuggc

SEQ ID NO: 832296 - RNA, 26 nt, Human
gaguagcugggauuacaggcgcgugc

SEQ ID NO: 832297 - RNA, 18 nt, Human
gaucacaggcgugagcca

SEQ ID NO: 832298 - RNA, 18 nt, Human
gauuacaggcgcgugcca

SEQ ID NO: 832299 - RNA, 22 nt, Human
gauuacaggcgcgugccacugc

SEQ ID NO: 832300 - RNA, 18 nt, Human
gauuacaggcgugagcca

SEQ ID NO: 832301 - RNA, 22 nt, Human
gauuacaggcgugagccaccgc

SEQ ID NO: 832302 - RNA, 22 nt, Human
gauuacaggcgugagccaccgc

SEQ ID NO: 832303 - RNA, 22 nt, Human
gcccagcucauuuuuguauuuu

SEQ ID NO: 832304 - RNA, 21 nt, Human
gcucacugcaaccucucccuc

SEQ ID NO: 832305 - RNA, 23 nt, Human
gcugaucucaaacuccugaccuc

SEQ ID NO: 832306 - RNA, 19 nt, Human
ggaucacaggcgugagcca

SEQ ID NO: 832307 - RNA, 22 nt, Human
ggcuggagugcaguggugugau

SEQ ID NO: 832308 - RNA, 22 nt, Human
gggguuucaccauguuggccag

SEQ ID NO: 832309 - RNA, 22 nt, Human
ggguuucaccauguuggccagg

SEQ ID NO: 832310 - RNA, 20 nt, Human
gguccacccaccuuggccuc

SEQ ID NO: 832311 - RNA, 24 nt, Human
gguggggaagaaauaagaaaagaa

SEQ ID NO: 832312 - RNA, 24 nt, Human
gguuucaccauguuggccaggaug

SEQ ID NO: 832313 - RNA, 23 nt, Human
guagagaugggguuucaccaugu

SEQ ID NO: 832314 - RNA, 18 nt, Human
guccggcgcggcgcgggg

SEQ ID NO: 832315 - RNA, 24 nt, Human
gucuugcucugucaccaggcugga

SEQ ID NO: 832316 - RNA, 22 nt, Human
gucuuggccucccaaagugcug

SEQ ID NO: 832317 - RNA, 24 nt, Human
gugauucucgugccucagccucuu

SEQ ID NO: 832318 - RNA, 22 nt, Human
gugccucagccucuugaguagc

SEQ ID NO: 832319 - RNA, 24 nt, Human
gugguccacccaccuuggccuccc

SEQ ID NO: 832320 - RNA, 20 nt, Human
uaaaucuuuaccuuagcgca

SEQ ID NO: 832321 - RNA, 21 nt, Human
uaaaucuuuaccuuagcgcaa

SEQ ID NO: 832322 - RNA, 24 nt, Human
uaauuuuuguauuuuuaguagaga

SEQ ID NO: 832323 - RNA, 22 nt, Human
uacaggcgugagccaccgcgcu

SEQ ID NO: 832324 - RNA, 22 nt, Human
uagagacaggguuucaccaugu

SEQ ID NO: 832325 - RNA, 22 nt, Human
uagagaugggguuucaccaugu

SEQ ID NO: 832326 - RNA, 21 nt, Human
uagcgcaagggaaaaaaugga

SEQ ID NO: 832327 - RNA, 24 nt, Human
uaguagagacaggguuucaccaug

SEQ ID NO: 832328 - RNA, 25 nt, Human
uaguagagacaggguuucaccaugu

SEQ ID NO: 832329 - RNA, 24 nt, Human
uaguagagaugggguuucaccaug

SEQ ID NO: 832330 - RNA, 26 nt, Human
uaguagagaugggguuucaccauguu

SEQ ID NO: 832331 - RNA, 24 nt, Human
ucacccaggcuggagugcaguggu

SEQ ID NO: 832332 - RNA, 24 nt, Human
ucacucugucacccaggcuggagu

SEQ ID NO: 832333 - RNA, 23 nt, Human
ucacugcaaccucucccucccgg

SEQ ID NO: 832334 - RNA, 24 nt, Human
ucacugcaaccucucccucccggg

SEQ ID NO: 832335 - RNA, 24 nt, Human
ucacugcaacuuccgucuccuggg

SEQ ID NO: 832336 - RNA, 20 nt, Human
ucagccucuugaguagcugg

SEQ ID NO: 832337 - RNA, 23 nt, Human
ucaugugguccacccaccuuggc

SEQ ID NO: 832338 - RNA, 24 nt, Human
ucauuuuuguauuuuuaguagaga

SEQ ID NO: 832339 - RNA, 20 nt, Human
uccacuguaaggcaaaaauu

SEQ ID NO: 832340 - RNA, 24 nt, Human
ucccaaagugcugggaucacaggc

SEQ ID NO: 832341 - RNA, 24 nt, Human
ucccaaagugcugggauuacaggc

SEQ ID NO: 832342 - RNA, 24 nt, Human
ucccaaguacaugggacuacaggc

SEQ ID NO: 832343 - RNA, 19 nt, Human
ucccggguucaagugauuc

SEQ ID NO: 832344 - RNA, 21 nt, Human
ucccggguucaagugauucuc

SEQ ID NO: 832345 - RNA, 24 nt, Human
ucccggguucaagugauucucgug

SEQ ID NO: 832346 - RNA, 21 nt, Human
uccucagacuugguuuuuaaa

SEQ ID NO: 832347 - RNA, 20 nt, Human
uccuggguucaagaauuuuc

SEQ ID NO: 832348 - RNA, 23 nt, Human
uccuggguucaagaauuuuccug

SEQ ID NO: 832349 - RNA, 24 nt, Human
uccuuuuucucuucaaauuccuuc

SEQ ID NO: 832350 - RNA, 23 nt, Human
ucucacucugucacccaggcugg

SEQ ID NO: 832351 - RNA, 24 nt, Human
ucucacucugucacccaggcugga

SEQ ID NO: 832352 - RNA, 26 nt, Human
ucucacucugucacccaggcuggagu

SEQ ID NO: 832353 - RNA, 27 nt, Human
ucucacucugucacccaggcuggagug

SEQ ID NO: 832354 - RNA, 19 nt, Human
ucucccucccggguucaag

SEQ ID NO: 832355 - RNA, 23 nt, Human
ucugucaccaggcuggagugcag

SEQ ID NO: 832356 - RNA, 24 nt, Human
ucugucacccaggcuggagugcag

SEQ ID NO: 832357 - RNA, 24 nt, Human
ucuugaguagcugggauuacaggc

SEQ ID NO: 832358 - RNA, 21 nt, Human
ucuugcucugucaccaggcug

SEQ ID NO: 832359 - RNA, 21 nt, Human
ucuugcucugucaccaggcug

SEQ ID NO: 832360 - RNA, 22 nt, Human
ucuugcucugucaccaggcugg

SEQ ID NO: 832361 - RNA, 23 nt, Human
ucuugcucugucaccaggcugga

SEQ ID NO: 832362 - RNA, 20 nt, Human
ucuuggccucccaaagugcu

SEQ ID NO: 832363 - RNA, 22 nt, Human
ugaacagaaacaaucacauuuu

SEQ ID NO: 832364 - RNA, 22 nt, Human
ugcagugguacgaucuuggcuc

SEQ ID NO: 832365 - RNA, 22 nt, Human
ugcaguggugugaucucagcuc

SEQ ID NO: 832366 - RNA, 24 nt, Human
ugccucagccucccaaguacaugg

SEQ ID NO: 832367 - RNA, 22 nt, Human
ugccucagccucuugaguagcu

SEQ ID NO: 832368 - RNA, 24 nt, Human
ugccucagccucuugaguagcugg

SEQ ID NO: 832369 - RNA, 23 nt, Human
ugcucugucaccaggcuggagug

SEQ ID NO: 832370 - RNA, 24 nt, Human
ugcugggaucacaggcgugagcca

SEQ ID NO: 832371 - RNA, 24 nt, Human
ugcugggauuacaggcgugagcca

SEQ ID NO: 832372 - RNA, 23 nt, Human
uggagugcagugguacgaucuug

SEQ ID NO: 832373 - RNA, 24 nt, Human
uggagugcagugguacgaucuugg

SEQ ID NO: 832374 - RNA, 19 nt, Human
uggagugcaguggugugau

SEQ ID NO: 832375 - RNA, 24 nt, Human
uggagugcaguggugugaucucag

SEQ ID NO: 832376 - RNA, 24 nt, Human
uggccaggcugaucucaaacuccu

SEQ ID NO: 832377 - RNA, 21 nt, Human
uggcucaaaguccaaugacag

SEQ ID NO: 832378 - RNA, 24 nt, Human
ugggacuacaggcacgccccacca

SEQ ID NO: 832379 - RNA, 25 nt, Human
ugggacuacaggcacgccccaccau

SEQ ID NO: 832380 - RNA, 18 nt, Human
ugggaucacaggcgugag

SEQ ID NO: 832381 - RNA, 19 nt, Human
ugggaucacaggcgugagc

SEQ ID NO: 832382 - RNA, 22 nt, Human
ugggaucacaggcgugagccac

SEQ ID NO: 832383 - RNA, 23 nt, Human
ugggaucacaggcgugagccacc

SEQ ID NO: 832384 - RNA, 24 nt, Human
ugggaucacaggcgugagccacca

SEQ ID NO: 832385 - RNA, 21 nt, Human
ugggauuacaggcgcgugcca

SEQ ID NO: 832386 - RNA, 22 nt, Human
ugggauuacaggcgcgugccac

SEQ ID NO: 832387 - RNA, 22 nt, Human
ugggauuacaggcgcgugccac

SEQ ID NO: 832388 - RNA, 24 nt, Human
ugggauuacaggcgcgugccacug

SEQ ID NO: 832389 - RNA, 18 nt, Human
ugggauuacaggcgugag

SEQ ID NO: 832390 - RNA, 19 nt, Human
ugggauuacaggcgugagc

SEQ ID NO: 832391 - RNA, 21 nt, Human
ugggauuacaggcgugagcca

SEQ ID NO: 832392 - RNA, 22 nt, Human
ugggauuacaggcgugagccac

SEQ ID NO: 832393 - RNA, 23 nt, Human
ugggauuacaggcgugagccacc

SEQ ID NO: 832394 - RNA, 24 nt, Human
ugggauuacaggcgugagccaccg

SEQ ID NO: 832395 - RNA, 24 nt, Human
ugggguuucaccauguuggccagg

SEQ ID NO: 832396 - RNA, 24 nt, Human
ugguccacccaccuuggccuccca

SEQ ID NO: 832397 - RNA, 24 nt, Human
uggugugaucucagcucacugcaa

SEQ ID NO: 832398 - RNA, 21 nt, Human
uguauuuuuaguagagauggg

SEQ ID NO: 832399 - RNA, 24 nt, Human
uguuuaaaauccuauuuacuauuu

SEQ ID NO: 832400 - RNA, 19 nt, Human
uuaaauacaauaauucugu

SEQ ID NO: 832401 - RNA, 20 nt, Human
uuaaggcauuuucauugccu

SEQ ID NO: 832402 - RNA, 24 nt, Human
uuaguagagacaggguuucaccau

SEQ ID NO: 832403 - RNA, 18 nt, Human
uuaguagagaugggguuu

SEQ ID NO: 832404 - RNA, 22 nt, Human
uuaguagagaugggguuucacc

SEQ ID NO: 832405 - RNA, 24 nt, Human
uuaguagagaugggguuucaccau

SEQ ID NO: 832406 - RNA, 27 nt, Human
uucaaauuccuucucuucuccugaacu

SEQ ID NO: 832407 - RNA, 23 nt, Human
uucaagugauucucgugccucag

SEQ ID NO: 832408 - RNA, 18 nt, Human
uuggccucccaaagugcu

SEQ ID NO: 832409 - RNA, 23 nt, Human
uuguauuuuuaguagagaugggg

SEQ ID NO: 832410 - RNA, 19 nt, Human
uuucaccauguuggccagg

SEQ ID NO: 832411 - RNA, 20 nt, Human
uuucaccauguuggccagga

SEQ ID NO: 832412 - RNA, 21 nt, Human
uuucaccauguuggccaggcu

SEQ ID NO: 832413 - RNA, 21 nt, Human
uuugcagauuuacucauaacu

SEQ ID NO: 832414 - RNA, 20 nt, Human
uuuucaaaacuccauauaaa

SEQ ID NO: 832415 - RNA, 24 nt, Human
uuuuuaguagagacaggguuucac

SEQ ID NO: 832416 - RNA, 24 nt, Human
uuuuuaguagagaugggguuucac

SEQ ID NO: 832417 - RNA, 20 nt, Human
uuuuuguauuuuuaguagag

SEQ ID NO: 832418 - RNA, 20 nt, Human
uuuuuguauuuuuaguagag

SEQ ID NO: 832419 - RNA, 27 nt, Human
aaaccuacucccucaaccuugcuccag

SEQ ID NO: 832420 - RNA, 23 nt, Human
aaccuguggagauacauuucccu

SEQ ID NO: 832421 - RNA, 22 nt, Human
aagauaauauuaacagcaacca

SEQ ID NO: 832422 - RNA, 18 nt, Human
aagcaagagccucccaca

SEQ ID NO: 832423 - RNA, 26 nt, Human
aagccaagaccaagagauugcugaga

SEQ ID NO: 832424 - RNA, 25 nt, Human
acacagcagcuccccucaguucccu

SEQ ID NO: 832425 - RNA, 25 nt, Human
acagacaguaacuaggccccagaac

SEQ ID NO: 832426 - RNA, 22 nt, Human
acagauuccuccuggcccaaag

SEQ ID NO: 832427 - RNA, 21 nt, Human
acagcaggaauggggcacaga

SEQ ID NO: 832428 - RNA, 20 nt, Human
acccugggauccugcccagc

SEQ ID NO: 832429 - RNA, 21 nt, Human
acucccacuccccucccucag

SEQ ID NO: 832430 - RNA, 21 nt, Human
acucugaccagagaugacauc

SEQ ID NO: 832431 - RNA, 18 nt, Human
agacaguaacuaggcccc

SEQ ID NO: 832432 - RNA, 23 nt, Human
agagcucugggagccaagaugga

SEQ ID NO: 832433 - RNA, 23 nt, Human
agauagacaggcucagcugcaaa

SEQ ID NO: 832434 - RNA, 19 nt, Human
agccaggaaacaaccagcc

SEQ ID NO: 832435 - RNA, 23 nt, Human
agccagugagcagguaaacagaa

SEQ ID NO: 832436 - RNA, 20 nt, Human
aggaauggggcacagagggg

SEQ ID NO: 832437 - RNA, 19 nt, Human
aggcagguucacccuggga

SEQ ID NO: 832438 - RNA, 21 nt, Human
aggcauguugaagggugagca

SEQ ID NO: 832439 - RNA, 20 nt, Human
aggcgcgaacgggaugcacc

SEQ ID NO: 832440 - RNA, 20 nt, Human
agggguuuuuuucuucuuca

SEQ ID NO: 832441 - RNA, 21 nt, Human
aguaacuaggccccagaaccu

SEQ ID NO: 832442 - RNA, 21 nt, Human
agucccccagccucuuccugu

SEQ ID NO: 832443 - RNA, 20 nt, Human
cacauguggcucaggaggau

SEQ ID NO: 832444 - RNA, 27 nt, Human
caccacauauuaagggacucuucaaaa

SEQ ID NO: 832445 - RNA, 20 nt, Human
caccacuccuacacuugcug

SEQ ID NO: 832446 - RNA, 21 nt, Human
cacccugggauccugcccagc

SEQ ID NO: 832447 - RNA, 19 nt, Human
caccucucccuccggagca

SEQ ID NO: 832448 - RNA, 19 nt, Human
caccucuucccagcccaag

SEQ ID NO: 832449 - RNA, 21 nt, Human
cacuccuacacuugcugggga

SEQ ID NO: 832450 - RNA, 20 nt, Human
cacugacuuuuucacacccu

SEQ ID NO: 832451 - RNA, 20 nt, Human
cagaaccuguggagauacau

SEQ ID NO: 832452 - RNA, 18 nt, Human
cagagaugacaucugguc

SEQ ID NO: 832453 - RNA, 20 nt, Human
cagaguucacaggcagguuc

SEQ ID NO: 832454 - RNA, 21 nt, Human
cagauuccuccuggcccaaag

SEQ ID NO: 832455 - RNA, 22 nt, Human
cagcagauucccacaggggcuc

SEQ ID NO: 832456 - RNA, 21 nt, Human
cagccaggaaacaaccagcca

SEQ ID NO: 832457 - RNA, 22 nt, Human
cagccaggaaacaaccagccac

SEQ ID NO: 832458 - RNA, 21 nt, Human
cagcucagggagcuaucucuc

SEQ ID NO: 832459 - RNA, 18 nt, Human
caggaucuggaguagaaa

SEQ ID NO: 832460 - RNA, 18 nt, Human
cagggagcuaucucucuc

SEQ ID NO: 832461 - RNA, 25 nt, Human
ccacaggaagcccggacggcccugc

SEQ ID NO: 832462 - RNA, 21 nt, Human
ccaccucuucccagcccaagc

SEQ ID NO: 832463 - RNA, 21 nt, Human
ccagcagauucccacaggggc

SEQ ID NO: 832464 - RNA, 18 nt, Human
ccagcccaagcugcugcc

SEQ ID NO: 832465 - RNA, 18 nt, Human
ccagggguuuuuuucuuc

SEQ ID NO: 832466 - RNA, 24 nt, Human
cccacaauccacugccagggaguu

SEQ ID NO: 832467 - RNA, 27 nt, Human
cccccagcagauucccacaggggcugg

SEQ ID NO: 832468 - RNA, 20 nt, Human
cccccagccucuuccugugc

SEQ ID NO: 832469 - RNA, 19 nt, Human
ccgccgccgccucaggcgc

SEQ ID NO: 832470 - RNA, 20 nt, Human
ccuacaacuccccucagcuc

SEQ ID NO: 832471 - RNA, 20 nt, Human
ccucaggcgcgggaagacca

SEQ ID NO: 832472 - RNA, 19 nt, Human
ccuccugcacccagcugga

SEQ ID NO: 832473 - RNA, 23 nt, Human
ccuccuggcccaaaggccagggg

SEQ ID NO: 832474 - RNA, 19 nt, Human
ccucuggacuccgagaaaa

SEQ ID NO: 832475 - RNA, 23 nt, Human
ccucuggcugcaggcaggcugcc

SEQ ID NO: 832476 - RNA, 21 nt, Human
ccugagcucaccucucccucc

SEQ ID NO: 832477 - RNA, 23 nt, Human
cgggggacacagcagcuccccuc

SEQ ID NO: 832478 - RNA, 23 nt, Human
cuaacuccuggccuguuccacca

SEQ ID NO: 832479 - RNA, 24 nt, Human
cuagucccccagccucuuccugug

SEQ ID NO: 832480 - RNA, 24 nt, Human
cucagaagcucaggcggccccucu

SEQ ID NO: 832481 - RNA, 25 nt, Human
cucagcccuaaagcaagcuugcaaa

SEQ ID NO: 832482 - RNA, 20 nt, Human
cucagcugcaaauccgucug

SEQ ID NO: 832483 - RNA, 19 nt, Human
cucauagacacuuagaaga

SEQ ID NO: 832484 - RNA, 24 nt, Human
cucauggcugggauggcuccuccc

SEQ ID NO: 832485 - RNA, 19 nt, Human
cuccaauacaaccaccaca

SEQ ID NO: 832486 - RNA, 22 nt, Human
cuccugccgccgccgccucagg

SEQ ID NO: 832487 - RNA, 20 nt, Human
cucugccaccaccucuuccc

SEQ ID NO: 832488 - RNA, 23 nt, Human
cucuucaaaaccuacucccucaa

SEQ ID NO: 832489 - RNA, 21 nt, Human
cugagacucccacuccccucc

SEQ ID NO: 832490 - RNA, 22 nt, Human
cugcgcccacuugccuccuggg

SEQ ID NO: 832491 - RNA, 23 nt, Human
cugcgcccacuugccuccugggg

SEQ ID NO: 832492 - RNA, 18 nt, Human
gaagccaagaccaagaga

SEQ ID NO: 832493 - RNA, 27 nt, Human
gagagcaaacaugggagguagaaguca

SEQ ID NO: 832494 - RNA, 20 nt, Human
gagcuuucuagagggcaggg

SEQ ID NO: 832495 - RNA, 19 nt, Human
gcugaacugugcugcugcu

SEQ ID NO: 832496 - RNA, 20 nt, Human
ggaagaccacagccccaggc

SEQ ID NO: 832497 - RNA, 18 nt, Human
ggagauacauuucccugg

SEQ ID NO: 832498 - RNA, 21 nt, Human
ggagauacauuucccuggugc

SEQ ID NO: 832499 - RNA, 22 nt, Human
ggagcagcugcgggagccugag

SEQ ID NO: 832500 - RNA, 20 nt, Human
ggagguagaagucagauggc

SEQ ID NO: 832501 - RNA, 19 nt, Human
ggcagggccucuuucuagu

SEQ ID NO: 832502 - RNA, 22 nt, Human
ggcagggccucuuucuaguccc

SEQ ID NO: 832503 - RNA, 21 nt, Human
gggaagaccacagccccaggc

SEQ ID NO: 832504 - RNA, 19 nt, Human
guagaacaccccccugcag

SEQ ID NO: 832505 - RNA, 23 nt, Human
gugagcagguaaacagaagccag

SEQ ID NO: 832506 - RNA, 18 nt, Human
uaacuccuggccuguucc

SEQ ID NO: 832507 - RNA, 20 nt, Human
uaacuccuggccuguuccuc

SEQ ID NO: 832508 - RNA, 25 nt, Human
uaaggagcccacccgaguaugagua

SEQ ID NO: 832509 - RNA, 19 nt, Human
uaaguucucagccagucuc

SEQ ID NO: 832510 - RNA, 21 nt, Human
uaaguucucagccagucucca

SEQ ID NO: 832511 - RNA, 23 nt, Human
uacaaccaccacacauugcauua

SEQ ID NO: 832512 - RNA, 18 nt, Human
uacaauauuucacauacc

SEQ ID NO: 832513 - RNA, 21 nt, Human
uacacacacacuggcauucuu

SEQ ID NO: 832514 - RNA, 24 nt, Human
uacagacaguaacuaggccccaga

SEQ ID NO: 832515 - RNA, 19 nt, Human
uaccccaaacccauuccca

SEQ ID NO: 832516 - RNA, 22 nt, Human
uagaaagggggagcaucacuga

SEQ ID NO: 832517 - RNA, 23 nt, Human
uagaagaggcaaaucuaguugug

SEQ ID NO: 832518 - RNA, 24 nt, Human
uagaagaggcaaaucuaguuguga

SEQ ID NO: 832519 - RNA, 24 nt, Human
uagagcucugggagccaagaugga

SEQ ID NO: 832520 - RNA, 22 nt, Human
uagcaaguaaacucugaccaga

SEQ ID NO: 832521 - RNA, 21 nt, Human
uaggccccagaaccuguggag

SEQ ID NO: 832522 - RNA, 24 nt, Human
uaggccccagaaccuguggagagg

SEQ ID NO: 832523 - RNA, 23 nt, Human
uauuaagggacucuucaaaaccu

SEQ ID NO: 832524 - RNA, 22 nt, Human
ucacagcaggaauggggcacag

SEQ ID NO: 832525 - RNA, 18 nt, Human
ucacccugggauccugcc

SEQ ID NO: 832526 - RNA, 24 nt, Human
ucagaagcucaggcggccccucug

SEQ ID NO: 832527 - RNA, 22 nt, Human
ucaggcccaccacuccuacacu

SEQ ID NO: 832528 - RNA, 19 nt, Human
ucaggccggcuguagaugg

SEQ ID NO: 832529 - RNA, 23 nt, Human
ucaguucccuacaacuccccuca

SEQ ID NO: 832530 - RNA, 24 nt, Human
ucaguucccuacaacuccccucag

SEQ ID NO: 832531 - RNA, 19 nt, Human
uccagaacccaucgagcuu

SEQ ID NO: 832532 - RNA, 21 nt, Human
ucccacaggggcucauggcug

SEQ ID NO: 832533 - RNA, 26 nt, Human
ucccagcccaagcugcugccuaaacc

SEQ ID NO: 832534 - RNA, 18 nt, Human
ucccccagccucuuccuc

SEQ ID NO: 832535 - RNA, 19 nt, Human
ucccuaguucucagaagcu

SEQ ID NO: 832536 - RNA, 19 nt, Human
ucccugggcuggcuagagc

SEQ ID NO: 832537 - RNA, 18 nt, Human
ucucucagcaucucagcu

SEQ ID NO: 832538 - RNA, 22 nt, Human
ucuggacuccgagaaaacgacc

SEQ ID NO: 832539 - RNA, 18 nt, Human
ucuggaguagaaaggggg

SEQ ID NO: 832540 - RNA, 25 nt, Human
ugacaagccacacuguccuccagaa

SEQ ID NO: 832541 - RNA, 19 nt, Human
ugacuaaggagcccacccg

SEQ ID NO: 832542 - RNA, 21 nt, Human
ugacuaaggagcccacccgag

SEQ ID NO: 832543 - RNA, 23 nt, Human
ugagacucccacuccccucccuc

SEQ ID NO: 832544 - RNA, 21 nt, Human
ugagcagguaaacagaagcca

SEQ ID NO: 832545 - RNA, 18 nt, Human
ugaguaacagaagccaag

SEQ ID NO: 832546 - RNA, 19 nt, Human
ugccaugaagccaagacca

SEQ ID NO: 832547 - RNA, 21 nt, Human
ugccaugaagccaagaccaag

SEQ ID NO: 832548 - RNA, 24 nt, Human
ugcugcgcccacuugccuccuggg

SEQ ID NO: 832549 - RNA, 19 nt, Human
uggagguuuuccaguaccu

SEQ ID NO: 832550 - RNA, 18 nt, Human
uggcccccagcagauucc

SEQ ID NO: 832551 - RNA, 20 nt, Human
uggcccccagcagauucccu

SEQ ID NO: 832552 - RNA, 24 nt, Human
ugggauggcuccucccuaguucuc

SEQ ID NO: 832553 - RNA, 18 nt, Human
uggggaggaggaggcggg

SEQ ID NO: 832554 - RNA, 22 nt, Human
uguaagcaagagccucccacaa

SEQ ID NO: 832555 - RNA, 19 nt, Human
ugugacugccucaggccgg

SEQ ID NO: 832556 - RNA, 18 nt, Human
ugugacuguuuguuucag

SEQ ID NO: 832557 - RNA, 22 nt, Human
uguggucccugggcuggcuaga

SEQ ID NO: 832558 - RNA, 20 nt, Human
uucccuacaacuccccucag

SEQ ID NO: 832559 - RNA, 20 nt, Human
uucccuggugcugcgcccac

SEQ ID NO: 832560 - RNA, 20 nt, Human
uugaaguccuccugcaccca

SEQ ID NO: 832561 - RNA, 18 nt, Human
uugcugagacucccacuc

SEQ ID NO: 832562 - RNA, 22 nt, Human
uuucacauaccacccaauagau

SEQ ID NO: 832563 - RNA, 19 nt, Human
uuucuucuucacagcuuuc

SEQ ID NO: 832564 - RNA, 24 nt, Human
aaaaaaacaaagcaaacccuggga

SEQ ID NO: 832565 - RNA, 18 nt, Human
aaacauggcuauggggau

SEQ ID NO: 832566 - RNA, 24 nt, Human
aaagccccuccaggauagcacuau

SEQ ID NO: 832567 - RNA, 25 nt, Human
agacccagccuaggggccuuuccuc

SEQ ID NO: 832568 - RNA, 24 nt, Human
aggugcuuccauacucugcucagg

SEQ ID NO: 832569 - RNA, 23 nt, Human
auggcaguguccaguuuuuuccu

SEQ ID NO: 832570 - RNA, 20 nt, Human
auguaaacauggcuaugggg

SEQ ID NO: 832571 - RNA, 19 nt, Human
caaguagccuugggcuucc

SEQ ID NO: 832572 - RNA, 25 nt, Human
cagauggcaguguccaguuuuuucc

SEQ ID NO: 832573 - RNA, 21 nt, Human
caggauagcacagugcuuagg

SEQ ID NO: 832574 - RNA, 21 nt, Human
caggugcuuccauacucugcu

SEQ ID NO: 832575 - RNA, 23 nt, Human
ccaaguagccuugggcuucccuc

SEQ ID NO: 832576 - RNA, 23 nt, Human
ccagaggcaagggagacaaucua

SEQ ID NO: 832577 - RNA, 24 nt, Human
cccagcccuaccccaugcugaggc

SEQ ID NO: 832578 - RNA, 18 nt, Human
cccauuuuguaggaugaa

SEQ ID NO: 832579 - RNA, 18 nt, Human
ccccaugcugaggccaca

SEQ ID NO: 832580 - RNA, 20 nt, Human
cccggggaggacgagcgggg

SEQ ID NO: 832581 - RNA, 21 nt, Human
cccucugccacccacccucuc

SEQ ID NO: 832582 - RNA, 20 nt, Human
ccgccgccgccaagcaccca

SEQ ID NO: 832583 - RNA, 19 nt, Human
ccucccuauccccuugguc

SEQ ID NO: 832584 - RNA, 20 nt, Human
ccucccuauccccuuggucu

SEQ ID NO: 832585 - RNA, 23 nt, Human
ccucucagauuccagguccugag

SEQ ID NO: 832586 - RNA, 23 nt, Human
ccucugccacccacccucucaga

SEQ ID NO: 832587 - RNA, 19 nt, Human
ccuggcccaguccuuuccc

SEQ ID NO: 832588 - RNA, 22 nt, Human
ccuucccacccccagcuggagg

SEQ ID NO: 832589 - RNA, 18 nt, Human
cuccccucugccacccac

SEQ ID NO: 832590 - RNA, 20 nt, Human
cucccgagccugcccuggcc

SEQ ID NO: 832591 - RNA, 23 nt, Human
cucccgagccugcccuggcccag

SEQ ID NO: 832592 - RNA, 23 nt, Human
cucccuauccccuuggucuuuca

SEQ ID NO: 832593 - RNA, 25 nt, Human
cugccccuaccccacccuauugcac

SEQ ID NO: 832594 - RNA, 22 nt, Human
cuggucccaaacucuggcucag

SEQ ID NO: 832595 - RNA, 19 nt, Human
cuucuugaagcgggucagg

SEQ ID NO: 832596 - RNA, 20 nt, Human
gacugaagccgaggugccuc

SEQ ID NO: 832597 - RNA, 23 nt, Human
gcacccagacccagccuaggggc

SEQ ID NO: 832598 - RNA, 21 nt, Human
ggcaguguccaguuuuuuccu

SEQ ID NO: 832599 - RNA, 21 nt, Human
ggugccucugggcccggggag

SEQ ID NO: 832600 - RNA, 21 nt, Human
gucccaaacucuggcucagau

SEQ ID NO: 832601 - RNA, 26 nt, Human
uaccccacccuauugcacaucaaauc

SEQ ID NO: 832602 - RNA, 22 nt, Human
uaggggccuuuccucgcagccu

SEQ ID NO: 832603 - RNA, 26 nt, Human
ucacccagcccuaccccaugcugagg

SEQ ID NO: 832604 - RNA, 19 nt, Human
uccacacaauggaguaggu

SEQ ID NO: 832605 - RNA, 20 nt, Human
ucccugccccuaccccaccc

SEQ ID NO: 832606 - RNA, 22 nt, Human
uccuggucccaaacucuggcuc

SEQ ID NO: 832607 - RNA, 21 nt, Human
ugaggcagauugauguguaaa

SEQ ID NO: 832608 - RNA, 19 nt, Human
uggcagaggauguacagug

SEQ ID NO: 832609 - RNA, 18 nt, Human
ugggccagaggcaaggga

SEQ ID NO: 832610 - RNA, 20 nt, Human
uggucccaaacucuggcuca

SEQ ID NO: 832611 - RNA, 24 nt, Human
uugcugauggcugaagccuccucc

SEQ ID NO: 832612 - RNA, 22 nt, Human
uugguccacacaauggaguagg

SEQ ID NO: 832613 - RNA, 19 nt, Human
uuuccuucccacccccagc

SEQ ID NO: 832614 - RNA, 18 nt, Human
agaaaagaaaaaauaaag

SEQ ID NO: 832615 - RNA, 20 nt, Human
agaaaagaaaaaauaaagga

SEQ ID NO: 832616 - RNA, 18 nt, Human
caagacaaguaauguugg

SEQ ID NO: 832617 - RNA, 21 nt, Human
cauauagguccucuucucuuu

SEQ ID NO: 832618 - RNA, 23 nt, Human
caucacugcgaauuaucuuugaa

SEQ ID NO: 832619 - RNA, 21 nt, Human
gcuuugucucuguugucuuga

SEQ ID NO: 832620 - RNA, 21 nt, Human
uauagguccucuucucucaac

SEQ ID NO: 832621 - RNA, 23 nt, Human
uguacagaacuuccucaucuuag

SEQ ID NO: 832622 - RNA, 23 nt, Human
aaaaaaaaaaaaaaaagaaagaa

SEQ ID NO: 832623 - RNA, 19 nt, Human
aaaaaaacagacagguaca

SEQ ID NO: 832624 - RNA, 22 nt, Human
aaaaagaaguuuguaaacaaaa

SEQ ID NO: 832625 - RNA, 24 nt, Human
aaaaagaaguuuguaaacaaaacc

SEQ ID NO: 832626 - RNA, 21 nt, Human
aaacaaaacccccaaagaaca

SEQ ID NO: 832627 - RNA, 19 nt, Human
aaacaaugcuuacuccuga

SEQ ID NO: 832628 - RNA, 19 nt, Human
aaacccccaaagaacacgg

SEQ ID NO: 832629 - RNA, 20 nt, Human
aaacccccuuuuucuccuuu

SEQ ID NO: 832630 - RNA, 18 nt, Human
aaacuaggccaccuagca

SEQ ID NO: 832631 - RNA, 22 nt, Human
aaacuaggccaccuagcaauca

SEQ ID NO: 832632 - RNA, 19 nt, Human
aaacuuauccuuagcaacu

SEQ ID NO: 832633 - RNA, 23 nt, Human
aacaaaacccccaaagaacacgg

SEQ ID NO: 832634 - RNA, 20 nt, Human
aacacggagaaagaccaaua

SEQ ID NO: 832635 - RNA, 26 nt, Human
aagaacagaucuggagauguaaagca

SEQ ID NO: 832636 - RNA, 20 nt, Human
aagaagagggccccccaaac

SEQ ID NO: 832637 - RNA, 21 nt, Human
aagagggcaggguagaagaca

SEQ ID NO: 832638 - RNA, 23 nt, Human
aagauccccccuuuaagaagagg

SEQ ID NO: 832639 - RNA, 23 nt, Human
aagggagcaaauaaauaaaauca

SEQ ID NO: 832640 - RNA, 19 nt, Human
aaggggcucagucuccugc

SEQ ID NO: 832641 - RNA, 22 nt, Human
aaggggcucagucuccugcagu

SEQ ID NO: 832642 - RNA, 18 nt, Human
aaucaagucauggggcca

SEQ ID NO: 832643 - RNA, 18 nt, Human
acaaaacccccaaagaac

SEQ ID NO: 832644 - RNA, 18 nt, Human
acccccuuuuucuccuuu

SEQ ID NO: 832645 - RNA, 23 nt, Human
accugagaacacagugcaggaaa

SEQ ID NO: 832646 - RNA, 21 nt, Human
acucacccuuuccccccaccu

SEQ ID NO: 832647 - RNA, 18 nt, Human
agaaagaaagaaauggua

SEQ ID NO: 832648 - RNA, 23 nt, Human
agacaacccucaccuaaucuugg

SEQ ID NO: 832649 - RNA, 21 nt, Human
agacacacaccacccaaugcg

SEQ ID NO: 832650 - RNA, 20 nt, Human
agacagagucucgcucugua

SEQ ID NO: 832651 - RNA, 19 nt, Human
agcaaucaacguagugaag

SEQ ID NO: 832652 - RNA, 19 nt, Human
agcagcaggucugcagcug

SEQ ID NO: 832653 - RNA, 23 nt, Human
agccccaaugcacccuauuccca

SEQ ID NO: 832654 - RNA, 19 nt, Human
agcccguggccccgggccc

SEQ ID NO: 832655 - RNA, 20 nt, Human
agcccguggccccgggcccc

SEQ ID NO: 832656 - RNA, 25 nt, Human
aggcuggagugcaguggugcgaucu

SEQ ID NO: 832657 - RNA, 19 nt, Human
agucauggggccacccagu

SEQ ID NO: 832658 - RNA, 21 nt, Human
agugcaguggugcgaucucag

SEQ ID NO: 832659 - RNA, 23 nt, Human
agugcaguggugcgaucucagcu

SEQ ID NO: 832660 - RNA, 24 nt, Human
agugcaguggugcgaucucagcuc

SEQ ID NO: 832661 - RNA, 24 nt, Human
aguggugcgaucucagcucacugc

SEQ ID NO: 832662 - RNA, 19 nt, Human
auaaacacaccccagugau

SEQ ID NO: 832663 - RNA, 27 nt, Human
auuauauuuacacaaacuaggccaccu

SEQ ID NO: 832664 - RNA, 20 nt, Human
auugcucauguaccugagaa

SEQ ID NO: 832665 - RNA, 19 nt, Human
caaaacccccaaagaacac

SEQ ID NO: 832666 - RNA, 18 nt, Human
caaaagaauagcccccac

SEQ ID NO: 832667 - RNA, 18 nt, Human
caaauaaacacaccccag

SEQ ID NO: 832668 - RNA, 19 nt, Human
caacaaaaaguaauuccug

SEQ ID NO: 832669 - RNA, 24 nt, Human
cacacacacccuguggcacauggu

SEQ ID NO: 832670 - RNA, 23 nt, Human
caccaaagcccaaaggggcucag

SEQ ID NO: 832671 - RNA, 23 nt, Human
cacccuguggcacaugguaggcc

SEQ ID NO: 832672 - RNA, 18 nt, Human
cacccuuuccccccaccu

SEQ ID NO: 832673 - RNA, 22 nt, Human
cacuacuguagcagggcaggac

SEQ ID NO: 832674 - RNA, 21 nt, Human
cacucugccugcuccucaaaa

SEQ ID NO: 832675 - RNA, 20 nt, Human
cacuugcauuuggacagagc

SEQ ID NO: 832676 - RNA, 18 nt, Human
caggacacaggcuccagg

SEQ ID NO: 832677 - RNA, 19 nt, Human
caggccacuuucaaaagcu

SEQ ID NO: 832678 - RNA, 18 nt, Human
caggcuuuccuacccucc

SEQ ID NO: 832679 - RNA, 19 nt, Human
caguaaacauggaguuaca

SEQ ID NO: 832680 - RNA, 22 nt, Human
caguauccaagggagcaaauaa

SEQ ID NO: 832681 - RNA, 18 nt, Human
cauccuggagaaaguggg

SEQ ID NO: 832682 - RNA, 23 nt, Human
ccaacuagccccaaugcacccua

SEQ ID NO: 832683 - RNA, 18 nt, Human
ccaaugcacccuauuccc

SEQ ID NO: 832684 - RNA, 18 nt, Human
ccacccaguuaaaaccua

SEQ ID NO: 832685 - RNA, 21 nt, Human
ccagacaaauacaguaacuug

SEQ ID NO: 832686 - RNA, 23 nt, Human
ccaggcaccacaaaacccucgcu

SEQ ID NO: 832687 - RNA, 21 nt, Human
ccaggcuggagugcaguggug

SEQ ID NO: 832688 - RNA, 22 nt, Human
cccaggaucagacacacaccac

SEQ ID NO: 832689 - RNA, 19 nt, Human
ccccagugauggggucacc

SEQ ID NO: 832690 - RNA, 18 nt, Human
cccccagaacccucacuu

SEQ ID NO: 832691 - RNA, 23 nt, Human
cccccagaacccucacuugcauu

SEQ ID NO: 832692 - RNA, 18 nt, Human
ccccccuccugguugccc

SEQ ID NO: 832693 - RNA, 19 nt, Human
ccccccuccugguugcccc

SEQ ID NO: 832694 - RNA, 23 nt, Human
ccccggagaaguccgaaggcaaa

SEQ ID NO: 832695 - RNA, 23 nt, Human
ccccuuuaagaagagggcccccc

SEQ ID NO: 832696 - RNA, 20 nt, Human
cccguggccccgggccccug

SEQ ID NO: 832697 - RNA, 23 nt, Human
cccuuucuuggccuccugacccc

SEQ ID NO: 832698 - RNA, 23 nt, Human
ccuacaaagcccagacaaauaca

SEQ ID NO: 832699 - RNA, 21 nt, Human
ccucuguguaccaccauuucc

SEQ ID NO: 832700 - RNA, 22 nt, Human
ccugggugacacagcgagacuc

SEQ ID NO: 832701 - RNA, 24 nt, Human
ccugggugacacagcgagacucca

SEQ ID NO: 832702 - RNA, 20 nt, Human
cucacccuuuccccccaccu

SEQ ID NO: 832703 - RNA, 19 nt, Human
cucacugcaaccucugccu

SEQ ID NO: 832704 - RNA, 24 nt, Human
cuccacuuuaaaaaaaaaaaaaaa

SEQ ID NO: 832705 - RNA, 20 nt, Human
cucgcucuguaaccaggcug

SEQ ID NO: 832706 - RNA, 19 nt, Human
cugaccccacuuucuacau

SEQ ID NO: 832707 - RNA, 24 nt, Human
cuuuaaacuuauccuuagcaacuc

SEQ ID NO: 832708 - RNA, 19 nt, Human
cuuuccccccaccuagagg

SEQ ID NO: 832709 - RNA, 24 nt, Human
cuuuucaccgggcccagccucucc

SEQ ID NO: 832710 - RNA, 23 nt, Human
gaaacccccuuuuucuccuuuag

SEQ ID NO: 832711 - RNA, 18 nt, Human
gaagaacagaucuggaga

SEQ ID NO: 832712 - RNA, 20 nt, Human
gaaguccuacaaagcccaga

SEQ ID NO: 832713 - RNA, 24 nt, Human
gacagagucucgcucuguaaccag

SEQ ID NO: 832714 - RNA, 22 nt, Human
gacucacccuuuccccccaccu

SEQ ID NO: 832715 - RNA, 20 nt, Human
gagcagcaggucugcagcug

SEQ ID NO: 832716 - RNA, 18 nt, Human
gcagaaccuucugucaaa

SEQ ID NO: 832717 - RNA, 20 nt, Human
gcagaaccuucugucaaagg

SEQ ID NO: 832718 - RNA, 18 nt, Human
gccccuggucgggcggcu

SEQ ID NO: 832719 - RNA, 23 nt, Human
gccccuggucgggcggcugcugg

SEQ ID NO: 832720 - RNA, 23 nt, Human
gccugggugacacagcgagacuc

SEQ ID NO: 832721 - RNA, 23 nt, Human
gcucuuauuggcaaaaaugaggu

SEQ ID NO: 832722 - RNA, 18 nt, Human
ggaaaggagaagggaagg

SEQ ID NO: 832723 - RNA, 24 nt, Human
ggaacccgaaaauuuugaaagguu

SEQ ID NO: 832724 - RNA, 19 nt, Human
ggaagaaagggugauggug

SEQ ID NO: 832725 - RNA, 19 nt, Human
ggcaggguagaagacaagu

SEQ ID NO: 832726 - RNA, 22 nt, Human
ggccccgggccccuggucgggc

SEQ ID NO: 832727 - RNA, 21 nt, Human
gggaaaggaaguacccaguac

SEQ ID NO: 832728 - RNA, 22 nt, Human
gggcaggacacaggcuccaggc

SEQ ID NO: 832729 - RNA, 18 nt, Human
gggcggcugcuggccccg

SEQ ID NO: 832730 - RNA, 20 nt, Human
ggguaugaggauacaagaug

SEQ ID NO: 832731 - RNA, 19 nt, Human
guaaagcacguccugugcc

SEQ ID NO: 832732 - RNA, 18 nt, Human
guaaccaggcuggagugc

SEQ ID NO: 832733 - RNA, 24 nt, Human
gucucgcucuguaaccaggcugga

SEQ ID NO: 832734 - RNA, 19 nt, Human
gugcaguuggcauccugga

SEQ ID NO: 832735 - RNA, 21 nt, Human
guggccacuuugacauaaagu

SEQ ID NO: 832736 - RNA, 23 nt, Human
uaaacaaaacccccaaagaacac

SEQ ID NO: 832737 - RNA, 26 nt, Human
uaaacaaaacccccaaagaacacgga

SEQ ID NO: 832738 - RNA, 24 nt, Human
uaaccaggcuggagugcaguggug

SEQ ID NO: 832739 - RNA, 18 nt, Human
uaacuuggggggcagcau

SEQ ID NO: 832740 - RNA, 20 nt, Human
uaagaagagggccccccaaa

SEQ ID NO: 832741 - RNA, 20 nt, Human
uacaggcuuuccuacccucc

SEQ ID NO: 832742 - RNA, 23 nt, Human
uagaagacaaguuuuuaggacag

SEQ ID NO: 832743 - RNA, 22 nt, Human
uagacaacccucaccuaaucuu

SEQ ID NO: 832744 - RNA, 22 nt, Human
uagagcagcaggucugcagcug

SEQ ID NO: 832745 - RNA, 22 nt, Human
uagauuaaaauauacaaaaaua

SEQ ID NO: 832746 - RNA, 19 nt, Human
uagcaaaagaauagccccc

SEQ ID NO: 832747 - RNA, 26 nt, Human
uagcaacucuaguuuuacaaacacac

SEQ ID NO: 832748 - RNA, 22 nt, Human
uagcaaucaacguagugaaguc

SEQ ID NO: 832749 - RNA, 23 nt, Human
uaguucaauaggcugugcacucc

SEQ ID NO: 832750 - RNA, 22 nt, Human
uauacaaaaauacaaaaccaga

SEQ ID NO: 832751 - RNA, 24 nt, Human
uauccaagggagcaaauaaauaaa

SEQ ID NO: 832752 - RNA, 22 nt, Human
ucaauaggcugugcacuccaaa

SEQ ID NO: 832753 - RNA, 20 nt, Human
ucacugcaaccucugccugg

SEQ ID NO: 832754 - RNA, 21 nt, Human
ucacugcaaccucugccuggg

SEQ ID NO: 832755 - RNA, 25 nt, Human
ucacugcaaccucugccugggugac

SEQ ID NO: 832756 - RNA, 19 nt, Human
ucauauauccaucccucga

SEQ ID NO: 832757 - RNA, 28 nt, Human
uccacuuuaaaaaaaaaaaaaaaaagaa

SEQ ID NO: 832758 - RNA, 19 nt, Human
uccuauuaaacaaucuugu

SEQ ID NO: 832759 - RNA, 18 nt, Human
uccugguugcccccagaa

SEQ ID NO: 832760 - RNA, 25 nt, Human
ucgcuugugugucucccuggaaccc

SEQ ID NO: 832761 - RNA, 21 nt, Human
ucuccacucugccugcuccuc

SEQ ID NO: 832762 - RNA, 22 nt, Human
ucucgcucuguaaccaggcugg

SEQ ID NO: 832763 - RNA, 23 nt, Human
ucucgcucuguaaccaggcugga

SEQ ID NO: 832764 - RNA, 18 nt, Human
ucuguaaccaggcuggag

SEQ ID NO: 832765 - RNA, 23 nt, Human
ucuguaaccaggcuggagugcag

SEQ ID NO: 832766 - RNA, 23 nt, Human
ugaaauguguaugugugugggug

SEQ ID NO: 832767 - RNA, 22 nt, Human
ugacacagcgagacuccacuuu

SEQ ID NO: 832768 - RNA, 25 nt, Human
ugauggggucaccaaagcccaaagg

SEQ ID NO: 832769 - RNA, 25 nt, Human
ugauuccccccuccugguugccccc

SEQ ID NO: 832770 - RNA, 22 nt, Human
ugcaggaaaugagggccuuaga

SEQ ID NO: 832771 - RNA, 21 nt, Human
ugcaguauccaagggagcaaa

SEQ ID NO: 832772 - RNA, 22 nt, Human
ugcaguggugcgaucucagcuc

SEQ ID NO: 832773 - RNA, 22 nt, Human
ugccuggugcagaaccuucugu

SEQ ID NO: 832774 - RNA, 21 nt, Human
ugcuuuggcuauuuuucucuc

SEQ ID NO: 832775 - RNA, 23 nt, Human
uggagugcaguggugcgaucuca

SEQ ID NO: 832776 - RNA, 24 nt, Human
uggagugcaguggugcgaucucag

SEQ ID NO: 832777 - RNA, 19 nt, Human
uggcauccuggagaaagug

SEQ ID NO: 832778 - RNA, 18 nt, Human
uggcccagaauggggcgg

SEQ ID NO: 832779 - RNA, 19 nt, Human
uggcccagaauggggcggg

SEQ ID NO: 832780 - RNA, 18 nt, Human
uggccuccugaccccacu

SEQ ID NO: 832781 - RNA, 22 nt, Human
uggccuccugaccccacuuucu

SEQ ID NO: 832782 - RNA, 23 nt, Human
uggcuugcucucuggccuuuuca

SEQ ID NO: 832783 - RNA, 24 nt, Human
ugggaaaggaaguacccaguacag

SEQ ID NO: 832784 - RNA, 23 nt, Human
ugggaauuauuauauauccuucu

SEQ ID NO: 832785 - RNA, 25 nt, Human
uggggccacccaguuaaaaccuagu

SEQ ID NO: 832786 - RNA, 22 nt, Human
uggggucaccaaagcccaaagg

SEQ ID NO: 832787 - RNA, 24 nt, Human
uggugcgaucucagcucacugcaa

SEQ ID NO: 832788 - RNA, 19 nt, Human
uggugugaacccaagccug

SEQ ID NO: 832789 - RNA, 21 nt, Human
uguaaguuuucuuuugggggu

SEQ ID NO: 832790 - RNA, 21 nt, Human
uguguaugugugugggugugu

SEQ ID NO: 832791 - RNA, 22 nt, Human
uguguaugugugugggugugua

SEQ ID NO: 832792 - RNA, 18 nt, Human
uguguguggguguguaag

SEQ ID NO: 832793 - RNA, 21 nt, Human
uguuuuguuuuguuuuguuug

SEQ ID NO: 832794 - RNA, 21 nt, Human
uuacccauugcuugggacagc

SEQ ID NO: 832795 - RNA, 18 nt, Human
uucaaaagcuggaaauuc

SEQ ID NO: 832796 - RNA, 20 nt, Human
uuccccccuccugguugccc

SEQ ID NO: 832797 - RNA, 30 nt, Human
uuccccccuccugguugcccccagaacccu

SEQ ID NO: 832798 - RNA, 21 nt, Human
uuuacaaacacacacacaccc

SEQ ID NO: 832799 - RNA, 18 nt, Human
uuuguuuuguuuuguuug

SEQ ID NO: 832800 - RNA, 19 nt, Human
uuuguuuuguuuuguuuug

SEQ ID NO: 832801 - RNA, 24 nt, Human
aaaaaaaauagaguaagcaaaaaa

SEQ ID NO: 832802 - RNA, 25 nt, Human
aaaaaaauagaguaagcaaaaaaaa

SEQ ID NO: 832803 - RNA, 24 nt, Human
aaaaaagcauacaauucuauucuu

SEQ ID NO: 832804 - RNA, 22 nt, Human
aaaaacaguaggacagaauugc

SEQ ID NO: 832805 - RNA, 24 nt, Human
aaaaaucauugaaaacuggaauaa

SEQ ID NO: 832806 - RNA, 25 nt, Human
aaacaguaggacagaauugcccuca

SEQ ID NO: 832807 - RNA, 22 nt, Human
aaagaaaucacaaaagaugaaa

SEQ ID NO: 832808 - RNA, 18 nt, Human
aaagacacauucaaccau

SEQ ID NO: 832809 - RNA, 21 nt, Human
aaagacacauucaaccaugca

SEQ ID NO: 832810 - RNA, 22 nt, Human
aaagaugaaaucugaaccuguu

SEQ ID NO: 832811 - RNA, 19 nt, Human
aaaguacaaaaugcagcaa

SEQ ID NO: 832812 - RNA, 18 nt, Human
aacagaaaaugaacccca

SEQ ID NO: 832813 - RNA, 18 nt, Human
aagcauuuuaaaaaaucc

SEQ ID NO: 832814 - RNA, 22 nt, Human
aaucaucugagacucacaguga

SEQ ID NO: 832815 - RNA, 18 nt, Human
accucagucacaguccca

SEQ ID NO: 832816 - RNA, 19 nt, Human
accuuuuacuuuuucuugu

SEQ ID NO: 832817 - RNA, 23 nt, Human
acuaaaauauaggggaaauacug

SEQ ID NO: 832818 - RNA, 22 nt, Human
agcuaaaacgcaaaaugaaaua

SEQ ID NO: 832819 - RNA, 23 nt, Human
auagaguaagcaaaaaaaaagaa

SEQ ID NO: 832820 - RNA, 19 nt, Human
augcaccaauaccucucuu

SEQ ID NO: 832821 - RNA, 23 nt, Human
augcagaaaaaagcauacaauuc

SEQ ID NO: 832822 - RNA, 19 nt, Human
auuucucaaauucccauau

SEQ ID NO: 832823 - RNA, 20 nt, Human
caaaagaugaaaucugaacc

SEQ ID NO: 832824 - RNA, 18 nt, Human
caaaaugcagcaaugaug

SEQ ID NO: 832825 - RNA, 18 nt, Human
caaaaugcccacuuuuuu

SEQ ID NO: 832826 - RNA, 24 nt, Human
caaauauuaagaauauguauuuua

SEQ ID NO: 832827 - RNA, 19 nt, Human
caacaaauaccucuaauaa

SEQ ID NO: 832828 - RNA, 22 nt, Human
caauucuauucuuccugaagga

SEQ ID NO: 832829 - RNA, 22 nt, Human
cacaaaagaugaaaucugaacc

SEQ ID NO: 832830 - RNA, 22 nt, Human
cacaaacaugcagaaaaaagca

SEQ ID NO: 832831 - RNA, 21 nt, Human
cagaaaaugaaccccaacucu

SEQ ID NO: 832832 - RNA, 21 nt, Human
cagcuacuucccaccaccaaa

SEQ ID NO: 832833 - RNA, 18 nt, Human
cagguuaaaaaaaauaga

SEQ ID NO: 832834 - RNA, 22 nt, Human
caugcagaaaaaagcauacaau

SEQ ID NO: 832835 - RNA, 22 nt, Human
caugcagaaaaaagcauacaau

SEQ ID NO: 832836 - RNA, 18 nt, Human
cccaccaccaaauaacug

SEQ ID NO: 832837 - RNA, 21 nt, Human
ccucuuuucuuccuauuuaaa

SEQ ID NO: 832838 - RNA, 21 nt, Human
cuaaaaaaagauuaagaaugu

SEQ ID NO: 832839 - RNA, 23 nt, Human
cuacuucccaccaccaaauaacu

SEQ ID NO: 832840 - RNA, 24 nt, Human
gcaaaaugaaauaucaaguuuuga

SEQ ID NO: 832841 - RNA, 26 nt, Human
guuaugcuuaauuucuuggaaaacug

SEQ ID NO: 832842 - RNA, 19 nt, Human
uaaaaaaaauagaguaagc

SEQ ID NO: 832843 - RNA, 18 nt, Human
uaaaaaaagauuaagaau

SEQ ID NO: 832844 - RNA, 22 nt, Human
uaaaaaaucuauaacaacuuua

SEQ ID NO: 832845 - RNA, 18 nt, Human
uaaacaaaaguugccucu

SEQ ID NO: 832846 - RNA, 22 nt, Human
uaaauauauccucuuuucuucc

SEQ ID NO: 832847 - RNA, 21 nt, Human
uaacagaaaaugaaccccaac

SEQ ID NO: 832848 - RNA, 18 nt, Human
uaagaaugucuacucuug

SEQ ID NO: 832849 - RNA, 24 nt, Human
uaagaccucagucacagucccaca

SEQ ID NO: 832850 - RNA, 22 nt, Human
uaaguaaaagugaaaaaacuug

SEQ ID NO: 832851 - RNA, 26 nt, Human
uacucuugaagcuagugagguuaaag

SEQ ID NO: 832852 - RNA, 24 nt, Human
uagcuaaaacgcaaaaugaaauau

SEQ ID NO: 832853 - RNA, 26 nt, Human
uaugacaaaaucugcauuugaaaaag

SEQ ID NO: 832854 - RNA, 19 nt, Human
ucagaaaaaaguguaugca

SEQ ID NO: 832855 - RNA, 22 nt, Human
ucccacacuaauagcugccuuu

SEQ ID NO: 832856 - RNA, 23 nt, Human
ugaaaaaggccuguaaaaacagu

SEQ ID NO: 832857 - RNA, 21 nt, Human
ugaaaaaucauugaaaacugg

SEQ ID NO: 832858 - RNA, 18 nt, Human
ugaaggaauguuacaaaa

SEQ ID NO: 832859 - RNA, 23 nt, Human
ugagcuaguaagaaugucuacuc

SEQ ID NO: 832860 - RNA, 22 nt, Human
ugauuguuucaguguuuaaaaa

SEQ ID NO: 832861 - RNA, 18 nt, Human
ugcagaaaaaagcauaca

SEQ ID NO: 832862 - RNA, 23 nt, Human
ugcccucaucaccuuuuacuuuu

SEQ ID NO: 832863 - RNA, 24 nt, Human
ugguuauauauauuaugugugugu

SEQ ID NO: 832864 - RNA, 19 nt, Human
uguuacaaaaugcccacuu

SEQ ID NO: 832865 - RNA, 24 nt, Human
uuaaagacacauucaaccaugcaa

SEQ ID NO: 832866 - RNA, 24 nt, Human
uuaaauauauccucuuuucuuccu

SEQ ID NO: 832867 - RNA, 22 nt, Human
uucacagguuaaaaaaaauaga

SEQ ID NO: 832868 - RNA, 23 nt, Human
uugaacauaaauagggauguaau

SEQ ID NO: 832869 - RNA, 21 nt, Human
uuggucucaacauuuuuaaaa

SEQ ID NO: 832870 - RNA, 24 nt, Human
uuucuuggaaaacuguaaagaaau

SEQ ID NO: 832871 - RNA, 26 nt, Human
aacaauaaauacuguacaggaagaga

SEQ ID NO: 832872 - RNA, 22 nt, Human
caggaacaauaaauacuguaca

SEQ ID NO: 832873 - RNA, 19 nt, Human
uacuguacaggaagagagu

SEQ ID NO: 832874 - RNA, 20 nt, Human
ugcacgugaacguccagauc

SEQ ID NO: 832875 - RNA, 20 nt, Human
uuaaauaaagugccaggaac

SEQ ID NO: 832876 - RNA, 20 nt, Human
uuuuuuuuuuuuugaggguc

SEQ ID NO: 832877 - RNA, 22 nt, Human
uuuuuuuuuuuuuuuuugaggg

SEQ ID NO: 832878 - RNA, 24 nt, Human
aaagaaaccuugugaacccucagu

SEQ ID NO: 832879 - RNA, 19 nt, Human
aaagagcugggagguucug

SEQ ID NO: 832880 - RNA, 19 nt, Human
aaagaggagagaggguagg

SEQ ID NO: 832881 - RNA, 26 nt, Human
aacaaugagagaacaaagaggagaga

SEQ ID NO: 832882 - RNA, 21 nt, Human
aaccucacgcucccccauccc

SEQ ID NO: 832883 - RNA, 18 nt, Human
aagaagcacgccgcccuc

SEQ ID NO: 832884 - RNA, 19 nt, Human
aaucucucccucccgacca

SEQ ID NO: 832885 - RNA, 18 nt, Human
acaacagcgcugcugaag

SEQ ID NO: 832886 - RNA, 20 nt, Human
acagggaagagacaaccgga

SEQ ID NO: 832887 - RNA, 21 nt, Human
acccaaauccacuaggagccc

SEQ ID NO: 832888 - RNA, 24 nt, Human
acccaaauccacuaggagcccaau

SEQ ID NO: 832889 - RNA, 21 nt, Human
acucuccacccuuccaguccu

SEQ ID NO: 832890 - RNA, 18 nt, Human
agaggagagaggguaggg

SEQ ID NO: 832891 - RNA, 24 nt, Human
agugcuggaagcugcagaucaacu

SEQ ID NO: 832892 - RNA, 24 nt, Human
aucucucccucccgaccaccccaa

SEQ ID NO: 832893 - RNA, 24 nt, Human
caaaagaaaccuugugaacccuca

SEQ ID NO: 832894 - RNA, 23 nt, Human
caacaaugagagaacaaagagga

SEQ ID NO: 832895 - RNA, 19 nt, Human
caagaaagccauagcgagc

SEQ ID NO: 832896 - RNA, 22 nt, Human
caagccuagcccgagauccucu

SEQ ID NO: 832897 - RNA, 20 nt, Human
cacccaaaacgucccaacgg

SEQ ID NO: 832898 - RNA, 21 nt, Human
cacccaaaacgucccaacgga

SEQ ID NO: 832899 - RNA, 20 nt, Human
caccccaaaagaaaccuugu

SEQ ID NO: 832900 - RNA, 22 nt, Human
cacgccucccccuacgcucaaa

SEQ ID NO: 832901 - RNA, 23 nt, Human
cacgcucccccaucccuucaccc

SEQ ID NO: 832902 - RNA, 26 nt, Human
ccaccccaaaagaaaccuugugaacc

SEQ ID NO: 832903 - RNA, 24 nt, Human
ccaguccucaguccccaauuugcc

SEQ ID NO: 832904 - RNA, 26 nt, Human
cccaaaacgucccaacggaaacggac

SEQ ID NO: 832905 - RNA, 24 nt, Human
cccaacggaaacggacccaaaucc

SEQ ID NO: 832906 - RNA, 18 nt, Human
ccccugagaucccccucu

SEQ ID NO: 832907 - RNA, 21 nt, Human
ccggagacagcaaagagcugg

SEQ ID NO: 832908 - RNA, 24 nt, Human
ccguucuacccagggucagcucca

SEQ ID NO: 832909 - RNA, 19 nt, Human
ccuacugugggacaacagc

SEQ ID NO: 832910 - RNA, 19 nt, Human
ccuagcccgagauccucug

SEQ ID NO: 832911 - RNA, 23 nt, Human
ccugagaucccccucucacgccu

SEQ ID NO: 832912 - RNA, 21 nt, Human
cgaccaccccaaaagaaaccu

SEQ ID NO: 832913 - RNA, 21 nt, Human
cgagcuuccuuguucccuaga

SEQ ID NO: 832914 - RNA, 20 nt, Human
cgagugcuggaagcugcaga

SEQ ID NO: 832915 - RNA, 26 nt, Human
cgcccucaagccuagcccgagauccu

SEQ ID NO: 832916 - RNA, 23 nt, Human
cgccucccccuacgcucaaaacc

SEQ ID NO: 832917 - RNA, 22 nt, Human
cggaaacggacccaaauccacu

SEQ ID NO: 832918 - RNA, 19 nt, Human
cucacgccucccccuacgc

SEQ ID NO: 832919 - RNA, 22 nt, Human
cucacgccucccccuacgcuca

SEQ ID NO: 832920 - RNA, 19 nt, Human
cucacgcucccccaucccu

SEQ ID NO: 832921 - RNA, 23 nt, Human
cuccagcucccuuguacuuuccc

SEQ ID NO: 832922 - RNA, 19 nt, Human
cucccucccgaccacccca

SEQ ID NO: 832923 - RNA, 19 nt, Human
cuccuggcaagaaagccau

SEQ ID NO: 832924 - RNA, 24 nt, Human
cucucccucccgaccaccccaaaa

SEQ ID NO: 832925 - RNA, 19 nt, Human
cugguuccgccuacucucc

SEQ ID NO: 832926 - RNA, 21 nt, Human
cuucccgacuacgagugcugg

SEQ ID NO: 832927 - RNA, 21 nt, Human
gacaaccggagacagcaaaga

SEQ ID NO: 832928 - RNA, 20 nt, Human
gagauccucugccccgacga

SEQ ID NO: 832929 - RNA, 19 nt, Human
gagugcuggaagcugcaga

SEQ ID NO: 832930 - RNA, 23 nt, Human
ggaagacuccacgccaaggaucc

SEQ ID NO: 832931 - RNA, 18 nt, Human
ggagaagggaggaagacu

SEQ ID NO: 832932 - RNA, 22 nt, Human
gggugcagcgcagagcgggugc

SEQ ID NO: 832933 - RNA, 18 nt, Human
gggugcggacagaagacc

SEQ ID NO: 832934 - RNA, 24 nt, Human
gggugcggacagaagaccuacugu

SEQ ID NO: 832935 - RNA, 19 nt, Human
uaacaacaaugagagaaca

SEQ ID NO: 832936 - RNA, 19 nt, Human
uaaggauaucgaggcuuuc

SEQ ID NO: 832937 - RNA, 21 nt, Human
uaaggauaucgaggcuuucug

SEQ ID NO: 832938 - RNA, 27 nt, Human
uacagggaagagacaaccggagacagc

SEQ ID NO: 832939 - RNA, 20 nt, Human
uacugugggacaacagcgcu

SEQ ID NO: 832940 - RNA, 20 nt, Human
ucacccguucuacccagggu

SEQ ID NO: 832941 - RNA, 18 nt, Human
uccacccuuccaguccuc

SEQ ID NO: 832942 - RNA, 22 nt, Human
uccaggaggaaaaguucacgga

SEQ ID NO: 832943 - RNA, 25 nt, Human
uccaggaggaaaaguucacggagaa

SEQ ID NO: 832944 - RNA, 26 nt, Human
uccaggaggaaaaguucacggagaaa

SEQ ID NO: 832945 - RNA, 24 nt, Human
ucccccaucccuucacccguucua

SEQ ID NO: 832946 - RNA, 21 nt, Human
uccccugagaucccccucuca

SEQ ID NO: 832947 - RNA, 20 nt, Human
ucccucccgaccaccccaaa

SEQ ID NO: 832948 - RNA, 21 nt, Human
uccucugccccgacgaccacc

SEQ ID NO: 832949 - RNA, 22 nt, Human
ucgucccuaagaagcacgccgc

SEQ ID NO: 832950 - RNA, 23 nt, Human
ucucacacccaaaacgucccaac

SEQ ID NO: 832951 - RNA, 21 nt, Human
ugaccuccuccccugagaucc

SEQ ID NO: 832952 - RNA, 22 nt, Human
ugaccuccuccccugagauccc

SEQ ID NO: 832953 - RNA, 21 nt, Human
ugagagaacaaagaggagaga

SEQ ID NO: 832954 - RNA, 20 nt, Human
ugccaaaguggggggcaagc

SEQ ID NO: 832955 - RNA, 25 nt, Human
uggcaagaaagccauagcgagcuuc

SEQ ID NO: 832956 - RNA, 22 nt, Human
ugggacaacagcgcugcugaag

SEQ ID NO: 832957 - RNA, 21 nt, Human
uggugaauuaaggauaucgag

SEQ ID NO: 832958 - RNA, 22 nt, Human
uuauuaaaauaacaacaaugag

SEQ ID NO: 832959 - RNA, 22 nt, Human
uuccaguccucaguccccaauu

SEQ ID NO: 832960 - RNA, 23 nt, Human
uucccuucgaccccuccuggcaa

SEQ ID NO: 832961 - RNA, 22 nt, Human
uucuacccagggucagcuccag

SEQ ID NO: 832962 - RNA, 23 nt, Human
aaacaaacggauaauucuuuaaa

SEQ ID NO: 832963 - RNA, 20 nt, Human
augagagaauaaaguauuua

SEQ ID NO: 832964 - RNA, 18 nt, Human
ggaaaaacaaacggauaa

SEQ ID NO: 832965 - RNA, 28 nt, Human
uaaagucaaaauuacagaaagaagcacc

SEQ ID NO: 832966 - RNA, 24 nt, Human
ugagagaauaaaguauuuuggaaa

SEQ ID NO: 832967 - RNA, 26 nt, Human
aaaauccgaaaugcuccuccggccgg

SEQ ID NO: 832968 - RNA, 28 nt, Human
aaacagaaagagggucuagaaaucccaa

SEQ ID NO: 832969 - RNA, 21 nt, Human
aaacagaagagauuugcucca

SEQ ID NO: 832970 - RNA, 24 nt, Human
aaacagaagagauuugcuccaaag

SEQ ID NO: 832971 - RNA, 25 nt, Human
aaacagaagucagaagugaccagga

SEQ ID NO: 832972 - RNA, 21 nt, Human
aaauaggaaagccaaugaugu

SEQ ID NO: 832973 - RNA, 21 nt, Human
aaaugcuccaaaauccaaaac

SEQ ID NO: 832974 - RNA, 19 nt, Human
aaccaauccagugugcacg

SEQ ID NO: 832975 - RNA, 19 nt, Human
aagaagaaauagaaaccac

SEQ ID NO: 832976 - RNA, 21 nt, Human
aagaagaaauagaaaccacuu

SEQ ID NO: 832977 - RNA, 24 nt, Human
aagaagaaauagaaaccacuuaaa

SEQ ID NO: 832978 - RNA, 22 nt, Human
aagagcuauagcagcgcagucc

SEQ ID NO: 832979 - RNA, 21 nt, Human
aagcauuuuggauaagggaua

SEQ ID NO: 832980 - RNA, 18 nt, Human
aaucacagaaacaagaga

SEQ ID NO: 832981 - RNA, 18 nt, Human
aaucuaaaauuugaaaca

SEQ ID NO: 832982 - RNA, 20 nt, Human
agaaaaucauucuuccucuc

SEQ ID NO: 832983 - RNA, 20 nt, Human
agaaagcaaucacagaaacu

SEQ ID NO: 832984 - RNA, 24 nt, Human
agaagaaauagaaaccacuuaaag

SEQ ID NO: 832985 - RNA, 23 nt, Human
agaagaauccuuccauugggugg

SEQ ID NO: 832986 - RNA, 24 nt, Human
agagaagcacacaauuggcuugag

SEQ ID NO: 832987 - RNA, 23 nt, Human
agcaaucccggccgguaagaccc

SEQ ID NO: 832988 - RNA, 21 nt, Human
agcagcugacagccuucuaca

SEQ ID NO: 832989 - RNA, 19 nt, Human
agcaggaagucuugcugcc

SEQ ID NO: 832990 - RNA, 19 nt, Human
agcaguaacuuuccuccau

SEQ ID NO: 832991 - RNA, 18 nt, Human
aggccccaggugccuuuc

SEQ ID NO: 832992 - RNA, 23 nt, Human
agggcuuaggauuuuauggaugg

SEQ ID NO: 832993 - RNA, 21 nt, Human
aggggcugggggacuggaggc

SEQ ID NO: 832994 - RNA, 18 nt, Human
agucuaggcauguggcug

SEQ ID NO: 832995 - RNA, 19 nt, Human
auaaaauuacccucaggcu

SEQ ID NO: 832996 - RNA, 20 nt, Human
auaaaauuacccucaggcua

SEQ ID NO: 832997 - RNA, 25 nt, Human
auaacuucuaucucucuaaacagaa

SEQ ID NO: 832998 - RNA, 22 nt, Human
auauacacauacaccauccaaa

SEQ ID NO: 832999 - RNA, 19 nt, Human
aucauucuuccucuccugc

SEQ ID NO: 833000 - RNA, 19 nt, Human
auuauguauaugcaaacau

SEQ ID NO: 833001 - RNA, 21 nt, Human
caaaauccgaaaugcuccaaa

SEQ ID NO: 833002 - RNA, 19 nt, Human
caacaagaaaaggcacugg

SEQ ID NO: 833003 - RNA, 26 nt, Human
caacaagacaaaaaaugggaaaagac

SEQ ID NO: 833004 - RNA, 19 nt, Human
caacagcuagggcccgagc

SEQ ID NO: 833005 - RNA, 21 nt, Human
cacacccccucccaagaaaca

SEQ ID NO: 833006 - RNA, 23 nt, Human
cacacccccucccaagaaacaga

SEQ ID NO: 833007 - RNA, 24 nt, Human
cacagaaacaagagaagcacacaa

SEQ ID NO: 833008 - RNA, 27 nt, Human
cacccccucccaagaaacagaaguugg

SEQ ID NO: 833009 - RNA, 20 nt, Human
cagaaaaauaggaaagccaa

SEQ ID NO: 833010 - RNA, 22 nt, Human
cagauuaaaacaauguccuuag

SEQ ID NO: 833011 - RNA, 22 nt, Human
cagcaagagcuauagcagcgca

SEQ ID NO: 833012 - RNA, 26 nt, Human
cagcaguaacuuuccuccaugggcuu

SEQ ID NO: 833013 - RNA, 21 nt, Human
cagggucaaggcugagaagaa

SEQ ID NO: 833014 - RNA, 24 nt, Human
cagugcaacccaugagaaccccaa

SEQ ID NO: 833015 - RNA, 20 nt, Human
cauaaaaaguccaaccguug

SEQ ID NO: 833016 - RNA, 18 nt, Human
caugcuucauguacacaa

SEQ ID NO: 833017 - RNA, 19 nt, Human
ccaacagcuagggcccgag

SEQ ID NO: 833018 - RNA, 22 nt, Human
ccacacccccucccaagaaaca
